United States Patent Application Publication US 2013/0332133 A1 - sequence listing, part 49

SEQ ID NO: 304658 - DNA, 355 bp, Unknown
  Bacterial polypeptide expressing nucleotide sequence isolated from the Sargasso Sea
atgagtgcaactgaatacaatccttcagaagtagaaaaaattatccaaaaatcttggaaagaaaataattcttacaaagcgactccttcaaagacaaaagaaaaattctattgcttatctatgtttccttacccttcaggaaaattacatatgggtcatgttagaaattatacgatcggagatgtgatctctagatttaagagaatgcaaggctttaacgtttttcagccaatggggtgggatgcattcggccttccagcagaaaatgcggctataaaaaataaagttgacccccaaagttggactgaacaaaatattgaaaatatgaagtcacaattagaaaggttgggctttc

SEQ ID NO: 304659 - DNA, 2692 bp, Unknown
  Bacterial polypeptide expressing nucleotide sequence isolated from the Sargasso Sea
atgtcttacaattttatcgaaatagaagaaaaatggcagaagtattggctagacaataaaacttttaaagctgataataattctgaaaaacctaaatattacgttttagacatgtttccatatccatctggttctggacttcatgttggtcatcctctaggttatatagcatctgacatagtttctagattcaaaagatgtaaaggctttaatgtccttcatccaatgggttttgattcatttggactacccgctgagcaatatgctgtcaaaacaggaaaacatcccaaaaaaacaacagaagaaaatgttgtcagatttaaaaatcaattggataaattgggtttgtcatttgattgggatagagaaattaaaacaagcgatagtagttattatcgttggactcagtggatttttttaaaattatttaacagttattatgatcaagagcttaataaagctcaacccatagaaaaattaaaaattccaaaaaatctgaatgatgaggaaaaagagtcttttgtagattctaaaaggttagcgtatgttgacacaatagatgttaattggtgtgaggaattgggaactgtacttgctaatgaagaggttataggtggtttaagtgaaaggggaggatttcctgtcgttaaaagaccaatgaaacaatgggttatgagaataacagattatgcagatagattacttgatgatttatccgaattggactggcctgaatctataaaattatctcaacaaaactggattggaaagtctgagggagctgaaataaagttttcaattgataataataattctattgaggtatttacaactaggccagatacaatttttggtgcaacatatttagtactagcacctgaacatcctttgataaatcatataaccacagatgaatatagagaatcaataagttattatgttgagcaggcttcaaaaaaaagtgatttagagaggcaagaaaacgaaaaaaataaaacaggtgttttcactggagcttttgcattaaatcctatttcaaacgaaaaaatccctgtatggatatctgattatgttcttttttcttacggtactggcgctataatggcagtgcctgcacatgatgaaagagataatgagtttgcaaaaaaatttaatcttaaaataactaaagtaattaatggtggcaatagtgatgagtgttatactggtaatggttccatgattaattgtggagaatatgacggaattgataatataaaattcaaatcgattgtagtagaaaaattagtaaatgaaaataaagggaataaaacgaccaattacaaattaagagattggatttttacacgtcaaagatattggggtgagccaattccaataatttacgatggaaataaaaagaaagctcttgaatttaatgagttgcctcttgaattacctgaagttgaaagttatttaccaactaatgacggtttgtcgcccttggcaaggaataaagattgggtcaatatttcaattaatggcaagaattataaaagagaaacgaatacaatgcctcaatgggctggatcatgttggtattttttaagatttattgatcctgaaaataaaaacgagtttgcaaataaaaatctaattaaatattggatgccagttgatctgtatattggaggtgcagaacatgccgttcttcatttgctatatgcaagattttggcataaagttctatatgacttgggttatgttagcagtactgaaccatttaaaaaacttgttaatcaaggaatgattttaggaaatagtgcatttgctcatagaataaaaaatactaatgatttcatttcatttgatatgatcaaggatgaaaagacacaaaaaattcatgttgatatatcgtttgtagatgaaaaaaatagattaaatattgagagattaaaacaaaacaatccagaatttaatggtgtaaattttataaaaggcgaatcattttatgtttcaagagatattgaaaaaatgtctaaatccagatataatgtaattagtcctgatgatatttgtaaaaggtatggtgctgatactttaagaatgtatgagatgtttcttgggccaatagatcagtctaagccatggaatacagctggaatttcaggcgtattttcttttttgaataagttttggaatttgtttcatataaatgaaaaattttatgttagtgatgaacaatccagcgatgaagctttaaaaatttatcacaaaactgtaaaaaaaattgttaatgatattgataaattttcatttaacacctctgtaagcgcatttatgatttgtattaatgagctatcttcaataggttgtaattccagaaatatactatctaatttatgtattttgctttcaccatttgcccctcatatttgtgaggagatttggtcacttcttgggaatgataaatccatttcatatgaaaaatatccagaatttgatgaaaagtttttggaggagtcagttattgaatatcctgtttcgttcaatggaaagctgcgttttagaattagcttacaaagcaatatagaattaaaagaagttgaaagtttggttaataaccatgaactaacgaataaatatttagacggtaaatcaataaaaaaaataatttttgtcccaaaaaaaattataaacgttgtgtgttaat

SEQ ID NO: 304660 - DNA, 1330 bp, Unknown
  Bacterial polypeptide expressing nucleotide sequence isolated from the Sargasso Sea
atgtctaatactcaaagatataattttaaagaagttgaaattaaatggcaaaatttttgggaaaaaaataaatcttttaaagcaaaaatagatcttaacaaaaaaaaattctactgtcttgaaatgttcccttatccctctgggaaaatacatatggggcatgttagaaattacacaataggtgatgtcttagctcgttataaatcattagaaggatttaatgtattacatcctatgggctgggattcttttggcatgccagctgaaaatgcagcaaaagaaaataatcttaatcctaaaaattggactgaagaaaatatttcaatcatgaagtctcaattaaaaaaaatgggtctttcaattgattgggaaagagaaatttcaacttgctctccagattattataaacatcaacaaaagatatttttagatctatttgataaagatcttgtttacagaaaagaaagttatgttaattgggatccagtagataatactgtgcttgcaaatgaacaagtaatagatggcaaaggctggagatcaggagctcctgtcgaaagaaaaaaattgaatcaatggttttttaaaatatctaatttttcggaagaattgctaaaagatttaaaaaatttagataactggccagaaaaagtaaagattatgcaagaaaattggatcggaaaatcatttggttgcgaagtagattttaaaattgaaggctcaaaaaatatacaatttataaaatgctatactactagaccagatactctttttggattttcttttttagctttatctgtagatcaccccttatctaaatactatgaagaagaccaaaaatttcaagaatttaaaaaaaaatgttcaaaaactggaacaactgaagaatctattgctcaagctgaaaaaattggatttaaaacaaatttattagctgtaaatccattagatcctagtaataaagttccagtttattttgcaaattttgttctaatggattacggatttggagcagtgtttggatgtcctgctcacgatcaaagagattttgattttgcaaaaaaatataatctcgaaatcaaaacagttgtaaaacctaatgataaaggtgatgattttaaagtattagatgaagcctactctggaccaggtagaattatcaactcaaaatttttagatggtcttatggttccaaatgattctgtaaacgaaactataaaaatattagaaaaaaaaaagattgggaaaaaaaaaataaattatagattaaaagattggggaatatcaagacaacgttattgggggatgtccaatacctattatttatgac

SEQ ID NO: 304661 - DNA, 889 bp, Unknown
  Bacterial polypeptide expressing nucleotide sequence isolated from the Sargasso Sea
aatggatagatataattttaaattagttgaaaaaaagtggcaagattattgggaacaaaataaatcttttaaaacaaaagaagataagaagaagaagaaattttactgtcttgaaatgtttccatacccatcaggtaaaattcatatgggacatgttagaaattatacaattggtgatgttctatctagatataaaacaatgctaggatttaatgttttacatcccatgggatgggactcatttggtttacctgctgaaaatgcagctaaacaaaataatttagatcctaaaatttggacagaaagaaacatttctgtcatgaaaaatcagcttaaaaaacttggtttatcaattgactgggatagagaaatttctacttgttcaaaagagtattataaacatcaacaaaaattttttttggatttatatgacaaaggtttagtctatagaaaagaaagttatgttaattgggacccagtagaaaaaagtgttttagcaaatgaacaggtaattgatgggaaaggatggagatctggttctacagtagaaagaaaaaaattgaatcaatggttttttaatatttctaaattttctgatgaacttttatcaggtctggataatttagaagactggcctaataaagttaaaactatgcagaaaaattggattggtaaatcttttggatgtgaaattgattttaatttagaaaaaaatgatcaagttggttcaattaaatgttttacaactagacctgatactttatttggcatgtctttcttggcggtatcaactgatcatcctatatctaagttttatcaaaatagggatgattttaaaaaatttaaagaaaaatgctcaaagactggaactacagaagaagcaatagcc

SEQ ID NO: 304662 - DNA, 445 bp, Unknown
  Bacterial polypeptide expressing nucleotide sequence isolated from the Sargasso Sea
gacgaccttggccgtcgacaaacttttaatacagctgttgctgccattatggagctactgaatcaccttcaaaaagcgccgcaagatgatgtgcaggacattgctattatgcgcgaagcgaccgagtctgtgcttctgttgcttaacccaattacaccgcatattgcccatgagttgtggaaggtgcttggacataacgaagatattgatattgcgccgtggccagaagtggacaaagacgcacttgttgaagacgaaaagctgatcattgttcaggtaaatggcaaggtacgcgccaaaatgaccattgccgctgatgccagcaaagaggacattgaagcaagcgccctcgcccagtcgaatgtccaacaatttatcgatgagaaaaccattcgaaaagtaattgttgtgcccggcaagcttgtaaacattgtagcgaactagg

SEQ ID NO: 304663 - DNA, 2581 bp, Unknown
  Bacterial polypeptide expressing nucleotide sequence isolated from the Sargasso Sea
atgcaagagcaatataatccctcagaaattgaagccttagtgcaaaagcactggcacgacaacaaaacctttgaagttactgaagatgcaaacaaagaaaagttttattgcctttcgatgtttccgtacccttcaggtcgactccacatgggacacgttcgcaactataccataggcgatgtggttgcccgcttccagcgtcttcaaggcaaaaacgtgctacaacctatcggttgggactctttcggtttgcctgcagaaaacgccgcaatcaacaacaaaacggcaccagcaccatggacttatcaaaatattgagtacatgaagaatcagctaaaactgttaggttttggctatgactggagccgtgaaatcgccacttgtaccccagaatactaccgctgggaacaatggttcttcactaaactgtacgaaaaaggcttagtttacaagaagacagcttctgtaaactggtgccctaacgatgaaaccgtactagcaaacgagcaagtacaagacggatgctgctggcgttgtgatacccctgtagaacaaaaagaaattccacagtggttcattaagatcaccgcctacgccgaagaactgttaaacgatatcgacaccttagacggctggcctgagcaagttaagactatgcagcgcaactggattggtcgcagcgaaggcgtggaaatgacctttggtgtggcaggtagcgataagtcattcgatatctacactacccgccccgataccctgatgggcgtaacctatgtagcgattgccgcaggtcatcaattagctgaaatcgccgcgcaaaccaatccagagcttgccgcctttatcgatgagtgcaaaaacagcacaacatcagaagccgaactcgcgaccatggaaaaacgtggcgtcgcgacaggtctatacgcgattcaccccatcactggcaagcaagtacccatttgggcggctaacttcgtactaatgaactatggcaccggcgctgtgatgtcagttccaggccacgaccaacgcgattacgaatttgcgaaaaagtacaatctgccaatcgaagcggttatcaaacctgttgatggcgagttagacattagcgaagcggcttacaccgaaaaaggcgtgctgtttaactctggcgagttcgacggtttagactttgacggcgccttcaatgccatcgccgacaagttagtggcagaaggtaaaggcaaacgccaagtaaactaccgtctgcgtgactggggtgtatcacgtcaacgttactggggcgcaccaattcctatggtgaccttagccgacggcactgttatcccaacacctgaagatcaactgccagttattctgccagaagatgtggtgatggacgggatccaaagcccaatcaaggccgataaagaatgggcgaaaacccaagttaacggccaagacgcgctgcgcgagactgatacctttgatacctttatggaatcttcatggtattacgcccgttattgcagcccacaggctgatcaaatgttagatccaaccaaggctaactactggttgccagtggatcagtacattggtggtatcgaacacgcctgtatgcacttgttatatttccgcttcttccacaagttgctgcgtgacgcgggcctagtaaacactaacgagccagcaaaacaactgctgacccaaggcatggttctggccgatgcctactactacaccaacgataaaggtgcccgtgtatgggtgtctccgctggatgtagtcactaccgaaaaagacgacaagggccgagtgactaaggctatcgataaagacggcaacgaactggtttacaccggtatgtgcaaaatgtctaagtcgaaaaacaacggtatcgacccacaagtgatggtcgaaaaatacggtgccgacacagttcgtctgtttatgatgttcgcatcaccaccagaattaacgctggaatggcaagagtctggcgttgaaggcgcgcaccgctttatcaaacgtctgtggaaactggccagcgattatgtggcgcaggacaacagcgaagcactagacgtcagcaaattaacaagcgagcaaaaagcgctgcgccgtgaagtgcacaagaccatcgctaaggtgaccgatgatatcggccgtcgtcagatgttcaatactgcggttgccgccgtgatggaactgatgaaccatctgcaaaaagcgccgcaaaccacaggccaagacagagccattatcggcgaagccttaactgcggtagtgcgtttactgtaccccatcatcccacacgtgagcttcaccctgtggaatgagctaggcaacaccaacagcatcgaagacagccaatggcctgttgtggatgaatctgctctggttgaagacagtaaactcatcgtggtgcaagtgaacggtaaagtgcgcgctaaaatcacagtcgcggccgatgctgaccaagcgtctgttgaagcactgggtatggcggacgagcaagtcatcaagtacttagatggcgttacggttcgtaaagtgatctatgtacccggtaaactgctcagcatcgttgccaactaac

SEQ ID NO: 304664 - DNA, 1450 bp, Unknown
  Bacterial polypeptide expressing nucleotide sequence isolated from the Sargasso Sea
atgcctcaaattaaataaccttcacccgaaagaatggacaaataaaaatataaaagtgatgaaagatcagcttaaaatgcttggcctttctattgattgggatttggaaatatcaacttgtgataaagaatattacaaacatcaacaagagctatttattgaattctacaatcaaggcttagtatcccgaaaagaaacctatgtaaattgggatcctgttgaaaaaacagtattagctaatgaacaagttataaatggaaaaggatggagatcaaacgctgttgttgaaagaaagaaattatcgcagtggttctttaatattacaaagttttctgaagaacttttaaatgatttagaaaatttaaatggttggccggaaaaagtaaaactaatgcaaaaaaactggataggaaaatcttatggctgtgaaattatatttaacatagaaaaaagtgaagataaaataaatgtttttacaactcgtccggacacaatttttggggcaagttttatatgtttatcagctgatcatccattaaacaaaaattttcttgaaagagaagattttaaaaaatttaaaaaactgtgtgataagacagggacgacggaagagtctttagcaaatgctgaaaaaataggttataaaactgatttatttgtaaagcacccttttattgctgaaaaaaaacttccagtttatttcgctaactttgtattgatggattatggtagtggcgcgatatttggatgccctgctcatgatcaaagggactttgactttgctaagaaatataaacttgaaataactcaagttgtatctgatgggaatgataaaaaaatccttagtgaggcttatactggtcctggaaagatgattaactctgattttttaaatggactggagtacaacaaagcaaaagaaaaaattattgataaaattgagcaaaataaattaggtaaaagaaaaacattatttagattaaaagactggggaatttctagacaaagatattggggttgtccaattccgatgatttatttggaagatggaagtgttgttcctgtagataaaagtgagcttcctatagaattaccggatgatattgatttaagttcacagggaaacccccttgaaagtcaccctacgtggaaaaataccacccaaaaatctactggcaaaaaagcaattagagaaaccgacacgttggatacctttgttgactcttcatggtattttttaagattttgttctcctaattataagaacgctccatttgatgaaaaaaaaataaattattggatgcctgttgatcaatatataggaggtatagaacatgcaattttacatctgttatattctcgattttttactaaaggaataaataaatttaataaaaatttagaattatcagaaccttttaaaaatctttttacacagggaatggtttgt

SEQ ID NO: 304665 - DNA, 1721 bp, Unknown
  Bacterial polypeptide expressing nucleotide sequence isolated from the Sargasso Sea
acacgtaagaaattatactataggagatgttctctcaagatacaaaacattgaagggttttaatgttcttcatccaatgggttgggactcttttggaatgcccgcagaaaatgcagcaaaacaaaacaatttaaatcctaaagattggacagaagaaaatattaaagcgatgaaaactcaattaaaattgttgggtctttcaatagattgggacagggaaatttcaacatgttcaccagattattataaacatcaacaaaaaatatttctagatctttatgataaaggtctagtgtataggaaagaaagttatgttaattgggaccctgtcgataaaactgttcttgcaaacgaacaagttatcgatggtaaaggttggcgatctggagctatcgtagaaagaaaaaaattaaaccaatggttttttaaaatttcacatttttcagaagatcttttgaatgaactaaataatttagattcttggccaaataaagtgaaaataatgcaaaaaaattggataggtaaatcttttggttgtgaaatagactttaaaatcgaaggctctaaaaatgttaaatctattaaatgttatacaacaagaccagatactttatttggattttcttttctagcattatcagtagatcaccctttgtcaaagtattatgaaaaaaatgaggattttattaagtttaaaaaagaatgttccaaaacaggtacaacagaggagtctattgctcaagcaactaaaataggtttcaaaactgacctacacgcagtcaatcctcttaatgaaacatcaaaagttccagtttactttgctaattttgttttaatggattatggatttggagcagtttttggatgtccagctcacgatcaaagagattttgattttgcaaaaaaatatgatcttaagataaaaacagttgtaaaacctataaatgaggatgatgattaccaagtccaaaaggaggcctatactggaacaggaacacttataaattcacaattcttaaatggtctttcagtgccagaaaaatcaatcgacgaaacgattaaaattcttgagaataaaaatttaggtaaaagaaaaactaattatagactaaaagattggggtatttccagacagagatactggggatgcccaataccaatagcttatgatgaaaataataatgtattaaaaattcctgaaaaagatttacctgtaaaactacctgagactattgagcttaacactaatggaaatcctttagatgttcaaacagattggaaaaaagttaaaataaatggaaaaatttgtacaagagaaactgatactttggacacttttgtcgactcatcatggtattttttgagattttgttcagctaagaacgtaaataaacctttcgaaaaaaatgaaatagattattggatgccagtagatcaatatattggaggtgttgagcatgcgattttgcatcttctatattcacgtttttttatgagagccatcagcttaaacaacaaagaaacaaatttaaaagaaccatttaagggtttatttactcaagggatggtttgccataggacttttaaagatgaaaacaaaaactgggtttatcctgatgaagtttttactgatgacggaaaaaattattatcaaattaaaaatccatcaaaaaaagtaattattggtccctcagaatctatgtcaaaatcaaaaaagaata

SEQ ID NO: 304666 - DNA, 1447 bp, Unknown
  Bacterial polypeptide expressing nucleotide sequence isolated from the Sargasso Sea
cgtgccggcgcatgatcaaagagattgggagtttgctaccaagtatggaatcgatatcaaacaagtgatcgagtccattagtgatcaacccgccgaaatatcctctggcgcctttgtcgaacgaggccgactaattaactctggggcctacagtgatttatcttttgaagaggcatttgatcaaatagccagtgcgttagcggggaaggggcttgggcgcaagacgagtaattttcggctcagggactggggagtttctaggcaaaggtattggggttgcccgatacccatgattcattgcgatgactgtggagtcgtaccggtcccagagaaagatcttcctgtcgttttgcccaccgaagttaaatttgagggtgtccagtcgcctttggtaaagatggaatcttttctgacggttggttgtcctgtatgtggtggccaagcgagaagagaaaccgatacctttgacacgttcatagattcttcctggtactacgcgagatttgcatcggcaaacaaccccggatcgatggtcgatagcaatgtcgatgattggacgccggtggatcattatgttggtggtattgaacatgctattttacatcttctttactcccgatttttttacaaactcatgcgcgatgagggattagttaaggccgacgagccattcaagaaattgctcatgctcggcatggtgctccaggacggcaaaaagatgtccaagtcttctggagatgctggagaccctcaaaagttattggacaaatacggcgctgatgcggttcgtactgcgatgatgtttgctgcgcctcctgatcagtccttcgagtggagtgaggctggactggaaggtgccttgagatttttgcgaaggctatggagcttggtcgaaaggcttgcggcggacggtgcagcggctgatgttgttcatagtgagctgaatgattcggctcgggagttgagaaagaaggcatatgaggccctagctagagctgatgacgattttggccggcgagtgcagttcaatacggtggtgtctggcgtgatggaattgtgcaacgcggtgtcgaaatttgattgtaagaccgaacatgatagagcagtagtttcggaagcgcttaaatttgcagtgcaaatattgtcaccgattgccccacatatctgcgagaagttgtggagtcgattgggtggtgagggaacgcttgtgagccgggcctggcctccgatggtagacgaggccttagaggtctctcaagtagaattagttgtgcaggttaacggaaaggtcagagggaaaattttagttccaggggatgcgagcgaagaagccgttttgttggcggccaaagaaaatgaaaatgtgttacgaagtattaacaaccaaaccattaggaaggagatattggttcctgggcgtttggtgaatctggttgtttcaggttga

SEQ ID NO: 304667 - DNA, 978 bp, Unknown
  Bacterial polypeptide expressing nucleotide sequence isolated from the Sargasso Sea
tttgagctacgatcataaatctatagagagcaaatggcaaaaattttggttagaaaatcaaacttttaagtctgaggatatctctgccaataagcctaaatattatgttttagatatgtttccgtatccctcaggagcaggtctgcatgttggtcatgctttgggatatgtagcaacagatattgtggcacgttacaagcgcatgaaaggttttaatgtgcttcatcctatgggttgggatgcgtttggtcttccagcagagcaatatgcgataaaaacaggtactcatccaaaagaaactactcaacataatgtttcaaatttcaaaaaacagataaatagccttggattctcttacgattggtcaagagagattaatactacagatccaaattactataaatggactcaatggattttcatgcaactttataacaaaggtttagcttatgaacaggaggttgctgttaattggtgtcctgaactaaaagcagttcttgctaatgaagaagttgttaatggaaagtctgatataggtggacatccagttgtaagactaccaatgagacagtggattttaaagattactgattatgcagagtcattacttgatggattagatgatttagattggccagaaaatattaaagaacttcaaaaaaattggatcggtaaatcagagggtgtcgagttggggtttgaaattgatgggcataatgatacaatcaatgtttatactacaaggcctgatactctttttggtgcatcttatatggttttagctcctgagcataccttaattcattcaattgtcactgatggccaaagatcaaaagtggaagcttatatagacgaaacaaaaaagaaatcagattttgatagaacagaagttaataaggataaaactggtgtttttactggaagctatgcaataaatccttttagtaaagaaaaaattgaaatatggatagctgacta

SEQ ID NO: 304668 - DNA, 1090 bp, Unknown
  Bacterial polypeptide expressing nucleotide sequence isolated from the Sargasso Sea
atgagcttaaaagaatacaatcctaaaagaatagaaaatcttattcaggaatcatggaaactgaacgattcatacaaggcaaaggtatctaaaactaaagaaaaattttattgtctatctatgtttccttatccatctggaaaattgcatatgggtcatgtaaggaattacacaattggagatgtaatctcaagattcaaaagaatgcaaggtttcaatgtcctgcaaccgatgggttgggatgcatttggtctaccagcagaaaatgcagctattcaaaataaagttgatccacaaagttggactgaacaaaatattgaaagtatgaaaatgcaattagaaaggctgggttttagttacgattggtctaaggaaattaaaacctgcgatccaaattatttcaaatgggaacaacagatttttactaagttagcacagaatggtcttgtatatagaaaaaaatctctagttaactgggatccagtggatgagactgtcctagcaaatgaacaagttattgatggtaagggatggagatctggtgcaactgttgagctcaaagaaatcgatcaatggttcttaaagatcactgattatgctgatgaattattatcatcaattgaaaacttagattggccagataatgtaaagtcaatgcaaaaaaattggattggaaagtcatttggttcagaaataaaatttaatttgcttaataacgatgagttaacagcttttacaacaagaattgacaccatatatggtgtcacatttatagctatttcaccaaaccatccaatagctcaaaacttagcaacaaataatccagaaattaatgaatttattaaacaatgtaatgcaacaaaaatggctgaggcagatatggcaaaagcagataagctgggccttaaaacaaacttaaaagttcaacatcccttcttagatacaaagctcgacgtttggattgcaaattatgtcctgatggattatggaacaggagtagtaatgggtgtaccagctcatgacgaaagggattatgagtttgctaaaaaatacaatattaaaattaaaaaggctgtgaaagcgatgaatg

SEQ ID NO: 304669 - DNA, 1141 bp, Unknown
  Bacterial polypeptide expressing nucleotide sequence isolated from the Sargasso Sea
atgccatacgacgcccaagagatcgaatcgagatggcagaagaaatggtccgaagacagagtattcgaggctgagattgatgattccaaacccaagttctactgccttgagatgttcccatatccatctgggcacatgcatatgggccatgtcaggaactactctatcggcgatgctatggcacgcttccagagattaatgggaaagaacgtactctatccgatggggtatgactcattcggaatgccagcggagaatgccgccaagaaagaaggcgggcatcctcatgatgtcacacatagcaacatctctagcattcgttccgaccaagaaaggatgggctactcatatgattggaggagattcttggcgacatcggatgtggattactaccgttggaatcaggagatgttcctaatcctcaatgagaggggtctgattgagcggaagtcggctccagtaaactggtgcattgactgtgataccgttctggctaacgagcaggtaagaaacaatagatgctggagatgcggattggaagtagtccagagagacatggcacagtggttcgtaaggatgaccgagtactccgacgagttgctcgatgaactcgaaaatatctcgttccccgagaatgttaaggctatgcagaggaactggattgggcgctccaatggagcccatatcgacttccaagtggtcgattcctcatcagtaattggagcattcactaccaggcctgacaccattttcggagtcactttcctcactttgtcgccagagcatcctttgtgtgaagaattgtgttcaggtagtgagtgggaagaaggatggagaggcctcaaagaagaatgctcacgaatgtctgagttcgagagagtaaacatgctgaaggagaagaaaggcatcttcctagggagacatgcaatcaatccactgaacgatgagagggttccaatatacgctggcaatttcgtggtctctacttatggaaccggtgcggtgatggcagtcccggggcacgatcaaagagacttcgatttcgcaaccgagtatgatcttgagataaggagggtactcgaagaaaaccggggtggagacatcaacgaaccaatgaatagggcattcgaaggatacggcc

SEQ ID NO: 304670 - DNA, 211 bp, Unknown
  Bacterial polypeptide expressing nucleotide sequence isolated from the Sargasso Sea
tatggagagatataattttaaattaattgagtctaaatggcaaaattattgggaaaaagaaaaagctaataaagttcaaatagataaaacaaaaaaaaaattttactgtcttgaaatgttcccttacccatcaggaaaaatacatatgggtcacgtaagaaattacactataggtgatgtattagctagacataaaaaaatgcaaggattt

SEQ ID NO: 304671 - DNA, 1282 bp, Unknown
  Bacterial polypeptide expressing nucleotide sequence isolated from the Sargasso Sea
gggatttgcttatgactggaaaagagaatttgctacttcagatgaagattattataaatgggaacaatggtttttcttgcaactggtagagagaggcttagcttatcaagaagaagcagaagtgaattgggaccctgtagatcaaactgttctggccaatgaacaagttatagatgggaagggatggaggtcaggtgctgatgttgaaaaaaagacccttaaacaatggtttctaaaaattactgattatgccgaagagttacttgaaggcacggataaacttgaaggctggcctaaccaagtaaagattcagcaaaaaaattggataggtaaatcagaaggtatggaatttagttttggaattgaaggaacaaagaaacatatagaaatttttaccactaggcctgacacaataatgggagcatcttttatagcaatttctacttctcattatttaagtttggaaatggcaaaagaaaatgatgaggtaaaagattttataaatgaacttaataaagttaaaactgctgaagcagatatagctaagcaagataaaaagggtattgaaactagatttaaagccattcacccatttacaaaagaagagttgcctatatggattgcaaattttgttctgagtgattatggatcaggcgctctaatggcggtaccaggtcacgaccaaagagattttgaatttgctaataaatataacctacctataaaacaagttatagagggaaatgaaaaagatgatataaataatgaagctattcttgaaaaaaataaattaataaactctgatgagtttaatggcctatcttttgaagaagcctttaatgcaatagaaaaaaaggcaaatgaattaaattgcggtaaacggtctacaaatttcaggctaagagactggggagtatctagacaacgatattgggggtcgccaataccaatgctaaaagacgaaaaaggctttattcctgctaaagatttgccagtaaagcttcctttagaagttaaatttaaaggtgttaattctccactgaaagacatggaagaattcatgaatattgaacaagatggtaaatctctaaaaagagaaactgatacttttgatactttttttgaatcttcttggtattacgcaagatttgccagtttcgatagtgaaaactctatgctggatgataggggcaagtattggcttcctgtagatcaatatattggcggcatagagcatgccgtccttcaccttctctatttcaggttcttttttagatgctta

SEQ ID NO: 304672 - DNA, 793 bp, Unknown
  Bacterial polypeptide expressing nucleotide sequence isolated from the Sargasso Sea
atggaaagagtaaattttcatttaattgaaaaaaaatggcaagaaaaatttgctaaggaaaaactttataataaagaaggtaaaaaattttactgtttagaaatgtttccttacccgtctggcaaaatccatatgggacatgtaaggaactatactatcggagatgttatagctcgatttaaatttcttaaaggttgcaatgttttacatcctatgggatgggatgcttttggattaccagcagaaaatgcttcaaaaatgaataatgttcatcctgaaaaatggacaaatcaaaacattcaaacaatgaaaaaacaattaaagttgttaggattatctatcgattgggatttggaaatatctacttgcgataaggaatattataaacatcagcaagagcttttcatagatttctataatcagggtctagtgtcaagaaaagaaacttatgttaattgggatcctgtcgaaaaaacagtacttgctaatgagcaagttgtaaatggaaaaggatggagatctaatgcagttgtagaaaggaaaaagctttctcaatggttttttaatattacgaaattagctgatccgcttttaaaagatttggaaaaattaagtggatggcctgaaaaagtaaagctcatgcaaaaaaattggataggtaaatcgtatggatgcgaacttgattttgaactcattaaagaaaaacagttaatcaccgtatttacaacaagacccgacacaatatttggtgcaagctttatagcactatcgaatgatcatcccttaagtaaaa

SEQ ID NO: 304673 - DNA, 1337 bp, Unknown
  Bacterial polypeptide expressing nucleotide sequence isolated from the Sargasso Sea
tacaacacaaaaatctttattaaacatccttttttagataaaaaaattccactatttatcgcaaatttcgttttaatggattatggattaggcgctatatttggttgtcctgcccatgatcaaagggatttagattttgcaataaagtataatttggaagttattcaggttgtagagcctataaaatcaaaacaaatctcaaatagcattaaaaatattgcaatattagatgatggtatgatgattaattctgggtttctagatggaatggataatgaaaaagcaaaaaaagaggttgtgaaaagattagaaaaagaggggattggtaataaaaaaataaattataaattaagagattggggtatttccaggcagcgttattgggggtgtccaattccaatattatatagagaagatggctcagttattcctgttgaagaaaaagaactacccgttttgctacctgtgctaagccaaaacaatccaagcccaacaaaagaagaggttgatgagtggaaaaataccagctgccctataactggtatgaaggcgattagagaaacagatacttttgatactttctttgagtcttcctggtattttttgcgttattgtaacccgcggttaaacaacaagccttttttaaaagaagatgttaattattggcttcctgttgatcaatatgtgggcggtattgaacatgcaattcttcatcttttgtattctaggttttttacaaaagcactaagagatttaaactttttagatattaacgagcccttcaaaggtctttttacacaaggcatggttacacataaaacatttaaagacaaaatgggtaattgggttgagcccaataaggttgtcgaaagtaagggaaattattttgataataataatgagcaggttctggttggtaaaattgaaaaaatgagtaagtccaaaaaaaatgtagtgaatccctcgtctataattgataattatggtgctgacacagcaaggtggtttatgttatcagactctcctccagaaagagatttggaatggacagatgttggtgtagcttcttcacacaagtttattaataaaatttgggaaacctgtataagagctaagaattacaaagcaccagatggtttgctaaaaacaaataagtttaacccccttataaaaagtgtttcagaaaatattgaaaaatttcattttaataaatctgttgcaaacatttatgaatatgtaaatgagattaacaagtctatggataaaaaaacaatttcaagcgatagtttaaaaggtgcggttaaaaatttatgtattattatacatccattcacacc

SEQ ID NO: 304674 - DNA, 1231 bp, Unknown
  Bacterial polypeptide expressing nucleotide sequence isolated from the Sargasso Sea
gatggcaaaattttggtctgaaaatcaaatttttaagtccgaggatatctctaccaataaacctaaatattatgttttagatatgtttccttatccgtctggggcaggactacatgtcggtcatgctttagggtatgtggcaacagatatagtagctcgttataagcgcatgaaaggtttcaatgtgcttcatcctatgggttgggatgcgtttggacttccagcagagcaatatgcgataaaaacaggtactcatcctaaagaaacaactcatcaaaatgtttcaaattttaaaaaacagattaatagccttggattttcctatgattggtcaagagaaattaatacaaccgatcctagttactacaaatggactcaatggatttttatgcaactttacaataaaggcttagcttatgaacaagaagttgctgttaattggtgtcctgagctaaaagcagtccttgccaacgaagaagttgttaacggaaaatcagatattggcggacatcctgtagtaagattaccaatgagacaatggattttaaagattaccgactatgcagagtcattacttgatggattagatgatttagattggccagaaaatattaaagaacttcaaaaaaattggattggtaaatcagaaggagtagagttagggtttgatattgatgggcatgatgatattatcaatgtatacactacaagacctgacactctttttggagcatcttatatagttttagctccagaacataccttaattcattcaattgtcactgatgagcaaagatcaaaagtggaagtttatattgaggaaacaaaaaagaaatcagattttgatagaactgaagttaataagtataaaactggtgtttttactggaagctatgcaataaatcctttcagcaaagaaaaaattgaaatatggatagctgactatgtacttattagttatggaactggtgctattatggctgttcctggtcacgacgaaagagattgggagtttgcatcaaaatataatcttcctatagtagaagttgttgagggaggagatgtatcaaaagctgcatacactgcaaaaggaaatgccaaaattataaactcttcaaacgataaaacattatccatggatggcttaagcgtagatcaagcaattaaggaagcaattttatttattgaaaaaaattcaatcggaaaagccactgttaattacaaattaaga

SEQ ID NO: 304675 - DNA, 763 bp, Unknown
  Bacterial polypeptide expressing nucleotide sequence isolated from the Sargasso Sea
atgcctgataaagatcttccttatgaaccgggagacatagagcatcaggttcaagagtattggaaagaaaatgaatcattttctgtaaccgaagaccatagtaaagagaagtacttttgcttgagcatgtttccttatcccagtggatcaattcatatgggccatgtgagaaactacaccattggcgatgcaataagtagatttcaaaggatgcttggaaaaaatgtacttcaacctatgggttgggatgcatttggtctacctgctgaaaatgctgcaatagataataaggtccaaccatcagattggacttcagaaaatatagaaagtatgaaaaaacagcttacaaggctgggatttgcatatgactggaaaagagaatttgcaacatcagaatcagattactataaatgggaacaatggttcttcctgcaaatgcttgaaaaaggcatagcttatcaagaggaagctgaagttaattgggaccctgtagatcagactgtactcgcaaatgaacaagttatagatggaaagggctggagatcaggagcagaagtagaaaaaaagattttgaagcaatggtttttaaaaattacagactacgcagaagaactccttcaaggaacagatgaattatatggttggccggaacaagtaaaaatccaacaaaaaaattggataggaaaatctgaaggtatgaattttagttttggtattgaagatagagaagcaatgattgattcttcacaacaagacctgacac

SEQ ID NO: 304676 - DNA, 1270 bp, Unknown
  Bacterial polypeptide expressing nucleotide sequence isolated from the Sargasso Sea
tatgaaagatcatattccttataacccatcagttattgagcccaaatggcaaaaaagatggaaagaatcaaaaatctatgatgtagatttagatacaaatagtgataagaattttttctctctaactatgttcccttatccttctggggatttacatattgggcattggtatgcattcacaccagcagatagctactcaaggttcaaaaaaatgaagggtttcaatgttcttcatactcaaggttttgatgcatttgggttaccagcagaaaatgctgcaatttctagaaatataaacccaatgaaatggaccttcgacaatattgataatatgagaaatcaatttaatttgatgggcaattcatatgactggtcgagagaacttataacttgtaagccagattattacaaatggaatcaattcttttttctcaagatgtatgaaaaaggtatagcttacagaaaaaatggtgctgtatggtgggatcctgttgatcagactactttagctaacgaacaggttattgagggcaaatcagaaagatctggtgcagatgtaattagaaaaatgatgcctcaatggtactttaaaattacggattacgctgaagaacttttaaatatggatgaccttggttggcctgaaaaaattaaacatatgcaaagaaactggattggaaaatcacttggaacaaatgttgattttaaacttgaaaaaagttcaaagaatgtttcaacttttactactcgtgttgatactatttttggtgttacttttattgttcttgccccagagcacaatttggtatcagaagttactacagaaaaatacaaaagtgatgttgaaaggtatataaaaaattcttctaaatcatcagagattgaaagaacatcaaccgaaagggttaaaaccggtcaatttactggaggatacgcaattaacccaatggacgataaaaaaatacctatctttgttggagattatgttttaggaacttatggaactggcgcagtaatgggtgtgcctgcccatgaccaaagagactatgaatttgcgaaaaaatataaattaccaattaatgttgttataacaagtgatggacaagctgctgaagaaataaataaagcaaatgagtcatatggaattttaataaactctaaaaattttgatggtcttgatagcgaaaaagcgaaatcaaacataacagaatttatggaaaaaaagggtgtggcaaaggaaccattacctaccatattagagactggttaa

SEQ ID NO: 304677 - DNA, 1198 bp, Unknown
  Bacterial polypeptide expressing nucleotide sequence isolated from the Sargasso Sea
acatttgaaatgatgaattcaaataattattcttctaacctattaaaggtatttactactagaccagatactatttttggagcatctttttgtgcaatatcattagaacacccattagctaaagaaattattaaaaaaaatcctgaggctaaaaattttctaacgtcatgttctggtgctgatattgaaaaagacaaattaggttttagaacagaaattttgataaaacacccttttatagaaaacaaaaaaattccattatttttggctaattttgttttgatggattatggatcgggggcaatatttggttgcccagcccacgatcaaagagatttggattttgctaataaatataatttagacgtaattcctgttgttcttccaaatgataaaaaagaaaacgaatttaagataactaatgaggcatttataggagaaggaaaattgattaattcttcttttttaaatggcttagaaattgaagatgcaaagaaggttgttgtaaaaaacttaaaaaatattaattgtggtaaagacaaaacaacatatagattaagagattgggggctttctagacaaagatactggggctgcccaataccaatgttgtatagagaagatggaaaaataatacctgtttcaaaaaaagatcttcctataactctacctccaattaaaggtctgggtggaacgaagaatgacattgatattataaattcttggaaaagaacagtttgtcctgaaactggaatgaaagccacaagagagacggatacttttgacactttttttgaatcctcctggtactatttaagatattgcaaccccagaagtagtgaaccatttcttaaagaagatatcgattactggttgcctgttgaccaatatataggtggaatcgaacacgcaatacttcatctcttatattctagattttttgttaaagcgctgagggacttgggctatataaatattaatgagccgtttcaaggcttatttactcagggaatggtaacacatcaaacttataaaagtgttgcgggtaattggcttgcaccagatgaagtaataaaagaaaacgatcaatttgtagatttaaaaaatgaacatgtaagtgtgggcaaaattgaaaagatgagtaaatctaaaaaaaatgttatagatccaagcaaaaccatagatatatatggggcag

SEQ ID NO: 304678 - DNA, 1112 bp, Unknown
  Bacterial polypeptide expressing nucleotide sequence isolated from the Sargasso Sea
cctggggaataaattaacatttgtgaacagatacaattttaaattaattgagaaaaaatggcaaagctattgggaaaaaaataaaacttttaagacgaaattagataaatcaaaaaaaaaattttattgtctagaaatgtttccctatccatcaggcaatattcatatgggtcatgtaagaaattatactataggagatgtactggctagatacaaaaccttagaaggttataatgtacttcatccaatgggttgggattcttttgggatgccagcagaaaatgcagctagacaaaatgaattagatccaaaatcttggactgaatcaaatatttcaaatatgaaatctcaattaaaaaatcttggattgtccctagattgggatagagagatttctacatgcacccctgaatactataaacatcaacaagaattctttttagaattatttgataaaggacttgtttatcgtaaagagcaatatgtaaattgggatccagtcgatcaaactgttttagctaacgaacaagtagttgatggtaaaggctggagatctggagtgccagttgaaagaaaaaaattaaatcaatggttttttaatataactaaattttcagaggaattacttgattgtttagatgaactaaaaaattggccaaataaagttaaagtaatgcaaaaaaattggattggaaaatcctttggctgtgaaattaattttaaaatacatgagccaaaaaatgtcaatgaaatcaagtgttttacaactagacctgacacattgtttggtatgtcctttttagctttatctattgaccaccctgttgcaaaattttatgaaaataataatgaatttttagaattcagaaaaaaatgttctaacacaggaacgacagaggaagccatagcaaatgctgagaaactaggttttaaaactgatttaattgcaatcaatccgttagatccatcaattaaagttcctgtctattttgcaaatttcgttttgatggattatggtttgggtgctgtatttggatgtcctgctcatgatcaaagagatttggattttgcaagaaaatataatttagaggttaatactgtagttaaacctt

SEQ ID NO: 304679 - DNA, 1513 bp, Unknown
  Bacterial polypeptide expressing nucleotide sequence isolated from the Sargasso Sea
tggacctacaacaacatttcaataatgaaagatcaaatgaaaccactcggtttgtctattgattggcaaagagagtttgcaacgtgcgatccggagtactatggccaacaacaggcactatttcttgattttttagaagcgggtttggtttatagaaaaaatgcagttgtaaactgggatccagtagacttaacagttcttgctaacgaacaagtggaaaacggccgaggctggagatctggagcagttgttgaaagaagagaactaacccaatggttttttaaaatttcggagttttcagatgatttgcttgcctctatagaaaagctagataattggccagcaaaagtaaagttgatgcaaacaaattggattggtgaatccaagggcttagaatttgcatttaaagcagtgaatgcaccagatagatttgacaaaattgaagtttacacaaccagaccggatactctgatgggagcatcttttgtaggcatatcagcagatcatccgctagcccgagagcttgaaaaggtaaatcctgatattgcttctttcaacgctcagtgcaggcaaatgtccacatccgaagccgaaatggaaaaagcagaaaaaaaaggcatcgacaccggtattttggtcactcatcccctgaacccagacattaaactgccagtttggatcgcaaattttatcctcatggattatggaactggtgcaattttcgcttgcccagcacatgatcaaagagatttagattttgctcgtaaatatcagttgcctgtaattgatactttttactctctagaaaacgaagaagccgtaaaaaatacagcgtttgttccacccaagtcagagcgagtcaaatgggtaaaccatttcactggcgttgatgtggccacaggagaggaagtaatagatgagaccattcgtttcgctgaaaaaaagggttggggatcaggagttaccaaataccgactgcgagattggggacttagccgacaaagatactgggggtgtccaattccagtagtccattgcgataactgtggattggttgcagagaagaaagaaaacttgccaatcaaactgcccgacgatgttaaatttgataaaccaggaaacccacttgatagacatgagatttggcgcaaatgcaaatgtccagaatgtggtggcccggcattaagagaaaccgatacaatggacacgtttgtggactcgagctggtattttacaaggttcacatcttataactcgacaacgcccacaaatgagaaagaaataaattattggatgaatgtagatcaatatatcggtggcgttgagcatgctatactacatcttctctactctagattttttgcaagagcgatgcatcactgtggtcacctacccaaaagcgctatagagccttttgatgcactcttcacgcaaggaatggtgacacatgcaatatatgaacgagataatgagaatggacggccaacatatttttacccagaagaagtagaaa

SEQ ID NO: 304680 - DNA, 2407 bp, Unknown
  Bacterial polypeptide expressing nucleotide sequence isolated from the Sargasso Sea
aatgagttctaactataagccccaattgattgaaaaaaccattcaagataaatgggataaagaagaaagatttctcgctaagatagatgatagagaaaaattttattgtttatctatgttcccctacccctctggaaagcttcatatgggtcatgtaagaaattacacaattggtgatgtaatctcaagatacaaaagaatgaatgattttaatgtttttcaaccaatgggctgggatgcttttggattaccagcagaaaatgcagcaatagaaaataaagtaaatccaaaagattggacaaatgcaaatattgataatatgaaaaaacaacttaaatcattaggtttaagttatgactggtcaaaagaattacgaacatgtgacccaaaatactataaatgggaacagctaatatttaaaaagttctatgatgctggattagtgtatagaaaaaaatcaatagtaaattgggacccagttgatgaaacagttttagcaaatgagcaagtaatagatggaaaaggatggaggtctggagcacaaattgagattaaagagattgatcaatggtttatcaaaataactgagtatgctgaagagctccttgattcactggatgatttggactggcctgaaaatgtaaagttaatgcaaaaaaattggattggaaaatctaatggggctgaaattaaatataagattgatgaatcagatgaatatctgacaactttttcaacaaggccagatactatttttggagtatcttttcttgctatttcaccaaatcacccattagcaattgacctatcaaaaaaggatcaaaacattcttgaatttcttgaaaaatgcaaagatataaaagcagctgaagcagatatagctaaggcagaaaaattaggaatagatactgaaattaaagtcatacatcctcttacgggagagaaattaccattatggattggcaattttgttctacttgattatggaacaggtgtagttatgggtgttcctggtcacgattcacgggattatgaatttgccactaaatatgaattaaatatcaaacaagtaattaagacaaaagatgatgatcttcctataactgaaaatggtattttaattaattcagataaatatgatgggatgacttctgaagaagcttctaatggaataattaaagaacttgttaagttagattctggagcgcatttaatccaatttagattaagggattggggtataagccgacaacgatactggggttgtccaatacctgtagtctatgaaaatggtgtgcccaaagtaattgaagaaaaagatatgccaataaagcttcctgaacttgataagaattctccaccaatacctttaagccaaaataaagaattcataggtattaaagatggtgtaataagagaaagtgatacttttgatacttttatggattcttcttggtaccatgccagattcacatcttcgaataatgaggatcaaatttttgatgaaaatactgattattggctcccagttgatctttatattggaggaattgaacatgcgattttacatctcttgtactctagattttttcacaaagcgttaagagatattggtttagtagaaggagatgaaccttttaagaaattacttactcaaggtatggttcttaaagatggtgcaaagatgtcaaaatccaaaggtaatactgttgacccccaatcttatatagaaaaatatggagcagatacagtaagactctatatgatgtttacttccccaccagaacaaagtcttgaatggagtgagtcatcagttgagggtgcatcaagattccttaaaaaaatctggaacttagtcaatggaagaaaatataaaaaatttgataaaaaactagaatttaataaagaagaaatgtctgttagaagaaaatcccatgcaacattaaaaaaagttgaaaatgattatgaggttaggtttgcatttaatacagcaattgcagcaataatggagcttataaattttatacctgatgaatatagaaatgaggatgctagcgatgctcaaaaatattgtttagatgaggcaataatgttcacattgaagatgctctcaccgatttctcctcatatttgtgaacatttatggaatgatttttatctagatgaatcatccattgataaatggtggcccaagttcgatgaaaatttattagaagtagaggaattcgaattaattattcaagtaaatggtaaagttagaggaaaaataaatatagataaaaacatagagcaaaaagaaattgaatcttcggcattaaatgttgagaatgttaaaagtcatatcggttcttcaaaaattaagaaagctatttatataaaagaaaagcttattaattttgtaatttaa

SEQ ID NO: 304681 - DNA, 341 bp, Unknown
  Bacterial polypeptide expressing nucleotide sequence isolated from the Sargasso Sea
tatggaaagacttaattttcaagctattgaaaaaaaatggcaaacagttttcgaaaagaataaattatacaataataagacagcaaaaaaattttattgcctagaaatgtttccctacccatcaggaaaaatacatatgggacacgtaagaaattatactataggagacgttatagcccgatttaaattcttaaatggattcaatgttttacatccgatgggttgggatgcatttggtttaccagctgaaaatgctgccaaagaaaataatttgcatccaagagaatggacggagaagaatattgcagaaatgaaaagacaacttaaattaatgggtctct

SEQ ID NO: 304682 - DNA, 745 bp, Unknown
  Bacterial polypeptide expressing nucleotide sequence isolated from the Sargasso Sea
atggaaagagtaaattttcaagtaattgaaaaaaaatggcagaaaaaatttgctaaaaagaagctctatagaactaatggtaaaaaattttattgtcttgaaatgtttccgtacccttctggaaagattcatatgggtcatgtcagaaattatactattggtgacgtgatagctcgatataaattcttaaatggatttagtgttttacatcccatgggatgggatgcctttggtttaccagcagaaaatgcctcgaaacaaaataatttacacccaaaagaatggacaaataaaaatatagagacaatgaaatctcaattgaagttactaggtttatcaattgattgggatttagaaatttcaacatgcaacaaagattactataaacatcaacaagagattttcattgatttttataaccaaggtttggtttctagaaaagaaacatatgtcaattgggatcctgttgaacgcactgttttagctaatgaacaagtaataaatggcaaaggttggaggtcaaatgcaattgtcgaaagaaaaaaattatcacaatggttctttaatataacaaagttttcagaggatttattgaatgatttagagaaactgattggatggccagaaaaagtaaaattaatgcaaaagaactggataggaaaatcttttggttgcacaattgattttaaagtagacaacaataaggatcaaattacagtctttactaccagaccagatacgattt

SEQ ID NO: 304683 - DNA, 903 bp, Unknown
  Bacterial polypeptide expressing nucleotide sequence isolated from the Sargasso Sea
catggaaaaatataatttcaaagttattgagaataaatggcaaacatattgggataaaaataaaagttttaaaacaagctctgataagtcaaaaaaaaaattttattgtttagaaatgtttccctatccatctggcaaaattcatatgggacatgtgaggaattatacaattggagatgttttagctcgttataaatcccttcaaggatttaatgttttgcatccaatgggctgggactcatttggtatgccagctgaaaatgctgcaagacaaaataatctagatcctgcaacatggactgaaaagaacatcactgttatgaaatctcaacttaaaaaattaggtttatctattgattgggatcgagaaatatccacatgttccaaggattattacagacatcaacaaactttttttctagaaatgtttgataaaggacttgtttatagaaaagaaaactatgtgaactgggatccagttgatcaaaccgtattagcaaatgaacaagtgattgatggaaagggatggcgttctggtgcccctgttgaaagaaaaaaattaaatcagtggttttttaatataactaaattttctgaggaccttcttaaaagcttagatacattggataaatggccaaacaaagttaagataatgcaaaaaaattggattggaaaatcgtttggttgtgaggttaaatttgaaatcactggttcaaaagatgtaaaaattgttgagtgttatacaacaagaccagatactctttttgggatgtcttttctcgcactctctgttgatcatccactagctaaactttaccaaaatgacaaagcatttttgaaatttaaagatgaatgttctaaaactggtaccacagaagaatcgattgccgttgcagaaaaact

SEQ ID NO: 304684 - DNA, 1343 bp, Unknown
  Bacterial polypeptide expressing nucleotide sequence isolated from the Sargasso Sea
ctttacaacaagaccagatacattatttggttcatcttttttagccctttcagtagatcattctttatctaaattttatgaaaacaatgaagactttttagaattcaaaaaaaaatgctctaaaactggcaccaccgaagaatcaattgcaaatgcagaaaaaattggctttaaaactgacttaattgcaatcaatcctatcgatgaagaaataaaaatacctgtttattttgcaaattttgttttaatggattatggactaggggcagtatttggttgtcccgctcacgatcaaagagatttggattttgcaaataaatataatttaaccgttaagccagttgttactccaaataaagatgatttaaactttaaagttaaggacgaagcatatactggaccaggctttatttttaattcatcctttttagatggactaaagtgtccagacgattcaataattaaaactattgaatatcttgaaagcaaaaatttgggtgaaaaaaaaattaacttcagattaaaagattggggagtatcaagacaaagatattggggctgtccaattccaataatgtacgatgaaaacaataatccaaaaaaaattccaaaagaaatattacctgttaaacttccagaaattaataaattagatgagactggaaatcctttagataaaaatattgaatggaaaaatattacaattgatggaaaaaattatacaagagaaacagatactctcgatacctttgtttgttcttcttggtattttttaagattttgttctcctcaaaacgagaaatatggattttcttacgatgatgtaaattattggatgccggttgatcaatatattggaggcgttgaacacgctatattacacttattatattcaagattctttatgcaagccctttctcataaaaacgaaaattttaatataaaagaaccttttaaaggactttttacgcagggaatggtttgtcatgaaacttataaagatgatgaaaataattgggttagtccagaagaaataactttgaaagatggaaaaaaatatttaaaaaataatcttttaaaagaagttaaagttggcccttcggagtcaatgtccaagtcaaaaaaaaatacaattgatccagaaaatataatcaataactacggtgcagattctgttagattatttattttatctgatagtccgccagaaaaagatgtgcagtggtccgaagaagggatttcagcatcatttaaatttatccaaaaattatggaatatgaatactaaaattctgaatgaaataaaaaaaaatcatcctaaagacacaagttcagaactagata

SEQ ID NO: 304685 - DNA, 993 bp, Unknown
  Bacterial polypeptide expressing nucleotide sequence isolated from the Sargasso Sea
aaacggatacgatggatactttcatctgctcttcatggtattacttcggctacgtttctccgtattggaaaaaaggcgaaaagctgaaaaaggaagaccttccctgggatccagaggcgattcaaaaatggtgtcctgtaaaccagtacaccggagggatagaacacgcgacgatgcaccttctctattttcgatttttcaccaaggtgcttgcagacatgaatctttttgatttcagagaacctgcaacgcgtctttttaaccagggcatgatccttggcgaagatcacgaaaagatgtcaaaaagtcggggaaatgtggttaaccccgatgatctggttaaaaaatacggtgccgatacagttcgttgctacctgatgtttcttggtccctgggatgctggtgctccctggaatcctcatggcatcgaaggactttcccgttttttcaaggggatttggaatctttgccatcaacctcagaaaccagaaaatattgaccaggagtctgaaaagaagttgaggaaggctcaacataggacccttaaaaaagtaacagaggatctcaggcgtttccgttttaatacggccatcgccgccttgatgagcttccgtaatgaccttaaagatcatgttcatcgctgctgtgaagaaacacgcaccgaagccttaaaaaccatgctgctgatgctcgctcctttagccccgcatgtttctgaagaattatggcagtggatggcacctgaaacagggtccattcatcagcaagactggcctgcttttgatgaacaattggcatctgcagaaatggtgaccctcgtggtgcaaatcaatggaaagattcgggaccggattcaatgtccagtagggatggaacaaaaacaaactgaagaaaaagtgcttgcctcagaaaaaatccagaatctgcttgaaggaaaagcagtcagaaaattgattgtggttccagatagactagttaatttggtggtttaaa

SEQ ID NO: 304686 - DNA, 2569 bp, Unknown
  Bacterial polypeptide expressing nucleotide sequence isolated from the Sargasso Sea
atggattatagcccaaaaaaaatagaaccttattggcaagatttgtggtctaaggaaaaatcctttgcctctgaaaaatctgataaaaatttaccaaagaaatatatactagaaatgtttccttacccctcaggaagaattcatatgggtcatgtcaggaactatacaataggcgatgtgataactaggtacagaataaccaaaggtgataatgtattacatcctatgggatgggacgcttttggtatgccagcagaaaacgccgctatggaaaacaaaattcaccctaaagaatggacttataaaaatatcgatagcatgagagaacagttaaaatctctaggccttgcaattgattgggaccgtgagtttgcaacttgtgatcatgattacattaagcatcaacaaactatcttcattgatttcttaaaaaatgatcttgtttatagaaaagaaagtgaagttaattgggatcctgtagacaatacagtattagcaaatgaacaagtgatagatggtttagggtggagatctggtgcagaagttgaaagaagaaagctaaatcagtggtttctaaaaatttcagatttttccgatgatttgcttgatggtttagaagaattagataagtggcctgaaaaagtaaaacttatgcaaaaaaattggataggaaaatctacaggtgcagtttttagtttcaaagtaatggaggagttttcaaagattgctgacaagattgaggtatacacaacaagacccgacacattgtttggtgcaagtttttgtgctgttgctcctgatcacgaaatagcaactataatatctcagaataacgataatgctctaaaatttatagaaaagtgccaaaaaatcgcatcttccgaagaagctatagaaaaagttgcgaaagaaggatttgatactggaattaaagtaaagcacccattcgataaagatatagaacttccggtttatatagctaattttgtattatcatcttatggcaaaggcgcaatttttggctgtccagcacatgatcaaagagacctagattttgctagaaaatacaatcttcctgttttgcccgtagtatgtccagagaatttaaacaaaaaagatatggtaattgaaaatgaagcttaccttggagaaggaaagattattaattcaaaattcctagatgggctagacatagatgaagccaaaaaggttgctattaataaactaaaggaattaaaaataggaaaaaaggaaataaattatagattaagagattggggaatttcaagacaaagatactggggttgtccgattcccattttgcacagagaagatggcgcaataattccagttccaatagacgaacttcctataacattgccagaagatattgacttttcacagccaggtaatccattagaaaaacaccctacctggaaatatacaacttgcaaagaaactgggctgaaggcaataagagaaactgatacatttgatacatttattgactcttcatggtattttgcgagattttgtgagcttgataactctaagccaattaataaagatgaagcaaattactggttgcctgttgatcagtatattggaggaatagagcatgcaattttacatctgctatattctagattttttacgcgggccttaaaaattacaggacatctagaaattaaagagccatttgatggtatgtttactcaaggaatggtttgtcatgagacatattctaacgaaaagggtgattggatagagccaaaatttgtgagaaaaggagataacaaacaagacgcccaccataaagatactggcgagaaaataaaagttggtccctcagaaaaaatgtcaaagtcaaaaaagaatatagttgatccagacgatattattaaactatatggtgcagatacagcaagatggtttgtcctttctgattctccccctgatagagacattttctggacagaggcaggtatagaatcctctaataagtttataaacaaaatatggagaacaattctggagtataaagaaattgttgaacagaaagacattaaaaatacatctgaacaagtacaatttatgaaaattattaataaaggcatcaaagatatcacctttaatcttgaaacaatgtcatttaataaagctattgcaaacatatattctcttattggagagctttccaaatcagaaacgaaagaaaaaataaatggtgaaactgcctctaaaattttgaaaaatctaatagtaattttatcacctttcgttcctcatttagctgaagagtcatgggtatatgctggttttgatggtttagcctgtaaacaatcttggccagagtttgatgaaagcctaacagataatgaagacgcaaagattgttgttcagataaatggaaaaaagcgaggtgaattaagcctaccaataacagctgaggaaaaagaagctgttgaagtcgcaaaaaataataataaaataaagaatgatctagcgggtaaagaaattaagaaaataatttatgttaagggaaggattttaaattttgttgtttaga

SEQ ID NO: 304687 - DNA, 1613 bp, Unknown
  Bacterial polypeptide expressing nucleotide sequence isolated from the Sargasso Sea
gtgaaaaagaagaaactttcacaatggtttttaaaaattagtaagtattctgaagaattattaaatgacttagacagtctaaataattggccaaacaaagttaaaattatgcaatcaaactggattggtaaatctgttggtgccgaaattgattttaaaataacaggtagagatgataaaataactgtatttacaactagacccgatactatttatggcgctacatttatagccctttcaagtgatcatgatttagttgaagaaatatctaaaaataatgagaagatacaaaagtttattaaaagttgtgaaggtttgaattctgataaaacaaagaagggtttagatttaggattatcagttgagcacccttttattatcggaaaaaaactaccaatttttatagctaattttgttttaaaggaatatgggcttggtgcaatttttggttgtcctgcacatgatcaaagagatttagattttgctaatgaatataagcttgaaataattccagtagtaaaaccaaataatattgaagagaatgaatttaaaatcaatgacattgcttacactgaagatggcacaataattaactcaaaattattaaacgggttatcaattaaagatgcaaagaaaagaataatagtagagattgaaaataaaaaaattggaagaaaaaaaataaattttaagttaagggattggggtatttcaagacaaagattttggggttgcccaataccaatgatttatcgtgaagatggggaagtggtaccggtagaggataaggatttgccaataaaacttccagatattaaagactttaatgagtcgtctagcgcccttaacaatatttctgaatggaaaaatacaaaatgttctaaaactggaatgaaggcgtatagagaaacagatacttttgatactttttttgaatcctcttggtattattttaggtattgtaatgcaagattagataaaccgtttgatgtaaaagatattgattattggttacctgttgatcagtatattggcggtattgaacacgctatattacacctattatactcaaggttttttactaaggcattaagagatcttggttactttagcttaagcgagccctttagtggtctcttcacacagggaatggttactcacataacatataaaaatgaagaaggtgtgtgggtagagccaaaagatgtaaataataaaggtttggaattgagagataataaaaattttagagtagaaacgggaaaagttgaaaaaatgagcaagtcaaaaaaaaatgttgtagacccaaatgatattatagaattatatggagcagatacagcaaggtggtttatgttatctgacagtccgcccgaaagagatttgcagtggacagatacagggattagtgcatcttttaagtttatgaataagctttacgaatttattgaaaaattaaataaatatgagtcgaatgatgaaaatgatagtgtaattattgaagacttgaaaatggttatcaatcaggtttcgcaaaatattgaagtttttcaattcaataaatcagttgctaaaatctatgaatttgtaaatatagttaatgaagcccctat

SEQ ID NO: 304688 - DNA, 289 bp, Unknown
  Bacterial polypeptide expressing nucleotide sequence isolated from the Sargasso Sea
tatgaaagaatattttgagcgatataattccgaagttaatgaaaaaaaatggcaagatgaatggaataatttgaattgcttcaaagcatccatagatctatcaaaacccaaatactatgtattagagatgtttccctatccttcagggcgaattcatatgggtcatgtaagaaattatactttaggtgatgtcattgcacgatataagagatcaaaaggttttaatgttcttcaccccatgggttgggatgcttttgggttaccagctgaaaacgcagctaaagataaa

SEQ ID NO: 304689 - DNA, 1528 bp, Unknown
  Bacterial polypeptide expressing nucleotide sequence isolated from the Sargasso Sea
tatgaaagaccaattaaaggaattaggtctttcgatagattgggaacgagaaatttccacctgttctcctgattattataagcatcaacaaaagatttttttaaacctatatgataaaggattagtttatagaaaagaaagttacgtaaattgggaccctgtagataatactgttcttgcaaatgagcaagttgtggatggaaaagggtggagatcaggggctgttgttgaaagaaaaaaacttaatcagtggttttttaaaatttctcatttttctgaagagctacttagtgatcttggcaaattagacgagtggcccgaaaaagttaaaataatgcaaaagaattggataggtaaatcctttggatgtgaaattgattttaagatagaaggttcagataaagtaaactcaattaaatgctacacgactagacccgatacattatttggtttttcttttttagctctttctgttgaccaccctttatcaaaatattacgaaaatgaccctgaattcattaagtttaaagaaaactgttcaaaaactgggaccacggaagagtcgattgcacaagctgaaaaaattggatttaaaactgacttaatggctataaaccctataaacaatacgaataaagtcccagtttattttgcaaattttgttttaatggattatggatttggtgctgtttttggatgcccagcacacgatcaaagagattttgattttgcaaaaaaatataatttagaaattaaaacggtagtcaaacctaaaaatgagaacgatgattatgttgtggatacagagccacacaccggtccaggtgttatgattaattcagattttttaaatggcttatcagcaccagaaaaatcaatttcagaaacaattaaatatctagaaaaaaacaatttaggaaataaaaaaacaaattacagacttaaagattggggaatatcaagacaaagatattggggatgtccaattccaattgtttatgatgaaaataatgaggtaattaaaataccacaggaagatcttccagtaaaacttcctgatattgaaaagtttaatacagatggaaatccattagatactcaagaagaatggaaatcaattataattaacggtaaaaaatgcattcgagaaagtgatacattggatacttttgttgattgttcttggtattttttaagattgtgttcatcaaataataaagaaaaggcttttaatgaggacgaaataaaatattggatgcctgttgatcaatacattggtggtgttgagcatgcaataatacacttattatattcaagatttttcgtaagagctattgatatggataataaaacttttaatttaaaagaaccattccagggtttgtttactcaaggaatggtttgtcaccaaacttttaaagatcaaaataataattggcttaatccagatgaggtttattcggaagatggtgaaaaatatttaataaaaaataggccagaagaaaaagttatggttggaccatcatga

SEQ ID NO: 304690 - DNA, 1081 bp, Unknown
  Bacterial polypeptide expressing nucleotide sequence isolated from the Sargasso Sea
aaatcatttgctgaaaaaaataaaattgactactggatgccagtcgatgtttatattgggggggctgaacacgctgttttacatcttctttatgcaagattttggcacaaggttttgtatgatctaggatatgtttcagtgccggaaccgtttaaaaaacttgttaatcaaggtatgatccttggtaacagtgcattcatccacagaatcaagaataccaacacatacatttcatatgatctaatacataaatatgatgttcaaaaaatcaatgttgatattgacttgttgactaacaataatgaactcaacatcgaaaaacttaaaaattcagacattaagttcaaaaatgctgaatatgtgttcaatgaaaagtttattgtcagtagagaggttgaaaaaatgtctaaatcaaaatttaatgttgtgagtcctgataaaatatgtgataaatatggtgctgatacacttaggatgtatgaaatgtttttgggtccattagaacaatctaagccctggaatatggacggaataacaggcgttcataatttcttaaaaaagttttggaatttatttcatgataaaactagatttaatgttttagatacaaaaccaaatgaaaattcattaaaaatattacacaagacaattaaaaaagttaactcagatattgaaagtttctcatttaatacatgtgttagtgctttcatgatttgtgtaaatgaattatcatctttaaatgaaaaatcgtctaaggttcttagaaatttgtgtttattaatgtcgccgtttgctccacatatctgtgaagaaatttggtcaaaatttggcgagtctgattctatatcaaatcaggattttccaattcacgacgagtcatatctaattgaagataaatttgagtatcctatttcatttaatggtaagttgaggtttaaaatgatttttaatttagactgtgagtacaacgatatccaaaaagaattatctcaaaatgaaaaagtgaatagttatttgaatgggaaaaaaataaaaaaaatcatttttgttaaaaataaaataatcaatattgtcttttagt

SEQ ID NO: 304691 - DNA, 196 bp, Unknown
  Bacterial polypeptide expressing nucleotide sequence isolated from the Sargasso Sea
aatgagcagatacaatttcaaatcgatagagacaaaatggcaaaattattgggaaaaaaataaaagtttcaaagtaaaaactgatacttcaaaaaaaaaattttattgtcttgaaatgtttccttatccatcaggaaaaattcacatgggtcatgtaagaaattatactataggtgagttcttgctcgttataagt

SEQ ID NO: 304692 - DNA, 1351 bp, Unknown
  Bacterial polypeptide expressing nucleotide sequence isolated from the Sargasso Sea
tcatcttttatagctatttctcctgatcatccaatttgtgaacaaatgaaagaccaaaaagattttgtagattttaaaaaagaatgtttaaaagtgggtactactgaggaggcattagctaatgctgaaaaagtcggattaaaaacaaatttaactgttgatcacccttttaaagaagataagaaattaccagtttacgtagctaactttattttaatggactatggaacaggagcaatatttggttgtcctgctcatgatcaaagagattttgattttgccaagaaatatgaactggagattatagaagtagtctctgaaacgggaaaagctacgagaaacttctataaaagcacagaagcttatactggagatggtttcatcttaaattctcaatttttggatggactaaaaattgatgaagcaaaacaaaaaattatttctgaatttgaaaaagaaggaattggtaaaaaaaagataactttcagattaagagattggggtatttctaggcaaaggtattggggatgtcctataccaataatttatttaaaagatggaactataaaaactgttcctaaagaagatcttccagtaaaattacctcaagatgttaatctaaaggctaatggtaatcctctagaaagtcatacttcttggaaaaacacagtagataaggaaacaggagagccagctatgcgtgaaactgatactctcgataccttcgtagattcttcatggtattttttaagattttgttctcctaaagtaaaagataaaccctttgacactgataaagtaaactattggatgcctgttgatcagtatataggtggaatagaacatgcaatattacatttgctatactcacgtttttttatgaaagcccttaaattaaatgatccaaaagttaaatgtgacgaaccatttaaaggtctttttactcaagggatggtttgtcatgaaacttataaagatagtgaaaataattggttaagccccgatgaaatagaattagatgaaaataataaatttgttttaaagaatacgaagaaaagagttactgtaggacctgcggaagcaatgtcaaaatcaaaaaaaaatgttgtagatcctgagaatatgattaaatcttacggcgcggatgctattagattatttattttatctgatagcccgcccgaaaaagatattcaatggtcagagaggggagtagtttcgtcaaataaatttttacaaaagatatggaatctaaatcaactaattatcaatagaaaagatataaaaatttcaaatataaaagttcaggaagagtttattgaaaatttttataattatattttcagacttt

SEQ ID NO: 304693 - DNA, 2416 bp, Unknown
  Bacterial polypeptide expressing nucleotide sequence isolated from the Sargasso Sea
atggacacagtggatctttacgttaatgtttaattccttctattgtaagattgaaaataaggcaaagcacattagtgaattgattaattcctttgaaaaagatggtgatactcaatataaaaatgagttagaaaatctagactattcattttcaaatgaagagtggaaaaattttaacgatcaaattaaatcagatattttgatgaattttagattagcctatattacagatggagaggttaattggtgtgatgaattgggaactgttttggctaatgatgagattattaatggagtaagtgaaagaggcggatatcctgtaacaaaaagaaaagttaaacattggtgtctaagaataagtaaatattcagatagacttttagaggatttaaataaaattgactggccagaacctttaaaagaaatgcaaagaaattggattggaaaatcaaaaggagtttcattaaaatttgaagttgaaaactcagataaaaaaattgaagttttcacaactaggcctgatactattttcggagtttcatttttaactgtcgcacctgagtatagagacttatatgatatttcttcctcgaaaaatagaaaagaaatagaaggttatgtaaaagaggtatcattaaagtctgaaagagatagactatcagatgttaaatctgtatctggggtatttactggttcttatgcaatccatcctttttccagcaagaaaattccaatatggatttcagattatgtgctggtaagctacggaactggagcggtaatgggagttcctgctggtgatcagagagattttgactttgcaaaaaagtttaaactagacattccaaatatttttgatcagattgatatttcaaaatctgctttttctgataagacaggatttaaattaatgaactctgaatttcttaacggtcataattatgaaacttcacttgagattataattaataaaattgaagataaaaaaattggaaaatcaaaaatacaatataaactaagagatgctatttttagcagacagcgatattggggtgagccaatccctatttattataagaatgatataccaaaaaatattgatgaaccccatcttccattaaaacttcctgaggtagataattttttaccaacaaaaaatggtgattcgcccctgggcaattctaatgaatgggcatgggacgaaaaaaataagaaagtgacttttaatagtaagattgataatgtaaatgtttttccaatagaacttaacactatgcctggttgggctggaagctcatggtatttctatagatatatggattctaaaaatgataaaaaatttatttctgacgattctcaatcttattggtgtgatgttgatgtttactttgggggaagtgaacatgctacaggacatttactgtattctagattttatcaaaaatttttatttgatttagattttcttcaaaaagatgaatatgctaaaaaacttgttaaccaaggaatgattcttggaaactctgcttttatttatcgtaagtcaggtacttcagaatatttctcaaaaaatttaattaataatatagaagttgatagaataaggattgatattaaatatgtaaatactgaaaacgaagttgatatagacggtttaaaaaaagaagataaagattttaataatgcttcttttcattttgataatggaaaatttgagtgtattagagagcaagaaaaaatgtctaaatcaaaatttaatgtagtgaatcctgatgaaatatgtgatcaatatggagctgatacattaaggatgtatgaaatgttcttagggccaattgaacagtccaaaccctgggatacaagaggtatctccggagtttattcttttttgaaaaggttttggaatcttttctttgaaaatgacaaattaactttaaatgaagatataccttcagaagaatctttgaagtcactacataagacaataaaaaaaattaccgaagacattgagaagcttagtctaaacacatgtataagttcatttatgatttgtgtaaatgaacttagtgcattaaaatgtaataacagattaatacttgagcaattacttattttaatttctccttttgcacctcattttgctgaggaactttggagtcaaattgggaataaaaaatcaataattgatgaaaaatatcctgaatttgacaaaaaatacttaattgagtctgaaaagaattatccagtttcttttaacggtaaaacaaaatttaccataaacttatctctagaattagatgttaacgaaattgagaaaattgtcttgtctaatgagaaaacaatatcaatcctaaacaatttaagaccaaagaaagttattgtagtccctggtaaaatcattaatatagttgtatga

SEQ ID NO: 304694 - DNA, 1368 bp, Unknown
  Bacterial polypeptide expressing nucleotide sequence isolated from the Sargasso Sea
gatgtttttagatttctataaaaatggtttggcgtatagaaaagaaacctgggtaaactgggatccaagtgaacaaactgttcttgcaaatgaacaggttatagatggtaaaggatggagatcaggggtaaatgttgaaaaaagaaaaatgaatggttggtttttgaaaatcactagatttgcagaagatttactaaaagaaatagataacttaaaacattggcctgaaaaagtaaaaataatgcaaaaaaattggataggtaaaagtatcggtgcaacaattaaatttgaagtatatgaaattaaagagtctataaatgtttattcaacaaggccagatactttatttggagctacattcatagctatctctccccaacatccgtttgcccttaaaattattaaagaaaataaacatattgaaaatcaattaaatagcatagaatttaaagctaattctgaagaagaaattgagaaattagataaagttggaattaaaaccccatttactgcaatccatccatttattaaagaaaaaagaatccctatttttatagcaaattttattttaattgattatggaactggtgcaatttttggatgtcccgctcatgaccaacgagatatggatttcgctaaaaaatatagtctagaaattatacaagttgttaaaaaattgaatagtaaaaaaaatgaaattttagataaagcatattctgatgatggcattttaattaattcttcattcttaaataatttatctgtaaaagaagctattgatttgtctgttaaaaaacttgaagaaaggggtcatggcaagaaaacaattaattacaggttgagagattggggcgtatcaagacaaagatattggggttgtcctataccaattatatattgttataaatgtggagatgtacctgtcccagaaaaggacttaccagtagagttacctcaggatatttcctttaacaatagaggaaaccctttatctaaccatgaaaactggaaaaatgttaaatgtccacaatgtggatcaagggcaaaaagagaaacagatacctttgatactttttttgagtcaagttggtattttgcaagatttaccgatccacaaattgatactccattttctgataaagcatctaaatactggcttccagttgaccagtatattggtggcgtggaacatgccgttctacatttgttatactcaagattttttattaaagctctaaacaaattaaaccaaataaatataactgagccttttagctccttacaaactcaaggaatggtatgtcatcgaacatatcaaaatgatgataatcaatggttatttcccagagatgtttaccaaaaaaatga

SEQ ID NO: 304695 - DNA, 1096 bp, Unknown
  Bacterial polypeptide expressing nucleotide sequence isolated from the Sargasso Sea
catggaacgatataatcacagagaagtagagggaaaatggcagaataaatgggattccaaaaagatattccaggctagcgaagattattcaaaacaaaaatattatgttttagagatgtttccttatccttcaggaaagatccatatggggcacgtccgtaattacacgatgggggatgtcgtcgccagatacaaaagagctagaggattcaatgttctacatccaatgggatgggatgcctttggaatgcccgcagagaatgccgccatgcaaaataatatccacccagctaaatggacttatgaaaatatctcaaatatgcgtgaacagcttaagctgcttggtttatctattgattggtcccgtgaaatagcaacatgtgaccctgaatattatcagcatgagcaaagattgtttttagatttctacagaaaaggtcttgttggaagaaaaaaatcaaaagtaaactgggacccggttgacaataccgttcttgccaatgaacaagtaattgatgggaaaggttggagatcaggtgcagaagttgaaacaaaagagcttactcaatggtttttcaatataacaaattatgcaaatgatttactgagtaaactcgacaagctcagtaaatggcccgaaaaagtcaaaactatgcaaaataattggataggaaagtcaactggcttgcaatttaagtttgagattgtaattgcccctgatgatgattgcaaaacaattgaagtttttactacgagacctgatacactttttggcgcaagcttcgttgcggttgccgcggaccatccaatagtcaaaaagcttgaaaaaaataatcgtgaaattaatagtttcattaaggagtgcagatcaaaaggaacaaccttagccgaaatagagaaagctgagaaaatagggtttaatactggtgttaaagttaagcacccattcataaaagataaaaatctagatgtctatatcgcaaattttgtcttaatggagtatggaacaggagcaatatttggctgtcctgcacatgatcaaagagacttggattttgcgcgtaaatatgacttagatgtcatacctgtagtgtta

SEQ ID NO: 304696 - DNA, 961 bp, Unknown
  Bacterial polypeptide expressing nucleotide sequence isolated from the Sargasso Sea
atgcttgaagaacaatataatccagaacaaatcgaatctagcattcaatctgaatgggaaaatacaaataaatataagactgctccggatgatagagagaaatattattgcttgtccatgttcccatatccctccgggaaacttcatatgggacatgtaaggaattatacaattggggacgttatttctagatataaaaggatgagaggattcaatgtctttcagcccatgggctgggatgcctttggactgcctgctgaaaacgcagctattcaaaataaagttgacccacaaagttggacagaacaaaacattgagaatatgaaatcacaactcaaaagacttggatttagctatgactggtcaaaagagcttaaaacctgtgacccaaactattataagtgggagcaggaaatttttagtcttcttcacaagcaaggtctagtttatagaaagaaatctctagttaattgggatccagttgatgagacagtgcttgcaaatgagcaagttatagatggaaaaggatggagatcgggagcaactgtagagttaaaagaaattgatcaatggtttttaaaaattacagattatgctgatgaacttcttacttctatagaaaaccttgattggcctgaaaatgtaaagtcaatgcaaaaaaattggattggtaaatcttttggatcagaaataagtttttctctctctagcggagagaagctaactgcttttacaacaagaattgatactatatatggagttacataccttgcgatatcaccaaatcaccctatttcacagaatttagcgaatcaagatactgagatagacgactttattaaaaaatgcaatgaaacaaagatggctgaagcagatatggctaaggctgataagttgggattaaaaacgaatttaaaagttaaacatccttttacaggaattgatcttgatgtctggattg

SEQ ID NO: 304697 - DNA, 559 bp, Unknown
  Bacterial polypeptide expressing nucleotide sequence isolated from the Sargasso Sea
tatgaacagtcaatttgaatataaaaaaatagaaaagaaatggcaggatcactgggaaaatagtgaaactgttaagtgcgatttaaaatctgacaaaccaaaattttataacctttgtatgtacccatatccctctggagatctgcatatgggacatataagaaattatacgattggtgatgttatcactagatataaacaaatgaatggtttcaatgttttatctcctatgggctgggattcatttggccttcctgccgaaaatgcagcaattaaaactggtattcatccaagagaatttacggaagaaagaattgctaatatgaaatctcaaattatcagattaggttctttatatgattgggatagggaagttgcagcccactctgttgattattacaaatggactcaatatctatttataaagttgtttgaaaatgatttggcttacaaggaggacgcaccagtaaattggtgtaattcatgcagaacagttctagcaaatgaacaagttatagaaggctcttgtgagcgatgtgatacagcttcgagccaaaaa

SEQ ID NO: 304698 - DNA, 976 bp, Unknown
  Bacterial polypeptide expressing nucleotide sequence isolated from the Sargasso Sea
aagtggttacctgtagatcaatatgttggaggagtagagcatgcaatattgcatttgttatatgcaagatttttcactaaagctttgcgagataatgaactatttgatattgatgaaccttttaaaaaactattaacgcaaggaatggttcaggccgcagcctataaaaacaataaaactggtaaatatgtttctcctgccgacataactgacttatcaaatcctacagatccaattgacaattctaaactcgaagttcttttcgagaagatgtctaagtctaaatataatggaatagaccctgaatcagtaattaaaaaatatggagcagatacagcaagaatgtttatattatttaaagcaccaccagaaaaagatttggaatggggagatacagatgttgaaggacaatttagatttttaagtaggatttggaagctttatataaattctgcaaaagatataaatagtaaatctaattcctatccagatcaagaaaaaagtttaataaagtcaatgaatatggctataaaagaaatttcaaatgacatattaaataaccaatttaatactgcgatttcagaattaatgaagttttataattcattatctaattccattaatgacgtaaacaataatttaaaaattgatgctttaaaaacattttgtattttattggctccatttgcacctcatattgcagaagaaatatggcatcttataggatttaaaaaatctgtgcatttagaacaatggccttcatttaatgccgaggcactaaaggaagattcatatgaactagtaatacaagtgaatggaaaagtaagagacaaagtaaatattaataatgaaatgagtgaagatcaaattaaggaattgactcttataagacctaacatattaaaatggactcaagataaggaaataagaaaaataattattgttaaaggaaaaattattaatattgttgtttaaa

SEQ ID NO: 304699 - DNA, 1362 bp, Unknown
  Bacterial polypeptide expressing nucleotide sequence isolated from the Sargasso Sea
atggtttttaaagataagcaaatattctgaggagcttttgaatgatttagataaacttgaaaattggccaaataaagtaaaggttatgcaatctaattggattggaaaatctataggtgcagaaataaattttgaaatagaagaaagttttgattctttaaaacatataagggtttttacaactagacctgatacaatttttggtgcaacctttattgctctatcagttgaccatcaattatctttgaagttatctgaagataatgtcgatttaaaaaaatttataaacgaatgtaaaaatatagatccagaaaaaaataaaaggggttttaaaactcaaatatctgttaaccatccttttataaagaataaaaaattaccagttttcatagctaattttgtattgtctgaatacggtctagggtcaatttttgggtgtcctgcacacgatcaaagagatttagattttgctaaaaattataatattgagattatacaagttgtaaaacctataaaaacaaataccgatagtttagataaaactaatactgcctttacagataatggtgttgttataaactctgattttttaaatggattaacaacggaagaggccaagacaaaaattttacaaattatcgaaaaaaacaaaattggtatcaaaaaaataaattataaattaagagactggggtatttcgagacaacgattttggggatgccctattccaataatctatagagaagatggttcggtggttccagtaaaagaagagagcctgccagtaaagctccctgaaattagtgaatttaatgaatcatccagtgctttgaagaattttagtgattggagtgaaacaacttgcgaagaaactggaatgaaagcttatcgtgaaactgacacctttgatactttttttgaatcatcctggtattactttagatactgtaatgcaagagacaatagtccttttaaaaaagaggatgttcattattggttaccagttgatcaatatatagggggtatagagcatgccattcttcatttgctatattcaagattctttactaaggttttaagagacttaggttattttaagttggatgagccgtttaaggggttgtttactcaaggaatggtgactcatcaaacatataaaaattctaaaagtgaatgggtagaaccaaaagatgtaaaagaggtagatggaattttgtacgatttaaataacaataagattgaaataggaaagattgaaaagatgagtaaatccaaaaaaaatgtcgttgatcctggggacattattaatttatatggggctgatacagctcggtggttcatgttatcagacagtccgcctga

SEQ ID NO: 304700 - DNA, 2383 bp, Unknown
  Bacterial polypeptide expressing nucleotide sequence isolated from the Sargasso Sea
aatgaaaatagaatacgaccattcaaaaattgaaaaagatattcaatctaagtggaatgaatctaatgcctttactgcaaaaatagataataaaaaaccaaaatattattgtttatcaatgcttccatatccttcaggcaatttgcatatggggcatgttagaaattatgcaataggtgatgctgtatcaagatataaaagacttaaaggctttaatgttctgcaacctatgggttgggatgcttttggcttgcctgcagaaaatgctgcaaaaggaaaaaatattcatccgaaagattggacggaaaagaatatagaaaacatgcgtgaacaacttaaatcattagggtttagctatgactggtcaaaagaattaaatacttcagatgtttcctattacaagtttgaacaaaaacttttcctaaaattctatgaacgaggtctagcttatcgcaaaaaatcacttgtgaattgggatccagtcgatgaaacagttcttgcaaatgagcaagttatagatggtaagggatggcgaacaggagccgaagttgaattaaaggaaatagatacctggtttctaaaaattacagattacgcagacgaattagaggaaagtttagcaaccatagattggccagagaatgttattaatatgcaaaaaaattggattggaaaatctaaaggcgttgagattaaatttacaacagatactaataaagaaattaaagcgtttacaactagacctgatactatctttggtataactttctttggcatttcacctaatcatcctattgttaatgaaatatcaaagaatgatgaaggtttaatagagtttttatcagaggttaagaaaatatcatctgcagaagcagatttagctaaagcagaaaaactaggttacaagacagagcttaatattgttcatcctattacagacgaaaagatacctgtttggataataaattatgtgttaatggattatggaacgggagcaattatgggggttcctggacatgatgaaagagattttgaatttgctcaaaaatatgaaatacccataacaagagttatagattctaaagatgaactcccatattctggccaagggaaattagtaaattcaaaagactttgatggactcaattcagataaagcttttgataaagtgactaaaagattagaaaaaaataatgcagctaaaattttataccaatatagattaagagattggggtatcagtagacaaagatattggggatgccctattccaataatatataaagatggcaaaactatgcctagtgaagaattgcctgttgaactacctgtatctgcagatggcaaatatagtcctcttcatcaaaatgaagaatttaaaaaattagataatggatttgaaagagagactgatacatttgatacctttatggaatcatcatggtattttgcacgctatacatcggcaactaacgataaagaaatttttgatgaaaatacaaaatattggttgccagttgatctctatataggaggagtagagcatgcgattcttcatttactatattcccgtttcttttttaaagcattaagagacatggatatagttgaaggagatgaaccatttaagaagctgctgacacaaggaatggttcttaaagatggtgcaaaaatgtctaaatcaaaaggtaatacagtcgatccaaaagaatacataacaaagtatggggctgattcaataagaacatttatgatatttgcaagcccacctgaacaatctcttgaatggtcagataatggtctagaaggttgtcataaatttcttaaaaggctttggaatctatcaacaaatattagtgaacttgatgaaaaacaattcaaagatagtaaaaatcaacttacagatgaatgtaaaaaattatttaagaaaataaatgatgattatgaaaaaagacttaatctaaataccattgtttcatcttgcatggaaattctaaataatattaacggacgttttgatgataaaaacgtcaattgttcaaaagaagatctcctaaatgtatatgacttcctattacttgctttgcacccgatagctccccatatctgtgaaacactatatgcagaagttcttaagaaagacattgcgcaagcagaatggcctgaagatagcttctttgttgccgatctctcagaatcaaattatttagttcaagttaatggcaaattaagagcaaatattatgatgccaatagacttaaaagaagatgaagtaaaagaaattgccctaacaaatgaaaatgtagccagacatttagaaaataagaatataattaaaataatttttataaaaaataaattaattaattttgttcattcgtag

SEQ ID NO: 304701 - DNA, 895 bp, Unknown
  Bacterial polypeptide expressing nucleotide sequence isolated from the Sargasso Sea
atttaaggatgaatgttttaagactggtactactgaagagtctttagcaatggcagaaaaaattggttttaaaacaaatttgtttgcaatcaatccattaaatcaaaaagagaaagtgccagtttactttgcaaattttgttttgatggattatggatttggagcagtttttggctgcccagcacatgaccaaagagactttgattttgcaaaaaaatataatcttcctatcaaaacagtagttaaaccaaatgatattgatgattttgaagtagataaagaagcctatactggctcaggcattataattaattctggtttgttaaatggactaaaagctcctgaagagtctattgttaaaacaattgaaatattagaaaaagataaaataggaataagaaaaattaattttcgtttaaaagattggggtgtatcaagacaaaggtattggggctgtcccattccaatcgcttacgacgaaaaaggtgaaatattaactattccaaaaaaggatctaccagtaaaattacctagtaatattaacttaaatactaaaggaaaccctttagatagtgataatgaatggaaaaatataaaaattaatggaaagaattttacaagagaaacagatactttagacacattcgttgattcatcttggtatttcttgaggttttgttctcccaaaaataatgattatggatttaattctgatgatattaaatattggatgccagttgatcaatatattggtggagtagaacatgcaatattacatttattatactcaagattttttatgagatctatcgattataaaaatgacaaattcaacgttaaagagccatttgatggattgtttactcaaggaaatggtttgtcacgaaacatataa

SEQ ID NO: 304702 - DNA, 1351 bp, Unknown
  Bacterial polypeptide expressing nucleotide sequence isolated from the Sargasso Sea
atggaaagaataaattttcaagtaattgaaaaaaaatggcaagaaagatttaaaactgccaaactttacaataaagagaagacatcgaaaaaattttattgtcttgaaatgtttccgtatccgtcgggtaaaattcatatgggccatgttaggaattatactattggggatgtactagccaggtacaaatatcttaatggctttaatgttttgcatcctatgggttgggatgcatttggtttacctgcagaaaatgcctcaaaattgaataaccttcacccgaaagagtggacaaataaaaatataaaagtgatgaaagatcagcttaaaatgcttggcctttctattgattgggatttagaaatatcaacttgtgataaagaatattacaaacatcaacaagagctatttattgaattctacaatcaaggcttagtatcccgaaaagaaacatatgtaaattgggatcctgttgaaaaaacagtattagctaatgaacaagtgatcaatggaaaaggatggagatcaaacgcggttgttgaaagaaagaaattatcacagtggttctttaatattacaaagttttcggaagaacttttaaatgatctagaaaatttaaatggttggccggagaaagtaaaactaatgcaaaaaaactggattggaaaatcttatggctgtgaaattatttttaacatagaaaaaagtgaagataaaataaatgtttttacaactcgtccagatacaatttttggtgcaagtttcatatgtttatcagctgatcatccattaaacaaaaattttcttgaaagagaggattttaaaaaatttaaaaaactgtgtgataagacagggaccacggaagagtctttggcaaatgctgaaaaattaggttttaaaactgatttatttgtaaggcacccttttcttgctaaaaaaaaacttccagtttatttcgcaaactttgtattgatggattatggaagtggcgcaatatttggatgccctgctcatgatcaaagggactttgactttgcaaagaaatataatcttgagataactcaagttgtatctgatgggaacgataaagaaatccttagtgaggcttatactggccctggaaagatgattaactctgaatttttaaatggactggagtacaacaaagcaaaagaaaaaataatcgataaaattgagcaaaataaattaggtaaaagaaaaacattatttagattaaaagactggggaatttctagacaaagatattggggttgtccaattccgatgatttatttggaagatggaagtgttgttcctgtagataaaagtgagcttcctatagaattaccgg

SEQ ID NO: 304703 - DNA, 1732 bp, Unknown
  Bacterial polypeptide expressing nucleotide sequence isolated from the Sargasso Sea
atatttggtgcaactttcttagctttatctgttgaccatcctttatgtaaagattatgtaacacgctcagatttcacagattttaaaaaaaaatgttctctagttggaaccactgaagaggcgattgccaatgctgaaaagattggttttaaaacagatttagaggctgagcacccatttattaaaggaaaaaaaattccaatttatgtttcgaattttatacttatggattatggaactggcgcaatatttggatgtcctgcacacgaccaaagagatcttgattttgcaacaaaatacaaaattgaagtaatacaagtagttaaacctaaagatataaataatgaaaaaattcataatggagcttacacaggtgaaggatctataattaattcagattttttaaataatttaacaatttcagaagcaaaagaaaaaattgtaaaagaaattgaaaaaaagaaaataggaaaaaaaaagattacatacagacttaaagattggggtgtatcaagacaaagatattggggttgtccgatcccaatgatttatttaaaaaatggtaaggttgtaccagttgataaaagtgaacttccaataaaattgccggacgatattgatgttaattccaaagggaatcctcttgataatcatccaacatggaaaaatactaaatgcaaaaaaacgggtgaggaagccacgagagaaacagatacattagacacctttgtggattcctcgtggtattttttgagattttgttctccaaaacttaaatctaagccttttgatgaagaagcgtttaaatattggatgcctgtagatcaatatataggaggtatagagcacgctattttacatttgctttactccaggtttttcatgagagcattgaaaaaaaataacagtaaaattaatgataatgagccatttaatggtttgtttactcaaggtatggtttgtcacgaaacatacaaagatcaaaatggaaaatggttaactccttcggaagtcgagaaaggctctgatggaaaatataaaaagatatcagataaaagtgaagttagagtaggagcttcggagtctatgtctaaatcaaaaaaaaatgtagttgacccagaaaatatgattaaatcatatggagcagatgctgtgagatggtttatactttcagatagtccaccagaaaaagatattcaatggtccaatcaaggagttaatgctgcttacaagtttcttcaaaaaatttacaatctttgttgtgttgtaaatgaaagatctgaagagaaaaatactttaaataaagaattcgacttaaagatgaattcatatgtaaataaaattacaaaatcaattaatgactttaacttaaatgtagtagtagcaaatgtttatgaaatttataacttgtttaataatcatattaataaagaagtaagcaataaaagtcttaaagcaaatttaataaacttaatgaaaattctaattcctttcacgcctcatatagcttatgaatgtttggaaatgttaggaacaaaagataacagaagttggcccaaagtagataccaagttagtgcttaaagaaaaaattaacatggcaattcaagtaaatggtaaaacaagagatgttattgaaatagaaaaaggaataaaccaaaattctgttgttaaactttgcaaaaataatgacaagataaaaaataaaattgatgataaatcagttaaaagga

SEQ ID NO: 304704 - DNA, 801 bp, Unknown
  Bacterial polypeptide expressing nucleotide sequence isolated from the Sargasso Sea
aatggataaggtaaattttaataatatagaaaaaaaatggcaaaagatttgggaaaaaacaaatctttatagggttaataaagaaaaaaagttttattgcctggaaatgtttccatatccatcgggaaaaattcatatgggccatgttagaaattatacaatcggagatgtgatagctagatacaaatacctaaattcttttaatgttttacatcctatgggctgggactcttttggtttaccggctgagaatgcagcacgtgagaataatcttaacccaaaaatttggacacaaaaaaatatttcggagatgaaaagacaacttaaaatgcttgggttgtcaatagattgggatttagaaatttcaacttgtgatgaaggctattataagcatcagcaagaaatatttatagacttatataataaaggcttcataagtagaaaggagaattacgtaaattgggatcccgtagaaaaaactgttcttgcgaatgaacaggttataaacggtcgcggctggagatcagatgcaccagttgaaagaaaaaaactttctcagtggttctttaatatttctaaattttcaaatgagctgctcgaagatttggaaaagcttaataactggccagaaaaagtaaaattgatgcaaaagaattggatcggaaaatcgataggttgcgaaattgattttgaaacaaatgagtccaacaaaaataatatcaaagtatttacaactcgtcccgatactatatttggcgcctcttttatcgctatctctgctgatcatcctttctgtgaaaa

SEQ ID NO: 304705 - DNA, 1621 bp, Unknown
  Bacterial polypeptide expressing nucleotide sequence isolated from the Sargasso Sea
atgaataaagactatcaacctgctgatattgaaaaaatagcgcaaactgcttggaatgataatacttcttctaaagtaaatttttctgatagcactaataaatattatgtactaagtatgtttccatatccaagtggcaagctacacataggccatgttagaaattatacaattggtgacgttattacaaggtcacataagatgattggaaaaaatgtatttcaaccaatgggctgggatgcatttgggcttccagcagaaaatgccgctattaagaataatgttcatccagaagagtggacaagaaagaatattgcacatatgaaagaacagcttaaaaatattggcattttatatgactgggaaaatgaaatatctaccgctgatgcaaattattttcgatgggagcaatggttttttattcaactacttaaaaaaggactcgtttatcgaaaattatcagaggttaattgggatccagtcgataagactgtacttgcaaatgagcaagttattgatggtagaggttggaggtcaggagctttagttgagcgcaaagaaatcccacagtggtttcttaagatcactgattattcagatgttctattgaaagaccttgataaacttccaaattggccagaacccgtcaaactcatgcaaaaaaactggataggtaaatcaaaaggattaaatataaactttaaactagcagaaagggatcaaatattaactgcctttaccactagaccagacacactatttggtgttacttttattgcaattagtatcaaccactcgttagcaaaagagttgctagaacataacaaaaatataaaggaattcattgaagagtatcaaaaactaacgctttctgaagaagcgtcttctaaattagaaaaagacggaatatttactgaactttactgtattcatccacttacaaataaaaaaattccattgtggataacaaattatgttctcgataattatggtactggtgtggtgatgggtgttccagctcatgatgctagagattttgaattctcgaataaatttaaattagatattatccaggttatagaaaacataaataaagagaatgatttaccattcattgactctggattactaattaattcagataaatttaatggactggagtcgcaagatgctaaggataagatatcaaaatattgtaatgataatcacataggagaagaagtcacatcttatcgtttgagagactggggaatatcaagacagagatactggggatgtcctatacctgttttctatcatgaagacggtagtgttcaccctgttccagaaaaagatctacccgtagaacttcctgaagatgttgatctaagcggagatggaaacccgcttgataaaaataataaatggaagaatatgatatgtccgtacactgggaaaaaagctacaagggaaacagatacttttgatactttttttgaatcatcctggtactatttacgattcttagatccttcaaataataaagaaatgtgtgataagaagttcaaatcatggcttcctgtagatcaatatataggcggaattgaacatgcaatattgcaccttttatatgcaaggattt

SEQ ID NO: 304706 - DNA, 985 bp, Unknown
  Bacterial polypeptide expressing nucleotide sequence isolated from the Sargasso Sea
gttgccagtagaccaatatatcggcggcgttgagcacgcggttttacatttgctatattctcgatttttcactcgcgcacttcgtaaatgcggttatctaaacatagacgagccattcgaaggcctcatgacacaaggtatggtctgtcacgaaacttacagagactcgactggctggctttttccaaaccaggtaacgaaaaacaaagccggcgagttcgtaaattctgagacaaacgagaacgttgtgcttggacgagtagaaaaaatgagcaagtcgaaacgtaatgtcgtggacccagaagcgataatagagagctatggcgctgacacggcccggctctttatgctctctgattcgccaccagaacgagatttagaatggacggaggctggtgttgatggcgcctggcgttacttaaatagactttggagaagtatcctggagttcaatgagcacccttttccaaaaactagtggaatatcaacagcaaaaaaaggtgacgaactccggcggctaattcacaagactataaaatcagtgactgagaacatagagcggtggcgatataatagcgcggtggcaaatattcgagaattgagtaaccacttgaatgattttaaaccggaaaatggtgatgacgctaaagttaaattatttggatatgaggtacttctacgtcttattgagcccatgacaccacatatagccgaagaaatttggcagtcactaggaaaaactgacgccttaggcgagcagccttggcctcaatacgataaggacttagtaattgatgaaactatttctatagcaatccagattaatggtaagcttcgagggagtattcaaattcagcgcgatgccactgaagaggaagtaaaagccttggctcgcgatctaaccaatatcaaaaaagcaatcaaggaaaaagaagtgcggaaggtaatcgttgtaccaaacaaaattatcaactttgtcatttaa

SEQ ID NO: 304707 - DNA, 1012 bp, Unknown
  Bacterial polypeptide expressing nucleotide sequence isolated from the Sargasso Sea
aaaaataataaacatggatatgatttagatgaaataaattattggatgcctgttgatcaatacattggcggtgttgagcatgctattttacacttattatactcaagattttttatgagggctataaattataaaaatgaaaattttagaatcactgaaccatttgaaggtttatttacacaggggatggtttgtcatgaaacttacaaagatgaaaataataattggcttaatccagaagaagtggaaacaagtgatggaaaaaatttttatataaaaaaaaaaccaaataaaaaggtaaaagttggtccttctgagtcaatgtcaaaatcaaaaaaaaatacaattgatcctgaaaatataatcgatagttatggcgcagattcagtgagattatttattttatcagatagcccaccagagaaagatattcaatggtctgagcaaggaatgattgcatcttataaatttatacagaaactttggatgcttcatggaaaatttaaaagcagaattcaggaaaattcaaataatgaagatattgagatttcaatatttattaatcagatgatcaaaaaagtaaattataacttagaaaaatttaattataacgttatagttgcaaatttgtatgaggcttataattttctttttcaaaaattaaataccccaatagataaaaaaacgcttttagataattatactaagtttttggcagtaatatccccagtaattccccatttttcatctgaatgcttgtcagacttaaaattaaatccacttcaaaaatggccagaagttgataagaatttactaaaagaagatactgtagagtatgtaatacaaattaatggaaaaaaaagaggtacaattaaaaatatgaaagatatttctgaagaggaattaattaatcacatcaagaattttgatgatacaaaaaaaattttagaaggtaaaaaaataaaaaaatctttttttgttaaaaatagattaatcaatattttaatttaat

SEQ ID NO: 304708 - DNA, 2344 bp, Unknown
  Bacterial polypeptide expressing nucleotide sequence isolated from the Sargasso Sea
aagcatgagacttataaagttgacctaaacaactctaatgaaaaatattactgtttatgcatgtttccttatccaagcggagacttacacatgggccatgttagaaattatacaataggtgatgttttttcaagattccatagattgactggcaaaaatgtattacatccgattggctgggattcatttggtttgcccgctgaaaacgctgctttagagaaaggaattaatccatctgattggacatatgaaaatattaaaaatatgagatatcaacttaaatccttaggctttagctacgattggtcaaaagaaattaccacttgttcggaagagtattttaagtgggaacaatggttttttataaagctttttgaagatggtttaatttacagaaaaaaatctatagtaaattgggacccagttgacatgacggtacttgccaatgaacaggttatcgaaggcagggggtggagatcaggagctattgttgagcaaaaagaaattaatcaatggtttctaaaaattacagaatttgcagacgacctattagaagatttaactttattaaaggataattggcctgacaatgtaattactatgcaaaaaaattggataggaaaatcattgggctctgaaatattaattaatacagatttaggggatattgatattttcaccacaagggcagatacaatatttggtgtatcatatataggtatttctctatcccatccatttgtctcaaaattagatattgaaattcaaaatttttgtaaatctaaggataattttttgaaaaatgaatctattacacaaaattctattaatggaatattttctggtttttatgcataccatcctattactaaagaaaaaattcctatttggtgctgtaattatattttaatggattacggcactggagctattatgggtgtacccgctcacgatgaaagagattatttatttgcaaagaaattttctttgaatattaaaaaagttatctcttgtaaagaaaaagagaatttaccagttattcaaaaaggaattttaatcaattctgaaaatttcgatgatttatcaagcgatgatgcaataaaaaaattaaatcaattttttcttgataattctcttggtaaaagttgttataaatataaactcagagattggggtgtatcgaggcagcgatactggggctgtcctatacctgtaatatatcgagaggatggggaaattttgactgtacctttagatcaacttccaataacacttcctgttgatgttagttttgaaggcaaaggaaatcctttggaaaatcatcctacttggaaatacacaaaatgttctgaaacaaatatgaaggctataagggaaacagatactctcgatactttttttgagtccagttggtaccaagctaaatacccaacatctaataacgaaacaatgatctcaaatgaagcaaaaaattggatgcctgtggatttatatataggaggtgttgaacatgctgtcttacatttactctatgcaaggttttttaataaacttatgaataaatacaatattttaacaaataaagaaccattcaaaaagcttattactcaaggaatggtactaaaagacggaagcaaaatgtcaaaatcaaaaggtaatactgtggaccctaaattacttattagtaagtatggcgcagacacggtacgacactttattattttttctgcacctattaataattcattagagtggtctgatactgctgtagaaggatcacataggtttttaaatagactatggcaaacctctgttgaaattaataattataaaaagccgacaatacaaaaagacttagaaaataattttttgatattttgtaatcagcaaattagaaagattacaaaagattataaagatgaagatagtttaaatactgttgtatcatcatgcatggagtatttgaataaactatcaataaacatcaaaaaaagaagtattaatgcagttattctaaatgaatattttatgaaacttctcataatgctataccccgtttgcccacatatatgtaaacaaatcttcaaagatttatacaatgaaaatattgatgtacagcagtggccaaggttcgatgaaaattatctaaattatgataatacaatgattgttattcaaattaatggtaaggtaaaggataaagtagaagtaaaaagtgatatatctcaggaagaacttgaaaagatagtttttcatagagaaaaaataaaagctattatcgctgatagaaagataaaaaaagttatatatattcaaaataaaattttaagtatagttatatagc

SEQ ID NO: 304709 - DNA, 1429 bp, Unknown
  Bacterial polypeptide expressing nucleotide sequence isolated from the Sargasso Sea
atttaaaaacaccgacaaaaaaaagaaattctactgcctggaaatgtttccttatccatcaggtaaaattcacatgggccacgttagaaactatgcaatcggtgatgtacttgcgagatataagacaatgcaagggtttaatgttctccatcctatgggatgggactctttcggtatgccagctgaaaatgctgctagagaaaacaatttagatcctaaagaatggacacaaaaaaatattgcaactatgaaaagacagctctgttctttaggactttcaattgattgggatttagaaatttcaacgtgtgatccaaattactataaacatcagcaatcactttttatagacttgtataacaaaggattagttgtaaggaaggaaacttacgtaaattgggatcctgttgaacaaacagttcttgcaaatgaacaagtaattaatggtaaaggatggagatcaaacgctattgtagaaagaaaaaaactatcacagtggttttttaatatatcaaagttttcagaagaattattagaagatttgaattcactcacagaatggccagaaaaagtaaagttaatgcaaaaaaattggattggtaaatctgttggatgcgagattgatttcgaaatcgagggacaaaaaaaagtaaaaatttttacaacacgtccagatactatatttggcgctacttttttagcggtttcagttgatcatccaatttgcaaaaattttagtaataacgataattttcttaaatttaaaaataaagcttctcaagtagggactaccgaagaagctatagcaaacgcggaaaagattggatacgacacaggatttagagctaaacatccttttataaaaaataaaagtatacctgtttatgttgcgaactttattttaatggattatggaaccggtgctatttttggttgtcctgctcacgaccagagagactatgattttgctaagaaatataaaattgaaattataaaagtagttaaaccaagagaaaatcatgaaatcattaaagataataaggcttttgatggagatggaagtataattaattctggatttttagatggtctaaatatttccgatgcaaaaaataagataatcagtgaaatagagaagaagaaaataggtaaaagaaaaatatcttatagactaaaagattggggaatttctagacaaagatattggggttgtccgataccaatgatttatttaaaaaatggtaaagttgtgcctgtcgataaaagtgagttaccaataatgttacctggagacgtagatctaaattcaaaaggtaatccactggaaaaccatcctaattggaaaaaaactaaatataaaaaaacaggtgaggatgccattagagagacagatactctagacacatttgtggactcttcttggtatttt

SEQ ID NO: 304710 - DNA, 2506 bp, Unknown
  Bacterial polypeptide expressing nucleotide sequence isolated from the Sargasso Sea
gatggaacagttaagtattcaaaaaatagataaaaagtggcaggatttttggtccaaaaataaaattatttcaaaaaaagacaaaaaggggaaaaaattctattgtctagaaatgtttccatacccttctggtaaaattcacatgggacatgtcagaaattatgctattggagatgtgctggctagatataaactaatgaatggtttcgacgttcttcatcctatggggtgggattctttcggtatgccagcagaaaatgctgcaagagaaaataacctaagcccaaaagattggacacaaaaaaacatcgcgactatgaagaggcagcttatgtcccttggcctttcgatcgattggaacttagaaatttctacctgcgatgaagaatattacaaacaccaacaagagttatttatagatttttataataaaggtttagtagtgagaaaagagacatatgttaattgggatccagtcgacgaaaccgttctagcaaacgaacaagtaattgacggaaagggatggagatctaacgcagttgtagaaagaaaaaaattatcacagtggttttttaatatttcaaaattttcaaatgagctacttgaagatttagatactcttaaggagtggcctgagaaagttaagcttatgcagaaaaattggattggcagatctgttggttgtgaaatagactttgaaatcaacaaaacaaaacaaaaagtaaaaatttttactactcgtccagatactatatttggagcgacttttttagcagtatcagtggaccatcctctgtgtaaggggcttgaaaaccaaaaagatttcaaagaatttaaaagaaagtgttctcatgttggtacaacagaggaagcgatagctaatgcagaaaaaattggttttaattcaggtcttgaagccaaacatccttttaaagaaaatgaaaaaatacctatttatgtagcaaattttattttgatggactatggaaccggagcaatttttggatgtcctgctcacgatcagcgggattatgattttgctactaaatacaaacttaaaataattcctgtagtaaagtctttgcaaagctctgcaaataatggggtctatactggcgatggtaaaatcataaactcaaattttttagacggccttagtgtggatcaggcaaaagaaaaaataatagatgaaattgtaagaaaaaaaattggaaacaagaaaacttcttttagacttaaagactggggtatatctagacaaagatattggggatgccccattccaatgatttacttaaaggatgggaaggtggtaccagttgaaaaaagtgaactaccgattaagcttccagaaaatattgatttaaattctaagggtaatccgttagcaaaccaccctacatggaaaaaaactaaacacaaaaagactggtgagccggctaccagggaaactgatacattggatacttttgtcgattcctcatggtattttataagattctgctcgccaaagttaaatgataagccttttgacaaagaagcttttaattattggatgccggttgaccagtacataggaggtgtcgaacacgcaatattacacttattatattcaagattttttatgagagcaattaaactaaaggacgataagattaaaattaaagagccatttaaaggactgtttacacaagggatggtttgtcatgaaacatacaaaaatgaaaaaggtgaatggctaagtcctgatgaagcaagtaaatatcaaaaatcccaagtaattgttggaccatctgaggcaatgtcaaaatctaaaaaaaatgttgtagatcctgaaagcatgatcagcatttatggtgccgatgcaataaggtggtttatgctttctgatagccctcctgatagagatatacagtggtcaaatgaaggtgtgtctagtgctcacaaatttgttcaaaaattatggagtctaaataaaaaaattattgaaagaaaagaaacaaaaatttctaaaattgaagaaaaaaaatttctgtcaaaatttaataaatatctatttaaaatatcaaatatgattgaaaaatttcatttgaatgttgcagttgcaaatttttatgaattaatacatgttgttaatgattacatttcgaaagatataagcacaaattgcttgaaagagacgcagataaaaataatgagaataatgatgccttttatgccccatataacatgtgagtgtttagctgctttggaaggagaaaattttttacaaaataataaatggccaaaagctgataaaacccttttagaagacagcgaagtgacaattgttgttcaaataaatggaaaaaaaagaggcctacttttgattaaaaaagattcggatgaaaaagaagctatagcaaaagcaaaaaatattgagaatattaaaaaaaatctaataaataaaaagattgttaaaaatgtatttgtcaaaaacaaggttatcaatttcataattacatga

SEQ ID NO: 304711 - DNA, 1183 bp, Unknown
  Bacterial polypeptide expressing nucleotide sequence isolated from the Sargasso Sea
aaagaggaggtgtccatttactgtgaaaacgccatgagaaaggacgaaatcgaaagaatgtccgaatctcaggaaaaagacggagttttcacaggagcctacgccatcaaccctttaaatggtgatcgtgttccagtatgggtcgccgaatatgttcttgcaggctatggcaccggagcgatcatgggagtcccggctcacgatcaacgggattttctttttgcacgacgctatgacattccgactccagtagtagtggttccagaggatcatgatcagccaatccctgaaggcagcgaattggaagaagcactgttggtcaaggaaggaagcaagatggttaacagcaatgaattcgatggcctggtgtggcctgaagggttcgaccgcgtagtccaggccattgaagacaaaggaatcggtaaaaagcagatcaactatcggttgcgggattggctgatcagtcggcaacggatgtggggcactcccattcctgtgatccattgtaaaaattgtggaaccgtgcccgttccttatgaggatcttccggtgatgttaccggatgatgctgaattcaaacctaccggggaaagtcccttgaagtatcatccgggatttctcaataccgaatgtcctaaatgcggaggaagcgctgagcgggaaacggataccatggatactttcatctgctcatcatggtattactacggctacgtttctccatattggaaaaaaggcgaaaagctgaaaaaggaagaccttccctgggatccagaggcgattcaaaattggtgtcctgtaaaccagtacactggagggatagaacacgcgacgatgcaccttctctattttcgattttttaccaaggtacttgcagacatgaatctttttgatttcagagaacctgcaacgcgtctttttaaccagggcatgattcttggcgaagatcacgaaaagatgtcgaaaagtcgcggaaatgtggttaatcccgatgatctggtcaaaaaatacggtgcagatacagttcgttgctacctgatgtttcttggcccctgggatgctggtgctccctggaatccacatggcatcgaaggactttcccgtttttttaaagggatttggaatctttgtcatcaacctcaggaaccagaaaatattgaccaggagtcagaaaaaaagttga

SEQ ID NO: 304712 - DNA, 1300 bp, Unknown
  Bacterial polypeptide expressing nucleotide sequence isolated from the Sargasso Sea
aaaaaaacaaattatagattaaaagattggggtatttctcgacaaagatattggggttgtccaatacctgttgcatatgatgaaaataataaaattataaagatacccgaaaatgaattaccagttaagcttcctgataatattgatatcaatacaaatggaaaccctttagacgcccaagaaaaatggaaaaaaattactatagatggaaaaaaatgtttaagagaaacagatactttggacacttttgttgactcatcttggtactatctaagattttgctcagcaaaggataaattaaagccctttaataaatctgacattgattattggatgccagttgatcaatatattggtggagttgaacatgcaattttacatcttttgtattcaagattttttatgagagcattaaatttaaataattctgaaataaaatttactgaaccatttaaaggtttgtttactcaaggaatggtttgtcacgaaacatataaagataataataataattggcttagtcctgatgaggtaatttctaaaaatggaaaagatttttttgaaaaaaaagatcctaataaaaaagttaaagtcggtccttctgagtcaatgtcaaaatcaaaaaaaaatactattgatccacaaaatatcattaatcaatacggagctgatgcagtaagattttttattttagcggatagcccacctgaaagagatattcagtggtctgaggaaggaatgaaatcatcgtataaatttatacaaaaattttggtcattaaatgaacaaatattaaaaatcaataaaattgagacagataagcaaaatgaagagttagaaattttcacaaaccaatcaataaataaaataaataaagccctagaaaaatttagatataatgtaattattgcaacttatcatgaaatttactcctattataaaaaaattattgaaaagggagtaaattataaaaatttaaaaaaaaattttcaaaaaatgatattaattatgattcctgttactccacatttagctaatgagtgtttagaaaagttaaattatgacgcagatataaagtggcctaatatagaacaaaaatatttaaatcaagaaactaataatattgtgattcagataaatggaaaaaaaagaggtattatctctgttgaaaaaaattttaaagaggaagaaattataaatcaaattaaaaatgaaaaattaatagacaaatatcttaataatggaaagttaataaaaacaatatatgttcaaaacagattaataaattatataattaaat

SEQ ID NO: 304713 - DNA, 1279 bp, Unknown
  Bacterial polypeptide expressing nucleotide sequence isolated from the Sargasso Sea
agtatcaagcaaaagatattggggttgtccaatacctatgatttatcttaaaaatggcgaagttgtaccagttgataaaagcgaacttccaattaagttgccagaaaatatagatgtaaattcaaaagggaatcctctttattcacatccaacgtggaagaaaactaagtataaaaagacaggtgaggaggcaacaagagaaactgacacgttagatacttttgtagactcttcatggtactttataagattttgttctccaaaaattaaatcaaaagcatttgatgaggaatcttttaaatattggatgccagttgatcaatatattgggggaattgagcatgcaattttacatcttctttattcaagattttttatgcgtgcaataaaattctgtaataaagcgataaatattaaagagccttttaaaggattatttacacaaggaatggtttgtcatgaaacatacaaagatgaaaaaggtaaatggcttagcccagatcaaattgaaaatacaaaagtggggattaagtcaaaaattgatggatctaaaatcaaagtcggtccatcagaagcaatgtcgaagtcaaagaaaaatattgtcgaccctgagagtatgattaaaatttacggagctgatgcagtaagatggtttattctttcagacagccctccagagagagatgttcagtggtcaactgctggtgtttcagcatcacacaaatttattcaaagagtatggagtctaaatgaaaaagttttaaacagaaataaaaccgaaaacgatgatgaaaaaacgtttgctttaaagtttaatgaatatgtttttaaaatcactgagttgattgagaaatttcaactaaacgtagctatagctaaaatttatgagattacctcactatttgaagattatgttgaaaaaaaaattagcaatgaaaaatttctaaattaccaaattcaatttatcaaaatactgctaccttttgctccgcatttgtcatgtgagtgcttatctaaattagagggaaaaaacttctatggagaaataaagtggccaaagggcagtaaatcattattagagaaacaagaggtcactttggttgttcaaattaatggcaaaaaaagaggcttaatgattaccaaaaaggatttgtccgaaaaggatgcattaattgaagcaaaaaaaattgaaaatattaaaaaaaacctcaaagacaaaaaaattgtaaaaaatatttttgtgaaaaataaaataataaattttatagttgcaggatga

SEQ ID NO: 304714 - DNA, 1027 bp, Unknown
  Bacterial polypeptide expressing nucleotide sequence isolated from the Sargasso Sea
cgagaaacccttcagcaaggaggcggtgaaccgctggttgccggtgaagcaatacgtgggcggcatcgaacacgcgatcctgcatctgctctacgcccgtttcttcaccaaggcgctgaaggatcgcggcctggtcgacatcaacgaaccgtttgaacggctcctcacccagggcatggtgcagggaatcacctaccgcaatgcgacaaccggcaagtacatcgctccagcggacgtggcagatcccgaaaatccccgggaccccaacaccggcgacaagcttgaggtgttgttcgagaagatgtcgaagtcgaagtacaacggcgttgaccccgcggcggtgatcgatcgctacggcgcagacacagcccgcatgttcatcctgttcaaggcaccgccggagaaggatctggagtgggatgacgccgatgtggagggccagttccgcttcctgcaacggctttggcgccttgttgaggcaggtgctacccgcatcgactcactcgagccgatgcaacggccagccgatctgagcgatgccgacagcgacgtacgtcgggcgctgcacctggccatcgaagccgtcagcgaggacctcagcgacgagatccaactgaacacggccatctccgagctgatgaagctctccaatgccatcagctccaccggcatcgaggccctcagtgcacctgtgttgcaggaagctctttccggactggttcgcctgctggctccgttcgcgccacatctggcggaggagctctggagccgtctggggggaagcggcagcgtgcaccgtcaaagctggccggttctggatccaacggcactggtgcaggacagcgttgaagtggtgatccaggtgaagggcaaggtgcggggcaagctgcaggttccggcctccgcagacaaggaagagctgaaacggctcgccctggccagtgatgtggccgaaaaatggttggaaggcgcagccccccgtcgggtgatcgtggtccccggaaaactggtgaacctggtgccctga

SEQ ID NO: 304715 - DNA, 1578 bp, Unknown
  Bacterial polypeptide expressing nucleotide sequence isolated from the Sargasso Sea
gcagttattttttttagaactttatgagaaaggtttggtttacagaaaagaaaattatgttaattgggatccaattgacaaaactgttcttgcaaatgaacaagtaattgatggtaaaggatggagatcaggggcggtagttgaaagaaaaaaattgaatcaatggttttttaatatttcaaaattttcacaagagcttttagacggattggataatttaaaacaatggcccaataaagtaaaagtcatgcagaaaaattggattggaaaatcctttggttgtgagattgcttttaaaactgagggagatctacctgtagaagaaataaaatgttttacaacaaggccagatactttattcggattttcatttttagctctttcagtagatcatgaaatttctaaatatttttctgaagacaaaaaattccaagagtttaaaaaagaatgttcaaaaacaggaaccactgaagaagctattgctattggagaaaaaattggctttaaaactgatctaatggcaataaatccactgaatccaagccaaaaagtgcctgttttctttgcaaattttgtattaatggattacggatttggagctgtatttggatgtccggcacatgatcaaagagattttgactttgcaaaaaaatacaatctaaatatcaaaactgtagtcaaaccagaaggagaaaacgacaattttgaggttaaagatgaggcatactcaggctctggtgaacttataaactctgaatttcttaacaaactaaaagtacctgaggagtcaattctcagaacaattgatattttagaggaaaaaaaaattggaaaaaaacagattaattttaggttaaaagattggggtgtttctcgacaaagatattggggatgtccaataccaatggcttatgacgaaaatggaaacgtagcaactattccaaaaaaagatttacctgtaaaacttccagaaaatgtagacttgaattctaaaggtaatcctctggactttgaaaaagattggaaaaatatcaaaattgacggaaaaaagtatgttagagaaactgatactttagatacatttgtgtgttcatcctggtattacataagattctgctcacctaaaagtgagaattatggatacagagaagaggatattaattactggatgcctgttgatcaatatataggtggtgtagaacacgcaattcttcatttactttactcccgtttttttatgaaagctttaggctataaaaatactaattttaggtttaatgaacctttcgaaggattgtttactcaaggaatggtatgccatgaaacttataaggatcaaaataataattggctcagcccagatgaaatagaattagttggaaatcaatttcaaaaaaaaggagagccaaatcaaaaagtaaaagtaggtccatctgagtctatgtcaaaatcaaaaaaaaacgtgatagatcctgaaaatataataaataattatggtgctgacgcagtaagattatttatattatctgatagtcctccagaaaaagatgttcaatggtctgatcaaggaatggtcgc

SEQ ID NO: 304716 - DNA, 2383 bp, Unknown
  Bacterial polypeptide expressing nucleotide sequence isolated from the Sargasso Sea
aatgaaagaattttatgattacaaagagatagagcaagaagttcaagatcgctgggatcaacagaaaacatacgaagcaaatattgatacaaaaaaaccaaaatattattgcttatcaatgttgccctatccttcaggcaatcttcacatgggccatgtgcgaaattattcaataggcgatgcagtatctaggtataagaggcttaagggatttaatgttttgcagcctatgggttgggatgcatttggattgcccgcagagaatgctgctattgataaaaaagttcatcctcaagaatggactgagcaaaatattaatcacatgaaagatcaacttaattcattaggtttcgcttatgactggaccaaagaaataaatacttctgatgagtcttattacaaatttgaacaagaattatttcttaagttttacgaaaaaggtctcgcatacagaaaaaaatcactagtaaattgggatcctgttgatatgactgtacttgctaatgaacaagtaattgatggtaagggttggcgtacaggcgctgaagttgaattaaaagaaattgaaacttggtttttaaaaattactgattatgcagatgaacttgaagagggacttgagaaaattgactggccggaaaatgtcaaaaatatgcaaaaaaactggattgggaaatctagaggtacagaaatttcttttgaaaccaatcaaggtgctgaacttaaggcttttacaacaagacctgatactttatttggcgtaacattttttggaatatctccaaatcatccttttgtaaatgaactaagcaaaaataatgatgaaataaaaaaatttttagaagaagttaaaaaagtttcttctgcagaagctgatcaggctaaagctgagaaacttggatataaaaccgaagtaaatattgtccaccctattaccaaagatttaatcccattatggataataaattatgttttaatggattatggaactggagcaattatgggtgttcctgctcatgatgaaagagattacgaatttgcacaaaaataccagattccaatctcacaagttatagaaacagaagagaagctgccctattctggcacaggtttagtaataaattcaggtgattttaatggacttccttcgggtgaagcctttgaaaaaatctctgaaaaacttattgcattaaaaaaaggtgaaatactttttcagtacaggttaagagattggggcataagtagacagaggtattggggctgccctattccaatggagtacaaagatggaaaaacttatagagctaaggatttaccagttgtgttgcctgtgaataaagatggtacctataaaccactgcatcagaatgaagactttcggtataaatctgatggctatgaaagagaaacagacacctttgatacattcatggaatcatcatggtactttgctagatatacatcagcacaaaacaaaaaagaaatatttgataaaaatactgaatattggcttcctgtagatctttatattggtggagttgagcatgcgattttacatcttttatattcaagatttttttataaagtgctacgagatatgggtatggtcaagcataatgagccttttaagaaacttttaacacagggcatggtccttaaagatggtgccaaaatgtcaaaatctaagggaaatactgttgatcctaaagaatatattgaaaactacggtgctgattcaattaggacatttatgatttttgcaagtccacccgaacagtcgcttgaatggtctgataatggtcttgaaggatgtcataaattcttaaaaagattgtgggctttatcatttaaaatcagctccttagagaatgatgcatttggtgcctcagaaaaaacactcaatgacgaatgcaaagatttattcatcaaaataaacgatgattatgaaaaaaggttaaacctaaacactgtagtttcatcttgtatggaaatacttaataacattagtaagagattcgatggtaaaaaggtgttgtgcgataaaagtgatttatacacttgttacgattttttactattagctttatctccaatagcaccacatattagtgagaatttatacaaaaatattcttaacaaagatattcaaaatgctagctggccagaagaaagttttttccataaaaatgaaacagaggttaagtatttagttcaggtaaatggcaaagtaagagcaaatattcttattgacagcgataagtctgaagaagatgttaaggagatagctaaagatcatgaaaatgtttcaagacatcttgaaaacaaagatataattaaagtcatatttataaaaaataggctaataaattttgttcactcgtaa

SEQ ID NO: 304717 - DNA, 1147 bp, Unknown
  Bacterial polypeptide expressing nucleotide sequence isolated from the Sargasso Sea
aaaggtaatcctttagactcggttaatgaatggacaaaaatcaaaattaatggaataaattgcacaagagaaacagatacactagatactttcgtagattcatcttggtactttttaagattttgttcttcacaagaaaaagataattccttcaataaaaatgaagtagattattggatgccggtagatcagtatattggtggggttgaacatgcaatattgcatcttttatattctagatttttcacaagagctataaatttagataatcaagaattaaatataaaagaaccattcaaaggattatttactcaaggaatggtatgtcatcaaacctacaaagatcaaaaaaataattggcttagtccagatgaagttttttctgatgatggaaaaaatttttttattaaaaataaaccatcagaaaaagtaataattggaccctctgaatcaatgtctaaatctaaaaaaaatactatagatcctgagaaaatgattgaggcatatggtgcagattccgtcagattatttatattatctgatagtcctccagaaaaagatattcaatggtcagaaacaggaatgacttctgcttataaatttattcaaaaattttggatgatgagtgaagacattatcgagatcattaatactgaacctaataaatctattaataaacaaatagaagtttttacaaatcaatcaattgaaaaaattaatattgcactcgaaaaatttagatacaacgtaatcatcgctgtatttcacgaaatttataattattataataaagtttcagaggaaaaaaaaaattataaaaatttaaaagaaaattacgaaaaaatacttatagttatgtcacccgtcattcctcatttggccaatgaatgtttgaacaatataaccaaagaaaatttgaaatggcctaaagtaaaaaaagaattcttagaatctgatgaaaaagaaattgttattcaaattaatggaaaaaaaagaggtaatattacaataaataagaaaattcgagaaaatgaaatactagcaaaagtaaaggaattagacataattcaaaaatatataaaagacaaaaaaatttctaaaacaatttatgtaaaggaaagattaataaatttaatagttaaataat

SEQ ID NO: 304718 - DNA, 1457 bp, Unknown
  Bacterial polypeptide expressing nucleotide sequence isolated from the Sargasso Sea
tgaacttctttccgatcttgacttgcttgatggttggccggaacaagtgaaaacaatgcagaaaaattggattggtaagtctgaaggaatggaatttacttttggtttaggcgaatcaggttttatagaggtttttacaacgaggcctgacactattatgggagtgacatttatagctctttcctttaatcaccccattactagagaatatgctagaaatgacaatgctcttcaaacttggcttaaaaataattcaaaagggtcgacatctgagattggttctaacttgactgaaaaaaatggttacaaactaaaattaaaagcgattcacccaatttcaaaagaacaaatagaagtttgggttagcaattatgttcttagttatggtttcggagcgttgatgggagtgccagctcatgatcaaagagactatgattttgcaaaaaaatacaaaataaaaattaaacaagttatagaaaataaaaacagcacagtagacatcactaaagaagctgaggttagtaagggaacaataataaattctgaatttttaaatggactcaaatcggaagaagctacagagcaactttctaaatttgggaaaaagaaaattaattacagattaagaaactggggagtgtcaaggcaaagaagttggggggctccaataccaatgatgatctcaaaaaatgatccgcaaaaagttattccattttctgaattaaatgaatctcttataggagaagaagagcctgaaattgatggtgaaatttttataaaagacaaagatacctttgatacctttgtcgaatcttcttggtattttgcaaggtttgcatcttacaaatctaaagacaaaatattcgatgacgaagtggattattggcttcctgttgatcaatacgtaggtggaattgaacacgcaatactacaccttctttattcaagatttttttgtaaagcaatgagcgatcttgatcttcttaaaattagagaaccatttaaaaaacttctttgtcaaggaatggtgcttaaagatgggtcgaaaatgtctaaatcaaaaggaaatgtaataaatccaaaagagttgattgaagaatttggctcagattctgttcgaatgttttctatgtttgctgcccctccaaaccaatcattagaatggtccaacgagggtttaaaaggttcttataaatttcttaacaagatttggagtttagtccaattattcaaacagcaggaaattgtagaaggtgattcaaaagaaagtcatgaagatttagtcgtcaaactaaatcaaacaataaaaaaagtatcaaacgattttgaaactagagaatcttttaatactgctatttcgtcgattatggaattaataaattttgtacccgaagattttttaaaaaataaaataaataatgagaaatattgcttattgaaacaagtaatcaatagtt

SEQ ID NO: 304719 - DNA, 2440 bp, Unknown
  Bacterial polypeptide expressing nucleotide sequence isolated from the Sargasso Sea
atgaaagatgattacaacccaaatgagctagaggaggcaattcaatctctctggaacaaagaaaagacttttgaaacaaaattcgaaaatacagataataaatactactgtctatcaatgtttccttatccaagtggaaaattacacattgggcatgttcgaaactatactatcggcgatgtcatttcaagatctcaaagaatgattgggaagaatgtattccaacctatgggttgggattcgtttgggctaccagcagagaatgcagcaataaagaataaaataccgccagcagagtggacgaaaatgaatattgataatatgagagagcaacttaaacgccttggttactcttacgactggaattgtgaactatctacatcagaccctaattactacaaatgggaacaatggttcttcatcaagctacttgaaaaaggtttagtttatcgcaaaaaatcagaagtaaattgggacccagttgataagacagttctagccaatgaacaagttatagatggcaagggttggcgatcaggggcagatgttataagaaaagaaatacctcaatggtttttaaaaatatcagagtattccgatgagttattaagcagtattgactctttagaggattggccagaatcagtaaagatgatgcaaagaaactggattggaaagtcaactggagctatgattcaattccaagttgaaggtcataacaaagtactagaagtttttactaccagaccagacactatttatggtgtaacttttttagctatttctccaaaccatccgtttttaagagacaatcttaatttagatatagaagttagagaattcattgaacaatgtaataaagttaaagtttctgaggagacagttagtaacttggagaaaaaaggagtaaatacaggttattttgctattagtccaatgaatgggtcacgtataccaatttggataggaaattatgtcctattagattatggaacaggatgtgtaatgtcagttcctgctcatgatgagagagactacgaatttgcaatcaaatataagcttccaataaaggttgttattacttctgatgataaaaaaactaacaataatgtgtattcaggagagggtattttgataaattcagatgaatttgataatctcaaatcatccagcgctaagactaaaattattgatgcattagtcgaaaaaggatttggtaaatcaaaaattaatttcagaatacgtgactggggcatttccagacaaagatattggggttgccccatacctgttttttatcatgaagatggatcggtacatcccattcctgaaaaagaccttccagtcgaattgcctgaagacgttgatttggattcagagggcaatcctctagctagccatccgacttggaaatatatcaaatgtccttatactggtaaaaatgctgtaagagaaacagatacatttgatactttctttgagtcatcttggtattatcttaggttcttaactcctgaactcagagaaagaatttttgataaaaaatttgagagctggcttcctgtggatcagtacataggaggaattgagcatgcgattcttcatctcctttatgcaaggttctttcataagttacttagggatctgggtataataaaatcttcagagcctttcaaagcattattatctcaaggaatggttcttaaggatggttcaaaaatgtcaaaatcaaagggtaatattgttgatcccaaagatatagttactaaatatggagctgatacgttaagactatttataatgtttgcggcaccacctgataataatttagagtggtctgataccgcaatagaaggttcttataaatttataaaaagactttgggttttatcaaaaaaaattattgaagataaggataataaatcaaacactgcaacaaatattcattctcaaagtttagagctgaaattaaataaaacgattgagaaagtgacaaacgatatctttaataggaaaagctttaatactgccatagcatctattatggaattatttaatgacttgaataagtacgagcagagcaaaaatcggaatatcctcttatgtaggcaatctttagaaagtatactcaaaatgctgtctccaatagcaccgcatgtaacacagtatctttggaaagaattaggatatgaaaagcttattttagatgagaaatggccaacagcaagaacagatgagctcaaagagactaaaaaagagataattattcaaatcaatggtaaacttagaggtagagtaacaattaaacctggtatctccgagtcccaaattaaatcaataattgaaaatgataaaaaaatttataaatatatagaaaatcatgagattaaaaaaatcatttatattaaagacaaacttattaattatgtgcttgattgaa

SEQ ID NO: 304720 - DNA, 1030 bp, Unknown
  Bacterial polypeptide expressing nucleotide sequence isolated from the Sargasso Sea
catcctcaaggatatgattcatttggtctccctgcggaacaatatgcaataagaactggtcaacatccgcttaagactacatccgataatataaacatgtatagaagccagctagatagaatcggattctctttcgattggtccagagaaataagaacttctgatccaaaatattataaatggactcaatggatatttattttaatgttcaactcattttattgtacaaaggataaaaaagcaaagagtataaatactcttataagtatgtttgagaaggatggtgacaaagactttaaagagcatcttttagagaatggatattcatttacaagttcagagtggaaaaactttgatgaaaaaattaagtcggatatactaatgaactttagattggcatacttgaccgatggagatgtaaattggtgtgaggagctaggaaccgttttagcaaatgacgaaattataaatggagtaagtgaaagaggaggttatccagtaactaaaaaaaaggtcaaacattggtgtctaagaattagtaaatattcggatagacttttaaatgatttagataaaattgattggccagatccactaaaagaaatgcaaagaaattggattggaaaatctaaaggtgtatctgtaacttttaatgttgaagattcaaataaaaaaattgaggtttttactacaagaccagacacaatttttggagtctcttttcttactattgcaccggaatataaagaaataaatgatttatcatcattaaattataaatcagaaattgagaattacattgaagaagtctcaaagaaatcagagagagaaagattgtctgatgtaaaaactgtttcaggagtattttcaggttcttacgcaatccatcctttcacaggaaataaaatacctatatggatttcagactatgttattgctagttatggaacgggagcagtaatgggtgttcctgctggagatcaaagagattttgactttgctaaaaaatttaagattgatattccaaata

SEQ ID NO: 304721 - DNA, 1072 bp, Unknown
  Bacterial polypeptide expressing nucleotide sequence isolated from the Sargasso Sea
gatggcagaatacgtccctgttgaaattgaagccaagtggcaaaaatcttgggaagagagcggatcttttgaacccgatttcgagaccgagaaatcacgttattacatgctgacgatgcttccttatccatccggggatctgcacattggacactggtatgccatggctccttctgacacctatgcccgatttttgaagatgcaggggaatgaggtgtttttcccgattggtttcgatgcattcggtcttccagcagaaaacgctgcaatcaagaacaacatccatcccaaagactggacctacaaaaacattgagcggatgcgtcttcagcttcgttcgatggggaacatgttcgcctggaaaaatgaggtcgtttcctgtgatccggattactacaaatggagtcagtggttttttctcaggatgctggaaatggatttggcctaccgagaatttgctccggtcgatttctgtaatcattgccagacgactcttgcaagagaacaggtttggggagatgaacgtctctgtgaacgttgcgggaacacggtgatccgcaaggaactcaaccagtggaaacttcgaattaccaattacgcagacgaattgctcgattttgatggattggactggcctgaacgtgtgcgtttgatgcagacaaactggatcgggcggagtaacggggtcgaattcgatatcgaactggatctaccatgcagtttacagttccgcatttttaccacacggccagataccgttttcgggatgactttttgtgtgcttgctccagagcatgaattagtagaacaaattgtaacggatgaccagaaagaggaggtgtccatttactgtgaaaacgccatgagaaaggacgaaatcgaaagaatgtccgaatctcaggaaaaagacggagttttcacaggagcctacgccatcaaccctttaaatggtgatcgtgttccagtatgggttgccgaatatgttcttgcaggctacggcaccggagcgatcatgggagtcccggctcatgatcaacgggattttctttttgcacgacgctatgacattccg

SEQ ID NO: 304722 - DNA, 280 bp, Unknown
  Bacterial polypeptide expressing nucleotide sequence isolated from the Sargasso Sea
aatgagttctaactataagccccaattgattgaaaaaaccattcaagataaatgggataaagaagaaagatttatcgctaagatagatgatagagaaaaattttattgtttatctatgttcccctatccttctggaaagcttcatatgggtcatgtaagaaattacacgattggtgatgtgatctcaagatacaaaagaatgaatgattttaatgtttttcaaccaatgggcgtgggatgcttttgggttgccagcagaaaatgcagcaatagaaaataa

SEQ ID NO: 304723 - DNA, 1120 bp, Unknown
  Bacterial polypeptide expressing nucleotide sequence isolated from the Sargasso Sea
aagagagacagatacaatggatacatttgtagatagttcttggtattttgctagatttacctctccaaaatcaataacccctactgacgaagattctatagattattggatgaatgtagatcaatatataggtggagttgaacatgccatattacatctactttattctaggtttttttgtagagcaatgtttgaaacaggccatatccctcgaaaatctaaagagccattttcttctttatttactcaaggtatggtatgtcatgagacttacagagatgaagatgggaaatggttatctcctattgaagtaaaagagattaaaaagataaataataaaagaaattttattaacataaaaacaggatctcatgttgaattaggtccatctattaaaatgtcaaaatctaaaaaaaatgttgttgatcccgaagatattatagatcaatttggtgctgatactgcaagatggtttatgatgtctgatagtcctcccgaaagagatgtagaatggactactgcaggtgttgaagcagcttggcgtcatcttcaaaaagtatggagaatttctcttcaaatttataatgaaggaaaaaatttaaatagtgtggcagaattcaaattagatttaactgaaaataaagaagataatcatttgttacaagcaactcataattctattaatgatgttacaagttgcctaacaaatttctcatttaataaggctgttgcacatatgtacgagttaacaaattttatttctaatacaaatgcatcttatggagcaaaagaatactctataaaaatattagcttcaattatgcaacctataacaccacatctatctcaagaaatttggagtctatttggatgtaagtcatttctttataatgaaaaatggcctcaagtaattaagaaatttattcaaaaacaggaaatgacttatcctatccaaatcaatggtaaaagaagagcagaaataactgttttgaaaaatatttcaaatagtgaacttgaagaaaaagtattaacacacccaacagtagaaaaatttttaaatggctttactcccaaaaaggtcattattgtaactggtaaaattattaatgttgttatttaa

SEQ ID NO: 304724 - DNA, 2020 bp, Unknown
  Bacterial polypeptide expressing nucleotide sequence isolated from the Sargasso Sea
aatgctcaaacctgatactgaagcttatattccttccgtagttgaatctaaatggcaaaaaaaatggaaagattcagatatctacaaaacatttgataacgttccttccaaaaaaaattggtatgcattatcaatgtttccttacccttctggagatttacatattggccattggtttgcatttactcctgctgacgctcatgcaagatttaagcgattagaaggatataatgtgatgcatccacaaggatttgatgcatttggcttacctgcagaaaatgctgctataaaaagaaatatcaatcccaaaaaatggacctttgacaatataaataatatgcaaaagcaatttgatatgatggggaattcttatgattggaatcgaaaagttgttacttgcacacctgaatattataaatggaatcaaaaattttttatagatatgtttaaaaaaggattagcatatcgaaaaaatggccctgtatggtgggaccctattgaccaaacgacgttggccaatgaacaagtagtagatgggaagtcagaaagatcaggagctgaagtagtaaaaaaattaatgcctcagtggtactttaaaattactgattacgctgaagaattattagatatgagtagtctagattggccagaaaaaatcaaacaaatgcaaagaaactggattgggaaatctgaaggagtaacgataaagtttaatattgaaaattcagataaaaaaattagtacatttacaactaggattgacactatatatggagtcacgttcgtagttttagctccagaacacccattaattaatgaactagctttagacaaaaataaaaatgttaaagaatatatcaaggaatctcaaaaattatctgaaatagatagaacatccacaattagggaaaaaactggtgttaaaacagatatctattgtataaatccagtcacaaatgaaaaggttcctgtatttattggagattacgtgttggcatcttatgggaccggtgctgtgatgggtgtcccagcacatgacgaaagagattttatttttgcaaaaaaatatgatttacccataaaagtagtaatatcaccagatggctctaaaaatctagacttaaaagaagctttcactggaaatgggattcaaataaattcaaatgaatttaatggattaagtaataatgagggaaagaaaaaaattgcaaatttaattgaggataaaggatttggtgaaaaaactataacttatcatctaagagattggctaatatcaagacaaagatattggggcacgcctataccaatgttttatgatgataataatgaaattattccagtagacgaagaatttttaccagtaatacttcccgatgctaaagagtttatgcctactgggcagtctcctctaactctagatgaaaactttttatattttgatcatcctaaatatggaaaattgagaagagaaacagatactatggatacttttatggattcttcatggtaccatcttaagtttgcaagtccgggtatattggatataccttttgagaaagaaaaaattgatctatggagtcctgttgatcaatatatgggtggagcagaacatgctgttatgcatttattatatgcaagattttttaacaaagttcttcgtgatcttggctatgtagactttgatgaaccatacaaaaggttatttaatcaaggcgtaatgctagcaaggcatatgaaaatatcgaaaagaaataatccattaaaccctgaacctttggttgaaaaatatggaacagattctgtaagagcatatttaatgtttcttggcccttgggataggggtggtgactggtcagattcaggaattaacggtgtttatagatggttacatagaatttgggatatggtgaccataaaatataaagaaaataagatttcagaaaaagaaaccaaaaattgtaagcaaatttcaaatgaaactactaagaatattctaaccgaccatggaaaactttaa

SEQ ID NO: 304725 - DNA, 1069 bp, Unknown
  Bacterial polypeptide expressing nucleotide sequence isolated from the Sargasso Sea
cttggtggaaagatataattttaaaatcattgaagaaaaatggcagaaattttggaatgaaaataaatctttctcaactaaaatagataaaaataaaaaaaaattttactgcttagaaatgtttccgtatccctctggtaagattcatatgggacacgtcagaaattatacaattggtgatgtattggctagatttaaagctttgcagggttataatgtcttgcatcctatgggctgggattcatttggtatgcctgcagaaaatgctgcaagagaaaataatttaagtcctaaaaaatggacagaaacaaatattctaaatatgaaaactcaacttaaaagacttggtttatcaattgattgggatagggaaatatcaacttgttcaccagaatattataaacaccagcaggaatttttcttagaattatatgataaaggcttggtatataggaaagaacaagatgttaattgggatccggtagataaaacagttttggccaatgaacaagttatcgatggcaaaggttggagatcaggagcaccagttgaaagaaagaaactaaaccaatggttttttaacataaccaagttttctaatgaattattagaaagtttagaaactcttaatcaatggccaaataaagttaaaataatgcaaaaaaactggataggaaaatcatttggatgtgaagttaaatttaaaattcaatcatctagaaatattgatgaaattaaatgttttacaacgaggccggatacattatttgggtcatcttttttggctctttcagtagatcatcctctatctaaattttatgaagataataaagaatttttagaatttaaaaaaaaatgttctaaaactggaacaactgaagaatctatcgcaaatgcagataaaataggatttaaaactgacttaattgcaataaatcctatcgatgaaaaaataaaaatacctgtttattttgcaaattttgttttgatggattatggattaggggctgtatttggttgtcctgctcatgatcaaagagatttagattttgcaataaatataatttga

SEQ ID NO: 304726 - DNA, 436 bp, Unknown
  Bacterial polypeptide expressing nucleotide sequence isolated from the Sargasso Sea
tatgaataaaaaatacgatcatttagaaattgaaccaaaatggcagaagttttgggatcaaaacaaaacttttaaggttgaggttgatcataacaagcctaaatactacatactagatatgtttccatacccatctgggcaaggccttcatgttggtcatccattaggttatacagcgactgacatattatctcgatataaacgcatgtgtggttttaatgtactgcatcccatgggctgggatgcttttggtttacctgcagaacaatatgccgtagaaactggaacgcatccagcagatactactatgaaaaatatagaaaagtttaaatcacaaattaagagtttgggattttcttacgattgggatcgtgaaataaataccacagatccccgatattatctatggactccatggatatttttacgattatat

SEQ ID NO: 304727 - DNA, 820 bp, Unknown
  Bacterial polypeptide expressing nucleotide sequence isolated from the Sargasso Sea
atgaccaaagaatataatccaaaatcaattgaagaggccgttcaagaaaaatgggaatcaaacaaaacctttgagtcaaaaattgatgacagggaaaagttttattgcctttccatgttcccatatccatctggtaaattacatatggggcatgttagaaattacaccattggtgatgtaatttcacgatataaaagaatgcaaaattacaatgtttttcaaccaatgggttgggacgcttttggtcttccggcagaaaatgctgcaatagaaaataaagtaagtcctaaagaatggaccaatcaaaatattcaaaatatgaaaacacaacttaaatctcttggtttaagttatgactggtcaaaagagttgagaacttgtgatgaaagttattacaaatgggagcaacttattttcaagaagttctttgatgctggactagtttatagaaaaaaatcaatggttaattgggatcctgttgatgaaacagtgcttgcaaatgaacaagtaatcgatggaaaaggttggaggtccggagcacaagttgaacttaaagaaatagatcaatggttcataaaaattacaaactacgccgatgaattgcttgagtctcttgatgacttagattggccggagaatgtcaaattaatgcagaaaaattggataggtaaatcaaatggggcagaaataaagtatcaaataataggcacaaaagattttttaacaacgttttcaactaggccagatacaatttttggtgtctcttttttggcactatctccaaatcatcctatgtcaatagaaattttcaaaagagaat

SEQ ID NO: 304728 - DNA, 1288 bp, Unknown
  Bacterial polypeptide expressing nucleotide sequence isolated from the Sargasso Sea
tgattctggagagttcaatgacttgagctctcacgaagaagcaagtaaaaagataaatgaatttttagtaaaaaataagattggcgatgaaaaaacaacataccgtttgagagattggttaatcagtagacagaggtattggggctgtccaattccattaatcaattgtgaagactgtggattattaccagaaaaatatgaaaatttaccagtattacttccagaaattaaagattatataaatacagatggatctcctttgtccaagagcaaagaatttgttgaaactgattgtccaaaatgttctaagaaagctcttcgtgaaactgacaccatggatacttttgtagattcatcgtggtattacatgaggtttttagatcctaagaatgaaaaagaaccttttaattctcactttattaatgaatggttaccggttgatcagtatattggaggagtagagcatgcaattttacatttattgtattctcgcttttttgtgaaagcccttcgagatcttggtctaatgactattgatgaaccttttcacaatttattttctcaaggcatgataaattttggaggggcaaaaatgtcaaaatctaaaggtaatattgtagatcccgaagaatattttgcaacacatggagctgacgctcttagattatatattttgtttatggcacctcccagcgatggcgttgaatggaatgatggcggtatcgagggtactaaaagatttttaaataaactatgggacaacttattaaaaatcataaatcaagaagatgtagaacaagaattgagtgaggatgataagtcattagaaagaaaaataaatcagactattaaatcagttacccaacattttgaaaagttcgaatttaacactgctgtatctgatttaatgaaatttaataatgaccttagtgaatatttaaaacataactctattttgccaaaagaattaaaagatgtactcataaaaaatatacttatacttttatatcctatgtctccgcatatggcatctgaaatttatgaaagttattttgacagtgatataagtactgagaaatgggcaaattttgatgattcaaaattagagaaccctatgtatgaattagttgtacaaataaatggtaaaaaaaagcatgcaattatggttgaaacaggaattgaagaagatgaggcaattacactttgtgaaagcaatttcgatataaactttaaagaagcaaaaaaaataatttttattaaagacaaaataattaatatagtgcaataa

SEQ ID NO: 304729 - DNA, 1024 bp, Unknown
  Bacterial polypeptide expressing nucleotide sequence isolated from the Sargasso Sea
tggagatctcctttagcagctatagatagttgggtaaatattattgataaagaaactggaaaatctgcaaaaagagaaacacatactatgcctcaatgggcaggatcttgttggtattatttgcgatttctcgatccaaataatgacgatagaccctgggataaagatgttgaaaaatactggatgccggtagacttatatgtaggaggaattgaacacgcagttcttcatttactatactcgcgtttttggcaccatgtattgcatgatcttggattggtatctactagagaaccatataaaaaactatttaatcaagggatgattcagggtgaagatggtcaaaaaatgagtaaatcaaggggaaatgttataaaccctgatgatgttattaacgaatatggcgctgattccatgcgtttatatgaaatgtttatggggccattagataaatcaaaaccatggtctacaaaaggattgcaaggttgtgcacgcttcgctgaaaaagtttggcgtatatttaatagtacagataaatattcggaaaatcctgattctgatgaaacgatacgattattgcatcaaacaatagcaaaggttactactgatttagacaatatgcgttttaatacagctatatctcaaatgatgatttttagtaatcatgtacaatcattatcagaaatcaatataaatacactaaaaacatttttattattattaaatccattcgttccacatatggctgaggaaataaatgaacatatgaatgcttatgaatcattatcgtacgcagaatggccaaattttgatccagaacttgcaaaagaagacttaatcacgattgctatacaggtaaatggaaaattacgtggtaatattcaagtttcagctgaaattgatgttaaaacattaaaatcagatgcatcccaaatagatactgtaaaaaaacacctggatgggaaggatattatcaaaaaaatagtagtttcaggtagattagttaactttgtcgttaaataaa

SEQ ID NO: 304730 - DNA, 337 bp, Unknown
  Bacterial polypeptide expressing nucleotide sequence isolated from the Sargasso Sea
atggagtacaaccaccaagaaattgaaagtaaatggcgtaaatattgggccgtaaatgaaacttataaagttttagaagataagtctaaaccaaaatattatgtcttagatatgtttccttatccttcaggcgcaggtttacatgtaggtcatccattgggttatattgcatcagatatttattcaaggtataaaaaaatgcaaggctttaatgtattacatcctatggggtatgattcatttggtttacctgcagagcaatatgctattcaaacagggcaacaccctgcaattactacaaaaaagaacattttaacataccgtaatcaattagata

SEQ ID NO: 304731 - DNA, 1693 bp, Unknown
  Bacterial polypeptide expressing nucleotide sequence isolated from the Sargasso Sea
aagatccctatatgggtttcagactatgttattgctagttatggaactggagctgtaatggctgtaccatcaggtgatcaaagagattatgattttgccaagaagtttaacttagagattaaaaatatatttaaaggaattgatatttctaaatcagcttttgaagaaaaatctaattttactctagaaaactcagactttctagataatctatccttttctgatgcagtagataaggttattctagaaatagaaaaaaaagatattggaaaatcaaagattcaatataagttaagagatgcaattttcagtagacaaagatactggggggaaccaataccaatttattatagaaatagtgaacctgtcgctttaagtttatctgacttgcctcttgagcttcctgaggtagataattttctaccaacaaaaaatggtgattctccattaggaaattccaaaaaatgggcatgggacttaaagaataaaactgtagtagaaaataatttaataaatgatacggatattttcccattagaacttaatactatgcctggctgggcaggaagttcatggtatttctatagatatatggattcagcgaataaagatttctttgcttcaaaagaggcaatagactactggaagagtgtagatatttaccttggagggagtgagcatgcaactggacatcttctatattcaagattttatcaaaaatttttgtttgacctaaatattctcccaattaatgagtacgctagcaaattgattaatcagggaatgattcttggaaactcatcatttatttacagagagagagggactaataagttttattctaagggtttaataaaagataaaaatgtagataagattagaattgatatatcatatgttgatattgataattacctatatgttgataaacttaaaaaaagtgataaatcattcagtgattctgaattttattctgaaaatggaaagtttattgtagagagagagcacgaaaaaatgtcaaaatctaaatttaatgtagtgaatcctgatgatatatgtgaccaatatggagcagatactcttagaatgtatgaaatgttccttggtcctattgaacaatcaaaaccttggagtacaaggggtatttcaggagttcattcttttttaaaaaaattttggaatctattttttttaaatggagatttcaatgtctctcaagataatccttcggaggaatcaataaaaattttaaatcaaacaattaagaaagtaactaatgatatagaaaagtttagtctcaatacttgtgttagtagttttatgatatgtataaataagctaagtgaagaaaaatgtaataatgagtctgttttaaaacaactattaattttaatttctccctttgctcctcattttgcagaagagctatggagcttaatgggaaataaagaatcaatagtagatgaaccttttccaattcatgatgatagtgttttggtagaataccaaaaggtatatccagtttcatttaatggtaaaacaaaatttacattaagtctatctctagatcttagtaataaagaaattgaagaaattcttctaaatgataatcaaacaaagaagtacttaaataataagaagccaaaaaaaattattattgttaaaggtagaataatcaatatagtagtataat

SEQ ID NO: 304732 - DNA, 850 bp, Unknown
  Bacterial polypeptide expressing nucleotide sequence isolated from the Sargasso Sea
tatgaaagcccagctcaaaaaacttgggttatccattgactgggacagagaaatttctaccgcctctgaggaatattataaacatcaacagctgttttttttagaattactagaaaaaaaattagtttatagaaaagagaattatgttaactgggatccggttgatgaaactgtgcttgctaatgaacaagtaattgatggcaagggctggagatcaggggctacagtcgaaagaaaaaaattaagtcaatggttttttaatatttctaagttttcgcaaaacttattagacggattagacaatctagaacaatggccaaacaaagttaaaacaatgcaaaaaaactggattggaaaatcctttggatgtgaaatagactttaaaacagaaggaagtttaccagtagaaaaaataaaatgttttaccacaagacccgatactctatttggtttttctttcttagctttgtcaattgatcatgaaatttctaatttctataaagatgacaaagattttataaaattcaaagatgagtgttctaaaactggaaccacagaagaagcaattgcagtcggagagaagattggtttcaaaactgatcttgtggcaataaatccattaaatcctaaacaaagagttccaatttattttgcaaatttcgttttaatggactacggatttggtgctgtatttggatgtccagcacatgatcaaagagattatgattttgcaaaaaaatataatcttgaaataaaaactgttgttaggcccaatgatcaagatgaaacttttaaagtaaacatgaagcttatccaggtccaggtattgttattaattctgattttttaa

SEQ ID NO: 304733 - DNA, 2407 bp, Unknown
  Bacterial polypeptide expressing nucleotide sequence isolated from the Sargasso Sea
aatgagttctacatataatccaaaattcattgaagaagagattcaaaaaaaatgggatcaagaaaaaagatatgaatcaaaagtagatgatagagaaaaatactattgtctgtctatgtttccttacccatcaggtaaattacatatgggtcatgtcagaaattacacaattggtgatgtaatttctcgttataagagaatgagaaattttaatgtatttcagccaatgggatgggatgcttttggtttgccagctgaaaatgctgcgattgctaataaggttagtcccaaagaatggacagatcagaatattgaaaatatgaaggatcagctaaagtctttgggatttagttatgactggtcaaaagaactaagaacttgtgattcaaaatactacaaatgggaacaattaatatttaaaaaattttacgatgcgggattagtctatagaaaaaaatcttttgttaattgggatccggttgacgaaactgtgcttgcaaatgagcaagtcattgatggcaagggttggagatcaggtgctcaaatagaaattaaagagattgatcaatggtttatcaaaataactgactatgcagatgagcttcttgattcattggacgatcttgattggcctgaaaatgtaaaactaatgcaaaaaaattggattggtaaatctaaaggtgctgaaattaaatacaatattgaggattcagatgattatcttattgctttttcaacaagacctgacactattttcggagtttcatttcttgcaatagccccaaatcatcctctagctattgatgtagcaaatgaaaataaagatgttgctgagtttcttaataaatgtaaagaaattaaagcagctgaagctgatattgcaaaagcggaaaagcttggaatcgatactaaaattaaagtcattcatccgttaacaggtgagaaaattcctttatggataggaaattttgttttacttgaatatggaacaggtgttgttatgggtgtgcctgctcatgattcaagagactatgagtttgcaaaaaaatataagttaaaaatagatcaagttatagatactggtgaaaaatctctgccaattactgagaaaggaatgctaataaattctcaaaaatatgacggcatgacctctgatcatgctataaaagaaatagtcaaagatctaattgatacaggtgctggtgaagaacttattcaatttagattaagggattggggcgtaagtagacaaaggtatgggggttgtccaataccagtaatatatgaagatgaatttccaaaagtcattaatgaggatgaaatgcctgtagagcttcctgccttagatcaacaatctcttccaaaacctttgagtcaaaacaaaaattttactgatctaggaaacggtcttcaaagagagagtgatacttttgacacttttatggactcatcatggtattacgcaagatttacttctgctgataataatgaagatatctttgatcaaaatacaaaatactggcttccagttgatctttatataggaggcattgagcatgcaatacttcatttattatattcgagattttttcataaggctctcagagatattggtctcttagaaggtaatgagcccttcaaaagattgctaactcaagggatggttttaaaagatggagcaaaaatgtcaaaatccaaaggcaacactgtagacccacaatcatacatagaaaaatatggagctgatacggttagactttacatgatgtttacatcacctccagaacaaagtcttgagtggagcgagtcatctgttgagggtgcatcgagatttctaaaaaaggtgtggaatcttgtagatggaagaaaatttgaaatatttgatatcgacaataatttttctaaagaagagcttgaacttcgtaggaaatcacatgcaactcttaaaaaagtagaaaatgattttgaggttagattttcatttaatactgcaatcgcagcaattatggagctactcaattttattcctgacaattttaaaagtgaaaatgctagtgattctcaaaaattttgtttaaacgaagcaataatcttcaccttaaaaatgttatttccaatagctcctcatattagtgaatatttgtggaataactttcaggtggaggaatcaaatatcgaatcatcatggcctaagtttgaaacatgcctaattgaggcagaagaatttgaacttatcattcaagtaaatggaaaagttagaggaaaaataaacctcaataaagatacttctcaaaaagacattgagcaagctgcgttaagtgtagaaaatgtaaaaaactttattgactcatctgaaataaaaaaaactatatatattaaagagaaattaattaattttgttatttaa

SEQ ID NO: 304734 - DNA, 2401 bp, Unknown
  Bacterial polypeptide expressing nucleotide sequence isolated from the Sargasso Sea
atgcttgaagaacaatataatccagaaaaaattgaatcaagtattcagtctgaatgggaaaagataaataaatataaggctactccagatgatagagagaagtattattgcttgtctatgttcccttatccctctggaaaacttcacatggggcatgtgaggaattatacgattggcgacgttatttctagatataaaagaatgagaggattcaatgtcttccagcctatgggctgggatgcctttggactgcctgctgaaaatgcagctattcaaaataaagttgatccacaaagttggactgagcaaaacatagagaatatgaagttacaactcaaaagacttgggtttagctatgactggtcgaaggagcttaaaacctgtgatccaaactattataagtgggagcaagaaatttttagtcttcttcataagcaaggtctagtttatagaaagaaatctctagttaattgggacccagttgatgagacagtacttgcgaatgaacaagtaatagatggtaaaggatggagatcaggggctactgtagagttaaaagaaattgaccaatggtttttaaagattacagattatgctgatgagcttcttacctctatagaaaatcttgattggccagaaaatgttaaatcaatgcaaaaaaattggattggtaaatcttttggatcagagataagttttcctcttccagatggagaagagctaactgcttttacaacaagaattgatactatttatggagttacataccttgcgatatcaccaaatcatccaatttcacaaaatttagcgaatcaagatcctgagattgatgactttattaaaaaatgcaatgaaacaaagatggctgaagcagatatggctaaggctgataagttgggcttaaaaacgaatttaaaagttaaacatccttttacaggaattgatcttgatgtctggattgccaattatgtcctaatggattatggaacaggagtagtgatgggagtcccagctcatgacgaaagggatcatgagtttgctctcaaatataatatagatatcaagcaagtcataaaagctgatgaggtgccctcctctgaaaaaggtgagctcattaactctgagaaatttaacggtctgacttcagaaaatgcaatccaagatatcaatagcttccttgaaaaagaaaaaataggtaaaggcattgagaattttcgattacgtgactggggcgtcagcagacaaagattttggggatgtcctataccggtagtctataaaaatgatgagcctatttttttagagaaaacagacctgcctgttgagttaccaaaaataaaagatggagagtccccaaaaccacttagtcaaaataaagatttttttgatattggtccgaatgaatcaagagaagttgatacatttgatacttttgtagactcgtcctggtattacgcaagatttacagcagcagataataataataaagctctagatgaaaattcagcatactggcttccagttgatctttatattggcggtattgaacatgctatcttgcatcttctttattcaaggtttttccataaagctatgagagatattggcttagtagagggtgacgagccttttaaaaaattacttactcaaggaatggttcttaaagatgggtctaagatgtcaaagtcaaaaggcaacacagttgacccacaacaatatattgataagtatggtgcagacacgatacgtctttacatgatgtttaccgctcctcctgaacaaagtttagagtggtctgaaactgctgtagaaggagcttttagattcttaaaaaaactttggagctttacccatgataaaaagtttaaaaaagtaaagatacaaggtgagttagataacagtcagaaagactttagaagaaaaattcacttaactataaaaaaagttactgatgactacgaaaatagatatgcttttaacacagtaattgcagcttgtatggagcttttgaattcaacgccagatcagattaaaggtgaaatatcatctgaaaatgatcaattctgcctcaatgaatttatcgcatcaatcctgcaaatgctttatccgatagcaccgcatatatgtgaaactctatggaataacttttttgagaatagctcagaaattgaggatacctggccgacttttgatgaagatttaatggtcactgatacatttgagttagttgtccagattaatggaaaagtcagaggaaaaatagaaatatcatcaaacctagaacaagacgaaatcgaaagtgttgctaagtctattaaaaatgtggatgatttacttggcgataaggaaatcaagaaatgtatctatgtaaaagaaaagctaataaatttcgtaatctagc

SEQ ID NO: 304735 - DNA, 2455 bp, Unknown
  Bacterial polypeptide expressing nucleotide sequence isolated from the Sargasso Sea
aatgattgattcaaaatataatccaagagaaatagaagaatcggcccagagtttttgggcggatcagcgagtctttgaatcaagagaagatcagaataaggaaaaatattactgcctttgcatgttcccttacccgagtggacgattgcacatgggccacgtaaggaattatacaattggtgacgtcgtatccagataccaaagaatgcaaggaaaaaatgttttacagcccatgggatgggatgcttttggtttacccgctgaaggtgcagcaataaaaaataacatgcctccatcaaaatggaccagacaaaacatcgattacatgaagcaacagttacaaatgcttggctttggctatgactggagcagagagcttgcaacttgtgatcctgattactacaaatgggagcagtggatgtttacccgtttgcttgagaagggaattgcatatcgaagcgatgccatagtcaattgggatcctgtggagaatacggtgcttgcgaatgagcaggtgattgatgggaagggctggcgatcaggggcaaccatagaacgacgaaatatgcctcagtggtttcttagaataacggattactgcgaagaacttcttgaaggattggatgatctggactggccagagcaagtcaaagtaatgcaaaggaattggattggccggtcagaaggttatgaaatagaatttcaaattccacacttagatacaagtgtgagtgtttataccacaagaacagatacactctttggcgcaacatatcttgcattggctccagagcaccctatcgttcaacaaatagcaagttcagatcagaatgttcaccaatttttagaagatacaaaatcacaagcagtatccgaggaagccctagagaagatggaaaagaagggcgttgccctcgggttcaatgctataaatcccatcaatggcgaagagattccagtatggactgcaaattttgtgttgatgacctatggaacaggctcgatcatgtccgtgccagcccatgatcaaagagatcatgattttgcaaaaaaatacgatttaaccattcagccagtcataaaacccattgagaaagatgcaagccatgatttcaatgaagaagcctatattgaagaaggaattctctttaattctggaaaatacgatggaatcaattcagcagacgcaaaagatcaaattggggaaatgcttactgataaaagcgctgcaaataaagtcatcaattatcgcttaagagattggttggtttctaggcaacgctattggggggctccaattccagttctgacaaatgaagatggtgatcttgtctcagaatctgatgaaaaccttcctgtcacattgccagaggaagttgaatttgatggcgttcattctccgctgaaaacaatgagtgaattttatgaggtcaatgatggaggcatgccattggttcgtgaaacagatacatttgatacctttatggagtcttcctggtactacgcaagattttgctcgagtgattctgacaatgccatgttggatgaaagagccaaatattggcttccggttgacctatacatcggtggaatcgagcatgcaatcttacatcttctctatgcaaggttttatcataagcttctccgagatgagggacttgttgaaggcaatgagcccttcaaaaggctgctaactcaaggcatggttcttaatgatggcgccaagatgtcaaaatctttaggcaacacagtcgatccagaggagatgattcagaattatggcgcagacactgtccgtttattcatgatgtttacgtctccacccgaacaatctttagagtggtcagatacagcaattaatggttcatataggtttttaaagaagttatggaagcttataaagactcatcaagactccataaaagatgtttctgaaatttctacgaatgatggatttaatgaagatcaaaacaagctgagaagaaaaacgcatcaaacgatctcaaaagtcactgacgatattggaaggaggtatacttttaataccgcaattgcagcagtcatggagctggtcaatgaagtgtcagctttcaatgtcaatgacgaattggatcgccaagtaatcaaggaggcaattgaaagcatactgttattgctctcaccgattgtgcctcatatttgtcatcagctttggttagatattaatcatgatcaaccaattatagatgctgagtggccaaaatttgactccagtcttttgaaaagtgaaacctcgctgattgtgatacaagtaaatggtaaattgagatccaagctggaagttgatgcttcaatcagtgaggaagaattaaaatcaatggcgttgtctgatgaaaaggttatgggttttattgagggaaatgaaatcaagaaaattatcgtcatacctgaaaagttggttaacatcgtagtttag

SEQ ID NO: 304736 - DNA, 1262 bp, Unknown
  Bacterial polypeptide expressing nucleotide sequence isolated from the Sargasso Sea
gggatgtccgatacctattgcttacgataaaaatggtaacgtaatccaagttccaaaaaaagatttgccagttaagttgcctgaaaatattgatataagtagaaaaggaaatccacttgaccaagaagatgattggaaaaaggtcaaaattaataaccaagattgcattagagaaacagataccttggacacttttgtggactcatcttggtattttttaagattttgttccccttcaaataaagattatggttatgataaaaaagaagtagattactggatgccagtagatcaatatattggtggagttgaacatgcgatactacatttgctttactcgagattttttatgcaagctttaggttttaaaaataaagaatttaaagacaaagaaccgtttaagggtttatttactcaaggtatggtttgccatgaaacttataaagataaggatgggaattggttaagtccagatcaggtttttactgaagacgggaaaaactattttagaaaggatgataaagcttcaaaaataattgtaggttcaaatgaatctatgtctaagtcaaaaaagaatacaatagaccctgaggatataataaataactttggagcagactctgtgagattgtttattttatctgacagcccgcctgaaaaagatgtacaatggtctgatcaaggaatggttgcgtcgtataaattcattcaaaaattttggatgttgcatcaaaaaataaaagagaaaatagaaaataaaactataacaaaagagaaatccaatgacaaaaatttatccaaatttactaacctcctaattagtaaaataacagctaatcttgataagtttaattataatgtaattatagcaaacttatacgagacatataactttttagttagagaaattgaaaaagaaatcgacccaaaagatttattgaaaaattatgaaaaaattttaaaagtaattaatcctatattaccacacttatcttcagagtgtctcgaagatattaataataaatttaatctaaattggcctaaaattgaagataaatatttaattgaagataacattaatatagttatacaaattaatggaaaaactcgatctatacttaaactgaaaaaagacattaccgaggaagaattaattgaggaaattaaaaaagatataaaattaaaaaaatacattgaaggaaaattaatatcaaagacaatttatattaaaaacaaattaataaacttaattatcaaatgaa

SEQ ID NO: 304737 - DNA, 838 bp, Unknown
  Bacterial polypeptide expressing nucleotide sequence isolated from the Sargasso Sea
atggatagatataattttaaattagtagaaaaaaagtggcaagactattgggataaaaataaatcttttatttcaaaaatagataaatcaaaaaaaaaattttattgtttggaaatgtttccgtatccgtctggaaaaatacatatgggacatgtgagaaattatacgattggagatgttctttctcgatataaatcaatgctaggatttaatgttttacacccaatgggatgggattcttttggattgccagctgaaaatgctgctaaacaaaataatttagatccaaaaatttggactgaaaaaaatatatcagttatgaaaactcagttgaaaaaacttggtttgtcaattgattgggatagagaaatttcgacatgttcaaaagaatattataagcatcaacaaaaattttttttagatttatatgataaaggtttggtttatagaaaagaaagctatgtaaattgggatccagttgaaaaaagtgttttagcaaacgaacaggtaattgatggaaaaggatggagatcaggagtttcagtagaaagaaaaaaattaaatcaatggttttttaatatttcaaaattttctgaagatttattgagtggtttagataatttagattcatggccaaataaagttaaaaccatgcaaaaaaattggattggaaaatcttttggctgtgaaattaattttaatttaaaaaaaaatgatcaagtaaaatcaattaaatgtttcacaactagaccagatactttatttggtatgtcttttttggcactatcaattgatcatcccatttcgaaattttatcaggacagagaggaactttaaa

SEQ ID NO: 304738 - DNA, 1156 bp, Unknown
  Bacterial polypeptide expressing nucleotide sequence isolated from the Sargasso Sea
cagcagcagcattgggtcaacgtcccctgcccctcctgtggtgagccggccacgcgcgaaaccgacacgatggataccttcatgtgttcgtcctggtatttcctccgtttcgccgacccacacaacaccgaacaaccattcagccgcgaagccgtgaaccgctggctgcctgtggagcagtacgtcggtggcattgagcacgccattttgcatctgctgtattcccgctttttcaccaaggcgttgaaggatcggggcttgatcgatgtggctgaaccctttgatcgtctgctgacccagggaatggttcagggaacgacgtatcgcaatcccagcaccggcaaatacgtcgccccggcggaggtatccgacccggagatgccgaccgatccgaccagtggcgaacctttggaggtgttgttcgaaaagatgtcgaagtcgaagtacaacggcgtcgatccagcggcagtgatcgatcgctatggcgccgacaccgctcgcatgttcattttgttcaaggcgccgcccgaaaaggacctcgaatgggatgacgctgacgtggaaggccaattccgtttcctgcagcggatctggcggctggtggagtccgcagcctcccgcatcgacagcctcgagccagaggagcgtcccgatccattagctgacaccgacgccaaggttcgtcgtgccatccacgtagccatcgaggcggtgagtgaggaccttcaggacgagattcagttgaacaccgccatctcagagctgatgaaactcaccaatgcgatcacatccgttggtgttgctgagttgagcacgtcagtgctgcaggaggctctttcaacactgctccggcttctggctccctttgctccccatctcgccgaagagctctggcatcagctcggtgggtcgtccagcgtgcatcgagccggttggccagtcctggaccccagtgctctggttcaggattccgtggacctggtgattcagatcaaggggaaagttcgcggaaccattcaggttcccgccaccgccgacaaagaacagcttgaggccttggcactggccagtgaggtcgctgccaaatggctggagggacaccccccccgacgcgtgattgtggtgccggggaagttggtcaacctggtgccctgat

SEQ ID NO: 304739 - DNA, 1066 bp, Unknown
  Bacterial polypeptide expressing nucleotide sequence isolated from the Sargasso Sea
agatacattagacacatttgttgactcttcatggtattttttaagattttgttctgcaggtataaaagatgatggttttaactatgatgatattaactattggatgcctgttgatcaatatattggaggagttgaacacgctatattacatcttctttattcaagattttttatgagggcaataggttacaataatccaaaatttaaatttaaagagcccttcaaaggtttgtttactcaagggatggtatgtcatgaaacatacagagatgacaaaaacaaatggtatagtccagatgaagtggaaagtgataatggtagagatttctatttaaaatctaacaaaaaattaaaaattagtgttgggccatccgagtcaatgtctaaatcaaaaaagaatactattgatccagagaaaatgataaatcactacggcgcagatgctgttaggctatttattctttcagatagtcctccagaaaaagatattcaatggtccgaccagggtatgatttcagcttacaaattcattcaaaaattgtttacacttaatgaaaaaattaaacaaatcgcagatttgaaagagactagttcgtccgaagaaatttctagatttatcaatcaatatatttacaaaattgaaaaaaatttggctaatttccattacaatgtaattattgcaaatatttatgaggcatacagtttcctcgcaaaaattgtaaaagaggaaaagaattattcaaatcttgtggaagattattcaaaattcttaatatctatttctccggttatccctcatttttctcatgaatgtctaagtcaaatgaataaacataaggatatttggccagaaattcaggagaaatttctcgttgaagaaaatgtaaatatagttgtacaatttaacggcaagaaaagaggggtttttgagacaaaaaaggatacatcagaaaaagagttggttgaacaaattatgaaaagtaaagtttttgacaaaaattttaatgacaaaaaaataaaaaaacaattttatgtcaacaatagattaatcaattttatagtttag

SEQ ID NO: 304740 - DNA, 1494 bp, Unknown
  Bacterial polypeptide expressing nucleotide sequence isolated from the Sargasso Sea
gcaaaaatataattcttcaaataaaaacggtagtaaaacctgataatgagtctgatgattatcaagttcagaaggaagcattttcaggagcaggagttataattaattctaaatttttaaatggtctatcagcaccacaaaattcaattgatgaaacaattaaaattttagaggagagaaaattaggaaagaaaaaaactaattatagattaaaggactggggtatatcaagacaaagatattggggttgtccaattccaatagcttatgatgcaaataataatgttatcaaaataccagaaaaaaatttacctgttacacttccagagtctattgaacttaatactaatggtaatccattagactcccaaacagaatggaaggaagttgtgattgatggaaaaaaatgtaaaagagaaacagatactttagatacttttgtagactcatcttggtattatttaagattctgttcagcaaaaaatacaaataaagcttttgatattgaagatatagattattggatgccagtggatcaatacattggtggtgtagagcatgcaattttacatttgctttattcgcgttttttcatgagagcaataagtcttaataataaagaaacgagttttaaagaaccgtttgaaggattatttacccaaggtatggtttgtcatcaaacatttaaagacaataacaataattgggtttatcctgaagatgtttttagcgaagatggaagaaattattatcaaaataaagatccatcaaaaaaagttatagttggtccatctgaatccatgtcaaaatctaaaaaaaatactgttgatccagaaaaaataataaaactttatggagcagactcggtcaggttatttatattgtccgacagtccgccagaaaaagatattcaatggtcagacagtggaatctcagcatcattcaaatttttacaaaaattatgggcacttaatgaaaaaatagtttctaataaaaaaaaattttcagaatttgataaagctttagaaaaatttacaaatcaaattttaaaaaaaattactaatgatttggacagatttggttttaatgtagtaatagcttctatttacaaaatttacactttttataataagcaaacaaacaagtcagactggggcagtaacttttttgaaaattacgtaaaaattctaaagattattaatcctataatccctcatttttctaatgaatgtcttgagagattaaatcaaccagttaaaaatcttcaatggccctctgcaaatgaaaaatatttagatgaagaaatagtaaatgttgtaacccaaataaatggtaaaaaaaggaaggtttttcaaattgataaatcaatagataaagaatctttaattgaaaagattaaaaatgatgatcaaataaagaaatatatcgataataaaaaaataataaagacaatatatatagaaaataaactaataaactttattataagataat

SEQ ID NO: 304741 - DNA, 1011 bp, Unknown
  Bacterial polypeptide expressing nucleotide sequence isolated from the Sargasso Sea
attacggattttctaaagaagatattgattactggatgcctgttgatcaatatattggtggagtagaacacgcaattctgcatcttctttattcacgtttttttatgaaagctatcggatataaaaacaaagattttaattttaaagaaccatttaaaggattatttacgcaaggtatggtgtgtcatgaaacctataaagataaaaatggaaaatggcttagtcctgatgaaatagagttaataggaaatcaatatcaaaaaaaaggcgatccaaaaaataagataaaagttggcccatcagagtcaatgtctaaatcgaaaaaaaatgtaatcgatccagaatatataatgaataactatggtgcagatgctgtaagattatttattctatctgatagcccaccagagaaagatgtccaatggtctgatcggggaatggttgcttcttacaagtttttgcaaaaattatggatgcttcataataaaattaaaattaaaatagaaaataatctagatattttaaatgatgataatgaaatagaaaaattcacaaatcagatgattaataaaataactaataatcttgaaaattttagttataatgtaatgattgcaaatatttatgaaacttacaattttttaaacaagcaaattgcaaagaaaattaatagtaagagtttaaaagaaaattatatcaagatattaattctattaactccagcgataccacactttacttctgaatgcatagaggatctaaatgttttaggtaacttagaatggcctgaaacgaattccaaatttttgaatgaagataaaattgattatgttgtacagataaatggaaaaaaaaggctaattttaaacgaaaatagagatatagataaagaaagtctattagataagataaaaactaataaaatgtctgaaaaatatttaaaagataaaaccattaataaagtaatattcataaagaacagattgatcaacttgctattaaatgaataaa

SEQ ID NO: 304742 - DNA, 1253 bp, Unknown
  Bacterial polypeptide expressing nucleotide sequence isolated from the Sargasso Sea
gaaacctaaagattggacagaagaaaacattaagataatgaaagctcagttaaaaatgcttgggttgtctatcgattgggatctagaaatatcaacctgtaacgaagattattataagcaccagcaagaattgtttattgatttctataatcaaggattagtttctcgtaaagaaacttatgttaattgggaccctgtcgagaaaaccgttttagcaaatgaacaagttataaatggaaaaggttggagatcaaatgcggttgtagagagaaaaaaactctcacaatggttcttcaatattactaaattctctaacgaacttttaaaagatttagaaaaactgtccggttggccggtaaaagtgaaattaatgcaaaaaaattggattggaaaatcaattggttgtgaattaaattttaaagttattggccaaaacaaaagtttatctatttttacaacaagacctgacactatttttggagcaagttttattgctatttcagttgatcacgaaatttctaaaaattttcataaaaatcaagattttgaaaaatttaaagataagtgctcaaaaattggaacaacagaagaggctttagcaaatgctgaaaagttaggatttaatactaaactttttgctgagcatcctttttcaaaaggtaaaaaaataccaatatacgttgcaaattttgttttaatggattatggaaatggagccatttttggctgtcctgctcacgatcaaagagattttgattttgctaaaaaatatcatcttccaattataagagttgtatcggataaaaataatcctgatggcggagaaaaaatgcaagaggcatatatcggtaatggatcaatggttaattcagaatttttaaacggtttacccgtagaagaagcaaaaaagaaaattatcagtaagattgaagaaaaaaaaataggaaaaaaacaaactttattcagattaaaagactggggtatttctagacaaagatattggggatgccctatacctatgatttacttagaagatggttctgtagttccggtagataaaagtgaattgccaataaaactgccatacgatgctgatcttagatcttcaggtaatcctttagataatcatccaaattggaagaaaacaactcataaaaagactggaaaaccagcaataagagaaacagacactttagatacttttgtagactcttcttggtatttcttgagattttgttcaccccaagaataaa

SEQ ID NO: 304743 - DNA, 796 bp, Unknown
  Bacterial polypeptide expressing nucleotide sequence isolated from the Sargasso Sea
tggacttcttgagggagatgagccttttaaaagactacttacacaaggtatggtattaaaagacggggctaaaatgtcgaaatctaaaggcaacacagttgatccacaatcatatattgaaaagtatggtgctgacacagtaagactatatatgatgtttacttctccacctgaacagagtcttgaatggagtgaatcatctgttgaaggggcatcaagatttttaaataagatttggaaactggttaataaaagaaaaaatctaaaatttgaaagagatttaaaatttacaaaacaagagcttgatttaagacgaaaatcacactcaactctcaaaaaagttgaaaatgattatgagtcgaggttttcatttaacactgcgattgcctcaataatggagttacttaatttcattccagaagaatttaaaactgaaggtgcgacagattcacaaaaattttgcttgaatgaggccatactattcactttaaaaatgttattcccaattgcaccgcatatatcggagtatctttggaataaatttattagtgatgaatcatgtattgaaacatcttggccagagtttgatgatgaaatagttgaatccgatgaatttgaattagtaatccaagttaacggaaaagtaagaggaaaaatgcacgccaatataaatatgacggagaatgaaatagaagatctatctctaaatataaaaaatgtaaaaaatattattggtgaaaataaaataaagaaagttatttttgttaaaaataaattaattaattttgtaacttaa

SEQ ID NO: 304744 - DNA, 1045 bp, Unknown
  Bacterial polypeptide expressing nucleotide sequence isolated from the Sargasso Sea
aagaattcgccacctattccattaagtcaaaatgaagattttataaatttggataatagtatctttagagaaagtgatacattcgatacctttatggattcatcttggtattacgctagatttacatcttcaaacaataataacgaaatttttgatgaaaatactaaatattggctaccagtagatttatatattggtggtatagagcacgctatattgcatctgctatattcaagattttttcataaagctcttcgagacattggactagttgaaggtgatgaaccttttaaaaggttgcttactcaaggtatggttcttaaagatggtgcaaagatgtctaaatcgaaaggtaatactgttgatcctcaatcatacattgagaaatatggagcagataccgttaggctttatatgatgtttacatcaccacctgagcaaagtttagaatggagcgaatcatctgttgaaggtgcttcaagatttttaaagagaatttggagtcttattgaaggaaaacaatatactaaactggacatgaaatttgaattctcgaaagaagaaatagagttaagaagaaagtgtcactcaacattaaaaaaagtagagaatgattatgaatcaagattttcttttaatactgcaattgcagcaataatggagttactaaattttattccagatgaattcaaaaaagataatgctacagatgctcaaaagttttgtcttaatgaagcaattcaattttctctaaaaatgctatttccaatttctccccatatttgtgaatatttatggaacagttttgtaaatgatggatcatgtatcgagtcatcttggccaaagtacaatgaagctattattgaatcagatgaattcgagttgataatacaagttaatggtaaagttcgtggaaagttaaatattagtaaaaatttagatgaagaaactcttaaaaatctatcattagaagtcaaaaatgttaaaaataacatagcagatagtgagataaaaaagctatctttgttaaagataagcttataaa

SEQ ID NO: 304745 - DNA, 2182 bp, Unknown
  Bacterial polypeptide expressing nucleotide sequence isolated from the Sargasso Sea
tgggacgcttttggtcttcgggcagaaaatgctgcaatagaaaataaagtaagtcctaaagaatggaccaatcaaaatattcaaaatatgaaaacacaacttaaatctcttggtttaagttatgactggtcaaaagagttgagaacttgtgatgaaagttattacaaatgggagcaacttattttcaagaagttctttgatgctggactagtttatagaaaaaaatcaatggttaattgggatcctgttgatgaaacagtgcttgcaaatgaacaagtgatcgatggaaaaggttggaggtccggagcacaagttgaacttaaagaaatagatcaatggttcataaaaattacaaactacgccgatgaattgcttgagtctcttgatgacttagattggccggagaatgtcaaattaatgcagaaaaattggataggtaaatcaaatggggcagaaataaagtatcaaataataggcacaaaagattttttaacaacgttttcaactaggccagatacaatttttggtgtctcttttttggcactatctccaaatcatcctatgtcaatagaaatttcaaaagagaatgaaaaaataaaaaaatttttagaagtatgcaaagaatctaaaactgctgaggcagatatggcaaaagcagataaactaggaatagatactggtattcgagcaatgcatccaattacaaaagaagagatacctatctggattggtaatttcgtactcttggattatggaacgggtgttgtaatgggcgtacctggccatgattcaagagattttgaatttgcttctaaatataatttagatataaaacaagtcattcaatctgaccgaacagaagacttaccaatacttgataaaggtaaattggttaattcagataaatttaatggtaaaacatctgaagaagcctcaaaagaaataattcaggagcttgttgataatggttatggcgaggaattagttcaatttagattaagagattggggagtaagcagacagagatactggggatgtccaattccagttatttataaaaatggtgagcctgaaatcattgatgaaaatgatatgccagttatcttacctgaacttgatgatggagcagctccggtcccactaagtcagattaaagattttgttgaacttgggaatggcataacaagagaaactgatacttttgacacatttatggattcttcctggtatcacgctagatttacttctgctggaaactcaaaacaaatatttgatgaaaatacaaaatattggttgcctgttgatctatacattggaggtatagaacatgcaattttgcacctcttatattctagattctttcacaaggcactaagagacataggaatggttgaaggagatgaaccattcaagagactcttgactcaaggtatggtacttaaagatggtgctaagatgtcaaaatcaaaaggaaacacagttgatcctcaatcatttattgataagtatggtgctgatacagtaagactgtacatgatgtttacttctccacctgatcaaagtcttgaatggaatgaatcatcagtagagggagcatcaagatttttaaataaagtttggaagctcattgagggtaaaaaatatattgagttaaagattaatgatcttaaatttagtaaagatgatctagcattaagaagaaagtctcatgctactcttaaaaaagtgcaaaatgactatgaaaaaagatttggatttaatacagcaattgctgcaattatggagcttttaaattttatacctgaaaaatttaaagttgatgagctcaatgattcaagtaaattttgtctaaatgaggcaatagtatttattctgaaaatgctttcacccattgcaccacatatttgttatcaactctggtctgaatatgaatatgatgcgagaaatattgagtcttggtggcctgagattgatgaatctcttctttcaatagaagaatttgaactaatcattcaagttaatggaaaagttagaggaaagataaatatcgaagtaaataaatcaaaaactgaaattgaggagcttgctaaaaacgttgataacgtaaaatcacatataggttctgtaaatgtgaaaaaaacaatatatgtagaaaataaattaataaattttgttgtatgaa

SEQ ID NO: 304746 - DNA, 1690 bp, Unknown
  Bacterial polypeptide expressing nucleotide sequence isolated from the Sargasso Sea
catcctttatgcacaaaattttcaaataatgacaaatttatcaaattcaaagaagaatgttctaaaacaggcaccaccgaagaggcgctagcaaatgctgacaaaattggttttgaaacaaaattattttgtgaccatccttttaaaaaaaaccataaactgcccgtatttgtagcaaattttatattaatggattatggaactggcgcaatatttggttgtccagcgcacgatcaaagagactttgattttgcaaaaaaatataatttgaaaatcactgaggtagttgctgaaaataagaaacaacctaaaaattttaataatcttaaagaagcatatactggagatggaattttagtaaattcagatttcttaaataatatgaacgtagaatctgccaaagtaaaaataattcaaaaaatagaaaatctaaaaatcggaagtaagaaagtttcctacagattaagagattgggggatatctagacaaagatattggggttgtccaattccgatgatacacctagaaaatggcactataaagccggtcgaaaaaaatgaattaccaattaaactcccaaaagacattgacttaaagacaaatggtaatccattagaccatcataaatcctggaaatttactaaagataagatatctggaaaacctgccataagagaaactgataccttggatacatttgttgactcttcttggtatttcttgagattttgttccccaaaaaaagaggagtcggctttcgacttagataaagtaaattattggatgccagttgatcaatatattggtggagtagaacatgcaatattgcacttattgtattcgagattttttatgagagctctaaaaaaaaatgacacgaaaataaaatataccgaaccttttaagggtctatttacacaaggtatggtttgtcatgaaacttataaagactctaatggcaaatggcttagtccagatgaaattgaaaaagatgatgatggtaattttattaaaaaagatgatcaatcaaaagttatagttggatcttcagagtcgatgtcaaaatcaaaaaaaaatattatagatccggaaagcatgataaaatcttacggtgccgacgctgtaagatggtttattttgtcagatagtcccccagaaaaagatgttcaatggtcaaaccaaggtgtaaatgctgcttataaatttcttcaaaaaatttataatttaaatcttttaattattgatagaaaagaatctcaagacgatttggacgaagattttgagcttaagattaattcttatatttttaggataacaaatctaatcgaaaattttaatttaaatgttgttattgcgtgtgtatacgaactttataatctttttaatgaatatttaaataaaaaaataagtaataaatgtatgaaaaataatataattaaagtcatgaaaattcttattccatttacaccgcaccttgctcatgaatgccttgaattacttggaactaataatgtttcaaaatggcctgctgtggacaaaaaattgatagataaagaaaaaattaagatagcagtacaattgaatggtagaacaaaaacaattctggaagtagaaaaaaacattaaccaaaatgatgtagttgaaatttgtaaaaagaaatgtgaaaatgagcagaaatttagcaaataat

SEQ ID NO: 304747 - DNA, 1975 bp, Unknown
  Bacterial polypeptide expressing nucleotide sequence isolated from the Sargasso Sea
ggggcgacagtagaaagaaaaaaactaagtcaatggttttttaatatttctaaattttcacaagatttattagacggattagacacactagaccaatggccaaataaagttaaaacaatgcagaaaaactggattggaaaatcatttggttgtgaaattgactttaaaactgaagggaatttaccagttaaaaatataaaatgttttaccacaagacccgacactctttttggtttttcctttttagctttatctatagatcatgaaatttctaatttttataaggatgataagaattttttaaaattcaaagaagagtgctcaaaaactggaactacagaagaagctattgctgttggagaaaaaattggatttaaaaccgaccttgtagcgcttaaccctttgaacccggaacaaaaagttcctgtatactttgctaattttgttcttatggattatggttttggagctgtttttggatgtccagcacatgaccaaagagattttgattttgcaaaaaaatataatcttgaaatcaaaactgtagttagaccacatgatcaagaagatacttaccaagttaataaagaagcctacccaggtccaggtgtaattataaactcagaatttttgaatggactaagcgccccagacaattcagtaatggagacaattactattttagaaaaaaaagatataggcaaaaagaaaataaattttagaataaaagactggggtgtatctagacaaagatactggggttgtccaattccagtaatgtatgatgaagagggtaaagcacatcctgtacctaaggaaactcttcctgtaaaacttccagaaaaaattgatttaaatgtaaaaggcaatcctctagatcatcaaaatagttggagagagattaaaatagatggcaaaaaatttataagagaaactgatacactggacacatttgtttgctcttcttggtattacttaaggttttgttcaccaaataataaggattatggatttaataaagaggaaattgattactggatgccagttgatcaatatatcggaggtgttgaacatgcaattttgcacctactttattcaagattttttatgcaagctttatcttatcaaaatcctagttttaacatcgttgaaccatttgaggggctgttcacacaaggaatggtttgtcatgaaacttacaaggataaaaataataattggataagcccagatgagattgaagttagaaatggaaaaaaagttctaaaaaaaaatcaaactgaagaaattaaaataggtccatcagagtcaatgtcaaaatctaaaaagaatacaattgatccagagaaaataattgaaatgtacggagcagactcagcaagattatttattttatcagatagtcccccagaaaaagatgttcaatggtcagatgaaggaattgcctcttcctacaaatttattcaaaaactatggtctttgaacgaaaaagttattcacgagatagagcaaaatcatgaagaagatgaaggaaaggacttgatcaaatttacaaataaatatttaaaaaaaatgactgatgctttaaatgcatttagttataatattttaatagcaaacttgcacgaaatgcaaaattttttcaataaagaattaattaaaaaatacacaaaaaaaacattaactgaaaattttagtaaaatattagtaacaatgattccaataattccacatcttgcaaatgagtgcttaaaaagaataaactacaatgttattgagtggccagaatatgatgaaacattattagttgaagatattattccttatgtaattcaagttaatggaaaaaaaagagcaattattgaagcaaaacgtgatattttggatgaagaattatttgaaattgtgcaacaaaataaaaatttaaaaaaatatttttatgaaaaagaaattaaaaaaaaaatatttgtaccaa

SEQ ID NO: 304748 - DNA, 289 bp, Unknown
  Bacterial polypeptide expressing nucleotide sequence isolated from the Sargasso Sea
gatgtcaaaagaaactatacaacttccaaaaaccgctttttcaatgaaagcgaatctgcccacgaaagagccaaaaattttggatgaatgggaaaaagaaaaaatatttgaaaaattaagaaagagctccaaaggaaaaaaaaaatttgttctacatgacgggccaccttacgcaaatggccacattcatatgggaactgcgttaaataaaattttaaaagatataatcacaagatatcatcagatggatggaaaggactctatatatgtaccaggttgggattgtcat

SEQ ID NO: 304749 - DNA, 521 bp, Unknown
  Bacterial polypeptide expressing nucleotide sequence isolated from the Sargasso Sea
aatgagtaaaaaccaaattaatttacctaaaacagctttttcaatgaaagctaatttaccaattagagagccagaaattctaaaactttggaaaaaaattgatctttataaagagttaaggaattcaagaaaaggagaggaaaaatttgttcttcacgatggtcccccatatgcgaatggaaatatacatatgggtactgcgttaaataaaatattaaaagatattatcgtaaagtttcatcaaatggatggtaaagactctgtttatgttccaggttgggattgtcatggtttacctatcgaatggaaaatcgaggaacaatacaaaaaaaataaaaaaaataagaacgatgttccgattgtagaatttagaaaagaatgccgaacttttgctgaaaaatggatcgaggttcacaaagaccaatttaaaagattaggtgttgttggtgattgggaaaactattattcaacaatgagttatgatgcggaggcacaaattgtaagagaacttggaaaatttt

SEQ ID NO: 304750 - DNA, 390 bp, Unknown
  Bacterial polypeptide expressing nucleotide sequence isolated from the Sargasso Sea
aatgagcaagcaacacataaatctacctaaaacagctttttcgatgaaagctaatttacccacaaaagaacctgagtttattaagttttgggataaaataaatctataccaaaaattaagagacaagactaaaggatatgaaaaatttgtccttcatgatggtcctccatatgcaaatggaaatattcatatgggaactgctttgaataaaattttaaaagatataattacaaaatttcatcaaatggatggaaaagactcaatttacgtacctggttgggattgtcatggactacctatcgaatggaaaattgaggaacaatataaaaaaaataaaaaaaataaaaatgatgtgcctattgtggagtttagaaaagaatgtagggattt

SEQ ID NO: 304751 - DNA, 697 bp, Unknown
  Bacterial polypeptide expressing nucleotide sequence isolated from the Sargasso Sea
aatggatataaatctacctaaaactaaattttctatgaaggctaatcttccaaccaaagaaccttcaataatagaattttggaagaatatggatttatacaatcaaataagaaaaattaacaaaggtaaagaaaagtttgtgcttcatgatggaccgccatatgcaaatggaaatattcatatgggaacagcattaaataaaatccttaaagatattattgttaagtttcaccagatgagtggaagtgatgctgtatatgttccgggatgggattgtcatggactgccaattgaatggaaaattgaagaacaatataaaaaaaataaaaaaaataaaaatgacgtacctattattgaatttagaaaagaatgtagggattttgctgaaaaatggattaatgttcataaagatcaatttcaaaggctaggtgtaattggagactgggaaaattattactcgacaatgagttttcctgcggaagcacaaatagtcagagaacttggaaaatttcttaaacaggggagtttatacaaaggttataagccagtattatggtctacagttgaaaagacagctttagcagatgcagaagttgagtatcaagatcataaatcagatactatatatacatctttcaaagtaattaagtcgaaaaatgaaaaattaatatcctctgatgtaattatctggactaca

SEQ ID NO: 304752 - DNA, 296 bp, Unknown
  Bacterial polypeptide expressing nucleotide sequence isolated from the Sargasso Sea
aatgagcaaagcaaatttaaatttaccaaaaacaacattttcgatgaaggccaacttaccaaacaaagaaccgggtattcttgattattgggatgaaatagacctctataaaaaacttagattcctaagtgaaaaaaaagaaaaatttgttcttcatgatgggccaccatatgccaatggagatattcatatgggaacggcacttaataaaattcttaaggatatcattgttaaatttcatcaaatgagcggaaaagactcggtttatgtacccggctgggattgtcatggattac

SEQ ID NO: 304753 - DNA, 969 bp, Unknown
  Bacterial polypeptide expressing nucleotide sequence isolated from the Sargasso Sea
taggggctggttccaatcatcattattaactagcatcgcaatgaacggtagggccccatataaatcagtcttaactcatggttttgttgttgatgaggatggaagaaaacaatctaaatcattaggcaatgtcgtttcacctcaaaaagtttgggataatttaggagctgatatcttaaggctatgggttgcatctactgattttagaagtgaaatggttgcctcagatgaaattttaaaaagaacttctgatcaatatagacgaataagaaatacatttagatttattttaggtaatttaaatgatttctcagaagagaataaggttgaatataaagctcaagttgagcttgataaatggattattgatgaggcaaagaatttagagcaaaaagttataaatttatatgaagcatattcttatcacaaagccattcaaagcattcataatttttgtgtaaatgaattagggggtatatatcttgatattgttaaagatagactttatacctgtaaaaatgattctttggccagaaggtcttgtcaaacaagtttagacgttttattaaatatattaattagattaatagccccagttctttcttatactgctgaagaaatatggcaattaactccaagtttgacaaaacaggaagattcagtatttttatcaaattttaatcttgaaaagaaaaacccaaattcagtaatctcaaaccatgaatggaaaaggatttttgagattaaagactctgtaaatcagacaatagaacaattaagaaacgagaataagttaaaagggtcattagacgcaattgtaaatattgaagttaattctgaagattttagaatattagataaattaggagatgagctgcattttctttttattgcatctgaagcttcaatatcggaaggtaaagatcttaaagtcaatataacaatttctgagaatgataaatgtgtcag

SEQ ID NO: 304754 - DNA, 976 bp, Unknown
  Bacterial polypeptide expressing nucleotide sequence isolated from the Sargasso Sea
agaaaacaatcaaaatcacttggaaatgttgtctctccgcagaaagtctgggataccctaggagcagatatcttaaggctttgggtagcctcaacagattttagaagtgaaatggtagcatctgacgaaatattgaagagaacttcagatcaatacagacgaataaggaatacttttagatttattttaggaaatttaagcgattttagtgataaagataaaattatgtttgaagatcaagttgaacttgataaatggattataaatgagataaaaactcttcaaaaagaagtcataagcttatatgaatctttttcttaccataaagcaattcaaaaaatacataatttttgtgttaacgagttgggaggagtatatctggatataattaaagataggctttatacatgcaaaaatgattctttggcaagaaaatcttgtcaaacaagccttgattgtattttgaatgttttagtaaggctcatttctccaatactttcctatactgcagaagaaatttggcaaacaagtaacagattgaatagtcagcaagactctgtttttctctccaactttgaaaattttgaagaggattctaaatctaatattaatcaatctgaatggaaaagaatttttgagattaaagatgctgtcaatcaaacaatagaggaaatgaggaatgaaaatacaattaaaggatcacttgattcaattgtagatattaaagctactgcagatgacatgagtattcttaaaaagcttggagaagaacttcactttttatttatctcttcagaggcaaacctaagtaaaggaaaaagctttaaaattaaagtcaatccttcaaataataccaaatgtgtaagatgttggcatagatgttcatcagtgggatcaaacaaagaacatcccgagttatgtaatagatgcattgataatatagaaaatgatggcgagcaaagaaaatctgtatagc

SEQ ID NO: 304755 - DNA, 227 bp, Unknown
  Bacterial polypeptide expressing nucleotide sequence isolated from the Sargasso Sea
aatgaaatctcaaaatagcaaagaacaaaaatctgacttttcttataaagaaactttaaatttattaaaaactgacttctcaatgcgcgccaattcagttgtaagagaacctgagatacagaaattctgggctaataatgatattgatttccaattaggttcaaacaattcaggagaaatatttacattacatgatggccctccttatgcaaatggagctcttcata

SEQ ID NO: 304756 - DNA, 229 bp, Unknown
  Bacterial polypeptide expressing nucleotide sequence isolated from the Sargasso Sea
aatggaatataaagatacaatttttcttcccaaaacatcttttgaaatgagagctaatcttcctgcaaaagaacctacaataatagaggagtgggataaagaaaatatttttaaaaagctaagagataaatctaaaggtagagaaaaatttgttcttcatgatggtccaccatatgcaaatggacatattcatatgggtacagctttaaataaaattctaaaagatgta

SEQ ID NO: 304757 - DNA, 865 bp, Unknown
  Bacterial polypeptide expressing nucleotide sequence isolated from the Sargasso Sea
ctgactggtgtgtatctagacaaagagtttgggggcgttccattaccaatctttatcaataagaaaactaaagaacctttaagagataagagtgtaatagatagaattgcagaaatttttgaaaaagagggctctgactgttggtttactgatgatccaaaaagatttttgggtaaaggttatgacactaatgattttatacaattaaaagacatagttgaagtgtggttcgatagtggttctactcatagctttgtacttgagtcaagagaagacctgagttggcctgccgatatgtatctagaggggtccgatcaacatcgtggctggtttcactcatcacttcttgagtcatgtggtacaagaggtagagcaccctttaaaagtattttatctcatggttttgtagttgatggcaaaggcatgaaaatgtcaaaatcatctggcaatgtaatttcacctgatgaaattttaaaaaactacggagcagacatcctcagagtatgggtaacagcttcagactatgctgaagacttgagaatagataaatcgatactaagccaacatgcagagtcatatagaaaaatacggaatacatttagatttatattaggtaatattcaagataagtttcaaaaggtaaaatttgatactgcaaaacttgaacaattaccagaactagaaaaatatattctacataaaatttatgttttgaatttaagttataaagaaaatttgaaaaattataattttcataaattatataaagaattattaaatttttgtaccttggatttgtcttcattttattttgatataagaaaagatgtactttattgcgatactaaagatcaaaaaaaagaaa

SEQ ID NO: 304758 - DNA, 471 bp, Unknown
  Bacterial polypeptide expressing nucleotide sequence isolated from the Sargasso Sea
tatgagtaaggaacatataaatcttccaaaaacttctttttcaatgaaggctaacctccctacaaaagagcctagtttagttgattattgggataagattaatttatacaaaaaattgagagaagaaaataaaggaaataaaaaatttgtccttcatgatggtccaccatatgcaaatggagacattcatatgggaactgctttaaataaaatactgaaagacataattataaaatttcatcaaatgaatggaaaagactctgtttatgtgcctggctgggattgtcatggtttgccaattgaatggaaaattgaggaacaatataaaaaaaacaaaaaaaataaaaatgaagttcctataaacgaattcagaaaagagtgtagagattttgctagtaaatggattggagtgcataaaaaacaattcaagagacttggagttttaggggactgggaaaattattattctac

SEQ ID NO: 304759 - DNA, 904 bp, Unknown
  Bacterial polypeptide expressing nucleotide sequence isolated from the Sargasso Sea
gatattgtagaggtatggtttgatagtggatctacacatagttttgttctagaaaaaagaaaagatttaaaatggcctgcagacatgtatctagaaggatctgatcaacacagaggttggtttcactcttctttgctagagtcttgcggaacaagaggaaaagctcccttcgaaagtattttatcacatggatttgttgttgatggaaaaggaatgaaaatgtcaaaatccatgggcaatgtaattttacctgaagatattttaaaaaattatggcgcagatattcttagagcttgggttgcagcttcagattatgccgaagatttgagaatagataaaagtattttaactcaacatgctgaatcttacagaaaaatcagaaatacctttagatttatgcttggtaatttaaaagataattttgaaaaacaaaactttgaaaaaattaaactaaatgaattcgaggaattagagcaatttattttgcataaattatttttaatagataaatctgttgatgaaaatttaaaaaattataattttcataaactttataaggaattattaaacttttgcacgcttgatctttcttctttttattttgatattagaaaagatgttctttactgcgatagtataaattcaaaaaaaagaaaaaattgtgtaattgttttaaacataattttagaaagtttattaaagtggtttgctccaattttagtttttactacagaggaaatttatagcttactaaataaaagtaatgagaaaagtatacatgaaaatcaatttgtaaaaattccatcacattgggaaaatgataagctaaatgaaaaatggacagatctatttaaaattaaacaagaagcaaatattgcaattgaagagaaaagagctaacaaag

SEQ ID NO: 304760 - DNA, 384 bp, Unknown
  Bacterial polypeptide expressing nucleotide sequence isolated from the Sargasso Sea
aacggcagcattcacatcggccacgcgctgaacaagatcctcaaggacatcatcacccgttccaagaccatggccggtttcgacgcgccgtacgtgccaggctgggactgccatggcctgccgatcgagcacaaggtcgagaccaccttcggcaagaaccagccggccgacctgacccgcgagcgctgccgtgcctatgccgccgagcaggtggaagagcagaaggccggtttcgtccgccttggcgtgctgggtgactgggacaacccctacctgaccatgaacttcgccaacgaggccggcgagatccgcgccctggccgagatggtcaagaacggtttcgtgttcaagggcctcaagccggtcaacttctgctcttccacc

SEQ ID NO: 304761 - DNA, 999 bp, Unknown
  Bacterial polypeptide expressing nucleotide sequence isolated from the Sargasso Sea
aaattgaagaaccaatataaaaatataaaaaaaaataagaatgatgtgccaatagttgaattagaaaaagaatgcagagattttgcaaataaatggatcgatgttcataaaaaacaatttcaaaggttaggtgtcatcggagattggaaagattattattcgactatgagtttcaaagctgaagctcaaattgttagggaattagcgaaatttttaaaagagggtagcttatacaaaggttataaacccgtcttatggtctactgttgaaaaaactgccctcgcagatgctgaggtagagtatatggatcatatttctgatactatttactcttcatttccaattaagaaaacttcaaacaaaagtctagagggttgcgaaattattatttggacgacaactccatggactataccagccaataaggcgctagcttataataaagatattagctaccaaataattaagattgaagatgacggtgatttcaaaaataaaaaaattgttatagctcatgatttaatagagaccgttttgaaggaatgtgagattaaaaaattcgagaaacttgacaagttatcaggcaaagaatttaaaaatataatttgtagccaccctttagaaaaagaaggttacactcacgatattccaatgttagaagcgaattttgttacaacagagcagggttccggaatagttcattgtgcaccaagtcatggacctgacgactttaacttatgtattaataatggaattcaggcagttgagacagtagataacgatggaaaatataccaagaatattctcaattatgagggaatacatgtttttaaagcaaatccaatcattattgaaagtttaaaaaaaaataacagattactttctaatggaaaattaaatcatacttatcctcactcttggagatcaaaggcgccattaattcacagagcaactcctcagtggtttatatctatggaaagtcacggactaagaaaaaaa

SEQ ID NO: 304762 - DNA, 679 bp, Unknown
  Bacterial polypeptide expressing nucleotide sequence isolated from the Sargasso Sea
aatgagcaaggaacatttaaatttacctaaaactgctttttcaatgaaagcaaatctaccaaataaagaaccagaatatttgaaattttgggataagattaatttatatgaaaaactaagatctcaaagtaaaggtaaagaaaaatttgtcttacacgatggacctccatatgcaaatggaaatattcatatgggtactgcattaaataaaattctaaaagatataataattaaatttcatcaaatggatggtaaagactcagtttatgtacctggatgggattgtcatggattaccaattgaatggaaaattgaggaacagtacaaaaaaaataaaaaaaataaaaatgatgtacctattattgagtttagaaaagaatgtagagattttgcaactaaatggattaatattcataaagatcaatttaaaagattaggagtaattggagattgggaaaactattattcaactatgagctttgatgcagaagctcaaattgtaagggaacttggaaaatttttaaaagagggtagtttgtacaagggttacaaacctgtcttatggtctacagttgaaaaaacagctttagcagatgcagaggtggaatataaagatcatgtatctgatacaatctatgtagcctttccagtaaaagaatctaatatccaagaactaatt

SEQ ID NO: 304763 - DNA, 934 bp, Unknown
  Bacterial polypeptide expressing nucleotide sequence isolated from the Sargasso Sea
ccagcatctatgtacctagaaggatctgaccaacatcgaggatggtttcactcttcattgcttgaatcatgcggaaccagaggtaaagcacctttcaagagcattcttacccatgggtttgttgttgatggcaaaggtttgaaaatgtcaaaatccacaggaaatataattgccccagaagatgtgcttaaaaaatatggagccgacatcctgcgtgcgtgggtagcggcatctgattatgctgaagatttaagactagattactcaattttggaacagcacgcggaatcatatagaaaaattagaaatacatttagatttttactgggcaatttgaaagatcaaaaagtggatgttaaattaaattctattgaaattgaaaagtggcctgaactcgaacgttatattcttcaccaaatatttacacttaataagaattttgaaaaatactttaaggaatataattttcacaagctatacaaagaactgctgaatttttgttcattagatttatcagcattttactttgatattagaaaagatgtgctttactgcgatgatataaaatctaaaaaaagaaaaatttgtattaatttattatcattaacactagacattttattgaaatggtttgctccaattctttcttttacgaccgaggaaatttttcaaattgttaattcgggaaaaaattcaagcatacatcttgaatattttcctaagattcccgcaaactgggaaaatagaaaactgcatgaaaaatgggaaaaattaaaagtaataagaaatgtagtaaatgcgggaattgaagttaaaagatctagcaaagatataggctctagcttggaggcggatatagagatttatcttgggaaagaatatttagaacttgttaaggacataaatctgtccgaaatattttattacatctaag

SEQ ID NO: 304764 - DNA, 427 bp, Unknown
  Bacterial polypeptide expressing nucleotide sequence isolated from the Sargasso Sea
atgcctgaaaacaatttacaacttcctaaaacagctttttctatgaaagcgaatctgccttctaaagaaccaaaaattttagaatcttgggacaagacaaaactttatgagaagttaagaaagaaatcagcaggaaaagaaaaatttatacttcatgatggtccaccctatgcaaacggtcatattcatatggggacagcattaaataaaattttaaaagacattgttacaaaatttcatcaaatgaataataaagactcaatttatgttccaggctgggactgtcacggactacccatagaatggaaaattgaggaggaatacaaaaaaaagaaaaagaataaagatgaagtcccaaccaaggactttcgaaaggaatgcagagagtttgcagaaaaatggattggtattcataaaaaggaattaa

SEQ ID NO: 304765 - DNA, 927 bp, Unknown
  Bacterial polypeptide expressing nucleotide sequence isolated from the Sargasso Sea
caaggctccgattgttggtttacagatgatgcaaaaatttttttaggtgatgactatgatgccaatgattatgaaaaacttaatgatattgttgaggtatggtttgatagcggctcgacacacagttttgttttagaaaaaagaaaagatttaaaatggcctgcagatatgtatttggagggatccgatcaacataggggttggtttcattcttctttactagagtcgtgcggaactagaggaaaagcaccatttaaaagtattctctcacatggtttcgttgtagatggcaaaggtatgaaaatgtctaaatctatgggtaacgttatctctccagaagatattttaaaaaattatggcgcagacatacttagagtatgggcttcagcatctgattatgcagaagatttaagaatagataaaaatattttaatacagcatgcagagtcttatagaaaaataagaaatacctttagatttatgctgggaaacttaaaagataattttgaaaaacaaaattttgagaaagttaaccttagcgaattagatgaattggaacaatttattttacataagttattttcaataaataaatcttttaatgaaaatttgaaaaattacaattttcataaactatataaagaacttttaaatttttgcacacttgacctttcttctttctattttgatatcagaaaagacgttctttactgcgatagcttgaactcaaaaaaaagaaaaaattgtgtaatcgttttaaatataattttagaaagtttattaaaatggtttgctccaattctagtttttaccactgaggaaatttttagcttattaaataaaaatagtgatgaaagtatacatgaaactcattttgtaaaaattccatcaagttgggaaaatgataagctaaatgaaaaatggtga

SEQ ID NO: 304766 - DNA, 544 bp, Unknown
  Bacterial polypeptide expressing nucleotide sequence isolated from the Sargasso Sea
atgagtaaagaaaatttaaatcttccaaaaactgcattttctatgaaggctaaccttcctcagaaagaaccagaccttgtagatttttgggacaaaattaatttatatcaaaatttaagagataaaagcagaggtaaagaaaaattcatattacacgatggtcccccttatgcaaatggtgacatacatatggggacagcattgaataaaatcttgaaagatataattacaaaatttcatcaaatgaataacaaagattccgtatatgttccagggtgggattgtcatggtcttccaatagagtggaaaattgaggaacaatataaaaaaaacaaaaaaaataaaaatgaagttcctgtagtagaattcagaaaagagtgtagagaatttgcaaataaatggattaaagtccataagggtcaatttaaaagattgggagtgattggtgattgggaaaattattattccacaatgagttttgatgcagaggcacagatagttagagaacttggaaaatttttaaaaggagggaagtctttataaa

SEQ ID NO: 304767 - DNA, 963 bp, Unknown
  Bacterial polypeptide expressing nucleotide sequence isolated from the Sargasso Sea
aaaactgataacgataaattaaaagagcactctattgttatttggacaactactccttggacaataccaggtaatagagctctggcagttcataacgacattgaatacaaatctttaattttaaaaataaatgatggaaacaaaaacgttattatagctagcgatttggttgagtcatttattaaagaaaataaaattgaagaatacaaagttaatttttctatcaaaggttatgaattaacaaatactttttgtaaacacactttatatgactctggatacaattttgaagttcctattcttcatggcgattttgtaactactgaacaaggtacgggtatcgttcatatttgtccagttcatgggatggatgattttattttgggtaaacaacataatttagaactacccatgacaataaatgaaagtggaatatattatgatcatattcctgtatttaatggccaacacatttttaaagttgatcaaaatgtttgtgatgaaataaataaaaacaataaccttatatcacaaggtattttaattcatagctatcctcattcttggagatctaaagcccccttggtatataaaaatacttcacaatggtttatctcaatggacacaaacgatttaagaacaaaagcacttaaagctattgacgaaactgattttttcccaaaacaaggacaaaaaagattaagaagtatgatacaggaccgtccggattggtgcgtgtcgagacaaagagtttggggggtacctttaccaatatttgtcaataaaaaaacaggtgaacctctgcgcgatcaaaatattattgaaaaaattgcaaagatttatgaattagagggaggagatgcctggtttaattccgaaccctcaagatttttatcacctgaatatgacccaaatgattttgaaacagtaaaagatgtcgttgaagtttggtttgatagtggt

SEQ ID NO: 304768 - DNA, 538 bp, Unknown
  Bacterial polypeptide expressing nucleotide sequence isolated from the Sargasso Sea
aatggaatataaagatacaatttttcttcccaaaacatcttttgaaatgagagctaaccttccctcaaaagaacctgcaataatagaggagtgggataaagaaaatatttttaaaaagctaagagataaatctaaaggtagagaaaaatttgttcttcatgatggcccaccatacgcaaatggacatattcatatggggacagctcttaataaaattttaaaagatgtcattgtgcgaactcaacaaatggctggaaaagactctatctatgttcctggatgggattgtcacggcttaccaattgaatggaaaatagaagaagaatatagaaaaaaaggaaagaacaaggatgatgttccaaccgttcaatttagaaatgagtgtagagagtttgcagaaaaatggatcgatatccaaaaaaaagagtttaggcgacttggcgttgaaggggattgggaaaatccttacctcacaatgtcaaatcaagcagaagcacaaattgttcgagagcttggaaaatttttacttgatgaaagt

SEQ ID NO: 304769 - DNA, 496 bp, Unknown
  Bacterial polypeptide expressing nucleotide sequence isolated from the Sargasso Sea
atgagtaaagaatatcgggatacgttaaatctccctcaaactaatttatccatgaaagctggtttgccaagaaaagagccagaaattcttgaattttggaactctataaacctctatcagaaaataagagaacaaaataatggcaaagagcagtttattctgcatgatgggcctccatacgcaaatggagatattcatttgggccatgcagttaataaaacacttaaggacatcacaattaaatttcaaagcctaattggaaaagatgctccatatgttccaggatgggattgccatggtttgcctattgagttaaatgttgaaaaaaagcatggaaaaggcagcgatcttgttagagataaaaaatcatttattaatgcttgtcgagaatatgcacaatctcaggttgataagcaaagagaggattttattcgcatgggcgttctaggagattgggaaaatccatacctttcactaaacaaaagttttgaggctg

SEQ ID NO: 304770 - DNA, 934 bp, Unknown
  Bacterial polypeptide expressing nucleotide sequence isolated from the Sargasso Sea
tttgatacaatttatgtgtcctttataattaagaaaacagatgtaaaggatttagaaggttgccagatcgccatttggacaactactccttggacaattccagcaaataaagctttagcttataatgaaagcttaaaatatttaatattagaaatagaagatgataatgaatttaaaaaaagcaaagttgtagtagcaaaagaacttttagagtcttttattaaagaatgtaatattgaaaaatataaaattttaaaggaattaccaggaaaagtattcaagggagtgatttgtaatcatccctttttagatattgggtatgattatgatgttccgatgctagaggcaagatttgttacaacagagcaaggaactggatttgtacattgtgcgccaagtcatggtcctgacgatttcaatttatgtataaataatggcattaaagcattggagacagttgatgatgatggaagatatacaaaacatatcttagaatttgagggaactcatatttttaaagcaaatccattagtaattgaaaagttaaaagaatctaaaagattacttgcaaacggaaagttaaaacactcttaccctcattcatggagatcgaaagcacctttagtccatagagcaactaaacaatggtttatatctatggagagtcatggcttgagaaaattagcactcaaagcacttgatgaaacaaaattctatccaagcaagggtaaagaaagaattagatctatgattgaaacaaggcctgattggtgtgtttcaagacaaagagtttggggtgttccactcccaatttttgtttcaaaaaaagatgataaagttttaatagatgatgaagtatttgaaaacattgctaaaatttatgaaaaagaaggttcagactgttggtttttagatgactttcgagagattttta

SEQ ID NO: 304771 - DNA, 277 bp, Unknown
  Bacterial polypeptide expressing nucleotide sequence isolated from the Sargasso Sea
atgagtaaatctgatataaatcttcctaaaacagctttctcaatgaaggctaacctaccaatcagagagcctgaaattctaaattattggcaaaaaataaatctttatgatgaattgagaaaatcaagtaaaggcaaagaaaaatttgtcttacatgatggccctccatatgcaaatggtaatattcatatggggacagcattaaataaaattctaaaagaaaaagtcgtgaaattccatcaaatggatggtaaagattcaatttatgtacctggat

SEQ ID NO: 304772 - DNA, 973 bp, Unknown
  Bacterial polypeptide expressing nucleotide sequence isolated from the Sargasso Sea
tattaataaaaaaacaaaagagccattaagagatcaaaaaataatcgatagaattgcttctatttatgaaaagcaaggctctgattgttggtttaccgatgattcaaaaatttttttaggtgatgattatgaatctaaagattatgaaaaactaaacgatattgtagaagtttggttcgatagcggatcaacacatagttttgttctagagaaaagaaaagatttgaaatggcctgcagacatgtatttagaaggatctgaccaacataggggttggtttcactcctcgcttttagaatcatgtggaactagaggtaaagcaccatttaaaagtatcctttcccatggtttcgttgtagacggcaaaggcatgaaaatgtctaaatcaatgggcaatgttatctctccagaagatattttaaagaattatggtgcagatatacttagagtttgggcttcagcatctgattatgctgaagatttaagaatagataaaaatattttaatacagcatgcagagtcttatagaaaaataagaaatacctttagatttatgcttggaaacttaaaggataattttgaaaaacaaaactttgaaaacatcaaagtagacgaactagatgaattagagcaatttatattacataaattgtttatattaaataaatctgttgaagaaaatttgaaaaattataattttcacaaactttacaaagagttgttaaatttttgtactctggatctttcctcgttttattttgatattagaaaagatgttctttattgtgatagcttaaattcaaaaaaaagaaaaaattgtgtaattgttttaaacataattttagaaagcttattaaagtggtttgctccgatattagttttcactactgaggaaatctatagtttagtgaataaaaataatagcgaaagcattcatgaaccatattttgttaaaattcccaatagttgggaa

SEQ ID NO: 304773 - DNA, 928 bp, Unknown
  Bacterial polypeptide expressing nucleotide sequence isolated from the Sargasso Sea
aatgtagtatcacccgaaaaagttttgaaaacatatggtgctgatatcttgaggctgtgggttgttagtgcagattattctgaggatcttagaatatctgatgagatattgaaatatcaggcagatagctacaggcgcttgagaaatactttacgttatttattaggtaatcttgcagaatattctgaatctgaggaggtagatattcaggatatgccagagcttgaaaggtggatcctgcatagactttacactcttgataaagatattcgggaatgggctaattcttatgaatttcactctatttttactgccatacataatttttgtgcggtcgaactttctgctttttattttgatatccgtaaggatacattgtactgtgagagcttggataacatagtcaggcgttcagctaggaccgtattagataagctttttctgtgtttaaccgcatggctggcaccaatactttgttttacttctgaagaagcttggttagctcgtttccctagctcagatgaaagtgttcactttagggaatttccggtgatacctttggaatgggaaaatgataacctatcaagtagatgggaaaaaatcagggaagtcagaagggttgtcacaggtgctctggagctagaaagatctgaaaagagaattggatcaagtttagaggctaagccttttatttgggcaagcgaagagtatcagtcactattttctagcctagatttagatgaaattttcattacgtcaggagctaagttttgtagtggtgatccacctgagggagcattctcaatgaatgatttatctggagtagctgtttctacagcttttgctgaagggagcaaatgtccaaggtgctggcgttattccagtattaatagcatggattctcagaccgggtctttgcaagaggtgc

SEQ ID NO: 304774 - DNA, 559 bp, Unknown
  Bacterial polypeptide expressing nucleotide sequence isolated from the Sargasso Sea
ccaactaaagaacccaaaattttagaaaattgggataattcaaaactatatgaaaaactcagagcgaaatcagttggaaaagaaaagttcgtccttcatgacggaccaccatatgcgaatggacatatacatatggggacagctttaaataaaattttaaaagatattgtaacaaagtttcatcaaatgaataacaaagattcaatttatgttcctggatgggattgccatgggctaccaatagagtggaaaattgaagaagaatataaaaagaagaaaaaaaataaagacgaagttcctacaaaagattttagaaaggagtgtagagactttgcacaaaaatggattggtattcacaaaaatgaattcaaaagattaggtgttattggggattgggacaactattactccccgatgagttttgatgcagaagcccaaattgttagggagttgggaaaatttctaatcgaaggaagcttgtaccgaggctttaaaccagtcttatggtcaactgttgaaaaaacagctttagcagatgcagaagtagaatacaaagacc

SEQ ID NO: 304775 - DNA, 350 bp, Unknown
  Bacterial polypeptide expressing nucleotide sequence isolated from the Sargasso Sea
aatggaatataaagatacaatttttcttcccaaaacatcttttgaaatgagagctaaccttccctcaaaagaacctgcaataatagaggagtgggataaagaaaatatttttaaaaagctaagagataaatctaaaggtagagaaaaatttgttcttcatgatggcccaccatatgcaaatggacatattcatatggggacagctcttaataaaattttaaaagatgtcattgtgcgaactcaacaaatggctggtaaagactcaatctatgttcctggatgggattgtcacggcttaccaattgaatggaaaatagaagaagaatatagaaaaaaaggaaagaacaagg

SEQ ID NO: 304776 - DNA, 274 bp, Unknown
  Bacterial polypeptide expressing nucleotide sequence isolated from the Sargasso Sea
atgcctgaaaataatttaaaccttcctaaaacagctttctctatgaaagcaaatctgccctctaaagaaccaaaaattttagaatcttgggagaaaacaaaactttatgagagattgagaaaaaaatcagcaggaaaagaaaaatttatacttcatgatggccctccatatgctaatggccatattcacatgggtacggctttaaataaaattttaaaagatattgttacaaaatttcaccaaatgaataatcaagattcagtttatgttccag

SEQ ID NO: 304777 - DNA, 637 bp, Unknown
  Bacterial polypeptide expressing nucleotide sequence isolated from the Sargasso Sea
tttgttaatttagaacaaggaactggtatcgttcactgtgctcctagtcatggtccagatgattttaatctgtgcctaaaaaacaatattccctctctttacaccgtcgatgacgctggcctttatactgatgaaattcccttttttgaaaagacacatattttcaaagctgacacgattgttatagataaattaaaagagcaaaaaaaattattaaagaacgataaattaagtcatacatatccacactcatggagatctaaagcacctctaatttatagagctacaccgcaatggtttatatctatgaaaaaaaatgatttaagaaaaaaagctataaagtcaattaatgaaactgatttttacccaaaaaaaggaaaagagagattattatctatgattgaaggaaggccagactggtgcgtatctagacaaagagtttggggagttcctttaccaatttttattaataaaaaaactaaagagccgttaagagatcagaaggtaatagaaagaatagcctcaatatatgaaaagcaaggatctgattgttggttcactgatgactcaaaagtttttctgggggatgattatgatacaaacgatttcgaaaaacttaatgatatagttgaagttt

SEQ ID NO: 304778 - DNA, 610 bp, Unknown
  Bacterial polypeptide expressing nucleotide sequence isolated from the Sargasso Sea
aatgagtaaagaaaacttaaatcttccaaaaacagctttttctatgaaagcaaatcttcctcagaaagaaccaagtctaattaatttctgggataagataaatctatatcaaaatttaagagagaaaagcaaaggcaaagagaaatttattttgcatgacggtcctccttacgcaaatggaaatatacatatgggaactgctctaaataaaattttaaaggatataataacaaaatttcatcagatgaacgataaagactcggtatacgtgccgggttgggactgtcatggtctaccaattgaatggaaaatagaagaacaatataaaaaaaacaaaaaaaacaaaaatgaagttcctgtagttgaatttagaaaagaatgcagagactttgctaataaatggataaaagtacataaagagcaatttaaaaggctgggtgttattggagattgggaaaactattattctacaatgagttttgaggcagaagcccagatagttagagaactaggaaaatttttaaaagaaggaagtctttataaaggttacaaacccgttctatggtcaactgttgaaaaaactgcgttgtccgatgcggaggttgagtat

SEQ ID NO: 304779 - DNA, 283 bp, Unknown
  Bacterial polypeptide expressing nucleotide sequence isolated from the Sargasso Sea
atgtcaaaagataatatacagcttcccaaaacagttttttcaatgaaagctaacctaccatctaaagaacctgaaattttaaaaaagtgggaaaaaaataaaatatttgagaaactaagaaagaactcaaaaggtaaggaaaaatttattttacatgatggaccaccttatgcaaatggtcatattcatatgggtacagctcttaataaaatattaaaagatatggtcacaagatttcatcaaatgacaggaaaagactcaatttatgttcctggttgggact

SEQ ID NO: 304780 - DNA, 355 bp, Unknown
  Bacterial polypeptide expressing nucleotide sequence isolated from the Sargasso Sea
aatggattataaggatacagtatttttacctaagtcaagttttggaatgcgtggagggcttcctcagcgcgagccagaaatgattgaaaggtggaataagataaatttatgggaaaaattaagagaattatcaaaagatagagaaaagtttattttacatgatggtcctccttatgcaaatggaccaattcatattggtacttctatgaataagattttaaaagatattatcaatcgaagtaaacagatgagtggttataattctcactatattccaggttgggattgccatggtctgcccatcgaatggcaagtggaacagacctacaaaaaaaaaggaattaataaagaagaa

SEQ ID NO: 304781 - DNA, 868 bp, Unknown
  Bacterial polypeptide expressing nucleotide sequence isolated from the Sargasso Sea
agacaaagagtttggggagtgcccctcccaatttttattaataaaaaaacaaaagaaccattaagagataaaaagattatagatagaattgcgtcaatttatgaaaagcaaggatccgattgttggttcactgatgacgcaaaaatttttttaggtgatgactatgactccaaagattacgaaaaacttaatgatatcgttgaagtgtggttcgatagtggttcaacacacagttttgttttggagaaaagaaaagatttaaagtggcccgcggatatgtatctagagggatctgatcaacacaggggatggtttcactcttctttacttgagtcatgcggaactagaggtgaggcaccttttaaaagcattctctcacacggttttgttgtggatggaaaaggcatgaaaatgtctaaatcgatgggaaacgtcatttctccagaagacatattaaagaactatggcgcagatatacttagagtttgggcttctgcatctgattatgcagaagatttaagaatagataaaaatatcttaatacagcacgcagagtcttatagaaaaattaggaatacttttagatttatgcttggaaacttaaaagataattttgaaaaacaaaactttgaaaaaattaaattgaaagaatttgacgaattagaacaatttattatgcacaaattgtttttaataaatagatctttcgatgagaattttaagagttataattttcataaattatataaagagctgcttaacttttgtacaatagatctgtcttctttctattttgatattagaaaagatgtcctttattgtgatagcttaaattcaaaaaaaagaaaaaactgtgtaattgttttaa

SEQ ID NO: 304782 - DNA, 523 bp, Unknown
  Bacterial polypeptide expressing nucleotide sequence isolated from the Sargasso Sea
atgagcaaagcccaaattaaccttcctaaaacagctttttctatgaaagcaaatttgccaactagggagcctgaaatcctcaaactttggagaaatatagatctttataatgagttgagaaaatcaagaaaaggaaaagaaaaatttgttcttcatgatggcccaccttatgcaaatggaaatatacacatgggtacagctctgaataaaattttaaaagatataattgtaagatttcatcaaatggatggtaaagattctgtatatgttcctggttgggattgtcatggattgccgattgaatggaaaattgaagaacaatacaaaaaaagtaaaaaaaacaaaaatgaagtacctattgttgaatttagaaaggaatgcagagcttttgcagaaaaatggattgatattcataaagaccaatttaaaagattaggagtagttggagattgggaaaattactattctacaatgagctatgaagctgaagctcaaattgtaagagaattaggaaaattttaaa

SEQ ID NO: 304783 - DNA, 779 bp, Unknown
  Bacterial polypeptide expressing nucleotide sequence isolated from the Sargasso Sea
aaactacaaagaattaaaggtttttaagggttccgaatttaaaggaacaatatgtaatcatccatttgtaaaaatggattttaaatatgatgttccaatgttggatgctcaattcgttaatttggagcagggaacaggaattgttcattgtgctccaagccacggcccagatgacttcaatctgtgtttgaaaaataatataccatcactttacacggtagataactcgggcgtttatactaaagaggtaccttattttacaaatacacacgtatttaaggctgacccgattgttatagacaaactaaaagaacaaaaacaattacttaaaaacgataaacttaatcacagttatcctcattcttggagatctaaggctccattaatttatagagcgacacctcaatggtttatctctatgcaaaaaaataaactgagagataaagctattaaagcgataaatgaaaccatcttttatcccaacaagggtaaagacaggcttttatcaatgattgaaggaagaccagattggtgtgtttcaagacaaagagtttggggagtgcctttgccaatttttattaataaaaaaacaaaagagccattaagagatcaaaaaattatagatagaattgcctctatttatgaaaagcaaggctcagattgttggttcacagatgatgcaaaaacttttttaggtgatgactacgatgccaaagattatgaaaaactaaacgatattgtggaggtatggttcgatagtggctcaacgcacagttttg

SEQ ID NO: 304784 - DNA, 289 bp, Unknown
  Bacterial polypeptide expressing nucleotide sequence isolated from the Sargasso Sea
tatgagtaaagattacaaatcaactattctattgccaaaaacaaatttttctatgagggcaggtttgccaaattatgagccaaaagttctagagcaatgggaagagaataaaatatatgataagataagagagaagtctaaaaatagggaaaaatttatacttcatgatgggcctccttatgctaatgggcatattcatatagggacagccctaaataaaattcttaaagatatagtaagtcgctctcagcaaatgatgggtaaaaactcgcattatattccagggggg

SEQ ID NO: 304785 - DNA, 494 bp, Unknown
  Bacterial polypeptide expressing nucleotide sequence isolated from the Sargasso Sea
aatggattataaggacacagtatttttacctaagtcaagttttggaatgcgtggagggcttcctcagcgcgagccagaaatgattgagaggtggaataagataaatttatggggaaaattaagagaattatccaaagatagagaaaagtttattttacatgatggtcctccttatgcaaatggaccaattcatattggtacttctatgaataagattttaaaagatattattaatagaagtaaacagatgagtggttataattctcattatattcctggatgggattgtcatggtttacctatagaatggcaagtggaacagaattacaaaaaaaaaggaactaacaaagaagaaattcctattgctgattttagagctgaatgtagaaattttgcagataaatggataggtgcccaaatggatgattttaaaagattatttgttcttgcggattgggataataaatatttaacaatgagttttgatgctgagg

SEQ ID NO: 304786 - DNA, 447 bp, Unknown
  Bacterial polypeptide expressing nucleotide sequence isolated from the Sargasso Sea
aatgtctaaagacaacttacatttaccaaaaactgctttttctatgaaggcaagtttaccaactaaagaaccattaattttagaaaaatggaaaaaaaataaaatttttgaaaagttaagaaaaaattcaaaaggaaaagaaaaatttattcttcacgatggccctccatatgctaatggccatattcatatgggaactgcactcaataaaattttaaaagatatgataactcgttttcatcaaatgaatggaaaagattctgtctatgtacctggctgggattgtcacggccttcccatagaatggaaaattgaagaacaatataaaaaaaagaaaaaaaataaagacgaaattcccatcaaagattttagacaagagtgcagagagtttgcaaaaaattggatacaagttcacataaaagaatttgaaagattaggtgttgttgg

SEQ ID NO: 304787 - DNA, 217 bp, Unknown
  Bacterial polypeptide expressing nucleotide sequence isolated from the Sargasso Sea
tatgagtaaagaaaatattaatttaccaaaaacctcgttttcaatgaaggctaaccttccaaataaggagcctgaaatattaaaaatttgggagaaattagatttatataacaaacttagagattctagcaaaggaaaagaaaaatttgttttacatgatggccctccatatgcaaacggtcatatacacatgggcaccgctcttataaaattttaa

SEQ ID NO: 304788 - DNA, 1031 bp, Unknown
  Bacterial polypeptide expressing nucleotide sequence isolated from the Sargasso Sea
aatagagcattagcttataatgaaaatttaaaatatgtaattgttaaaatagaagatcaaacagattttaaagataaaaaaataatagtagcccaagatttattaaaatccttaataaacgattgtggtattgaaaaatttagcaagattttaacatttccaggaaaagattttaaaggaacaatatgtagtcacccattttcaaaaattggttttgattatgatataccaatgttagatgcaaactttgttacactagagcaaggctcgggcattgttcattgtgcaccaagccatggacctgatgattttaatttatgtttaaaaaacaatattaaagcagaagaaacagtaaatgacgatggaaaatatacaaaacatgtacctaactttgaaggcttacatatttttaaagcaaataaagtaattattgagaaattaaaagaacaaaaaaaattattatctaatggtgagttaattcactcttatcctcattcttggcgctctaaagcgcctctagttcatagagcgacaccccaatggtttatttctatggaaagtcatggtttgagaaaaaaagctttaaaatctattgacgaaactaatttttatccaaacaaaggaaaagaaagattaaaatcaatgattgaattgcgacctgattggtgtgtttcaagacaaagagtttggggcgtacctataccagtttttctgtcaaaagatacaaacgaagttttaatggacgaacaggtaattgaaaatatagcaagtatatttgaaaaagaaggagccgactgttggttcgaagaagatgctcagaaatttttaggaaaaaaatataaaagtgaagactacaaaaaaatgactgatattgttgaagtttggtttgatagcggttcgactcatgcatatgtgcttgaaaaaagagaagatttaaagtggcccgcatccatgtaccttgaaggctcccgacagcatagagggtggtttcattcatcattgctagaatcttgcgggacgagaagtagagc

SEQ ID NO: 304789 - DNA, 634 bp, Unknown
  Bacterial polypeptide expressing nucleotide sequence isolated from the Sargasso Sea
atgagcaaagaaaacctgaatctcccaaaaactgcattttctatgaaggcgaatttgcctttaaaggaacctgagctcattaatttttgggataagatcaatttatatgaaaatttaagaaacgatagcaagggtaatgaaaaatttattttacacgatggtccaccttatgcaaatggcaatattcatatgggcacagctttaaataaaattcttaaagatataataactaaatttcatcaaatggataataaagactccgtatatgttccaggttgggactgccatggtctaccaatagagtggaaaatagaggagcaatataaaaaaaataaaaaaaataaaaatgaagttcctgtagttgaatttagaaaagaatgcagagattttgcaaataagtggattaaggtgcacaaagatcaatttaagaggctaggtgtaattggagattgggaaaactattattccacaatgagttttgatgcagaggcacagattgtaagagagcttggaaaatttctaaaagaaggaagtctttataaaggttacaaacctgttttatggtcaactgtagagaaaaccgcattatcagatgcagaggttgagtatatggaccacagttctgatacgattt

SEQ ID NO: 304790 - DNA, 880 bp, Unknown
  Bacterial polypeptide expressing nucleotide sequence isolated from the Sargasso Sea
gaggtaccaataaaagatttcaggagtgaatgcagagattttgctaaaaaatggattgagatacaaactaaagaatttaaaagattaggcgtagttggagattttgataattattattccacgatgagttttaatggagaagcacaaatagttcgtgagcttggaaaatttttattagataaaagtttatatcaaggttttaaaccagtactttggtctactgtagaaaaaactgcattagccgatgctgaggtagaatataaggatcacacttctaatacaatttatgcagctttcaagatcaaaaaaacagacaaagactttttaaaagatgccaatattgtaatttggaccacaactccttggactataccagccaataaagctctagcatttaatagctctcttgattattccctaatcgaaattgaagggttagataattttaaagaaaaaaaaattgttatagctaaagaattaattaaatctgttactgagtcttgtggtttagaaaaatttaaagttgtaaaaaattttaagggatctgaattaaataaaacagtatgtagccacccatttttgaaattaggatatgactatgatgtaccaatgtttgatgcaagatttgtcactctcgagcaaggaacaggtattgttcattgcgctccaagtcatggtgttgatgattttaatttatgcctaaaaaataatattgagtcaaaatacacggtagatgactcaggatattacaccaaagagataccatattttgaaaaaacacatgtgtttaaagcagatcccattgttatagataatcttagagagcaaaaaaagttattaaaaaatgataaatttacacatagttatcctcattcttgga

SEQ ID NO: 304791 - DNA, 346 bp, Unknown
  Bacterial polypeptide expressing nucleotide sequence isolated from the Sargasso Sea
aatgagcaaagaatatataaaccttcccaaaacagctttttcaatgaaggcaaatttgccaactaaggagcctggaataattgaatattggcaaaaaataaacttatacgaaaagcttagagagaacagtaaaggaaaagaaaaattcgttttacatgacggaccaccatatgcaaacggaaatatacatatgggtactgctttaaataaaatattaaaagatataattactaaatttcatcaaatggatggcaaggactcagtgtacgttcctggttgggattgtcatgggctacccatcgagtggaaaattgaagaacaatataaaaaaaataaaaaaacaaaa

SEQ ID NO: 304792 - DNA, 840 bp, Unknown
  Bacterial polypeptide expressing nucleotide sequence isolated from the Sargasso Sea
agttgcagatgctttggtagattcagttgttaaagagtgtgaattaaaaaaatataggaaaattaaaacttttaagggtaaagaatttaagagcaccatttgtagccacccatttttaaatcttggttatgatcatgatatcccaatgctggaagctagatttgtaacaactgatcaaggaactggaattgttcactgtgctccaagtcatggacctgatgattttaatttatgcttgaacaacgatattaaagctattgaaactgttgatggagatggaaaatatacaaaaaatgtaaaattattcgaaggtattcatatttttaaagcaaatcctattgtaattgaaaagctcaaagaacaaaaaaatttattatttaatggtgagttagttcactcatacccacattcatggagatccaaagctccacttgttcatagagcaacaccacaatggtttatttctatggagagtcataaattaagagataaagcattaaaagctattaatgaaactaatttttatccaagcaaaggtaaagaaagattaaaatcaatgattgaaacgagacctgattggtgtgtttcaagacaaagagtttggggtgtaccacttccaatatttataaataaacaaacaaaagaaatactagtagatgatgagattacagaaaatattgcatcaatttatgaaaaagagggctcagattgttggttttcagatgatccacaaagatttttaggcagaaaatataaagctaatgaatttgaaaaacttaatgatatcgttgaagtttggtttgatagtggatcaacgcattcatttgtattagaaaaaag

SEQ ID NO: 304793 - DNA, 340 bp, Unknown
  Bacterial polypeptide expressing nucleotide sequence isolated from the Sargasso Sea
atgtctgaaaataatttacaacttcctaaaacagctttttccatgaaagcgaatcttccttcaaaagaaccaaaaattttagaatcttgggataagacaaaactttacgaaagattaagaaagaaatcgaatggaaaagaaaaatttgtacttcatgatggcccgccctatgcaaacgggcatattcatatgggtacagcattaaataaaattttaaaagatattgtcacaaaatttcatcaaatgaacaataaggactcaatttatgttccaggctgggactgccatggattacctatagaatggaaaattgaagaagaatataaaaaaagaaaaaaaa

SEQ ID NO: 304794 - DNA, 786 bp, Unknown
  Bacterial polypeptide expressing nucleotide sequence isolated from the Sargasso Sea
aatgagcgatatcgtagaggtttggttcgatagtggttccactcattcttatgttttggaaaaaagagatgatttgaaatggccagcatccatgtatctagaaggctctgatcaacatagaggttggtttcactcatcattattagagtcatgtggaactagaggcaaagctccttttgaaagtattttatctcacggttttgtagttgatggaaaaggacttaaaatgtcaaaatcaactggaaatgtaattgctccagaagatatattaaaaaaatacggagcagatattttaagaatttgggtagcatcttcaaattatgcagaagatttaagaatagattatacaattttagatcaacatgcagagtcttacagaaaaattagaaatactttcagataccttttaggaaatatacaagatgaatatttagaaattgattttaaaaatttagatataaaagaaatgcctgatcttgaaaagtacatgctacatagaatttatgaaattaatgaaagttttcataagttttttaaaacctataattttcataatttatataaagagttattaaatttttgtacagtagagttatcagcattttattttgacattagaaaagatcttctttactgcgatccaatagactcaacgaaaagatcaaaatgtattctaattttaaatattttgttacaatgtttacttaagtggtttgctccaatattatcatttactactgaagaaatttttagattggtaaataaaaatgaagatgaaaaaagtat

SEQ ID NO: 304795 - DNA, 871 bp, Unknown
  Bacterial polypeptide expressing nucleotide sequence isolated from the Sargasso Sea
aaaatttttaaaagaaggaagtttgtacagaggtttcaaaccagtattgtggtctacagttgaaaaaacggctttagcggatgcagaagtagaatatcaagatcataaatctgatactatttatgcgtcatttaaagttaaaaaatcaaaaataaaagagttgaatgataatgagatagttatttggaccactacaccttggacaattccagcaaataaagcgttagcttacaatgaaaatctagattatctgttagttaaaataaatgacgatggagactttaaagacaaaaaaattgttgtagctgaggctttactcgagtctgttattaaggattgtaatattgaaagtcatgaaatatcaaaaaaatttaaaggaaaagagcttaaagatacaatttgtattcatcctttctttaatttgggtttcgactacgatattccaatgttagaggcacgttttgtaaccacagaacaaggaacaggtatcgtacattgtgctccaagccacggacctgatgattttaatctttgtatgaacaatggcataaaagcaattgaaactgttgatggagatggaaagtatacaggtaacgtaaaattatttgagggagtgcatattttcaaagcaaaccctttaataattgaaaaattgaaagatgaaaaaaaattgttatcaaatggtgaacttgttcactcttatcctcattcttggcgatcaaaagctccattagtgcatagagcaacaccacaatggtttatatcaatggaaagtcacaacttgagaagcaaagctctaaaagctattgatgaaacaaatttttatccaagcaagggtaaagagagattaaaatcaatgatagaaacgaga

SEQ ID NO: 304796 - DNA, 349 bp, Unknown
  Bacterial polypeptide expressing nucleotide sequence isolated from the Sargasso Sea
atgaataaaagtcaaattaatttacccaaaacagctttttcaatgaaagctaatttaccaattagagagccggaaattttaaaactttggaaaaaaattgatctttataaagagttaaggaattcaaggaaaggggaagagaaatttgtcctccatgatggtcctccatatgcgaatggaaatatacacatgggtaccgcgttaaataaaatactaaaagatattatagtaaagttccatcaaatggatggcaaagactctgtatatgttccaggttgggattgccatggtttacctattgaatggaaaattgaggaacaatataaaaaaaataaaaaaaataagaatg

SEQ ID NO: 304797 - DNA, 826 bp, Unknown
  Bacterial polypeptide expressing nucleotide sequence isolated from the Sargasso Sea
ttatacatctgatactatttatgtttcttttacagttaaagaaagcaaacttaaagaattgaatggatctgatataattatttggacaacaactccatggactattccagcaaataaagctttagcttataattctagtttaaaatacataataattaaaattaacgatgagggagattttaaaaatagaaaaattgtattagctaaagatcttttagaatctttgataaaagattgtaaaattaataattttattattgagaaagaatttttgggcaaagaatttaaaggaacaatttgtactcacccatttttagaaattggttatgattatgatattccaatgttagaaggaaggtttgtaacaattgaacaaggatcaggaattgtacactgtgctccaagtcatggaccagatgatttcaatttgtgcataaataataacattaaagctgttgaaacagttgatgatgatggaaaatatacagataatattattaaattttctggaactcatatatttaaagctaatccaatagtgattgaaaatctaaatagacaaaaaaaacttcttgctaatggaaaattaactcattcctatccacattcatggagatccaaagctcccttggttcacagagccactgctcaatggtttatctcaatggaaagtcataatttgaggacaaaatcactaaaagcaattgacgaaacaatattttacccgagtaaagctaaagatagaattaaatctatgattgagactcgaccagattggtgtgtttcgcgacaaaaagtttggggggttccttgcctattttcttat

SEQ ID NO: 304798 - DNA, 835 bp, Unknown
  Bacterial polypeptide expressing nucleotide sequence isolated from the Sargasso Sea
gtatttagatcatacctcagatacaatttatgtttcatttccaattaaaaataccaaatttaaaaatttaattggttcagaaataattatatggacaacaactccttggactataccggcaaataaagctttggcattcaatcccagtttgatttacacaattataaaaatcaaagatttaggtgattttaaggataaaaaaattgtaattgctaaagatcttctggaaacagtaattaaagaatgtgaaataaaaagttataaaattgaaaaagaatttttaggaaaagagtttaaaggaactgtttgtattcatccattttcagaaattggttatgattatgatattcctatgcttgatgctagatttgtaacaacagagcaaggctcaggaattgtacattgtgcaccaagtcatggacctgacgattttaacttatgtttaaacaacaatattaaagctgtagaaacagtagatgatgatggaaaatacacaaaaaatattattaattttgaaggtatgcatatttttaaagctaatcctatagttattgaaaaactaaaaagtttaaaaaaacttcttgctaatggaaaattaaatcattcctaccctcactcttggagatctaaagctcctttagttcatagagctacggcacaatggtttatatcaatggagagtcacgacctaagatctaaatccttaaaagctattaatgaaacaatattttatccaagcaaagcaaaggaaagaataaagtctatgatagaaactagacctgattggtgtgtttctagaccaagagtttggggagttcccttgccaatttttcta

SEQ ID NO: 304799 - DNA, 771 bp, Unknown
  Bacterial polypeptide expressing nucleotide sequence isolated from the Sargasso Sea
ataccaagatcataagtcagatactatatatgcatcctttccggtcaaatcatcaaacattaaagaattagatgatagtgaaatagtaatttggacaactaccccatggactattccagccaataaagcattagcttacaatgaaagcttagaatatttactaattgaggtaaatgatgatggagattttaaaaataaaaaaattgttattgcagatgcattaatagattcagttgtaaaagataccaaaattcaaagtttcaaaaaattaaaaaattttaaaggtaaagatttaaaaggaacaatatgtaatcacccttttttaaaacttggctatgaatatgacatacctatgctggaggcgcgttttgttactacagaacaaggtactggaattgttcattgtgcgccaagccatggacctgatgattttaatttatgtatgaataatggaattaaagcaattgagacagttgatggtgatggaaaatatacaaaaaatgtagctctttttgaagggatacatatttttaaatctaattcaatcgttattgaaaaattaaaagaccaaaaaaaattattatcaagtggtgaactcgtccactcatatcctcattcatggaggtcaaaagcaccattagttcacagagcaactcctcaatggtttatttccatggatagtcataagcttagaaacaaagctttaaaagcaattgatgaaacaaccttttatcctagcaaaggaaaagaaagattaaaatcgatgattga

SEQ ID NO: 304800 - DNA, 532 bp, Unknown
  Bacterial polypeptide expressing nucleotide sequence isolated from the Sargasso Sea
atgagtaaagaaaatataaatcttccaaaaacagcgttttcaatgaaagcaaatcttcctgtaaaggaacctagctttgttcaattttgggataagattgatttgtatggaaaattaaggacgataactaaggataaagaaaaatttattcttcacgatggaccaccttatgccaatggtaatattcatatgggcacagcgctaaataaaatattgaaagatataataactaaatttcatcaaatggatggaaaagactcagtttatgttccaggatgggactgtcacggactacctatagagtggaaaattgaagaacaatataaaaaaaataaaaaaaataaaaatgaaataccaattactgaatttagaaacgagtgtagagaatttgcaaataaatggattaaagttcataaagatcaattcaaaagattaggagttgtcggcgattgggaaaattattattcaacgatgagttttgctgcagaagcgcagatagtaagagagcttgcaaaatttctgaaagaaagga

SEQ ID NO: 304801 - DNA, 847 bp, Unknown
  Bacterial polypeptide expressing nucleotide sequence isolated from the Sargasso Sea
tttcaaaaagaatgtgaaattgaaaatttaaatttaattgaggaaataaaaggtaaagattttgaaggtactatttgttctcacccttttctaaatttaggatatgactatgaagttcctatgctagaagcaagttttgttacactggaacagggaactggcgtagttcattgcgcaccaagtcatggaccagatgatttcaatttatgtttaaaacacggaattaagtctttggatacaatagacgataatggaaagtatacaaaacatatcaaaaaatttgaaggaattcatatcttcaaagcagatcaaattgtaatagaaagtctaatcgattgtaaaaaattattagcaaatggaaagttaactcacagctaccctcattcttggcgatcaaaagcacctttagtccatagagctacttctcaatggtttatatcaatggaaacaaaagatttaagaaaaaaagcactcaaggcaattgataataccaatttttatcctgaaagaggtagagaaagaattaagtcgatgattgaaacaagaccagattggtgtatttccagacaaagaatttggggtgttcctttaccgttatttatttcaaaaaaaactaaagaagtactaagagatgctgacgtaattgaaaatattgcaaaaattttcgaaaaagaaggtgcagattgctggtttactgacgatcctcaaaaatttttaggcaaaaaatataaaagtgaagaatatataaaatctaatgatattgtagaagtttggtttgatagtggagcaacacatagttacgttcttgaaaaaagaaaagacttagattggcctgcatcaatgtatt

SEQ ID NO: 304802 - DNA, 757 bp, Unknown
  Bacterial polypeptide expressing nucleotide sequence isolated from the Sargasso Sea
ggcaagaaccagccggcggacctgacccgcgagcgctgccgcacttatgccggcgagcagatcgaagggcagaaggccgacttcatccgcctcggtgtgctgggtgactgggataacccctacaagaccatggatttcgccaacgaggccggcgagatccgcgccctggccgagatggtcaagcagggcttcgtgttcaagggcctgaagccggtgaactggtgcttcgactgcggctcggcgctggccgaggccgaagtggagtatcaggacaagaaatccgatgccatcgacgtcgccttccccatcgaagacgcagacaagctggccgccgccttcggcctcagcgagctgagcaagccgactgccatcgtcatctggaccaccacgccctggaccatcccggccaaccaggcactcaacgtccaccctgaattcacctacgccctggtcgacaccggcgagcgcctgctgctgctggctgaagaactggtcgaatcctgcctgcagcgctacggcctgcaaggtcaagtaatcgcgaccgcgcagggcgctgcgctggatctgatccgcttccgtcatccgttctacgagcgtttctcgccggtgtacctggccgagtacgtcgagctgggcgccggtaccggtatcgtccactcggcgccggcttatggtgaggacgacttccgcacctgcaaagcctatggcatgagcaacgacgacattctcagtccggtgcagagcaatggcgtctaca

SEQ ID NO: 304803 - DNA, 700 bp, Unknown
  Bacterial polypeptide expressing nucleotide sequence isolated from the Sargasso Sea
atgagcaaaagcaacatcaatctacccaaaactgctttttcaatgaaagcaaatttacaaaataaagaacctggaataattgattactgggataaaattgatttatataaaaagctaagaaattctagcaaaggaaaaacaaaatttgttcttcatgatggtccaccctatgccaatggggatatacacatgggaacagcacttaataaaatccttaaagatataatagtaaaatttcatcaaatgaaaggagaagattctgtttatgtaccaggttgggattgtcatggtttaccgattgaatggaaaattgaggaacaatataaaaaaaataaaaaaaataaaaatgaagttccagtaaatgaatttagaaaagaatgtagagattttgcaaagaaatggattgaggtacataaaaagcaatttaaaagacttggggtagtaggtgactgggaaaattattactctacaatgagctttgatgcggaggctcaaatcgtaagagaacttgggaaatttttaaaggaaggtagtctctacagaggttataaacctgtactttggtctacggtagaaaaaacagctttagcagatgcagaagttgaatacatggatcataagtctgatacaatctatgctgcttttaatattaaaaaatctaaaaataaaaaacttttaaacagcgaagtaatcatttgac

SEQ ID NO: 304804 - DNA, 898 bp, Unknown
  Bacterial polypeptide expressing nucleotide sequence isolated from the Sargasso Sea
aagcttcaaattgtaagagaacttggaaaatttttaaaagagggtagtttgtacaagggttacaaacctgtcttatggtctacagttgaaaaaacagctttagcagatgcagaagtggaatataaagatcatgtatctgatacaatctatgcagcctttccagtcaaaaaatctaatatccaagaattaattggttcgaaggttgttatttggactacaaccccatggacgataccagctaataaagcattagcctataaccaaagtttgaattatgttttatgcgagatagataacaaagatattttacagaatgaaaaaatagttattgcaaaagaacttttgacatctgttgtaaaagatactgattacaaaattaatatattaaaagaattcaaaggaaaagaatttgatggaactgtttgtagccatccgtttcataaaattggatatgactatgatgttccaatgctcgaagcaagatttgtaacaactgaacaaggaacaggaattgttcattgtgcaccaagccacggacctgatgattttaatttgtgtatcaataatggaataaaagcaattgaaactgttgatgatgatggaaggtacacaaaacacatccccatatttgaaggaactcatattttcaaagcaaacgatattgttattgaaaagctcaaagaacttaaaggtcttttaaacaatggtaaactgacacattcttacccacattcttggagatctaaagctcctttagttcacagagcaacacctcaatggtttatttcaatggaaagtcataaactaagagacaaagcacttaaagcaataaatgataccgctttttatccaagcaaaggaaaagaaagaattaaagcaatgatagagacaaggccag

SEQ ID NO: 304805 - DNA, 667 bp, Unknown
  Bacterial polypeptide expressing nucleotide sequence isolated from the Sargasso Sea
aatgaactacaactatgatgttcccatgctggatggacaatttgtaaatttagatcaaggaacaggattcgttcattgcgctccaagtcatggagcagatgattttaatttatgtcttaaaaataatataccatctttatacaccgtagataatgcaggtctatacacaaaagaaataccacattttactggcacacatatttttaaagcagacccagttgttattgaaaaacttaaagagcaaaataaacttttaaaaaacaacaaacttacacatagctatccgcattcttggagatcaaaagctccacttatatacagagcaactcctcagtggtttatatcgatgaaaaaaaataatttaagagataaggcagtcaaagccatcaacaaaacaacattttatcctaataaaggtaaggatcgtttattatcaatggtagaaggaaggccagattggtgtgtatcaagacaaagagtttggggtgtacctttaccaatatttattaataaacaaactaaagaacctttaagagatgaaaaagtcattgatagaatagcctcaatttatgagaagcaaggctcagattgttggtttacagatgatccaaaaatttttctaggggaagattatgatactgcagagtatgaaaaactaaatgatatt

SEQ ID NO: 304806 - DNA, 742 bp, Unknown
  Bacterial polypeptide expressing nucleotide sequence isolated from the Sargasso Sea
gaaaaaagaaaagacttaaaatggcctgcagatatgtatttggaaggctctgaccaacacagaggctggtttcactcatctttacttgagtcatgtggaaccagaggtaaggccccctttaaaagcatcctttcccatggtttcgttgttgatggcaaagggatgaaaatgtcaaaatctatgggaaacgttatttctccagaggacatactaaaaaattatggtgcagacatactgagagtatgggcatctgcatctgactattcagaagatctaagaatagataaaaatattttaatccagcacgcagagtcctacaggaagattagaaataccttccgctttatgcttggaaatttgaaagataattttgaaaagcaagattttgaaaaaattaatttgactgagctcgatgagcttgagcaatttatattacacaaattatactccataggtacctctgtaactgaaaatttaaaaaattataattttcataaattatataaagaactattaaatttttgtgctttggacctttcttctttctatttcgatatcagaaaggacgttctttactgcgatagcttaaaatcaaaaaaaagaaaaaattgtgttgttgttctaaatattattttagaaagtttactaaaatggtttgctccaattttagtttttacaacagaagaaatatacagtttagttaataataataatgaaagtatccatgaaaaaaattttgtta

SEQ ID NO: 304807 - DNA, 708 bp, Unknown
  Bacterial polypeptide expressing nucleotide sequence isolated from the Sargasso Sea
ggattacctattgaattaaaggtcttacagaatttgaaatcagatgaaagaaaaaatttaaatacaataggattaagaaaaaaagctactgaatatgcatatactcagattaataagcaattagaaggttttaaaagatggggaatttggggagattggaataacccatatttaactctcaagaaaagttatgagtcggctcaaattggagtatttgggaaaatgtatttaaatggttatatatataggggcctcaaacccgttcattggagtccaagttcaagaactgctctagcagaagcggaattagaatatcctgaagaacacttttctaaaagtatttatgtttcttttaaaatagctaaaattacaaaagaaattttattaaatatttcagatgacgaacaaagaaaatttcttgattttaatcatataaatttttttatagcagtttggactactacaccttggacaatacctgcaaatgaagctgtagcagttaatccaaaaataaaatatgtttttgctaatgatgaagatgataatatatatatttttgcaaaagatttaatttctgaaattagtaataaattaaataaaaacttcaaaatacttttagaggtgaagggctcaaaccttgaaaatattgaatatgagcatcctactaaaaataagacttgtaaaattgttattggaggagattatatt

SEQ ID NO: 304808 - DNA, 860 bp, Unknown
  Bacterial polypeptide expressing nucleotide sequence isolated from the Sargasso Sea
gatgatttttttaaatctaatgacatagttgaagtatggtttgatagcggggctacccattcttatgttttggaaaaaaggaaagacctaatatggccagcatctatgtatctggaaggatcagatcaacatagaggatggtttcactcttctcttttggagtcatgtggtacacggggaaaagcaccatttaaaagtattcttacacacggatttgtagtcgatggcaaaggattaaagatgtcaaaatcgaccgggaatattattgccccagaggatattttaaaaaaatatggagctgatattttaagaacgtgggtagctgcatccgactatgcagaagatttaaggttagattattcaattcttgaacagcatgcagaatcttatagaaaaattagaaatacatttagatttttgttaggaaatttaaaagataaaaaaaataactttgattttaattcacaagaagttgaaaaatggcctgaacttgagcgtgttattcttcatcaggtttttttattaaaccaaaattttaaaaattattttaaagaatataattttcataaactttataaagagttagcgaatttttgttctttagaattatcagcattttattttgatataaggaaagatacactctattgtgatgatttttcatcatcaaagagaaagtcatctattaatttactcggattaattttagatatattgttaaaatggttcgcacctatcttggcttttacaacagaagaaatttatcaaatagtaaatcagggacaaaaatcaagcatacaccttcaatcatttcccgatatacctgctagttggcgaaatgataaactttttgaaaaatg

SEQ ID NO: 304809 - DNA, 887 bp, Unknown
  Bacterial polypeptide expressing nucleotide sequence isolated from the Sargasso Sea
agcaacagattatgcccatatccaaattgataatcaaaaggagggtttcaaaaggtggggcatatggggagattggaataacccttacttaactcttaaaaaaagttatgaatctgctcagattggagtatttgggaaaatgtttttaaatggctatatatatcgaggtctcaaacctgtgcattggagtccaagttcgaggactgcacttgcagaagcagaattagaataccctgatgaacattattcaaaaagtatttatgtttctttaaaaatcactaaaatacctgaggaaattttattaaatttcatccaagaaaatcttaatatcaaaaaagatttttttcaaaataattctttcataactatttggaccactactccctggaccatccctgcaaatgaagcagttgcagtaaatccaaaaattaaatacgttttcgctatcgatgaagagaaacgaatttaccttttcgcaaaggatttatcttctgaaataagtaagaaatctaataaggatttcaaggtgcttctagaggttaaaggctctaaattggaaaatattgaatatcaacatccttctaagaataaaaattgcagaattgtaattggaggagattatattactaccgaatcagggactggaattgttcatactgctcctggccatgggatagatgattttattgtgggtcagaaatatgatttaccgataacatgtgtcgttgatgaaaaaggtaacttgaatgaatattctggtcaattcaaaggatcaaatgtgctgaaagatgcaaatgatttaattattgaacatttaaaagaaaacaatttacttctgttacaggaaaattataagcatagatatccgtatgattggagaacaaaaa

SEQ ID NO: 304810 - DNA, 880 bp, Unknown
  Bacterial polypeptide expressing nucleotide sequence isolated from the Sargasso Sea
tgatgcaaaaatttttttaggtgatgactatgatgataaagattatgataaacttaatgatattgttgaagtgtggtttgatagcggttcaacacacagttttgtattagagaaaagaaaagatttaaaatggccagcagacatgtatctagaaggatctgaccaacataggggatggtttcattcttcattactagagtcttgtggaactagagggaaagcgccatttaaaagcatactatcacatggttttgttgtggatggcaaaggtatgaaaatgtctaaatctatgggtaacgttatttctccagaagatattttaaagagctatggtgcagatatactaagagtttgggcttcagcatctgattatgctgaagatttaagaatagataaaaatattttggtacagcacgcggagtcttatagaaaaattcgaaatacttttagattcatgcttggaaatttaaaagataattttgaaaaacaaaattttgacaggattaaattaaacgaatttgatgaattagagcagtttattttacataagttatttttaattaataaatctgtagatgaaaatttgaaaaattacaattttcataaattatataaagatctactgaatttttgtactctagatctttcttctttttattttgatataagaaaagatgttctttattgcgatagtattaattcaaaaaaaagaaaaaattgtataattgttttaaatataattttagaaagtttattaaagtggttcgctcctattttagtttttactgctgaggaaatttatagtttagtcaacaaggataattctgaaagcattcatgaaaaaaattttgtaaaaattccagctaatggaagaatgata

SEQ ID NO: 304811 - DNA, 544 bp, Unknown
  Bacterial polypeptide expressing nucleotide sequence isolated from the Sargasso Sea
atgtctaaagataatctacaactcccaaagacggctttttcaatgaaagcaagtttacctacaaaagaacctttaattttggaaaaatgggaaaaaaataaaatttttgaaaaattaagaaaaagctcaaaaggaaaagaaaaatttattctacatgatggacctccatatgctaacgggcatatacatatgggaactgcgctcaataaaattttaaaagatatgataatacgttttcatcaaatgaatgaaaaagactcagtctatgttcctggatgggattgtcacggacttccaatagaatggaaaatcgaagaagaatacaaaaaaaagaaaaaaaataaagacgaggttccaattaaagattttagacaagagtgcagagaatttgctaaaaagtggatacaagttcatataaaagaattcaaaagattaggagttgttggagactttgaaaattattattcaacaatgagtaacgaagcagaagcccaaattgtaagagaacttggaaaatttcttttggacggaagcctatatcaag

SEQ ID NO: 304812 - DNA, 859 bp, Unknown
  Bacterial polypeptide expressing nucleotide sequence isolated from the Sargasso Sea
aacaatgagtttcgatgcagaagcgcagattgtaagagaactaggtaaatttttgcttgagggaagtctttatagaggttttaaaccagtactgtggtcaacagtagaaaaaactgcattagctgatgctgaggttgaatataaagatcacaaatcaaatactatatacgcacagtttaaagttgaaaaaactgatcaaaattttttaaaagacgcctttattattatatggacgacgacaccatggacgatacctgcaaacaaggctttagcatttaatcaaaacttgagatattctgttttacaagttgataataaaaaaattgtggtcgcagaaaaattaattaattctgttattgaaaattgcaatctaagtaaatttaaaattgtgaaatcttttgaaggaaaattatttaacaaaacaatttgttcccatccatttaaaaatttaggttataactttgatgttccaatgttagaggctgattttgtaactcttgaacaaggaactggaattgtccattgtgcacccagtcatggtccagatgactttaacttatgtttgaagcatggaatgaaggctatcgagacagtaaataatgatggaagatatactaaaaacattcctgtttttgaaggtacacatgtatttaaagcagatgatattattatcaaaaatttagacgaacaaaaaaaccttttaggaagcggtagtttagttcatagttaccctcattcttggagatctaaggcacctttagttcacagagctacaccacaatggtttatttctatggaaagtcataaactaagaaacaaagcactggagtcaattgatcaaacatcttttatccagaaa

SEQ ID NO: 304813 - DNA, 90 bp, Unknown
  Bacterial polypeptide expressing nucleotide sequence isolated from the Sargasso Sea
gatgtggtcgcctgttgagaaaacggcactcgccgaggcggagatcgagtatcaggaccacacctcggtcaccatctatgcgcgcttccc

SEQ ID NO: 304814 - DNA, 508 bp, Unknown
  Bacterial polypeptide expressing nucleotide sequence isolated from the Sargasso Sea
atgtctaaagaaagtttacagcttcctaaaacagctttttcaatgaaagcaaatttaccaaaaaaagagccggatataattcaacactgggaaaagattgatctttataaaaagttaagaataaaatctaaaggaaaagaaaaattcgttcttcacgatggacctccatatgctaacggtcatatacatatgggaactgctttaaataaaattttaaaagacattataaccaggtttcatcaaatgaacggaaaagactctatttatgttccaggttgggattgccatggacttccgattgagtggaaaattgaagaacagtataaaaaaaagaaaaagaacaaagatgaagtacctattaaagattttagacaagagtgtagagagtttgctgaaagctggatcgatgttcatattaaggagttcaaaagattgggcgtagttggagattttgataattattattctacaatgagttatggagcggaagcccagattgttcgggaat

SEQ ID NO: 304815 - DNA, 848 bp, Unknown
  Bacterial polypeptide expressing nucleotide sequence isolated from the Sargasso Sea
tgtagtagcaaaaaatttaatcgaaacaataattaaagattgtgagattaaaaactataaagagttaaaaacttttaagggttctgaatttaaaggaacgttatgtagtcatccattagtcaaaatggattttgactacgatgttccaatgttagatgctcaatttgtaaatttagagcaaggaacggggatagtacattgtgctccaagccatggcccagacgactttaatttgtgtttgaaaaataatataccgtcactctatacagtcgataactcaggtgtttacactaaagaggtaccttattttacaaatacacatgtattcaaggctgacccaattgttatagacaaattaaaagaacaaaaacaattacttaaaaatgataaacttaatcatagctatcctcattcttggagatctaaggctccattaatttacagagcaacacctcaatggtttatttctatgcaaaaaaataaattgagagataaggctgttaaagcaataaatgaaaccatcttctatccaaacaaaggtaaggacaggcttttatcaatgattgaaggaagaccagattggtgtgtatcaagacaaagagtttggggagtaccattaccgatttttataaataaaaaaacaaaagaaccactaagagatcaaaaaattatagatagaattgcctctatttatgaaaagcaaggctccgattgttggttcacagatgatgcaaaaatttttttaggtgatgactacgatgccaaagattatgaaaaacttaacgatattgtagaggtatggttcgatagtggctcaacacacagttttgttttagagaaagaaaaga

SEQ ID NO: 304816 - DNA, 235 bp, Unknown
  Bacterial polypeptide expressing nucleotide sequence isolated from the Sargasso Sea
atgactaaatcacagataaatctcccaaaaacagctttttccatgaaagctaatctacctactagagagccagaaattcttgaatattggaaaaaaataaatctttacgatgagttgagaaatacaagcaaaggaagagaaaaattcgttctacatgatggacctccatatgctaatggaaatatccataagggaacagcccttaataaaattttaaacagatataattgtaaaa

SEQ ID NO: 304817 - DNA, 610 bp, Unknown
  Bacterial polypeptide expressing nucleotide sequence isolated from the Sargasso Sea
gaagatcaaatatggccagcatcaatatatttagagggcacagatcagcacagaggctggttccattcttcattattagagtcatgtggaactagaggtgtggcaccatatgaatcagttttaacccatggatttgttttgcatgaagatggcaataaaatgagtaagtcttcctcaaacattgttccacctgctgaaattgttgaaaaatcaggtgctgatattttgcgattatgggttgctagtagtgattactctgaagatcttaaaataggtcctgaaataataaagagtaacgcagacagctatcgaagacttagaaatacgcttagatttattctaggtaatttaaatgacttcagtgaagttgaaaaagtcaaatttttagatctgccagaattagaccaatatatacttcacaaattggctcatttagaagatgaagtattaaaaagttatcaatcttttgaatatcagagagttttttcagcaatctttaatttttgtacaaatgaactttcgtcattctattttgatgtacgtaaagacagcttgtattgtgaccacagaactagtcttacaagaagagcaacaagaactgtgcttgata

SEQ ID NO: 304818 - DNA, 799 bp, Unknown
  Bacterial polypeptide expressing nucleotide sequence isolated from the Sargasso Sea
ttagttgatgataatgcctcaatacttgcatggacaacaactccttggacacttccaggaaatgttggtcttgcagttggaccagaggtcacatattgtagagttcgaataactgaacctccatcaggaaattgggaaggacgtggtggagctaaagttggagatgaattaattctagctaaggagctaatgtctgaagtattacgtcatcaagttgaagtgattgaagaatttcccggttcaaaaatagtaggtaaagcctatgaaccactatttccggatgcaatacaaagaggtgattcaggaactgcttggacagtggtttctgcagactttgtaactacgacagatggtacaggcgtagtacatacagctgtaatgtatggtgaagaagattatgcattagggatggaagtaggttttcctgcacaacacacagtaggtatggatggtaaattcattaatggtacacatgaatcattagatggtcgttatgtcaaagattgtgattcagatattattgaccttttagacacaaacagtaggttataccgtgagcatatctatactcacgattatccgcattgctggcgaacagatcatcctttgctgtattatgcaatggatagctggtttgttcgaatgactgctgttaaggataagataatacagtataattcagaagttgaatgggctcctgagtggactggaacaggaagagtaggcgaatggcttagaaatatcaaagattgggcaattagtagggaaagatattggggaactccaataccagtctgga

SEQ ID NO: 304819 - DNA, 524 bp, Unknown
  Bacterial polypeptide expressing nucleotide sequence isolated from the Sargasso Sea
aatggcagaaaataacttaaatctccccaaaacatcattttctatgaaggcaaacttacctgctaaagaaccaaaaattttagaaaattgggataaaacaaaactttacgagaaacttagagaaaaatcatcaggaaaagagaaattcgtacttcatgatggtccaccatatgctaacggtcatatacatatgggaacagctttaaacaaaattttaaaagatattgttacaaagttccaccaaatgaataacaaagactcaatttacgtaccaggttgggactgtcatggactaccaatagagtggaaaattgaagaggaatataaaaaaaagaaaaaaaacaaagatgaaattccaacaaaagattttagaaaagagtgcagagactttgcccaaaagtggataagtattcacaaaactgaatttaaaagattaggggtcataggtgattgggagaattattattctacaatgagttatgatgcagaagcacaaatagtaagagagttaggaaaatttttag

SEQ ID NO: 304820 - DNA, 730 bp, Unknown
  Bacterial polypeptide expressing nucleotide sequence isolated from the Sargasso Sea
atgagtaaagaaaatattaatttacccaaaacttcattttcaatgaaggcaaatttacccaacaaagaacctgaaatattaaaaatttgggaaaatttaaatctatataaaaaacttagagaatctagcaaaggaaagaaaaaatttattttgcatgatggtcctccatacgcaaatggtcatattcatatgggaaccgcattaaataaaattttaaaggatatgattaccagatttcatcagatggaaggaaaagattctgtttatgtccccggctgggactgtcatggattacccatagaatggaaaattgaggaacaatataaaaaaaataaaaaagataaaaatcaagtcccaataaaagattttagattagaatgcagagaatttgctgaaaagtggataaaaatacacataggagagtttacaaggttaggagtggttggcgattggaagaactattattctacaatgagctttgatgctgaggcgcaaatagttagagagctgggtaagtttttactggatggtagcttatacaaaggttacaagcccgtgctttggtctacagtcgaaaaaactgcacttgccgatgccgaagttgaatataaggatcatacttccaatacaatatatgcaggttttaaagttaagaattcaaaaattaacttattaaaaaatgccgaaattattatatggacccactacacccctggactatcccaggcga

SEQ ID NO: 304821 - DNA, 873 bp, Unknown
  Bacterial polypeptide expressing nucleotide sequence isolated from the Sargasso Sea
ttcctcttctcttttagagtcttgcgggactaggggtagagctccttttgaaaccatactttcacacggcttcgtagtagacgggaaaggtatgaaaatgtctaaatcagcaggtaacattatttcacctgaggaaattttaaaaaaatatggtgcagatatactaagactttgggttgcttcttcagactatgcggaggatttaagaatagatcattcgattttagaacaacatgctgagtcttacagaaaaattagaaatacttttagatatattttgggaaatttaagggataattatagcccacaaaattttaagtctatcaaagtaaatgagctaccagagttagaacaagtaattttgcacaaactttattttttaagtttagaaattaaaaaaagctttaaagattataacttccacaagcttcaaaaagagttattaaatttttgcacgttagatctatcgtcattttattttgatataagaaaagatacattatattgtgatgaagtcagttcacaacaaaggaagtcatgtgtgactttactaaatgtaatccttgaatgtctgttaaaatggtacgcaccagtgttgtcgtttacaactgaagaaataaacgatttatcaaataaaaataaaaaaacaagtatccacgaagaaaccttttctaacttaccagaaaattggcaaaacaaaactctattaaaaaaatgggaaaaattactttcttttagacaggaagtaaatatcgctatagaagaaaaaagatcaaaaaaaataattggctctagcttggatgctgatgtaaaaatttctttatctaaaaaagattatgaaattctaagcagtataaacgcagaagaactttt

SEQ ID NO: 304822 - DNA, 331 bp, Unknown
  Bacterial polypeptide expressing nucleotide sequence isolated from the Sargasso Sea
atgactaaatcacagataaatctaccaaaaacagctttttccatgaaagctaatctgcctactagagaaccagaaattcttgaatattggaaaaaaataaatctttacgatgaattaagaaacgaaagtaagggtagagaaaaatttgtcctacatgatggtcctccatatgcaaacggaaatattcacatgggaacagctctcaataaaattcttaaagatataatagtaaaatttcatcaaatggatggaaaagactctatttatgttccaggttgggattgtcacggcctgccgattgagtggaaaattgaggaacagtataaaaaaa

SEQ ID NO: 304823 - DNA, 733 bp, Unknown
  Bacterial polypeptide expressing nucleotide sequence isolated from the Sargasso Sea
agcattataatttggacaactacaccttggactatacctgctaacaaagcattagcttttaatagcaatatcgaatacgcagttttagaaattgaccaacttgaacactttaaagacaaaagaattgtagttgcaaaaaatttaattgaaacaataactaaagattgcgagattaaaaattataaagagttaaaaacttttaagggttctgaatttaaaggaacgctatgtaatcatccatttgtcaaaatggattttgattacgatgttccaatgttggatgctcaattcgttaatttagagcagggaacgggtatagttcattgtgctccaagccatggcccagacgactttaatttgtgtttgaaaaataatataccgtctctttatacagttgataactcaggtgtttacactaaagaggttccctattttacaaatacacacgtatttaaggctgacccgattgttatagacaaattaaaagagcaaaaacaattacttaaaaatgataaacttaatcatagctaccctcattcttggagatctaaggctccattgatttatagagcgacaccacaatggtttatctctatgaaaaaaaataaattgagagataaagctgttaaagcaataaatgaaaccatcttctatccaaacaaaggtaaggacaggcttttatcaatgattgaagcaagaccagattggtggtttcaagacaacgagttgggga

SEQ ID NO: 304824 - DNA, 880 bp, Unknown
  Bacterial polypeptide expressing nucleotide sequence isolated from the Sargasso Sea
agattatgaaaaattatcagatatagttgaagtttggtttgacagtggatccactcattcgttcgtcttagaaaaaagagatgatcttaaatggccagcatctatgtatttagagggttcagatcaacatagaggttggtttcactcctcattgttagagtcatgtggaaccagaggtgttgcaccatttgaaagcattctttcgcatggttttgtcgtagatggaaaaggtctaaaaatgtcaaaatcaacaggtaacgtaattgctccgcaagatatacttaaaaaatatggagctgatatattaagaatttgggttgcatcttcaaattatgctgaggatcttagaatagattattcaattttagatcaacatgcagagtcttatagaaaaattagaaacacgtttagatatcttttaggaaatatacaagatcaatatgaaaatcttgattttgaaaaagttaagtttgaaaactttgactcacttgaaaaatttatgcttcatagaatttatacaataaatgagaattttaagaataattttaaattttataatttccataatttatacaaagagttactaaatttttgtacagttgagctttcagccttttattttgatatcaggaaagacactttatattgtgaggctttaaattctgataaaagaaagaactgtataactcttttaaatattattttacaatgtctccttaaatggtttgcaccaatattatcatttacaactgaagaaatttatcaattagttaaaaaagaagaggacagccaaagtatacatttacaaaattttgtttcagttcctaattcttggaataatgtggaacttagttcagattgggattatgttaaaaaattt

SEQ ID NO: 304825 - DNA, 424 bp, Unknown
  Bacterial polypeptide expressing nucleotide sequence isolated from the Sargasso Sea
atgagtgacaagaaagatcaaaaattaaatttaccaaatactagcattcctatgaaagctaatcttaatttaagagaaccagaaatattaaagcaatgggagaagaggaatgtctacaagaaaattagaaaaaataggaaaggaaaagaaaaatttattcttcatgatggtccaccatatgctaatggcaatattcatctcggacatgcagttaataaagttctaaaagatattgtaattagatcaaaaacattggaagggtatgatgcaccttatataccaggttgggattgccatggcttaccaatagaacaacaggtcgagaaaaaactcggaaaaaaaagaagggaaattgcccaatcagattttagagacctttgtagagactatgctaagaaacaaataaacatcagaaagacgattt

SEQ ID NO: 304826 - DNA, 301 bp, Unknown
  Bacterial polypeptide expressing nucleotide sequence isolated from the Sargasso Sea
aatggaatataaagaaacaatatttttaccaaaaacttcttttgaaatgagagcaaatctccctaaaaaagaaccacaaatcttacaagattggaatgaacaagatattttcgatcaactaagaaaaaaatctgaaggtaaggaaaagtttattttacatgatggtcccccatatgcaaatggacatattcatatgggaactgcattaaataaaatattaaaagatgtaatagtaagaacacaacaaatgacaggaaaagattcaatttatgttccaggttgggactgtcatggcctacct

SEQ ID NO: 304827 - DNA, 341 bp, Unknown
  Bacterial polypeptide expressing nucleotide sequence isolated from the Sargasso Sea
aatgagtaatttacaaataaaccttcccaaaactgctttttcaatgaaagctaatttgccagtaagagagccagaaattatagaatattggcaaaagattaatctttatcaagagttaaggaattcaagaaaaggaaaggaaaaatttgttcttcatgatggacctccatatgcaaatggtaatattcatatgggaactgctcttaataaaattctaaaagatattatagtaaaattccatcaaatggatggcaaagactctatctatgttcctggatgggattgtcatggtttaccaatcgagtggaaaatagaggagcaatataaaaaaaataaaaaaa

SEQ ID NO: 304828 - DNA, 880 bp, Unknown
  Bacterial polypeptide expressing nucleotide sequence isolated from the Sargasso Sea
gttatagctcacgatttactagagacagttttgaatgaatgtgagattaaaaaattcgaaaaacttgacaagatatcaggcaaagaatttaaagatataatttgtagtcaccctatggaaaaagaaggctacacttacgatattcctatgttagaggcaaattttgttacaacagagcagggttctggaatagtccattgtgcaccaagtcatggacctgacgattttaacttatgtaataataacggaatccaagcaatcgaaacagtagatgatgatggaaaatatactaagaatattttgaatttcgagggaatacatgtttttaaggcaaatccaatagtaatcgaaagtttaaaaaagaataaaacattactttctaatggaaaattaaatcatacttaccctcattcctggaggtcaaaggcgccattaattcacagagcaactcctcagtggtttatatcaatggaaagtcacggacttagagaaaaagcgttagttgcaattgataaaactgatttttatccaaacaaaggtaaggagagacttaaatcaatgatagaaactagaccagattggtgtgtttctagacaaagagtttggggagttccactgcccatattcatctctaaaaaagatgagaaagttttaattgatgaggaagtctttaataacattgctaatatttttgagaaagaaggatcagattgttggtttgaagataacaaacaaaagttccttggaaagaaatatgatgaaaatgatttttaccaaacaacagatattgtagaagtatggtttgatagtggctctactcattcttttgtattagagcaaagagaagatttaaaaatggcccgcatctctttaccttgag

SEQ ID NO: 304829 - DNA, 832 bp, Unknown
  Bacterial polypeptide expressing nucleotide sequence isolated from the Sargasso Sea
aaaacatttaaaggtaaggaattaaaagaaaccatctgtaatcacccttttttagatctaggttatgattatgatatcccaatgttagaggcaaggtttgtaacaactgagcagggaaccggcattgttcattgtgctccaagtcatggacctgatgattttaatttatgtctaaataacggaattaaagcaatagaaacagttgatggggacggaaaatatacaaatcatgtaagcttatttgaaggtattcatatatttaaagcaaacccaatagtaattgaaaaacttaaagagcaaaaaaaattattatcaaatggggagcttatccactcctatccacattcttggagatcaaaagctccactagttcatagagccactccacaatggtttatatcgatggaaagtcataaattgagagataaagctttgaaagcaattaatgatacaactttctatcctagtaagggaaaagagaggttaaaatcaatgatagagactagaccagattggtgtgtgtcaagacaaagagtttggggcgttcctcttccaatttttgttaataaaaaaactaaagaaatattagttgatgatgaagttaatgaaaatattgcatctatttatgaaaaagagggttcagattgttggttttcagataatccacaaagatttttaggtaaccaatacaaggctgaagattatgaaaagttgagcgatattgtagaggtttggtttgatagtggctccacgcactcatttgttcttgaaaaaagagaagatttaaagtggccggcatcgatgtatttagaaggatcagatcaacacagag

SEQ ID NO: 304830 - DNA, 394 bp, Unknown
  Bacterial polypeptide expressing nucleotide sequence isolated from the Sargasso Sea
atgagtaaaagttctgtaaatcttccaaaaacatcattttcaatgagagcaaatcttcctttaaaggaacctgatataattgattattggaacagaatatcactttatgaaaagcttcgatcaaacagtaaaggaaatgaaaaatttgttttacatgatggtccaccttatgcaaatggaaatatccacatgggaactgctttaaataaaattttaaaagatattgttacaaagtttcatcaaatgaatggaaaagactctgtatatgttccaggatgggattgtcatggcttaccaattgaatggaaaattgaagaacaatataaaaagaataaaaaaaataagaatgatgtgccaatagtgaatttagaaaagagtgcagagacttgcaaat

SEQ ID NO: 304831 - DNA, 889 bp, Unknown
  Bacterial polypeptide expressing nucleotide sequence isolated from the Sargasso Sea
ttaattgaactaaatgatgatggtgatttaaaaaataaaaaaattgttatagcagaagctttattagagtcgatgattaaagactgcgatataaacaaatttaaaaatttaaaaaaatttaaaggtgaagatctcaaaaatactatttgcaatcatccttttttagatttgggatatgattatgatgtaccaatgctagaagctcaatttgtaacaacagagcaaggcacaggtattgttcattgtgcaccaagtcatggaccagacgattttaatctatgtttaaaaaatggaattaaggcaatagaaacagttgatggagatggtaaatatacaaagaatgtgggctcattcgaaggaatacatatttttaaggcaaatccaattgtaatagaaaaactaaaagaacaaaaaaaactgattaaaaatggagaactggttcattcttatcctcattcgtggagatcaaaagcacctttggttcatagagctactcctcaatggtttatttctatggaaagtcataaacttagaaataaagctttgaaagcaattgatgaaacaattttttacccaagtaaaggaaaagaaagattaaaatcgatgattgaaacaagaccagattggtgcgtatctcgtcaaagagtgtggggagtacctttgcctatttttgtaaataaaaaaactaaagaagttttaatagacgatgaattatttgaaaatattgcaaaaatttacgaaaaagaaggatcagattgttggttttctgatgatcctcaaaagtttttgggtaaaaaatataaagcagaagattttgataaacttagtgatattgtagaagtatggtttgatagtgggtctactcattcttttgtattggaaaaaagag

SEQ ID NO: 304832 - DNA, 262 bp, Unknown
  Bacterial polypeptide expressing nucleotide sequence isolated from the Sargasso Sea
atgaacaaaaataatattaatcttcccaaaacatctttttcgatgaaagcaagtttaccgaataaagaaccaagtttaattgattattggaataaaattgatttatataaaaaattaagatcttcaagcgaaggtaaagaaaagtttgttctgcatgatggcccaccatatgcaaatggtgatattcatatgggaactgcattaaataaaattctaaaagatttaattgtaaagtttcatcaaatgaatggaaaagactcag

SEQ ID NO: 304833 - DNA, 391 bp, Unknown
  Bacterial polypeptide expressing nucleotide sequence isolated from the Sargasso Sea
aatggaatataaagatacaatttttctcccaaaaacctcttttgaaatgagagcaaacttaccaacaaaagaacctgaaatactaaaagattgggacaaacaaaatatttttactgaattgagaaaaaagtcaaaaggtagggaaaaatttgtacttcatgatggccctccttatgcaaatggtcatatacatatgggcacagctttaaataaaatactcaaggacgttattgtgcgaactcagcagatggcaggcaaagactcaatttacgttccagggtgggattgtcatggcttaccaattgaatggaaaattgaagaggaatatagaaaaaaaggtcaaaataaagatgatattcctattgttcagtttagacaagaatgcagagat

SEQ ID NO: 304834 - DNA, 355 bp, Unknown
  Bacterial polypeptide expressing nucleotide sequence isolated from the Sargasso Sea
atgtctaaagaaagtttacagcttcctaaaacagctttttcaatgaaagcaaatttaccaaaaaaagagccggatataattcagcattgggaaaaaattgatctttataaaaagttaagaataaaatctaaaggaaaagaaaaattcgttcttcacgatggcccaccatacgctaacggtcatatacatatgggaactgctttaaataaaattttaaaagatatgataaccaggtttcatcaaatgaacggaaaagactctatttacgttccaggttgggattgtcatggacttcctattgagtggaaaattgaagaacaatataaaaaaaagaaaaagaataaagacgaaatac

SEQ ID NO: 304835 - DNA, 534 bp, Unknown
  Bacterial polypeptide expressing nucleotide sequence isolated from the Sargasso Sea
aatgagcaaagaaaatattaatttacccaaaacagctttctcaatgaaagcaaatttacctaataaagagcctgaaattctaaaccactggggcaagattaatttatataaagaattaagaaaatctaataagggaaataaaaaatttattcttcatgatggacctccatacgcgaatggtaacatccatatgggaactgcatataataaaattcttaaagatataattgtaaaatttcatcaaatgagcggtgaggactcggtatatgttcctggatgggattgtcatggattaccgattgaatggaaaattgaggaacaatataaaaaaaataaaaaaaataaaaatgatatacctattgcagagtttagaaaagaatgcagagcttttgctgaaaagtggatcgaagttcataaaaaacaatttatgagattaggagttgttggagactgggataattattactcaacaatgagttttgatgctgaggcccaaattgttagagagcttggaaaatttttaaaagaaggtag

SEQ ID NO: 304836 - DNA, 614 bp, Unknown
  Bacterial polypeptide expressing nucleotide sequence isolated from the Sargasso Sea
aatgagcaaaagcaatatcaatctacccaaaactgctttttcaatgaaagcaaatttacaaaataaagaacccggaataattgattactgggataaaattgatttatataaaaagttaagatcttctagcaaaggaaaaacaaaatttattcttcatgatggccccccatatgctaatggagatatacacatgggaacagcactaaataaaatccttaaagatgtaatagtaaaatttcatcaaatgaaaggagaagattctgtttatgtaccaggatgggattgtcatggtttgccaattgaatggaaaattgaagaacaatataaaaaaaataaaaaaaataaaaatgaagtcccaattaatgaatttagaaaggaatgtagagattttgcaaagaaatggattgaggtacataaaaagcaatttaaaaggcttggggtagtaggtgactgggaaaattattattctacaatgagttttgatgctgaagcccaaatagttagagagcttggtaaatttttaaaagaaggaagtctttacagaggttataagcctgttctttggtccacagtagaaaagacagcattggcagatgcagaagttgaatacatgg

SEQ ID NO: 304837 - DNA, 895 bp, Unknown
  Bacterial polypeptide expressing nucleotide sequence isolated from the Sargasso Sea
aggcttggagttgttggagattgggaaaattactattcaacaatgagttatgaggctgaggctcaaatagtaagggaattaggtaaatttttaaaagaaggcagtttatatagaggttacaagccagttttgtggtccactgtagagaaaactgccctagctgatgcagaggttgaatatatggatcatacatcagatacaatttatgtttcgtttcatattcaaaaatcaaaattagaaaatcttttaggcgctgaagtaattatctggacaaccacaccatggacgataccagcaaataaagctttagcttacaacaaatctttaaaatatgttgtgatacaaattaatgacaaaagtgattttaatactagaaaaattgtagttgcaaaagatcttttaaaaagcgtagttgaggattgtaaaattaacgactacaaaattataagtgaaataaatggatctgattttgatggagtagtttgctcccatccatttaagaacttaggttacaattatgatataccgatgcttgaggcaaggtttgttacgacagaacaaggctcaggaatagtacattgcgctccaagccatggtccagatgattttaatttatgtttaaataataatattaaagctgtcgaaacagttgatgatgatggaaagtatacaaaacatgttttaaattttgaaggtattcatatttttaaagcaaaccccattgttattgagaagcttaaaaatgaaaaaaatttattagcaaatggaaaactaaaccactcatatcctcattcgtggagatctaaagctccgttagttcatagagctacacctcaatggtttatttctatggaaagccataaattaagagataaagctttaaaagctatagatg

SEQ ID NO: 304838 - DNA, 367 bp, Unknown
  Bacterial polypeptide expressing nucleotide sequence isolated from the Sargasso Sea
atgagcaaaagtcaaataaatttacctaaaacagctttttcaatgaaggcaaatttaccgataagagagccagaaatattggaactttggaaaaaaattgacctttataaagaattaagaaactcaagaaaaggagaagaaaagtttgttcttcacgatggtcctccgtatgcaaatggaaatattcatatgggcactgctttgaacaaaatactaaaggatatcattgtgaagttccatcaaatggacggtaaagactctgtttatgtgccaggttgggattgtcatggtttacctattgagtggaaaattgaagagcaatacaaaaaaaataaaaaaaataaaaatgatgttccaaattgttgaa

SEQ ID NO: 304839 - DNA, 766 bp, Unknown
  Bacterial polypeptide expressing nucleotide sequence isolated from the Sargasso Sea
agtcgagtatatggataaagtttctacatcagttgatgttttattcaaaatagttgaaccttctgagtttattgaaagaacaaatgccagtaagatcaataatgataatgaattgtttattccaatttggacaacaacaccatggacccttccatcaaatgaggcagtcgcgatgggtgaagatattccctatgggatttacagtctgacacttcatgaaagagatattcatgtcgttattgccaatgaactcagagaaagtattgagaaaagatggggagtatcaaatttagaaatgctcgaagaggtttctgctgaaaacctttcgggacttcagttacaacatccttttgatgagagaacagtcccagttcttctaggtgatcatgttaccactgagaatggtactggctctgtacatactgctcccgctcacggacatgaagattttcaaattgggaaagaaaatgatttagatctcaaatgttacgttaattcatatggtgttttcattgatgcaaaagagagctttgccaaacagcatatatttaaatctgaatcagaaatcattgaaagattagatgaatcaaacttgctcattttgagtgaaaaatttgaacacagctatccacactgttggagacataaaactccagtgatctttaggacaacaagacagtggttcatcagtatggaaaatgaagattttagatcctcttgtttagagtcaatcaaagatgttcagtggaaaccaaaatggggagaa

SEQ ID NO: 304840 - DNA, 912 bp, Unknown
  Bacterial polypeptide expressing nucleotide sequence isolated from the Sargasso Sea
gatctagaccattttaaagataaaaagatagttgttgctaataacttaattgattcaattattaaatcttgcggaatagaaaatcacaaagttttaaaaacttttaaaggctctgaatttaaaggaacgatttgtagccatccttttttacagatgaattttgattatgatattcctatgctagaggcaaactttgtagatcttgagcaaggaactgggatagttcattgtgcacctagtcatggaccagatgatttcaatttatgtcttaagaataatattccatcaagttatacagttgacaatgctggtctttatacaaaagaagtaccttattttactaatacacatatttttaaagccgatcctctagtgatagaaaaacttaaagaacaaaataagttactaaaagacgacaaattacatcatagttatcctcactcatggagatcaaaagcacctttaatatatagagctacaccacagtggtttatttctatggaaaaaaattctttaagaaataaagctattaaagcaataaagaatacagctttttatccagaaaagggtaaggagcgattgctttctatgattgaagaaaggccagactggtgtgtttcaaggcaaagagtttggggcgttcctttgcctatttttattaacaaaaaaacaaaggaaccattaagagataaaaaagtaatagatagaattgcagaaatttacgaaaaagaaggatctgattgttggtttacagatgaagcaaaaaaatttttaggaaaagactatgatccaaatgattatgaaaaacttaatgacattgtagaagtatggtttgatagtggttctactcatagttttgttttagagaaaagaaaagatttaaaatggcctgccgatatgtatctgaagtca

SEQ ID NO: 304841 - DNA, 943 bp, Unknown
  Bacterial polypeptide expressing nucleotide sequence isolated from the Sargasso Sea
gccattaaaaaagacggcattgactcatggacaaacttagatttaagtgttgacgaagaaggttatgaaaaatctaaagatatctttgatgtttggtttgattctgggattacacattattgtgtcgtagatgaaatatttggttcaaatacacaatcagatctttatttagaagggagtgatcagcacagaggctggtttcagtcttctcttttaacttccatagcaatgaagggaacagctccttataaagctgtgctaactcatggttttgtagttgatgaaagtggcagaaaaatgtccaaatcagtaggaaatgttgtaactccacaagaagttatcaaagattctggagcagatattttaagatactggattgcctcaacagattttagaggcgagatggccttttcaaaagatatctttgatagatcaatagacgggtttagacgaattagaaacactatgagattcatggtttcaaatttatatgactatgatggtgagtttaagaaagatgatttgttatttttagacagagttatattgtcaaaggcacatagactacaagaagatataagagaaaatttcaataattataattttcatcttgtgatatcaaaaatactcaatttttgtgtaaatgacttaggtggcatgtatctcgacgtgataaaagaccgtttatacacaatgaaaagcgattctttgggaagaagatctgcacaatatgcggtaaatcatatactaaatattttaattaaaagtatatctccaatcttgccattcactgcatatgagtttcaagaaagcctcaaaccaggaaaaggcgatgatattttctatgaagagttccaaaacgatgatttggcagcaagttttgaggatattgaaaagtttgaattcttagatagccttagatcgagagtatatcaggcaattg

SEQ ID NO: 304842 - DNA, 754 bp, Unknown
  Bacterial polypeptide expressing nucleotide sequence isolated from the Sargasso Sea
ggaaaaaaatataaaaaagaagactacattaaatctaacgatatagttgaagtctggtttgatagcggggctacgcattcttatgttttagaaaaaagaaaagatttggcttggccagcttcaatgtatttagaaggatcagatcagcatagaggatggtttcattcttcattattagaatcttgtggcacgagaggtaaggcaccatttaaaagtattcttacccatggattcgtagttgatggcaagggtttaaagatgtcaaaatctacaggaaatataatagcgcccgaagatattttaaaaaaatatggagcggatattttaagaacctgggttgcggcatctgattacgccgaagatttacggctagattattcaattttagaacagcacgcagagtcatacagaaaaattagaaatacatttaggtttttgctaggaaatttaaaggacaaaaaaaataattttgatctaaattcaaaggaaattgaaaagtggccagaacttgagcgatttattttacatcaaatttttttattaaataaaaattttgaaaattactttaaagaatataattttcataaactttataaagaattgataaacttttgttctttagagctatcagcattttattttgatattagaaaagatacactttattgtgatgatttttcatcaacaaagagacaggcttgtattaatttgctcggtttaattttagacatgttgttaaaatggtttgcaccaa

SEQ ID NO: 304843 - DNA, 209 bp, Unknown
  Bacterial polypeptide expressing nucleotide sequence isolated from the Sargasso Sea
tatgagtgaaaagaaagaccaaaaattaaatttaccaaaaactagcattcctatgaaagcaagccttaacttaagggagcctgaaatgttgagcgaatgggacaagagaaatgtctataaaaaaattagaaaaaataggaaaggaaaagaaaaatttattcttcacgatgggccaccatatgcaaatggcaatattcaccttgggcatg

SEQ ID NO: 304844 - DNA, 862 bp, Unknown
  Bacterial polypeptide expressing nucleotide sequence isolated from the Sargasso Sea
aaaacaaaagaaccgttaagagatcaaaaaattatagatagaattgcatctatttacgaaaagcaaggctccgattgttggttcacagatgatgctaaaacttttttaggcaatgactatgatgcaaatgattatgaaaaactaaatgatattgttgaagtttggtttgatagcggttcaacacacagttttgttttagagaaaagaaaagatttaaaatggcctgcagacatgtatttagagggatctgatcagcataggggatggtttcactcttccttattagaatcatgtggaactaggggcaaagcaccatttaagagtatactttcacatggtttcgttgtggatggtaaaggtatgaaaatgtcaaaatcgatgggcaatgttatctcacccgaagatatattaaagaattatggtgcagacatacttagagtttgggcttcagcgtctgattatgctgaagatttaagaatagataaaaatattttaatacaacatgcagagtcttatagaaaaattagaaatacatttagatttatgcttggtaaccttaaagataattttgaaaagcaaaaatttgacaaaataaagataaatgaattcgatgaattggagcaatttattttgcacaaattattttcaataaacaaatctttttatgaaaatttgaaaaattataattttcacaaattatataaagaactcttgaacttttgcacacttgatctttcttctttttattttgatatcagaaaagatgttctttactgtgatagcttaaattcaaagaaaagaaaaaactgtgtaatcgttctgaacataatcttagaaagcctattaaagtggttcgctccaa

SEQ ID NO: 304845 - DNA, 822 bp, Unknown
  Bacterial polypeptide expressing nucleotide sequence isolated from the Sargasso Sea
gttcttatttggactacaaccccatgggacgataccagctaataaagcattagcctataaccaaggtttgagttatgttttatgcgagatagacaataaagatattttacaaaatgaaaaagtagttattgcaaaagaacttttgacatctgttgcaaaagatactgattacaaaattaatatattaaaagaatttaaaggaaaagaatttgatggaactgtttgtagtcatccattttataaaattggctatgaatatgatgttccaatgctcgaggcaagatttgtaacaactgaacaaggaacaggaattgttcattgtgctccaagtcatggacctgatgattttaatttgtgtatcaataatggaataaaagcaattgaaacagttgatgatgatggaaggtatacgagtcacatacctatatttgaaggaactcatatttttaaagcaaatgatattgttatagaaaagcttaaagaactaaaaggtcttttgaacaatggaaaactaacacattcttacccacattcttggagatcaaaagctcctttagttcacagagcaacacctcaatggttcatttcaatggaaagtcataagctaagagacaaagcacttaaagcaataaacgataccactttttatccaggcaaaggaaaagaaagaattaaagcaatgatagagacaaggccagattggtgtgtctctaggcagagagtttggggtgttccacttccaatatttatttccaaaaaaactggagaaattcttattgatgaggaagtttttgagaatattgcaaaaatttatgaaaaaga

SEQ ID NO: 304846 - DNA, 463 bp, Unknown
  Bacterial polypeptide expressing nucleotide sequence isolated from the Sargasso Sea
aatgagcaaagatcaaataaaccttccaaaaacagctttttcaatgaaagcaaatctcccattgaaagaacctaagatcgttgaacattggaataaaatcgatctttacaatttattaagagaaaataataaaggcaaagaaaagtttgttcttcatgatgggcctccttatgcaaatggtaatattcatatgggaacagcttttaacaaaattcttaaagatataattacaaaatttcatcaaatggatggtaaagactcagtatatgttccgggatgggattgtcatggtttgccgattgaatggaaaatagaggaacaatataaaaaaaataaaaaaaataaaaatgacgtgccagtcgttgaatttagaaaagaatgcagagagtttgctaataaatggatcaaagttcataaagagcaatttaaaaggctcggagttgttggagattgggaaaattac

SEQ ID NO: 304847 - DNA, 818 bp, Unknown
  Bacterial polypeptide expressing nucleotide sequence isolated from the Sargasso Sea
tctaaaagaagtagcttatataggggatacaaaccagttctttggtctacagtagaaaaaactgctcttgcagatgctgaagttgaatatatggaccatgtatccgatacaatttatgtagaatttccggttgttaaaacaaattttaaagagatagaaaaatcaaatgttgttatatggacaaccacaccttggactatacctgcaaacaaagctttagcttacaatcaaagtttaacgtatctattgttagagattgataacgaaaaaaaaatcattattgcaaaagatcttttagagtccttcaaaaaagacactaatattgaaaaaaccaaaattattaaagaattttctggaaaggaatttgaagggacactctgtagtcatccattttactcaattgggtatgattatgaaattcccatgttggaggcgagatttgtaacgactgaacaaggaactggaatagtacattgtgcaccaagtcatggtccagatgattttaatttatgcctaaataataatataaaagctgttgaaacagttgatgatgacgggagatatactaaaaacattttgcattttgaagggctacatatttttaaagctaatagtgtcattatagacaaattaaaagaacataaaaaacttattgcaaatggtaaattaaatcactcgtatccacactcatggagatcaaaagctccattagttcatcgtgctaccccacaatggtttatatcaatggaaagtcatgaattaagatctaaagcattgaaagcattggatgaaacaactttttatccaagtaaaggaaa

SEQ ID NO: 304848 - DNA, 857 bp, Unknown
  Bacterial polypeptide expressing nucleotide sequence isolated from the Sargasso Sea
aaggtttcagcgctgggggatctgggctgactgggagcagccgtatctgaccctgcagaaggaatacgaatcagctcagattcgcgtcttcggcgagatggtgctcaaggggcacatctaccgcggcctgaaaccggtgcactggagcccgagctcccgcacagccctggcagaagccgaactggaatatcccgacggtcacaccagtcccagcgtctatgtggcttttccggcggtggagctgccggcgacgctgcgggatgcagtcaagcaggagggcctggacctgccctctgaccccaaaaccctgggcgagggtcttcaggtcgcgatctggaccacaacgccctggaccctccctgcgaacctggcggtttcggtgaatgaacggctcgattacgccctggccgaggacggcgcaggccgcctgctgctggtggcagctgacctgatcgagtcgctctccaaaaccctggaatgtcccctcaagcagcgcgccacggtgaaaggtgccctgcttgccggtctcatctaccggcatcccctgctggaccgcaccagcccggtggtgatcggcggggagtacatcaccaccgaatcgggcacaggcctcgttcacaccgcgcctggtcacggcgtcgacgacttccacaccggccagaagaacggcctgccggtgctctgccctgtcgacgaaggcggcaccctcaccgatgaagccgggccgtttgcgggcctgaatgtgctcaaggacgccaaccccaagatcatcgaagctctggagtcggctggggccctgctcaagcaggaggcctatggccaccgctacccctacgactggcgcaccaagaaaccca

SEQ ID NO: 304849 - DNA, 784 bp, Unknown
  Bacterial polypeptide expressing nucleotide sequence isolated from the Sargasso Sea
gaagatcaaaagtttttaggaaaaaaatataattcggaagattatgaaaaaatgagcgatattgtcgaagtctggtttgatagcggatcgacccattcttatgtgttggaaaaaagagaagatttaaaatggcctgcatcaatgtatttagaaggttcagatcaacacagggggtggtttcactcctcactattagagtcatgcggaacaagaggaagagctccttttgaaagtattttatctcatggttttgtagttgatggaaaagggcttaaaatgtctaaatctactggaaatgttattttacccgaagaggttttgaaaaaatatggagcagacatattaagaatttgggtagcatcatctaattatgcagaagatctaagaattgattattcaattttagatcagcatgcagaatcttatagaaaaataagaaatacctttaggtatttacttggaaatattcaggatgattatattgataaaaattttgaagatttaaatattgaacaacttcctgatcttgaaaaatatatgttgcatagaatttatttaatgaacaaaaatttttataattattttaattcttataattttcataatttatataaagaattattaaatttttgtacagttgagttatctgctttttattttgatattagaaaggatcttctttattgtgatccaatagattcaaaaaaaagatctgactgcatcttagttttaaatataatgcttaattgtttattaaaatggtttgcgccaatactatcattta

SEQ ID NO: 304850 - DNA, 601 bp, Unknown
  Bacterial polypeptide expressing nucleotide sequence isolated from the Sargasso Sea
atgagcaaagaacatattaatttacctaaaactaaattctcaatgaaagcaaatttgccaaacaaggagccaaattatattgaattttggaagaaaattgacctgtacaatttgttaagacaaaaaagtaaagggcaagaaaaatttgtacttcatgatgggcctccatatgcaaatggcaatattcacatgggtactgctttaaataaaattttaaaagacataattacaaaatttcatcaaatggatggcaaggactcagtttatgttcctggatgggattgccatggtttgcctattgagtggaaaattgaagaacaatacaaaaagaataaaaaaaacaaaaatgatgttccaataattgaatttagaaaagaatgtagggagtttgcaaacaaatggatagatgttcataaaggagaatttacaagacttggggtaattggtgattgggaaaattactattcaacaatgtcatttgatgcggaagctcaaatagttagagaacttgggaaatttcttaaagaaggaagcctttatagaggctataaaccggttctttggtcaactgttgaaaaaacagctttagctgatgctgaag

SEQ ID NO: 304851 - DNA, 826 bp, Unknown
  Bacterial polypeptide expressing nucleotide sequence isolated from the Sargasso Sea
attataattgaaaagctaaaaactttaaaaaatttagtttctaatggaaagctaaaacactcatacccacattcctggaggtcaaaagctccattggtacacagggcaactcaacaatggtttatctcaatggagagtcacgggttgagagaaaaagctctaaaagctttagatgaaacaaaattttttcctagtaaaggtaaagatagaattaaatcaatgatagaaacaagacccgattggtgtgtttccagacaaagagtatggggtgttccattacctatttttgtatctaaaaaaaataatgaagtattgattgatgaagaggtatttgaaaatatagcaaatatttatgagaaagagggttcagattgttggttttctgatgatccacagaggtttttaggaaataaatataagtcacaagattatcataaattaagtgatattgttgaagtttggtttgatagtggatctacccactcttttgttttagaaaaaagagatgatttaaagtggccagcttcgatgtatcttgaagggtcagaccagcatcgaggatggtttcattcatctttactagaatcttgtggaactagaggtagagcgccttttgaaagtatattatctcacggttttgttgtcgatggaaagggactcaagatgtccaagtcagctggaaacacaatagcaccagaagatatactaaaaaaatacggtgctgatatcttaagaatatgggttgcggcttcaaattatgccgaggatttaagaattgaccactcaattttacaacaacatgctgaggcctacagaaaaattagaa

SEQ ID NO: 304852 - DNA, 883 bp, Unknown
  Bacterial polypeptide expressing nucleotide sequence isolated from the Sargasso Sea
atgagttttgatgcagaagctcaaattgtcagagaactcggcaaatttttaaaagagggtagtttgtacaagggctataagcctgttctatggtcaacagttgaaaaaacagctttagcagatgcagaagttgaatatcaagatcatgtgtcagatacaatctatgcagccttcccagttaaaaaatctaatatcaatgaactaattggttcgaatgttgttatttggactacaactccatggaccataccagctaacaaagcattagcttataaccaaagtttggattatgttttatgcgagatagataacaaaaaagcattacaaaacgaaaaaatagttattgcaaaagaacttttgccatctgttgcaaaagatactgagaacaaaattaagataataatggattttaaaggtaaagaatttgagggaactatatgtagccacccattttacaaaattggatatgactatgatgttccaatgctcgaggcaagatttgtaacaactgaacaaggtacaggaattgttcattgtgctccaagtcatggacctgatgattttaatctgtgtatcaataatggaataaaagcaattgaaacagttgacgatgatggaaggtacaccaaacacatacctatgtttgaaggaattcatatttttaaagcaaacgatattgttattgaaaaacttaaagaagtaaaaggtcttttaaacaatggcaaactaacacattcttacccacattcttggagatctaaagctcctttagttcatagagcaacgcctcaatggtttatttcaatggaaagtcataatcttagagataaggcacttaaagcaattaatgacactactttctatcctagtaaaggcaaagaaa

SEQ ID NO: 304853 - DNA, 745 bp, Unknown
  Bacterial polypeptide expressing nucleotide sequence isolated from the Sargasso Sea
agcgttattagactcagttataaaagattgtggaattaaaaaatttaaaaatttaaaaaaaattaaaggtaaggattttaaaaaaactgtatgcaagcatcctttttttgatttaggatacgattatgatattccaatgttggaggctaattttgtcacaactgagcaaggaacgggaatagttcattgtgcgccaagtcatggtccagatgattttaatctttgtttaaataatggaatcaaagcaatagaaactgtagatgatgatggaaagtatacaaaaaatgtatctttatttgaaggtacacacatctttaaagcaaacccaattgtaattgaaaaattaaaagatcaaaaaaaacttctatttaatagtatattagttcattcttatccacactcttggagatcaaaagcgcctttggtacatagagctaccccacaatggtttatttctatggagagccataaacttagaagtaaagctcttaaagcaatagatgatacagttttctatccaagtaaaggaaaagatagattaaaatcaatgattgaaacaaggccagattggtgtgtatctagacaaagagtttggggtgttccattacctatttttataaataaaaaaacaaaagaaattttaattgatgaagaagtatttgaaaatatagcaaagatttatgagaaagagggttcagattgttggttttctgatgatccacaaaaatttttagggtcaaaatat

SEQ ID NO: 304854 - DNA, 505 bp, Unknown
  Bacterial polypeptide expressing nucleotide sequence isolated from the Sargasso Sea
atgagcaaaagcaatatcaatctacccaaaactgctttttcaatgaaagcaaatttacaaaataaagaacccggaataattgattactgggataaaattgatttatataaaaagttaagatcttctagcaaaggaaaaacaaaatttattcttcatgatggccccccatatgctaatggagatatacacatgggaacagcactaaataaaatccttaaagatgtaatagtaaaatttcatcaaatgaaaggagaagattctgtttatgtaccaggatgggattgtcatggtttgccaattgaatggaaaattgaagaacaatataaaaaaaacaaaaaaaataaaaatgaagtcccaattaatgaatttagaaaggaatgtagagattttgcaaagaaatggattgaggtacataaaaagcaatttaaaaggcttggggtagtaggtgactgggaaaattattattctacaatgagttttgatgctgaagcccaaaatagttaga

SEQ ID NO: 304855 - DNA, 888 bp, Unknown
  Bacterial polypeptide expressing nucleotide sequence isolated from the Sargasso Sea
aggtgatttcgacaactactattctacaatgagctatgaagctgaagctcaaattgttagagaattgggaaaatttcttttagacggcagtttgtatcaaggtttcaaacctgtgctgtggtcaacagttgaaaaaactgccttagccgacgcagaggttgagtatttggaccacacatctaatactatttacgtagcttttaaggtggtcaaaactaaaaaagattttttaaaaaatacaaatgttataatttggacaacaactccttggactataccagctaatcgagcattagccttcaatagtaatatagaatattcaattttggaaataaatgatcttgaacattttaaagaaaaaaaaatcgtagtagcaaaaaatttaattaaatcaataactgaggagtgtgaaataaaaaattttaaagaaattaagacttttaaaggatcagaatttgagggaactgtttgtagccatccttttgttaaaatgaattttaattatgacgtgccaatgttagatgcgcaattcgtcaatttagaacaaggtactgggatcgtacattgtgcaccaagccacggtcctgatgattttaatttatgtttaaaaaataacatatcttctcgttatactgttgataactcaggcctttatacaaaagagataccttattttactaatacacacatattcaaagcagatccattagttataggaaaattgaaagagcaaaataaactacttaagcacgataaattaaatcatagctatccccattcatggagatctaaagcacctttgatttatagagcaacacctcaatggtttatatctatgcaaaaaaataaacttagagataaagcaattaaagcaataaatgaaactgt

SEQ ID NO: 304856 - DNA, 763 bp, Unknown
  Bacterial polypeptide expressing nucleotide sequence isolated from the Sargasso Sea
gactacaactccctggacaattccagccaatagggcactggcttataatgaagctcttgattatgttcagttggaattaaatgatgatagtgattttaaaaaaagaaaaattgtagtcgcagaagccttactgcagtcagtcattaatgattgtaaaataaaaaattacaaaaaaattaaaacatttaaaggtaaagatttaaaagaaactatctgtaatcatccttttttagatctaggttacgactacgatattccaatgttggaggcaaggtttgttacaactgagcagggaactggtattgttcattgtgctccaagtcatggacctgatgattttaatttatgtttaaacaatggaattaaagcaattgaaacagttgatggagatggcaaatatacaaaacatgtaagcttattcgaaggtattcatatttttaaagcaaacccaatagtaattgaaaaacttaaagagcaaaaaaaattattatcaaatggagagctgatgcactcctatccacattcttggagatcaaaagctccactagttcatagagccactccacaatggttcatatctatggaaagtcataagttgagagataaagctttaaaagcaattaatgatacgactttttatcccagtaaaggaaaagagagattaaaatcaatgatagagacccgacctgactggtgtgtttctaggcaaagagtatggggtgttcctcttccaatttttattaataaagagactaaagaaatt

SEQ ID NO: 304857 - DNA, 669 bp, Unknown
  Bacterial polypeptide expressing nucleotide sequence isolated from the Sargasso Sea
gatgagtaattctcaaataaaccttcctaaaacagctttttcaatgaaagcaaacctgcctgtaagagagccagaaattttagaatattggcagaagattaatctttacaaagaattaagaaattcaagcaaaggaaaagaaaaatttgttctacatgatggtcctccatatgcaaatggtaatattcatatgggaactgctttaaataaaatattaaaagacattattgtaaaattccatcaaatggatggtaaagactctatctatgttccaggatgggattgccatggtttaccaatcgagtggaaaatagaggagcaatataaaaaaaataaaaagaataagaatgatgttccaattgtagagtttcgaaaagaatgcagatcgtttgcagagaaatggattgaggtacacaaaggtcaatttaaacgtttaggtgtagtgggtgattgggaaaattattattcaactatgagttttgatgctgaagctcaaattgtaagagagcttggaaagtttttaaaagaaggaagtctatacaggggttttaaaccagtattgtggtctacggttgaaaagactgctttagcagatgctgaagttgaatatcaagatcataaatcagatactatttatacatctttccctattaaaacatctaacttaaa

SEQ ID NO: 304858 - DNA, 765 bp, Unknown
  Bacterial polypeptide expressing nucleotide sequence isolated from the Sargasso Sea
aaatttaataaagattttatgacccttttagatgttaaaggatcttccttggaagatattgaatatcaacatcctactaaaaataaaaattgtagagttgtgattgggggagactatatcactactgaatcaggtactggaattgttcatactgcaccaggtcatggaatagatgattttaatgtggggaaaaaatacgatttacctactacatgtgttgttgacgagaaaggtaacttaaatgaacattcaggtcaattcaaaggatcaaatgtccttaaagatgcaaatgatttaattattgaatatctaaatgaaaataatttgcttttattacaagaaaaatataagcatagatatccctatgattggagaacaaaaaaaccaactatttttagagcaacagaacaatggtttgcatctgtaaatggctttagatcatctgcattaaaggcaatcgaagatgttgaatggatgccagcaacaggaaagaaaagaatttattctatggtcgttggtagaggagattggtgtatttccagacaaaggtcatggggggtcccaattccagttttttataaaaaaaatggtaatgaaattctcctaaatagcgatattattaatcacattaaaaaactttttagtgaacatggagcagatatttggtgggattgggatgttaagaatctattaccaaaaaattatgaaaaggaatctgatttgtggataaaaggaacagatacaatggatgtatggtttgattca

SEQ ID NO: 304859 - DNA, 892 bp, Unknown
  Bacterial polypeptide expressing nucleotide sequence isolated from the Sargasso Sea
atttcaagacttggagtgatcggggattggaataattattattctactatgagttttgatgcagaggcccaaattgtaagagaacttggtaaatttttaaatgaaggaagtttgtatagaggatacaagccagttctttggtcaacagtggaaaaaactgccttagcagatgcagaggtcgagtataaagatcataaatcagatacaatctatacatcatttgaagtaaaaaattcaaaggataataaattaaaagatgttgaaataataatttggactacgacaccttggacaatcccagcaaataaggctttagcctataataaaaatctaaaatacatagttataaaaattgaagacgaaaccgattataaagatagaaaaattttagtagctgatgcattactaaaatctgttttagatgagtgcaaaataaaaaaatttagtaaagttttagaattaaatggccaaaatcttgaaggaactatatgcaaacatccattttctaaaataggctttgattatgatataccaatgttagaagcaaattttgtcacgacagaacaaggaactggaattgttcattgtgcacctagtcatggacctgatgattttaatctctgtttaaataatggaataaaagccatagagactgttgatggagatggaaagtatacagatatcattcctttatttaaagggatgcacatttttaaggcaaatagtttagttattgaaaaattaaaaaatgaaaaaaatctcttatctagcggtgagttaattcattcctatcctcattcttggcgatccaaagctccattagtccacagagcaacgcctcaatggtttatatcaatggaaagtcacgaccttagaaaaaaagcttttaaag

SEQ ID NO: 304860 - DNA, 694 bp, Unknown
  Bacterial polypeptide expressing nucleotide sequence isolated from the Sargasso Sea
atggaatataaagatacaatcttcttacctaaatcttcttttgaaatgagaggaaatttacctctcaaagagcccaaaattcttgagcaatgggacagagaaaaaattttttacaaattaagagaaaaatcaaaaggcagagaaaaatttgttcttcatgatggacctccttacgcaaatgggcatattcatatggggaccgcactaaacaaaatactaaaagatgttatagtgagaacacagcaaatggctgggaaagactccatatatgttccaggatgggactgtcacggacttccaatagaatggaaaatagaggagagttatagaaaaaaaggtaaaaataaagatgatgtacctgtcgtaaagttcagacaagaatgtagagagtttgcagaaaaatggatagatattcagaaaaaagaatttagaaggttaggtgttgagggagattggttgaatccatatcttacaatgtctaatgaagcagaagctcaaattgttcgcgagcttggaaaatttctaatagatgagagtctttacaaaggagcgaagcctgttttatggtctgttgttgaaaaaacagcattagcagatgctgaggttgaatatgaagatcatacttctaatacaatatatgtaaaatttataattaccagtactgctgacaaagactggaaggatcaaatatagt

SEQ ID NO: 304861 - DNA, 261 bp, Unknown
  Bacterial polypeptide expressing nucleotide sequence isolated from the Sargasso Sea
aatggaatataaagatacaatttttttacctaaaacatcttttgagatgagggcaaaccttccatcaaaggaaccagtattacttgaaaattgggataaacaaaaaatttttttaaaattgagagaaaaatcaaaaggaaaagaaaaatttgttcttcatgatggaccaccctatgcaaatggtcatatacacatgggaactgcattaaataaaattttaaaggacgtaattgttagaactcagcaaatgaatggtaaaga

SEQ ID NO: 304862 - DNA, 397 bp, Unknown
  Bacterial polypeptide expressing nucleotide sequence isolated from the Sargasso Sea
atgacagttaactatagagatacattaaatcttccagatactgatttttcaatgaaagctggattgcccagaaaagagccagagatattgcatttatggtccaaacaagacttatatgcaaagatcagaaagaagtatgagaataaagaactatttctcttacacgatggacctccatatgcaaacggggatatacatcttgggcactcagttaataaaatccttaaggatataactatcaaatataaaacacttagtggttttgacgctccttatgttcccggctgggattgtcatggtttgccaattgagcttaatgttgaaaagaaacatggaaaaaatagtgaattattaaaaaataaagaaagttttcaaaaggcttgcaaagaatatgctg

SEQ ID NO: 304863 - DNA, 919 bp, Unknown
  Bacterial polypeptide expressing nucleotide sequence isolated from the Sargasso Sea
atttaaaacccttcaaggatttaatgctccttatgtgccgggctgggattgtcatggacttccaattgaacttaatgttgaaaagaaacatggaaaaaatagtgaacttgtgaaaaacaaagaaagttttcaaaaagcctgtaaagaatatgctgaaagccaaatcaataatcaattaaatgattttaaaagattgggagtatttggtgattgggaaaattcatataaatcattagatccaaaatttgaagcagacattgtaaggtctttaggtactatttttagtgaaggtcacctagaaaaaggtgagaagcccgttcattggtgtcaagaaagtgggtcatcattagcagaggcagaagttgagtatattgataaaacatcaaaagcaattgatgtttcattcaaagtagatgattcatccttagagaaggtaaaagatttgtttagttttaaggatttagacgaaatattctttgttatatggacaacaacgccatggacaattccttcaaatgtagctgtttgtattaatcctgaattcgaatactcactgattagcatgcaaaataaattttatgtaattgcatttgagatgattgatcaatgttccaaaagatggaagcaaaaatttgatgttatatcgacaataaaaggcaataaattaattgatattgaccttattcatccttttttaaaaagaaaatcagttctactacatgcagatcatgtcactactgaaacaggaacaggttgtgttcacaccgctcctgctcatggtatggatgattatttaatatgtaagaaaaacaatattgaaaccatccattcgctaaataataagggtttcttcaaagatgagctggattttattgcaggactcccagctatgaaagcagatccgcttattgttgaaaaa

SEQ ID NO: 304864 - DNA, 664 bp, Unknown
  Bacterial polypeptide expressing nucleotide sequence isolated from the Sargasso Sea
atgagcaaggaacatataaatctaccaaaaacagctttttctatgaaggcgaatttgccagctagagaacccgagcttattaagttttgggaaaaaataaatttatatcaaaaattaagagataagactaaaggatgtgagaaatttgtactacatgatggtcctccatatgctaatggaaatattcatatgggaactgccttaaataaaattttaaaagatataattacaaaatttcatcaaatgaatggaaaagactcaatttatgtacccggatgggactgtcatggacttccaatcgaatggaaaattgaagaacaatataaaaaaaataaaaaaaataagaatgatgtaccaattgtagaatttagaaaagaatgtagagattttgcagaaaaatggattaaggttcacaaagaacaatttagaagattgggtgtcatcggagattgggaagattactattcaacaatgagctttgatgctgaagcacaaatagtaagagaattaggcaaatttttaaaagaaggtagtctttataggggctttaaaccagttttgtggtcaacagttgaaaagactgctttagcagatgcagaagtagaatatttagatcatacatctgatacaatatatgtttcttttgctgttaaagaaaagtaaa

SEQ ID NO: 304865 - DNA, 364 bp, Unknown
  Bacterial polypeptide expressing nucleotide sequence isolated from the Sargasso Sea
tatgagtaaggaacacattaatttacctaaaacaaaattctcaatgaaggcaaatttgccaaacaaggagccaaattatattgaattttggaagaaaattgacctttacaatttgttaagacaaaaaagtaaagggcaagaaaaatttgtacttcatgatgggcctccatatgcaaatggaaatattcatatgggtactgccttaaataaaattttaaaagacataattacaaaatttcatcaaatggatggcaaggattcagtttatgttcctggatgggattgccatggtttgcctatcgagtggaaaattgaagaacaatataaaaagaataaaaaaaataaaaatgatgttccaattatt

SEQ ID NO: 304866 - DNA, 895 bp, Unknown
  Bacterial polypeptide expressing nucleotide sequence isolated from the Sargasso Sea
gaagatattttaaaaaaatatggtgcagatatacttagactttgggttgcttcttcagactatgcagaggatttacgaatagatcattcaatattagaacaacatgctgagtcttatagaaaaataagaaatactttcagatatattttgggaaatttaagggacaattatagttcgcaaaattttaagtcaatcaaagtgaatgagttaccagagttagaacaagtaattttgcataaaatttattttttaagtttagaaattaagaagattttaaaagattacaatttccacaagcttcaaaaggagttactaaatttttgcacgcttgatctatcttcattttattttgatataagaaaagatacattatattgtgatgaagtaagttcgcaaaaaaggaagtcatgtgtaactttactaaatgtaatcctcgagtgtctgttaaaatggtatgcaccagttttatctttcacaaccgaggaaataactgacttatcaaataaaaataaaaaaataagtatccatgaggaaactttttctgatttaccagaaaattggcaaaatgaaactttatacaaaaaatgggaaaaattactttcttttagacaggaagttaatattgctatagaagaaaaaaggtcaaaaaaaattattggctcaagcttggaagctgatgtaaaaatttctttatctaaaaaagatcatgaaattctaaatagtgtagatgcagaggaactttttattacatcaaatgttacaaaaactatacaggatgatataaaagataaattatcaatatcagtcaaaaaagctgatggcacaaagtgtgtaagatgctggaaaatagtaccaagtgtaaaagaaaataaatgcccgagatgtggaaaataaa

SEQ ID NO: 304867 - DNA, 556 bp, Unknown
  Bacterial polypeptide expressing nucleotide sequence isolated from the Sargasso Sea
atgagtaagcagcatataaatttacctaagacagctttttcaatgaaggcgaatttacctgtaagagaacctgaatttattaaattttgggacaaaataaatttgtataaaaaattaagagaccagactaaaggatatgaaaaatttgtactacatgatggtcctccatatgcaaatggaaatattcatatgggaactgctttaaataaaattttaaaagatattattacaaaatttcatcaaatggatggaaaagactcaatttatgtacctggttgggactgtcatggactacctatcgagtggaaaattgaagaacaatataaaaaaaataaaaaaaataagaatgatgtaccaattgtagaatttagaaaagaatgcagagattttgcagaaaaatggattaaagttcacaaagaacaatttaaaagattaggcgtcatcggagactgggaagattattattcaacaatgagctttgatgctgaagcacaaatagtaagagaattgggtaaatttttaaaagaaggaagcctatatcgaggcttaaaccagt

SEQ ID NO: 304868 - DNA, 775 bp, Unknown
  Bacterial polypeptide expressing nucleotide sequence isolated from the Sargasso Sea
ccctggaccatcccggccaaccaggcgctgaacgtccaccctgaattcaactacgcgctggtcgataccggcgagcgtctgctggtgctggccgaagatctggtcgagagctgcctggagcgctacggcctcgaggggcaggtgctggcaaccgctgaaggtgcagcgcttgagctgatccgtttccgtcacccgctgtacgagcgcttctcgccggtctatctggccgagtatgttgagctggacgccggtaccggcgtcgttcactcggcgccggcctacggtgaagacgacttccgtacctgcaagcagtacggcatgagcaatgacgacattctcagcccggtacaaagcaatggcgtgtacgtgtctgacctgccgttctttggtggccagttcatctggaaggctaatccggccattgttgccaagctggaagaagtcggtgcgctgctcaagcacaaccgcatccagcacagctacatgcactgctggcgccacaaaacgccgctgatctaccgcgccactgcgcagtggtttgtcggcatggacgtaccggtcgatggcggtgccacgctgcgcgagcgcgccctcaaggccattgaagaaaccgagtttgttccggcttggggcaagcagcgcctgcacaatatgattgccggtcgtccggactggtgtatctcccgtcagcgtaactggggtgtgccgatcccgttcttcctgcatcgcgagacgggcgagctgcatccgcgtaccgttgagctgatcgagcagg

SEQ ID NO: 304869 - DNA, 867 bp, Unknown
  Bacterial polypeptide expressing nucleotide sequence isolated from the Sargasso Sea
acaaagcattagcctacaaccaaagtttggattatattttatgcgagatagataacaaagatattttagaaaatgaaaaaatagttattgcaaaagaacttttgagttctgttgtaaaagatactgattacaaaattgagatattaaaagaatttaaaggaaaagaatttgatggaactatttgtagccatccatttcataaaattggatataactatgatgttccaatgctcgaggcaagatttgtaacaactgaacaaggaacaggaattgttcattgtgcaccaagccacggacctgatgattttaatttgtgtatcaataatggaataaaagcaattgaaacagttgatgatgatggaaagtacacgaaacatatacctatatttgaaggaactcacattttcaaagcaaacgatattattattgaaaagcttaaagaactaaaatgtcttttaaacaatggcaaactaacacattcttacccgcattcttggagatcaaaggctcctttagttcatagagcaacacctcaatggtttatttcaatggaaagtcataaactaagagataaagcactgaaagcaataaatgaaactactttttatccaagtaaaggaaaagaaagaattaaagctatgatcgagactaggccagattggtgcgtctctagacagagagtatggggagttccgcttccaatatttatttcaaaaaaaaatggagaaattcttattgatgaagaagtttttgagaacatagcaaaaatttatgaaaaagaaggatcagactgctggtttgaagataattttcagagactgcttggagataaatacaaagcagaagattttgataaaacccagtgat

SEQ ID NO: 304870 - DNA, 733 bp, Unknown
  Bacterial polypeptide expressing nucleotide sequence isolated from the Sargasso Sea
ttatgatattccaatgctcgaagcaaattttgtggatcttgagcaaggaactggaatagtgcattgcgcacccagtcatggtccagatgattttaacttatgcttaaagaataatattccatctagttatacagttgacaatgctggcttgtatacaaaagaagtaccttattttaccaatacacatatttttaaggcagatcctttagtcatagaaaaacttaaggaacaaaatcaattattaaaagatgataaattaaaccatagttaccctcactcatggagatcaaaagcacctttaatatacagagctaccccacaatggtttatctctatggaaaaaaattctttaagaaataaagctcttaaagctattaatgatacaaatttttatcctaagaaaggaaaagaaagactcctatcaatgattcaagataggcctgattggtgcgtttcaagacaacgagtttggggagttccattacctatctttatcaacaaaaaaacaaaagagcctttaagggataaaaaagtaatagatagaattgctgaaatttatgaaaaagaaggctcagattgttggtttactgacgaacctaaaaaatttttaggagaagattataatccaaatgattttgaaaaacttaatgatattgttgaagtatggtttgatagtggctcaactcatagttttgttttagaaaaaagaaaagatttaaaatggccagcagac

SEQ ID NO: 304871 - DNA, 838 bp, Unknown
  Bacterial polypeptide expressing nucleotide sequence isolated from the Sargasso Sea
ttaggcacagttttatcaaactttgaagcaggacaaaattatcaagacgttcaagacccagccgtaaccgtactgtttaaattacaagatgaagacaaatatatctccgcctggacaacaacaccctggacattaccaagcaaccttggcctttgtgtcggcaaagatatcgactacgtggaggtaaaggaccctgaacttcaaaaagttattattattgcaaaagcgagacttgagcactacggaaaaaagaaagagcttgaaatcattaaagaattgaagggagaggagctaaaaggccttaaatatgtccctctatttccttactttgagcactttaaaaaagatggtgctttccaaatatttaatgacgagtatgtcacaactgataacggaacagggattgtccaccttgcaccttcatttggtgaagatgacaaccgagtaatgaaagaagctggcttcaattttgagctatgccctataaatgacaaaggtgaatttttaaattctgtcgtcgattttgctggagaatatgtaaaatctgctgacaaaggaattattaagacattgaaagagagtggaaagctatacgaacaaagtgttctagttcatagctatccgatgtgtcctcgatccgatactccgcttatctatagaagcattccatcttggtacgttaacgttgagaaaattaaaggtgatttactcaagtctaactcagaaattaactgggtgccttctcacataaaagatggacgatttggaaaatggcttgagggtgcaagagattggtctatttccagaaatcgtgtatggggaacaccaattcctattt

SEQ ID NO: 304872 - DNA, 909 bp, Unknown
  Bacterial polypeptide expressing nucleotide sequence isolated from the Sargasso Sea
gaggctgaagcccaaattgtgagagagttaggtaaatttcttttagatggaagtttatatcaagggtttaagccagtgctatggtctacagtagaaaaaactgctttggctgatgctgaagtagagtatttagatcatacttctaatacaatttatgttgcatttaaagttaagaaaaccaataaagactttcttaaggacgcaagcataataatttggaccaccacaccttggaccatacctgccaataaagcattagcttttaatagtaatattgaatactcagttttggaaattgaaaaccttgcacactttaaagaaaagagaattgtagttgcaaaaaatttaattgagtcgataactaaagaatgtgaaataaaaaactatactgaattgagaacttttaaaggttcagaatttaaaggaactttgtgtagtcacccatttgccaagatggatttcgattatgatgttccaatgctagatgcacaatttgttaacttagagcaaggaacaggaattgttcattgtgctcctagtcacggtcctgatgactttaatttatgtttaaaaaataatattccatcactatacacagttgataacgcgggtgtttatactaaagaggtcccatatttcacaaatacacatgtatttaaggcagactcaattgttatagaaaaacttaaagagcaaaacaaattacttaaaaatgacaaacttaaccatagctatccccattcttggagatccaaggctccattaatttacagagcaactcctcaatggtttatttctatgcaaaaaaataaattaagagataaagccgttaaagctataagtgagactgttttttacccaaataaaggtaaggaaaaacttttatcaatgattgaaggaagaccagac

SEQ ID NO: 304873 - DNA, 607 bp, Unknown
  Bacterial polypeptide expressing nucleotide sequence isolated from the Sargasso Sea
atggaatacaaagatacaatttttttacccaaaacatcttttgagatgcgtgcaaatcttcctgtaaaagagtcaaaaatattagatgattgggataatcaaaaaatttttcaacaattgagaaaaaaatctaaaggaaaagaaaaatttattctacatgatggacctccatatgcaaatggacatatacatatgggtacagcacttaataaaatattaaaagatgtaattgttagaactcaacaaatggtaggcaaagattcaatttatgtgcctggatgggattgtcatggattacctattgaatggaaaattgaagaagagtatcgaaaaaaaggacgcaataaagacgatgttccaattgttcaatttaggcaagaatgccgtgaatttgctgaaaaatggattagtattcagaagaaagaattcagacgactaggtgttgagggagattggaacaatccttatctaactatgtctaatgaagcagaggcacagattgtaagagagctaggaaagtttttacttgataaaagcttatataaaggagctaggccagttttatggtctgtagttgaaaaaactgcacttgctgatgcagaagtga

SEQ ID NO: 304874 - DNA, 856 bp, Unknown
  Bacterial polypeptide expressing nucleotide sequence isolated from the Sargasso Sea
tatgcaaacggtggatatacatctaggacattcagttaataaaatccttaaggatataactattaaatttaaaacccttcaaggatttaatgctccttatgtgccaggttgggattgtcatggacttccaattgagcttaacgttgaaaagaaacatggaaaaaatagcgaacttgtgaaaaataaagaaagttttcaaaaagcctgtaaagaatatgctgagagccaaatcaataatcaattaaatgattttaaaagacttggtgtgcttggtgattggaaaaattcatacaaatcattagatccaaaatttgaagcagatattgttaggtctttaggtattatttttagtgaaggtcacctagaaaaaggtgaaaagccggttcattggtgccaagagagtggatcatcattagcagaggcagaagttgagtatatcgataaaacatcaaaagcaattgatgttgcattcaaagttgatgattcatctctagagaaagtaaaagaattgtttagttctaaggatttaaacggaatattctttgttatatggactacaactccatggacaattccttcaaatgtagctgtttgtattaatcctgaattcgaatactcactaattagcatgcaaaataaattttatgtaattgcatttgacatgattgatcaatgctctaaaagatggaagcaaaaatttgatgttatatcaacaataaaaggcaaaaaattaattgatattgaccttattcatccttttataaaaagaaaatcagttctactacatgcagatcatgtcacaactgaaacaggaacagggttgtgttcataccgctcctgctcatggcatggatga

SEQ ID NO: 304875 - DNA, 115 bp, Unknown
  Bacterial polypeptide expressing nucleotide sequence isolated from the Sargasso Sea
aaaacaagacttatatgaaaagatcagaaagaaatatgagaataaagagctatttcttttacacgatggacctccttatgcaaacggtggatatacatctaggacattcagttaa

SEQ ID NO: 304876 - DNA, 844 bp, Unknown
  Bacterial polypeptide expressing nucleotide sequence isolated from the Sargasso Sea
ttggaaggaagtctttaccggggtttcaaaccagttttgtggtcaacagttgaaaaaaccgctttagcggatgctgaagtagagtacaaagaccataaatcaaatacaatttatgcagaatttaaaataaaaaaatcagataaagattttttaaaagacgcttcaattataatttggacaactacaccatggacaataccagcaaataaagcgctagcttacaacaaagaaataaaatattcagtaatacaagttaatgataaaaaaattattgtcgctgaaaaattaattaattcagttataaaagattgtaatataacaaaatttaaagttttaaaatcttttcaaggcgatttattcaaaaaaacaatatgttcacatccctttaataaactaggatataattttgatgtccccatgctcgaagcaaattttgtaactctagaacaggggactggaatcgttcattgcgctccaagccatgggccggatgacttcaatttatgcttaaagcatggaatgaaggctattgaaacggttaacaacgacggtagatacacaaaaaatattcctatttttgagggtatccacgtttttaaagcagatgaaattgtaataaaaaatttaaatgaacaaaaaaatcttttaggtagtggtactttagtacatagttacccccactcttggagatctaaagcccctttagttcatagagcaactccacaatggtttatttctatggaaagtcataaacttagaattaaagccttaaaatcaattgaccaaacagcattttatcctgaaaaaggaaagacaagaataagagctatgatcgaaactcgtc

SEQ ID NO: 304877 - DNA, 809 bp, Unknown
  Bacterial polypeptide expressing nucleotide sequence isolated from the Sargasso Sea
aatgtggccagcatctatgtacctagaaggatctgatcaacatcgaggatggtttcattcatcgctattagaatcttgtggcacgagaggtaaagcgccttttaaaagtatacttactcatgggtttgtcgttgatggcaaaggtttaaaaatgtcaaagtctacaggaaatataattgcaccagaagatatattaaaaaaatatggtgcagatattcttcgaacttgggttgctgcatctgattatgccgaagatttaagattagattattctattttagaacaacatgctgaatcatacaggaaaattagaaatacatttagatttttattaggaaatttaaaagaccaaaaagtatcttttaaacttaattcaaaagaaattgaagaatggccagaattagaacgctacatgcttcatcaaatatttgtagtaaataataattttgaaaaatattttaaagaatacaattttcataaactttataaagaactacttaatttttgttcattggatttgtcagccttttattttgatattagaaaagacgtgctttattgtgatgatttaaaatcatcaaaaagaaaaatatgtacgaattttttaggattaactttagatattttactaagatggtttgcgccaattttatcttttacaacagaggagatttttcaaattgtaaatgcgaataaaaattccagtattcatttggaaaattttcctaaaattccaaaaaattgggaaaataaaaaattacatgaaaaatgggaaaaacttaaagtagtaagaaatgtagtaaatgctg

SEQ ID NO: 304878 - DNA, 544 bp, Unknown
  Bacterial polypeptide expressing nucleotide sequence isolated from the Sargasso Sea
atgagcaaagaacatttaaatttacctaaaacagccttttctatgaaggcaaacctacctaataaagagcctgaatatttgaaattttgggagaagataagtttatacaagaagcttagatcgcaaagcaaaggtaaagaaaaatttgttttacatgatggcccaccctatgcaaatggcaacattcatatgggtacagcattaaataaaattttaaaagatataattattaaatttcatcaaatggatggcaaggactcggtctatgttccgggatgggattgtcatggtttaccaattgagtggaaaattgaagagcaatataaaaaaaataaaaaaaataaaaatgatgttcctataatagagtttagaaaagaatgtagagattttgctagcaaatggattgaaattcataaagaccaatttaaaagacttggagtaattggagattgggaaaattattattcaacaatgagttttgatgccgaggctcaaaatgtaagagaacttggaaaatttttaaaagaaggaaaagtttatacaa

SEQ ID NO: 304879 - DNA, 850 bp, Unknown
  Bacterial polypeptide expressing nucleotide sequence isolated from the Sargasso Sea
aaagagcctttgagagatgagaaagtaattaatcatattgctgaaatctatgaaaaagaaggctctgactgttggtttacagatgatcctcaaagatttttaggcaaagatcataattcaagtgattatattcaacttaaggatattgttgaagtttggtttgatagtggatcaactcatagttttgtgctcgagtctaggaaagatttgaaatggccggctgatatgtatttggaaggctcagaccagcatagaggttggtttcactcgtcgttgttagagtcttgtggaactagaggcaaagctccatttaaaagcatcttatcccacggatttgttgttgatggcaaagggatgaagatgtctaagtctgcaggaaatgtaatttctccagatgatattttaaaaaattttggcgccgatatattaagagtttgggtaacagcttcagattatgccgaagatctaaggatagataaaactatactaaatcaacacgcggagtcttacagaaaaataagaaatacttttagatttattttgggaaatataaaagataattttcagaaaatagatttggaagatgttaaaactagagaccttcctgagcttgagagatatatattgcataaagtttattctttaaatgaaaaatataaagaaaatcttaaaaattataattttcacaagttatataaagagcttttaaatttttgcacgctggacctatcatcattttattttgatatcagaaaagatgttctttattgtgatagtttaaattcaaaaaaaagaaaagattgcgtaattgtattaaatattttgttagagtgcctattaaaatggtttg

SEQ ID NO: 304880 - DNA, 222 bp, Unknown
  Bacterial polypeptide expressing nucleotide sequence isolated from the Sargasso Sea
aatgacaattaactacagagatacattaaatctgccaaacactgatttttcaatgaaagctggattgccgagaaaagaaccagagatattggatttatggtccagcacagatttatatggaaagatcagaaagaaatatgagaataaagaactatttcttttacatgatggacctccttatgcaaatggggatatacatttaggacactcagttaataaaat

SEQ ID NO: 304881 - DNA, 937 bp, Unknown
  Bacterial polypeptide expressing nucleotide sequence isolated from the Sargasso Sea
aattagagactttagggctgcagatttcgtaactgagactgagggcaccggatttgtccactgtgcaccatctcatggaatggaagagtatgaactctatcgcgaattggggatgttggctgaggtcatcacatacaacgtaaaagacgatggaagtttcagagatgatctaccattctttggaggaaagtatattcttagccgaaagggcggtgagggcgatgcaaataaagcggttatcgacaagttaatagaagttaatggattattggctcgtgggaaaatcaaacatagttacccccattcatggcgctccaaagctccagttatatacagaaacacacctcaatggtttgcatcgatagatcgcgaagttgatgataatagagatgaatatggcagaacgataagagagcgagcactgaattctatagataagttggtttcatggacacctcagacaggaagaaaccgattgtattcaatgattgagacgcgtccagattgggttttgtcgagacagcgagcatggggtgtaccccttacttgctttacaaaaaaaggggcgttgccaaccgacagtgattttcttttaaaaaatgctgagttgaacgaacggattgccaaagctttcgaaaaagagggagctgatgcttggtatcttgaaaattcgaaagagcgttttttagaagggatcgtagacccaacagactacgagcaggtatacgatatattagatgtttggttcgatagcggctcaacacacgcattcgttttgaaggaacgtgaagatggatccgatgatggactggctgatttgtatttagagggaacagaccaacaccgaggttggtttcactcttcaatgctacagtcctgcggaacgaatggaagagcaccataccgaggggtcctaacacacggtttcactttagag

SEQ ID NO: 304882 - DNA, 345 bp, Unknown
  Bacterial polypeptide expressing nucleotide sequence isolated from the Sargasso Sea
aatgcctgaaaataatttaaatctaccgaagacagctttttccatgaaagccaaccttccctctaaagagccaaaaattttagaaacttgggataaaacaaagctctacgataaactaagaaaaaaatctgcaggaaaagaaaaattcattcttcacgacggtcctccctatgcaaatggtcatattcacatgggaacagcacttaataaaattttaaaagatatagtgacgaagtttcatcaaatgagagacaaggattcaatttatgttcctggttgggactgtcatggactacctattgaatggaaaattgaagaacaatataaaaaaaagaagaaaaacaa

SEQ ID NO: 304883 - DNA, 667 bp, Unknown
  Bacterial polypeptide expressing nucleotide sequence isolated from the Sargasso Sea
tgatattttaagactttgggttgcttcctctgactacgccgaagacctaagaatagatcactctatattagaacagcatgctgagtcttatagaaaaattcgaaatacttttagatttatactcggaaatttaagagatgaatttaaaccaaaagattttaaaaaaattaatattaaagatcttcccgaacttgagcaattaatattacataaactttatttattaaatacagaagttgaaaaaaatttgaaaaattatagttttcataagttacaaaaagatcttttaaatttttgtgctttagacctttcatctttttattttgatgtcagaaaagatgtactatattgtgatgaaaaaaattcagaaaaaagaacgttttgtataatactcttgaatataattttggaatgcttattaaaatggtatgcaccagtgctttcttttaccactgaggaaattactgaacttgcaaaaaaaaataataaaaacagtattcacgaagagatttttcctgaaatacctagtagttggaaaaatgaaaaattgaatgaaaaatgggacaaattattttctataagacaaaaagttaatatttctatagaggaaaaaaggtcaagcaaaattattggttcaagcctagaagcagatgttaatattagtttg

SEQ ID NO: 304884 - DNA, 421 bp, Unknown
  Bacterial polypeptide expressing nucleotide sequence isolated from the Sargasso Sea
tgaagcagatatagttagatctttaggcatcatatataaagaaggtcatttagagaaaggtgaaaaacctgttcattggtgccaagattgtggatcatccttagcagaggctgaggtggaatacattgataagacatcaaaatcaattgatgttgcattcaaggtagatgaaagatctttaaataaggttaaggacttgtttaataccaaagaagcagatgaaatttcatttgtaatatggactacaacaccgtggacaataccctcaaatgcggcagtttgcattaatcctgaatttaaatactcacttataaaaatgaataataaattttatgtgattgcatttgaaatggctgatcattgcaaagaaagatggaaacaaaaatttgaagttatatctataattgagggtaaaaattaa

SEQ ID NO: 304885 - DNA, 794 bp, Unknown
  Bacterial polypeptide expressing nucleotide sequence isolated from the Sargasso Sea
aatggagggtttcaagaggtggggtatatggggagattgggataatccatacttaaccctcaagaaaagttatgaatctgctcagattggagtatttgggaaaatgtttttaaatggatatatataccgaggtcttaaacctgtacattggagtccaagctcgaggactgcactcgcagaagcagaattagaatatccagaagaacattattcaaaaagtatttatgtttctttaaaaattactaaaatatctgatgaagttcttttgaaattttgtgataaaaatcccaatatcaaaaaggagctttttctaagtaattcatttataactatttggaccactacaccctggaccataccagcgaatgaagcagtcgcagtaaatccaaaaatcaactacgtttttgctatcgatgaagagaaacgaatatacctttttgcaaaagaattatcttctgaaataaataataaatttaataaaaatttccaacctctcctagaggttaaagggaattgtttggaagatattgaatatcaacatcccactaaaaataaaaattgcaaaattgtgattggtggtgattacatcactacagaatcaggtactggaattgttcatacagcccctggtcatgggatagatgattttaatgttggacaaaaatatgatctaccgacaacatgtgttgttgatgaaaaagggaatttaaatgaattttcaggccaattcaaaggatcaaatgttcttaaggacgcaaatgatttaattattgaaaatttgagagaaaactaat

SEQ ID NO: 304886 - DNA, 856 bp, Unknown
  Bacterial polypeptide expressing nucleotide sequence isolated from the Sargasso Sea
aatgtcagaaaaaaaacattcctacaaacaaacattaaatttacctaaaacaacctttccaatgagagcaaatttgtctcaaaatgaaactctttctataaaacgctggaacaaacaaaatatttatgattgtttaatcgaccaacatgctaataacgacacatttttgtttcatgatggtcccccttatgcaaatggcaacatacacattgggcatttactaaataaagttttaaaagactttgttgtaagaagtcaatttttattaaatcgtcactgcccatttactcctggttgggattgtcatggtcttcctatagaacataatgttatgacgcgattgcaagaagaaaaaaatcctgtttttgatcttcctttgaaggaacaacgtattgccattcgaaaagcctgtcaacattacgctaaacaatttattaaggcgcaatctaaacaaatgcagtctcttttaactttagctgattacaaaaaaccctatctaacgatgagtaaacaatttgaaagtcgttgtttatcagtttttgctaagttggtaaaagaaggtattgtctatcgtcaacttaaacctgtacattggtctttagagaataaaacagccttggctgatgctgaacttgactatcatgacaaagaagacaccgctatttttgtgggttttgatctgctagaccatgtgagtttttattcgtcttattcactttcaaaaaatttaccaattaggttaatggtttggaccactacgccctggaccttacctgctaatttagctattgcagtcaatgaacatgccttatattgtgtcattgaatataagaatacttattatattgtagctaaa

SEQ ID NO: 304887 - DNA, 232 bp, Unknown
  Bacterial polypeptide expressing nucleotide sequence isolated from the Sargasso Sea
atgagtaaatttcaaattaacttaccaaaaactgctttctcaatgaaagcaaatttaccaacaagagagcctgaatttttaaagttttgggaaaaaataaatttatatagagaattaagaaattctagaaaaggtgaagaaaaatttatcctacatgatggtcctccttatgctaatggcaatatacatatgggtactgccttaaacaaaatcttaaaggatataattgtaa

SEQ ID NO: 304888 - DNA, 430 bp, Unknown
  Bacterial polypeptide expressing nucleotide sequence isolated from the Sargasso Sea
atgacaaaagaaaatttgaatcttcccaaaacatctttttcaatgaaagcaaatcttcctcaaaaagaaccagggatgattgaattttgggacaagatagatttatacaaaaaattgcgagaaaaaagcaaaggggataaaaaatttatattacatgatgggccgccttatgcaaatggacacatacatatgggtactgcacttaacaaaatacttaaggacatagtaacaaaatttcatcaaatggatggaagaaattctaattatgttccaggctgggattgccatggtttaccaatagaatggaaaatagaagaacaatataaaaaaaataaaaaaaataaagacgatgtgcctataggcgagtttagaaaagaatgtaaaaaatttgcaaataaatggattgatgttcacattaaagaatttaaaa

SEQ ID NO: 304889 - DNA, 979 bp, Unknown
  Bacterial polypeptide expressing nucleotide sequence isolated from the Sargasso Sea
gaagtacccatcaaggactttagaaaagagtgtagagaatttgcggaaaaatggatagtaattcacaaaaaagaattcaaaaggttaggcgtaataggtgattgggagaattattattccactatgagcttcggtgccgaagcccagatcgtaagggaactaggtaaatttttaaaggatggtagtctttatagaggctttaaacctgttttatggtctacggttgagaaaacagctttagcagatgcagaagtggaatataaagatcataaatcgaacactatctatgctgcttttgaagtaaaaaaaactgataaagattttttaaaaaatacttcaattatcatttggaccaccacgccttggacgattccagcaaacaaagcactagcttataataaagatataaactatgtggttttagatacaaataaaaataaaattgtagtagctgagaaattaattcagtcagtgatagaaagttgtgaactaagtaaatataaagttttagaaacttttaagggcagtgaatttaataatactttatgctctcacccatttaaaaatttaggttacgaatatgatgtgccaatgttagaggcaaattttgtaactttagaccaaggcactggaattgttcactgtgcgcctagtcatgggcctgatgattttaatttatgcttgaaacatgggatgaaggcaatcgaaacagttaataatgacggtctttatacaaagaatattccgatttttgagggaacacacgtatttaaagcggatgaaataattataaaaaatttaaaagagcaaaataatcttttaggtagcggtagtttaatgcacagttatcctcactcttggagatctaaggcgccgttagtacatagggctacaccccaatggtttatatcgatggaaagtcacgagcttagaaaaaaagcaattgactctatcgacaaaacagccttttacccagaaa

SEQ ID NO: 304890 - DNA, 791 bp, Unknown
  Bacterial polypeptide expressing nucleotide sequence isolated from the Sargasso Sea
tgttgttcaagaatgtaaaattaaagattttaaaaaattaaaaaagtttaaaggaaaagaatttaaagggacggtgtgtaaacacccattttttaaactaggatatgactatgagattcctatgttagaggctcgttttgttaccacagaacaaggaacaggaattgttcattgtgctcctagccatggtccagatgattttaatctttgtattaataacggaataaaagcaattgagaccgttgatggagatggaaaatatacaaataatgtagcattgtttgagggaattcatattttcaagtctaaccccattgtaatagaaaaattaaaagaacaaaaaaaacttttatttaatggtgaacttgttcactcttatcctcactcatggagatcaaaagcaccattggttcatagagcaacacctcagtggtttatttcaatggatagtcatgaacttagaagtaaagctttaaaagcaattgatgaaactattttttatcctagcaaaggaaaagaaaggttaaaatcaatgattgaaacaaggccagactggtgtgtttcacgacaaagagtttggggagtgcctttacctatttttattaataaaaaaactagtgaaattttgatagatgataatgtttttgaaaatattgcaaagatttatgaaaatgaaggttcggattgctggttttcagatgattcacaaaagtttttaggtgataaatataaagctgaagattttgataaactgagtgatattgttgaggtgtggtttgatagtggctcaa

SEQ ID NO: 304891 - DNA, 799 bp, Unknown
  Bacterial polypeptide expressing nucleotide sequence isolated from the Sargasso Sea
gatggacctccatacgcaaatggtcatattcatatgggaaccgctttaaataaaattttaaaggacataatcaccaggtttcatcagatgaaaggaaaagattctgtttacgttcccggctgggattgtcatggattacccatagagtggaaaattgaagaacaatataaaaaaaataaaaaagataaaaatcaagtcccaataaaagattttagattagaatgcagagaatttgcagaaaagtggataaaaatacacataggagaatttacaagattgggcgtggttggtgattgggagaactattattccacaatgagttttgatgctgaggcacaaatagttagagagttgggtaagtttttactagatggtagcttgtaccaaggttacaagcccgtgctttggtctacggtcgaaaaaactgcccttgctgatgccgaggttgaatataaggatcatacttccaatacaatattcgtaggttttaaagttaagacttcaaaaattaatttattaaaaaatgctgaaattattatatggactactacaccctggacaattccagcgaataaagctttggcctataataaagatctagattattcaattatcgagattaatttaccatcagagaactttgataataaaaaaattgtaatagcaacggaacttcttgatcaggtttcaaaggattgtgaattaggaacttataaagtaattgaaaaaattaaagggagagattttaatggaacaatttgctcacatccatttgaaagtttgggatatcaatatgaag

SEQ ID NO: 304892 - DNA, 689 bp, Unknown
  Bacterial polypeptide expressing nucleotide sequence isolated from the Sargasso Sea
agctttagcagatgctgaagtagaatacaaagaccataaatcaaatactatttatgcagaattccagataaaaaaaactgataaagattttttaaatgatgcttcattagttatttggactactaccccttggacaattccagcaaataaagccttagcctataaccaaaaccttaattattctctcttacaatttgataataaaaaaattgttattgcagaaaaattaattaattctgtagtagataattgtggtttaggtaaatttaaaatcctaaaaacctttgaaggaaaaatatttaaaaacacaatatgttcacacccattcaaaaacttgggttataagtttgatgttcctatgttcgaggcagattttgttactctagaacaaggtaccggtatagtgcattgcgcccctagtcatggtccagatgattttaatttgtgtttaaaacacggcatgaaggccatagagacagttaataatgatggtagatacactaaaaatattcctatttttgaaggaatacatgtttttaaagcagatgaaattattataaaaaatttaactgaacaaaaaaatcttttgggaagcggaagtttagttcatagttaccctcattcttggagatctaaagctcctttagttcacagagcgacaccgcaatggtttatttctatggaaagcc

SEQ ID NO: 304893 - DNA, 949 bp, Unknown
  Bacterial polypeptide expressing nucleotide sequence isolated from the Sargasso Sea
aatgaataaatcagtgccgtataaaacggttcttactcatggatttgttgtagatgaaaaaggaagaaaacaatcaaaatcacttgggaatgttgtctctcctcagaaagtctgggataccctaggagcagatatcttaaggctttgggtagcctcaacagattttagaagtgaaatggtagcatctgacgaaatattgaagagaacttcagatcaatatagacgaataaggaatacttttagatttattttaggtaatttaagcgattttagtgataaagataaagttatgtttgaagatcaagttgaacttgataaatggattataaatgagataaaaactcttcaaaaagaagtcataagcttatatgaatctttttcttaccataaagcgattcaaagaatacataatttttgtgttaacgaattaggaggagtatatctggatataatcaaagataggctttatacatgcaaaaatgattctttagcaagaagatcttgtcaaacaagccttgaccgtattttgaatattttagtaaggctcatttctccaatactttcctatactgcagaagaaatttggcaaacaagtaacagattgaatagtcaggaagactctgtttttctctctaactttgataattttgaagaggaatctaaatctaatattaatcaatctgaatggaaaagaatttttgagattaaagatgctgtcaatcaaacaatagaggaaatgaggaatgaaaatacaattaaaggatcacttgattcaattgtagatattaaagctactgcagatgacatgagtgttcttaaaaaacttggagaagagcttcactttttatttatctcttcagaggcaaacctaagtaaaggaaatagctttaaaattagagtcaatccctcaaataataccaaatgtgtcagatgttggcatcgatgttca

SEQ ID NO: 304894 - DNA, 934 bp, Unknown
  Bacterial polypeptide expressing nucleotide sequence isolated from the Sargasso Sea
tataaattgcaatgttgtgatttggactactactccatggactatgcccggaaatagggcagtagcatttggaaaacattttgaatattctttgattcaagtaaaatcagtattagaagattcattagctattgttaatgacaaaattataatagcaagtgatttaatagaaacttttttaagcgaaacaaaagttatagattttgaacttgtatcaaaaatttcattaaaagactttgaagggttagttttaagacatcctttgtatgagttgggttatgattttgatgtccctttgcttgaagctgactttgtcactaccgaacaagggacaggttttgttcatattgctccaggtcatggttctgatgattttgacctaggagttaaaaattctttgccagtaattgaaactgttgaggatgatggttacttgaaaaataatctcccattattcggaggacttcatgttcttagagataatgagaaaattgcagatttgatggtagaacaaaaagcactgattggtagaggtagtttagtccactcttacccacatagctggcgctcgaaggctccattaatttttagaacgacccctcaatggtttatatcaatggaaaaaaatgatcttaggaaattggctttaaaaggtataaatgacacgaaattttttcctgaccagggtgcaaacagattatacagcatgataaaggataggccagattggtgcgtttcaagacaaagagcctggggcgtccctatagctatattttatcataaagaaactttagaaccattgagggatgaaaaagtattaaatagagtagtagaggcctttaggaaagagggagctgatgcttggttttcgaaaccagaaaaatattttttaggtgatgattataatccggaagattacataaaagtaaatgat

SEQ ID NO: 304895 - DNA, 873 bp, Unknown
  Bacterial polypeptide expressing nucleotide sequence isolated from the Sargasso Sea
tatagataggattgcttctatttatgaaaagcaaggctctgattgttggttcactgacgatgcaaatatatttttaggtgatgactatgatgcaaaagactatgaaaaacttaacgatatcgttgaagtatggtttgacagtggctcaacacatagttttgttttggaaaaaagaaaagatttgaaatggcctgcagacatgtatttagaaggatctgaccaacacagaggatggtttcactcctctttattagagtcttgcggaactagaggtaaagcgccgttcaaaagtattctttcacatggttttgttgtcgacggaaaaggtatgaaaatgtctaaatcaatgggtaatgttatttccccagaagatatattgaagaactatggtgcagatatacttagagtttgggcttcagcatctgattatgccgaagatttaagaatagataaaaatattttaatccagcacgcagagtcttataggaaaattagaaatacttttagatttatgcttggaaatttaaaagataattttgaaaaacaaaactttgaaaaaattaaattaaatgaatttgatgaactagagcaatttatcttacataaattgtttttattaaataaaactgttgatgaaaatttgaaaaattataattttcataaattatataaagagctattaaatttttgtacactagatctttcctctttttattttgatataagaaaagacgtcctttattgcgatagcataaagtcaaaaaaaagaagaaattgtgtaattgttttaaacattattttagaaagcttattaaagtggtttgctccaattttagttttcaccactgaggaaatctacagcttggttaataa

SEQ ID NO: 304896 - DNA, 544 bp, Unknown
  Bacterial polypeptide expressing nucleotide sequence isolated from the Sargasso Sea
atgtcagataataatttacaacttccaaaaactagcttttctatgaaggctaaccttccctcaaaggaacccaaaatattagaattttgggataataccaaactttatgaaagattgagaaaaaaatcttctggtaaggagaagttcgtccttcatgatggtccaccttatgcaaatggacatattcacatggggacggctttaaataaaattttaaaagatattgttacgaagtttcatcaaatgaataacaaagactctatttacgttccaggttgggattgtcacggactaccaatagaatggaaaattgaggaggagtataaaaaaaagaaaaaaaataaagatgaagttcctacaaaagattttagaaaggaatgtagagattttgctgaaaaatggattgtaattcataaaaaagaatttaaaagactcggggttataggagattgggacaactattattcaacaatgagttttgatgcagaagctcaaatagttagagagttgggaaaatttcttttggaaggaaagtttatatagg

SEQ ID NO: 304897 - DNA, 592 bp, Unknown
  Bacterial polypeptide expressing nucleotide sequence isolated from the Sargasso Sea
tactcaatcagaattccgagatctttgtagagagtatgctaagaaacagatagccatacagaaagatgattttgttagattaggtgtttttggagattgggataaaagctatgctagtcttgatcaaaattttgaaggagatgccatcaatggttttgcaagaatttttcataatgggcatgttgaaaaaggtttcaagccagtccactggtgccctgaatgtagttcctcgctagcagaagctgaagttgaatatatcgataaaaattcaacagcaattgatgtaaagttcaaatttgatgaaaacagcactgaaaatctaatcaataaacttaaacttgataagaaaaaaaatatatctttagttatttggactacaacgccttggacaattcccggaaatcaggcggtatgctttaatgccgatatagattatcaggttattgattcaggtgaagagtatttacttgttgctgttgagctttgcgaacaatgcttggataggtggaataatgactcttataaagcaacaaaaataaaatttaaaggttcagaattagaagggctcaaatcattacaccccttattatga

SEQ ID NO: 304898 - DNA, 916 bp, Unknown
  Bacterial polypeptide expressing nucleotide sequence isolated from the Sargasso Sea
atggtgctcaagggccacatctacaggggcctgaagcccgtgcactggagccccagttcccgcacagccctggcggaagccgaactggaatatcccgacggtcacaccagtcccagcgtctatgtggcttttccggcggtggagctgccggcggcgctgcgggatgcagtcaagcaggagggcctggacctgccctctgaccccaaagccctgggcgagggtcttcaggtcgcgatctggaccacaacgccctggaccctccctgcgaacctggcggtttcggtgaatgaacggctcgattacgccctggccgaggacggcgcaggccgcctgctgctggtggcagctgacctgatcgagtcgctttccacaaccctggagcgtcctctcaagcaccgcgccactgtcaagggtgctcttttggccggcctcatctatcggcacccactgctggatcgcaccagccccgtggtgatcggcggcgagtacatcaccaccgaatccggcacgggcctcgtgcacaccgccccggggcacggcgtcgacgactttcataccggtcaaaagcacggcctgcccgtgctgtgccccgtggatgaagccggcaccctcacggcagaggcaggtcctttcgcaggcctgaacgtgctcaaggacgccaatccagggatcatcgaggccctcgagcaaaccggagcactgctcaagcaggaggcctacagccaccgctacccctacgactggcgcaccaagaaacccaccatcttccgcgccacggaacagtggttcgcgtcagtggagggcttccgccaggacgccctcgatgccatcgaccaggtgcagtggacccctgcatcaggccgcaaccggatcgaagcgatgggaaggagcggggggactggtgcatctcccgcca

SEQ ID NO: 304899 - DNA, 848 bp, Unknown
  Bacterial polypeptide expressing nucleotide sequence isolated from the Sargasso Sea
aaaatctgatgaaagaaagaatcttgatactctgaatctaagaaaaaaagcaacagattatgcctatatccaaattaataatcaaatggagggtttcaaaagatggggtatatggggcgattgggaaaacccttacttaactcttaagaagagttatgaatctgctcagattggagtatttgggaaaatgtttttaaatggctacatatatagaggtcttaaacctgtgcattggagcccaagttcaaggactgcactcgcagaagcagaattagaatatcctgatgaacattattcaaaaagtatttatgtttctttaaaaataactaaaatatctgaggaaattctattaaatttcaaccaagaaaattttaattttaaaaaagatttttttcaaaataattctttcataactatttggaccaccactccttggactatacctgcaaatgaagcagttgcagtaaatccaaaaataaagtacgtttttgctatcgatgaagagaaacaaatttacctttttgcaaaagatttatcttctgaactaagtaaaaaatttaataaagatttcaaggagcttttagaggtaaaaggctctaaattggaaaatattgaatatcaacatccctctaagaataaagattgcaaaattttaattggaggagattatataactacagaatcaggtactggaattgttcacactgcccctggtcatgggatagatgattttaatgtgggtcaaaaatatgatttaccaataacatgtgttgttgatgagaaaggtaacctaaatgaatattctggacaattcacaggatcaaatgtcctaaaagacgcaaatgatt

SEQ ID NO: 304900 - DNA, 811 bp, Unknown
  Bacterial polypeptide expressing nucleotide sequence isolated from the Sargasso Sea
catggaaattaaatctttagatacaatagatgatcacggcagatacacaaagcatataaaaaaatttgaagggattcatatttttaaagcagatcaaattgtaattgaaaagcttaaagaatgtaaaaaactattggcaaatggaaaacttactcatagctatcctcattcttggagatctaaagcacctttagttcatagagctacatctcaatggtttatttctatggaaaaaaaagatttaagaaaaaaagcacttaaagcaatcgatgaaactaatttttatcccgcgcgaggtagagacagaatcagatctatgatcgaaacaagaccagactggtgtgtatccagacaaagaatttggggagttccactgcctctgtttgtttcaaaaaaaacaaaagaacctttaaaagatccagacgtaatagaaaatattgcaaaaatttttgaaaaagaaggagcagattgttggtttacagatgatcctcaaaaatttttaggcaaaaaatacaaaaaagaagattataccaaatcaaatgacatagttgaagtttggtttgatagtggggccacacatagttatgttttggaaaaaagaaaagatttaacttggcccgcatcaatgtacttagaaggatctgatcagcataggggttggtttcattcatcactattagaatcttgcggaacgagaggaaaagctccttttaaaagtatacttactcatggttttgttgtggatggcaaaggtttaaaaatgtcaaaatctacaggcaatataattgcaccagaagaatgttctcaaaaa

SEQ ID NO: 304901 - DNA, 940 bp, Unknown
  Bacterial polypeptide expressing nucleotide sequence isolated from the Sargasso Sea
ggaaaattcatataaggaacattgtcttaataaaatcttaaaagacattatcataaaatataattcaataattggaaaagggattgattatatacctggttgggattgccatggcttacctatcgaacaccaggtttcaaaaaagattaaagataaaaatatttccaaatcaaagattagagacttatgcgaagaatttgctctatcttttgtctccatacaaaaagaagaatttaaaagactaggtatttttgctgattgggacaaaccttatcttaccattaaccctgaatttgagactaaccaaattgatgttttttggaacatgtattcgaaaggttatatttacagaggattaaagccagtaaattggagcccaagttctagaacagcacttgcagaagctgagctagagtacccggataatcatatttcaaaaagtgtttatgttaagttcaaaatcgaaaattctattgatttcttaggagacttccaagaatcattgtttttgattgtttggacaactaccccatggacacttcctgctaataaagcagtcgcaattaacaaatctttcgaatatggaatatacaagaccgacaacaactatgtaattatcgaagaaagtctatcacaaaaattagaggagaaacttggtaaaaaatttattctttttaaaaaaataaatggaaatgaattaacaaatttaaaatacttgtcacctttaactggcgaagtttcaccaattgttgctgctgattatgttacaaaagaatcaggcacagggttggttcataccgcacctggacatggttcagatgactacaatacaggaataaaaaataatttagaaatctattcacctgtagatagtgctggaagatttacagaagatgcaggggatggtttaactggacttaatgtattaaaagaaggtaat

SEQ ID NO: 304902 - DNA, 865 bp, Unknown
  Bacterial polypeptide expressing nucleotide sequence isolated from the Sargasso Sea
tttgaagataattttcagagactgcttggagataaatataatgcagaagattttgataagactagcgatattgtagaagtatggtttgatagtggatcaactcattcttttgttttagaaaagagagaagatttaaaatggccagcatcaatgtatctagagggttcggatcaacatagaggatggtttcactcttcacttttagagtcttgtggaacaagaggtagagcaccatttgaaagtattttatctcatgggtttgttgttgatggaaaaggactaaaaatgtctaaatcaactggaaatgtaatagctccagaagatatcttaaaaaaatatggtgctgatatactaagaatttgggttgcctcatcaaattatgctgaggacttaagaatagattactcaattttagaccaacactctgagtcttacagaaaaattagaaatactttcagatatcttttaggaaatatacaagatgaatattcaaaagtagattttgataaaattgatttaaataatattcctgaattagaaaagtatatactgcatagattgtatgtgatcgatgaaagatttaatgaatactttaagtcctataattttcataatttatataaagaattactaaatttttgcacagtagaactctcagcattttattttgatattagaaaagatcttctttattgcgacccaaaagtttcaaaaaagcgttctgattgtattttgatactaaaagtaattttagaatgcttattaaaatggtttgctcctatcttatcatttaccacagaggaaatttatcatttaatttataaggaagatgaaaatggaagtattcatttacaaaaatttgtta

SEQ ID NO: 304903 - DNA, 937 bp, Unknown
  Bacterial polypeptide expressing nucleotide sequence isolated from the Sargasso Sea
aaagatgtcgtgaaagtttggtttgatagtggttcaactcattcttatgtattagaggctagagaggatcttcactggccagcatcgatgtatttagagggctcagaccaacatagaggttggtttcactcctcattacttgagtcgtgcggaacaagagacaaggcaccttttgaaagtattttatcacatggctttgttgtggatggtaaaggtagaaaaatgtctaagtcagtcggaaacgttatttccccagatgaaataatcaataaatacggcgcagatatattgcgtatttgggttgttgcatcagattattctgaggatttaaaaattgataatcagattatcaactaccaaatagactcttacagaaaaataagaaacacactaagattccttttaggaaatcttaataacttcaataaacaaaatttagttgacccagatgaaatgcctgaattagaaaggtatctcttgacgcgaatttcaagccttaatgaaaaacttaaagaattagtttcaaatcatgattaccatgcgatttacactgctttactaaatttctgcactcttgagctatcagcattttattttgatattagaaaggactccttatattgtgatgatataaaaagtacaaaaagaagatcaacttcaacatgtttacatataatatttgagtttttaacaaaatggctttcacccatagtttcatttacatgtgaggaagcatggaagtctaggagctataataacgaagaaagtattttattacaaaatgttaaagatgatgaatttatttataaggatatttcacttgaaaaagtttttgaagaacttaaaagagtaagaaaaagtgttacctccgccttagagctaaaaagaaatgaaaaattaattggctcaagccttcaagccaaagtcattttatttt

SEQ ID NO: 304904 - DNA, 201 bp, Unknown
  Bacterial polypeptide expressing nucleotide sequence isolated from the Sargasso Sea
aatgagtaaaaataatattaatctacccaaaactgctttttcaatgaaagcaaatttacaaaataaagagccaggaataattgattattgggataaaattgatttatataaaaagttaagatcttccagcaaaggaaaaacaaaatttgttcttcatgacggtcctccatatgctaatggagatatacacatggggaacag

SEQ ID NO: 304905 - DNA, 753 bp, Unknown
  Bacterial polypeptide expressing nucleotide sequence isolated from the Sargasso Sea
aatggaatataaagatacaatttttcttcccaaaacatcttttgaaatgagagctaaccttccttcaaaagaacctgcaataatagaggagtgggataaagaaaatatttttaaaaagctaagagataaatccaaaggtagagaaaaatttgttcttcatgatggtccaccatatgcaaatggacatattcatatgggcacagctttaaataaaattttaaaagatgtcattgtgcgaacacaacaaatggctggtaaggactcaatttatgttcctggatgggattgtcacggtttaccaattgaatggaagatagaagaagaatatagaaaaaagggaaagaataaggatgatgtcccaactgttcaatttagaaatgagtgtagagagtttgcagaaaaatggatcgatatccaaaaaaaagagtttaggcgacttggtgttgaaggagattgggaaaatccttacctcacaatgtcaaatcaagcagaagcacaaattgttcgagagcttggaaaatttttacttgatgaaagtttgtataaaggagcaaaaccagttctctggtctgttgtagaaaagacagctctagctgacgccgaagttgaatatgaagatcatacgtccaacactatatatgttaaatttttaattaaaaattctaccgataaagatttaattgattctaatattgttatttggacaacaactccttgggacaatttcagggtaacagagctctgggcttatgg

SEQ ID NO: 304906 - DNA, 866 bp, Unknown
  Bacterial polypeptide expressing nucleotide sequence isolated from the Sargasso Sea
agtgcccaagaggcggtggccaaattaggagttaagggatacaacgacgaatgcagatccatcgttcagcgttatgtagctgagtggcgaagcacgattactcggttgggacgttgggtcgactttgatgacgactataagacgatggacccatggtacatggagtcggtctggtgggtatttaaacaactatgggacaaggggcttgtctataaaggtttcaaggtgatgcctatttctaccgctcttggaactccactcgcgaattttgaggtcagtcaaaattaccgtgacgttcaagatcctgctgttaccgtcttgtttaagattaaagaccatgaaaggtatctcgctgcctggacgacaaccccttggacgcttccctccaatttggcagtttgcgttggcgatgagattgattatgtgcttgttagagatgaatcgactgcaaagaacatctattttgcggaagagttactgacccattacggcgatttcgaaattttggaaagagtgaaaggctcggacttagttgggctccaatatgaaccgctgtttgattattttgctgaccagcaaacagagggtggttttgttgtagttagtgatgactatgttacgacggatgggggaacaggtttggtgcatcaagcgcctgcatttggagaagacgattacagagttctaaatgaaaacgacatcgatgcatttgtatgcccggtcggtctggatggcagatttaatgaatctgtgacggatttttctgggatgcacgtaaaggatgccgataagctcataatagaatttttgaaacaaaggggttcactttatcgtcaggaggttatccaacacagttaccccttttt

SEQ ID NO: 304907 - DNA, 284 bp, Unknown
  Bacterial polypeptide expressing nucleotide sequence isolated from the Sargasso Sea
gatgcctgaaaataatttaaatcttcctaaaacagctttttccatgaaagcgaatcttccttctaaagagccaaaaattttggagtcttgggataaaacaaaactttacaaaaagttgagaaagaattcagaaggaaaagaaaagtttatacttcatgatggtccaccttatgcgaacggtcatatccatatgggtacagcattaaataaaattttaaaagatattgttacaaaattccatcaaatgaataacaaagactcaatttatgttccaggttgggatt

SEQ ID NO: 304908 - DNA, 841 bp, Unknown
  Bacterial polypeptide expressing nucleotide sequence isolated from the Sargasso Sea
aaatttttaaaagagggtagtttgtacaagggttacaagcctgttttatggtcaacagtcgaaaaaacagccttggcagatgcagaagttgaatatcaagatcatgtatccgatacaatctatgcagtcttcccagttaaaaaatctaatattaaagaactaattggatcgaacgttgttatttggacaacaactccatggacgataccagctaacaaagcattagcctataatcaaagtttggattatattttatgcgaaatagataacaaagatattttagaaaataaaaaaatagttattgcaaaagaacttttagcatctgttgtaaaagatactgagtactcaattaagatattaaaagaatttaaaggaaaagaatttaatggaactatttgtagccatccatttcataaaattggatatgattatgatgttccaatgctcgaggcaagatttgtaacaactgaacaaggaacaggaattgttcattgcgcaccaagtcatggtcctgatgattttaatttgtgtatcaataatggaataaaagcaattgaaacagttgatgacgatggtaggtatacgaaacacataccaatatttgaaggaacccacatttttaaggctaatgatattgttattgaaaagcttaaagaactaaaaagtcttttgaacaatggcaaactaacacattcttacccacattcctggagatctaaagctcctttagttcatagagctacaccccaatggtttatttcaatggaaagtcataatctaagagacaaagcacttaaagcaataaatgacactactttttatcctggtaaaggaaaagaaa

SEQ ID NO: 304909 - DNA, 904 bp, Unknown
  Bacterial polypeptide expressing nucleotide sequence isolated from the Sargasso Sea
gttttgtgttctacggtagaaaaaactgctttggctgacgctgaggtagaatataaagatcatacatccaatactgtatacgtagggtttaaagttaaaaattccaaaatcgattcattaaaaggtagtgaaattatcatatggactacaactccatggacaatacccgccaataaagctttagcgtttaacaaaaatttagattactcaattgttgaaataaattcagatctaggaaatttagataataaaaaaatcgtagttgccacacagcttttagatcaagttttaaaggagtgtgaaataggaggtcataaattaattaaaaaaataaaaggtaaagactttgagggaacagtttgttcacatccttttgaaaagctaggataccaatacgatattccaatgttagaggcaaattttgtaacacttgaacaaggtactggtattgttcattgtgctccaagtcatggaccagacgattttaatttatgtttaaaacacggaatcaaatcattagatacaattgatgatactggaagatacacaaagcacattgaaaaatttgaaggaatacatattttcaaagccgaccagattataattgaaaaacttaaagaatgtaaaaagctattggcaaatggaaagttgactcacagctatcctcattcttggagatccaaagcacctttggtccatagagctacatcccaatggtttatttctatggaaaaaaaagatttaagaaaaaaagcacttcaagcaattaatgatacagacttttttccagagagaggaagagatcgaatccgatcaatgatagaaaccagaccagactggtgtgtttcccatcaaagaatatggggcgtgccactacctttatttgtttcaaaaaaaaccaaag

SEQ ID NO: 304910 - DNA, 800 bp, Unknown
  Bacterial polypeptide expressing nucleotide sequence isolated from the Sargasso Sea
aaccatccattttttaaaattggatttgattatgatataccactgctagaagctttatttgttacaacagaacagggctcaggcatagttcattgtgcaccaagtcacggacctgatgattttaatttatgtcttaagaacaatattaaagctcaagaaacagtcgatgatgatggtaaatataccaagcatgtgcctttatttgaaggcacacatatttttaaagctaacaaaataattatagataaattaaaggagcaaaaaaaattattagctaatggtgaattagtacaccaatatcctcattcttggcgttcaaaagctccacttgtccatagagcaacaccacagtggtttatctcaatggaaagccatggtttaagaacaaaagcgttaaaagcaatagacgatacaaatttttatccaaaaaaagggaaagaaagacttaaatcaatgatagaaattagaccagactggtgtgtttctaggcaacgagtctggggcgttccaattccagtctttatatcaaaaaaaacaaatgaagttttaattgatgatgaaataacaaaaaacattgctgaaatttttgaaaaagaaggagctgattgttggtttgataaagatgttaaaaaatttttaggcaacaagtataaatctgaagattatgaaaagatgaccgatattgtagaagtttggtttgatagtggagcaacacattcttatgttcttgaaaaaagaaaagatttaaaatggcctgcatcaatgtatttagaaggatcagaccagcataggggatggtt

SEQ ID NO: 304911 - DNA, 742 bp, Unknown
  Bacterial polypeptide expressing nucleotide sequence isolated from the Sargasso Sea
tatgccagaaaataatttaaatcttcccaaaacttctttttcaatgaaagcaaatttaccttccaaagaaccgaaaatattggaaacttgggataaaattaaactttatgaaagattaagaaaaaaatcagaaggcaaaaccaagttcgtccttcatgatggcccaccttatgccaatggtcatatacacatgggtacagctctaaataaaattctaaaggatataattactaaatttcaccaaatgagtgacaaagactctatttatgtaccaggatgggattgtcatggtttaccgatagagtggaagattgaggagcaatataaaaaaagaaaaaaaaataaagatgaagtacctattaaggactttagaaaagagtgtagagaatttgctgaaaaatggattttaattcacaaaaaagaattcaaaagattaggcgtaattggtgattgggaaaattattactctaccatgagctatgatgctgaagctcagatcgtaagggagctaggtaaatttttaaaggaaggaagtctctatagaggtttcaaacctgttttatggtctacagttgagaaaacagctttagcagatgcagaagtggaatataaggatcataaatcaaatactatttatgcagcgtttgaagtaaaaaaaactgataaagattatttaaaaaaatacttctgttattatttggactaccacaccttgggacgataccagcaaataaagcactag

SEQ ID NO: 304912 - DNA, 940 bp, Unknown
  Bacterial polypeptide expressing nucleotide sequence isolated from the Sargasso Sea
atgtatcaagggtatactattcaaccatattccccagcagcaggaactggtctttcttcagcagaagttaatatggaaggttgttatcaagatgttaaggatacaacagttgttgctcagtttaaagtaataagtcccgagtttaaagacacttggggtgttgagggagatgttcatattttagcttggacaacaactccttggacacttccatcaaatacagcattatgcgttggtccaaaaatagaatattcgttagttaaatcgtttaatcaatatactggtgaatctattcaagtaattattggcgcccctttagtggaaaaacaattttctggcaaattttttgccgttgattctgaagaagatttagtatttgaagaaggagacaaaaagattcctttttttgtggataaaaaatttttaggcaatgatttggttgggattcgttatgagcagttgataaagggatgtttaccctatcaggatgctgaaaaagcatttcaagtcataaaaggagattttgtaactactgaagacggaacaggtattgttcatatagcaccaacctttggtgctgatgatgctttagttgcaaaagaagcaggtgttccaccaatgttgattttagataaaaaagataatcctgttcctctggttgatttaacaggtcgatttgtaaaagaattgggaggagaattaggagggatgtttgtgaaaaacgagtactatgatgaagtggattgtcctgataagtctgctgatgttttaatagctattcagttaaaaacagaaaacaaagcctttaaggttgaaaaatatgagcacagttatcctcattgttggagaacacataaaccagtgttgtattaccctttagacagttggtttatcaaggccacagaggttaaatcgagaatgactcagctaaataatacaa

SEQ ID NO: 304913 - DNA, 481 bp, Unknown
  Bacterial polypeptide expressing nucleotide sequence isolated from the Sargasso Sea
aatgagtaaatcacaaattaatcttccaaaaacggctttttctatgaaagcaaatcttccaatcagggaacctgaaattttagaatattggaaaaagattaatctttatgaaaaattaagaatcaacagtaaaagcaaagaaaaatttgtactacatgacggcccaccatatgcaaacgggaatattcatatgggaactgcacttaataaaatcttaaaagatataattgtaaaatttcaccaaatggatggaaaagactctatttatgttcctggttgggattgtcatggattaccaattgagtggaaaatagaagaacaatataaaaaaaataaaaaaaataaaaatgaagttccgattgttgagtttagaaaggagtgtagatcatttgctgaaaaatggattgaagttcacaagattcaatttaaacgattaggcgttgttggagattgggaaaaatattattctacaatgagtttt

SEQ ID NO: 304914 - DNA, 916 bp, Unknown
  Bacterial polypeptide expressing nucleotide sequence isolated from the Sargasso Sea
gtttggatctgatattttaagattatgggtagcttcgactgactcatcctctgagatgaacgtttccgaggagatattaaatagaacatccgacaaatataggaaaattagaaatacaataaggtttttgttatcaaacatttccgattatgataatgaaaaattttctcatgaggctgttaccgttgagcttgataaatggatcattaaaaaagccgttgaaactcaaaaagaggttcaaagacactacgaacaatataattttcatttgctaactcaggtaattcacggattttgtgttaatgaactaggtgccttctatttggatgttattaaagacaggcaatatacttgtaaaaagaattcaaaagagagaatttctgctcagcaatcaatgtattttctcacaaaaatgcttttaacatggatagcaccaatatgtccgcacacagctgaagaggcctggcaacatataccaaaaaataataaaggatctatttttctaaacaattggtttgatctggatataaataatcttgctcaatgtagtatttctgaaactaattggaatgatattttagaggtaaaaaaagctgtatctaaagcgcttgaagaaaaaagaactgaaaatataattggttcatctttagacgccgatataataatttactgctcaagagatttatataatactttaaatgcattaaatggagagctaaaatttatttttattacttctaatgcatccttaagaagtattgatgaaaaagaatcattaaataatatttcaataaataatcatctactcgcaatagatattaaaaattctaacaataaaaaatgtgaaagatgttggcataaatgtaaaacagttggaatgaataaaaaatatggaaatatttgtcatagatgtatt

SEQ ID NO: 304915 - DNA, 496 bp, Unknown
  Bacterial polypeptide expressing nucleotide sequence isolated from the Sargasso Sea
aatgagtaattcccaaataaacctccctaaaactgctttctcaatgaaagctaacttacctgtaagagagccagaaattctagaatattggcaaaagattaacctttacagggaattaagaaattcaagcaaaggaaaagagaaatttgtcctccacgatggtcctccatatgcaaatggtaatattcatatgggaacagctcttaataaaattttaaaagatattattgtaaaatttcatcaaatggatggaaaagattcaatatatgttcctggatgggattgtcatgggctgccaatagagtggaaaattgaggagcaatataaaaagaataaaaaaaataagaatgatgttccaatagtagaatttcgtaaagaatgtagattgtttgcagaaaaatggattgaggtacacaaaggtcaatttaaacgtttgggtgtagtaggtgattgggaaaattattactcaactatgagttttgatgctgaggctcaa

SEQ ID NO: 304916 - DNA, 922 bp, Unknown
  Bacterial polypeptide expressing nucleotide sequence isolated from the Sargasso Sea
cgctaccgatttttatttcaaaaaaacaggtgaagttttagttgatgatgaagtttttgaaaatatcgcaaaaatttacgaaaaagaaggttctgattgttggtttaatgaagattatcagatatttcttggagataagtataaagcagaagattatgaaaaattatcagatatagttgaggtttggttcgatagtggatccactcattcttttgtcttggaaaaaagagatgaccttaaatggcctgcatcgatgtatttagagggttcagatcaacatagaggatggtttcattcttcattactagagtcatgcggaacaagaggtgttgctccatttgaaagcattctttctcacggttttgtcgtagatggaaaaggtctaaaaatgtcaaaatcaacaggtaacgtaattgctccacaagatatacttaaaaaatacggagccgatatattaagaatttgggttgcatcttcaaattatgctgaggatcttagaatagattattcaattttagatcaacacgcagagtcttatagaaaaattagaaacacgttcagatatcttttaggaaatattcaagatcaatatgaaaatctcgatttcgaaaaagttaagtttgaaaactttgattcacttgaaaaatttatgcttcacagaatttatataattaatgagaattttaaaaataattttaaagtttataactttcacaacttatataaagaattactaaatttttgtacagttgagctttcagccttttattttgatatcaggaaagacactttatattgtgaggctttgaattccgaaaaaagaaagaactgcataactcttttaaatattattttacaatgtctcctaaaatggtttgccccaatattatcatttacaactggaagaaattttatcaattga

SEQ ID NO: 304917 - DNA, 856 bp, Unknown
  Bacterial polypeptide expressing nucleotide sequence isolated from the Sargasso Sea
aaagaaattttaaaatttcttaaaaatggagggttgtacaaaggctacaaaccagtcttgtggtctgtagttgaaaaaacagccttagctgatgcagaagttgagtataaagataaagtttcaaatacaatctatgcaaaatttaaaatcaataaaaaatttaaaaatcatgataatatcagtgtagtaatttggacaactacaccctggacaataccctgtaatagggcactttgttataattccaagtacaattacactatattaaacattagtcacaataatattgaggaaaaattaattgttgctactgatcttattgataatttcatcaaggaaaatgaaattaaaaaatataaaaaaattgagacatttataggttctgaatttaataatacaaaatgtattcatccatttaaagaatatggttatgattttgaagtacctatgttggatggagaatatgttacacttgagcagggtacaggaatcgtccatatagcacctagtcatggaccagatgattttcacttatcacttaaaaataaaattttagttgaaaatactcttgaggacgatggcacttataccgataaaataaaaaaattcaaaggagttcacatttataaggctgataaaattgttattgatgaattaaaaaaaacatctagtctaatctcagcaggtgaatacaagcatagctacccgcattcatggcgatcaaaggctcctcttgtgcatagagcaactccacaatggtttatatccatggaaaaaaataatttaagatcaagcgctttaaaagcaattggcaaaacctcattctaccctgaaattggtaaaaacagactcgagg

SEQ ID NO: 304918 - DNA, 769 bp, Unknown
  Bacterial polypeptide expressing nucleotide sequence isolated from the Sargasso Sea
gtttttttaggtaatgaatatgatccaaatgattacgataaattaaatgatattgttgaggtttggttcgatagcggttctacacacagctttgtattagaaaagagaaaagatcttaattggcctgcagatatgtatctcgaaggctctgatcaacatagaggatggtttcattcttctttgttagagtcttgcggcacaagaggtagagcaccatttaaaagcatcctatcacacggtttcgtagttgatggaaaaggtatgaaaatgtctaaatcaatgggaaatgttatttctccagaggacatcttaaaaaattatggagcagatattctaagagtttgggcttcagcatcagattatgcagaagatttgagaatcgataaaaatattttaattcagcacgctgagtcttatagaaaaatcagaaatactttcaggtttatgcttggaaatctcaaagataaatttgaaaaacaagattttaagaaaattcaaattaataaaatggacgagttagaacagttcatcttacataaactattcattattggacagtccgtcgatgaaaatttaaaaaattataattttcataaattatataaagatctattaaatttttgtacgttagatctttcctcattttattttgacataaggaaagatgttctttactgtgatagcttaaactcctcaaaaagaaaaaactgtgtagttgttcttaacataattctagaaagcttgttaaaatggtttgctcccaattttg

SEQ ID NO: 304919 - DNA, 625 bp, Unknown
  Bacterial polypeptide expressing nucleotide sequence isolated from the Sargasso Sea
ttgaatcactcatatcctcactcgtggagatctaaagctccattagtacatagagcaacacaacaatggtttatttctatggaaagtcataaacttagaagcaaagctttaaaagcaataaatgatacagatttttatcctgctaagggaaaagagagattaagatcaatgatagaaacaagaccagactggtgtgtttctaggcaaagagtttggggagttccattacctatatttatatataaatcagatggtaaagttttagtagatgaagatgtatttgaaaatattgctaatatatatgaaaaagaaggttctgattgctggttctcagatgaccctcaaaaatttttaggaagcaaatataaagcagatgattttgtaaaactaaaagatatcgttgaggtatggtttgatagtggatcaacccattcttttgtcttagaaaaaagaaaagatttaaagtggcctgcctctatgtatctagaaggttctgatcagcatagaggatggttccattcttctttattagagtcttgtggaacaagagacagagcaccttttgagtctattctttctcatggatttgtagttgatggaaaaggcttaaaaatgtcaaaatcat

SEQ ID NO: 304920 - DNA, 976 bp, Unknown
  Bacterial polypeptide expressing nucleotide sequence isolated from the Sargasso Sea
gatggggatgatccatatcttacaatgtctaatcaggcagaggcacaaattgtcagagaattaggaaaatttttacttgatgaaagtctgtataaaggagctaagcctgttctttggtcagtagttgaaaaaactgcattagcagatgctgaagttgaatatgaggatcatacctctaacacaatatatgttaaatttttaatttctaattcagatgacaaagatttagtaggctcaaatatagttatatggactacaacgccatggacaataccaggcaatagggcattagcttatggaaatgatttagattattgtattattaaagttgataaagttgaaaactctagtctagcaaaagttggtgataaattaatttttgctgcagatttattagataatgtttcaaatgaaataggaattataaaatattcaatagtaaaaaaatttaagggttcaaatcttgctacctgtgaatgtaatcatccttttaaagatataggatataattttattgttaaaccctttcatggtgaatttgtaaatttagatcaaggtactggtatagtacatattgcaccaggtcatggagatgatgattatattctaggaataaaaaataatattgatattattcaaactgttgaagatgatggtaagtataatcatcatgctattggttttgaaggtgaacatgtttataaagttgaccaaaaaattgcagataaattgaaagagttttcaaaacttttattccaaggaaccttaagacatagctatcctcattcatggagatcaaaagctccattaatttatagaaatactcctcaatggtttatttcaatggaaaaaaatggtctaagagaaattgctttgaaatctattgatgaaacaatattctacccgtctcaaggtcaaaaaagattaagatctatgatagaaacaagaccagattggtgtgtatctagacaaagag

SEQ ID NO: 304921 - DNA, 593 bp, Unknown
  Bacterial polypeptide expressing nucleotide sequence isolated from the Sargasso Sea
cgtggcgcgtcgcagctgccagaccgcgctgttccatattgtggaagcgctggttcgctggatggcgccgatcatgtccttcaccgcagacgaaatctggggctacctgccgggttcccgcgagaaatacgtcttcaccggtgagtggtatgaaggtctgttcggcctggccgatgacgaagcgatgaacgacgacttctgggacgacctgctgcaggtacgtggcgaagtcaacaaggtcatcgagcaggcgcgtgccgacaagctggtgggtggttctctggaagcggcggtcacgctgtatgccgatgccgatctggccgcgaagctgaacgcgctgggcagcgaattacgatttgtcctgttgacctccggggcgacggttgccgattatgcacaggcgccggcggatgcctggcagagtgaactgctgaaaggtctgaaagtcgtgctgagtaaagccgaaggcgagaaatgcccacgctgctggcactataccagcgatgtcggcaaggtggcggaacacgcggaaatctgcggtcgctgtgtcagcaacgtcgccggtgacggcgaaaaacgtaagtttgcctgat

SEQ ID NO: 304922 - DNA, 823 bp, Unknown
  Bacterial polypeptide expressing nucleotide sequence isolated from the Sargasso Sea
taagattgatgattttgaaggtaataaaattatagtcgctaacgatctaatagaaagttttatttcagcgtgtaaaattaaaaattttaaaaaattaaaaacttttaaaggtaaggaatttaagggtactatttgttcacatcctttttttaagcttggttttgattatgaagtaccgatgcttagtgcaaattttgttgatactgagcaaggaactggaatagtacactgcgcgccaagtcacggacaagatgattttaatctatgtctacaaaataatattccctcaaaatatacagtagatgacagcgggcgctataccaaagaaatacctttttttgaaaatcttcatattttcaaagccgatgaagaagtaataaaaaaattaaaagaggaaaagagtttgttgtcatcagataaattgcagcatagttatccgcattcctggcgttcaaaagcaccattaatatatagagcgactcctcaatggtttatatcaatggaaaaaaagtctctaagagaaaaagctataaaatctatcaacgaaactgagttttttccaaaaaaaggaaagggcagattgatgtcgatgattgaaacaagaccagattggtgtgtatcaagacagagagtttggggtgtgcctttgcctatctttattaataaaaaaactaatgaacctcttcgagaccaaaatgtaattaatagaattgctgaactatatgaacaggagggatcagattgctggtttactgatgatcctcaaaaatttttaggaaagaaatataaagctgatgattataatcaactcaaggatatagtc

SEQ ID NO: 304923 - DNA, 410 bp, Unknown
  Bacterial polypeptide expressing nucleotide sequence isolated from the Sargasso Sea
aatggaatataaagacacactttttttaccaaaatcatcttttgaaatgagagccaatcttccgtctaaagaaccaaaaattcttgaggattgggataaacaaaatatttacaagaatttaagagaaaaatcattaggaaaagaaaaatttgtattacatgatggccctccttatgcaaacggtcacattcatatggggacagcattaaataaaattttaaaagacgttattgtaagaacccaacaaatgtcaggtaaagactcaatttatgttcctggttgggattgtcatggattaccaattgaatggaaaattgaagaacaatataaaaagattggaaaaaataaagatacaattccaataattcaattcagaaaagaatgcagagaatttgcagaaaaatggattg

SEQ ID NO: 304924 - DNA, 971 bp, Unknown
  Bacterial polypeptide expressing nucleotide sequence isolated from the Sargasso Sea
gatgttactttcggaaaacttagaaaaaataagcctgaaacaccctttatcttcagcaaaagatgcaaatggtgaatgggatgatatcagagactttagagctgcagattttgtaactgacactgaaggcaccggatttgtccactgcgcgccatcgcacggaatggaggagtatgaactctatcgcgaattgggtagattggatcaagtcatcacgtataacgtaaaagacgacggaagcttcagagatgatcttccattctttgggggaaagtatatcctcagccgaaaaggcggtgaaggcgatgcgaacaaagcagttatcgataagctaatagaagttaatggattattggctcgtgggaaaatcaaacatagctacccgcattcatggcgctccaaagctccaataatatacaggaatacccctcaatggttcgcatcaatagatcgcgcagtcggtgatagtaaagatgaatttggcagaacgataagagagagagcactaaattctatagataaattggtttcatggacacctcagacaggaagaaaccgattgtattcaatgattgagacgcgtccagattgggtgttgtcgagacagcgagcatggggtgtacccctaacttgctttaccaaaaaaggagctttgccaaccgacagtgattttcttttaaagaatactgcggtgaatgaacggattgctaaagctttcgaaaatgaaggagctgatgcttggtatcttgaaaattcaaaagagcgttttttgaaaggaatcgtagacccaaaagagtacgagcaagtatacgatatattggatgtttggttcgatagcggctcaacgcacgcattcgttttgaaagaacgtgaagatggacccgatgatggacttgctgatttatatttagagggaacagaccaacatcgaggatggtttcactcatcaatgctacagtcctgcggaacga

SEQ ID NO: 304925 - DNA, 694 bp, Unknown
  Bacterial polypeptide expressing nucleotide sequence isolated from the Sargasso Sea
catgagtaaagaaaacataaacttaccaaagacaaaattttctatgaaggccaaccttcccgcgaaggaaccagaaatggtagagcattgggaaaaaattggattatataaacaattaagagaaagcagaaaaggcaaagaaaaatttgtccttcacgatggaccaccatatgcaaatggtaatatacatatgggaactgcctataataaaattttaaaggatcttattaccaaatttcatcaaatggatggaaaagattcagtttacgttcctggatgggattgtcatggattacccatcgagtggaaaatagaggaacaatataaaaagaataaaaaaaataaaaacgacgttccaatttctgaatttagaaaagtgtgtagagattttgcagcaaaatggatagatgttcacaaaactcaatttaaaagattaggagtcataggagactgggacaactattactcaactatgagttttgatgctgaggctcaaatcgttagagagttaggaaagtttttaaaggaggggagtttatacagaggttacaaacctgttctttggtcaacagttgagaaaacagcgttatcagatgctgaagtggaatatatggatcatacttctgatacaatttatgtttctttcccaattaaaaaaacaaatattgaatacttaaatgaatgtgaaatataa

SEQ ID NO: 304926 - DNA, 235 bp, Unknown
  Bacterial polypeptide expressing nucleotide sequence isolated from the Sargasso Sea
atgagtaaagaaaacttaaatcttccaaaaacagcattttcaatgaaggcaaatttaccacagaaagagcctagtctgattgatttttgggataaaatcaatttatatcaaaatttaagagacgaaagtaaaggcaaagagaaatttattctacacgatggtcctccctatgcaaatggcaacatacacatggggactgctttaaataaaatattaaaagacataataacaaaat

SEQ ID NO: 304927 - DNA, 418 bp, Unknown
  Bacterial polypeptide expressing nucleotide sequence isolated from the Sargasso Sea
atgtctaaagataatctacaactcccaaagacggctttttcaatgaaagcaagtttacctacaaaagaacctttaattttggaaaaatgggaaaaaaataaaatttttgaaaaattaagaaaaagttcaaaaggaaaagaaaaatttattctacatgatggacctccatatgctaacgggcacatacatatgggaactgcactcaataaaattttaaaagatatgataatacgttttcatcaaatgaatgaaaaagattcagtctatgttcctggatgggattgtcacggacttccaatagaatggaaaattgaagaagaatacaaaaaaaagaaaaaaaataaagacgaggttccaattaaagattttagacaagagtgcagagaatttgctaaaaagtggatacaagttcatataa

SEQ ID NO: 304928 - DNA, 327 bp, Unknown
  Bacterial polypeptide expressing nucleotide sequence isolated from the Sargasso Sea
aatggaatacaaaaacacaatttttcttcctaaaacatcctttgaaatgagggcaaatttaccaacaaaggaaccaaaaattttagatgaatgggataagacaaatatatacaaagaattaagaaaaaaatctaaaggaaaagaaaaatttgttcttcatgatggccctccctatgcaaatggacatatacatatggggactgcattaaataaaattctaaaggatgttattgtaagatctcaacaaatgataggtaaggattcaatttatgtacctggctgggattgccatggtttgcctattgaatggaaaattgaagaacaata

SEQ ID NO: 304929 - DNA, 679 bp, Unknown
  Bacterial polypeptide expressing nucleotide sequence isolated from the Sargasso Sea
atggaatataaagatacaatttttcttcccaaaacatcttttgaaatgagagctaatcttccagcaaaagaacctgaaataatagaggagtgggataaagaaaatatttttaaaaagctaagagataaatctaaaggtagagaaaaatttgttcttcatgacggtccgccatacgcaaatggacatattcatatgggaactgctcttaataaaattttaaaagacgtcattgtgcgaacacaacaaatggctggtaaagattctatctatgttcctggttgggattgtcacggtttaccaattgaatggaaaatagaagaagaatatagaaaaaaaggaaagaacaaggatgatgttccaactgttcaatttagaaatgagtgcagagagtttgcagaaaaatggatcgagatacaaaaaaaagaatttagacgacttggtgttgaaggagattgggaaaatccttacctcacaatgtcaaatcaagcagaagcgcaaattgttcgagaacttggaaaatttctacttgatgaaagcttgtataaaggagcaaaaccagttctctggtccgttgtagaaaagacagctttagctgatgctgaagttgaatatgaagatcatacgtctaatactatatatgttaaatttttaattaaaaattctacagataaagatttaa

SEQ ID NO: 304930 - DNA, 554 bp, Unknown
  Bacterial polypeptide expressing nucleotide sequence isolated from the Sargasso Sea
aatggaatataaggacacaatttttttacctaaaacttcatttgaaatgagggcaaatctttctaaaaaagagccaaaaataattgaagattgggataatgaaaatatttttaaaaaattacgaattaaatcaaaaggtagagaaaaatttattcttcatgatggcccaccttatgcaaatggtcatatccatttaggaacagctctaaataaaattctaaaagatgttatcgtaagaacacaacaaatggcaggaaaagattctatatatgtgccaggatgggattgtcatggattgcctatagaatggaaaattgaagaagagtatagaaaaaaaggaaaaaataaagacgatgtacctattgtacagtttagaaatgaatgtagagaatttgctgaaaagtggattcaaattcaaaaaaaagaatttagacgtttaggcgttgaaggtgattgggacaatccttatttaactatgtcaaatcaagcagaagcacaaattgtaagagagcttggaaaatttttgattaataaaagtttatataagggtgcaa

SEQ ID NO: 304931 - DNA, 571 bp, Unknown
  Bacterial polypeptide expressing nucleotide sequence isolated from the Sargasso Sea
atgagcaaatttcaaattaatcttccaaaaactgctttttcgatgaaagcaaatttgccaactagagaaccagaaattttgaaactttggcaaaaaataaatctttatgatgaattaagaaaatcgagaaaaggagaggaaaaatttgttcttcacgatggtcctccttatgcgaatggtaatatacacatgggaacagcccttaataaaatattaaaagatataattgtaaaatttcaccaaatggatggtaaagactcagtatatgttcctggttgggattgtcatggtttacccatagaatggaaaattgaagaacagtataaaaaaaataaaaagaacaaaaatgaaattcctgtagttgaattcagaaaagagtgtagagcttttgctgaaaaatggataaaagttcataaagatcaattcaaaagattaggagttgttggagattgggataattactattctacaatgagttatgatgccgaagctcatattgtcagagaattaggaaaatttttaaaggaaggaagtttatatagaggttttaaacctgtattgtggtcgacag

SEQ ID NO: 304932 - DNA, 1035 bp, Unknown
  Bacterial polypeptide expressing nucleotide sequence isolated from the Sargasso Sea
taaaaaaagatttttaggagaagaatataatgaggaagattatgaaaaattaaatgatatagtcgaggtttggtttgatagtgggtctacccacagctttgtattggagaaaagaggagatttgaaatggccagctgatatgtatttagagggttcagatcagcacagaggttggtttcactcatctcttttggagtcttgcggcacgagaggaaaagccccttttgaaagcatattatcacatggttttgtagtggatggtaaaggcatgaaaatgtctaagtcggctggaaatgttattttaccagaagaaattttaaaaaaatatggtgctgatattttaagagtttgggttgcgtcttctgactattcagaagatcttagaattgataaaataattctagaacaacacgcggagtcatacagaaaaataagaaatacttttagatttttattaggaaatttaaaagataattttgaaccaactgatttaaaaaaattaaatattcaggaacttcctgagttagagagatatattttaaataggatttttaatgtgaatgaaacgattaataaaaactttaagatttataattttcataaaatgtataaggaactactgagtttttgtacattagacctatcttcgttttatttcgatatcagaaaagactgcttatattgtgatgatgtaaattcaaaaaaaagaaaggattgtattattgttttaaacgttatacttgagacacttcttaaatggtttgctccaattttagtttttacaactgaggaaatatataatcttattaaaaaggacaataaaagtattcatgaacatgaatttttacagatccctaagtcttgggcaaatttaaacctaaatgataagtgggagagtcttaataaaattaaacaggcagttaatatagctatagaggaaaaaagatcaaagaaagttatcggttccagttggaagcagaaattgaaatctttcttgataaaaagaattatgacttacttgaaaatttggatcta

SEQ ID NO: 304933 - DNA, 1435 bp, Unknown
  Bacterial polypeptide expressing nucleotide sequence isolated from the Sargasso Sea
atggggtttaaagaatcaaaaaatttttcacttaattcaattgcaaaagagattgaagatttttgggctaaaaatgatgtctttatcaaatcatccaacagagataacagagaaagctttgttttttttgaaggccctccttctgcaaacggcaagcctggaattcaccatgtaatggcaagaacgataaaagatgctttttgtagatataaaactatcaaaggatttaatgttaaaagaaaggctggatgggacactcatggacttcctgttgaattaggtgtagaaaaagaactggggatttcaaaagatgatattggaaataagattagtgtatcggaatataatagagcatgtaaagaagcggttatgaaatatacttctaactgggaatctctaactaaagagatgggttattggattgatatgtctgatccttatgtaacattcgattctaaatatatggaatccgtatggtggattataaaagaaatttacaataagaatttgatatacaaaggctatactgttcaaccctattcgcctgctgctggatctggtttaagctctcatgaacttaatcagcctggcgcatatagagatattagtgatacctctgttgtggctcagtttaaatctataaaagaaagactccctaatgaatttattaatctatacccattttattttcttgcttggacaactacaccatggacactaccttcaaacacagcattaactattggtaagaagatcaaatattcttttgttaaaacatataatcaatacactaaagagttagtaactgttgtaatagcctctaaactaattgataagattttttctaagattttttatgaggtaaaaactgagaaagaattaaaatcatataacactgaaaagcgagatataccttatttaatatgccatgaagtgtctggtaaaagtttagaaaatatcagatatgaaagaatttgggaagaatctcctctgccattggataatccagaaaatgcatttagagtaataagtggagattttgttactactgatgacggaactggtattgttcatacagctccaacattcggagcagatgactataaggctgcaaaatcagcaaaacctgaagttccaccattacaagttttagataaaaatggcattaaagttccacttgttgatcttaaaggaaaatttattgacgggattggtttaataagtggcaaatatgtaaaaaatgaatattatgaatcagattgtattccagaaaaatctgttgatgttgaaatatccattagacttaaagaattaaatcgcgcatttaaagtagagaaatattcacattcttaccctcattgttggagaactgataagccagttctatactatccaatggaatcttggtttataaaaatggatagcttatcaaaaa

SEQ ID NO: 304934 - DNA, 1207 bp, Unknown
  Bacterial polypeptide expressing nucleotide sequence isolated from the Sargasso Sea
gatgattatcaaaaaattactagggaacaagtacaaagctgaagattttaataaacttagtgacattgttgaagtatggtttgacagtgggtccactcactcttttgttcttgagaaaagagctgatcttaaatggccagcatctatgtatctagaaggatctgatcaacatcgtggatggtttcattcatcactattagaatcctgtggcacgagaggcaaagctccttttgaaagcattttatcccatggatttgtagtagacggaaaaggtctaaaaatgtctaaatcgcaaggaaatgttatagcgcctgaagatattttaaaaaaatatggggcagatattttaagaatttgggttgcttcatctaattacgcagaagatctaagaatagattattcaattttagatcaacatgcagagtcataccgtaaaataagaaatacttttagatttttacttggaaatataaaagatgaatatgaagaatacgattttaataatttagaaattgttaatttaccagatctagaaaaatatatgcttcatcgtttagctaaagtgaaccaaagttttcataaaaattttcagtcatacaactttcatcaactttacaaagaattattaaatttttgtacagttgagttatcagcattttatttcgatatcaggaaggatttattgtactgtgacccaattaactctgataaaagatctgactgtatcaaagttctaaatataattctgcagtgcttgttaaagtggtttgctcctatattatcttttacaacagaggaaattttcaaacttttaaatcaaaatagcaacaaacaaagtatccacttagaaaattttataaaaatgccatcaaattggtttaatcaaaatatcgaacataaatgggataatattaaaaaaattagagatgaagccaatattagtatcgagacaaaaagagctagcaaggaaataggctctagtctagaggcaaaaattttaataaaattaaataaagatttatacaatgtaacaaaaaatgagaatttttctgaaatttgcattacttcagaaagtaaaatagttgaagatcagaatactgataaagaagttgaagtgattacagaaaaagccgaaggaagcaaatgttctttatgctggaaaataaaatcaaaaaaatgtgagagaattaattgtcaaatctcctaa

SEQ ID NO: 304935 - DNA, 502 bp, Unknown
  Bacterial polypeptide expressing nucleotide sequence isolated from the Sargasso Sea
aatgagcaaagaatatttaaacttacctaaaactgctttttctatgaaagcaaatctaccaaacaaagaaccagaatatttgaaattttgggataagattaatctatatgaaaaactgagatcccaaagtaaaggtaaagaaaaatttgtcttacacgatggacctccatatgcaaatggaaatattcatatgggtactgcattaaataaaattctaaaagatataataattaaatttcatcaaatggatggtaaagactcagtttatgtccctggatgggattgtcatggattaccaattgaatggaaaattgaggaacgatacaaaaaaaacaaaaaaaataaaaatgatgtacctattattgagtttagaaaggaatgtagagattttgcaagtaaatggattaatattcataaagatcaatttaaaagattaggagtaattggagattgggaaaactattactcaactatgagttttgatgcagaagcccaaattgta

SEQ ID NO: 304936 - DNA, 688 bp, Unknown
  Bacterial polypeptide expressing nucleotide sequence isolated from the Sargasso Sea
atgactaaatcacaaataaatctaccaaaaacagctttttctatgaaagctaacctgcctactagagagccagaaattcttgaatattggaaaaaaataaatctttacaatgaattaagaaatcaaagtaaaggaagagaaaaattcgtcttacatgatggtcctccttacgcaaatggaaatattcatatgggtacagctctaaataaaattcttaaagacataattgtaaaattccatcaaatggatggaaaagactctatttatgttccaggctgggattgtcatggtttaccaattgaatggaaaattgaagaaaagtataaaaaaaataaaaaaaataaaaatgaagttccaatagttgagtttagaaaagaatgtagaacatttgctgagaagtggattgaagttcacaaaagtcaatttaaaagattaggtgttgtaggggattgggaaaattattactcaacaatgagttttaatgcagaagctcaaatagttagggagcttggtaaatttttaaaagaaggaagcttatataaaggctttaaacctgtgttatggtcaacagttgaaaaaaccgcgcttgcagatgccgaggtagaatatcaagatcataaatcagatacaatttacacttcgtttaaagttaaatcatctaatttaaaagatttagtttggaagtgaa

SEQ ID NO: 304937 - DNA, 751 bp, Unknown
  Bacterial polypeptide expressing nucleotide sequence isolated from the Sargasso Sea
atggaaataaaagacacactcaatttgccagaaacaaaatttcctatgaaagccagccttactaaggctgagccacaaatgcttgaatggtgggcaaaggaaaaaatctatgaagaaattcgcgaatcatccaagggaaatgagaaatttgttttccatgatggtcctccttatgcgaatggtcatattcatatggggcatgcccttaataaagttctcaaagattttattgtaaagattatgggtatgaagggctacgatgcaggttttataccgggttgggactgtcatggtttgcccattgaacatcaagtgggtaagaagctcaaagaaaaaaagatgagccttgaaaagagtgcgataagaaaacaatgtcgttcttatgctcaggactttgtttcaattcaacgcgatgaatttaaaaggttgggcatatttgcagattgggaaaacccatatctaacaatggactatagctacgagtcaacgattgttcgtgagtttggaaagtttgtagaaaaagggatggtctataaaggtttgaaaccagttcattggtgtacatcttgccgaactgctcttgcggaagccgaagttgaacacggcgatcacacctctccatctatctatgtcaagtttgaaattaaatccggtgttcccaataatatgggtggtgatctaggtaaagcctacatggtgatctggacgacaactccctggaccttgccggcaaatctggcaattagtttgc

SEQ ID NO: 304938 - DNA, 1138 bp, Unknown
  Bacterial polypeptide expressing nucleotide sequence isolated from the Sargasso Sea
tggtttgacagtggatcaactcattcttttgttttagaaaaaagggaagatttaaaatggcctgcttcaatgtatctagagggttcagatcaacatagaggttggtttcattcttcactgttagagtcatgtggaacaagaggtagagcaccatttgaaagtattttatcccacgggtttgttgttgatggaaaaggacttaaaatgtctaaatcaacaggcaatgttatagctccagaagatattctaaaaaaatatggtgctgatatacttagaatttgggttgcttcatcaaattatgctgaggatttaagaatagactattcaattttagaccagcactctgagtcatatagaaaaataagaaatactttcagatatcttttaggaaatatacaagacgaatattcaaaaatagattttgataaaattaatttaaataatattcctgaattagaaaagtatatgctgcatagattgtatgtgatagatgagagttttaatgaatactttaagtcatataattttcataatttatataaagaattattaaatttttgtactgtagaactctcagcattttattttgatattagaaaagatcttctttattgtgacccaaaagactcaaaaaaacgctctgactgtatcttaattttaaaagtaattctagaatgtttattaaaatggtttgcgccaatcctatcatttactactgaagaaatttatcatttaattcaaaaggaagatgataaaggaagtattcatttacaaaaatttgttaaaattccaaataagtggaaaaatgaagaattgaacgacaaatggaataaacttaaattgattagagacgaagcaaacattagtattgaaagtaaaagggcagataaaattattggttcaagtttagaggcaaatattgagataaaaattaaagataaagacatgtatagtttggctcagaaccatgatttttctgaaatttgcattacatcttctgcttcaatcttgaatgataacaatttagaaaaagaaattgagatcactagttcaaaagctgttggaaataagtgcccagtttgttggaaaattagagaaaatatttgtgaaagagatggtaactgtcatctttcatgaa

SEQ ID NO: 304939 - DNA, 928 bp, Unknown
  Bacterial polypeptide expressing nucleotide sequence isolated from the Sargasso Sea
aatgtcaaaatctcttggaaatattattgcaccagaagatattttaaaaaagtatggagctgatatcctaaggatttgggtagcggcttctgattatgctgaagatttaagaatagattattcaattttagagcagcatgcagaatcttacagaaaaattagaaatacctttagatacattcttggaaatttaaatgacaaatttgaaaaagttgattttgaaaaaattaatgcaagaaattttcctgagttagaacagtttatgttacataaaatctataatctcaacattttatttgaaaagaattttgaaaaatataacttccatactatttataaggaaataataaatttttgtacatctgatttatcagctttttattttgatattagaaaagatgccttatactgcgattctctagagagtaaaaaaagaatttcaactatagagtttttaaatattgttcttgaaatattattaaaatggtttgcaccagtattatcatttacaactgaagaaattcattcacttctaaaaattaatgaaaaaggaagtattcatctagaaaaatttccatctatcccgtcaaactggaataatccagatttaaataacaaatggactgagcttataaaaataagggacaaatgtaatagcagtatagagttgaaaagagcatctaaagaaattggctcaagtttagaagcaaatttaaaaatacttttaaatgataaactaattcaattatctaaaggaactgatttttctgaactatgcattacatctggagcagatgttgataaaattaaaaaagacgatggagaagaaattattgttgagacaaacaaagctgtaggaaaaaaatgtagtgtttgttggaaaattaaggaagataagtgtgagagacatggatgcgtaataaaataa

SEQ ID NO: 304940 - DNA, 481 bp, Unknown
  Bacterial polypeptide expressing nucleotide sequence isolated from the Sargasso Sea
atgagtaaagaaaatttaaatctcccaaaaacatctttttctatgaaggcaaacttaccttcaaaagaaccaggttttatagaatattgggacaagataaaattatatgaaaaattaagagaatctactaaaggtaaggaaaaatttgttcttcatgatgggccgccatatgcaaacggtaatattcatatgggcactgcattaaataaaattcttaaagacataataaccaaatttcatcaaatggatggcaaagattcagtctatgttccaggctgggattgtcacggactaccaatagaatggaaaatagaggaacagtataaaaaaaataaaaaaaataaaaatgaagttccaattactgaatttagaaaagaatgcagagaatttgcaaataaatggattaaagttcacaaagatcaatttaaaagattaggagttattggagattgggaaaactattattctacaatgagttcga

SEQ ID NO: 304941 - DNA, 379 bp, Unknown
  Bacterial polypeptide expressing nucleotide sequence isolated from the Sargasso Sea
gttggaagattatgctgtatgcaaggaaaatggcattgatgtgctgaatccagttaaagggaatggaacttatagtgaggacgtagaacactttgcagggcaatttgtcttcaaagctaatgacaacataacgaatctcctagaagagagaggggttttattatcaaaatcatcttacgaacacagttatcctcattgttggagacataaaacccctgtcatgtttagggcaacacctcaatggtttatttcgatggagaaaaaagatcttttaaagcagtctcaagattctgttgactctgttaaatgggcaccaacttgggggtcaagccagaatgaattcaatgctggaaggacgtcccgattggtgtatttctag

SEQ ID NO: 304942 - DNA, 706 bp, Unknown
  Bacterial polypeptide expressing nucleotide sequence isolated from the Sargasso Sea
atgagcaaggaacatataaatttacctaaaacaaaattctcaatgaaggcaaatttgccaaataaggagccaaattacattgaattttggaagaaaattgacctttacaatttgttaagacaaaaaagtaaagggcaagaaaaatttgtacttcatgatgggcctccatatgcaaatggaaatattcatatgggtactgccttaaataaaattttaaaagatattattacaaaatttcatcaaatggatggtaaagactcagtttatgttcctggatgggattgccatggtttgcccattgagtggaaaattgaagaacagtacaaaaagaataaaaaaaataaaaatgatgttccaattattgaattcagaaaagaatgtagagaatttgcaaataaatggatagacgtccataagggagaatttacaagacttggggtaatcggtgattgggaaaattactattcaacaatgtcatttgatgctgaagctcaaatagttagagagcttggaaaatttcttaaagaaggaagcctttatagaggttacaagccagttctttggtcaactgttgaaaaaacagctttagcggatgcagaggttgaatacatggatcatgtttcagatacgatttatgcagcattcaaagtgaaagtttcaaatttagatataattgatggtgctgatgtaataattggacgacaac

SEQ ID NO: 304943 - DNA, 574 bp, Unknown
  Bacterial polypeptide expressing nucleotide sequence isolated from the Sargasso Sea
aatgtctaaagataccttacagcttccaaaaactgctttttcaatgaaagctagtttacccaccaaagagccagaaattttaaagaattgggaaaaaaataaaatttttgaaaagttaagaaaaaaatctaaaggaaaagagaaattcatacttcatgacggcccgccttatgccaatggacacatacatatggggaccgctttaaataagattttaaaagatatgattactcgttttcatcaaatgaatggaaaagattctgtttatgtgcctggatgggattgtcatggactaccgatcgagtggaaaattgaggaacaatacaaaaaaaagaaaaagaataaagatgaagttcccatcaaggattttaggcaagaatgtagagagtttgcagagagttggattgacatacatattaaggaatttaagagattaggtgtagttggagattttgaaaattactattctacaatgagtttcgaggcagaagctcaaatagtacgggaactaggtaagtttcttcttgatggaagtttatatcaaggatttaaaccagtactttggtcaactgtg

SEQ ID NO: 304944 - DNA, 352 bp, Unknown
  Bacterial polypeptide expressing nucleotide sequence isolated from the Sargasso Sea
aatgagcaaggaacatttaaacttacctaaaactgctttttctatgaaagcaaatctaccaaataaagaaccagaatatttgaattattgggataagattaatttatatgaaaaactaagatctcaaagtaaaggcaaagaaaaatttgtcttacacgatggacctccatatgcaaatggaaatattcatatgggtactgcattaaacaaaattctaaaagatataataattaaatttcatcaaatggatggcaaagactcagtttatgtacctggatgggattgtcatggcttaccaattgaatggaaaattgaggaacaatacaaaaaaaataaaaaaaataaaaatgat

SEQ ID NO: 304945 - DNA, 342 bp, Unknown
  Bacterial polypeptide expressing nucleotide sequence isolated from the Sargasso Sea
tatgagtaaagaacatataaatctcccaaaaacggctttttcaatgaaagccaacttaccagtaagagaacccggtattttagattactggcaaaagattggcctatacaagaaattaagacaaaaaagcaaaggtaaagaaaaatttgttcttcatgatggacctccctatgcaaacggaaatattcatatgggaacggctttgaataaaatactaaaagatataatcacaaagtttcatcagatggatggcaaagactctgtatatgtgccaggttgggattgtcacggattgccaatagaatggaaaattgaggaacaatataaaaaaaataaaaaaaa

SEQ ID NO: 304946 - DNA, 1045 bp, Unknown
  Bacterial polypeptide expressing nucleotide sequence isolated from the Sargasso Sea
atgactgctgaaaaagagcaaaaaactttttcctttgtagaaatggagcacgaaatcctagatttctgggatcaggaatcgatctttcagcagtccctcaagaacacgaaggataagaaaccttatattttttatgacgggccgccttttgctacggggctaccacatcacgggcatttagtggcgagtactatcaaagacgttgtgcctcgatattggacaatgaagggtcgctacgtaatgcggcgattcggttgggattgtcatggcctaccggtagaacacgagatcgacaaaaaactaggcatatcagcgcaagaggcagtcaacagtcttggggtacaaggttataacgacgagtgtagagcgattgtgcagcgctatgtctccgagtggcgccaaacaattacgcgtattggtagatgggtggatttcgaacacgattataagacgatggatacctggttcatggaatctgtctggtgggcttttagacagttatgggataaaggactcatctatcagggtatgaaagtggttcctgtttctaccgagttaggcacgccactcgcaaacttcgaggcgacctcgaattataaagatgtgcaagatcccgccataacggtgctattaaaaataattgatcgggaggaatatctggcagtctggactaccactccttggactttgccctcgaacttagccgtctgtgttggtgccgatatcgactattgcttagtagaagatccggatacaggtcttaaattctatctggctgaggagaggatcagcgcctacgaggataaaggcagatttaagatcctaagttcgattaaaggcgatcgtctcgttggactatcttatgagccgccctttgattacttcctcggtgagcaagagaagggcgcatttgttgttttgtcggatgattatgtaacgacagacagcggaactggcttagttcatcaagcccccgctttcggagagaaagactaccgtgtactaaatgagaacggtatagaagcctttgcttgccctgtcggtt

SEQ ID NO: 304947 - DNA, 481 bp, Unknown
  Bacterial polypeptide expressing nucleotide sequence isolated from the Sargasso Sea
atggaaaaagattacaaaaataccttaaatctgccaaaaacagatttacctatgaaagctggtttgccaaataaggaaccagagattctatctttttgggattcaatcaatctttataatttaattagagaagaaaatgctaaaaaagataaatttatccttcacgatggcccgccatatgcaaatggcgatattcatcttggccactcagtaaataaaatacttaaagatattgtaattaagactaagactttgcaaggctttgatgcaccttatgttcctggctgggattgtcatggattaccaatagaactaaacgttgagaaaaagtttggaagagatagtgatactgtaaaagataaatcaaaatttattagtgcctgtcgtgaatatgctctttctcaaatagaaaatcaaaagaaagattttatacgtcttggagtcttgggtgattgggaaaattcatataagtctcttgatt

SEQ ID NO: 304948 - DNA, 181 bp, Unknown
  Bacterial polypeptide expressing nucleotide sequence isolated from the Sargasso Sea
atgagcaaggaacacctaaatttacctaaaactgctttttccatgaaagcaaatctaccaaataaggaaccagaatatttaaaattttgggataagattaatctatatgaaaaactaagatctcaaagtaaaggaaaagaaaaatttgtcctacatgatggacctccatatgcaaatggaa

SEQ ID NO: 304949 - DNA, 415 bp, Unknown
  Bacterial polypeptide expressing nucleotide sequence isolated from the Sargasso Sea
atggaatataaagatacaatttttcttcccaaaacatcttttgaaatgagagctaaccttccctcaaaagaacctgcaataatagaggagtgggataaagaaaatatttttaaaaagctaagagataaatctaaaggtagagaaaaatttgttcttcatgatggtccaccatatgcaaatggacatattcatatgggaacagctcttaataaaattttaaaagatgtcattgtgcgaactcaacaaatggctggtaaagactctatctatgttcctggatgggattgtcacggcttaccaattgaatggaaaatagaagaagaatatagaaaaaaaggaaagaacaaggatgatgttccaaccgttcaatttagaaatgagtgtagagagtttgcagaaaaatggatcgagatac

SEQ ID NO: 304950 - DNA, 517 bp, Unknown
  Bacterial polypeptide expressing nucleotide sequence isolated from the Sargasso Sea
atgacacttaattatagagatacattaaatcttccagatactgaattttctatgaaggctggtcttcctagaaaagagcctgaaattcttaaattttggtctaaaacaagtgtgtatgaaaaaattaggaaaaaatatgaaggtaaggacttatttctgcttcatgatggacctccatatgctaatggtgcaatccatctgggccattctgtaaataaaattcttaaagacataactgtgaagtcaaaaactcttcagggttatgatgcgccatttattcctggttgggattgtcatggtttacctattgaattgaatgtagaaaaaaaacatggaaaaaaaagtgatttagttaaaaataaagaaagtttccaaaaagcttgcaaagaatatgcccaatctcaaataagtgatcagcttgaagattttaaaaggttaggtgtttttggtgactgggaaaactcttacatgtcattagactcaaaattgaagcagatattattaggtcattgggaat

SEQ ID NO: 304951 - DNA, 952 bp, Unknown
  Bacterial polypeptide expressing nucleotide sequence isolated from the Sargasso Sea
atgtctaaatctttaggtaatgttatttctccagatgatatattaaagaaatatggagtagatattttaagattgtgggttgtcgcatctgattattatgatgatctgaagcttgataatgctatcctccaatcacaagctgagtcttacagaagaataagaaatacctttcgttttctaattggcaatttaagtgaatttactgaagaggaagttattgatgagagtgagtttccagagttagaaaaatatctgcttcatcgattgtgggaagttgatcaggttgttcaaaaatgtgtatcaacatttaactttcacttgatgtttactactctactgaacttttgttcaagtgatctttcagctttttattttgatattagaaaagacacaatatattgtgatagtaaagagtcggttaaaagaaggtctactagaactctattaaatataatttttaatcatttagtaagatggtttgccccttctatttcctttacttctgaagaagcttggaaagcaatgggaaatatagaaagtatacacctacaagattttttacaatgtaaaaaagaatacgaagataatcaattaaatgaaaaatggaatataattaaaaatattagaaaagttgccactggagctattgaaaaaattagagaagaaaaaactattcgttcaagtcttgaagcacacatagatatttttgtttctgcaaaaagttataaaaaacttgagaaagtaatgtttgatgaaattacaattacctcatcattttctttgtttgttattgacgaaaaatccaatggtttctctattgaagatatttctgatgttatcgtaaaagcatcaaaggtaaatggagaaaagtgtcaaagatgttggaaatatgaggcaaaattaataaatgatgaagtttgtaacaggtgtaatactgtaatatttaagtgat

SEQ ID NO: 304952 - DNA, 1093 bp, Unknown
  Bacterial polypeptide expressing nucleotide sequence isolated from the Sargasso Sea
atgggtcatgctcttaataaagttttaaaggacataataaataaatacaaaaccttaagaggatttagggttcacttcgtacctggttgggactgtcatggattacctattgaattaaaagtacttcagaatttaaaatctgatgaaagaaagaatcttaacactctaaatttaagaaaaaaagcaacagattatgcccatatccaaattaataatcagaaagagggtttcaaaaggtggggtatatggggagattggaataatccttacttaactcttaagaaaagttatgaatctgctcagattggagtttttgggaaaatgtttttaaatggctacatatatcgaggtcttaaacctgtgcattggagtccaagttcaaggactgcacttgcagaagcagaattagaataccccgatgaacattattcaaaaagtatttatgtttcattaaaaatcactaaaatacccgaggaaattttattaaatttaatccaagaaaaacttaatatcaaaaaagatttttttcaaaataattcttttatcactatttggactactactccttggaccatacctgcaaatgaagcagtagcagtaaatcccaaaataaagtacgtttttgctatcgatgaagagaagaaaatttacctttttgctgaggatttattttctgaaataagtaagaaatttaataaagatttcaaggtgcttttagaggttaaaggctccaaattggaaaatattgaatatcaacatccctctaagaataaaaattgcagaattataattgggggagattacattacaacagaatcagggacgggaattgttcatactgctcctggtcatggtgtagatgattttaatgtgggtcaaaaatatgatttaccaataacatgtgtcgttgatgaaaaaggtaacttaaatgaatattctggtcaattcaaaggggcaaatgttcttaaagaagcaaatgatttaattattgaacatttaaaagaaataatttgcttctatttacagaaaattataagcatagatatccgtatgattggagaactaaaaaaccaactatttttagggcaacaga

SEQ ID NO: 304953 - DNA, 1144 bp, Unknown
  Bacterial polypeptide expressing nucleotide sequence isolated from the Sargasso Sea
aaaatatagatcagaagactataataaaatgagtgatattgtcgaagtttggtttgatagtggctctactcattcttatgttttggaaaaaagagatgatttgaaatggccagcatctatgtatttagaaggttcagatcaacacagaggatggtttcattcttctttattagagtcatgtggcaccagaggcaaggcaccattcgaaagtattttatcacacggatttgttgttgatggcaaaggtcttaaaatgtcaaaatctacaggaaacgttattgcaccagaagatatattgaaaaaatatggagcagatattttaagaatatgggtggcatcttctaattatgcagaggatttaagaattgattatgcaattttagaccaacatgcagaatcttacagaaaaattagaaatacttttagatatcttttaggaaatattaaagatgaatatttagaatctaattttaaaaatttggatttaaaggaaatgcctgatcttgaaaagtatatgcttcacagaatttatgaaattaatgaaagtttttataaatattttaaatcttataattttcataatttgtataaagagttattaaatttttgtaccgtagagctatcagccttttattttgatattagaaaagatcttctttattgtgatccaatagactcaaaaaaaagatcaaaatgtatattgatattaaatattttattacaatgcttacttaagtggtttgcgccaatattatcatttactacagaagaaatttttaaattaataaataaaaatgaagatgaaaaaagtatacatttaaaaaattttgttgatattccaaaaaattggaaaaatgaagaaataaataataaatgggaacaaataaaaaaaataagggatgaagctaatattagcatagaaaataaaagagctagtaaagccataggttcaagccttgaagccaatattagcattaagttaaaagaaaatttatacaatatttcaaagaatgaagatttttcagaaatttgtattacatctaacgcaacaattgttgaagataatcagatgcaaaatgaaattgaagttaatactgaaaaggctaaaggaattaaatgtcctgtttgttggaaaattaccaaa

SEQ ID NO: 304954 - DNA, 640 bp, Unknown
  Bacterial polypeptide expressing nucleotide sequence isolated from the Sargasso Sea
atgagcaaggaacacattaatttacctaaaacaaaattctcaatgaaggcaaatttgccaaacaaggagccaaattatattgaattttggaagaaaattgacctgtacaatttgttaagacaaaaaagtaaagggcaagaaaaatttgtactccatgatgggcctccatatgcaaatggcaatattcacatgggtaccgctttgaataaaattttaaaagacataattacaaaatttcatcaaatggatggtaaagactcagtttatgttcctggttgggattgccatggtttgcctattgagtggaaaattgaagaacagtacaaaaagaataaaaaaaataaaaatgatgttccaattattgaattcagaaaagaatgtagagaatttgcaaataaatggatagatgtccataagggagaatttactagactcggggtaatcggtgattgggaaaattactattcaacaatgtcatttgatgctgaagctcaaatagttagagaacttggaaaatttcttaaagaaggaagcctttatagaggttacaagccagttctttggtcaactgttgaaaaaacagctttagctgatgctgaagttgaatacatggatcacgtttcagatacgatttatgcag

SEQ ID NO: 304955 - DNA, 550 bp, Unknown
  Bacterial polypeptide expressing nucleotide sequence isolated from the Sargasso Sea
atgagtaagtcacaaattaatctgcccaaaactgctttttccatgaaagcaaatcttccaatcaaggaacctgaaattttagaatattggaaaaaaattagtctttatgaaaaattaagaaacaatagtaaaagtaaagagaaatttgtacttcatgatggtccaccatatgcaaacgggaatattcatatgggaacagcacttaataaaatcttaaaagatataattgtaaaatttcaccaaatggatggaaaagactcaatttatgttcctggttgggattgtcatggtttaccaatcgagtggaaaatagaggagcaatataaaaagaataaaaaaaataaaaatgaagttcctataattgagtttagaaaggagtgcagatcatttgctgaaaaatggattgaagttcacaagagtcaatttaaacgattaggtgttattggagattgggagaattattattctacaatgagttatgatgctgaagctcaaattgtaagagaacttggtaagtttttaaaagaaggaagtttgtatagagggttta

SEQ ID NO: 304956 - DNA, 224 bp, Unknown
  Bacterial polypeptide expressing nucleotide sequence isolated from the Sargasso Sea
aatgactaaatctcaaataaatctgccaaaaacagctttttctatgaaagccaacttgccaattagagagccagaaattcttgaatattggaaaaaaataaatctttacaacgaaataagaaaggaaagcaaaggaagagaaaaattcgttctacatgacggacccccttacgcgaatggaaatatcaatatgggaacagctctaaataaaattcttaaagata

SEQ ID NO: 304957 - DNA, 1159 bp, Unknown
  Bacterial polypeptide expressing nucleotide sequence isolated from the Sargasso Sea
tagagattttgctaacaaatggattaatgttcacaaagatcaatttacaacatttggtgtaataggagactggaaaaactattattcgacgatgagttttgatgctgaagctcaaattgtaagagagttaggaaaatttcttaaagaaggaagtttatacagaggttacaagcctgtattatggtcaacagttgaaaaaacagcattagctgatgcggaagtagaatatatggatcacgtatcagacacaatatacgctgctttttctattaaaaaaacaaacttaaaggaaatggagggttcgaatgtaattatttggacaacaactccatggactataccagcaaataaagctttagcttacaattctaatttaatttatttaatagtaaaaattaaagatgatggtgattttaaagataaaaaaataatagttgcaaaagatcttttggagtttttgataaaagaatgtgaagttaaaagttttaatattgagaaagaattttcaggtaaagaatttgaaggaactatttgtactcatccatttttagatattggttatgattatgatattccaatgcttgaagctaaatttgttacaaccgaacaaggttcgggaattgttcactgtgcgccaagtcatggccctgatgattttaatctatgtttaaaaaataatattaaagctttagaaacagtagatgatgatgggaaatatacaaaaaatataattaaatttgaaggtactcatatttttaaagcgaatcctatagtaattgaaaatttaaaaaaccaaaaaaaacttcttgctaatggaaagctaactcattcttatccacattcatggagatcaaaagctccgctggttcacagggcaacagcccaatggtttatatctatggaaagtcacggtttaagaacaaaatcactaaaagcaattgatgagactgttttttatccaagcaaggctaaagaaagaattaaatcaatgatagaaactagaccagactggtgcgtttcaagacaaagagtatggggagtgcctttaccaattttcctatccaagaaaactggaaaagcactaatagacgatgaagtttttgaaaatattgcgaaaatttttgaaaaagaaggttctgactgttggttttccgaataa

SEQ ID NO: 304958 - DNA, 334 bp, Unknown
  Bacterial polypeptide expressing nucleotide sequence isolated from the Sargasso Sea
atgaataaatcacaaattaatctgccaaaaacagctttttccatgaaagctaatctgccaactaaagaaccagagatacttgaatattggaaaaaaataaatctttacgatgaattaagaaatgaaagtaaaggaaaagaaaagttcgtccttcatgatggaccgccttatgcaaatggaaatattcatatggggacagctcttaataaaattctaaaagatataatcgtaaaatttcaccagatggatggaaaagattctatttatgttccaggttgggattgtcatggcctgccgattgagtggaaattgaggaacagtataaaaaaataaa

SEQ ID NO: 304959 - DNA, 437 bp, Unknown
  Bacterial polypeptide expressing nucleotide sequence isolated from the Sargasso Sea
aatgagtaaaagttcagtaaatcttccgaaaacatcattttcaatgagagcgaatcttcccttaaaggaacctgatctaattgattattggaacaaaatatcgctctatgagaagcttagagcaaatagcaagggaaatgaaaaatttgttttacatgatggcccaccttatgcaaatggaaatatacacatggggactgctttaaataaaattttgaaagatatcgttacaaagtttcatcaaatgaaaggaaaagactctgtgtatgttccaggatgggattgtcacggtttaccaattgaatggaaaattgaagaacaatataaaaaaaataaaaaaaataaaaatgatattccaatcgttgaatttagaaaagaatgtagagattttgcaaataaatggattgatgttcataaaaaacaattccaaagattag

SEQ ID NO: 304960 - DNA, 235 bp, Unknown
  Bacterial polypeptide expressing nucleotide sequence isolated from the Sargasso Sea
atgagcaaatctcaaataaacttgcctaaaacagctttttctatgaaagccaatctaccaactaaagaacccgaaatattaatgtgctgggataaaattagtttatataaagaattaagaagttcaagaaaaggacaagaaaagtttgttctccatgatggtcctccatatgcaaatggtaatatacatatgggaacagcacttaataaaattttaaaagaatattattgtaaaa

SEQ ID NO: 304961 - DNA, 1063 bp, Unknown
  Bacterial polypeptide expressing nucleotide sequence isolated from the Sargasso Sea
agatataataattaaatttcatcaaatggatggtaaagactcagtttatgtccctggatgggattgtcatggattaccaattgaatggaaaattgaggaacgatacaaaaaaaataaaaaaaataaaaatgatgtacctattattgagtttagaaaggaatgtagagattttgcaagtaaatggattaatattcataaagatcaatttaaaagattaggagtaattggagattgggaaaactattactcaactatgagttttgatgcagaagcccaaattgtaagagaacttggaaaatttttaaaagagggtagtttatacaagggctacaaacctgtactatggtcaacagttgaaaaaacagctttagcggatgcagaggttgaatatcaagaccacatatctgatacaatatatgtggcctttccagttaaaaaatctaatataaatgaattagttagctctaatgtagttatctggacaacaacaccatggacgataccagctaataaagcattagcctataatcaaagtttggattatgttttatgtgaaattgataacaaagatatattacaaaacgataagatagttattgcaaaagaacttttaccctctgttgtaaaagacactcaatacaatattaagatattaaaagaatttaaaggaaaagaatttaatggaactatttgtagtcatccatttcacaaaattggctatgactatgatgttccaatgctcgaggcaagatttgtaacaactgaacaaggaactggaattgttcattgtgcaccaagtcatggacctgatgattttaatctatgtatcaataatggaataaaagcaattgaaacagttgatgatgatggaaggtacacgaaacacatacctatgtttgaaggaacacatatttttaaagcaaataatattgttattgaaaagcttaaagaaattaaagctcttttaaataatggcaaactaactcattcttacccacattcttggaggtctaaagctccattagttcatagagcaacacctcaatggtttatttccatggaa

SEQ ID NO: 304962 - DNA, 1177 bp, Unknown
  Bacterial polypeptide expressing nucleotide sequence isolated from the Sargasso Sea
gcagaagattttgataagactagcgacattgtagaagtatggtttgatagtggatcaactcattcttttgttttagaaaagagagaagatttaaaatggcctgcatcaatgtatctagagggttctgatcaacatagaggatggtttcattcttcactgttagagtcctgtggaacaaggggtagagcaccttttgaaagtattttatctcatgggtttgttgttgatgggaaaggtttaaaaatgtctaaatcaactggaaatgtaatagctccagaagatattttaaaaaaatatggtgctgatatattaagaatttgggttgcctcttcaaattatgctgaggatttaagaatagattattcaattttagatcaacactccgaatcttacagaaaaatcagaaatacttttagatatcttttaggaaatatacaagatgaatattcaaaagttgactttgataaaattgatttaacaaatatccctgaattagaaaagtatatgctgcatagattgtatttaataaatgaaagttttaatgaatactttaagtcttataattttcataatttatataaagagttgttaaatttttgtacagttgaactctcagcattttattttgatattagaaaagatcttctttattgtgatccaaaagattcaaaaaagcgttctgattgtattttgatactaaaagtaatattagagtgcttattaaaatggtttgcacctatcttatcatttactaccgaggaaatttatcatttaattcataaggaggataataatggaagtattcacttacaaaaatttgtcaaaattccaaatcaatggaaaaatgaagaattaaatagtaaatgggataaacttaaattaatcagagatgaagcaaacattagtattgaaagtaaaagagctgataaaattattggttcaagtttagaggcaaatattgaaataaaaatcaaagatgaagccatgtatagtttagctcagaactatgatttctctgagatttgcataacatcctctgcttcaatcttaaatgataacaatttagaaaaagaaatagagatcactagttcaaaagctgttgggaataagtgcccagtttgttggaaaatcagggaaaatatttgtgaaagagatggtaattgtcatctttcatgaa

SEQ ID NO: 304963 - DNA, 390 bp, Unknown
  Bacterial polypeptide expressing nucleotide sequence isolated from the Sargasso Sea
aatggaattcaaagatacaatttttttacctaaaactacttttgagatgagagccaatcttcctcaaaaagaacctaaaattttagaagagtgggataaagaagaaatatttttaaagcttagagaaaaatctaagggaagagaaaaatttgtactccatgatggacctccatatgcaaatggacatattcatatgggaactgctttaaataaaatactaaaagacgttatagtaagaacacaacagatgtcaggaaaagattccatttatgttccaggatgggattgtcatggtttacctattgagtggaaaattgaagaagaatatcgaaaaaaagaacaaaacaaagatgatgtacctattgttcagtttcgtcaggaatgtcgaga

SEQ ID NO: 304964 - DNA, 1006 bp, Unknown
  Bacterial polypeptide expressing nucleotide sequence isolated from the Sargasso Sea
gactacaactccttggacaattccagctaacagagcattggcttacaatgaaggtcttgattatgtgcaactagagttaaatgatgaaagtgattttaaaaataaaaaaattatagtcgctgaagccttactgcagtctgtcatcaatgattgtaaagtaaaaaattacaaaaaaataaaaacatttaaaggtaaagaattaaaagaaactatctgtaatcatccctttttagatctaggttacgactacgatatcccaatgttagaggcaaggtttgtaacaactgagcaaggaactggtattgttcattgtgctccaagtcatggacctgatgattttaatttatgtttaaataatggaattaaagcaattgaaacagttgatggagatggcaaatatacaaaacatgtaagcttattcgaaggtattcatatttttaaagcaaacccaatagtaattgaaaaacttaaagagcaaaaaaaattattatcaaatggggagctaatgcactcctatccacattcttggagatcaaaagctccattagttcatagagccactccacaatggttcatatctatggaaagtcataagttgagagataaagctttaaaagcaattaatgatacgactttttatccaagtaaaggtaaagagagattaaaatcaatgatagaaactcgacctgattggtgtgtttctagacaaagagtatggggtgttcctcttccaatttttattaataaaaagactaaagaaattttagtagatgatgaagtaaatgaaactattgccactatttatgaaaaagagggttcagattgctggttttcagatgacccacaaagatttttaggaaataaatacaaagccgaagattatgacaagttgagcgatattgttgaagtttggtttgatagcggatctacacattcatttgttcttgaaaaaagagaggatttaaagtggccagcatcaatgtatttagaaggttccgatcaacat

SEQ ID NO: 304965 - DNA, 262 bp, Unknown
  Bacterial polypeptide expressing nucleotide sequence isolated from the Sargasso Sea
atgagtaattcccaaataaaccttcctaaaactgctttttcaatgaaagctaatttgcctgtaagggagccagaaattttagaatattggcaaaagattaacctttacagggagttaagaaactcaagcaaaggaaaagaaaaatttgtcctccacgatggtcctccatatgcaaatggtaatattcatatgggaactgctcttaataaaattttaaaagatataattgtaaaattccatcaaatggatgtaaagattctat

SEQ ID NO: 304966 - DNA, 1079 bp, Unknown
  Bacterial polypeptide expressing nucleotide sequence isolated from the Sargasso Sea
tgggtggttccaaagctctctacttacttctgtggcaataaatgatcaagcaccatataaagaagttctcactcatggatttgtagtcgatgaaaaaggacataagatgtctaagtcaattggaaataccgtctcacctcaatcggttataaataatatgggagctgatattttgagactttgggttgcatcaaccgattacaccagtgaaatgaaaatttcagatcagatactcaagcgtaatgctgacacttataggagaatcagaaacacagcgagatttttattgagtaatttaagcgacttcgatcctacaaagaatcagcagaaaattgaggatctagtattacttgatcaattagctattcagcgtgttgcagtaatgaatgaagaaattaaaaatgagtttaataactattcattccataaaatcatccagcttttacataacttttgtgtcaatgatatgggaggtttctatctagatattatcaaggatcgactttatacaatgccgacagattcgcacggcagaagatctgcacaaacagccttgtatatcattgcagaatcattgactcattggattgctcctattttgtcttttacggctgaagaaatctggaaacatctaccagagaggaaagaagaatctgtatttctttctgattggatagatatagaagagcctaagtcgaatgttgattgggatcaattgaatgacataaattcgattgttcttaaagctttggaggttgcaagggatgatggcaaaatcggatctccactggatgcacatttggaaatttacgcagatcaaaacacatacgattttcttcaagagttttctgaagagctgagattcttatttattacttcctcagttcatcttgagattgacgatactattgattctaatgagaagctgcgtgtgaaggtaaataaatctaaagcagaaaaatgtggaagatgctggcaccgacaagaatcagtaggagattctagtgaacatccagagatttgcgctcgatgtgtaagcaatatcagcgattcacctgaagagagatcatttttctaga

SEQ ID NO: 304967 - DNA, 552 bp, Unknown
  Bacterial polypeptide expressing nucleotide sequence isolated from the Sargasso Sea
gatgactgactacaagcagactttgaatttaccggacacggcttttgccatgcgcgccaaccttgcgcagcgtgagccacagatgctagccaactggacagaaaaaaatctgtaccagaaaattcgtcaggccaaacaaggtaaaaaaacctttatcctgcacgatggcccaccatacgccaacggtaacattcacattggtcacgcggtcaataaaatcctgaaggatatgattgttaaagccaagaccttgtctgacttcgatgccccttatgtgccgggttgggactgtcatggcttgccgatagagctggttgttgaaaagaaatacggcaaacctggcgtcaagctgagtgctgctgaattccgtcaaaaatgccgtgattatgcgttgacgcaaatcgaagctcagaaagtcgactttatccgcttaggcgtattgggcgattgggacaatccttaccgcactatggattttaataccgaagccaatatcatccgttctttaggtcgtatcatcgacaatggtcatttgcagcaaggctttaagcc

SEQ ID NO: 304968 - DNA, 607 bp, Unknown
  Bacterial polypeptide expressing nucleotide sequence isolated from the Sargasso Sea
tgctctagatgcgatagatgctacacgtttcgttctgggcagaggtaaaaatagattaaggactatgattgagcaacgtccagactggtgtgtttctcggcaaagggcatggggtgttccaattacaatttttatcaataaggaaacgggtgaacccttaaaggatcagaaagtaattgacaggataggcgatatatttgaggtggagggttccgacgcttggtattcgagtgacccgcagcgttttcttggggacaaatatgatgcaaatgattacgagcaaattacagatatagttgaagtttggttcgatagcggttcgacccatgcttttgttttggaggatcggcccgaattaaaatggcctgcttccctttatcttgaagggtcggaccaacatcgaggttggtttcacacctctcttttacaatctagtggcacacgaggacgtgcaccatttgaggcagttctaactcacggatttgtgctagatgagtctggcagaaaaatgtcgaaatcaatgggtaatgtgacagcaccacaagatattatagagcggaatggtgcagacattttacgtttgtgggtagtgggctcggactattct

SEQ ID NO: 304969 - DNA, 1030 bp, Unknown
  Bacterial polypeptide expressing nucleotide sequence isolated from the Sargasso Sea
tctaattgatcaagatgttattgagaatattgctaatatctatgaaaaagaaggctcagactgttggttttcagatgatccacaaagatttcttggagacaaatataaagcatctgattttgataaaatgaaagatattgttgaggtttggtttgacagtggctcaacccattctttcgttcttgaaaaaagaaaagatttaaaatggccagcttcaatgtatttagagggatctgatcaacatagaggctggttccattcatcactattagagtcgtgcggaacaaggggtagggctccatatgaaaatattttatctcatggatttgttgttgatggcaagggtttaaaaatgtctaagtcattaggaaatataatttctccagatgatattttaaagaaatatggagcagatatattaaggatttgggttacatcatcaaactatgcagaagatttaagaattgattattcaattctagatcaacatgctgaagcctacagaaaaattagaaatacttttaggtatttattaggaaatttaaatgatgagtttaaaaaaatcaatttaaatgaattgaaaatagaagagtttccagagttagagcaatatatgttaaataaaatttttaatttaaacaagaattttttgaaatattataaatcgtacaattttcataatttgtataaagaattattaaatttttgtactgttgacctgtccgcattctattttgatatacgaaaagatacactttattgtgatacaaaagactcagaaaaaagacaaaatactattttacttttaaatattattttggactgcttgttaaagtggtttgcaccaattttatcttttactgcagaggaaattttttcaataataaataaaaataatactagcattcatttggaaaaattcccaaatattccatccaattgggaaaataaaagtttaaatgaaaaatggacaactttgaaaaaaataagagataattgcaatattagcatgaagaaaaaagagcaagca

SEQ ID NO: 304970 - DNA, 882 bp, Unknown
  Bacterial polypeptide expressing nucleotide sequence isolated from the Sargasso Sea
aatgaaagttaattatagagatacattaaatcttccagatactgatttttcaatgaaggctggcttacccagaaaagagccagaaatattagaaatgtggtctagttcagatttgtatgggaagattagaaaaaaatataaagataaagaattatttttattacatgacggtccaccatatgcaaatggtgatatacatcttggacattcagttaataaaatccttaaagatataactattaagtacaaaactctgcaaggttttaatgctccttatgtgcctggttgggattgtcatggtctcccaattgaacttaatgtcgaaaagaaacacggaaaaaacagcgaacttgtaaaaaataaacaaagttttcaaaaagcttgtaaagaatatgctgaaagtcagatcaataaacaattagacgattttaagagacttggtgtgctaggcgactgggaaaactcatataagtcattagatccaaaatttgaagcagatatagtaaggtccttaggcaagatttataaagaaggccatctagaaaaaggtgaaaagcctgttcattggtgtcaagaaagtggatcatctttagccgaagcagaagttgaatacattgatagaacatcaaaggctattgatgttgcatttaaggttgataatacatgtttaaaaaaggtaaaagacttatttgatattgaagacatagatgaaatagcattcgttatatggaccactacaccatggaccattccatcaaatgtagcagtatgcatcaatcctgaatataaatactcacttataaaaatgaaaaataaattttgtgtgattgcatttgatatgattgaggaatgctcaaaaagatgggaacaaaaattaaatat

SEQ ID NO: 304971 - DNA, 924 bp, Unknown
  Bacterial polypeptide expressing nucleotide sequence isolated from the Sargasso Sea
gctttagcagatgctgaagtagaatatagagaacataaatctgatactatttacgcagcttttaaggttaaagattccaaaataagagagttaaaaaaaagtgaagtaataatttggaccacaaccccgtggaccattcctgcaaataaagctctagcatataatgaagcgttaaaatatttaattataaaaatcaaagatgatacagactttaaagacagacaaattgttatagccgaagctttactaaaatctgtaatagaagaaaataaaattaaaaattttaataaaattttagaatttgacggtaaagattttgaaggaacaatttgtacacatccattatcagggattggatttaattatgatattccaatgcttcaagctagatttgtaactacagaacaaggatctggaatagttcactgtgctccaagtcatggaccggatgattttaacttatgtttaaagaatggaattaaagccttagaaactgttgacgatgacggtaaatatacaaaaaatattccacaatttgaaggaatacatatttttaaagcaaataaaatggttattgaaaaattaaagcagcagaaaaatttgttagcaagcggtgaattagttcatgaatatcctcattcatggcgatcaaaggcacctttagttcatcgcgcaactccccaatggttcatatcaatggaaagtcatggattaagaaaaaaagcattaaaggcaattgaagatactaaattttacccaaataaaggaaaagaaagattaaaatcaatgattgaaactcggccagactggtgtgtttcaagacaaagagtttggggagtacctattcctgtattcatatcaaaaaagacaaatgaaatattgatagatgaacaagtaaccgaaaatattgcaactatttttgaa

SEQ ID NO: 304972 - DNA, 496 bp, Unknown
  Bacterial polypeptide expressing nucleotide sequence isolated from the Sargasso Sea
tatggctaccccgcaatggttcttttcaatgactaaatccggcttattagacggagcaactcgagcactagaagaaattaaatttattcctgagtggggcaaagaaagaatggaaattatgcttaatgataggcctgattggtgcatatcaaggcaaagagattggggcataccaatacctctttattatgataaaaatacaggcgagcctcatcctgagcaagataatattttcaatgctgtttctgagtccataaaagataagggtatagactcttggaattcaatcgatttaaaactaagtgattcagaaaattatgaaaaatcaaaagatatatttgatgtgtggtttgattcaggaataactcatttttgtgttgtcgacgaattgtatggatcaaatacacagtctgatctttaccttgaaggtagtgatcagcatagaggttggtttcagtcatctcttttaacttctatcgctatgaaaggtacagca

SEQ ID NO: 304973 - DNA, 951 bp, Unknown
  Bacterial polypeptide expressing nucleotide sequence isolated from the Sargasso Sea
gaaaaacaaaaagcagatttcataagattaggcgtatttgccgattgggataatccttacactagcatggataaggaagttgaggcaggaattgtaaaaagcttatctaagattatggataataatcatatctactttggctcaaagcctgtccattggtgtattgagtcgtcctctgctttggctgaagctgaagttgaatataaaaatattgtatcaaaagctgtatgcgttaaatttaagattacttcctctagtgagctgacttttactaaaaatatagatcaaaaagctcatatctcaattccaatttggactacaacgccttggactctccctgcgaacagagctgttgccataagtaagaacgtagaatattcactagtgcaagttgataaaaactatttgatcattgcgaaaaaattagttggttctgtgatggaaaaagctggtatcagtgattttaaaattatagaagaatccataaaatcagagatgaacgctgcaatgttggagcacccattttatgacattaaagttcctataatatttgcagagcatgtcactgatgaaaatgggacaggtgcagttcatatagcccctgggcatggtacagaagactatttggctggcttaaagcatggtcttgaagtgtataatcctgtcgatgattatggacgtttcaaggagagtcttcctatcttcggggggatgaaagttcgagattcaaatgaggagatagtgtcacttttaaataaaaatgatgcccttctttttaaggaggattatgaacactcctatcctcattgttggagatataaaacacctctcattttcagagcgacaccacaatggttcatgagcatggataaatcagcactgcgcaaatctatcaaagatgacattaaaaatatcaaatggcttccttcatggggtgaagacaggattttt

SEQ ID NO: 304974 - DNA, 901 bp, Unknown
  Bacterial polypeptide expressing nucleotide sequence isolated from the Sargasso Sea
gaaggaagtctatatagggggttttaaaccagtattatggtctactgttgaaaagactgctctagcagatgccgaagtcgaatatcaagatcataagtcagatactatttatacatctttctccatcaaaaaatctaacttaaaagatcttgtgggtagtgagataattatttggactacaaccccttggacaattccagcaaataaggcgttagcttacaatgaagctcttgactatattcagttggaaataaatgacgataatgattttaaaaatagaaaaattatagttgctgatgctttactgcagtcggtaattaatgactgtaaaataaaaaattataaaaaaataaaaacatttaaaggtaaggaactaaaagaaactatctgtaatcacccttttatagatctaggttatgattatgatatcccaatgttagaggctaggtttgtaacaactgagcagggaaccggcattgttcattgcgctccaagtcatggacctgatgattttaatttatgtttaaataacggaattaaagcaattgaaacagttgatggagatggaaaatatacgaaaaatgtaagcttatttgagggaattcatatttttaaagcaaacccaatagtgattgaaaaacttaaagagcaaaaaaaacttttatcaaatggtgaacttatgcattcttatccacattcttggagatcaaaagcacctttagttcatagagcgacacctcagtggtttatatcaatggatagtcataaattaagagataaagcattaaaagcaattaatgatacaactttttatcccagcaaaggaaaagaaagattaaaatcaatgatagaatcaagaccagattggtgtgtatctagacaaagagtgtggggcgttcct

SEQ ID NO: 304975 - DNA, 1059 bp, Unknown
  Bacterial polypeptide expressing nucleotide sequence isolated from the Sargasso Sea
gagtacaaagatcataaatcaaacactatctttttagcttttaaagtaaaaaaaactgataaagattatttaaaagatacttctattattatttggactaccacaccttggacgattccagcaaataaagcgctagcttataataaaggtattaattatgtggttttagatattaataaaaacaaaattgttgtggctgaaaaattaattcagtcagtgatagaaagttgtgaactgggtaaatatgaagttttaaatacttttaagggcagtgaatttaaaaatactttttgctctcatccatttaaaaatttaggttatgaacacgatgtaccaatgttagatgcaaattttgtaactttagaccaaggtactgggattgttcactgtgcacctagccatgggccagatgattttaatttatgtttaaaacacgggatgaaagcgattgaaactgttaataatgatggtctttacacaaagaatattccaattttccagggaacacatgtatttaaagcagatgaaataattattaaaaatttaaaagaacaaaataatctcttaggtagtggcagtttaatgcacagttatcctcactcttggagatctaaagcgccgttagtacatagggctacaccccaatggtttatatcgatggaaagtcacaagcttagaaaaaaagcaattgattctattgatcagacaactttttatccagaaaaaggaaaaacaagaattagatcaatgattgaaacaaggccagactggtgcatctcaaggcagcgttcttggggggtgcctttaccaattttcattgataagaaaaccaatgaaccattaagagaccctgaagtaattgaaaatatagcaaaaatctacgaaaaggagggatcagattgttggtttcatgatgatccacaaaggtttcttggaaaaaaatataataaagagaattatattaaatcaaatgacatagtggaggtttggtttgatagtggatcaacacattcgtttgttttagaaaaaagaaaagatttaaaatggcctgcatcaatg

SEQ ID NO: 304976 - DNA, 909 bp, Unknown
  Bacterial polypeptide expressing nucleotide sequence isolated from the Sargasso Sea
tcatctaatttaaaagatttagttggaggtgaaatagttatttggacaacaactccatggacaataccagcaaataaagctttagcgtttaatgaatctcttgattatgtcatattagaaataaatgatgtaggtgattataaaaatagaaaaattgttattgcagatggtttgctagagtcggttgttaaagagtgtgaaataaaaaattataaaaaaatttacacattcaaaggtaaagaatttaagaacacaatttgtagccacccatttttaaatcttggttatgatcatgatataccaatgctagaagccaaatttgtaacaaccgagcaaggaactggaattgttcactgtgcaccaagtcatggacctgatgactttaatttatgtttgaataacaatattaaagctattgaaactgtcgatggagatggaaaatatacaaacaatgttaaattgtttgaaggaattcatatatttaaagcaaataatattgtaatcgaaaaactcaaagaacaaaaaaacttattatttaacggtgagttggttcattcatacccgcattcatggagatctaaggctccacttgttcatagagctacaccacagtggtttatttcaatggaaagtcataaattaagagacaaagcattaaaagccattgatgaaaccactttttatccaggcaaaggtaaagaaagattaaaatcaatgatcgaaacaagacctgactggtgtgtttcaagacaaagagtttggggtgtacctcttccaatttttgtgaacaaacagactaaagaaattttagtcgacgacgaaacaacagaaaatattgcatcaatttatgaaaaagaaggctctgattgttggttttcagatgattcctcaaagatttttaggcaagaa

SEQ ID NO: 304977 - DNA, 880 bp, Unknown
  Bacterial polypeptide expressing nucleotide sequence isolated from the Sargasso Sea
ggtgtgtttccagacaaagagtatgggggagttcctattcctgtttttatgtcaaaaaaatcaaatgaagttttagttgatgatgaagtcactgaaaatattgcaaatatatttgagaaagagggggctgactgttggtttgaaggagatgctcaaagatttttaggcgaaaaatataaaattgaggattatgaaaaaatgactgatattgttgaagtttggtttgatagcggctctacgcatgcctatgttcttgaaaaaagagaagatttaaaatggcctgcttctatgtaccttgaaggttcagatcaacacagaggctggtttcactcgtcattactagagtcgtgtggaacaaggggtagggctccgtttgaatctatattgtcccacggatttgttgttgatggaaaaggtttaaaaatgtcaaaatctcttggaaatattattgcaccagaagatattttaaaaaagtatggagctgatatcttaaggatttgggtagcagcttctgattatgctgaagatttaagaatagattattcaattttagagcagcatgcagaatcttacagaaaaatcagaaacacttttagatacattcttggaaatttaaatgacaaatttgaaaaagttgattttgaaaaaattaatataagtaattttccagagttagaacagtatatgttacataaaatttataatctcaacattttatttgaaaagaattttgaaaaatataattttcatactatttataaggaaataataaatttttgctcttctgatttgtcagctttttattttgatattagaaaagatgccttatattgtgattctctagagagtaaaaaaagaatttcaactatagagtttttaa

SEQ ID NO: 304978 - DNA, 863 bp, Unknown
  Bacterial polypeptide expressing nucleotide sequence isolated from the Sargasso Sea
tttttattcatcaagaaaacacaagaattacatccagatacatcgaaccttattttgaaagcggctgatctagttgagaaaaatggtattaatgtttggtttgatttagatataactgaaatacttggtaaagattctaaaaattatactaaagtcacagatacactagatgtatggtttgattctggcgtaactcatgacacggtattgcaaaatgatgaacgtttagagtgtccagctgatctttatttagagggatctgatcaacatcgtggttggtttcagtcttcactattaacctcattagccattaacgataatcaaaaaccctatcattgtgtggtaacacatggttttactgttgacgcagatggcatgaaaatgtctaagtcaaagggtaacgtaatttctccacagaaagttatgaatgtttatggcgctgatgttttgcgtctttgggttgccgcgaccgattatagagcagaaatgaatgtttcagatgaaatacttaaaagagtatcagatgcctacagacgtattcgtaatacttcccggtatcttttatcaaatttacatgattttgatcctgaggcaaatagcgttaattttccggatatgctcgacttagacaaatggatttttgagcatgcacaagatttacaaaaagaaattattgaagcgtacaataattttgaatttcatttaatttatcagttattacatcaattttgtgtggtcgaaatgggtggattttatcttgatataataaaagacagacaatatacaacgagtaaagatagtttacttagacgttcgggacaaacagtaatgtattatttgatacaaatgtggttagatggtgg

SEQ ID NO: 304979 - DNA, 1050 bp, Unknown
  Bacterial polypeptide expressing nucleotide sequence isolated from the Sargasso Sea
agccaatcaaatttcggttttctctgatatgtttttgaagggatatatttacagaggaatgaagccagttaattggagccctagctcacaaactgctcttgctgaggcggaactagaatatcctgataatcatatttcaaaaagcgtttatgtaaagttcccagtgctgaaaaaaacatatccaaatgaaattaaagaaacatgcgacaatctcaactttcttgtatggacaactactccatggacattgcctgcaaataaagctttgtctttaaaccaagattttgtttatggtatatatgaaataggaaatgaacaaattatcattgaattagatcttgctatcaagttgaatgataaaagtgatttaaatttaaataaaatcgatgaaatttctggaaagacattactagaaatgaaatatttatctcctttaacgcaacaggagtgcagtgtttataatgctgaatatgtaactaaagatgcaggtacaggaatagtacatactgcacctggtcatggggtagatgactacaacactggcattaaaaataatctcgatattttttctcctgttgataagtatggaaaatttactgatgatgtacatgaagaattacaaggacttagtgttttgaatgaaggaaatcttaaggtaatagagttgttagataatgaaaattatttatttttttctgaggattataatcataaatatccttacgattggcggactggcaagccaactatttttagatcaacttaccaatggtttgcatctgtagataagtttagagagcaagcacttagtgaaattgaaaaagttaaatggtatccaacccaatctatgaaacgaataagttctatgatatatgaaagatcagactggtgtatatctaggcaaagatcatggggtttgccaataccagttttttactataaggaatcaaatgaagctttcattaataaagagatattaaataaaattattgatatttttaagcatgaaggatcaaactcttggtgggaaaaagatgttgactatttttt

SEQ ID NO: 304980 - DNA, 667 bp, Unknown
  Bacterial polypeptide expressing nucleotide sequence isolated from the Sargasso Sea
aatgagcgactataaatttactttgaatttgccggaaactgagtttccgatgcgtggtaatttggcaaatcgcgagccagagatgttagagcgctggacgaaagacggtctgtatcagcagatccgtgatagccgaattggccgcacaccttttattttgcatgacggcccaccgtatgcgaacggcagtattcatattggtcactcagtcaacaaaattcttaaggacattattgttaagtcaaaaaccatgtctggttttgacgcgccttatgtgcctggttgggattgccacggtctgccaattgaactgaaagttgagcaaaaagtcggtaagcctggtcaaaaaatttctgcggccgaattccgtgaagaatgccgtaaatatgcggctgagcaagtcgatggtcaacgtgctgactttattcgtttaggcgtgctgggcgattggcaaaagccttatttaacgatggactttgctaccgaagccaatatcgtacgctctctatcaaaagtgattgaaaatggtcacttacataaaggtgttaaaccggttcattggtgtacagactgtggttctgccttgctgaagccgaagttgaatacgaggataaaacctctcccgctatcgatgtggcctttactgcgacagatagcaaagctttag

SEQ ID NO: 304981 - DNA, 433 bp, Unknown
  Bacterial polypeptide expressing nucleotide sequence isolated from the Sargasso Sea
ctggtgagcgcgagcgagacctcttacaaagacaccctcaatctgctcaaaaccgatttctcgatgcgcgccaactcgcgccaacgggaaccggaattgcaaggattctgggctgagctggatctctacaaccgcctcagccaggacaaccctgggccgattttcaccctccacgacgggcctccgtatgccaacggggctctgcacgtgggccatgccttgaacaaaaccctcaaggacatcatcaacaaagtccagttgatgcagggcaagcgagcccgctacatccctggttgggactgccatggcctaccaattgaactcaaggttctgcaaagcctgaagaccgaagagcgacgggagctcaagcccctcgaactacgccgcaaggcccacgcctatgccgagaagcaggtgaagggcagcgtcaggg

SEQ ID NO: 304982 - DNA, 924 bp, Unknown
  Bacterial polypeptide expressing nucleotide sequence isolated from the Sargasso Sea
agttacaaacggccatcttcaaaaggggagaagcctgtccatttttgttatgactgcaaatcagccctagcagaagcagaggttgaatatgaagacaaagtttctaaatctattgatgtaggttttaaagtaaaaaaagattcactcattaagttaagcgcagcattttcaaaagaaatagatagttgcagctttgtaatttggactactacaccatggacaattccagcaaatgctgctgtctcaattggtccagaattaaaatataccttatgtagttctaaatttggaaacttaatattagctagtgatctcattgatcaatgttcagaacgctgggatgaggatttagagaagattagcgaggctaaaggcagtgatattaaagacgtagttctagaacacccttatctaaaaagagattctattttagttcatggagatcatgtcactacagaaactggaacaggttgtgttcacactgcaccagctcatggtatcgatgaccataatatatgcaaaaaatttaatattgagacaattcatgctctggacggtaatggattttttgatgcagaatatgaaggcttagctggtctccccgcaattaaagctgacaacattgtaattgatattctcaatgattcaggagctttaataaatgttgaagattttcatcattcatatccatactgctggagacataaaactcctctaatttttgcatcgacccctcaatggtttatctcaatggacaaatcaggtttgttagaaggatccatccaagcggttaaggatgttgagtgggagccttcatggggatatgaaagaattaaatctatgcttgagggaaggccagattggtgtatttctaggcaaagaagctggggagttccaattcctttaatcattaacaaaaaaact

SEQ ID NO: 304983 - DNA, 649 bp, Unknown
  Bacterial polypeptide expressing nucleotide sequence isolated from the Sargasso Sea
atgaaagataccctaaatcttccaaagactaaattttccatgaaagccaatttggctcaaaaagagccagagattcttaaattctgggaggagattaatttgtatgacgctcttcaggaacaaaataaggataaaccgaaatttaccttccacgacggtcctccatatgccaatggcccaattcatttgggtacaagcatcaataaaactttaaaagatattgcctgcaaatctagattactatccggttacaacgtctcttttgttcctggatgggattgtcatggattacctattgagttaaacgtggagcaaaaatcaggtaagccaaataaagatattcctgccaaagactttagggccaaatgtcgtgattatgctaaccagcaaatcgcaatccaaaaaaaggatttcaaaagattgggtgttttggctgattggaataatccttacaagacaatggattactctttcgaggcagggataatcagagctctttcagagatagtcaaatcgggtcatctaatcaaaggggataaacctgtttattggtgtcctgattgcaactctgcacttgctgaggcagaagtggaatacaaagataaaacctccacctcaatagatttcctttttgagatggagacatcaa

SEQ ID NO: 304984 - DNA, 931 bp, Unknown
  Bacterial polypeptide expressing nucleotide sequence isolated from the Sargasso Sea
atcaaaagctccactagttcacagagcaactccacaatggtttatttctatggaaagccatggattaagagataaagctttaaaagccatcgataatacagatttttatccttccaaaggaaaagaaagaataaaatcaatgattgaaactagacctgattggtgtgtatcaagacagagagtttggggtgtgccattgccaatctttatttcaaaaaaaacaggtgatgtattagttgatgatgaagtttttgaaaatattgcaaaaatttatgaaaaagaaggttctgattgctggtttaatgaagattatcagatcttcctcggagataagtataaagcggaagattatgaaaaattatcagatatagttgaagtttggtttgatagtggatccactcattcttttgtcttagaaaaaagagatgaccttaaatggcctgcatcgatgtacttagagggttcagatcaacatagaggatggtttcactcatcattattagagtcatgtggaacaagaggtgttgctccatttgaaagcattctttctcatggttttgtcgtagatggaaaaggtctaaaaatgtcaaaatcaacaggcaatgtaattgctccacaagatatacttaagaaatacggagctgatatattaagaatttgggttgcatcttcaaattatgcagaggatcttagaatagattattcaattttagatcaacatgcagagtcttatcgaaagattagaaatacatttagataccttttaggaaacattcaagatcaatacgaaaaccttgattttgaaaaagttaaatttgaaaaatttgattctcttgaaaaatttatgcttcacagaattttatgtattaatgaaaattttaaaaaacattttaaagtgttatatttccataatttgtacaaagagttacta

SEQ ID NO: 304985 - DNA, 911 bp, Unknown
  Bacterial polypeptide expressing nucleotide sequence isolated from the Sargasso Sea
aatatattggatcatacatcagatacgatttatgtctcattccctgtaaaagaaacaaaaacaaaagatcttttgaataccgaggttattatttggacaactactccatggacaatccccgcaaataaagctttggcttataaccaggctttaaaatacgtcatagttcaaataaacgaccaaagtgatttcataaatagaaaaatagttgttgcaaaagatcttttgaagagtgttatagaagattgcgaaattaaagattataaaattgttagtgaaattaaaggatccgattttcacggaacaatttgtttacatccgttcaataaattagggtatgactacgatataccaatgcttgaggctagattcgttactatagaacagggctcaggaatagttcattgtgcaccaagccatggaccagatgattttaatttatgtttaaataataatattaaagctgttgaaacagttgatgatgatggaaaatatacaaaacatattttaaattttgaaggtattcatattttcaaagcaaatccaattgttattgaaaaactgaaaaatgaaaaaaatttattagctaatggaaaactaaatcactcatatcctcattcttggagatcaaaagctcctttagttcatagagcaacacctcaatggtttatttctatggaaagccataaattaagagataaagctttaaaggcaattgatgatacagaattttatccttcaaaaggcaaggaaagattaagatcaatgattgaaactcggccagattggtgtgtttctagacaaagagtttggggagttccattacctatatttatatctaagtcagatggtaaagttttggtagatgaagaggtatttgaaaatattgcggctatttatgaaaaagaagg

SEQ ID NO: 304986 - DNA, 951 bp, Unknown
  Bacterial polypeptide expressing nucleotide sequence isolated from the Sargasso Sea
atggacgcttccatcaaatgaggcagtcgcgttgggtgaagatattccctatgggatttacagtctgacacttcatgaaagagatattcttgtcgttgttgccaatgaactcagagaaagtattgagaaaagatggggtgtatcaaatttagaaatgctcgaagaggtttccgctgaaaacctttcgggactccagttacaacatccttttgatgagagaacagtcccagttcttctaggtgatcatgttaccactgagaacggtactggctctgtacatactgctcctgctcacggacaagaggactttcaaattgggaaagaaaatgatttagatctcaaatgttacgttaattcatatggtgttttcactgattcaaaagagagctttgccaaacagcatatatttaaatctgaatcagaaatcattgaaagattagatgaatcaaacttgctcatttcgagtgaaaaatttgaacacagctatccacactgttggagacataaaactccagtgatctttaggacaacaagacagtggttcatcagtatggaaaatgaagattttcgatcctcttgtttagagtcaatcaaagatgttgagtggaaaccaaaatggggagaagacaggatcaatggaatgattgaaacaaggccggattggtgtatttcgagacaaagatattggggcgtacctattccgctatttacacataaagatgatcagacaatccatcctgacacctctgaacttctttatcagatcgctgaaaaaattgaggagaatggaattgatgcgtggtttgatgcagatattgaagagttactgggtgatgattcaaattcatatgaaaaatccactgatacaatggatgtctggatggattcaggaattgcacacaaaactgtcagccatctctttgatcacatcacagataaagctgacttgta

SEQ ID NO: 304987 - DNA, 929 bp, Unknown
  Bacterial polypeptide expressing nucleotide sequence isolated from the Sargasso Sea
ctacactacaatgtcttacgaagctgagtctacaattgtgaaggagtttttcaaatttttagaaaatgagagtttatatcgtggctctaaaccagttatgtggtcaacagttgaaaagaccgcattagctgaagctgaaatagaatataaagaacataaatcgataacaatttttgtaaaatttccagttatttcttcactagaaaataatgaagtaaatacgtcggttattatttggactacaactccatggactataccagcaaatcgagccatagctttcagtaaagatataagttattcaatttattctgttaatggattagaagaaaacagtctactaaatgaaggagatcaaattattatcgctgatgaattgatagacaatgtaagaacccagtgcaaagtaaaagagctcacaaaaattagagcaatcaaagacttagatcaaataatttgtgggcatccttttagagattcagggtatgattttgaagttaaattatttgatgctgattttgtaactctagaacaaggaagtggatttgttcatatagccccaggtcacggagcagatgattataatttgggcattgcaaataatgtggaagttccggaaacagtggatgagaatggtcaatattttgaccatgttcccctttttaaaggcaaaaaagtatttaacgatgatggctctgatgcagatgctaatgtagcagtgatcgttgagcttaaaaatcataataaccttgcaggcaaaggatcactcaggcacagctatcctcattcatggagatctaaagctcctgtcatattcagaaatactcctcagtggtttattagtatggaaaagaatggtttaaggtcaacggcacttaatgaaatagacaaagttaattggttccctaaacaaggtaagaatagaatat

SEQ ID NO: 304988 - DNA, 988 bp, Unknown
  Bacterial polypeptide expressing nucleotide sequence isolated from the Sargasso Sea
gattaatttaaaggatttagttgatgatcatgatgattatgtaaaagcaactgacacgctggatgtttggtttgactcaggatcaacacatttttgcgtgttggataaactttatggaaaagatctaattgctgatttatatctagaaggatctgatcagcatagaggatggtttcagtcatctctattaactggaattgcaattaatggaaaagctccctatgaagccgtccttactcatggatttgttgttgatgagaatggcaggaaacaatccaaatcactgggtaatgttgtatctcctcaaaaggtctgcaataacttaggtgcagatattttaagactgtgggtagcatctaccgactttagaagtgaaatggtagccactgacgaaatctttaagcaagtatcagatcagtatagaagaataagaaatacttttagatttattatgggtaatctcaatgactttgataaagaatcaaataacattaataaaaatgatttagttgagatagataaatggataattagcgaagcaataaaacttcatgaagaagttaaaaagttaaatgataactacgcctatcatcacgttataaaaaaaattcataacttttgtgttcatgaactcggaggagtttatctagacataataaaggatagaatgtatgtaacaaaaagtaattccaatgcaagaaggtctgctcagtttgcactttttgaagttgctgagatcttaatacgactaatatcaccaattctagtatttacagctgaggaaatatggcaatcacacgagctttttaaaaaacaatcagtttcaatatttacggctccacaaaacattttaagcaaaatagaaagttcaatatctgatgatgattgggaaaagatttttgttgttaaggatgctgtaaatcaaagtattgaaaaagcaagagctgattcagttatcaaaggttcacttgattcaaaaattaccatt

SEQ ID NO: 304989 - DNA, 916 bp, Unknown
  Bacterial polypeptide expressing nucleotide sequence isolated from the Sargasso Sea
acttatagatgaagatgttattgaaaacattgctagtatttatgaaaaagaaggctcagattgttggttttcagatgatccacaaaggtttcttggcaaaaaatataaagcttcagattttgataaaatgaaagatatcgttgaagtttggtttgatagtggttcaacccactcttttgtgcttgaaaaaagaaaagatttaaaatggcctgcatcaatgtatctagaaggatctgatcaacatagaggctggtttcattcttcactgctagagtcatgtggaacaagaggtagggcaccatatgaaaatattttatcccatggatttgtcgtagatggtaagggcttaaaaatgtctaagtcattaggaaatataatttctccagatgatattttaaaaaaatatggtgcagatatattaagaatttgggttgcttcatcaaactacgcagaggatctaagaattgattattcaattctagaacaacatgctgaagcctatagaaaaattagaaatacctttagatatttattaggtaatttgaatgatgaatttaaacaaataaattttaatgaggtgaaagtagaggattttcctgagctagaacaatatatgttaaataaaattttcgatttaaatgagaattttttgaattattataaaacatataattttcataatttatataaagaattattaaatttttgcactgttgatctatctgcattctactttgatataagaaaagatacgctttattgtgatacaaaagactcagaaaaaaggagaaatactattttatttttaaatattattttggactgtttgttaaagtggtttgcaccaattttatcttttactacagaggaaattttttcaataattaataaaaataatacaagtattcatttggaa

SEQ ID NO: 304990 - DNA, 949 bp, Unknown
  Bacterial polypeptide expressing nucleotide sequence isolated from the Sargasso Sea
acaaataaagtcctaattgatgaagaggtaaccgaaaatattgcaaatatatttgagaaagagggtgcagattgttggtttgaaagtgatgctcagaaatttttaggaaaaaaatatgagagtgcagattatgaaaaaatgaacgatattgttgaggtttggtttgatagtggttcaactcatagttatgttctagaaaaaagagatgatttaacctggccagcatcaatgtatttagaaggttctgaccagcacaggggctggtttcattcttcacttttagaatcatgtggaaccagaggaagagcaccatttaattctatactttcccatggttttgttgttgatggaaaaggattgaaaatgtcaaaatctcttggaaatataatggctccagaggatatattaaaaaaatatggtgcagacattttaagaatttgggttgcagcatctgattacgcagaagatctgagaattgatagctcgatattggaacaacacgccgagtcttatagaaaaatcagaaatacatttagatatatccttggaaatataaaagataatcacgagaaggtagattttgaaaaattagaaattggtaaattaccagagcttgagcaatatatgcttcacaaacttttttgtttaaatgaaaattttaataaaaattttaaaaaatataattttcatgcactgtataaagatatattaaatttttgcacagttgatttatctgcattttattttgatataagaaaagacacattgtattgtgataaaatcaatagtgaaaaaagaaaatcgacagttctttttttaaatattcttttagatattttattgaaatggtttgctccgattttatcttttaccaccgaagaaatttactctctggttaaaatgaatggaaaaagtatacatttagaaagttttccatcaatacctgaaa

SEQ ID NO: 304991 - DNA, 870 bp, Unknown
  Bacterial polypeptide expressing nucleotide sequence isolated from the Sargasso Sea
aagtttcgaaaagttaaaaaattttaagggtaaagatttaaaaggaacaatatgtaatcatccttttttaaaacttggttatgaatatgacatacctatgctggaagcaagttttgtaactacagaacaaggcactggaattgttcattgtgcgccaagtcatggtcctgatgattttaatttgtgtatgaataatggaattaaagcaattgaaacagttgatggcgacggaaggtatacaaaaaatgtagcactttttgaaggtatacatatttttaaatctaattctattgtgattgaaaaattaaaagaacaaaaaaaattattatcgaacggtgaacttgttcattcctatcctcattcatggaggtccaaagcaccattagttcacagagcaactcctcaatggtttatttctatggatagtcataagcttagaagtaaagctttaaaagcaattgatgaaacaaccttctatcctagtaaaggaaaagaaagattaaaatcgatgattgaaacaagacccgactggtgtgtttcaagacaaagagtatggggagttccattgcctatttttattaacaaaaagacaggtgaaattttgattgataatgaagtttttgataatattgcgaaaatttatgaaaaagaaggatctgattgttggttttcggatgatccacaaaaatttcttggaaaaaaatataaagctgaggattttgataagttaagtgatatcgtagaggtatggtttgatagtggatctacacactcatttgtattagaaaaaagaaaagatttaaagtggcctgcatctatgtatctcgagggctcggatcaacacaggggatggtttcattcgtctctttt

SEQ ID NO: 304992 - DNA, 716 bp, Unknown
  Bacterial polypeptide expressing nucleotide sequence isolated from the Sargasso Sea
tatgatcaagtaaaagatgtagttgaagtttggtttgatagtggatccactcatgcattttgtttagaacaacgatctgatttaaaatggccagcatcaatgtatttagaaggaactgatcaacatagaggttggtttcactcttcacttcttgaatcttctggaacacgaggaaaggcaccatatgagagtgttttaactcatggatttattgttgatggcaaaggaagaaaaatgtctaaatcattgggaaataacatatcacccgatgatattttaaagcaatatggggtagatattttacgtttatgggttgtagcttcaaattactatgatgatctcaaaattgataatgcaattcttaagtcacaagcagagtcatatagaagaatcagaaacacctttagatttttaataggtaatttaaatgattttagaaaagaagaaatcattaatgaagaaaaatttccagaactagaaaaatttttactgcatcgcttatgggaagttgatcaaataataaaaaaatgtgttaaaaattttaattttcatttaatgtttacaacgttgctaaacttttgttcaaatgatttatcagctttttattttgatataaggaaagatgtaattttatgtgatagtcaagattcattaaacgacgttcatcccaactatgctttatcatatatttattacttagttagatggtttgctcc

SEQ ID NO: 304993 - DNA, 325 bp, Unknown
  Bacterial polypeptide expressing nucleotide sequence isolated from the Sargasso Sea
aatgactgttgattatagcaaaacaatctttttaccacgtactgattttcctatgaaagctcaattaccaaaaagagagcctgatattctcaagcgttggtctgagattgatatttactcgaagcttcgtgaagcatcagccggcagagaaaagtttgttttacatgacggaccgccatacgcaaatggacatcttcatatagggcatgcacttaataaaattctaaaagacgtaattgtgagatctcaacaaatgatgggtcgtgactctatttatgtgccaggggtgggattgtcatggggtaacaaattgaatggcaaatag

SEQ ID NO: 304994 - DNA, 445 bp, Unknown
  Bacterial polypeptide expressing nucleotide sequence isolated from the Sargasso Sea
atgactgctgaaccaatcgactacaaaaatacgctaaatttacctaaaactgattttccaatgagagcaggtttacctaatcgggaacctggttggttggaaagatgggaaaaaattggcatctataaaaaattgagacaaaaaacctctcgtaaaccatttattttgcacgatggtccaccctatgcaaacggcaaccttcatattggtcacgctctaaataaaattttgaaggatatggtggtaagaagccaacaaatgatgggtagtgacgctagatatattccaggttgggattgccatggattaccaattgaatggaaaattgaagaaaaatatcgaaaaaaaggaaaaaataaagatgacgttccggtaatagattttcgcctaggaatgccgaaaatttgcggatggctggatagatattcagagagaagaatttaaa

SEQ ID NO: 304995 - DNA, 757 bp, Unknown
  Bacterial polypeptide expressing nucleotide sequence isolated from the Sargasso Sea
tttaattgcgacgagccagatgaaatatcatttattatatggacaacaactccatggacaataccctctaatgtagctgtatgcatcaatcctatatataagtattcattaattaaaatgaatgaaaaattttatgtattagcttttgagatgacagaacaatgcaccaaacgatggaatcaaaaattcgatcttatatcaacgataaatggcgaaaaattaattgatattaatcttattcatccttttttggatagaaaatcagttcttcttcatgcagatcatgttacaactgaagcaggaacaggttgtgttcataccgctccagctcatggtatggatgattatttaatatgtaagaaaaataatattgatactatccactcacttaataacaaggctttcttcaaagatgaattagattttattgcaggattacctgctttgaaagcagacccacttatcattgagaaattacaagagcataatgccctagttaacatagaagattatcatcattcttaccctcattgttggagacgtaaaacgccactaatttttacatctacccctcaatggtttatttctatgaaaaaaaataatcttattaatgaagcccttaatcaaattaataatgttaattgggagccctcatggggtcttcaaagaattaaatccatgcttactgatagaccagattggtgtgtttcaagacaaagaaactggggagttcctataactttagttgttcataaag

SEQ ID NO: 304996 - DNA, 879 bp, Unknown
  Bacterial polypeptide expressing nucleotide sequence isolated from the Sargasso Sea
aattttttaaaatttgttgagaatggtagtctatatagaggttcaaagccggttatgtggtcaacagttgaaaagaccgcgttagctgaagctgaaatagaatataaggaacataagtctacaactatctttgtaaagtttccagttttaaagtcttctgatctagatctaaaaggatcatcagtagttatttggactacaactccttggacgattcctggcaacagggctattgcttacagtaagaatattaggtattcactttttgagattaatgaaacagaagaaaatagtcatttaaaaattgaagatcgaataattattgctcatgacttagaggagagttttaagcagcaatgtagagtaaaatctattactaagattaaggatatagaaaatttaggaggccttgtttgtaaccatccatttgcaaaatctggctatgattttgaaataaaattatacgacgcagattttgttacattagaacaaggaacgggatttgtacatatagctccaggccatggtgctgatgattatatattgggcattagtaataatattgaagtacctgagactgttgatcaggatggattctattttgatcacgttccgttatttaaaggtaaaaaaatatttaatgatgatggcagtgatgctgatgcaaatattgcagtaattatagagttaaaaaatcataatacacttgctgggaaaggatctttgaggcatagctatccacattcttggcgttcaaaggctcctgtaatatttagaaacacaccacaatggttcatcagtatggaaaaaaatgatttaagaaagaaagccttaaaggcaatcgatgatgtatcttggtttcctaaacaaggaaagaaa

SEQ ID NO: 304997 - DNA, 757 bp, Unknown
  Bacterial polypeptide expressing nucleotide sequence isolated from the Sargasso Sea
tttgtcccatggatttgtggtggatggcaaaggattgaaaatgtcaaaatctttaggaaatgtaattgccccagaagatattctaaaaaaatatggagcagatatactaagaatttgggtagcatcttcaaactattcagaggatttaagaatagattattcgattcttgatcaacatgcagaatcatacagaaaaataagaaacacattcaggtacttgcttgggaatattaaagataattttgaagaaattgattttaaaaaagtagatttaaatgaattacctgaactcgaacaatttatgttgcataagttgtattctttggatgttaactttaaaaaatattttaaaaattatgattttcataatttatataaagagttgcttaatttttgtactgtagatctgtctgcattttattttgatataagaaaagattcactatattgcgattctacagattcaaaaaaaagaaaatctactatactattattaaatataattttgaattcattattaaaatggtttgcaccaattttgtcttttacaactgaagaaatatacagattaatatttaaagatagcaaaagtgtccatttagaaaaatttttaaatttcccaaataattttgaaaacgaaaaattgtatcaaaaatggttagagcttattaaaattagaaatatttgtaatattagtattgaggaaaaacgagcaaacaaagaaattggatctagtttagaggcagacttaaatata

SEQ ID NO: 304998 - DNA, 661 bp, Unknown
  Bacterial polypeptide expressing nucleotide sequence isolated from the Sargasso Sea
tttgttttagaaaaaagagaggatttaaaatggcccgcatctatgtatttagaaggatcagatcaacatagaggttggttccactcatcgttattggaatcgtgtggaactagaggcagagctccatttgaatcaattttatctcatggttttgttgtagacggcaaaggtttgaaaatgtccaagtctttgggaaatgtaattgctcctgaagatattttaaaaaagtatggtgctgatattttaagaatttgggtagcatcatcaaattatgcagaggatttaagaatagattattctattttagatcaacatgcggaatcttatagaaaaataagaaatactttcagatatttacttggcaatataaatgacaattttgaaaaaataaactttgatgagctagatgtagatgagttacctgagttagaacaattaatgctgcacaaaatattcattttaaatcaaaattttaaaaaaaattttaataattatgattttcataatttgtataaagaattgctaaatttttgtactgttgatttgtctgctttttattttgatattagaaaagacactctttattgcgatcctaaagattcaaaaaaaagaaaatcaactattttacttcttaatataattttaaatgcattattaaaat

SEQ ID NO: 304999 - DNA, 831 bp, Unknown
  Bacterial polypeptide expressing nucleotide sequence isolated from the Sargasso Sea
gatgctcaaaaattttttgggaaaaaaatacaaaagttcagattatgaaaaattaaatgatattgtagaggtatggtttgatagtggatcaactcacagctatgtgctcgaaaaaagggaggatctaatgtggccagcttcaatgtatttagagggctcagaccaacacagaggatggtttcattcttcactattagagtcttgcggaactagaggtagagcacctttcaattcaattctctctcatggttttgttgtggacggaaaaggactaaaaatgtcaaagtctcttggaaatattatggcgccacaagatatattaaaaaaatatggcgcggatattttgagaatttgggtagcagcatctgattatgctgaggatttaagaatagataaatcaatattagaacaacatgctgagtcctaccgaaaaataaggaatactttcagatatattcttgggaatataaaagacaaacatgaaaaagttgattatgaaaaattagatcctaaaaagctacctgagttagagcaatatatgcttcataaactttatcttttaagtcaaaattttaataaaaactttgatcggtataattttcatgccctttataaagatattttaaatttttgtactgttgacttatcagcattttattttgatattaggaaagacactttatattgcgacaaattagaaagcgaaaaaagaaaatcaacaattttatttttaaatattcttttagacgtactattaaaatggtttgctccaattttatcttttactactgaagaaatttattctcttgtaaataaaaatggaaaaagtat

SEQ ID NO: 305000 - DNA, 838 bp, Unknown
  Bacterial polypeptide expressing nucleotide sequence isolated from the Sargasso Sea
aaagattacaaaaataccttaaatctgccaaaaacagatttacctatgaaagctggtttgccaaataaggaaccagaaattctttctttttgggattcaatcaatctttataatttaattagagaagaaaatgctaaaaaagataaatttatccttcacgatggcccgccatatgcaaatggcgatattcatcttggccactcagtaaataaaatacttaaagatattgtaattaagactaagactttacaaggctttgatgcaccttacgttcctggctgggattgtcatggattaccaatagaactgaacgttgagaaaaagtttggaagagatagtgatactgtaaaagataagtcaaaatttattagtgcctgtagagaatatgctctttctcaaatagaaaatcaaaagaaagattttataaggcttggagtcttgggtgactgggaaaattcatataagtctcttgattcatcatttgaagcagataccgtcaggtctttaggcagaatagttacaaacggccatcttcagaaaggggagaaacctgtccatttttgttatgactgcaagtcagccctagcagaagcagaggttgaatatgaagataaagtttctaaatctattgatgtaggttttaaagtaaaaaaagattcacttgttaagttaagtgcagcattttcaaaagaaatagatagttgcagctttgtaatttggactactacaccatggacaattccagcaaatgctgctgtctcaattggtccagaattaaaatataccttatgtagttctaaatttggaaacttaatattagctagtgatctcattgatc

SEQ ID NO: 305001 - DNA, 757 bp, Unknown
  Bacterial polypeptide expressing nucleotide sequence isolated from the Sargasso Sea
aatggaatacaaaaatacaatttttttaccacagacttcgtttgaaatgagaggaaatctaccctccaaagaacctaaaattttagaagaatggaacaatgaaaatatttttaaaaaattaagagaaaaatccaaaggtagagaaaaatttatacttcatgatggtccaccatatgcaaatggacatatacatatgggtacagcattaaataaaatattaaaagatgtaattgttagaactcaacaaatggctggcaaggattctatttatgtaccaggatgggattgtcatggacttcctattgaatggaaaatagaagaagaatatagaaagaatggacaaaacaaggacgatgttccaattgtacaatttcgtcaagaatgcagagaatttgctcaaaagtggatcaatatacaaaaaaaagaatttagaagattgggtgttgaaggagattgggacaatccctacttaacgatgtccaaccaagctgaggcccaaattgtaagggaactcggtaaatttcttttagatgaaagtttatacaaaggtgctagaccagttttatggtcagttgtagaaaagactgctcttgcagatgccgaagtagaatatgaagatcacacttcaaatactatttatgtaaaatttaaaataactaaaagcaaaattagtaattttattggtacaaatattgtaatttggacaactactccttggactataccaggcaatagagccgttgcttatggaaaggat

SEQ ID NO: 305002 - DNA, 606 bp, Unknown
  Bacterial polypeptide expressing nucleotide sequence isolated from the Sargasso Sea
tgcaaaagagagctttgccaaacagcatatatttaaatctgaatcagaaatcattgaaagattagatgaatcaaacttgctcatttcgagtgaaaaatttgaacacagctatccacactgttggagacataaaactccagtgatctttaggacaacaagacagtggttcatcagtatggaaaatgaagattttcgatcctcttgtttagagtcaatcaaagatgttgagtggaaaccaaaatggggagaagacaggatcaatggaatgattgaaacaaggccggattggtgtatttcgagacaaagatattggggcgtacctattccgctatttacacataaagatgatcagacaatccatcctgacactccagaacttctttatcagatcgctgaaaaaattgaggagaatggaattgatgcgtggtttgatgcagatatcgaacagttactgggtgatgattcaaattcatatgaaaaatccactgatacaatggatgtctggatggattcaggaattgcacacaaaactgttagccatctctttgatcacatcacagataaagctgacttgtatctggagggatctgatcagcaccgtgggtg

SEQ ID NO: 305003 - DNA, 814 bp, Unknown
  Bacterial polypeptide expressing nucleotide sequence isolated from the Sargasso Sea
ttaccaatttttataaataaaaaaaataatcaaattttaatagatgatgaagtttttgaaaatattgctaaaatttatgaaaaagaaggctctgattgttggttttctgatgatcctcaaaaatttctgggaaaaaaatataaagcggacgatttcgataaattaaaagatattgttgaggtatggtttgatagtggttcaacacattcatttgttttagaaaaaagagatgatttaaaatggcctgcatcaatgtatcttgagggatctgatcaacatagaggatggtttcactcatctttgttagaatcttgcgggactagaggaagagcaccattcgagtcgattctgtcacatggatttgttgttgatggtaagggcttaaagatgtcaaaatctctgggaaacgtaattgcaccagaggatattttaaagaaatatggagctgatatacttagaatttgggttgcatcatcaaattatgctgaagatttaagaatagactattctatattagaccagcactcagagtcttatagaaaaattcgtaatacattcaggtatttacttggaaatctaaaggacaattttcaggaaattgacttaaaaagtatcgatataaaaaaattacctgaattagaacaatttatgctacataagattttttctttaaatctaaattttcataaatattttaaaaattatgattttcataatctttacaaagaattattaaatttctgcaccgttgatttatctgctttttattttgatataagaaaagactgcctatactgtgatgatataaattcag

SEQ ID NO: 305004 - DNA, 913 bp, Unknown
  Bacterial polypeptide expressing nucleotide sequence isolated from the Sargasso Sea
ggcgataaatataaagctgaagagtttgataaattaagcgatatcgtggaagtttggtttgatagtggttcaactcattcatttgtattagaaaaaagggaagacttaaaatggccagcgtcaatgtatttagagggatctgatcagcacagaggatggtttcattcatcacttctagagtcatgcggaacaaggggtagagcaccctttgagtctatattatcccacggttttgttgtggatggtaaagggttaaaaatgtctaaatcattaggaaatgtaattgcgcctgatgatatcctaaaaaagtatggtgcagatattttaagaatctgggtagcatcatcaaattatgcagaggatttaagaattgattattcaatcctagatcagcatgcagaatcttatagaaaaattagaaatactttcagatatttacttggaaatataaatgataattttgaaataattaactttgaaaaactcaatttggatgatttacctgagttagaacagttaatgctacataaattatatgttttaaatactaattttaaaagatattttagtaattatgatttccataatttgtataaagaattgttaaatttttgtactgttgatttatccgctttttattttgatattagaaaggataatctttattgtgatggtaaagactcaaacaaaagaaaatcaacaattttacttcttaatataattttaaacgcattactaaaatggtttgctcctattctttcttttacaacagaagaaatatttaaattattgtttaaagaccaaaaaagtattcatcttgaaaaatttttagaatttcctgataaatttaaaaatgaaaaacttagtaaaaaatggatcgaattaattaagatcagagatatttgtaatatca

SEQ ID NO: 305005 - DNA, 479 bp, Unknown
  Bacterial polypeptide expressing nucleotide sequence isolated from the Sargasso Sea
aatgagcgactataaatttactttgaatttgccggaaactgagtttccgatgcgtggtaatttggcaaatcgcgagccagagatgttagagcgctggacgaaagacggtctgtatcagcagatccgtgatagccgaattggccgcacaccttttattttgcatgacggcccaccgtatgcgaatggcagcattcatattggtcactcagtaaacaaaattcttaaggacattattgttaagtcaaaaaccatgtctggttttgacgcgccttatgtgcctggttgggattgccatggtctaccaattgaactgaaagtagagcaaaaagttggtaagcctggtcaaaaaatttctgcggccgaattccgtgaagaatgccgtaaatatgcggctgagcaagtcgatggtcaacgtgccgactttattcgtttaggcgtgctgggcgattggcaaaaaccttatttaacgatggattttg

SEQ ID NO: 305006 - DNA, 904 bp, Unknown
  Bacterial polypeptide expressing nucleotide sequence isolated from the Sargasso Sea
aatataaatttacctaaaactttattttcgatgaaaggaaacttgcctagtaaagaacctgaaattttaaaaatttgggaaaaaattgaattatataaaaaattaagaaaattaggaaaaggaaaagaaaaatttgttctacatgatggtcctccatacgcaaatggacatatacatatgggaacagccttaaataaaattcttaaagatatgattactagatttcatcaaatggatggtaaagattctgtttatgttccagggtgggattgtcacggattacctatagaatggaaaattgaagaacaatataaaaaaaataaaaaaaataaagatgaagttccaataaaaatctttagacaagagtgtagggagtttgctgaaaaatggattaatattcatatagatgagtttaaaagattaggtgttgaaggtgattggaaaaaccattattcaacaatgagtttcgatgcagaagcacaaatagtgagagaattaggaaaatttttattagatggctctttatatcagggctataaaccagttctctggtcaacagtggaaaaaactgctttagctgatgctgaagttgagtataaagatcatacttcaaatacaatatatacttcatttgaggtaaaaaaaactgataaagattttttaaaaaatggtcatgttataatatggacaacaacaccatggactattcctgttaatagagctttagcttatagcggcaaaattaaatactcagtaatcaagttaggaaatgaaacagaaaactttaaaaataaaaatataattttagctagcgaattgataaaaaaagtttcagaagaatgtaactttaaggattttaaaataataaaagagtttgaggggaatgaatttaaaaatactattt

SEQ ID NO: 305007 - DNA, 735 bp, Unknown
  Bacterial polypeptide expressing nucleotide sequence isolated from the Sargasso Sea
gtttatactaaagaggtaccttattttacaaatacacacgtttttaaggctgatccgattgttatagagaaacttaaagaacaaaaacaattattaaaaaatgataaacttaatcatagttatcctcattcatggagatctaaggctccattaatttatagagcgacacctcaatggtttatatcaatgcaaaaaaataaattgagagataaagctgttaaagcaataaatgaaactatcttctatccaaacaaaggtagagacagacttttatcaatgatcgaaggaagaccagattggtgcgtttcaagacaaagagtttggggggtaccattaccgatttttataaataaaaaaacaaaagagccattaagagatcaaaaaattatagatagaattgcctccatttatgaaaagcaaggctccgattgttggtttacagatgatgcaaaaatttttttaggcgatgattataatgtcaaagattatgaaaaacttaacgatattgttgaagtatggttcgatagtggctcaacacacagttttgttttagagaaaagaaaagatttaaaatggcctgcagacatgtatctagagggatctgaccaacacagggggtggtttcactcttcattattagagtcgtgcggaactagaggaaaagcaccatttaaaagtattctctcacatggtttcgttgttgacggcaaaggtatgaaaatgtctaaatctatg

SEQ ID NO: 305008 - DNA, 898 bp, Unknown
  Bacterial polypeptide expressing nucleotide sequence isolated from the Sargasso Sea
cactgtcaatatttacaataaagcaactggacaaccattggttgattcaaagcttaatgaaagaattgtaaaaatgtatgaagaaaatggatgtgatatttggtttgaaaaatcaatagaggaacttcttggaaatgaatataatgcagatgattatgagaaagttgatgacattttagatgtatggttcgactcaggttgcactcatgccttcgtacttgaagggaaagaagatcaaatttggccagcatcaatatatttagagggtacagatcagcacagaggctggttccattcttcattattagagtcatgtggaactagaggcgtggcgccatatgagtcagttttaactcatgggtttgttctgcatgaagatggcaataaaatgagtaagtcttcttcaaacattgtacctccagctgaaattgttgaaaaatcaggcgctgatattttgcgattgtgggttgctagtagtgattactctgaagatcttaaaattggtccagaaataattaaaagtaacgtggatagctatcgaagactaaggaatacgctaagatttattctaggtaatttaaatgacttcagtgaagatgaaaaagtcaaatttttagacctgccggaattagaccaatatattcttcacaaactggctcatttagaagatgaagtattaaaaagctatcaatcatttgaatatcagagagtgttttcagcaatttttaatttctgtacaaatgaactttcgtcattctattttgatgtacgtaaagacagcttgtattgtgatcaccgaaatagtcttgcaagaaaagcaacaagaactgtacttgatattttatttaatcatttactgaaacttttagctccaattttatgctttaccactgaagaa

SEQ ID NO: 305009 - DNA, 902 bp, Unknown
  Bacterial polypeptide expressing nucleotide sequence isolated from the Sargasso Sea
attgagcaagtttcaaattaatttaccaaaaacagcattttcaatgaaggcaacttttccaacaagagagcctgaattattaaaattttgggataagataaatctttataaagaattaagaaattctagaaaaggtcaaaaaaaatttgtccttcatgatggccctccatacgcaaatggaaatatacacatgggaactgcgcttaataaaatattaaaagatattattgtaaaatttcatcaaatggatggcaaagactcggtatatgttccaggatgggattgtcatggtttgcccatagagtggaaaattgaagagcagtataaaaaaaataaaaaaaataaaaacgaggttcctatagttgaatttagaaaagaatgtagagcttttgcagagaaatggataaaggttcataaagatcaatttaaaagattaggtgttgtgggggattggcagaattattattccacaatgagttatgatgctgaagcacaaattgttagagagcttggaaaatttttaaaagagggtagtttatataggggtttcaagccagtattatggtcaactgtcgaaaaaacagctttagctgatgcagaagttgaatatcaagatcataaatctgatactatttacgcatcatttcaagtaaaaaaaacaaatgttcaagaattgagtgatagtgaaatagttatttggactactactccatggacaatacctgcaaataaagctttagcttacaatgaaaatttagattatttgttgataaaaatttccgataccagtgatttcaaaaataagaagattgttgttgcagaagcattattagagtctgtaaaaaaagattgtaatattgaaaattatgaaatcctaaaaaagttaaaaggaaaagaattaa

SEQ ID NO: 305010 - DNA, 748 bp, Unknown
  Bacterial polypeptide expressing nucleotide sequence isolated from the Sargasso Sea
gatattcttaatttttgggacaaaacaaatctctacaagaaaattagacaaaaatatcaagggaaggagctttttttacttcatgatggcccgccttatgccaatggcgccattcacctaggtcattctgttaataaaattttaaaagatatcactattaaatcaaaaacacttcatggcctagattctccatttataccagggtgggactgtcacggtcttccaattgagctaaatgttgaaaagaaacatggaaaaaatagcgaacttgtaaaaaataaagaagcttttcaaaaggcctgcaaggaatatgcagaaagtcaaataaataaacaattagatgattttaaaagattgggcgtgcttggtgattgggaaaattcatacaaatcgctggatccaaaatttgaagcagacatagtcaggtcattgggcattatttataaagaaggtcacctagaaaaaggtgaaaaacctgttcattggtgccaagaaagcggatcatcactagcagaggcagaagttgaatatattgataaaacatcaaaagcaattgatgttgcattcaaggttgactactcatctttaaaaaaggtaaaagatttatttaatgctgaagattcagatgaaatatcatttgttatatggactacaacaccatggacaataccttcaaatgtagctgtatgtataaatcctaaatataaatattcactcattaaaatgaataataaattttatgtaattt

SEQ ID NO: 305011 - DNA, 784 bp, Unknown
  Bacterial polypeptide expressing nucleotide sequence isolated from the Sargasso Sea
tttcacagtttctgcaaaaagatttggggctaatgttgttgctgatctttacttagagggctcagatcaacataggggatggttccaatcatctttattaacaagtatagcaatgaataaatccgtaccatataaaacggtccttactcatggatttgttgtagatgaacaaggaagaaaacaatcaaaatcacttggaaatgttgtctctcctcagaaagtctgggatagcttaggagcggatatcttaaggctttgggtagcttcaactgattttagaagtgaaatggtagcatctgatgaaatattgaagagaacttcagatcaatacaggcgaataaggaatactttcagatttattttaggaaatttaagcgattttggtgataaagataaggtaatgtttgaagatcaagttgagcttgataaatggattataaatgaaataaaaactcttcaaaaagaagtcataagtttatatgaatctttttcttaccataaggcaattcaaaaaatacataatttttgtgttaacgaattaggaggagtatatctagatataattaaagataggctctatacatgcaaaaatgattctttagcaagaagatcttgtcaaacaagccttgactgtattttgaatattttagtaagacttatttctccaatactttcgtatactgcagaagaaatttggcaaacaagtaacagattaaatagtcaggaagactctgtttttctctctaattttgataattttgaggaggattctaaatctaatatt

SEQ ID NO: 305012 - DNA, 913 bp, Unknown
  Bacterial polypeptide expressing nucleotide sequence isolated from the Sargasso Sea
gaaccaggaatattagaaatgtgggaaaaattaaacctatataataaacttagagaagcaaataaaggtaaagaaaagtttgttttacatgatggccccccatatgcaaatggacatatacacatgggtacagctcttaacaaaattttaaaggacattataacaagatttcaccaaatggatggaaaagattctgtttatgtgccgggatgggactgccacgggttaccaatagaatggaaaattgaagaacaatataaaaaaaataaaaaagataaagatcaagttcctataaaagattttaggtcagaatgtagagaatttgcagaaaaatggattaaagtgcacatcaaagaatttagaagactaggcgtcgagggcgactggaaaaattattattccacaatgagctttgatgcagaagctcagatcgtaagagaattaggaaaatttttaatggatggaagtttatataaaggttataaacctgttctatggtcgacagtggaaaaaactgctctagcagatgctgaagttgaatataaagaccacacttccaacactatatatgtaggctttaaagttaaaaattcaaaaaataatttattaaaagatacagaaattattatatggacaactacaccttggactataccagcaaataaagctttggcatacaataagaatctggattattcagttattgaaattaattctgtattagaaaattttaataataaaaaaattataattgccacaaaacttatagatcaggtttcaaaagagtgtgagatagaaacttacaaattaataggaaaaattaaaggaaaagacttagaaggaacaatttgttctcatccttttgaaaaattaggataccagtacgatgttccaatgttagaagcaaatttgt

SEQ ID NO: 305013 - DNA, 757 bp, Unknown
  Bacterial polypeptide expressing nucleotide sequence isolated from the Sargasso Sea
aatgagcaaaagcaatatcaatctacccaaaactgctttttcaatgaaagcaaatttacaaaataaagaacctggaataattgattattgggataaaattgatttatacaaaaagttaagatcttcaagcaaaggaaaaacaaaatttgttcttcatgatggtcccccatatgcaaatggagatatacacatgggaacagcacttaataaaattcttaaagatataatagtaaaatttcatcaaatgaaaggagaagattctgtttatgtgccaggttgggattgtcatggtttaccgattgaatggaaaattgaagaacaatataaaaaaaacaaaaaaaataaaaatgaagtcccgatcaatgaattcagaaaagagtgtagagatttcgcaaagaaatggattgaggtacataaaaagcaatttcaaagacttggagtagtgggtgactgggaaaattattactctacaatgagctttgatgctgaagcccaaatagttagagagcttggtaaatttttaaaagaaggaagtctttatagaggttacaaacctgttctttggtccacagtagaaaagacagcattggcagatgcagaagttgaatacatggatcataagtctgatacaatttatgcagcttttaatattaaaaaatcaaaaaatgaaaaacttttgaatacacaaattataatttggactacaactccatggactataccggctaatagagctttggcttacaatgaaaattaa

SEQ ID NO: 305014 - DNA, 937 bp, Unknown
  Bacterial polypeptide expressing nucleotide sequence isolated from the Sargasso Sea
gcgatatgctgtcgctgatctttacttagagggctcagatcaacataggggatggtttcaatcatcattactaacaagtatagcaatgaataaatccgcaccatataaaaccgttcttacgcatggatttgttgtagatgaacaaggaagaaaacaatcaaaatcacttggaaatgttgtctcaccccagaaagtctgggatagcctaggagcagatattttaaggctttgggtagcttcaacagattttagaagtgaaatggtagcatctgatgaaatattgaagagaacttcagaccaatacagacgaataaggaatacttttagatttattttaggtaatttaagcgattttagtgataaagataaagttatgtttgaagatcaagttgaacttgataaatggattataaatgaaataaaaactcttcaaaaagaagtcataagtttatatgaatcttttgcttaccataaggcaattcaaaaaatacataatttttgtgttaacgaattaggaggaatatatctagatataattaaagataggctttatacatgcaaaaatgattctttagcgagaagatcttgtcaaacaagccttgactgtattttgaatattttagtaaggattatttccccaatcctttcatatactgcagaagaaatttggcaaacaagcaacagattgaatactcaggaagactctgtttttctcactaattttgataattttgaagaagattttgaatctaatataaatcaatctgaatggaaaagaatttttgaaatcaaggatgctgtcaatcaaacgatagaggaaatgaggaatgaaaataaaatcaaaggatcactcgattcaattgtagatgttcaagctacttccgatgacattagtgtttctaaaaaacttggagaggagcttcactttttatttatt

SEQ ID NO: 305015 - DNA, 726 bp, Unknown
  Bacterial polypeptide expressing nucleotide sequence isolated from the Sargasso Sea
tatggctgacaataatttaaatcttcccaaaacatccttctctatgaaggcaaatctaccttctaaggaaccaaaaatattagaaacttgggacaaaataaaactgtacgaaagattacgaaaaaaatctgcgggcaaaaccaaatttgttcttcacgatggccccccttatgcaaatggacatatacatatgggaactgcgcttaataaaattttaaaagacattattacaaaatttcatcaaatggatgacaaagactcaatctatgttccaggctgggattgccacgggttaccaatagagtggaaaattgaggaacaatacaaaaaaagaaaaaagaataaagatcaaatacctatcaaagattttaggaaagaatgtagagaatttgcagagaagtggatagtaatccataaaaaggaatttaaaagattaggtgttattggcgattgggaaaattattattccacaatgagttatgatgcagaggcacaaattgtaagggaacttggaaaatttcttaaagaaggaagtctttacagaggctttaagccagtattatggtctacagttgaaaagacagcgctagcagatgcagaagtagaatataaagatcataaatcaaatactatttacgcaggttttgatgtaaaaaaatctgataaagattatctaaagaatacatctattattatttggacaacaacgccatggacaataccagc

SEQ ID NO: 305016 - DNA, 883 bp, Unknown
  Bacterial polypeptide expressing nucleotide sequence isolated from the Sargasso Sea
aaaaacaaataaagttttgatagatgatgaggttacagaaaatattgcagctatttttgagaaagaaggtgccgattgttggtttgaggatgatgctcaaaaatttttagggaaaaaatataaaagctcagattatgaaaaattaaatgatattgtagaagtatggtttgatagtggatcaacccacagctatgtgctcgaaaaaagggaggatttaatgtggccagcttcaatgtatttagagggctctgaccaacacagaggatggtttcactcttcactattagagtcttgtggaactagaggtagagcacctttcaattcaattctctctcatggttttgttgtagatggaaaaggtctaaaaatgtcaaagtctcttggaaatattatggcgccacaggatatattaaaaaaatatggtgcggatattttgagaatttgggtagcagcgtctgattatgctgaagatttaagaatagataaatcaatattagaacaacatgcagaatcttacagaaaaattaggaatacttttagatatattcttgggaatattaaagacaaacatgaaaaagttgattatgtaaaattagatcccaaggagctacctgaattagaacaatatatgcttcacaaactttatattttaagtaaaaattttaataaaaactttgatcagtataattttcatgctctttataaagatattttaaatttttgcacagttgacttatcagctttctattttgatataaggaaagatactttgtattgtgataaattagaaagtaaaaaaaggaaatcaacaattttatttttaaatattcttttagatgtactactgaaatggtttgcgccaaattttatcatttactaccga

SEQ ID NO: 305017 - DNA, 868 bp, Unknown
  Bacterial polypeptide expressing nucleotide sequence isolated from the Sargasso Sea
ctgcatatcggtcacgcactaaataaaattctcaaagacgtcatcaatcgctgccagcaaatgctcggcaaagacgcgaatttcgtgccgggttgggattgccatggcttgcccatcgaatggaagatcgaggaaaaatatcgcaaaaagaaaaaaaacaaagacagggtcccagtcgttgaatttcgcagggagtgccgtgtcttcgctgacgaatggatcgacgtacaacgcaatgagttcaagcgcatgggtgtcattggcaattgggataatccctacacaaccatgacctatgctgcagagtccaaaatcgccgaggaactgggcaagtttctattagatggttcgctttatcgaggctccaagccggtaatgtggtcgccagtggagaagactgcgctagccgaagcggaggtcgaatattacgaccacacctcgacaactatctttgtccgcttcccggtgatctctccatccgtacccgaagtcgacggtgctgcaatcgttatctggacgacaaccccttggaccatgccgggcaaccgcgctgtggccttcggcccagccatcgagtacaccgttttcgaagtgaccgggacggctgaggctagccatgcccaggttggcgaaaccttaattgtcgctaccgagcgcctgggagagatgaccagagaatgtggtatcaccagccacgaaacgagagcgactctgaaaggtggctcgctgaccggtaccgtctgccgtcatccacttcgggggcaagggtttgactacgacgtgccagctctagaagccgatttcgccaccaccgaggaaggcactggctttgtccacatcgcgccggggcatggcgccgatgactggg

SEQ ID NO: 305018 - DNA, 856 bp, Unknown
  Bacterial polypeptide expressing nucleotide sequence isolated from the Sargasso Sea
aaattttaaaaaggatttttttctaatgaattcttatataactatttggactactacaccctggacaatacctgcaaatgaagcagttgcagtaaatccgaaaataaattacgtttttgcaattgatgaagatagacgaatatacctttttgcaaaagaattatcttctgaaattagtaataaatttaataaagattttatgacccttttagatgttaaaggatcttccttggaagatattgaatatcaacatcctactaaaaataaaaattgtagagttgtgattgggggagactatatcactactgaatcaggtactggaattgttcatactgcaccaggtcatggaatagatgattttaatgtggggaaaaaatacgatttacctactacatgtgttgttgatgagaaaggtaacttaaatgaacattcaggtcaattcaaaggatcaaatgtccttaaagatgcaaatgatttaattattgaatatctaaaagaaaataatttgcttttattacaagaaaaatataagcatagatatccctatgattggcgaacaaaaaaaccaactatttttagagcaacagaacaatggtttgcatctgtaaatggctttagatcatctgcattaaaggcaatcgaagatgttgaatggatgccagcaacaggaaagaaaagaatttattctatggtcgttggtagaggagattggtgtatttccagacaaaggtcatggggggtcccaattccagttttttataaaaaaaatggtaatgaaattctcctaaatagcgatattattaatcacattaaaaaactttttagtgaacatggagcagatatttggtgggattgg

SEQ ID NO: 305019 - DNA, 898 bp, Unknown
  Bacterial polypeptide expressing nucleotide sequence isolated from the Sargasso Sea
gttaaagctataaatgagactgtcttctatccgaacaagggaaaggatagacttttatcaatgattgaaggaaggccagattggtgtgtttcaagacaaagagtttggggagtgccattaccaatttttataaataaaaaaacaaaagagccattaagagatcaaaaaattatagatagaattgcctctatctatgaaaagcaaggctccgattgttggtttacagatgatgcaaaaattttcttaggtgatgactatgatgccaaagattatgaaaaacttaacgatattgttgaggtatggtttgatagtggctcgacacatagttttgttttagaaaaaagaaaagatttaaaatggcctgcagacatgtatttggagggatccgatcaacataggggttggtttcactcttctttacttgagtcgtgcggaactagaggaaaagcaccatttaaaagtattctctcacatggtttcgttgtagatggcaaaggtatgaaaatgtctaaatctatgggtaacgttatctctccagaagatattttaaaaaattatggcgcagacatacttagagtatgggcttcagcatctgattatgcagaagatttaagaatagataaaaatattttaatacagcatgcagaatcttatagaaaaataagaaatacctttagatttatgcttggaaacctaaaagataattttgaaaaacaaaattttcaaaaaattaaacttaacgaatttgatgaattagagcaattcattttacataaattattttcaattaatcaatctgtagacgaaaatttgaaaaactataattttcataaaatgtataaagatctattgaatttttgtacactagatctttcttctttttattttgatataagaa

SEQ ID NO: 305020 - DNA, 756 bp, Unknown
  Bacterial polypeptide expressing nucleotide sequence isolated from the Sargasso Sea
acttgcaataatagaggagtgggacaaagaaaatattttaaaaagctaagagataattctaaaggtagagaaaaatttgttcttcatgatggtccaccttatgcaaatggacatattcatatgggaacagctcttaataaaattttaaaagatgttattgtgcgaacacaacaaatggctggtaaagactctatttatgttcctggatgggattgtcacggtttaccaattgaatggaaaatagaagaagaatatagaaaaaaaggaaagaacaaggatgatgtcccaactgttcaatttaggaatgagtgtagagagtttgcagaaaaatggatcgagatacaaaaaaaagaatttagacggcttggtgttgaaggagattgggaaaatccttacctcacaatgtcaaatcaagcagaagcacaaattgttcgagagcttggaaaatttttacttgatgaaagtttgtataaaggagcaaaaccagttctctggtctgttgtagaaaaaacagctctagctgatgctgaagttgaatatgaagatcatacgtccaacactatatatgttaaatttttaattaaaaattctactgataaagatctaattgattcaaatattgttatttggaccacaactccttggactattccaggaaatagagctttggcttatggtaaagaattagattattcacttattgttgttgaagaattagaagaagatagcttagtcaaagaaaatgatagattaata

SEQ ID NO: 305021 - DNA, 829 bp, Unknown
  Bacterial polypeptide expressing nucleotide sequence isolated from the Sargasso Sea
tttttaaaagatgcaagtataattatttggactacaacaccttggactataccagctaataaagctttagcttttaacagtagtattgaatattcagttttagaaattgatgatcttgaaaattttaaagataaaaagattgttgtagcaaaaaacttaattgacgaaattactaaagaatgtgaaataaaaaattacaaagaattaaagacttttaaaggatcggagtttaaaggtactatttgcactcatccttttgccaagatgaatttcgattatgatgttccattgctagatgctcaatttgttaatctagaacagggaactggaattgttcattgtgcccctagccatggtccagatgattttaatttatgtttgaaaaataacataccttctttatatacagtcgataatgctggtctttatactaaagaaataccttactttactaatactcacatatttaaagcagatccaatcgttatagaaaaattaaaagagcaaaaaaaattacttaaaaatgataaacttaatcatagttaccctcattcgtggagatctaaagctcctttaatttatagagcaacaccacaatggtttatatctatgcaaaaaaacgatcttagaaaaaaagcaattaaagcaattaatgatactaatttttttccaaataaaggaaaagaaagactattatctatggttgagggaagaccggattggtgtgtttcaagacagagagtatggggagttcctttaccaatttttataaataaaaaaacaaaagaacctcttagagatcaaaaagtaatcgatagaatagcaaaca

SEQ ID NO: 305022 - DNA, 483 bp, Unknown
  Bacterial polypeptide expressing nucleotide sequence isolated from the Sargasso Sea
tatgaaatctcaaaatagcaaagaacaaaaattagaattttcttataaagaaactttaaatttacttcaaactgatttttcaatgcgtgctaattcagttttaagagagcctgaaattcaggaattttgggctaaaaataatattgatttcgaattaggttcaaagaactcaggaaatacatttacattacatgatggccctccctatgcaaatggagcgcttcatatgggccatgctctgaataaagttttaaaagacataatcaataagtacaaaaccttgaaaggatttcaagttcactatgttccaggttgggactgccatggtttacctattgaattaaaagtacttcagaatttgaaatctgatgaaagaaagaatctggatatcctaagcctaagaaaaaaagcaacagattatgcacaaacacaaattaatagtcaaatggagggttttaaaaggtggggcatatggggagattg

SEQ ID NO: 305023 - DNA, 882 bp, Unknown
  Bacterial polypeptide expressing nucleotide sequence isolated from the Sargasso Sea
aatggcagaaaataatcttttttttcccaaaactgctttttcaatgaaggctaacttaccttcaaaagaaccaaaaattttagaaaattgggacaaaacaaaactttacgaaaaacttcgaaagaggtctttaggaagagaaaagtttatacttcatgatggaccaccctatgcaaatggtcatatacatatgggaacagctctaaataaaattttaaaagatatagtaactaagttccatcaaatgaataataaagactctatttacgtacctggatgggattgtcatggcttaccaatagaatggaagatcgaggagcaatataaaaaaaagaaaaaaaataaagatgaaattcctactaaggattttagaaaagaatgtagagaatttgcacaaaaatggattgatatacataaaactgagtttaaaagacttggtgttataggtgactgggaaaattattattcaacaatgagttttgatgccgaagctcaaattgtaagagaactgggaaaatttttacttgagggaagtctctatagaggttttaaaccagtcctgtggtcaactgtggaaaaaacagcattagccgatgctgaggttgaatataaagatcacaaatcaaatactatatacgcacagtttaaaattgaaaaaactgatcaaaattttttaaaagatgcttttgttattatttggacaactactccatggacgattcctgcaaacaaggctttagcgtataatcaaaatttaacatattcagttttgcaggttgataacaaaaaaattgtagtagcagaaaaattaattaattctgttgttgaaaattgtagtttaggtaaatataaaattatcaaatcttttgaaggtaaattatt

SEQ ID NO: 305024 - DNA, 958 bp, Unknown
  Bacterial polypeptide expressing nucleotide sequence isolated from the Sargasso Sea
aatggaatataaaaatacaatctttttaccaaaaacttcttttgaaatgaaagctaatcttccagttaaggaacctaaaattttagaagattgggatagagaaaagattttttacaagttgcgtgaaaaatcaaaaggaagggaaaaatttgtacttcatgatggaccaccctatgcaaatggacatattcatattggtactgctttaaataagattcttaaagatgttattgtaaggacgcagcaaatggcgggaaaagactctatttatgttccaggatgggactgtcatggtttgcctatagaatggaaaattgaggaagagtatagaaaaaaaggaaaaaataaagatgacgttcctactgttcaattcagaaacgagtgcagagaatttgcagaaaagtggattaaaattcaaaaaaaagaatttagacgattaggtgttgagggtgattgggataatccatatcttacaatgtcaaaccaggcagaggcccagattgtaagagagctagggaaatttttaattaatgaaagtttgtataaaggagcaaaaccagttctttggtcagtagtagaaaaaactgcattagcagatgctgaagttgaatatgaagaccatacatcaaatacaatttatgtaaaatttttagtaaataaatctgaagatattgatcttattggttcaaacatagtaatttggacaacaactccatggactattcctggaaatagagcattagcttatggagaagagttagaatattcattgataacaatcgatgaagttaatgaaaatagtttagctcaaataaaagataagctaattcttgcaaaagagttattggacactgttactaaagaaataggtattacaaaatattcaatcaaaaaaaattttaaaggatcaaatctatgcagttgtgaatgtgaacatccatttaaaaaactgggatat

SEQ ID NO: 305025 - DNA, 895 bp, Unknown
  Bacterial polypeptide expressing nucleotide sequence isolated from the Sargasso Sea
cgaaagaaaatttttaaatggtttatataacccagatcaatatgaacaagtaaaagatatcttggatgtttggttcgactccggttcaacccatgcatacgttcttagagacaggtcagatggagaatggcctgctgatttatatctcgagggaactgatcaacatcgaggatttttccactcctctttacttcaatcttgtggaactcagggaagagccccctataaaggagttttaactcatggttttattctagatgaaaaaggattgaaaatgtccaaatctcttgggaatactgttagtccacaacaggtaataaagcaatacggggcagacattttgagactttgggttgcccaaagcgattatacagtggatatgagaattggacctgaaattttaaaaggtgtagcagatagttataggaaactcagaaatactgccagatttttactaggaaacttaattgaatacagcaaaaatgaatttgattataatgggcttcctgatcttgaaaaatatattttgagtagagtatttgaagtagacaaaagaataagagaagcatacgataattattctttccaaaacgttttccaaatttacttccagttttgtacccaagatttatcttctttttattttgatataagaaaagatgttttatattgcgaagacaaaagtagcacgaaaagaaaagcaaccctagctatacttgatttgcttttttacagacttacaacatggtttgccccaattttgccttttacgatggaagaagtttttcttgaaagatttcctcatgaagataaatcagtacatcttttagatattcctaaatctgaagatcactggaaaaataaagaaattgaagaaaaatgggatctaattaga

SEQ ID NO: 305026 - DNA, 794 bp, Unknown
  Bacterial polypeptide expressing nucleotide sequence isolated from the Sargasso Sea
aatgaaatctcaaaataacaaagaacctaaatcagatttttcttacaaagaaactttaaatttactgaaaactgatttctcaatgcgcgccaactcagttgttagagaacctgagattcagaatttttgggctaaaaataatattgattttgaattgggttcaaataatagaggagaaacatttacattacatgatggtccaccatatgcaaatggagcacttcatatgggacatgctcttaataaagttttaaaagacataataaacaagtacaaaaccttgaaaggatttaaggtacattatgtccctggctgggactgtcatgggttacctattgaattaaaagtacttcagaaattatcttctgatgaaagaaaggaacttgatactctaaatctaagaaaaaaagcgactgattatgcatacatacaaataaataatcaaatggaaggctttaaaagatggggtatatggggagattgggataatccttacttaacacttaagaaaagttatgaatctgctcagattggagtatttgggaaaatgtttttaaatggatatatatatcgaggccttaaacctgtgcattggagtccaagttcgaggactgcgctagcagaggcagaattagaatatcctgaagaacattattcaaaaagtatttatgtttccttaaaaatcactaaaattcctgacgaaattttcttaaaactttgtcaagaaaataccattaataaaaaggatcattttctaagtaattcttttattactatttggaccaccactccat

SEQ ID NO: 305027 - DNA, 793 bp, Unknown
  Bacterial polypeptide expressing nucleotide sequence isolated from the Sargasso Sea
aatttagagcaaggaacaggaatagttcattgtgctccaagccacggtcctgatgattttaatttatgtttaaaaaataatattccctctttatatacagtagataatgcaggtctctatactaaggaaataccatattttgaaaacactcatatttttaaggctgatcctacagtcatagaaaaattaaaagagcaaaatagattattaaagagtgataagctaagtcacagttatcctcactcttggagatctaaagctccactaatttatagagcaacacctcaatggtttatttctatgcagaaaaatgatctcagaaaaaaagctattaagtcaataaatgaaacagtattttatcctaagaaaggaaaagaaaggcttttatcaatgatagaaggaagaccagattggtgcgtctctaggcagagagtatggggagttccgctaccaatctttattaataaaaaaacaaaagaaccactaagagatcaaaaagtaattgataaaatagcatctatatatgaaaaacaaggatctgattgctggtttacagatgatccagcaatatttttaggtgacgattatgactcaaaagattacgaaaaacttaatgatatcgttgaagtgtggtttgatagtggttcaacgcacagttttgtattagaaaaaagaaaagatttaaagtggcctgctgatatgtatcttgaaggatctgaccaacatagagggtggtttcactcctctttattagagtcttgcggaacaagaggcaaagctccttttaaaagca

SEQ ID NO: 305028 - DNA, 819 bp, Unknown
  Bacterial polypeptide expressing nucleotide sequence isolated from the Sargasso Sea
tcaaaagcacctttaatatatagagctacgcctcagtggtttatctctatggaaaaaaattctttaagaaataaagctattaaagcaataaatgatacttctttttatcctgagaaaggaaaagaacgattgctttctatgatagagggacgaccagattggtgtgtttcaaggcaaagagtttggggagtcccattaccaatctttattaataaaaagacaaaggaacctctaagggataaaaaaataatagatagaatagctgaaatttatgaaaaagagggttcagactgttggtttacagatgactcagaaaaatttttaggaaaagattatgacccaaaaagttacgagaagcttaatgacattgtagaagtatggtttgatagcggatctactcatagttttgttttagagaaaagaaaagaccttaagtggccagcagatatgtatctcgaaggctcagatcagcatagaggctggtttcattcctctcttctagaatcttgtggaacaagaggtagagctccttttaatagcattttatctcatggatttgtcgtcgatgggaaaggattaaaaatgtctaaatcgtcaggaaatgtaatctctcctgaggatattttaaaaaattatggggccgacattcttagggcttgggtggctgcatcagattatgcagaagatttaagaatagataaaaatatattagcacaacatgctgagtcttacagaaaaattagaaatacttttagatttattttaggcaatataaaagataattttgaaccacaaaaatttaattctattgaaattaaa

SEQ ID NO: 305029 - DNA, 871 bp, Unknown
  Bacterial polypeptide expressing nucleotide sequence isolated from the Sargasso Sea
ttaaaactttggaaaaatataaatctttatgatgaattaagaaaatcaagtaaggaaaatgaaaaatttgtgctgcatgatggaccgccatatgcaaatggaaatatacatatggggacagcttacaataaaattttaaaagacataatcgttagatttcatcaaatgaatggaaaagactcagtgtatgttccgggatgggactgtcatggattaccaattgaatggaaaatagaagaacaatataaaaaaaataaaaaaaataaaaatgatgtaccaatagttgaatttagaaaagagtgtagggcttttgcagaaaagtggatagatgttcataaagatcaatttaaaagattaggagttgttggggattggaataattattactctacaatgagtttcgatgcagaagcccaaattgttagagagcttggaaagtttttaaaagaaggaagtttatatagaggctttaaaccagttttgtggtctacagttgaaaaaacagctttagcagacgcagaagttgaataccaagatcataagtcagatactatttatgcttcgtttcctgtcaaatcatcaaatattaaagaattgaataatgctgaaataataatctggacaacaaccccgtggactattccggcaaataaagctttagcttacaatgaaagcttagattatttattggtagaaataaatgatgagggtgattttaaaaataaacgaattgtttttgcggatgctttattagagtctgtagtacaagattgtaaaataaaaaattataaaaaaattaaaaaattaaaaggtaaagattttaaaggtacaatttgtaatcatcctttttttaaattaggttatgactatg

SEQ ID NO: 305030 - DNA, 887 bp, Unknown
  Bacterial polypeptide expressing nucleotide sequence isolated from the Sargasso Sea
taaaattaatttatataatctactaagaaaaaataataaaggaaaagagaaatttgttcttcatgatggccctccttatgccaatggaaatattcacatgggaactgcatttaataaaattttaaaagatattataactaagtttcatcaaatggatggaaaagattcagtttatgttcctggttgggattgtcatggtttaccaatcgaatggaaaatagaagaacaatataaaaaaaataagaaaaataaaaatgatgtaccaatagttgaatttagaaaagaatgcagagagtttgctaacaagtggataaaagttcataaagaacaattcaaaagacttggtgtagttggtgattgggaaaattattattctacaatgagttatgatgcagaggcccaaattgttagagaattgggaaaatttttaaaagaaggaagtttatatagaggttacaaaccagtattatggtcaactgttgaaaaaactgcgttagctgatgctgaagttgaatatttggaccatgtttcagatacaatctatgtatcatttccaattaaaaagtctaatttaaaagaattaaaagattcagaaattattatatggacaacaactccatggacaattccagcaaataaagctttagcttataacaaaagtttaaaatatgtagtggttcaaattaacgatcaaaatgattttaataaaagaaaaataattgtagcaaaagagcttttagaacgagttgtaaaagaatgtgatattaaagattttaatatcataaatgaaatagaaggaaaagatttttcaggaacgatttgttctcatccattattaaagataggttatgattatgatataccaatgttagaggcaaggtttgtaa

SEQ ID NO: 305031 - DNA, 877 bp, Unknown
  Bacterial polypeptide expressing nucleotide sequence isolated from the Sargasso Sea
ttgagcaaagattacaatgaaacattaaatctaccaaaaactgatttctcaatgagggcaaatctcccaaataatgagcctgatcttttgagctattgggattcaataaacttatacggaattttatctaataaatctggagagaaatttgaattacacgatggaccaccatttgctaatggaaaaattcatattggccattgtttgaataaaattttaaaagatataattttaaagtttaattcagtacaaggtagatcaattgcatatacacctggatgggactgccatggattacctattgagcatcaagtttcaaagaaaattaaaactaaggatataactaaattagaaataagaaatttatgtgaagatttcgcaatgaattttgttaatagtcaaagagacgaatttaagaggctcggtgttatttctgattgggacaatccatatctgactatgtcaccagtttttgaatcaaatcaaattagagttttttcagaaatgtattttaaaggctacatttaccgaggattgaagcctgtaaattggagcccaagttcacagacagccttagcagaagctgagttagagtatcctgagaatcatatatctaaaagtgtttatgttaaatttaatttacaaggaaatcctaaagaaatagaaaatgtttctttgttaatttggaccactaccccctggacattgccagcaaacaaagcagtttctgtaaataaaaattttacttatggtatttatgaattagaaaatgagaatttaataattgaaacaagtttgtccaaaattatagaagataaacttggtaaaagtttaagaaaagtccatgaacttatgggtcaagacttgctttcattca

SEQ ID NO: 305032 - DNA, 856 bp, Unknown
  Bacterial polypeptide expressing nucleotide sequence isolated from the Sargasso Sea
gtatcttgaaggttcagatcaacatagaggctggtttcattcatctttattagaatcatgtggaactagaggcagagctccatttgatacaatcttgtctcatggttttgtggtagatggtaaaggattaaaaatgtcaaaatctttaggcaatgttattgctcctgaggatattttgaaaaagtatggagctgatattttaagaatttgggtagcttcctctgattatgctgaagatttaagaatagattattcaattttagaccaacattcagaatcttatagaaaaattagaaatacatttagatatttgcttggaaatataaatgatacatttgaaactatagatttagaacaaaccaatattaaaaaactacctgaacttgaacggtttatgcttcataaaatttatgttttagatgaaaattttaaaagatattttaaaaattatgattttcataatttatataaagaattattaaatttttgtactgttgatctttcagctttttattttgatattagaaaagattgcttgtattgtgatccaaaaaattcagaaaaaagaaaatcggcaattttaattttaaaagttatacttgaatctttattgaaatggtttgctccaatactttcatttactacagaagaaatttttagattagtcagcaataataaaaaaagtattcatttagaaaaatttttagattttccagaaataattaaagatgatgaactaaatgctaaatggtctgaattaattaagttaagagatatttgtaatttaagtatagaacaaaaaagaggtgaaaaaataatcggatcaagtttagaggcttctttaaaaataaaataa

SEQ ID NO: 305033 - DNA, 828 bp, Unknown
  Bacterial polypeptide expressing nucleotide sequence isolated from the Sargasso Sea
aaaaagatggaatttctgcttgggataccttagatttgaaagattatatcgatgatcatgaagattatattaaaacctctgattcacttgatgtttggtttgattctggggtaacccacttcgcagtttctgcaaaaagatttggcgctaatgttgttgccgatctttacttagagggctcagatcaacataggggatggttccaatcatcattattaacaagtatagcaatgaataaatcagtgccgtataaaacggttcttactcatggatttgttgtagacgaaaaaggaagaaaacaatcaaaatcacttggaaatgttgtctctccgcagaaagtctgggatagcctaggagcagatatcttaaggctttgggtagcctcaacagattttagaagtgaaatggtagcatctgacgaaatattgaagagaacttcagatcaatacagacgaataaggaatacttttagatttattttaggaaatttaagcgattttagtgataaagataaaattatgtttgaagatcaagttgaacttgataaatggattataaatgagataaaaacccttcaaaaagaagtcataagcttatatgaatctttttcttaccacaaagcaattcaaaaaatacataatttttgtgttaacgaattaggaggagtatatctggatataattaaagataggctttatacatgcaaaaatgattctttagcaagaagatcttgtcaaacaagccttgactgtattttgaatgttttagtaaggcttatttctccaaatactttcctatactgcagaagaaatttggcaaacaagtgac

SEQ ID NO: 305034 - DNA, 856 bp, Unknown
  Bacterial polypeptide expressing nucleotide sequence isolated from the Sargasso Sea
catgtgtctgatacaatctatacagccttcccagttaaaaaatccaatattaacgaattaattggttctaacgttgttatttggactacaactccatggacgataccagctaataaagcattagcctataatcaaagtttggattatgttttgtgcgagatagataacaacgatattttagaaaatgaaaaaataattattgcaaaagaacttttgagttctgttacaaaagagactgagtacaaaattaagattctaaaagaatttaaaggaaaagaatttgatggaactatttgtagccatccatttcataaaattggatatgactacgatgttccaatgctcgaggcaagatttgtaacaactgaacaaggaacaggaattgttcattgtgcaccaagccacggacctgatgattttaatttgtgcatcaataatggtataaaagcaattgaaactgttgatgatgatggtaggtacacgaaacacatacccatatttgaaggaactcacatttttaaagcaaacgatattgttattgaaaagcttaaagaacttaaagctcttttaaagaatggcaaactaacacattcttaccctcattcttggagatcaaaggctcccttagttcatagggcaacacctcaatggtttatttcaatggagagtcatagactaagagacaaagcacttaaagcaataaatgacaccactttttatcctagtaaaggaaaagaaagaattaaagcaatgatcgagactagaccagattggtgtgtttctagacagagggtatggggagtaccacttccaatatttatctcaaaaaaaaacggagaaattcttatcgacgaag

SEQ ID NO: 305035 - DNA, 582 bp, Unknown
  Bacterial polypeptide expressing nucleotide sequence isolated from the Sargasso Sea
gctggaaattcccgtgagcaaggagtcgcgcgacgccgccgagggacgtccctcctacaaggacacgctcaacctgctgcagaccgggttcggcatgcgtgccaatgccattcagcgagaaccggagctgcaggggttctgggccgaacagggaattgatctgagcctcggtctggagaacagcggtgcggtgttcactctgcacgacggacctccttacgccaatggcgccctgcacatgggccatgccttgaacaaggtgctcaaggacgtcatcaacaagtatcaggttctgcgcggacgccgggttcgcttcgtgccgggctgggactgccacggtctgccgatcgagctgaaggttctgcagtcgatggatcaggagcagcgccaggccctgacaccgatcaagttgcgcaagaaagccgcggcctatgcccgcaagcaggtcgaaggccagatgaaggggttccagcgctggggaatctgggccgactgggatcatccctacctgacgctgcagaaggagtacgaggccgcccagatccgggtgttcggcgagatggttctcaagggccacatcta

SEQ ID NO: 305036 - DNA, 784 bp, Unknown
  Bacterial polypeptide expressing nucleotide sequence isolated from the Sargasso Sea
acttgaattaaaggattatatttctgatgctgatgattatgtaaaaacttctgattctttagatgtatggtttgattctggagtaactcattttgcagtatcttcaaaaagctttggcaaaaatatagtttctgatttataccttgaaggttctgatcagcataggggctggtttcaatcatctttgttaaccagaattgcaatgaacggcgatgctccttacaaaacagttttaacccacggatttgttgttgatgaggagggtagaaaacaatcaaaatctcttggtaatgttgtttcacctcaaaaagtttgggataacttaggagcagatattttaagactttgggttgcatctactgattttagaagtgagatggttgcatctgatgaaattttgaagagaacgtcagatcagtacaggcgtattagaaatacatttcgctttattttaggtaatttgaatgattatcaagataaagatcaaattaaatttgagaatcaagtggaattagataaatggattattaatgaagcaaaaggcttgcagaatgatgtattaaaaatgtatgagtcatattcctatcacaaagcagtacaaaaaatacataatttttgtgttaatgaattgggaggtatttatcttgatattgtaaaagacagactttatacatgtaaatctgattctgttgcaagaagatcttgtcaaacaagtttagattacttactaaatattttagtaaggctaatcgcaccaattctttcctacactgcggaagaaatt

SEQ ID NO: 305037 - DNA, 890 bp, Unknown
  Bacterial polypeptide expressing nucleotide sequence isolated from the Sargasso Sea
tatgggggttactggggatcaaccatatttaagtttagacaaaaagtttgaagcctctcaaatcaagttgtttggtgaaatggtcttcaaaggatacatatatcgaggcctaaaaccagttcattggagtccaagttctcaaacagctctggccgaggcggaactagaatatccaaccggacatattagcaaaagtatttatgtgggatttaaagttaatcaaataccaaaaagattaactcaagaaatttctaagcaagctccagatctaattaattctgaggggcaattaaaagaagtaaaacttgtcatatggactactactccttggacaattcctgcaaatgaggccatttctgttaaccaaaaattagaatatgtaattgcacaaagttctgatctctcattgataattattgctaacgatcttttggaagaagtatctaagagtgtaggaattgattatgaaaaaagagtattaatcaaaggatcaatcttagatggaattatatataaacatcctttatttgataaaacaagccctgttgttttaggaggagattatattacaactgaatcaggaactggattagtacatactgctccaggtcatggtgttgatgatttcaatactggtaaaaaatataatttatcaatttcttgcccagttgatgaaaaaggttttctaacgaaagaagccggaaaatttgaaggactaaatgtattaaaagatgctaatagtgtcataataagtgatctcattaatgctggatctttgcttaaagaaattccgtatgagcacaggtatccttatgattggagaactaaaaaaccaactatttttagagctacagaacaatggtttgcttccgttgaaggatttagagata

SEQ ID NO: 305038 - DNA, 817 bp, Unknown
  Bacterial polypeptide expressing nucleotide sequence isolated from the Sargasso Sea
tggacaacaaccccatggacaattccagcaaatagagctttagcgtacaatccaaatttaaagtattcaattataaaaatagaggacgaaacagattttaaaaacaaaaatattgttcttgcagatgatttgcttaaatctttaattgaagaatgtaatattaaaaaatttagcaaagttgatacttttttaggaaaggattttaatggcactatatgtgagcatccgttttcaagtattggatttgactatgaaataccaatgttagaagcaaacttcgtgactatcgaacaaggttctggcattgtacactgcgctcctagccatggacctgatgattttaatttatgtttaaagaataaaattaaagccgaggaaacagttgatgacgatggtaaatatacaaagcatgtaccagtatttgagggaatacatatttttaaagcaaataaaatagttatagaaaaattaaaagaacataaaaagttactatctaacggtgaattaattcactcttatccacattcttggcgatctaaagcacctctagttcatagagcaacgccacaatggtttatttcaatggagagtcatggattaagggctaaggctttaaaatctattgatgaaacaagtttttttccaaataaaggaaaagaaagattaagatcaatgatcgaactaagaccagactggtgtgtctctagacaaagagtgtggggagtaccaattccagtatttttatcaaaaaaaacaaatcaagttttaattgatgaagaggtaacagaaaatattgctaaaatatttgaaaaggagg

SEQ ID NO: 305039 - DNA, 658 bp, Unknown
  Bacterial polypeptide expressing nucleotide sequence isolated from the Sargasso Sea
tgttgaaaattgggaaaagggcgaaatttttaaaaagttaaggaacaattcaaaaggtcgaaaaaaatttgtactacatgacggaccaccttacgcaaatggaaatattcatatgggcacagcccttaataaaatattaaaagatattattacaagatttcatcaaatgtcggggcaagactcaatatacgtacctggttgggactgtcacggccttccgatagaatggaaaatagaagaaaaatataaaaaaaataaaaaaaataaagatgaagttcctgtaaaagatttcaggaacgagtgcagagattttgcaaaaaaatggatagatatacaagcgaaagaatttaaaagattaggagtaataggagactttaaaaattattactccactatgagttttcaaggtgaagcacaaattgtgagggagcttggtaaatttttgatgaataaaaccttatatcaagggttcaagcctgtgttatggtcgacagttgaaaaaactgctttggcagatgcagaggttgaatacaaagaccatatttcaaatacaatttatgtagcatttaagattacacaaacagacaaagattttttaaaagatgcaaatattataatctggaccacgacaccttggacaataccagctaataaagct

SEQ ID NO: 305040 - DNA, 946 bp, Unknown
  Bacterial polypeptide expressing nucleotide sequence isolated from the Sargasso Sea
taaggaaactaatcaacttcataaggatacatcaaaaatattagataatgcagctaaaattatttctgagaaaaatattgaaggttggtttgattttgataaaagcaaactaataaataatagtgaagaatactatctaataactgatactcttgatgtatggtttgattcaggagtttctcatatctctgttatgcagcaaagaggattaggtgatacggctgacttatacctcgaaggatctgatcaacacagaggctggtttcagtcatcactcataacagccctagctataatgaataaacctccttataagaaagtcttgactcatggttttgttgttgatgctgaaggacaaaaaatgtctaagtcacaaggtaatgttatagctcctcaaagtatcataaaagacaaaggtgctgatattttaaggttatgggtagccacaacagattatacaaaagaaatgcatatatctgaagaaatattaaaaagagcatcagaaggatatagaagaataagaaatacaattaaatttttactatctaatacttcagattattcacagaaagataataaagaaatcgataatttaacaatagtcgacaaatggatactcaaccaagcgtttgacttgcaacatttgattcaaaaaaattatgaagattttaaatttcatcagattattcaagatatacaaaatttctgtagcgtacagctaggaggttactacttagatattataaaagatagattgtatacctcaaaaactgatggtgagcctagaagagcaagtcaatacgtatgcaataacatcctaaaaatgattaatatctggatcgcaccaatattaccctttactgcagaggaagtttatcagagtatggatgacaagaaatttgaatctatttttcttgaagaatggtcgtctgataaatttataatt

SEQ ID NO: 305041 - DNA, 241 bp, Unknown
  Bacterial polypeptide expressing nucleotide sequence isolated from the Sargasso Sea
tatggaaattaaagactctattactcttccaaagactggattttctatgaaagctgacttgcctaaaaaagagccaggaattcttgataaatggcttaaaaatgacatatataaaaaattaagagaacaatccaattccaaagaaaaatttattcttcacgacggacctccttatgcaaatggtcatcttcatatgggtcatgcccttaataaaattttaaaagatataattgtaaaatat

SEQ ID NO: 305042 - DNA, 745 bp, Unknown
  Bacterial polypeptide expressing nucleotide sequence isolated from the Sargasso Sea
tctgacaaacttaatcatagttatcctcattcttggagatctaaggctccattaatatatagagcaacacctcaatggtttatttctatgcaaaaaaataaattaagagataaagctgttaaagctataaatgagacaatgttttatcctagcaaaggtaaggatagacttttatctatgattgagggaagaccagattggtgtgtttcaagacaaagagtttggggagtgccacttccaatttttattaataaaaaaacaaaagagccattaagagaccaaaaaattatagataggattgcctctatttatgaaaagcaaggctccgattgctggttcacaaacgacgcaaaattttttttaggtgaggattatgatgccaaagattatgaaaaactcaatgatatcgttgaagtatggttcgatagcggttcaacacatagttttgttttagaaaaaagaaaagatttaaagtggccagcagacatgtatctagagggatctgatcaacataggggatggtttcattcttctttacttgagtcatgtggaactagaggtaaagcaccattcaaaagcattctttcacatggtttcgttgtagatggcaaaggtatgaaaatgtctaaatcaatgggtaacgttatttctccagaggatatcttaaaaacttatggtgcagacattctaagagtatgggcatcagcatctgattattccgaagatttaagaatagataaaaata

SEQ ID NO: 305043 - DNA, 496 bp, Unknown
  Bacterial polypeptide expressing nucleotide sequence isolated from the Sargasso Sea
catgaaagattataaagaaactctaaatttacctaatactgagtttgccatgaaggctaatctgcccaataaagaacctgggttattggattattgggaagaaatagacttatatgagaaattaaaagagaaaggcaagggtaaagaaaaatttattcttcatgatggacctccttatgcgaatggggcaattcatataggacatgccgttaataagactcttaaagatatagtaattaaatctcaatctttgagcggtaaatatgcgccttataaaccaggatgggattgtcatggacttcccatcgaattgaatgttgaaaagaaaaaaggcaaagctggtaacaagataagtgttggtgaattcagaacagcctgtagggattatgcaaaagggcaaatagaagttcagaagcaggaatttaaaagattaggaattataggtgattgggataggccttaccttaccatggatagtaaatttgaagctggcata

SEQ ID NO: 305044 - DNA, 562 bp, Unknown
  Bacterial polypeptide expressing nucleotide sequence isolated from the Sargasso Sea
tatgaattacaaagagacagtgttcctgccgaggaccgacttcccgatgcgtgccggactcccgaagaaggagccggaaatcctcgagggctggaagcagattgatatctataaccggctccgcgaggcgcgcgccgatgctgagctcttcgtgcttcatgacggcccgccctacgcaaatggccagcttcatattgggcatgcgctgaacaagattctcaaggatgtgatcaaccgctcgcagtcgatgctcggcaagaatgccaattatgtcccgggttgggactgtcacggccttcccatcgaatggaagatcgaggagcagtaccgcaagaagggcaaggacaaggacgaggttccggtcgaggagttccgccaggagtgccgcgacttcgccgcccactggctcgatgtccagtccgaggagttccagcggctcggtgttctcggcgactggcatgttccctacaccacgatggcctatgaagctgaggcgacgatcgcaggcgaactcggccggatcctgatggatggcagcctttatcgtggcgcaagccggtga

SEQ ID NO: 305045 - DNA, 838 bp, Unknown
  Bacterial polypeptide expressing nucleotide sequence isolated from the Sargasso Sea
gacaattaattatagagatacattaaatctgccagttactgatttctcaatgaaagctggattgccaagaaaagaaccagaaattttggatttgtggtcaaattcagatttatacggaaaaataagaaaaaaatatgaggataaagaattatttcttttacatgacggacctccatatgcaaatggtgacatacatcttggacattcagttaataaaatcttaaaagatattactgtaaagcataaaacaatgcagggttttaatgcaccatttgtgccaggttgggattgtcatggtcttcccattgagctgaatgttgaaaagaaacatggaaaaaatagtgagcttgttaagaataaagaaagctttcaaaaagcatgtaaagaatatgctgagagccaaataaaaaaacaattagttgattttaaaagactaggcgtcctaggtgattgggaaaattcttataaatcattagatccaaaatttgaagcagatatcgtcagatcgcttggcattatttacaatgaaggatatctagaaaagggtgaaaaaccagtccattggtgccaagaaagtggatcatctttagcagaggctgaagttgaatatattgataaaacatcaaaagcaattgatgttgctttcagagttgatgattcttctttagacactgtaaaagatttatttaattgcgacgagccagatgaaatatcatttattatatggacaacaactccatggacaataccctctaatgtagctgtatgcatcaatcctatatataagtattcattaattaaaatgaatgaaaaattttatgtattagcttttgagatg

SEQ ID NO: 305046 - DNA, 883 bp, Unknown
  Bacterial polypeptide expressing nucleotide sequence isolated from the Sargasso Sea
tcattattggagtcttgtggcacaagaggaagagccccatttgaatcaatattatcacatggatttgttgttgatggcaaaggtttaaaaatgtcaaaatctttgggaaatgtaattgcacctgaggatattttgaaaaagtatggtgctgatattttaagaatttgggtagcatcatcaaattatgctgaagatttaagaatagattattcaattttggatcagcatgcagactcttacagaaaaataagaaatacttttagatatttgcttggaaatataaatgataaatttaaggagattaacttagataacctcaaagtacatgaattacctgaattagagcaattaatgttacataaaatatttgttttaaacattaaatttaaacaatattttaataattatgattttcataatttatataaagagttgttaaatttttgtactgttgatttatctgcattttattttgatatcagaaaagataatctttattgcgatcccgttgaatcaaaaaatagaaaatcaacaataatgttgcttaatattttattaagttttttattgaagtggtttgctccaattttatcttttaccactgaagaaatttttaggctattatctaaagataaaaaaagcattcatttagaaaaatttttagaaattcctgtcaaatttaagaatgataaattaaatgaaaaatggttagaattaattaaaattagaaacatttgcaatataagtatagaagaaaaaagagctaataaagaaataggatcaagtttagaggcacatttgaaaatatttttgaatcacaaatttaaaaaattaacaaataatattgatttttctgaaatttgtatacttcaaaagctgaagt

SEQ ID NO: 305047 - DNA, 862 bp, Unknown
  Bacterial polypeptide expressing nucleotide sequence isolated from the Sargasso Sea
tctaggtgttcctggagagtgggataatccttatttgactctggataaaagatatgaagcagaacagattcgtgcatttgccgaaatatatggaaacaatcatgtcacatttggacataaaccagtgcactggtgtttagattgtcagtctgctttggctgaggcagaagtcgagtatatggataaagtttctacatcagtcgatgtgttgttcaaaatagttgacccttccgagttcattgaaagaacaaatgccagcaagatcaacaatgaaaaagaattgtttattccaatttggactacaacaccatggacgcttccatcaaatgaggcagtcgcgatgggtgaacatatttcctatggcatttacagtctgacacttcatgaaagagatattcttgtcgttgttgccaatgaactcagagaaagtattgagaaaagatggggtgtatcaaatttagaaatgctcgaagaggtttctgttgaaaacctttcgggactacagttacaacatccttttgatgagagaacagtcccagttcttctaggtgatcatgttaccactgagaatggtactggctctgtacatactgctcctgctcacggacatgaagattttcaaattgggaaagaaaatgatttagatctcaaatgttacgttaattcatatggtgttttcactgatgcaaaagagacctttgccaaacagcatatatttaaatctgaatcagatttcattgaaagattagatgaatcaaacttgctcatttcgagtgaaaaatttgaacacagctatccacactgttggagacataaaactccagtgatctttaggacaaccagacagtggttcatcagtatg

SEQ ID NO: 305048 - DNA, 946 bp, Unknown
  Bacterial polypeptide expressing nucleotide sequence isolated from the Sargasso Sea
attttaggaaatgattttgaaggaacaatctgttcacatccatttcataaacttggttatgattataatgttccaatgttagaggctagatttgttacaactgagcaaggaacaggtattgttcattgcgcgccaagtcacggtccagatgattttaatttatgcttaaataatggcattaaagctttagagactgttgatgatgatggtaaatatactaacaatattcctttatttgaaggtacacacatttttaaagctaatgctatcgttatagaaaaactcaaaaaagaaaaaaaattggtattcaatggtaaattaaatcattcataccctcactcttggagatcaaaagctcctttagttcacagagcaaccccacaatggtttatttcaatggaaagccatggtctgagagacaaagcactcaaagcaataaataaaacagttttttaccctgaaaaaggaaaagagagattgaagtctatgattgagaccaggccagattggtgtgtttcaaggcaaagagtttggggtgtccctttaccaatatttataaataaaaaagatggaaaggttttagttgatgatgaagtttttgaaaatattgcaaaaatttacgagaaagagggttcagactgctggtttaaggacgatgctcaaaaatttcttggaaaaaaatacaaagcagaaaattttacaaaactgtcagacattgtagaggtatggttcgatagtggctctacacactcttttgttttagaaactagaaaagatcttaaatggcctgcctctatgtacttagaagggtcagatcaacatcgaggctggtttcattcctcgcttttacaatcttgtggaactagaggagaggcgcctttcgaaacaatcttatcacatggatttgttgtagatggaaaaggacttaaaatgtccaagtcattag

SEQ ID NO: 305049 - DNA, 839 bp, Unknown
  Bacterial polypeptide expressing nucleotide sequence isolated from the Sargasso Sea
taacttacctaaaacagccttctcaatgaaagcaaatttgcccgctaaagaacctaatcttgttaaacactgggataagatcaaactttataacaagttaagagaatctaccaagggtaaagaaaagttcgttcttcatgatgggccaccgtatgcaaatggaaatattcatatgggaacagctttaaataaaatattgaaagatattattactaaatttcatcaaatggatggaaaagactccgtttatgttcctggctgggattgccatggtttacctatagagtggaaaattgaagaacaatataaaaaaaataagagaaacaaaaatgaagttcctataactgaatttagaaaagaatgtagagaatttgcaaataaatggataaaagtccataaagatcagtttaaaagactaggagttttaggagattgggaaaattattattcaaccatgagctttgatgctgaagctcaaattgttagagagcttggtaagtttttaaaagaaggaagtctttaccaaggatataaaccagttctctggtctacagtagaaaaaactgcattatctgacgccgaagtagaatatatggatcatacttcagatacaatctatacatcttttttagttaaaaaaaccgtcatagaggaattaaatgattgtgaaattgtaatatggacaactactccatggacaataccagctaataaagctttagcttataatcaaaatttaaaatactcaattattcaaatagaagatgataatgaatttaaaaaaagaaaaatagtagtagcaaaagatcttttaaactctgtcaaatcggaatgtaatt

SEQ ID NO: 305050 - DNA, 883 bp, Unknown
  Bacterial polypeptide expressing nucleotide sequence isolated from the Sargasso Sea
aagaaatttattggatccaatattatgatttggacaacaacaccctggacaatacctgcgaataaagctttagcttataatcaaaatttagtttacgttttatgtgagataaacaacaaagataaattgcaaaataaaaaaatagtaattgctaaagatcttttagtatccgtcgcaaaagatacagagtgcaaaatagatatactctttgaatttaaaggaagagaatttgagggaactatttgtagccatccattccatacaattggatatgactatgatattccaatgcttgaggcaagatttgttacaacagaacagggaacaggtattgttcattgtgctcccagtcatgggcccgatgattttaatttgtgtataaataatggtattaaagcagttgaaacagttgatgacgatggaaaatacactaaacagattccaatatttgagggaactcacatttttaaagctaatgtgattgtaattgagaagcttaaagaaacaaaaaatcttttatctaatggaaaacttactcattcttacccacattcttggaggtctaaagctccgttagtgcacagagcaacacctcagtggttcatttctatggaaagccataaattaagagataaagctcttaaagctatagataatacaacgttttatcctgcaaaaggaaaagaaagaattaaatcaatgattgagactagacctgattggtgcgtgtcgagacagagagtttggggcgttcctctaccaatatttatttcaaaaaaagatggagagattttaatagatgacgaagtttttgaaaatattgcagaaatttatgaaaaagaaggttctgattgttggtttgaagaaaattttcaaagatttc

SEQ ID NO: 305051 - DNA, 835 bp, Unknown
  Bacterial polypeptide expressing nucleotide sequence isolated from the Sargasso Sea
agagataagggtgttattgaaaatatagcaaaaatttatgaaaaagaaggatctgattgttggttttatgacgaccctcaaagattcctcggaaataaatataaaaaggaagattacataaaatctagtgatatcgttgaggtttggtttgatagtggatctacacattcatttgttttggaaaaaagaaaagatttaaaatggcctgcatcaatgtatttggagggttctgatcaacatagaggttggtttcattcttctcttttagagtcttgcggaactaggggcaaagctccatttgaaagtatactttcacatggttttgtagtggatggaaaagggatgaaaatgtctaaatctgccggaaatatcatttcacctgaggaaattttaaaaaaatatggtgcagatattcttaggctttgggttgcttcatcagactatgctgaggatttaagaatagatcatacgattttagaacaacatgctgagtcttacagaaaaataagaaatactttcagatatattttgggaaatttaaaggacaattttacacctcaaaacttcaagttaattaaggtgaaagaattaccagaattagagcaagtaattttgcataaactttattttttaagtttagaaattaaaaagagtttaaaagattataactttcacaagctccaaaaggaattactaaatttttgtacgcttgatctatcttctttttatttcgatataagaaaagactcattatattgtgatgatctaaattcagaaaaaagaaagtcatgtattatttcacttaatataattcttgaatgtttattaaaatggt

SEQ ID NO: 305052 - DNA, 852 bp, Unknown
  Bacterial polypeptide expressing nucleotide sequence isolated from the Sargasso Sea
ggccacgcgctgaataagacgctgaaggacaccatcctgcgctacaaatggatgcagggctacaacgccccctacatccccggctgggacagccacggcctacccatcgagcacaaggtctcgcgtgagatccaggagtccgggcgcaccgattacaccccgctggaagtgcgggaggcctgcgccgcctttgccgataaatatcgccaagtgcagaccgcccagttccagcgcctcggcgtgctcgccgactgggccaacgaatactggaccatccagccgcaatacgaagccgccgagctggagacctttgccacctttgtcgaacagggcctggtctaccggagcaaaaagccggtctactggtccatcccctgcgcgaccgcgctggccgaggccgagatcgagtatcagccacacaagagcatctccatctatgtgaagtttgccctcagccccgaggcctgccaggcgctgggactgcctgtcggcgaggcatcgatcctgatctggacaaccaccccgtggacgctcccggccaacctcacggtctccgtgcatccgcaaattgaatacagcgccatccgcacggagaagggcatcctcgtggtggcctcggccctcgtcgatcaaatcgcgggcgagtgcggcctgaaggaggcagcgaccgtggccactttttccggtgcccaactcgaaaagctcgaggcgcgccacccgttcatcgaccgggcctccccgattttgctggccgactacgtgaccactgaggccggcacaggctgcgtgcacaccgccccggggcatggactcgacgactatcttaccggtatgcaaaacggcctcgacgtc

SEQ ID NO: 305053 - DNA, 298 bp, Unknown
  Bacterial polypeptide expressing nucleotide sequence isolated from the Sargasso Sea
atgagtgactataaatcaaccctgaatttgccggaaacagggttcccgatgcgcggcgatctcgccaagcgcgaaccgggaatgctggcgcgttggactgatgatgacctgtacggcatcattcgtgcggccaaaaaaggcaaaaaaaccttcattctgcatgatggccctccttatgcgaatggcagcattcatattggtcactcggttaataagattctgaaagacattatcgtgaagtccaaaggactcacgggctatgactcgccgtacgttccgggctgggactgccacggtc

SEQ ID NO: 305054 - DNA, 916 bp, Unknown
  Bacterial polypeptide expressing nucleotide sequence isolated from the Sargasso Sea
attagacctgactggtgtgtttcaagacaaagagtatggggcgttcctattccagtttttctatcaaaaaaaacaaataaagctttaattgatgatgaagttatagaaaatattgcaaatatttttgaaaaagaaggggctgattgttggtttgagggagacacacagaaatttcttggcaaaaaatacaagagtgaagattatattaaaatgacagatatagttgaggtctggtttgatagtggttcaacccactcttatgttcttgaaaaaagagaagatttaaagtggcctgcttctatgtatcttgagggttcagatcaacacaggggatggtttcattcatctcttttagagtcttgtggcacaagaggtaaggcaccatttgagtcaattttatcccatgggtttgtagtcgacggaaagggccttaaaatgtcaaaatcaacaggaaacgtaatttctcctgatgatattctaaaaaaatatggtgcagatatattaagaatttgggtatcatcctctgattattccgaagatctgagaattgattatactatactagaacaacacgctgaagcttacagaaaaataagaaatacatttagatacttactgggcaatttaaatgataatttttcagaaattaattttgaaaaaattaatataaataaacttcctgaactagagcaatacatgttgcacaagatttcagttttaaatgaaaaatttcaaaaaaattttgagtcgtacaattttcacaacttatataaagagcttttaattttttgcactgttgatttatcttcattttactttgatatcagaaaagactgtctttattgtgatagtatagattcacagaaacgaaaagactgcataaatgtgttaaatattattcttgagatgctataaa

SEQ ID NO: 305055 - DNA, 317 bp, Unknown
  Bacterial polypeptide expressing nucleotide sequence isolated from the Sargasso Sea
gccaagctggggagaagaaagaattctatcaatgctggaggaccgtcctgattggtgtatctcaaggcaaagaaattggggggttccaattaccttaattattcacaatcaaacgggtgagatccatccaaagcaaaacatactttttaatcaaattgcagaagtgatagagaaagaaggaattgagggttgggataatctaaagctagattcattgattgatgatgctgaatcttattcaaaggtccatgatactttggatgtatggtttgattctggtgtaacccatatgtgtgttttagacaagctatatggtg

SEQ ID NO: 305056 - DNA, 481 bp, Unknown
  Bacterial polypeptide expressing nucleotide sequence isolated from the Sargasso Sea
aatgaccgataaatctcaaaataatgatcaaaaaaactataaagatactctaaatttaccaaaaactggcttttctatgaaagctaatcttgcccaaagagagcctggggttctaaagcgctggcaggatgaaaatatctatcacaaaattcgggagttctcagctggtggtaaaagctttgtgctgcatgatgggcctccgtatgcaaatggcccaattcatattggccatgcctttaataaagttttaaaagatataattgttaaaagtaaaactattgcaggttttgatgcaccatatatcccagggtgggattgtcacggcttaccaattgagctacaggttgaaaaaaaggttggaaagcctggggttaaggtatctcataatgattttagaagagcttgtcgtgagtatgccaaaaaacaagttgagcgccagtcggtaagttttcaaaggttgggtgtttttggcctatggaaa

SEQ ID NO: 305057 - DNA, 757 bp, Unknown
  Bacterial polypeptide expressing nucleotide sequence isolated from the Sargasso Sea
atgagcaaggatcacataaatcttcctaaaacagctttttcaatgaaagctaaccttccaggcaaagaaccagctttggtagaatattgggataaaattaatttatacagcaaaattagagaagaaaataaaggtaataaaaaatttgtcctacacgatggtcctccatatgcgaatggaaatattcatatgggaacagctttaaataaaattcttaaagacatagtaacaaaatttcatcaaatgagcggagaagattctgtttatgtacccggttgggactgccacggattgccaatcgaatggaaaattgaggaacaatataaaaaaaataaaaaaaataaaaatgaagtaccaattaatgagtttagaaaagaatgtagagattttgcaaataagtggattgatgtacataaaaaacaatttaaaagattaggagttataggagactggaacaattattactccacaatgagttttggtgctgaggcacaaatagtaagagaattaggaaaatttttaaaagagggcagtctttatagaggttataaacctgttttatggtctacagtagagaagactgcattagctgatgcagaagtcgaatatatggatcataaatctgatacaatttatgctgcttttaaagtcaaaaattctcaaaataaaaaccttttaaatagtgatgtaataatttggactacaactccttggactattccggcgaatagagctttggcttataatcaaaatttac

SEQ ID NO: 305058 - DNA, 640 bp, Unknown
  Bacterial polypeptide expressing nucleotide sequence isolated from the Sargasso Sea
taagaaatctttagttatttcttcaaagttattacagaaaactctggagcgatacgaattagaaaaatttaaatctttaggccaagttaagggaaaagagttagttggaattaaatgtaaacatccctttttagatcaagaatcgctaataatttcttcttcgcatgtaacagacgaaataggaacaggatttgttcataccgcacctgcacacggattggaggatcatgaagcatgtagagattatgactttgataactctagtttggtccaagcagatggaaaatttttagaaggtgttccatacgttgggggaaaaaaaatttctgaagcaaatcaagttgttgtggatacactgaattctaaaaatttgctaatgtctaaaaacaaatataggcatagctttcctcattgttggaggcataaaactccacttttcttcagagcaactcctcaatggtttatctcaatggataaaaatgatttattagatagctgtttaaaaaaaattgatgaaataaattggctacctgaatggggtaaatcaaggattaattcaatgttatcagatagaccagattggtgtatttcacgacagagacattggggagctcccattccactattcgttaataaagaa

SEQ ID NO: 305059 - DNA, 790 bp, Unknown
  Bacterial polypeptide expressing nucleotide sequence isolated from the Sargasso Sea
aatgtctaaagaaaaattaaacttaccccgaacttcttttgccatgaaagcagctttgccatctagagaacctttaattctcgaacaatgggaaaagaacaagatttttaaccagttacgaaaaaattctcaagggcgagagaaatttatattacacgacgggccaccttacgctaatggtcatatacatatgggcactgcttataataaaattcttaaagatataataacaagatttcatcaaatggatggtaaagactccgtttatgttcctggttgggattgtcacgggcttccaatagaatggaaaatcgaggaagagtataaaaaaaaaaagaaaaataaagatcaagttccaataaaagattttagacaggagtgtagagaatttgcaaaaaaatggattaatattcacattactgagtttaaaagattgggtgtattcggtgattttgaaaattactattcaacaatgagtaatgaagctgaggctcaaatagttagagaactcggtaaatttcttttagacggaagcttatatcaaggttttaaacctgttctgtggtcaacagttgaaaaaactgcactcgctgatgctgaagttgaatatctagatcatacttcaaatactatttacgtagcatttaaagttaaaaagacacaatacgactttcttaaggacacaaatgtaattatttggacaacgactccttggacaataccagctaataaagctttagcattccataaaagtatagaatattctcttgttgagatagatgagttaaat

SEQ ID NO: 305060 - DNA, 934 bp, Unknown
  Bacterial polypeptide expressing nucleotide sequence isolated from the Sargasso Sea
aaatttcttggaagaaagtataaagctgaagattttgaaaagttaagcgatatcgtggaagtatggttggatagtggatctacacattcttttgtgttggaaaaaagaaaagatttaaaatggccggcatctatgtatttagagggctcagatcaacatagaggttggtttcattcctctcttttggagtcttgcggaacaagagatcgagcaccttttgaatctattctttctcatggctttgtagttgatggtaaggggttaaaaatgtcaaaatctttgggcaatgtaattgctcctgaagatattctaaaaaaatatggagctgatatacttagaatttgggttgcttcctcaaattatgccgaagatcttcgaatagactattcaatattagaccagcatgccgagtcttacagaaaaataagaaatacatttagatatttacttggaaatcttaatgataactttgaacaaataaatttagatacaatcaaaattgagaaattacctgaactagagcaatttatgcttcataaaatttacaatttaaattttaaatttaataagtatttcaaaaattacgattttcataatttatacaaagaattattaaacttttgtactttggatttatcagctttttattttgatataagaaaagatactttatattgtgatccagtcaattctgaaaaaagaaaatctgctcttatactcttaaacgtaattctaaattctttaataagatggtttgcaccaattctatctttcacaactgaggaaatttaccaacttatttcaaagaataaaaaaagtattcaccttgaaaaatttttagattttccaaaaaaatttaaaaattctcatctaaattctaaatgggaacaattaattaaaataagagatatctgtaatcttagtatgagcaaaa

SEQ ID NO: 305061 - DNA, 949 bp, Unknown
  Bacterial polypeptide expressing nucleotide sequence isolated from the Sargasso Sea
gaagttgaatataaagatcataaatcagatacaatttatgcatcttttaaagtaaaaaaatctaaaattgagaaattaaaaaacagtgaggttataatttggaccacaacgccatggacaataccagcgaataaggcattagcatacaatccaagcttaaaatatattattataaaaatagaagatgaaggtgattttgtaggcaagcaaattcttttagcggaagatttattaaagtcagtggtagaggattgtaaaatcaaaaactataaaaaaattttaaattttaaaggaaaagaattagaaggaactgtttgtagtcatccattttatgaaattggttttaaacataatataccaatgcttgaggctttgtttgttacaactgagcaaggttctggggtagttcactgtgcacctagtcatggacctgacgattttaacttatgtattaaaaacggtattaaggcagaagaaacagttgatgatgatgggagatatacaaaaaatgttcctttgtttgaaggtacacatatttttaaagccaacaaaataattatagaaaaattaaaagagcaaaaaaaactattagcaagtggtgaattggtacatgattaccctcattcttggcgttcaaaagcgcctttagttcatcgggcaacaccccaatggtttatttcaatggaaagccacggattaagaagcaaagctttaaaagcaatcaatgatacaaaattttatcctaataaaggaaaagaaagattaaaatcaatgattgaaacgcgaccagattggtgcgtttctaggcaaagagtatggggtgtaccaattccagcatttatttcaaaaaaaacaaaggaaattttagttgatgaaacaattattgaaaatatagcaaagatttttgaaaaagaaggcgcagactgttggtttgaaaaagactataaaa

SEQ ID NO: 305062 - DNA, 895 bp, Unknown
  Bacterial polypeptide expressing nucleotide sequence isolated from the Sargasso Sea
ttgaggttttggtttgacagtggctcaactcattcatttgttctagaaaaaagagatgatttgaaatggccagcttcaatgtatttagaaggatcagatcaacatagagggtggtttcactcatctttattagaatcatgtggcaccagaggaagagctccatttgagtcaattttatctcatggatttgttgtagatggcaaaggtttgaaaatgtctaaatctttaggaaatgtaattgctcctgaggatatcttgaaaaaatatggtgctgatattttgagaatatgggtcgcgtcgtcaaattatgcagaggatttaagaatagattattcaatattagatcaacatgctgaatcatatagaaaaattagaaatacattcagatatttacttggaaatataaatgataattttgaaaacgtaaatttaaataaattagatttgactgaattacctgagttagagcagtttatgttacataaactttatattttaaacgataatttcaaaaaatattttaataattatgactttcataatttatacaaagaattattaaatttttgtactgttgacttatctgctttttattttgatattagaaaagacaacctttattgtgatcccatagattcaaaaaaaagaaaatcaacaattttacttcttaatataattttaaattcactattaaaatggtttgctcccatcttgtcgttcacaactgaagaaatttttaaattattattcaaagaccaaaaaagtattcaccttgagaaatttttagattttcctgataaatttaaaaatgaagaactttgtgaaaaatggatagaattaattaaaatcagaaatatatgtaacataagcatgaagaaaaaagagccagtaaaga

SEQ ID NO: 305063 - DNA, 817 bp, Unknown
  Bacterial polypeptide expressing nucleotide sequence isolated from the Sargasso Sea
attcttcatgatggacctccttatgcaaatggcaatattcacatgggaactgcttataataaaattttaaaagatttaattacaaaatttcatcagatggatggaaaggattctgtttatgtgcctggttgggattgtcatggattacctatcgagtggaaaattgaagaacagtataaaaaaaataaaaaaaataaaaatgatgtcccagtagttgaatttagaaaagagtgcagagaatttgcctcaaaatggattaaagttcataaagaccagttcaaaagattaggcgttattggagactgggaaaattattattctacaatgagctttgaagctgaagcacagatcgtgagagagttaggaaaatttcttaaagaaggaagtttatatagaggatacaagccagttttatggtctaccgttgaaaaaactgcattatcagatgctgaagtagaatatttagatcatgtatctgatacaatatatgtatcttttccaataaaaaaaacgaattctaaaaatttagataattgtgaagtaataatttggacaacaacaccatggacaataccagccaataaagcattagcatataataatagtttaaaatatttaattataaccattgaagatgatggtgattttaaaagaaaaaaaattattgtagcaaaagatttattagaggtttttgtagcagagaataaaattgaaagttacaaaattataaatgaattttccggaaaagaatttaaaggtacaatttgtagtcatccttttttatctttaggttacgattatgatgtgccaatgtttg

SEQ ID NO: 305064 - DNA, 859 bp, Unknown
  Bacterial polypeptide expressing nucleotide sequence isolated from the Sargasso Sea
attggattcagttgtccaaaaatgtgaaatcaaaaactataaagttatatctaattttccaggaacagaatttgaagggacatcctgttcccatccatttttagaaattggttacaattataatattcctctattagaagcaaattttgtaaacttggaacaaggtacagggattgttcattgtgctccaagtcatggtccagatgattttaacttatgcttaaatcatggtatcaaagcagtggaaactgttgatgataatggaatatatactaaaaatattttgaaatttgagggcattcatattttcaaggcgaaccctattgtaatagaaaagcttaaagaacataataaacttttttccagtggaaagttaaatcattcttacccacattcatggagatctaaagctcctttagttcatagagctactcctcaatggtttatctcaatggatagccatggtttaagagataaggctttaaaggcaattgatgaaacatcattttatcccgctaaaggaaaagaaagattgagatcaatgattgaaacaagacctgattggtgtatttcaagacaaagagtttggggcgttccactaccgatatttatttccaaaaaggatggaaaagtcctaatagatgacgagatttttgaaaatattgcaaaaatttatgaaaaacaagggtcagattgttggttttctgaggattatcaaatttttttaggagcaaagtataaggcagatgattatttgaaattaagcgacatagttgaagtatggtttgatagtggctctacacactcatttgttttggaaaaaagaaaagatttaaatggcctgcttcaatgtatttag

SEQ ID NO: 305065 - DNA, 487 bp, Unknown
  Bacterial polypeptide expressing nucleotide sequence isolated from the Sargasso Sea
agatgaagaagtaattgaaaatatagcatcattttatgaaaaagaaggttctgattgttggttttcggataatcctcaaagatttttaggagacaaatatagtgctaaggaatatgaaaagctaagtgatatcgtagaggtttggtttgatagtggctctactcactcatttgttttagaaaaaagagaagatttgaaatggcctgcttctatgtatttagagggatcagaccaacacagaggctggtttcattcatcgcttttagagtcatgtgggacaagaggaagggcaccatttgagtcaatactttctcatggatttgtagtcgatggaaaaggtctcaaaatgtctaaatcattaggaaatgttatcgctccagaagatattttaaagaaatatggagctgatattttaagaatttgggtagcatcatcaaattatgcagaggatttgagaatagatttttctattcttgatcaacatgcc

SEQ ID NO: 305066 - DNA, 952 bp, Unknown
  Bacterial polypeptide expressing nucleotide sequence isolated from the Sargasso Sea
tcaaagatttttaggagaagattactctatcactgattatgaacaagtaaaagatgttgttgaggtttggtttgatagtggatctacacatgcattttgtttagaaaaaagatcagatttaaaatggcctgcatctatgtatctagaaggcagtgatcaacacagaggctggtttcattcgtctcttttagaatccgctgggacaagaggacaagctccttatgagagtgttctaacccatggatttgttgttgatggaaaaggtagaaaaatgtctaaatcacttggaaatgtaatttcacctgatgatatattaaaaaaatatggtgttgatattcttagattgtgggttgttgcctccgattattatgatgatttaaaacttgatgatgcaattttgaaatcccaggctgagtcctatagaagaatacgcaatacattcagatttttaataggcaatttaaataattttaataatgatgaaaatattagtgaagatcatttcccagagcttgaaaaatatcttcttcatcgtttgtgggaagttgataaaatagttaaaagatgtattgagactttcaattttcatttgatgtttacaactttgcttaatttttgttctaatgatctttctgctttttactttgatataagaaaagatgttatttattgtgatagtaatgagtctaaaacaagaagatcgtcaagaacactattaaacataatttttaattttcttgttcgatggtttgctccatcaatttcttttactactgaagaagcctggaaatctataggtaacaaaacaagtatacatttagaggatttcttaaattgtaaagactcataccaaaacaataagattaatgaaaaatggtcaataataaaaaatattagaaaagtttctacaggtgcaattgaaaaattaagagaggaaaaacttattcgctca

SEQ ID NO: 305067 - DNA, 871 bp, Unknown
  Bacterial polypeptide expressing nucleotide sequence isolated from the Sargasso Sea
aaaatgtcaaaatctcttgggaatattattgcaccagaagatattttaaaaaaatatggtgctgatatcttaaggatttgggttgcagcttctgattatgctgaagatttaagaatagattattcaattttagaacagcatgcagaatcttacagaaaaattagaaacacttttagatatatcctaggaaatttaaatgacaaatttgaaaaagttgatcctgaaaaaattaatataagtaattttccagagttagaacagtatatgttgcataaaatttataatcttaatgttttatttgaaaagaattttgaaaagtataattttcatactatttataaagaaataataaatttttgtacatctgatttatcagctttttattttgatataagaaaagatactttatattgtgattctttagagagtaaaaaaagaatttcaactatagagtttttaaatatcgttcttgaaatattattaaaatggtttgcaccagtgttatcatttacaactgaagaaatttattcacttctgaaaattaaagaaaaaggaagtattcatttagaaaaatttccagtaatcccatcaaactggaataatcctaatttaaataacaaatggacagagcttattaaaataagagataaatgtaatagtagtatagagttaaaaagagcatctaaagaaattggttcaagtttagaggcaaatttaaaaatacatttaaatgataaactaattaaattatctaaaggaactgatttttctgagctatgtattacatcaggagcagatgtagataaaattaaagaagatgataaggaagaaattattgttgagacaaacaaagctgagggtaaaaaatgta

SEQ ID NO: 305068 - DNA, 871 bp, Unknown
  Bacterial polypeptide expressing nucleotide sequence isolated from the Sargasso Sea
ggtgaacgaacggctcgattacgccctcgccgacgacggcaccggccggatgctgctggtggcttcggatctgatcgaaccactcacggccaccctgggactgcccctcagccgcaagctgacggtgaagggagccctgctggcaggactgatgtatcgccatcccttgctggaccgcaccagtccggtggtgatcgggggtgagtacatcaccacggaatccggaacgggtctggtgcacacggctccaggccatggcgtcgacgacttccacaccggccagaagaacggtctccccgtgctctgtccggtggatgaaggcggcaccctcaccgcagaggcgggcccctttgctgggctgaacgttctcagggacgccaacccggcgatcatcgaagccctggatgccgctggagcgctgctgaagcaggagacctacggccaccgctatccctacgactggcgcaccaagaaaccaacgatcttccgggccacggagcagtggttcgcctcagtggacggcttccgccagcaggctctggacgccatcgatgacgtgcagtggacccccgcatcaggacgcaaccgcatcgaggcgatggtgaaggaacggggcgactggtgcatctcgcgccagcgcacctggggcctgccgatcccggtcttctaccaccgcagcagcggagaggtgctgctcaacgccgacaccctctcccacatcgagagcctgatcggcgagcacggcgccgacgtctggtgggaaaaagacgaagccgatctgctgcctccggcctatgccgaccaggccaaccagtggcgcaaaggcaccgacaccatggatgtctggttcgattccggctcgagctggccg

SEQ ID NO: 305069 - DNA, 631 bp, Unknown
  Bacterial polypeptide expressing nucleotide sequence isolated from the Sargasso Sea
ttggggagtccctttaccaattttgtaaacaaaaaaactaatgaagttttaatagataatgaggtttttgatacgattgctaaaatttatgaaaaagaaggatcagattgctggttttcagataatcctcaaaagtttttaggaaaaaaatataatgctagagattttgaaaaacttagcgatatcgttgaggtatggtttgatagtggctctacccactcatttgttcttgaaaaaagagaagatttgaaatggcctgcatcgatgtatttagaagggtcggaccaacacagaggatggtttcactcttctttattagagtcttgtggaacaaggggaaaagcaccttttgagtctatcttatctcatggatttgtagtagatggaaaaggtcttaaaatgtcaaagtctctaggtaatgttattgcaccggaggatatattaaaaaaatatggtgcagacattcttagaatttgggttgcatcatctaattatgctgaagatttaagaatagattattctattttagaccaacactcagaatcatatcgaaaaataagaaatacttttagatatttactcggaaacttaaatgataaaattgaagaaattgatttagaaaaatattaaa

SEQ ID NO: 305070 - DNA, 898 bp, Unknown
  Bacterial polypeptide expressing nucleotide sequence isolated from the Sargasso Sea
tgaaaaagaaggttcagattgttggttttcagatgatccacaaagatttttaggtaaaaaatataattccaaggattatgaaaagttaagtgatattgttgaagtgtggttcgatagtggttctactcattcatttgttttagaaaaaagagaagatttaaaatggccagcatcaatgtatttagaaggttcggatcaacatagaggatggtttcattcatcactactcgaatcgtgtgggactagaggaagagctccatttgagtcaattttatctcatggttttgttgtcgatggaaaaggtttaaaaatgtcaaaatcacttgggaatgtgattgctccagaagatattttaaaaaaatatggagctgatattttaagaatttgggtagcatcttctaattatgctgaagatttaagaattgatcactctattttagatcaacacgccgagtcatatagaaaaattagaaatacatttagatacttactaggtaatctaaatgataattttgaaaaaattgatctacaaaaaataaatttatcagaattaccagaacttgagcaatttatgcttcataaaatctatatgttaaattcaaattttaaaaattattttaaaaattatgattttcacaatttatataaagagttattaaatttctgcactgtagatttatcagctttttattttgatattagaaaagatactttgtactgtgatccaatagagtctcaaaaaagaaaatcaacaattattttgttaaatgtgattttaaattcattattaagatggtttgcgccaattctttcttttacaacagaagaaatacatagattaatttttaatgataataaaagtgtacatttagaaacttttttagattatccggaaaaa

SEQ ID NO: 305071 - DNA, 732 bp, Unknown
  Bacterial polypeptide expressing nucleotide sequence isolated from the Sargasso Sea
aaatttgttcttcatgatggccctccatatgccaatggagatatacacatgggaacagcacttaataaaattcttaaagatgtaatagtaaaatttcatcagatgaaaggagaagattctgtttatgtgccaggttgggattgtcatggtttgccgattgaatggaaaattgaggaacaatataaaaaaaacaaaaaaaataaaaatgaagtcccaataaatgaatttagaaaagaatgtagagatttcgcaaagaaatggatagaggtacacaaaaagcaatttaaaagacttggtgtagtaggtgactgggaaaattattactctacaatgagttttgatgctgaagctcaaatagttagagagcttggaaaatttttaaaagaaggaagtctttacagaggttataaacctgttctttggtccacagtagaaaagacagcactggcagatgcagaagttgaatacatggatcataagtctgatacaatttatgcagcatttaatattaaaaaatcaaaaaatgaaaaacttttaaatacccaaattataatttggactacaaccccatggactataccagctaatagagctttggcttacaatgaaaatttaaaatatgtgattattaaaatagaagatcaatctgattttaaagataaacaaataatagtagcagaagatttgttaaaatctttaatagaggattgtaatatcaaaaaagtttacaaa

SEQ ID NO: 305072 - DNA, 895 bp, Unknown
  Bacterial polypeptide expressing nucleotide sequence isolated from the Sargasso Sea
aacgactgatcttcctatgaaagctggtctgtcagcaaaagaaccaaaaattcttgatttttggaagacagaaaatatttataaccaaattagaatcgaacgaaaggaagccaaaaaatttattttgcatgatggacctccttatgcaaacggagatatacatttaggtcatgcagtcaataaagtgctaaaggatatagtcatcaaatatcaaacactcattgggtatgatgctccatacgttccaggatgggattgccatggacttcctattgaactaagcatagaaaaaaaacatggtaaaaataatgcacttgttaaagataaaaaacaatttttagaggcatgtagaaaatatgccgaaactcaaatttctaatcaaaaagatgactttatcaggcttggtgtcttaggagattgggaaaactcttataagtcaatggatgctgaatttgaggcggacattgttagggctttgggtagaatcgttactaatggtcatctacaaaaaggagaaaagccagtgcattggtgctttgattgtaaatctgcattggctgaggcagaagttgaatatagtgacaagacatcaaaggctatatatgtaaagtttggtgtgcaacataaatccgttgctcaaattaattctgcttttggaaagtcagatatcaaatcatgctcggctgtgatttggacgacaacaccgtggactttgcctgctaatgtagcagtttgtgtaggtcaatcaatagagtactctctttgtaatttggatgattcttacttaatcattgcatctgacctagtttcagcatgctctgaaaaatgggacaaaaaaatcaatattttggcaacatgtaaaggtgaaatgttagagggagtaactcttgatcat

SEQ ID NO: 305073 - DNA, 916 bp, Unknown
  Bacterial polypeptide expressing nucleotide sequence isolated from the Sargasso Sea
tttcgatgaagctagtttaccactcaaagaacctgagattttgaagaaatgggaaaaaaatataatctttgataaactaagaaaaaagtctaagggtaaagaaaaatttgttcttcacgatggtccaccttatgcaaatggccatatacatatgggtaccgcgttaaacaaaattttgaaagatataattactcgttttcaccagatgaatggaaaagattctgtttatgttccaggttgggattgtcacggacttccaatagaatggaagatagaagaacaatataaaaaaaagaaaaaaaataaagatgaagtgcccattaaagattttagacaagaatgtagggaatttgcaaaaagctggatcgaagttcacataaaagagtttaaacgattaggagtagttggagattttgaaaattattactctacaatgagtttcgaggcagaggctcaaattgtaagagagttaggtaaatttcttttggatggaagtttatatcaaggattcaaaccagttctttggtctactgttgaaaaaacagctttagcagatgcggaagtagaatatttagatcacacctcaaatacaatttatgtttcatttaaagtaaaggagactaacaaagactttctaaaggactcaagcattataatctggaccactacaccctggaccatacctgctaacaaagcattagcttttaatagcaatatcgaatacgcagttttggaaattgatcaacttgaacactttaaagacaagagaattgtagttgcaaaaaatttaatcgaaacaataattaaagattgtgagattaaaaattataaagaattaaagacctttaagggttctgaatttaaaggaacactatgtagccatccatttgtcaaaatggattttgactatgatgtt

SEQ ID NO: 305074 - DNA, 847 bp, Unknown
  Bacterial polypeptide expressing nucleotide sequence isolated from the Sargasso Sea
aagctaagagataaatccaaaggtagagaaaaattcgttcttcatgatggcccgccatatgcaaatggacatattcatatggggacagcgcttaataaaattttaaaagatgtcattgtgcgaacacaacaaatggcaggcaaagactcaatttatgttcccggatgggactgtcacggtttaccaattgaatggaaaatagaagaagaatatagaaaaaaagggaagaacaaggatgatgttccaactgttcaatttagaaatgagtgtagagagtttgcagaaaaatggatcaagatacaaaaaaaagaatttagacgattaggtgttgaaggggattgggaaaatccctacctcacaatgtcaaatcaagcagaagcacaaattgttcgagagcttggaaagtttttgcttgataaaagtttgtataaaggagcaaaaccagttctttggtctgttgttgaaaagacagcattagctgatgctgaagttgaatatgaagatcatacctccaacactatatacgttaaattcttaattaaaaattcatctgataaagatttaatcgattctaatattgttatttggacaacaactccttggactattccaggtaatagagctttggcttatggtaaagaattagattattcacttattgttgttgaagaattagaagaagatagtttagtcaaaaaaaatgatagattaatatttgcttcagaacttttagaaagtgtaactaaagaaattggaattaaaaaatttagtacaaaaaagaaatttaaaggagataatttatcttcttgtaaatgtgaacatccttttaaaaaattgggatacgatt

SEQ ID NO: 305075 - DNA, 862 bp, Unknown
  Bacterial polypeptide expressing nucleotide sequence isolated from the Sargasso Sea
gcagatgcagaagttgaatatctagatcatgtgtctgatacaatctatgcagccttcccagttaaaaattccaatattaatgaattaattggttcgaatgttgttatttggacaacaactccatggacgataccagctaacaaagcattagcctataatcaaagtttggattatgtcttatgccagatagataacaataatattttagaaaatgaaaaaatagttattgcaaaagaacttttgagctctgttgcaaaagatactgattacaaaattgagatattaaaagaattcaaaggaaaagaatttgatggaactatttgtagccatccatttcataaaattggatatgactatgatattccaatgctcgaggcaagatttgtaacaactgaacaaggaacaggaattgttcattgtgcaccaagccacggtcctgatgattttaatttgtgtatcaataatggaattaaagcaattgaaacagttgatgatgatggaaggtatacaaaacacatacccatatttgagggaattcacattttcaaagcaaataatattgttattgaaaagcttaaagaattaaaaggtcttttaaagaatggcaaactaacgcattcttacccacattcttggagatcaaaggctcctttagttcatagagcaacaccccaatggtttatttcaatggaaagtcataaattaagagacaaagcacttaaagcaataaatgataccactttctaccctaataaaggaaaagaaagaattagagcaatgatagagactagaccagattggtgtgtatctagacagagggtgtggggagttccacttccaatatttatttcaaaaaaaaatg

SEQ ID NO: 305076 - DNA, 901 bp, Unknown
  Bacterial polypeptide expressing nucleotide sequence isolated from the Sargasso Sea
attggatcatacatcaaatacaatatatgttggttttaaagttaaggaaacagataaagattttttaaaagataccagcataataatatggacaacaacaccgtggacaataccagcaaataaagctttagcttttaatagtaatattgattattcgatattagaaataggtaatcttgaaaattttaaagaaaaaaaaattgtagttgcaacaaatttagtcaaagaaatcattaatgcttgtgaaattaaaagttataaggagctaagaaaatttaaaggttcagaatttcaaaatacagtttgtagccatccatttttaaaaatgaaatttgactatgacgtccctatgttagacgcacaatttgtgaacctcgagcaaggaactggaattgtacactgcgcaccaagtcatggcccggatgattttaatttatgcttaaaaaacaatattccttctctttacactgttgatgacgcaggactttatactaaagaaatacctttttttgaaaagactcatgttttcaaagctgacaatatcgtaattgagaaattaaaagagcaaaaaaaattattaaaaaacgataagttaaatcatacctatccacattcatggagatctaaagctcctcttatttatagagctacaccacaatggtttatatctatgcagaaaaatgatttaagaaaaaaagctattaaatcaattaatgaaactaatttttttccaaagaaaggaaaagatagactattgtctatgatagagggaagaccagattggtgtgtttcaagacaaagagtgtggggagttcctttgccaattttcataaataaaaaaaccaatgaacctttaagagaccaaaaggttatagatagaatagctttcatatatgaaaaa

SEQ ID NO: 305077 - DNA, 718 bp, Unknown
  Bacterial polypeptide expressing nucleotide sequence isolated from the Sargasso Sea
cactcatggagatcaaaagcgcccttagtccatagagcaacccaacaatggtttatttctatggaaagtcatggtctaagaaaattagcactcaaagcacttgatcaaacaaaattctatccaagcaagggcaaagaaagaataaaatctatgattgaaacaagacctgattggtgtgtttctagacaaagggtttggggtgttccacttccaatttttgtttcaaaaaaagataataaagttttagtagatgacgaagtattcgagaacatcgcaaaaatttatgaaaaagaaggatcagactgttggttttcagacgactttcagagatttttaggaaaaaaatataaagcagaagattatgttcaatctaaagatattgtagaggtttggttcgatagtggatcaacacactcttttgtattagaaaaaagggatgatctaaaatggcctgcatcaatgtatttagaaggatcggatcaacacagaggatggtttcattcctctttattagagtcttgtggcactagaggaaaagcgccttttgagtccattctatctcatggatttgtagtcgatggaaaaggtcttaaaatgtcaaaatcactaggaaatgtaattgcaccagaggaaattttaaaaaaatacggagcggatattttaagagtttgggtcgcagcttcaaattatgcagaggatcttagaattgatcattcaa

SEQ ID NO: 305078 - DNA, 850 bp, Unknown
  Bacterial polypeptide expressing nucleotide sequence isolated from the Sargasso Sea
agttctagacgtagttgaagtatggtttgatagtggatcaactcatgctttttgtcttgaacaacgtcaagatttaaaatggccagcatcaatgtatttagaaggaagcgatcaacatcgtggctggtttcattcttctttgctagaatcaacaggcacaaggggaagagccccttatgaaagtgttttaacgcatggatttgtggttgatggaaagggacgcaaaatgtcaaaatctctgggtaatgtaatctcacctgaaaaaattctgactcaatacggtgttgatattcttagattatgggttgtggcttctgattattatgatgatttaaaacttgataataatattttaaaggcgcagagcgactcttatcgtcgtataagaaatacttttcgttatctaattggaaatctaagtaattttaatgatgtagaaaaaataacttcagagaaatttcctgaactagaaaaatacttattacatcgtttatgggaaatagatcaaacaattcaagaatgtatttcaacatttaattttcatcttatgtttactactttattaaatttttgttcaaatgatttgtccgctttttattttgatattcgtaaagatacaatttattgtgattctttaaaatcaatcaaaagacgttcatcacgtactttattaaatttagtttttgagtatcttgttagatggttggcaccttctttaagttttacatgtgaagaagcttggcaatcccgtggttataaatcaagtatacatcttgaagattttaaaagagtagatgaaaattttaaaaatactaagcttggcaacaaatggaacactataaaaatagtt

SEQ ID NO: 305079 - DNA, 478 bp, Unknown
  Bacterial polypeptide expressing nucleotide sequence isolated from the Sargasso Sea
atgagtgtcgattacaaatctacggtctttttaccgactacagattttcccatgcgggggtctttgccagaacacgagccaaaaatactagagcgctggttaaaaattgacctctataaactgctccgtgatgagtccaaaggaagagaaaaatttattctgcatgacggccccccctatgcgaacggcaatttacacattggtcatgcgttaaataaagttctcaaggacgtcatcaatcgttcgcagcaaatgcttgggaaggatgcaaactatgtaccggggtgggactgccatggtttgccaatcgaatggaaaattgaagaaaaatatcgaaaggaaggcaaggataaggacaaaattccagtagcagatttccgtcaggaatgccgtgattttgcagaccattggatcggtgtgcagtcggaggagttccagagattaggcgttataggtgactggaagaacccctatacaa

SEQ ID NO: 305080 - DNA, 850 bp, Unknown
  Bacterial polypeptide expressing nucleotide sequence isolated from the Sargasso Sea
catggttttgttgttgatggcaagggcagaaagatgtcaaaatcacttggtaacgtaatctctcttgatgatattttaaagaaatatggtgttgatattttaagattatgggttgtagcttcaaactattatgatgatttaaaaattgataattcaatcttacaagcccaaacagattcatacagaaggataagaaatacatttcgttatctaattggcaatttaaatgaatttcaagaaagtgaaaagattgatattcaagaatttccagacttagaacaatttattttacatcgactttgggaattagatcaaattattaaaaattgcataacaaaatataattttcatttgatgtttactactttattaaatttttgttcaaacgatttatcttcattttattttgatattcgaaaagatacaatttactgcgataatttttcatcaaaaaaacgtagatcaacaagaacacttcttaatattctttttgattatttagtacgttggcttgctccttttttaacttttacatgtgaagaagcatggcaatccttaggcaattcttctagtatccatttagaaaattttttaatcgtagataataaatatcaaaattctaatttatctcaaaagtgggaaataatcaaaaacataagaaaagttattactggtgctttagaaaaaaaacgtgctgaaaaattaattggatctagtcttgaagctcaagtagatatttatttgcctaataaaatcaaattaatcatcgaagatgtcgatatggcagaagtttcaataacatcttctgttaatttaattgttgatgaaaattttatttccaggttttagc

SEQ ID NO: 305081 - DNA, 402 bp, Unknown
  Bacterial polypeptide expressing nucleotide sequence isolated from the Sargasso Sea
catgtcatcaaacgaaaaagattataaagagaccttactactgccaaagacaaattttccaatgagagccaacttacctgaaagagagaacgagtggctagaccgttgggaaaaattaaacgtatacaaaagactaagaaaggactctaaaaataggagggattttgtccttcacgacggcccaccatatgcaaatggaaatctgcatattggccatgctctaaacaagattctgaaagactttgtagtaaggagtcaacaaattttgggtaataacagtatttatgtcccaggctgggattgtcatggattacccattgaatggaaaattgaagagaattacagagaaagcggaaggtctaaagaagacatttccataaatatccttcgtaaagactgtag

SEQ ID NO: 305082 - DNA, 811 bp, Unknown
  Bacterial polypeptide expressing nucleotide sequence isolated from the Sargasso Sea
tatggctgacaataatttaaatcttcccaaaacatccttctctatgaaggcaaatctaccttctaaggaaccaaaaatattagaaacttgggacaaaataaaactgtacgaaagattacgaaaaaaatctgcgggcaaaaccaaatttgttcttcacgatggccccccttatgcaaatggacatatacatatgggaactgcgcttaataaaattttaaaagacattattacaaaatttcatcaaatggatgacaaagactcaatctatgttccaggctgggattgccacgggttaccaatagagtggaaaattgaggaacaatacaaaaaaagaaaaaagaataaagatcaaatacctatcaaagattttaggaaagaatgtagagaatttgcagagaagtggatagtaatccataaaaaggaatttaaaagattaggtgttattggcgattgggaaaattattattccacaatgagttatgatgcagaggcacaaattgtaagggaacttggaaaatttcttaaagaaggaagtctttacagaggctttaagccagtattatggtctacagttgaaaagacagcgctagcagatgcagaagtagaatataaagatcataaatcaaatactatttacgcaggttttgatgtaaaaaaatctgataaagattatctaaagaatacatctattattatttggacaacaacgccatggacaataccagcaaataaagctttagcttttaataaagatatcgattatgtagttttagatattggtaaaaataaaattgttattgctgaaaaataa

SEQ ID NO: 305083 - DNA, 910 bp, Unknown
  Bacterial polypeptide expressing nucleotide sequence isolated from the Sargasso Sea
caaaaagatttatttgaaaaatttgctcaaattattgaaaaagatggaatttcagcttgggataaattggatttaaaagattatatagatgatcatgaagaatatattaaaacttctgattcacttgatgtttggtttgattctggagtaactcattatgcagtttctgagaaaaaatttggtaacaaaattgttgcagatctttacttagaaggctcagatcagcataggggatggtttcaatcatcattattaacaagtatagcaatgaataactatgcaccatataagacagttctgactcatggatttgttgtagatgaacaaggaagaaaacaatcaaaatcactaggaaatgttgtatctcctcagaaagtgtgggatagcttaggagcagatattttaagactttgggtggcttctacggatttcagaagtgagatggtagcatctgatgaaatattaaagagaacttcagatcaatatagacgtatcaggaacacttttagatttattttgggtaacttgaatgattttactgataaaaataaagttaagttcgaagatcaagttgaattagataaatggatcattaatgaaacaaaaatcctacaaaaagaagttttaaaattatacgaatcatattcttaccataaggcaattcaaaaagtacataacttttgtgttaacgaattaggaggaatatacctggatattgtcaaagataggctttatacatgtaaaaatgattctttagcaagaagatcatgtcaaacaagcctagattttattttgaatattttggtaaggttgatagctcccattctctcctatacaacagaagaaatttggcaaacaagtgatagattgaattctcaggaggactcagtttttctttcaaattttgata

SEQ ID NO: 305084 - DNA, 622 bp, Unknown
  Bacterial polypeptide expressing nucleotide sequence isolated from the Sargasso Sea
accgattttcccatgcgcgcggggttgccacggcgcgaacccggatggctggaacgctgggagaaaataggggtttacggccggctgcgggcgcaggcgggacgggcgccgttcattctgcatgacgggccgccctatgccaacgggcatctgcatatcggtcacgcgctgaacaagacgatcaaggacatgatcgtgcggtcgcaccagatgatggggtatgacagccggtatgtccccggctgggattgtcacggtctgccgatcgagtggaagatcgaggaacaataccggcagaaaggcaaggacaaggacgaggtgccggttgtcgatttccgtcaggaatgccggcggttcgccgaggaatgggtcgacattcagcgcgaggaattcaagcgccttggcgttgccggaaattgggacgatccgtacctgaccatggattttcacgccgagcgggtgattgccgaggagttcatgaaattcctgatgaacggtactttgtaccaggggtcgaaaccggtgatgtggtcgccggttgaacagaccgcgctggccgaggccgaggtcgagtatcacgacaaggaaagctttacggtttgggtgaagtttcccattctca

SEQ ID NO: 305085 - DNA, 850 bp, Unknown
  Bacterial polypeptide expressing nucleotide sequence isolated from the Sargasso Sea
cggctcggcgctggccgaggccgaggtggagtatcaggacaagaaatccgatgccatcgacgttgccttccccatcgaagacgcagacaagctggccgccgccttcggcctgagcgagctgagcaaaccgaccgccatcgtcatctggaccaccacgccctggaccatcccggccaaccaggcgctcaatgtgcatccggaattcacctacgcgctggtcgataccggcgagcgcatcctgctgctggccgaggaactggtcgagtcctgcctgcagcgctacggtctgcagggccaggtgatcgccaccgcgccgggcgcggcgctggagctgatccgtttccgtcatccgttctacgagcgtttctcgccggtgtacctggccgaatacgtcgagctgggcgccggtaccggcatcgtccactcctcgccggcctatggtgaggacgacttccgtacctgcaaagcctacggcatgagcaacgacgacatcctcagcccggtgcagagcaatggcgtctacaccccggacctgccgttcttcggcggccagttcatctggaaggccaacccggccatcgtcgagaagctggccgaagtcggtgcgctgctcaagcaccagccgatccagcacagctacatgcattgctggcgccacaagaccccgctgatctaccgcgctaccgcgcagtggttcgtcggcatggacactcagcccaagcagggcggcaccctgcgtgagcgcgcgctggccgccatcgagcagacccagttcgtcccggcctggggtcaggcgcgtctgcacagcatgatcgccggccgcccggactggtgcatctcgcgtcagcgc

SEQ ID NO: 305086 - DNA, 519 bp, Unknown
  Bacterial polypeptide expressing nucleotide sequence isolated from the Sargasso Sea
aatgagcgactataaatttactttgaatttgccggaaactgagtttccgatgcgtggtaatttggcaaatcgcgagccagagatgttagagcgctggacgaaagacggtctgtatcagcagatccgtgatagccgaattggccgcacaccttttattttgcatgacggcccaccgtatgcgaacggcagtattcatattggtcactcagtcaacaaaattcttaaggacattattgttaagtcaaaaaccatgtctggttttgacgcgccttatgtgcctggttgggattgccacggtctgccaattgaactgaaagttgagcaaaaagtcggtaagcctggtcaaaaaatttctgcggccgaattccgtgaagaatgccgtaaatatgcggctgagcaagtcgatggtcaacgtgctgactttattcgtttaggcgtgctgggcgattggcaaaagccttatttaacgatggactttgctaccgaagccaatatcgtacgctctctatcaaaagtgat

SEQ ID NO: 305087 - DNA, 777 bp, Unknown
  Bacterial polypeptide expressing nucleotide sequence isolated from the Sargasso Sea
gatggaatataaaaatacaatttttttacccaaaacatcttttgagatgcgagcaaatcttcccttaaaggaaccaaaaattttagaaaattgggacaaacaaaatatttataaaaaattgagagaaaattcaaaaggtaaagaaaaatttgtattacatgatggtcccccgtatgcaaatgggcacattcatatgggaacagctcttaataaaatattaaaagacgtaatagttagaacgcaacaaatgactggtaaagattcaatttatgttccaggttgggactgtcatggtttgcccattgaatggaaaattgaagaagagtatagaaaaagaggaaaaaataaagatgatgttcctattgttcaattcaggaaagaatgcagggaatttgcagaaaaatggattaacattcaaaaaaaagaatttagaagactgggtgtagaaggtgattgggataatccttatctaacgatgtcaaatgaagccgaagcgcaaatagtaagagaattaggaaaatttttactcgatgaaagtttatataagggggcaagacctgttttatggtcagtagttgaaaaaactgcgttagcagatgctgaagtagaatatgaagaccatacttctaatactatttacgttaagtttaaagtcaaacaaagtaaaataaatgaacttgttgataacaatctacttatttggactactactccatggacaattcctggcaatagagccttagcttacagttcagaaatacaatatacattaataga

SEQ ID NO: 305088 - DNA, 902 bp, Unknown
  Bacterial polypeptide expressing nucleotide sequence isolated from the Sargasso Sea
aaagaattaaagacttttaaaggttcagaatttacaggaacagtttgtagccatcctttcgtcaaaatgaattttaattataatgttccaatgttggatgctcaatttgttaatttggaacaaggaacagggattgttcattgcgctccgagtcatggtccagatgattttaatttgtgtttaaaaaataatataccatcactttatacagttgataatgctggtgtttataccaaggaggtaccttattttacaaatacgcatgtatttaaagctgatccgatagttatagaaaaactaaaagagcaaaataaattacttaaatctgataaacttaatcatagttatcctcattcttggcgatcgaaggctccactaatttatagagcaacacctcaatggtttatttctatgcaaaaaaataaattaagagataaagctgttaaagctattaatgagactgtcttttatccgaataaaggtaaggaaagacttttatcaatgattgaaggaaggccagattggtgtgtttcaagacaaagagtttggggagtgccattgccaatttttattaacaaaaaaactaaaaagccattaaaagatcaaaaaattatagataggattgcctctatttatgaaaagcaaggctctgattgttggtttacagatgatgcaaaaatttttttaggtgatgactatgatgctaaagattatgaaaaacttaacgatatagttgaagtatggttcgatagcggctcaacacatagttttgttttagaaaaaagagaagatttaaaatggcctgcagacatgtatttagagggatctgatcaacatagggggtggtttcactcttctttgctagagtcgtgcggaacgagagggaaagcaccgtttaaaag

SEQ ID NO: 305089 - DNA, 952 bp, Unknown
  Bacterial polypeptide expressing nucleotide sequence isolated from the Sargasso Sea
aagttaagattttctagtaaaggaaaaacaaaatttgttcttcatgatggccctccatatgcaaatggagatatacacatgggaacagcacttaataaaattcttaaagatgtaatagtaaaatttcatcagatgaaaggtgaagattctgtttatgtgccaggttgggattgtcatggtttgccgattgaatggaaaattgaggaacaatataaaaaaaataaaaaaaataaaaatgaagtcccaataaacgaattcagaaaagaatgtagagatttcgcaaagaaatggattgaggtacataaaaagcaatttaaaagacttggagtagtaggtgattgggaaaattattattctacaatgagttttgatgctgaagctcaaatagttagagaacttggtaagtttttaaaagaaggaagtctttacagaggttacaaacctgttctttggtccacagtagaaaagacagcattggcagatgcagaagttgaatacatggatcataagtctgatacaatttatgcaacatttaatatcaaaaaatcaaaaaacgaaaaacttttaaatacccaaattataatttggactacaaccccatggactataccagctaatagagctttggcttacaatgaaaatttaaaatatgtaattattaaaatagaagatcaatctgattttaaagataaacaaataatagtagcagaagatttgttaaaatctttaatagaggagtgtaatatcaaaaagtttacaaaagttttaagtttttcaggaaaagaatttgaaggaacaatatgcagtcatccattttcaaaaattggatttgactatgatattccaatgctaagtgcaaattttgttacaactgagcaaggttcaggtattgtacattgtgcacctagccacggtcctgatgattttaatttgtgtttaaaaaataatataa

SEQ ID NO: 305090 - DNA, 952 bp, Unknown
  Bacterial polypeptide expressing nucleotide sequence isolated from the Sargasso Sea
ttagagtcttcaggcacaagaggtaaagcaccatatgaaagtgttttaacacatggattcgttgtagatggaagaggtcgtaaaatgtctaagtctctgggtaatgtaatttctccagatgaaattttaaaaaaatatggagtagatattttaagattatgggtagtcgcatcagattattatgatgatctaaaacttgataattcaattctacaagctcaggcagaatcctatagaagaataagaaatacttttcgttttttaatagggaatttaaatgattttaatgaacttgaagcaattgaggacaataattttccagaattagaacaatatcttcttcatagattatgggaagttgatcaagtggttcaaaaatgtgtagcaacatttaattttcatttaatgtttacaacacttttaaatttttgctctaatgatctttcagctttttattttgatataagaaaagacactatttattgtgatagtaaagagtcgattaagagaagatctacaagaacgcttttaaatataatttttaaccatttagtacgatggttcgctccgtctatttcatttacttctgaagaagcatggaaagctataggaaataaagatagtatacatttgcaagattttttacgttgtaaaaaagaatatgaaaacaatcaattaaatgaaaaatggagcttaattaaaaatattagaaaagttgccactggagcaattgaaaaaattagagaggaaaaaattattcgttcaagtctagaagctcatatagatatatatgtttctagagaaagtttaaaaaaaatagaaaaagtaaagtttgatgaaattacaattacctcgtcattttctttatatttaatcagcgaagaatcaaatggtttttctattgatgaaatttcagatgtaatcgtaaaagcatcaaagtctaaggagaaaa

SEQ ID NO: 305091 - DNA, 620 bp, Unknown
  Bacterial polypeptide expressing nucleotide sequence isolated from the Sargasso Sea
aatgggaaacttacacattcatatcctcattcttcggagatcaaaagcaccattggtgcatagagctacgccacaatggtttatctctatggaaagtcacaaattgagagatacagcacttaaagcaataaatgatacaactttttatcctagcaaaggaaaagagagaataaaatctatgattgagacaagaccagactggtgcgtgtctagacagagagtatggggcgttcctcttccaatatttatttcaaaaaaagatggaaaaattctagtagatgatgatgtttttgagaatattgctaacatttatgaaaaagaaggctctgattgttggtttgaagaaaattttcaaaggcttcttggagataaatacaaagcagaggactttaataagtcatcagatattgtggaagtgtggtttgacagtggatcaacacactcttttgttttagaaaaaagggaagacctaaaatggcctgcatcaatgtacttagagggttcagaccaacatagaggatggtttcattcttcattactagaatcttgcggaacaagaggcagagcgccttttgagagtattttatcgcatggatttgtggttgatggaaaaggactaa

SEQ ID NO: 305092 - DNA, 832 bp, Unknown
  Bacterial polypeptide expressing nucleotide sequence isolated from the Sargasso Sea
aactgcgcttgcagatgctgaggtagaatatcaaaaccataaatcagatacaatttatgcatcatttaaagttaaatcatctgactttaaagatttggttggaagtgaaatagttatttggacaacaactccatggacaataccagcaaataaagctttagcatataacgagtctcttgattatataatagtagaaataaatgacgaaggtgattttaaaaatagaaaaattgttatcgcagatgctctgctagaatcagttgttaaagagtgtgaattaaaaaattataaaaaaattcatacctttaaaggaaaagaatttaataatactatttgtagtcatccttttttaaatcttggttatgatcatgatatcccgatgctagaagctagatttgtaactatcgagcaaggaactggagtagttcactgcgcacctagtcatggacctgatgactttaatctttgtttgaataacggtattaaagcaatagaaacagtcgatggagatggaaaatatacaaacaatgtaaaattgtttgaaggaattcatatttttaaagcaaaccctattgtaattgaaaaactaaaagaacaaaaaaatttattattcaatggtgtgttggttcattcttatccacattcatggaggtctaaggcaccgcttgttcatagggccactccacaatggtttatctcaatggaaagtcataaattaagagataaagcattaaaggctattgatgaaacaactttttacccaagcaaaggtaaagaaagattaaaatcaatgatagaaacaaggcctgattggtgtgtttcaagacaaaga

SEQ ID NO: 305093 - DNA, 779 bp, Unknown
  Bacterial polypeptide expressing nucleotide sequence isolated from the Sargasso Sea
gatggtaggtacacgaaacacataccaatatttcgaaggaacccacatttttaaagcaaatgatattgttattgaaaagcttaaagaactaaaaagtcttttgaacaatggcaaactaacacattcttacccacattcctggagatctaaagctcctttagttcacagagctacaccccaatggtttatttcaatggaaagtcataatctaagagacaaagcacttaaagcaataaatgacactactttttatcccggtaaaggaaaagaaagaattaaagcaatgatcgaaaccaggccagattggtgtgtctctagacagagagtatggggagttccacttccaatatttatttcaaaaaaaaatggagaaactcttatcgatgaagaagtttttgagaatattgcaaaaatttatgaaaaagaaggctcagactgttggtttgatgataattttcagagattacttggagataaatacaaagcagaagattttgataagactagtgatattgtagaagtatggtttgatagtggatcgacgcattcatttgttttagaaaagcgagaagatttaaaatggccagcatcaatgtatctagaaggttcagatcagcatagaggatggtttcactcttcacttttggagtcttgcggaacaagagggagagcaccatttgaaagcattttatctcatggttttgttgttgatggaaaaggattaaaaatgtctaaatcaactggaaatgtaattgctccagaggatattttaaaaaaat

SEQ ID NO: 305094 - DNA, 901 bp, Unknown
  Bacterial polypeptide expressing nucleotide sequence isolated from the Sargasso Sea
tgcgcagactacgtaaccatggattcggggaccggttgcgtacatactgcgccggggcatgggttggatgattatctcaccggaaaggcaaacggtttggaaacttattgcccgctagatgatagcggctgttacttggatgatggtcagattccagcaaatctcgttggcgtttccgttttagaaaagaaggatggctgtcccgcgaataaggaagtgattgccatattagagcagtctggagatttgctggcattaagcgagcatcaccatcaatatcctcattgttggcgaagcaagaccccggtcgtctttcgggcaatggatcaatggtttgtttctcttgaccatgggagattgagagaagcttgcttggaggaagtcgagggtgttcgctttactcccgattggggaaaaaatcgaatcaaaggcttccttgaggctcgtccggattggtgtatttccaggcagcgttcttggggggtgcctattcctgtattttatgacgaagaaggtgagccccttttggatgggtccttgattcgaatgatcgcggaaaaagtggagaaggaaggcactgatctgtggttttctcaatccgctgcagaaattgtcgaaggatttgccctccccgacgaatggatgggaaaaactctagtcaaggggatggatactctggatgtttggatcgattcgggttgttcccatcgggccgttctcaaatgtcaggacgaattggaatggcctgccgatctctatctggaaggaagcgatcagcacaggggatggtttcaaagttctctttggacgagtatgatcgcttacgaaaaagcgccttatcgccatgtgcttactcatgggttcgtagtagatggtgatggccggaaaatatccaaaagcg

SEQ ID NO: 305095 - DNA, 849 bp, Unknown
  Bacterial polypeptide expressing nucleotide sequence isolated from the Sargasso Sea
ttggaaggaagtgatcagcatcgaggttggtttcacagttctttgctagaatctattgggacgagaggtaaagaaccttatcggtctgttcttacccatggatacgttgtggatggaaaaggtaagaagatgtccaagtctgccggtaatgttatggcaccacaaaaaattatagatcaatatggagcagaaattttacggttatgggttgcttcagaaaattatcgagaagatattcgggtttcaaatgagattttaaaacgattgaccgagtcctatagaaagatccgaaatacctttcgctatcttttgggcaaccttcatgattttgacccgaaaattgatcggttgccactggagtcattacctgagattgatcgttttattcttagccgattcaatattttaagagaaaaaattctttcggcttttgataattatgaatttcatactttttatcattctttttcaaacttttgtattgttgaactgagtgcattttatctagatatattgaaagatcgactctatacctatcctgaaaaatcgaaaggcagaagggcagggcaaacaacgcttcatatccttttgatggggatggtgcgtttaattgctcctattttaagctttacggcagaggaaatatggagataccttcctaaggaaagtgtaaaagaaaaaagtgttcatctatcgttatttccagaagaagaggtattaatatttgatgataagttgactcgtaattgggaattattggtccagcttaaaagtgaagtgagcaaggcctcagaaaaaagtcggagaaataaagttatcggccactctttggattccattgttaagtta

SEQ ID NO: 305096 - DNA, 814 bp, Unknown
  Bacterial polypeptide expressing nucleotide sequence isolated from the Sargasso Sea
agcctttatcgccatcctctgctggaccgcaccagtccggtggtagtaggcggcgactacatcaccacagaggcgggcaccggcctggttcacacggcaccgggccatggcgttgatgacttcaacaccggtcgcaagcacgatctacctgtgctatgcccagtagatgagggtggatggctcaccgaggaagccggccccttcgctgggctgaacgtgctcaaggacgccaattccgccatcatcgaagccctcagggaggctggagcgctgctaatggagcagcgatacgaacaccgctacccctatgactggcgtaccaagaagcccacaatcttccgtgccaccgagcagtggttcgcatcggttgaaggcttccgtgagcaggcgctcaaggcaatcgccgaggtggagtggctgccgtccagcggccgcaaccgcatcgaaggcatggtgcgcgaacgcggcgactggtgcatcagccggcaacgcacctggggtgtaccaatcccagtcttctatcaccgcagcagcggtgaagtgctcctcaacgccgacaccctccaacacattcaagggctgattgctgaacacggcgcggatgtctggtgggagaaagaggaagccgagctgttaccggcgagttaccgcgaccaagccgatcagtggcgcaaagggacggacacgatggatgtttggtttgattcaggctcctcctgggccggcgtcttgcaaggcctggcagccgatcaagacaaggatgatctgaagtatccggctgatctctacctcgagggctctgatcagcaccgcg

SEQ ID NO: 305097 - DNA, 786 bp, Unknown
  Bacterial polypeptide expressing nucleotide sequence isolated from the Sargasso Sea
aaacaaaagtcttgaaggttgtgaaataattatttggactacaactccatggactattccagccaacaaggccctagcctataataaagatattagctaccaaataattaagattggagatgatggtgatttcaaaagtaaaaaaattgttatagctcatgatttactagagacagttttgaaggaatgtgagattaaaaaattcgagaaactcgacaagttatcaggtaaagaatttaaaaatataatttgtagtcatcctatggaaaaagaaggttacacgcacgatattccaatgttagaagcgaattttgttacaacagagcagggttctggaatagttcattgcgcaccaagtcatggacctgatgattttaacttatgtattaataacggaattcaagcaattgaaacggtagataatgacgggaaatatacaaagaatattttaaatttcgaggggatacatattttcaaagcaaatcctattattattgaaagtttaaaaaaaaataaaagattactttctaatggaaaattaaaacatacttacccacattcttggagatcaaaagcgcctttaattcacagagcaacccctcagtggtttatatctatggaaagccacgaactcagaaaaaaagctttagttgcaattgataaaactcaattttatcctaacaaaggcaaggagagacttaaatcgatgatagaaactagaccagattggtgtgtttctagacagcgagtttggggagttccattacctatatttatatcaaaaaa

SEQ ID NO: 305098 - DNA, 856 bp, Unknown
  Bacterial polypeptide expressing nucleotide sequence isolated from the Sargasso Sea
ggtcatggtgatgatgattatattttaggaatagagaacaatgttgatattgttcagacagttcaagatgatggtaaatacaatcatcacgcagttggttttgagggagaacatatttataaagtagatcaaaaaattgctgataaacttaaggaattttcaaaattattatttaaaggtacacttcgtcatagctatccacattcttggagatctaaagctcctctaatttatagaaatacacctcagtggtttatttctatggaaaaaaataacttaagaaatattgctcttaaatcaatcgatgaaaccattttttatcctccacaagggcaaacaagacttagatcgatgattgaaacaagaccagattggtgcgtatctagacaaagggtatggggagtaccactaccattatttgtaaataaaaaaacaggtcagcctttaagagataaaaaaattattgatagaatagcagatatttatgaaaatgaaggaagcaatacatggtttacagaagatccccagagatttttaggtaatgattattctatagatgaatatgatcaagtaaaagatgtagtagaggtatggtttgatagtggatcaacccatgctttttgtctagaacaaagagaagatttgaaatggcctgcatcgatgtatttagagggcagtgatcaacacagaggttggtttcattcatcacttttagaatcttctggcacaagaggtaaggctccatatgaaagtgtcttaacacacggttttgttgtcgatggtcgaggccgtaaaatgtctaaatctcttggtaatgttatttctccagatggaaattttaaagaaatatggagtt

SEQ ID NO: 305099 - DNA, 598 bp, Unknown
  Bacterial polypeptide expressing nucleotide sequence isolated from the Sargasso Sea
atgactgctgaaccaatcgactacaaaaatactttaaatttacctaaaactgattttccaatgcgagcaggtttacctaatcgagaacctgcttggttggatagatgggaaaaaattggcatctataaaaaactgagacaaaaaaaatctcgtaagccatttattttgcatgatggcccaccctatgcaaacggcaaccttcatataggtcacgctctaaataaaattttgaaggatatggtagtaagaagccaacaaatgatgggtagtgacgctagatatgtaccaggttgggattgccacggattaccaatcgaatggaaaattgaagaaaaatatcgaaaaaaaggaagaaataaagacgacgttccagtagtagattttcgccaagaatgccgaaaatttgcagatggatggatagatattcagagagaagagtttaaacggttgggtattatcggaaactgggaaaacccatatcttacgatggatttcaaagccgaacgaacgatcgcacaagaatttatgaaatttttaatgaacggcaccctttaccgagggtccaaaccagtgatgtggtcacctgtagaaaaaacgg

SEQ ID NO: 305100 - DNA, 730 bp, Unknown
  Bacterial polypeptide expressing nucleotide sequence isolated from the Sargasso Sea
ttgtacaataaattaagactctcaagcaaaggcaaagaaaaatttgttttacatgatggtcctccttatgcaaatggagacattcatatgggtacagctttaaataaaattttgaaagatataattgtaaaattccaccaaatgaatggtgaggactctgtttatgttccaggatgggattgtcatggtttaccaatagagtggaaaatcgaagagcaatataaaaaaaataaaaaaaataaaaatgaagttccaatcaatgaatttagaaaagagtgtagagattttgctaagaagtggatatcagttcacaaaaaacaatttaaaagacttggtgtagttggggactgggaaaattattactctacaatgagttttgatgccgaagctcaaatagttagagaattagggaaatttttaaaggaaggcagtttatatagaggttataaaccagtgctttggtctactgtagaaaaaactgctttagcagatgctgaagttgaatatttggatcataaatcagatacaatttatacagcttttaaaataaaaaaatcaaataataaaaacttagttggtaaagaggtaataatttggaccactacaccttggactatacctgcaaatagagcattggcatataataaaaatcttaagtatacaattataaaaattgaagatgaaactatttttaagaataggcaaataattttagctgaagatttattaa

SEQ ID NO: 305101 - DNA, 769 bp, Unknown
  Bacterial polypeptide expressing nucleotide sequence isolated from the Sargasso Sea
aaaaaatgaaaaacttttaaatacccaaattataatttggacaacaaccccatggacaataccagctaatagagctttggcctacaatgaaaatttaaaatatgtaattattaaaatagaagatcaatctgattttaaagataaacaaataatagtagcagaagatttgttaaaatctttagtagaggattgtaatatcaaaaagtttacaaaagttttaagcttttcaggaaaagaatttgaaggagcaatgtgtagccatccattttcaaaaattggatttgactatgatattccaatgttaagtgcaaattttgttacgacagaacaaggttcgggtattgttcattgtgcacctagccatggtccagatgattttaatttgtgtttaaaaaataatataaaagcagaagaaacagtggatgatgatgggaaatatacgaaacatgttccaacttttgaaggtatacatatttttaaggcaaacaaaatagttatagaaaaactaaaagaacaaaaaaatttattatctagtggagaattaattcattcctatcctcattcttggcgttctaaagcacccttggttcatagagcaacaccccaatggtttatttcgatggaaagtcatggtttgagaaagaaagctttaaaatctatagatgaaactaatttttatccaaacaaaggaaaagaaagactaagatctatgattgaattgaggcctgattggtgtgtttcaagacaaagagtatggggagttcccatt

SEQ ID NO: 305102 - DNA, 913 bp, Unknown
  Bacterial polypeptide expressing nucleotide sequence isolated from the Sargasso Sea
atgtctaaagaaagtttacagcttcccaaaacagctttttcaatgaaagcaaatttaccaaataaagaaccagatataattaagcattgggaaaaagtcgatctttataaaaagttaaggaaaaaatctaaaggaaaagaaaagttcgttcttcacgatggaccaccatatgcaaatggtcatatacatatgggaactgctttaaataaaattttaaaagatatgataactaggtttcatcaaatggacggaaaagattctatttatgttccaggttgggattgtcatgggcttccaattgagtggaaaattgaagagcaatataaaaaaaagaaaaggaataaagatgaagtacctatcaaagattttagacaagagtgcagagagtttgctgaaagctggatcgatgttcacattaaagagttcaaaagattaggcgttgttggagattttgataattattattctacaatgagttatgaagcagaagctcagatagttcgagaattaggtaaatttcttctagatggaagtttgtatcagggtttcaagccagtcctttggtcgacagtagaaaaaactgcattagcagacgcagaagtagaatacatggatcacacgtccaacacaatatatgttggttttaaagttaaagaaacggataaagattttttaaaagataccagcataattatatggacaacaacaccatggacaatacctgcaaataaagctttagcctttaatagcaatattgattattcgatattagaaatagatagtctccaaaattttgaagaaaaaaaaattgttgttgcgactaatttagtaaaagaaattatcaatgcctgtgaaatcaaaagttataaagaattgaaaaaatttaaaggttcagaatttcaaaatacaattg

SEQ ID NO: 305103 - DNA, 859 bp, Unknown
  Bacterial polypeptide expressing nucleotide sequence isolated from the Sargasso Sea
gcaccttttaaaagcatattatcccatggctttgtagttgatggcaaaggtttaaaaatgtcaaagtctttaggaaatacaatttctccagacgaaattctaaaaaattttggtgctgatattttaagggtttgggttgctgcatcagattatggcgaagatccacgaatagataaaagtatattatctcagcacgcagaatcttatagaaaaataagaaacaccttcaggtttattctgggtaatttgaatgatgagtttaatagtcaaaattttgaacgtttgaaaataaacgagcttgaggagattgaaagatttattttacacagattattctctattgaccaatcatttagagaaaatttaaaaaattataattttcacaaactatataaagaattattaaatttttgtaatctagatctttcatctttttattttgatataaggaaagacgttctctattgcgacagcattcaatctataaaaagaaaaaattgtattgttgttttaaatataattttggagattttattaaaatggtttgcacctatactcgtatttacaactgaagaaatatataaattaataaataaagaagcttccataaaaagtattcatgagctcaatttttcaaaattaccgaagacttggaatgacccttctttaagtgataagtggacaaaactttttaaaattaaacaagacgcaaatattgcaatagaggaaaaaagatcaaaaaaagagataggttcgagtcttgaggcagaaataaagataactttaggagaccagaatttcaaattgctagaaaatctggatttagctgaatattttataacttcaaaagcacaaaaaa

SEQ ID NO: 305104 - DNA, 923 bp, Unknown
  Bacterial polypeptide expressing nucleotide sequence isolated from the Sargasso Sea
tcgccctacacaacaatggcctttgaagccgaagcaaagattgccgaagagctcggtaaaattttgatggatggcagcctttatcgtggtgccaaaccggtgatgtggtcgccagttgaaaagaccgcactcgccgaggcggaaattgaatatgaaaaccacagttcggtcacaatttatgcaaggttcccggtgcaaacaagtgctttggaaatgttgcgcgatgccagcattgtcatctggacaacaacgccgtggacaatgcccggcaaccgagccatcgcctatggtgatgatatcgcctatcgcatcatcgaggtgacagcggtcaaagatgatgtgcttgtgtgtaaaggtgacgtgctatgtctcgccgatgaattatgcgatgcggtggcagatgcgcttggtattgaggccatgagcgttcgtgcgacggtgaccggacatgaattggccggtacaattgccgcgcatcccatggccgccgatggctatgattttgacgtgccattgctggctggcagtcacgttaccacggaacagggtactggttttgtccacattgccccgggccatggtgtagaagattatgaattggcgcacttaaaacacggcatttccgtgccagaaaccgttggtgaagacggatatattttgccgcatcttccactttatggaggtatgcatgcgctgcgcgacaatgccaaaattgctgatatgatggccgcgcaccgtggtgtcattggcattggcaaattggttcactcttatccacattcgtggcggtcaaaggcaccggtgatttatcgcaacactgcgcaatggtttgtgtcgatggagtcacatgggctgcgtgatacagcactttatgaattggcaaaaacggcattttacccggcggctggacaaaagcggctgac

SEQ ID NO: 305105 - DNA, 586 bp, Unknown
  Bacterial polypeptide expressing nucleotide sequence isolated from the Sargasso Sea
gctgaaagttggttcactctctgatccatcgaaatttttaggagatgattccgatgaatatgaaaaaattactgataccttggacgtttggttcgattctggcgtgactcattattgttcaaattaccaaccaaaagattcaatagtccctgcggatttgtatttagaaggttctgatcaacacagaggttggtttcaatcttcactacttactggtctggcaattaataatgaatcgccttatcggacagcattaacgcatggatttgttgttgatgccgatggtagaaaaatgtctaaatctctcggcaatgtaatttcacctcaatctatatggaataaaaagggggcagatattttaagagcatggacagcatcaacagatttcagaaatgaaatgaatttttcagaagaatctcttgaaagaacaagcgatgcttatagaagaatcagaaatacgctgagatttttaatgggcaacctgaatgaatttaatttccaaagagataagataaatcctgagaattattcagaacttgataagtggattattatgaagggaatagagctccaagaagaagtaatc

SEQ ID NO: 305106 - DNA, 784 bp, Unknown
  Bacterial polypeptide expressing nucleotide sequence isolated from the Sargasso Sea
tcttttgtaatatggactacaactccatggacattaccatcaaatgttgctgtttgtataaatcctgatattcagtattcattaatatcaatgaatgaaaagtattatgttattgctagtgaaatggtagatcaatgtatggaaagatggggcactaaatgtaagaaaatatctagcgtcattggtaacaagctaaaggaagtagagcttttacaccctttcattaatagaaagtcaattcttcttcatggtaaccatgttacaactgagacaggaactggttgtgttcatacagctcctgcacatggtatggatgatcacataatctgtaaaaaaaataatttaagcactattaacgcacttaataataaagctttttttaaagatgagttagattttataaaaggccttccagccattaaggctgatccattgataattgaaaaattaaaagaatgcaatgcactcataaatgatgaagattaccatcattcatatccacactgctggaggcacaagactcctttaatttttacatcgacccctcaatggtttatttctatgaataagaataatttaatcaaagatgctttaggtgctgtaaaggatgttaattgggagccctcttggggtcttcaaagaatagagtctatgcttgatgaaagaccagattggtgcatatcaagacaaagaaattggggtgtgccaataactttagttgttcataaagaaactggagatattcatcctgaccaatcagaattatttgaaaaatttgctgtaa

SEQ ID NO: 305107 - DNA, 748 bp, Unknown
  Bacterial polypeptide expressing nucleotide sequence isolated from the Sargasso Sea
atgggtaaaagttctgtaaatcttccaaaaacatcattttcaatgagagcgaatcttcccctgaaagagcctgagcttattgattattggaacaaaatatcactttatgaaaagcttcgagaaaatagcaagggggatgagaaatttgtcttacatgatggtccaccttatgcaaatggtaatatacacatgggaactgctttaaataaaattttaaaagatattgttacaaagtttcatcaaatgaacggtaaagactctgtatatgttccaggatgggattgccatggtttaccaatcgaatggaaaattgaagaacaatacaagaagaataaaaaaaataagaatgatgtacctatagttgaatttagaaaagaatgtagagattttgcaaataaatggatcgatgtccataaaaaacaatttcaaagattaggtgtaataggagattggaaagattattattcgactatgagcttcaaagctgaagctcaaatagttagggagctagcgaaatttcttaaagagggcagcttgtacaaaggttataaacctgtcttatggtctactgtagaaaaaactgcgttagcagatgccgaagtagagtacatggatcatatttctgatactatatacacttcatttccaattaagaaatctacaaacaaaagcctcgaggattgtgaaataattatttggactactactccatggactataccagccaataaggcactagcttataaca

SEQ ID NO: 305108 - DNA, 637 bp, Unknown
  Bacterial polypeptide expressing nucleotide sequence isolated from the Sargasso Sea
tttggaaaaaagagaagatttaaaatggccagcatcaatgtatttggaggggtcagaccaacacagaggatggtttcattcttcattattagagtcttgcggaacaagaggtagggcaccttttgaatcaattttatcacatggttttgttgtagatggaaagggtttaaagatgtctaagtctctaggaaatgtaattgcaccagaagatattcttaaaaaatatggtgcagatattttgagagtttgggtggcttcatctaattattctgaagatttaagaattgattattctattttagatcaacatgcggactcatatagaaaaataagaaatacatttagatatttattaggaaacataaatgataaatttgaaatattagacctagaaaaattagatatagataaacttccagaattagagcaatttatgctacacaaaatttataacttaaataataattttgaaaaatatttcaaaaattatgattttcacaatctgtataaagagttattaaatttttgtactgttgatctttctgccttttattttgatataagaaaagacactctttattgtgatcccattgactcacaaaaaagaaaatcaactattattttattgaatataatt

SEQ ID NO: 305109 - DNA, 904 bp, Unknown
  Bacterial polypeptide expressing nucleotide sequence isolated from the Sargasso Sea
ttgaaagaaggaagcctttatagaggttataaacctgtcctttggtccacagttgaaaagaccgcattagccgatgcagaggttgaatatttagatcataaatcagatacaatttttgcggcttttaaagtaaaaaagtcaaatatagaaaagcttataggatctgaaattataatttggacaactactccttggaccataccagcaaatagagctctagcttataatgaaagcttaaattatgtaataattaaaattgatgacgattcagattttaaggaaagatgtatagttgtagctgaggacttactaaaatcaactttagaaagttgtaaaataaaaaaatataaggaaattatgaaatttcctggaaaaaattttaaaggtactatttgttcacatccattttttgatattggatatgactatgaaataccaatgttagaagctggatttgttactactgaacaaggctcaggaatagttcactgtgcaccaagtcatggtcctgatgattttaatctatgtttaaaaaataatattaaagcagaggaaacagttgatgatgatggaaaatatacaaaatacgttcctttatttagcggtacccatatttttaaagcaaataaaatagttatagaaaaacttaaagaacaaaaaaaattactcagtagtggagaactagtacattcatatccacattcttggagatcaaaggctccacttgtacaccgagctacaccacaatggtttatttcgatggaaagccacagtttgagaaaaaaagctctaaaagcaatagatgaaactgaattttatcctagcaaaggaaaagaaagattaaaatcaatgatagaacttagaccagattggtgtgtttctagacaaagagtatggggagtac

SEQ ID NO: 305110 - DNA, 334 bp, Unknown
  Bacterial polypeptide expressing nucleotide sequence isolated from the Sargasso Sea
tatgactgattataaagatactgtttatttacctaaaaccgatttttctatgagagcagggttgcctaaaaaggaaccacaaatattaaagttatgggaagaaactaaattatataagaaactcagagatcaaagaaaaaattccaagccatttattcttcatgatgggcctccatatgcaaacggcaatttgcacataggtcatgctttaaataaaattattaaagatgttattaacaggtctcaatcaatgcttggcaaaaatgctaactatgtacccggttgggattgtcatggcttacccattgaatggaaaattgaagaaaattataga

SEQ ID NO: 305111 - DNA, 630 bp, Unknown
  Bacterial polypeptide expressing nucleotide sequence isolated from the Sargasso Sea
tatgaaagattataaagacactttgaatctgccaggtacgtcttttccgatgaaggcgaatctgcccaatagagaacctgaaattcttaaattttgggatgagattgatttgtatagaaaaatcagaaaaaaaagaaagggcgagaaaccattcctacttcttgatggtcctccttatgccaacggaaaaattcatataggccatgctctcaataagatcttgaaagatttcattattaaatcaaaaactttgtttgggcatgatgcaccttatcttcctggctgggattgtcatggcttaccgattgagcatcaggtagaaaagaagaaagggaaggttggacccaagctgactgcaagagaatttagagattactgccgtgaatatgcattgaaacaagttgaagagcaaaaagaagacttcattcgtctaggtgttcctggagagtggaacaatccatacatgaccctagataaaagatatgaagcagagcagattcgtgcatttgctgaaatatatggaaacaatcatgtcacatttggacataaaccagtgcactggtgtttagattgtcagtctgctttggctgaggcagaagtcgagtatatggataaagtttctacatcagt

SEQ ID NO: 305112 - DNA, 880 bp, Unknown
  Bacterial polypeptide expressing nucleotide sequence isolated from the Sargasso Sea
atttttgtaaataaaaagtctaatgaaattttaatagacgatggagtatttgaaaatattgctaatatttatgagaaagaaggttctgattgttggttttcagatgaccctcaaaaatttttaggtagtaaatataaagcggaagattttgaaaagctcagcgatattgttgaagtttggtttgacagtggatcaacccattcttttgtattagaaaagagaaaagaccttaaatggcctgcatcaatgtatttagagggttctgatcaacataggggttggtttcattcctctttgttagagtcgtgtggaacaagaggtaaagcacctttcgagtctatattatctcatgggtttgttgtggatggaaaaggtcttaaaatgtcaaaatctcttgggaatgtaattgcacctgaggatattttgaaaaaatatggtgccgatattttaagaatttgggttgccgcatcaaattatgcggaagatttaagaatagattattctattttggaccagcattctgaatcttatcgtaaaattagaaatacatttagatatttattaggaaatataaatgacaaatatgaggatgttaatttagataaaattgatgtcgaaagcttgccagagttagagaaatttatgttgagtaagattcattctctcaacaacaaatttgaaaattattttaaaaaatatgattttcacaatctttataaagaattgttgaatttttgcacaacagatttgtcagcattctattttgatataagaaaggacactttatattgtgatccaattaattctgagaaaagaaaatcttgtgttacaattttgaatgttttattaaaatctttactcaggatggttcgctccaata

SEQ ID NO: 305113 - DNA, 720 bp, Unknown
  Bacterial polypeptide expressing nucleotide sequence isolated from the Sargasso Sea
aactgctcttgcagaagctgaaattgaataccatgaccatactagcacaactatttttgcaaagtttccaattaaacaagctagtaatgatagtttaataaattgcaatgttgtgatttggacaactactccgtggactatgccaggaaatagggcagtagcatatggaaaacattttgaatattctttgattcaagtaaaatcagtatcagaagattcattagctattgttaatgacaaaattataatagcaagtgatttaatagaaacttttgtaagcgaaacaaaagttatagattttgaacttgtatcaaaaatttcattaaaagactttgaaggactagttttaagacatcctttgtatgagttgggttatgattttgaagttcctttgcttgaagctgactttgtcactaccgaacaagggacaggttttgttcatattgctccaggtcatggttctgatgattttgacttaggagttaaaaattctttgccagtaattgaaactgttgaagacgatggttacttgaaaaataatcttccattatttggagggatgcatgttctcagagataatgaaaaaattgcagatttgatggtggaacataaagcactgataggaagaggtagtctagtccactcttatcctcatagctggcgttcgaaggctccattaatttttagaactaccccacaatggtttatatcaatggaaaa

SEQ ID NO: 305114 - DNA, 920 bp, Unknown
  Bacterial polypeptide expressing nucleotide sequence isolated from the Sargasso Sea
ggttcgacacataccttttgtattagaaaaaagaagtgatttaaaatggcctgcctcaatgtatttagagggatcagatcaacataggggatggttccattcatcattgctacaatcttgcggaactagaggaagagcaccttttgattcaattttatctcatggatttgtagttgatggaaaaggtttaaaaatgtctaagtccctggggaatgcgatttctcctgaagatattttaaaaaaatatggagccgatatcctaagagtatgggttacagcatctaattatgcggaagatttaagaatagattattctatattagaacaacatgcagaagcctatagaaaaattagaaatacatttagatttttgctcggaaatctaaacgatgtcttttccgagactgactttgaaaaagtaaaattagaagagttaccagagttagaaagatatatgttacataaaatttatttattaagtgaaaaatttcaagaaaattttaaaacttacacatttcataatttatataaagagttattaaatttctgtacggtagacctttcagctttttattttgatataagaaaagactctctttattgcgattcaaaaaaatcaaataaaagaaaagaatgtataaaactattgaatataattcttcaaacactattaagctggtttgctccaattttatcttttacaactgaggaaatttatcaattagttaacaaagatgataacagcagcattcatctaaagaaatttgtaaaaattccaaaatcatggaaaaatgaaaagctcaacgaaagatggaaagatttgattaaaataagagacatttcaaatataagtattgaaggcaaaagagctcaaaaaattattggatcaagtttggaagcaaaaataaatattaaattaa

SEQ ID NO: 305115 - DNA, 944 bp, Unknown
  Bacterial polypeptide expressing nucleotide sequence isolated from the Sargasso Sea
ctttacgagagacttagaaaaaaatcacagggtaaaacaaagttcgttcttcatgatggacctccctatgctaacggtcatatacatatgggaactgcactaaacaaaattttgaaagatatcattactaaatttcatcaaatgaatgataaagattctatttatgtcccaggatgggattgtcatggtttacccatagaatggaaaattgaggaacaatataaaaaaataaaaaaaaataaggatgaagtacccataaaggattttagaaaagaatgcagggaatttgcagaaaagtggattgtaattcataaaaaagaatttaaaaggttgggtgtaatcggtgattgggaaaattattattctactatgagtttcgatgccgaggctcaaatagttagagagctaggtaaatttttaaaggaaggtagtctttatagaggcttcaaaccagtcttatggtcaacagtagagaaaacagctttagcagatgccgaggtagaatacaaagatcacaagtcaaacactatatatgctgcatttaaagtaaaaaaaactgacaaagattatttaaaaaatacttctgttattatttggactactacaccttggacgattcccgcaaacaaagcattagcatacaataaagacattaattatgtcgttttagatattaataaaaataaaattattgtagcagaaaaattaattaaatcggtaattgaaagttgtgaattaggaaattatcaaatcttaaagaattttaaaggaagtgaattcaagaatactttatgttctcacccatttaaaaatctaggttatgaacatgatgtaccaatgctagaggcaaattttgtaaccctagaacaaggtaccggaattgttcactgcgctcctagtcatggacctgatgattttaatttgtgtttgaaacatggaatgaa

SEQ ID NO: 305116 - DNA, 908 bp, Unknown
  Bacterial polypeptide expressing nucleotide sequence isolated from the Sargasso Sea
aatgaataagacacaaataaatcttcctagaacatcgttttccatgaaggctaatttaccaactagagagcctgaaatcctagaattttgggacaagatcaatctttataatgaactaagaaaatcaagaaaaggattagaaaaatttgttcttcatgatggtccaccatatgcaaatggaaatattcatatgggaaccgctttaaataaaatcctgaaagatattattgtaaaatttcatcaaatggatggtaaagactcagtctacgtgcccggctgggattgccatggacttccaattgaatggaaaatagaagaacaatacaaaaaaaataaaaaaaataaaaatgaagttcctatagttgaatttagaaaagaatgtaggtctttcgctgaaaagtggattaaaattcataaagaccaatttaaaaggcttggagtagttggggattgggataattattattctactatgagctttgatgctgaggcacaaattgttagggaacttggaaaatttttgaaagagggaagtctttacagaggatttaaacccgttttgtggtcaactgtagagaaaactgctttagcagatgccgaagtagaatatcaagaccataaatccgacactatatatacatgttttccagtcaagctttctaatattcaagagcttaagggaagcaatattgttatttggacaacaacaccctggacaataccagctaataaagctttagcttacaatgagagtcttgattacttattggttcagattaatgacgatggagaatttaaaagtaaaaaaatcgttgtggcagaatctttaatagaaatcagtataaaaagattgtgggatttcagatttacagaatttaaaaaatttaaaggtaaacaattagaaatac

SEQ ID NO: 305117 - DNA, 788 bp, Unknown
  Bacterial polypeptide expressing nucleotide sequence isolated from the Sargasso Sea
aatgagcaaagaacatataaaccttcctaaaacagctttttcaatgaaagcaagtttgccaacaaaagaaccaggaatcattgaatattggcaaaagataaatttatacgaaaaacttagagaaaaaagcaaaggtaaagaaaagtttatattacacgatggaccgccatatgcgaacggtaatattcatatgggaactgctttaaataaaatattaaaagatatcattacaaaatttcaccaaatggacggaaaggattccgtatacgttccaggttgggattgtcatggtcttcctatcgaatggaaaattgaggaacagtataaaaaaaataaaaaaaataaaaacgatgtaccaattgttgatttcagaaaagaatgcagagaatttgctgataaatggattggtgtccacaaagatcaatttaaaaggttaggtgtaattggagactgggaaaattattattcaacgatgagcttcgatgctgaagctcaaattgtaagagagcttggaaagtttcttaaagaaggaagtttgtatagaggatataaacctgtgttgtggtctacagttgagaaaacagctttagctgatgcagaagtagagtacatggattatgtttccgatacaatatattctgcattccctataaaaaaaacaaatattaaaggaattgaaggctcaaatataattatatggacaacaacaccttggactatacctgctaataaagcgttagcctacaattcaagcttaacctatttagttgtaagaattaatgatgagg

SEQ ID NO: 305118 - DNA, 910 bp, Unknown
  Bacterial polypeptide expressing nucleotide sequence isolated from the Sargasso Sea
aatgattttatttcatttggggtgtggaatggattgggaaaatgcatataaaacagttaccgcagagtacatggaagctgcatggtggggattttctcaagcgcataaaagaggactggttgagcgaggaaaaagatctataagtcaatgtccaagatgtgaaacttctattgcaaaaaatgaaattgagtatcaccaagtgaaagatccttctatttatgttaaatttgaattagaagatagagaagagtttctagttatttggaccaccactccatggacccttccagcaaacacgtttgtagctgtaaatgaagagtttacatatcaaaaggttgtggctgtgaaagggggtgtggaagaaaaactttggatagaaaaatcactcgtggatgccgtagttgggaagggtaaatatgatagttgggagatagagcaagaattgaaggggaaagatatgatagagtggaagtataaacacccgctgcgccaggaagttcccaatcatgtaaagggagatggatcactgagggtttactcggcggattttgtggaggtagacagaacgggtttggttcactctgccccaggtcacggggaggatgattttcgtgcgggaaaagagagaggtttggaattgttttgtccagttggtacggatgggatatatacgatagatgcaggaaaatatgagggaaaatttgttaaagatacaaacgaagaaattattgaggacttgaagaattcaggattgttacttgcagaagagaaatacactcatgattatggtaagtgttggcgttgtaatactaacataattcagattgttacggatcaatggttcatcaaaataacagaaataaaagaagaacttattgaaaatataaccaaatcaagttggtatccagaa

SEQ ID NO: 305119 - DNA, 775 bp, Unknown
  Bacterial polypeptide expressing nucleotide sequence isolated from the Sargasso Sea
agagtttgaacgattaggtgtctgtggcgattggaaaaaaccatattcaactatgagatatgaatctgaagcttctataatggcagaaattggaaaatttctcatgaatgggggtctctaccgtggcgtgaaaccagtcatgtggtcttcagttgaaaagactgctttggctgaggcagaaattgaatatcatgatcacaaaagtacaaccatttatgcaagattttctgtaaagaaaaccaaaattgaacaaataaaagatgcagaaattattatttggaccacaaccccatggacgatgcctggtaatagggccgtggcttataataaaaaaataaaatattctttattggtcattaatgaaattgcagatttatctctggctagggttaatgataaagtggttgttgctaaagagctaatagatgattttataaaagaaaataaaattgttgattttaataatgtttgtaactttctaggcgaggatctaaagggcacaattctctctcatcctttaagaggatatggttatgatcatgaagttccgcttcttgaaggacattttgtcacaacggaacaaggtactggttttgttcatatcgcgccaggacacggagctgatgattttgagttggggatggcaaattctttgcccgttccagaaactgttgaagataatggatttttaaaagataacctccccatatttggtggattgcatgtcttaagagataatgaagaaatggccgaaaggatgtcagaaaaaggcgcc

SEQ ID NO: 305120 - DNA, 810 bp, Unknown
  Bacterial polypeptide expressing nucleotide sequence isolated from the Sargasso Sea
gtttgttgtggatggtaaaggacttaaaatgtcaaaatctttaggaaatcatatattaccagaagatatattgaaaaaatatggagctgacatattaagaatttgggtagcatcatctaactatgcagaggatcttagggttgattactcaatattagatcagcatgcagagtcatatagaaaaatcagaaacactttcaggtttttacttggaaatattaaagataattttgaagaatataatttcgaaaaattgaatatagataatttaccagatcttgaaaaatatatattacaccgattatttataattaatgagaattttcattataactttaagatatacaattttcatattttatataaagaattattaaatttttgcacagtagaattgtctgcattttatttcgatataaggaaagatcttctttattgtgatccaattgattcaaaaaaaagatctgattgcattattgttttaaatataattctacaatgtttattaaagtggttcgcacccatattatcttttacaacagaagaaatttatacattattgaatgatggagaaaaagataaaagtattcatttaaaagattttgttaaaattcctaaaaattggaaaaatgaaaaattaaatttagattgggaaaaaattaaaaaaattagagacgaagcaaatattagtatagagaatcaaagatcaaataaaattataggatctagtcttgaagctaatataagtataaaacttggaaatgaattttatgaaattgcaaataaaaatgatttttcagaaatttgcat

SEQ ID NO: 305121 - DNA, 842 bp, Unknown
  Bacterial polypeptide expressing nucleotide sequence isolated from the Sargasso Sea
aactgcattttccatgaaagctaatttaccaattagagagcccaaaattttagaattatggaaaaaactaaacctttatgaagaattaagaaattcaagaaagggtgcagaaaaatttgtgttacatgatggtccgccatatgcaaatggtaatattcacatggggacagctcttaataaaattcttaaagacataataataaaatttcatcaaatggatggaaaagattctgtttatgttcctggttgggactgccatggacttccaattgaatggaaaattgaagaacaatacaaaaaaaataaaaaaaacaaaaatgaagttccaattgttgaatttagaaaagaatgtagatcttttgcagaaaaatggatagaaattcataaagagcaatttaaaagattaggtgttgttggagattgggaaaattattattcaacaatgagctttgatgcagaggctcaaatagtaagagagttgggcaaattcttaaaagaaggaagtctttatagaggatataaacccgtattatggtctactgtagaaaaaacggctttggctgatgcagaagttgaatatcaagatcataaatcagataccatatacgcctgctttccggttaaatcgtcagatattaaagaaatagtagggagcgacatagttatttggacaactactccatggacaataccagcaaataaggcattagcttataatgaaagtttaaactatctattaatagaaataattgatgatgttgaatttaaaaataaaagaattgtaatagctgaagcacttttagattctgttattaaagactgtgggaataaagaattataag

SEQ ID NO: 305122 - DNA, 810 bp, Unknown
  Bacterial polypeptide expressing nucleotide sequence isolated from the Sargasso Sea
tatgtcaaaaaaatcaaatgaagttttagtcgatgaagaagttactgaaaatattgcaaatatatttgagaaagagggagccgactgttggtttgaaggagatgctcaaagatttttaggcaaaaaatataaaattgaggattatgaaaaaatgactgatattgttgaggtttggtttgatagtggctctactcatgcttatgttcttgaaaaaagagaagatttaaaatggcctgcctccatgtatcttgagggttcagatcaacacagaggatggtttcattcatcattattagagtcttgtggaacgagaggtagggctccgtttgaatctatattgtcccacggatttgttgtagatggaaaaggtttaaaaatgtcaaaatctcttgggaatattattgcaccagaagatattttaaaaaagtatggagctgatattctaaggatttgggttgcggcttctgattatgctgaggatttaagaatagattattcaattttagaacagcatgcagaatcttacagaaaaattagaaacacttttagatatatccttggaaatttaaatgacaaatttgaaaaagttgatcttgaaaaaattaatataaataattttccagagttagaacagtatatgttgcataaaatttataatcttaacattttatttgaaaaaaattttgaaaaatataattttcatactatctataaggaaataataaatttttgtacatctgatttatcagctttttattttgatataagaaaagatattttatattgtgattctctagagagtaaaaaaag

SEQ ID NO: 305123 - DNA, 862 bp, Unknown
  Bacterial polypeptide expressing nucleotide sequence isolated from the Sargasso Sea
ccaggaaaagaatttgaaggaacaatatgcagtcatccattttcaaaaattggatttgattatgatattccaatgctaagtgcaaattttgttacaacagaacaaggctcaggtattgtccattgcgcacccagccatggtcctgatgattttaatttgtgtttaaaaaataatataaaagctgaagaaaccgtagatgatgatgggaaatatacaaaacatgttccaacttttgaaggtatacatatttttaaggctaacaaaatagttatagaaaaactaaaagaacaaaaaaatttattatctagtggggaattaattcattcttatcctcattcttggcgctcaaaagcacccttggttcatagagctacaccccaatggtttatttcgatggaaagccatggtttgagaaagaaagctttaaaatctatagatgaaactaatttttatccaaataaaggaaaagaaagactaagatcgatgattgaattgaggcctgattggtgtgtttcaagacaaagagtatggggagttcctattcctgtttttatgtcaaaaaaatcaaatgaagttttagtcgacgatgaagttaatgaaaatattgcaaatatatttgagaaagagggtgctgactgttggtttgaaggagacgctcaaagatttttaggcaaaaaatataaaattgaggattatgaaaaaatgactgatatcgttgaagtttggtttgatagtggctctactcatgcctatgttcttgaaaaaagagaagatttaaaatggcctgcttctatgtatcttgaaggatcagatcaacaccgaggatggtttcactcatcattattagagtcttgtgaacaag

SEQ ID NO: 305124 - DNA, 834 bp, Unknown
  Bacterial polypeptide expressing nucleotide sequence isolated from the Sargasso Sea
gacaaaattaaactgtacgaaagattacgaaaaaaaatctgcgggcaaaaccaagtttgttcttcacgatggacccccttatgcaaatggacatatacatatgggaacagcgcttaataaaattttgaaagatattattacaaaatttcatcaaatggatgacaaagactcaatctatgttccaggctgggattgccatggattgccaatagagtggaaaatcgaggaacaatacaaaaaaagaaaaaagaataaagatgaaatacctattaaagattttaggaaagagtgtagagaattcgcagagaagtggattgtaatccataaaaaagaatttaaaagattaggcgtcattggagattgggaaaattattattccacaatgagttatgatgccgaggcacagattgtaagagaacttggaaaatttcttaaagaaggaagtctttatagaggattcaaacctgttttatggtcaacagttgaaaagacagcgctagcagatgcagaagtagaatataaagatcataaatcaaatactatttacgcaggatttgatgtaaaaaaatctgataaagattatctaaagaatacatctattattatttggactacaacgccatggacaataccagcaaataaagctttagcttataataaagatattgattatgtagttttagatattggtaaaaataaaattgttgttgctgaaaaattaattaaatcagttatcgaaaattgtaatctggggaaatacaaaattttaaaaacttttaaaggaatcgaattcaagaatactttgtgttctcatccatttaaaaatttaggtta

SEQ ID NO: 305125 - DNA, 937 bp, Unknown
  Bacterial polypeptide expressing nucleotide sequence isolated from the Sargasso Sea
ttctcttttggagtcttgtggaaaagagatcgagcaccttttgagtctattctttcccatggctttgtagttgatggcaaaggtttaaaaatgtcaaaatctttgggcaacgtaattgcacctgaagatattcttaaaaaatatggagctgacatacttagaatttgggttgcttcttcaaattatgctgaagatcttcgaatagattattcaatattagatcagcatgctgagtcttatagaaaaattagaaatacgtttagatatttacttggaaatcttaatgacaattttgaaaaaataaatttagaaacaattaaagttgagaatttacctgaattagagcagtttatgcttcataaaatttataatttgaattttaaatttaacaaatatttcaaagattatgattttcataatctttataaagaattattaaacttttgtactgtggatctatcagctttttattttgatataagaaaagatactttgtattgtgatccaataaattctgaaaggagaaaatctacacttatattgttaaatgtaatacttaactctttaattagatggtttgcaccaatcttatcttttacaactgaggaaatttaccaacttatttcaaagaacaaaaaaagtattcatcttgaaaaatttttaaattttcctgaaaaatttaaaaattctcaacttaatttaaaatgggaaaaattaatcaaaataagagatatctgtaatcttagtattgaacaaaaacgagctagtaaagatatcggatctagtttagaggcagcattaattgtaaaattaaataaagataatttagaaatcgcaaaaaatattgatctttcagaattatgcattacttcttcggtcaaagttgaaaaaatagaagataatgaaattttgggtgaaaccaaaaaagccaaaggca

SEQ ID NO: 305126 - DNA, 882 bp, Unknown
  Bacterial polypeptide expressing nucleotide sequence isolated from the Sargasso Sea
tatgagcaaagatcagataaatttacctaaaacatcgttttctatgaaagcgaatttgcctaataaagaacctgatttaattaaatattgggatgaaattggactttatgaaaaattaagaaaaaataccaagggtaaagaaaagtttgttttacatgatggccctccttacgcaaatgggaatatacatatgggtacagctttaaataaaattcttaaagatattattacaaagtttcatcaaatggatggaaaagactcagtttatgttcctggctgggattgccatggtttaccaatagagtggaaaattgaagagcaatacaaaaaaaagaaaaaaaataaaaatgatattccaattgttgaatttagaaaagaatgtagagaattcgcaagtaaatggatcttaattcataaggagcaatttaaaaggctaggagttgtgggagattgggaaaattattattccacaatgagctatgacgcagaagcacaaattgtaagagaattgggtaagtttcttaaagagggaagtttatataaggggtataaaccagtgctatggtctactgttgaaaaaacagctttgtcggatgctgaagttgaatatatggatcatacatctgatacaatttatgtttctttcaaagtaaaaaaaaccagttttcaagaacttaaaaatactgaaattataatttggaccaccacaccatggactattcctgcaaataaagctttggcttataatgaaaatttaaaatatttaataatcaaaattaaagatgatagcgatttcaaagacagaaaaatagtagtagccaaggaactacttcaatcgatgattgacgaatgtaaattagaaaaattcgaaattttaaatga

SEQ ID NO: 305127 - DNA, 667 bp, Unknown
  Bacterial polypeptide expressing nucleotide sequence isolated from the Sargasso Sea
tcataaattaagagataaagctcttaaagcaattaatgaaacaagtttttatcctgctaaaggtaaagaaagattaaattctatgattgaaacaagacctgactggtgcgtttctagacagagagtttggggtgttcctcttccaatttttataaataaaaaaacaaaagaaattttactcgatgatgaagtaaatgaaaatattgcaagtatttatgaaaaacaaggttcagattgctggttttcagatgatcctcaaaaatttttaggtgataaataccaagctgctgattttcaaaaactaagcgatatcgttgaggtttggtttgatagtggatctactcattcatttgttttagaaaaaaggaaagatttaaaatggcctgcttctatgtatttagagggatcagatcagcacagaggttggtttcattcatcactacttgagtcttgtgggacaagagggaaagcaccatttgaatctatactttctcatggatttgtagttgacggtaaaggtttaaaaatgtctaaatcgcttggaaatgtaattgctcctgaggatattctaaaaaaatatggtgcagacattttaagaatttgggtagcgtcatcaaattatgctgaagatttaagaatagactattcaatattagatcaacatgct

SEQ ID NO: 305128 - DNA, 934 bp, Unknown
  Bacterial polypeptide expressing nucleotide sequence isolated from the Sargasso Sea
gattacgtagttttggatattggtaaaaataaaattgttattgctgaaaagttgattaaatcagttatcgaaagttgtgatttagaaaatcataaagttttgaaaacttttaaaggaagcgaattcaagaatactttatgttctcatccatttaaaaatttaggttatgagcatgatgtgccaatgttagacgccaattttgttactttagaccagggcacaggaattgttcactgcgcacctagccatggaccagacgattttaatttatgtttaaaacacggaatgaaagcaatcgaaacagtcaataatgacggtctttatacaaaaaatataccaatctttgagggaacccatgtatttaaagcagatgaaattattataaaaaatttaagagagcaaaataatcttctaggaactggtagcttgttacacagctatcctcattcatggaggtcaaaagcacctttagttcatagggcaacaccacagtggtttatatcaatggagagtcataaacttagaaaaaaggcgatcgactcaattgataagacaatattttacccagaaaaaggtaaggccagaattcgatctatgatcgaaacaagacctgactggtgtatttcaagacagcgttcttggggggttcctttaccgatttttattgataaaaaaaacaatgaacctttaagagatcttgaggtaattgaaaatattgcaaagatttatgagcaagagggatcagactgttggttctatgatgatccacaaaggtttcttggaaaaaaatataataaagaaaattacataaaatcaaatgatatagtagaagtttggtttgatagtggatcaacacattcatttgttttggaaaaaagaaaagatttaaaatggccggcatcaatgtatttagaaggttctgaccaacacagag

SEQ ID NO: 305129 - DNA, 859 bp, Unknown
  Bacterial polypeptide expressing nucleotide sequence isolated from the Sargasso Sea
ggaagccctacgcaatggagcgcttcatatgggtcatgcactgaataaagttttaaaagacataataaataagtacaaaactttaaaaggatttagagtacattacgttcctgggtgggattgtcatggactacctattgaattaaaagtgcttcagaatttaaaatctgatgaaaggaagaatcttgatactttgagtctaagaaaaaaagcaacagactatgcatacatacaaataaacaatcaaatggagggttttaaaaggtggggtatatggggcgattgggataacccatacttaaccctcaaaaaaagttatgaatctgctcagattggagtatttgggaaaatgtttttaaatggatatatttatcgaggacttaaacctgttcattggagccctagttcaaggactgccctcgcagaagcagaattagaatatcctgaagaacattattcaaaaagtatttatgtttcgttgaaaattactaaactatctgacgaaattcttttgaaattctgtaaagagaatccaaatttcaaaaaggatttttttcttatgaattcttatataactatttggactactacgccttggacaatacctgcaaatgaagcagttgcagtaaatccgaaaattaattacgtttttgcaattgatgaagatagaagaatatacctttttgcaaaagaattatcttctgaaattagtaataaatttaataaagattttaagacccttttagatcttaaagggtcttccttggaagatattgaaatatcacatcctactaaaaataaaaattgtagagttgtgattgggggagactatatcactactgaatcaggtactggaatt

SEQ ID NO: 305130 - DNA, 925 bp, Unknown
  Bacterial polypeptide expressing nucleotide sequence isolated from the Sargasso Sea
atattaggcgataagtacaatccagatgaatgggagaaaattgatgacattcttgatgtgtggtttgattcaggatcaacacaagcttttgttcttgaaggcgatgaaggaataggttttcctgcagatttgtacttagaaggatcagatcagcatcgaggctggttccagtcttctttacttgttggttgcggaacaaggggtaaagctccatttaagcaagttttaactcatggttttgttgtcgataaggacggaaaaaaagaatctaagtcccttgggaatgtaactaaaccagaagatttaataaatcagtatggtgctgatgttatacgtttgtgggttgtgtcttcagattacacagatgatctgagagttggtcaggatataatgaaagctaatgttgaatcttatagaaaaattcgaaatacatttcgttttttacttggaaatctgaataacttttctcaagatgagatagtggattatgaagaaatgcctgagttagagaaatacattcttcataagctttatttgatagatttagaagtaagaaaggcatatgaaaattatgatttaaagtctgtatttcagacattattaaatttttctaatcttgatttatcttctttttattttgatattaggaaagacactctttattgcgacagcccaaaaagtaataatagaaaatcaactagaacagttcttgatttgctttttaattatttagttacatggtttgccccaattttgtgttttacgactgaggaagttagaagatcgaggttcccagaaaaaaataactccgtacatgaaatgcaatttttagcgactaaagatatatggaataatagtaaattatttgaaaaatgggaaaatattcgatcaataagaaaagtagtaactggagcaattgagcttg

SEQ ID NO: 305131 - DNA, 846 bp, Unknown
  Bacterial polypeptide expressing nucleotide sequence isolated from the Sargasso Sea
actcgaatcgtgcgggacaagaggaagagccccatttgagtcaattttatctcatggttttgttgttgatggaaaaggtttaaaaatgtctaaatcacttgggaatgtgattgctccagaagatattttaaaaaaatatggagctgatattttaagaatttgggtggcatcttctaactacgctgaagatttaagaattgatcactctattttagatcagcacgctgagtcttatagaaaaatcagaaatacatttagatacttactaggtaatctaaatgataattttgaaaaaattgatctacaaaaaataaatttatctgaattaccagaacttgagaaattcatgcttcataaaatctatgtgttaaactcaaattttaaaaactactttaaaaattatgattttcataatttatataaagagttgttaaatttttgtactgtggatttatcagccttttattttgatattagaaaagatactttgtactgtgatccaatagactcaaaaaaaagacaatcaacaattattttgttaaacgtgattttaaattcattattaagatggtttgctccaattctctcttttacaacagaagagatctataaattaatttacaacaataataatagcattcatttagaatcttttttaaattatccagaaaaatttaagaatgaccagcttaatcaaaaatggatagatcttattaagataagaaatatatgtaatattagtattgaagaaaaaagagcatctaaagaaattggatcaagtttagaggctaaactaaaaattaatttggataaaaaattatctaagattactgaaaatattgattt

SEQ ID NO: 305132 - DNA, 874 bp, Unknown
  Bacterial polypeptide expressing nucleotide sequence isolated from the Sargasso Sea
aaaaactaaagaaattttagttgacgataaggttaatgaaaatattgcagcaatttatgaaaaagagggatctgattgttggttttcagatgatccacaaagatttctaggtaaaaaatatgatgcaaaagaatatgacaaactaagtgatatagtagaagtatggtttgatagtggatcaactcattcatttgtattagaaaaaaggagtgatctaaaatggccagcatcaatgtatttggaaggatctgatcagcatagaggttggtttcactcatctttattagaatcttgtggcactagaggaagggcgccgtttgactcaattttatcacacggctttgtggtagacggcaaaggtttaaaaatgtctaaatcattaggaaatgtaattgctccagaagatattttaaaaaaatatggagcagatattttaagaatttgggtagcttcttctaattactcagaagatttgagaattgattattcaattctagatcagcatgcagattcttatagaaaaataagaaataccttcagatatttattaggaaacttgaatgacaattttgaattaattgattataaaaaaattaatcttcaagatcttcctgaacttgagcaatatattttgcataggctgtacaatttaaatgaaacatttaaaaaatattttaaaaattacgattttcataatttgtataaggaattattaaatttttgtacagtggatctttcagctttttatttcgatatccgtaaagatacattgtactgcgattcagtaaattctaataaacgaaaatcaactattttattgttaaatataattttagactctctactcaaatggttgcaccaattttatcattac

SEQ ID NO: 305133 - DNA, 688 bp, Unknown
  Bacterial polypeptide expressing nucleotide sequence isolated from the Sargasso Sea
tgcatttctagacaaagaaattggggtgttccaataactttagttgttcataaagatactggagaaatccatcctagtcaaaaagacctgtttgaaaagtttgcgcaaactattgaaaaagaaggaatttcagcttgggataagttgagtcttaaggattatatcgacgatcatgaagaatatattaaaacttccgattcacttgatgtgtggtttgattctggagtaactcactatgcagtttctgaaaaaagatttggtaataatgtagttgcagacctctatctagagggctcagaccaacatagaggatggtttcaatcatcattattatcaagcatagctatgaataagtcagcaccatataaaaccgttctgactcatgggtttgttgtagatgagcaaggaagaaaacaatcaaaatcacttggaaatgttgtctctcctcaaaaagtgtgggacagcttaggagcagatattttgagactttgggtggcttcaacagactttagaagcgaaatggtagcgtctgatgaaattttgaagagaacttccgaatcatatagacgaattagaaatacttttagatttatcttaagaaatttaagtgactttagtgataaaaataaagttaagtttgaaagatcagttgaactagataaatggatcattaatgaaacaaaaatac

SEQ ID NO: 305134 - DNA, 870 bp, Unknown
  Bacterial polypeptide expressing nucleotide sequence isolated from the Sargasso Sea
gttgaaaaaacagcattagctgatgctgaagttgaatataaagatcatacctcaaatacaatttatgtggcatttaaagtgaaagatacaaaaaaggattttttaaaagaagctagtattataatttggacaacaacaccttggactattcctgctaataaggctttagcttttaatagcactatagaatattcattagttgagattgaatctttagattattttaaagaaaaaaaaataattgttgctagcaacctagttgactcaataattaagtcttgcgaaataaaaaaacataaagttttaagaacttttaaaggctctgaatttcaaggaacaatttgcagtcatccttttttaaaaatgaaatttgaatacgatgttcccatgctcgaagcaggatttgtagatcttgaacaaggaactgggatagtacactgtgctcctagccatggaccagatgactttaatttatgcttaaaaaataatatcaaatcaagctatacagtggataatgctggactgtacacaaatgagattccctattttactaataaacatatttttaaagctgacgacttagttatagaaaagctcaaggaacaaaacaaattacttaaaaatgataaactacttcatagctatcctcactcctggagatcaaaagctcctttaatttatagagctacgccacaatggtttatttctatggaaaaaaattctttaagaaataaagccattaaagcaattaatgatacaaatttttatcctgaaaaaggaaaagatcgactgctttctatgatagaaggcaggccagattggtgtgtctcaagacaaagagtttggggtgttccttttacgatttttatt

SEQ ID NO: 305135 - DNA, 952 bp, Unknown
  Bacterial polypeptide expressing nucleotide sequence isolated from the Sargasso Sea
gcagatgcagaagttgaatatcaagatcatgtatcagatacaatttatgctgcttttatagtcaaaagttcaaatataaaagaaatcattggatcaaatattatcatttggactactacaccatggactatacctgcaaataaggctttagcatataatcaaagtttagattatgtcttatgcgagataaacaataatgacaaactacatagtgaaaaaatagtaattgctaaagagcttttagaatctgtgtcaaaagacacagacttaaaaataaatttactttctgaatttaaaggaaaagattttgaaggaactatttgtggtcatccatttcataaaattggatatgattatgatgttccaatgcttgaagcaagatttgttacaacagaacagggaacaggtattgttcattgcgcacctagtcatggacctgatgattttaatttgtgtttaaacaatgggattaaagcagttgaaacagttgatgacgatggaagatacactaaacatataccaatatttgaaggaacacatatttttaaagctaatacgattgtcatagagaagcttaaggaaacaaaaaccctattatccaacggaaaacttactcattcctatccacattcttggagatctaaagctccattagttcacagagcaacacctcaatggtttatttcaatggagagtcacaaattaagagataaagctcttaaagctatagatgatacaactttttaccccgcgaaaggtaaagaaagaattaaatcaatgattgagactaggccagattggtgtgtatctagacagagagtatggggtgttcctttaccaatatttatttcaaaaaaaaatggagagattttgatagatgatgaagtttttgaaaatatcgcaaaaatctatgaaaaagagggttccgattgttggttgaagaaaatttcaa

SEQ ID NO: 305136 - DNA, 828 bp, Unknown
  Bacterial polypeptide expressing nucleotide sequence isolated from the Sargasso Sea
ctacctctcaaggaaccaaagattttggaagagtgggcagaagaagaaatatttaataaattgcgtgaaaaatctaaaggaagagaaagatttgtactccatgatggcccaccatatgcaaatgggcatatacacatgggtacagcattaaataaaattttgaaagatgttattgtacgtactcagcaaatggctggaactgattcaatatacgttcctggttgggattgtcatggattaccaattgaatggaaaattgaagaacaatatcgaaaaaaaggtaaaaataaagatgatattccaatagtaaattttcgaaaggagtgcagagaatttgctgaaaaatggatagaaatacaaaaaaaggaatttaaaagattaggtgttgaaggagactggaacaatccatatttaacaatgtctaatcaagccgaagctcaaatagtaagagagttaggaaaatttttaattgatgaaagcttatacaaaggagctagaccagttttatggtcagtagttgaaaaaacagcgctagctgatgcagaagttgaatatgaagatcatacttctaatactgtttatgttaaatttttaattaaaaaatcaaaaaatacagaattaaataattcaaatattgtaatttggacaacaacaccttggacaatacctggaaatcgtgctttagcctatcattcagatttagactattctttgattgaaattgcagaagtgcaagattccagcttaataacaaaaggtgaaaaattaattatcgcaaaagaattgctttcaaaggttaatgaagaaataggtattttaaaatataat

SEQ ID NO: 305137 - DNA, 801 bp, Unknown
  Bacterial polypeptide expressing nucleotide sequence isolated from the Sargasso Sea
aattgatgattatgaacaagtaaaagatgtagttgaagtatggtttgatagtggttctacacatgctttttgtctagaacaaagagaagatttgaaatggccggcatcaatgtatttagaaggaagtgatcaacatagaggttggtttcattcatctcttttagagtcttcaggaactagaggaaaggcgccatatgaaagtgttttgacacatggatttgttgttgatggaagaggacgtaaaatgtctaaatctttaggtaatgtcatttctccagatgatattttaaaaaaatatggagtagatattttaagattatgggtcgttgcttcagattattatgatgatcttaaacttgataattccattctccaatcacaagctgagtcttatagaagaataagaaatactttccgttttttaatcggcaatttaaatgattttactaaacaagaagctattgatgagagtcagtttccagagttggaaaaatatcttcttcatcggttatgggaagttgatcaagttgttcaaaaatgtgtctcaacatttaattttcacttaatgtttacaacactattgaacttttgttcaagtgatctttcagctctttattttgatatcagaaaagacactatatactgtgatagtaaagagtcggttaaaagaaggtctactagaactctattaaatataatttttaattatttagtaagatggttcgcgccatctatttcctttacctctgaggaagcttggaaagctatgggaaataaagaaagtattcatttgcaagattt

SEQ ID NO: 305138 - DNA, 454 bp, Unknown
  Bacterial polypeptide expressing nucleotide sequence isolated from the Sargasso Sea
atgtcatcaagcgaaaaagattataaagaaactttattcttaccaaccacatcgtttccaatgcgagctaatctacctgaaagggaaaaagagtggcttgaccattgggaagaattaaaaatttataaaaagcttaggctggactcaagcaatcgaaaagattttgttcttcatgatggccccccttatgcgaatggaaacttgcatattgggcatgcgttaaacaaaattttgaaggactttgtcgtaaggggtcagcaagttttaggtaacaacagcatttatgttcctgggtgggattgtcacggattgcccattgaatggaaaattgaagagaaatacagagagaaaggtaaatcgaaggaagatgtacccattaataaacttcgtgaagattgtagagactttgcaaaacactggatagaaattcagaaagaagaattaaaagattagg

SEQ ID NO: 305139 - DNA, 735 bp, Unknown
  Bacterial polypeptide expressing nucleotide sequence isolated from the Sargasso Sea
agtgtaataatttggacaaccaccccttggacgatccctgcaaatagagctttagcttacaacaaaagtttagattatttattaattaaaataaaggatgatggtaaatttaaagataaaaaaattatttttgctgaggctttacttgaatcagtcattaaggaatgtgaaataaaaaattataaaaaccttaagagatttaaaggtgaagagtttaaaaatactatttgcaatcacccgttttttgatatgggctatgattatgatataccaatgttagaggctagatttgttacaaccgaacaaggaacgggtatagttcattgtgcaccaagtcatggaccagatgattttaatctttgtcttaacaatggaattaaagctatagaaacggtagatggagacggaaaatataccaaaaatgttttattatttgaagggctacatatttttaaagccaatcctattgtaattgaaaaattaaaagaacagaaaaaacttttaaaaaatagtcaactaactcactcttatccacactcatggagatctaaagcacctttagttcatagagctacacctcaatggtttatttcaatggaaagtcataagcttagaagaaaagcattaaaagcaattgatgaaactattttttatccaaataaaggaaaagaaaggttaaagtcgatgattgagactaggcctgactggtgtgtatcaagacaaagagtatggggt

SEQ ID NO: 305140 - DNA, 877 bp, Unknown
  Bacterial polypeptide expressing nucleotide sequence isolated from the Sargasso Sea
tcagttatttctaaaaggaataatttaaattatccagcagatttatacttggagggatctgatcaacatcgtggctggtttcagtcttctttattgacctcagtcgctgtaaatgaacatgccccctttaaaaaggttcttacccatggttttgctttagatgaaaatggtaggaaaatgagcaaatctttaggtaatattattgacccattagtgataattaatggtggtaaaaataagaagatagaacctgcttatggtgctgatgtacttagactttgggtaagctctgtagattattctactgatgtaccaattggatctaatatcctaaagcaaatctctgatgtttatcgtaaagttagaaatacttcgaggtatttattaggaaacatttatgattttgattataaaaaagatgctattgatatttctgaattaccattgttagataaatggatgttgaatagaacggctgatgttatagatgagataactgattctttttctaattatgaattttctaagtttttccaaataattcaaaacttttgcgtagtagatctttctaatttttatttagatattgcaaaagacaggttatatgtaagctttaaatctgattttaggagaagaagttgccagacggttctatcattagttgttgagaaactatctggcttaattgcacctgtcttatgtcatatggcagaggatatttggcagaatattccatatactttagaagaaatctcagtatttgaaagaggatggcctaaagttcctgaatcttggagaaataatagttctaatgagcatgttaatgaactactcaaactcagaactgttattaatcgaaatgttggaaagttgtaga

SEQ ID NO: 305141 - DNA, 829 bp, Unknown
  Bacterial polypeptide expressing nucleotide sequence isolated from the Sargasso Sea
acgaccagactggtgcgtttcacgacaaagagtttggggagtgcctttgcctattttcttatcaaaaaaagatggaaagccattaatagatgatgaaatatttgaaaacatagcagaaatttatgaaaaagaaggctcagactgttggttttccgatgatccacaaaggtttttaggaaaaaattatagatctgaagactataataaaatgagtgatatcgttgaagtttggtttgatagtggttctactcattcttatgtattggaaaaaagagatgatttaaagtggccagcatctatgtatctagaaggctctgatcaacacagaggatggtttcattcctcattactagaatcatgcggtactagaggcaaagctccatttgaaagtattttatcacatggttttgttgtagatggaaaaggccttaaaatgtcaaagtctacaggaaatgtaattgctccagaagatatattaaaaaaatatggagcagacattttaagaatatgggtagcatcttcaaattatgcagaagatttaagaatagattactcaattttagatcaacatgcagagtcttacagaaaaattagaaatacttttagataccttttaggaaatatacaagatgaatatttagaagttaattttaaaaatttagatttaaaagaaatgcctgatcttgaaaaatacatgctacatagaatttatgaaattaacaaaagttttcataaatattttcattcttataattttcacaatttgtataaagaattattaaatttttgcacagtagagttatcagctttttattttgacattagaaaa

SEQ ID NO: 305142 - DNA, 800 bp, Unknown
  Bacterial polypeptide expressing nucleotide sequence isolated from the Sargasso Sea
tcagatggcaagccaggaaatgcaaataagttagttattgaacacattgataaggagggtggtttattttcttcttctaaatatgtccattcatatcctcattcttggcgttcaaaagcgcctgtaatttttttaagtactccccagtggtttatttcgatggatcagaatgatcttcgaaaaaatgctttaaaagcaattgataatgttaattggtttccttctcaagggagaagtagaatttattcaatgatagagcataggccagagtgggttatttctcggcagagagcatggggggttccaattccaatttttgtaaatcgaatgacaggtgagcttttaaaagaccaatccgtaaatgaacgtatatataacacttttataaaagagggatcggattcttggttttctgaccaaggtggtgaaaaatttttaggtgataattataacaagtctgattgggaaaaagttaatgatatagttgatgtttggtttgagtcaggtagttctcatgcctttgttcttgaagaaaatgaagatctactttggcctgcatcgctatatctagagggaactgatcaacatagagggtggtttcattcttctcttttagagtcttgtggcactcgaggggtagctccttttgaatctgtccttacccatggttttgtaatggatggcaatggtaggaagatgtcaaaatctttgggtaatgttgttagtcctcagaaagttattgataagtatggagctgatattttaaggctttgggtagttggctcagattacacagatga

SEQ ID NO: 305143 - DNA, 564 bp, Unknown
  Bacterial polypeptide expressing nucleotide sequence isolated from the Sargasso Sea
tatgaaagattataaagacactttgaatctgccaggtacgtcttttcctatgaaggcgaatctgcccaatagagaacctgaaattcttaaattttgggatgagattgatttgtatagaaaaatcaggaaaaaaagaaagggcgagaaaccattcctacttcttgatggccctccatatgccaacggaaaaattcatataggccatgctctcaataagatcttgaaagatttcattattaaatcaaaaactttgtttgggcatgatgcaccttatcttcctggctgggattgtcatggcttaccgattgagcatcaggtagaaaagaagaaagggaaggttggacccaagctgactgcaagagaatttagagattactgccgtgaatatgcattgaaacaagttgaagagcaaaaagaagacttcattcgtctaggtgttcctggagagtggaacaatccatacatgaccctagataaaagatatgaagcagagcagattcgtgcatttgctgaaatatatggaaacaatcatgtcacatttggacataaaccagtgcactggtg

SEQ ID NO: 305144 - DNA, 919 bp, Unknown
  Bacterial polypeptide expressing nucleotide sequence isolated from the Sargasso Sea
agaaaaaaaaattgtagttcaaaaaagctcattgagcaaatcatagatacctgcgaaatcaaaaatttcaaagagttaaaaactttcaagggttcagaatttcataaaacaatctgcagtcatccattttctaatatggatttcaagtacgatgtccctatgctggacgctcagtttgttaatttagaacaaggaactggtatcgttcactgcgctcctagtcatggtccagatgattttaatctgtgcctaaaaaacaatattccctctctttacaccgtcgatgacgctggtctttatactgatgaaattcccttttttgaaaagacacatatttttaaagctgacacggtcgttatagataaattaaaagaacaaaaaaaattattaaagaatgataaattaaatcatacatatccacactcatggagatctaaagcacccctaatttatagagctacaccgcaatggtttatatctatgaaaaaaaatgatttaagagaaaaagctattaaatctattaacgaaactaatttttacccaaaaaaaggaaaagagagattattatctatgattgagggaagaccagactggtgcgtatctaggcaaagagtttggggagttcctctaccaatttttattaataaaaaaactaaagagccgttaagagatcagaaggtaatagacagaatagccacaatatacgaaaagcaaggatctgattgttggtttactgatgactcaaaagtttttctgggggatgattatgatccaaaggattacgaaaaacttaatgatatagttgaagtttggtttgatagtggatcaacacacagttttgttttagaaaaaagaaaagatttaaaatggccagctgacatgtatctagagggttctgatcaacataggggctggttca

SEQ ID NO: 305145 - DNA, 916 bp, Unknown
  Bacterial polypeptide expressing nucleotide sequence isolated from the Sargasso Sea
atgagtaaatctgatataaatctacttaaaacagctttctcaatgaaggcaaatttaccaatcagagaacctgaaattctaaattattggaaaaaaataaatctttatgatgaattgagaaaatcaagtaaaggcaaagaaaaatttgtcttacatgatggaccaccatatgcaaacggcaatattcatatggggacagcattaaataaaattttaaaagacataattgtaaaatttcatcaaatggatggcaaagactcaatttatgtccctggatgggattgtcatggtctaccgatcgaatggaaaatagaagaggaatataaaaaaaataaaaaaaataaaaatgacgttcctatagttgaatttagaaaagagtgcagatcttttgcagaaaaatggatagaaattcacaagggtcaattcaaaagattgggtgtagttggtgattgggaaaattattattctacaatgagttttgatgcagaggctcaaatagtaagagagctcggaaaatttcttaaagaaggaagtttatacagaggatataagccagttttgtggtcaactgttgaaaaaactgctcttgctgatgctgaggtagaatatcaagaccataggtcagatacaatatacacatctttttcagtaaggtcgtcgaaaattaaagaattagaggaaagtgaaattataatttggacaacaactccatggacaattcctgccaacaaagccttagcttataacgaaggattagaatatattatattgcaagttaatgatgagggagattttaaaaatagaaaaatagttattgcaaaagctttacttgagtcagtcattaatgaatgtggaattaaaaattataaagaaattaaaaagtttaaaggaaaagagtttaaagataccatttgta

SEQ ID NO: 305146 - DNA, 760 bp, Unknown
  Bacterial polypeptide expressing nucleotide sequence isolated from the Sargasso Sea
gtaactctggaacaaggaactggaattgtccattgtgcaccaagtcatggcccagatgattttaacttatgtttgaggtatggaatgaaggctattgagacagtcaataacgacggaagatatactaaaaatattcctatttttgaaggtacacatgtatttaaagcagacgatattattatcaaaaatttagatgagcaaaaaaatcttctaggaagtggtagtttagtacacagttaccctcattcttggagatctaaagcacctttggttcacagagctacaccacaatggtttatttcaatggaaagtcataaacttagaaacaaagcattagaatcaattgataaaacatctttttatccagaaaaaggaaaagcaagaattagagcaatgatcgaaacacgtcctgactggtgtatttcaagacaaagatcttggggtgttccgttacctatttttataaataagaaaactaacgaacctttaagagataagggggttattgaaaatatagcaaagatttatgagagtgaaggatctgattgttggttttatgatgatcctcaaagattccttggaaataaatataaaaaagaagattatataaaatctagcgatattgttgaggtttggtttgatagtggatctacgcattcatttgtattggaaaaaagaaaagatttaaaatggccagcatcaatgtatttagagggttcagaccaacacagaggttggtttcactcgtctcttttagcgt

SEQ ID NO: 305147 - DNA, 832 bp, Unknown
  Bacterial polypeptide expressing nucleotide sequence isolated from the Sargasso Sea
cttgtggaactagaggagaagcaccttttcgaaacaatcttatcacatggatttgttgtagacggaaaaggacttaaaatgtccaaatcattaggcaatgttatttcacctgatgatatcttaaaaaaatatggcgctgatattctaagaatttgggttgcagcttctaactattcagaggatctaagaatagattatacaattttagaacagcatgcagacgcatacagaaaaataagaaacacttttagatatattcttggaaatttaagagatgaattttcagaaaatgacttcaataagataaattataatgaactgtgcgaacttgataagctgatgttgcataaaatttatttgttaaatgataattatcaaaaaaattttaagtcttataattttcatttgctttataaagatttattaaatttttgtacggtcgacttatcatccttctattttgatataaggaaagactctttgtattgtgatgatttaaaatcgaagagaagaaaagattgtttgcaaatattaaatgtgcttctcgattgtcttctcaaatggtttgctcctattctatctttcactactgaagaaattttcaaattgataaataaaaaatctaatgaaagcattcatttagaaaagtttgtaacaatcccagatagttggaaaaatgaaaatcttgctaaaaaatggaaagaaatattaaatgtaagagagattgctaattcaagtatagaattaaaaagagctgataaactaattggttctagcttagaagctgaaataataattgaacttaataaagaaaaatatgatcttctaaaaa

SEQ ID NO: 305148 - DNA, 882 bp, Unknown
  Bacterial polypeptide expressing nucleotide sequence isolated from the Sargasso Sea
gatatttatgaaaaagaaggtagcgatacatggtttacagaaaatcttcagaggtttcttggagataaatataagttagaagattatgaacaagtaaaagacgttgtagaggtatggtttgatagtggttctactcatgctttttgcttagaaaaaagagaagatcttaaatggccagcatcgatgtatcttgaggggagcgatcaacatcgtggctggtttcattcttcattattggaatcatctggaacaagaggaagagcgccatatgagagtgtccttacacatggttttgttgtggatggaaaaggaagaaagatgtcaaaatctttaggtaatgttatttctccagatgatattttaaaaaaatatggtgttgatattttgagattatgggttgttgcttctgattattatgatgatttaaaattagataattcaattttacaatcccaaaccgactcatatagaagaatcagaaatacatttcgttacttaattggtaaccttgatggatttaatattaatgaaaaaatagatgaaaacaaatttccagagttagaaaaatttatattacatagattatgggaagttgatcaaatagttattagatgtgttacaaattttaattttcatttaatgtttactacattgttaaatttttgttccaatgaattatctgcattttattttgatattcgaaaagatgttatttattgtaatggaaaaaattcaattgaaagaagatctgcaagaacactattagatataatttttaattatcttgtaagatggtttgctccatctttgtcatttacagcagaagaagcgtggaaagcaagaggtaacaaatctagtattcatcttgaagattttttaaaa

SEQ ID NO: 305149 - DNA, 858 bp, Unknown
  Bacterial polypeptide expressing nucleotide sequence isolated from the Sargasso Sea
gatgatccgcaaaaatttctttggaaaaaaatataaagctgacgattttgaaaagttaagcgatatcgtagaggtatggtttgatagtggatctacacattcatttgtattggaaaaaagaaaagatttaaaatggcctgcatctatgtatcttgagggctctgaccaacataggggctggtttcattcttcccttttagagtcttgcggaacaagagatcgtgcgccttttgagtctattctctcccatggttttgtagttgatggtaaaggtttaaaaatgtcaaaatcgttaggaaatgtaattgcgcctgaggacatcctaaaaaaatatggagctgatattcttagaatttgggttgcttcctcaaattatgctgaggatcttcggatagactattcaatattagatcaacatgctgagtcttatagaaaaataagaaatacatttagatatttgttaggaaatcttaatgataattttgaagaaatagatttagaaaaaattaaaattgaagacttgccggaattggaacaattcatgcttcataaaatttacaatttaaattctaaatttaacaagtatttcaaagattatgattttcataatttgtataaagaattattaaatttttgcactgtagacttatctgctttttattttgatataagaaaagatactttgtactgtgatccaataaattccgaaaaaagaaaatctacacttatattgttaaatgttattcttaattctttaataagatggtttgcaccaatcctatcttttacaactgaagaaatttaccaacttatttcaaaaaagaacaaaagtattcatcttgaaaaatttttaaattt

SEQ ID NO: 305150 - DNA, 733 bp, Unknown
  Bacterial polypeptide expressing nucleotide sequence isolated from the Sargasso Sea
atgtccgattccaagaagcctacgccggagaagagcaaatacccggtcaacctgctggacacgcccttccccatgcgcggcgacctgcccaagcgcgaaccgctgtgggtcaagcaatggcaggacaagcagctctacaagaagatccgcgccgcgcgcaaaggcgcgaagaagttcatccttcacgacggcccgccgtatgccaacggcgatctgcacatcggccacgcggtcaacaagatcctcaaggacatggtgatcaaggcgcgcggcctgaccgggctggacgccgtctacgtgccgggctgggattgccacggcatgccgatcgaaatccagatcgaaaagcaatttggcaagggcctgccggtcaaggaagtgcaagagaaagcgcgtgcctacgccacgggccagatcgcccgccagaaggcggatttcgaacgcctgggcgtgctgggcgactgggccgatccgtacctgaccatgaacttccgcaacgaagcggatgaagtgcgcgcgctgggcaagatcctggaaaagggctacgtgttccgcggcctgaagccggtcaactggtgcttcgactgcggctcggcattggccgaggcggaagtcgaatacgcggatcgcaccgacctgtcgatcgacgtcggcttcccgtttgccgacatcgacgcgctggcgagtgcgttccatgttggcgccgaggtgctcaaggccaagccgggctgga

SEQ ID NO: 305151 - DNA, 916 bp, Unknown
  Bacterial polypeptide expressing nucleotide sequence isolated from the Sargasso Sea
cccagaaattttaaaaatatgggctggactcaatctgtattcaaaacttagaaatttaagaaagggaaaagaaaaatttattttgcacgacggacctccttacgctaatggccatattcacatggggacagccttgaataaaattcttaaagatatgattacaagatttcatcaaatggatggaaaagactcagtttatgttcccggatgggattgtcatggcttgcctatagaatggaaaattgaagagcaatataaaaaaaataaaaaaaataaggatgaggttccaataaaaaattttagaaatgaatgtagagaatttgctgaaaaatggatccagattcatgtaaaagaatttaaaaggttaggggtagaaggtgattgggaaaattattattccaccatgagctttgatgcggaagcgcagatcgtaagggaattaggaaaatttttattggatggcagtctatatcaaggttataaacctgttttatggtcaacagtagaaaaaactgctcttgctgacgctgaagtagaatataaagatcatacttcaaatacagtatatgtaggttttaaagttaaaagctcaaaaattaatttgttaaaagacgccgaagttattatttggactactacaccctggactatacctgcgaataaagctttggcatacaataaaaatctggattactcaattatcgagataaattcattattaaagaattttgataataaaaaaattataattgctacacaacttcttgatcaagtttcaaaggagtgtgaaataggaaattataaattaattaaaaaaataaaaggaaaagatttcgaaggaacaatttgctctcatccttttgaaaatttaggatataattatgatgttcctatgttagaggctaattttgtaaca

SEQ ID NO: 305152 - DNA, 845 bp, Unknown
  Bacterial polypeptide expressing nucleotide sequence isolated from the Sargasso Sea
ccagcgtcaatgtatttagaaggttctgatcaacataggggctggtttcattcatcactcttagagtcatgtgggactagaggaagggcgccgtttgagtcaattctttctcacggttttgtagttgatggtaaaggccttaaaatgtcaaagtctttaggaaatgtaattgctccagaggatatattaaaaaaatatggagcagatattttaagaatttgggtggcctcatctaattatgctgaagatttaagaattgattactcaatcctagatcaacattcagagtcatatagaaaaattagaaacacttttagatacttacttggaaatttaaatgataattttgaggaaatcgatttagaaaaattaaacattaaagaattgcctgagttagaacaatttatgcttcataaattgtttaaattaaatcaaaattttaataaatattttaagagttatgattttcacaatttatacaaagagttattaaatttctgcacagttgatttgtctgctttatattttgatataagaaaagatactttatattgtgatcctaaagattcaaaaaaaagaaaatcgacattacttttattaaatattattctaaatactttattaaaatggtttgcacctatcttgtcttttaccactgaggagatttatcaattgatctcaaaaaaaaataaaagtgtgcatttagaaaaatttccagatattggagaaaaatttgaaaataagaatttattcaataaatggattgagcttattaaaatcagagatatttgtaatattagcatagaagaaaagagagccacaaaagtgattgggtcaagcttaga

SEQ ID NO: 305153 - DNA, 760 bp, Unknown
  Bacterial polypeptide expressing nucleotide sequence isolated from the Sargasso Sea
ttggaaaaaagagatgacctaaaatggcctgcgtctatgtatttagagggctcagatcaacatagaggctggtttcattcgtcattacttgagtcttgtgggactagaggaagagctccttttgaaagtattttatcgcacggatttgtgatggatggaaaaggattaaaaatgtcaaaatctttaggaaatcaaattttacctgacgatattttaaaaaaatatggtgcagatattttgagagtttgggttactgcatctgattacgcagaagatttaagaatagattattcaattttagaacagcatgcagaagcttatagaaaaataagaaatacatttagatatttaatgggtaatttaaatgataattttttagagcaggattatgaaaaaattaaaattaataaccttccagagttagaacaatatatgttacataagttatatgttttaaatgaaagttttaataaaaattttaaattatataattttcatgttttatacaaagatctacttaatttttgtacggtagatctgtcttcattttattttgatataagaaaagatactttatattgtgataaaaaaaattcagataaaagggcgaattgtattttgactttaaacattattctcgatggattattaagatggtttgctcctatattatcatttacaactgaagaaattttcaaacttttaaataaagatgatacaaatagtatacatttaaaaaaatttccccacatatccgtca

SEQ ID NO: 305154 - DNA, 769 bp, Unknown
  Bacterial polypeptide expressing nucleotide sequence isolated from the Sargasso Sea
gaagccggcaccggtctggtgcacaccgcgccgggccacggcgtggatgacttcaacaccggccgtcaacacgatctgccggtgctctgcccagttgatgaggggggctggctgaccgaggaggccggcccctttgccgggctgaacgtgctcaaggacgccaatcccaccatcatcgaagccctgtcgcaggccggggccctgctgaaggagcagcgctacgaacaccgctacccctacgactggcgcaccaaaaaacccaccatcttccgcgccaccgagcagtggttcgcctccgtcgaaggcttccgcgagagggccctagcggccattgccgaggtggagtggatgcctgccagcggccgcaaccgcattgaaggcatggtgcgcgagcgcggcgactggtgcatcagccgccagcgcacctggggggtgcccatccccgtcttctatcaccgcagcagtggtgaggtgctgctcaacgccgacaccctgcaacacatccaggccctgattgccgagcatggcggcgatgtgtggtgggagcgcgaggaggccgagttgttacctccggcctaccgcgaccaggccgatcagtggcgcaagggcaccgacacgatggatgtctggtttgactccggttcctcctgggctggcgtgctgcagggcctcgatggcgacaccagtgatgcagccctgaactatccggccgatctctatctcgagggttccgatcagcaccgcggctggttccagagcagcctgctga

SEQ ID NO: 305155 - DNA, 826 bp, Unknown
  Bacterial polypeptide expressing nucleotide sequence isolated from the Sargasso Sea
atgtcaaaagataaccttcaacttccaaaaacctctttttcaatgaaagcaaatttgccttctaaagaacctgctattttatctaaatgggaaaaaaatgatatgttcaacaaacttagaaaaaaatcttttggaagaaaaaagtttgttttacatgatggaccgccttatgccaacggtcacattcatatgggtactgcacttaataaaatcttaaaagatatggtaacaagatttcatcaaatgactggtaaggactcgatctatgtgcctggatgggactgccacggtttaccaatcgaatggaaaattgaagaacaatataaaaaaaataaaaagaacaaagaccaagttcctattaaagattttagaaatgaatgcagagaatttgcaaaaaaatggataaagattcagactgaagaattcaaaagacttggggtagttggggattataaaaattattactctactatgagtttcaatggagaagctcaaatagtaagagagcttgggaagtttttattggataaaagtttatatcaaggttttaagcctgtgctttggtcaacagttgaaaaaactgctttagctgatgctgaagttgagtataaagatcatacatctaatactatctttgcagcttttaaagtgaaaaaaacagacaaagattttcttaaagatgcaagtgtggttatatggactactaccccttggacaatacctgcaaacaaggcgttagcatttaatagttccttagagtatactgttcttgaaatacaaaatcttgaaaattttaaagaagaaaaaattattttagcgaaagatc

SEQ ID NO: 305156 - DNA, 907 bp, Unknown
  Bacterial polypeptide expressing nucleotide sequence isolated from the Sargasso Sea
attattagaatcttgtggaacgagagatagagcaccattcgagtcaattttatctcatggttttgttgtagatggcaaaggcctaaagatgtcaaaatcgctgggaaatgtaatagcacccgaagatattttgaaaaaatatggtgctgatattttaagaatttgggtagcatcatcaaattatgctgaggacttaagaatagattactccattttagatcaacacgcagagtcttatagaaaaattagaaatacttttagatatttactaggaaatattaatgataaatatgaaacgataaattttgatgagcttgatgtagatagtttacctgagttagaacagttaatgctacataaaatttatgttttaaatagtaattttaaaaaatattttaaaaattatgattttcataatttatataaagaattattaaatttttgcactgttgatttgtctgctttttactttgatattagaaaagataatctttattgtgatcctattgacacagaaaaaaggaaatcaacaattttacttctaaatatcattttaaatgctctactaaaatggtttgcacccatactatcttttacaacagaggaaatttttaaattattatttaaagatcaaaaaagtattcaccttgaaaaatttttagaatttcctgataaatttaaaaatgaaaagcttagtaataaatggattgaattggtaaaaatcagaaatatttgcaacataagtattgaagaaaaaagagctagtaaagaaataggatcaagtttagaggcaaatctaaagatagaaattaatcaaaaattaaaaaaccttactgaaaatactgatttttcagaactttgtataacttcgaaagctgaagtaagttacaaagaagatgccgagaca

SEQ ID NO: 305157 - DNA, 874 bp, Unknown
  Bacterial polypeptide expressing nucleotide sequence isolated from the Sargasso Sea
aataaaatttttgaaaagctaagaaaaaaatctaaagggaaagaaaaatttgttcttcacgatggtccgccatatgcaaatggtcacatacatatgggtacagcattgaataaaattttgaaagatatgattactcgttttcatcagatgaatggtaaagattctgtttacgttccaggttgggattgtcacgggctaccaatagaatggaaaatagaagaacaatataaaaaaaagaaaaaaaataaagatgaagtacctattaaagattttaggcaagaatgtagggaatttgcaaaaagttggattgaagttcacattaaagagtttaagagattaggagtagttggagactttgaaaattattattctacaatgagttacgaggccgaggcccaaattgtaagagagttaggaaagttcctattagatggaagtttatatcaaggctttaaacctgtgctttggtctactgtcgaaaaaactgctttagctgatgcggaagttgagtatttggatcatacttcaaatacaatttatgttgcatttaaagttaaagagaccaccaaagacttccttaaagacacaagcatcataatatggactactacaccatggactatacctgccaataaagcattggcttttaatagtaatattgagtactcagttttggaaattgaggatcttgagtattttaaaggtaagagaattgtagtcgcaaaaaacttaattgagtcaatcactaaagagtgtgaaattaaaaactttaaagaattaaaaacttttaagggatttgaatttaaaggaacagaatgtagtcatccatttttaaatattgattttgaatataatgttccaatgctagatgctc

SEQ ID NO: 305158 - DNA, 829 bp, Unknown
  Bacterial polypeptide expressing nucleotide sequence isolated from the Sargasso Sea
aaaaactgacaaagattttttaaaagactcctcaataattatttggactactaccccctggacaattccagccaataaagctttagcctataacccgaacctaaattattccgttttgcaagttgataacaaaaaaattattattgcagaaaagttagtcaattctgtagtagaaaattgtggtttaggtaaatttaaaattttaaaatcttttgagggaaaaatatttaaaaacacaatatgttcacatccattcaaaaacttaggttataagtttgatgttcctatgcttgaggcagattttgttactctagaacaaggtactggtatagtgcattgtgcccccagtcatggtccagatgactttaatttgtgtttaaaacacggtatgaaggctatagagacagttaataatgatggtagatacactaaaaatattcctatttttgaaggaatacatgtttttaaagcagatgaaattattataaaaaatttagctgaacaaaaaaatcttttgggaagcggaagtctagttcatagttatccccattcatggaggtctaaggctcctttagtccacagggcgacaccgcaatggtttatttctatggaaagtcacaagttaagaaataaagccttgaagtcgattgatcaaactgctttttttccagaaaaaggaaaagcaaggataagagctatgattgaaactcggccagactggtgtatttccagacaaagatcctggggggttcctttaccaatttttgttaataaaaaaacaaacgaacccttgcgagataaggaagttgtagaaaatatagctaagatt

SEQ ID NO: 305159 - DNA, 818 bp, Unknown
  Bacterial polypeptide expressing nucleotide sequence isolated from the Sargasso Sea
tatggatcatgtttcagacacgatttatacagcatttaatgtgaaagatacaaatttagatataattaaaggtgctgatgtaataatttggacgacaactccatggactattccagcaaataaagctttagcttataattctggcctaaaatatattttactcgaaattaatgataacaaaaattttgttaatagaaaaattgtaattgcaaaagatttattagaaccttttaaaaaagatacctctattgaaaatataaaaattttaaatgaatttttaggaaaagatttaaaaggaacaatttgcagtcatccattttctaaaatgggatatgattatgatattccaatgcttgatgctaactttgttactactgaacaaggaaccggtattgtacattgcgctcccagtcatggaccagatgacttcaatctttgtttaaataataacattaaagcaattgaaacagttgatggtgatggaaaatatacaaatgaaattaaactttttgagggtttacatatttttaaggccaataacttaattattgaaaaattagacgaacaaaataatttattgaaaaatgggaaactcactcactcctatccccattcttggagatcaaaagctccattagttcatagagcaactccacaatggtttatttctatggagagccatggattaagagataaagcattgaaggcaatcgataatacagatttttatccttcaaaaggaaaagaaagaattaaatcaatgattgaaactagacctgattggtgtgttttcagacagagagtttggggcgtgccat

SEQ ID NO: 305160 - DNA, 850 bp, Unknown
  Bacterial polypeptide expressing nucleotide sequence isolated from the Sargasso Sea
cctcggttcacgctgcacgacggaccgccctatgccaatggggccctgcacgtgggccatgccctcaacaagacgttgaaggacatcatcaataaataccagctgctcaacgggcgccgcgcccgctacatcccgggctgggactgccacggattgcccatcgaactcaaggtgctgcagagcctcaaaggggaggaacgccgcaacctcagcccgctggagctgcgccgcaaggcccatgcctatgcccttgagcaggtggaagggcagcgccggggctttcagcgctggggcatctggggggagtgggacacgccgtatctcaccttgcagaagcgctatgaggccgcccagatcgaggtctttggccgcatggtgctggccggccacatctacaggggcctcaaaccggtccactggagccccagctcccgcacagccttggcggaagccgaactggagtatcccgacggccacacctcaccgagcgtgtttgtcgccttccccctcgagcagccctccgcagccctgaaggcgctgatggaatcccatggggaaggcccggtggccgttgcgatctggaccaccaccccctggacgctgccggcgaatgttgcggtggctgtcaacgggcgtctcgactacgccctctgctccagcggtgatggccgccgtctgctggtggccagcgaactggtggaatccctgagccagcagctggaactgccgctccaatccctggccagcctcaagggggaagaactgcagggaagtcgttatcgccatccgcttatggagcgcaccagccctgttgtggtgggcggcgattacatcaccaccgaagccggca

SEQ ID NO: 305161 - DNA, 850 bp, Unknown
  Bacterial polypeptide expressing nucleotide sequence isolated from the Sargasso Sea
ggaaatgcgcagtcccaagtcaatcagcaaaaaaaagattttattcttttaggtgttcttggtgattgggataatccttacttatcactgaataaatcttttgaagcagatactgttagagcacttggaagaattattgcaaacggtcatctagaaaaaggtgagaaacctgttcacttttgtatggattgcggatcagctttagcagaagctgaagttgaatacaaagataaaaaatctcattcaattgatgttaaattcaaagtaaaacctgaatcaattgaatctctttctaattcattcaaaacaaaaaaaatcaaagatgccttctttgtaatatggacaaccacaccttggacaatcccatctaatgtagctgtatgtattaatggaagcattgattacattctcgtaaaaagtgcaaatgaacattttgtaatagcaaaagatcttatggatgcatgctctgagcgctggaatttagagcttgaggtcattggatcagttcaagggaaagagattgaaaatattgctatgactcatcctctttatgacagagaatcaacattgcttcatgcagatcatgtaacaactgagagtggaacaggatgtgttcatactgctccagcgcatggattggatgactactttatctgcattaagaatggcctagagtttgtaaaggctttagatcatcgaggacttttcaaagaggactatggaccgttaactggactaagtacaaaaaaaggagatccagtcgtaatagagttattgaatgaaaaaaacgctctattagctaataagcaatatgatcattcttacccacattgctggagacataagtcac

SEQ ID NO: 305162 - DNA, 831 bp, Unknown
  Bacterial polypeptide expressing nucleotide sequence isolated from the Sargasso Sea
aatgaaggcgaatctgcccaatagagagcctgaaattcttaaattttgggatgaaattcatttgtacaagaaaatcagagaaaaaggtcaaggaaagaaaccattccttcttcttgacggccctccttatgcaaacggcaaaattcacattgggcatgctctcaataaaatattgaaagatttcattattaaatcaaagactttgtttgggtatgatgcaccttatcttcctggttgggattgtcatggcttaccaattgagcatcaagtcgagaagaaaaaaggcaaggtcggaccaaaactgactgcaaaagaatttagagatcattgccgtgaatatgctttgaagcaagttgaagaacaaaaagaggattttattcgtttgggcgtccctggagagtgggaaaatccttatttgacattggataaaaaatacgaagcagagcagatcagggcatttgctgagatatatgcaaacaaccatgtcacgcatgggcacaaaccagtgcattggtgcttagactgtcaatctgcattggcagaggctgaagtggactatatggataaggtttctacctcggtagatgtgttattcaaggtcattgacacttctgaatttatcataagaacagaatcaaaaaagattgatgatggtagggatttatatattccaatttggacaacaacgccatggacacttccatcaaatgaagcggtcgcgatgggaaaggatatttcctatggaatttacatgcttacctcaaatgaacgagaaattcttgtaattatcgctaatgatcttaaagaaactattaaaaatagatggaatgt

SEQ ID NO: 305163 - DNA, 247 bp, Unknown
  Bacterial polypeptide expressing nucleotide sequence isolated from the Sargasso Sea
atgagtgaaaagaaagatcaaaaactaaatttaccaaagactgaaattccaatgaaggcaaatcttaatgagagggagcctaagatgttagaagaatggtcaaaaagagaagtctacgagaagataaggaaacagaattctggaaaagaaaagttcattcttcatgatggtcctccatacgcaaatggaaaaattcatatcggacatgcggttaataaggttttaaaagaatgtagtaatcagatct

SEQ ID NO: 305164 - DNA, 979 bp, Unknown
  Bacterial polypeptide expressing nucleotide sequence isolated from the Sargasso Sea
agctgatctttatttagagggttcagatcaacatagaggatggttccaatcctctcttttaactagcatggctataaatgattgtgcaccttataaggcagtacttacccatggttttgttgtagatggtgagggtaaaaaaatgtcaaaatcactcggcaatgtcatttctccgcaaaaaatttgggaaacgatgggcgcagatgttttgagagcatggatagcttccactgactatactaaagagatagttttatcagacgatattcttaaaagatcagcagattcctacagaagaattagaaatacaattagatttcttctcggaaatcttaatgattatgacggacaaattattgaacctgataagcttactgaattagataagtggatgatcttaagaactaagacgttacaagaacaaattaaagatgattatctcaattataattttcatcaagcatttcaaaaaattcataacttttgtgcaaacgacctaggtggattctatttagatatattaaaagacaggctatatacagctagattagattctgatgcgcgaaggtcttctcaagtagcactttccaatattcttcaagccttacttagatgggtaagtcctatactttcttttactgcagaagaggcctggcaatccttagggagtgatacaaaatctgtccatctccttgagtggtttcaagattggactgaagtaggagaattaagattcttcgatgaggagtgggaaaagatattagagataagatctgaagttaataaacatatcgaagaggcgagaaataatgaaatcatagggtcgtctttagaagcagagctagaattgtattgtgatacagatatcaaaacacttttagataatttttctgaagaacttagatttatttttattacctcagaagcaaaagtttaccaacttggacagaatggaaatgatacaaatatccaaggttaa

SEQ ID NO: 305165 - DNA, 853 bp, Unknown
  Bacterial polypeptide expressing nucleotide sequence isolated from the Sargasso Sea
atgagtggaacttattgtgagcatccttttaaatctattggatatgattttattgttccagcacttgaagcagattttgtaaatttggagcaaggcacaggtatagttcatgttgctccaggacatggtgctgatgattataacttaggaatcgaaaatgatattgatgtagttcaaacagtagaggatgatggaaaatataatcgtaatgcaattggttttgagggagaacatgtttttaaagtagacttaaaaattgctgaaaaattacaatcactaaataaacttctttatttaggtaaattacgtcacagttatccccactcatggagatccaaggcacccttaatttttcgtaatacaccacaatggtttatttctatggaaaaaaacaatttaagaaaaaaagcacttaaatctattgatgaaactgttttttatcctccgcaatctcaaactagacttcgctccatgatagaaactcgtcctgattggtgcatttcgcgtcagcgcgtatggggagttccattaccactttttatcaataaaaaagatggacaacctttaagagatattaatattataaatagaatagctgatatatttgaaaaagagggtagtgatacatggtttacttatgatcctcaggaatttttaggaaccgactattcagctgatgactatgatcagattcaagacattgttgaagtttggtttgatagtggctccactcatgctttctgtttagaaaagagagaggatcttaaatggccagcttcaatgtatctggaaggaagcgatcaacatcgtggatggtttcactcttcattacttgagtcaactgggtactaga

SEQ ID NO: 305166 - DNA, 1006 bp, Unknown
  Bacterial polypeptide expressing nucleotide sequence isolated from the Sargasso Sea
gagaataaagtcaatgatagaaacaagaccagactggtgtgtttctagacagagagtctggggtgtgccgttaccaatatttatttcaaaaaaaactaataatgtacttatcgatgatgatgtatttgaaaatatcgcaaatatttatgaaaaagaaggctctgattgttggttttcagacgacccacaaaaatttttaggagataaatataaagcggaagatttcgaaaaattaaatgatatcgtcgaagtatggtttgatagtggctcaacacattcctttgtattggaaaaaagagaggatctaaaatggcctgcatcaatgtacttagagggatcagatcaacatagaggctggtttcattcgtctttacttcaatcttgtggaacaagaggtaaagcaccatttgaaagcattttatcacacgggtttgttgtagatggcaaaggtcacaaaatgtcaaaatctgccgggaatacaatatcacctgaggaaatattgaaaaaatatggtgccgatattttaagaatttgggttgcagcttcaaactatgctgaagatcttagaatagattattcaatattggaacaacatgcagaagcatatagaaaaataagaaataccttcagataccttcttggaaacttaaatgatgaggtaatagacttagattttaataatattaaagttaatgagctcccagagcttgagcaaattatgcttaataaaattcaagttttaaatactaagtttcattacaattttaacatttataattttcataatctttacaaagaattattaaatttttgcactgtagatttatcatctttttatttcgatataagaaaagacacgctttattgtgatacaaaatcttcaaaaaaaagaaaaagctgtatcgaagtacttaacgtaattataaattgcttattaaaatggtttgcacctatacttacttttaccacagaagaaatttacaaaataataaataaagatggaaaa

SEQ ID NO: 305167 - DNA, 1312 bp, Unknown
  Bacterial polypeptide expressing nucleotide sequence isolated from the Sargasso Sea
cctgatcaaaaagacctggtttgaaaaatttgcacaaattattgagaaagatggaatctcagcttgggacaagttaaatttaaaagactatatcgatgatcatgaagaatatattaaaacttctgattcacttgacgtttggtttgattctggaataacacactatgcagtttcatcaaaaagatttggtaaaaatgttgttgcagatctttatttagagggctcagatcaacatagggggtggtttcaatcatcattattaacaagtatagctatgaataactatgcaccatataaaacagttctgacacatggatttgttgtagatgaacatggaagaaagcaatcaaaatcacttggaaatgttgtcgctcctcagaaagtatgggatagcttaggagcagatattttgcgactttgggtagcttcgacagactttagaagtgaaatggtagcatctgatgaaatattgaagagaacttcagatcaatatagacgtattaggaatacttttagatttattttaggaaacttaagtgattttagtgataagaataaagttaaatttgaagatcaagttgaattagataaatgggtcattaatgaattaaaagtccttcaaaaagaaataataagcttgtatgaatcttattcttaccataaggcaatacaaaaaatacataacttttgtgttaatgaattaggaggaatataccttgatattgttaaagatagactttatacatccaagaatgattctttagcaagaagatcatgtcaaacaagccttgattttattttgaatgttttagtaaggctgattgcgccaatcctttcttatacagcagaagaaatttggcaaacaagcaatagattaaatggtcaggaggactctgtttttctttcaaatttcgatatttctgaaataaattttgaatctaatatcaatcaatctgaatggaaaagaatttttgaaattaaggatgctgtcaatcaatctatagaagaaatgcgaaatgaaaataaaattaaaggatcacttgattcagtcgtagatattcaagcttcttcaaatgacctaaatattcttaaaaagctaggcgaggaacttcattttttatttatatcttctgaagcaaatgttgaaaagagtaaagattttaaaataaaaattaattcatcaaaaaacccaaaatgtactcgttgttggcatagatgttcttcagtaggagtaaacaaagagcatcccgagctttgcaatagatgcattaaaaatatagatgataatggtgaacaaagaagttttgtataa

SEQ ID NO: 305168 - DNA, 1420 bp, Unknown
  Bacterial polypeptide expressing nucleotide sequence isolated from the Sargasso Sea
tggaaaatttttaaaagagggtagtttgtacaagggttacaagcctgttttatggtcgacagttgaaaaaaccgctttagcagatgcagaagttgaatatcaagatcatgtgtctgatacaatctatgtagccttcccagttaaaaaatccaatattaatgaattaattggttcgagtgttgtaatttggactacaactccatggactatcccagctaacaaagcattggcctataaccaaagtttagattatgttttatgtgaaatagataacaacgatattttagaaaatgaaaaaatagttattgcaaaagaacttttgagttctgttgcaaaagatactgattataaaattaagatattaaaagaatttgaaggaaaagaatttgatggaactatttgtagccatccatttcataaaattggctatgactatgatgttccaatgctggaggcaagatttgtaacaactgaacaaggaacaggaattgttcattgtgcaccaagccatggacctgatgattttaatttgtgtatcaacaatggaataaaagcaattgaaacagttgatgacgacggaaggtacacaaaacacatccccatatttgaaggaactcatattttcaaagcaaatgatattgttattgaaaagcttaaagaacttaaagctcttttaaaaaatggcaaactaacacattcttacccacattcttggagatcaaaggctcccttagttcatagagcaacacctcaatggtttatttcaatggaaagtcataaacttagagacaaagcacttaaagcaataaatgacaccactttttatcctagtaaaggaaaagaaagaattaaatcaatgatcgagactagaccagattggtgtgtttctagacagagggtatggggagttccacttccaatatttatctcaaaaaaaaacggagaaattcttatcgacgaagaagtgtttgagaatattgctaaaatttatgaaaaagaaggctcagactgctggtttgaagataattttcagagactgcttggaaataaatataaagcaggagattttgataagactagtgatattgtagaagtatggtttgatagtggatcaacacattcttttgttttagaaaagagagaagatttaaaatggcctgcatcaatgtatctagagggttcagatcaacatagaggatggtttcactcttcactgttagagtcttgtggaacaagaggtagagcgccgtttgaaagtattttatcccatgggtttgtagtcgatggaaaaggactaaaaatgtctaaatcaactggaaatgtaattgctccagaagatattttaaaaaaatatggagctgatatacttagaatttgggtagcctcatcaaattatgccgaggaccctagaatagattat

SEQ ID NO: 305169 - DNA, 1039 bp, Unknown
  Bacterial polypeptide expressing nucleotide sequence isolated from the Sargasso Sea
aatgagcaaggcacatttaaacttacctaaaactgctttttcaatgaaagctaatctaccaaataaagaaccagaatatttgaaattttgggataagattaatctatatgaaaaactaagatctcaaagtaaaggcaaagaaaaatttgtcttacacgatggacctccatatgcgaatggaaatattcatatgggtactgcattaaataaaattctaaaagatataataattaaatttcatcaaatggatggtaaagattcagtttatgtgcccggatgggattgtcatggattaccaattgaatggaaaattgaggaacaatacaaaaaaaataaaaaaaataaaaatgatgtacctattattgagtttagaaaagagtgtagagattttgcaagtaaatggattgatattcataaagatcaatttaaaagattaggagtaattggagattgggaaaacttttactctacaatgagttttgatgcagaagctcaaattgtaagagaacttggaaaatttttaaaagagggtagtttgtacaagggttacaagcctgttttatggtcaacagttgaaaaaacagctttagcagatgcagaagttgaatatcaagatcacgtatctgatacaatctatgcagtcttccaggtaaaaaaatctaatattaacgaattaattggctcgaacattgttatttggacaacaactccatggacgataccagctaacaaggcattagcatataatcaaagtttggattatgttttatgtgagatagataacaaagatattttagaaaacgaaaaaatagttattgcaaaagacctattggcgtctgttgtaaaagatactgattacaaaattgagatattaaaagaatttaaaggaaaagaatttgatggaactatttgtagccatccatttcataaaattggctacgactatgacgttcccatgctcgaggcaagatttgtaacaactgaacaaggaacaggaattgttcattgcgctccaagccacggacctgatgattttatt

SEQ ID NO: 305170 - DNA, 1288 bp, Unknown
  Bacterial polypeptide expressing nucleotide sequence isolated from the Sargasso Sea
ttatttaaatcaggcagatcgatggaaaaaaggtactgatactatggatgtttggtttgactctggctctagttggtcttcagttatttctaagaaagaaaatttaaattatccagcagatttatatttggagggctctgatcaacatcggggttggttccagtcctctttattaacttcggtagcagtgaatgaacatgcaccttttaaaaaggtccttacacatggttttgcattagatgagaatggtaggaaaatgagtaaatctttaggaaacattattgatcctttagttataattaatggtggttcaaataagaaattagatcctgcgtatggagctgatgttttgaggttatgggttagttctgttgattattctgcagatgttcctattggatcaaacatactaaagcaaatttctgatgtttaccgtaaggttcgaaatacgtctaggtatctattaggtaacctctatgattttgattataaaattgattccattgatattgctaacctaccattgttagataaatggatgttgaatagaacagctgaagtaattgatgaaatatcagatgcatataataattttgaattttcgaaatttttccaaataattcaaaatttttgtgttgttgatctatctaatttttacttagatattgcaaaagataggttgtatgtgagttctaaatctgactttagaagaagaagttgtcagacagttttatccttggtaattgaaaaaatatctggattaattgcacctgttttatgtcatatggcagaagatatttggcagaatattccatacgacttagaggaagcctcagtatttcaaagaggatggcctaatgtacctaagtcatggcgaaatagtagttttaattgtcatgtgactgaactccgtaaactcagagcagttattaatcgtatgttggagagttgtagaaataatcaagagttaggttcttctttggaagcatcagtaagggttgatatatctgatgaaaaagttaaagctgctattgaatggctatctgaaagcgaatctaataatgttgatgtattaagagattggttcctagtttcatctttacaaattggcggtgagccatgggctgaggttttagttagtgaggacaatgattatgcttcagtcgaaattgcaaaagcaaggggatttaagtgtgaaagatgttggcattatgaaatagaaatgagcaagaatcctcaacacacaaatatttgcaaaaggtgcgaaaaaatagtattagctatttaa

SEQ ID NO: 305171 - DNA, 1195 bp, Unknown
  Bacterial polypeptide expressing nucleotide sequence isolated from the Sargasso Sea
gtggaaattgaggagcaatataaaaaaaataaaaaaaataaaaacgatgtacctgtaatagagtttagaaaagagtgtagagactttgcaagcaaatggattgaaatccataaagatcaatttaaaagacttggagttattggagactgggaaaactactattctacaatgagttttgatgctgaggcacaaattgttagagagctcggtaaatttttaaaagaaggaagtttatttaaagggtataagcctgttttatggtcaacagtcgaaaaaactgctttagcagatgctgaagttgaatatcaagatcatatatcagatactatttatgcagcttttttagttaaaagttcaaatataaaagagattattggatctaatattataatttggactacaaccccatggacaatacctgcaaataaagctttagcttacaatcaaagtttagattatgttttatgtgagataaaaaacaaagataaattaaataatgaaaaaataataatcgcaaaagagctattagagtctgtttcaaaagatacagaatgtaaaataaatatactttctaaatttaaaggaaagaaatttgaaggaactatatgtagtcatccatttcacaaaattggatatgattataatgttccaatgcttgatgcaagatttgttacaacagaacaaggaacaggtattgttcattgtgcacccagtcatggacctgatgactttaacttgtgtataaacaacgggattaaagcagttgaaacagttgatgacgatggaagatatactaatcatataccaatatttgaaggaacacatatttttaaagctaatgagattgtcatagacaagcttaaggaaacaaataccctattatccaacggaaaacttactcattcctatccacattcttggagatctaaagctccattagttcacagagcaacacctcaatggtttatctcaatggaaagtcataaattgagagataaagctcttaaagctatagatgatacaactttttaccctgcaaaaggtaaggaaagaattaaatcaatgattgagactaggccagattggtgtgtatccagacaaagagtatggggtgttcctttaccaatatttatttcaaaaaaaaatggagagattttgatagatgatgaagtttttgaaaatatcgcaaaaattt

SEQ ID NO: 305172 - DNA, 1300 bp, Unknown
  Bacterial polypeptide expressing nucleotide sequence isolated from the Sargasso Sea
aatgagcaaaagtaatatcaatctacccaaaactgccttttcaatgaaagcaaatttacaaaataaagaacctggaataattgattactgggataaaattgatttatataaaaagttacgatcaattggcaaaggaaaaaaaaaatttattcttcatgatggtcctccatatgccaatggggacatacacatgggaacagcacttaataaaatccttaaagatgtaatagtaaaatttcatcaaatgaaaggagaagattctgtttatgtgccaggttgggattgtcatggtttaccgattgaatggaaaattgaggaacaatataaaaaaaataaaaaaaataaaaatgaagttccggtaaatgaatttagaaaagaatgtagagattttgctaagaaatggattgaggtacataaaaagcaatttaaaagacttggggtagtaggtgactgggaaaattattactctacaatgagctttgatgctgaagctcagatagttagagaacttggtaaatttttaaaagaaggaagtctttatcggggatataaacccgttctttggtccactgtagaaaagacggcattggcagatgcagaagttgaatacatggatcataagtctgatacaatttatgcagcatttaatattaaaaaatcaaaaaatgagaaacttttaaatacccaaattataatttggacaacaaccccatggactatacctgccaatagagctttagcttacaatgaaaatttaaaatatgtaattattaaaatagaagatcaatcagattttaaagataaacaaatagtagtagcagaagatttgttaaaatctttaatagaggattgtaatatcaaaaagtttacaaaagttttaaacttttcaggaaaagaatttcaaggaacaatttgtactcatccattttcaaaaattggatttgattatgatatcccaatgttaagcgcaaattttgttacgacagaacaaggttcgggaattgtccactgtgcacctagccatggtcctgatgattttaatttgtgtttaaaaaataatataaaagctgaagaaactgtagatgatgacggaaaatacacaaaacatgttccaacttttgaaggtatacatatttttaaggctaacaaagtagttatagaaaaactaaaagaacaaaaaaatttattatctagcggggaattaattcattcttatcctcattcttggcgttcaaaagcacccttggttcatagagcgacacctcaatggtttatttcgatggaaagtcatggattgaga

SEQ ID NO: 305173 - DNA, 1006 bp, Unknown
  Bacterial polypeptide expressing nucleotide sequence isolated from the Sargasso Sea
actgactcatggatttgttgttgatggcgaaggacagaagatgtcaaaatctcttggaaatgttatttcaccacaggatatcattaaagagaagggctcggatatcctgagactatggattgcaaataccgattacacaaaagaaatgactatatctgacgagattctcacaagaacaagtgaaagttatagaagaattagaaatactattaagttccttctatcaaacattaatgactatacttcagatggacaaatacaaactgaagatatgccgcttgttgacaaatggattctaaatgaaactcaggatttacaggatagagtaacaagatattatgaagaatttaaattccaccagattacacaagatattcaaaacttctgtacaatttatcttggtggatactaccttgatataattaaagatagactatacacagtaaaaacagactctatgtctagaagatcatgtcaagaagcatgtaaaagaatcctaaaaattcttaataaaatcatttctccgatattatcttttactgcagaagaggtattcaattactataagattaaggatgaagaaagcgttttctacacagaatggccggaacacacttgtaatttaagcgataaagaacaagaaatcgggaatgtgctttttcagttgaggcaaacggtctcaaaagaattggacgatgcgcggaatgctaataaaatcggatcttcccttgatgcaaacattatcctgaaattaaatcataagaagtttaacttacttaaagattatgaagatgagttaaagtttattttcatttcatcttcatgcgatattgttgataatggtaatgataatgatgaaataactatcaactcgtcaccacataaaaagtgtacaaggtgctggcataaacatgaaagtgttggcactattgagggccatcctgaaatttgtgaaaggtgttttagtaacatcgaaggtgatggcgagacaagaaaattagcttga

SEQ ID NO: 305174 - DNA, 1147 bp, Unknown
  Bacterial polypeptide expressing nucleotide sequence isolated from the Sargasso Sea
tatgagcaaggaagatataaatttaccaaaaacttcattttcaatgaaggcaaacctaccaaataaagaacctgaaattttaaaaatttgggataggttagatctttacaaaaaacttagagagtccagcaaaggaaaagagaaatttgttcttcacgatggccctccttatgcaaatggacatatccatatgggtacggcattaaataaaattctcaaagatatgattacaagatttcatcaaatgaacggaaaagactcagtttatgttccaggatgggattgtcatggactgcctatagaatggaaaattgaagagcaatataaaaaaaataaaaaaaataagaatgatgttccagtaattgagtttaggaaagaatgtagagaatttgcgaataaatggataaaggtacacaagagtgaatttagtagacttggtgtaattggtgactgggacaattattattcaacaatgtcattcggagctgaagctcaaattgttcgagagctcggtaaatttttaaaagaaggaagtctatatagaggttataagccagttctttggtctacagttgaaaaaacagctctagctgatgctgaagttgaatatatggatcttgtttcagatacaatttatgctgctttcaaagtaaaagaatccagtttagattttatcaaaggtgcggatatagttatctggacaacaactccttggacaattcctgcaaataaagctttagcctacaatgcaggattaaaatatgttttgatggaagtaaatgatgataaaaattttgtgaacagaaaaatagtaatagcaaaagatttattagaaccatttaaaaaagacacatcaattgagaaagtaaatatcttagaagagttcaacggaaaggaatttacaaatacaatttgtaggcatccattttctgaattaggatatgattatgatattcctatgcttgaagcaaattttgttacaactgaacaaggtactggcatagttcactgcgctcctagtcatggacctgacgattttaatttatgtataaacaataatattaaggcaattgaaactgtagatggtgatggaaaatacacaaatgagataaaaatttttgaaggcttgcatatttttaaagcaaat

SEQ ID NO: 305175 - DNA, 1273 bp, Unknown
  Bacterial polypeptide expressing nucleotide sequence isolated from the Sargasso Sea
gctgatcactggattgaaatacagcgcgaagaatttaaacgtttgggcgtgatgggcgattgggacaatccctacacgacaatggcctacaaggccgaggcacgtattgccgcggaaatcggcaaattcctgattaacggtggactgtttcggggatcaaaacctgtgctgtggtcagttgttgaaaaaacagctctggcggaagccgaagtggaatacatggagcacaagtcgacgacgctctttgtccggttccccgttacatcaactccagacgccgcgataaagggaaccaacatcgtaatctggacgacgacgccgtggaccattcccggcaatcgcggcatcgcgttcagcgccgaggacaaatacgggatctatgaagtaaccgccattaccgaaacaagtaaggccctgattggtgaacgcctggttctggcagacaagctagccgaatcagttagggaagtcgcccacattgaaagctggatccgggtctccgacgtaaacgaattggacggcactatctgcgcccacccttggcgcggcaaagggtttgacttcgacgtgccggtcttacccggcgaatttgttacaatggagcaaggcacgggattggtccatattggaccgggacatggtactgacgattttaattttgctatcgaacacggcctcgaaattccgcaaactgtcggcgaggacggctcattttacgcgcacgtcccgttggtaactggcaaagtcatctatacccaggatggaaaatccggagacgccaatggcgccgtcattcgagaactcctggaggtagacggcttacttgccaaatcaagtttccgccacgaatatccacactcttggcgctcaaaagcgccactaatcttccggaatacggcgcaatggttcatttcgatggatatcaacgacctacggaagaaagcgctcaatgccatcgaccaaacgaagttctatccaaaacaaggaaagaaccgtctctattcgatgatcgaaaatcgcccggattggtgtgtatcgcgtcaacgggcatggggcgttccgatcacagtctttgttcataaaaaaaccggcgaacccttgcgcgatcaaaaagtcgtcgaccgaattgtagacgcgtttcgcaaagaaggtgcagatgcatggtttgtcagccccaccgaacgtttccttggtgacgaatacgacccggatgactttgaacaagtccgggacgttgtggacgtgtggttcgattcaggctcgacccacacat

SEQ ID NO: 305176 - DNA, 831 bp, Unknown
  Bacterial polypeptide expressing nucleotide sequence isolated from the Sargasso Sea
aatgagcaaagaacaaataaatttacctaaaacagctttctcgatgaaggcaaatcttccagttaaagaaccagatttaattaagtattggacaaatattaatctttacaagcaattaagagataaaagcaaaggtcaaaaaaaatttgttttacatgatggccccccttacgctaatggaaatattcatatggggacagctcttaataagattttaaaagatattgtaaccaaatttcatcaaatgagtggtcaagactcagtttatgtgccaggatgggattgtcatggtttgccgatagaatggaaaattgaagaacaatataaaaaaaataaaaaaaataaaaacgatgttccgatagttgaatttagaaaagagtgtcgagagtttgcagaaaaatggattgaaatacataaagatcaatttcaaagattaggggtaattggtgactggaataattattactcgacaatgagcttcgatgctgaagcccaaatagtcagagaattaggcaagttcttaaaagagggaagtttatacagaggctataaaccagttctttggtctacagtagaaaaaacagcattagcagatgcagaagttgaatatttagatcatacatcggataccatatacacctcttttccagtaaaaaaatcaaaaaataaatatctattagattgtgaagtaattatttggactactacaccctggacaattcctgcaaacaaagctttggcttataataaaagtcttaaatatttaataatcgaggtgactagtgattctgattttaaaaataaaaaagtaatagttgcgaaagatttatt

SEQ ID NO: 305177 - DNA, 1105 bp, Unknown
  Bacterial polypeptide expressing nucleotide sequence isolated from the Sargasso Sea
atgtcgaaagatactttacaacttcccaagacggctttctcgatgaaggctagtttgccattaaaagaacctgaaattttgaagaaatgggaaaaaaataagatttttgaaaagttaagaaaaaagtctaagggaaaagaaaaatttatacttcatgatggtccaccttatgcgaatggtcatatacatatgggtaccgcgttgaataaaattttaaaagatatgattactcgatttcatcaaatgaatggcaaagactctgtttatgttcctggctgggactgtcatggattaccaatagagtggaagattgaagaacagtataaaaaaaagaaaaaaaataaagacgaggtacctattaaagattttagacaagaatgtagagaattcgcaaaaagctggattaatgttcatatcaaagaatttaaacgattaggagtagtcggagactttgaaaattattattccacaatgagttacgaagctgaggctcaaattgttagagagttaggtaaatttcttttaaatggaagtttatatcaaggttttaaaccagttctttggtctactgttgaaaaaactgctttagctgatgctgaagtcgaatatttagatcacacttctaatacgatctacgttgcatttaaagttaaagaaacaaataaagactttcttaaagatacaagcataataatttggacgactacgccatggactatacctgccaacaaagcattagctttcaatagtaatattgaatacacaatactagaaattgataatcttgaacattttaaagacaaaagaatagttgttgcaaaaaatttaattgaatcaataactaaagcatgtgaaatcaaaaactataaagaattaaagtcttttaaaggttcagaatttacaggaacaatatgcaaccatccatttctcaaaatggattttgactataatgttcctatgttagatgcgcaatttgtaaatttagaacaaggaacaggaattgttcattgtgctccaagtcacggtccggatgattttaatttgtgtttaaaaaataatataccatcactttacacagttgataacgctggtgtttatacccaag

SEQ ID NO: 305178 - DNA, 931 bp, Unknown
  Bacterial polypeptide expressing nucleotide sequence isolated from the Sargasso Sea
atgactaaatcacaaataaatctgccaaaaactgctttttccatgaaagctaacttacctactagagagccagaaattcttgaatattggaaaaaaataaatctttacgaagagttaagaaatgaaagcaaaggaaaggaaaaatttgttctgcatgatggacctccatatgcgaatggaaatatccatatgggaacggctcttaataaaattcttaaagatataattgtaaaatttcatcaaatggatggaaaagactcaatttatgttccaggttgggattgccatggtttgcctattgagtggaaaattgaagaacaatataaaaaaaacaaaaaaaataaaaacgaagttccaattgttgagtttagaaaagaatgtagagcatttgctgagaagtggattgaagttcacaaaagccaatttaaaagattgggtgttgtgggggattgggaaaattattactccacgatgagctttggagcagaagcacagatagttagagagcttggtaaatttttaaaagagggaagtctttatagaggcttcaaaccagttttatggtcaacagttgagaagactgcacttgcagatgctgaggtagaataccaggatcataaatcagatacaatttatacttcattcaaagttaaatcatctgatttaaaagatttagctggaagtgaaatagttatttggacaacgactccatggacaattccagccaataaagctttagcatataatgactctcttgattatataatattagaaataaatgacgaaggagattttaaaaatagaaaaattgtcattgcacatgctttactagaaacagttgttaaagagtgtggaataaaaaattataaaaaaattcatacctttaaaggaaaagattttgataatactatttgtagtcacccttttttaa

SEQ ID NO: 305179 - DNA, 1329 bp, Unknown
  Bacterial polypeptide expressing nucleotide sequence isolated from the Sargasso Sea
aatgagcaaaagcaatatcaatctacccaaaactgctttttcaatgaaagcaaatttacaaaataaagaacctggaataattgattactgggataaaattgacttatataaaaagttacgatcatctagcaaaggaaaaacaaaatttgttcttcatgatggccctccatatgccaatggggacatacacatgggaacagcacttaataaaatccttaaagatgtaatagtaaaatttcatcaaatgaaaggagaggattcggtttatgtgccaggttgggattgtcatggtttgcctattgaatggaaaatcgaggaacaatataaaaaaaacaaaaaaaataaaaacgaagtcccaataaatgaattcagaaaagaatgtagagatttcgcaaagaaatggattgaagtacataaaaaacaatttaaaaggcttggagtagtaggtgactgggaaaattattactccacaatgagttttgatgctgaagcccaaatagttagagagcttggtaaatttttaaaagaaggaagtctttaccggggatataaacctgttctttggtctacagtagaaaagacagcattggcagatgcagaagttgaatacatggatcataagtctgatacgatttatgcagcatttaatattaaaaaatcgaaaaatgaaaaacttttgaatacacaaattataatttggaccacaactccatggaccataccagctaatagagctttggcttacaacgaaaatttaaaatatgtaattattaaaatagaagatgaatcagattttaaagataaacaaataatagtagcagaagatttgttaaattctttaataaaggattgtaatattaaaaagtttacaaaagttttaacattatcaggaagagaatttgaaggaacaatatgtagccatccattttcaaaaattggatttgactatgatattccaatgctaagtgcaaattttgttacgacggaacaaggctcgggcattgtccattgtgcacctagccatggtcctgatgattttaatttgtgtttaaaaaataatataaaagctgaagaaactgtagatgatgatgggaaatatacaaagcatgttccaacttttgaaggtatacatatttttaagtctaacaaaatagttatagaaaaactaaaagaacaaaaaaatttattatcttgtggggaattaattcattcttatcctcattcttggcgctcaaaagcacccttggttcatagagcaacaccccaatggtttatttcgatggaaagtcatggcttgagaaagaaagctttaaaatctatagatgaaac

SEQ ID NO: 305180 - DNA, 1200 bp, Unknown
  Bacterial polypeptide expressing nucleotide sequence isolated from the Sargasso Sea
aatggccgaaaataatttaaatcttcctaaaacattgttttctatgaaggcaaaccttccttctaaagaaccaaagattttggataattgggataaaacaaaactttatgaaaaattgagaaagaaatcgtcaggaaaagaaaaatttatactccacgatggtcctccctatgcaaatgggcatattcatatgggaacagctttaaataaaattttgaaagatattgttacgaagtttcaccaaatgaataataaagactcaatatatgttcccggttgggactgtcacggattaccaatagaatggaaaatagaagaggaatataagaagaagaaaaaaaataaagacgaaattccaacaaaagattttagaaaagagtgtagagagttcgcgcagaaatggattggtattcacaaaactgaatttaaaagattaggtgttattggggactgggaaaattattattctacaatgagttttgatgcagaagctcaaattgtaagagagcttggaaaatttcttttagaaggaagtctttatcgtggtttcaaaccagttttatggtcaaccgtagaaaagacggctctggctgatgctgaagttgaatataaagatcataagtcaaatactatttatgctgagttccatattaaaaaaactgataaagattttttgaaagatgcttcaattataatttggacaactactccctggacaattccagctaataaagctctagcatataacaaagacttaaaatattctgttttacagcttgataataaaaaaattgttgtagcagaaaaattaattgactccgtaatagagaattgcggtttaggaaaattcaaaattttaaaatcgtttgaaggtcaattatttaaaaatacgatatgctcacatccttttaaaaatttaggttacaattttgatgttcctatgttggaagcagactttgttactctagaacaaggtactggaattgttcattgcgctcctagtcatggcccagatgactttaatttatgtttaaaaaatggaatgaaagctatagaaactgttaataatgacggcaggtatacaaaaaatattcctatttttgagggtacacacgtcttcaaagctgatgaaattattataaaaaatttaagtgagcaaaaaaatcttttgggcagtggtaccctagttcatagttaccc

SEQ ID NO: 305181 - DNA, 1411 bp, Unknown
  Bacterial polypeptide expressing nucleotide sequence isolated from the Sargasso Sea
cctgattggtgcatttcaagacaaaggtcatgggggagttccaatagcattattgatacatactgaaactggtgaactgcatcccgaaacacctgaagtcatagagaaggtagcagtattagttgaagctaaaggtattcaggcgtggcatgatgtcgccattaaagacttagtagatgatcatcaagattatgaaaaaataaccgattgtttggatgtgtggtttgattcaggagttacgcatgcttgtgtattaagtgctaataatgaattgcaatttccagctgatctttatttagagggttcagatcaacatagaggatggttccaatcctctcttctaactagtatggctataaatgattgtgcaccttataaggcagtacttacccatggttttgttgtagatggtgagggtaaaaaaatgtcaaaatcaatcggcaatgtcatttctccgcaaaaaatttgggaaacgatgggcgcagatgttttgagagcatggatagcttccactgactatactaaagagatagttttatcagacgatattcttaaaagatcagcagattcctacagaagaattagaaatacaattagatttcttcttggcaatcttaatgattatgacggacaaattattgaacctgataagcttactgaattagataagtggatgatcttaagaactaagacgttacaagaacaaattaaagatgattatctcaattataattttcatcaagcattccaaaaaattcataacttttgtgcaaacgacctcggtggattctatttagatatattaaaagacaggctatatacggctagattagattctgatgctagaagatcttctcaagtagcactttccaatattcttcaagccttacttagatgggtaagtcctatactttcttttactgcagaagaggcctggcaatccttaggaagtgatacaaaatctgttcatctccttgagtggtttcaagattggactgaagtaggagaattaagattctccgatgaggagtgggaaaagatattagagataagatctgaagttaataaacatatcgaagaggcgagaaataatgaaatcatagggtcttctctagatgcagaactagaattgtattgtgatacagatatcaaaagacttttagatgatttttctgaagaacttagatttatttttattacatcagaggcaaaagtttataaatctagacaggatggaaatgataccaacatacaaggcttaaagataaatgttcgaaaaaccaaatataagaaatgtgttcgatgctggcatagtcgacctgaagtagggaccatcaaaggtcatgaagctatttgtcaaagatgctacgaaaatgttgaagggaatggtgaaattagaatttttgcgtaa

SEQ ID NO: 305182 - DNA, 1213 bp, Unknown
  Bacterial polypeptide expressing nucleotide sequence isolated from the Sargasso Sea
tggttcgactcaggatctagctgggccgcagtatgtgaactgagaagtgaattaaagtatccagcagatctttatttagagggctcagatcaacatcgaggatggtttcagtcttctttgctaacatctgttgcagtaaataataaacctccttataagaaagttttaactcatggttttgcacttgatgaaaacggaagaaaaatgagtaaatctttaggaaatgttgttgacccaaatataattattaatggaggtaataataaaaaaactgaccctgcttatggtgctgatgttttaaggctatgggtaagctctgtagattattcagttgatgttccaattggttcaaatatactcaagcaactttcagacgtttacagaaaagttcgtaatactgcaagatatcttctaggtaatattcatgattatgatcctaaaattgatagttttgaaattgatcaattacctctcttagatcaatggatgttaggcagattagttgaggttacagagcaaatatcaaatgcttatgaaaattatgaattttcaaaatttttccaaattttgcaaagtttttgcgttgtagatctatcaaatttttatctggatattgcgaaggataggttatatgtaagttcaaaatcacaatttaggagaagatcttgtcagttcgttatgtcaaaagttgtagaaaatttagccgtacttatttctccagtgctttgtcatatggctgaagatatttggcaaaatattccatattcaactgaagaaaaatcagtttttcaaagaggatggccaacattttcgcagtcatggagaaaccaaatagttaatgagcacattgcaaatttaagaaatttgagagttgaaattaacaaggctatagaaggatgtaggaataaacaaataattggcgcagctttggaaactgaagttaattatttacctgaagatcaatctttaaaagattcacttacatggctaaaagaatttggcaatcaagatgtagatttatttagagattggcttatagtatcaaacttccaagtggtgtcggatttggtggagaattctctgattattgataacaatgcacttggtaaaattcaaataaataaagctcaaggtcaaaaatgtgatagatgttggcattatcaaaaagaaacttttaatggaatccaaaatacaaaattatgcaaaagatgtt

SEQ ID NO: 305183 - DNA, 370 bp, Unknown
  Bacterial polypeptide expressing nucleotide sequence isolated from the Sargasso Sea
atgaaagattataaagacactttgaatctgccaggtacgtcttttgcgatgaaggcgaatctgcccaatagagaacctgaaattcttaaattttgggatgaaattgatttgtatagaaaaatcaggaaaaaaagtaagggcaagaagccatttctactgcttgatggccctccttacgccaacggaaaaattcatataggccatgctctcaataagatcttgaaagatttcatcgtcaaatcaaagacattatttggatatgatgcaccttatcttcctggctgggattgccatggcttaccgattgagcatcaggtagaaaagaagaaagggaaaggttggacccaagctgacagcaagagaatttaga

SEQ ID NO: 305184 - DNA, 2513 bp, Unknown
  Bacterial polypeptide expressing nucleotide sequence isolated from the Sargasso Sea
aatttttcacttaattcaattgcaaaagagattgaagatttcttgggctaaaaataatgtctttatcaaatcatcaaacagaaataacagagaaaactttgtgttttttgaaggtcctccttctgcaaatggcaagcctggaattcatcatgtaatggcaagaacgataaaagatgctttttgtagatataagactattaaaggatttaacgttaagagaaaagccggatgggatacccacggacttccagttgaattaggcgtagaaaaggaactggggatttcaaaagatgatattggaaataagatcagtgtgtcggaatataataggcaatgtaaagaagctgtgatgaaatatacttctgactgggaatctttaacaaaagagatgggttattggattgatatgtctgatccttatgtaacatttgaatctaaatatatggaatcagtatggtggattataaaagacatttacaagaagaatttgatatataaaggctatactgttcagccctattcacctgctgctggatctggtttaagctcacatgaacttaatcagcctggtgcatatagagatattactgatacatctgttgttgctcagtttaaatctgtaaaaaaagggctgcctaatgaattaattaatctatatccattttattttcttgcttggacaactacaccgtggacactcccctcaaacacagcattaacaattggtaagaagattaaatattcttttgttaaaacgtataatcaatacactaaagagttagtaactgttgtaatagctactaaactaattgataagattttttctaaaattttttatgaggtaaaaactgagaaagaatttgactcatatgatactaaaaggtccaatataccttatttaatatttcatgaagtgtctggtaaagatctagaaaatattagatatgaaagaatttggcaagaatctcctatgccattggataatccagaaaatgcatttagagtaataattggagattttgttactactgatgatggaacaggaattgttcatacggctccgacatttggagcagatgactataaagctgcaaaatcagcaaaacctgaagttccaccattacaagttttagataaaaacggcattaaagttccacttgttgatcttaaaggaaaatttattgacggtattggattaataagtggcaaatatgttaaaaatgaatattatgaatcagattctatgccagaaaaatctgttgatgttgaaatagctattagacttaaagaattaaatcgcgcatttaaagtagaaaagtattcacattcttatcctcattgttggagaactgataagccagttctttattatccaatggaatcttggtttataaagatggatagcttatcgaacagaatgtttgaattaaatcaggaaattaattggaaacctaagtcaactggtgagggtagatttggtaactggttaaagactgctaatgattggaatctttcaagatcaagattttggggaattcctctacctatatggactgatgaagaaaatgaagaaatcaaagtgattggttctgcaaaagagcttattaatgaaattgaaacttcagtgaaaaatggtcatatgttatctaatccctattcggattttgatattggtaatatgtcagatgagaattatttaaatttagatcttcataaggatattgtcgatgaaataactcttacatcaagtaaaggaaagcccatgaaaagggagaaagatattattgacgtttggtttgattcaggatcaatgccttatgcccaatttcattatccttttgagaacaaagatttaattgataataaaattaattttccagcagatttcattgcagagggggttgatcaaacaagaggatggttctatactcttcacgctatttcaactttagtgtttgactcaatttcatataaaaacgttgtatcaaatggtttagttcttgataaaaatggacataaaatgtctaagagactgggaaatgcggtagatccatttaaaatgatagatgaatatggtgctgatgcagttagatggtatatggtttcaaactcaaacccatgggacaatttaaagtttgatcaggagggtgtagctgaagttaaacgaaagttttttggcacgttacataatgtatacagtttttttagtctttatgctaatattgacaatttttcatataaagaagaaataatagagtttgaaaaaagatcagaattagatcaatggatactgtcagaattgaactctttaataaaaaaagtagataatcattacaatgaatatgatttaacccctgcttcaagagaaattagtgattttgttcaagaaaaactaagtaattggtacgttagattatctagaagaagattttggaagggtgagtataataatgataaaatttctgcatatcagactctatatgagtgcctagcctccattagtaaagttattt

SEQ ID NO: 305185 - DNA, 856 bp, Unknown
  Bacterial polypeptide expressing nucleotide sequence isolated from the Sargasso Sea
aatgagcaaagagaatattaatcttccaaaaactcaattttctatgaaggcaaacttaccttcaaaagagccaggatttatcgaatactgggataaaataaaattatacgataaattaaggaaatctacccagggtaaagagaaattcgttcttcatgatggtcctccatatgcaaatggtaatattcatatgggtacagctctaaataaaatacttaaagatattataacaaagtttcatcaaatggatggaaaagattctgtctatgtccctggctgggattgccatggccttccaatagaatggaaaattgaagaacaatataaaaaaaataaaaaaaataaaaatgaagttcctattactgaattcagaaaagaatgtagagattttgcaaataaatggattaaggttcataaagatcaatttaaaagactgggagttattggtgactgggaaaattattattcaacaatgagttttgatgcagaagctcaaatagtgagggagctaggaaaatttttgaaagaaggaagtctttacaaaggatataagccagttctttggtcaactgtagaaaaaactgcactgtcagatgctgaagtagaatatatggaccatacatcagatacaatctatgcatcttttataattaaacagtccaaaattaaagagctaaatgattcagaaataattatttggacaacaactccttggacaattcctgcaaataaagctttagcttataaatataaattgaagtatttacaagttttattgctagatgaaaatgaaataaaaaatagaaaaattattattgcaaaagattttattaattcagttatcaagggattgtaa

SEQ ID NO: 305186 - DNA, 1242 bp, Unknown
  Bacterial polypeptide expressing nucleotide sequence isolated from the Sargasso Sea
aatgtcaaaagataccttacaacttcccaaaacagctttttcgatgaaagctagtttaccacttaaagagcctgaaattttgaagaaatgggaaaaaaataaaatatttgaaaagcttagaaaaaaatctaaaggaaaagaaaaatttgttcttcatgatggcccaccttacgcgaacggtcatatacatatgggtactgcgttaaacaaaattttaaaagatatgatcactcgttttcatcaaatgaatggaaaagactcagtttatgttccaggttgggattgtcacggccttccaatagagtggaagatagaagaacaatacaaaaaaaagaaaaaaaataaagatgaagtgcctattaaagattttaggcaagaatgtagagaattcgcaaaaagttggatcgaagttcacattaaagagtttaagcgattaggggtggttggagactttgaaaattattattccacgatgagctatgaggcagaggctcaaattgtaagagagttaggtaaatttcttttagatggaagtttatatcaaggatttaaaccagttctttggtctactgttgaaaaaactgctttagctgatgcagaagtagaatatttggatcatacttcgaatacaatttatgttgcatttaaagttaaggaaactgataaagattttttaaaagacacaagcattataatttggactactacaccctggactatacctgctaacaaagctttagcttttaacagcaatatcgaatacacagttttggaaattgatcagcttgagcattttaaaaataagagaattgtagttgcaaaaaatctaattaaatcaattactaaagagtgtgaaattaaaaactataaagaattaaagacttttaaaggttctgattttaaaggaacaatatgtagtcatccattttttaaaatggattttgactatgatgttccaatgttggatgctcaatttgttaatttggagcaaggaacggggatcgttcattgcgctcctagccatggtccagatgattttaatctatgtttgaaaaataatataccttcactttatacagttgataactcaggcgtttatactaaagaggtaccttattttactaatacacatgtatttaaggctgacccgattattatagaaaaactaaaagaacagaaacaattacttaaaaatgataaacttaatcatagttatcctcattcatggagatctaaggctcc

SEQ ID NO: 305187 - DNA, 1251 bp, Unknown
  Bacterial polypeptide expressing nucleotide sequence isolated from the Sargasso Sea
gaaatatttcatcaatttatgaaaaggaggggtctgattgttggttttctgaagattttcaaagatttttaggtaaaaaatataaagctgaagattatgataaattaagcgatatagttgaggtttggttcgatagtgggtctacacactcatttgttttagaaaaaagagaggatttaaaatggccagcatcaatgtatttagagggttcagatcaacataggggttggtttcattcatcattattagaatcttgtggaacgagagatagagcacctttcgagtcaattttatctcatggttttgttgtagatggcaaaggcctaaagatgtcgaaatcgctgggaaatgtaatagcacctgaagatattttgaaaaaatatggtgctgatattttaagaatttgggtagcatcatcaaattatgctgaggacttaagaatagattactccattttagatcaacacgcagagtcttatagaaaaattagaaatacttttagatatttactaggaaacattaatgataaatatgaaacaataaattttgatgagctagatgtagatagtttacctgagttagaacagttaatgctacataaaatttatgttttaaatagtaattttaaaaaatattttaaaaattatgattttcacaatttatataaagaattattaaatttttgcactgttgatttgtctgctttttactttgatattagaaaggataatctttattgtgatcctatagacacagaaaaaagaaaatcaacaattttacttcttaatattattttaaatgctctactaaaatggtttgcacctatactatcttttacaacagaggaaatttttaaattgttgtttaaagaccaaaaaagtattcaccttgaaaaatttttagaatttcctgataaatttaaaaatgaaaagcttagtaataaatggattgaattagtaaaaataagaaatatttgcaatattagtattgaggaaaaaagagctagtaaggatataggatcaagtttagaagcagatttaaaaatacaactaaatcaaaaattaaaaagtcttacagaaaacacagatttttcagaactttgtataacctcaagtgctgaagttagttataaggatgatatcgagacaaccgcaattactagcaaggcaaatggatcgaagtgctctatttgttggaagattaaagaatcagcttgtagtagagctaattgtgctgtgaacatagcatgat

SEQ ID NO: 305188 - DNA, 1355 bp, Unknown
  Bacterial polypeptide expressing nucleotide sequence isolated from the Sargasso Sea
tgcgaatggccatatacatatgggtacagcactaaataaaatattaaaagatgttattgttcgaacacaacaaatgtcaggaaaagattctatctatgtacctggatgggattgtcatggtttacctatagaatggaaaattgaagaacaatatagaaaaaaaggcaaaaacaaagatgatgttccaatagttaaatttagacaagaatgtagagaatttgcagaaaaatggatttcaatacaaaaagctgaatttaaaagactaggagttgaaggagattggccaaacccttacctaacaatgtcaaatgaagccgagggacaaattgttagagagcttggaaaatttttattagataaaagtttgtataaaggggcgagacctgttctgtggtcagtggtggaaaaaactgcattagcagatgcagaagttgaatacgaagatcataattcaaatactatttatgttaaatttcttattaccaaatcaaaaaataatgaatttttagattcaaatattgtaatttggactactacaccatggacaataccaggtaatagggctttagcttatggtgaaaatcttgaatattgtttaattgaagttaatgaaataaataaaaatagcttagctataattggagaaaagttaattcttgcaaaagatttaattacaagagtaacagaagaaataggtataactaaatttaataaaattaaggaatttagtggaagcttattaaaagatgttgaatgtgaacacccatttaaaaaattaggttatgatttcgtagtacgtttatttcatggagattttgttaatcttgatcaaggaactggaattgttcatatagctcctgcacatggagacgatgactattatttaggaataaaaaatgatgtagatattgttcaaacagtattagatgatggtaaatttaaccaacatgcaaaaggttttgaaggagatcatatatacaaggtagataataagatttctgataaactaaaagaatacaataaattgcttaaacaaggaatacttaggcatagttacccacactcctggagatcaaaagcaccactaatatatagaaatactccacaatggttcatttcaatggaaaaaaaagatttaagaaaaaaagccttaaaatcaattgatgaaactattttttatcctgctcaaagtaaaattagattgcgatctatgatagaaacaagacctgattggtgtatttcaagacaacgtgtctggggtgttccattaccattatttgttaataaaaaaaatggacaacctttacgggatattgaagttgttaacaggattgcaaatatatatgaaaaaagaa

SEQ ID NO: 305189 - DNA, 1084 bp, Unknown
  Bacterial polypeptide expressing nucleotide sequence isolated from the Sargasso Sea
taggaaaattttactagagggtagcttatatagaggttttaaaccagttttgtggtcaacagttgagaaaacagctctagcagatgctgaagttgaatatcaagatcataaatcaaatactatttatgcagaatttgaagttaaaaatactgatcaagattttttaaaaaatacctcagttatcatttggacaacaactccttggacaattcctgcaaataaagctttagcttataatcaaaacttaaaatattcagttttacaacttgataataaaaaaattgtaatagctgaaaaactaattaattctgttatagaaaattgtgaattaggaaaatttaaaattttgaaatcttttgaaggaaaactatttcagaagacagtatgttctcatccatttaaaaaactaggttacaactatgatgtgcctatgcttgacgcagattttgtaacacttgaacaaggaactggtattgttcattgcgcgccaagtcatggtccagatgattttaacttgtgtctaaaacatggaatgaaagcaattgaaacagttaataatgacggtaggtacacaaaaaatattccaatttttgaaggaacacatgtttttaaggcagacgaaataattattaaaaatttaattcagcaaaaccatcttttaggaagcggaaccttagttcatagttatcctcactcttggagatcaaaagcaccattagttcatagagcaacaccccaatggtttatttcaatggaaagtcacgagttaagaaaaaaagctttagcatcaatcgataaaactgctttttatccagacaaaggcagggctaggattagagccatgattgaaacaaggcctgattggtgtatttcaaggcaaagatcatggggtgttccactaccaatatttgtaaataaagaaacaaatgaacctttaagagactccgatgtaatagaaaaaattgcaactatatacgagaaagagggttcagactgttggttttatgacgacccccaaaggtttttaggaaaaaaatataataagaaagattatacaaaatctgaagatatagttgaggtttgg

SEQ ID NO: 305190 - DNA, 2538 bp, Unknown
  Bacterial polypeptide expressing nucleotide sequence isolated from the Sargasso Sea
tcaggttaatagaaaagcgggttgggatactcatggccttcctgtagaattaagtgttgaaaaagaacttggtattacaaaagaagatattggaaaaaaaatatctgttgaagaatacaacgaagcctgtaaaaatgcggtaatgcgatatacccaaatttggaatgatttaacccagaaaatgggttattgggttgacattgaaaacccatacattacctatgagagtaagtacatggaaagcgtttggtggttgttaagtaaattatataacgacaacttaatatacaaaggatatacaattcagccttactcaccaaaagcaggaacaggactgtcttctcatgaattaaatcaaccaggatgttacaaagatgtaactgatacaacagttgttgctcagtttaagttgaaagccaataaaaaatcaaatgctttagaaaaaatcatatcaaaaaatgattgttcaaatttgtattttttagcatggaccactacaccatggacacttccatcaaacactgccctaactgttggtccaaaaatcgactattccattgtaaaaactcacaatgtttatacaaaaaaacccattcatgttgttcttgcaaaagccttgattaccaagcattttggaaaaggctataaaaaagttgaccattctgatttggtcaataattttgaatcaactgataaagaaattccatattttatttgcggccaatttttaggaagtgaattattaggaatgcagtatgaacaattactaccatattgcgagcctgatgaaaatcctgaaaatgcatttcaaataattcctggagactttgtaacaacagaggacggcacaggaattgttcatacagcgccgacatttggagctgatgactatatggcagctaaacaatcaaatgtacctggaatgcttgttaaagatgaaaaaggaaatcttgttcctttggtcacccttcaaggtaaatttagaccggaagttagcgatttcgcaaacatgtatgtgaaaaatgaatactatgcggatggagatgcacctgaaaaatctgttgatgttcaaattgcaattaaactaaaagaagaaaacaaagcctttagagttgaaaagtatgttcactcgtatccacattgttggagaacagataaacctgttctttattatcctcttgattcttggtttattcgtgtaactgaaaaaaaagaggaattaattaagctaaacaatacaatacagtggaaacctacgtcaactggaactgggcgatttggaaaatggttggaaaatgcaaatgattggaacttatcaaggtcaagatattgggggataccaataccaatatggtctacaaaagatggaacagaacaaaaatgcatttcgtcaatcgaggaacttaaggcagagtgtcaaaaagctgttgatgctggatttatggataaaaatccattaaataaattttccgttggagatatgtcaaaagaaaattatgatgctgttgatcttcacaagcattttgttgacacaattgtcttgacatcaaaatcaggtaataaaatgtatagagagtctgacttaattgatgtatggtttgactcaggctctatgccctatgctcaacttcattacccatttgaaaataaagacaagatcgaatccaaagaaagttttcctgcagattttatagcagaaggggttgaccaaacaagaggttggttttatacacttcatgccatagcaactatggtatttgactctgtagcttataaaaatgtaatctcaaatggattggtattagataaaaatggacataaaatgtcaaaacgtctaggtaatgcaaccgatccttttgatactttatctaaatatggtgctgatgcaacaagatggtacatgattaccaatgctcaaccatgggataatttaaaatttgatgttgaagggattgttgaagttcaaagaaaacttttcggaacacttcataacacctactcgttcttttctctatatgcaaatattgatggattcactaatgagaaagaattaattcctattacagagagaccagaaattgaccaatgggtcctctcaaaacttaatagtttaattaaagatgttgatgatttatacacctcatttgagccaactcaagcaggaagattgatacaggactttgtaaataatcaactttctaactggtatgttagattatgtcgaagaagattttggaaaagtgacgatgctcaagataaattaagcgcataccaaactctttatacttgcttaaaagaaatttcaatcataggatcaccaattgcaccattctattttgatcaactatattgtgatttaacccaattatcagaatcagttcatttatctgattatccaactgtaaaagagtcaatcatcaatattgatcttgaaaaaagaatggatttagcacaaaaaatctgttctttatctcttggtttaagaaaaaaagaatctataaaagtaaggcaaccacttgaaaagattttaataccatc

SEQ ID NO: 305191 - DNA, 950 bp, Unknown
  Bacterial polypeptide expressing nucleotide sequence isolated from the Sargasso Sea
aatgagtaaggaacacttaaatttacctaaaactgctttttccatgaaagcaaatctaccaaacaaggaaccagaatatttaaaattttgggataagattaatctatataaaaaactaagatttcaaagcaaaggaaaagaaaaatttgtcttacatgatggacctccatatgcaaatgggaatattcatatgggtactgccctaaacaaaattctaaaagatataattattaaatttcatcaaatggatggcaaagactcagtttatgtacctggatgggactgtcatggcttaccaattgaatggaaaattgaggaacaatacaaaaaaaataaaaaaaataaaaatgatgtacctgttattgagtttagaaaagaatgtagagattttgcaagtaaatggattaatattcataaagatcaatttaaaagactaggggtaattggagattgggaaaactattactcaactatgagttttgatgcagaagctcaaattgtaagagaacttggaaaatttttaaaagagggtagtttgtacaagggttataaacctgttttatggtcaacagttgaaaaaacagctttagcagatgcagaagttgaatataaagaccatgtatctgatacaatctttgtagcctttccagttaaaaaatctaatatccaagaactaattggttcgaacattattatttggactacaacaccgtggaccataccagctaataaagcattagcatataaccaaagtttggattatgttttatgtgatatagataacaaagatatattaaaaaacgaaaaaatagttattgcaaaagaacttttgccatctgttgcaaaagacactgactacaaaattaagatattaaaagaatttaaaggaaaagaatttgaaggaactatttgtagccatccatttcacaaaattggatatgaatatgatg

SEQ ID NO: 305192 - DNA, 1351 bp, Unknown
  Bacterial polypeptide expressing nucleotide sequence isolated from the Sargasso Sea
ctgactggtgtgtttctagacaaagaggtatggggggttccgatacctgtttttatgtcaaaaaaaacaaatgaagcattggttgacgatgaagtaacaaataatattgcaaatatttttgaaaaagaaggtgctgattgttggtttgaaggagatactcaaaaatttttaggaaaaaaatataaaagccaagattatgaaaaacaaaccgatattgtagaagtatggtttgatagtggttcaactcatgcctatgttcttgaaaaaagaaaagatttaaaatggccagcatctatgtatcttgaagggtcagaccaacatagaggatggtttcattcatcattattagagtcgtgtggaactagaggaagagcaccctttgattcaatattgtcccatggatttgtagttgatggtaaaggtttaaaaatgtcaaaatcacttggaaatatcatgtcaccagaagacattttgaaaaaatatggggctgatattttaagaatttgggttgcagcatctgattattcagaagatctaagaatagattattcaatattagatcagcatgctgaatcttatagaaaaatacggaatacttttagataccttcttggaaatctaaatgacaaatttgtaaaaatagattttgaaaaaataaacattaaagaattgcccgagttagagcaatacatgttgcataaaatttttaatcttaataatttatttaaaaaaaattttaatgactataattttcacactttatataaagagctactacacttttgtactttagatttatcagctttttattttgatattagaaaagatactttgtactgcgactcaatcgaaagtcaaaaaagaaaatcttgtattaaatttttaaatattgtttttgaaatattgttgaaatggtttgctcctattttatcttttaccacagaagagatttattcattaacaaaaattgaatcaaataacagtattcatcttgaaaaatttccagaaattccatcaaattggaaaaatgaagatttagaaactaaatggggtcaattgataaaaataagagacaagtgtaatagcagcattgaaataaaaagagcatcaaaagaaattggttctagtttagaagtaaacctaacgattaatttaaatgataaattgatgggaattgcaaaagaagtagatttctcagaattatgtataacatctgcagcaaaaattaaaaaattagaaaaaacaaatttagaagaaataataattgaaactaataaagcagaaggaaaaaaatgtcctgtctgttggaagataagtaaaaatgagtgcgaaagacattcaaaaaaataaa

SEQ ID NO: 305193 - DNA, 940 bp, Unknown
  Bacterial polypeptide expressing nucleotide sequence isolated from the Sargasso Sea
ttaaaagaaggaagtttgtatagaggctataaaccagttctttggtcaactgtagaaaaaacagctttagctgatgcagaagttgaatataaggatcataaatctgatacaatttttacagcctttaaagtaaaaaaatcaaatattaaaaaacttctaaatactgaaattataatatggacaacaacaccttggacaataccagctaatcgagcattggcttataatgaaaaactaaaatatttgataattaaaatagaagacgaaacagattttaaagataaagaaattgttatagcagaagatttactcaaatctattttagaaaattgtaaaattaaaaaatataaaaaaatccaaacttttttaggaaaagattttgaaggaaccatatgcagccacccatttttagcaataggatttgattatgatattccaatgttagaagcaaactttgtaacaaaagaagaaggtacaggaatagttcattgtgctccaagccatggccctgatgattttaacttgtgtttaaaaaataatattaaagcaatagaaactgtagatgatgatggaaagtatacaaagcacgtaccttcttttgaaggaactcatatttttaaggcgaataaaatagttatagaaaaattaaaggagcaaaaaaaattactaatgagtggagagctagttcattcctatcctcattcttggcgttcaaaagcacccttggtacatagagcaactcctcaatggtttatttcaatggaaagtcatggcttgagagataaagctttaaaagcaatcgatgaaactaaatttttccctaataaaggaaaggaaagattaaaatcgatgattgaattaagacctgactggtgtgtttctagacaaagaggtatggggggttccgatacctgtttttatgtcaaaaaaaacaaatgaa

SEQ ID NO: 305194 - DNA, 352 bp, Unknown
  Bacterial polypeptide expressing nucleotide sequence isolated from the Sargasso Sea
atgaaatctcaaaatagcaaagaacaaaaatcagacttttcttataaagaaactttaaatttattaaaaactgacttctcaatgcgcgccaattcagttgtaagagaacctgagatacagaatttttgggctaataatgatattgatttccaattaggttcaaaaaattcaggcgaaatatttacattacatgatggccctccttatgcaaatggagctcttcatatgggtcatgcccttaataaagttttaaaagacataattaacaagtacaaaaccttaagaggatttagggttcatttcgtacctggttgggactgtcatggattacctattgaattaaaagttcttc

SEQ ID NO: 305195 - DNA, 1816 bp, Unknown
  Bacterial polypeptide expressing nucleotide sequence isolated from the Sargasso Sea
atgggatatgattatgatattccaatgctcgaggctaattttgttactactgaacaaggtacaggcattgtacactgtgctccgagtcatggacctgatgatttcaatctttgtttaaataataatattaaagcaattgaaacagttgatggtgatggaaaatatacaaatgaaattaaacattttgaaggtttacatatttttaaggtcaataacttaattattgaaaaattagatgagcaaaaaaatttagtaacaaacggaaaacttactcactcttatccccattcttggagatcaaaagctccactagttcatagagcaactccacaatggtttatttctatggaaagtcatgggttaagggataaagccttaaaagctatcgataatacagatttttatccttccaaaggaaaagaaagaataaaatcaatgattgaaactagacctgattggtgtgtatcaagacagagagtttggggtgtaccgctgccgatttttatttcaaaaaaaacaggtgatgttttagttgatgatgaagtttttgaaaatatcgcaaaaatttacgaaaaagaaggttctgattgttggtttaatgaagattatcagatatttcttggagataagtataaagcagaagattatgaaaaattatcagatatagttgaggtttggtttgatagtggatccactcattcttttgtcttagaaaaaagagatgaccttaaatggcctgcatcgatgtatttagagggttcagatcaacatagaggatggtttcattcttcattactagagtcatgcggaacaagaggtgttgctccatttgaaagcattctttctcatggttttgttgtagatggaaaaggtctaaaaatgtcaaaatcaacaggtaacgtaattgctccacaagatatattaaaaaaatatggagctgatatattaagaatttgggttgcatcttcaaattatgctgaagatttaagaatagattattcaatattagatcaacacgcagagtcttatagaaaaattagaaatacgtttagatatcttttaggaaatattcaagatcaatatgaaaatcttgatttcgaaaaagttaagtttgaaaactttgactcactcgaaaaatttatgcttcatagaatttatataataaatgagaattttaaaaataattttaaaatttataattttcacaacttatataaagaattactaaatttttgtacagttgagctttcagccttttattttgatatcaggaaagatactttgtattgtgaggctttgaattccgataaaagaaagaactgtataactcttttaaatattattttacaatgtctcctgaaatggtttgccccaatattatcatttacaactgaagaaatttatcaattggttaaaaaagaagaagacagccaaagtatacatttgcaaaattttgtttccgttccaaattcttggaataatatagaaataagctcagattgggaatatgttaaaaaaattagagatatagcaaatatttcaattgagaacatgagagctgaaaaatcaattggctcaagtttagaggcaatgattgagataaagttaaataaagaattttatgataaagcaaaaaatataaattttgctgaaatttgtataacttcatctgcttcagtaattaaagaagaaaatttaaaaaataatattgatgtagttgcaaaaaaagctaggggaacaaaatgcccaatttgttggaaaatttttgagtcaagttgtgaaaggcacggacatcttaatttaaatgggcaatgaa

SEQ ID NO: 305196 - DNA, 862 bp, Unknown
  Bacterial polypeptide expressing nucleotide sequence isolated from the Sargasso Sea
aatgagtaaagaatatagggatactttaaatctccctcaaacagatttatcaatgaaagctggcctaccaaaaaaagagccagaaattcttgcattttgggactctataaacctttatcacaaaattagagagcaaaataaaggtaaagagcaattcattcttcatgatggtcctccttatgctaatggagacattcatttaggtcatgctgtaaataaaaccctaaaagatattacgataaagtttcagagcatgcttggaaaagacgctccatatgtaccaggctgggattgtcatggtcttccaattgaattaaatgttgaaaagaaacatgggaagacaagtgatcttgttaggaataaacaatcatttatcaaagcatgcagagaatatgcgcaatctcaagttaatcaacaaaaaaaagattttattcgtttgggtgttcttggagactgggagaatccttatctatcattaaataaatctttcgaagcagatactgttagatcgcttggaagaattattgcaaatggtcatcttgaaaaaggagagaagcctgttcatttttgtatggattgtggatcagctttagctgaggctgaagttgaatacaaagataaaaaatcccattcgattgacgttaaatttaaagtaataccccagtcaattgaatcactttgtaattcattcaaaattaataatatcaaagacgcttacttcgttatatggactactacaccctggacaatcccatctaatgtagctgtgtgtattaataagaatattgattacattcttgtaaaaagctcaaatgaacattttattattgcaaaagacctgctagatgcttttcagaacgct

SEQ ID NO: 305197 - DNA, 1387 bp, Unknown
  Bacterial polypeptide expressing nucleotide sequence isolated from the Sargasso Sea
aatgactaaatcacaaataaatctaccaaaaactgctttttccatgaaagctaacttacctactagagagccagaaattcttgaatattggaaaaaaataaatctttacgaagaattaagaaatgaaagtaaaggaaaggaaaaatttgttcttcatgatggacctccctatgcgaatggaaatatccatatgggaacagctcttaataaaattcttaaagatataattgtaaaatttcatcaaatggacgggaaagactctatttatgttccgggttgggattgtcatggcttgcctattgagtggaaaattgaagaacaatataaaaaaaacaaaaaaaacaaaaacgacgttccgatagttgagtttagaaaagaatgtagaacatttgctgagaagtggattgaaattcacaaaagccaatttaagagattgggcgttgtgggggattgggaaaattattactctacgatgagctttggagcagaagcacagatagttagagagcttggtaaatttttaaaagagggaagtctgtatagaggcttcaaaccagttttatggtcaacagttgagaagaccgcacttgcagatgctgaggtagaatatcaggatcacaaatcagatacaatttatacgtcatttaaagttaaatcatctggtttaaaagatttagctggaagtgaaatagttatttggacaactactccttggacaataccagccaacaaagctttagcatataacgagactcttgattatataatattaaaaataaatgacgaaggtgattttaaaaatagaaaaattgttattgcagacgctctgctagaatcagttgtaaaagagtgtggactaaaaaattttaaaaaaatttctacctttaagggaaaagaattaaataatactatttgtagtcacccttttttaaatcttggttatgatcatgatattccaatgcttgaggctagatttgtaactactgagcaaggaactggaatagttcactgcgcaccaagtcatggacctgatgactttaatctatgtttgaataacggtatcaaagcaatagaaacagttgatggagatggaaaatatacaaaaaatgtgaaattatttgagggaattcatatttttaaagcaaatcctatcgtaattgaaaaactcaaagaacaaaaaaatttattattcaatggtgaattagttcattcttatccacattcatggagatcaaaggctccacttgttcatagagctacaccacaatggtttatttcaatggaaagtcacaaattaagaaataaagcattaaaggctattgatgagactactttttatccaagcaaaggtaaagagagattaaaatcaatgatagaaacaagacct

SEQ ID NO: 305198 - DNA, 1148 bp, Unknown
  Bacterial polypeptide expressing nucleotide sequence isolated from the Sargasso Sea
agatcaacatagaggttggttccagtcttctttactcacatctgttgcagttaataataaacctccctataaaaaagttttaactcatggttttgcacttgatgaaaatggaagaaaaatgagcaaatctttaggtaacgttgttgatccaaatataattattaatggaggtaataataaaaaaattgaacctgcttatggcgctgatgttttaaggctatgggtaagctctgtagattattcagtagatgtaccaattggttcaaatatcctaaagcaactatcagacgtttatagaaaagttcgtaatactgcaagatatcttctagggaatattcatgattatgaccctaaaattgatagttttgaaattgaccaattgccgcttttagatcaatggatgttaggcagactagttgaggttacagatcaaatatcaaatgcttatgaaaattatgaattttcaaaattttttcaaattttacaaagtttttgcgttgtagatctatcaaatttctatttggatattgcgaaggataggttatatgtaagttctaaatcacaatttagaagaagatcatgtcagtttgtaatgtctaaagttgttgaaaatttagctgttcttatttctccagtactttgtcatatggctgaagatatttggcaaaatattccatattcaactaaagaaaaatcagtatttcaaagaggatggccaattttttcacagtcctggaaaaatgaaactcttaatgaacacatcacaaatttgagaaatttgagagttgaaattaacaaagctatagaaggatgtagaaacaaacaaataattggagcagctttagaaactgaagttaattatttacctgaagataaagttataaaagattctctgacttggctacaaagatttggtaatgaagatgtcgatttatttcgagattggcttatagtttcaaatttccaagtggtatccgacttggttgatcattctctaattatagataaaaatgaacttggaaagatccaaatcttaaaggctgatggtgaaaaatgtgatagatgctggcattatcaaaaagaaacttttagtggaattcaaaatacaaaattatgcaaaagatgttcaaatattattaatctttaat

SEQ ID NO: 305199 - DNA, 1305 bp, Unknown
  Bacterial polypeptide expressing nucleotide sequence isolated from the Sargasso Sea
gagttccattacctatttttattaaaaaaaagacaggtgaaatcttggtcgatgatgaggtctttaataatattgcaaaaatttatgaaaaagagggatctgattgttggttttcggatgatccacaaaaatttctaggaaaaaaatataaggctgaggattttgaaaagttaagtgatatcgtagaggtatggtttgatagtggatctacacactcatttgtattagaaaaaagaaaagatttaaagtggcctgcatctatgtatctcgaaggatctgatcaacacaggggctggtttcattcgtctcttttagagtcttgtggaacaagagatcgtgcacctttcgagtctattctttctcatggttttgtagttgatggcaaaggtttgaaaatgtcgaaatctttaggaaatgtaatcgcacctgaagatatcctaaaaaaatatggagctgatatccttagaatttgggttgcttcctcaaattatgcagaggatcttcgaatagactattcaatattagatcagcatgctgaatcttatagaaaaataagaaatacatttagatatttgcttggaaatcttaatgataattttgagcaaatagatttagaaaaaattgaaattgagaatttacctgaattagagcaatttatgcttcataaaatttacaatttgaattctaaatttaacaagtatttcaaagattatgatttccataatttgtataaagaattattgaatttttgcaccgtagatttatctgctttttattttgatataagaaaagatactttgtactgtgatccaataaattctgaaaaaagaaaatctactcttatattgttaaacgttattcttaactctttattaagatggtttgcacctatattatctttcacaaccgaggaaatttaccaacttatctcaaaaaataaaaaaagtattcatcttgaaaaatttttaaactttcctgaaaaatttgataattcgaatctaaactctaaatgggaacaattgatcaaaattagagatatttgtaatcttagtattgagcaaaaacgagcaagtaaagatattggatctagtttagaagcggcattagtcgtaaaattaaataatgaaaatcagaaattattaaaaaatattgatctttcagaactttgtataacttcttcagtcaaaattgagaataatgatactaatgaaataattgtagaaacaaacaaagcatcaggtgaaaaatgtccaatttgttggaaaattagaagcgcaccatgtgaaagaccaaactgtaaataaa

SEQ ID NO: 305200 - DNA, 1183 bp, Unknown
  Bacterial polypeptide expressing nucleotide sequence isolated from the Sargasso Sea
tttttaggaagcaaatataaagctgaagattatgaaaagttaagcgatattgtcgaagtttggttcgatagtggatccactcattcatttgttcttgaaaaaagacaagatttaaagtggccagcatcgatgtatttagaaggatcagatcaacatagaggatggtttcattcttcattattagagtcttgtggaacgagaggaagagcaccatttgagaatatcttgtcgcatggatttgttgtggatggcaaaggattaaaaatgtcaaaatctttaggaaatgtgattgctccagaagatattttaaaaaaatatggagcggatatactaagaatttgggtagcgtcttcaaattattcagaggatttaagaatagattattcaattctcgaccaacacgcagaatcttatagaaaaataagaaatacatttaggtatttgcttggaaatatcaaagataattttgaagaagttgattttgaaacagtagatttaaataaattaccagaacttgaacaatttatgttacataagttgtatactttaaatataaattttcaaaaatattttaagaattatgattttcacaatttatataaagatttacttaatttttgcacagtagacttgtctgcattttactttgatataaggaaagactcattatattgcgatccaatagaatcaaaaaaaagaaagtcaactatattgttgttaaatattattttaaattcattattaaaatggtttgcgccaattttatcttttactactgaggaaatttatagattgttgtttaaagataacaaaagtattcatttagaaaaatttttagatttccctatttctttttctaatgaaaaattaaatgaaaaatgggtagagttgataaaaattagaaatatttgtaatatcagtattgaagaaaaaagagctgataaagaaattggatcaagtttagaagcagacttgaatattcatcttgataaaaaattagaagaaatttctcaaaacatagatttttcagaattgtgtataacatcaaaagctgaaatttcttttaaacaaaatatagaaacaattgcacatactataaaagcaaaaggaacaaaatgtactctatgctggaaaattaatgaaaatccttgtgaaagagttcattgtccaaaaaattattaat

SEQ ID NO: 305201 - DNA, 2626 bp, Unknown
  Bacterial polypeptide expressing nucleotide sequence isolated from the Sargasso Sea
atgggatttaaagaatcaaaaaatttttcacttaattcaattgcaaaagaaattgaagatttctgggctaaaaatgatgtctttatcaaatcatccaacagaaataacaaagaaaactttgtgttttttgaaggtcctccttctgcaaatggtaagcctggaattcaccatgtaatggcgagaactataaaggatgctttttgtagatataagactatcaaaggatttaacgttaagagaaaagctggatgggacacccatggacttccagttgaattaggtgtagagaaggaactggggatttcaaaagacgatattggtaataagattagtgtctcggagtacaatagggcatgtaaagaagcggttatgaaatatacttctgactgggaatctttaacaaaagaaatgggttattggattgatatgtctgatccttatgtaacatttgaatctaaatatatggaatcagtatggtggattataaaagatatttacaataagaatttgatatacaaaggttatactgttcagccctattcacctgccgctggatctggtttaagctcacatgagcttaatcagcctggtgcatatagagatattagtgatacatctgttgtggctcagtttaagtctataaaagaaggtctccctaatgagttaattaatctatatccattttattttcttgcttggactactacaccatggacactcccttcaaacacagcattaactattggtgagaagatcaaatattcttttgttaaaacatataatcaatacactaaacagttagtaactgttgtaatagctactaaactaattgataagattttttctaagattttttatgaggtaaaaactgagaaagaattagactcatatgatactcaaaagcctaatataccctatttaatatgccatgaagtatctggtaaagatctcgaaaacatcagatatgaaagaatttgggaagaatctcctcttccattggataatccagagaatgcatttagagtaattagtggagattttgttactactgatgacggaacaggaattgtccatacagctccaacgtttggagcagatgactataaggctgccaaatcagcaaaacctgaagttccaccattacaagttttagataaaaatggcattaaagttccacttgttgatcttaaaggaaaatttattgacggaattggtttaataagtggcaaatatgtaaaaaatgaatattatgaatcagactctatcccagaaaaatctgttgatgttgagatagctattagacttaaagaaataaatcgagcatttaaagtagagaagtattcacactcttatcctcattgttggagaactgataagccagttctttactatccaatggaatcttggtttataaaaatggatagcttatcaagtagaatgtttgaattaaatcaggaaattaattggaaacctaaatcaactggtgagggtagatttggaaactggttaaaaactgctaatgattggaatctttcaagatcaagattttggggaattcctctgccaatttggactgatgaagaaaatgaagaaattaaagtgattggttcagcagaagagcttattaatgaaattgaagcttcagtaaaaaatggtcatatgttatctaatccttattctgattttgacattggtaatatgtctgatgagaattatttaaatatagatcttcataaggatattgtcgatgaaataactcttacatcaagtaaagggaagccaatgaaaagggaaaaagatattattgatgtttggtttgattcaggatcaatgccttatgcccaatttcattatccttttgagaacaaagatttaattgataataaaattaattttccggctgatttcattgcagagggtgttgatcaaacaagaggatggttttatactcttcatgctatttcaactctagtgtttgactcaatttcatataaaaacgttgtatcaaatggtttagttctcgataaaaatggacagaaaatgtctaagagactgggtaacgcagtagatccatttaaaatgatagaagaatatggtgccgatgcagttaggtggtatatgatttcaaactcaaatccatgggataatttaaagtttgatcaggatggtgtggatgaggttaaaagaaaattttttggcacattacataacgtatacagtttttttagtctttatgccaatatcgataatttttcatatgaagaagatgtagtagtatttgaagaaagatcagaattagatcaatggataatctcagaattgaactctttaataaaaagagtagataattattacaatgattatgagttgaccccggcctcaagagaaattagtgattttgttcaagaaaaattaagtaattggtatgttagattatcaagaagaaggttctggaagggtgaatataataatgataaaatttctgcatatcagactctttatgattgcttatcctccataagtaaacttatttcaccaattgctcctttttactcagaatatatttatcaatgtattaacactgttactggaaaagaggaacatgaatcagttcatttatctgaat

SEQ ID NO: 305202 - DNA, 1546 bp, Unknown
  Bacterial polypeptide expressing nucleotide sequence isolated from the Sargasso Sea
actaacacattcttacccacattcctggagatctaaagctcctttaattcatagagctacaccccaatggtttatttcaatggaaagtcataatctaagagacaaagcacttaaagcaataaataatactactttttatcctggtaaaggaaaagaaagaattaaagcaatgatcgaaaccaggccagattggtgtgtctctagacagagagtatggggagttccacttccaatatttatttcaaaaaaaaatggagaaactcttattgatgaagaagtttttgagaatattgcaaaaatttatgaaaaagaaggctcagactgttggtttgacgataattttcagagactacttggagataaatacaaagcagaagattttgataagacaagtgatattgtagaagtatggtttgatagtggatcgactcattcatttgttttagaaaaacgagaagatttaaaatggccagcatcaatgtatctagaaggttcagatcagcatagaggatggtttcactcttcacttttggagtcttgtggaacaagaggtagagcaccatttgaaagcattttgtctcatgggtttgttgttgatggaaaaggattaaaaatgtctaaatcaactggaaatgtaattgctccagaggatattttaaaaaaatatggcgctgatatacttagaatttgggttgcttcatcaaattatgctgaggacttaagaatagattattcaattttagaccaacactcagaatcttacagaaaaattagaaatactttcagatatcttttagggaatattcaagatgaatatacaaaattagattttgataaagttgatttaaataatattcctgaattagaaaagtatatgttgcatagattatatgtgatcggtgaaagttttaatgaatactttaagtcctataattttcataatttatataaggaattattaaatttttgtacagtagaactctcagcgttttattttgatattagaaaagatcttctttattgcgatccaaaagactcaaagaagcgtactgattgtattttgatactaaaagtaattttagaatgtttattaaagtggtttgcgccaatcttatcatttaccactgaagaaatttatcatttaattcataaggaagataataatggaagcatccatttacaaaaatttgtgaaaattccaaatcaatggaaaaatgatgaattaaatagtaaatgggataaacttaaattaatcagagatgaagcaaatattagtattgaaagcaaaagggctgataaaattattggttcaagtttagaggcaaatattgagataaaaattaaagataaagacatgtatagtttagctcagaatcatgatttctcagaaatttgcattacatcctctgcatcaatttcgaatgataacaatttagaaaaagaaattgagattactagttcaaaagctgttggaaataagtgcccagtttgttggaaaattagagaaaatatttgtgaaagagatggtaactgtcatctttcatga

SEQ ID NO: 305203 - DNA, 862 bp, Unknown
  Bacterial polypeptide expressing nucleotide sequence isolated from the Sargasso Sea
atgacagttaactatagagatacattaaatcttccagatactgatttttcaatgaaagctggattgcccagaaaagagccagagatattggatttatggtccaaacaggacttatatgcaaagatcagaaagaagtatgagaataaagaactatttctcttacacgatgggcctccatatgcaaacggggatatacatctagggcactcagttaataaaatccttaaggatataactatcaaatataaaacccttagtggttttgacgctccttatgtacccggctgggattgtcatggtttgccaatcgaacttaatgttgaaaagaaacatggaaaaaatagtgaattagtaaaaaataaagaaagttttcaaaaggcttgcaaagaatatgctgaaactcaaattaataagcaattagatgattttaaaagattgggtgtatttggtgattgggaaaattcatataaatcactagatccaaaatttgaggcagatatagtcagatctttaggcatcatatataaagaaggtcatttagaaaaaggtgaaaaacctgttcattggtgtcaagattgtggatcatccttagcagaggctgaagtggaatacattgataaaacttcgaaatcaattgatgttgcattcaaggtagatgatacatctatagataaggttaaggacttatttaatattaaagaagcagatgaaatttcatttgtgatatggactacaacaccgtggacaataccttcaaatgtggcagtttgtattaatcctgaatttaaatactcactcataaaaatgaataacaaattttatgtgatcgcatttgaaatgattgatcattgtaaagaaaaga

SEQ ID NO: 305204 - DNA, 969 bp, Unknown
  Bacterial polypeptide expressing nucleotide sequence isolated from the Sargasso Sea
aatgaaagctaattacagagatacattaaatcttccagatactgaattttcaatgaaggctggattacctagaaaagaaccagaaatgcttgatttttggtctaataaagatttgtataagaagataagagataaatataaagataaagaattatttcttttacacgatggtcctccgtatgcaaatggcgacatccatcttggacactcagtaaataaaattctaaaagacattactatcaaatttaaaactcttcagggttttaatgctccatttgtgccaggatgggactgtcatgggctgccaatcgaattaaatgttgaaaagaagcatggtaaaaatagtaagcttgttaagaataaagaaagttttcaaaaagcatgcaaggaatatgcagagactcaaataaacaatcaattggaagactttaaaaggcttggggtcttaggtgattgggaaaattcatataaatcattagatccaaaatttgaagcagacatcgtaaggtccttgggtattatttataacgaaggctacttagaaaaaggtgaaaagcctgttcattggtgccaagaaagcggatcatcgttagcagaggcagaagttgaatatattgataaaacatcaaaagcaattgatgttgcattcaaggttgatcattcatctttaaaaaaggtaagagatttatttagtgctgtagattcagatgaaatatcatttgttatatggacaactactccatggacaataccttcaaatgtagctgtatgtattaatcctgaatataaatactcgctcattaaaatgaataataaattttatgtaattgcatttgagatgattgatcaatgttctaaaagatggaagcaaaaattcgatgttatatcgacaatagaaggtaaaaaattaaatgatattgatcttattcatccttttttagatagaaaatcagtcgtcttcatgcagat

SEQ ID NO: 305205 - DNA, 746 bp, Unknown
  Bacterial polypeptide expressing nucleotide sequence isolated from the Sargasso Sea
aatggaatataaagataccatcttcttacccaaatcatcttttgaaatgagaggaaatttacctctcaaggaaccaaaaattcttgagcaatgggataaagaaaaaattttttataaattaagagaaaaatcaaaaggtagagaaaaatttgttctccatgacggacctccttacgctaatggacatattcatatggggacagcactaaacaaaatacttaaagatgtaatcgttagaacgcagcaaatggctggaaaagactctatatatgttccaggatgggattgtcacggtcttccaattgaatggaaaattgaggaaagttataggaaaaaaggtaaaaataaagatgatgtacctgttgtaaaattcagacaagaatgcagagaattcgcagaaaaatggatagatattcaaaagaaagaatttagaaggttaggtgttgagggagattggtctaacccatatctaactatgtctaatgaagcagaagctcaaattgttcgagaactcggaaaatttctaattgatgagagtctttacaaaggtgctaagcctgttctatggtctgtagttgaaaaaacagcattagcagatgctgaggttgaatatgaagatcatacttctaatacaatttatgtaaaatttctaatcactagcgctggtgataaagacttagagggatcaaatattgttatttggacaacaactccatggacaattccaggaaatagagctttagcat

SEQ ID NO: 305206 - DNA, 849 bp, Unknown
  Bacterial polypeptide expressing nucleotide sequence isolated from the Sargasso Sea
tatgaaaaataacgattataaaacgactttattcttgccccaaacagcattccctatgaagggggggcttccacgcaaagaaccagacctattagagcgctggcgtagtctggatctatggaagaagttgcgagaccaatcatttggccgagaaaaatttgtgctccatgatggcccgccatacgctaatggaccgatacacattggcacagctatgaataagattctaaaggatatgatcaatcggagttaccaaatgttgggaagggatgctcactatattcctggatgggattgtcacggcctcccgatagaatggcaaattgagcaagagtatcgaaagagtggtaaatctaaagatgaaatccccgtcacacaatttagggaggaatgcagggcctacgctactcattggattgctgagcaaatgaaagatttcaaaaggttgggggttttaggagattgggatagcccttacctcacaatgagctttccagctgaggcacaaattgtaagagagttgggtaaatttttgttggatggttctctctacaaaggtgctaagcccgtaatgtggtcgccggttgagaaaacggcgttggcagaagcagaggtggaatataaagatatttcgtccaccgcaatttatgtacgattcccgataaccgaggccgccgacaataacctggttggatcctctgtggttatttggactacaactccgtggactatgccaggtaaccaggctgtagcgttcggcaaagatatggattacggccactacaccgttgaaaacgtagcagaagactctcagatgaaagaaggagaacgtataattatagccgcgtc

SEQ ID NO: 305207 - DNA, 736 bp, Unknown
  Bacterial polypeptide expressing nucleotide sequence isolated from the Sargasso Sea
tatgcctgaaaataatttaaatcttcccaaaacttctttctcaatgaaagcaaatttaccctctaaagaaccaaaaatattagaaacctgggataaaattaaactttatgaacgattaagaaaaaaatcagaaggtaaaacaaagttcgttcttcatgatgggccaccttatgccaatggtcatatacacatgggaacagcactaaataagattttgaaggatatcgttaccaaatttcatcaaatgaatgataaagactctatttatgttccaggatgggactgtcatggtttaccgatagaatggaaaattgaggagcaatataaaaaaagaaaaaaaaataaagatgaagtacccataaaggattttagaaaagagtgtagagaatttgcggaaaagtggatagttattcacaaaaaagaattcaaaaggttaggagtaattggtgattgggaaaattattattccactatgagcttcggtgccgaagcccagatcgtaagggaactaggcaaatttttgaaggaaggaagcctctatagagggttcaagcctgttttatggtctacagttgagaaaacagctttagcagatgcagaagtagaatataaagatcataaatcaaatactatttatgcgggcttcaatgtaaaaaaatctgataaagattatttaaagaatacatctattattatttggactacaacgccatggacaattccagcaaataaagct

SEQ ID NO: 305208 - DNA, 1057 bp, Unknown
  Bacterial polypeptide expressing nucleotide sequence isolated from the Sargasso Sea
tcgtggttggtttcactcatcattgctagagtcttcaggaacaagaggtagggctccttatgaaagcgtattaacccatggttttgttgtagatggcaaaggaagaaaaatgtctaaatctctaggtaatgttatttccccagatgatattttgaaaaaatatggcgtagatattttaaggttgtgggtagtggcttcagattattatgatgatctgaaattagataatgcaattttacaagctcaaacagactcttatagaagaattagaaatacctttagatatattataggtaatcttgatggttttgataatagcgaaaaaattgatgaaagtgagtttcctgatttagaaaaatatatccttcatcgattatgggaaattgatgtaattatcactgactgtgtaaaaaactttaactttcatttaatgtttacaactttacttaatttttgctctaatgatctttcagcattctattttgatattagaaaagatgttatttactgtgatggagataaatccaagaaaagaagatcagcaagaactcttttagagataatctttaattatttagttcgatggctagctccttcattatcgtttacaactgaagaagcttggaaagctatgggaaatcaaacaagtattcatttagaggattttttacatattccagcaaaatatgaaaatttaaaaattaatgaaaattggaaaattataaaacaaattagaaaagttataacaggtgccttagaaataaagagagctgaaaaattaattggttctagtttagaggcacatgttgatatttatgttgatagtgaaacattagaaaaaattaaaaactatcccttggatgagataagtattacttcatcattttcattgcatgtcctgactaatgactctcaaggtttttctttagaagatgttgctgatatcaaaattgctgtttcaaaaacaaacggtcaaaagtgtcaaagatgttggaaatataaagaacagctaatacgtaatgaaatatgcgagcgttgcgataatgccattgcatga

SEQ ID NO: 305209 - DNA, 1045 bp, Unknown
  Bacterial polypeptide expressing nucleotide sequence isolated from the Sargasso Sea
ttcttctttattagagtctgcaggaacaagaggaagggccccctatgaaagtgttttaacacatggttttgtagttgatggcaaaggtcgtaagatgtcaaagtctctaggaaatgttatatctcctgacaaagtcatgtctcaatacggagttgatatacttcgtttatgggtagttgcatcagattactatgatgatctaaaattagataatgccattttaaaagcccaaagtgattcttatagaagaataagaaatacctttcgttacttaataggtaatctagagggttttgatgaaaaagaaaaaattaatattgaagaatttccagaattagaaaaatacatcttacatagattgtgggaagtagatcagattattcaaaaatgtgttaaggattttaattttcatttaatgtttactacattattaaatttttgttcaaatgacttatctgcattttattttgatattcgtaaagactcaatatactgtgactcatttgattcaaaaaaaagacgttctgcaagaactttattgaatttaatttttgatcatcttgtcagatggttagcaccttctttaagctttacttgtgaagaagcctggaaggctaagggtaatacatctagtattcatctggaagactttcttaaagcatctcaagattttaaaaataatgatattgcaaacaaatggaatataattaaaaatattcgaaaagttattacaggagctattgagaaaaaaagagcagaaaaattgattggctcaagtttggaagcaaatgtaataatatatgttaaagaagatttaaaaaagaaaatagaagaaattaattttgatgaaatagctattacttcctcatttcaactattagattacaagaataaaaaagattactttgcattagaagagattgatgatgtagctgtgacagtagaaaaaactgacggtcaaaaatgtgaaagatgttggaaatatacagatatattgcaagataaacaaatttgtcaacgttgtgatgaagcaattaaaaaatag

SEQ ID NO: 305210 - DNA, 1741 bp, Unknown
  Bacterial polypeptide expressing nucleotide sequence isolated from the Sargasso Sea
gaagtttttgataagaaaggaaaagatgggaaagctaatagaggcataatagagaagttagtcgaggttaaaagcttattggccaggggacggttgacgcattcgtatcctcatagttggcgctcgaaggcacctgtaatatttaggaatactcctcaatggtttgtcgctattgataagaaacctaacgataaaatgaatgactacggtgacacagttcgtgagagggcaatcaaatccatcgataaattggttgagtggacccctatttcggggaagaatagacttcaccccatgataagtgcacggccagactgggtactatcccgacaacgtgcttggggggtacctttaacgtgctttgtcaagaaaaataaaactgcagcagataaagatttccttcttcgtgatccggaagttaacaaaagaattgtagctatattcagggaagagggtgccgattcttggtttaaaaaaggcgccaaaaaaagatttctcgaaggtctgcatgaccccgaaatgtatgagcaggtttatgacatcttggatgtgtggttcgactctggttcaacccatgctttcgttttgcgggatagagaagatggagtttggcccgctgatttatatcttgaaggaactgaccagcatcgaggatggttccattcctctttgttacaatcgtgtggtactcgaggcaaagcgccgtatcttggtgtgttgacgcacggttttacgttagacgaaaaagggatgaagatgtcaaaatccatgggcaatactgtcagccctgatcaagtcatcaaacaatatggcgctgacatcttgaggctttgggttgcccaggcagactactctactgatctacgtattggaccagagattttgaaaggtgtcgctgacagctatagaagattaaggaacacattgagatttttgttaggaagtcttgttaattttgatgaaagtaatgagttggtaaaatacaaagatcttccagaattggaaagatgggttttgcatcgggtcacggaattagacgagatagtcaagattggttacgaaaaatatgaatttcaaacagtttttcaacaacttttccaattttgtacaatggatttatcatcgttttattttgacattagaaaagatactttgtactgcgattctagcacctcgagccttaggaaatcttgtcggacagttctgaatatattgttttatcgtctggtaacttggctcgcacccgtgatggtctttactaccgaagaagtttggcttgagaggtttcctggtgacatgtcatctgttcatttacaagattttcctgatgagacgaaagagtggaaagaccaaagtctggctgtgagatgggaagcgatccgacaagttagaaaggttgttactggagcaatagaagtcgagcgtcaaaagaaagtaataggatcgagtttggaggctgcaccaagtatttttattgataatcaagatttatatcgagttatcaactctatagattttgcagaaatatctattacgtctgctacttcgatttgtgaggggaatacttcaaaaaaagcattttctttggaggaaagtcctgatatttctgttgtcttcaacagggcagctggagaaaagtgtagcaggtgttggaaatatggaactgatttagttaccgtccaagcaggcgcgctcgtatgccaccgctgtagtgacgtaatttccaatcaaaaaaaatgat

SEQ ID NO: 305211 - DNA, 1274 bp, Unknown
  Bacterial polypeptide expressing nucleotide sequence isolated from the Sargasso Sea
taaaaaaacaaaagatatcctggtagacgatgaagttaatgaaaatattgcaagtatttacgaaaaagaaggatcagattgctggttttcagataatccacaaaggtttttaggcaaaaaatataaggctgaggattatgataaattaagcgatattgttgaggtatggtttgatagtggttcaacacattcttttgttttagaaaaaagaaaagatctaaaatggccagcatcaatgtatttagaaggttcagaccagcacagaggatggtttcattcatctttattagagtcttgcggaactagaggaagagctccttttgagtcaattttatcacacgggttcgttgtagatggcaaaggtttaaaaatgtcaaaatcattaggtaatgccattgccccggaagatattttaaaaaaatatggagcagatattttaagaatttgggttgcttcatctaattatgcagaagatcttagaattgattattcaattcttgatcaacatgcagaatcttatagaaaaattagaaatacatttagatatttacttggaaatcttaatgataattttgaaagtttggatttagaaaaaatagatttaaaaaagttgcccgaacttgagcagtacatgcttcataaaatatattcactaaatcttaattttaaaaaatattttaaaatttatgattttcataatttatataaagaattattaaatttttgtactgtagatttatcagctttttattttgatataagaaaggatactttatattgtgatccaaaagattcctcaaaaagaaaatcaacaattattttattaaatataattctaaattcattattaaaatggtttgctccaattttatcatttacaacagaagagatttataaacttttaaataatgatagcagaagtattcaccttgaaaactttttagactttcctgaaaattttagaaatgaaaaattaaataaaaaatggaatgaattaattaaaataagaaatatttgtaatattagtattgaagaaaaaagagctagtaaagaaattggatcaagtctagaggtagaattagaaattaaattagataataaattattagaagttaccaaagatgtcgatttttcagaattgtgtatcacctcaaaagcgacaactttttatgaagaaatttcagaattaagtgtaaaggcttttaaagctaaaggatctaagtgtccagtatgctggaaaattagtgaagattcttgtgctagacattcttaat

SEQ ID NO: 305212 - DNA, 1315 bp, Unknown
  Bacterial polypeptide expressing nucleotide sequence isolated from the Sargasso Sea
atgtccaaagatactttgcaattacctaaaacagctttttccatgaaagctagcttaccgcaaaaagagcctgaaattttgaaaaaatgggaaaaaaataatatttttaaaaaactcagaaaaaaatcaaaaggaaaagaaaagtttgtacttcatgatggcccaccttatgcaaatggccatatacacatgggtactgctttaaataaaattttaaaggacatgataactcgttttcatcagatgaacggaagagactctgtttatgttcctggttgggattgtcacggcctacctatagaatggaagatagaagaacagtacaaaaaaaagaaaaagaataaagatgaaattccaattaaagattttagacaggaatgcagagagtttgcaaaaagttggattgaagtacatattaaggagtttaagcgacttggagtagtaggggattttgaaaattattattcaacaatgagctttgaggctgaagctcaaattgtaagagaattaggtaaatttcttttagatggaagtttatatcaaggatttaagccagttctttggtctactgtagaaaagactgctttggctgatgctgaagtagaatatttagatcatacttctaatacaatttatgttgcatttaaagttaggaaaaccaataaagactttctcaaggactcaagcatcataatttggactaccacaccatggacgatacctgccaataaggcattagcatttaatagtaatatcgaatactcagttttagaaattgaaaaccttgaacattttaaagaaaagagaattgtagttgcaaaaaatttaattgagtcgattactaaagaatgtgaaataaaaagctataaagaattgatgacttttaaaggttcagaatttaaaggaaccttgtgtagtcacccatttgtaaaaatggattttgattataacgttccaatgctagatgcacaatttgttaacttagagcaaggaacaggaattgttcattgtgctcctagtcacggtcctgatgactttaatttatgtttaaaaaataatatcccatcactttacacagttgataacgcgggtgtttatactaaagaggtcccatattttacaaatacacatgtatttaaggcagacccaattgttatagaaaaacttaaagagcaaaacaaattacttaaaaatgacaaacttaatcatagctaccctcattcttggagatccaaggctccattaatttacagagcaacaccccaatggtttatttctatgcaaaaaaataaattaagagataaagccgtaaaag

SEQ ID NO: 305213 - DNA, 1535 bp, Unknown
  Bacterial polypeptide expressing nucleotide sequence isolated from the Sargasso Sea
ttaccctcattcctggagatcaaaagctcctttagttcatagggcaacaccccaatggtttatttcaatggaaagtcataagttaagagataaggcgcttaaagcaataaatgataccactttctatcctagtaaaggaaaagaaagaattaaagcaatgatcgagactagaccagattggtgtgtttctaggcagagagtgtggggagttccgcttccaatatttatttcaaaaaaaagtggagaaattcttatcgatgatgaagtttttgaaaatattgctaaaatttatgaaaaggaaggctcagactgttggtttgaagataattttcagagactgcttggagataaatataaagcagaagattttgataagactaatgatattgtagaagtatggtttgatagcggatcaacacattcttttgttttagaaaagagagaagatttaaaatggcctgcatcaatgtatctagagggttcggatcaacatagaggttggtttcactcttcactgttagagtcgtgtggaacaagaggtagagcaccatttgaaagtattttatctcatgggtttgttgttgatggaaaagggttaaaaatgtctaaatcgactggaaatgtaatagctccagaagatattttgaaaaaatatggtgctgatatactaagaatttgggttgcctcatcaaattatgctgaggatttaagaatagattattcaattttagatcaacattctgaatcttacaggaaaattagaaatactttcagatatcttttaggaaatatacaggatgaatactcaaaagtagagtttgataaaattgatttaaataatattcctgaattagaaaagtatatgctgcatagattatatgtgatcaatgaaagttttaatgaatactttaagtcttacaattttcataacttatataaagagttattaaatttttgtacagtagaactctcagcattttattttgatattagaaaagatcttctttattgtgatccaaaagactccaagaagcgttccgattgtattttaatactaaaagtaattttagaatgcttattaaaatggtttgcacctattttatcatttaccactgaagaaatttatcatttaattcataaggaagacaataatggaagtattcatttacaaaaatttgttaaaattccaaatcaatggaaaaatgtggaattaaatagtaaatgggataaacttaaattaatcagagacgaagcaaacattagtattgaaagtaaaagggctgataaaattattggttcaagtttagaggcaaatattgagataaaaattaaagataaagacatgtatagtttagctcagaatcatgatttttcagaaatttgcataacatcttctgcttcaatatctaatgatattaatttagaaaaagaaattgagatcactagttcaaaagctgttggaaataagtgcccagtttgttggaaaataagagaaaatatttgtgaaagagatggtaactgtcatctttcatgaa

SEQ ID NO: 305214 - DNA, 1075 bp, Unknown
  Bacterial polypeptide expressing nucleotide sequence isolated from the Sargasso Sea
atgaccgtagattacaaaaatacaatttttcttccaaagacaagcttccctatgcgagcagggctgccaaaacgagagccagagatattggcggagtgggaaaagattgggcttgagaaaaggttgcgtaccaatcgtaaaggaaaagaaaagtttatccttcacgacgggcctccttatgctaacggtcatctgcacatggggcatgcgctaaacaaagtattaaaggacgtgataaacagatcccagcaaatgttaggtaaagatgccaattatgtcccaggctgggattgtcatggccttcctattgaatggaaaatagaagaggaatataggtcgaaaggtcaagataaggatagcgtgccaattttggaattccgaaggcaatgcagggaattcgctgaagaatgggtaaaagttcaaacagccgaattcaaacgccttggtgtaacgggtacatgggataacccttacacaacgatgagtttcaacgcggaagcccagatttcgagagaacttggaaaattcttaatgaatggtggtttgtacaagggtgcaaaacccgtactttggtcggcggttgaaaaaaccgctttagctgatgcagaagtcgaatatcacgaccataagtctacgacgatacatgtgagatttccaattgtagaaacgccacactccatattaaacggtgcatcggtcattatttggacgaccacaccttggactattccgggcaacaaggcagtggcgtatggtgaggattacggatatggagtttatgaggtagtagatgttgacgatgaaagcacagcaattgtcggagaaaagattgttgttggcgatgaactaatagaggaagtaaaagccgccgcacgaatcttgaatacaaagaaattagcctcgcttaacgggacagactttgaaaaaaccaaactaacacatcccttaaaagatgacgggtataactttactgtccctatgttgccagcggactttgtaacaatggatcagggaagcgggttcgttcatatagctccgggagcaggggctgacgacttcgaattaggtttaaagt

SEQ ID NO: 305215 - DNA, 1222 bp, Unknown
  Bacterial polypeptide expressing nucleotide sequence isolated from the Sargasso Sea
aaatattaataccgaaatatatcttttagcatggacaactactccttggactttaccagcaaataattccttagctgtaaatgaaaatatggaatattctattattaaaactattaatatatatactaatattcctgttacagtgatattagcaagcagttgtattagtcactattttgagaataaaaatctaaaatatgaattattaaaaaaaattaaaggcaaagacctattaggttttgattatgaacagttattagattatgttcctgctgaaaagcctgcttttaccatacttcatgctgattttgtttcttctgatgaaggaactggtattgttcatatttctagaacttttggatctgatgatttttttatatctgaaaaatataatattcctggtatttttgtcaaagacgaaaaaggaaataacgtgcctatcgtagataaatctggaaaatttgttaaggagattcaagacttttctggtatgagtgtaaaaaattttggaaatgatgaagaattatcaactgatattcagatagcaataaaattaaaaaaagaaaacaaagcttttttagttgaaaaatatgaacattcttaccctcattgctggaggacagataaaccaatcttatattatccattagaatcttggtttattgctactactaaatttaagaatgaattaatacaaatgaacaaagagattaattggcaaccagaatcaactggatcaggaaggtttggaaattggttagaaaatatagttgattggaatttaagtagatcaagatattggggaactccgttacctatttggacaacagaaaatggagatgaagaaatttgcataggaagtattaaggaattaaaagatgaagtcaaaaactctgttaaagctggatttatgaaaaatgaattaccaaatggattcgaccttcatagaccttatatagatgatattatattagtttctaaaagtggtaagaaaatgaaaaggcaaaaagatattatagatgtatggttcgattccggtgctatgccttttgctcaacatcattatcctttttctaataagaaaaattttgataaactttttcctgctgattttatagctgaaggagttgatcaaacaagagggtggttttttactttacatgttttaggtgttttattattcaataagatttcttataaaaacgttatttctaatggttta

SEQ ID NO: 305216 - DNA, 1123 bp, Unknown
  Bacterial polypeptide expressing nucleotide sequence isolated from the Sargasso Sea
tatgagtaaagaacatataaatttaccaaaaacagttttctctatgaaggctaatttgccaaataaagagccaaatttaattaagtattgggaccagataaaattgtatgaaagtttacgcgaaagtacaaaaggaaaagagaaattcatacttcatgatggacccccatatgccaatggtaatattcacatgggaacagctttaaataaaattttaaaagacattataactaaatttcatcaaatgaatggaaaggattcagtttatgttccaggatgggattgtcatggacttcctatagaatggaaaattgaagagcaatataaaaaaaataaaaaaaataaaaacgatattcctattgttgaatttagaaaagagtgcagagatttcgcaaataaatggataaaaactcacaaagatcaatttaaaagattaggagtcgtaggagattgggaaaattattattcaacaatgagcttcgatgcagaagctcaaatagtaagagaattaggtaagtttttgaaagaagggagtctatataaaggctataaaccagtactttggtctacagtagaaaaaaccgctttatcagatgccgaggtagagtatatggatcatacctcagatacgatttatgtttcatttgatataaaaaaaacaaatctaaaggatttagaaaattctgaaattataatatggacaaccactccatggacaattccagcaaataaagctttggcatataatgaaaatttaacttatcaagttattgaattaaatgatgagaatgattttaagaatagaaaaattgttgtagctaaagaccttttagaaaatgtaataaaagattgtgatattaagaattataaaattatcaaagagataaaaggcgagaattttgaaggcactatctgttcgcatccatttataagtgatggatttgactatgatgtacctatgttggaagcacgtttcgttacaattgaacaagggacaggcatcgtgcattgcgcaccaagtcatggccctgatgattttaatctttgtctcaaacatgatatcaaagcattagaaactgttgatgatgacggtaaatatacaaaacatattccatttatttga

SEQ ID NO: 305217 - DNA, 1233 bp, Unknown
  Bacterial polypeptide expressing nucleotide sequence isolated from the Sargasso Sea
atgaaaaagaaggatctgattgttggtttactgatgatgcaaaaaaatttctaggagaagatcatgatcataaagattttgaaaaacttaatgatattgtagaagtttggtttgatagcggatcaactcacagttttgttttagaaaaaagaaaagatttaaagtggcctgccgatatgtatctcgagggttcagatcagcatagaggttggtttcattcatctttgctagagtcttgtggcactagaggcacagccccatttaaaagtattttatctcatggatttgtagttgatggaaaaggtctaaaaatgtcaaagtcatcaggaaatgtgatttccccagatgatattcttaaaaattatggcgctgatattttaagagcttgggtggcttcatcagattatgctgaagacttaagaattgataaaaatattttagctcagcatgcggagtcttatagaaaaattagaaatacttttagatttattctaggaaatataaaagataattttgaagaagaaaaattttcatcattagatattaaaaaattcgatgagttagaacaatatattcttcataaagtttttactttagactccctagtcaaagaaaatttagttaattataactttcataaactatacaaagaacttttaaatttttgtgctttagatttatcctcattctattttgatataaggaaagatacattgtattgtgatagcattacctctaataaaagaagaaattgtataagagttttaaatattatcctagagtgtttattaaaatggtttgccccaatttttgtttttaccactgatgaaatttatagtttagtaagtaaagataaaaaaaatattcatgaatatacattccccaaaattccaagttcatggaaaaataatactttagatcacaaatggaaagaattattcaaaataaaagaggtagcaaatattgcaatcgaagaaaagagagtgagcaaagaaattggttcaagtttagaagctgacttaaaaattaccacagatagtaaaaaatttaatatactaaaagatatagatcttgcggaatattttataacttctaaagcagaaaaaattgaaagcaaaaacaaagatgaattaagtattaaagttataaaatccaaagggatcaagtgtccaagatgttggaaaattttagaaaaaaactgcgatagatgtaaaaaagctacgaatgtctgaa

SEQ ID NO: 305218 - DNA, 406 bp, Unknown
  Bacterial polypeptide expressing nucleotide sequence isolated from the Sargasso Sea
tatgagtgattacaaagccacactgaaccttccagaaactgcgtttcctatgcgcggtaaccttgctcagcgcgagccgaaaatgcttaaagactggcaggaaaaaggggtatacagcaaaattcgtgaagcgaaaaaaggcaaaaagccatttattcttcacgatggccctccttatgcaaatggcgatattcacattggtcacgcggttaacaaaattctcaaagacattattgtaaagtcgaaaaacctttctgacttcgattctccgtacgttcctggatgggactgtcacggtttgccgattgaattgatggtagaaaagaaagttggtaagccaggtaagaaagttactgcggctgaatttcgccagaagtgtcgcgaatacgcacaaaagcaaaattga

SEQ ID NO: 305219 - DNA, 823 bp, Unknown
  Bacterial polypeptide expressing nucleotide sequence isolated from the Sargasso Sea
atgacagttaactatagagatacattaaatcttccagatactgatttttcaatgaaggctggattgcccagaaaagaaccagagatattggatttgtggtccaaaacagatttatatggaaagattagaaaaaaatatgagaataaagaactatttctcttacacgatgggcctccatatgcaaacggagacatccatttaggacactcagttaataaaatccttaaggatataactataaaatttaaaacccttcaaggatttaatgctccttatgtgccgggttgggactgtcatggacttccaattgaacttaatgttgaaaagaaacatggaaaaaatagcgaactcgtaaaaaataaagaaagttttcaaaaagcctgtaaagaatatgctgaaagccaaattaataatcaattaaatgattttaaaagattgggagtatttggtgattgggaaaattcatataaatcgttagatccaaaatttgaagcagacattgttaggtctttaggtgctatttttagagaaggtcacctagaaaaaggtgagaagcccgttcattggtgccaagaaagtgggtcatcactagcagaggcagaggttgagtatattgataaaacatcaaaagcaattgatgtttcattcaaagtagatgattcatctttagagaaggtaaaagatttgtttagttttaaggatctagacgaaattttctttgttatttggacaacaacgccatggacaattccttcaaatgtagctgtttgtattaatcctgaattcgaatactcactcattagtatgcaaaataaattttatg

SEQ ID NO: 305220 - DNA, 757 bp, Unknown
  Bacterial polypeptide expressing nucleotide sequence isolated from the Sargasso Sea
aatgagcaaagaacatataaatcttcccaaaacagctttttcaatgaaggcaaatttaccgactaaggagcctggaataattgaatattggcaaaaaataaatttatacgaaaaacttagagagaaaagcaaaggaaaagaaaagttcattttacatgacggaccaccatatgctaacggaaatatacatatgggtactgcactaaataaaatattaaaagatataattactaaatttcaccaaatggatggtaaggactcagtgtatgttcctggttgggattgtcatggtttacctattgagtggaaaattgaagaacaatacaaaaaaaataaaaaaaacaaaaacgatgtaccgattgttgactttagaaaagaatgtagagattttgcaaataaatggataaatattcataaagatcaattctcaagactaggtgttattggggattggaaaaattattattcaacaatgagtttcgatgctgaagctcaaatagtaagggagcttggaaagtttcttaaagaaggaagtctttatagaggatataagcctgtattgtggtcaacagttgaaaaaacagctctagctgatgcagaagttgagtatatggatcatgtatctgatacaatatattcagcattccctataaaaaaaacaaatctaaaagaaattgaagattcaaatataattatatggacaacaacaccatggacgatacccgcaaataaagctttagcttataatccaagctta

SEQ ID NO: 305221 - DNA, 404 bp, Unknown
  Bacterial polypeptide expressing nucleotide sequence isolated from the Sargasso Sea
tatgaaatctcaaaataacaaagaacaaaaatcagacttttcttataaagaaactttaaatttattaaaaactgacttctcaatgcgcgctaactcagttgtaagagaacctgagatacagaatttttgggctaataatgatattgatttcaaattaggttcaaaaaattcaggcgaaatatttaccttacatgatggcccaccttatgcaaatggagctcttcatatgggtcatgcccttaataaagttttaaaagacataataaataagtacaaaaccttaagaggatttagggttcatttcgtacctggttgggactgtcatggattacctattgaattaaaagttcttcagaatttaaaatctgatgaaagaaagaatcttgacaccctaaatttaagaa

SEQ ID NO: 305222 - DNA, 1186 bp, Unknown
  Bacterial polypeptide expressing nucleotide sequence isolated from the Sargasso Sea
aaaactgcactagctgatgccgaggtagaataccaagaccacaaatctgatacaatttatacctcttttccggttaaaacttcaaatattgatgagcttataggtagtgaaattgtaatttggactacaacaccttggacaataccagctaataaagctttagcttataataaagctcttgattatatcttagttcaattatgtgacgataatgattttaaaaatagaaaagtggttgtcgcagaagctttattagattcagttattaaaaattgttcaataaaagattttaaaaaaataaaaaaatttaaggggaatgaattaaaagatacaatatgtaaccatccatttttaaacataggttacaattatgatattccaatgttggaggccagatttgtaacgaccgagcaaggaactggcatagttcattgtgccccaagtcatggtccagacgattttaatttatgtttaattaatggaattaaagctatcgaaactgtagatggtgatggaaaatatactaagaatgtaaaattatttgagggtattcacatttttaaagctaatccaattgtaattgggaaacttaaagaacagaaaaaattattatcaaatggtgaattagtccattcttatcctcattcttggagatcaaaagccccattggttcacagagcaacacctcaatggtttatatctatggacagtcataaattgagagctaaagcattaaaagctattgatgacacaacattttatcctaacaaaggaaaagaaagattaaaatctatgatagaaactagacctgattggtgcgtttctagacaaagagtttggggagtccctcttccaatttttgtaaataaaaaaactaaggaaatattagtagatgatgaagtaaatgagaatattgctaatatttatgaaaaggagggatcagattgttggttttcagacagccctcaaagatttttaggaacaaaatatgaagctaaagattttgataaattaagtgatatcgttgaggtttggtttgatagtggctcaacacattcatttgtcttagaaaaaagaaaagatttaaaatggccagcatcaatgtatctagaggggtctgatcaacatagaggttggtttcattcatcattattagagtcttgtggtaccagaggacgagcccctt

SEQ ID NO: 305223 - DNA, 1057 bp, Unknown
  Bacterial polypeptide expressing nucleotide sequence isolated from the Sargasso Sea
aatgacagttaactacagagatacgttaaatctaccagatactgatttttcaatgaaagctggattgcccagaaaagaaccagagatattggatttatggtccaaacaagacttatatgcaaagatcagaaagaagtatgagaataaagaactatttctcttacatgatggacccccttatgcaaacggagacatccatttaggacactcagtcaataaaatccttaaggatatcactattaaatttaaaaccctccaaggatttaatgctccatatgtgccgggttgggactgtcacggacttccaattgaacttaatgttgaaaagaaacatggaaaaaatagcgaactcgtgaaaaataaagaaagttttcaaaaagcctgtaaagaatatgctgagagccaaatcaataatcagttaaatgattttaaaagacttggcgttcttggggattggaaaaattcatataaatcattagatccaaaatttgaagcagacattgttaggtctttaggtattatttttagtgaaggtcatcttgaaaaaggtgaaaagcccgttcattggtgccaagaaagtcggtcatcattagcagaggcagaagttgagtatatcgataaaatatcaaaagcaattgatgtttcattcaaagttgatgattcatctttaaagaaagtaaaagatttgtttagttttgaggatttagatgaaatattctttattatatggacaacaacgccatggactattccttcaaatgttgctgtttgcattaatcctgaattcgaatactcactcattagcatgcaaaataaattttatgtaatcgcgtctgagatgattgatcaatgctctaaaagatggaagcaaaaatttgatgttatatcgacaataaaaggaaataaattaattgatattgaccttattcatccttttttaaaaagaaaatcagttcttcttcatgcagatcatgtcacaactgaaacaggaacaggttgtgttcataccgctcctgctcatggcatggatgattatttaatatgtaagaaaaataat

SEQ ID NO: 305224 - DNA, 1321 bp, Unknown
  Bacterial polypeptide expressing nucleotide sequence isolated from the Sargasso Sea
gtacttcatgatggacccccatatgcaatgggcaatattcatatgggaacagctttaaataaaatactgaaagatatatacgaaaagtttcaccaaatggatggaaaaaattcagtttatgttccaggatgggattgtcatggattaccaatagaatggaaaatagaagaacaatataaaaaaaataaaaaaaataaaaatgaagtaccgattactgaatttagaaaagagtgtagagatttcgcaaataaatggattaaagtacacaaagatcaattcaaaagattgggtgttataggggattgggaaaactattattcgacaatgagttttgatgctgaggcccagatagttagagagctaggaaaatttttgaaagaaggtagtttatataagggctataaaccagttttatggtcaacggttgaaaaaacagctttatcagatgctgaagtagaatacatggatcatacttcagatacaatttatacgtcttttccaattaaaaaaacgaacttaaatgaattgaaagattgtcagataattatctggactactactccttggacaattcctgctaacaaggctttagcgtacaatgaaaatttaaaatatttagtcatccatttgttaggtgataatcaatttttaaattctaaaatagtgatagcaaaagaacttttagagtctttcataaaagaatgtaatatagaaaaatataaaatattaaacgaaatacctggaaaagtatttcaaggaactatttgcaaacatccattttttgatatcggctatgattatgatgttccaatgttacaagctagatttgttacaacagagcaaggaacaggcttcgtccattgtgcaccaagccatgggcctgatgattttaacttatgtttaaataatggaattaaagcactagaaacagttgatgatgatggaaagtacacaaaacatataccaatttttgaaggaacacacatcttcaaagctaatgtaatagttatagataaactaaaggagatgaaaaaattaattgctaatggcaaactaaaccattcataccctcattcatggagatcaaaagctcctttagttcacagagcaactcagcaatggtttatttcaatggaaagtcatgggctgagaaaaaaagcgcttaaagcgatagatgaaactgcattttatccaagcaaaggtaaagaaagaattaaagctatgatagagaccagacctgattggtgcgtttcaagacaaagagtttggggagttccactgccaatttttgtatctaaaaaaacgaacaaagtactgatag

SEQ ID NO: 305225 - DNA, 403 bp, Unknown
  Bacterial polypeptide expressing nucleotide sequence isolated from the Sargasso Sea
atgaacactaaaaatgataaaaaagactttagtgaaactctatttttaccaaagacatcctttgcgatgcgtgctggcctgcccgagcaagagccaaaaattctagatggatggtcaaaggataatatctatgaaaaattaaggaaaaaatcaaaaagtagaaaaaaattcgtattacatgatggccctccttacgctaacggccatttacacatggggcacgccctgaataaaatactaaaagactttgttgtaagatcacaacaaatgcttggaaatgatagttcttacattcctggctgggattgtcatggcttgccaattgagtggaaaatagaggaacaatatagagaacaaggaaggaataaagatcatgtcgatattataaaatttgaaaagaatg

SEQ ID NO: 305226 - DNA, 880 bp, Unknown
  Bacterial polypeptide expressing nucleotide sequence isolated from the Sargasso Sea
aatgactaaatcacaaataaatctgccaaaaactgctttttccatgaaagctaacttacctaccaaagaaccagaaattcttgaatattggaaaaaaataaatctttacgataaattaagaaatttgagcaaaggcaatgagaaattcattttgcatgatggacctccctacgcaaacggaaatatacatatgggtactgctcttaataaaattttgaaggacattattgtaaaatttcatcaaatggatggcaaggattctatttatgttcctggatgggattgtcatggcttacctattgaatggaaaattgaggaactttataaaaaaaataaaaaaaataaaaacgaggttcctgtagttgagtttaggaaagagtgtagagcatttgctgaaaaatggattgaagttcacaaatctcaatttaagcggctaggtgttgttggggattgggaaaattattactcaacaatgagttttgatgccgaggctcaaattgtaagagagcttggaaaatttcttaaagagggaagtttgtatagaggttttaaaccagttctgtggtcgacagttgaaaaaacggctttagcagatgcagaagttgaatatcaagatcacaaatcagatacaatatatacatcttttaaagttaagtcatctgatttagaggttttagttggaagtgaaataattatttggacaacaactccttggacaataccagctaataaagccttagcttttaatgagtctcttgattatatcataatagaagtaaatgatgataatgattttaaaaatagaaaaattgttattgcagatgccttattagattcagttgttaaagagtgtgacttaaaaaattacaaaaaaaattaa

SEQ ID NO: 305227 - DNA, 466 bp, Unknown
  Bacterial polypeptide expressing nucleotide sequence isolated from the Sargasso Sea
tttaggggatgaatattcacttgatgattatgaacaggtaaaagatgtagttgaagtatggtttgatagtggttcaacacatgcattttgtctagaacaaagagaagatttaaaatggcctgcatctatgtacttagaaggaagtgatcaacacagaggatggtttcactcatcacttttagagtcttctggcaccagaggtaaagcaccttatgaaagtgttctaacacatggatttgttgttgatggaagaggacgtaaaatgtctaaatctttaggtaatgttatttctccagatgatatattaaaaaaatatggagtagatattttaagattgtgggtagtcgcgtctgattattatgatgatcttaaacttgataatgctatcctccaatcgcaagctgagtcttatagaagaattagaaatacgtttcgtttttttaattggaaatttaaacaattttaa

SEQ ID NO: 305228 - DNA, 1082 bp, Unknown
  Bacterial polypeptide expressing nucleotide sequence isolated from the Sargasso Sea
tttgtggtccactgtagagaaaactgctctagctgatgctgaggttgaatacatggatcatacatcagatacaatttatgtttcgtttcatattcaaaaatcaaaattagaaaatcttttaggcgctgaagtaattatctggacgaccacaccatggacgataccagcaaataaagctttagcttacaacaaatctttaaaatatgttgtaatagaagttaatgacaaaggtgattttaataatagaaaaattatagttgcaaaagatcttttaaaaagcgtagttgaagattgtaaaattaatgactacaaaattataagtgaaataaatggatccaattttgatggagtagtttgctcccatccatttaagaacttaggttacaattatgatataccgatgcttgaggcaaggtttgttacgacagaacaaggctcaggaatagtacattgcgccccaagccatggtccagacgattttaatttatgtttaaataataatattaaagctgtcgaaacagtagatgatgatggaaagtatacaaaacatgttttaaattttgaaggcattcatatttttaaagcgaacccaattgtaattgagaagcttaaaaatgaaaaaaatttattagcgaatggaaaactaaatcactcatatcctcattcttggagatctaaagctccgttagtacatagagctacacctcaatggtttatttctatggaaagccacaaattaagagataaagctttaaaagctattgatgatacagaattttatcctgcaaaagggaaagaaagattgagatcaatgatcgaaacaagaccagattggtgtgtttctagacaaagagtttggggcgtaccattgcctatatttatttctaaatcagatggcaaggttttagtagatgatgatgtgtttgaaaatattgcgtctatttacgaaaaagaaggatcagattgctggttttcagatgaccctcagaagtttttaggaaataaatataaagctgaggattttgttaaactaaaagatattgttgaggtttggtttgatagtggatctacacattcatttg

SEQ ID NO: 305229 - DNA, 1357 bp, Unknown
  Bacterial polypeptide expressing nucleotide sequence isolated from the Sargasso Sea
tttggccgaggctgaagttgagtatcatgataaagaaagttttactatctgggtcaaattcaaagtaatcgataacgaagataaagaattgaacggctctcaagttgtaatatggactactacgccctggaccattccatcaaacaaagcagtcgtttttggccctgatattaagtacggcttgtacgaagtaatttcgcgaccagatgaatgttgggcaaatattggcgatcgttacatattagccgataatttagcagatggagttatggaaaaagcaagactagacaacacaaattatcgccggattagggatgttacagcagagaaattatcaaaaataagcttaaaacacccattatgttcagcaaaagacgctaatggagagtgggatgaaattagagattttaggggtgcggatttcgtaactgacactgaaggtaccggatttgtccactgtgctccatctcatggaatggaagagtatgaactctatcgcgaattaggaatgttggctcaggtcatcacatacaacgtaaaagacgatggaagtttcagagatgatctaccattctttgggggaaagtatatccttagccgaaagggcggtgagggcgatgcgaacaaagcagtcatcgataagctaatagaagttgatggattattggctcgtgggaaaatcaaacatagttacccgcattcatggcgctccaaagctccagtaatatacagaaacacacctcaatggtttgcatcgatagatcgcgaagttggtgataataaagatgaatttggcagaacgataagagagcgagcactaaattctatagataagttggtttcatggaccccccagacaggaagaaatcgcctgtattcaatgattgagacgcgcccagactgggtattatctagacagcgcgcctggggtgtacccctcacttgctttacaaaaaaaggggccctgccaacagatagcgattttcttttaaaaaatactgctgtgaacgaacgaattgcagaggctttcgaaaatgaaggagctgatgcttggtatcttgaagactcaaaagaacgatttttaaatgggatcgtagacccagcagaatacgagcaggtgtatgatatattagatgtttggttcgatagtggctcaacgcacgctttcgttttgaaagaacgtgaagatggatcagatgatggacttgctgatttatatttagagggaacagatcaacaccgaggttggtttcactcatcaatgctccagtcctgcggaacgaatggacgagcaccataccgaggagtgctaacccacggtttcacattagatgaaaagggcatgaaaatgtccaaa

SEQ ID NO: 305230 - DNA, 1246 bp, Unknown
  Bacterial polypeptide expressing nucleotide sequence isolated from the Sargasso Sea
gattaatttaaaggatttagttgatgatcatgatgattatgtaaaagcaacagatacgttggatgtttggtttgattcaggatcaacacatttttgcgtgttggataaactttatggaaaagatcttattgctgacctatacctagaaggatctgatcagcacagaggatggtttcaatcatctctattaacaggtattgctatcaatggaaaagctccttataaagctgtccttactcatggatttgttgttgatgagaatggtagaaagcaatccaaatcattgggtaatgttgtatctcctcaaaaggtctgcaataacttaggtgcagatatcttaagactatgggttgcatctaccgacttcaggagtgaaatggtagccactgacgaaattctcaagcaagtatcggatcagtatagaagaataagaaatacttttagatttattatgggtaaccttaatgactttgatgaagtatcaaacaatattaataaaaatgatttagttgaaatagataaatggattattagtgaagcaattaagcttcatgaagaaattcaagagttaaatgataactatgcttatcatcatgtcatacaaaaaattcataacttttgtgtgcatgagctcggaggagtttatttagacataattaaggatagaatgtatgtaacgaaaagtaattccaatgcaagaaggtctgctcagtttgcactttttgaagttgctgatatcttaattaggctaatatcaccaattctagtatttactgctgaggaaatttggcaatcacatgagctatttaagaagcaatcagcttcaatattcatggctccacaaaagattgtaagcgaaagagagagttcaatatctgatgaggattggaaaaagatttttgctgttaaggatgctgtaaatcaaagtattgaaaaagcaagagctgactcagttattaaaggttcacttgattcaaaaattatcatttcatgtgataagaaaacctataaagctcttgaaaagattgaggatgagctaaaattcgtttttatttcttcggaagtagagatagctgaatcatcaagctctaagctagacatagaagtaattaatttcgatcaaaaaaaatgtataagatgttggaataagtgtagttcagttggattgtatgttgaagatcctgagatttgctcaagatgctatacaaatgtttatggcgatggtgaaattagaaaatttgtctaa

SEQ ID NO: 305231 - DNA, 709 bp, Unknown
  Bacterial polypeptide expressing nucleotide sequence isolated from the Sargasso Sea
catgagtgactataaggacacattaaatttaccccaaacagcttttgctatgaaggcaaatttacccaatcgtgaaccagaaattctatcttattgggaagagatagacctctatgggttgttgaaagaagaaggaaaaaccaaagaaaaatttattcttcatgacggccctccttatgcaaatggagagttgcatataggtcatgccattaacaaaaccctaaaggatttaataatcaaaactcaaactttaaatggaaaatatgcgccgtatactccggggtgggattgtcatggattacccatagaactgaatgttgaaaaaaaagtaggaaaggcaggccataaagtatcaaaagaagattttagggacgcttgcagaaagtatgcctctagtcagattgatattcaaagagatcaattcaaaagactaggtgttataggtgactgggaaaatccctacatatctatggattttaactatgaagccaatatcgtgagatccttaggaaaaattatagataacggttatttagtaagaggagaaaaaccagttcattggtgtgtggattgtggttctgctttagctgaagcagaagttgaatataaagataaagtctctctcgcaattgattttggatttttatttgatccaaatgacatgtctaaggtttttggttacgaaagcgataaagacacttttattatg

SEQ ID NO: 305232 - DNA, 1279 bp, Unknown
  Bacterial polypeptide expressing nucleotide sequence isolated from the Sargasso Sea
ttggagcatggtgaaaagattgacatttccaattttattgatgatgcggaagattatgtaaaagttgatgatactcttgatgtatggtttgattcagggtcaacccatttttgcgttcttgacaagttgtatggaaaggatctcattgccgatctatatctagagggttcagatcagcacagaggctggttccaatcatcacttcttacaggaattgcaataaatggcaaagcaccttataagtctgttctcacgcatggattcgttgttgatgaaaacggaagaaagcaatcaaaatctcttggaaatgttgtttcaccccaaaaggtttgtaatgttctcggtgcagatatacttagattgtgggtggcttcaacagattttagaagtgaaatggtggcaacagatgagattctaaaacaggtatctgatcaatataggagaataagaaatacttttaaatttcttcttggaaatatgtttgattacgattccagaaatgcagctaatctcacttctgaccaattaaccgaaatagacaaatggataattaatcaaactatcaaattgcaacaagaaatcaaacaactcagtaatgaatttgcatatcatatagttgttcaaaaaattcataatttttgtgtaaatgaattgggcggcatttatttagatattattaaagacaggatgtatgtttgtaaaaatgattcccaagcaagaaaatctgctcaaattgccatggaaaaaatcttgaacatcttggtgcgagttgttagcccaattttatctttcacatcagaagaaatttggcaaagctctgaaatctttacctcacaacataaatctgtctttttagcatcttatgaatcagaaatatttataaatcaaaaaatctctgaccaaaaatgggaacatatttttgccataaaagattcagtaaatttagcaatcgaacaagcaagatcagaagatagagtaaagggctcacttgattgcaaaatcacacttgaattatctaccgaattattcaatttactcaaaatatttgataaggaactcaaatttatctttatagtttccagtgtcgaaattactttagacaaaacattaaaagataatgaatttcatgttaccaaagtagaaaactttgatgccccaaagtgtattagatgctggaataaatccttcactgttggcgattcaggaagcgatcctgagatttgtgataggtgcatcttaaatattaaaggtgatggtgaagttagagaatttgcttgat

SEQ ID NO: 305233 - DNA, 1534 bp, Unknown
  Bacterial polypeptide expressing nucleotide sequence isolated from the Sargasso Sea
aatggatggtaaagactctgtttatgttcctggctgggattgtcatggattgccaattgaatggaaaattgaagaacaatacaaaaaaaacaaaaaaaataaaaatgatgttcctattattgagtttcgaaaagaatgtagagattttgcaagcaaatggattaagattcataaagatcaatttaaaaggttaggtgtaattggcgattgggaaaactattattcaacaatgagttttgatgcagaagctcaaattgtaagagagttaggaaaatttctaaaagaaggaagtttatacaaaggttacaaaccagttttatggtcaacagttgaaaaaactgctttagcagacgcagaagttgaatacaaggaccatgtttctgacactatttatgcagctttcccgattaaattttcaaatataaaagatataattggatctagcattgtcatctggacaacaactccctggaccatacctgcaaataaagcattagcctataatcaaaatttaacatatgttttgtgtgagatagataataaaaatatattacaaaataaaaaaattataattgcaaaagaacttttatcatcagtttcaaaagacgcagaggttaaaataaatattctatcagaatttaagggaaaagaattagatggaactatttgctatcatccatttaataaaattggatatgattatgatattccagtgcttgaggcaagatttgtgaccacagaacagggcacagggtttgttcattgtgcaccaagtcatggacctgatgattttaatctatgtattaataatggaatcaaggcagttgaaaccgttgatgatgatggaaggtacacaaaacatattccaatattcgagggcactcatatttttaaagcaaataatattgtcattgaaaaattaaaagaactaaaaggtctattagcaaatggtaagcttacacactcatatcctcactcatggagatccaaagcacctttagttcatagggcaacgcctcaatggtttatttcaatggaaagtcataaacttagggataaagctctcaaagctattgaagatactactttttatccaagtaaaggaaaagaaagaattaaatctatgattgaaacaaggccggattggtgtgtctctcgacaaagagtttggggagttccactaccaatatttatttcaaaaaaaagtggagagattcttattgatgatgaagtttttgagaatattgcaaaaatttatgaaaaagaaggatcagactgttggtttgaagataattttcagagacttcttggtgaaaaatatgatgcagaagacttttataaaacaagtgacattgtagaagtatggttcgacagtggttcaacacattcttttgttttggaaaaaagagaggatttaaaatggcctgcatcaatgtatttagaaggatcagatcaacatagagggtggtttcactcttctctactagagtcatgcgggacaagaggaagagctccatttgaaaatattttatct

SEQ ID NO: 305234 - DNA, 664 bp, Unknown
  Bacterial polypeptide expressing nucleotide sequence isolated from the Sargasso Sea
atggaaaaagactataaagataccctaaacctgcctaaaacagatctacctatgaaagcaggattaccaaaaaaggagcccgagattctatctttttgggattctattaatctttataatttaattagaaaagaaaatgccaaaaaagataaatttatcctccacgatggccctccatatgcaaatggagacattcatcttggccactcagtaaataaaattcttaaagatattgtaattaagactaagactttggagggttttgatgcgccttatattcctggatgggattgtcatggactgccaatcgagcttaatgtggaaaagaagtatggaaggagtagtgaaactgtgaaagacaagtcaaaatttattagtgcctgtcgtgaatatgctctttctcagatcgaaaatcaaaaaaatgattttattcggcttggtgttttaggagattgggaaaattcttataagtctcttgattcaacatttgaagcagatactgtcagatcattaggtagaatagttactaatggccatcttcaaaaaggagagaaacctgttcatttttgttatgactgcaaatcggctctggcagaggctgaagttgaatatgaggataaagtttctaaatcaattgatgtaggtttcaaagttaaaaaagatt

SEQ ID NO: 305235 - DNA, 1312 bp, Unknown
  Bacterial polypeptide expressing nucleotide sequence isolated from the Sargasso Sea
aaaaaactaagagataaatccaagggaagagaaaaatttgttctccatgacggaccaccatatgcaaatggtcatatacatatgggaacagctcttaataaaatattaaaagatgtaattgttaggactcaacaaatggctggtaaagactcaatctatgttccaggttgggattgtcatggattgcctattgagtggaaaattgaggaagaatatagaaaaaaaggaaaaaataaagatgatgttcctacagtaaagtttagaaatgagtgtagagaatttgctgaaaaatggattcaaattcaaaaaaaagaattccgacgtttgggtgttgaaggtgattgggaaaatccctacttaacgatgtctaaccaagctgaagcacaaattgtaagagagttaggtaaatttttgattgatgaaagtttatataaaggagccaaacctgtactttggtctgtagtagaaaaaactgcattagctgatgcagaagtagagtatgaagatcatacatcgaatacaatatatgttaagtttttaatttttcgatcagaagataaagacttaattggatcaaatatagttatatggactacaactccatggactataccgggtaatagagctttagcttatgggattgatttagattattgtcttattaaagtaaatgaagttgaagatacaagcttagtgcagattgatgataaattaatttttgcaaaagaattaatagagaatgttactaaagaaattggtattaaaaaatattctatattaaaaacttttaaaggaacaaatctttcaacttgtgaatgtgagcatccttttaaaaaattagggtataattttattgtaaaaccatttcctgctgaatttgtaaatttagaacaaggtactggtatagttcatatagctcctggacatggtgatgacgattatgttttgggaattaaaaataatttagatattattcaaactgttcaggatgatggaaaatataataatcacgcagttggttttgaaggagaacacgtctacaaagttgatcaaaaaatagctgacaaacttaaagatttttcaaaacttttatttcaaggtacattaaggcatagttaccctcattcgtggagatctaaagctccgttaatttatagaaatactcctcaatggtttatttcaatggaaaaaaagaatttaagaaaaattgcattaaaatctattgatgaaactattttttatccacctcaaggaaaaacaagactaagatcaatgatgaaactagaccagattggtggtatctcgacaaaga

SEQ ID NO: 305236 - DNA, 1318 bp, Unknown
  Bacterial polypeptide expressing nucleotide sequence isolated from the Sargasso Sea
atgagtaaatcacaaattaatctaccaaaaacagctttttctatgaaggcaaatttgccaacaagagagcctgaaattttagattattggcaaaaaataaatctttatgatgaaataagaaactcaagtaaaggaaaagaaaaatttgttcttcacgatggcccaccttatgcgaatggaaacattcacatgggtactgctcttaataaaatattgaaagatattatcgttaaatttcaccaaatggatggtaaagacagcatttatgtacctgggtgggactgtcatggtctaccaattgaatggaaaatagaggaacagtataaaaaaaataaaaaaaataaaaatgaagttcctatcgttgagtttagaaaagagtgtcgatcatttgcagaaaaatggattgaagttcataaatctcaatttaaacgtttaggtgttgttggagattgggaaaattactattccactatgagtttcggagctgaggcccaaattgtaagggaacttggaaagtttttaaaagagggaagtttatatagaggtttcaaaccagttttatggtcaacagttgaaaaaacagctcttgcagacgcagaagtagaatatcaagatcataaatctgatacaatttatacatctttttcagttaaatcttctaatttaaaagaattagttggaagtgatattataatttggacaacaacaccatggacaattccagccaataaagctctagcatacaatgagtctcttaattacgtgatattacaattaggagatgatggtgattttaaaaataggaaaatagttgttgcagaagccttattagagtcagttattaaagaatgtaaaatcaaagattataaaaaaattcatatttttaaaggacaggaatttaaaaatactatttgcaatcacccttttattaaaattggatatgagcatgatattccaatgcttgaggcaagatttgttacaatcgagcaaggaactggaattgttcactgtgctccaagtcatggacctgatgattttaatttatgcttaaacaatggaattaaagcgattgaaactgttgatggagatggaaaatatacaaacaatgtaaaactgtttgagggtatccatattttcaaagcaaactcaattgtaattgaaaaacttaaggagcaaaaaaatttattatctaatggtgatttaatacattcttatccacattcatggagatctaaagcaccacttgtgcatagagctacacctcaatggtttatttctatggaaagtcataaattgagagataccgctttaaaagcaa

SEQ ID NO: 305237 - DNA, 793 bp, Unknown
  Bacterial polypeptide expressing nucleotide sequence isolated from the Sargasso Sea
aatgagcaaagcaaatattaatttacccaaaacagaattttcaatgaaagctaatttgccaaataaggaaccggctatgattgaatattgggatcaaatagatttatataaaaatttaagagacaaaagaaaacaaaaagaaaaatttgttcttcatgatggccccccatatgctaatggcgatatacatatgggtacagctcttaataaaatacttaaagacttaatagttaagtttcatcaaatgagtgggaaagattctatctatgtgcccggatgggattgccatggtttaccaattgaatggaaaattgaagaacaatacaaaaaaaataaaaaaaataaaaatgaagttcctataaatgaatttagaaaagaatgtagagattttgcaaacaaatggataaaaattcacaaaaaacaatttaaaagattaggagtaataggagattgggaaaattattattcaaccatgagtttcaacgcagaagctcagattgtaagagagttagggaaatttttaaaagaaggaagtttatatagaggttttaagcctgttttatggtctacagttgaaaaaaccgccttagctgatgcagaagtagaataccttgatcataaatcagatacgatctatgccgctttcaaaattaagaaaactaaattagataagctaaaaaatacggatgtaataatatggacaactactccctggacaataccagcaaataaagccttagcatataacccaaatttaaaatattcaattattgaaattataaaagatggtgat

SEQ ID NO: 305238 - DNA, 1000 bp, Unknown
  Bacterial polypeptide expressing nucleotide sequence isolated from the Sargasso Sea
aatgagcaaatcacaaataaatcttcctaaaacagctttttccatgaaggcaaatctaccagttagagaacctgaaattttagaatattggaataaaattaatctttatgatgaattaagaaactctagtaaaggaaaagaaaaatttgttcttcacgatggtcctccatatgcaaatggtaatattcatatgggtactgctctaaataaaattttgaaagatataattgtaaaatttcatcaaatggatggcaaggactctatatatgtccctgggtgggattgtcatggtttaccaattgaatggaaaatagaggaacaatataaaaaaaataaaaaaaataagaatgaagtaccaatagttgaatttagaaaagaatgtagatcatttgcagaaaaatggattgatgttcacaaaggtcaatttaaacgattaggtgttataggcgactgggaaaattattactctacaatgagtttcgatgctgaggcacaaattgtaagagaattaggaaaatttctaaaagaaggaagtttatatagaggatttaaaccagttttatggtcaacagttgaaaagactgcacttgcagatgcagaagttgagtatcaagatcataaatctgataccatctatacaactttcccagttaaatcttctaatataaaagagctcgagggaagcgaagttgttatttggacaacaacgccttggacaataccagccaacaaagctctagcttataaccagtctcttgattatgtgttaattcaattgaatgatgagggtgattttaaaaatcgaaaaatagttatagcggaggctttattagagtcagttattaaagattgttcaatagaaaattatcaaaagattaaaaagtttaaaggtaaagatttgaaagaaacaatctgcaatcatcctttctataatctaggttatgaatatgatattccaatgttggaggcaagatttgtaaccacagaacaaggaacaggt

SEQ ID NO: 305239 - DNA, 1343 bp, Unknown
  Bacterial polypeptide expressing nucleotide sequence isolated from the Sargasso Sea
aatggaaaaagactataaaaataccttaaatctgccaaaaacagatttaccgatgaaagcaggactaccaaaaaaagagcctgagattctctctttttgggattcaattaatctttatgatttaattcggaaagaaaatgctaaaaaagataaatttatcctccatgatggtccaccatatgcaaatggagatattcatcttggtcactcagtaaataaaatactaaaagatattgttattaagactaaaaccttgcaaggttttgatgcgccttatgttcctggatgggattgtcatggactgccaatagagctaaatgtagaaaagaaatacggaagggatagcgatactgtcaaagataagacaaaatttattagtgcttgtcgtgaatatgctctttctcaaattgaaaatcaaaaaaaagattttattcgacttggagttttaggagattgggaaaattcatataagtcccttgattcatcatttgaagctgatactgtcagatcattaggcagaatagttacaaatggccatcttcagaaaggggagaaacctgtccatttttgttatgactgcaaatcagccttagcagaagcagaggttgagtatgaagataaagtttctaaatcgattgatgtaggttttaaggtaaaaaaagattgcctcaataaccttagtgcagcattctcaaaagaaatagatagctgtagcattgtaatctggactacaacaccatggacaattccagcaaatgctgcagtttcaattggtccagaattaaaatacaccttatgtaattcaaaatttggcaacttagttttggcaactgatctaattgatcagtgctcagagcgttggaagaccgatttagaaaagatctctgaagtaaatggaaatgaaataaaagatatcgtattagagcatccatatttagacagagattctattttaattcatggagagcatgtaaccaccgagacaggaacaggatgtgttcatactgcgccagctcatggtatagatgatcataatatttgcaaagaatataacatcgaaacaattcatgcacttgatggaaatgggttttttaatcaagaatataaggacttagctgggttacctgcaataaaagctgatcaaatagttatagatatccttaaggaatctggaactttaattaatgaggaagatttccatcattcttatccatattgttggcggcataagacccctctaatttttgcttcaacgccacaatggtttatttcaatggataagtcaggtcttttagagggatcaatacaagctattaaagatgtgaagtgggaaccatcttggg

SEQ ID NO: 305240 - DNA, 1193 bp, Unknown
  Bacterial polypeptide expressing nucleotide sequence isolated from the Sargasso Sea
ggaagaatataaaaaagttaatgatattttagatgtatggtttgactcaggctgtacacatgcatttgttttagatggaaaaaatgatcaaatctggccggcatctatttatcttgaaggaacagatcaacacagaggttggtttcattcatcacttttagaatcttgtggcacaagaggagttgcgccttatgagtctgttttaactcatggatttatacttcatgaagatggcctaaagatgagtaaatcatcatccaatactgtctcgccagcagaggtcattgaaaaatcaggcgctgacatactaaggctctgggtagcaagcagtgattactctgaggatttaaagatcgggcctgaaatcataaaaagcaacattgatagctatagaagactccgcaatacacttcgttttattttaggtaatttatcagattttgatcaagacgagaaagtatctgtggatgaacttgatgaattagatttatatattttatcagaattagagagtttaaaaaaagaagttatctcaaactataaaatatttgagtatcaaaaagttttttctgcgatatttaatttttgtacaaacgacttatcatctttctattttgatgtaagaaaagatactctttattgtgattcaaaaaataacaaagtaagaaaatctactcgcactgttctagatattttatttcacgatttattaagtttgcttgcaccaatactctgttttaccactgaagaagcctggcaaagtcgatttggatttgaaaacagcatacatgaaaaagattttccaaaattaaatgatactttaataaataaaaatttatcaactaaatgggcagtgtataaaaaattaagaaaggtcattaacggagcaatcgaagtgaagagaaaagaaaaagttcttggatccagccttgaagcttctgttaaactgtacatatctaaagatgaaatcgaaaagattgaccaaaaagtattagaaaatatttcaattattagtgaattagaaattgtaaatgacaagccttcaagtgacagctttatatctgaactagataaaaacatcggagtgcatgtaagtaaaaccgatggtgaaaaatgtgagcgctgttggaaatatttttctaatttaaaaggtaacgtttgcgatagatgtcaagaagtgcttagtaaatgat

SEQ ID NO: 305241 - DNA, 1402 bp, Unknown
  Bacterial polypeptide expressing nucleotide sequence isolated from the Sargasso Sea
aaggagagacttaagtcaatgatagaaactagaccagattggtgtgtttctagacagagagtttggggagttccactgcctatatttatctctaaaaaagatgagaaggttttagttgatgaggaagtctttaacaacattgctaatatttttgaaaaggagggttcagattgttggtttgaaaataacaaacaaaagtttcttggaaaaaaatataatgaaaatgatttttaccaaacaacagatattgtagaagtatggtttgatagcggttctactcactcctttgtattagaacaaagagaagatttaaaatggcccgcatctctttaccttgagggttctgatcagcatagaggttggtttcactcttctcttttagagtcttgtggcacaagaggtgaagcaccttttgaagctattttatcacatgggtttgttgtagatggaaaaggtcttaaaatgtcaaaatctcttggaaatgtaatttcgcctgaagaaatcttaaaaaaatatggtgcagatattcttaggatttgggttgcagcttcaaattatgctgaggatttaaggatagatcataaaattttggaacagcatgctgacgcttatagaaaacttagaaatacattcagatatttattaggtaatttaaacgatgaattaaatgaaattgatttagataaaatcaaagttgatacattgccagagcttgaacaacttatgctccacaaattatataatttgaatgaaagcttcatgaaacatttcaattcttataatattcatcttatttataaagaattactaaatttttgcactgttgatctctcgtctttttattttgatattagaaaagatactttgtactgtgatgaaaaaaattcaaaaaaaagaaaagattgtcagttactactcaacataatactagatagtttacttaaatggtttgctcccatattatctttcactactgaagaaatatttaagttagtaaataaaaatgatagagaaaagagtattcatttgaaaaaattaaatgtatttcctcaatcatggcataatacgaagctagagcaaaactggcagagaataattgacattagaaatgaagttaactcaagtattgagactatgcgagctgaaaaaattataggatcgagtttagaggcgaatattgaaatagtgttaaatgatgaaaattataatctgggaaaaaactatgatttttcagaaatttgcattacctcatcagcaaaaataactaaagcaaaagaaaaggaaaatccaattaaagtaaatactgttaaagcagaaggacaaaaatgcccgatttgttggaaaattaataaaaatggatgtgaaagacattcatgttctaataaaaatcaaggtgaataaa

SEQ ID NO: 305242 - DNA, 1818 bp, Unknown
  Bacterial polypeptide expressing nucleotide sequence isolated from the Sargasso Sea
atgctgattttgtaactttagaacaaggaagtggctttgttcatatagctccaggtcacggagcagatgattataatttaggcattgcaaataatgtcgaagttccagaaacagtagatgagaatggtcaatattttgaccatgttcccctttttaaaggcaaaaaagtatttaatgatgatggctctgatgcagacgcgaatgtagcagtgattgttgagcttaaaaatcataataaccttgcaggcaaaggatcactcaggcacagctatcctcattcatggagatctaaagctcctgtcatattcagaaatactcctcagtggtttattagtatggaaaagaatggtttaaggtcaacggcacttaatgaaatagacaaagttaattggttccctaaacaaggtaagaatagaatatattcgatgattgaagatagacctgattgggttgtttcaaggcaaagagcttggggtgttcctctatctatattttacaacatagaaactggacaacctctaattgataaagaaattaatcaaaaaataatcgatctgtataaagaagaaggatcagacgcttggtttaaatactctaaagaagaattattgggagataagtacgatccaaatgactataaaaaagttgatgatattcttgatgtttggtttgattctgggtgtacccattcttttgttttagatgaaaaggaagatcaaatgtggcctgcatctctttatttagaaggcactgatcaacatagaggatggtttcactcctcacttttggagtcatgtggtaccagagggattgctccttacgagtcggttttgacgcatggttttgttcttcacgaagatggactaaaaatgagtaagtcttcagctaatatagtttcacctgatgaaattataaataaatctggagcagatattttaagactatgggttgcaagcagcgattattcagaggatttaaagatagggcctgaaatcatgaagagcaatgttgatagctacagaaggctgaggaatacattacgtttcattcttggaaacttatctgaatttaatgataatgaaaaaatttcatatgcagaactcagtgagcttgatcaatatatattatctcagttagaggagctaaaaaaagaagtaatagaaaattataaaatatttgaatatcaaaaagttttttctgcaatatttaatttttgtactaatgatttatcatcattttattttgatattaaaaaggatgttctttactgcgaatctaaggacagtcatatcagaatgtctactcgaacagtattagataagctattctataatttgcttaccttactcgcacctattttatgttttacatctgaagaggcttggcaaagcagacttggaaaagaatcaagtgtccatgaagttgattttccagtcttagaaagtgatgttattaataaagagctcacaaaaaaatgggatttatataagcagttgcgtaaagtaataaatggtgcaattgaggtaaagagaaaagaaaaagtcatcggctcaagtcttgaagcatctgtaacactcttttcaacaaaaaatattaatgaaattgatagtgatacacttgaaaatatttcaataataagtgaattaacaatattaaacgaaaagccaccagaaggctcatatatttctgagtcagaaaaagatgtaggtattgtagttaagaaagttgatggcaataagtgcgagagatgctggaaatattatcctaatctagaaaaagatatttgtttacgttgtgagcaagttatgaatcaataaa

SEQ ID NO: 305243 - DNA, 1006 bp, Unknown
  Bacterial polypeptide expressing nucleotide sequence isolated from the Sargasso Sea
gccagcattaagcgaaattgagcagactcagtggatccctgattggggccaaagccgcatcgaaaagatggttgagaatcgccctgactggtgtatctcccgtcaacgtacttggggcgtgccaattacattattcgtacaccgcgaaaccgaagagctgcacccagacagcgtgtcgttaatggcgcgtgtagccaaccgcattgagcaggaaggcattcaagcttggtgggatctcgatgctgccgaattactgggcgaagaagccgaacaataccgcaaagtgaccgataccttagacgtatggtacgactcaggttcaacctttgcttctgtggttggtgcgcgtccagagtttcatggtcatggtgtcgatttgtacctcgaaggtagcgaccaacaccgcggctggtttatgtcatcattgatgatttctacagccatcactggtaaagcaccttacaagcaagtgctgacccacggctttaccgttgatggtaaaggtcgcaagatgtcgaaatctatcggtaacgtcattgcgccgcagcaagtcaccaacaagttaggtgcagacattctgcgtctttgggttgctgcgaccgactacagcggtgaaatgacggtatcggatgaaatcttaaaccgtagcgccgatgcttatcgccgtattcgtaacaccgctcgtttcttactagctaaccttaatggcttcgatcctgctaaggacttagtggcagtagaagatatggtagcgttagaccgttgggcggtgcgccgcgcggcatcgctgcagcaagaaatcatcgaagcttacgagcaatataacttccatattgtgacgcaaaagctgatgcagttctgctcggttgagctaggtagcttctacttagacatcatcaaagaccgtcagtacaccgctaagcaagagggtcatgctcgccgtagctgccaatcggcactgttccacattgctgaggccatggtgcgttggattgcgccaatcctg

SEQ ID NO: 305244 - DNA, 994 bp, Unknown
  Bacterial polypeptide expressing nucleotide sequence isolated from the Sargasso Sea
tctatgcttactgatagacctgattggtgtatttcaagacagagaaattggggtgttcctataactttagtggttcataaagatactggtgaaatacatcctgatcaaaaggatctatttgaaaaattcgcacaaattattgaaaaagatggtatttctgcttgggataacttagatttgagagattatatcgatgatcatgaagattacataaaaacctctgattcacttgatgtttggtttgattctggggtaacccactttgcagtttctgaaaaaagatttggcgctaatgttgttgctgatctttacttagagggctcagatcaacataggggatggttccaatcatcattattaacaagtatagcaatgaataaatccgtgccatataaaacggttcttactcatggatttgttgtagatgagcaaggaagaaaacaatcaaaatcacttggaaatgttgtctctccacagaaagtctgggatagcctaggagcagatatcttaagactttgggtagcttcaacagattttagaagcgaaatggtggcatctgacgaaatattgaagagaacttcagatcaatacagacgaataaggaatactttcagatttattttaggtaatttaagtgattttagtgataaagataaagtttcgtttgaagatcaagttgaacttgataaatggattataaatgagataaaaactcttcaaaaagaagtcataagcttatatgaatctttttcttaccataaagcaattcaaaaaatacataatttttgtgttaacgaattaggaggagtatacctagatattgtcaaagataggctttatacatgcaaaaatgattcttcagcaagaagatcttgtcaaacaagccttgactgtattttgaatattctagtaaggctcatttctccaatactttcctatactgcagaagaaatttggcaaacaagtaacagattaaatagtcaggaagactctg

SEQ ID NO: 305245 - DNA, 971 bp, Unknown
  Bacterial polypeptide expressing nucleotide sequence isolated from the Sargasso Sea
tttacctatgctttgatcgagataattcatgaaacaagaaaaataaatataattatcgctgaagatttaatagattcgaccttagaaagaattgaggtagaaaagtttatttccctaggaacttgtaaaggctctgatctactcggttttgaggctactcacccatatcttgatagaaattcgttaataatatctggagatcatgttacaaccgatgcaggaacgggaatagtacataccgcaccaggtcatggattagaagattatactgtaagcatccaaaatggtattgatgttctgaatccagtaaaagggaatggaacttataatgaagatgtggagcattttgcagggcaatttgttttcaaagcaaatgaaaatataacaacactccttaaagaaagaggagttttattatcgaaatcgtcttatgaacatagctatccccattgttggaggcataaaagtcctgtcatgtttagagcaacaccacaatggtttatttctatggaggaaaaagatctcttgaaacaatctcaaaattctatagattcaataaactgggcaccaacttggggtcaggccagaatgaattcaatgttggaagaacgtccagattggtgtatttctagacaaaggtcttggggtgtaccgattgctttactgataaacaaagatacaggagagctacatccagaaactgaaaaaattatagaaaaagtagctgatttagttgaattagacggcatccaagcctggcatgatatagaaatcaaagatctaactaacgattatgagtcttacgaaaaaataacagattgcctcgatgtttggtttgattctggagttactcatgcttgtgtattagatgtaaatgaagatttacatttccctgctgatctatatctagaaggttctgatcagcaccgaggttggtttcagtcatcattacttacaagtatcgcgagaaa

SEQ ID NO: 305246 - DNA, 849 bp, Unknown
  Bacterial polypeptide expressing nucleotide sequence isolated from the Sargasso Sea
tatgaaatctcaaaatagcaaagaacaaaaatcagacttttcttataaagaaactttaaatttactaaaaactgacttttcaatgcgtgccaactcagttgtaagagaacctgagattcaggatttttgggctaataatgatattgattttcaattaggttcaagcaattcaggcgaaatatttacgttacatgatggccctccttatgcaaatggagcgcttcatatggggcatgcccttaataaagttttaaaagacataataaataagtacaaaaccttaagagggtttagggtacatttcgtacctggttgggactgtcatggattacctattgaattaaaagttcttcagaatttaaaatctgatgaaagaaagaatcttgacactctaactctaagaaaaaaagcaacagattatgcccatatccaaatcaataatcaaaaggagggtttcaaaaggtggggcatatggggagattggaataacccttacttaactctgaagaaaagttatgaatctgctcagattggagtattcgggaaaatgtttttaaatggctatatatatcgaggtcttaaacctgtgcattggagcccaagttcgaggactgcacttgcagaagcagaattagaatatcctgatgaacatttttcaaaaagtatttatgtttcattaaaaatcactaaaatacctgaggaaattctattaaatttcaaccaagaaaatcttaatatcaaaaaagatttttttcaaaataattctttcataactatttggaccactactccttggaccatacctgcgaatgaagctgttgcagtaaatccaaaaaataaagtacgttt

SEQ ID NO: 305247 - DNA, 862 bp, Unknown
  Bacterial polypeptide expressing nucleotide sequence isolated from the Sargasso Sea
gcgtcagcgcgcctggggcgttcctattacggttttcgtcaacaagggaacgggcgagccgctgcgcgaccccactgtcatggaacgcgtagtaagcattttcaaagaggagggcgccgacgcttggttcacgtcgccaccggaccggttcctaagcaatgattaccacgccgacgactacgagcaagtcaccgacatactagacgtgtggttcgactcgggctcgacccatgcctttgttctggaggatggtgaatgggaggacctggcgtggcccgcttccctctacttggaaggctctgaccagcaccgcggctggttccattcgagcctattagaatcatgcggaacccgaggctgtgcgccatacgaaacggtccttactcacggatttgtaatggccgaggacggccagaaaatgtcgaaatcgttggggaacattgtcgaaccacagaacgtctacaatcaacatggcgccgatattcttagactctgggtgatcggctcggactatgcggaggacctccgtatcggtcccgaaatcgttaaacagcaggccgatgtctaccgccgactacgcaacacgctgcggttcctattgggtaacctgcatggcttctccgatgcggaacgcatacccttaagagacatgccagagcttgagcggtgggtcctcgaccgcctttggcggatggataaagcgctgcgcgagacctgtgataatttccaattccacaccttttttacggagctgcacaacttctgtacagtcgacctttcagctttttatctggatatacgcaaggacagcctatactgcgaccgcctcgacgacccgcgccgccgcgccgcgcgcacagtt

SEQ ID NO: 305248 - DNA, 911 bp, Unknown
  Bacterial polypeptide expressing nucleotide sequence isolated from the Sargasso Sea
acaaaacatgttttaaattttgaaggcattcatatttttaaagcaaacccaattgttatcgagaagcttaaaaatgaaaaaaatttattagcgaatggaaaactaaaccactcatatcctcattcttggagatctaaagctccgttagtccatagagctacacctcaatggtttatttctatggaaagccataaactaagagataaggctttaaaagccattgatgatacagaattttatcctccaaaagggaaagaaagattgagatcaatgatcgaaacaagaccagactggtgtgtttctagacaaagagtttggggtgtaccattacctatatttatttctaaatccgatggtaaagttttagtagatgaagatgtgtttgaaaatattgcgtctatttacgaaaaagaaggatcagattgctggttttcagatgaccctcaaaagtttttaggagataaatataaagctgaagattttgttaaacttaaagatattgttgaggtttggtttgatagtggatccacacattcatttgttctggaaaaaagaggagacttaaaatggcctgcatctatgtacctagagggatctgatcaacatagaggatggtttcactcctcattattagaatcttgtggaacaagaggcagagctccatttgaaagtatcttatcccacggatttgtgatggatggcaagggtttgaaaatgtcaaagtctttagggaaccagatctttcctgaagatattttaaaaaaatatggagcagatattcttagggtttgggtgactgcatctgattactctgaggatttaagaatagattacacgattttagagcaacatgctaaagcatataggaagataagaaatacatttagatacttaatgggaaatataaacga

SEQ ID NO: 305249 - DNA, 922 bp, Unknown
  Bacterial polypeptide expressing nucleotide sequence isolated from the Sargasso Sea
ctcggtagatgttttgttcaggtcgttgacgcttctgagtttatcaaaagaacagaatcaaaaaagattgatgatggtagagatttatatattccaatttggacaacaacgccttggacacttccatcaaatgaagcggtcgcgatgggaaaggatatttcctatggaatttacaagctcaccttaaatggacgagaaattcttgtagttattgctaatgatctaaaagaaaccattaaaaatagatggaatgttgaaaatctcgaggtgctagaggaaatttctgctgaaaatctctctggccttcggttacagcatccgtttgatgaaagaaccgttccagttcttttgggagagcacgttacgacagaaaatggaactggctcggttcacaccgctcctgctcatggtcttgaggattttcaactgggacaagaaaatgatttggatctcaattgttatgtgaatacatatggtgttttcattgaaacaaaggagagctttgccaagcagcatatatttaaatccgaatctaatatcatcgaaaaactaagtgactcaggcttattaatctcgagcgaaaaatttgaacacagttacccacactgctggagacataaaacacctgtgatctacaggactacaaagcaatggttcattagcatggaaaatcaagattttcgaactgcttgtttgagttccattaaagatgttaattggaaaccgacttggggagaggagcgaatccatggaatgattgaaaccaggccagactggtgtatttcaagacaaaggtattggggcgtgcctattcccctttttacgcacaaagacgatcaaggaattcatcccaacactccagacttgctcaatcagattgctgataaagttgaggatcagggaattgacgcttggtttgata

SEQ ID NO: 305250 - DNA, 1123 bp, Unknown
  Bacterial polypeptide expressing nucleotide sequence isolated from the Sargasso Sea
gattgagacccgacctgattggtgcgtatcaagacagagggtttggggagtacctttacctctgtttatagataaaaaaacgggaaaacctctaaaggataaaaacgttataaatagaattgcagatatatatgaaaaagaaggaagtaatacttggttttcagaaaatccacaaagatttttaggagatgaatataatgctgatgattatgaacaagtaaaagatgttgttgaagtttggtttgatagtggatctacgcatgctttttgtttagaaaaaagagaagacttaaaatggcctgcatctatgtatttagaaggaagtgatcaacataggggatggtttcactcctctctattagaatcttcaggaacaagaggtcgagcaccctatgaaagtgtattaacacatggatttgttgtcgacggaaaaggaaggaaaatgtccaagtcgctaggaaatgttatttctccagatgatattttgaaaaaatatggtgttgatattttaaggctttgggttgttgcttctgactattatgatgatttaaaactagataacgcaattttgcaatcacaagcagagtcttatcgtagaatcagaaatacatttaggtttttaattggaaatttacataattatagttcagaggaaattgtagctgaagaagattttcctgaactagagaaatatcttctacatcgtttgtgggaagtagatcaagtagttaaaaaatgtgtaaaaacatttaattttcacttaatgtttacaactttgcttaatttctgttcaaatgatctttcagcgttttacttcgatataagaaaagatataatttattgtgacagttctaaatctaatactagaaaatcatcaagaactttactagacattatttttaatcatttggttagatggttttcaccatcaatttccttcaccacagaagaggcatggaaagctataggaaaaaataatagtgttcatttagaagattttttaaactgtaaagatgtctatcaaaataaaaaattaagtgaaaaatggtctttgattaaaaatattagaaaagtttcaactggagctatagaaaaaataagagaagaaaaaataatcgatcaa

SEQ ID NO: 305251 - DNA, 865 bp, Unknown
  Bacterial polypeptide expressing nucleotide sequence isolated from the Sargasso Sea
gattttaatctttgcttaaataacggaataaaagctattgagacagttgatgatgatggaaaatatacaaaaaatgtttctttgtttgaaggtttacatatttttaaggctaatccaattgttattgaaaaattgaaagagcaaaacaatcttctttcaaatggtgaattggttcattcatatcctcattcttggagatcaaaagcgcctttagttcatagagcaacaccacaatggtttatttctatggaaagtcataaactcagaagtaaagctttaaaggcaatagatgatacaactttttatccaagtaaaggcaaagaaaggttgaaatcaatgatcgagacaagacctgattggtgtgtatcaagacaaagagtgtggggtgtaccgcttcctatctttgtaaataaaaagtctaatgaaattttgatagatgatgaagtatttgaaaatattgcaaatatttatgaaaaagaaggttcggattgttggttctctgataaccctcaaaaatttttaggtgataaatataaagcagaagattttaataagcttagtgatattgttgaagtgtggtttgatagtggatcaactcactcttttgttttggagaaaagaaaagatctcaaatggcctgcatcgatgtatttagagggctcggatcaacacagaggttggtttcactcttctttattagagtcctgtggaacaagaggtaaagccccatttgagtcgatattatctcatggatttgtggtggatggaaaaggtcttaaaatgtccaaatctcttgggaatgtaattgccccagaggatattttaaaaaaatatggtgctgatattttaagaatttgggtagcag

SEQ ID NO: 305252 - DNA, 773 bp, Unknown
  Bacterial polypeptide expressing nucleotide sequence isolated from the Sargasso Sea
aatgacaaattataaagatactgtttttcttccacagactgagttttctatgagagctggtttgccacaaaaagaaccagaaattcttaaaagttggcaaaaaattgatctttataagttactgagacataaaagaaaaaattgtactccttttatacttcatgatggtcccccatatgcgaatggtaacttacatattgggcatgctttaaataaaattttaaaagatataattaatagatctcagtctatgcttggcaaagatgcaaattatgtcccaggatgggattgccatggattacctatagaatggaaaattgaagaaaattacagaaagaagaaaaaaaataaagatgaagttcctttaattgaatttagagctgaatgcagagaatttgcatctaaatggatgaaaattcaatctgaagaatttgaaagattaggagtttgtggggattgggaaaacccttactcaacgatgaagtttgagtcagagtctactataatgtctgagttaggtaaatttttattgaatggtggcttgtacagaggcgttaaaccggtaatgtggtcaacagtagaaaaaactgctcttgcagaagctgaaattgaataccatgaccatactagcacaactatttatgcaaagtttccaattaaacaagctaataatgacagtttaatcaattgcaatgttgtgatttggactactactccttggactatgccaggaaatagggcagtagcatttggaaaacatattgaatattctt

SEQ ID NO: 305253 - DNA, 831 bp, Unknown
  Bacterial polypeptide expressing nucleotide sequence isolated from the Sargasso Sea
acctgatacgccactttttgctggtcagcacgtgtttaaagccaacgactctgtggttgaagctttaaaagacgcaggcaagttattggtgcataaagccttaacgcacagctatccgcattgctggcgtcataaaacccctattattttccgtgctacgccgcagtggtttgtcagcatggaacagaaaggcctgcgcagtacttctttagaagaaattggcaaaacccgctggatcccggattggggtcagcagcgtattgaaaatatggtggcaggtcgtccggactggtgtatttcccgtcagcgtacctggggtgtgcctattgcactttttgttgataaagacaccagtgctttgcatccgaatacgccagctttgatggagcaagttgctaagttagtggagcaatccggtattcaggcctggtttgatttagagcctgaaactctactaggcgctgatgcagcacagtacgttaaagtcacagatacgctggatgtgtggtttgactcaggtgtgactcacgcttgtgtgattgagccgcgtgctgaattccatggtgccactcaggccgacctgtatttagaaggttcggatcagcaccgtggctggtttatgtcgtcgctgatgacaggtgtggctattaaacaccatgcaccttataaacaagtactgacccatggttttaccgtggatggcgaaggccgcaaaatgtccaagtccctgggcaacgtggtatcgccgcaggacgtgatgaacaagttaggcgccgatatactgcgcttatgggtagcgactacggattacacctcagagatgacagtctc

SEQ ID NO: 305254 - DNA, 796 bp, Unknown
  Bacterial polypeptide expressing nucleotide sequence isolated from the Sargasso Sea
aagagagcgagcactaaattctatagataagttggtttcatggacccctcagacaggaagaaatcgcctgtattcaatgattgaggcgcgtccagattgggttttgtcgagacagcgagcgtggggtgtaccactcacttgctttacaaaaaaaggtgcgttgccaaccgatagtgattttcttctaaaaaatactaccgtgaacgaacggattgcaaaggctttcgaaaatgaaggagctgatgcttggtatcttgaaaattcaaaagcgcgttttttagaagggatcgtagatccagcagactacgagcaggtatacgatattttagatgtttggttcgatagcggctcaacgcacgcattcgttttgaaagaacgtgaagatggatcagatgatggatttgctgatttatatttagagggaacagaccaacaccgaggttggtttcactcttcaatgctacagtcctgcggaacgaatggaagagcaccataccgaggggtcctaacccatggcttcacattagatgaaaagggcatgaaaatgtccaaatctctaggaaacacaatagccccggaacaagttgtaaaacaatatggggcagatattttgcgcctgtgggttgcgcagtctgactacacagcagatcttcgtattggcccagaaattttaaaaggggtttcggatagttatcgacggctccgtaatacaatgagatttattttgggttcactttcagaactaacggaaagtgaaaaaattgagcctcgaagatatgccagagctcgaacagtg

SEQ ID NO: 305255 - DNA, 796 bp, Unknown
  Bacterial polypeptide expressing nucleotide sequence isolated from the Sargasso Sea
acaaaaaaatcttttaggaagtggaagtttggttcatagctacccacattcttggagatctaaagctccattagttcacagagctacaccacaatggtttatctcgatggaaagtcataagttaagaaataaagctttagattcaattgatcaaactgctttctaccctgaaaaaggcaaggcaaggataagggctatgattgaaactcgtcctgactggtgcatttcaagacagaggtcttggggtgtcccattaccaatttttgttaataaaaaaacaaacgaacctttgagagataaagaggttgttgaaaatattgcaaatatttatgaaaaagaaggatcagactgttggttttatgatgacccacaaagatttctcggaaagaagtataaaaaggaagattacattaagtcaaatgacatagtggaagtttggttcgatagtggctctacacattcgtttgttttagaaaaaagaaaagatttgaaatggccagcatcaatgtatcttgaaggctcagatcaacatcgtggctggtttcattcgtcattacttgagtcatgcggtacaagaggtagggcacctttcgatagcatcctatcccatggttttgttgttgatggcaaaggaatgaaaatgtcaaaatctgcaggaaatatcatttctccagaagatattttaaaaaaatatggagcagatatattaagattatgggttgcatcatctgattattccgaggacttaagaatagaccattcgatattagatcagccatgcggagtctacagaaaa

SEQ ID NO: 305256 - DNA, 915 bp, Unknown
  Bacterial polypeptide expressing nucleotide sequence isolated from the Sargasso Sea
ttagagacagttgatgatgatggcaagtataccaaaaatattcctttatttgaaggtacacacatttttaaagctaatgctatcgttatagaaaaactcaaaaaagaaaaaaaattggtattcaatggtaaattaaatcattcataccctcactcttggagatcaaaagctcctttagttcacagagcgaccccgcaatggtttatctcaatggaaagtcatggtctgagagataaagcacttaaagcaataaataaaacagttttttatcctgaaaaaggaaaagagagattgaagtctatgattgagaccaggccagattggtgcgtttcaaggcaaagagtttggggtgttcctctaccaatatttataaataaaaaagatggaaaggttttagttgatgatgaagtttttgaaaatatagcaaatatttatgagaaagaaggctcagactgctggtttaaggacgatgctcaaaaatttcttggaaaaaaatacaaagcagaaaattttacaaaactgtcagacattgtagaggtatggtttgatagtggctctacacactcttttgttttagaaactagaaaagatcttaaatggcctgcttctatgtacttagaaggttcagatcaacatcgaggctggtttcattcctcacttctacaatcttgtggaactagaggagaggcacctttcgaaacaatcttatcacatgggtttgttgtagatggaaaaggacttaaaatgtcaaagtcattaggtaatgttatttcacctgatgatatattaaaaaaatatggtgctgatatactaagaatttgggttgcagctttctattattcagaggatctaagaatagattatacaattttagagcagcatgcggacgcatacagaaagataagaaacactttt

SEQ ID NO: 305257 - DNA, 869 bp, Unknown
  Bacterial polypeptide expressing nucleotide sequence isolated from the Sargasso Sea
gcatgtaagaaaggttgagccaaatgttcttaatgagctaacaaaaaaaggaaatttaataaattctgaagaatatgaccacagttatcctcattgctggagacacaaaactccagtaatcttcatggccactcctcaatggtttctttcaatgagtaaatcaggcttattggagggtgcagtaagagcagttgatgatatcaagtttattcccgattggggcaaagatcggatggaaattatgctaaaagaaagaccagattggtgtatttctcgacagagggattggggaattccaataactttgttctataacaatgatagtggagaactacatcccaatcaggatgagatttttcgagatgcagcagaggcaattaaaagcaatgggattgattcatggaatgagatggaacttaattatgaagattcttcagaatatgagaagtcctcagacatatttgatgtttggtacgattcaggggtaaccaattttactgtcattgataaattgtatggttcaaatacacaatcagatttatatctagaggggagtgaccagcatagaggttggtttcaatcatctttattaacatcaattgctatgaaaggcatagcgccttataaatctgtcctaactcacggttttgttgtagatgaaggtgggcgcaaaatgtcgaaatctcttgggaatattattacgcctcaagaaattatgaatgattcgggtgcagatattctgaggtattggatagcttctactgacttcagaggtgagattgcattttcaaaagacatattcaatagagcaattgatggttttagaagaattagaaacacaatgagatttatggcctcaaacctataga

SEQ ID NO: 305258 - DNA, 631 bp, Unknown
  Bacterial polypeptide expressing nucleotide sequence isolated from the Sargasso Sea
atgtgtgctgaaataccagactacaaagataccttaaatctgccaaaaacagattttccaatgagagccgggttaccaaaacgagaaccagaatggctcgcaaagtgggaaaatattaaggtttatgacactcttcgccaaaaaaagggcagatcttcatttatattacatgatggccccccatatgcgaacggacatctgcatattggccatgcacttaacaaaattctgaaagatatggtcgttcgtagccagcaaatgatgggaaaagacgcgagatatatccctggatgggattgtcatgggttaccaattgagtggaaaatcgaggaacaatatcggtccaaaggaaaaaataaagacgatgttgatattatagatttcagacaggaatgccgaaaatttgccgctggctgggtagagacccagagggaggaattcaaaagattaggagttatgggaaagtgggaaaacccataccttacaatggacttccatgctgaaagagtaatcgcagaagagttcatgacattcttaatgaatgggaccctttaccaaggatcgaaacctgtaatgtggtcaccggttgaaaagactgcattggcagaagctgaaatagaatatcatgacc

SEQ ID NO: 305259 - DNA, 864 bp, Unknown
  Bacterial polypeptide expressing nucleotide sequence isolated from the Sargasso Sea
aaatcacctcttacctcacattcttgggagatcaaaagctccattggttcatcgagctactcaacaatggtttatttcaatggaaagtcatggattaagaaaaaaagctcttaaagcattagatgaaactgtcttttatcctagcaaaggaaaagaaagaattaaagcaatgattgaaactaggccagattggtgtgtttcaagacagagagtctggggagttcctttgccaatttttgtatcaaaaaagaataatgaagttttaattgatgatgagatttttgaaaacatagcaaaaatatatgaaaaagaaggttctgattgttggttttcagatgatccccaaagattcttaggaaaaaaatataaagctgagaattatgaaaaattaagtgacatagttgaagtatggtttgacagtggatcaacccattcttttgtactagaaaaaagaaatgatttaaaatggcctgcctcgatgtatttagaaggatcagatcaacataggggctggtttcattcatctcttctagagtcttgtgggactagaggtagagctccatttgaaagtattttatcacacggttttgtagttgatggaaaaggacataaaatgtctaaatcattgggaaatgcaatagctcctgaggatattttaaaaaaatatggagcagatattttacgagtttgggttgctgcatccaattatgctgaagatttaagaattgattattctatcttagaacaacatgcagaagcatatagaaaaataagaaatacatttagatttttattaggaaatataaatgataattttacaaaaattaattttaaagatattgatataagtaaatttcctgaact

SEQ ID NO: 305260 - DNA, 926 bp, Unknown
  Bacterial polypeptide expressing nucleotide sequence isolated from the Sargasso Sea
aaacatgtaccatattttgaaggcattcatatttttaaggcaaataaaatagttattgaaaaacttagagagcaaaaaaaacttttatcaaatggtgagttaattcactcctatccacactcttggcgttccaaagcacctttggttcatagagctactccacaatggtttatttcaatggaaagccatgacttaagaaaaaaagcattaaaggctatacaagatactaaattttaccccagcaaaggaaaagaaagattaaaatccatgattgaactaagacccgattggtgtgtttcgaggcaaagagtatggggagttcctattcctgtatttatttctaagaaaaccaaaaaagtattattggatgaagaagtaacagaaaatatagcaaatatttttgaaaaagaaggtgctgactgctggtttgatggagatattcaaagatttttaggaaaaaaatataaaagcgaggattatataaaaatgaacgatatagtagaagtgtggtttgatagcggatcaacccatgcctatgttcttgaaaagagaaaagatttaaagtggcccgcatctatgtatttagagggatcagatcaacatagaggatggtttcattcttccctactagagtcttgcggaactagaggaaaagcaccttttgaaactatattatcccatggttttgtggttgatggcaaaggtcataaaatgtctaaatctttgggaaattctattgctccagaagatatattaaaaaagtacggggcggatatcttacgaatttgggtatcagcatctaattacgcggaagatcttagaattgatcactccatattagagcagcacgcagagtcatacagaaaaattagaaatacattcagatatttattgggtaatttaaatgacaattttaaaccatcaga

SEQ ID NO: 305261 - DNA, 867 bp, Unknown
  Bacterial polypeptide expressing nucleotide sequence isolated from the Sargasso Sea
attaataaagaagatcgtactcttcatccaaaaacaaatgagattatggaatcaatagcaaatgatattaagaatcacggaattgaaaaatggtttgactcttcagttaaagattatctaggcaaagattacgaagattatgaaaaatctagtgacacaatggatgtatggatggactctggtttagcgcatcacagtgtgagtcaaagtcataaagagataacctttccagctgatctttatttagaaggttctgaccagcatcgaggatggtttcagagctctttattaacttcggtggcaatgaatggttctgctccatataagcaagtattaacccatggtttcttcgttgatgagcatgggaaaaagatgtctaaatcattaggaaatgttattgcaccgcagaacataataaattctatgggcgcagatattttaaggttatgggttgcttccaccgattatacaagtgaaatgaggatctctgatgaaattcttaaacgaaatagtgacacctacagaagaatcaggaatacagctagatttttactcagtaatcttggtgattttaacccggcagaagaaatgattgcatacgataagctattagtactggatcaatgggttattgatcgattaagcaatgtaaatgaacaaattaaagatgactttgaaagatattcatttcataaggtttcacaaacactacataatttttgtgtcaatgatatggggggtttttatttagatgtaattaaagacaggctctatactatgccagagaactctataggtagaagatccgcacaaactgtattgatgcatattgctgagtctttagttcgctggattgctccaatgctt

SEQ ID NO: 305262 - DNA, 905 bp, Unknown
  Bacterial polypeptide expressing nucleotide sequence isolated from the Sargasso Sea
tatgactacgatataccaatggctggaagctcaatttgtaacaacagaacagggcacaggtattgtccattgtgcaccaagccatggacctgatgattttaatctttgccttaataacgggattaaggcgatagaaacagttgatggagacggaaagtatactaaaaatgtaaccttattcgagggtattcatatttttaaagcaaatcctattgtaatagaaaaattaaaagaacaaaaaaaacttttaaaagatggagaactaattcattcttatccccattcttggagatcaaaagcacctctggtccatagggctacacctcagtggtttatttctatggagagtcataagcttagagacaaagctttaaaagctattgatgaaacaactttttaccctagcaaaggtaaagagcgattgaaatctatgatagaaactagacctgattggtgtgtatcaagacaacgagtatggggagttccattacctatctttataaacaaaaagagtaaagaaattttaatcgatgatcaagtttttgaaacaatcgcaaagatttatgaaaaagaaggttcagattgttggttttctgatgatcctcaaaagttcttaggaaaaaattataaatcaaaagattttgaaaaacttagcgatattgtagaagtatggtttgatagtggctcgacacactcctttgtgttggaaaaaagagaagatttaaaatggcctgcctcaatgtatcttgagggatcagatcaacatagaggttggtttcattcatctttgttagaatcatgtggaacaaggggaagagccccatttgagtcaatcctttcacacggttttgttgttgatggaaagggattaaaaatgtcaaaatctttaggtaacgtaattgctc

SEQ ID NO: 305263 - DNA, 949 bp, Unknown
  Bacterial polypeptide expressing nucleotide sequence isolated from the Sargasso Sea
ggcgctccaagccatggcccagatgattttaatttatgtttaaataataatatcaaagctgtcgaaacagttgatgatgatggaaagtatacaaaacatgttttaaattttgaaggtattcatatttttaaagcaaacccaattgttattgaaaagcttaaaaatgaaaaaaatttattagcgaatggaaaactaaaccactcatatcctcattcatggagatctaaagctccattagtccacagagctacacctcaatggtttatttctatggaaagccataaattaagagataaagctttaaaagctattgatgatacagaattttatcccgcaaaagggaaagaaagattgagatcaatgattgaaacaagaccagattggtgtgtttccagacaaagagtttggggcgtaccattgcctatatttatttctaaatctgacggcaaggttttagtagatgaagatgtgtttgaaaatattgcatctatttacgaaaaagaaggatcagattgctggttttcagatgaccctcaaaagtttttaggagataaatataaagcagaagattttattaaactaaaagatattgttgaagtttggtttgatagtggatctacgcattcattcgttttagaaaaaagagaagatttaaaatggcctgcatcaatgtatttagagggatctgatcaacatagaggatggtttcactcctcattattagaatcttgtggaacaagaggcagagctccatttgaaagtattttatctcacggatttgtaatggatggtaagggtttgaaaatgtcaaagtctttaggaaatcaaatttttcctgaagatattttaaaaaaatatggagcagatattcttagagtttgggtgactgcatccgattactctgaagatttgagaatagactactcaattttagagcaaacatgctgaa

SEQ ID NO: 305264 - DNA, 918 bp, Unknown
  Bacterial polypeptide expressing nucleotide sequence isolated from the Sargasso Sea
tatttctagacaaaggtcatggggagtcccaattccagtttttttataaaaaaaatggtaatgacattctccttaacagcgagataattaatcatattcaaaaactttttagtgaacatggagcagatatttggtgggattgggaggttaaagatctattgccacaaaattatgcaaaagaagcggatctatggagaaaagggacagatacaatggatgtctggttcgattcaggatctagctgggccgcagtatgtgaactaagaagtgaattaaagtatccagccgatctttatttagagggttcagatcaacatcgaggatggttccagtcttctttgctaacatctgttgcagtcaataataaacctccatataaaaaagttttaactcacggttttgcacttgatgaaaacggaagaaaaatgagcaaatctttaggcaatgttgttgatccaaatataattattaatggaggtaataataaaaaagtagaacctgcttatggcgctgatgtgctaaggctatgggtaagctctgtggattattcagtagatgttccaattggttcaaatatacttaaacaactatcagatgtttacagaaaagttcgtaatactgcaagatatctactagggaatattcatgattatgatcccaatattgagagttttgaaattgatcaattgccacttttagatcaatggatgttaggcagattagttgaggttaaagatcaaatatcagatgcttatgaaaattatgaattttcaaaattcttccaaatcttacaaagtttttgcgttgttgatctatcaaatttctatttggatattgcaaaggataggttatatgtaagctctaaatcagaattcaggaggagatcatgtcagtttgtaatgtcaaaaagtagttgaa

SEQ ID NO: 305265 - DNA, 898 bp, Unknown
  Bacterial polypeptide expressing nucleotide sequence isolated from the Sargasso Sea
aagatgttccatatcaaactatacgatcttatcgacaaaacctggatctattttggagtctgcagaagctaaacatccttattttgataggaagtctaaagttatattgggagatcacgtcactaccgaaatgggtactggaattgttcatacagcgccagctcatggtctagaagattttcatgcaagcaataaatataaacttgagatactaaatcacgttggctcggatggaagattcttagaaacagctattgatttttctggaatgaatttagaggaagccaataaaaaatctatcgaaatgttagaaggacaatcaaaccttctttctaaagatccttatcaacatagttttccgcactgctggagacacaaaacatcgctatttttcagagcaactcctcaatggtttatatctatgacggcagaaaacttattggagaattctatgaattctattgattctgttaactggatgccagattggggtaaatccaggattacaagcatgatggaagagaggccagattggtgtatttcaagacaaagaacttggggtgttcccatagctttgtatataaataagaaaaccggagagcttcatccagataccgtctctattatgcaaaaagtagcagatgaaattgaaaagtcaggaacagacatttggtttgagcaaaaattagaatcagtgaatgttggtgatgagtatgagccagtaatggatattttagatgtatggtttgattctggcgtcacacattactgtgttcttaatgaacaaagaggtttgtctcaacctgcagatttatatttagaaggatctgatcagcatagaggctggttccagtcatctctccttacaggcatgacaattaataagctaccgccgtta

SEQ ID NO: 305266 - DNA, 667 bp, Unknown
  Bacterial polypeptide expressing nucleotide sequence isolated from the Sargasso Sea
attgatgatttaaatacttcaggtgttctgttagctcatagtgagtatgagcatagttatccgcattgttggcgtcataaaaccccattaatttttagagcaactccgcagtggtttattagtatgaatgctaaaaacttacaaaaagattcttgggaggggattcaatctgttaagtggattccatcatgggggcaaaagcggattgaagcgatgatgcaagataggccggattggtgtatatctcgccagcgtacttggggggtgccacttgctatttttattcataaagaaacatatgagatccatccaaattcagtaaaaattatgcataaagttgctgagcttgtaaaagagggtgggattgaagcttggtttgatgcaaaacctgctgacttcttatctgaagctgatgcacaagattatgaaaaatgcgaagatgtcttagatgtatggtttgattcaggagtatcccatcaggcggttacgagcgtaagatctggtatgagttacccggctgatttataccttgaaggctcggatcaacaccgtgggtggtttcaaacttctttattaagcggggttgcaattaagggtattccaccatttaagcaagttttaactcacggatttacggttgatgctaaaggttacaaaatgtctaaat

SEQ ID NO: 305267 - DNA, 858 bp, Unknown
  Bacterial polypeptide expressing nucleotide sequence isolated from the Sargasso Sea
actggtgaaaaaagccaacatcacgcacagctacccgcactgctggcgccataaaacgccgattattttccgtgcgacgccgcagtggtttatcagcatgaatcaggcaggcctgctggatcaggcgatgaatgaagttgagaacaccgtcgagtggcgtccgtcctggggtaaggcgcgcatcgatggcatgatgaacgatcgccctgactggtgtatttctcgtcagcgcacctggggggtgccgatcgcacttttcgttcacaaagaaaccgccgaactgcatccgcgtacgtctgaattaattgctcaggttgcagagcgcgttgaaggtgcaggcattgatgcctggtttgatcttgatccggcagagttactgggtgatgaagcgactcagtacgataaagtcgtcgatacactggatgtctggttcgattctggggtgactcacacggccgtctgcatggcgcgtgacgagctggaaatgcccgccgacctgtatctggaaggttctgaccagcaccgtggttggttccagtcatcactgctgaccagcgtcgcagcctatggcaaagcaccctacaaaacagcactgactcacggcttcaccgttgatggtcagggccgcaagatgtccaagtcgatcggcaacacggtagaacctcagaaggttattaatcaactgggcggcgacatccttcgctggtgggtagccgatactgactattcaggtgagatgacggtttctgatgaaattctgaaacgcaacgccgattcttatcgccgtgtacgtaatacctgccgtttcctgttggcgaacatcaatggcttcacaccagcgaccgatatggtgccagc

SEQ ID NO: 305268 - DNA, 983 bp, Unknown
  Bacterial polypeptide expressing nucleotide sequence isolated from the Sargasso Sea
catctttggaggtatgaaggttcgagagtcaaatgaggagatagtatcacttttaagtaaaaatgatgctcttcttttttccgaggactatgaacactcgtatcctcattgttggagatataaaacacctctcattttcagagcaacgccacaatggtttatgagcatggataaatcagcactgcgtaagtctattaaagatgacattaaaaatatcaactggcttccatcatggggcgaagacaggatttttaatatgattgaaggaaggcctgattggtgcctatcaagacaaagattttggggtgtaccaatacctctatttttgcacaaagaaacaaatgaattacatcctaatacgaatgttattttagaggaagctcaaaagataataaaagagggtaatatagaagcttggatcgattttgataaaagatcgattgttagagatttcgatgattatacagaagtaaaggatactctagatgtatggtttgactcgggtgttacgcatcagacagttctaaaagacaggggaattgacgaaacagcagatctttaccttgaagggtcggatcaacatagaggatggtttcaatcatcgcttattacatctcatgctataaacaataaatctccctataaaaatgttcttactcatggctttgttgtcgatgctgaaggtcaaaaaatgtcaaagtcagttggtaatataatctctccacagagaataattaaggataaaggggctgacattctcagaatgtgggttgcgatgactgattatacaaaagagatgactatttcagaagagatcattaaaagagtatctgagtcatacagaaggatcagaaatacatcaaagtttttgctctcaaacataaacgattttgatgtaaatgagttttatcaaagtaaattacttgctcttgacaaatggattatccataaagctgaagagatgaataaaacaatacagagcg

SEQ ID NO: 305269 - DNA, 833 bp, Unknown
  Bacterial polypeptide expressing nucleotide sequence isolated from the Sargasso Sea
gtttatatctatggaaagtcataatttgagagaaaaggcattaaaagctattgatgaaaccactttttatccaagcaaaggtaaagaaaggttaaaatcaatgattgaaacaagacctgactggtgtgtctcaagacaaagagtttggggagtgcctcttccaatttttgttaataaaaaaacaaaagagattttatctgatgatgaggttactgaaaatattgcctctatttatgaaaaagagggatctgattgttggttttcagataatcctcaaagatttttgggaagcaaatataatgctgaagattttgaaaagttgagtgatattgtagaggtttggtttgatagtggctctacccattcttttgttttggaaaaaagagaggatttaaaatggccagcgtcaatgtatttagaggggtcagatcaacatagaggctggtttcattcatcgttattggaatcttgtggaacaagagataaagctccgttcgaatctattttgtctcatggctttgtcgtagatggtaagggtttgaagatgtctaaatctttaggaaatgtaattgcacccgaggatattttgaaaaagtatggtgctgatattttgagaatttgggtagcatcatcaaattatgcagaagatttaagaatagattattcaattttggatcaacatgcagaatcgtatagaaaaattagaaatacctttagatatttacttggaaatataaacgacaattatgaaaatattaattttgaaaaaattgatattactaagtttcctgaaatagaacaacttatgttgcataaaatttattctcttaatg

SEQ ID NO: 305270 - DNA, 825 bp, Unknown
  Bacterial polypeptide expressing nucleotide sequence isolated from the Sargasso Sea
attaaatgttttaaaagatgctaatgatttgattattgttgatttgcagaaaaataatttactccttttaaaagaaaaatataaacacagatatccttatgattggagaactaaaaaacctacaattttcagagcaactgaacaatggtttgcatcagtagagggatttagatcttcagctttgaaatcaatagaagatgttgaatggatgccaaaaacaggtaaaaaaagaatttattcgatggttgttggaagaggtgattggtgtatttctagacaaaggtcctggggagtgccaatacccgtcttctatgaaaaagaagggaaacaaatactaattaatactgaaactattaaccatataaaaagtttatttgaggagtatggagcagatgtatggtgggaatgggatgagaagaaactattaccagaaaaatataaagatgaatctgatcgttggaaaaaaggtctagatactatggatgtctggtttgattcaggttctagttgggccgcagtttgtgagcaaagggaagaattacaatatccagctgatttgtatttagaaggatctgatcaacatagaggttggtttcaatcatctttgctaacttcggtagcagtaaataataagccgccatataagacagttctaactcatggatttgctttagatgagaatggaagaaaaatgagtaaatccttgggtaacgttgttgatcccaatattattattaatggtggtcctaaccaaaaaatccaacctgcctatggagcagatgtccttaggctttgggttagttctgttgattactcagttgatgt

SEQ ID NO: 305271 - DNA, 889 bp, Unknown
  Bacterial polypeptide expressing nucleotide sequence isolated from the Sargasso Sea
ggaattcatatatttaaagcaaatcctatcgtaatcgaaaaactcaaagaacaaaaaaacttattatttaatggtgagctggttcattcatacccacattcatggagatctaaggctccacttgttcatagagctacaccacagtggtttatttcaatggaaagtcataaattaagagacaaagcattaaaagccattgatgaaaccactttttatccaggtaaaggtaaagaaagattgaaatcaatgattgaaacaagacctgactggtgtgtttcaagacaaagagtttggggtgtacctcttccaatttttgtgaacaaacagactaaagaaattttagtagacgatgaaataatagaaaatattgcatcaatttatgaaaaagaaggttctgattgttggttttcagatgatcctcaaagatttttaggcaagaaatataaagctgaagattatgaaaaattaagtgatatcgtagaagtttggtttgatagtggttcaactcattcttttgtattggaaaaaagagaggatttaaaatggccagcatcaatgtatttggagggttcagatcaacataggggctggtttcattcctcactattagagtcctgcggaaccagaggtaaagctccatttgagtcaatattatcacatggttttgttgttgatggcaaaggtttgaaaatgtctaaatctttaggaaatgtaattgcgcctgaggatattttgaaaaagtatggtgctgatattttgagaatttgggtagcatcttcaaattatgcagaggatttaagaatagattactctattttagatcaacacgcagagtcttatagaaaaattagaaatactttcagatatttacttggaaatttaaatgata

SEQ ID NO: 305272 - DNA, 865 bp, Unknown
  Bacterial polypeptide expressing nucleotide sequence isolated from the Sargasso Sea
agttgatgatgatgggaaatatactgatcatattcctgagtttaagggtttacatatttttaaagctaatagagtagttatagaaaagttagaagagcaaaagaacttattgtctagtggtgaacttgtacattcttatccacattcttggcgttcaaaagctccattagttcacagagctactccacaatggtttatatctatggaatctcatgacctgagaaaaattgccttaaaagctctagataatacaatcttttatccctcaaaaggtagagagagaataaagtcgatgatagagaccagacccgattggtgtgtatctagacaaagagtttggggtgtgcctttaccaatttttgtgtctaaaaaaactaaagaagttttaattgatgatgaggtttttgaaaatattgccaatatttatgaaaaagaaggttctgattgttggtttggtggtgatgtacaaagattccttggaaagaattataaggctgaagattatgaaaaatcaaatgatatcgttgaggtttggtttgatagtggatcaactcattcatttgttcttgagaaaagagatgatttaaaatggccagcttctatgtatcttgagggatcagatcagcatagaggatggtttcattcatcattattagagtcttgcggaactagaggacgtgcaccttttgaatcaattctatctcatggttttgttgttgatggtaagggattgaaaatgtcaaaatccttaggaaatgtaattttaccagaagatatattaaaaaaatatggtgctgatattttaagaatatgggttgcagcaaaaaattatgctgaggacctaagattagatcattctatatta

SEQ ID NO: 305273 - DNA, 871 bp, Unknown
  Bacterial polypeptide expressing nucleotide sequence isolated from the Sargasso Sea
gtggcctttactgcgactgatagcaaagctgttgccgctcagtttggtgtaagcgattactcacatcctgtcgctatggtgatttggactactacaccttggacactgccagctaaccgcgcgttatctatcagccctgagctggattacagcttggttgagtttgtgaaagaaggcgcgactcacgcggttattctggccgacgtgttagttgaagcttgtatggcgcgttacggcgccgagagccatagcgtgttaggtaaagttaaaggtgcaacacttgagctggttcgctttaagcatccattcttagcctttgacgttcctgctattttaggcgaccacgtgacgactgacgcgggtacgggtgtggttcacacggcacctggccatggtcaagacgacttcgtggtaggtcaaaaatacggtttagaagtggcaaacccagttggtgataacggtgtttacaaaccagatactgagttctttgctggccaacacgtatttaaagcaaacgacaatgtggttgcactgttgaaagaaaaaggtgcgctattacaccatgttgcgtaccgtcacagctatccacactgctggcgccataaaacgcccattatcttccgtgctacgccgcaatggtttatctcaatggataaccaaaacctgcgcaagcaagcattaagcgaaattgagcagactcagtggatccctgattggggccaaagccgcatcgaaaagatggttgagaatcgccctgactggtgtatctcccgtcaacgtacttggggcgtgccaattacattattcgtacaccgcgaaaccgaagagctgcaccctgacagcgtgtcgttaatggcacgtgtagccaacc

SEQ ID NO: 305274 - DNA, 847 bp, Unknown
  Bacterial polypeptide expressing nucleotide sequence isolated from the Sargasso Sea
aatgggtttatatcaatgggaaagtcataagcttagaaaaaaagcaattgattctatcgatcaaacaactttttatcccgaaaaaggaaaaacaagaattagatcaatgattgagactaggccagactggtgtatctcaaggcagcgatcttggggagtacctttgccgatctttattgataaaaaaaccaaagaacccttgagagatcttgaagtaattgaaaatatagcgaagatttatgaaaaagaaggatcagactgttggtttcatgatgatccacaaagatttcttggaaaaaaatacaataaagaaaattatattaaaacaaatgatatagttgaggtttggttcgatagtggatcaacacactcatttgttttagaaaaaagaaaagatttaaaatggcctgcatcaatgtatctagaaggctctgaccaacatagaggctggtttcactcttctcttttagaatcttgcggaaccagaggcagggctccgtttgaaagtatactgtcacatggttttgttgttgatggaaaaggcatgaaaatgtccaagtctgctggcaacatcatatcgccggatgagattttaaaaaaatatggtgcagacattctaagactttgggtagcatcatctgattattcagaagatttaagaatagatcactcgatattagaacagcatgctgagtcttacagaaaaataagaaatactttcagatacattttgggaaatttaagggacaattacagtccacaaaatttcaagtcaatcgaagcgagtaagttaccagagttagagcaagtaattttgcataaactttattttttaagtttagaaatt

SEQ ID NO: 305275 - DNA, 857 bp, Unknown
  Bacterial polypeptide expressing nucleotide sequence isolated from the Sargasso Sea
agcattaaaagctattgataatactgaattttatcctgcaaaagggaaagaaagattgagatcaatgatcgaaacaagaccagattggtgtgtttctagacaaagagtttggggagtaccattgcctatatttatttctaaatcagatggtaaagttttagtagatgaagatgtgtttgaaaatattgcatctatttacgaaaaagaaggatcagattgctggttttcagatgatcctcaaaaatttttaggagataaatataaagctaaagattttgttaaactaaaagatattgttgaagtttggtttgatagtggatccacacattcatttgttctagaaaaaagaggagatttaaaatggcctgcatctatgtatctggaaggatctgatcaacatagaggatggtttcactcctcattattagagtcttgtggaacaagaggtagagctccatttgaaagtatattatctcacggatttgtgatggatggtaagggtttgaaaatgtcaaaatctttagggaaccagatctttcctgaggatattctaaaaaaatatggagcagatatccttagagtttgggtgactgcatccgattactctgaagatttaagaatagactactcaattttagagcaacatgctgaagcatatagaaagataagaaatacatttagatacttaatgggaaatataaatgacaattattcagagcaagaatatgctagtatcaatattaaaaaacttccagaactcgaaaaattaatgttacacaaattgtatattttgaatgaaaagtttaaagcaaattttagagagtataattttcatgttttgtataaagaattattaa

SEQ ID NO: 305276 - DNA, 957 bp, Unknown
  Bacterial polypeptide expressing nucleotide sequence isolated from the Sargasso Sea
atgtaggtcaaaatacgaattaccaataacatgtgttgttgatgaaaaagggaacttaaatgaatattctggtcaattcaaaggatcaaatgtcctgaaagatgcaaatgatttaattattgaatatttaaaaagaaataatttgctgctactacaagaaaactataagcatagatatccgtatgattggagaaccaaaaaaccaactatttttagggcaacagaacaatggtttgcatctgtaaatggctttagatcatctgcattaaaggcaatcgaagatgttgtatggatgccagagactggaaagaaaagaatttattctatggttgttggtagaggagattggtgtatttctagacaaaggtcatggggagtccctattccagttttttataaaaaaaatggtaatgacattctccttaacaaagagataattaatcatattcaagaactttttggtgaacatggagcagatatttggtgggattgggatgttaaaaatcttttgccagagaattatgcaaaagaatcagatctatggaaaaaaggaacagatacaatggatgtttggttcgattctggatctagctgggcggcagtatgtgaactaagaagtgaattaaagtatccagccgatctttatttagagggctcagatcaacatcgaggatggtttcagtcttctttgctaacatctgttgcagtcaataataaacctccatataagaaagttttaactcatggttttgcacttgatgaaaacggaagaaaaatgagtaaatctttaggaaacgttgttgatccaaatataattattaatggaggaaataataaaaaaactgaccctgcttatggtgcggatgttttaaggttatgggtaagctctgtagattattctgttgatgttccaattggctcaaatatactccagcaactttcagatgtatacagaaa

SEQ ID NO: 305277 - DNA, 969 bp, Unknown
  Bacterial polypeptide expressing nucleotide sequence isolated from the Sargasso Sea
ttaaaagaatttaaaaaattacttcatcaaggtactttaagacatagctatcctcactcttggagatcaaaagcaccattgatttttcgtaatactcctcaatggtttatatcaatggacaaaaaagacttacgacaaaaagcattaaaatcaattgatgaaacaatattttatccacctcaaggacaaacccgactacgttcaatgattgaaactcgtcctgattggtgtgtttctcgtcaaagagtttggggagtcccacttccattgtttgttaataaaaaaactgagcaacctctaagagatattaaagtaattaatcgtattgcagatatttatgaaaaagaaggaagtgatacatggtttactgaggatccaaaaagatttttaggagatgattattctataaatgactatgatcaaatccaagatgtagttgaagtttggtttgatagtggttctacgcatgcgttttgcttagaaaaaagagaagacctaaaatggcctgcatcaatgtatctagaaggaagtgatcaacatagaggctggtttcattcttctttattagagtctgcaggaacaagaggaagagccccctatgaaagtgttttaacacatggttttgtagttgatggaaaaggtcgcaagatgtcaaagtctctaggaaatgttatttctcctgaaaaagtcatgtctcaatatggagttgatatacttcgtttatgggtagttgcatcagattactatgatgatctaaaattagataatgccattttaaaagcccaaagtgattcctatagaagaataagaaatacctttcgctacttaataggcaatctagagggttttgatgaaaaagaaaaaattaatattgaagaatttccagaattagaaaaatacatcttacatagattgtgggaagtagatcagattattcaaaaatgtgttaagggaattttaattttcatt

SEQ ID NO: 305278 - DNA, 784 bp, Unknown
  Bacterial polypeptide expressing nucleotide sequence isolated from the Sargasso Sea
aggacttcctgctatgaaagcagatccgcttattgttgaaaaattacaggagcataatgccctcattaatattgaagattatcatcattcttatccacattgctggagacgtaaaacacctttgatttttacctctactcctcaatggtttatttcaatgaaaaaaaataatcttattaaaaatgctttaaaacaaattaaaagtgttaactgggaaccctcatggggacttcaaagaatagaatctatgctcactgacagaccagattggtgtatatctagacaaagaaattggggtgttcctataactttagttgttcataaagatactggagaagtacaccctaatcaaaatgatttatttgaaaaatttgctctattaatagaaaaagatggaatagcagcttgggataatttaaatctgaaagattatatcgatgattatgaagaatatattaaaacttctgattcattggatgtttggtttgactctggagtaacccattatgcagttctcgaaaaaagatatggtaaaaatgttgttgctgatctctatttagagggatcagatcaacatagaggatggttccaatcatcattattaacaagtttagccatgaataattctgcaccatataaaacagttctcacacatggatttgttgtagatgaacaaggacgaaaacaatctaaatcacttggaaatgtagtatctcctcaaaaagtatggaataacttaggagcagatatattaagactttgggtggcttcaacagaattatag

SEQ ID NO: 305279 - DNA, 826 bp, Unknown
  Bacterial polypeptide expressing nucleotide sequence isolated from the Sargasso Sea
attattataaaaaatttagatgaacaaaaaaaccttctaggaagtggcagtttagttcacagttatcctcattcttggagatctaaggcgcctttagttcacagggctacaccacaatggtttatttcaatggaaagtcacaaactgagaaacaaagcattagactcaattgatcaaacatctttttatccagaaaaaggaaaagcaagaattagagcaatgattgaaacacgtcctgactggtgtatttcaagacagagatcttggggggttcctttgcctatttttgtaaataaaaaaacaaatgaacctttaagagataagggagttattgaaaatattgcaaagatttatgaaaaagaaggatctgattgttggttttatgatgatcctcaaagattcctcggaaataaatataaaaaagaagattacataaaatctagtgatatcgttgaggtttggtttgatagtggatctactcattcatttgttttggaaaaaagaaaagatttgaaatggccagcatcaatgtacttagagggttctgaccaacacagaggttggtttcattcttctcttttagagtcttgcggaaccaggggcagagctccttttgaaagtatactttcacacggttttgtagtggatggaaaagggatgaaaatgtctaaatctgccggcaatattatttcaccagaagaaattttaaaaaaatatggtgcagatatacttagactttgggttgcttcatcagactatgcagaggatttaagaatagatcaaacgatattagaacaacatgctgaatcttatagaaaaataagaa

SEQ ID NO: 305280 - DNA, 985 bp, Unknown
  Bacterial polypeptide expressing nucleotide sequence isolated from the Sargasso Sea
tatgatcgaaactagacctgattggtgtgtttctagacaaagggtatggggtgtgcctctacctatttttgttaataaagaaactaaagaaattttagttgatgatgaagttaatgaaaatattgcatcaatttatgaaaaagagggatctgattgttggttttcagacgatcctcgaagatttttaggcgataaatataaagcccaagattatgataaattaagtgatattgttgaagtttggtttgatagtggctcaactcactcatttgtattagagaaaagaaatgatcttaaatggccagcttcaatgtatttagaaggttcagatcaacatagagggtggtttcattcatcattattagagtcatgtggaactagaggtagagctccttttgactcaattttatctcacggttttgttgtagatggaaaaggtttaaaaatgtctaaatcattgggtaatgtgattgctccagaagatattttaaaaaaatacggagcagatattttaagaatttgggtagcatcatcaaattattcagaggatttaagaatagattattcaattttagatcaacacgctgattcatataggaagattagaaatacatttagatatttattaggaaatcttaatgataattttgaaataattgatcttgaaaaagtagatttaaatgatttacctgatttagagcagtacatgttacacaaattgaattctttaaataataatttcaaaaaatattttgagaattatgattttcacaatttgtataaagaattattaaatttttgcactatagatttgtcagctttttattttgatataagaaaagatactttatattgtgactctttagatgacacaaagcgaaaatcaactattttattgttgaatataattttaaactctctgcttagatggtttgctccaatattgtctttcacaactgaagaaatttatcaattattatttaaa

SEQ ID NO: 305281 - DNA, 588 bp, Unknown
  Bacterial polypeptide expressing nucleotide sequence isolated from the Sargasso Sea
ggggccttcaagaattgaatctatgcttaccgataggcctgattggtgtatttcaagacagagaaactggggtgttcctataactttggtggttcataaagatactggtgaaatacatcctgatcaagagagtctatttgaaaaatttgcacaaattattgaaaaagatggaatttctgcttgggataacttagatttgaaagattatatcgatgatcatgaagattatattaaaacctctgattcacttgatgtttggtttgattctggggtaacccacttcgcagtttctgcaaaaagatttggcgcaaatgttgttgccgatctttacttagagggctcagatcaacataggggatggttccaatcatcattattaacaagtatagcaatgaataaatcagtgccatataaaacggttcttactcatggatttgttgtagatgaaaaaggaagaaaacaatcaaaatcacttggaaatgttgtctctccgcagaaagtctgggatagcctaggagcagatatcctaaggctttgggtagcctcaacagattttagaagtgaaatggtagcatctgaagaaatatt

SEQ ID NO: 305282 - DNA, 819 bp, Unknown
  Bacterial polypeptide expressing nucleotide sequence isolated from the Sargasso Sea
tatgaaagattataaggacactttaaatctaccaggtacgtcttttccgatgaaggcgaatctgcccaatagagaacctgaaattcttaaattttgggatgaaattgatttgtatagaaagatcagaaaaaaaagtatgggaaaaaaaccatttcttcttcttgatggccctccatatgccaatggaaaaattcatataggccatgctttgaataagattttgaaagacttcatcgtcaaatcaaagactttgtttgggtacgatgcaccttatcttcctggctgggattgtcatggcttaccgattgagcatcaggtagaaaagaagaagggaaaggttggacccaagctgactgcaagagaatttagagattattgtcgtgaatatgcattgaggcaagttgaagagcaaaaagaagacttcattcgtctaggggttcctggagagtgggataatccatatttgactctggataagagatatgaagcagaacagattcgtgcatttgctgaaatatacgaaaacaatcatgtcacatttggatataagccggtgcattggtgtttagattgtcagtctgctttggctgaggcagaagtcgagtatatggataaagtttctacatcagtcgatgttttattcaaaataattgacacttctgagtttattaaaaggacaaatgccagcaagatcaataatggtaaagaattgtttattccaatttggacaacaacaccatggacgcttccttcaaacgaggcagtcgcgatgggtgaagatattccttatggcatttatagtctgacacttcatgaaag

SEQ ID NO: 305283 - DNA, 831 bp, Unknown
  Bacterial polypeptide expressing nucleotide sequence isolated from the Sargasso Sea
tggaagatatacaaaaaatgtagcgctttttgaggggatacatattttcaaatcaaattctattgtgattgaaaaattaaaagatcaaaaaaaattattatcaagcggcgaacttgttcactcctatcctcattcgtggaggtctaaagcaccattagttcacagagcaactcctcaatggtttatttctatggatagtcataagcttagaaataaagctttaaaagcgattgatgaaacaaccttctatcctagcaaaggaaaagaaagattaaaatcgatgattgaaacaagacctgattggtgtgtttcaagacaaagagtgtggggagttccactacctatttttattaataagaaatcaaataaaattttagtcgatgatgaagtttttgaaaatatagcaaaaatttatgaaaaagagggatctgattgttggttttcggatgatccacaaaaattccttggaaaaaaatataaagctgaggattttgaaaagttaagcgatattgtagaggtatggtttgatagtggatctacgcattcatttgtattggaaaaaagaaaagatttaaagtggcctgcatctatgtatctcgagggctctgaccaacatagaggctggtttcactcgtctcttttagagtcttgtggaacaagagatcgtgcgccttttgagtctattctctctcatggttttgtagttgatggcaaaggtttaaaaatgtcaaaatctctgggaaatgtaattgcgcctgaagatatccttaaaaaatatggagctgatatacttagaatttgggttgcttcctcaaattatgctgaggatct

SEQ ID NO: 305284 - DNA, 893 bp, Unknown
  Bacterial polypeptide expressing nucleotide sequence isolated from the Sargasso Sea
acacctcaatgggtttatttttctatggaaaaaaatgatttaagaaaaaaagcaatcaaatcaataaacgaaactcacttttatccaaaaaaaggaaaagaaagactattgtctatgattgaaggaaggcctgattggtgcgtttcaagacaaagagtgtggggtgtaccattaccaatttttattaataaaaaaacgaaagaaccattaaaagataaaaaggttattgacagaatagcctcagtttatgaaaaacaaggctctgattgttggttcacagatgatccaaaagtttttctaggtaatgaatacgatccaaaagattacgataaattaaatgatattgttgaggtttggttcgatagcggttctacacacagctttgtattagaaaagagaaaagatctaaattggcctgcagacatgtatctcgaaggctctgatcaacatagaggatggtttcattcttctttattagagtcttgtggcacaagaggtagagcaccatttaaaagcattctatcacacggtttcgtagttgatggaaaaggtctgaaaatgtctaaatcattgggaaatgttatttctccagaagacatcttaaaaaattatggagcagacattctcagagtttgggcctcagcatcagattatgcagaagatttgagaattgataaaaacattttaattcagcacgctgagtcttacagaaaaatcagaaatactttcagatttatgcttggaaatctaaaagataaatttgaaagacaagattttaagaaaattcaaattaaagaaatggatgaattagaacagtttattctacataaactattcattatcggagagtcacttaatgaaaatttaaaaaattataattttcataaattata

SEQ ID NO: 305285 - DNA, 679 bp, Unknown
  Bacterial polypeptide expressing nucleotide sequence isolated from the Sargasso Sea
atagaccgtaagctgaatgatggaatggatgattatggtgatacgatccgaaaacgtgcgctttcttcgatagaccagttggtaaaatggacacctaggacaggtagaaataggctgttttctatgatagagactaggccggattgggttttgtcaaggcaaagggcatggggtgttcccttatcatgttttgttaggaaaggtagaactccccaggataatgatttcatactcatagatagtaaagtgaacgaaagaatcattgaagtttttaaagaagaaggtgcagattcttggtttgcgcctgacgcaaaaaaaagatttttgcttggtctttataaccctgaagattatgaacaaatttttgatatcctcgacgtttggtttgattcgggctccactcacgcatttgttttgagagatagatcagacggtttttggccagcggatctttacctagagggtacggatcaacatagaggttggtttcactcttctcttttgcaagcttgcggtactcgtgggcaagcaccctataaaggagtattgacccatggatttgctttggatgagaatggcatgaaaatgtcaaaatccttgggcaatacagtaagtcctgaaaatgtaataaatcaatatggagaagatatattgcgcttatgggttgcgcagtcagatt

SEQ ID NO: 305286 - DNA, 808 bp, Unknown
  Bacterial polypeptide expressing nucleotide sequence isolated from the Sargasso Sea
aaaaataatatagaaattataaaagcgttagacagcgaaggattatttaaaaaagaaattgatttcattgctgggctacctccattaaaagcagactctcttgttatagaaaaaattgatgaaaaaggagcattaatcaattgtgatgattatcaacactcatatcctcattgctggagacataaaacacctttgatttttacctcgacacctcagtggtttatctcaatggataaagcaggcttgcttaaaaatgctcttggaagtattaatgaagtcaaatgggagccttcatggggtctgcaaagaattgaaagtatgcttactgatagaccagattggtgtatttcaaggcaaagaaagtggggtattccaataacattactaattcataaagatactggtgaaattcatcctgatcaaggcgagttatttaaaaagtttgctgatgttattgaaaaaaatggaatttctgcatgggatagtcttgatttgagtgagtttacagatagtagtgattcctatataaaagttcaagataccttagatgtttggtttgattccggtgttactcatagtacggtttcggaaaaaagattttcagatgatgttattgcagatctttatctagagggttcagatcaacataggggatggtttcaatcatcattgttaactagtattgcaatgaaaggagcaccgccatataaagcagttcttactcatggttttgttgtagatgaaaatggaagaaagcagtctaagtctttaggtaatgttgtttcgcctcaaaaagtttgggatagct

SEQ ID NO: 305287 - DNA, 907 bp, Unknown
  Bacterial polypeptide expressing nucleotide sequence isolated from the Sargasso Sea
attttattattgcaaaagacctatttggatgaatgctctgatagatggggcatagacctagagattcttggatcagttttaggaaaagaaattactgagatcaccatggctcatcctttgtatgaaagggagtcaaaactattgcacggagaccatgtcaccactgaaagtggaacaggttgcgtgcatactgctccagcgcacgggttggatgattactttatttgcataaagaatggtctcgaatctgtaaaagccttggataatcgaggcatttttaaagaagaatacggaccgttaagcggattaggtactaagaagggagatccgattgttattgaattattacaggacaacaacgctttacttgctcataaacaatatgatcattcatatcctcattgttggaggcataagtcaccagtcatttttatgtcaaccccgcaatggtttatttcaatgaagaaatctggtcttagtgatggagcagtgaatgcggttaaagatgttaattgggagcctagctggggagaagaacgcattctttcaatgctcgaagatcgccctgattggtgtatttcgagacaaagaaattggggcgttcccatcaccttaattattcacaatgaaacaggcgagattcatccaaaacagaatttgctttttaatcaaattgcagatgttattgagaaagagggtatcgagggctgggataatttaagccttgattccttgattgatgatgccgaatcctattctaaggtttatgacactttagatgtttggtttgactcaggtgtaactcacatgtgtgttttagataatttatatggtccagatgtgattgcagatctttatctagagggatcagatcagcataggggatggtttcatcgtccttgctgac

SEQ ID NO: 305288 - DNA, 858 bp, Unknown
  Bacterial polypeptide expressing nucleotide sequence isolated from the Sargasso Sea
aaattataaagatacagtattcctgccaagtactacttttccgatgaggggagggcttcctaaaaaagaacctgaaattattgctcgatggaagcaactagacctatacaaaaaactcagaaaagcaagaaaaggaagagagaagtttattctgcatgacggtcccccatatgcgaatggtaatttgcatatagggcacgcattgaacaaaattcttaaagacgtgataaaccgatcccaatctatgatgggtaaagatgctaattacgtgcctggatgggattgtcatgggcttccaatcgaatggaaaattgaggagcagtatcgaaagaaaggaaaggataaagatgaagttcctattgaggagttccgccaagaatgtcgtgattttgccactcattggatggatgtccagtcagaagaatttcagagattaggtgtattaggcgactgggaaaacccctattacacaatgaaatttgagtcagaagcaataattgccgaggaaataggtaaattcttgatgcaaggttcattgtacagaggctcaaaacctgtaatgtggtctccagtggaaaaaacagcattagcggaggctgaggttgaatatagcgaacatagttctgtaactatttttgcaaaatttaagcttgttaaatgcacaattgaatctttaattggaaattatattattatttggacaacaacaccttggacgatgcctggcaacagggcactagcctatggcaacgatattgattacgttgcagtgacgataaatcaagtttcagaaacttcaattgcacatgagggtcaaacaataattgtaagtgaaatattacttgaaaatatctgctt

SEQ ID NO: 305289 - DNA, 544 bp, Unknown
  Bacterial polypeptide expressing nucleotide sequence isolated from the Sargasso Sea
ggttggtcaaaggataatatttatgaaaaattaagtgaaaaatcaaaaagtagaaaaaaattcgtattacatgatggccccccttacgccaacggccatttacacatggggcacgccatgaataaaatattaaaagactttgttgtaagatcacaacaaatgcttggaaatgatagttcttacattcctggttgggattgtcatggcttgccaattgagtggaaaatagaagagcaatatagagaacagggaaagaataaagatgatgttgatattataaaattcagaaaagaatgcagagaatttgctgaaaaatggattgatatacaaagagaagaatttattcgtttaggaataaatggagattggtactctccctatactacaatgtcatatgaggcagagtctataattgtaagagaattttttaagtttcttgagaacgaaagtttatatcgtgggtcaaagcctgttatgtggtcaactgttgaaaagactgcattagctgaagctgagattgaatataaagaacataaatcaacaa

SEQ ID NO: 305290 - DNA, 895 bp, Unknown
  Bacterial polypeptide expressing nucleotide sequence isolated from the Sargasso Sea
tgcaaaggatttgaaggtgaacacatttataaagtagatggtaaaatttcagataagttaaatgagcttaaaaaattattatttaaaggaacgctacgtcatagctatccacactcttggaggtccaaggctccattaatttatagaaatacacctcaatggtttatttccatggaaaaaaataagttgagggatacggctctaaaatcaatagataaaactgttttctatccagctcagggccaggcacgccttcgttctatgatagaaactagaccagactggtgtatttcaaggcaaagagtttggggagttcctttacctttatttgtcagtaaagaaactggtcaaccacttcgagatcaggaagtcattgatcgaattgcagatatatatgaaaaagaaggaagtgatacatggtttacagaagaccctcaaagatttcttggagacaaatatttaatagaagattatgagcaagttaaagacgtagtggaagtttggtttgatagtggttctacacatgcgttttgtttagaaaaaagagaggatctaaaatggcctgcctcgatgtatttagaaggcagtgaccaacatcgtggttggtttcattcatcattattagagtcctcaggaacacgaggcagggctccatacgaaagtgtattaactcatggtttcgttgtagatggtaaaggaagaaaaatgtctaaatctcttggtaatgttatttctccagaagatattttaaaaaaatatggcgtagacattctaagactgtgggttgttgcttcagattattatgatgatttaaaattagataattcaattttacaagcacaaacggactcttatagaagaatcagaaatacttttagatacataataggtaatc

SEQ ID NO: 305291 - DNA, 724 bp, Unknown
  Bacterial polypeptide expressing nucleotide sequence isolated from the Sargasso Sea
atgtctgaatataaagatactgtatttttacctaaaacaactttttcaatgagagcagggcttccaaagaaagagccagaaattttaaagttttggcaagatatagatatctactcgaaattaagaagtgcaagacaaggcagagaattgttcgtcttgcatgatggaccaccatacgcaaatggtaatcttcatataggtcatgcattaaataaaatattaaaagacataattaatagatctcagtctatgttaggtaaagatgccaattatgttcctggatgggattgtcatggattacctattgagtggaaaattgaagaaaattatagaaagaaaaaaaagaataaagatgaaattccaattatagattttagaaaagaatgtagagaatttgctgataaatggatgaatattcaaagtgaagaattcgaacgacttggtgtttgtggagattggaaggatccttactctacaatgaaatttgaatctgaagcaaagataatgtcagaaattggtaaatttttaatgaatgggggactttatagaggtgttaagccagttatgtggtctacggtagaaaaaactgcattagctgaggctgaaattgaatatcatgaacatagaagtactacaatttatgttaggtttcctgtttataaaactgaaattgaggatttaaaaaattcaagcattattatttggacaaccacaccttggacca

SEQ ID NO: 305292 - DNA, 835 bp, Unknown
  Bacterial polypeptide expressing nucleotide sequence isolated from the Sargasso Sea
cccaagcaaaggtaaagaaagattaaaatctttgatcgaaacaagacctgattggtgtgtttcaaggcaaagagtttggggagtgccccttcctatttttgttaacaaaaaaacaaaagaaattttggttgatgacgaagttatggaaaacattgcatcaatttacgagaaagaaggctctgattgttggttttctgatgatcctcaaagatttttgggaaagaagtataaagctaaagattatgaaaaattaagtgatattgttgaagtttggtttgatagtggttcaacccattcatttgttttagagaaaagagacgatttaaaatggccagcaacaatgtatttagagggatcagatcaacataggggttggtttcattcctcattattagagtcttgtggaacaagaggaagagctccatttgagtcaattttatctcatggatttgttgtggatggcaaaggcttaaaaatgtcaaaatctctcggaaatgtaattgcacctgaggatattttgaaaaagtatggtgctgacattttaagaatttgggtagcttcatcaaattatgccgaagatttaaggatagattattcaattttggatcaacatgcagattcttatagaaaaataagaaacacttttagatatttacttggaaatataaatgataattttgaagatattaacttagacaacattgaggttgatgaattacctgaattagagcaattaatgttgcataaaatctttgttcttaacgataaatttaaacaatattttagtaattatgattttcataatttatataaggagttattaaatttttgcact

SEQ ID NO: 305293 - DNA, 749 bp, Unknown
  Bacterial polypeptide expressing nucleotide sequence isolated from the Sargasso Sea
ttatttaaatgagtcagatcgatggcaaaaaggaactgatactatggatgtttggtttgactcaggctctagttggtcttcagttatttctaagaaaaaagatttaaattatccagcagatctatatttggagggatctgatcaacatcggggttggtttcagtcctcattattaacctcggtagcagttaatgaacatgcgccttttaaaaaggtccttacacatggctttgccttggacgagaatggtagaaaaatgagtaaatcattaggaaatattattgatcctttagttataattaatggtggttcaaataagaaattagatcctgcatatggagctgatgttttgaggctatgggttagttctgtcgattactctgcagatgttcctattggatctaatatacttaagcaaatttctgatgtatatcgtaagattcgaaatacatcaaggtatctattaggaaacctctatgattttgattataaaaatgattccattgatatttctaagctaccattgttagatcaatggatgttgaatagaacagctgaagtaatcgatgagattacagaggcatactctaacttcgaattctcgaagttttttcaaactattcagaatttttgtgtagttgatctatctaatttttatttagatattgcaaaagataggttatatgtgagctctaaatctgactttagaagaagaagttgccagacagtattatctttgattgttgaga

SEQ ID NO: 305294 - DNA, 837 bp, Unknown
  Bacterial polypeptide expressing nucleotide sequence isolated from the Sargasso Sea
gattctcctaaacgaagagataattaatcatattcaagaactttttagtgaacatggagcagatatttggtgggattgggatgtaaagaatcttttgccagaaaattatgcaaaagaatcggaggtctgggaaaaaggaacagatacaatggatgtctggtttgattcaggatctagctgggcagcagtatgtgaactaagaagtgaattgaagtatccagctgacctttatctagagggttcagatcaacatcgaggatggtttcagtcttctttgctaacatctgttgcagtcaacaataaacctccatataagaaagttttaactcatggttttgcacttgatgaaaacggaagaaaaatgagcaaatctttaggaaatgttgttgatccaaatataattatcaatggaggtaataataaaaaaactgatcctgcttatggtgctgatgttttaagactatgggtaagctctgtagattattcagtagatgttccaattggttcaaatatacttaagcaactttcagaggtttatagaaaagttcgtaatactgcaagatatcttctaggtaatattcatgattatgatcctaaaattgatagttttgaaattgatcaattgcctctcttagatcaatggatgttaggcagattagttgaggttacagatcaaatatcaaacgcttatgaaaattatgaattttcaaaatttttcaaaattttgcaaagtttttgtgttgtagatctatcaaatttttatttggatattgcgaaggataggttatatgtgagttacaaatcacaatttaggagaagatcttgtcagttcgtcat

SEQ ID NO: 305295 - DNA, 823 bp, Unknown
  Bacterial polypeptide expressing nucleotide sequence isolated from the Sargasso Sea
attgaacgtgctcagggatgccaacgccgcgatcattgaagcgctggagtccgcgggggccctgctgaagcaggaggcctatggccaccgctacccctacgactggcgcaccaagaaacccacgatcttccgggccactgaacagtggtttgcctccgtggaaggtttccgtcaacaggcccttgatgcgatcgccgcagtggagtggacccctgcctccggtcgcaaccggatcgaatcgatggtcaaggagcggggcgactggtgcatctcccgtcaacgcacctggggggtgccgatccccgtcttttatcaccgcagcagcggcgaggtgctgctgaacgccaacaccctggatcacatcgaagcgttgatcgccgagcacggtgccgacgtctggtgggagaaaaacgaagcggatctgctgccgcccgcctacgccgaccaggccgaccagtggcgcaagggaaccgacacgatggatgtgtggttcgactccggctcaagctgggctgccgtcgccagccagcgggacaacctgagctatcccgccgacctgtacctggaagggtccgaccagcaccgcggctggttccagagttcactgctcacctcggtcgccgtaaatggccacgctccctacaaacgggtactcacccatggcttcgccttggatgagaagggccgcaagatgagcaaatccctcggcaatgtggtcgacccgatggtgatcatcgaggggggcaagaaccagaaacaggaaccgccctacggcgccgatgtgctgcggctctgggtgagctcggtggattactccgccgat

SEQ ID NO: 305296 - DNA, 991 bp, Unknown
  Bacterial polypeptide expressing nucleotide sequence isolated from the Sargasso Sea
gtccacaaggccagcggcgagccgctttgcgatcaggcggtgatcgaccgtgtggtcgaggcgatgcgtgacgaaggcgctgatgctgggttctcttcgaccccgtcccggttcctcgggccggattacgacccggccgaatatgaacaggtgacagacattctcgatgtttggttcgattccggatcgacccattcctttgttctcgagcagcgcaatgaccttgtcagcccggcagacctctatctggaaggctccgaccagcatcgtggctggttccactcatcccttctgcagtcttgcgccacccgtggccgtgcgccctacaagagcgtgctgacccatggctttgttctcgatgagcaaggccgcaagatgtcgaagtcgctcggcaacgtcgtgacccctcagaaggtgatggaccagaatggagcggatatcctgcggctatgggtcgtcagttcggactattataacgacctgcggatcggaccggagatcatcaagcggaccaccgacaactaccgccggttccgcaacacgctgcgctatcttctgggggcgcttgacggctttgccgccgaagaggttgtctcgcacaaccggatgccggcactggaacgctgggtgctacaccgtcttgccgagattgattcacgcatccgcgagatgaccgagggctatgacttccacggtattttcaccgagttgcacacactctgtaacagcgatttgtcggccttctattttgagattcgcaaggaccggctatattgtgattcgtccaactcgatggagcggcgcgcctgccgcacggtgatgaacgaagtctatgaacgcctcacggcatggcttgctccgatcctagccttcaccgccgaggaagcctggcaggcccgtgtccaggacatcgagaattcggtgcatctgcgaagctatgatccgatccccgatggctggctcgatccggcccttggcgaacgctgggcgg

SEQ ID NO: 305297 - DNA, 792 bp, Unknown
  Bacterial polypeptide expressing nucleotide sequence isolated from the Sargasso Sea
ttgtacatagagcaacgccccaatggtttatatcaatggaaagtcacaaactaagaaagaaggctttagattctattgatcaaactgcattttatccagaaaaaggaaaagcaagaataaggtctatgattgagacccgtcctgattggtgtatttctagacaaagatcatggggagttccattaccaatttttgtaaacaaaaagacaaacgaacctttaagagattctggggtcgtagaaaatatagctaagatttatgaaaaagaaggatccgactgctggttctatgacgatccacaaagatttctaggaaaaaaatataaaaaagaagattatataaaatcaaacgatatagttgaggtttggtttgatagtggatctacgcattcttttgttttagaaaaaagaaaagatctaaagtggcctgcatcaatgtatttagaaggatcagatcaacatcgaggctggttccattcatcacttttggagtcttgtggaacaagaggcagagctccttttgaaagcattttgtctcatggatttgttgttgatggcaaaggtatgaaaatgtcaaaatcttcaggaaatattatctctccagaagaaattctaaagaaatatggagcagacattctgaggctatgggttgcttcttctgattatgctgaggatttaagaatagatcattccatcctagaacagcatgccgagtcttatagaaaaataagaaacacttttagatttatacttggtaacttacgagatgattttaatccaaaaagattttaaa

SEQ ID NO: 305298 - DNA, 876 bp, Unknown
  Bacterial polypeptide expressing nucleotide sequence isolated from the Sargasso Sea
cgaagatttgttacctaaaaaatacaaagaaaatgcaaaggatttgaggaaaggagaagacactctagatgtatggtttgattctggttcttcatggaaatcagttctaataaatgataataagtatcctgctgatatgtacttggaaggaaacgatcaacaccgaggatggtttcaaagtagtcttcttacttcagtatcagtaaacaatatagcaccatacaaagctgttttgacccacggttttgttgtagatagcaaaggacaaaagatgtctaaatctaaagggaatgtatttgatcctaataaaattatcaaaacaaatggcgcagatattttaagattatgggttgcttccgaagattattcgtccgaagttagaatatcagacgatattttatcaactgttacagataaatataaaaaaattcgtaatacacttagatttttattaggaaatctccatgattttggattaacaaacaaattaaatgttaacgatttagaagaaatagatagatggattttagcaagattgtcaaaaacaaaagaaaattacaataaaaattttgattcttacttgttccatattggtatcaacgatattattcatttttgcagcaatgacttaagttcaatatatctagacattcaaaaggatgtactttatacgtattccataaattcgaaagaaagaatttcatgtcagacttctatgtctatactatttagagaaatatccattatgttggctccaatactttctttcacgactgaagaagcatggcaatcaagtaattatttaaaaggtagcgtttttgaagcttcattgtcaaatgaaatattttctcattcagagattgaatttaaatggga

SEQ ID NO: 305299 - DNA, 871 bp, Unknown
  Bacterial polypeptide expressing nucleotide sequence isolated from the Sargasso Sea
aatttagaaatgctcgaagaggtttctgctgaaaacctttcgggacttcagttacaacatccttttgatgagagaacagtcccagttcttctaggtgatcatgttaccactgagaatggtactggctctgtacatactgctcccgctcacggacatgaagattttcaaattgggaaagaaaatgatttagatctcaaatgttacgttaattcatatggtgttttcattgatgcaaaagagagctttgccaaacagcatatatttaaatctgaatcagaaatcattgaaagattagatgaatcaaacttgctcattttgagtgaaaaatttgaacacagctatccacactgttggagacataaaactccagtgatctttaggacaacaagacagtggttcatcagtatggaaaatgaagattttagatcctcttgtttagagtcaatcaaagatgttcagtggaaaccaaaatggggagaagacaggatcaatggaatgattgaaacaaggccggattggtgtatttcgagacaaagatattggggcgtgcctattccgctatttacacataaagatgatcagacaatccatcctgatactccagaactccttaatcagattgctgaaaaaattgaggagaatggaattgatgcgtggtttgatgcagatatcgaagagttactgggtgatgattcaaattcatatgaaaaatccactgatacaatggatgtctggatggattcaggaattgcacacaaaactgttagccatctctttgatcacatcacagataaagctgacttgtatctggagggatctgatcagcaccgtgggtggttccagagctctctacttacttctgtggcaataa

SEQ ID NO: 305300 - DNA, 909 bp, Unknown
  Bacterial polypeptide expressing nucleotide sequence isolated from the Sargasso Sea
tttgaattccattaaagatgttaattggaaaccgacttggggagaggagcgaattaatggaatgattgaaaccaggccagactggtgtatttcaagacaaagatattggggtgtgcccattcccctgtttacacacaaagacgatcaaagaattcatcccaacactccagacttgctcaatcagattgctgataaagttgaggatcagggaattgacgcttggtttgatgcaggcatcgaagaatttctaggcgacgatgtaaattcgtatgaaaaatctacggatacgatggacgtttggatggactcagggattgcgcataaaaccgtcagccgtctttttgatcacataaaagatgaggctgatttgtatcttgaaggttctgatcagcaccgcggttggttccaaagttctctacttacttctgtggctattaataatcatgcaccttataaagaagtgcttactcatggatttgtcgtcgatgagaaaggtcataaaatgtccaaatcactcggaaatactgtatctcctcaatctgtaattaataatatgggagctgatatcttgaggctttgggttgcatcaactgattactccagtgaaatgaaaatttcagatcagatactgaaacgaaatggtgatacttacagaaggataagaaatacggcgagatttttattaagcaacttaagtgactttgatccaaacaaaaatcaaaagaaagtcgatgatttggtgctgcttgatcaattagctatacaacgtgtttcagtcttaaatgaacaaattaaaaatgagtataacaattattcattccataagatcgtccagcttcttcataacttttgtgtccacgatatgggtggtttctatctagacatccttaaggatcggctctatacaat

SEQ ID NO: 305301 - DNA, 940 bp, Unknown
  Bacterial polypeptide expressing nucleotide sequence isolated from the Sargasso Sea
acggggaatagttcattgtgcgccaagtcatgggccagatgattttaatttatgtttaaacaataatattaaagcagttgaaactgtagacgatgatggaaagtatacaaaacatgttttaaattttgaaggcattcatatttttaaagcaaatccgattgtaatcgatagacttagaactgaaaaaaatttattagcacatggaaaattgagtcattcatatcctcattcgtggagatccaaagctccattagtacatagagcaacaccacaatggtttatttctatggaaagccataaattaagagataaagctttaaaagctattgatgatacaaatttttatccttctaaaggaaaagagagattaagatcaatgatagaaaccagaccagattggtgtgtttctagacaaagagtttggggagttccgttacctatatttatatctaaatcagatggtaaagttttagtagatgaagatgtatttgaaaatattgctactatttatgaaaaagaaggttcagattgttggttttcagatgaccctcaaaaatttttaggaagtaaacataaagcagatgattttatcaaactaaaagatatcgttgaggtatggtttgatagtggatcaactcattcttttgttttagaaaaaagaaaagatttaaagtggcctgcctcaatgtatctggagggttctgatcaacatagaggatggttccattcttctttattagaggcttgcggaacaagagacagagcaccttttgagtctattctttctcatggatttgtagttgatggaaaaggtttaaaaatgtcaaaatcattaggtaacgtgattgcacctgaggatattcttaaaaaatacggagccgatattcttaggatttgggttgcctcttcaaattatgcggaagatctaagaatagatacc

SEQ ID NO: 305302 - DNA, 775 bp, Unknown
  Bacterial polypeptide expressing nucleotide sequence isolated from the Sargasso Sea
tgtctctttatttgagggtattcatatttttaaagcaaatcctatcgtaatagaaaaattaaaagagcaaaaaaaactattgaaaaatggtgagctagttcattcttaccctcactcgtggagatctaaagcacccttagtccacagggcaactccacaatggtttatttcaatggaaagccacaaacttagaaaaaaagctttaaaagcaatagatgaaacaactttttatcctagtaaaggtaaggaaagattgaaatcgatgattgaaactagaccagattggtgtgtatcaagacaaagagtttggggggttccactacctatatttgtaaacaaaaaaactaaagaaatcctagtggataatgatgtttttgagacaatagctaaaatttatgaaaaagagggttccgactgttggttttctgataatcctcaaagatttttaggaaaaaaatataaagcagaagattttgaaaagctaagtgatattgtagaggtgtggtttgatagtggttcaacacattcttttgttttggaaaagagaaaagatttaaagtggcccgcatcaatgtatctagagggatctgatcaacatagaggatggtttcattcttcattgttacaatcctgtggaacaaggggtaaggcaccatttgagtccattctttctcacggttttgttgttgatggaaaaggtcttaaaatgtctaaatctttaggcaatgtaattgcaccagaagatattttaaaaagtatggagcagatatattaa

SEQ ID NO: 305303 - DNA, 946 bp, Unknown
  Bacterial polypeptide expressing nucleotide sequence isolated from the Sargasso Sea
caacagaacaagggatctgggatagtacattgtgcaccaagtcatggtcctgacgattttaatttatgtataaataacaatatcaaggcagtagaaacagtcgacgatgatggaaaatatactaagcatgttttaaattttgatggagttcatatttttaaggcaaacccaattgttattgaaaaactaaaacaacaaaaaaatttgttagccaacggcaaactaactcattcataccctcattcatggagatctaaggctcctttagttcacagggctacaccacaatggtttatatcaatggaaagccacaaactgagggagaaagctttaaagtccatagaagaaacaagcttttatccaaaaaaaggaaaagaaagacttaaatcaatgattgaaacaagaccagactggtgtgtttctagacaaagagtatggggagttccgcttccaatatttatatcgaaaaaagatggaaaggttttagttgacgaggaagtattcgataatattgcaaaaatttatgaaaaagaaggatctgattgttggttttcagataatccaaaaagattccttggaaataattatgatattgaagactataataaacttacagatatcgtagaagtttggtttgatagtggatcaactcactcattcgttttagaaaaaagaaaagatttaaaatggcctgcttcaatgtatttggaggggtcagaccaacatcgaggatggtttcattcatcccttttagagtcttgcgggacaagaggaaaggcaccatttgaatcaatattatcgcatggatttgttgttgatggaaaaggacataaaatgtccaaatcccttggtaatgtaattgcaccagaggagattttaaaaaaatatggagcagatatattaagaatatgggtggcttcctcagattatgcagaagaccttagaa

SEQ ID NO: 305304 - DNA, 868 bp, Unknown
  Bacterial polypeptide expressing nucleotide sequence isolated from the Sargasso Sea
gctacaccccaatggtttatatctatggaaagtcataagttaagagataaagctttaaaagctatcaatgatacaactttttatcctagcaaaggaaaagagagattaaaatcaatgatagagaccagacctgactggtgtgtatctagacaaagagtttggggtgttcctcttccaatttttgttaacaaaaaaactaaagaaattttagtagatgaagaagtaaatgaaaatattgcgtctatttatgaaaaagagggttcagattgttggttttcagacgaaccgcaaagatttttaggaacaaaatataaagccgaagattatgataagttgagcgatattgttgaggtttggtttgatagtggatccacgcactcatttgttctagaaaaaagagaagatttaaagtggccagcatcaatgtatttagaaggatcagatcaacatagaggttggtttcattcgtcactgctagaatcttgcggcactagaggaagggcaccatttgaaaacattttatcccatggatttgtggtagacggtaaaggattgaaaatgtcgaaatctttaggaaatgtgatagctcctgaagacattttaaaaaaatatggagcagatatattaagaatttgggttgcatcatcaaactattcagaggatttaagaatagattattctattcttgatcagcatgcggagtcttatcgaaaaataagaaatacctttaggtatttacttggaaatatcaaagataaacttgaagaaattaattttgaaaaagtagatttaaatgtattaccagaacttgagcagtttatgttacataaattgtactttttgaacataaattttaaaaaatatttta

SEQ ID NO: 305305 - DNA, 769 bp, Unknown
  Bacterial polypeptide expressing nucleotide sequence isolated from the Sargasso Sea
ttagagtcaatcaaagatgttgagtggaaaccaaaatggggagaagagaggatctatggaatgattgaaacaaggccagactggtgtatttctagacaaagatattggggcgtgcctattccgctgtttacaaataaagatgatcagacaatacaccctgatactccagaacttcttaatcagattgctgaaaaaattgaggagcatggaattgatgcgtggtttgatgtagataccgaagagttactgggtgatgatgcaaattcatatgaaaaatccactgatacaatggatgtctggatggattcaggaattgcacataaaactgtcagccatctctttgaacacatcacagataaagctgacttgtatcttgagggatctgatcagcaccgtggttggttccaaagctctctacttacttctgtcgcaataaataaccaagcaccatataaagaagttctcactcatggatttgtagttgacgaaaaaggacataagatgtccaagtcacttggaaataccgtctcacctcaatctgttataaataatatgggagccgatatcttgagactttgggttgcctcaaccgattacaccagtgaaatgaaaatttcagatcagatactgaagcgtaatgctgacacttataggagaatcagaaacacagcgagatttttattgagcaatttaagcgattatgaccctgcaaagaatcaacagaaaattgacgatctagtattgcttgatcaattagctattcagcgtg

SEQ ID NO: 305306 - DNA, 868 bp, Unknown
  Bacterial polypeptide expressing nucleotide sequence isolated from the Sargasso Sea
tcaatgattgaaacaaggcctgattggtgtgtctcaagacaaagagtttggggagttcctcttccaatttttgtgaatagaaaaacgaaggaaattttagttgatgatgaagtaatagaaaatattgcttcaatttatgaaaacgaaggatccgattgttggttttccgatgatcctcaaagatttttaggcaataagtacaaagctcaagattatgaaaaattaagtgatatcgttgaagtttggtttgatagtggttctactcattcattcgtgttagaaaaaagagatgacttgaaatggccagcctcaatgtatttagaaggatctgatcagcatagaggttggtttcattcctctttattagagtcttgtggaacacgaggtagagcacctttcgaatctatcttatctcatggttttgttgtagacggcaaaggtttaaaaatgtctaaatctttaggaaatgtaattgcccctgaggatattctaaagaaatatggtgctgatattttaagaatttgggtagcttcatcaaattattctgaggatctaagaattgattattctattttagatcagcacgcagattcatatagaaaaataaggaatacattcagatatttattaggaaacataaatgataaatttgaaatattagatttaaataaaataaacataaatgaattgccggaactagagcaatttatgcttcataaaatttataacttaaataataattttgaaaaatattttaaaaactatgattttcataatttgtataaagaattattaaatttttgtactgtagatctttccgctttttattttgatatcagaaaagatgctctgtattgtgatccccatt

SEQ ID NO: 305307 - DNA, 932 bp, Unknown
  Bacterial polypeptide expressing nucleotide sequence isolated from the Sargasso Sea
tgactctattctagatgtttggttcgattctggatcaagtcatgtttatgttttaaaaaataatggaataaccaataaagcagacctttatcttgagggttccgatcaacatcgtggttggttccagtcatctttaattgaaagttgtgcaaattacggagaaagcccttttaaaactgttttgacgcatggttttgtaatagatgaaaaaggaaaaaaaatgtcaaagtctttgggtaatattatttcaccatcagatgttattaaaaaatatggagctgatattcttagaatttgggttgccaactcaaattttaacgaagatataaaaatcagttatcagaacctagacagacaagcagaaagttatagaaaaattcgtaatacaattagatttattctgggtaatctaaacaattcatcactaaatacgaagactgatcatgataaacttttaccattggaaaagtttataagacataagttatacacattaaataaaaaaataaacttagagtatgaagaatttaattttagcaaagttttccaaatgattttgcatttttgttcacaagaactatcagcacttttctttgatataagaaaagatgctttatattgtgatggaaaagattctttagtagtacaatcaacaaaaactgtcatggctgacgtttttcagtgtcttattagatggcttgcgcccataattcccttcacatctgaagaagcatggcaatgttggagaaacgatataaagaaggagaactacttaagttgtcatttgctcaataaaattgaattgtctgatgattggaataatgagttattagaggaagagtggacaaaaatcttagagataaaaaatgcatttacttttgcagttgaaaaaaaaagaaaccttaaagaaattaaatctagtcttgaggcta

SEQ ID NO: 305308 - DNA, 661 bp, Unknown
  Bacterial polypeptide expressing nucleotide sequence isolated from the Sargasso Sea
cgcgcgtggggcgttccgattccggcgttttatcacaaggacacgaacgaggtgttgatggacgaggccatcatcactcacttcacagaaatcgttcgaaagcgcggttgcgacgcgtggtgggagatggaagtcgaagagcttctgcccgaagagcacaaggccaaggcgggtgattacgtcagaggttccgacaccatggacgtgtggttcgattctggaagctcgtgggcgggcgtcgtgcaatcgcgcggactctcgttcccggcggacttgtacttggagggtagcgaccaacaccgcggatggttccagtcgagccttctcacgggcgtcgccgccacggggtccgcgccgtacaagactattttgacgcacggtttcgtgctcgacgaaaagggatacaagatgtccaaatcgttgggtaacgtcatcgatccgcgcatggtgatcgagggtggtaagaaccaaaaacaagagcccggttacggcgccgatactctccgcctttgggtcgcgagcacggattattcgggtgacgtgagcatcggcatgaacatcatcaagcaaacgagcgaggcgtaccgcaagctccgtggtacgattcgtttcttgatgggcgtgctcgacgacttcaacccggccgagcaagtgtcgtacg

SEQ ID NO: 305309 - DNA, 889 bp, Unknown
  Bacterial polypeptide expressing nucleotide sequence isolated from the Sargasso Sea
gattggccagctgacatgtacctttgagggatcagatcagcatcgtggatggtttcattcttctcttttacattcttctggaacgcgcggtcaagctccatataaaagcattcttacccacgggtttgttgttgatggcaaaggtcaaaaaatgtcaaaatcacttggaaacgtaatagctccagaagaaatcattaagaaaaatggtgctgatattttacgactctgggtcgttgcatctgactattcagaagatttgcgaatagatcagtcaattattagacaacattctgaatcatatagaaaaatcagaaatactcttaggtttttgctcggaaatatattagatgaattttcttttgaagaattcgaaaattttgattttgacaaattagatttaattgacgcttttataattaacaaaatttcggaattagataacaattttagtaattatgaaaaaaacaatgaatttcataaaatatacgtagagttattaaacttttgtacaattgacttgtcatccttgtattttgatatcagaaaagattgcctgtactgtgacgatcaagacagccaaaaaagaaaaaactccgttaatattttaaaatattctctatattttcttttaaaatggttgcatcctattttagttttcaccactgaggaggtgtttcaaattttaaaatctaattcaaaaaacttggaaaaatttgaagaaagtatttttttagttgattttaaaaaaattagtaatcaaaaagacgtaaattttgatttatcatcttgggaaatattacaaaagattaaaaccgagattaatcatatttttgaagatatgagaaataataaagtaataaaatcaggattagaaaccataataaatatc

SEQ ID NO: 305310 - DNA, 838 bp, Unknown
  Bacterial polypeptide expressing nucleotide sequence isolated from the Sargasso Sea
gctgaggcagaagtcgagtatatggataaagtttctacatcagtcgatgtgttgttcaaaatagttgacccttccgagttcattgagagaacaaatgccggcaagattaataatgaaaaagaattgtttattccaatttggacaacaacaccatggacgcttccatcaaatgaggcagtctcgatgggtgaagatattccctatggcatttatagtctgacacttaatgaaagagatattcttgtcgttgttgccaatgaactcagagaaagtattgagaaaagatggggtgtatcaaatttagaaatgctcgaagaggtttctgctgaaaacctttcgggactccagttacaacatccttttgatgagagaacagtcccagttctactaggtgatcatgttaccactgagaatggtactggctctgtacatactgctcctgctcacggtcatgaagattttcaaattgggaaagaaaatgatttagatctcaaatgttacgttaattcatatggtgttttcactgatgcaaaagagagctttgccaaacagcatatatttaaatctgaatcagaaatcattgaaagattagatgaatcaaacttgctaatttcgagtgaaaaatttgaacacagctatccacactgttggagacataaaactccagtgatctttaggacaacaagacagtggttcatcagtatggaaaatgaagattttcgatcctcttgtttagagtcaatcaaagatgttgagtggaaaccaaaatggggggaagacaggatcaatggaatgattgaaacaaggccggattggtgtatttcgagacaaagatatt

SEQ ID NO: 305311 - DNA, 841 bp, Unknown
  Bacterial polypeptide expressing nucleotide sequence isolated from the Sargasso Sea
gattttgtagatttagaactccagcatccattttatgatctgacagttcctgccataactgctgaccatgtaaccgatgaaaatggtactggtgcggtacacatagctcctggtcatggtacagatgattatcttgcagggataaaaaataatctcgaagtttacaatcctgttgatgactatggaagattcattgaagctttgccaatttttggtgggatgaaaattagagactgcaatgatgacattatcgcattacttaagaaaaatgattgcttattgttctcagaggattatgaacattcatatccgcattgttggcgttataaaactccattaatttttagagcaactcctcagtggtttatgagcatggataactctggattacgagaatctataaaaaataatataagagatataaactggttaccttcatggggagaagacagaatatttaatatgattgatggtagaccagattggtgtttatcaaggcagagaaactggggtgttcctattccattattcttacataaagataccaatgaacttcatcctgatacagattcaatcttaaaaaaagctgccaatattataaaatacggcaacatagaagcatggttagattttgataaagaatcaatagtaaaaaatataaatgagtatagagagataaaagatactcttgatgtctggtttgattcaggcgtgacacatgaaactgttctaaaaagcagaggcattgatcaaacagcagatttatatttagagggctctgatcaacatagaggttggtttcaatcatcactaaaaacatcccatgcgatgtatagtaaat

SEQ ID NO: 305312 - DNA, 982 bp, Unknown
  Bacterial polypeptide expressing nucleotide sequence isolated from the Sargasso Sea
ttaaaagcaatagatgatacaaatttttatccaaataaaggaaaagaaaggcttaaatcaatgatagaaacaagaccagattggtgtgtttctaggcaaagagtctggggcgttccaattccagtatttatatcaaaaaaaacaaataaagttttaattgatgatgagataacaaaaaacattgctgacatatttgaaaaggagggagctgattgttggtttgagaaagataacaaaaaatttttaggcaaaaagtataaagctgaagattacgaaaaaatgagtgatattgtagaagtttggtttgatagtggagcaactcattcttatgttcttgaaaaaagaaaagatttaaaatggcccgcatcaatgtatttagaaggatcagatcaacataggggatggtttcattcttcattattggaatcttgcgggacaagaggtagagcaccttttgattccatactgtctcatgggtttgttgtagatggaaaaggattaaaaatgtcaaaatctcttggaaatattatagcacccgaagatattttaaaaaaatatggcgctgatattttaagaatttgggtggcggcatccgactacgctgaagatttaagaatagattattccatattagagcaacacgcagaatcatatagaaaaataagaaatacttttaggtacatcttgggaaatctaaatgataattttgagaaagttgattttgataaactagatattttaaatctaccagagctagaacaatttatgttgcacaaaataacaaatttgagtttaaattttaaaaaaaattttgaaatatacaatttacatacactttacaaagatcttttaaatttttgtactatagatttgtcagcattttattttgatattagaaaagatactttatattgcgatgatgttagaactgaaaaaagaaaatcaacaataatttttttaaatatattgcttgaaattttat

SEQ ID NO: 305313 - DNA, 718 bp, Unknown
  Bacterial polypeptide expressing nucleotide sequence isolated from the Sargasso Sea
gaaaatggtctagatgttctaagtcccgtggttgcgaacggaactttttctgatgatgtggagcatttagcaggcatgtttgtattcaaatccaatgaaaaggttatccaaatcttagaagaaaaaggagcattacttgctaaagcagattatgagcatagctatcctcactgctggcgacataaaacaccattaatgttcagagcaacgcctcaatggtttattggtatggacagtaaggacctgttgaaacgaagttctttatcgatagaaaatgttctttgggaacctgattggggaaaagccagaatggcttctatgctagaagcaagacctgactggtgtatttcgagacagagaacttggggcgtcccaataactttattagttcataatgagactggtaacttgcaccctaatatggaagcaatcattgagaatgttgctactttaatagagcaagaaggagttcaagcctggcatgatattgagatttcagaattaatagaagattcagaggattattttaaagttactgactgcctagacgtatggtttgattctggggtgactcatgcaagtgttttgagtgaaaacgacgagttgaattttccagctgatttatatttagaaggttctgatcagcatagaggttggtttcaatcatctctgttaacaagcatggctattaatggagagcctccctataagggtgttt

SEQ ID NO: 305314 - DNA, 809 bp, Unknown
  Bacterial polypeptide expressing nucleotide sequence isolated from the Sargasso Sea
tttggggaacggcagtttgttacatagctatcctcattcatggaggtcaaaagcaccattagttcatagagctacaccacagtggtttatatcaatggaaagtcataaacttagaaaaaaagcaattgaatcaattgataaaacaatatttttccctgaaaaagggaaagctagaatcagatcaatgatcgaaacaaggcctgactggtgtatttcaaggcagcgttcttggggagttcctttaccaatttttattgataaaaaaactaatgaacctttaagagatcctgaggtaatagaaaatattgcaaagatttacgagaaagagggatcagactgttggtttcatgatgatccacaaaggtttcttggaaaaaaatataataaagaaaattatataaaatcaaatgacatagttgaggtttggtttgatagtggatcaacacattcatttgtcttggaaaaaagaaaagatttaaaatggccagcatcaatgtatttagaaggctctgaccaacacagaggttggtttcactcctctcttttagagtcttgcggaactaggggtagagctccttttgatagtatactttcacatggctttgtagtggatggcaaagggatgaaaatgtcaaaatccgctggcaatattatttcacctgacgatattttgaaaaaatatggtgctgatatacttaggctttgggttgcttcttcagactatgcggaggatttaagaatagatcatacgatattagaacaacatgctgagtcttataggaaaataagaaatactttcagatatattt

SEQ ID NO: 305315 - DNA, 859 bp, Unknown
  Bacterial polypeptide expressing nucleotide sequence isolated from the Sargasso Sea
aaatataatcaacacgctgttggttttgaaggtgaacatatttataaagtagatcataaaattgcagataaattagaagaattttcaaaattattatttaagggtactcttcgtcatagctacccacattcgtggaggtctaaagctcctcttatttatagaaatactcctcaatggttcatttctatggaaaaaaataatctaagagacattgctcttaaatcaattgatgaaactattttctatcctcctcaaggtcaaacaaggcttagatcaatgattgaaactagaccagattggtgtgtgtctagacaaagagtttggggtgtacctttaccattatttgtaaataaaaaaacgggtcaacctttaagagatgaaaatattatcaatagaatagcagacatatatgaaaaagaaggaagcaatacgtggtttaccgaagatccacaaaggtttttaggagatgaatattcacttgatgattatgaacaggttaaagatgtagttgaagtatggtttgatagtggttctacacatgctttttgtctagaacaaagagaagatttgaaatggcctgcatcgatgtacttggaaggaagtgatcaacacagaggatggtttcattcatctcttttggaatcttctggcacaagaggtaaagcgccttatgaaagtgtcctgacacacgggtttgttgttgatggaagaggacgtaaaatgtctaaatctttaggtaatgttatttctcctgatgatattttaaaaaaatatggagtagatattttaagattatgggttgttgcttctgattattatgatgatcttaaacttgataatgccattcttcaatcacaag

SEQ ID NO: 305316 - DNA, 911 bp, Unknown
  Bacterial polypeptide expressing nucleotide sequence isolated from the Sargasso Sea
gcctccatatgcaaatggaaatttgcacataggccacgctttaaacaagataattaaagatgtaataaataggtcccaatccatgcttggtaagaatgcaaactatgttcctggatgggattgtcatggattgcctattgagtggaaaatagaagaaaattatagaaaaaagaaaaaaaataaagatgatatttcaattgtagaatttagaaaagaatgtcgagattttgctgcaaaatggatggatgttcaatctgaagaatttcagagattaggtgtttatggtgattgggaagatccatattcgactatgaagtatgaatcagaggctataataatgtctgaaataggaaaatttcttatgaatggcagcctctacagaggtattaagcctgtaatgtggtctccagttgaaaaaactgcactagcagaagctgagattgaatatcatgaccatataagcactaccatttttgcaaggtttccagttctcaaaacatcattagatataattagcgattttgaaattataatttggacaacaacaccatggacaatgccaggtaatagagcggtagcatatggtaaggatattgattattcacttatagaagttactaatgtaagtgagaattctttagcaaaaattggtgataaaattattatagctaaagaattggtggaagatgtaatgaaagaaatttctgtcttaagttttaattcttctaatacccttaagggcagtgattttgcaggaacggttttagcgcatccacttaacaacaatggttatgaacatgaggttttacttctagaagctgattttgtaacaactgatcagggaacaggtttcgttcatattgctccgggtcatggtgcagatgactttgaacttggaagacaaaaataat

SEQ ID NO: 305317 - DNA, 979 bp, Unknown
  Bacterial polypeptide expressing nucleotide sequence isolated from the Sargasso Sea
cacccattttatgacattcaagtgcctgtgatatttgcagagcatgtcactgatgaaaatgggacaggtgcagttcatatagcccctgggcatggtacagaagattatttggctggcttaaagcatggccttgaagtgtataatcctgtagatgattatggacgttttaaggagactcttcccatctttggtgggatgaaggttcgagaatcaaatgaggagatagtgtcgcttttaaataaaaatgatgcgcttcttttttccgagaattatgaacactcatatcctcattgttggagatataaaacacctctcattttcagagcaacaccccaatggtttatgagcatggataaagcagcattgcgcaaatctatcaaagatgacatcaaaaatatcaaatggcttccttcatggggtgaggacaggatttttaatatgattgaaggaaggcctgattggtgcctatcaagacaaagattttggggtgtaccaatacctctatttttacacaaagaaacaaatgaattacatcctaatacgagtgttattttagaagaagctcaaaagataataaaagagggtaatatagaagcatggattgattttgataaaagattgattgtgaaagatttcgatgattatacagaggtaaaggatactcttgatgtttggtttgactcaggtgttacgcaccagacagttctaaaagacaggggaattgatgaaacagcagatctttaccttgaaggatcggatcaacatagaggatggtttcaatcatcgcttattacatctcatgctataaacaattcatctccatataaaaatgttcttactcatggttttgttgtcgatgctgaaggtcaaaaaatgtcgaagtcagttggtaatataatctctccacagaaaataattaaggataaaggtgctgacattctaagaatgtgggttgcgatgactgattatacaaaagaaa

SEQ ID NO: 305318 - DNA, 957 bp, Unknown
  Bacterial polypeptide expressing nucleotide sequence isolated from the Sargasso Sea
aattagatcaatgatagagacaaggcctgattggtgtatctcaaggcagcgttcctggggtgtacctttgccaatttttatcaacaaaaaaactaatgaacctttaagagatcctgaggtaattgaaaatatagcaaagatttatgaaaaggaaggatctgattgttggttttatgatgatcctcaaagattcctcggaaataaatataaaaaagaagattatataaaatctagtgatatcgttgaggtttggtttgacagtggatctacacattcatttgttttggaaaaaagaaaagatttaaaatggcctgcatcaatgtatttggagggttccgaccaacatagaggttggtttcattcctctcttttagagtcttgtggaactaggggcagagctccctttgaaagtatactttcacatggctttgttgtggatggaaaagggatgaaaatgtcaaaatctgccggcaatattatttcacctgaagatattttaaaaaaatatggtgcagatatactcagactttgggttgcttcttcagactatgcggaggatttaagaatagatcatacaatattagaacaacatgctgagtcttatagaaaaataagaaatacttttagatatattttaggaaatttaaaggacactttcagtccgcaaaatttcagatcaattaaagtgaaagaattaccagagttagaacaagttattttgcataaactttattttttaagtttagagattaaaaagagtttaaaagattataacttccacaagcttcaaaaggagttgctaaatttttgcacgctagatctatcttcattttattttgatataagaaaagatacattgtattgtgatgatttaagttcacaaaaaagaaagtcatgtgtaaccatactaaatataatactcgagtgtttattaaaatggtatgcaccagtgttgtc

SEQ ID NO: 305319 - DNA, 709 bp, Unknown
  Bacterial polypeptide expressing nucleotide sequence isolated from the Sargasso Sea
tcagtggatccctgattggggccaaagccgcatcgaaaagatggttgagaatcgccctgactggtgtatctcccgtcaacgtacttggggcgtgccaattacattattcgtacaccgcgaaaccgaagagctgcacccagacagcgtgtcgttaatggcgcgtgtagccaaccgcattgagcaggaaggcattcaagcttggtgggatctcgatgctgccgaattactgggcgaagaagccgaacaataccgcaaagtgaccgataccttagacgtatggtacgactcaggttcaacctttgcttctgtggttggtgcgcgtccagagtttcatggtcatggtgtcgatttgtacctcgaaggtagcgaccaacaccgcggctggtttatgtcatcattgatgatttctacagccatcactggtaaagcaccttacaagcaagtgctgacccacggctttaccgttgatggtaaaggtcgcaagatgtcgaaatctatcggtaacgtcattgcgccgcagcaagtcaccaacaagttaggtgcagacattctgcgtctttgggttgctgcgaccgactacagcggtgaaatgacggtatcggatgaaatcttaaaccgtagcgccgatgcttatcgccgtattcgtaacaccgctcgtttcttactagctaaccttaatggcttcgatcctgctaaggacttagtggca

SEQ ID NO: 305320 - DNA, 869 bp, Unknown
  Bacterial polypeptide expressing nucleotide sequence isolated from the Sargasso Sea
tgctgataaagttgaggttcatggaattgacgcttggtttgatgcaggcatcgacgaatttctaggcgatgatgcaaattcgtatgaaaaatctacggatacgatggacgtttggatggactcagggattgcgcataaaactgtcagccgtctttttgatcacataaaagatgaggctgatttgtatcttgaagggtctgatcagcaccgtggttggttccaaagttctctacttacttctgtggcgattaacagtcatgcaccttataaagaagtgcttactcatggatttgtcgtcgatgagcaagggcataaaatgtccaaatcactcggaaatacggtatctcctcaatctgtaattaataacatgggagctgatatcttgaggctttgggttgcatcaactgattactccagtgaaatgaaaatttcagatcagatactcaaacgaaatggtgatacttacagaaggataagaaatacggcgagatttttattaagcaacttaagtgactttgatccaagcaagaatcaaaagaaagtcgatgatttggtactgcttgatcagttagctatacagcgtgtttcagtcttaaatgagcaaattaaaaatgagtataacaactattcattccacaagatcgtccagcttctacataacttttgtgtcaatgatatgggtggtttctatttagacatccttaaggatcgactctatacaatgccagcaaattcatctgggcgaagatccgcacaaacggctttgtatatcattgctgaatctttaactcgttggattgcaccaattctgtctttttactctgaagaaattttggaacatctcccagaaagaaaagagagtccgtatt

SEQ ID NO: 305321 - DNA, 978 bp, Unknown
  Bacterial polypeptide expressing nucleotide sequence isolated from the Sargasso Sea
taaggcaattgacgaaacaactttttatcccagtaaaggtaaagaaagattaaaatctatgattgagacgagaccagattggtgtgtttcgagacaaagggtttggggtgttccacttccaatttttgttcataaaaaaagtaaagagattttagttgatgatgaagtgatagaaaatatagcatcaatttatgaaaaagaaggctctgattgctggttctcagataatcctcaaaggtttttaggtactaaatataaagcagatgattatgaaaaactgagtgatattgttgaagtttggtttgatagtggttcaacacattcatttgtattggaaaaaagagaagatctaaaatggccagcatcaatgtatttggaggggtcagaccaacacagaggttggtttcattcttcattattagagtcttgtggaacaagaggtaaggcgccctttgaatcaattttatcacatggttttgttgtagatggaaaaggtttaaagatgtccaagtctctaggaaatgtaattgccccagaagatattcttaaaaaatatggtgcagatattttaagagtttgggtggcttcatctaattattctgaagacttaagaattgattattctattttagatcaacatgcggactcatatagaaaaataagaaacacatttagatatttattaggaaatataaatgataaatttgaaacattagacctagaaaaaatagatatagataaacttccagaactagagcaatttatgctacacaaaatttataacttaaatcaaaattttgtaaaatattttcaaaattatgattttcataatttgtataaagatttattaaacttttgtaccgttgatctttctgctttttattttgatataagaaaagatactctttattgtgatcccgttgattcacataaaagaaaatcaacaattatttttattgatgtaattttagactcatt

SEQ ID NO: 305322 - DNA, 895 bp, Unknown
  Bacterial polypeptide expressing nucleotide sequence isolated from the Sargasso Sea
caacaatggtttatctcaatggaaagccatggattaaggaaaaaagcacttaaagcaattgatcaaactgcattttatccaagcaaaggtaaagagagaattaaatcaatgatagaaaccagaccagattggtgcgtatctagacaaagagtttggggagttcctctgcctattttcgtatcaaaaaaaaacaatgaagttttaattgaccaggatgttttcgataatattgcaaaaatttacgaaaaagaaggatctgattgttggttttcagatgaccctcaaagatttttaggaaataagtataaaaaagaagaatatgaaaagttaagtgatattgttgaagtatggtttgatagcggctcaacacattcttttgtattagaaaaaagaagtgatttaaaatggccagcatccatgtatttggaaggttcagatcagcatagaggatggtttcattcatcattgcttcagtcttgtggaacaagaggaagagcaccttttgattcaattttatctcatggatttgtagttgatggcaaaggattaaaaatgtctaaatctttgggaaatgcaatttcaccagaggatatattaaaaaaatatggcgcagacatccttagagtttgggttgcagcctctaattattcagaggatttgagaatagattattctatattagaacagcatgcagaagcttatagaaaaataagaaatacttttagatatttacttggaaatttaaacgataatttttccgaaactgattttgaaaaagtaaaattaaatgattttccagaattggaacaatacatgtttcataaaatttatttgttaaacgaaatatttcaaaaaaattttcaaacatatacatttcataatttatataaagagt

SEQ ID NO: 305323 - DNA, 951 bp, Unknown
  Bacterial polypeptide expressing nucleotide sequence isolated from the Sargasso Sea
cttcccgtatttggtggattgcatgtcttaagagataatgaagaaatggctgaaaggatgttagaaaaaggtgccttaataggaagaggtaatttacaacattcctatccgcatagttggagatctaaagcaccattaattttcagaacaacccctcaatggtttatttcaatggaaaaaaacgatctaagaaaaattgctattaagagtataaatgatacaaatttttttcctgaccaagggtcaaaaagattgtcaagcatgattgagtctaggcctgattggtgtatttctcgtcaaagggcttggggtgtaccaattggtattttttataataaagaaacacttgaacctttaagagatcaaggagttgttgatagagttgttgaagcatttaaaatagaaggggcagatgcttggtatcaaaaaccatcatcatattttttaggcgatgattatgatgaaaaagaatatgtaaaagttacagatatagcggatgtgtggtttgattctggttcaacccattcgtatgttttagaagataggaaagatttgacgtggccagcatcaatgtatttagagggaacagatcaacataggggatggtttcattcttcattgttagagtcatgtggcactagggggcgagcaccttttgatgcagtattaactcatggttttgtcttagatgaacaaggcagaaaaatgtcaaaatcctttggaaacataacatcacctcaggaggttttaaaagagtttggagcggacattctaaggttatgggtaatagggtctgactattatgatgacttgagaattggtaaagaaatattaattagacatgcggatcattatagaagattaagaaatactcttagatatttgttgggggcattaaatgaattcaatgaagaagaaaatataaattataaacaaatgcctgaaatagaa

SEQ ID NO: 305324 - DNA, 927 bp, Unknown
  Bacterial polypeptide expressing nucleotide sequence isolated from the Sargasso Sea
cccccattgttggaggcataagaccccagtaatgtttagtgcaacacctcaatggtttatttctatggaggaaaaagatctattacaacatgctcaagattctgtcgattctgttaactgggcaccaacatggggtcatgccagaatgagctctatgctggaagaacgtccagattggtgtatatctagacaaaggtcttggggcgttccaattgctttgctgatacataaagcaacaggagagctccatccagaaaccagagaaataatagaaaaagtagctgatttagttgaatcagaaggcatccaagcttggcatgatattgaaattaaggatctaattgatgatcatgagtctttcgaaaaaataacagattgtttagatgtttggtttgattctggagttactcatgcttgtgtattagatgtgaatgaagatctacagtttcctgctgatctatatttagaaggttctgatcagcaccgaggatggtttcagtcatcattacttacaagtatcgcaatgaaagatgttccgccctacaaggcagtcttgactcatggctttgtagttgatgctgatggtaagaagatgtctaaatctctaggaaatgtcatttctcctcaaaaagtatgggagacgatgggtgctgatgtcttaagaacatgggcggcatctactgactacactaaagaaattgttctttctgatgatattttaaaaagatcatctgattcttacaggagaataagaaatacaatgagatttttattaggaaacttgagtgattattctggacaaaaactggtacctgaaaaacttacagaattagataaatggatgattcataagactcaaaatcttcaagaggagatcatagaagactatctaaattatgactttcatcatgcgtttcaaaaaatcat

SEQ ID NO: 305325 - DNA, 830 bp, Unknown
  Bacterial polypeptide expressing nucleotide sequence isolated from the Sargasso Sea
aaaagacaaaaaaaagtttattctccatgatggccctccttatgcaaatggacctatccatataggtacagctgccaataaaatattaaaagatattataaatagaacaatgcaatttgaaggctataattctttatatgttccaggctgggattgccatggtttaccaatagaatggcaaatagaaaaacaatatagaaaaaaaggtaaaaaaaaagaagatattgatatcaaagattttagaaatgaatgtagagagtttgctcaaaaatggattgaagaacagaaaaagtcttttataaggttgtttgttttagcagattggaataaaccatatacaactatggcttacgagtcagaagcaattatattaaaagaatttagtaaattttttctaaatggctctttatatcagggttcaaagccagtaatgtggtcacctatagaaaaaactgcattagcagaagcagaaatagagtatcatgatatcgattcaacctccatttatgtagcctttaaggtaaaaagtagcccgaataaattactagaaaatacttctgtaattatatggactactacaccatggacaattccaggaaatagggcaatagcattcggaaattctattgattactgtatatttaaagttcaagaaagtaaaaataatcttattaagaataataaatatttagtagcaaaatctttattaaaagaagtttgtgatagatgtaatataagtaaatttgagctaattaagaaaataaaaggagaagaattaggtaatacaatatgccatcatcctttttcaaaaattggattgattatgatgt

SEQ ID NO: 305326 - DNA, 942 bp, Unknown
  Bacterial polypeptide expressing nucleotide sequence isolated from the Sargasso Sea
ccacagtggtttatttcaatgtgaaagtcataaattaagagacaaagcattaaaagccattgatgaaaccactttttatccaggcaaaggtaaagaaagattaaaatcaatgatcgaaacaagacctgactggtgtgtttcaagacaaagagtttggggtgtacctcttccaatttttgtgaacaaacagactaaagaaattttagtcgacgacgaaacaacagaaaatattgcatcaatttatgaaaaagaaggctctgattgttggttttcagatgatcctcaaagatttttaggcaagaaatataaagctgaagattatgaaaaattaagtgatatcgtcgaagtttggtttgatagtggctcaactcattcttttgtattggaaaaaagagaggatttaaaatggccagcatcaatgtatttggagggttcagatcaacataggggctggtttcattcatcactattagagtcctgcggaacgagaggtagagctccattcgagtcaatattatcacatggttttgttgttgatggcaaaggtttgaaaatgtctaaatctttaggaaatgtaattgcacctgaggatattttgaaaaagtatggcgctgatattttgagaatttgggtagcatcatcaaattatgcagaagatttgagaatagattactctattttagatcaacacgcagagtcttatagaaaaattagaaatactttcagatatttacttggaaatttaaatgataattttgaaacaataaactttgatgagttagatgtagatgggttgcctgagttagagcaattaatgctgcataaaatttatattttaaacaacaattttaaaaaatattttaataattatgattttcataatttatataaagagttactaaatttttgtactgttgatttatctgctttttattttgatat

SEQ ID NO: 305327 - DNA, 904 bp, Unknown
  Bacterial polypeptide expressing nucleotide sequence isolated from the Sargasso Sea
catattgccccaggtcatggtgatgatgattacagtctaggtataaacaatggtgtggatattattcagactgttcaggatgatggcagatacaataatcatgcaaaaggttttgaaggtgaacatatttataaagttgatggtaaaatttcagataaattgaatgaactttcaaaattattattcaagggcactttacgtcacagttatcctcactcttggagatcaaaagctccattaatttatagaaatacgcctcaatggtttatttctatggaaaaaaataatctgagagatattgccttaaaatcaattgatgaaactattttctatccagaacaaggtcaaatacgtcttcgctcgatgattgaaactagacctgattggtgtatttctagacaaagagtttggggagttcccttacctttatttgtcagtaaagatactggacagccattaagagatcagagcgtaattgatcgcattgcagatatttatgaaaaggaaggcagtgatacttggtttacagaaaatcctcagagatttcttggagataaatattcattcaatgactatgaacaagttaaagatgttgtagaggtttggtttgatagtggctcaacacatgctttttgtttagaaaaaaggggtgacttaaaatggccagcatccatgtatctagagggaagtgatcaacatcgtggttggtttcattcttcattattagagtcttcaggaacaagaggtagagctccatacgatagtgtattaactcatggttttgttgttgatggtaaaggaagaaaaatgtccaaatcccttggtaatgttatttcccctgatgatattttaaaaaaatatggtgttgatattttaaggttatgggtagttgcatcagattatt

SEQ ID NO: 305328 - DNA, 824 bp, Unknown
  Bacterial polypeptide expressing nucleotide sequence isolated from the Sargasso Sea
aatgaaaaatttttctaaaacaatcattttgccatcaacaaaattttcaatgaaggcaaatttatccgaaactgaaaatacttggatggccttttgggaaaagaataaaatttaccataatctaaaaaataaaagccaaaaaaaagataagtttatattgcatgatggaccgccgtatgcaaatggtgatttgcatatgggccatgccttgaataaaattttaaaagacattgtttgcagatcaaaatttcaattttcatttgatgttaattttattcctggctgggattgccatggtctccctattgaatggaagattgaagagaaatttagaaaagctggaaaagaaaagggtgaagttgaccttaaggaatttagaaaagagtgtagagaatttgcaaatacgtgggttgaaaaacaaaaatctcaatttaacaggttgggaattcaaaatgattggaaaaaaatttacaccactatgaccaaagatgctgaagtttgtatagttgaagaattgttaaagttttttgaatctggagaactatatttaggatttaaacctgtgatgtggtctgttgttgagaaaactgctttagctgaagcagaagttgaataccaagaaaaagtttcgagttcaatttttgtaaaattcccaattaaaaactgtgatgaaaaagcttcaataattatatggacaaccactccctggacaataccttgtaatcgagcaattgcatattcaaaaaatcttgaatataaaaaaataattcttcttgatgattatccaaatcttaatctagaaaaaaatgaagtaattgtgattg

SEQ ID NO: 305329 - DNA, 884 bp, Unknown
  Bacterial polypeptide expressing nucleotide sequence isolated from the Sargasso Sea
tatgatagaaactagacctgattggtgtgtatctcgtcaaagagtttggggtgttcctcttccaatttttgttaataaaaaaacaaaagaaatacttatagatgatgaagttaatgagaatattgcaaatatttatgaaaaagaaggatcagattgttggttttcagataatcctcaaaggtttttaggaaaaaaatataaggctgaggacttcgataaattaagtgatattgttgaggtatggtttgacagtggctcaacgcattcatttgttttagaaaaaagagaagatttaaaatggcccgcatcaatgtatttagaaggatcagatcagcatagaggttggtttcattcatctttattagagtcatgcggaactagaggtagagctccatttgagtcaattttatcgcatggttttgttgtagatggaaaaggtttaaaaatgtctaaatctttgggcaatgctattgctccagaagatattttaaagaagtatggagctgatattttaagaatttgggttgcatcatctaattatgcggaagatcttagaattgactattctattttggaccagcatgcagagtcttatagaaaaattagaaatacatttagatatttgcttgggaatcttaatgataattttccaaagttaaatttagaaaaaatagatttaaataaattacctgaacttgagcagtttatgcttcataaaatatattcattaaatcttaattttaaaaaatattttaaaaattatgattttcataatttatataaagaattattaaatttttgtactgttgatttatcggctttttattttgatataaggaaagatactttatattgtgatccaaaagactcttcaaaaagacaat

SEQ ID NO: 305330 - DNA, 979 bp, Unknown
  Bacterial polypeptide expressing nucleotide sequence isolated from the Sargasso Sea
ctcctttagttctagagcaactccacaatggtttatctcaatggagagtcatggtcttagagataaggcgcttaaagcaataaataaaacagttttctatcctgagaaaggaaaagatagattaaagtctatgattgagaccaggccagattggtgtgtttcaaggcaaagagtttggggtgtccctctaccaatatttattaataaaaaagatggaaaggcactagttgatgacgaagtttttgaaaatatagcaaatatttatgagaaagagggctcagactgttggtttaaggatgacgctcaaaaatttttaggaaaaaaatacaaagcagagaattttacaaaactgtcagatattgtagaggtatggtttgatagtggttctacacattcttttgttttagaaactagaaaagatctaaaatggcctgcttccatgtacttagaaggttcagatcaacatcgaggatggtttcactcctcactattacactcttgtggaactagaggacaagcaccattcgaaacaattttatcacatggatttgttgtagatggaaagggacttaaaatgtccaagtcattgggaaatgttatttcaccagacgatatcttaaaaaagtatggtgctgatattttaagaatttgggttgcagcctctaattattcagaggatttaagaatagattatacaattcttgagcaacatgcagatgcctatagaaagataagaaatacttttagatatattcttggaaatttaaaagatgaatttacgaaagtagactttaatgagataaattataacggactgtctgaactagataagctgatgttacataaaatttatttgttgaattataattatcataaaaatttcaaatcttataattttcatttgttatacaaggatttgcttaatttttgcactgttgacctatcatctttttattttgatattagaaaagacactttg

SEQ ID NO: 305331 - DNA, 797 bp, Unknown
  Bacterial polypeptide expressing nucleotide sequence isolated from the Sargasso Sea
agttcatagagcaacaccacaatggtttatttcaatggaaagccacaaacttagaaataaagctttaaaagctattgatgaaacaactttttatccaagtaaaggtaaagaacgattaaaatcaatgattgaaactagacctgattggtgtgtctctcgtcaaagagtttggggagtcccgttacctatttttgtaaataaaaaaactaaagaaattttagtagacaatgaattattcgaaaatattgcaaagatttatgaaaaagagggatcagattgttggttttcagacgatcctcaaaaatttttaggagaaaaatataaagcagaagattttgataaacttagtgatattgttgaagtatggtttgatagtggatctactcattcttttgtgttggaaaaaagacaggatcttaagtggccagcttcaatgtatttagagggttcagatcaacatagaggatggttccattcatctctattagagtcatgtggaacaagaggcaaggcaccatttgagtcaatattatctcatggttttgtggtcgatggcaaaggtttaaaaatgtcaaaatctttgggaaacgttatagcccctgaagatattttgaaaaaatatggagctgatattttaagaatttgggtagcttcttctaactatgcagaagatttaagaatagattattctattttagatcaacattcggagtcttatcgtaaaattagaaacacctttagatatttattaggaaatctaaatgacaaatttgaggatatagatttaaaaaaattaa

SEQ ID NO: 305332 - DNA, 906 bp, Unknown
  Bacterial polypeptide expressing nucleotide sequence isolated from the Sargasso Sea
aatggaatataaagataccctgaacttacctaaaacagactttcctatgaaagctaatctacctaacagagaacctgatattctcaaatcatgggctaaacactctatatttcaaaaagtactaaatcaatcgaaacaatcgaaaaaatatgtacttcatgatggaccaccatatgccaatggtgacatacacataggtcatgcagtaaataaaattctaaaagatttcatcattaaatctaaaattatgtcaggataccacactccattcactccagggtgggattgccatggcttgccaatagaactacaagtggaaaaaaaatatggtaaaggtaaatttaaagataatcctaatgcttttgttgctgcctgtagagaatttgcaaacaaacaaatagaaaagcaaaaagcagatttcataagattaggcgtatttgcagactgggataatccttacactagtatggataaggaagttgaggcaggaattgtgaaaagcttatccaagattatagataataatcatatctactttgggtcaaagcctgtccattggtgcatcgagtcctcctctgctttagctgaagctgaagttgaatataaagatattgtatcaaaagctgtatgtgttaaatttagaattgcctcctctagtgagctgacttttactaagaatataaatcaaaaagctcatatctcgattccaatttggactacaacgccctggactctccctgcgaatagagcagttgccatcagtaaggacgtagaatattcattagtccaagttaaaaaaaactatctgatcattgcgaaaaaattagttgattctgtgattgaaaaagctggtatcagtaagttcaaagttatagaagaatcccatgaatcagaaatgagcaatgg

SEQ ID NO: 305333 - DNA, 861 bp, Unknown
  Bacterial polypeptide expressing nucleotide sequence isolated from the Sargasso Sea
ttcgggtattgtccattgtgcacctagccatggtcctgatgattttaatttgtgtttaaaaaataatataaaagctgaagaaactgtagatgatgatgggaaatatacaaagcatgttccaactttcgaaggcatacatatttttaaggctaacaaaatagttatagaaaaactaaaagaacaaaaaaatttattatctagtggagaattaattcactcttatcctcattcttggcgttcaaaagcacccttggttcatagagcaactcctcaatggtttatttcgatggaaagtcatggtttgagaaagaaagctttaaaatctatagatgaaactaatttttatccaaataaaggaaaagaaagactaagatcgatgattgaattgaggcctgattggtgtgtttcaagacaaagagtatggggagttcctattcctgtttttatgtcaaaaaaatcagatgaagttttagtcgatgatgaaattaatgaaaatattgcaaatatatttgagaaagagggtgctgactgttggtttgaaggagatgctcaaagatttctaggcaaaaaatataaaattgaggattatgaaaaaatgactgatattgttgaagtttggtttgatagtggctctactcatgcctatgttcttgaaaaaagagaagatttaaaatggcctgcttctatgtaccttgaaggttcagatcaacacagaggctggtttcactcatcattactagagtcttgtggaacaaggggtagggctccgtttgaatctatattgtcccacggatttgttgttgatggaaaaggtttaaaaatgtcaaaatctcttggaaatattattgcaccagaagacat

SEQ ID NO: 305334 - DNA, 849 bp, Unknown
  Bacterial polypeptide expressing nucleotide sequence isolated from the Sargasso Sea
gattatgaggtcgtgaccgacattctcgacgtgtggttcgattcgggcagcacgcacgtcttcacggtcgaggcccgctatggcgagggcacccgcgccaacctgtatctggaggggtccgaccagcatcgcggctggttccagtcgtcgctgctggaatccagcggcacgcgcggccgtgcgccctatgacgcggtgctgacccacggcttcgcgctggacggcaatggccgcaaaatgtccaagagcctgggcaacgtcgtcgatccgctcaagatcatcggtgaatcgggtgccgacatcctgcgcctgtgggtcgcccagaccgactatttcgaggatgtccgcatcggcaaggaagtgctgtcgggcacgtcggacacctatcgcaagctgcgtaacaccttccgctatctgctcggcgcgctcgacggcttcaccgaagaagaacgcgttgaggtgcggcagatgccggagctcgagcgctacatcctctccgaactcggccgcctcgaccgtgagctgcgcgcggcggcggaggcgttcgaattcaaccgctacacccgcgcgctggccgatttcgccaatgacgacctgtcggccttcttcttcgatatccgcaaggattcgctgtattgcgacgcggccgacagcctgaagcgccggtcgtatcgcaccgtcctcgacatcctgttccacgccctggtccgctatgccgccccggtgctggccttcacggccgaggaagtgtggcaggcgcgctatccgtcggacgacggctcggtccatttcctcgaatggcccgaaatccccgcgctgcccggcgatctgccgatggggaccgagggg

SEQ ID NO: 305335 - DNA, 885 bp, Unknown
  Bacterial polypeptide expressing nucleotide sequence isolated from the Sargasso Sea
aagaaagattaaaatcaatgattgagacaagaccagattggtgcgtgtcaagacaaagagtttggggtgtacctcttccaattttcgtaaataaaaaatctaatgaaattttgatagatgatgaagtatttgaaaatattgcaaaaatttatgagaaagagggttcggattgttggtttgcagatgaccctcaaaaatttttaggtgataaatataaaacagaggattttgaaaagctcagcgacatcgttgaagtttggtttgatagtggatcaactcactcttttgttctagagaaaagaaaagatcttaagtggcctgcatccatgtatttggagggttcagatcagcatagaggttggtttcactcttctttattagagtcgtgtggaacaagaggcaaagcaccattcgaatctatactatcacatgggtttgttgtagatggaaaaggtcttaaaatgtcaaaatctcttggaaatgtaattgcaccagaggatattttaaaaaagtatggtgctgatatattaaggatttgggtggctgcatcaaattatgcagaagacttaagaatagattattcaatattagaccagcattcggagtcttatcgtaaaataagaaatacattcagatatttactaggaaatataaacgataaatttgagaatgttaattttgatgaaattgatatcgaaagcttgccagaactagaaaagttcttgctaaataagatatatatacttaatcaaaaatttgaaacttgttttcataaatacgattttcataatctttataaagaattgttaagtttttgcacagtagatttatcagctttttattttgatatccgaaaagacactttatattgcgatcccaattaat

SEQ ID NO: 305336 - DNA, 837 bp, Unknown
  Bacterial polypeptide expressing nucleotide sequence isolated from the Sargasso Sea
aagaacaaaaaaatcttttgggtagcggtactttggttcatagctatcctcattcttggagatcgaaagcacctcttgtgcatagagcaacaccacaatggtttatttcaatggaaagtcataaattaagaaagaaagcgctagactctattgatcagacagcattttatccagaaaaaggaaaagccaggataagagccatgattgaaactcgacctgattggtgtatttctaggcagagatcatggggagttccattaccaatttttataaataaaaaaacaaatgagccgttaagagacatcgatgttgtagaaaacatagcaaagatttatgaaaaagaaggatctgattgctggttttatgatgatccacaaaaatttttaggaaaaaaatataaaaaagaggattttataaaatcaaaagatatagttgaagtttggtttgatagtggttcaacacactcttttgttctagagaaaagaaaagatttaaaatggcccgcctctatgtatctcgaaggttcagatcaacaccggggctggttccactcttctcttctggagtcgtgcggaaccagaggtagagctccttttgacagtatcttatctcatggttttgttgttgatggaaagggaatgaaaatgtcaaaatcatcaggtaatattatttcgccagaagaaattttaaaaaaatatggcgcagacatacttagattatgggtggcatcttcagattatgctgaggatttgagaatagatcattccatactggaacaaaacgcagaatcttatagaaaaataagaaatacttttagattcatattaggaaattaaa

SEQ ID NO: 305337 - DNA, 928 bp, Unknown
  Bacterial polypeptide expressing nucleotide sequence isolated from the Sargasso Sea
tgagcgtaaggtactgctgtgtcacgcacctttccagcacagctatccgcactgttggcgccacaagacgccgattatttttcgcgccacgccgcaatggttcgtcagcatgacgggcagcggcttgctctctgccgcaaaaagcgcggtggaggacgtgcagtggatacccgactggggccgggcgcgcatcgacagcatgctggcggagcggcccgactggtgtatttcccgccagcgaacctggggcgtccccatttgcctgtttgttcacaacacgaccggcgagattcatccagacacgaaatctcttatggagcaggtggcggtgcggatggagagccagggtatcgacgcctggtttgatctggaccctgccgagttgctgggtgacgatgcggcgcactatgaaaaagtgactgacaccctagatgtctggttcgattccggggtcacgcacgagtgcgtgttgcgggagcgtgaaggcctgagttggcccgccgatctgtatctggagggctctgatcagcaccgcggctggttccagtcctcactgctgactggcatcggcacccataacacggcgccttatcgtaaggtgttgacccacggtttcacggttgatggtgacggtcgcaagatgtcgaaatcgttgggcaatatcattcctgcgggcaaggcgatgcaggatctaggcgcagatgtattgagactgtatgtgtccgccgctgattaccgcaatgaaatctcagcctctgacgaaatcttcaagcgcaccgctgacgcctaccgacgtattcgcaacacggcgcgctttttgctctccaatctcgccggtttcgacccggtgagcgactgcttgccggtagagcagttactgccgctagatcgctggattctggggcaagcgcaaagcctgcagaccgac

SEQ ID NO: 305338 - DNA, 930 bp, Unknown
  Bacterial polypeptide expressing nucleotide sequence isolated from the Sargasso Sea
ttaaaaaataatataaaagctgaagagacagttgatgatgatggaaaatatactaaacatgttcctaaatttgaaggaatacatatttttaaagcaaataaaattattattgaaaatttaaaagaacaaaagaatttattgtctagtggtgaattaattcattcctaccctcattcttggcgttcaaaagcaccattggttcatagagccacaccacaatggtttatttcaatggaaagtcatggtttgagaaaaaaagctttgaaatcaattgatgaaacaaatttttatccaagcaaagggaaagaaagattaagatctatgattgaactaaggcctgattggtgcgtttctagacaaagggtatggggagttccaataccagtctttttatcaaagaaaaataatgaagttttaatagatgacgagattacagaaaatattgcaagtatatttgaaaaagaaggagcagactgttggttcgaagatgacgctcaacgatttttaggaaaaaaatataaaagtgaggattatcaaaaaatgactgatatcgtcgaggtttggtttgatagtggctcaacacatgcatatgtccttgaaaaaagacaagatttaaaatggccagcatctatgtatcttgagggttcagatcagcacagaggttggtttcactcatcacttttagaatcatgtggaacaagaggcagagctccatttgagtcaattttatcacatggatttgttgttgatggcaaaggattaaagatgtcaaaatctcttggtaatataatttcaccagaggacattctgaaaaagtatggtgccgatattcttagaatttgggttgctgcatcggactacgctgaagatctaagaatagattattctatactagaacaacacgctgaatcttatagaaaaattagaaat

SEQ ID NO: 305339 - DNA, 934 bp, Unknown
  Bacterial polypeptide expressing nucleotide sequence isolated from the Sargasso Sea
aatggtgggtcaaaaatatgatttaccaataacatgtgtcgttgatgaaaaaggtaacttaaatgaatattctggtcaattcaaaggatcaaatgttctgaaagatgcaaatgatttaattattgaacatttaaaaggaaataatttgcttctattacaagaaaattataagcatagatatccgtatgattggagaaccaaaaaaccaactatttttagggcaacagaacaatggtttgcatctgtaaatggctttagatcatctgcattaaaggcaatcgaagatgttgaatggatgccagaaactggaaaaaaaagaatttattctatggttgttggtagaggagattggtgtatttcaagacaaaggtcatggggagtccctattccagttttttataaaaaaaatggtaatgacattctccttaacaaagagatcattaatcatattcaagaactttttagtgaacatggagcagatatttggtgggattgggatgttaagaatcttttgccagaaaattatgcaaaagaatcggatctatggaaaaaaggaacagatacaatggatgtttggttcgattcaggatctagctgggccgcagtatgtgaattaagaaatgaattaaagtatccagcagatctttatttagagggctcagatcaacatcgaggatggtttcagtcttctttgctaacatctgttgcagtgaataataaacctccatataagaaagttttaactcatggtttcgcacttgatgaaaacggaagaaaaatgagcaaatctttaggaaatgttgttgatccaaatataattattaatggaggtaataataaaaaaactgaccctgcttatggtgctgatgttttaaggctatgggtaagttctgtagattattcagtagatgttccaattggttcaaatatactc

SEQ ID NO: 305340 - DNA, 1415 bp, Unknown
  Bacterial polypeptide expressing nucleotide sequence isolated from the Sargasso Sea
cgttcatagagctacaccacaatggtttatttcaatggaaagtcataaattaagagataaagcattaaaagctattgatgaaaccaccttttatcctagcaaaggaaaagaaagattaaaatcaatgattgaaacaagacctgattggtgtgtttcacgacaaagagtttggggagtacctcttccaatttttgttaacaaaaaaactaaacaaattttagtagatgatgatgttatagaaaatatagcgacaatttatgaaaaagagggttcagattgttggttttcagacgaacctcaaagatttttaggaaaaaaatataaagctgaggattatgaaaagttaagtgatatagttgaggtttggtttgatagtggttccacgcattcttttgttttagaaaaaagagatgacttaaaatggccagcttcaatgtatttagagggatctgatcaacataggggttggtttcattcatcattattggaatcttgtggaactagaggcaaagctccatttgagacaattttatctcatggatttgttgtagacggtaaaggcttgaaaatgtctaaatctttaggaaatgtaattgcaccagaggacatcttgaaaaaatatggtgctgatattttaagaatatgggtagcatcatcaaactatgctgaagatttaagaatagattactcaatattagatcaacatgctgactcatatagaaaaattagaaatacatttagattcctgctaggaaatataaatgataatttcgttaatataaatttaaatgaattagatttgactaaattacctgagcttgagcagttcatgttgcataaaatttttgtattaaatgataaatttaaaaaatattttaagaattatgatttccataatttatataaagagttgctaaatttttgtactgttgatttgtctgctttttattttgatattagaaaagatagtctttactgcgatgaaaaggaatcaaaaaaaagaaaatcaacaataaaagttcttaacatagtgcttgatgctcttttaaagtggttcgcgccaatattatctttcacaactgaagaaatttataaattattaaataaagatcaaaaaagtattcacttagaaaagtttttagaaattcctactaaatttaaaaatgaaaaaattaatgaaaaatgggtagagttgattaaaattaggaatatttgcaatataagtattgaagaaaaaagagcgaataaagaaattggctcaagtttagaagcagatttaaaaattgaaataaataaaaaattaaaagtaatgatggagaatatagatttttctgaactttgtataacatcaaaagcatcagttcattacaaagatgatattgagacaacagcaattacaagtaaagcaaaaggct

SEQ ID NO: 305341 - DNA, 1240 bp, Unknown
  Bacterial polypeptide expressing nucleotide sequence isolated from the Sargasso Sea
atgtctgactataaagaaacactgaatctacctgacacaggatttgctatgaaagcaaatttgccttccaaggagccgaaaatgattgaattttgggaagaaatggatttgcgcaaggaagttgctgcggctagagaaggtagagaaaaatttatacttcatgatggtccgccatatgctaacgggcaaattcatattggacatgccgctcagaaagttctcaaagatatagtaattaaatctcagacattaaacggaaaatacgctccttatgttcctggatgggattgtcatggcttgcctattgaattaaatgttgagaagaagaaaggcaaagcaggccataagatttctgtatctgaatttagagaagcttgcagggaatatgcccagtcacagatagatatacaaaagaaagatttcaagcgattgggaattattggagattgggataaaccatatgtgacaatggactttgcttttgaggcaaacattataaggtccttaggtagaataattgaaaaagggcatcttcaaagaggagataagcctgttcactggtgtgtagattgtggttctgctttagctgaagctgaagtggagtatcaagacaagatatcaacttctatagattttatttttcctattgataataaaattatatcggagattttttcttgttcctcaactaatcattcttatgctgcgagttggacgactaccccatggactttgcctgggaatctagctttgacaataaatgaatcatttacctatgaattaatagagatacttcatgataataaaccaataaatataattcttgctcaagatttagtcgattccaccttagataggattggtgttgataaatttacttctctaggaacttgtaaaggtaccgatcttcttggttttaatgctaaacacccatatcttgatagaaattctctaataatatcgggtgatcatgttacaactgatgcaggaacaggaatagtacataccgcacccggtcatgggctagaagattatgctgtatgcaaggaaaatggcattgatgttctaaatccagttaaaggaaatgggacttataatgaggacgtagaacattttgcagggcaatttgtcttcaaagctaatgaaaacataacaaatctcctcgaagaacgaggagtattattatctaaatcgtcttacgaacacagctacccccattgttggaggcataagaccccag

SEQ ID NO: 305342 - DNA, 2824 bp, Unknown
  Bacterial polypeptide expressing nucleotide sequence isolated from the Sargasso Sea
atgagcgactataaatttactttgaatttgccggaaactgagtttccgatgcgtggtaatttggcaaatcgcgagccagagatgttagagcgctggacgaaagacggtctgtatcagcagatccgtgatagccgaattggccgcacaccttttattttgcatgacggcccaccgtatgcgaacggcagtattcatattggtcactcagtcaacaaaattcttaaggacattattgttaagtcaaaaaccatgtcaggttttgacgcgccttatgtgccgggttgggattgccacggtctgccaattgaactgaaagttgagcaaaaagtcggtaagcctggtcaaaaaatttctgcggccgaattccgtgaagaatgccgtaaatatgccgccgagcaagtcgatggccaacgtgctgactttattcgtttaggcgtgctgggcgattggcaaaagccttatttaacgatggactttgccaccgaagccaatatcgtacgctctttatctaaagtgattgaaaacggtcacttacataaaggtgttaaacctgttcattggtgtacagactgtggttcagcattggcagaagccgaagtggaatacgaggataaaacctctcccgctatcgatgtggcctttagtgcgactgacagcaaagccgttgccgctcagtttggtgtaagcgattactcacatccagttgctatggtgatttggacaaccacaccttggacactgcctgcgaaccgcgcgttatctatcagccctgagctggattacagcttggttgaatttgtcaaagagggggcgactcacgcggttattctggccgacgtgttagttgaagcttgtatgacgcgttacggcgccgagagccatagcgtgttaggtaaagttaaaggtgcagcgcttgagctggttcgttttaagcatccattcttagcctttgacgtacctgcaattttaggtgaccacgtgacgactgacgccggtacgggtgtggttcacacagcacctggccatggtcaagacgacttcgtggtaggtcaaaaatacggtttagaagtggcaaacccagttggcgataacggtgtctacaaaccagagactgagttctttgccggtcaacacgtatttaaagcaaacgacaatgtggttgcattgctaaaagaaaaaggcgcgctattacatcatgttgcgtaccgtcacagctatccacactgctggcgccataagacacccattatcttccgcgcaacgccacaatggtttatctctatggataaccacaacctgcgcaagcaagcattaagcgaaattgagcagactcagtggatccctgactgggggcaaagccgcatcgagaagatggttgagaatcgcccagattggtgtatctcccgtcaacgtacttggggcgtaccaattacattattcgtacaccgcgaaactgaagagctgcaccctgacagcgtgtcgttaatggcgcgtgtggccaatcgtattgagcaggaaggcatccaagcttggtgggatctcgatgctgctgaattactgggtgaagaagccgaacaataccgcaaagtgaccgataccctagacgtatggtacgactcaggttcaacctttgcttctgtggttggcgcgcgcccagagtttcatggtcatggtgtagatttatacctcgaaggtagcgatcaacaccgtggttggtttatgtcatctctgatgatttctaccgctatgacaggcaaagcaccttacaagcaagtgctgacccacggctttaccgttgatggtaaaggtcgcaagatgtcgaaatctatcggtaacgtgattgcgccgcagcaagtgactaacaaactaggtgcggacattttgcgcctctgggttgcggcaaccgactacagcggtgaaatgacagtatcggatgaaatcttaaaccgtagcgccgatgcttatcgccgtattcgtaacaccgctcgtttcttactggcgaaccttaatggcttcgaccctgcgaaggacttagtggcagtagaagatatggtggcgttagaccgttgggctgtgcgccgcgcggccgctcttcagcaagaaattatcgaagcttacgagcaatataacttccatattgtgacgcaaaagctgatgcagttctgctcggttgagctaggtagcttctacttagacatcattaaagaccgtcaatataccgctaagcaagagggccatgcccgccgtagctgtcaatcggcattgttccatatcgccgaagctatggtgcgttggattgcgccaatcctgagctttactgccgatgaagtgtggcaattactgccaggtcaacgtgatgcttacgtgtttacccaagaatggtatcaaggtctgcaatctatcactttagatactgatttaagtgatgcgtactgggaaaatctgctgactgtacgtaacgaggtcaacaaggtcatcgagcaagcgcgccgtgataaacgtattggtggctccttagaagccgaagtcacactgtttgctgatgcggctttaactgaacagttaacgcacattggtgatgagctgcgtttcgtcctgttaacttcagaagccaaagtattgccattggcagatgcgacaagcgatgccgttgaaactgagctggcgtcattgaagttagtggtaaatgcaacaacagcagaaaaatgcgaacgttgttggcaccacagggaagaagtgggcacgattgaggctcacccaacgctgtgccatcgctgcgtaaccaatattgaaggtgacggcgaagttcgtctgtttgcgtaaa

SEQ ID NO: 305343 - DNA, 2863 bp, Unknown
  Bacterial polypeptide expressing nucleotide sequence isolated from the Sargasso Sea
gatgagcgactataaacacaccctgaatcttccggaaaccgagtttccgatgcgtggcgatctggccaagcgcgaacccaacatgctgaaacgttggtacgatcaggatctttacggcgccattcgccgcgccaaagcgggcaagccttcgttcattctgcacgatggccccccctatgcgaacggcagcattcacatcggtcactcggtcaacaagatcctcaaagacatcatcatcaagtccaagggcctctccggtttcgactccccctatgtgccgggctgggattgccacggtctgcccatcgaactgaaagtggaaggcatggttggcaagccgggcgagaaggtttccgccgccgagttccgcgccgagtgccgcaaatacgccaagacccagatcgaagcgcagaagaccgacttcatccggctgggcgtgctgggtgactgggaacacccctacctgaccatggattttggcaccgaagccaacatcatccgctccatggccaagatcgttgaaaacggtcacctgcacaaaggttccaagccggtgcactggtgtaccgattgtggctccgcgctggccgaagccgaagtggagtactacgacaagaactccccctccatcgacgtgcgcttcaaggctgtcgacgaggcgggtgttgccgccaagtttgactgcgccgaaggccataccggcaagggcccgatctctgcggtgatctggaccactactccgtggactctgcccgccaaccgcggcatcgccatgcacgccgatctggactatgcgctggtgcaggtggaaggcgagcatcccgagcgcctgatcctggccgccgagctggtcaaggacgtgatggaccgtgccggtatcgagcagttccacaacttgggctacgccaagggcgctgcgctcgagctgctgcgcttcaaccaccccttctacagcttcgacgtgccagtggtgctgggtgaccacgttaccctggatgccggtaccggcgccgtgcacaccgcccctggccacggtcaggaagatttcgtggtcggtcagaagtacggtctggaagtggccaacccggttggtagcaacggcgtgtacctgccggataccgaactgtttgccggccagcacgtgttcaaggccaacgcctccgtggtcgaggtgctgaccgagcgcggcgccctgctgcatcacaaggtgttcaaccactcctacccgcactgctggcgtcacaagactccgattatcttccgtgccaccccgcagtggttcatcagcatggagcagaagggtctgcgcaaacgcgcgctggaggagatcgagcgcatcgagcaagacggcatcaaacagcacggccagagcggctgggtgccggcctggggtaaaaaccgcatccaggcgatggtcgagaaccgtcctgactggtgtatctcccgtcagcgtacctggggcgtgcccatctccctgttcgtccacaaggagacccaggaactgcacccggaatccgtgcgcctgatgcacgaagtggccaagcgggtcgaacagtccggcatccaggcctggtgggatctggacaaggtcgagctgctgggcagcgacgccgacctgtacgacaaggtgcccgacaccctggacgtctggtttgactctggttcgacccactcctccgtggtcgacgcccgtcccgagttcaacggcaacccggccgacatgtatctggaaggctctgaccagcaccgcggctggttcatgtcctccctgatgatcggcgtggcgatgaaagacaaggctccctacaaccaggtgctgacccacggtttcaccgtggatggtcagggccgcaagatgtccaagtccatcggcaacgtggtgagcccgcaggacgtaatgaacaagctgggtgccgacatcctgcgtctgtgggtcgccagcaccgactacaccggcgagatgaccgtctccgacgagatcctcaagcgctctgccgacgcctatcgccgcatccgcaacaccgcccgcttcctgctggccaacctgaacggcttcaatccggcgaccgacatggtggcgcctgccgacatggtggtggtggatcgctgggccgtgggtcgtgccaaggcggtacaggccgagatcatggcggcgttcgacgagtacaacttccacggtgtgacccagaagctgatgcagttctgctccatcgagatgggctccttctacctggacgtcatcaaggaccgtcagtacaccgccaaggctgacagcctggctcgtcgctcctgccagaccgccctgtatcacatcgccgaggccatggtgcgctggatggcgccgatcatgagctttaccgccgacgagatctgggcgctgctgccgggtgagcgcggtgagttcgtgttcaccgaggagtggtacgacggcctgttcgggctggaagcgggtgaaaccctcaacgacgatttctgggccgagatcctcaccgtgcgcggtgaagtgaacaaggcgctggaagtggctcgtggcgagaagcgcatcggtggctccctgcaggccgagctgaccctgttcgccaagccggcactggctgcgcgtctgaacgccctggccgatgagctgcgcttcgtgctgctcacctccaaggccaaggttgtcagcgtcgatgccgccccggcagacgccgtggcgaccgagcgcgatgacctgtggctgagcgtggcccagtctgccgccgccaagtgcgaccgctgctggcaccatgtggaagacgtgggcaccatcgctggtcacgaagagatctgtggccgctgcgtcaccaacgtcgagggtgacggcgaaactcgtcaatttgcctga

SEQ ID NO: 305344 - DNA, 1308 bp, Unknown
  Bacterial polypeptide expressing nucleotide sequence isolated from the Sargasso Sea
cggtaatggattttttgatgcagaatatgaaggcttagctggtcttcccgcaattaaagctgacaacattgtaatagatattctcaatgattcaggagctttaataaatgctgaagattttcatcattcatatccatattgctggagacataaaactcctctaatttttgcatcgactcctcaatggtttatctcaatggataaatcaggtttgttagaaggatccatccaagcggttaaggatgttgagtgggagccttcatggggatatgaaagaattaagtctatgcttgagggaaggccagattggtgtatctctaggcaaagaagttggggagttccaattcctctaatcattaacaaaaaaactggagaaatacacccaaaacaaaacctcttatttaacgaaattgctgaccgtatcgatgagcagggtttagaagcatgggataaagctaatttagaagatttaattgatgatcatgacgaatacattaaggctactgatactcttgatgtatggtttgattcaggctcaacacatttctgtgttctggataagctatatggaaaagatttaatagcagacttatatcttgaggggtcagatcagcataggggttggttccagtcttctttattaaccggaatagccataaatggtaaagctccttacaaagctgttttaactcatggatttgttgtagacgaaaatggtagaaagcaatctaaatcgctaggaaatgtagtttctcctcaaaaagtttgtaataacttgggcgcagatattctcagactctgggtagcatctacggattttagaagcgagatggttgcaaccgatgagattttgaaacaagttgcggatcaatacagaagaatcagaaatactttcagatttatgatgggtaacttaaatgattttaatgatgattcaaaaaatattaatcaaaatgatttagttgaaatcgacaagtggataatcagtgctgcaattaagcttgatgaggaagttaaaaatttaaatgatagttatgcgtatcatcatgttgtccaaaagattcataatttttgtgttcatgagcttggtggtatttatttggacatcatcaaggatagaatgtatgtaacaaaaagcgactcgcacgcaagaaattctgctcaattcgcgctttttgaagttgcagatattttaattagactcatttcaccaatcttagtctttacagctgaagaaatttggcaatcacatgatctttttaaaaaacaatctaagtcagtatttctgtgtccaaagaaatcactaaa

SEQ ID NO: 305345 - DNA, 2050 bp, Unknown
  Bacterial polypeptide expressing nucleotide sequence isolated from the Sargasso Sea
tatgttaaatttaaagttacgaaaagtaatatctcagagattataggaaaagatattattatttggacaacaacaccttggactattccgggaaatagagcactagcttacggccaagacttaaattatgttttaatagaggtactagaaactaaaaaagaaagcttagttaatctgaatgatcaaattattatagctgaaaaacttaaagaaaatgtacttgaagaaataggtgtaaataattctaaaattataaaaaagttttctggtgaaagcttagaaaatactgaatgcgaacatccttttaaagatattggttataattttattgtcaaagctctacctggagattttgttaaccttgaacaaggtacaggcatagttcatattgctcctggacatggtgacgatgattataatttagggattaaaaataatattgatgtagtacaaactgtagaagatgatggcaaatataatcatcatgctgtaggatttgaaggagagcatatatttaaagttgatttaaaaatagctgaaaaacttaaagaattaaataaacttttatttttgggttctcttaagcatagctatcctcattcttggagatcaaaggcacctttaattttcagaaacacaccacagtggtttatttcaatggaaaaaagagacttgagaaataaagctttaaagtcaatagatgaaacaattttttacccttcacaaggtcaaacaagattacgctctatgattgaaaccagaccagattggtgtgtttctaggcaaagagtttggggagttcccttaccactttttgttaataaaaaaactggactacctttaaaagatgtaaaagttattaataggattgctgatatttatgaaaaagaaggaagtgatacttggtttacaagtgatccacaacgtttccttggcgaagattacaaaattgaagattttgatcaagtcaaagatgttgttgaagtttggtttgatagtggctcaactcatgctttttgtttagaaaaacgagaagatttgaagtggcctgcttctatgtatctagaaggaacagaccaacatagaggctggttccattcatcattattagaatcatctggaacaagaggtagggcaccatatgaaagtgttctaacccatggatttgttgttgatggcaaaggaagaaaaatgtctaaatcccttggaaatgcaatgacacctgatgacatattatctaaatatggtgtcgacattctaagactttgggtagttgcatcagactattacgatgatttaaaattagataattcaattttaaaagcccaaactgattcatatagaaaaataagaaatacttttaggtacttgattgggaatcttcatgaatttgattcaaaagaaaaagtagatattgaagaatttcctgagttagaaaagtacgtgttacatcgtttgtgggaaataaataaaataattattgattgtataaataattttaattttcatttaatgtttatgactctcttaaatttttgtacaaatgatttatcatctttttattttgatattcgtaaagacaccatctattgtgatagtattaattcaaaaaaaagaaaagctgcaagaactcttttagatatattatttaattcattagtcagatggtttgctccatctttagtttttacatgtgaagaagcatgggcatcaagaggaaatcaatcaagtattcatctagaagaattttcgaaaatagaagaaaattataaaaatgaaaaattaaacaataaatgggaaataattagaaatataagaaaagttgtaacaggagctttagagaaaaaaagagaagaaagaataattggatcaagtcttgaagcttcaatagaaatctatgttgataaaaaaattaaaccaattattgaagatatagattttgctgaaatatcaattacatctaatgcaaaattattagaaaaaaattcttctacaaaaggatttattttagaaaattataaagatatcattgtcaacattaaaaaagcag

SEQ ID NO: 305346 - DNA, 1693 bp, Unknown
  Bacterial polypeptide expressing nucleotide sequence isolated from the Sargasso Sea
agaatggaagatagaagaacaatacaaaaaaaagaaaaaaaataaatatgaaatacccattaaagattttaggcaagagtgtagagaatttgcaaaaagttggattgatgttcacattaaagaatttaagcgattaggagtagttggagattttgaaaattattattctacaatgagttacgaagcagaggctcaaattgtaagagaattaggcaaattccttatagatggtagtttatatcaagggtttaaaccagttctttggtctactgttgaaaaaactgctttggctgatgcagaagtagagtatttagatcatacatcaaatacaatttatgttgcatttaaagttaaagatactaataaagattttttaaaagactcgagtattataatttggactaccacaccttggactatacctgctaacaaagcattagcttttaatagcagtattgaatatgcagttttagaaattgaccagcttgagcattttaaaaataagagaattgtagttgcaaaaaatttaattgaaacgattaccaaagagtgtgaaattaaaaaatataaggagttaaagacttttaagggttctgaatttaatggaacagtatgtagccatccatttgtcaaaatggattttaactacgatgtccccttgttggatgctcaattcgttaatttggatcagggaacagggatcgttcattgcgctccaagccacggtccagatgactttaatttatgtttgaaaaataatataccatcactttatacggttgataactctggtgtttatactaaagaggtaccttattttacaaatacacatgtatttaaggctgacccaattgtcatagacaaactaaaagaacaaaaacaattgcttaaaaacgacaaacttaatcatagttatcctcattcttggagatctaaggccccattaatttatagagcgacacctcaatggtttatctccatgcaaaaaaataaactgagagataaagctgttaaagcgataaatgaaaccatcttctatccaaaaaaaggtaaagacaggcttttatcaatgattgaaggaagaccagattggtgtgtttcaagacaaagagtttggggggtgccattaccaatttttatcaataaaaaaacaaaagaaccactaagagatcaaaaaattattgatagaattgcctctatttatgaaaagcaaggctccgattgttggtttacagatgatgcaaaaatttttttaggcgacgactacgatgccaaagattatgaaaaacttaacgatatcgttgaagtatggtttgatagtggttcaacacatagttttgttttagaaaaaagaaaagatttgaaatggcctgcagacatgtatttagagggatctgaccaacataggggatggtttcactcttctttactagagtcttgcggaactagaggtaaagcaccatttaagagtattctttcacatggtttcgttgtggacggcaaaggtatgaaaatgtctaaatcaatgggtaacgttatttctccagaggatattttaaagaactatggcgcagacatacttagagtttgggcttcagcatctgattatgccgaagatttaagaatagataaaaatattttaatacagcatgcagaatcttatagaaaaattagaaatacttttagattcatg

SEQ ID NO: 305347 - DNA, 1177 bp, Unknown
  Bacterial polypeptide expressing nucleotide sequence isolated from the Sargasso Sea
ttaaataatgggattaaagcaattgaaacagttgacggagatggcaaatatacaaaacacgtaagtttattcgaaggtattcatatttttaaagcaaacccaatagtaattgaaaaacttaaagagcaaaaaaaattattatcaaatggggagctgatgcactcctatccacattcttggagatcaaaagctccactagttcatagagccactccacaatggttcatatctatggaaagtcataagttgagagataaagctttaaaagcaattaatgatacgactttttatccaagtaaaggtaaagagagattaaaatcaatgatagaaactcgacctgattggtgtgtttctagacaaagagtatggggtgttcctcttccaatttttattaataaaaagactaaagaaattttagtagatgatgaggtaaatgaaactattgccactatttatgaaaaagagggttcagattgctggttttcagatgacccacaaagatttttaggaaataaatacaaagccgaagattatgacaagttgagcgatattgttgaagtttggtttgatagcggatctacacattcatttgttcttgaaaaaagagaggatttaaagtggccagcatcaatgtatttagaaggttccgatcaacatagaggctggtttcattcatcattattagagtcttgtggaactaggggaagagcaccgtttgaaaatattttgtcccatggatttgtggtggacggcaaaggattgaaaatgtcaaaatctttaggaaatgtaattgccccagaagatattctaaaaaaatatggagcagatatactaagaatttgggtagcatcttcaaactattcagaggatttaagaatagattattcgattcttgatcaacatgcagaatcatacagaaaaataagaaacacattcaggtacttgcttgggaatattaaagataattttgaagaaattgattttaaaaaagtagatttaaatgaattacctgaactggaacaatttatgttgcataagttgtattctttggatgttaactttaaaaaatattttaaaaattatgattttcataatttatataaagagttgcttaaattttgtactgtagatctgtctgcattttattttgatataagaaaagattcattatattgcg

SEQ ID NO: 305348 - DNA, 1423 bp, Unknown
  Bacterial polypeptide expressing nucleotide sequence isolated from the Sargasso Sea
ccccgattgggttttatctagacaaagagtatggggtgtgccactggcttgtttcgtagataaaaatttaaacattaattgtgataattatattctttttgataaaaaagttaataaccgaatattagaagcttttgaaaaagagggtgcagatgcatggtttgctcctgatgcgaaacaaagatttttaggaggtcttcataatccagatgattatgaaaaaattgatgatattctcgatgtgtggtttgattcaggatcaactcatgcgtttgtattaagagatcgtgacgatggaagttggccggctgatttatatttggagggtactgatcaacatagaggatggtttcactcctctatgttacaatcgtgtggtactgttgggagagcaccttataatggagttttgactcacggttttactttagatgaaaacggcatgaagatgtctaaatcattgggtaatacagtaagccctgatgacgttattaaacaatatggggcggatattcttagactttgggtatctcaatcagactacactagtgatttaagaatcggaaaagaaattttaaaaggtgttgctgatagttatagaaggttaagaaatacaatgcgttttatgttaggttctctaggtgactctaacgattttgaaaaaattaggttacaagatttgcctgatcttgaaaaatgggtacttagcaagttaaagaaacttgatattaatattcgggaggattacaaaaactattcttttcagactgtttttcaacaactctttcaattttgtaccgtagatctttcttcattttattttgatataagaaaagatgcactttattgcgatcatatttcctctaatgtaaggaaatcgtgcatatttacattagaaatgatttttgaaagactagtaaaatggtttgctccgatacttccatttactatggaggaagtttggatgcagagacaaaaggaaaattccaaaacatccgtgcatttagatgactttcctaaaactcctaatgaatggactaatatagaacttgaagagaaatggaataggattagagatattaggagttatgttactctagcaatagaaaaagaaagacagaataaaaatattagatcaagtttagaagcttctcctgttttaaaaataaaagataaaaatttatttaagatattgagttcagttgattttagtgaagtatgtattacctcatctattaaaattgaggtaaatgaagatttacaattagaggagactttatcgtctgatgagggtatagaggtaagtattgttaaagcagaaggagaaaaatgtaataggtgctggaaatatactaattcatataatcattataaaaataaaattatttgtaaaaggtgtaatgaagttctaaataattcataa

SEQ ID NO: 305349 - DNA, 1630 bp, Unknown
  Bacterial polypeptide expressing nucleotide sequence isolated from the Sargasso Sea
acagcattagctgatgccgaagttgaatacatggatcacgtttcagatacgatttatgcagcattcaatgtgaaagtttcaaatttagatataattaaaggtgctgacgtaattatttggacaacaaccccatggactattcctgcaaataaagctttagcttacaatgctggcctaaaatatgttttgcttgaaataaacgataacaaaaattttattgatagaaatatagtaattgcaaaggacctactagaaccttttaaaaaagatacttctattgaaaatataaaagttttaaacgaatttttaggaaaagatttgaaaggaacaatttgcagtcatccattttctaaaatgggatatgattataatatcccaatgcttgaggctaactttgttaccactgaacaaggcacaggtattgttcactgcgctccaagccatggaccagatgatttcaatctttgtttaaataataatatcaaagcaattgaaacagttgatggtgatggaaaatatacaaatgaaattaaacattttgaaggtttgcatatttttaaggccaataacttaatcattgaaaaattagatgagcaaaaaaatttagtaacaaacggaaaacttactcattcttatcctcattcttggagatcaaaagctcctctagttcatagagcaactccacaatggttcatttctatggaaagccatggattaagagataaagcattaaaagccatcgacaatacagatttttatccttccaaaggaaaagaaagaataaaatcaatgatagaaactaggcctgattggtgtgtatcaagacagagagtttggggtgtgccgctaccgatttttatttcaaaaaaaacaggtgatgttttagttgatgatgaaatttttgaaaatattgcaaaaatttatgaaaaagaaggttctgattgttggtttaacgaagattatcagatctttcttggagataagtataaagcagaggattatgaaaaattatcagatatagttgaggtttggtttgacagtggatctactcattcttttgtcttagaaaaaagagatgaccttaaatggcctgcatcgatgtatttagagggttcagatcaacataggggatggtttcattcttcattactagagtcatgtggaacaagaggtgttgctccatttgaaagcattctttctcatggctttgtcgtagatggaaaaggtctaaaaatgtctaaatcaacaggtaacgttattgccccacaagatatacttaaaaaatatggggcagacatattaagaatttgggttgcatcttcaaattatgctgaggatcttagaatagattattcaattttagatcaacacgcagagtcttatagaaaaattagaaacacgtttagatatcttttaggaaatattcaagatcaatatgaaaatcttgattttgaaaaagttaagtttgaaaactttgattcgcttgaaaaatttatgcttcacagaatttatgtaataaatgaaaattttaaaaacaattttaaagtttacaatttccataatttgtacaaagaattactaaatttttgtacagttgagctttctgctttttattttgatatcaagaaaa

SEQ ID NO: 305350 - DNA, 1577 bp, Unknown
  Bacterial polypeptide expressing nucleotide sequence isolated from the Sargasso Sea
acatggtgttgatgactataatatttgtaaaaaatatcaatttgagactattcacgcaattgataacaagggatatttcaaaaaggattatgaaaggctgtcaggcaaacctgttttgattgtagatgaagaggttatttctatacttaaagaaaatgacaaactaatacatgttgaggactatttccattcttatccacattgctggcgacataagacgcccttaatatttgcatgcacaccacaatggttcatttccatgaaaaaatctggattactagacggtgcaataaattctgtcgatggtgtcgagtggcatccatcctggggaaaagaaagaattttatcaatgcttcaagaaaggccagattggtgtatctctagacaaagaagttggggagttccaataccacttattgtgcataacgaaactggagaacttcatcccaagcagagcagtttatttaatgaaatagcagatcttattaaaactaaaggtatcgagagttggagtgacgtaaatttaaatgagttcatagatgatgaggagaattatcataaaactatagatattttagatgtgtggtttgattctggagttacccactttgcagtactggataagctttatggagcagatttggttgctgatttatatttagagggctctgatcaacacagaggatggtttcaatcatcactgcttactggtattgctataaatggtacggcaccatataagtcggtacttactcatggttttgttgttgatgaggagggaagaaaacagtcaaaatctttaggaaatgttattgcaccccaaaaaatttggaattcattaggcgctgatattttaagattatggattgctaatacagactttagaagcgaaatggtagcttctgatgaaatttttaaaagagtatcagaccaatacagacgaattaggaatacattacggtttttggttgctaatttaaatgattttgatgttaagtcgcacaatataaatgtcgatgatttgttggaaattgataaatggattatttctaaaacctactccattcaatctaaaattcttgagcattacaagagttatgagttccatcaggttatacaaaaaattcataatttttgtgtcaatgacttaggaggcttttatcttgatgttataaaggacagacaatatacaactcaaacaaattctgatacgcgcaggtctgcacagactgcaataaatattgttttaaacgtaatggttaggcttattagtccaatactctcattcactgctgaagaaatttggcaatcacaagaatcattaaaaaatcaatacaagtctgtatttttatcacttcaatatgaattttctttacctaaatcagatttaactgctgaagattgggagcgagttttagaactaagaaactttgtaaatcaatctattgaggaagcaagaaacctaaaacaaataaaaggctctttagatgcagatttgagattagaggtaacagaatcggattatgagttgctttcaatttttggcacagaaattacattttttgtttattacctca

SEQ ID NO: 305351 - DNA, 1489 bp, Unknown
  Bacterial polypeptide expressing nucleotide sequence isolated from the Sargasso Sea
ggctaacttaccttctaaagaacctggaattttagaaaggtgggaaaaagaaaaaatttttgaaaagttaagaaaaaattcaaaaggtaagaagaaatttgttttacatgatggaccaccttatgcaaatgggaatattcacatgggtacagctcttaataaaattttaaaagatatggttactaggtttcatcaaatgacaggtaaagactccatctatgtcccgggctgggattgtcatggcttaccaatagaatggaagatcgaagagcaatataaaaaaaataaaaaaaacaaagatcaagtaccaattaaagatttcagaaatgaatgcagagagtttgcaaaacaatggattaaaatacagtcaaaggaatttaaaagactaggagtagttggagattttgaaaattattactctacgatgagttttaacggtgaggctcaaattgttcgtgaacttggaaaatttttattagatggaagtttatatcaaggttttaaacctgttctatggtcaactgtggaaaaaactgcattagctgatgccgaggttgaatataaagatcatacttcaaacacgatttttgcagctttcaaaattaaaaaaacagacaaagattttttaaaagatgctaatgtaataatctggaccacaacaccctggacaattccagcaaataaggctctagcattcaatagctccttagaatattccgttgtagaaatttctaacttagaaaattttaaagataataaaattgttattgctaaagatttaatgaagacagtatttgagtcttgtggtattgaaaaatttaaagttattaaaaacttcaaaggttctgatttaaaaaatattatatgtagtcacccatttttaaaattaggttacgactatgatgttccaatgtttgatgctagatttgtaaatcttgaacaaggaactggaatagttcattgtgcaccaagtcatggagttgatgattttaacttatgtttaaaaaacaatattgagtcaaattatacagttgatgactcaggatactatactgatgttatccctcattttaataagacacatgtttttaaagctgatgcagttattattgaccaacttaaaaaagaaaataaattgttaaaaagtgaaaaattacaacacagttacccacattcatggagatctaaagcacccctaatatatagagccactcctcaatggtttatttcaatggaaactaactcactaaggaaaaaagcaattaaagcgattaacgatacgaatttttatccctcaaaaggtaaagaaagattaatgtcgatgatcgaaggaagaccagactggtgtgtttctcgtcaaagggtatggggagttcctctaccaatatttattgataaaaaaactaaaaaacctcttaaagataaaaaggtaatcgaccgtattgctgaaatttatgaaaaagaaggctctgattgttggttttctgac

SEQ ID NO: 305352 - DNA, 1397 bp, Unknown
  Bacterial polypeptide expressing nucleotide sequence isolated from the Sargasso Sea
aatgaaatctcaaattaacaaagaacacaaatcagatttttcttacaaagaaactttaaatttactgaaaactgagttctcaatgcgcgctaactcagttgttagagaacctgagattcagaatttttgggctaaaaataatattgatttcgaattgggttcaaataatgaaggagaaacgtttaccctacacgatggcccaccatatgcaaacggagcacttcatatgggtcatgctcttaataaagttttaaaagacataataaataagtacaaaaccctcaaaggatttaaggttcattatgttcctggctgggactgccatgggttacctattgaattaaaagtacttcagaaattatcttctgatgaaagaaagagacttgatactcttaatctaagaaaaaaagcaacagattatgcatacatacaaataaaaaatcaaatggaaggctttaaaagatggggtatatggggagattgggataatccttacttaacactcaggaaaagttatgaatctgctcagattggagtatttgggaaaatgtttttaaatggatacatatatcgaggtcttaaacctgtccattggagtccaagttcgaggactgcgctcgcagaagcagaattagaatatcctgaagaacattattcaaaaagtatttatgtttctttaaaaatcacaaaaatccctgacgatatcctgttaaaattttgtcaagaaaataatgctaataaaaaagataatttcctaagtaattcttttataactatttggaccaccacaccatggacaatacctgctaatgaagctgttgcaataaatccaaaaataaattacgtttttgctattgatgaagagaaacgcatatacctttttgctaaagatttatcttctgaaattagtaataaatttaataaagatttgaagcatcttttagaagttaagggtgctaacttggaacatattgaatatcaacatcctacaaagaataaaaattgcagaattgtgattggtggagattatataactacagaatcaggtactggaattgttcatactgcacctggccatgggatagatgattttaatgtggggcaaaaatataatttacctactacatgtgttgttgatgaaaaaggaaatttaaatgaaaattctggtcagtttaaaggttcaaatgttcttaaggatgcgaatgatttaattattgaatttttaaagggaaacaatttacttcttttacaagaaaattataagcatagatatccttatgattggagaaccaaaaaaccaactatttttagagctacagaacaatggttcgcatctgtgaatggcttccgatcatttgcattaaaggcaattgaagatgttgaatggatgccatcca

SEQ ID NO: 305353 - DNA, 1771 bp, Unknown
  Bacterial polypeptide expressing nucleotide sequence isolated from the Sargasso Sea
cctgttctttggtctacagtagaaaagacagcattggcagacgctgaagttgaatatatggatcacaagtctgatacaatttatgctgcatttaatattaaaaaatcaaaaaatgagaaacttttaaatagccaaattataatttggacaacaactccatggacaataccagctaatagagctttggcttacaatgaaaatttaaaatatgcggttattaaaatagaagaccagtcagattttaaagataaacaagtagtagtagcagaagatttgttaaaatctttaatagaggattgtaatatcaaaaagtttacaaaagttttaaccttatcaggaaaagaatttgaaggaacaatatgcagtcatccattttcaaaaattggatttgaatatgatattccaatgttaagtgcaaattttgttacgacagaacaaggttcgggtattgtccattgcgcacctagtcatggtcctgatgattttaatttgtgtttaaaaaataatataaaagcggaagaaacagtagatgatgatgggaaatacacgaaacatgttccaacttttgaaggtatacatatttttaaggcaaacaaaatagttatagagaaactaaaagaacaaaaaaatttattatctagtggggaattaattcattcttatcctcattcttggcgttcaaaagcaccattggttcatagagcaacaccccaatggtttatttcgatggaaagtcatggcttgagaaagaaagctttaaaatctatagatgaaactaatttttatccaaataaaggaaaagaaagactaaggtctatgattgaactaaggcctgattggtgtgtttcaagacaaagggtatggggagttcctattcctgtttttatgtcaaaaaaatcaaatgaagttttagttgatgatgaagttacagaaaatattgcaaatatatttgagaaagagggggctgactgttggtttgaaggagatgctcaaagatttttgggcaaaaaatataaaattgaggattatgaaaaaatgactgacattgttgaagtttggtttgatagtggttctacgcatgcctatgttcttgaaaaaagagaagatttaaaatggcctgcttctatgtaccttgaaggttcagatcaacacagaggctggtttcactcatcattactagagtcttgtggaacaaggggcagggctccgtttgaatctatattgtcccacggatttgttgttgatggaaaaggtttaaaaatgtcaaaatctcttggaaatattattgcaccagaagatattttaaaaaagtatggagctgatatcttaaggatttgggtagcagcttctgattatgctgaagatttaagaatagattattcaattttagagcagcatgcagaatcttacagaaaaatcagaaacacttttagatatattcttggaaatttaaatgacaaatttgataaagttgattttgaaaaaattaatataagtaattttccagagctagaacagtacatgttacataaaatctataatctcaacattttatttgaaaaaaattttgaaaaatataattttcatactatttataaggaaataataaatttttgttcgtctgatttgtcagctttttattttgatattagaaaagatgccttatattgtgattctctagagagtaaaaaaagaatttcaactatagagtttttaaacattgttcttgaaatattattaaaatggtttgcacccagtattatcatttaca

SEQ ID NO: 305354 - DNA, 1174 bp, Unknown
  Bacterial polypeptide expressing nucleotide sequence isolated from the Sargasso Sea
atgatagatcttaagaaaaccttaaatttaccatcaacaaaattcccaatgaaggctaacttgccggtaaaagagcttgaaattcaaaaagagtggaaggaaactgatatttataatgaaatgcaaacttatagaaaggactcccctttatttattcttcacgatgggccgccatacgccaatggaaatatacacataggtcatgccgtaaataaaatcttaaaagacatcattttaaaatcaaagtttctatctggctttaaaacaccctatataccaggatgggattgtcatggtcttccaatagaacttgaagtcgaaaaaaatatctcaaaaaaagacgagatatctgacgaagaatttagaaaattatgtcgcgaatacgcttacaaacaagttgaaaaacaaaaagaagattttattagattaggagttttaggaaactgggataatccatatctcacatcaagccctgaattagaagctgagataattaattcacttaaaaagatttacgaaaaaggtcatattagtagaggagtcaaaccagtttactggtgccctgtgtgtaaaagtgctttagcagaagcagaagttgaatatcatgaaaaagaatccacctcaatagatgtcaaatttgaaattaccgatgaacttaattttctaaatactgaagataaaaaagtaagtatcgtcatatggacaactacaccttggaccttgccatcaaatcaagcaattgctattaacgaaaatattgattatgtattaatagagagaaataaggaattgttaattatttgtaacgaactttttgaaaaatttaatttaaggtctggggaaaattgtaaattaataaaaagatttgaaggaaagaagttaataaatataaaagtaaaacatcccctttttaaaaataaaatagtttcaattcttcatggtgactttgtaaccaccgatactggtactggctgtgttcacattgctcctgcgcatggagtagatgattttgaacttggtaaaaagtatgacctagaaatattaaatccagttacctcatcaggtttatatgtcggtgaaattgaagaaataaaaaatattcatgtgtttaaaattgatcaaaatataatagatatactagaacgagaatctgcactgataggtaaagaaaaat

SEQ ID NO: 305355 - DNA, 1390 bp, Unknown
  Bacterial polypeptide expressing nucleotide sequence isolated from the Sargasso Sea
aaaggtgaaaaacccgttcattggtgccaagaaagtggatcatccctagcagaggcagaagttgaatatattgataaaacatctaaagcaattgatgtcgcatttaaagttgatgcttcatctttaaaaaatgtaaaagatttatttaatgctgaagattcagctgaaatatcgttcgttatttggaccacaacaccatggacaataccctcaaatgttgcagtatgtatcaatcctaaatacaaatactcacttattaaaatgaatgataaattttatgtaattgcatttgagatgattgatcaatgttccaaaagatggaaccaaaaattcgatgttatatcgacaatacatggtaaaaaattacgtgatattgatcttattcatccatttttagatagaaaatcagttcttttgcatgcaaatcatgttacaactgaaacaggaacaggttgtgttcatactgctccggctcatggtatggatgattatttaatatgtaagaaaaatagtattgatactattcattctttaaataataaagccttttttaaagatgaattggattttattgcaggacttcctgctatgaaagcagatccgcttattattgaaaaattacaagagcacaatgcactcattaatatagaagattatcatcattcttatcctcactgttggagacgcaaaacacctctaatttttacatcaacgcctcagtggtttatttcaatgaaaaaaaataatctcatcaatgatgccctaaaacatatcaaaagtgttaattgggaaccctcatggggtcttcaaagaattgaatccatgcttattgatagaccagattggtgtatctctagacaaagaaattggggtgtcccaataactttagttgttcataaagatactggagaaatccatcccaatcaaaacgacctatttgaaaaatttgcacaagttatcgaaaaagaaggaatttcagcttgggataaattgaatttgaaagattatattgatgatcatgaagaatatgttaaaacttctgattctcttgatgtttggtttgattctggagtaacacactatgcagtttccacagaaagatttggtagtaatgtcgttgcagatctttatttagaaggctcagatcaacataggggatggttccaatcttcattattaacaagtatagccatgaaagactctgcgccgtataaaacagttctgacacatggatttgttgtggacgaacaaggaagaaaacaatcaaaatcacttggaaatgttgtctcacctcagaaagtgtgggataacttaggagcagacattttaaggctttgggttgcttcaactgattttagaagtgaaatggtggcatctgatgaaatattaa

SEQ ID NO: 305356 - DNA, 1411 bp, Unknown
  Bacterial polypeptide expressing nucleotide sequence isolated from the Sargasso Sea
acgagaatctgcactgataggtaaagaaaaatttagacatagttatcctcataattggagaactaaaactccattgatatttcgaactacacctcaatggtttatttcgatgtcaaaaaacaatttgcgaaaaaatgctttacaagaattaccagaagtaaattggattcccgattggggctataacaggataaaaactatgattgatgataggccagactggtgtatatctaggcaaaggaaatggggtgtgccaattacacttctaataaataaaaaaacacaagaactacatccaaatacttcaaaaatttttaatgcagtatatgaggaagtaaaaaaagatggtattgaagcttggtttaagaaagatattaaagacttaatagatgaccataatgattatgagaaagtaaatgacacactcgatgtgtggtttgattctggagcaactcattcagcagttttaaaagaaaagcatggtttagattttcctgctgacctatatcttgaaggttcagaccaacaccgtggttggtttcaatcatcttttttatcatctgtttcaatttctggcaaaccaccatttaaatctgcaatgactcacggatttacagttgatgctaaaggaaacaaaatgtcgaaatcaaaaggaaatgttgtctcgcctcaaaaagtaattaacaggcttggtgcagatattttaagattatgggttgcaagcactgactacacttcagaaatttcagtttcagacgagatcttaaatcgaacgtctgataaataccgtaaaattagaaataccattcgttttttgcttgctaatatttctgattttgaagagaaagactatgaatcggaaatttcaaatgaacttgataaatggattttatgtcgagctataaatactcaaaaaaatattattgaaaattatgacaaatacaatatgcacaatgtcgttcaaatcattcattctttttgtgtaaacgaattaggatctttttatctagatattataaaagatagaatttatacaattaataaaaattcgtatagtaggaaatcagctcaacaagcaatgaaacatattttgaacatgctaatcttgtggctagctccaatatgtcctcacacagctgaagaatcctggagtcattttaccaacaccaataataattccgtattacttaataactggtatgacacaaatgaaataaaatttggaaataggaaagtaaatgatgaagattgggaaagaatattaaatataaaaaaaattgtcacgaaggagattgaattaaagagggaacaaggagttattggctcatctttagaggcgaaacttgacattaattgtactaatcatgattttttacttcttgaaaaatttgagaatgaagtgaaattttta

SEQ ID NO: 305357 - DNA, 1365 bp, Unknown
  Bacterial polypeptide expressing nucleotide sequence isolated from the Sargasso Sea
aatgaataaatctcaaattaacctaccaaaaacagctttttccatgaaagcaaatttgccattaaaggaacctgaaatattaaaactttggcagaatataaatctttatgaagagttaagaaaatcaagaaaaggagaggaaaaatttgttctacatgacggtccaccttatgcgaatggaaatatacatatgggcacagctttaaataaaattttaaaagatataattgtgagatttcatcaaatggacggaaaagactcagtttatgtccctggttgggattgtcatggattaccaattgaatggaaaattgaagaacaatataaaaaaaataaaaaaaataagaatgaagtgcctatagttgaatttagaaaggaatgtagagcttttgccgaaaaatggatagaagttcataaagatcaatttaaaagattaggtgtcgtaggagattgggaaaactattattctacaatgagctatgatgctgaagctcaaattgttagagagttaggaaaatttttaaaagaaggaagtttatacagaggttttaaaccagttttatggtctacagttgagaaaacagctttagcagatgcagaggtagaatatttagatcataaatcagatacaatctatgcgtcttttcctgttaaatcatctaacattaaagagttaaataatagcgacgtaataatttggacaacaactccttggactattccagcaaatagggctttagcatttaatgagagtttagattatttattaattgagataagagatgatggtgattttaaaaacaaaaaaattcttcttgcggacgcattattcgaatctgttataaaagattgcaaaattaaagaatttaaaaaattaaataaaattaaaggcaaagatttaaaaggtactatatgtaagcatccatttttaaaactagggtatgattttgatatacctatgttagatgcacgttttgtgacaacagaacaaggtacaggaattgttcactgtgcgccaagtcatggccctgatgatttcaatttatgtttaagcaatggaatcaaagcaatagaaacagtagacggagatggaaaatatactaaaaatgtagcattatttgagggaatacacatttttaaatccaatcctattgtaatagaaaaattaaaaagtcaaaaaaaacttttatttaatagtgagctagttcactcttatccacattcatggagatcaaaagcaccattagttcatagagcaacaccacaatggtttatttcaatggatagtcatagacttagagttaaagctttaaaagcaatcgatgaaacagttttttatcctgggaaaggaaaagaaagattaaa

SEQ ID NO: 305358 - DNA, 1711 bp, Unknown
  Bacterial polypeptide expressing nucleotide sequence isolated from the Sargasso Sea
ggaagagaaaaatttgtccttcatgatgggcccccatatgccaatggacacattcatatgggaactgcattaaataaaattttaaaagatgtgattgttcgtactcaacaaatgtcaggaaaagattctatatatgtacctggatgggattgtcatggcttaccaattgaatggaagatagaagaagagtatagaaaaaagggtaaaaataaagatgatgttccaatagttcagtttagaaaagagtgccgagaatttgccgaaaaatggatagatattcaaaaaaaagaatttagaagactaggagttgaaggcgattggaaaaatccttatttaacaatgtccaatgaagcagaagctcaaattgtaagagaattaggaaaatttttattagatgaaagtttatacaaaggcgctagacctgttttgtggtcagtagttgaaaaaactgcacttgctgacgcagaagttgaatatgaagatcacacatcaaccactatttatgtaaaatttttaattttaaaatcaaatattgaggaactcgtaaattcaaatattgtaatttggactacaacaccatggacaataccaggaaatagagccttagcttacaactctgaaattgattatagtttaattgaggttaatgaagttgatgattcaagtttgttaagtgttggtgaaaaactaattttagcatcagatcttgttaaaaaggttagtgaagaagtagggattattaaatacaacctaattaaaaaattcaaaggaagggatttagacacctgcgaatgtgagcatccttttaaaaaaatagtttataaatttatagtaaaaccatttcatgctgattttgtaaacttagatcaaggtactgggatagttcacatagcaccagcacatggtgatgatgattatcatttaggaattaaaaataatgtagatattgttcaaactgttttagatgatggtaaatataatcatcatgcaaagggttttgagggagaacatgtttacaaggttgatgataaaatatctgaaaaattaatcgaatttaaaaaattaattcacaaaggtaaacttcgacacagctatccacattcttggagatcaaaagcacctttgatttatagaaatacaccgcagtggtttatttctatggaaaaaaagaatttaagaaaaattgccctaaaatcaattgatgaaactattttttatccttcacagagtaaaacaagattaagatctatgatagagacaaggcctgattggtgtatttcaagacagcgagtttggggagtgcccttacccttgtttgttaataaaaaaactgggcagcctataagagatattaaattaattgatcgcatagctaatatttatgaaaaagaagggagtgatacctggttcaccgaggatccaaaaagatttttggaagatgattactccatagatgaatatgagcagttaaaggatattgttgaagtttggtttgatagtggttccacccatgcattttgtttagaaaaacgaacagatctaaaatggcctgcatcaatgtatttagaaggcagtgatcagcatagaggttggtttcactcttctttactagagtcttcaggtacaaggggcagagctccttatgaaagtgttttgacacatggctttgtagttgatggcaaaggtagaaagatgtctaaatctttaggta

SEQ ID NO: 305359 - DNA, 607 bp, Unknown
  Bacterial polypeptide expressing nucleotide sequence isolated from the Sargasso Sea
aatgacaaactataaagatacattaaatctgccacatacagcattccccatgaaggcaaatttatctcagcgtgaaccagagatactcaaatcatgggaagaaaataatctgtaccaaaaaatacgaacgaaacgtaaaaaaaataaaaaatttattttgcatgacggtcctccttatgccaatggagatattcatattggtcatgctgttaataagattctcaaagatattattataaaatcgaagggatttagcggttttgatacaccatatattcctggctgggattgccatgggttaccaattgaattgcaggttgaaaagaagataggaaaagcaggagtgaaagttaatcccagagaatttcgagatgcatgtcgtcaatttgcatcgaaacaagttgataaacaacgagaggattttaaacgccttggtgtgctagctgattggggaaaaccttatctcactatggatcacttaacagaggcaaacataataagatcactcggaaaaataatttcgtctggacatttagcaaaaggcgttaaacctgtacattggtgtattgattgttgctcagcattagcagaggctgaggttgagtac

SEQ ID NO: 305360 - DNA, 1444 bp, Unknown
  Bacterial polypeptide expressing nucleotide sequence isolated from the Sargasso Sea
atggatagtcataaacttagaaacaaagctttaaaagcaattgatgaaacaactttctatcctagcaaaggaaaagaaagattaaaatcgatgattgaaacaagacctgattggtgtgtttcaagacaaagagtatggggagttccattacctatttttattaacaagaagacaagtgaaattttggtcgatgaggaggtttttgataatattgcaaaaatttatgaaaaagagggatctgattgttggttttcggatgatccacaaaaatttcttggaaagaaatataaagctgcggattttgaaaagttaagtgatatcgtagaggtatggtttgatagtggatctacacattcatttgtattggaaaaaagaaaagatttaaagtggcctgcatctatgtatcttgagggctctgaccaacatagaggctggtttcattcatctcttttagagtcttgtggaacaagagatcgtgcaccctttgagtctattctttctcatggttttgtagttgatggcaaaggtttaaaaatgtcaaaatctttgggaaatgtaattgcgcccgaagatatcttaaaaaaatatggagctgatatacttagaatttgggttgcttcatcaaattatgctgaggatcttcgaatagactattcaatactagatcaacatgctgagtcttataggaaaataagaaatacatttagatatttgcttggaaatcttaatgataattttgaacaaatggatttagaaaaaattaaaattgagaatttacccgaactagagcaatttatgcttcataaaatttacaatttaaattctaaatttgatatgtatttcaaagattatgattttcataatttatataaagaattattaaatttttgcaccgtagatttatctgctttttattttgatataagaaaagatactttgtactgtgatccaataaattctgaaaaaagaaaatctacacttatattgttaaatattattcttaattctttaataagatggtttgcaccaatattatcttttacaactgaagagatttatcaacttatttcaaaaaataaaaagagtattcatcttgaaaaatttttaaattttcctgaaaaatttaataattcaaaccttaattccaaatgggaacaattaatcaaaataagggatatttgtaatctgagtattgagcaaaaacgagcaagtaaagatataggatctagtttggaggcagctttaattgtgaaattaaataatgagaaccagaaatttttgaaaaatattgacctttcagaactttgcataacttcatcagtcaaaattgagattagtgatacaaatgagataactgtagaaacaagcaaagcaaaaggtgaaaaatgtccaatatgttggaaaatcagaagcgcaccatgtgaaagaccgaattgtaaataga

SEQ ID NO: 305361 - DNA, 2725 bp, Unknown
  Bacterial polypeptide expressing nucleotide sequence isolated from the Sargasso Sea
aacttacctaaaactgctttttctatgaaagcaaatctaccaaataaagaaccagaatatttgaaatattgggataagattaatttatatgaaaaactaagatctcaaagtaaaggcaaagaaaaatttgttttacacgatggacctccatatgcaaatggaaatattcatatgggtactgcattaaataaaattctaaaagatataataattaaatttcatcaaatggatggcaaagactcagtttatgtacctggatgggattgtcatggtttaccaattgaatggaaaattgaggaacaatacaaaaaaaataaaaaaaataaaaatgatgtacctattattgagtttagaaaagaatgtagagattttgcaagtaaatggattaatattcataaagatcaatttaaaagattaggagtaattggagattgggaaaactattactcaactatgagttttgatgcagaagcccaaattgtaagagaacttggaaagtttttaaaagagggtagtttgtacaagggttacaagcctgttttatggtcaacagtcgaaaaaacagctttagcagatgcagaagttgaatatcaagatcatgtatccgacacaatctatgcggccttcccagttaaaaaatccaatattaatgaattaattggttcgagcgttgttatttggacaactactccatggacaattccagctaacaaagcattagcctataatcaaagtttagaatatgttttatgtgagatagataacaaaggtattttagaaaataaaaaaatagtcattgcaaaagaacttttgacttcagttgcaaaagatactgattataaaattaagatattaaaagaatttaaaggaaaagattttgaaggaactatttgtaaccatccatttcataaaattggatatgactatgatgttccaatgctcgaggcaagatttgttacgactgaacaaggaacaggaattgttcattgtgcaccaagtcacggtccagatgattttaatttgtgtattaataatggaattaaagcaattgaaacagttgatgatgatggaaggtacacgaaacagatacctatatttgaaggaactcatatttttaaagcaaacgatattgttatagaaaagcttaaagaactaaaaaatcttttaaaaaatggtaaactaacacattcttacccacattcctggagatctaaagctcctttagttcatagagcaactccacaatggtttatttcaatggaaagtcataagctaagagacaaagcacttaaagcaataaacgaaaccactttttatccaagtaaaggaaaagaaagaattagagcaatgatcgagactagaccagattggtgtgtatctagacagagagtgtggggagttccacttccaatatttatttcaaaaaaaaatggagaaattcttattgatgaggaagtttttgaaaatattgcaaaaatttatgaaaaagaaggatctgactgttggtttgaagataattttcagagattgcttggggataaatataaagcagaagactttgataagactagtgatattgtagaagtatggtttgatagtggatcaactcactcttttgttttggaaaagagagaagatttaaaatggccagcatcaatgtatctagagggttcggatcaacatagaggatggtttcactcttcacttttagagtcttgtgggacaagaggtagagcaccatttgaaagtattttatctcatggttttgtagttgatggaaaaggattaaaaatgtctaaatcaactggaaatgtaatagctccagaagatattttaaaaaaatatggtgctgatattcttagaatttgggttgcttcatcaaattatgccgaggacttaagaatagattattcaattttagaccagcattctgagtcttatagaaaaataagaaatacatttagataccttttaggaaatatacaagatgaatattcaaaagtagactttgataaaattgatttaaaaaatatccctgaattagaaaagtatatgctgcatagattgtatgtaatcgatgaaagttttaatgaatactttaagtcttataattttcataatttgtataaagagttgttaaatttttgtacagtagaactctcagcattttattttgatattagaaaagatcttctttattgtgacccaaaagactcaaaaaagcgttctgattgtattttgatactaaaagtaattttagaatgtttattaaaatggtttgcaccaatcttatcttttaccactgaggaaatttatcatttaattcataaggaagaaaataatggtagtattcatttacaaaaatttgttaaaattccaaatcaatggaaaaatgaggaattaaatagtaaatgggataaacttaaattaatcagagatgaagcaaacattagtattgagagtaaaagagctgataaaattattggttcaagtttagaagcaaacatagaaataaaaatcaaagataaagacatgtacagtttagctcagagtcatgatttctctgaaatttgcataacatcctctgcttcaatctccaatgataacaatttagaaaaagaaattgagataacgagttcaaaagctattggaaataagtgtccagtttgttggaaaattagagaaaatatttgtgaaagagatggtaactgtcatctttcatgaa

SEQ ID NO: 305362 - DNA, 2653 bp, Unknown
  Bacterial polypeptide expressing nucleotide sequence isolated from the Sargasso Sea
aaagatcagaaagaatatgagaataatgaactatttcttttacatgatggacctccttatgcaaacggggatatacatttaggacactcagttaataaaatccttaaggatataactattaaatttaaaacccttcaaggatttaatgcaccttatgtgccaggttgggattgtcatggacttccaattgaacttaatgttgaaaagaaacatggaaaaaatagcgaacttgtgaaaaataaagaaagttttcaaaaagcttgcaaaaaatatgctgagagccaaatcaataatcaattaaatgattttaaaagacttggcgtgcttggtgattgggaaaattcatataaatcattagatccaaaatttgaagcagacattgttaggtctttaggtattatttttagtgaaggtcacctagaaaaaggtgaaaagccagttcattggtgccaagaaagtggttcatcattagcagaggcagaagttgagtatattgataaaacatcaaaagcaattgatgttgcattcaaggttgatgattcatctttaaagaaagtaaaagatttgtttagttctgaggatttagacgaaatattctttgttatatggactacaacgccatggacaattccttcaaatgtagctgtttgtattaatcctgaattcgaatactcactcattagtatgcaaaataaattttatgtaattgcatttgagatgattgatcaatgctccaaaagatggaagcaaaaatttgatgttatatctacaattaaaggaaacaaattaaatgacattgatctcattcatccttttttaaaaagaaaatcagttctacttcatgcagatcatgtcacaactgaaacaggaacaggttgtgttcacaccgctcctgctcatggtatggatgattatttaatatgtaagaaaaacaatattgaaaccatccattcacttaacaataaaggtttcttcaaagatgagctggattctattgcaggactgccagctatgaaagcagatccgcttattgttgaaaaattagaagaacataatgctctaattaatattgaagactatcatcattcttatcctcactgttggagaagaaaaacgcctttaatttttacatctactccacagtggtttatttctatggataaaaataacctaaacaaagatgctcttgagttcattaaaagtgttaattgggaaccttcatggggccttcaaagaattgaatctatgcttactgatagacctgattggtgtatttcaagacagagaaactggggtgttcctataactttggtggttcataaagatactggtgaaatacatcctgatcaaaaggatctatttgaaaaatttgcaaaaattattgaaaaagatggaatttctgcttgggataatttggatttaaaagattatatcgatgatcatgaagattatattaaaacttctgattcacttgatgtttggtttgattctggagtaacccactatgcagtttctgcaaaaagatttggcgataatgctgtcgccgatctttacttagagggttcagatcaacataggggatggtttcaatcatcattattaacaagtatagcaatgaataaatccgcaccatataaaacggttcttacgcatggatttgttgtagatgaacaaggaagaaaacaatcaaaatcacttggaaatgttgtctcaccccagaaagtctgggatagcctaggagcagatattttaaggctttgggtagcttcaacagattttagaagtgaaatggtagcatctgatgaaatattgaagagaacttcagatcaatacagacgaataaggaatacttttagatttattttaggtaatttaagcgattttagtgataaagataaagttatgtttgaagatcaagttgagcttgataaatggattataaatgaaataaaaactcttcaaaaagaagtcataagtttatatgaatctttttcttaccataaggcaattcaaaaaatacataatttttgtgttaacgaattaggaggaatatatctagatataattaaagataggctttatacatgcaaaaatgattctttagcgagaagatcttgtcaaacaagccttgactgtgttttgaatattttagtaaggcttatttctccaatcctttcatatactgcagaagaaatttggcaaacaagtgacagattgaatagtcaggaagactcggtttttctcactaattttgataattttgaagaagattctgaatctaatattaatcaatctgaatggaaaagaatttttgaaatcaaggatgctgtcaatcaaacgatagaagaaatgaggaatgaaaataaaatcaaaggatcacttgattcaattgtagatgttcaagctacttcagatgacataagtgttcttaaaaaacttggagaggaacttcactttttatttatttcttcagaagcaagcattagtaagggaaaaagttttaaaattaaagtcaatccttcaaataacacgaaatgcgtcagatgttggcacagatgttcatcagtaggatctaacaaagaacatcccgaattatgtaatagatgcattgataatatagagaatgatggcgagcaaagaaaatctgtataac

SEQ ID NO: 305363 - DNA, 1389 bp, Unknown
  Bacterial polypeptide expressing nucleotide sequence isolated from the Sargasso Sea
gatggattacaaagatactctcaatttacctaaaactaaatttccgatgaaggcaaatctacctaacagggaacctgaaattatgaaattttgggatagcattaatttatatcaatcattaaggaaagaaaatcagaataaacctaaatatattctccatgacgggcccccttatgcaaatggtgatatacatattggtcatgctgtaaataaaattctcaaagatatagtaattaaaagcaaaacagcatctggctatgattgtccatttgtgcctggctgggattgtcacggattaccaattgaacttatggttgaaaaaaaatttggaaagtctaaatttagagaaaataaaaatgccttcagaaaagcttgcagagaatatgctcataagcaagttgaaaaacaaaaaaaagattttattagactgggtatttctgccgactgggataattcttacttaagtatggataaagattttgaggcatcaataattgaaagtctcggagatatccttgctaataatcatatatattttggttctaaaccagtgcactggtgtattgagtctgaatcagccttagctgaagcagaagttgaatataaagatgttgaatcagatgccgtatacgttttatttaaattggtaaaaaataatcttaaaattaatacaaaaaaagatatttatttgatgatttggacaacgacaccatggaccttacctgccaatagagctgttgctgttaatatagatgttcagtacgtattagttgaggataaggatagagtttacgttttagccgaggatcttttagagtctcttaattctgtaatgaatacatcactgcagtcggttgattccgttaatggcaaggatctcattggtttgagcgtaaatcatccattctataactttgacgttcccattatttttgctgatcatgttacaactgagtctggaagtggtattgtccacatagctcctggtcatggacaagaagattataaggcagggattgaaaatgatttagaaatattcaatccggtaaatgataagggatgttttgatgatggtttagaattttttggcgggctaaatgttagagatgcaaactcatcgataatttctaagcttaaagaaaataattgtctgctacatcaacataaatatcaccacagctatccacattgctggaggtttaaaacacctctgatatttagagcaactcctcaatggtttgtcagtatggataataataatctcagagagaaaatcctctcgtcgattaatgatgttgaatggattcctgggtggggggaagataggataagaaatatgatggataacaggccagattggtgcatttctcgtcaaaggttttggggtgt

SEQ ID NO: 305364 - DNA, 1378 bp, Unknown
  Bacterial polypeptide expressing nucleotide sequence isolated from the Sargasso Sea
tatggaaagtcataaattaagagataaagctttaaaagcaattgatgacacaactttttatcccaataaaggtaaagaaagattaaaatcaatgatagaaactagacctgattggtgtgtctccagacaaagagtttggggagttccattgccaatttttataaataaaaaagataataagattttagtagatgaagatgtttttgaaaacatagcaaagatttatgaggaagaaggatcagattgttggttttctgatgatcttcaaaaatttttaggaaaaaattataaagcagaagattatgaaaaattatcagatattgttgaagtttggtttgatagcggttctacacactcatttgtcttagaaaaaaggaaagatttgaaatggccggcttcaatgtatcttgaaggctcagatcaacacaggggttggtttcattcctctttattagaatcttgtggtacaagaggcaaagctccttttgagtcaattctttcacatggctttgttgttgatggaaaaggcttaaaaatgtcaaaatctttaggtaacgtaattgcacctgaagatattttgaaaaaatatggagcagatatattaagaatatgggttgcttcttctaattacgcagaagatttgaggattgattattctatattagatcaacattctgagtcttacagaaaaattaggaatacttttagatatattcttggaaatttaaatgacacttttgagaatatagatctagaaaatatagagataaaaaagttacccgaattagagcaatttatgcttcacaaattatacaatcttaatataaattttaataaatattttaaaaattatgattttcataatctttataaagacttattaaatttttgtactgtcgacctatcagccttttattttgatattaggaaagactgtttatattgtgattctaaaaattcagaaaaaagaaagtctacgcttttattattaaatattattttaaatgcattgttaaggtggtttgcaccgattttatcttttacaacagaggagatttatcaactgatgtctaaagataaaaagagtattcatcttcaaaatttcataaggtttccaaaaaaatttgaaaatttagaattgaataataaatggatcaaattattaaaaataagagatatttgtaacttaagtatagaggaaaaaagagccagcaaggaaattggttcaagtttggaagcatcactaatagtaaacttaaataagaacatgatggatattattcaaaaaattgatttatctgaactttgcatcacttcaagtgttgaagttaaagaaaatagtaaagatgagattatagttgaaacaaaaaaagccaaa

SEQ ID NO: 305365 - DNA, 1636 bp, Unknown
  Bacterial polypeptide expressing nucleotide sequence isolated from the Sargasso Sea
acaataccagcaaacaaagctctcgcatttaatgaatctcttgattatgttgtattagaaataaatgatgaaggtgattttaaaaatagaaaaattgttattgcagattctttactagagtcagttgttaaagagtgtgaattaaaaagttataaaaaaattaagacatttaagggtaaagagtttaagaacaccatttgtagtcacccatttttagatcttggttatgaatatgacattccaatgctggaagctagatttgtaacaactgagcaaggaaccggaattgttcattgtgcaccaagtcatggacctgatgattttaatctatgtttgaacaatggtattaaagcaatcgaaacagttgatggtgatggaaaatatacaaacaatgttaaattgtttgaaggaattcatatatttaaagcaaatccaattgtaattgaaaaacttaaagaacaaaaaaatttattatttaatagtgagttagttcactcatatccacactcatggagatctaaagctcctcttgttcatagagctacaccacaatggtttatttcaatggaaagtcataaattgagagataaagcattgaaagctattgatgaaactgctttttatccaatcaaagggaaagaaagattaaaatcaatgattgaaactagacctgattggtgcgtttcaagacaaagagtttggggtgtgccccttccaatttttgtaaacaagcagactaaagaaattttagtagatgatgaagtcacagaaaatattgcatcaatttatgaaaaagagggttcagattgttggttttcagatgatccacagagatttttaggtagcaaatataaagctgatgaatttgaaaaactaagtgatattgttgaggtttggtttgatagtggatcaactcattcatttgtattagaaaaaagaactgatttaaaatggcctgcatcgatgtatttggaaggatctgatcaacacagaggttggttccactcctctttattagaatcttgtggcacaaggggaagagcaccgtttgaatctattttatcccatggatttgttgttgatggtaagggtttaaaaatgtcaaaatctctgggcaatgtaattgctccagaagatattttgaaaaaatacggagcagacattttaagaatatgggtagcatcctctaactactcagaggatttgagaattgactattctattcttgaccagcattcagattcctacaggaaaatcagaaatactttcagatacttactgggaaacattaacgataactttaatatagtaaatttagatgaattaaatttgaaggatttgcctgaattagaacagttcatgctacataaaatttattctttaaatattaattttaaaaaatactttacgaactatgattttcataatttatataaagagttattaaatttttgtacagttgatctttctgcattttattttgatattagaaaagactccttgtattgtgaccccattaactcgaaaaagagacagtcaactattttgttacttaatattattttaaattcattattaaagtggtttgcaccaattctatcatttacaacagaagaaatttataggttattaaata

SEQ ID NO: 305366 - DNA, 1393 bp, Unknown
  Bacterial polypeptide expressing nucleotide sequence isolated from the Sargasso Sea
agcgcaggacctgcttgaaagctgcatgaaccgttacggcgttgaagatttccgtgaagtggcaacctgtactggtgctgcgcttgataagcttaacgttaatcacccattcttagaccttgaagttccgttaattctaggcgaccacgttacgactgaatctggtacaggttgtgtacacacagccccagctcatggtgttgacgactttaacgtgggcaagcaatacgatatcgaagtgtacaatccggtaggcaacaatggcgtgtaccttgaaaacacaccgctgtttgcaggtcagtttgtatttaaagccaacgatgaaattatcgaaacggttaaagagaagggcaaccttgtcctaaacgtaaaatacgagcacagctacccgcattgctggcgccacaaaacgccaattattttccgcgctacgcctcagtggtttgtaagcatggataaaaaaggccttcgcgctgaatcacttgaacaaattaagcaaaccaaatggatcccagactggggccaaaaccgcattgagaaaatggttgaaggtcgtccagattggtgtatctctcgtcaacgtacgtggggcgtgcctattcctttgtatgtgcacaaacttaccggtgaaatccacccagagtctgcggcgttaatggaaaaggtggcacaagaagttgaagctaaaggcattcaagcgtggtgggatcttgatgatgcagccctgcttggtagcgaattagacaactatgaaaaagtgaccgataccctagatgtttggtttgactcgggcgtaacgcactacttcgttgtcgaccgtcgcgatgacattccggcctctgccgatttatatcttgaaggttctgatcagcatcgcggttggtttatgtcttcgcttatgtcatcaactgccatgcacggtcacgcgccttataaagaagtgctaacacacggctttacggtagatgcccacggcagaaaaatgtcgaagtcggtaggtaacgttgtagcacctcaggaagtgactaacaaattaggcgcagacatccttcgtctatgggtggcatctactgattatcgcggtgaaattgcggtatcggatgaaattttaaagcgtgctgcagatggctatcgccgcgtacgtaataccgcacgtttcttgcttgcgaacctgaatggtttcgctgttgaagatgcggttgcagaagaagatatggtcgcgctcgaccgctggattgttgctcgtgcaaaggcacttcaagaagagcttatcgaagcgtatgacaactacgacttgttggtagtgtcacagaagcttacgcacttctgttcaattgaactgggctcattctatttagacgtgattaaagaccgtcagtacacggcaaaagca

SEQ ID NO: 305367 - DNA, 1447 bp, Unknown
  Bacterial polypeptide expressing nucleotide sequence isolated from the Sargasso Sea
atgagtaacgaaaaagatcagaaattaaatctgcctaaaacatcaattcctatgaaggctaatctaaatcaacgagagcctgaatttttaaaagaatgggataagcggaatgtatataaaaaaatcagaaaaaataaaaaaggaaaaaaagcttttcaccttcatgatggcccaccatatgcaaatggagaaattcatcttgggcatgctgtcaataaggttttaaaagatattattattcgttcaaaatctttagagggttttgattccccctatattccaggttgggattgtcatggacttcctattgagcatcaggttgaaaaaaaaataggaaagaaaagaaaggaaataagtaagtcggaatttagagacttgtgtagggaatacgcaaaaacacagattaaacttcaagagaaagattttgtcagattaggtgtatttggagattggaagaatagatatgcatcactggatcaatcttttgaaggagaggctatcaatgcattctcaagaatatttcataatggccatgttgaaaagggtttcaaacctgtccattggtgtctagattgcggatcctctttggctgaagcggaggttgattacttagataaaacatcaagagctattgatgttaaatttcgcattgataagactttagaggaaaaattcataaaacagaataaattgccagaacatagtaaagtttttgcagtaatttggacaactacaccatggactattccaggcaatcaagcagtatgccttaataaagatattgaatattctttggtagaagttgctaaaaatgagatttatataattgcatctgaacttgttaaaacttgttttgatagatggagttcggaagattttaaaataatcaaaaaaatgaaaggtaatgatttagacggactgcatttcattcatcctctctataatagaacatcaccattattattcagcgaacacgttacaactgatactggaactggatgtgttcactctgctcctgcacatggccctgaagattttgagacgtgctctgagaatggaattgaattaaaaaatccaatctcatcaaatggttgttttaaagatgatgttaaacattttggtggactgcatgtaagaaaatcagaagaggaaattatcaaaaagttgaaagaaaccgattccctattatgtaatgaagattttcagcatagctatccgcattgctggagacataaaacaccattaatttttatggcaacacctcaatggtttatttcaatgactaaatcaggactattggagggggctgaacatgggattgataatgttgaatttactcctgcttgggggaaagaaagaatgcaaataatgcttaaagatagaccagactggtgtatttcaagacagagagattggggaataccaataccattaatttttgataaag

SEQ ID NO: 305368 - DNA, 1376 bp, Unknown
  Bacterial polypeptide expressing nucleotide sequence isolated from the Sargasso Sea
tttcactgatgcaaaagagagctttgccaaacagcatatatttaaatctgaatcagaaatcattgaaagattagatgaatcaaacttgctaatttcaagtgaaaaatttgaacacagctatccacactgttggagacataaaactccagtgatctatagaacaacaagacagtggttcatcagtatggaaaatgaagattttcgatcctcttgtttagagtcaatcaaagatgttgagtggaaaccaaaatggggagaagacaggatcaatggaatgattgaaacaaggccggattggtgtatttcgagacaaagatattggggcgtacctattccgctatttacacataaagatgatcagacaatccatcctgacactccagaactccttaatcagattgctgaaaaaattgaggagaatggaattgatgcgtggtttgatgcagatatcgaagagttactgggtgatgattcaaattcatatgaaaaatccactgatacaatggatgtctggatggattcaggaattgcacacaaaactgttagccatctctttgatcacatcacagataaagctgacttgtatctggagggatctgatcagcaccgtgggtggttccaaagctctctacttacttctgtggcaataaatgatcaagcaccatataaagaagttctcactcatggatttgtagtcgatgaaaaaggacataagatgtctaagtcaattggaaataccgtctcacctcaatcggttataaataatatgggagctgatattttgagactttgggttgcatcaaccgattacaccagtgaaatgaaaatttcagatcagatactcaagcgtaatgctgacacttataggagaatcagaaacacagcgagatttttattgagtaatttaagcgacttcgatcctacaaagaatcagcagaaaattgaggatctagtattacttgatcaattagctattcagcgcgttgcagtaatgaatgaagaaattaaaaatgagtttaataactattcattccataaaatcatccagcttttacataacttttgtgtcaatgatatgggaggtttctatctagatattatcaaggatcgactttatacaatgccgacagattcgcacgggagaagatctgcacaaacagccttgtatatcattgcagaatcattgactcgttggattgctcctattttgtcttttacggctgaagaaatctggaaacatctaccagagaggaaagaagaatctgtatttctttctgattggatagatatagaagagtctaagtcgaatgttgattgggatcaattgaatgacataaattcgattgttcttaaagctttggaggttgcaagggatg

SEQ ID NO: 305369 - DNA, 1016 bp, Unknown
  Bacterial polypeptide expressing nucleotide sequence isolated from the Sargasso Sea
aatgaaaatagactataaagataccgtttgcctgcctaagacagattttccaatgaaagcaggtctagcaaaaaaagaaagtgaaattctatcacgatgggaaaaaattaatttgtataagcaacatagaaagattgcaaagggccgggaaaaatttattcttcatgatggccctccctacgcaaatggaaacctacacataggacatgctcttaataaaatactcaaagatgtagtaactagaagtcagcaaatgctgggaaaagactcaaattatgtgccagggtgggattgccacggcctgccaattgaatggaaaatagaggagaaatatagaaagaaaggagaggataaagaccagatacctattgttgatttccgcaaggaatgtcgagattttgccgagggctggattgaaattcaaaaagaagagttcaagcgtttaggtgtaattggagattgggcaaacccgtataccactatgagttatgaagcagaagccgccatagtggctgaactgggaaagtttatacttaatggtggcttatatagaggagctaaacctgtgctctggtcagtcgttgaaaaaactgcactggcagaggccgaggtggagtataaagatcacacctccaatactatatttacaaaatttccaataattaaatcggcaattaaatcattagtggataactcctctatagtaatctggactactaccccttggaccattccaggtaacaggggaattgcttatagtgctaataacgaatatttgtgtctgcttataaaaaaagttgagcccggctcagaggcgatggtcaatgacaaagttgtagtggctgaatccttgctcgaagaattttgtcaaggatgccatataagcgaatacaatatagttgataaatttaatggctcacatttagaaggcacacactgtatccacccatttagcggcaagggctatgactttgaggtgcccttacttcctgcagattttgttgatatggaaactg

SEQ ID NO: 305370 - DNA, 2782 bp, Unknown
  Bacterial polypeptide expressing nucleotide sequence isolated from the Sargasso Sea
tatggaaattaaagactctattactcttccaaagactggattttctatgaaagctgacttgcctaaaaaagagccaggaattctagatgaatggcttaaaaatgacatatataaaaaattaagagaacaatccaattctaaagaaaaatttattcttcacgacggacctccttatgcaaatggtcatcttcatatgggtcatgcccttaataaaattttaaaagatataattgtaaaatatcaacaacttcttaataaaaactctatttatgtcccaggatgggattgccacggactacctattgaatggaaaatagaggaggaatacagagctaaaaagaaaaataaagacgatgtacctgtgattgaattcagaaaacagtgtagagattttgctaataagtggatatctattcaaaaaaaagaattccaaagattgggagtcattggcgattgggataacccatacacaactatgcattttcatgcagaggcacaaatagtaagagaattaggaaagtttctcaaaaatggtggtatttataaaggacacagaccagttttatggtcagttatagaaaaaacagcacttgcagatgcagaggttgaatatcatgatcataaatcaacaacaatatatgcttgttttccaatttcaaaaactgataacaataaattaaaagagcactctattgttatttggacaactactccttggacaataccaggtaatagagctctggcagttcataacgatattgaatacaaatctttaaatttaaaaattaatgatggaaacaaaaacgttattatagctagcgatttggttgagtcatttattaaagaaaataaaattgaagaatacaaagttaatttttctattaaaggtcatgaattaactaatactttttgtaaacacactttatacgactctggatataattttgaagttcctattcttcatggtgattttgtaactactgaacaaggtacgggcatagttcatatttgtccagtacatggaatggatgattttattttgggtaaacaacatggtttagaattacccatgacaataaatgaaagtggaatatattatgatcatattcctgtatttaatggccaacacatttttaaagttgatcaaaatgtttgtgatgaaataaaaaaaaacaaaaaccttatatcacaaggtattttagttcatagctatcctcattcttggagatctaaagcccccttggtatataaaaatacatcacaatggtttatctcaatggacacaaacgatttaagaacaaaagcacttaaagctattgatgaaactgattttttcccaaaacaaggacaaaaaagattaagaagtatgatacaggaccgtccagattggtgcgtgtcgagacaaagagtttggggggtgcctttaccaatatttgtcaataaaaaaacaggtgaacctctacgcgatcaaaatattattgaaaaaattgcaaagatttatgaattagagggaggcgatgcctggtttaattccgaaccctcaagatttttatcacctgaatatgacccaaatgatttcgaacaagtaaaagatgtcgttgaagtttggtttgacagtggttcaactcattcttatgtattagaggctagagaagatcttcactggccagcatcgatgtatttagagggctcagaccaacatagaggctggtttcactcctcattacttgagtcgtgcggaactagagataaagcaccttttgaaagtattttatcacatggttttgttgtggatggtaaaggtagaaaaatgtctaagtcagtcggaaacgttatttctccagatgaaatcatcaataaatacggcgcagatatattgcgtatttgggttgttgcatcagattattctgaggatttaaaaattgataataagattatcaactaccaaatagactcttacagaaaaataagaaacacactaagattccttttaggaaatctttataacttcaataaacaaaatttagttgacccagaagaaatgcctgaattagaaaggtatcttttaacgcgaatttcaagccttaatgaaaaacttaaagaattagtttcaaaacatgattaccatgcgatttacactgctttactaaatttctgcactcttgagctatcagcattttattttgatattagaaaggactccttatattgtgatgatataaaaagtataaaaagaagatcaacttcaacatgtttgcatataatatttgagtttttaacaaaatggctttcacccatagtttcatttacatgtgaagaagcatggaagtctaggagctatagtaacgaagaaagtattttattacaaaatgttaaagatgatgaatttacttataaggatatttcgcttgaaaaagtttttgaagagctaaaaagagtaagaaaaagtgttacctccgccttagagctaaaaagaaatgaaaaattaattggctcaagccttcaagccaaagtaattttatttttatctaaagatacacaaaaaataattgcagatttagatttggctgagatgtgtattgtcagcaatgttgaaacacacgatatttcaaataagtcaaaggaatctatcagtattgaagatgaggaaatatatgtagagataaaattagctgatggaaaaaaatgcgagcgatgctgggctgtattgcaagaagtatcaactagtaaaaataatttatgcaatcgatgtgataatgtttggaaaacttttcaaaaataa

SEQ ID NO: 305371 - DNA, 1552 bp, Unknown
  Bacterial polypeptide expressing nucleotide sequence isolated from the Sargasso Sea
atgactaaatcacaaataaatctaccaaaaacagctttttctatgaaagccaaccttcctactagagaaccagaaattcttgaatattggaaaaaaataaatctttacgatgaattaagaaatcaaagcaaaggaaaagaaaaatttgttttacatgatggtcctccttatgcaaacggaaatattcacatggggacagctctgaataaaatccttaaagatattattgtaaaatttcatcaaatggatggaaaagattctatttatgttccaggatgggattgtcatggcttaccaattgagtggaaaattgaagaacagtataaaaaaaataaaaaaaacaaaaacgaagttccaatagttgagtttagaaaagaatgcagaacatttgctgagaaatggattgagattcacaaaagtcaatttaaaagattaggtgttgtaggggattgggaaaactattactcaacaatgagctttaatgcagaggcccagatagttagggagcttggtaaatttttaaaagaaggaagtttatataaaggttttaaacctgtgttatggtcaacagttgaaaaaactgcgcttgcagatgctgaggtagaatatcaagatcataaatcagatacaatttacacttcgtttaaagttaaatcatctaatttaaaagatttagttggaagtgaaatagttatttggacaacaactccgtggacaatacctgctaataaggctttagcatataacgagtctcttgattatataatattagaaataaatgacgaaggtgattttaaaaatagaaaaatcgttattgcagatgctctactagaatcggttgttaaagagtgtgaactaattaattataaaaaaattcatacatttaaaggaaaagaatttaataatactatttgtagtcacccttttttaaatcttggttatgatcatgatatcccaatgcttgaagctagatttgtaacaactgaacaaggaactggaatagttcactgcgcacctagtcatggacctgatgattttaatttatgtttaaataatggtatcaaagcaattgaaactgtagatggggatgggaagtatacaaataatgtgaaattgtttgaaggcatacatatttttaaagcaaatcctgttgtaattgaaaagctaaaagaacaaaaaaatttactattcaatggtgagctagttcattcttatccacattcatggagatcaaaggcaccacttgtacatagagcaacaccacaatggtttatttctatggaaagtcataaattaagagataaagcattaaaggctattgatgaaacaactttttacccaagcaaaggtaaagaaagattaaaatcaatgatagaaacaaggcctgattggtgtgtctcaagacaaagagtttggggagttcctcttccaatttttgtgaatagaaaaacgaaggaaattttagttgatgatgaagtaatagaaaatattgcttcaatttatgaaaaagaaggatccgactgttggttttcagaccatccacaaagatttt

SEQ ID NO: 305372 - DNA, 1130 bp, Unknown
  Bacterial polypeptide expressing nucleotide sequence isolated from the Sargasso Sea
tttctatttttcgaaggtacacatatattttaaagcaaacccaatagtcattgaaaaactaaaattagaaaaaaaacttttatcaagtgggaaattaaaacactcatatcctcattcttggagatctaaagctccattagtacatagagcgactctgcaatggtttatatctatggagagtcatggattaagaaaaacagcattagatgcaataaataaaactacattttatccaagcaaagcaaaagaaagattaaaatcgatgatagaaactcgacctgattggtgtgtttctagacaaagagtctggggtgtgccattaccaatttttatatcaaaaaaagatagtaaagttctaattgatcaagatgttattgagaatattgcaaatatttatgaaaaagaaggctcagactgttggttttcagatgatccacagagatttcttggcaaaaaatataaagcatcagattttaaaaaaatgagtgatattgttgaggtttggtttgatagcggctcaacccattcgtttgttcttgaaaaaagaaaagatttaaaatggccagcatcaatgtatttagagggatctgatcaacatagaggttggttccattcatcactattagagtcgtgcggaacaaggggtagggctccatatgaaaatattttatcccatggatttgttgttgatggcaagggtttaaaaatgtctaagtcattaggaaatataatttctccagatgatattttaaagaaatatggagcagatatattaaggatttgggttacatcatcaaactatgcagaagatctaagaattgattattcaattctagagcaacatgctgaagcctacagaaaaattagaaatacttttaggtatttattaggaaatttaaatgatgagtttaaaaaaatcaatttaaatgaattgaaaatagaagagtttccagagttagagcaatatatgttaaataaaatttttaatttaaacaagaattttttgaattattataaatcgtacaattttcataatttgtataaagaattattaaatttttgtactgttgacctgtctgcattctattttgatatacgaaaagatacactttattgtgatacaaaagact

SEQ ID NO: 305373 - DNA, 724 bp, Unknown
  Bacterial polypeptide expressing nucleotide sequence isolated from the Sargasso Sea
aatgaacactaaaaatgataaaatagattttagtgaaactctatttttaccaaagacatcctttgcgatgcgtgctggcctaccagagcaagagccaaaaattctagatgactggtcaaaggataatatttataaaaaattaagggaaaaatcaaaaagtagaaaaaaattcgtattacatgatggccccccttacgccaatggtcatttacacatggggcacgccctgaataaaatactaaaagactttgttgtaagatcacaacagatgcttggaaatgatagctcttacattcctggctgggattgtcatggcttgccaattgagtggaaaatagaagagcaatatagagaacagggaaagaataaagatgatgtcgatattataaaatttagaaaagaatgtagagaatttgctgaaaaatggattgatatacaaagagaagaatttattcgcttaggaataaatggagattggtactctccctatactacaatgtcatatgaggcagagtctataattgtaagagaattttttaagtttcttgagaacgaaagtttatatcgtgggtcaaagcctgttatgtggtcaaccgttgaaaagactgcattagctgaagctgagattgaatataaagaacataaatcaacaactatctgcgtaaagttcccagtaaaagagagttcagatacaaattgtcaagatgcatccgtaattatatga

SEQ ID NO: 305374 - DNA, 1935 bp, Unknown
  Bacterial polypeptide expressing nucleotide sequence isolated from the Sargasso Sea
tatgtctgactataaagaaacactaaatctacctgataccggatttgctatgaaagcaaatttgccttccaaggagccgaaaatgattgaattttgggaagacatggatctgcgtaaggaagttgctgcggcaagagaaggtagagaaaaatttatacttcatgatggtccgccatacgctaatggggaaattcatattggacatgccgcccagaaagtccttaaagatatagttattaaatctcagacattagatggaaaatatgctccttatgtccctggttgggattgccatggcttgcctattgaattaaatgttgagaagaagaaaggcaaagcaggtcataaggtttccgtatcagaattcagagaagcatgcagagaatatgctcagtcacagatagatatacaaaagaaagatttcaagcgattgggaatcattggagactgggacgatccatatgtaactatggacttcgcttttgaggcgaacattatcaggtccttaggtaaaataattgaaaaaggacatcttcaaagaggagataagcctgttcactggtgtgttgattgtggttcggctttagctgaagctgaagtggagtatcaagacaagatatcaacttctatagattttatttttcctattgataataaaaatatatcggagattttttcttgttcctcaactaataattcttatgctgcgagttggacgactaccccatggactttacctgggaatctagctttgacaataaatgaatcatttacctatgaattaatagagatacttcatgataataaaccaataaatataattcttgctcaagatttagtcgattccaccttagataggattggtgttgataaatttacttctctaggaacttgtaaaggtaccgatcttcttggttttaatgctaaacacccatatcttgatagaaattctctaataatatcgggtgatcatgttacaactgatgcaggaacaggaatagtacataccgcacccggtcatgggctagaagattatgctgtatgcaaggaaaatggcattgatgttctaaatccagttaaaggaaatgggacttataatgaggacgtagaacattttgcagggcaatttgtcttcaaagctaatgacaacataacaaatctcctggaagaacgaggagtattattatctaaatcgtcttacgaacatagctacccccattgttggaggcataagaccccagtaatgtttagggcaacacctcaatggtttatttctatggaggaaaaagatctattacaacatgctcaagattctgtcgattctgttaactgggcaccaacatggggtcaggccagaatgagttcaatgctggaagagcgtccagattggtgtatatctagacaaaggtcttggggcgttccaattgctttgctgatacataaagaaacaggagagctccatccagaaactagaaaaattatagaaaaagtagctgatttagttgaagtggaaggcatccaagcttggcatgatatagaaattaaggatctaattgatgatcatgagtctttcgaaaaaataacagattgtctagatgtttggtttgattctggtgttactcatgcttgtgtattagatgtgaatgaagatctacagtttcctgctgatctatatttagaaggttctgatcagcaccgaggatggtttcagtcatcattacttacaagtatcgcgattaaagagcttccgccttacaaggcagtcttgactcatggctttgtagttgactctgaaggcaagaagatgtctaaatctctaggaaatgtcatttctcctcaaaaagtatgggagacgatgggtgctgatgttttaagaacatgggcggcatctactgactacactaaagaaattgttctttctgatgatattttaaa

SEQ ID NO: 305375 - DNA, 1547 bp, Unknown
  Bacterial polypeptide expressing nucleotide sequence isolated from the Sargasso Sea
aatgagcaattcagaaattacactacccaaaacttcattctcgatgaaggccaatcttccaaataaggaaccagatttaataaaatactggaaagaaatagatctatacaaaaaattaagggcaaatagtaaaggaaaagagaaatttgtcttacacgatggacccccttatgcaaatggtaatatacatatgggtaccgcgctaaataaaattttaaaagatgtaataattaaatttcatcaaatgtcaggaaaagattctgtatatgtgccgggttgggattgtcatggattaccaatcgagtggaaaattgaggaacaatataaaaaaaataaaaaaaacaaaaatgatattccgatagtagaatttagaagagagtgtagggaatttgctagtagatggattgatattcataaagatcagtttcaaaggttgggggtaattggggattgggataactattattcaacaatgacttttgatgctgaagcccaaattgtcagggagttaggaaaatttttaaaaaatggaagtctttatagaggatataaaccagtactttggtctactgtagaaaaaacagcattagctgatgctgaagttgaatataaagatcacacttcagatacaatttatgtatcatttccaataataaaaactgacttaaaagaaatagaaaagtgtaatgtaattatttggactactactccatggacaatacccgctaatagagcattggctttcaatcagagtttaaaatacttagttctagaaattaatgatgaaggagatttcaataatacaaaagttattattgctaaagatttaacagatagttttgttaaggattgtaaaattttaaaatataaaaaattaaacgaattttcaggaaatcaatttaaaaacacaatatgttctcatccatttaaggatataggatacgatcacgacattccaatgttggatgctagatttgttacaacagaacaaggtacaggaatagtacattgtgcgccaagtcatgggccagatgattttaatttatgcttaaataatggaataaaagcagtcgagacagttgatgatgatggcaagtacacaaatcatattccaaattttgaaggtttgcatatttttaaagcaaatcaaatcatcatagaaaaattaaaagaacaaaaaaaacttttatcaaatggtaagctaaatcatagttatcctcattcatggagatcaaaagcacccttggtacatagagcaacaccacaatggtttatatctatggaaagtgacagtcttagaaacaaagctttgaaagccttagatgaaactgacttttatcctgaaaaaggaaaagatagaataaaatccatgattgagactaggccagactggtgtgtttcaagacaaagagtttggggagtgcctttacctatatttttgtcaaagaaagacaaaagtgtattagtagatgatgaagtaaatgaaaatattgcaaatatttttgagtctgaagggtcagattgttggttttctgacaaccctcaaa

SEQ ID NO: 305376 - DNA, 1432 bp, Unknown
  Bacterial polypeptide expressing nucleotide sequence isolated from the Sargasso Sea
tatggactatagagataccataaatcttccttttacagagctagctatgaaagcagggcttgctaaaaaagaaccagaaattcttaaattctggaatgaaataaatctttatgatgagattcgaaaacttagaagcggtaaggagcaattcattttgcatgacgggcctccctatgcaaatggagatattcatcttggtcatgcagtcaataaagtcttaaaagacatcaccattaagtatcactcattgatagggaaagatgctccttacattccaggatgggattgccacggtttacctattgagttgaacatcgaaaagaagcatggaaaaaagagtgaaatagttcaagacaaaaataaatttattaaagcgtgtagagattatgctgatacacaagttgaaaatcagatggaggattttcaacgcttaggagttttgggtgattggaagaattcgtataagtcaatggatccagcttatgaggcagatattgtcagagcactgggtcgaattgttgcaaacggtcatctgcaaagaggggaaaaaccagttcattggtgctatgactgcggttctgcactggctgaggcagaagtcgagtatcaagataaaatttctaaatctatctatgtaaattttcctgtaaagtcggaatcattgaagtcattaggcgcctactttggtgagaccattcaagaatgtgcgtttattatttggaccaccacaccatggacaattccagctaatgttgcagtttctattggtccagaaattgaatattctctttgcgagaattctgagagatcttttgttattgcatctgatcttatgaaagcatgtgaggagatatggggttcagaaatcaaagaaatttcgagagttaaaggtagcgagttaacagatatagtcttggagcatccatacctaaagagagactccattttgattcatggtgaccatgtgacgattgaaacgggtactggttgtgtccatactgctcctgctcatggaatcgacgattattttgtatgtaaaaaatataatttagataccattcactcacttaatgcaaaagctttttttaaagatgaattctcttctattgctgggttgccggctgtaaaagctgatgagttagtcattcaagatattgatgcagctaaaaatttaattcacaccgatgattttcatcattcatatccccattgttggcgtcataagagcccattaatttttacctctacgccgcagtggtttatatccatggatcagtcaggactgataggtggagctaaagccgcagttgaccaagttgactggcatcctgaatggggaaaacaaagaattttatccatgcttgaagaccgtcctgattggtgcatctcaagacaaaggagatggggtgttccgattccattaattgttcac

SEQ ID NO: 305377 - DNA, 631 bp, Unknown
  Bacterial polypeptide expressing nucleotide sequence isolated from the Sargasso Sea
aatgactgctgaaccaattgactacaaaaatacattaaatttacctaaaactgattttccaatgagagcaggtttacctaatcgggaacctggttggttggaaagatgggaaaaaattggcatctataaaaaattgagacaaaaaacttctcgtaagccatttattttgcacgatggtccaccctatgcaaacggtaaccttcatattggtcacgctctaaataaaattttgaaggatatggtggtaagaagccaacaaatgatgggtaacgacgctagatatattccaggttgggattgccatggattaccaattgaatggaaaatagaggaaaaatatcggaaaaaagggaaaaataaggacgacgtgccattagtagattttcgccaagaatgccgaaaatttgcggatgactggatagatattcagagagaagaatttaaacggttgggtattactgggaactgggaaaacccatatcttacaatggatttcaaagccgagcgaactatcgcacaagaatttatgaagtttttaatgaacggcaccctttatcaaggttctaaaccagttatgtggtcacctgttgaaaagacagcgttagccgaggccgaagttgagtatcatgat

SEQ ID NO: 305378 - DNA, 1474 bp, Unknown
  Bacterial polypeptide expressing nucleotide sequence isolated from the Sargasso Sea
atgactattaattatagagatacattaaatctacctgaaacagatttttcaatgaaagctggtttaccaaaaaaggagcctgaaattcttgatttatgggagaaaaaaaatctttacaaaaaaattagacaaaaatacgaagatagaaaattgtttttacttcatgatgggcctccgtatgcgaatggatcaatccatcttggtcattcagtaaacaaagttttaaaagatataactatcaagaataagacacttcagggcttaaacgcaccattcattcctggttgggactgtcatggactaccgattgagttaaatgttgaaaagaagcatggtaaaaatagcgatttagttaaaaataaagaaacttttcaaaatgcctgcaaagaatatgcagaatcacaaataaataatcaattaaatgattttaaaagactaggaatattaggtgattgggacaatccatataaatcccttgattcaaattttgaggcagatgttgtaagggcattaggaaaaatctatgatgctggacacgttgaaaaaggtgaaaaaccagttcattggtgtcaggactgtggttctgctttggctgaagcagaagttgagtataaggataaaacttcaaaatctattgatgtttcatttgaagctgacaaagaatcaatatccaagttgaaagatatttttaatacaaataaaccagaatcaatttcttttgtaatttggacgaccacaccatggactatcccatcaaatgttgcggtttgtattaatgcagagttagattattcattgataaatgttgatgatacgcacgtagttattgcttctgaaatgattgatgaatgcatggaaagatggggaaaggttggcacagaaatatccaaggtacctggtaaattaatttcagatattcaactcctacatccttttttagatagaaaatcagtattacttcatggtgatcatgtcacgacagagactggaacaggatgcgtgcatactgcacctgctcacggcgttgatgatcatctaatatgtaagaaaaataatattaggccaataaaagcgatgaatagcttagggctttttaaagatgaaattgattttttgaaaggtttgcctgctgtgaaagcagatccattagttatagaaaaattaaaagaaacaaattctcttgtcagtcttgaggaatataaccattcatatcctcattgttggagacataaaactccacttatttttacctctactcctcaatggttcatttcaatggataaaaataatttactaaatgatgcaaaaaaaacaattgacactgtaagctgggaaccttcatgggggcttcaaaggattgaatccatgttagaagatagacctgactggtgtatttcaagacaaaggaactggggagttccaataaccctggttgttcataaagaaactggtgaaatcatccagatcaatcaaa

SEQ ID NO: 305379 - DNA, 1801 bp, Unknown
  Bacterial polypeptide expressing nucleotide sequence isolated from the Sargasso Sea
atgacaattaattatagagatactttaaatctgccggtgactgatttttcaatgaaggctggtttgccttgtaaagagcctgagattcttaatatgtggtcagataaagatatctataacaagattagaaaaaaatataaggataaagatttattccttcttcatgatggccctccttatgccaatggtgatatacatctcggacattcagttaataaaatcttaaaagatatcactattaagcttaaaacaatgcagggttataatgcgccatttgtaccaggctgggattgccatggacttcccatagaactaaatgttgaaaagaaacatggcaaaaatagcgaacttgttaaaaacaaagaaagttttcaaaatgcatgtaaggaatatgctgaaactcaaatagataatcagctagaagatttcaaaaggcttggagtttttggagattggaaaaattcttacaaatctttagattcaaaatttgaagccgatatcgtaaggtctttgggcgttatttttaaagaaggtcatcttgagaaaggagaaaagccagttcactggtgtcaggattgtggatcatcattagctgaggcagaggttgaatatattgataagatttcaaggtcggttgatgttgcttttaaggttgatcacgaatctttgaaaaatctccaagacactttcgatgataaaactattgttgatgtatcttttgtaatatggaccacaaccccatggacattgccttcaaatgttgctgtttgtataaatcctgatattgagtattcgttaatatctattaatgaaaaatattatgttattgctagtgaaatggtagatcaatgtatggagagatggggcactaaatgtaagaaaatatctagtgtaataggaaataaactcaacgaaatagaccttttacacccctttatcaatagaaagtcagttcttcttcatggtgaccatgtgacaactgagacgggaactggatgtgttcatacggctcctgcacatggcatggatgatcacataatttgtaaaaagaataatttaagcactattaatgcacttaacaataaagctttttttaaagatgagttagatttcataaaaggtcttccagccattaaggctgacccgctgataattgaaaaattaaaagaatgtaatgcgctcattaatgatgaagattatcaccattcatacccacattgctggaggcacaagagtcctttaatttttacatcgactcctcaatggtttatttctatgaataagaataacttaatcaaaggtgctttagatgctgtaaaggatgttaattgggagccttcttggggtcttcaaagaattgagtctatgcttgaagacagaccagattggtgtatatcaagacaaagaaattggggcgtgccaataaccttagtcgttcataaagaaactggagatattcatcctgaacaatcagaattatttgaaaaatttgctgttatgattgaagaaaatggaatatcaagttgggataaacttgaattaaaggattatatttcagatgctgatgattatgtaaaaatttctgattctttagatgtatggtttgattcgggagtaactcattttgccgtatcttcaaaaaggtttggcaaaaatgtagtttctgatttatacctagaaggttctgatcagcataggggttggtttcagtcatctttgttaaccagaattgcaatgaatggtgacgctccatacaaaacagttttaactcatggatttgttgttgatgagccagggtaga

SEQ ID NO: 305380 - DNA, 1628 bp, Unknown
  Bacterial polypeptide expressing nucleotide sequence isolated from the Sargasso Sea
tatgagtgaaaagaaagaccaaaaattaaatttaccgaagactgaaattccaatgaaggcaaatctgaatgaaagagagcctaagatgctagaagagtggtcaaaaagagacgtctatcaaaagataagaaaaaataattctggaaaagataaatttattctccacgatggcccaccatatgcaaatggaaaaatccatattggacatgcggttaataaggtcttaaaagatatagttataagatcaaaatcactagaaggttacgatgctccatatgttccgggatgggactgtcatggactgccaattgaattacaggttgaaaagaaactaggtaaaaaaagaagagagcttagccaatctgaattcagagcaatgtgcagggaatatgcaaaagaacagatagatattcaaaaagatgattttattagattgggagtctttggtgattgggaaaatagatatgcaagcttagattattcttttgagggcgaggcaataaatggattcgctagaatctatcataatgggcatgttgagaagggctctaaacctgtgcattggtgtctggaatgttcctctgctttagcagaagctgaagttgaatacatggataaaacttcaagttctattgatgttaaatttgcattcacaaaagactcagcaaaagaattaaagaaaaggcttggaaataaaactgctgatcaaattcatgtagtcatatggacaacaacaccttggacaattcctggcaatcaagcagtttgttttaaaccagatattggttacgaagttttaaaagttgatggagaattcttattagttgcttctgaattaaaagaacaatgctccgaaagatggagtgacaagaaagtgtcatccaccaaaataaaattaaaaggctcagatttggaagatctgatccttaagcaccctctctttgatagggaatctcctctttatgcagctgatcatgttacaacagagacaggcacaggttttgttcatacggctcctgctcatggtgtagatgactataatatttgttctaaagaaggcttggctatagaaaatccagtcttagcaaatggttgttataaagaagatgttgaacatttttctgggatgcatgtaaggaaagttgatccagaagttatatcaaagttaaaggaatttaacgcacttattaatcatggagaatattttcatagctatcctcattgttggagacataaaactcctcttacattcatggctactccacaatggttcttttcaatgactaaatctggtttattggatggggcaactagagcactagaagaaattaaatttattcctgagtggggtaaagaaagaatggatattatgctcaatgataggcctgattggtgcatatcaaggcaaagagactggggcataccaatacctcttttttatgacaaaaatacaggagagcctcaccctgaacaagataatattttcaatgctgtttctgaatcaataaaggataacggcatagattcttggaattcaattgatctaaaaataagtgattcagaaaattatgaaaaatctaaagatatatttgatgtatggtttgactcaaggaataactcacttttgt

SEQ ID NO: 305381 - DNA, 1171 bp, Unknown
  Bacterial polypeptide expressing nucleotide sequence isolated from the Sargasso Sea
atgaaagattataaagacactttgaatctgccaggtacgtcttttccgatgaaggcgaatctgcccaatagagaacctgaaattcttaaattttgggatgaaattgatttgtatagaaaaatcagaaaaaaaagtaagggcaagaagccatttctactccttgatggtcctccttacgccaacggaaaaattcatataggccatgctctcaataagatcttgaaagatttcatcgtcaaatcaaagactttatttggatatgatgcaccttatcttcctggctgggattgtcatggcttaccgattgagcatcaggtagaaaagaagaagggaaaggttggacccaagctgactgcaagagaatttagagattattgtcgtgaatatgcattgaggcaagttgaagagcaaaaagaagacttcattcgtctaggggttcctggagagtgggataatccttatttgactctggataaaagatatgaagcagaacagattcgtgcatttgctgaaatatacggaaacaatcatgtcacatttgggcataaaccagtgcactggtgtttagattgtcagtctgctttggctgaggcagaagtcgagtatatggataaagtttctacatcagtcgatgtgttgttcaaaatagttgacccttccgagttcattgaaagaacaaatgccaggaagatcaataatgaaaaagaattgtttattccaatttggactacaacaccatggacccttccatcaaatgaggcagtcgcgatgggtgaagatattccctacgggatttacagtctgacacttcatgaaagagatattcttgtcgttgttgccaatgaactcagagaaagtattgagaaaagatggggtgtatcaaatttagaaatgctcgaagaggtttctgctgaaaacctttcgggacttcagttacaacatccttttgatgagagaacagtcccagttcttctaggtgatcatgttaccactgagaatggtactggctctgtacatactgctcctgctcacggacatgaagattttcaaattgggaaagaaaatgatttagatctcaaatgttacgttaattcatatggtgttttcattgatgcaaaagagagctttgccaaacagcatatatttaaatctgaatcagaaatcattgaaa

SEQ ID NO: 305382 - DNA, 2731 bp, Unknown
  Bacterial polypeptide expressing nucleotide sequence isolated from the Sargasso Sea
aatgagcaaatctgatataaatctacctaaaacagctttctcaatgaaggcgaacctgccaactagagaaccagaaattttaaattattggcaaaaaataaacctttatgatgaattaagaaagtcaagcaaaggtaaagaaaaatttgtcttacatgatggccctccatatgcaaacggcaatattcatatggggacagcattaaataaaattttaaaagacataattgtaaaatttcatcaaatggatggtaaagactcaatttatgtacctggatgggattgtcatggtttgccgatcgaatggaaaatagaagaggaatataaaaaaaataagaaaaataaaaatgatgtccctatagttgagtttagaaaagagtgtagatcttttgctgaaaaatggatcgaaattcacaaaggccaattcaaaagattgggtgtagttggtgattgggaaaattattattctacaatgagttttgatgcagaggctcaaatagtaagagaacttggaaaatttcttaaagaaggaagtttatacagaggatataaaccagttttatggtcaactgttgaaaaaactgctcttgctgatgcagaagtagaataccaagaccataagtcagatactatatatacatcgttttcagttaggtcatctaaaattaaagaattagaaaaaagtgaaattataatttggacaactacaccatggacaattcctgctaataaagcattagcttataatgaggcattagattatgttttgttgcaagttaatgatgaaggagattttcaaaacagaaaaatagttgttgcacaagctttacttgaatcggtcataaaagaatgtggaattaaaaattataatgagattaaaaagtttaagggaaaagagtttaaagatactatttgcaaccatccttttttaaacttaggttatgaaactgaaatcccaatgttagaagcaagatttgtgacgacagagcagggtacaggaatagttcattgtgcgccaagtcatgggccagatgattttaatttatgtttgaataatggaataaaagcaatagagacagttgatggtgatgggaaatatacaaataatgtaaaattatttgaaggtatccatatttttaaagctaacccaatagtaattgaaaaacttaaagagcaaaaaaatttattattaaatggtgaactagttcattcttatcctcattcttggagatcaaaagcaccattggttcatagagcaacacctcaatggtttatttctatggaaagtcataaattaagagacaaagctttaaaagccattgatgatacaatattttatccaagcaagggaaaagaaagattaaaatctatgatcgaaactagacctgattggtgtgtttctagacaaagggtatggggtgtgcctctacctatttttgttaataaagaaactaaagaaattttagttgatgatgaagttaataaaaacattgcatcaatttatgaaaaagagggatctgattgttggttttcagacgatccgcagagatttttaggtgaaaagtataaagcccaagattatgataaattaagtgatatcgtggaagtttggtttgatagtggctcaactcactcatttgtattagagaaaagaaatgaccttaaatggccagcttcaatgtatttagaaggttcagatcaacatagagggtggtttcattcatcattattagagtcatgtggaactaggggtagagctccttttgactcaattttatctcacggtttcgttgtagatggaaaaggtttaaaaatgtctaaatcattgggtaatgtgattgctccagaagatattttaaaaaaatacggagcagatattttaagaatttgggtagcatcatcaaattattcagaggatttaagaatagattattcaattttagatcaacacgcagattcctataggaagattagaaatacatttagatatttattaggaaatcttaatgacaattttgagataattgattttgaaaaaatagaattaaataatttacctgatttagagcagtacatgctacacaaattgtattctttaaataataatttcaaaaaatattttgagaattatgattttcacaatttgtacaaagaattattaaatttttgcactgtagatttgtcagctttttattttgatataagaaaagacactttatactgtgactctttaaatgaccctaagcgaaaatcaactatcttattgttgaatataattttaaattctttaattagatggtttgctccaattttgtctttcacaactgaagaaatttatcaattaatatttaaaaaccagaaaagtattcatttagaaaactttttaacttttccaaaaaattttcataatgaaaaattaaatcagaaatgggttgagctaattaaaattagaaatttatgtaatgtaagtatagaggaaaaaagagcagcaaaagtgataggatcaagtttagaagctgagattaaaattaatttagataaaaatttagaaagtatcacaaaagatattgatttttcggagctttgtataacttctaaagctgaagttaattatgaaaataacattgacgcaaatgttcttacagaaaaagcgaaaggaacgaaatgcccaatgtgttggaaaataaacgaaaaaggatgtaccagatctaattgtcctcaaaattcttaa

SEQ ID NO: 305383 - DNA, 1165 bp, Unknown
  Bacterial polypeptide expressing nucleotide sequence isolated from the Sargasso Sea
atgactgctgaaccaatagactacaaaaatacattaaatttacccaaaactgattttccaatgagagcaggtttacctaatcgggaaccttattggttggagagatgggaaaaaattggcatctataaaaaattgagacaaaaaacctctcgtaagccttttattttgcacgatggtccaccctatgcaaacggcaaccttcatattggtcacgctctaaataaaattttgaaggatatggtggtaagaagccaacaaatgatgggtagtgacgctagatatattccaggttgggattgccatggattaccaattgaatggaaaattgaggaaaaatatcgaaaaaaaggaaaaaataaagacgacgttccggtagtagattttcgccaagaatgccgaaaatttgcggatggctggatagatattcagagagaagaatttaaacggttaggtattactggcaactgggaaaatccatatcttacaatggatttcaaagccgagggaactatcgcaaaagaatttatgaaatttttaatgaacgggaccctttatcaaggttctaaaccagttatgtggtcacctgttgaaaagacagctttggccgaggctgaagttgagtatcatgataaagaaagttttactatctgggtcaaattcgaagtaattgataacgaagataaagaattgaatggctctcaagttgtaatatggactactacgccttggaccattccatcaaacaaagcagtcgtttttggtcctgacattaagtatggcttgtacgaagtaatttctcgaccagatgaatgttgggcaaatattggtgatcgttacatattggccgataatttagctgatggagttatggaaaaggcaagactagacaacaccatgtatcgtcggattagcgatgttacaacagagaaattatcaacaattagcttaaaacaccctttattttcagcgaaagacgctaatggtgagtgggatgaaattagagactttagaggtgcagatttcgtaactgacactgaaggcacaggatttgtgcactgtgcaccatctcatggaatggaagagtatgaactctatcgcgaattgggaatgttggctcaggtcatcacatacaacgtaaaaagacgatggcagtttcagagatgat

SEQ ID NO: 305384 - DNA, 1591 bp, Unknown
  Bacterial polypeptide expressing nucleotide sequence isolated from the Sargasso Sea
cgacgttggggtgtcgaaggtgattgggaaaatccataccttacaatgtcaaaccaagctgaagcacaaattgtaagagagctgggtaaatttttaattgatgaaagtttatacaaaggggctaagcctgttctgtggtcggtagttgaaaaaacagctttagcagatgcagaggtagaatatgaagaccatacttctaatactatcttcgttaaatttctaatttctaattcagatgataaagatttaattggttcaaatatagttatatggacgaccactccatggacaatacctggtaatagagctttagcttatggaagtgaattagaatattctattattaaagtagaggaagttgaaaattcaagtttagcaaaaataaatgataaattaatttttgcaaaagaactattagaaaacgttactaaagaaattggtattataaaatactcttctgtaaaaactttcaaaggttcaaatctttcatcttgtaaatgtgatcatccttttaaagagttaggatataattttactgttaaaccttttcatggtgaatttgttaacttagagcaaggaactggcatagtacatatagcccctggtcatggggacgatgattatgttcttggaatagaaaataatgtagatataatccaaactgtagaggatgatggtaaatataatcatcatgctgttggttttgaaggagagcatgtttataaagttgatcaaaaaatagctgacaaactaaaagaattttcaaaacttttatttcaaggaactctaagacatagctacccacattcatggagatcaaaagctcctttaatttatagaaatacacctcaatggtttatttcaatggaaaaaaaagatttaagaaaaattgccttaaaatcaattgatgaaacaattttctatccacctcaaggacaaacaagactaagatcgatgattgagacaagacctgactggtgtgtatctaggcaaagagtttggggtgtgccattacctttatttattaataaaaaaactggacaaccactaagagatgaaaaaattataaatcgaatagcagaaatatatgaaaaagaaggtagtaatacttggtttacagaggatcctcaaagatttttgggaacaaaatattcaaaagatgaatatgaacaagttaaagatgttgttgaagtatggtttgatagtggctctacacatgcattttgtctcgaaaagagatcagatttaaaatggccagcctcaatgtatttagaaggaagtgatcagcatagaggttggtttcattcttctcttcttgaatcttcaggcacaagaggtcaagcaccttatgaaagtgtattaactcatggttttgttgtagatggaaaaggtagaaaaatgtcaaaatctttaggtaatgttatttcaccagatgatattttaaaaaaatatggagtagacatattaagactatgggttgttgcttctgattattatgatgatttaaaacttgataatgctattctacagtctcaagcagagtcttatagaagaattcgaaatacctttcgttttttaattggtaatctaa

SEQ ID NO: 305385 - DNA, 2839 bp, Unknown
  Bacterial polypeptide expressing nucleotide sequence isolated from the Sargasso Sea
atgagcaacaagaaagccgattcgaaaccgcaggccaagtatccggtcaacctgctcgacacgccgttcccgatgcgcggcgacctgcccaagcgcgagccgcagtgggtcaaggaatgggaagagcgcggcatctacgagaagatccgcgcggccagcgccggccgtccgaagttcatcctgcacgacggcccgccgtatgcgaacggcgacatccacctcggccacgccgtcaacaagatcctgaaggacatcgtcgtcaagtcgcgcaacatggccggcttcgacgcgccgtacgtgccgggctgggattgccacgggatgccgatcgagatccagatcgagaagcagttcggcaagtcgctgccggcggccgaagtgatgagcaaggcgcgcacgtacgcgaccgagcagatcgagaagcagaaggtcggcttcaagcgtctgggcgtgctcggcgactgggccaacccgtacaagacgatgaacttcgtcaacgaggcggaagagatccgcgcgctcggcaagatcatcgagaagggctacgtgtatcgcgggctgaagccggtgaactggtgcttcgactgcggctcggcgctcgccgaagcggaagtcgagtacaaggaccgcaccgatccgacgatcgacgtgatgtttgcgttcgcggaaccggaaaagaccgcgcaggcgttcggcctgccggcgctgccgcgcgccgaaggcggcatcgtgatctggaccaccacgccgtggacgatccccgcgaaccaggcgctgaacctccatccggaaatcgtctacgcgctggtcgacaccgagcgcgggctgctgatcatcgcggaagagcgcgtcgaagcctgcatgaccgacttcaagctgaccggccgcgtcgttgcgaccgcgccgggcgtgaagctcgcgggcctgcgcttccatcacccgctcgcgtcggctcaccccggctacaagcgcaccgcgcccgtgtacctcggcgactacgtgacgaccgacaccggtaccggcgtcgtgcactcgtcgcccgcgtacggtatcgaggacttcttgtcctgcaaggcgcacgggatgaccgactccgacttcatcaacccggtgatgggcgacggccgctatatcgaatcgctgccgctgttcggcggcctgtcgatctgggacgcgaacccgaagatcgtcgaggcgctgaatgcagccggctcgctgctgcgcagcgagaagtacacgcacagctacatgcactgctggcgccacaagacgccgatcatctaccgcgccacgtcgcagtggttcgccgggatggacgtgacgccgcgcgacggcggcaagacgctgcgcgaaacggcgctcgaaggcgtcgacgcgaccgcgttctacccgtcgtggggcaagcagcgcctgttcagcatgatcgcgaaccgtcctgactggacgctgtcgcgccagcgccagtggggcgtgccgatggcgttcttcgtgcacaaggaaaccggcgagctgcatccgcgcacgctcgaactgctcgaggaagtcgcgaagcgcgtcgagcagtcgggcatcgaggcgtggcagacgctcgacccgcgcgagctgatcggcgacgacgcgaacctgtacgagaagaaccgcgacacgctcgacgtgtggttcgattcgggcacgacgcactggcacgtgctgcgcggctcgcacaaggatcagctgcagttcccggccgacctctacctcgaaggctcggaccagcaccgcggctggttccactcgtcgctgctcaccgcgtcgatgatcgacggccgcgcaccgtacaagggcctgctcacgcacggcttcacggtcgacggcgaaggccgcaagatgagcaagtcgctcggcaacggcatcgacccgcatgaagtcgcgaaccgcctcggcgcggaaatcatccgcctgtggatcgcgtcgaccgactattcgggcgagctcgcgatctccgaggaaatcctgaagcgcgtgacggaaggctatcgccgcatccgcaacacgctgcgcttcctgctcgcgaacctgtcggacttcgacttcgcgcagcatgcggtgcccgtcgacgaatggctcgagatcgaccgttatgcggtcgcgttctcgcagcaactgcagacggagctgctcggccactacgagaagtacgaattccacccggtcgtcgcgaagctgcagacgtactgctcggaagatctcggcggcttctacctcgacgtgctgaaggaccgcctgtacacgagcgcggccgattcgctcgcacgccgctccgcgcagacggcgctgtaccacctgacgcacggcctgctgcgcgtgctcgcaccgttcctgtcgttcacggcggaagaagcgtggaaggtgttccagccggccagcgacacgatcttcacggaaacctactacgcgtatccggaagtcgccggctccgccgcgctgatcgagaagtgggcactgctgcgcgatgtgcgcggcaacgtgacgaaggcgctcgaggaagcccgcaccgcgaaccgcatcggttcgtcgctgcaggccgaagtcgccgtgcacgcgagcggcgcacgctacgacgcgctcacgagcctcggcgaggatctcaagttcgtgctgatcacgtcggctgcgacggtcgtcaaggtcgacgacgaagcgcaggaaagcgtcgacgtggccgcgtcgaagtaccagaagtgcgagcgctgctggcactaccgtgaagatgtcggcgcgcatgccgatcatccgacgctgtgcggccgctgcttctccaacctgttcgaaaacggcgaaatccggagcgctgcttaac

SEQ ID NO: 305386 - DNA, 2449 bp, Unknown
  Bacterial polypeptide expressing nucleotide sequence isolated from the Sargasso Sea
aatgagtaaagaatatagggatactttaaatctcccccaaacagatttatcaatgaaagctggcctaccaaaaaaagagccagaaattcttgcattttgggactctataaacctttatcacaaaattagagagcaaaataatggtaaagagcaattcattcttcatgatgggcctccttatgccaatggagacattcatttaggtcatgctgtaaataaaacccttaaagatattactataaagtttcagagcatgcttggaaaagacgctccatatgtaccaggctgggattgtcatggtcttccaattgaattaaatgttgaaaagaaacatgggaagacaagcgatcttgttaggaataaacaatcatttatcaaagcatgcagagaatatgctcaatctcaagttaatcaacaaaaaaaagattttattcgtttgggtgttcttggagactgggagaatccttatctatcattaaataaatctttcgaagcagatactgttagagcgcttggaagaattattgcaaatggtcatcttgaaaaaggagagaaacctgttcatttttgtatggattgtggatcagctttagctgaggctgaagttgaatacaaagataaaaaatcccattcgattgacgttaaatttaaagtaatacctcagtcaattgaatcactttgtaattcattcaaaattaataatatcaaagacgcttacttcgttatatggactactacaccctggacaatcccatctaatgtagctgtgtgtattaatgagaatattgattacattcttgcaaaaagctcaaatgaacattttattattgcaaaagacttgctggatgcttgttcagaacgctgggatttagatttggaagttcttgcatcagtccaaggaaaagatatagaaaatatttcaatggaacaccctttatatgatagggaatcaatattacttcatgctgatcatgtaaccactgagagtggaacaggatgcgttcatacagctcctgcgcatggactagatgattactttatctgcattaagaatggattacagtcaataaaggctttggatcatcgagggctttttaaagaagaatatgggcaattaagcggactaagcacaaaaaagggagatcctgttgtaatagagttattaaatgaaaaaaaagccttgctggcgcacaaacaatacgatcattcatatcctcattgttggagacataagacaccagtaatttttatgtcaacacctcagtggtttatttcaatgaaaaaatctggtttgattgatggcgcagtaaatgcggttgccaatgtagactgggaaccaggttggggtgaagaaagaatacttgggatgcttgaagatcgtcctgattggtgtatttcaagacagagaaattggggtgttcctatcccattaattattcataatgaaacgggagaaatacatccaaaacaaaatcaactttttaatccaattgcagaagtaattgagcaagagggcattgagggctgggataatttaaatctaaaagaattaattgatgatcatgaatcttattctaaagttcatgacacattagatgtttggtttgattccggcgttacacacatgagtgttttagataggctttatggttcaaatattgtcgcagatttgtatttggaaggatcagatcaacatagggggtggtttcaatcatcacttttaacaggaattgcctcgaagggaatggctccatatcgatcagtattaacgcacggctttgttgttgatgaagagggaaaaaaacagtcaaaatctctgggtaatacaatatctcctcaaaaaatttgggatacattaggagccgatattcttcggctgtggattgcctctactgattttagaagtgaaatggttgcttctgacgaaatatttaagagagtatctgatcaatatagaagaattagaaatacctttagatttttattaggaaacataagtgactttgatgcaaagattgattcagtagagctcgataatttattagagctcgataaatggattttgtcagaactttcttttttgcaagaagatcttattgggctatataaatcttattcttatcatcaagtaattcagcgcattcacaatttttgcgttaatcagttagggggaatctatcttgatgtcattaaagatagacaatacacaactcaaaaagattcaaaaataagacgttctgctcagacctgcatgagtattatcatagagcaactagttgtcttagtttcaccagttctttcatttacggcagaagaaatttggcaaggtaatgattttctaaaagctaacgctgaatcagtctttttggcgactttgagaagtctagatgattttgagagtgaactatctaaagaaaattggtctagattaattgagataaaagaagca

SEQ ID NO: 305387 - DNA, 2764 bp, Unknown
  Bacterial polypeptide expressing nucleotide sequence isolated from the Sargasso Sea
tatggattacaaagaaactgtttttttgcccaaaactgaatttcctatgaaggcaggattgccaagaaaagaacctgaaattctaaaaatttgggaagaaattaatatttaccaaaaactaagagaacaaagaaaaggttctgaaaagtatatactccacgatggccctccatatgctaatggtaatttacatattggaacagctttaaataaaattttaaaagatattataaacagatttcaatcgatgcttggtaaagatgctaattatgttccaggttgggattgtcacggattacctattgaatggaaaattgaagagcagtataggaagaaaggaaaggataaagatactattccaattgttgaatttagaaaagaatgcagagattttgcaaaaaaatggatggatatacaatcccaagaatttcaaagattaggtgtttgcggcaactttaaaaacccctatacaactatgacatttgatgctgaagcatcaattgcgaatgaaatgggtaaatttttattaaatggcggcttataccgtgggtcaaaacctgtcatgtggtccgtggtagagaaaacagctttagctgaagctgaaattgaatatgaggatcataaatcaactactatttatgcaaagtttgaagttaaaaaaactaatcttcaaaatgttgatggagcatatataattatttggactaccacaccatggacaatgccaggtaatagagccgtagccttttctaaagagattaattattcattagttcggatcaagaaaattgctgatgacagcctagcaaaaaataatgatttaataataattgctaaagatttggtggaagatgttgctaagaattgtaaaattttagaatgggaggaagtttcgagcattttgggtcataagtttgatgaaactatactttcgcatccattaaataattatggatatagtcatgacgttaaaatgcttccagctgattttgtaacagttgagcaaggaacaggttttgttcatattgcaccaggtcatggagaagacgactattttttaggaaaaaaatttaatattgaagttccagaaaccttagctgggaatggaaaactattagatcaccttccattatttggtgggatgcatgtattaagagataatccaaaaatagctgatataatgtcggaaaaaaactcattaattggaagaggggaattaattcattcgtatccccattcatggcgttccaaagctcctttagtttttagaaatacaccacaatggtttatttctatgacaacaaacaatttaaaagaaacggcacttaacgagattgaaaaaacacaattttaccctgaagcagggaagcaaagactatactctatgattgaaaatagacctgactggtgtcttagtagacaaagagcatgggggattccaatcccagtttttgtcaacaaaaaaacaggtgaacctttaagagataaaattgttatagacaggattgtttcttcttttaaaaaagggggatcagatgcctggtttgagatcccagcatcaaattatttggaacctgaatatgatgctaatgattttgaacaaattcaagatattgcagacgtttggtttgactctggctcaacccatgcttttgtcttggaggatagagatgatttaaagagtccagcaaacctctatcttgagggttctgatcagcaccgtggatggtttcattcatcattattagagtcagttggttcaagaggagtggcaccttttgagggaattctaacacacggtttcgttttggatgataaaggacgtaagatgtctaagtcacttgggaatactgtaaaccctcaagatattttgagagattatggagctgatattttaagattatgggttgctgggtccgactattatgaagacctgaggattggtcctgaaattattaaacatcatactgatcactacagaagattgagaaacacactaagatatttacttggcagtttgaatggttttcaagaaaatgagaaaattgattattcagacatgcctcaactagaaaaatggcttttacatagagtgaacgaagtaaataattcagtgagagaaaaaattgaaagttataattttcatcctatatacacagaaatccataatttttgcactattgaattatcttcgttttattttgagattaggaaagatcttttatattgtggagatccaaatagtctcgaaagacgtggatgcagaactgctttagatattttatttaatcacttaacagcatggctagcaccaatattgtgctttacagctgaagaagcatggcaatgttatataaacaacaaagaaaactctatacatttaaaaactataccaatctcagtgaataaatggaatgatgaagctcttaatatcaaatggaaaagaataagatttataagaagtttagttttggctgaaattgaagaagcaagaaacaataatgtgattaaatctagtttacaggcaaaagtagaaatcaaattatctaaagaagataaagatttatttgaaaatttaattgctgcggatatttttattacatctgaggtaagttttagtattgaaaaaattgaaactcctaaaatcacaatagaaaatgcagatggaaacaaatgttccagatgttggaaaattcttccagaagtaaaaccagagggtttgtgcaacagatgtgaagatgttgttaaaatatattgtagctaa

SEQ ID NO: 305388 - DNA, 1180 bp, Unknown
  Bacterial polypeptide expressing nucleotide sequence isolated from the Sargasso Sea
atgaaagattataaggacactttgaatctgccaggtacgtctttttcgatgaaggcgaatctgcccaatagagaacctgaaattcttaaattttgggatgaaattgatttgtatagaaaaatcagaaaaaaaagtaagggcaagaaaccatttctactccttgatggccctccttatgccaacggaaaaattcatataggccatgctctcaataagatcttgaaagatttcatcgtcaaatcaaaaactttatttgggtatgatgcaccttatcttcctggatgggattgtcatggcttacctattgagcatcaggtagaaaagaagaaagggaaggttggacccaagctgactgcaagagaatttagagattattgccgagaatatgcattgagacaagttgaagaacaaaaagaagacttcattcgtctaggtgttcctggagagtgggacaatccatatatgactctggataaaagatatgaagcagagcagattcgtgcatttgctgaaatatatggaaacaatcatgtcacatttggacataagccagtgcactggtgtttagattgtcagtctgctttggctgaggcagaagtcgagtatatggataaagtttctacatcagtcgatgtattattcaaaatagttgatacttctgaatttattaaaagaacaaatgcaatcaagatcaataatgaaaaagaattgtttattccaatctggacaacaacaccatggacacttccatcgaacgaggcagtcgcaatgggtgaagatatttcctatggcatttatatattgacacttcatgagagagatattctagttattgttgccaatgaacttagagaaagcattgagaaaagatggggagttgcaaacttagaaatgctcgaagaagtttctgctgaaaacctctcaggcctccagttacagcatccttttgatgagagaacaatcccagttcttctgggtgatcatgttactactgagaatggtactggctcggttcacactgctcctgctcacggacaagaggattttcaacttggtaaagaaaatgatttagatctcaactgttacgtcaatacatacggtgttttcactgatgcaaaagagagctttgccaaacagcatatatttaaatctgaatcagattttattgaaagattagata

SEQ ID NO: 305389 - DNA, 1789 bp, Unknown
  Bacterial polypeptide expressing nucleotide sequence isolated from the Sargasso Sea
aatgagcaaaagcaatattaatctacccaaaactgctttttcaatgaaagcaaatttacaaaataaagaacccggaataattgattactgggataaaattgatttatataaaaaattaagatcttctagcaaaggaaaaacaaaatttgttcttcatgatggtcccccatatgcaaatggtgacatacacatgggaacagcgcttaataaaatccttaaagatgtaatagtaaaatttcatcaaatgaaaggagaagattcagtttatgtaccaggttgggattgccatggtttgccgattgaatggaaaattgaggaacaatataaaaaaaataaaaaaaataaaaatgaagtcccaataaatgaattcagaaaagaatgtagagattttgcaaagaaatggattgaggtacataaaaagcaatttaaaagacttggagtagtaggtgactgggaaaattattactctacaatgagttttgatgctgaagcccaaatagttagagagcttggtaaatttttaaaagaaggaagtctttacagaggttacaaacctgtcctttggtctacagtagaaaagacagcattggcagatgctgaagttgaatatatggatcacaagtctgatacaatttacgctgcatttaatattaaaaaagcaaaaaatgaaaaacttttgaatagccaaattataatttggacaacaaccccatggacaataccagccaatagagctttggcttacaatgaaaatttaaaatatgcagttattaaaatagaagatcaatcagattttaaagataaacaaattgtagtagcagaagatttgctaaaatctttagtagaggattgtaatatcaaaaagtttacaaaagttttaagcttttcaggaaaagaatttcaaggaacaatgtgtagccatccattttcaaaaattggatttgactatgaaattccaatgttaagtgcaaattttgttacgacagaacaaggttcgggtattgttcattgtgcacctagccatggtccagatgattttaatttgtgtttaaaaaataatataaaagcagaagaaacagtggatgatgatgggaaatacacaaaacatgttccaacttttgaaggtatacatatttttaaggcaaacaaaatagttatagaaaaactaaaagaacaaaaaaatttattatctagtggggaattaattcattcttatcctcattcttggcgttcaaaagcacccttggtgcatagagcaacaccccaatggtttatttcgatggaaagtcatggtttgagaaagaaagctttaaaatctatagatgaaactaatttttatccaaataaaggaaaagaaagactaaggtcgatgattgaactaaggcctgattggtgtgtttccagacaaagagtatggggagttcctattcctgtttttatgtcaaaaaaatcaaatgaagttttagttgacgatgaagttactgaaaatattgcaaatatatttgagaaagagggggctgactgttggtttgaaggagatgctcaaagatttttaggcgaaaaatataaaattgaggattatgaaaaaatgactgatattgttgaagtttggtttgatagcggctctacgcatgcctatgttcttgaaaaaagagaagatttaaaatggcctgcttctatgtaccttgaaggttcagatccacacagaggctggtttcactcgtcattactagagtcgtgtggaacaaggggtagggctccgtttgaatctataattgtccacgggatt

SEQ ID NO: 305390 - DNA, 1938 bp, Unknown
  Bacterial polypeptide expressing nucleotide sequence isolated from the Sargasso Sea
tatgagtgaaaagaaagatcaaaaattaaatttaccgaagactgaaattccaatgaaggcaaatctcaatgaaagagagcctaagatgctagaagagtggtcaaaaagagacgtctatcaaaagataagaaaaaataattctggaaaagaaaaatttattctccacgatggcccaccatatgcaaatggaaaaatccatattggacatgcggttaataaggttttgaaagatgtagttataagatcaaaatcactagaaggttatgatgctccatatgttccagggtgggattgtcatggattgccaattgagttgcaggttgaaaagaaattaggcaaaaaaagaagagagcttagccaatctgaattcagaacaatgtgcagggaatatgcaaaagaacagatagatatccaaaaagatgattttattagattaggagtctttggcgattgggaaaataggtatgcaagcttagattactcttttgaaggtgaggcaataaatggattcgctagaatctatcataatgggcatgttgaaaagggctctaagcctgtgcattggtgtctagagtgttcctctgctttagcagaagctgaagtcgaatacatggataaaacttcaagttctattgatgttaaatttgcattcacaaaagactcagcaaaagaattaaagaaaagacttggaaataaaaccgatgatgaaattcatgtagtcatatggacaacaacaccttggacaattcctggcaatcaggcagtttgttttaaaccagatattggctacgaagttttaaaagttgatggagaatttttattagttgcctctgaattaaaagaacaatgctccgaaaggtggagtgataagaaagtatcatccaccaaaataaaattaaaaggctcagatttagaagatctggtccttaagcaccctctctttgatagggaatctcctctttatgcagctgatcatgttacaacagagacaggcacaggttttgttcatacggctcctgctcatggtgtagatgactataatatttgttctaaagaaggcttggctatagaaaatccagtcttagcaaatggttgttataaagaagatgttgaacatttttctgggatgcatgtaaggaaagttgatccagaagttatatcaaagttaaaggaatttaacgcacttattaatcatggagaatattttcatagctatcctcattgttggagacataaaactcctcttacattcatggctactccacaatggttcttttcaatgactaaatctggtttattggatggggcaactagagcactagaagaaattaaatttattcctgagtggggtaaagaaagaatggatattatgctcaatgataggcctgattggtgcatatcaaggcaaagagactggggcataccaatacctcttttttatgacaaaaatacaggagagcctcaccctgaacaagataatattttcaatgctgtttctgaatcaataaaggataacggcatagattcttggaattcaattgatctaaaaataagtgattcagaaaattatgaaaaatctaaagatatatttgatgtatggtttgactcaggaataactcacttttgtgttgtagatgaattgtatggatcaaatactcaatcagacctttatttggaaggtagtgatcagcacagaggctggtttcagtcatctcttttaacttccatcgccatgaaaggcatagcaccttataaatcagtcttaacacatggttttgttgtggatgaagaaggtaagaaaatgtctaaatcaattggcaatgttattactccacaagaagtaatagatcagtctggagctgacattcttagattctggattgcttccacagactttagaggagaaatggccttttctaaagacatacttaatagatc

SEQ ID NO: 305391 - DNA, 2848 bp, Unknown
  Bacterial polypeptide expressing nucleotide sequence isolated from the Sargasso Sea
aatgtcagataaaaaaaatactaaggattatcgagatactcttcttttaccaaagacagaccttccaatgaaagctaaattatctgaaaatgaacctatacttttagagaattgggataaaattgatacatatacctctatcagaaaatcttctcaaggtaaggaaaagtttattctccacgatggacccccttatgcaaatggtaatgtgcatatgggcacagcattaaataaaatccttaaagatgtaattgttaaatctaaacaaatggcaggttttgatgcaatttatagaccaggatgggactgtcatggtcttcctatcgaatggaaaattgaagaacagtatagagagcagggaaagtcaaaagaagaagtgccaataaatgaattcagaagtgagtgcagattatttgcaaagaaatggattaaagttcaaaaagaagaatttaaaagattaggtgtttttggcgattgggaaaacccttacacaacaatggaatttgaatccgaagctattatcgttagagaatttcataaatttctaatgaatgatgatttgtattgtggatctaagcctgttatgtggtcagttatagaaaaaactgcgttagctgaggctgaagtagagtataaagagcatgtatcgccaacaatctgggttaaatttcctttaacttcaaaagaaaaaccatatgacgagtctagtattcttatttggacaactactccatggacaattcctgcaaatagagcaattgccttttcatcgaagtatgaatatggactttatgaggttatagaaatagaagaaggcagtttagcaaaaattggggaaaaaataatcattaataactcactcaaggaaaacctagaaaacgcatcaaaaacaaaaataaatcttattcaaaatgttgatgagattgaaaaattagtttgtcaacatccttttaattctcttggctatgattttgatattcctcttctagagggtgaatttgttactgatgaaacgggaacaggttttgtgcatattgctcctagccatggtcaggatgattatgatttagcatctaaaaatggaattgaggcccctttcatgattgatgatgaaggtgtttatttaccaagtgtaaaaatctttgctggaaagaaagtatatgatgatgatggttcttacggtgatggcaatggtgcagttattaaagaattaattaattgcaatgccttgtttgcaaaaggcaaactccgtcatcaatatcctcatagttggagatctaaagcgcctttattatttagaaatacccctcagtggtttatttctatggaaaaaaataatcttagaaataaatctttatctgagattgagaatgtcgaatggatacctaagagaggaaaaaatagaattaaatccatggtagataacagaccagattgggttgtatctcgtcaaagggcatggggagtacctttagcaatctttttaaacaaaaaaacaggggaaatccttaaagataaagaaataaatgaaaaaatatttaataattttaaagaaaatggttcagactcttggtttgagttatcttcagaagaaattttgggtgaaaaatataattctgatgaatgggaaaaaattgatgatatcttagatgtttggtttgactcaggatctacacaagcttttgtattagagggaaatcaaggaataggtattcctgcagatttatatcttgagggatcagatcaacatcgcggttggttccagtcttcgttacttgttggttgtggaacaagaggtaaagctccctttaaaaaggttttaactcatggatttgtagttgataaagatggaaaaaaagaatctaaatcacttggaaatgttacaaaacctgaagatttgattaaacaatatggtgctgatgttatcagattgtgggtagtttcttccgactttacagacgatctaagagttggccaggacatcatgaaagcaaatgtagagtcttatagaaaaattagaaatacttttcgttttttactcggaaaccttgataacttttctgaagatgaaattgtggattataaagatatgccagagctagaaaggtatattcttcataagctttgcttaatagataatgaagttagagagtcttataaaaattttgatttaaagtcagtatttcaaatattattaaatttttcaaaccttgatctttcttcattttattttgacataagaaaagattgcttatattgcgacagtccaaaaagcaatataagaaaatcaactaggactgttcttgatttactctttgattatttggttaggtggtttgctccaattttatgttttactgctgaagaagtcagaaaatctagatttcctgatttaaataattctattcatgaaatgcaatttttagatgttaaaaatgaatggaataattcagaattatttgaaaagtgggagagcattagatcaataagaaaggtagttactggagcaattgagcttgaaagaaaagaaaaaagaattggctcaagtcttgaagcaaaaccaatactttttatttcagatgataattatgttggcgcattaaaagatattgatttacctgagatatttattacctctcaagcagagatgagaaatgaaaaaggtcccgaaaatgcatttactttggatgaaattgatgatgttgctgtgatatgtgatattgctgagggtaacaaatgcagtagatcttggaaaattttaccagaagtagggacggataaggaatacccagacctaagtcttcgtgatgcagaagtaatgagagaaattaatgataaagggaattaa

SEQ ID NO: 305392 - DNA, 1273 bp, Unknown
  Bacterial polypeptide expressing nucleotide sequence isolated from the Sargasso Sea
aatgacaattaattatagagatacattaaatctgccggttactgatttctcaatgaaagcaggattaccaagaaaagaaccagaaatattggatttgtggtcaagttcagatttatacggaaagataagaaaaaaatatgaggataaagaattatttcttttacatgacggacctccatatgcaaatggtgacatacatcttggacattcagttaataaaatcttaaaagatattactatcaagcataaaacaatgcagggttttaatgcaccatttgttccaggttgggattgtcatggtcttcccattgagctgaatgttgaaaagaaacatggaaaaaatagtgagcttgttaaggataaagagagcttccaaaaagcatgtaaagaatatgctgagagccaaataaaaaaacaattagttgattttaaaagactaggcgtgctaggtgattgggaaaattcctataaatcattagatccaaaatttgaagcagatatcgtcagatcgcttggcattatttacaatgagggatatctagaaaagggtgaaaaacctgtccattggtgccaagaaagtggatcatctttagcagaggctgaagttgaatatattgataaaacatcaaaagcaattgatgttgctttcagagttgaagattcttctttagacactgtaaaaggcttatttaatagcgacgagccagatgaaatatcatttattatatggacaacaactccatggacaataccctcaaatgtagctgtatgtatcaatcctaagtataagtattcattaattaaaatgaatgaaaaattttatgtattagcttttgagatgatagaacaatgcaccaaacgatggaagcaaaaattcgatcttatatcaacaattaagggtgaaaaattaattgatattaatcttattcatccttttctagatagaaaatcagttcttctccatgcagatcacgttacaactgaagcaggaacaggttgtgttcataccgctccagctcatggtatggatgattatttaatatgtaagaaaaataatattgataccatccactcacttaataacaaggctttattcaaagatgaattagattttattgcaggattacctgctttgaaagcagacccacttatcattgagaaattacaagagcatgatgtcctagttaacatagaagattatcatcattcttaccctcattgttggagacgtaaaacgccactaatttttacatctactcctcaatggtttatt

SEQ ID NO: 305393 - DNA, 1944 bp, Unknown
  Bacterial polypeptide expressing nucleotide sequence isolated from the Sargasso Sea
ttttggattatgaaattcacttgattgagagttcaattgtgacagaagaaactggtaccggttttgtgcatatggcgccaagtcatggtgctgaggattatgaagagtttttaaaaagaggttggttagataaactaacgcataatgtcgatgaagatagtagttttgtaagatttatgccttattttaatggtcttgaaatttataataaaaagggaaaagaaggtagagctaatgaagaagttataaaaaaattgattgaagccaatggtttaatggctcgaggaaagctattacattcgtatccccacagttggaggtctaaggcacccttaatttttagaaatactaaacagtggtttgtatctatagacaaagatgtttctcataaagacaaaacaaaaacagactcagtctatggaaacacaataagagaacgtgctttaaaatcaattgacgatttggttagttggtttccaaagtctggtagaaatagactttattcaatgatagaaaaacgccctgattgggttttatctagacaaagggtatggggtgtacctctggcttgttttataaataagaactttacgaacaaggataataactacatactttatgatactagagttaatagccgaattttaaaggcttttgaaaatgaaggagcagatgcatggttttctcctggtgctaaagaaagatttttaaaggatttttataatccagatgattatgaaaaaatagatgatattcttgatgtttggtttgattcaggatcaacacatgcatttgttttaagagatcgtgaggatggagtttggcctgcagatctttatttagaaggtactgatcaacatagggggtggtttcactcctctttgttacagtcgtgtggtacagtaggaagggctccttacaacggagttctaacacatggttttaccttagatgaaaaaggtatgaagatgtcaaaatcattaggaaataccataagccctgatgatgtaattaaacaatatggagctgatattttgaggctatgggtgtctcaatcagattatacgagtgatctaagaattggaaaagagattttaaaaggtgtggctgataattatagaaaattaagaaatacaatgcgttttatgttgggatctcttgaagatttaaaagacatagaaaaaattgaattagacgaactacctgagctagaaaaatgggtattaaacaagttaaagaaccttgataattgtgttcgagatggttataagaattattcttttcaacttgtttttcaacaactatttcaattttgtaccgtagatctctcttccttttattttgatataagaaaagattctctttattgtgatcaagcctcttctcatgtaagaaaatcttgcatatttactttagaaatgatttttaaaagactagtaaaatggtttgctccaatacttccttttactatggaagaagtatggttacaaagacatcctgaaaatccaaatatatctattcattttgaggactttcctgaaacccctgataaatggatcaatgttgatcttgaaaagaaatggaatatggttagagatgtaagaggacttgttacttcagccattgagaaagaacgacagaacaaaaaaattcggtcaagtttggaagcgtttcctattttaaaattaaaacaaaaaaaattatttcaagttttgaattcaattgattttaacgaaatctgtataacttcttctataaaattaattttaaacgaagatcctacttcaaatggttctttatctaacgaagattctgtggaggttgaaataattaaagcagaaggcgaaaaatgtgaaagatgttggaagtacaccaactcatacactaattttaaagacaatattatatgccaaagatgtaatgaagttcttgaaaatttgtaat

SEQ ID NO: 305394 - DNA, 1119 bp, Unknown
  Bacterial polypeptide expressing nucleotide sequence isolated from the Sargasso Sea
tttaaagcaattgataacactgaattttatcctgcaaaaggaaaagaaagattgagatcaatgatcgaaacaaggccagattggtgtgtttctagacaaagagtttggggtgtaccattgccaatattcatttctaaatcagatggtaaggttttagttgatgaggatgtgtttgaaaatattgcatctatttacgaaaaagaaggatcagattgctggttttcagatgaccctcaaaagtttttaggagataaatataaagctgaagattttgttaaactaaaagatattgttgaggtttggtttgatagtggatctacacattcatttgttcttgaaaaaagaggagatttaaaatggcctgcatctatgtacctagagggatctgatcaacatagaggatggtttcactcctcattattagaatcttgtggaacaagaggcagagctccatttgaaagcatcttatctcacggatttgtgatggatggtaagggtttgaaaatgtcaaagtctttagggaaccagattttccctgaggatattctaaaaaaatatggagcagatatcctaagagtttgggtgactgcatccgattactctgaagatttaagaatagactactcaattttagagcaacatgctgaagcatatagaaagataagaaatacatttagatacttaatgggaaatataaatgacaattattcagagcaagaatatagcaaaattaatttaactaaactccctgaactcgaaaggctaatgttacacaaattgtatatattaaatgaaaaatttaatttaaactttaaagaatataattttcatgttttgtacaaagagttattaaacttctgcactgtagatctttcttcattttattttgatattagaaaagatactttatattgcgataaaaaaaattcagataagagacaaagttgtattttaatattaaatacaatattggacgccttgttaaaatggtttgcaccaattttatcttttaccacagaggaaattttcagtcttttaaacaaagatgaaaaaaatagtattcatttaaaaaaatttccagaatttccaaaatctggaaagatgaggagcttaataaca

SEQ ID NO: 305395 - DNA, 1771 bp, Unknown
  Bacterial polypeptide expressing nucleotide sequence isolated from the Sargasso Sea
aatgactaaatcacaaataaatctgccaaaaacagctttctccatgaaagctaacttacctactagagagccagaaattctagaatattggaaaaaaataaatctttatcaagaattaagagattcaagtaaaggaagagaaaaatttgttcttcatgacggacccccttacgcaaatggaaatatccatatgggaacagctcttaataaaattcttaaagatataattgtaaaatttcatcaaatggatggaaaagactctatttatgttccaggttgggattgtcatggtttgcctattgagtggaaaattgaggagcagtataaaaaaaataaaaagaataaaaacgaggttcccatcgttgagttcagaaaagagtgtagaacatttgctgagaagtggattgaagttcataaaaatcaatttaagagattaggtgttgttggagattgggacaattattactcaacgatgagttttgatgcagaagcacaaatagttagagagcttggtaaatttttaaaagaaggaagtctatacagaggttttaaaccagttttatggtcaactgtagagaaaactgcacttgcagatgctgaggtagaatatcaagatcataaatcagatacaatttatacatcatttaaagttaaatcatctaatttgaaagatttagttggaggagaaataattatttggacaacaactccatggacaataccagcaaataaagctttggcatataatgattctcttgattatgtcattttagaagtaaatgatgaaggtgattttaaaaatagaaaaattgttattgcagatgccttgcttggctcagttgtaaaggactgtgaattaaataattataaaatacttaataaatttaaaggtaaagaatttaataatactgtttgtaaccatccatttttaaatcttggttatgattatgatataccaatgcttgaagctagatttgttacaactgagcaaggaaccggaattgttcactgtgcaccaagtcatggacctgatgactttaatttatgtttgaataataatattaaagctattgaaactgtcgacggagatggaaaatatactaataatgttaaattgtttgaagggactcatatttttaaagcaaatcctattgtaattgaaaaactaaaagagcaaaaaaatttattatttaatggtgagctggttcattcatacccacattcttggagatctaaggctccacttgttcatagagctacaccacaatggtttatttctatggaaagtcataaattgagagataaagcattaaaagctatcgatgaaactactttttatcctagcaaaggcaaagaaagattaaaatcaatgattgaaacaagacctgattggtgtgtttcaagacaaagagtttggggtgttcctcttccaatttttgttaataaaaaaacaaaaaaaattttagctgatgatgatgttatggaaaacattgcatctatttatgaaaaagaaggttctgattgttggttttctgatgatcctcaaagatttttgggaaagaaatataaagctgaagaatatgaaaaattaagtgatattgttgaggtttggtttgatagtggttctacccattcatttgttttagaaaaaagggatgatttaaaatggccagcatcaatgtatttagagggatcagaccaacatagaggttggttccactcctcattgttagagtcttgtggcacaagaggaagagccccattgaggcaa

SEQ ID NO: 305396 - DNA, 1678 bp, Unknown
  Bacterial polypeptide expressing nucleotide sequence isolated from the Sargasso Sea
aaaatggattgatattcagaagaaagaatttagaagattaggagttgagggagattgggaaaatccttatctcactatgtctaatcaagcagaagctcaaattgttcgcgaacttggaaaatttttaattgatgaaagtttatacaaaggtgcgaagccagttctttggtctgttgtcgaaaaaactgcattagctgatgcagaagttgaatatgaagatcatacttcaaacacaatatatgttaaatttttaattaatagttcttcatataaagatcttgagggtgcaaatatagttatatggacaacaacaccttggactatacctgggaatagagcattagcatttggtgaagatttaaaatattctctaattgaggttgagaaaataactaatgagagtttagccaagattggagacaaactgatttttgctaaagaattagtcaaacaagtatgtgatgaaataggaatagaaagttataaagaaattaaagaatttgaaggtaaacatttatctaaatgtcaatgtgagcatccttttaaaagtattgggtatgattttgtagtaaggacatttcatggagattttgtaaatttagaacaaggaactggaatagtgcacattgcccctggtcatggagatgatgattataatttaggaatcaaaaatggcgttgatattgttcaaactgtgcaggatgatggtaaatataataaacatgcaaaaggatttgagggtgagcatatttacaaagttgatataaaaattgcagataaattagacgagctttcaaaattattatttaagggaactctccgtcatagttatcctcactcttggagatcaaaagctccattaatctacaggaatacaccccagtggtttatttcaatggaaaaaaataaattaagagaaatagccctcaaatcaattgatgaaactattttctatccagcacaagggcaaaaacgtcttcgatcaatgatagaaacaagacccgattggtgtatttctagacaaagggtttggggggttcctttaccattatttgttagtaaagaaactggacagccattaagggataaaagcattattgatagaattgcagatatttatgaaaaagagggcagtgacacatggtttactgaagatcctcaaagatttcttggagataaatattcaatagatgattatgaacaaattaaagatgtagttgaagtttggtttgatagtggatcaacacatgcattttgtttagaaaaaagagatgacttaaaatggcctgcatcaatgtatttagagggaagtgatcaacatcgtggctggtttcactcttctttattagaatcttcaggaacaagaggtagagctccatacgaaagtgtattaactcacggttttgttgttgatggcaaaggaagaaaaatgtcaaaatctcttggtaatgttatttctcctgacgatattttaaaaaaatatggtgtcgatatattaagattgtgggtagttgcatcagattattatgatgatttaaaattagacaatgcaatcttacaatctcaaactgactcctatagaagaattagaaatacatttagatatttgataggtaacttagatggctttaatgatgatgaaaaaataaatgaaagtgaatttcccgatttagaaaaa

SEQ ID NO: 305397 - DNA, 2002 bp, Unknown
  Bacterial polypeptide expressing nucleotide sequence isolated from the Sargasso Sea
agcaaataaagccttagcttataatcagagtttaaaatatttaattattgaacttttagatgataatcaatttaaaaataaaaaaatagttatagcaaaagatcttctaaactctgttattaaagattgtaatatagaaaaatataaaactttaaaagaaattaatggaaaagattttttaggaactatatgccaacatcctttttttaatatcggttatgattatgatataccaatgctggaagcaagatttgtcacaacagagcaaggcacaggaatagttcattgtgctcccagtcatggacctgatgattttaatttatgtttaaataatggaattaaagcattagaaacagttgatgatgacggaaaatatacaaaaaatattccagtttttgaaggtgtacatatatttaaagctaactctatcgtaatagaaaaattaaaagaatttaaaaaacttttagctaatggaaaattaaatcattcatatccacattcttggagatcaaaagctcctctagttcatagagctacacaacaatggtttatatccatggatagccacgggttaagaaaaaaagctttgagagctattgaagaaacaaagttttatcctagcaaaggaaaagaaagattaaaatcaatgatagaaacaagacctgactggtgcgtttcaagacaaagagtttggggagtccctttaccgatttttatctcaaaaaaaacaaatgaaattttaattgatgacgaagtttttgataacatcgcgaacatttatgagaaggaaggctcggactgttggttttcagatgatcctcaaaaatttttaggaaaaaaatataatgctaaagattatgaaaaattaagtgatatcgttgaggtatggtttgatagtggatcaactcactcctatgttcttgaaacaagaaaagatttaaaatggccagcgtctatgtatctagaaggatctgatcagcatagaggatggtttcattcttcattattagaatcttgcggtacaagaggcagagctcctttcgaaaccatattgtcccatggttttgttgttgatggaaaagggctcaaaatgtctaaatctttaggaaatattatagcacccgaagatatattaaaaaaatatggagctgatattttaagagtatgggtagcagcggccgactattcggaagatttaagaatagataatttaattttagaacaacatgcagaatcttatagaaaaataagaaatacttttagatacattttgggaaatttaaatgacaattttgtaaaaacagatcttgaaaaaataaatttaagtaaatttacagaattagaaaaatatatgcttcataaaatatatatcttaaacgaaaattttcataaaaatttcaagtcttatacatttcataatttatataaagaactattaaatttttgcactgtagatctttcagcattttatttcgacattagaaaagactcactttactgcgatgatctaaagtctgaaaaaagaaaaaattgtattctggttttaaatattattcttgattgtctgcttaaatggtttgctccaattttatcttttactactgaagaaatttttactttagtcaataaaggtaacggtaaaagtatacatttagaaagattttctgaaatacctttgaaatggaaaaatgagaaattaaatgaaaaatggattaaaataaaaagaattagagacataacaaatataagtattgaaaataaaagagcaaacaaagttatcggttcgagtttagaagctaaagtaaaaataaagcttaataaagaaatgtatgaatttgcaaaaaatttcgactttgctgaaatctgcattacttcagaagcagaaatcatcttagatgaaaaacttaatgatgaagtagatgttgaaacaattaaagcagagggtaaaaaatgcaaggtatgttggaaaatcataaaaggtaagtgtgaaaggcatggttag

SEQ ID NO: 305398 - DNA, 2848 bp, Unknown
  Bacterial polypeptide expressing nucleotide sequence isolated from the Sargasso Sea
aatgtctgaagaaaaaaaaattactgattatagagatactcttcttttaccagagaccgatctgccaatgaaggcaaaactacccgaaaatgaacctaagcttcttgataattggaatgagattggaacctatgcagctataaggaaatcttcagagggtaaagataaatttatacttcatgatggaccaccctatgctaatggaaatttacatatggggactgctctaaacaaaattttaaaagatattattgtgaaatctaaacaaatgtcgggttttgatgcgatttatagaccgggttgggattgtcacggtcttcctattgaatggaagattgaagagcaatatagagaaaaaggtaaatccaaagaagaagtccctattaatgagtttagaagtgaatgtagagtatttgcaaaaaaatggatagatattcaaaaagaagagtttaaaagattaggtgtctttggcgaatgggaaaacccatacacaacaatggaatttgagtcagaagcaataattgtcagagaatttcataaatttttaatgaatgatgatctttattgtggatcaaagccagttatgtggtcagttgtagaaaaaactgctcttgctgaggctgaggtagaatacaaagaacatgtatcaccaactatttgggtcaaatttccattaaatacaaaagaaactgaatacgagaattcaagcatcttaatttggacaactactccgtggactataccagctaatagagcaattgcttattcctcaaaatatgaatacggcctttatgaagttgtagaaatagaggaaggaagtctagcaaatattggtgaaaaaattatcataaataataccctaaaagaaaacttagaaaatgcttcaaaggccaaaataaaatttattaaaaatattgataatattgaaaacctaatttgtgagcatccttttaaatctttaggttatgaatttcaaatcccacttcttgagggtgagtttgtgactgatgaaacaggaacaggatttgttcatattgccccaagccatggtcaggatgattatgatttagcatcaaaaaatggaattgaagcaccatttatgattgatgatgaaggggtttacctcccaagcgttaagttctttgctggaaaaagagtttatgaagatgatggctcatatggggatggaaatggatctgtaataagggaattaattaatgctaatgctttatttgcaaaaggaaaacttcgtcaccagtatccgcatagttggagatctaaagcacctctcttatttagaaatacacctcaatggtttatttctatggagaaaaataaccttagagaaaaatctttatctgaaatagagcgtgttcagtggatcccaaagagaggaaaaaatagaattaaatctatggttgataatagaccagactgggtagtttcgcgccaaagagcatggggagtgcctttagcaatatttttgaataaaaaaacaggtgaaattcttaaggataaagaaattaatgagaaaatattcgctaaatttaaggaaaaaggttctgattcatggtttgagctaacttctgaagaaatattaggtgataattacaattcagatgaatgggaaaaaattgatgacattcttgatgtgtggttcgattcaggttcaacacaagcttttgtgcttgagggcgatgaaggaataggttttcctgcggatttgtatttagaaggatcagaccagcatcgaggatggttccaatcttctttacttgttggctgtggaacaagggggaaagctccatttaagcaagtattaactcatggttttgttgttgataaggacggaaaaaaagaatctaagtctcttggtaatgttactaaaccagaagatttaataaatcagtatggtgctgatgttatacgattgtgggttgtgtcttccgactacacagatgatctgagagttggtcaggatataatgaaagctaatgttgaatcttatagaaaaattcgaaatacatttcgttttttacttggaaatctgaataacttttctcaagatgagatcgtggattatgaagatatgcctgagttagagaaatacatccttcataagctttatttaatagatttagaagttagaaaggcatatgaaaactatgatctaaaatctgtatttcagacattattaaatttttctaatcttgatttatcttctttttattttgatatcaggaaggatactctttattgcgacagtccaaaaagtaataatagaaaatcaactagaacagttcttgatttactttttaattatttagttacatggtttgctccaattttgtgttttacgactgaggaagttagaaaatcgagatttccagaaataaataactccgtacatgaaatggagtttttagagactaaagatgtatggaataatagtaaattatttgaaaaatgggaaaatattagatcgataagaaaggtagtaactggagcaattgagcttgaaagaaaagaaaaaagaattggttctagtcttgaagcaaaaccaatagtctttgtttctaatgaagattatatcgagttattaagaaatattgatttacctgaaatatttattacttctcaggcggaattaagaagtgaagagggtcccaaaaatgctttcactttggatgatattagtgatgtttcggtaatttgtgaaatcgctgaaggaaataaatgcaatagatcatggaaaatactacctgaggttggaacagataatgattatcctgatttaagtcttcgtgatgctaatgtaatgagagaaattaatgttaaaggacattaa

SEQ ID NO: 305399 - DNA, 2613 bp, Unknown
  Bacterial polypeptide expressing nucleotide sequence isolated from the Sargasso Sea
tacatgatggtcctccatatgcaaatggtgacatccatctcggacactcagtaaataaaattctcaaagatattactattaaattcaaaactcttcagggttttaatgcgccatttattccagggtgggactgccatggtcttccaatcgagcttaatgttgaaaagaaatatggaaaaaatagcgaactcgtaaaaaataaagagagttttcagaaagcttgtaaagaatatgcagaaagccaattaaatagacaactagatgattttaaaagactaggcgtgcttggtgattgggaaaattcatataaatcactagatccaaaatttgaagcagacatcgtcaggtcattaggtattatttacagtgaaggttatctagaaaaaggtgaaaagcctgttcactggtgtcaagaaagtggatcatccttagcagaggcagaagttgagtatattgataaaacatcaaaagcaattgatgttgcattcaaggttgatcatttatctttaaaaaaggtaaaagatttatttaatactgtagattcagatgagatatcatttgttatatggactacaaccccatggacaataccctcaaatgtagctatatgtatcaatcctgaatacaaatactctctcattaaaatgaataataaattttatgtgattgcatttgagatgattgatcaatgttctaaaagatggaatcaaaaatttgatgttatatctacaatacagggtaaaaaattatgtgatattgattttattcatccttttttagatagaaaatcagtccttcttcatgcagaccatgttacaactgaaacaggaacaggttgtgttcataccgctccagcacatggcatggatgactatttaatatgtaagaaaaataatattgataccatccactctctaaataacaaggctttcttcaaggatgagttggattttattgcaggacttcctgctatgaaagcagatccgcttattattgaaaaattacaagagcagaatgcacttattaatatagaagattatcatcattcatatcctcactgttggagacgcaaaacgcctctaatttttacatccactcctcaatggtttatctcgatgaaaaaaaataatcttattaaagatgccctaaaacatattaaaagcgttaattgggaaccctcatggggccttcaaagaatagaatctatgcttgttgatagaccagattggtgtatttctagacaaagaaattggggcgtgcctataactttagttgttcataaagatactggagaaatccatcccgatcaaaaaaacctatttgaaaaatttgcacaaattattgagaaagatggaatttcagcttgggatcaattagatttaaaagattttatttctgattataaagattatgttaaaacctctgatactctagatgtttggtttgactcaggagtaacacattttgctgtatcttctaaaagatttggaaaaaatactattgctgatctttatcttgaaggatcagaccagcataggggatggtttcaatcatctctactgacaagtattgcaatgaatggctccgctccatacaaaacagttttaacacatgggtttgttgtcgatgagcagggaagaaagcaatcaaaatctcttggcaatgttgtatctcctcaaaaagtttgggacaacttaggtgcagatatcttaagactttgggttgcctcaactgattttagaagtgagatggttgcatctgatgagattttgagaagaacttcagatcaatatagacgaattagaaatacatttaggtttattttaggcaatttaaaggactataaggatgaaaataaaattaagttcaaagatcaagttgagctagataaatggataattaatgaagctaaaatcttacaaaacgatgttttaaaactatatgaatcctattcatatcataaggctattcaaaaaattcataatttttgtgtcaatgaattaggaggagtatatcttgatattgttaaagatagactttacacctgtaagtctgactcaaatgcaagaagatcatgccaaacaagcttagattttcttttaaatattttagtaaggctcattgctccagttctttcttatactgcagaagaaatctggcaaacaagcgaaagattatccagtcaagaggaatcagtttttctgtctaattatgatatttcagaaattgattatcagtcatctatcaaagaatcagattggaatagaatttttgaaattaaagatgcagttaatcaatctatagaagaaatgagaagtgacaataaactcaaaggatcattagattctattgtaaatattaatgcaaatgaagaagatttaaagattcttaaaaaattagggaatgaactccattttttatttatctcttctgaagcaagtgttgaaaagagcaagagttttaaaattaaaattaattcatcaaaaaatcctaaatgtaccagatgttggcataggcatgcttcagtaggaacaagtaaagaacatccagagctttgttatagatgtattgaaaatatagatgacaatggtgaacaaagaagctttgtataac

SEQ ID NO: 305400 - DNA, 1633 bp, Unknown
  Bacterial polypeptide expressing nucleotide sequence isolated from the Sargasso Sea
aatgagcgactataaacatactttgaacttaccggaaacaccgtttccaatgcgtggcaatttggcacaacgtgaaccaaaaatgctaaaagcatggtatgaagacgacctatacggtcaaatccgcagcgctaaaaagggtaaaaaaacctttattttgcatgacggtcctccatatgcgaatggcgacattcacttaggtcactcagtaaataaaattttaaaagacattattgtaaagtctaaaaccttatctgacttcgactcaccatatattccaggttgggactgtcacggtttaccaattgagctgatggttgagaaaaaagtaggtaagcctggcgttaaagtaactgcgagcgagtttcgcgaaaaatgccgcgcttatgctaaaaagcaagttgaaggtcaaaaagtagattttaaacgtttaggtgtgtttgccgattgggacaagccatacctaacaatgaattttgattttgaagcgaatgcaattcgtgtacttggtcgtattattaaaaatggtcacctacacaaaggtgcaaagcctgtgcactggtgtactgattgtggctctgcattagctgaggctgaagttgagtatcaagataaacagtcgccagccattgatgtgcgttttatttttgctgaccaggacgccgtagttaatgcatttgatatggcacaagggcataaaggtaaaggtagtgtaggtactgtaatatggactacaacaccatggacgcttccagcaaaccgtgcagtagccgtgcatgctgagttagaatatgcattagtacaagttgaagatgaaggcgctgagcagcgtttaattttaggttcagagcttgtaaaagatgctatggatcgttttggttttaatcattaccatgttttaggttacgtaaaaggtgctgcacttgaaaacttgcaagtagcgcatcctttttatgactttaatgtaccggtaattgttgcagagcatgtaactacggactcaggtactggcgtggtgcatacagcgccaggacatggtcaagaagatttcgtggcaggcttaaactataacctagaagttgctaacccagttggcgctaacggtgtgtacttgcctgatacagaattatttgcaggccagcacgtatttaaagcaaacgcgagcgtaattgaagtattaaaagagcgtggcgctttagtgcatcaccatgcgcttactcatagttacccacattgttggcgccacaaaacgcctattattttccgtgctacgccacaatggtttgttagcatggatcaggctaacttacgtaaagattcacttgctgaaattaaaaatacgcagtggttaccagagtggggtgaaagccgtattgcaaacatggtcgaaggtcgcccagattggtgtatttctcgccaacgtacttggggtgtacccattgctttatttgttgacaaagacaccggtgcattacacccaaatacccaagcgcttattgagcaagctgccgcattagtagaaaaatcaggtatacaggcatggtatgacttagagccagaaacactattaggcgaagaagacgctaaacaatacatgaaagtgcaagatacactcgatgtatggtttgactca

SEQ ID NO: 305401 - DNA, 2731 bp, Unknown
  Bacterial polypeptide expressing nucleotide sequence isolated from the Sargasso Sea
acctgagatacagaatttttgggctaataatgatattgattttcaattaggttcaaacaattcaggcgaaatatttacattacatgatggccctccttatgcgaatggagctcttcatatgggtcatgcccttaataaagttttaaaagacataattaataaatacaaaaccttaagaggatttagggttcatttcgtacctggttgggactgtcatggattacctattgaattaaaagttcttcagaatttaaaatctgatgaaagaaagaatcttgacactttaaatttaagaaaaaaagcaacagattatgcccatatccaaattaacaatcaaaaggagggtttcaaaaggtggggcatatggggagattgggataacccttacttaactcttaagaaaagttatgaatctgctcagattggagtatttgggaaaatgtttttaaatggatatatatatcgaggtcttaaacctgtgcattggagtccaagttcgaggactgcacttgccgaagcagaattagaatatccggatgaacatttttcaaaaagtatttatgtttcattaaaaattaataacatatctgagcaaattctattaaatttcaaccaagaaaatcctaatatcaaaaaagatttttttcaaaataattctttcataactatttggaccactactccttggaccatacctgcaaatgaagcagttgcagtaaatccaaaaataaagtacgtttttgctatcgatgaagagaaaagaatttacctttttgcaaaggatttatcttctgaaataagtaagaaatttaataaagatttcaaggtgcttttagaggttagaggttctgaattggaaaatattgaatatcaacatcctactaaggataaaaattgcagaatcttgattgggggggattacattacgacagaatcaggtactggaattgttcatactgcacccggtcatgggatagatgactttaatgtggggcaaaaatatgatttacctattacgtgtgttgttgatgaaaaagggaacttaaatgaatcttctggacagtttcaaggatctaatgtcctgaaagatgccaatgatttaattattgaatatttaaaaggaaataatttgcttctattacaagaaaattataaacatagatatccgtatgattggagaaccaaaaaaccaactatttttagggcaacagaacaatggtttgcctctgtaaatggctttagatcatctgcattaaaggcaatcgaagatgttgaatggatgccagagactggaaagaaaagaatttattctatggttgttgggagaggagattggtgtatttctagacagaggtcatggggtgtacctattccagttttttataaaaaaaatggtaatgatatcctacttaacaacgagataattaatcatattcaagaactttttagtgaacatggagcagatatttggtgggattgggatgttaagaatcttttgcctgaaagttatgcaaaagaatcggatcaatggaaaaaagggacagatacaatggatgtttggttcgattcaggatctagctgggccgcagtatgtgaactgagaagtgaattaaagtatccagcagatctttatttagagggctcagatcaacatcgaggatggtttcagtcttctttgctaacatctgttgcagtcaataataaacctccctataagaaagttttaactcatggttttgcacttgatgaaaatggaagaaaaatgagtaaatctttaggaaatgttgttgacccaaatataattattaatggaggtaataataaaaaaactgatcctgcttatggtgctgatgttttaaggctatgggtaagctctgtagattattcagttgatgttccaattggttcaaatatactcaagcaactttcagacgtttacagaaaagttcgtaatactgcaagatatcttctaggtaatattcatgattatgatcctaatgttgatagttttgaaattgatcaattgcctctcttagatcaatggatgttaggcagactagttgaggttacagatgaaatatcaaatgcttatgaaaattatgaattttcaaaatttttccaaatcttgcaaagtttttgcgttgtagatctatcaaatttttatttggatattgcgaaggataggttgtatgtaagttctaaatcacaatttaggagaagatcatgtcagttcgtcatgtcaaaagttgttgaaaatttagccgtacttatttctccagtgctttgtcatatggctgaagatatttggcaaaatataccatattcaactaaagagaaatcagtctttcaaagaggatggccaatattttcgcagtcatggaaaaatcaaatacttaatgaacacattgcaaatttaagaaatttgagagttgaaattaacaaggctatagaaggatgtagaaacaaacaaataattggagcagctttggaaactgaagttaattatttacctgaagacaaagttttaaaagattcacttacttggctaaaagaatttggcaatcaagatgtagatttatttagggattggcttatagtatcaaacttccaagtggtatctgatttagtggaaaattctctaattattgataacaatgcacttggaaaaatacaaatattaaaagctcaaggtcaaaaatgtgatagatgttggcattatcaaaaagaaact

SEQ ID NO: 305402 - DNA, 1657 bp, Unknown
  Bacterial polypeptide expressing nucleotide sequence isolated from the Sargasso Sea
gggacatgctgcccaaaaatattgaaagatatggtagtgaagtctcaagttctagatggcaagcatgctccttttgtgccgggctgggattgccatggtttgcctatagagctcaatgtggaaaagaagaagggtaaggttggtcaaaaaatatcagcttcagaatttaggacagcatgtcgagattatgctaattctcagataaatctgcaaaagagtgattttcaaagattaggaatcattggcgattgggaaaatccttacgtaacgatggattatcccttcgaggcaaatattataagatcactaggaaagattatagagcagggccatctcaaaagaggtgataagccagtgcattggtgttttgactgtaagtccgctttagcagaagctgaggttgagtatcaggaaaaactatctacatccattgatttcctctttcctattaaaaacagcaagatagataaaattttcggttcaaatagcaaaaatcaatcctattttgctagttggactactacgccttggaccttgccaggaaacctggccttaacagtcaatgaatcctttatttatgaactcattgaaattattttcaataatcgaaagattaatctcatccttgcaaaagagcttgttcaatcaaccttggagagaattggattggattcttacaaatcactcggaacttgtaatggtagtgatctacttggaatcaaagcaacccatccttatctagatcgtgattctttgatcatagcgggtgatcacgttactactgaagctggtactggtattgttcatactgctccaggtcatggtctggaggactatttggtgtcaatagaaaatggtcttgaagttctcaatacagtaaaggcaaatggaacgtttcaagatgatgttgcacatttcgctggtcaatttgtattcaatgctaacgacaacatcatcgagttgcttaaggaaaaggatgttcttctatcgcagtctgattacgaacatagttatccacattgttggagacataaaaccccagttatctttagagctacaccccagtggtttatatctatggatgccaacaagttattagaaaaatccctcagctctgttgactcggtaagatgggagcctgcctggggacaatctagaatggtgtccatgttagaaagtagacctgattggtgtatatcaagacaaagatcttggggagttccaattgtcttgttagtagacaaggatactggagaaatacaccctgaaactcaagaaatcatagagaaagtagcaatcatggttgaaaagaatggtatccaggcatggcatgatgttgcgatagaagatttgacagaaaaccatgaaaattattataaagtaacagattgtttagatgtttggttcgactcaggtgttacacatgcttgtgttttggacacaaatgaagaattacaattcccagcagatttatatttagaaggatctgatcaacatcgtggttggtttcaatcgtccttactaaccagcatagcaatgaaggagagcgctccttataagacagttctaactcatggatttgtagtagacggggaaggcaggaagatgtcaaagtcgattggtaacgtaatttccccacaaaaaattggaaaaatat

SEQ ID NO: 305403 - DNA, 1713 bp, Unknown
  Bacterial polypeptide expressing nucleotide sequence isolated from the Sargasso Sea
gtgctccagtcatggtccagatgattttaatcttttgtttaaacaatggtataaaagccattgagacagttgatggagatggaaagtatacaaataatgtagctttatttgaaggaactcatatttttaaatctaatccaattgttatagaaaaacttaaagaacaaaaaaaacttttatcaaacggtgaactgatacattcctatccacattcatggaggtctaaggcaccattagttcatagagcaacacctcaatggtttatctctatggatagtcataaacttagaattaaagctttaaaagcaatcaatgaaaccaccttttatcctagcaaaggtaaggaaagattaaaatcaatgattgaaacaagacctgactggtgtgtttcaagacaaagagtttggggggttccattgcctatttttataaataaaaaaactaaagaaattttagtagatgataatatttttgaaaatattgctaaaatctatgaaaaggaaggttcagactgttggttttcagatgatcctcaaaagtttttaggaaataaatataaagctgaagattatgaaaaactcagtgatattgttgaggtatggtttgatagtggatcaactcactcttttgtattggaaaaaagaaaagatttaaaatggcctgcttcaatgtatttagaaggttctgatcaacacagaggttggtttcattcttccttattagagtcttgtgggacaagagatagagcaccctttgaaaccatcctttcccatggttttgttgttgatggaaaaggtttaaaaatgtcaaaatcattaggcaatgtaatcgcgcctgaggatatcttgaaaaaatatggtgctgacatacttagaatttgggttgcctcatccaattatgctgaggacttacgaattgattattctatattagatcaacatgctgaatcttatagaaaaataagaaatacatttagatatttacttggaaatttaaatgattctttcgaaagtaaggatctatccaaattagagattaaaaaattaccagagcttgagcaatttatgcttcataaaatttatacccttaatttaaactttgataagtattttaagaattatgattttcataatctttataaagaattgctaaatttttgcacagtggacctgtcggctttttattttgatattagaaaagacactttgtattgtgactctaaagaatctgaaaaaagaaaatcaacactaattttgttaaatattattctggactcattattaaaatggtttgcaccaattttatcttttactactgaggaaatctatcagcttgtttcaaaaaataaaaaaagtattcatttagaaagatttttaagtttcccaaaaaagtttgaaaatccagaattaaacttaaaatgggagagattacttaaaataagagatgtgtgtaatttaagtattgaacaaaaaagggctaataaggaaattgggtctagcttagaagctgctttaataattaaattaaataaagaaaatcaaaatattttaaagggtattgatttatccgagctttgtataacttcatcagcaaaaatagaaaatagtaatttagatgaagtcgttgttgagactagtaaagcgaaaggggacaaatgttcaatatgttggaaaataagaacttcaccatgtgaaagacctaattgcaaatagg

SEQ ID NO: 305404 - DNA, 1522 bp, Unknown
  Bacterial polypeptide expressing nucleotide sequence isolated from the Sargasso Sea
tcctttaatttatagaaatacacctcagtggtttatttcgatggaaaaaaatcagttaagagatacggcattaaaatcaatagataacactattttttatcctgcccaaggtcaaacgcgtcttcgctctatgatagaaactagacctgactggtgcatttcaagacagagagtttggggagttcctttacctttatttgttagtaaagaaactggtcaaccacttcgagaccaagaagttattaatagaattgcagatatatatgaaaaagaaggaagtgatacatggtttaccgaagaccctcagagatttcttggagataaatattcaatcgatgattttgagcaagttaaagatgttgtagaagtttggtttgatagtggttctacacatgcgttttgtttagaaaaaagagaggatctaaaatggcctgcatcgatgtatctagagggtagtgaccaacatcgcggctggtttcattcatcattactagagtcttcaggaacaagaggtagggctccgtatgaaagcgtattaacccatggttttgttgtagatggcaaaggaagaaaaatgtctaaatctctaggtaatgttatttccccagatgatattttgaaaaaatatggcgtagatattttaaggttgtgggtagtggcttcagattattatgatgatctgaaattagataatgcaattttacaagctcaaacagactcttatagaagaattagaaatacctttagatatatcataggtaatcttgatggttttgataatagtgaaaaaattgatgaaagtgagtttcctgatttagaaaaatatatccttcaccgattatgggaacttgatcaaattatttctaactgtgtaaaaaactttaactttcatttaatgtttacaaccttacttaatttttgctctaatgatctttcagcattttattttgatattagaaaagatgttatttattgtgatggaaaaaaatcaaagataagacgttcagcaagaactcttttagatacaatcttccattatttagttagatggcttgctccttcattatcatttacaactgaagaagcctggaaagctatgggtaataaaacaagtattcatttagaggattttttacatactccagtaaattatgaaaactcaaaaattaatgaaaattggaaagttttaaaacaaattagaaaagtaataactggtgcgttagaaaaaaagagagcagaaaaaataattggttctagcctagaggcacatctcgatatttatgttgatagtctaacactagaaaaaattaaaaactatcctttggatgagataagtatcacttcatcattttccttgcatgaattgacagataaatctcaaggtttctatctagaggatgtatctaatgttaaaattgctgtttcaaaaacaaaaggacaaaaatgtcaaagatgttggaaatataaagaacagctaatacgtgatgaaatatgcgagcgttgcgataatgccatttcatga

SEQ ID NO: 305405 - DNA, 1330 bp, Unknown
  Bacterial polypeptide expressing nucleotide sequence isolated from the Sargasso Sea
aatgaccgctaaagatgataaaatagattttagtgaaactttgtttttgcctaaaacttcttttgctatgcgtgcgggtctgcctgaacaagaaccaagcatattagaggattgggataaaaataatctttaccataaattaagaaacaattcgaaggaccgaaagaaatttgtacttcatgatggcccaccatatgcaaatggccatcttcatatgggtcatgctttaaataaagttttaaaagattttgttgttcggtcacagcaaatgcttggccacaatagctcatatattcctggctgggattgtcatggcctcccgatagagtggaagattgaagaacaatatcgagaaaaaggaaaagataaagatgaagtagatatcattcagtttagaaaagaatgcagggaatttgctaaaaagtggattgatattcaaagatcggaatttattaggcttggagtaactggagattggttcaatccctacactacaatgtcttacgaagctgagtctacaattgtgaaggagtttttcaaatttttggaaaatgagagtttatatcgtggctctaaaccagttatgtggtcaacagtagaaaagaccgcattagctgaagctgagatagaatataaagagcataaatcgataacaatttttgtaaaatttcctgtaatttcttcactggaaaataatgaagtaaatacgtcggttattatttggactacaactccatggactataccagcaaatcgagccatagctttcagtaaagatataagttattcgatttattctgttaatggattagaagaaagcagtctattaaaagaaggagagcaaattattattgctgatcaattaatagacaatgtaagaactcaatgcaaagtaaaagagcttacaaaaattagagcaatcaaagacttagatcaaataatttgtggacatcctttcagagattcagggtatgattttgaagttaaattatttgatgctgattttgtaactttagaacaaggaagtggatttgttcatatagctccaggtcacggagcggatgattataatttaggcattgcaaataatgttgaagtaccagaaacggtggatgagaatggtcaatattttgatcatgttcccctttttaaaggcaaaaaagtatttaatgatgatggctctgatgcagacgcgaatgtagcagtgatcgttgagcttaaaaatcataataatcttgcaggaaaaggatcactgaggcacagctatcctcattcatggagatctaaagctcctgtcatattcagaaatactcctcaatgggtttattag

SEQ ID NO: 305406 - DNA, 1682 bp, Unknown
  Bacterial polypeptide expressing nucleotide sequence isolated from the Sargasso Sea
aatgagcaaagaaaatattaatttacccaaaactgctttttcaatgaaagcaaatttgcctaataaagagcctgaaattttaaatcattgggacaaaattaatttatatgaggagttaagaaaatccaataaaggaaataaaaaatttattcttcatgatggtcctccatatgcaaacggtaatattcatatgggtactgcttataataagattcttaaggatataattgtgaaatttcatcaaatgagcggcgaagactctgtatatgttcctggatgggattgtcatggactaccaattgaatggaaaattgaagagcaatacaaaaaaaacaaaaaaaataaaaatgatgttccaattgcagaatttaggaaagagtgtagagcttttgcagaaaagtggattgatgttcataaaaaacaattcatgagattaggtgttgttggagattggaaaaactattattcaacaatgagctttgatgccgaggctcaaattgtaagagaacttggtaaatttttaaaagaaggtagtttatataaaggttttaaaccagttctctggtcaacagtagaaaaaacagctttagcagatgctgaagtagagtacttagatcataattcagatacaatttatgcttcatttactataaaaaaatcaaattttaatgagcttaatggggcggaggctataatttggacaactactccgtggaccatacctgcgaaccgtgcgttagcctttaatccaaatcttgaatattgtatagttcaaatagaagatcctggagattttgagaataaaaaaattgtaatctgtaaagatctaatcgagtctgtaattaaagattgtgagataacaaaatataaacttataaaaagttttaaaggaaatgaattaaaaggtactatttgtattcatcctttcttcaaattaggatatgactatgaaattcctatgttggaagcaagatttgttaccacagagcagggaactggaattgtacattgtgctccaagtcatggacctgatgattttaatctgtgtttaaataatggaatcaaagctatcgaaacagttgatggcgatggaaaatacacaaagaatgtatatttgtttgaaggtattcatatatttaaagcaaacccaatcgtaattgaaaaactaaaagatcaaaaaaaattactttcaagtggaaaactcttgcattcctaccctcactcatggaggtccaaagctccattagttcatagagctactccacagtggtttatctcaatggaaagccacggtttaagaaaaacagctttgaaagccattgatgatacaaaattttatcctgctaaaggaagagatagaattagatctatgattgagactaggccagattggtgtgtctcaagacaaagagtctggggagtgccacttccaatttttattcataaaaaaactaaagaaatacttatagatgataaagtaattgagaacattgcttcaatatacgaaaaagagggctcagattgttggttttctgacgatcctcaaaagtttttggtagatggttataatattgatgattacgaaaaatcaaatgatattgttgaagtatggtttgacagcggatctactcattcatttgtattagaaaaaagggaggaacttgaatggccagcatcaatgt

SEQ ID NO: 305407 - DNA, 1336 bp, Unknown
  Bacterial polypeptide expressing nucleotide sequence isolated from the Sargasso Sea
agtagaaaaaaattcgtattacatgatggccctccttacgctaacggtcatttacacatggggcacgccctgaataaaatactaaaagactttgtcgtaagatcacaacaaatgcttggaaatgatagttcttatattcctggctgggattgtcatggcttgccaattgagtggaaaatagaagagcaatatagagagcagggaaagaataaagatgatgtcgatattataaaatttagaaaagaatgcagagaatttgctgaaaaatggattgatatacaaagagaagaatttattcgcttaggaataaatggagattggtactctccctatactacaatgtcatatgaggcagagtctataattgtaagagaattttttaagtttcttgagaacgaaagtttatatcgtgggtcaaagcctgttatgtggtcaactgttgaaaagactgcattagctgaagctgagattgaatataaagaacataaatcaacaactatctgcgtaaagttcccagtaaaagagagttcagatacaaattgtcaagatgcatccgtaattatatggactacaactccatggacaattccaggaaacagagcaattgcttacagtaaatcaataacgtattcaatgtttgaagtagtaagtttagaagaacacagtactttacaagttggagataaaattataattgcagatgaacttttagataatgtaaaagttcaatgcaaaattagagaattaaaaaaaatatcagaagtaaaaaacttagacaaaattatttgtaatcacccttttaaaaaatctggttatgattttgaggtaagaatttttgatgctgattttgttactttggagcaaggcacgggttttgttcacatagcacctggccatggagctgatgactataatttgggtattacaaatggtatcgaagtacctgatacagtagatgaaaatggtgaatactttccccacgtaccattatttaatggtaaaaagatttttaatgaagatggatcagatgctgatgcaaacgtagcagttatcattgagctaaaaaagcatgaaaatttagcaggcaagggttcattgcgtcatagctaccctcattcatggagatcaaaagctcctgtcatctttagaaatactccacaatggttcatcagtatggaaaaaaatcaattgagagaaaaagcgttgaacgaaattgaaaaggttaaatggtatccaaaacagggaaaaaatagaatttattctatgattgaagaaagacctgattgggtagtgtcaagacaacgggcatggggcgtacctttatctatctttacaa

SEQ ID NO: 305408 - DNA, 1015 bp, Unknown
  Bacterial polypeptide expressing nucleotide sequence isolated from the Sargasso Sea
tcaattgataagacaatattttacccagaaaaagggaaagctagaatcagatcaatgatagaaacaaggcctgactggtgtatttcaaggcagcgttcttggggagtccctttaccaatttttattgataaaaaaaccaatgaacctttaagagatcttgaagtaattgaaaatatagcaaagatttatgagaaagagggatcagactgttggtttcatgatgatccgcaaaggtttcttggaaaaaaatacaataaacaaaattatattaaatcaaatgacattgtagaggtttggtttgatagtggatcaactcattcatttgttttggaaaagagaaaagatttaaaatggccagcatcaatgtatttagagggctctgaccaacacagaggttggtttcactcctctcttttagagtcttgcggaaccaggggcagggctccttttgaaagtatactttcacacgggtttgtagtggatggaaaagggatgaaaatgtctaaatctgccggcaatattatttcacccgatgaaattttaaaaaaatatggtgcggatatacttagactttgggttgcttcttcagattatgcagaggatttaagaatagatcactcgatattagaacaacatgccgagtcttacagaaaaataagaaatactttcagatatattttaggaaatctaagggacaattatagtccacaaaatttcaagtcaatcaaagtgggtgagttaccagagttagagcaagtaattttgcataaaatttattttttaagtttagaaattaaaaatagtttaaaagattataacttccacaagctccaaaaggagttgctaaatttttgtacccttgatctatcttcattttattttgatataagaaaagatacactatattgtgatgaagtaacttcacaaaaaaggaagtcatgtgtaactttattaaatataatccttgagtgtctattaaaatggtatgcgcccagtgttatcgtttacaactgag

SEQ ID NO: 305409 - DNA, 926 bp, Unknown
  Bacterial polypeptide expressing nucleotide sequence isolated from the Sargasso Sea
tatgagtgactacaaagccacgctgaatctaccccagacggatttcccgatgaaggcgaatctggcgcagcgcgaaccggagcgtctcaaggcgtgggctgagatggatctgtatggccagatgcgcgaggcagcaaagggaaagccaacctttatcctgcacgacggccctccctacgccaacggtgagcttcacattgggcatgccatcaacaagatactgaaagacatcatcatcaagtccaagactctgtctggttttgacgctccctatgtccctggttgggactgccacggcctgcctattgagctcaatgtagaaaagaaagtgggcaagcctggacataaggtcacggcagccgagttccgacagaagtgccgcgactatgcgagcaaacaggttgaagcccaaaaggcggattttgtgaggatgggcgtgttcggagactgggcgcacccttacctgaccatggattttcagtttgaggcgaacattgtccgcacgctggccaaaattattgatcgcgggcacttgcaccgcggtttcaagcccgtgcactggtgcctggactgtggttcagcgttggcagaggctgaggtggagtacgccgacaagcaatcctccgcggtcgatgtcgccttcccctttgttgatcgcggagaggccgcttcacggctggggtgtgacgatgtcgaagcgatcgatctggccatctggactaccaccccctggaccttgcctgccaaccgagcggtggcactgtcagcagatctggaatatgtgctgcttgatctcggcagccgtcgggtcctcgtcgccgaagcgctggctgaggactgtgtccagcgctttggtgcggcaagtcacgacattattgggcgcgccaagggtgaggcgctggaaggactgtttagtgatgccgcct

SEQ ID NO: 305410 - DNA, 1552 bp, Unknown
  Bacterial polypeptide expressing nucleotide sequence isolated from the Sargasso Sea
atgtctgaacataatgccttaataggaagaggaaaattaaatcactcatatccacatagttggagatcaaaagctccactcgtttttagaacaacacctcaatggtttatttcaatggtatctaataatttaagagaagcttctcttaaagctttgtcacaaactgctttttatccgcctcagggtcaaaaccgtttaacaaaaatgatagaagacaggcctgactggtgtatatctaggcaaagagcgtggggagttcctcttgcgatatttgttaataaaaaaactcaagaaccacttcgtgatcaagtagtaatagacagaattgtaaatgcctttaagacagatggagcagacgcttggtttgaaaaaccttcttcttattttcttggatcaaaatataatccagacgattatgaggcagtaactgatatagcagatgtttggtttgattctggttctacccattcatttgttttagaggagagggatgatttattttggccagcttcattatatctcgaaggaacggatcaacatagagggtggtttcactcttctttactagaaagttgtgggacaagaggccgtgctccatatgatgcagttttaactcatggttttgttttagaccaacagggaaggaagatgtcaaaatctcttggcaatattactgcaccacaaaaagtaattaatgagtttggggctgatattcttcgtttatgggtggtaggctcagattactatgatgatcttagaattggaaaagaaattttaattagacactctgatcattacagaagactgagaaacactcttagatatttactaggtgcattgaacgactttagtgaaaatgaaagaataaattatattgaaatgcctgaattagaacaatgggttctccatagagtttatgaactaagtgaaaaaatacatgagaacacagaaaagtttaaccttcacgatatttacttagatattcataatttttgtactgttgatttgtcagctttttactttgatataagaaaagatactttatactgtgaaaatcccagtagtactgaacgaaaatcatgtagatctgtcatggacattttatttcaatcattaactacatggctggctccaattatttgctttactgctgaagaggcttggcagagtagatacggagataaagaaaattcagtacatctacaaacctattttcaagcaaaaaaagaatgggaaaattttcaaataggtaaaaaatggtctgaaataagagaattaagatctgtcgttacatcatctattgaagagaaaagaaaagaaggagtgttaggttctagccttcaagctaaggttttaatagaagcaaatgaagattcttataatgtgctccaaagcgtagatctgccagatatttttatttgttcagatgttcaaatggacttaaataaaaatttatctgatacaaaaatcaaggtaaagatagatttggcatctggaggaaaatgtatgagatgctggaaagtagttccagaagtaaaagataatatgaact

SEQ ID NO: 305411 - DNA, 1669 bp, Unknown
  Bacterial polypeptide expressing nucleotide sequence isolated from the Sargasso Sea
atgctcgggaaggacgctaattacgtgcccggatgggattgccacggtctgcccatcgaatggaaaatcgaggagaagtaccgcaagaagaagaaagataaggacgaggtcccggtcgttgaattccgcaaggaatgccgcgaattcgccgacgaatggatcgacgtacaacgcaccgagttcaagcgcatgggcgttttcggcaactgggatcatccttacactaccatgacatatgccgccgaggcgaagatcgccgaggaactgggtaagttccttttggacggttcgctctatcgtggctccaagccggtcatgtggtcgcctgtagagaagacggcgctggccgaagcggaggttgaatattacgaccatacgtcgacaacgatcttcgttcgcttccccgtgataacgccgtccgtgcccgaggtcgatggcgctgccgtcgtcatctggactacgaccccttggaccatgccgggcaaccgagccgtggccttcggcccggccatcgagtacacagttttcgacgtgaccgcgacggccgaggaaagccgcgctcaggtaggcgagactttgatcgtcgccactaagcgcctggccgagatgactgctgaatgcggcattaccggccacgaagcaagagcgaccctgaagggcgatgcccttaccgacacggtctgccgtcatccgcttcgggggcagggtttcgactacgacgtgccagcgctagcggccgatttcgccaccactgatgaaggcacgggctttgtccacatcgcgccgggtcacggtgccgatgactgggtcctaggcgtcgccaacggcattgaggtgccgcacacggtcggcgaagaagggcgctttttcgcccacgtccccctgttctctggcatgcatgtctataaatgcaacgacgacgtggccgagattatttgtaacgccggcgggctgctgggcaagggctctctggttcaccgctatccgcacagctggcgttcgaaacaacctttgatcttccgcaacacggcccagtggttcatttccatggagacgacagggcttcgcgacaaggccctgaaggctattgacgagacccgtttcgttcccgcctccggccaaaaccgacttcgaggcatgatcgccgagcgtcctgattgggtggtctcgcgtcagcgcgcttggggcgtgcccatcacggtattcgtcaacaaggaaacggacgagccgctacgcgaccccgctgtcatggaacgcgtcgtgagcacctttaaagaagaaggcgcggacgcctggttcgcgtcaccgccggaccggttcctgggtaaagactacaacgccgaagactacgagcaggtcactgacatcctggatgtttggttcgattctggctcaacccatgctttcgttctggaagacggcgaatggaacgacctggcgtggcccgcgtccttgtacctagaaggttccgaccagcaccgcggctggttccattcgagcctcctggaatcttgcgggacccggggtcgtgcgccttacgaaacggtactcacccatggcttcgtcatggccgaggacggccagaagatgtcgaagtccctaggcaacatcgtcgaaccacagaacgtctacaatcagcagggcgccgatatcttcggctctgggtgat

SEQ ID NO: 305412 - DNA, 1034 bp, Unknown
  Bacterial polypeptide expressing nucleotide sequence isolated from the Sargasso Sea
aatgcaagacaaagaatttgattttaagaatacactatttttaccggatactagttttccgatgcgtgcatcattgcctacaagggaaccaagttggctcgaacagtggaataggttaaaaatttattataaacttagggaaaagggtgctaaaagaaaaccttttattcttcatgatggccccccatacgctaatggccatctacatattggtcatgctcttaataaaattctgaaagattttattgttagaagccaacaaatgcttggttttgatgctagatacgttcctggttgggactgtcatgggttacctatagaatggaaaattgaggaaaaatttagacaaaagggtcaaaacaaggatgagattccaataaatgaacttagaaaacaatgtagagtttttgcttctgaatgggttgagattcaaaaaaatgaatttaaaaggcttggtataataggagattgggaaaatccttatcttacaatggattttaaatctgaagcaactattgcagctgaatttatgaaattcattgaattaggaacaatttatcagggttcaaaacctgttatgtggtcaccagttgaaaaaaccgctcttgctgaagcagaaatagagtataaagaacaccaaagcaaaaccatatgggttaaattcccattaatttcaaataaattcagtaattgttcaatagtcatttggactactacaccatggactataccttctaataaggcagttgctttcaataaagatatttcttatggcatttatgaagttattgagacggaatcagaatgctggttatctaagggtgagttattaatgcttgctgacaaacttgcttcagaatgttttaagcaagcaagagtattaaatgcaaaaaaaatcaaaaacatagattataaagatttaaacactttaaaaactaagcacccattttcaaatcttactggatctaataatttttggaattacgaggttccaataattgacagttcaatagttactgaagaaacagggactg

SEQ ID NO: 305413 - DNA, 1707 bp, Unknown
  Bacterial polypeptide expressing nucleotide sequence isolated from the Sargasso Sea
ctctggacggtaatggattttttgatgcagaatatgaaggcttagctggtctccccgcaattaaagctgacaacattgtaattgatattctcaatgattcaggagctttaataaatgttgaagattttcatcattcatatccatactgctggagacataaaactcctctaatttttgcatcgacccctcaatggtttatctcaatggacaaatcaggtttgttagaaggatccatccaagcggttaaggatgttgagtgggagccttcatggggatatgaaagaattaaatctatgcttgagggaaggccagattggtgtatttctaggcaaagaagctggggagttccaattcctttaatcattaacaaaaaaactggagaaatacacccaaaacaaaacctcttattcaacgaaattgctgatcgtatcgatgagcagggtttagaagcttgggataaagctaatttagaagatttaattgatgatcatgacgaatacataaaggctactgatactcttgatgtatggtttgattcaggctcaacacatttctgtgttctggataagctatatggaaaagatttaatagcagacttatatcttgaggggtcagaccagcataggggttggtttcaatcttctttattaactggaatagctataaatggaaaagctccttataaagctgttttaactcatggattcgttgtagatgaaaatggtagaaagcaatctaaatcactgggaaatgtagtttctcctcaaaaagtttgcaataacttgggcgctgatattctcagactatgggtagcatctactgattttagaagcgagatggtcgcaactgatgagattttgaaacaagttgcagatcaatacagaagaatcagaaatactttcagatttatgatgggtaacttaaatgattttaatgacgattcaaaaaatattaatcaaaatgatttagttgaaatcgacaagtggataattagtgctgcaattaagcttgatgaggaagtaaaaaatttaaatgatagttatgcgtatcatcatgttgttcaaaagattcataatttttgtgttcatgagcttggcggtatttatttggacatcatcaaggatagaatgtatgtaacaaaaagcgactcgcatgcaagaaattctgctcaattcgcgctttttgaagttgcagatattttaattagactcatttcaccaatcttagtctttacagctgaagaaatttggcaatctcatgatctttttaaaaaacaatctaagtcagtatttctgtgtccaaaaaaatcacttaataagattgaaagttcaatatctgattatgattggaaagtaatttttgctgtaaaagattcagtaaatcaaaacatcgaaaaagcaagagcggattctgttatcaaaggatcgctcgatgcaaaaataaaaatttcttgcagctctgaaatctatggtgcgctcaaaaagattgaaaacgagcttaaatttgtctttattgcatcagaggtagagctaattgaggattcaaatacaaaattaagtattgatataactaattatgatcaaaagaaatgtataaggtgctggaacaaatgtgaatccattggatcgcatgaagatgatcctgagatttgttcaaggtgtcatacaaatgtttatggcgatggtgaagttagaaaatttgtctaaa

SEQ ID NO: 305414 - DNA, 1417 bp, Unknown
  Bacterial polypeptide expressing nucleotide sequence isolated from the Sargasso Sea
gaaaaagtttggaagagatagtgatactgtaaaagataagtcaaaatttattagtgcctgtagagaatatgctctttctcaaatagaaaatcaaaagaaagattttataaggcttggagtcttgggtgactgggaaaattcatataagtctcttgattcatcatttgaagcagataccgtcaggtctttaggcagaatagttacaaacggccatcttcagaaaggggagaaacctgtccatttttgttatgactgcaaatcagccctagcagaagcagaggttgaatatgaagataaagtttctaaatctattgatgtaggttttaaagtaaaaaaagattcacttgttaagttaagcgcagcattttcaaaagaaatagatagttgcagctttgtaatttggactactacaccatggacaattccagcaaatgctgctgtctcaattggtccagaattaaaatataccttatgtagttctaaatttggaaacttaatattagctagtgatctcattgatcaatgttcagaacgctggggtgaggatttagagaagatcagtgaggctaaaggcagtgatattaaagatgtagttctagaacatccttatctaaaaagagattctattttagttcatggagatcatgtcactactgatactggaacaggttgcgttcacactgcaccagctcatggtgtagatgaccataatatatgcaaaaaatttaatattgagacaatacatgctctggacggtaatggatttttcaatgcagaatatgaaggcttagctggtcttcccgcaattaaagctgacaacattgtaatagatattctcaatgattcaggagctttaataaatactgaagattttcatcattcatatccatattgctggagacacaaaactccgctaatttttgcatcgacccctcaatggtttatctcaatggataaatcaggtttgttagaaggatccatccaagcggttaaggatgttgagtgggaaccttcatggggatatgaaagaattaaatctatgcttgagggaaggccagattggtgtatttctaggcaaagaagctggggagttccaattcctttaatcattaacaaaaaaactggagaaatacacccaaaacaaaacctcttattcaacgaaattgctgatcgtatcgatgagcagggtttagaagcttgggataaagctaatttagaagatttaattgatgatcatgatgaatacataaaggctactgatactcttgatgtatggtttgattcaggctcaacacatttctgtgttctggataagttatatggaaaagatttaatagcagacttatatcttgaggggtcagaccagcataggggttggtttcaatcctctttattaacaggaatagctataaatggt

SEQ ID NO: 305415 - DNA, 1858 bp, Unknown
  Bacterial polypeptide expressing nucleotide sequence isolated from the Sargasso Sea
aatgagtaagagccaaattaatttacccaaaacagctttttcaatgaaagctaatttaccaattagagagccagaaattttaaaactttggaaaaaaattgatctttacaaagagttgaggaattcaagaaaaggagaggaaaaatttgttctccacgatggtcctccatatgcaaatggaaatatacatatgggtactgcattaaataaaatactaaaagatattatcgtaaaattccaccaaatggatggcaaagactctgtttatgttccaggttgggattgtcacggtttaccaattgaatggaaaattgaagagcaatacaaaaaaaataaaaaaaataagaatgatgttccaattgtagaatttagaaaagaatgccgaacgtttgctgaaaaatggatagaggttcacaaagaccagtttaaaaggttgggtgttgttggtgattgggaaaactattattcaacaatgagctatgatgcagaggcacaaatcgtaagagaacttggaaaatttttaaaagagggaagtctttacagaggatttaaaccagttttatggtcaactgtagaaaaaactgccctagctgatgccgaggttgaatatcaagaccataaatctgatacgatctatgcttgttttccagttaaattatcaaaaataaaagaacttaatgattgtaacattgttatatggacaaccactccttggacgataccagcaaataaagccttagcttacaatgaaagcttagattacttaattattcaaattaacgatgaagggaattttaaaaataaaaaaattgttatagcagaagcattattggaatcagttttaaaagattgcgagattaaagaatttaaaaaccttaagaaatttaaaggtaaagatttaaaagatactatctgtaagcatccattttttgatttagggtatgattacgatattccaatgttagaagcacgttttgtaaccactgaacaaggaacaggaattgttcattgtgcgccaagtcatggacctgatgattttaatctttgtttaaataacggaataaaggcaattgagacagtggatgatgatggaaaatatacaaataatgtttccctgtttgaaggtttacatatttttaaggctaacccagttgtgatagaaaaattgagagaacaaaataaacttctttcaaatggtgaattggttcattcatatcctcactcttggagatcaaaagcacctttagttcatagagccacaccacaatggtttatttctatggaaagtcataaactaagaagcaaggctttaaaagcaatagatgatacgacattttatccaagcaaaggtaaagaaaggttaaaatccatgattgagacaaggccagattggtgtgtatcaaggcaaagagtttggggtgtaccacttcctatttttgtaaataaaaagtctaatgaaattttaatagatgataaagtatttgaaaatattgctaatatttatgagaaagaaggttccgattgttggttttcagatgaccctcaaaaatttttaggtgataaatataaagctaaagattttgaaaagcttagcgatattgttgaagtttggtttgatagtggatcaacccattcttttgtattggagaagagaaaagaccttaaatggcctgcatcaatgtacttagagggttctgatcaacataggggttggtttcattcctctttattagagtcatgtggaacaagaggtaaggcacctttcgagtctatattatctcatggatttgttgtggatggaaaaggtcttaaaatgtcaaaatcacttggaaatgtaattacaccagaggatatttga

SEQ ID NO: 305416 - DNA, 1571 bp, Unknown
  Bacterial polypeptide expressing nucleotide sequence isolated from the Sargasso Sea
agagatattaaatcttatcattgcaaaagatcttgtgaagagttgtatagagcgtttgggaatcactaagtacagtgaaaaggcatcatgtaaaggaaaagatttagaaggttttgaggctagacacccttatttagatagatcttctaaaattatattaggagatcatgttacaaccgaagcaggaactggaatagtccatacagctccaggtcatggattggaagattatcaagtagcaatgaagtacaacctagaagtaataaatccagttaaaaataatggaacatttaaagaagatatctatggtttagaaggcatgtttgcgatgaaggcaaatgaaaaagttctagaattattggatgaagcaggaagtttgtttcattcagaggattatgcacatagctaccctcattgctggagacataaaactcctttgatgttcagagcgactccacaatggtttattggtatggacagaaataatttacttgaaaaagcaaagttaactgtagatgaagttgattggaagccagattggggacaggcaaggatgaaaggtatgctcgaagatagaccagattggtgtatctcgagacaaaggacttggggagttccgattcctttaattttaaataaagaaaccagtgaattgcatccagacatgcagaatcttatcgaaaaaatagcattaaagattgaggaacaaggactaaatgcatggtacagcatggaattgtcagagttgatagaagatcatgaagattatgaaaaaatagatgattgtttagatgtatggtttgactcaggagtaagtcactcttgtgttttaaaccatttcgaagatcttcagtttcctgcagatgtatatttagaaggatcagatcagcatagaggatggtttcaatcagctcttctaactagtgttgctatgtatgaagaagctccttatagagaagtaattactcatggttttgtaatcgattcagatggtcaaaaaatgtctaaatcaattggaaacaccacctctcctaaagagatatggaattctaaaggagctgatgtcttaagaatttggatagcctcaactgattacagaaaagaaatggttttttctcaagagattcttaaaaactgctctgatgcctacagaagaataagaaacacaataaggtttcttctaggaaatttgaatgattttaacgaccaagaaatccctaagggttttgaattagctgaattagataactacatgatttctagaacaaagagcttacaagaagaaattgtggaagattacaataactaccaattccatagggctttccaaaaaattctgaatttttgtactaatgatttaggtggcttttacttggacgttctaaaggatagactctacacctgtgctcaagattcacaggccagaacttcttctcaaatcgctctcaatgttattttggaatctcttctaagatgggtatctcctattttatgctttacggctgaagaagcttataagcaattcaaaccagaagataaatcagttcatttacttaattggtttaaagatt

SEQ ID NO: 305417 - DNA, 1774 bp, Unknown
  Bacterial polypeptide expressing nucleotide sequence isolated from the Sargasso Sea
atgttaggggcacgttttgtaaccactgaacaaggaacgggaatagttcattgtgcgccaagccatggacctgacgattttaatctttgtttaaataacggaataaaggcaattgagacagttgatgatgatggaaaatatacaaataatgtttctctatttgaaggtttacatatttttaaggctaaccccattgtgatcggaaaattgaaagatcaaaataaacttctttcaaatggtgtattggttcattcatatcctcattcgtggagatcaaaagcacccttagttcatagagcgacaccacaatggtttatttctatggaaagtcataaactgagaagtaaggctttaaaagcaatagatgatacgaccttttatccaagcaagggcaaagaaagattaaaatcaatgatcgagacaaggccagattggtgtgtatcaagacaaagagtttggggtgtaccacttcctatttttgtaaataaaaagtctaatgaaattttaatagacgatggagtatttgaaaatattgctaatatttatgagaaagaaggttctgattgttggttttcagatgaccctcaaaaatttttaggtagtaaatataaagcagaagattttgaaaagcttagtgatattgttgaagtttggtttgatagtggatcaacccattcttttgtattggagaagagaaaagaccttaaatggcctgcatcaatgtatttagagggttctgatcaacataggggttggtttcattcctctttattagagtcatgtggaacaagaggcaaagcaccttttgagtccatattatctcatgggtttgttgtggatggaaaaggtcttaaaatgtcaaaatctcttggaaatgtaattgcacctgaggatattttgaaaaaatatggtgccgatattttaagaatttgggttgctgcatcaaattatgcagaagatttaagaatagattattctattttggatcagcattctgagtcttatcgtaaaattagaaatacatttagatatttattaggaaatataaatgacaaatatgaggaaattaatttagataaaattgatgtcgaaagcttgccagagctagagaaatttatgttaagtaagattcattctcttaacaataaatttgaaaattattttaaaaaatatgattttcataatctttataaagaattgttgaatttttgcacaacagatttgtcagcattctattttgatataagaaaggacactttatattgtgatccgattaattctgagaaaagaaaatcttgtgttactattttgaatgttttattaaaatctttactgagatggttcgctccaatattgtcttttacaactgaggaaatacatcaactgatatcaaaggaaagtaaaagcatccatttagaaaaatttctcacttttccagataaatttaaaaatgaagagcttactgagagatggtctcaattaataaaaattagagatgtgtgtaacataagtattgaggaaaaaagagctagtaaagaaataggttcaagtttagaagcagatcttaatattcaacttaatgaaaaatataaggaaatagttgcagatatggatttatctgaattatgtattgtgtcgaaaacttttattaattttgataatcagtcagatattttagttgagacaaaaaaagcttctggaaataaatgctcagtttgttggaagattagagaagacccatgtgaaagacaccctaaatgtcaaatttcttaaa

SEQ ID NO: 305418 - DNA, 1366 bp, Unknown
  Bacterial polypeptide expressing nucleotide sequence isolated from the Sargasso Sea
gttattgcagatgcattaatagactcagttgtaaaagatacaaaaatccaaagtttccaaaaattaaaaaattttaaaggtaaagatttgaaaggtacaatatgtaatcacccctttttaaatcttggttatgaatatgacatacctatgttagaagcacgtttcgtaactacagaacaaggtacgggaattgtccattgtgcgccaagtcatggtcctgatgattttaatttgtgtatgaataatggaattaaagcaattgaaacagttgatggtgatggaagatatacaaaaaatgtatcactttttgaggggatacatattttcaaatcaaattctattgtgattgaaaaattaaaagatcaaaaaaaattattatcaagcggcgaacttgttcactcctatcctcattcgtggaggtctaaagcaccactagttcacagagcaactccccagtggtttatttctatggatagtcataagcttagaaataaagctttaaaagcaattgatgaaacaaccttctatcctagcaaaggaaaagaaagattaaaatcgatgattgaaacaagacctgattggtgtgtttcaagacaaagagtatggggagttccattacctatttttatcaacaagaagacaagtgaaattttggttgatgatgaggtttttgataatattgcaaaaatttatgaaaatgaaggatctgattgttggttttcggatgatccacaaaaatttcttggaaaaaaatataaagctgcggactttgaaaagttaagtgatatcgtagaggtatggtttgatagtggatctacacattcatttgtattggaaaaaagaaaagatttaaagtggcctgcatctatgtatctcgagggctctgaccagcataggggttggtttcattcatctcttttagagtcttgtggaacaagagatcgtgcaccttttgagtctattctttcccatggttttgtagttgatggtaaaggtttaaaaatgtcaaaatctttgggaaatgtaattgcgcccgaagatatccttaaaaaatatggagctgatatacttagaatttgggttgcttcctcaaattatgctgaggatcttcgaatagactattcaatactagatcagcatgctgagtcttataggaaaataagaaatacatttagatatttgcttggaaatcttaatgataaatttgaacaaataaatttagaaaagattaaaattgaagacttaccagaattagagcaatttatgcttcataaaatttacaatttaaattctaaatttagcaagtatttcaaagattacgatttccataatttgtataaagaattattaaatttttgcacgtgta

SEQ ID NO: 305419 - DNA, 2839 bp, Unknown
  Bacterial polypeptide expressing nucleotide sequence isolated from the Sargasso Sea
atgagcaacaagaaagccgattcgaaaccgcagtcacgctacccggtcaacctgctcgacacgcccttcccgatgcgtggcgacctgcccaagcgtgagccgcaatgggtcaaggagtggcaggaacgcaaggtctacgagaagatccgcgccgcctccaagggccgcaagaagttcatcctgcacgacgggccgccgtatgcgaacggcgacatccacctcggccacgcggtgaacaagattctcaaggatatgatcgtcaaggcgcgcaatatggcgggcttcgacgcggtctacgtgccgggctgggattgccacggcatgccgatcgaaatccagatcgaaaaacagttcggcaagtcgctgccggccgctgaagtgatgcagaaggcgcgcgcctacgcgaccgagcagatcgaaaagcagaaggtcggcttccgccgtctcggcgtgctcggcgactgggacaacccgtacaagacgatgaacttcacgaacgaagccggcgaaatccgcgcgctcgcgaagatcatggaaaagggctacgtgttccgcggcctgaagccggtcaactggtgtttcgactgcggctcggcgctggccgaagcggaagtcgaatacgcggacaagaccgacccgaccatcgacgtgctgttcagcttcgccgaaccggaaaagaccgcgcaggccttcggcctcaaagcactgccgcgcaacgaaggcggcatcgtgatctggaccaccacgccgtggaccatccccgccaaccaggcgctgaacctgcatccggaaatcgtctacgcgctggtcgatacgccgcgcggcttgctgatcctcgccgaagagcgtgtggaagcgtgcctgaaacagtacgaactggaaggcacggtcatcgcaaccgcgccgggcgcgaagctcgtcaatctgcgcttcaatcatccgctcgcggccgcgcatccggcctacaagcgcacggcgccggtttatctcggcgactacgtgacgactgaatcgggtacgggtgtcgtccactcgtcgccggcctacggcgtggaagacttcgtgtcctgcaaggcacacggcatggccgattccgacatcatcaacccggtgatgggcgacggccgttacatcgaatcgctcgcgctgttcggcggcctgtcgatctgggcggccaatccgcagatcgtcgaagccctgcgggccgcgggctcgctgatgcgcaccgagaactaccggcacagctacatgcattgctggcgccacaagacgccgatcatctaccgcgcaacctcgcaatggttcgccggcatggatgtgaagccgaacgactccgacaagacgctgcgcgaaaccgcgctcgaaggcatcgagaacaccgccttctatccggcgtggggcaaacagcgcctgttcagcatgatcgcgaatcgcccggactggacgctgtcgcgtcagcgccaatggggcgtgccgatggcgttcttcgtgcacaaggaaaccggcgaactgcatccgcgtacgctggagctgctcgaagaagtcgcgcaacgcgtcgagaaggccggcattgaagcgtggcaaacgctagacccgcgcgaactgctcggcgacgacgccaacatgtacgaaaagaaccgcgacacgctcgacgtctggttcgattcgggcaccacgcattggcacgtgctgcgcggctcgcataaggacgaactgcaattcccggccgacctgtatctggaaggctcggaccagcatcgcggctggttccactcgtcgctgctgaccgcgtcgatgctcgacgggcgtccgccgtataacgcgctgctcacgcacggcttcaccgtcgacggcgaaggccgcaagatgagcaagtcactcggcaacgggatcgacccgcatgaggtggcgaaccgcctcggtgcggaaatcatccgtctgtggatcgcctcgaccgattactcgggcgaactggcgatctccgaggaaatcctgaagcgcgtgacggaaagctatcgccgcatccgcaacacgttgcgcttcctgctcgcgaacctctcggacttcgatttcgcgcaacacgcgcgtccggtcgaagactggctcgagatcgatcgttacgcggtggcgctgtcggcgaatctgcagaacgacatcctctcgcactacgacaagtacgagttccacccggtggtcgccaagctgcagacgttctgctcggaagacctgggcggcttctatctcgacgtgctgaaagaccgtctgtacaccacggcggcagactccgtcgcgcgccgctcggcgcagaccgcgctgtatcacatcgcgcacggcctgctgcgtctgatggcgccgttcatgtcgttcaccgcggaagaagcgtggaaggtgttccagccgaacagcgaaacgatcttcaccgagacgtatcacgcgttcccggcggtgccgcaagccggtgagctgctcgacaagtggacgctgctgcgcgccgcgcgcagcgacgtgaccaaggcgttggaagaagcacgcgttgcgaacctgatcggctcgtcgctgcaggcggaagtcgaaatccgggcgagcggcgcgcgttatgacgcgctcacgagcctcggcgacgacctcaagtttgtgctgatcacgtcggcggcgaacgtcgtgaaggtcgacagcgaagcggaagaaagcgtcgaagtgatcgcctcgaagtacctgaagtgcgagcgctgctggcactatcgcgcggacgtcggcgcctacgccgagcaccccaccttgtgcggccgctgcttcagcaatctgttcggcaacggcgaaacgaggagcgcggcataat

SEQ ID NO: 305420 - DNA, 1363 bp, Unknown
  Bacterial polypeptide expressing nucleotide sequence isolated from the Sargasso Sea
aatgatagaaacccggcctgattggtgtgtttctagacaaagagtatggggtgttcctcttccaatttttattaataaaaagactaaagaaattttagtagatgatgaggtaaatgaaactattgccgccatttatgaaaaagagggttcagattgttggttttcagatgacccacaaagatttttaggaaataaatacaaagccgaagattatgacaaattgagcgatattgttgaagtttggtttgatagcggatctacacattcatttgttcttgaaaaaagagaagatttaaagtggccagcatcaatgtatttagaaggttccgatcaacatagaggctggtttcattcatcattattagagtcttgtggaactaggggaagagcaccgtttgaaaatattttgtcccatggatttgtcgtggacggcaaaggattgaaaatgtcaaaatctttaggaaatgtaattgccccagaagatattctaaaaaaatatggagcagatatactaagaatttgggtagcatcatcaaattactcagaggatttaagaatagattattctattctggatcaacatgcagaatcttacagaaaaataagaaatacatttaggtacttgcttgggaatattaaagataattttgaagaaattgattttaagaaagtagatttaaatgaattacctgaactcgaacaatttatgttgcataagttgtattctttggatgttaactttaaaaaatattttaaaaattatgattttcataatttatataaagagctgcttaatttttgtactgtagatctgtctgcattttattttgatataagaaaagattcattatattgcgactctatagactcaaaaaatagaaaatctactatactattgttaaacataattttgaattcattattaaaatggtttgcaccaatcttatcttttacaactgaagaaatatatagattaatatttaaagatagcaaaagtgttcatttagaaaaatttttaaatttcccaaataattttgaaaacaaaaaattgtatcaaaaatggttagagctaattaaaattagaaacatttgtaatattagtattgaagaacaacgagcaaataaagaaattggatccagtttagaggcagacttaaatatacatctaaacaaaaaattacaagaaatcactaagaacatagacttttcagaactatgtataacatcaaaagctcagatttcttttaaggaaaaacttgaaacaagtgcacaaactacaaaagcaaagggaacaaagtgtaccctgtgttggaaaattagtgaaaatgcttgtgacagaactcattgtccaaaaaacacttaa

SEQ ID NO: 305421 - DNA, 1437 bp, Unknown
  Bacterial polypeptide expressing nucleotide sequence isolated from the Sargasso Sea
gaacatttagcgggtatgtttgtgtttaagtccaacgaaaaggttatcgaaattttagaagaaaatgatgccttgctagctaaagcagattaccagcatagctatccgcattgttggaggcataaaacacccttaatgtttagagcaacgcctcaatggtttattggaatggaaagcaaggatctacttaaaaatgccttttcatcaatagagaatatccactgggagccagattggggtaaagctaggatggcttctatgcttgatagcagaccggattggtgtatatctagacagagatcgtggggagttccaataactttattagttcataatgaaactggagagattcatcctgatattgagacaatcattgaaaaagtagctaccttaatagaaaaggttggaatacaagcttggcatgatgttgaagtttcagatttaatagatgattctgagaagtacttcaaagttactgactgtttagacgtatggtttgattccggtgttactcatgcttgtgttttaaattcaaatgacgaattagattttccagcagatttgtatttagaaggctctgatcaacatagaggatggtttcaatcgtcgctccttacaagtatggcaattaatggagagccaccatacaaaggagtattaacccatggatttgttgtagacagtgaaggaaagaagatgtctaaatcaataggtaatgtcatatcgcctcagaagatatgggacacaatgggggcagacgtactaagagcatggatagcttcgactgattacacgaaagaaatcgttctctctgatgatattctaaaaagaacttcagattcttaccggagaataagaaacacaattagatttttattgggaaacctaagtgatttcaataatgaagatgctgttggaaaagacaagctaacagagttggataaatggatgatatacaggacaaaaagtcttcaagatgaaataaaaaaagattacgaaaattttcaattccatcaagcttttcagaagatccataatttctgtgccaatgatttaggaggtttttacttagatattctaaaagatagactttacacagctaaaacagattcggacgctagaaggtcttctcagacagctttatctaacattttacaggctttattaagatggataagtcctgtacttagttttacggctgaagaggcttggctcttaatggaggaagacgaagattcagtacatcttctagagtggtttgaggattggaatgactttggcgaattaaagatatccgatgatgagtggaacaaggttttagaaataagatctgaagttaataaacacattgaagaaactaggaatcaggagattataggatctgcgcttgaagcagacctagagctatgttgcgataaaagcttgaaacaacttctg

SEQ ID NO: 305422 - DNA, 2017 bp, Unknown
  Bacterial polypeptide expressing nucleotide sequence isolated from the Sargasso Sea
accgagattccctcagatattctaaaagaattaatttgcaagcatccatttcataatctccacaaaggatttaattttgatgttccattattagatggtaaccacgtgacagatgatgcgggtacaggttttgttcatacggcccctggtcatggtattgatgattttgagatttggatgaaaaacaagaaaagtctagatgaacaaaatattgatagtactatcccatacacagtaaacgaggatggagcctttgatgaaaatatcgatggttttcatggagtgtatgtgtttgataaaaacggaaaaaaaggtaaagcaaatgagcatgtcataagtaaattagtcgactgtgcatcaatcatttctcgaaagcgctttgaacaccaatatcctcattcgtggcgttcaaaaaaacctgtaattttccgaaacaccccacaatggtttatttcgatggaggataataaaactaatggtttacggtcaactgcactgaaatcaatcaataatacaattttctatcctcccgcgggaaagaacagattgcactcaatgattgaggcaaggccagattgggttttgtcaagacaaagaacatggggagtgccaatttccttattcattaacaggcaaacaggcatttttattccaaataaagaatttgataaatctgaaatattaattgatcgaattcataaaattttctctgaagaaggagcaaattcttggtttaaggaaaatgcaaaagagagattcttagaagggattgttgataatcatgatgattgggaaaaagttgatgacattttggatgtatggttcgagtcaggtacaactcatgcctttgttcttgaaaataatcctgaaacaacgtggccagcggatatgtatttggaaggaagcgatcaacacagaggatggtttcactcatctttactggaaagtagcctgacccgtggtcgtgccccctacaaatctgtcttaactcatggcttcaccatggataaagacggtagaaagatgtccaagtctcttgggaatgttatatctccccaagatatagtaaaaaaatatggagccgatattttaaggctttgggttgcatccacagactatagtgatgatcagcgaattggtgaagagatcttgaagtcaattatagaagcttacagaaagattaggaatacgatcaggtggatgttgggtgtattatcaaattatgatcagagctggatttatgattatgaggatttagacgaattagagaaatatatgttgcacagcctcacaagactacaagaggatgtacaggatgcatatgaagcttatgactacaggaaagtgaccacattgctggtgaattacattaacttggatttatcagccttttatttcgatatccgcaaggactctctctattgtgacccttactcgagtgaaaaaagaaaatcttcgctctatgtaataaacctcatattcaaaacgatatcaaaattatatgcaccaatcttaagcttcacaatggatgaggtttggaaaaattatccatttgctcaggatagatcgattcatctatcaagatttgagttggtaaataacaaatggagtagtgataatataaattcaaagtgggataatgtaagaaagttacgtaagaccgtaactgctgcgctagagataaaaaggcgagataaagaaattgggtcaagcctcgaagcaggtattcagatatatctgaatgataaagatatacaagcttcagtatgtgatatcgacctagctgaaatttgcatcacaagcagctttgaattgataaataaaaagcctgatagtaagtgttttgttttggatgaggagcctgaaatcggcgtgattgttcacattgctaatggtaaaaaatgtaagaggtcttggaaggttagtcaggacgtaggattggatgctgaatatcccgaattatccaagagagatgccgatgcggtacgtgagtttctgagtttaagccaaaattagt

SEQ ID NO: 305423 - DNA, 2773 bp, Unknown
  Bacterial polypeptide expressing nucleotide sequence isolated from the Sargasso Sea
atgacagttaactatagagatacattaaatcttccagatactgatttttcaatgaaagctggattgcccagaaaagagccagagatattggatttatggtccaaacaagacttgtatgcaaagatcagaaagaagtatgagaataaagaactatttctattgcacgatggacctccatatgcaaacggggatatacatctagggcactcacttaataaaatccttaaggatataactatcaaatacaaaacccttagtggttttgatgctccttatgttcccggctgggattgtcatggcttgccaattgaacttaatgttgaaaagaaacatggaaaaaatagtgaattagtaaaaaataaagaaagttttcaaaaggcttgcaaagaatatgctgaaactcaaattaataagcaattagatgattttaaaagattgggtgtgtttggtgattgggaaaattcatataaatcactagatccaaaatttgaggcagatatagtcagatctttaggcatcatatataaagaaggtcatttagaaaaaggtgaaaaacctgttcattggtgtcaagattgtggatcatccttagcagaggctgaggttgaatatattgataaaacttctaaatcaatcgatgttgcattcaaggtagatgaaacatctatagataaggttaaggacttatttaatatcaaagaagcagatgaaatttcatttgtgatatggactacaacaccgtggacaataccttcaaatgtggcagtttgtattaatcctgaatttaaatactcacttataaaaatgaataacaaattttatgtgatcgcatttgaaatggttgatcattgtaaagaaagatggaaacaaaaatttgatgttatatccacaactgagggtaaaaaattaagtgatatttatctcattcatccatttttagaaagaaagtcagtccttcttcatggagatcatgttacaactgaaacaggaacaggatgcgttcatactgctccagctcatggtatggatgatcatttaatatgtaaaaaaaataatattgatacgataaattctctaaataataaagctttctttaaagatgagttagatttcattgcggggcttcctgccataaaagcagatccactcattgttgaaaaattacaagagcataatgcactcatcaatattgaagattatcatcattcatatcctcattgttggagacataaaacgcccctaattttcacatcaactcctcaatggtttatttcaatgaaaaaaaataaccttattaaagatgccttgaaagatattaagaatgtaaactgggaaccttcttggggctttcaaagaattgaatccatgctttctgatagacctgattggtgtatttcaagacaaagaaattggggagttccaataactttggttgttcataaggatactggtgaaatccatcccgatcaaaaagacttatttgaaaaatttgcacaagttattgaaaaagatggaatttcagcttgggataagttgaatttagaagattttatcgatgaccatgaagaatacattaaaacatctgattctctggatgtttggtttgactctggtgtaactcattttgcagtttcctcaaaaagatttggtaataaagttatctcagatctttatctagagggttcagatcaacatagaggatggtttcaatcttcattattaactagtatagctatgaataattctgcaccgtataaaacagtccttactcatggctttgttgtagatgaacaaggaagaaaacaatcaaaatcacttggaaatgttgtttctcctcaaaaagtatgggacagcttaggtgcagatattttaagactatgggtagcttcaactgatttcagaagtgaaatggttgcatctgatgaaatattgaaacgaacttctgatcaatacagaagaattaggaatacatttagatttatcttgggtaacttaagtgattttaatgataaaaataaagttgagttcaatgatcaagttgaattagataaatggatcatcaatgaaacaaaaatccttcaaaaagaaattacagcattatatgaatcatattcttatcataaggcaactcaaaaaatacataatttttgcgttaacgaattgggaggaatatatctcgatattgtcaaagataggctttacacatgcaaaaacgattctttagcaagaagatcatgtcaaacgagccttgattttattctaaatgtattagtaaggctcattgctccgatactttcttatacagcagaagaaatttggcaaactagcgacagattaaatgatcaggagaaatctgtttttctatcaaattttgacacttttgaaattgaatcggaatcaattatcaatcagtctgaatggaaaagaatttttgaaatcaaggatgctgtcaatcagtctattgaagaaatgagaaatgataacaagttaaaaggatctcttgattcagtagtaaacattcaagctacatcaaatgactttcaaattctaagtaagcttggagacgaacttcattttttatttatttcttcagaggcaaaagttaaagagggaaatacttttaaaattaaagtcacaacttcaaaaaatgcaaaatgtgtcagatgttggcacagggatttgtcagtaggatctatacaggaacatccagaattatgtaatagatgtattgataatatagaaaatgatggcgagcaaagaaaatctgtataac

SEQ ID NO: 305424 - DNA, 829 bp, Unknown
  Bacterial polypeptide expressing nucleotide sequence isolated from the Sargasso Sea
aagagacaaagcactaaaggcaattgatgaaactactttttatccctccaaaggtaaagaaagattaaaatcaatgattgaaacaagacctgattggtgtgtttcaagacaaagagtttggggcgttccccttccaatttttgtgaataaaaaaacgaaagaaattttagcagacgatgatgttacagaaaatattgcatcaatttatgaaaaagaaggctctgattgttggttttcagatgatccgcaaagatttttaggtaaaaaatataaatctgaagattatgaaaaattaagtgatatcgtcgaagtttggtttgatagtggctcaactcattcttttgtattggaaaaaagagaggatttaaaatggccagcatcaatgtatttagagggttcagatcaacataggggttggtttcactcatctctactggagtcttgtggaactagagatagagctccatttgaatcaatattatcacatggttttgttgtagatggcaaaggtttaaaaatgtcaaaatcattaggaaacgtaattgcacctgatgatatcttaaaaaagtatggtgctgatatcttgagaatttgggtagcatcatcaaattatgcagaggatttaagaatagattattctattttagatcaacatgcagagtcttatagaaaaattagaaatactttcagatatttactaggaaatataaatgataattttgaaataataaactttgataagttagatttaaatggattacctgagttagagcaattaatgctccataaaatttatattttaaacgacaattttaaaaaatatttttaa

SEQ ID NO: 305425 - DNA, 1507 bp, Unknown
  Bacterial polypeptide expressing nucleotide sequence isolated from the Sargasso Sea
gagtttagaaaagaatgtagaacatttgctgagaagtggattgaaattcacaaaagccaatttaagagattgggtgttgtgggggattgggaaaattattactctacgatgagctttggagcagaagcacagatagttagagaacttggtaaatttttaaaagagggaagtctttatagaggctttaaaccagttttatggtcaacagttgagaagactgcacttgcagatgccgaggtagaatatcaggatcataaatcagatacaatttatacatcattcaaagttaaatcatctaatttaaaaaatttagttggaaccgaaataataatttggacaacaaccccatggacaataccagccaataaagctttagcttacaacgagtctcttgattatataattctagaaataaatgatgaaggtaatttcaaaaatagaaaaatcgttattgctgatgctttgctagactcagttgttaaagagtgtgaattaaaaaattataaaaaaattcatgtatttaaaggtaaagaatttaaaaacagcatttgtagtcatccttttttaaatcttggttatgatcatgatatcccaatgttagaagctagatttgtaacaactgagcaaggaactggaatagttcactgcgcaccaagtcacggacctgatgactttaatctttgtttgaataacggtattaaagcaatagaaacagttgatggagatggaaaatatacaaacaatgtgaaattgtttgaaggagtccatatttttaaagcaaatcctattgtaattgaaaaactgagagaacaaaaaaatttattatttaatggtgagttggttcattcttatccacactcatggagatctaaggcaccacttgtacatagagctacaccacaatggtttatctcaatggaaagtcataaattaagagataaagcactaaaggctattgatgaaacgactttttatccaagcaaaggaaaagaaagattaaaatcaatgattgaaacaagacctgactggtgtgtttcaagacaaagagtttggggtgtacctcttccgatctttgttaataaaaaaacaaaagaaattttaattgacgatgaagtaactcaaaatattgcaactatttacgaaaatgaaggctctgattgttggttttcagatgatcctcaaagatttttaggtaacaaatataaagctgaaaattatgataaattaagtgatattgtcgaagtttggtttgatagtggctcaacccattcttttgttttagaaaaaagagaggatttaaaatggccagcatcaatgtatttagaggggtcagatcaacatagaggatggtttcactcatcattactagagtcatgcggaaccagaggtagagctccatttgaatcaattttatcacatggctttgttgtggacggtaaaggtttgaagatgtctaaatcattaggaaatgtaatagcacctgaagatattttaaaaaagtatggcg

SEQ ID NO: 305426 - DNA, 985 bp, Unknown
  Bacterial polypeptide expressing nucleotide sequence isolated from the Sargasso Sea
aatgaattcaatgctggaaggacgtcccgattggtgtatttctagacaaagggcttggggtgtaccgattactttactaatacataaagagacaggagagcttcatccagaaacaagaaagattatagaaaaagtagctgatttagttgaattagaaggcattcaagcttggcatgatatagaaaccaagaatctaattaacgattatgagtcttatgaaaaaataacagattgcctagatgtctggtttgattctggagttactcatgcttgtgtattagatgtaaatgaagatttacagtttccagctgatttataccttgaaggttctgatcagcaccgagggtggtttcagtcatcattacttacaagcattgctatgaaagaggttcctccttacaaggcagtattgactcatggttttgttgttgattctgaaggcaaaaaaatgtctaaatctctaggaaatgtcatctctcctcaaaaagtattggagacgatgggtgctgatgtcctaagaacatggacagcatctactgattacactaaagaaattgttctttccgacgatattttaaaaaggtcgtctgattcttataggagaataagaaatacaataagatttttactaggaaacttaagtgactattcaggcgaaaaactggcgcctgaaaaacttacagagttagataaatggatgattcttaaaactaagaatcttcaagaggagatcgtagaagactatctaaattacgactttcatcatgcgtttcaaaagattcataatttttgctccaatgatttaggtggtttttatttagacattttaaaagatagactttacacagcaaaatcaacttcagacgcacgtttatcttcacagattgctcttttctatattcttcaagcattgcttagatggataagtcctatactttcttttactgcagaggaagccctggcatccctaggaagtgatacaaat

SEQ ID NO: 305427 - DNA, 1506 bp, Unknown
  Bacterial polypeptide expressing nucleotide sequence isolated from the Sargasso Sea
tccacttacatttatggccacccccccaatggtttttttcaatgactaaatctggtttgttagatggagcaactcgagcactggaagaaattaaattcatttctgagtggggcaaagaaagaatggatattatgcttaatgataggcctgattggtgtatatcaaggcaaagagattggggcataccaatacctctttattatgataaaaatacaggcgagcctcatcctgagcaagataatattttcaatgctgtttctgagtccataaaagataagggtatagactcttggaattcaatcgatttaaaactaagtgattcagaaaattatgaaaaatcaaaagatatatttgatgtgtggtttgattcaggaataactcatttttgtgttgtcgacgaattgtatggatcaaatacacagtctgatctttaccttgaaggtagtgatcagcatagaggttggtttcagtcatctcttttaacttctatcgctatgaaaggtacagcaccttataaatccgttttaacacatggatttgttgtagatgaagaagggaaaaaaatgtctaaatcaataggcaatgttatcaccccacaagaagtaatagatcagtctggtgcagacattcttaggttttggattgcttcaacagactttagaggcgaaatggccttttctaaagacatactaaatagatccatcgatggtttcaggcgtataagaaatacaatgcgttttatgatatcgaatttatatgattattcagataattttaatgaaaaagatcttttactcttagacaaggtaattcttaataaaactaaggaattgcaagaagaaattagagcaaactatgaaaactataatcttcacttcattacctccaaaattttaaatttttgtgtaaatgatctaggaggaatgtatttagacataattaaagacaggctgtatacaatgaaagacggttcagtagggagaagatcagctcagtttacaatcaaaaaagtcttaacaatattaataaagaatatttctcctattcttccattcactgcttatgaattttatgaacaaatgtttccaggggaaggggataagatttttctagaagaatatgaaaacctaagtagttttgcatctaatgatgaaatggagatattcaaagttctggaagagcttagatcatcggtttaccaagaaatagagagcaaaagacaaaaaggtatattaaaaaatgcattagatgcagaaatttctattaccctaacaaaagaaaaatttgaattattggaacacttatcctctgagatccataaattttttatatcctcagcttgtaagttagttttaggtaaagaagaaaaaatccaggtttcaaaatcgaaacatgagaaatgttcaagatgttggcatagagttgaaggggtagaagcagggggacattgctatagatgtgaagataatatgaatggagaaggtgaaataaggagctttttctaat

SEQ ID NO: 305428 - DNA, 1597 bp, Unknown
  Bacterial polypeptide expressing nucleotide sequence isolated from the Sargasso Sea
gtatgactttgaagtgccggtgattttaggtgatcacgtcaccaccgattcaggtactggtgctgtgcatacggcccctggtcatggcccggaagactttaccgtcggtaagctctacaacttagaagtggctaacccagtaggtgctaacggtgtctatctgccggatacgccactgtttgcaggtcagcatgtgtttaaagccaatgactctgtggttgaagccttaaaagaagccggcaagctcttagtgcataaagccttaacacacagctacccacattgctggcgccataaaacccctattattttccgtgctacgccgcagtggtttatcagcatggaacaaaaaggcctgcgcagcacctcactgcaagaaattggtcaaacccgctggatcccggattggggtcagcagcgtattgaaaacatggtggcagctcgtccggactggtgtatttcccgtcagcgtacctggggtgtgcctattgctctgtttgtcgacaaagacaccagtgctttgcaccctaatactcaggagctgatggagcaagtggctcagttagtcgaacaatctggtattcaggcatggtttgatttagaagccgaaaccttattgggcgctgatgcggctcagtacgtcaaagtgacagacacgctggacgtctggtttgactcaggcgtgacgcacgcttgtgtgattgagcctcgtgcagaatttcatggtgctactcaggccgacctgtatttagaaggttcggatcaacaccgtggctggtttatgtcgtctctgatgacaggtgtggccattaaacaccacgcgccctacaaacaagtactgacccatgggtttactgtggacggtgaaggccgcaaaatgtccaagtccttgggcaatgtggtgtcgccgcaggatgtgatgaacaagttaggcgctgacattttgcgcttatgggtcgcaacgacggattacacctcagagatgacagtctctgatgaaatcttaaaccgtgctgcagacaaataccgtcgtatccgtaatacagcccgtttccttttagcgaacttaaaaggttttgaaccggaaacgcaactggtgccatttgaagagatggtgcagctggatttatggctggtgcaacgtgctgccaaattgcagcaggaaattgttgatgcctatgaaaactaccagttccaccaggtcagccagaagttaatgaatttctgtactgtggagttgggtagcttctacttagacgtcattaaagaccgtcagtacacggcaaaaaccgatggcttagcccgtcgttcttgtcagactgcattattccacgtggtacaagccatggttcgctggatggcgcctatcatgagcttcacagcgcaggaaatctgggaagtgatgccagggcagcatagcgagtttgtcttcactgaagcctggtatcagggcttagacactgttcctgcaggtcagtttgatgatgcgttttggcaacaactgctggaagtgcgtgatgcagtcaacaaggtgctggaagttggccgtcgtgatggcaaaattggtgcgtcattacaagctgaagtgaccttgtat

SEQ ID NO: 305429 - DNA, 1857 bp, Unknown
  Bacterial polypeptide expressing nucleotide sequence isolated from the Sargasso Sea
ctttatgttctcatccatttaaaaatttaggttatgagtatgatgtgccgttgttagaggcaaattttgtaactttagatcaaggtactggaattgttcactgtgcccctagtcatgggcctgatgattttaatttatgtttgaaaaatggaatgaaggcaatcgaaacagttaataatgacggtctttatacaaagaatatacctatttttgagggcacgcacgtatttaaagctgatgaaataattataaaaaatttaaaagagcaaaataatcttttaggaagcggtaacttaatacacagttaccctcattcttggagatctaaagccccgttagtgcacagagctacacctcaatggtttatatcgatggaaagtcataagcttagaaaaaaagcaatcgaatctattgatcagacaaacttttacccagaaaaaggaaaaacaagaattagatcaatgatagagacaaggccagactggtgtatctcaaggcagcgttcctggggagtacctttaccaatttttatcgacaagaaaactaatgagcctttaagagatcccgaagtaattgaaaatatagcaaaaatttatgaaaaagaagggtcagactgttggtttcatgatgatccacaaaggtttcttggaaaaaaatataacaaagacaattatattaaatcaaacgatatagtagaggtttggtttgatagtggatctacacattcatttgtcttagaaaaaagaaaagatttaaaatggccagcatcaatgtatttagagggatctgaccaacacagaggttggtttcactcctctcttttagagtcttgtggaactaggggcagagctccttttgaaagtatactttcacacggctttgttgtggacggaaaaggaatgaaaatgtctaagtctgctggtaatattatttcacctgaagacattttaaaaaaatatggggcggatatacttagactttgggttgcttcttccgactacgctgaggatttaagaatagatcatacgatattagaacaacacgctgagtcttatagaaaaattagaaatactttcagatatattttagggaatttaagagacaattacagtccacaaaatttcaactcaattaaagtaaaagatttacctgaattagagcaggtaatcttgcataaactttattttttaagcttagaaattaagaagagtttaaaagattataatttccataagcttcaaaaggaattgttaaatttttgcactcttgacctatcgtcattctattttgatataagaaaagatacactatattgtgacgatgtaagttcacaaaaaagaaagtcatgtgtaaccttgcttaatataattcttgagtgtttattaaaatggtacgcaccagtgctatcatttacaactgaggaaattacagatttatcaaataaaaataaaaaaataagcatccatgaggaaattttttctgacttaccagaaaattggaaaaatgaaactctttacaaaaaatgggaaaaattactttcttttagacaggaagttaatatcgctatagaggaaaaaagatcaaaaaaaataattggatctagtttagaggctgatgtaaagatttctttatctaaaaaagatcatgaaatccttgatagtgtagacgcagaagaactttttattacttctaatgttacaaaaactatacaggatgatataaaagataaattagtagtatcagtaaaaaaagctgagggaacaaagtgttcaagatgttggaaaatagtgccaaagccaaatgaaaataaatgttcaagaactaaaatttgtccgctacaaaatgttggaaaataaa

SEQ ID NO: 305430 - DNA, 2119 bp, Unknown
  Bacterial polypeptide expressing nucleotide sequence isolated from the Sargasso Sea
aatggaatataaagatacaatttttcttcccaaaacatcttttgaaatgagagctaaccttccatcaaaagaacctgcaataatagaggagtgggataaagaaaatatttttaaaaagctaagagataaatctaaaggtagagaaaaatttgttcttcatgatggtccaccatatgcaaatggacatattcatatggggacagctcttaataaaattttaaaagatgttattgtgcgaactcaacaaatggctggtaaagactctatctacgttcctggttgggattgtcacgggttaccaattgaatggaaaatagaagaagaatatagaaaaaaaggaaagaacaaggatgatgtcccaactgttcaatttagaaatgagtgtagagagtttgcagaaaagtggatcgagatacaaaaaaaagagtttaggcgacttggtgttgaaggagattgggaaaatccttacctcacaatgtcaaatcaagcagaagcacaaattgttcgagagcttggaaaatttttacttgatgaaagtttgtataaaggagcaaaaccagttctctggtctgttgtagaaaaaacagctctagctgacgctgaagtcgaatatgaagatcatacatccaacactatatatgttaaatttttaattaaaaattctatcgatgaagatttaattgattctaatattgttatttggacaacaactccttggacgattccaggtaacagagctctagcttatggtaaagaattagattattcacttattgttgttgaagaattagaagaagatagtctagcaaaaataaatgataaattaatattttcttcagaacttttagaaaatgtaactaaagaaattggaattaaaaaatttagtataaaaaagaaatttaaaggagataatttatcttcttgtgaatgtgaacatccgtttaaacaattgggatacgattttattgtaaaaccatttcatggagattttgtaaacttagaacaaggtacaggggttgtacatatcgctcctggacatggagatgacgactatgttttagggatagaaaataatgttgatatcatacagacagttcaagatgatggtaaatataatcaacatgctgttggttttgaaggtgaacatatttataaagtagatcacaaaatcgcagataaattagaagaattttcaaaattattatttaaaggaacgcttcgtcatagctaccctcattcatggaggtctaaagctcctcttatttatagaaatacgccacaatggttcatttccatggaaaaaaataatttaagagacattgctctcaaatcaattgatgaaactattttctatcctcctcaaggccaaacaaggcttagatcaatgattgaaactagaccagattggtgtgtatctagacaaagagtgtggggtgtacctttaccattatttgtaaataaaaaaacgggtcaacctttaagagatgaaaatattatcaatagaatagctgacatatatgaaaaagaaggaagcaatacgtggtttaccgaagatccacaaaggtttttaggggatgaatattcacttgaagattatgaacaggttaaagatgtagttgaagtatggtttgatagtggttctacacatgctttttgtctagaacaaagagaagatttgaaatggcctgcatcaatgtacttagaaggaagtgatcaacacagaggatggtttcattcatctcttttagagtcttctggcacaagaggtaaagcgccttatgaaagtgttctgacacacgggtttgttgttgatggaagaggacgtaaaatgtctaaatctttaggtaatgttatttctccagatgatatattaaaaaaatatggagtagatattttaagattgtgggttgtcgcatctgattattatgatgatctgaagcttgataatgctatcctccaatcacaagctgagtcttatagaagaataagaaatacctttcgttttttaattggcaatttaagtgattttactgaagaagaagctattgatgagagtgagtttccagagttagaaagatatcttctacatcgattgtgggaagttgataaagtcgttcaa

SEQ ID NO: 305431 - DNA, 1332 bp, Unknown
  Bacterial polypeptide expressing nucleotide sequence isolated from the Sargasso Sea
gatggagatgaaaaatatacaaaaaatgttttgttgtttgaaggaatacatatttttaaatctaatccaatcgtaatagaaaaactcaaagaacaaaaaaaacttctatctaatggtgaactcactcactcatatcctcactcttggaggtcaaaagcacccttagttcatagagcaacacctcaatggtttatttctatggatagtcataaattacgaaacaaagctttaaaggctattgatcaaactattttttatccaaacaaaggaaaagaaagattaaaatcaatgattgaaacaagacctgattggtgtgtttcaagacaaagagtttggggagtacctttacctatatttataaataaaaaaactaatgaaattttagttgatgataatgtttttgaaaatattgcaaaaatttatgaaaaagagggttcggattgttggttttcagatgatcctcaaaaatttcttggaaaaaaatataaagcagaagattttgaaaaacttagtgacattgtagaggtatggttcgatagtgggtctacacattcttttgtattagaaaaaagaaaagatttaaagtggccagcatcaatgtacttagagggatctgaccagcacagaggttggttccattcatctctgcttgaatcttgtggaacaagagatcgggctccatttgaatcaattctttctcatggttttgtcgttgacggtaaaggtttaaaaatgtcaaagtctttaggtaatgtaattgcgcctgaagatattcttaaaaaatatggtgcagatatacttagaatttgggttgcatcatcaaattatgctgaggatttaagaattgattattcaatattagatcaacatgctgagtcatatagaaaaattagaaatacatttagatatttattaggaaatctaaatgatacttttgagaatattaatttagactctatagatattcaagaattgcccgaattggaacaatttatgcttcataaaatttataatttgaatattaattttaataaatattttaaaaattatgattttcataatctttacaaagaattattaaatttctgtacagtagacttatcagctttctatttcgatataagaaaagatattttatattgtgatccaaaaaattctgaaaaaagaaaatcaacattgttgttactaaatattattttaaattcattattgaaatggtttgcaccaattttatcatttaccactgaagaaatttatcaactaatctcaaaacaaaaaaaaagtgttcacttagaaaaatttatcacttttcctaaggaatttaataattca

SEQ ID NO: 305432 - DNA, 2344 bp, Unknown
  Bacterial polypeptide expressing nucleotide sequence isolated from the Sargasso Sea
aatgagtaattcccagataaacctacctaaaactgctttttcaatgaaagctaatttgcctgtaaaggagccagaaattttagaatattggcaaaagattaatctatacgatgagttgagaaattcaagcaaaggaaaagaaaaatttgtcctccacgatggtcctccatatgcaaatggtaatattcatatgggaactgctcttaataaaattttaaaagatattattgtaaaattccaccaaatggatggaaaagattctatctatgttcctggatgggattgtcatgggttgccaattgaatggaaaattgaagagcaatataaaaagaataaaaaaaataagaatgatgttccaatagtagaatttcgaaaagaatgtagattgtttgcagaaaaatggattgaggtacataaaggtcagtttaaacgtttgggtgtagtcggtgattgggaaaattattactcaactatgagttttgatgccgaggctcaaattgtaagggagcttggcaagtttttaaaagaggggagtttatacagaggttttaaaccagtattatggtctactgttgaaaaaactgctttagcagatgcagaagttgaatatcaagatcataaatcagatacaatttatacatcttttctaattaaaagatctaacttgaaagatcttctaggtagtgaaataattatttggactacaactccctggacaattccagccaatagggctttggcttacaatgaagatcttgaatatgttcttttagagttaaatgacgaaagtgactttaaaaatagaaaaattattgtagctgaagctctactacagtcagtaattaatgagtgtaaaataaaaaattacaaaaaaataaaaatatttaaaggcaaggaactaaaaggaactatttgtaatcatccttttttaaatctaggttacaactacgatatcccaatgttagaggcaaggtttgtaacaactgagcagggcacaggaattgttcattgtgctcccagtcacggccctgatgattttaatttatgtttaagtaacggaattcaagcaattgaaacagttgatggagatggcaaatatacgaaacatgtaagcttatttgaaggtattcacatttttaaagcaaaccctatagtaatcgaaaaacttaaagagcaaaaaaatttgttatcaaacggtgaattgctacattcttacccgcattcttggagatcaaaagcgccactagttcatagagcaacgcctcaatggtttatatccatggaaagtcacaagttaagagataaagctttaaaagcaattaatgatacaactttttaccctagcaaaggaaaagagagactaagagcaatgattgaaaccagaccagactggtgtgtctcaagacagagagtatggggagttcctcttccaatttttgtaaataaaaaaacaaaagaaatcctaatagatgatgaagtaaatgagactattgccagtatttatgaaaaagagggttcagattgttggttttcagatgatcctcaaagatttttgggaagtaagtatgaagcagaagattacgataaattgagcgatattgttgaggtctggtttgacagtggatctacacattcatttgttcttgaaaaaagaaaagacttaaaatggccagcatcaatgtatttagagggatctgatcaacataggggctggtttcattcatcattattagagtcatgtggaaccagaggcaaagctccgtttgagtctattttatcccatggatttgttgtggatggcaaagggttaaaaatgtcaaaatctttaggaaatgtgattgccccagaagatattttaaaaaaatatggagcagatatattgagaatttgggtagcatcatcaaattattcagaagatttaagaattgattattcaattctcgaccaacatgcagactcttataggaaaattagaaatacatttagatacctccttggcaatctaaatgataattttaataatgttgactttaaaaagatagatataaatgaattaccagaacttgaacaatttatgttgcataaattatatattttagacagtaattttaaaaaatattttaacagttatgattttcacaacttatacaaagaattactaaacttttgcacagtagatttatctgcattttattttgatattagaaaagatactttatattgtgatcgagtaaattcaaacaaaagacaatcaactttattactgctaaatataattcttaattcattattaaagtggtttgcaccaattttatcatttactacagaggaaatttataggtta

SEQ ID NO: 305433 - DNA, 2172 bp, Unknown
  Bacterial polypeptide expressing nucleotide sequence isolated from the Sargasso Sea
aaatgtttttaaatggctatatatatcgaggtctaaacctgttcattggagtccaagttcaaggactgcacttgcagaagcagaattagaataccctgatggacattattcaaaaagtatttatgtttcattaaaaatcactaacatacctgaggaaattctattaaatttcatccaagaaaaccttaatatcaaaaaagattatttttttaataattctttcataactatttggaccactactccttggaccatacctgcaaatgaagcagttgcagtaaatccaaaaataaactacgtttttgctatcgatgaagagaagaaaatttacctttttgctgaggatttatcttctgaaataagtaagaaacttaataaagatttcaaggtgctattagaggttataggctcaaaattggaaaatatcgaatatcaacatccttctaagaataaaaattgcagaattgtaattggaggagattacattactacagaatcaggaactggaattgttcatactgctcctggtcatgggatagatgattttaatgtgggtcaaaaatatgatttaccaataacatgtgtcgttgatgaaaaaggtaacttaaataaatattctggtcaattcgagggatcaaatgtcctgaaagatgcaaatgatttaattattgaacatttaaaaggaaataatttgcttctattacaagaaaattatatgcatagatatccgtatgattggagaactaaaaaaccaactatttttagggcaacagaacaatggtttgcatctgtaaatggctttagatcatctgcattaaaggcaatcgaagatgttgaatggatgccagagactggaaaaaaaagaatttattctatggttgttggtagaggagattggtgtatttctagacaaaggtcatggggagtacctattccagttttttataaaaaaaatggtaatgacattctccttaacaaagagataattaatcatattcaagaactttttagtgaacatggagcagatatttggtggaattgggatgttaagaatcttttgccagaaaattatgcaaaagaatctgatctatggaaaaaaggaacagatacaatggatgtctggttcgattcaggatctagctgggccgcagtatgtgaactaagaagtgaattaaagtatccagcagatctttatttagagggctcagatcaacatcgaggatggtttcagtcatctttgctaacatctgttgcagtcaataataaacctccatataagaaagttttaactcatggttttgcacttgatgaaaacggaagaaaaatgagcaaatctttaggaaatgttgttgatccaaatataattattaatggaggtaataataaaaaaactgatcctgcttatggtgctgatgttttaaggctatgggtaagctctgtagattattcagtagatgttccaattggttcaaatatactcaagcaactttcagacgtttatagaaaagttcgtaatactgcaagatatcttctaggtaatattcatgattatgatcctaaaattgatagttttgaaattgatcaattgcctctcttagatcaatggatgttaggtagattagttgaggttacagatcaaatatcaaatgcttatgaaaattatgaattttcaaaatttttccaaattttgcaaagtttttgcgttgtagatctatcaaatttttatttggatattgcgaaggataggttatatgtaagttctaaatcacaatttaggagaagatcttgtcagttcgtcatgtcaaaagttgttgaaaatttagccgtacttatttctccagtgctttgtcatatggctgaagatatttggcaaaatattccatactcaactgaagaaaaatcagtctttcaaagaggatggccaatattttcgcagtcatggaaaaatcaaatacttaatgagcacattgcaaatttaagaaatttgagagttgaaattaacaaggctatagaaggatgtaggaacaaacaaataattggagcagctttggaaactgaagttaattatttacctgaagataaagctttaaaagagtcacttacttggctaaaagaatttggcaatcaagatgtagatttatttagagactggccttatagtatcaaaatcca

SEQ ID NO: 305434 - DNA, 2824 bp, Unknown
  Bacterial polypeptide expressing nucleotide sequence isolated from the Sargasso Sea
aatgagcgactataaatttactttgaatttgccggaaactgagtttccgatgcgtggtaatttggcaaatcgcgagccagagatgttagagcgctggacgaaagacggtctgtatcagcagatccgtgatagccgaattggccgcacaccttttattttgcatgacggcccaccgtatgcgaacggcagtattcatattggtcactcagtcaacaaaattcttaaggacattattgttaagtcaaaaaccatgtctggttttgacgcgccttatgtgcctggttgggattgccacggtctgccaattgaactgaaagttgagcaaaaagtcggtaagcctggtcaaaaaatttctgcggccgaattccgtgaagaatgccgtaaatatgcggctgagcaagtcgatggtcaacgtgctgactttattcgtttaggcgtgctgggcgattggcaaaagccttatttaacgatggactttgctaccgaagccaatatcgtacgctctctatcaaaagtgattgaaaatggtcacttacataaaggtgttaaaccagttcattggtgtacagactgtggttctgcattggctgaagccgaagttgaatacgaggataaaacctctcccgctatcgatgtggcctttactgcgacagatagcaaagctttagccgctcagtttggtgtaagcgattattcacatcctgtggctatggtgatttggacgactacaccttggacactgccagctaaccgcgcgttatctatcagccctgagctggattacagcttggttgagtttgtgaaagaaggcgcgactcacgcggttattctggccgacgtgttagttgaagcttgtatggcgcgttacggcgccgagagccatagcgtgttaggtaaagttaaaggtgcaacacttgagctggttcgctttaagcatccattcttagcctttgacgttcctgctattttaggcgaccacgtgacgactgacgcgggtacgggtgtggttcacacggcacctggccatggtcaagacgacttcgtggtaggtcaaaaatacggtttagaagtggcaaacccagttggtgataacggtgtttacaaaccagatactgagttctttgctggccaacacgtatttaaagcaaacgacaatgtggttgcactgttgaaagaaaaaggtgcgctattacaccatgttgcgtaccgtcacagctatccacactgctggcgccataaaacgcccattatcttccgtgctacgccgcaatggtttatctcaatggataaccaaaacctgcgcaagcaagcattaagcgaaattgagcagactcagtggatccctgattggggccaaagccgcatcgaaaagatggttgagaatcgccctgactggtgtatctcccgtcaacgtacttggggcgtgccaattacattattcgtacaccgcgaaaccgaagagctgcacccagacagcgtgtcgttaatggcgcgtgtagccaaccgcattgagcaggaaggcattcaagcttggtgggatctcgatgctgccgaattactgggcgaagaagccgaacaataccgcaaagtgaccgataccttagacgtatggtacgactcaggttcaacctttgcttctgtggttggtgcgcgtccagagtttcatggtcatggtgtcgatttgtacctcgaaggtagcgaccaacaccgcggctggtttatgtcatcattgatgatttctacagccatcactggtaaagcaccttacaagcaagtgctgacccacggctttaccgttgatggtaaaggtcgcaagatgtcgaaatctatcggtaacgtcattgcgccgcagcaagtcaccaacaagttaggtgcagacattctgcgtctttgggttgctgcgaccgactacagcggtgaaatgacggtatcggatgaaatcttaaaccgtagcgccgatgcttatcgccgtattcgtaacaccgctcgtttcttactagctaaccttaatggcttcgatcctgctaaggacttagtggcagtagaagatatggtagcgttagaccgttgggcggtgcgccgcgcggcatcgctgcagcaagaaatcatcgaagcttacgagcaatataacttccatattgtgacgcaaaagctgatgcagttctgctcggttgagctaggtagcttctacttagacatcatcaaagaccgtcagtacaccgctaagcaagagggtcatgctcgccgtagctgccaatcggcactgttccacattgctgaggccatggtgcgttggattgcgccaatcctgagctttactgccgatgaagtgtggcaattactgccaggccagcgtgatgcttacgtgtttacccaagaatggtatcaaggcctgcaatctattactttagatacagatctcagcgatgcgtactgggaaaatctgctgactgtgcgtaacgaagtcaacaaggtcatcgagcaagcgcgccgtgataaacgtattggtggctccttagaagccgaagtcacgctgtttgctgatgcggctttaactgaacagttaacgcacattggtgatgagctgcgcttcgtcctgttgacctcagaagccaaagtattgccattggcagatgcaacaagtgatgccgttgacaccgaactggcgtcgttgaagttagtggtcggtgcgacaaccgctgaaaaatgcgaacgttgttggcaccacagggaagaagtgggcacgattgaggctcacccaacgctgtgccatcgctgcgtaaccaatattgaaggtgacggcgaagttcgtctgtttgcgtaa

SEQ ID NO: 305435 - DNA, 2122 bp, Unknown
  Bacterial polypeptide expressing nucleotide sequence isolated from the Sargasso Sea
atgagtgataagaaagaccaaaaattaaatttaccaaagaccgaaattccaatgaaggcaaatcttaatgaaagagagcctaagatgttagaagaatggtccaaaagagatgtctatcaaaagataagaaagcataactctggaaaagaaaagtttattcttcatgatggaccaccatatgcaaatggaaaaattcatataggacatgcggtaaataaagttctaaaagatatagtaataagatcaaaatcactggaaggttttgatgctccttatgttccaggctgggattgtcatgggttaccaatagagctacaggtcgaaaagaagctaggcaaaaaaagaagggagctaagccagtctgagttcagagcaatgtgtagagaatatgcaaaagaacaaattgatatccaaaaagatgatttcattagactgggagtcttcggagattgggacaacagatatgcgagtttagactattcttttgagggagaagcaataaatggattcgctagaatttatcataatggacatgttgaaaaaggttctaagcctgttcattggtgtttagaatgctcttctgctttggcggaggctgaagtggaatatatggataaaacttcaagctctattgatgttaaatttgcatttacaaaagattcagcaaaagaactaaataaaagattagacaataaaattaaaggtgaagtgcatgtagttatatggacaactacaccctggacaattcctggaaatcaggcagtttgcttcaaaccagatattagctatgaagtcttagaagttaatggagattttttattagttgcttctgagctaaaggagcaatgctctgaaagatggagcgataaaaaagtatcatccacagaagtaaagataaaaggctcagatcttgaagacctagttcttaaacacccactctttaacagggaatccccactttttgcagctgatcatgtcacaacagagactggaacaggttttgtccatactgctcctgcgcatggtgtagatgactataatatttgctctaaagaaggcttagaggtaaataatccggttctagcaaatggttgttataaagaagatgtcaaatatttctctggcatacatgtaagaaaagttgatccagaagttatatctaaactaaaggaatttaatgcgctagttaatcatggggaatattttcatagctatccgcactgttggagacacaaaaccccacttacatttatggctaccccgcaatggttcttttcaatgactaaatccggcttattagacggagcaactcgagcactagaagaaattaaatttattcctgagtggggcaaagaaagaatggaaattatgcttaatgataggcctgattggtgcatatcaaggcaaagagattggggcataccaatacctctttattatgataaaaatacaggcgagcctcatcctgagcaagataatattttcaatgctgtttctgagtccataaaagataagggtatagactcttggaattcaatcgatttaaaactaagtgattcagaaaattatgaaaaatcaaaagatatatttgatgtgtggtttgattcaggaataactcatttttgtgttgtcgacgaattgtatggatcaaatacacagtctgatctttaccttgaaggtagtgatcagcatagaggttggtttcagtcatctcttttaacttctatcgctatgaaaggtacagcaccttataaatccgttttaacacatggatttgttgtagatgaagaagggaaaaaaatgtctaaatcaataggcaatgttatcaccccacaagaagtaatagatcagtctggtgcagacattcttaggttttggattgcttcaacagactttagaggcgaaatggccttttctaaagacatactaaatagatccatcgatggtttcaggcgtataagaaatacaatgcgttttatgatatcgaatttatatgattattcagataattttaatgaaaaagatcttttactcttagacaaggtaattcttaataaaactaaggaaattgcagaagaaattagagcaaactatgaaaactataatcttcacttcattacct

SEQ ID NO: 305436 - DNA, 2779 bp, Unknown
  Bacterial polypeptide expressing nucleotide sequence isolated from the Sargasso Sea
aatggaattcaaagatacaatttttttacctaaaactacttttgagatgagagctaatcttcctcaaaaagaacctaaaattttagaagagtgggataaagaaaaaatatttttaaagcttagagaaaagtctaagggaagagaaaaatttgtactccatgatggacctccatatgcaaatggacatattcatatgggaactgctttaaataaaatactaaaagacgttatagttagaacacaacagatgtcagggaaagattccatttatgttccaggatgggattgtcatggtttacctattgagtggaaaattgaagaagaatatcgaaaaaaaggacaaaacaaagatgatgttcctatcgttcagtttcgtcaagagtgccgagagtttgctgaaaaatggatagaaattcaaaaaaaagaatttagaagattgggagtagaaggggattggaataacccttatttgacgatgtccaatgaagctgaagctcaaattgtaagagagttgggaaaatttttattagataaaagtttatataaaggcgcaagaccagttttatggtcggttgttgaaaaaacagctttagcagatgccgaagtagaatatgaggatcatacttctaatactatctatgtaaaatttaaagttactaaaagtttaattaatgaattggtagatacaaatatagtaatttggacaacaactccctggacaatacctggtaatcgagctgtagcatacggtaaggatctcgaatattccttaattgaaatcattaagactaatgaaaaatctttagcaaatataggtgaaaaattagttatagctgatgaattaaaaaaccaagtattagatgaaataggcattgatgaatcaaaaattattaaaaaattttttgggaaagatttagaaggtactgaatgtgaacatccatttaaatctttaggatataactttaatgttagagctttggagggagattttgttaatttagagcaaggaacaggcattgtacatattgccccaggtcacggagcagatgattacattttaggaataaaaaatgatgttgatgttatacaaactgtagaagatgatggtaaatacaatcatcatgctgtcggttttgaaggagaacatgtatataaggttgaccaaaaaattgcagataagttaaaagaatttaaaaaattacttcatcaaggtactttaagacatagctatcctcactcttggagatcaaaagcaccattgatttttcgtaatactcctcaatggtttatatcaatggacaaaaaagacttacgagaaaaagcattaaaatcaattgatgaaacaatattttatccacctcaaggacaaacacgactacgttcaatgattgaaactcgtcctgattggtgtgtttctcgtcaaagagtttggggagttccactaccattgtttgttaataaaaatactgagcaacctctaagagatattaaagtaattaatcgtattgcagatatttatgaaaaagaaggcagtgatacgtggtttactgaggatccaaaaagatttttaggagatgattattctataaatgactatgatcaaattcaagatgtagttgaggtttggtttgatagtggttcaacgcatgcgttttgcttagaaaaaagagaagacctaaaatggcctgcatcaatgtatctagagggaagtgaccaacatagaggctggtttcattcttctttattagaatctgcaggaacaagagggagggccccctatgaaagtgttttaacacatggttttgtagttgatggcaaaggccgtaagatgtcaaagtctctaggaaatgttatatctcctgataaagtcatgtctcaatatggagtggatatacttcgattatgggttgttgcatcagattactatgatgatctaaaattagataatgccattttaaaagcccaaagtgattcttatagaagaataagaaatacctttcgttacttaataggtaatctagagggttttgatgaaaaagaaaaaattaatattgaaaaatttccagaattagaaaaatacatcttacatagattatgggaagtagatcagattattcaaaaatgtgttaaggattttaactttcatttaatgtttactacattattaaatttttgttcaaatgacttatctgcattttattttgatattcgtaaagactcaatatactgtgactcatttgattcaaaaaaaagacgttctgcaagaactttattgaatttaatttttgatcatcttgtcagatggttagcaccttctttaagctttacttgtgaagaagcttggaaggccaagggtaatacatctagtattcatctggaagactttcttaaagcatctcaagattttaaaaataatgatattgcaaacaaatggaatataattaaaaatattcgaaaagttattacaggagctattgagaaaaaaagagcagaaaaattgattggctctagtttggaagcaaatgtaataatatatgttaaagaagatttaaaaaagaaaatagaagaaattaattttgatgaaatagctattacttcctcatttcaactattagattacaagaataaaaaagattactttgcattagaagaaattaatgatgtagcggtgacagtagaaaaaactgacggtcaaaaatgtgaaagatgttggaaatatactgatatattgcaagataaacaaatttgtcaacgttgtgatgaagcaattaaaaaatag

SEQ ID NO: 305437 - DNA, 1712 bp, Unknown
  Bacterial polypeptide expressing nucleotide sequence isolated from the Sargasso Sea
gctgatcgtggccagcgaattggttgagaacctcagcgcgcaactcgaactcaagctggaacctctgcagcaggtcaaaggcgaagagctggagggtctgacctatcgccatccactagtcgagcgcagcagtcctgtggtgattggcggtgactacatcaccacggaagccggcaccggcctggtgcatacggctccagggcatggtgtcgacgacttcaacacgggccgcaaatacaacttgccggtgctctgccccgtcgacgagggcggttggctgacggacgaagccggccccttcgccgggctcaatgtgcttaaagacgccaacacagcgatcatctctgccctgcaggacgtagaagccctactggcagagcagcggtatgaacaccgatatccctacgactggcgcaccaagaaaccaacgatcttccgtgccaccgagcagtggtttgcctcggtggagggcttccgcgacgacgcgcttcgagccattgaatcggtggagtggctgccagccagtggccgcaaccgcattgaagggatggtgcgcgaacggggtgactggtgcatcagccgccagcgcacctggggcgtgccaatcccggtcttctatcaccgctccagtggtgaggtgctcctcaacgctgacaccctccaacacatccagggcctaatcgccgagcacggtgctgatatttggtgggagagcgacgaagctgatctcttgccatcggcctatcgggatcaggccgatcaatggcgcaaaggcagtgacacgatggacgtttggttcgactccggctcatcgtgggccggtgttttagggggccttgaagctgaggccagcagctccctgaactatccagctgacctttatctggaaggctctgaccaacaccgcggttggttccaaagcagcctgctgacctcggtcgccgtcaacggtcaggccccttacaagcgagtgctcacccacggcttcaccctcgacgagaagggccgcaagatgagcaagtccctgggcaacgtcgtcgatccggccgtcatcgttgaagggggaaagaaccaaaagcaggagcccccctacggcgctgatgtgctgcgcctttgggtgagttcggtggactattcagccgatgtgcccctggggccaggcatcgtcaagcagctggccgacgtctatcgcaaggtccgcaacacggcccgctatctgcttggcaacctccatgactttgatccaagccgcgatgcgataccgctagctgaattgccgcttcttgatcgctggatgctgcaacgcaccgccaaggtgctgaaggacgtcagtggcgattttgagcgctacgagttctatcgcttctttcaaaccctgcagaacttctgcgtggtggatctctccaatgtctacctcgacattgccaaggatcgtctttacgtgagtgctgccgactcgttccgccgccgcagctgtcaaaccgtgatggctctggtagtcgagcgcttagccgggatgatcgccccggtgctcagccatatggccgaagacatctggcaacacctgccctaccccgttgaagaagcctcggtcttcctgcggggctggccgcaggccgagtcgagctggagtgccctcacggactctgaaagcgccgccatcgatgctgcggtgcaacttgcgggcgttggtgaacaggcaattggaaagt

SEQ ID NO: 305438 - DNA, 1813 bp, Unknown
  Bacterial polypeptide expressing nucleotide sequence isolated from the Sargasso Sea
aatggaattcaaagatacaatttttttacctaaaactacttttgagatgagagccaatcttcctcaaaaagaacctaaaattttagaagggtgggataaggaaaaaatatttttaaagcttagagaaaagtctaagggaagagaaaaatttgtactccatgatggacctccatatgcaaatggacatattcatatgggaactgctttaaataaaatactaaaagacgttatagtaagaacacaacagatgtcaggaaaagattccatttatgttccaggatgggattgtcatggtttacctattgagtggaaaattgaagaagaatatcgaaaaaaaggacaaaacaaagatgatgttcctattgttcagtttcgtcaagaatgtcgagagtttgcggaaaaatggatagaaattcaaaaaaaagaatttagaagattgggagtagaaggggattggaataacccttatttgacaatgtccaatgaagctgaagctcaaattgtaagagagttgggaaaatttttattagataaaagtttatataaaggagctagaccagttttatggtctgttgttgaaaaaacagctttagcagatgccgaagtagaatatgaggatcatacatcaaatactatctatgtaaaatttaaagttactaaaagtttaattaatgaattggtagatacaaatatagtaatttggacaacaactccctggacaatacctggtaatcgagctgtagcatacggtaaggatctcgaatattccttaattgaaatcattaagactaatgaaaaatctatagcaaatataggagaaaaattagttatagctgatgaattaaaaagccaagtattagatgaaataggtattgatgaatcaaaagttattaaaaaattttttggaaaagatttagaaggtactgaatgtgaacacccatttaaatctttaggatataacttcattgttagagctttggagggagattttgttaatttagaacaaggaacaggcattgtacatattgccccagggcacggagcagatgattacactttaggaataaaaaatgatgttgatgttatacaaactgtagaagatgatggtaaatataatcatcatgccgttggttttgaaggggaacatgtatataaggttgatcaaaaaattgctgataagttaaaagaatttaaaaaattacttcatcaaggtactttaaaacatagctaccctcactcttggagatcaaaagcaccattgatttttcgtaatactcctcaatggtttatatcaatggacaaaaaagacttacgagaaaaagcattaaaatcaattgatgaaacaatattttatccacctcaaggacaaacacgactacgttcaatgattgaaactcgtcctgattggtgtgtttctcgtcaaagagtttggggggttccacttcctttgtttgttaataaaaaaactgagcaacctttaagagatattaaagtaattaatcgtattgcagatatttatgaaaaagaaggaagtgatacttggtttactgaggatccaaaaagatttttaggagatgattattctataaatgactatgatcaaattcaagatgtagttgaggtttggtttgatagtggttctacgcatgcgttttgcttagaaaaaagagaagacctaaaatggcctgcatcaatgtatctagagggaagtgaccaacatagaggctggtttcattcttctttattagaatctgcaggaacaagagggagggccccctatgaaagtgttttaacaaaagggttttgtagttga

SEQ ID NO: 305439 - DNA, 1968 bp, Unknown
  Bacterial polypeptide expressing nucleotide sequence isolated from the Sargasso Sea
aatggaacactctattttggagttctgggaaaacgagaatatttttcagaagtccctccaacagtcgaaagagtttgatccctatgtcttttatgatggccccccctttgcgacggggcttcctcaccatggtcatttaacggccagcacaataaaagatatcattcccaggtattggacgatgcagggtaaacatgtgtccaggcgtttcggttgggattgtcatggggtccctatcgagtgggaaatcgacaaaaagctaaaaatgagtgcccaagaggcggtggccaaattaggagttaagggatacaacgacgaatgcagatccatagttcagcgttatgtggctgagtggcgaagcacgattactcggttgggacgttgggtcgactttgaagacgactataagacgatggacccatggtacatggagtcggtctggtgggtatttaaacaactatgggataaggggcttgtctataaaggtttcaaggtgatgcccatatctaccgctcttggaactccactcgcgaattttgaggtcagtcaaaattaccgtgacgttcaagatcctgctgttaccgtcttgtttaagattaaagaccaagaaaggtatctcgctgcctggacgacaactccttggacgcttccctcgaatttggcagtttgcgttggcgatgagattgattatgtgcttgttagagatgaatcgactgcaaagaacatctattttgcggaagagttactgacccattacggcgatttcgaaattttggaaagagtgaaaggctcggacttagttgggctccaatatgaaccgctgtttgattattttactgaccagcaaactgagggtggttttgttgtagttagtgatgactatgttacgacggatgggggaacaggtttggtgcatcaagcgcctgcattcggagaggacgattacagagttctaaatgaaaacgacatcgatgcatttgtatgcccggtcggtctagatggcagatttgatgaatctgtgaccgatttttctgggatgcatgtaaaggaagctgataagtccataatagaatttctgaaacaaaggggttcactttatcgtcaggaggttatccaacacagttaccctttttgtcctaggtctgatacccctctgatttatatagcgattcccgcttggtatgtgaggacttcttctatcgttgataagatggtttcagcaaatgatcaaattcactgggtccccgagcacattaaagaggggagatttgggaattggttgaaaggcgaggtagattggggtgtttcaaggaatcgagtatggggaaccccaatacctatatggatcaatgatgaaactggaaaagcaatctgtattggctcgaaagaagagctcaaggaatattcgggtgttgaggtatccgactttcatagagagcacgtcgatcctttaactttcgatatcgaaggagaacctggaacttatcgtcgtatcgaggaggttttagattgctggtttgagtcagggtctatgccctatgcccaattgcattatccttttgagaaccatgatgtgtttaaatcaggttttcctgctgagtttattgctgagggactagatcaaaccagaggctggttctacacgttaacggtactggcagcggctatttttgataagccagcttttaataacgtcattgtgaacggtttagttcttgctgaagacggcaaaaaaatgtcgaagtcattgcaaaactatacgcctcccgacaatttgatggagcagtacggagccgatgcgcttcgactctatctgattaattccggtctagtgaaagccgaggaacagcggtttgtcgactcgggtgtgcacgagatgactcgtcgggcgcttctgccctggtttaatgcattttctttccttaaaacctatgcggaaatcgatgagtggtcaccaaaaggtcgttt

SEQ ID NO: 305440 - DNA, 1642 bp, Unknown
  Bacterial polypeptide expressing nucleotide sequence isolated from the Sargasso Sea
aatgactaaatctcaaataaatctgccaaaaacagctttttccatgaaagctaacttacctactcgagagccagaaattcttgaatattggaaaaaaataaatctttatgatgaattaagaaataaaagtaaaggaaaggaaaaatttgttctacatgatggacctccttatgctaatggaaatatccatatgggaacagctcttaataaaattcttaaagatataattgtaaaatttcatcaaatggatggaaaagactctatttatgtaccaggttgggattgtcatggcttgcctattgagtggaaaattgaagaacaatataaaaaaaacaaaaaaaacaaaaacgatgttccaattgttgagtttagaaaagaatgtagaacatttgctgagaagtggattgaaattcacaaaagccaatttaagagattgggcgttgtgggggattgggaaaattattactctacgatgagctttggagcagaagcacagatagttagagagcttggtaaatttttaaaagagggaagtctgtatagaggcttcaaaccagttttatggtcaacagttgagaagactgcgcttgcagatgccgaagtagaatatcaggatcataaatctgatacaatttatacatcattcaaagttaaatcatctgatttaaaagatttagttggaagtgaaatagttatttggacaacaactccatggacgatacctgcaaataaagctttagcgtttaatgagtctcttgattatgtcatattggatataaaagatgagggtgattttaaaaatagaaaaattgtaatagcaaatgctttgctagagtcagttgttaaagagtgtgagttaaaaaattataaaaaaattcatatatttaaaggtaaagaatttaaaaacaccatttgtagtcatccatttttaaatttaggttatgatcatgacatcccaatgttggaagctagatttgttacaactgagcaaggaactggagttgttcactgtgcaccaagccatggacctgatgattttaatttgtgtctgaacaataatattaaagccattgaaactgtagatggagatggaaaatatacaaacaatgttaaattgtttgaagggattcatatttttaaagcaaatcctattgtgattgaaaaactcaaagagcaaaaaaatttattattcaatggtgcgctagttcactcttatccccattcatggagatctaaggcaccacttgttcatagagcaactccacaatggtttatatccatggaaagtcacaaattgagagataaggcactaaaggcaattgatgaaactactttttatccaaacaaaggaaaagaaagattaaaatcaatgattgaaaccagaccagactggtgtgtttcaagacaaagagtttggggtgtcccacttccaatttttgttaacaaaaaaactaaggaaattttggtagatgatgaagtcactgaaaatattgcatcaatttatgagaaagaaggttcagattgttggttttcagatgatcctcaaagatttttaggacagaaatataaagctggggattatgaaaaattaagtgatattgttgaggtatggtttgatagtggatcaacgcattcatttgtg

SEQ ID NO: 305441 - DNA, 2386 bp, Unknown
  Bacterial polypeptide expressing nucleotide sequence isolated from the Sargasso Sea
aaaaagttaagaaaaaaatctaaaggaaaagagaagttcgttcttcacgatgggccaccatatgcaaatggtcatatacatatgggaaccgctttaaataaaattttaaaagatatgataactaggtttcatcaaatgaacggtaaagattctatttacgttccaggctgggactgccatgggctacccattgagtggaaaattgaagaacagtataaaaaaaagaaaaagaataaagacgaagtacctataaaagattttagacaagagtgcagagagttcgctgaaagctggatcgatgttcacatcaaagagttcaaaagattaggcgtagttggagattttgataattattattctacaatgagttatggagcggaagcccagatagttcgggaattaggtaaatttcttctagatggaagtttgtatcagggtttcaagccagttctttggtcgacagtagaaaggaccgcattagcagatgcagaagtggaatatatggatcatacgtctaatacaatatatgttggttttaaagttaaggaaacggataaagactttttaaaagataccagcataattatatggacaacaacaccgtggacaataccagcaaataaagctttagcctttaatagcaatattgattattcaatattagaaatagaaaatcttccaaattttaaagaaaaaaaaattgtagtagcaacaaatttagtaaaagaaatcattaatgcttgtgaaattaaaagttataaagagttaagaaaatttaaaggttcagaatttcaaaatacaatttgtagtcatccatttttaaaaatgaaatttgactatgacgtccctatgttagacgcacaatttgtaaaccttgagcaaggaactggaattgttcactgtgcaccaagtcatggcccagatgattttaatttatgcttaaaaaataatattccttctctctacactgttgataattcaggactttatactaaagaaattcctttttttgaaaatacacatgtttttaaagctgacaacatcgtaatagagaaacttaaagagcaaaaaaaattattaaaaaatgacaagttaaatcacacttatccgcattcatggaggtcaaaagcaccacttatttatagggctacaccacaatggtttatatctatgcagaaaaacgatttaagaaagaaagctattaaatcaattaatgaaactaatttttttccaaagaaaggaaaagatagacttttgtctatgatagagggaagaccagactggtgtgtttcaagacaaagagtgtggggagttcctttaccaattttcataaacaaaaaaacaaaagaacctctaagagaccaagaggttatagatagaatcgctggaatttatgaaaaacaagggtcagattgttggtttaccgatgatccgaaagtttttttgggagatagctatgatcctaatgattatgaaaaattaaatgatatagttgaagtatggttcgatagtgggtcaacacatagctttgttctagaaaaaagaaaagatttaaaatggcctgcagatatgtatttagaaggctctgaccagcacagaggctggtttcactcatcactattagaatcatgtggaacaagaggtagagctccctttgaaagcatactatctcatggttttgttgttgatggcaaggggatgaaaatgtcaaaatctatgggaaatgttatttctccagaggacatattaaaaaattatggtgcagacatccttagagtgtgggcttctgcatctgattattcagaagatctaagaatagataaaaatattttgatacaacacgcagagtcttacagaaaaattagaaacacctttcgatttatgcttggaaatttgaaagacaattttgaaaaacaagattttgaaaaaattaatttaaatgaattagatgaattagagcaatatatattacataaattatatttaataggtaactctgtgacacaaaacttaaaaagttataattttcacaaattatataaagagctactaaatttttgcgcgctggatctttcctctttctattttgatatcagaaaagatgttctttactgtgatagcttaaattcaaaaaaaagaaagaattgtgttactgtgcttaacattattttagaaagcttattaaaatggtttgctcctatattagtttttactacagaagaaatatatagtttagttgataaaaaaagtgagagtattcatgaaagtaattttgtaaaaatacctaaaaaatgggaaaatgataaactcaatgaaaaatggtcaaatttatttaaaataaaacaagtggcaaatgtcgctatagaagagaaaaggacaaacaaag

SEQ ID NO: 305442 - DNA, 1759 bp, Unknown
  Bacterial polypeptide expressing nucleotide sequence isolated from the Sargasso Sea
aaagaacctgagcttgtagactattgggataaaataaaactatacgaaaaacttagagatatcagcaaaggaaaagaaaaatttatacttcatgatggacctccatatgcgaatggcaatattcatatgggtacagctttaaataaaatattgaaagatattattacaaaatttcaccaaatggatgaaaaggattctgtatatgttccagggtgggattgtcatggcttaccaatagaatggaaaatagaagaacaatataaaaaaaataaaaaaaataaaaatgatgttccaataaatgaatttagaaaagaatgcagagattttgctgcaaaatggatagatgttcataagaagcaatttaaaagattaggagtaataggagattgggaaaattactattcaacaatgagttttgacgctgaagctcaaattgtaagagaacttggaaagtttttaaaagaaggaagtttgtataggggatataaacctgttttatggtctacagtagaaaaaactgcattagctgatgctgaggttgagtatctagatcataaatctgaaactatatttactggatttaaagttaaaaagtcaaatgtgaaagaacttacagatagtgaaattataatttggacaactacaccctggacaattccagcaaatagagcactggcatataatgaaaattataaatactctattattaaaatagaagatgaaacagactataaaaataagcaagtagttatatgtgaagatttattaaaatcagtcttagaaaattgtaatataaaaaaatttaaaattataaagagtattcgcggaaaagatttcaaagaaactgtatgcagtcatccttttctagaaaaaggatttaattatgatattcctatgcttgaagcaaatttcgttacaaaagaagagggtactgggatcgttcattgtgcaccaagccatggtccagatgatttcaatttgtgcttaaaaaacaatattaaagctgaggaaacagttgacgatgatggaaagtatacaaagcatgttccattttttgaaggtattcatatttttaaagcaaataaaatagttattgaaaaactcaaagagcataaaaaacttttatcaaatggtgaactaattcattcatatcctcattcatggcgttctaaagcacccctggttcatagagctactccacaatggttcatctcaatggaaagtcatggcttaagaaaaaaagcacttaaggcaattcaagaaactaatttttatcctaacaaaggaaaagaaagattaaaatctatgattgagctaagaccagattggtgtgtttcaagacaaagggtatggggagttcctattccagtttttatttcaaaaaaaactaaaaaagttctcttggatgatgaggtaatagaaaatatcgcaaatatttttgaaaaagaaggcgcagattgctggtttgagggagacactcaaagatttttaggaaaaaaatataaaagtgaagattacgataaaatgaacgatatcgtagaagtttggtttgatagcggatcgacccatgcttatgtgcttgaaaaaagaaaagatttaaagtggccagcaactatgtatttagaaggatcagatcaacacaggggatggtttcactcttccttgctggagtcttgtggaacaagaggaagggcgccatttgaaaatatactatcccatggttttgtagttgatggcaaaggtcacaaaatgtctaaat

SEQ ID NO: 305443 - DNA, 1070 bp, Unknown
  Bacterial polypeptide expressing nucleotide sequence isolated from the Sargasso Sea
tatgtctgactataaagaaacactaaatctacctgatacaggatttgctatgaaagcaaatttgccttcaaaggagcccaaaatgattgaattttgggaagaaatggatttgcgcaaggaagttgctgcggcaagagaaggtagagaaaaatttatacttcatgacggtccaccttatgctaatgggcaaattcatattggacatgccgcccagaaagtcctcaaggatatagttattaaatctcagactttaaatggaaaatacgccccttatgttcctggatgggattgtcatggcttgcctattgaattaaatgttgagaagaaaaaaggcaaagcaggacataagatttctgtatcagaatttagagaagcttgtagggaatatgcccagtcacagatagatatacaaaagaaagatttcaagcgattgggaattatcggagattgggataatccatatgtaactatggactttgcttttgaggctaacattatcaggtccttaggtagaataatcgaaaaaggacatcttcaaagaggagataagcctgttcactggtgtgttgattgtggttcggctttagctgaagctgaagtagagtatcaagacaagatatcaacttctatcgattttctttttccaattgataataaaaatatatcagagattttttcttgttcctccactaatcattcttatgttgcgagttggacgactactccatggactttacctgggaatctagctttgacaatcaatgaatcatttacttatgaattaatagagatacttcatgataataaaccaataaatataattcttgctcaagatttagtggattccaccttagaaaggattggtgttgataaatttacttctcttggcacttgtaaaggtactgatctactaggctttaatgccaagcacccctatcttgatagaaattctctaataatatcgggtgatcatgttacaactgatgcaggaacaggaatagtgcataccgcacccggtcacgggctggaagattatgctgtatgcaaggaaaatggtattgatgttctaa

SEQ ID NO: 305444 - DNA, 1965 bp, Unknown
  Bacterial polypeptide expressing nucleotide sequence isolated from the Sargasso Sea
ctagcagacgctgaagtagaatataagagtcacacatcaaatacaatttatgtggcatttaaagttaaggttgcttccaaagactttcttaaagatgctagcattataatttggacaacaactccttggacaattcctgctaataaagctttagcttttaataaaaatctagattactcacttatagaaataaatgaattagatcattttaaagataaaaaaataattattgcaactaatttaattgagtcagttattaaatcttgcgaaataaaagatcataaaattttaaaaacttttaaaggttctgaactaaatggaacaatttgtagccatccttttttagatatgaagtttgaatatgacgttcctatgttggaagcggattttgttgatcttgaacaaggaactggaatagtgcattgtgcaccgagccacggacctgacgattttaatttgtgtcttaaaaacaatattaaatccagctatactgttgataatgctggattatacactaaagaaataccttatttttccaaaacccatatttttaaagcagacttactagtaatagaaaaacttaaagaacaaaaaaaactattaaaagatgataagttaaatcatagttacccccattcgtggagatcaaaagcaccattaatttatcgagccacaccacaatggtttatttcaatggaaaaaaattccttaagaaataaagccatcaaagctattaatgatacaaaattctttcctgaaaaaggaaaagagcgacttctttctatgatagaaggaaggccagattggtgtgtctcaagacaaagagtgtggggagttcctttaccgatctttattaacaaaaaaacaaaagaaccattaaaagacaagaaaatcatagatcgaattgctgatatttatgaaaaagaaggatcagattgttggttcaccgaagatcccaaaaaattcttgggcaacgattatgatcctaatgattttgacaagcttcaagatatagtcgaggtgtggtttgatagtggatcaactcatagttttgtattagaaaaaagaaaagacttaaaatggccagcagatatgtatcttgaaggttcggaccaacatagaggatggtttcactcatccttattagaatcttgtggaacaagaggtagagctccatttgatagcattctttctcacggctttgttgtagatggaaagggtttaaagatgtctaaatcttctgggaatgttatttctccagatgatattttaaagaattatggagcagacatcctaagatcttgggtagcttcttctgactatactgaagatcttagaattgataaaagtattttagctcaacatgctgaatcatatagaaaaatcagaaataccttcagatttattttaggaaatatcaaagataaatttgaaagacagtcgatcaagtctctcgatattaaaaattttgatgaacttgagcagtatattttgcataagttatttgtaattaataattcagtgcaagaaagtttgaaagattacaattttcataggctatataaagaacttttaaatttttgcgcattagatctatcatcattttatttcgatattagaaaagatatcttatattgtgatagcataggatcaaaaaagagaaaacagtgtgttatagttctaaatattattttagattgtttgttaaaatggttcgctcctgtattagtatttacaactgatgaaatttatagcttagtatctagtgataaaaaaaatatccatgagtataaatttccagaaatatctaaagaattttataatttaactttaaatgaaaaatgggaacagctttttaaaataaaagaaaaggctaatattgcaattgaagagaaaagggcaacaaaagaaataggttcaagcttagaagcagatatagaaatcacagctagcaaaaaaaatttg

SEQ ID NO: 305445 - DNA, 2302 bp, Unknown
  Bacterial polypeptide expressing nucleotide sequence isolated from the Sargasso Sea
tcattagatccaaaatttgaagcagatattgttagatctttaggcattatctataaagaaggtcaccttgaaaaaggtgaaaaacctgttcattggtgtcaagaaagcggatcgtcccttgcagaggcagaagttgaatatattgataaaacttcaaaagctattgatgttgcattcaaggctcatcattcatctttaaaaaagttgaaagatgttttcaatgctgaagatttagatgaagtgtcatttgtaatatggactacaacaccatggacgattccatcaaacgtagctgtatgtataaatcctaaatacaaatactcactaattaaaatgaataacaaattttatgtcattgcatatgaaatgattgaacagtgctctaatagatggaagcaaaaatttgatgttatatcgacaacgcaaggtaaaaaattaagtgatattgatcttgttcatccctttttagatagaaaatcaattcttcttcatgcagatcacgttacaactgaaacaggaacaggttgtgttcatactgctcctgctcatggcatggatgactatttaatatgtaagaaaaataatattgatacaatccactctctaaataataaggcttttttcaaagatgaattggattttattgcaggacttcctgcaatgaaagcagatccattaatcgttgaaaaattaaaagaatataatgccttaattaatatagaggactatcatcattcttatcctcattgttggagacgaaaaacgcctctaatttttacatccactcctcagtggtttatttcaatgaataaaaataatctaaacaaagatgctcttaaacatattaaaagcgttaattgggaaccctcatggggtcttcaaagaattgaatctatgcttactgatagaccagattggtgtatctctagacaaagaaattggggtgttcctataactttagttgttcacaaagacacgggagaaattcatcctgatcagaaagatttatttgaaaaatttgcacaaattattgagaaagatggtatttcagcttgggataatctggatttaaaagattatatcgatgattatgaagaatatattaaaacctctgattcacttgatgtttggtttgattctggagtaactcactatgcagtttctgcaaagaaatttggtaataatgttgttgcagatctttacttagagggttcagaccagcacaggggatggtttcaatcatcattattaacaagcatagctatgaataaccatgcgccatataaaacagttctgactcatgggtttgttgttgatgaacaaagaagaaaacaatcaaaatcacttggaaatgttgtttctcctcagaaagtttgggatagcttaggagctgacattttaagattgtgggtagcttcaacagattttagaagtgaaatggttgcatccgatgaaatattaaggagaacctcagatcaatatagacgtattaggaatacttttagatttattttaggaaacttgagcgactttagtgacaaatataaaatttctcttgaagaacaagttgaattagataagtggattattaatgaaacaaaaattcttcaaacagaagttttaaaattatataaatcatattcttatcatagggcaattcaaaaaatacataatttttgtgttaatgaattaggtgggatatacctagatattgtcaaggataggctatatacctgcaaaaatgattcttcagcaagaagatcatgtcaaacaagccttgattttattttaaatgttttggtaagacttattgctccaattctttcttatacatcagaagaaatttggcaaacaagcaatagattgaatggccaagaggaatctgtttttctctcaaattttgatatttctgatatagattttaaatctaatatcaatcaatctgaatggaaaagagtttttgaaattaaggatgctgttaatcaatcaatagaagaaatgagaaatgaaaataaaattaaaggatcacttgattcagtagtagatattcaagcagattcaagcgatataaatattcttaggaagctaggcaaagaacttcattttttatttatttcttcagaagcaaatataagtgagggaaaaagttttaaaattaaggtctgtccctcaaaaaatacaaaatgtgtaagatgctggcacagatgttcatcagtaggatctagcaaagaacatcctgagctatgtaacaggtgtattgataatatagaaaatgatggtgagcaaagaaaatctatataac

SEQ ID NO: 305446 - DNA, 2553 bp, Unknown
  Bacterial polypeptide expressing nucleotide sequence isolated from the Sargasso Sea
aatgagcaaatctcaaataaatcttcctaaaactgctttttcaatgaaagcaaatttgccaacacgagaacctgagattttgaaactttggcaaaacataaatctttatgatgaattaagaaaatcaagaaaaggagaagaaaaatttgttcttcatgatggccctccatatgcgaatggtaatatacacatgggaacagctttaaataaaattttaaaagatataattgtgagatttcatcaaatggacggaaaagactctgtctatgttccaggatgggattgtcatggattgccaatagaatggaaaatcgaagaacaatacaaaaaaaataaaaaaaacaaaaatgaagttccaatcgttgagtttagaaaagaatgtagagcctttgcagaaaaatggatagatattcataaagatcaatttaaaagattaggagttgtaggagattgggataattattactctacaatgagttttgatgctgaagctcaaatagtaagagaactaggtaaatttttaaaagaaggaagtttgtatagaggctttaaacctgttttgtggtctactgttgaaaaaacagctttagctgatgcagaagtcgagtaccaagatcataggtcagatactatctatgcatcttttccagttaaatcatcaaatataaaagaattaaacgatagtgaaatagtaatttggacaaccaccccatggactattccagctaacaaagccttggcttacaatgaaagcctagattatttattaattgaaataaatgacgatggagactttaaaaataaaaaaattgttattgcagatgcattaatagatacagttgtaaaagataccaaaattcaaagtttcaaaaaattaaaaaattttaaaggtaaagatttaaaaggaacaatttgtaatcatccttttttaaaacttggttatgaatatgacatacctatgctggaagcacgttttgttactacagaacaaggtacaggaattgttcattgcgcaccaagtcatggtcctgatgattttaatttgtgtatgaataatggaattaaagcaattgaaacagttgatggtgatggaagatatacaaaaaatgtagcactttttgaagggatgcatatttttaaatctaattcaattgtgattgaaaaattaaaagatcaaaaaaaattattattgagcggtgaacttgttcactcttatcctcactcatggaggtccaaagcaccattagttcacagagcaactcctcaatggtttatttctatggatagtcataagctcagaaataaagctttaaaagcaattgatgaaacaacattctatcctagcaaaggaaaagaaagattaaaatcgatgattgaaacaagacccgactggtgtgtttcaagacaaagagtatggggagttccattacctatttttattaacaagaagacaggtgaaattttggttgatgatgaggtctttgataatattgcaaaaatttatgaaaaagagggatctgattgttggttttcagacaatccgcaaaaatttctcggaaaaaaatataaagctgaagattttgaaaagttaagtgatatcgtagaggtctggtttgatagtggatctacacactcatttgtattggagaaaagaaaagatttaaagtggcctgcatctatgtatctcgagggctctgatcaacacaggggatggtttcattcgtctcttttagagtcttgcggaactagagatcgtgcaccttttgagtctattctgtctcatggttttgtagttgatggcaaaggtttaaaaatgtcaaaatccttaggaaatgtaattgcgcctgaagacattctcaaaaaatatggagctgatatacttagaatttgggtcgcttcctcaaattatgctgaggatcttcgaatagactattcaatattagatcagcatgctgagtcttatagaaaaataagaaatacatttagatatttacttggaaatcttaatgataattttgaacaaatagatttagaaaaaattaaaattgagaatttacctgaattagagcaatttatgcttcataaaatttacaatttaaattctaaatttaacaagtatttcaaagattatgatttccataatttgtataaagaattattgaatttttgtactgtagatctatctgccttttattttgatataagaaaagatactttgtactgtgatccattaaattctgaaaaaagaaaatctactcttatattgttaaatgttattcttaactccttattaagatggtttgcaccaatattatctttcacaactgaggaaatttatcaacttatctcaaaaaataaaaaaagtattcatctcgagaaatttttgaatttccccaaaaaatttgataactcgaacttaaattctaaatgggaacaattaatcaaaataagagatatttgtaaccttagtattgagcaaaaacgagcaagcaaagatattggatctagtttagaagctgcgttaatcgtaaaattgaataacgaaaaccagaa

SEQ ID NO: 305447 - DNA, 1212 bp, Unknown
  Bacterial polypeptide expressing nucleotide sequence isolated from the Sargasso Sea
taagcagcatatatttaaatccgaatctaatatcatcgaaaaactaagtgactcaggcttattaatctcgagcgaaaaatttgaacacagttacccacactgttggagacataaaacacctgtgatctacaggactacaaagcaatggttcattagcatggaaaatcaagattttcgaactgcttgtttgagttccattaaagatgttaattggaaaccgacttggggagaggagcgaatccatggaatgattgaaaccaggccagactggtgtatttcaagacaaaggtattggggcgtgcctattcccctttttacgcacaaagacgatcaaggaattcatcccaacactccagacttgctcaatcagattgctgataaagttgaggatcagggaattgacgcttggtttgatacaggcatcgaagaatttctaggcgacgatgcaaactcgtatgaaaaatctacggatacgatggacgtttggatggactcagggattgcgcataaaactgtcagccgtctttttgatcacataaaagacgaggctgatttgtatcttgaagggtctgatcagcaccgcggttggttccaaagttctttacttacttctgtggcgattaacaatcatgcaccttataaagaagttcttactcatggatttgtcgtcgatgagaaagggcataaaatgtccaaatcactcggaaataccgtatctcctcaatctgtaattaataatatgggagctgatatcttgaggctttgggttgcatcaactgattactccagtgaaatgaaaatttcagatcagatactgaaacgaaatggtgatacttacagaaggataagaaatacggcgagatttttattaagcaacttaagtgactttgatccaagcaagaatcaaaagaaagtccatgatttggtgctacttgatcagttagctatacaacgtgtttcagtcttaaatgagcaaattaaaaatgagtataacaactattcattccataagatcgtccagcttctgcataacttttgtgtcaatgatatgggtggtttctatttagacatccttaaggatagactctatacaatgccagcagattcatctgggcgaagatcggcacaaacggctttgtatatcattgctgaatctttgactcgttggattgcaccaattctgtcttttacctctgaagaaatttggaaaca

SEQ ID NO: 305448 - DNA, 2524 bp, Unknown
  Bacterial polypeptide expressing nucleotide sequence isolated from the Sargasso Sea
atgagtaattcccaaataaaccttcctaaaactgctttttcaatgaaagctaatttgcctgtaagggagccagaaattttagaatattggcaaaagattaacctttacagggagttaagaaactcaagcaaaggaaaagaaaaatttgtcctccacgatggtcctccatatgcaaatggtaatattcatatgggaactgctcttaataaaattttaaaagatataattgtaaaattccatcaaatggatggtaaagactctatctatgttcctggatgggattgtcatgggttgccaattgagtggaaaattgaggagcaatataaaaagaataaaaaaaataagaatgatgttccaatagtagaatttcgtaaagaatgtagattgtttgcagaaaaatggattgaggtacataaaggtcaatttaaacgtttgggtgtagtaggtgattgggaaaattactactcaactatgagttttgatgctgaggctcaaattgtaagagagcttggcaagtttttaaaagagggaagtttatacagaggttttaaaccagtattatggtctactgttgaaaaaactgctttagcagatgcagaagttgaatatcaagatcataaatcagatactatttatacatcttttcctattaaaaaatctaacttaaaagatcttgtaggtagcgatataattatttggaccacaacaccctggacaattccagccaatagggcactggcttataatgaagctcttgattatgttcagttggaattaaatgatgatagtgattttaaaaaaagaaaaattatagttgctgaagccttgctacagtcggtcatcaatgattgtaaaataaaaaattacaaaaaaataaaaacatttaaaggtaaagatttaaaagaaactatctgtaatcatccttttttagatctaggttacgactacgatattccaatgttggaggcaaggtttgttacaactgagcagggaactggtattgttcattgtgctccaagtcatggacctgatgattttaatttatgtttaaacaatggaattaaagcaattgaaacagtcgatggagatggcaaatatacaaaacatgtaagcttattcgaaggtattcatatttttaaagcaaacccaatagtaattgaaaaacttaaagagcaaaaaaaattattatcaaatggagagctaattcactcctatccacattcttggagatcaaaagctccactagttcatagagccactccacaatggttcatatctatggaaagtcataagttgagagataaagctttaaaagcaattaatgatacgactttttatccaagcaaaggaaaagagagattaaaatcaatgatagagtcacgacctgactggtgtgtttctaggcaaagagtatggggtgttcctctgccaatttttgttaataaaaaaactaaagaaattttagtagatgatgaggtaaatgaaactattgccgccatttatgaaaaagagggttcagattgctggttttcagatgacccacaaagatttttaggaagtaaatacaaagctgaagattatgaaaagttgagcgatattgttgaagtttggtttgatagcggatcaacacattcatttgttcttgaaaaaagagaagatttaaagtggccagcatcaatgtatttagaaggttccgatcaacatagaggttggtttcattcatcattattagagtcttgtggaactagaggaagagcaccgtttgaaaatattttgtcccatggatttgtagtggacggcaaaggattgaaaatgtcaaaatctttaggaaatgtaattgccccagaagatattttaaaaaaatatggagcagatatactaagaatttgggtagcatcttcaaactattcagaggatttaagaatagattattcaattcttgatcaacatgcagagtcctacagaaaaataagaaacacattcaggtacttgcttgggaatattaaagataattttgaagaaatagattttataaaagtagatttaaatgaattacctgaactggaacaatttatgttgcataagctgtattctttggatgttaactttaaaaaatattttaaaaattatgattttcataatttatataaagagttgcttaatttttgtactgtagatctatccgcattttattttgatataagaaaagactcattatattgcgaccccataaactcaaaaaaaagaaaatctactatactattattaaatataattttgaattcattattaaaatggtttgcaccaattttgtcttttacaactgaagaaatatatagattattatttaaagatagcaaaagtgttcatttagaaaaatttttaaacttcccaaataattttgaaaacaaaaaattgtatcaaaaatggttagagcttattaaaattagaaatatttgtaatatcagtattgaggaaaaacgagcaaataaagaaattggatctagtttagaggcagactaaa

SEQ ID NO: 305449 - DNA, 2743 bp, Unknown
  Bacterial polypeptide expressing nucleotide sequence isolated from the Sargasso Sea
atgagcaaagaacatataaatcttccaaaaacagctttttcaatgaaagctaatctaccaaacaaggaaccaggaattatagaatattggaaacaaataaatctatatgaaaaacttagaaaacaaagtaagggaaaagagaagtttattttacatgatggaccaccatatgcgaatggaaatattcatatgggaacagctttaaataaaatattaaaagatattattaccaaatttcatcaaatggatggtaaggattcagtttatgttccaggatgggattgtcatgggttgcctattgagtggaaaattgaagaacagtataaaaaaaataaaaaaaataaaaatgatgttccgattgttgaatttagaaaagaatgtagagactttgctaacaaatggattaatgttcacaaagatcaatttacaagactaggcgtaataggagactggaaaaactattactctactatgagtttcgatgctgaagctcaaattgtgagagagttaggaaaatttcttaaagaggggagtttatacagaggttataagcctgtattatggtctacagttgaaaaaacagcattagcagatgctgaggtagagtatatggaccatgtgtcggatacaatatattctgcttttccaattaagaaaacaaatttaaaagaaatagaaggctcaaatgtaattatatggactactactccatggaccatacctgcaaataaagctttagcttataattcaagtttaatttatttagttataaaaattaatgatgagggtgattttaaaaataaaaaaattataatagcaaaagatctttcagaatctttgatcaaagaatgtgaaattaaaaactttgatattgagaaagaattttcaggtaaagaatttgaaggaactatttgctctcatccatttttagatattggttataattatgatattccaatgcttgaagcaagatttgttacaactgaacaaggttctggaatcgttcactgcgcaccaagtcatggtcccgatgattttaatttatgtttaaaaaataatattaaagcactagaaacagtcgatgatgatggaaggtatacaaaaaatataattaaatttgaaggcacacatatttttaaagctaatcctatagttatagaaaacttgaaaaaccaaaaaaaacttcttgctagtggaaaactaactcattcttacccgcattcatggagatcaaaagcccctttggttcatagggccacagctcaatggtttatatctatggaaagtcacggtctaagaacaaaatcactaaaagctattgatgagaccactttttatccaagcaaggctaaagaaagaattaaatcgatgattgaaactagaccagactggtgtgtttctagacaaagagtatggggagttcctttaccaattttcttatctaagaaaaacggaaaagcattaattgacgatgaagtttttgaaaatattgctgaaatttttgaaaaagaaggttcagactgttggttttctgatgatgatcaaaagtttttaggaaaaaaatataattccgaagattatgaaaaaatgagtgatatcgttgaagtatggtttgatagtggctctactcattcgtacgtattagaaaagagagaggacttaaaatggcctgcatcaatgtatttagaaggatcagatcaacatagaggctggtttcattcctcattattagagtcatgtggaacaagaggtaaggctccttttgagagtattttatctcatggttttgtagttgatggcaaaggtcttaaaatgtcaaaatctactggaaatgttattttacctgaagatattttaaagaaatatggagctgatattttaagaatttgggtagcatcttcaaattatgcagaagatttgagaattgattattcaattttagatcagcatgcagaatcttatcgaaaaattagaaacacttttagatacttactaggaaatattaatgataattacgttgagaaaaattttgaggatataaatattaaagatttacctgatcttgaaaagtatatgttgcacagaatttatttaattaacaaaaatttttgtaattattttaattcttataattttcataatttatataaagagctattaaatttttgtactgttgagttgtctgctttttattttgatattagaaaagatcttctttattgtgacccaataaactcaaaaaaaagatcagactgtatcttagtattaaatatcatacttaattgtttgttaaaatggtttgcgccaatactatcttttacaactgaagaaatttacaaactaattaataaaggagaggaaaatagtattcacctaaaaaactttatcaaaatcccagaaaattggaaaaatgaagagctaaattcaaactgggaaaaaattaaaaaaattagagatgaagcaaatataagcatagaaacccaaagatccgaaaaaataataggctcaagtctagaagcaaacattgaaataaaaattaaagatcaagaaatgtttgatatagctcagaaacatgatttttctgaaatttgtataacatcttcagcctcaatcttgagtgataataatttaaaaaaggatattgaggttattagttcaaaagctaaaggtaataagtgccccgtatgctggaagattagagaaaatgcttgtgaaagatctggtcattgtcaccttgtatgat

SEQ ID NO: 305450 - DNA, 1126 bp, Unknown
  Bacterial polypeptide expressing nucleotide sequence isolated from the Sargasso Sea
gtagacggagatggaaaatatacaaaaaatgtttcattatttgagggtattcatatttttaaagcaaatcccattgtaatagaaaaattaaaagagcaaaaaaaactattgaaaaatggtgagctaattcattcttaccctcactcatggagatcgaaagcacccttggttcacagggcaactccacaatggtttatttcaatggatagtcacaaacttagaaaaaaagctttgaaagcaattgatgaaacaactttttacccaagcaaaggtaaagaaagattaaaatcgatgattgaaactagaccagattggtgtgtatcaagacaaagggtttggggagttccattaccgatatttgtaaacaaaaaaactaaagaaatattagtagatgaggatgtttttgaggcaatagctaaaatttatgaaaaagagggttccgactgttggttttctgatgatcctcaaaaatttttaggaaaaaaatataaatcagaagattttgaaaagctaagcgatatagtagaggtgtggtttgatagtggttcaacacattcttttgttttggaaaaaagaaaagatttaaagtggcctgcatcaatgtatctagaaggatctgatcaacatagaggatggtttcactcatcactattacaatcatgtggaacaagaggtaaagcaccatttgagtccattctttctcatggttttgttgttgatggaaaaggtcttaaaatgtctaaatctttaggcaatgtaattgcaccagaagatattttaaaaaagtacggggcagatatattaagaatttgggttgcttcatcaaactatgctgaggatctaagaatagattactcaatattagaccaacattcagagtcttatagaaaaattagaaatacatttagatatttactcggaaatttaaatgataattttgaagaaaaaaaaatggaagatattgatattgatcaattaccagaattagagcaattcatgcttcacaaaatttattcattaaatattaagtttaataagtattttagagattatgattttcataatctttataaggaattgttaaacttttgtactgtagatttgtcagcattctattttgatatta

SEQ ID NO: 305451 - DNA, 1761 bp, Unknown
  Bacterial polypeptide expressing nucleotide sequence isolated from the Sargasso Sea
cagctcatggtatggatgattatttaatatgtaagaaaaatattattgataccatccactcacttaataacaaggctttattcaaagatgaattagattttattgcaggattacctgctttgaaagcagacccacttatcattgagaaattacaagagcgtgatgtcctagttaacatagaagattatcatcattcttaccctcattgttggagacgtaaaacgccactaatttttacatctactcctcaatggtttatttctatgaaaaaaaacaatcttattaatgaagcccttaatcaaattaataatgttaattgggagccctcgtggggtcttcaaagaatccaatccatgcttactgatagaccagattggtgtgtttcaagacaaagaaactggggagtaccaataactttagttgttcataaagatactggggaaatacatccaaatcaaaaagatctatttgaaaaatttgcactcgcaattgaaaaacaaggaatttcagcttgggataagttagatttgaaagattatattcaagattatgatgagtatgttaaaacttctgattctcttgatgtttggtttgattctggaataacacattatgctgtttcctcaaaaagatttggtgaaaatactgtcgcagatctttatttggaaggctcagaccagcacaggggatggtttcaatcctcattattgacaagtatagccatgaataattctgcaccttataaaacagttcttactcatggatttgttgtggatgaacaaggaagaaagcagtcaaaatcactcggaaatgttgtctctccacagaaagtgtgggacagcttgggagcagatattttaagactttgggttgcttcaacagattttagaagtgaaatggtagcatctgatgaaatattgaagaggacttccgatcagtatagacgtatcagaaatactttcagatttattcttggaaacttaagtgattttaacaataaaaataaagttcagcttgagaatcaagtcgaattagataaatggataattaatgaaactaaaattcttcaaaaagaagtaatcagcctttatgaatcgtattcttaccataaggcaatccaaaaaatacataacttttgtgttaacgaattaggtggaatatacctagatgttgtaaaagataggctttacacctgcaaaaatgattcgtctgcaagaagatcatgtcaaaccagtcttgattttattttaaatgtattagttaggttgattgcacccattctttcatacacggcagaagaaatatggcagtcaagtaatagattaaatagtcaggaggactctgtttttctatctaactttgatatttctgaactaagttttgaatcagatattaatcaatctgaatggaagagaatttttgaagttaaggacgctgtaaatcaatctatagaagaaatgagaaatgaaaataaaattaaaggatcgcttgattcagtggtagatattcaagctacttcaaatgatcttaatattcttaaaaagttaggctcagaacttcattttttatttatttcctcagaagcgaatgtaaatgaaggaaaaaacttcaaaattaaagtaaatccctcaaagaacgcaaaatgtgtcagatgctggcatagatgtttttcagtaggatctagcaaagaacatcctgaattgtgtactagatgcattgaaaatatagatgatgagggtgaaaaaagaagttttgtataaa

SEQ ID NO: 305452 - DNA, 1654 bp, Unknown
  Bacterial polypeptide expressing nucleotide sequence isolated from the Sargasso Sea
atgaaatctcaaaatagcaaagaacaaaaatcagacttttcttataaaggaactttaaatttattaaaaactgatttctcaatgcgtgctaactcagttgtaagagaacccgagattcagaatttctgggctaacaatgatattgatttccaattaggtgcaagcaattcaggtgaaatatttacattacatgatggacctccttatgcaaatggagcgcttcatatgggtcatgcccttaataaagttttaaaagacataatcaataagtacaaaaccttaagaggatttagggttcattttgtgcctggttgggactgtcatggattacctattgaattaaaagttcttcagaatttaaaatctgatgaaagaaagaatcttgacactctaaatttaagaaaaaaagcaacagattatgcccatatccaaattaataatcaaaaggagggttttaaaaggtggggcatatggggagattggaataacccttacttaactcttaagaaaagttatgaatctgctcagattggagtatttgggaaaatgtttttaaatggctatatttatcgaggtcttaaacctgtacattggagtccaagttcaaggactgctcttgcagaagcagaattagaataccctgatgaacattactcaaaaagtatttatgttgctttaaaaatcacaaaaatatccgaggaaattttattaaattttattcaagaaaatcctcatattaaaaaagaattttttcaaagtaaaactttcataactatttggacaactactccttggactatacctgcgaatgaagcagttgcagtaaatccaaaaataaattatgtctttgctatagatgaagataaacaaatttatctttttgcaaaagacttatctgctgaaataagtaagaaatttaataaagatttaaaggtgcttttagaggtaaaaggttctaaattggaaaatattgaatatcaacatccctctgagaataaaaattgcagaattgtaattggaggtgattatataactacagaatcagggaccggaattgttcatactgctcctggtcatggaatagatgactttaatgtgggtcaaaaatataatttaccaataacatgtgttgttgatgaaaaaggcaacttaaatgaatattctggtcaattcaaaggatcaaatgtcctgaaagatgcaaatgatttaattattgaacatttaaaaggaaatgatttgcttctattacaagaaaactataagcatagatatccgtatgattggagaaccaaaaaaccaactatttttagggcaactgaacaatggtttgcatctgtagatggctttagatcatctgcattaaaggctatcgaagatgttgaatggatgccagcaactggaaagaaaagaattcattctatggttgttggtagaggagattggtgtatttctagacaaaggtcatggggagttccaattccagttttttataacaaaaatggtaatgaaattctccttaacaacgagataatcaatcatattcaagaactttttagtgaacatggagcagatatttggtgggattgggatgtaaagaaccttttggcagaaagttacgcaaaagaatcggatctctggaaaaaagggacagata

SEQ ID NO: 305453 - DNA, 2455 bp, Unknown
  Bacterial polypeptide expressing nucleotide sequence isolated from the Sargasso Sea
tgagaaaaagtttggaagagatagtgatactgtaaaagataagtcaaaatttattagtgcctgtagagaatatgctctttctcaaatagaaaatcaaaagaaagattttataaggcttggagtcttgggtgactgggaaaattcatataagtctcttgattcatcatttgaagcagatactgttaggtctttaggcagaatagttacaaacggccatcttcagaaaggggagaaacctgtccatttttgttatgactgcaaatcagccctagcagaagcagaggttgaatatgaagataaagtttctaaatctattgatgtaggttttaaagtaaaaaaagattcacttgttaagttgagtgcagcattttcaaaagaaatagatagttgcagctttgtaatttggactactacaccatggacaattccagctaatgctgctgtctcaattggtccagaattaaaatataccttatgtaattcaaaatttgggtacatagttttagcaactgatttgattgatcaatgctcagaacgctggaagaccgatttagaaaagatatcagaggtcaatggaaatgatattaaggatgttgtattggaacatccatatttagagagagattctattttaattcatggagatcatgtaactactgagacaggaacgggatgtgttcatactgcaccagcacatggagcagatgatcataatatttgcaaaaagtataacattgatacaattcatgcgcttgatggaaacgggttttttaatcaagaatataaggatttagctggcctccctgcaataaaagctgaccaaatagttatagatattctgagggaatctggaactttgataaatgaggaagattttcatcattcctatccatattgctggcggcataagactcctctaatttttgcttcaacgcctcaatggtttatatcaatggacaagtcaggtcttttagaggggtcaatacaagctattaaagatgttaattgggaaccatcttggggatatgaaagaataaaatctatgcttgaaggaagaccagattggtgtatctctaggcaaagaagttggggcgttccaataccacttcttataaacaaaaatactggagagattcatccaaaacaaaatcttctctttaatgagattgcagatcttattgaggagaatggaatagagtcatgggataaggttaatttaaaagagttagttgaagatcatgatgattatgtaaaagcaacagatacgctggatgtttggtttgattcaggatcaacacatttttgtgtgctggataagctttatggaaaagatctaattgctgatctatatctagaaggatccgatcagcacagaggttggtttcaatcatctctattaacaggtattgccattaatggaaaagctccttataaagctgtgcttactcatggatttgttgttgatgagaatggtagaaagcaatccaaatcattgggtaatgttgtatctcctcaaaaggtctgcaataacttaggggcagatatcttaagactatgggttgcatctacggacttcaggagtgaaatggtagccactgatgaaattctcaagcaagtatctgatcagtatagaaggataagaaatacttttagatttattatgggtaaccttaatgactttgatgatgcaacaaacaatattaataaaaatgatttagttgaaatagataaatggattataagtgaagcaataaagcttcatgaagaaatccaagagttaaatgataactatgcttatcatcatgtcatacaaaagattcataacttctgtgtgcatgagctcggaggagtttatttagacataattaaggatagaatgtatgtaacaaaaagtaattctaatgcaagaaggtctgctcagtttgcactttttgaagttgctgatatcttaatcaggctcatatcaccaattctagtatttactgctgaggaaatttggcaatcacatgagctatttaagaagcaatcagtttcaatatttacggctccacaaaagactttaagcgaaatagaaagttcaatttctgatgatgattggaaaaagatttttgcagttaaggatgctgtaaatcaaagtattgaaaaagcaagagctgactcagttattaaaggttcacttgattcaaaaattatcatttcatgtgataagaaagcctataatgctctcgaaaagattgaggatgagctgaaatttgttttcatttcctcagaagtagagatagctgaatcatcaagctcaaagttagatattgaagtaactaatttcgatcaaaaaaaatgtataagatgttggaataaatgtagttcagttggattgtatgtagaagatcctgagatttgctcaagatgctatacaaatgtttatggtgatggtgaaattagaaaatttgtctaa

SEQ ID NO: 305454 - DNA, 1918 bp, Unknown
  Bacterial polypeptide expressing nucleotide sequence isolated from the Sargasso Sea
gaagaaattggaattaaaaaatttagtacaaaaaagaaatttaaaggagataatttatcttcttgcgaatgtgagcatccatttaaacaattaggttacgattttattgtaaaaccatttcatggagactttgtaaatttagaacagggaacaggggtagttcatatagctcctggacacggagatgacgactatgttttaggtttaaaaaacaatgttgatattatccagacagtacaagatgatggaaaatataatcaacacgctgttggctttgaaggtgaacatatctataaagtagatcataaaattgcagataaattagaagaattttcaaaattattatttaagggtactcttcgtcatagctatccacattcgtggaggtctaaagctcctcttatttatagaaatactcctcaatggttcatttctatggaaaaaaataatctaagagacattgctctgaaatcaattgatgaaactattttctatcctcctcaaggtcaaacaaggcttagatcaatgattgaaactagaccagattggtgtgtgtctagacaaagagtttggggtgtgcctttgccattatttgtaagtaaaaaaacgggtcaacctttaagagatgaaaacattattaatagaatagctgatatatatgaaaaagaaggaagcaatacgtggtttaccgaagatccacaaagatttttaggggatgaatattcaattgatgattatgaacaggtaaaagatgtagttgaagtatggtttgatagcggttctacacatgctttttgtctagaacaaagagaagatttgaaatggcctgcatctatgtacttagaaggcagtgatcaacacagaggatggtttcattcatctcttttagaatcttcaggcactagaggcaaagcgccttacgaaagtgttttaacacatggatttgttgttgatggaagaggacgtaaaatgtctaaatctttaggtaacgttatttctccagatgatatattaaaaaaatatggagtagatattttaagattgtgggtcgttgcttctgattattatgatgatcttaaacttgataatgccattctccaatcacaagcagagtcttatagaagaataagaaacacctttcgttttttaattggtaatttaaataattataagaatgaggagtcgatagatgagaaagagtttccagaattagaacaatatcttcttcatagattatgggaagttgatcaaactattcaaaaatgtgtaaaaacttttaattttcatttaatgttcaccacacttttaaatttttgttctaatgatctttcagctttttattttgatattagaaaagatactatctactgtgatagtataaattcaatcaaaaggcgatctacaagaactcttttaaatattatctttaaccatttagtaaggtggtttgctccttctatttcttttacttctgaagaagcttggaaagctatgggaaatactgaaagtatacatcttcaagattttttaaattgtaaaaaagaataccaaaatgatcaattaaatgaaaagtggaatttgattaagaatataagaaaagtttctacgggtgctattgaaaaaataagagaagaaaaaattatacgttcaagtttagaagctcatttggatatatttgtatcaaaagaaaattttgataaagttaatgaagtaatgtttgatgaaattgctattacttcatcatataaactgcatgtacttgatgaaaatagccagggcttttcaatagatgaaattgaaaatgtaaaggtacaagcatcaaaagttagtggtcaaaaatgtcaaagatgctggaaatatgaaaaagaattagtgaaaaatgaaatttgcaatcgttgtaatgatgcaataagttaag

SEQ ID NO: 305455 - DNA, 949 bp, Unknown
  Bacterial polypeptide expressing nucleotide sequence isolated from the Sargasso Sea
tcagatgatatggatggtttaagaaaggttcctgaaaatatacctaatcaagatatattaataaaaaatttaaataagccactaactcaagtgcccgatccttttggaaaattcaatagttttggtgaacataataatgaaatgttaaaaactttcctaaacaattttaaatttaagtatatttttaaaagttctacagaactttatagaagtggatttttcaatgatacgttaataattattttacataattttgacaaaataatggatattattttaccaacactaggaaaagaaagacaaaaaacctactctccttttttgccgatttgtcctgatacaggaaaagttttagaaattcctgttaaagaaattaataagaaaaataataaaattatctttgaaaataatggaaaagatcttgagacaaatattttagacggtaattgtaaattgcagtggaaggtagattgggcaatgcgatggtatgcgctagatgtggattttgaaatgtatggaaaagatctgattgagagtgcagtgttatcttctaaaattataaaaactttgggtaaaaataatccattaggttttgcttatgaattatttttagatgagaaaggtgaaaaaatttcaaaatcaaaagggaatggtattacaattgacgagtggttgaaatatgcgtcaccagaaagtttatctctttttatgtatcaaaatccaaaaagagcgaaaaaactatataatgagatagtatcaaaagctgtagatgaatatctaagttttattgaaaagggaaaaactcaaaatctgtcgcaacttttgctaaatccactatggcatgttcataatggcgagataccaaaagaagaaattataatgagtttttcaatgttattaaatttagttgaaactagtaatgcatcctcgaaagatgtcctttggaagt

SEQ ID NO: 305456 - DNA, 628 bp, Unknown
  Bacterial polypeptide expressing nucleotide sequence isolated from the Sargasso Sea
aatggaaaataaaagtttaaaacaaatcattgacaatcgacttgaaaaattaaaaaaaattcgtgaattaggcgtagaaccttatgcctatgattttacatgctctcataatacatcagaaataaatgatgagttaattgactctaaagtttccatagctggaagaattatgtcactgaggagaatgggtaaagcatcttttgccaatattcaagatcaagagggtcgtattcaattgtacattgcaagagatgacgttggagaagataattataatttgtttaagcttactgacataggtgattttgttggcattgaaggtaaggttttcaaaacaaaaactgatgctttgacaattaaagtttctcatttgacaattttatctaaaagcattaaacctattcctgatgttaaagagaaggacggagaaaaatataatttagtttccgataaagaacttagatatcgaaaaagattccttgatttgattattaatcctgaaacaaaggaaaattttattaaaagattcaaaataattaattctatcagatcttttttaaataatcacggatatattgaagtagaaactccagtatttgcaaccaatttatggaggaagcaatgctaa

SEQ ID NO: 305457 - DNA, 842 bp, Unknown
  Bacterial polypeptide expressing nucleotide sequence isolated from the Sargasso Sea
cgaagtatcacgaacctcaatgatgattaatgccttaaagcatattagaaaaattgaaacagaattaattactttctcagatgatatggatggtttaagaaaagttcccgagaacatacctaatgataaaattttacatgataatttaggaaaaccattaactgatattcctgacccttttaaaaaatttaaaagttttggcgaacacaataatgaaatgttgatagaatttctcaaaagatttaatttcaattttgtttttaaaagttcaacacaaaattataaaaatggtacattcaacaactcaattgtaagagttttagaaaaatttgatgatatcatgaatattattttgcccacattaagaagtgaaagaagaaaaacatattccccatttttaccaatatgcccagaaacaggaaaagtattagaaataccagttgtcgaaattgataagaaaaaaaacatattagtctttgataataatggaaaaaaaattgaaacagaaatattgaatggcaaatgtaaactacaatggaaagtagattgggctatgagatggtttgcatttgatgtagattttgaaatgtacggtaaagatctcatagaaagcgctataatatctagtaaaatttgcaaggtgatgggcaaacaaccgcctaatggttttgcttatgaattatttttggatgaaaaaggagaaaaaatttcgaaatcaaaaggtaatggaataaccattgaacagtggttaagatatgcctctcctgaaagcttatcacttttcatgtatcaaaatccaaagagagctaaaaaactttatccagatgtagttcccaaagctg

SEQ ID NO: 305458 - DNA, 868 bp, Unknown
  Bacterial polypeptide expressing nucleotide sequence isolated from the Sargasso Sea
acaggatatgggccaagtggattgccccacattggaacttttggtgaagtttcaagaacctctatgatggtaaatgctttgaaccatattagaaaaattaattctgaaataataactttttctgatgatatggacggattaagaaaagttccagaaaatataccaaatgatgatgttcttcatgcaaatctaggtaaaccccttactgatatccccgatccttttagaaaatacaaaagttttggcgaacataataatgaaatgttaattgagtttttaaataaatttaaatttaaatttaaatttaaaagttcaacagtaaattataaaaaaggtttttttaatgaatcactcacaagagttttggataagtacgaagaaattatgaacatagtccttcccacattaagaagtgaaagaaaaaaaacttacagtgcttttttacctatgtgccccaatactgggaaagttctcgaaattccagttttggaaatagataaaaaaaataataaaataatttttgacaacaaaggaaaaaaacttgaaagcagtattctagatggaaattgtaaattacaatggaaagtagattgggcaatgagatggtttacatttgatgttgacttcgaaatgtacggcaaagatctaattgagagtgcagatatttctagaaaaatttgtaaaacattgggaaaaaaacctccaaacggttttgcctatgaactatttttggacgaaaaaggtgaaaaaatatctaagtcaaaaggaaatggtatcacaatagatcagtggttaagatatgcatctcctgaaagtttgtcattgtatatgtaccaaaatccaaaaagagcaaaaaaactttatccag

SEQ ID NO: 305459 - DNA, 862 bp, Unknown
  Bacterial polypeptide expressing nucleotide sequence isolated from the Sargasso Sea
aacatcaatggtagttaatgctctaaataatttatcagatctacccaaagaaataattacattttctgatgacatggatggacttagaaaagttcctgaaaatattcctaatttagaaaaacttcagaaaaatttacataaaccacttacacaagttcccgatccgtttgaaaagtttaatagttttggtgagcataataatgaaatgttaaagaaatttttgaataaatttaaatttaattattcatttaaaagttcaacagaattatataagtctggtttttttaacccaactttgaaattgatattagaaaactacaaagaaattatggaaataataattccaacacttggaaaggaaagacaaaaaacttattctccatttttaccgatttgtccagatacaggtcatgttttagaaattccagttatagaaattgatactaaaaattctaagatactttttgataataatggaaaaaaacttgaacaaagtattctagacggaaattgcaaactccagtggaaagttgattgggcaatgagatggtatgcattagatgttgattttgaaatgtacggaaaagatctcatagaaagcgcaattttatcaacaaaaataattaaattacttggtaagcaaaatccttctggttttgcttatgaattgtttttagacgaaaaaggtgaaaagatatctaaatcaaaaggaaatggaataaccatcgatcagtggttaaaatatgcatcaccagaaagtttatctctgtatatgtatcaaaatccgaaaagagcaaaaaagctttatgatgaggtagtaccaaaagctgtagatgaatatttagattttatacagaaaggt

SEQ ID NO: 305460 - DNA, 905 bp, Unknown
  Bacterial polypeptide expressing nucleotide sequence isolated from the Sargasso Sea
tgaaaataaaggaaaaattattctccaaacaggatatggtcctagtggtttaccacacattggtacttttggtgaagtggcaagaacctcaatgatagttaatgccttaaatcatttaactgatctcccgaaagaaataattactttttccgacgatatggatggactaaggaaagtacctgaaaatattcctaattctgaaaaactaatacaaaatcttcataaacctttaactcaagttccagatcctttcggaaaatttaatagttttggagagcacaacaatgaaatgttaaaaaactttctaaataaatttaattttaaatataattttaaaagttcaactcttttatataaatctggtttttttaatgactctttaaaattaattttagaaaattatgaaggaataatgaatatagttattcccacgcttggtaaagaaagacaaaaaacatattctccatttttaccaatatgtccagatacaggagttgtattagagataccagtcttacaactagatactaaaaattctaaaataatttttgacaataaaggtaaaaaattagaacaaagtattttagatggtaattgcaaattacaatggaaagtagattgggcaatgagatggtatgctctcgatgtagattttgaaatgtatgggaaagatttgattgagagtgcaattttatctacaaagatcataaaattattaggtaagccaaatccatctggcttcgcatatgagttatttttggatgaaaagggtgaaaaaatatctaaatcaaaaggaaacggtattactattgaccaatggttagagtatgcatcaccagaaagtctctccttatatatgtaccaaaatccaaaaagagcaaaaaaactttacagagaagtagtac

SEQ ID NO: 305461 - DNA, 880 bp, Unknown
  Bacterial polypeptide expressing nucleotide sequence isolated from the Sargasso Sea
aatgcactgggctgacgtagtcgcagacaaattattagaatctggtaaaaaacacgttatttcatcaggtatcacaccttcaggtccaatacatttaggtagtatgcgtgaaatattaactgcagatgcagttgtaagatctgtaaatgacaaaggaggggaagcaaaactaatctacatagcagataatgctgatcctcttcgtaaagtatatccctttttggacgaaaacaagttcaaagattatgttggaaggcctttagcagaaatacctgcacctgatggaaatggaagttatgatcaattctttctgaagccttttttcaaatcgctagaagacgtaggtgttatacctgaggtagttgataattacaaattttacaaagatggaagatataaagaatgtactaaaactattatagaaaatagagaagaggtcagagaaatactggaaaaaatttctggaagacaattacctaagagttggttcccttggacatttaaagatgaggatggaaaattgtgtaatggtaaatttaccagatatgaatggccaaatgtatattttgaaaatgagactggtaaagaaatagtaaacaacttagaaaaaggagaagggaaattaccctggaggctagactggccctcgaaatggagaattttgaatgtaacttttgaagcatttggaaaagatcatgctacaaaaggaggtagttttgatacagggaaaagaattgtaagaaatattttgggaagtgcagttcctcaccatattgtctacgaatggataaatttgaaaggtaaaggagctatgcactcctcaactggattagcaatttcagcagatgaaatgcttagaatggcacctcctgaagttata

SEQ ID NO: 305462 - DNA, 868 bp, Unknown
  Bacterial polypeptide expressing nucleotide sequence isolated from the Sargasso Sea
gatgacatggatggtctaagaaaagttcctgataatgttcctaatcaggaattgctaaataaaaatctacataaaccattaacacaagttccagatccatttgaaaaatttacaagttttggagaacataataatgaaatgttaaaagattttttaaatagttttaattttaaatacagctttaaaagctcaacatctttatacaaagatggttttttcaacccaactttaaaaattattttagaaaattatgatggtataatgaatattatacttccaactttaggtaaagaacgtcaaaaaacttactgtccttttttacctatttgtccagacacaggtcatgttctcgaaattccagttatagaaattgataaaaaaaattctaaaataatttttgataataagagtaaaaaattagaatctagtattttggatggaaattgtaaattacaatggaaagttgattgggcaatgagatggtatgctctagatatagattttgaaatgtatggaaaagaccttattgagagtgcaattttatcaactaaaattataaatttaatcggtaaaaaacatccatctggatttgcttatgaattatttcttgatgaaaagggtgaaaaaatttcaaaatctaaaggaaatggtattaccatcgaccagtggttaaaatatgcttcacctgaaagcttatctttatacatgtatcaaaatccaaaaagagcaaaaaaactttataaagaaatagtgcctaaagcagtagatgagtacctcgataatattgaaaaatcaaaaaaacaaacagaacaacaattagtaatgaatcctgtttggcatgttcataatggcaatatccaaaagaaga

SEQ ID NO: 305463 - DNA, 807 bp, Unknown
  Bacterial polypeptide expressing nucleotide sequence isolated from the Sargasso Sea
aaaaaagttataaatcttcaaactggctatgggccaagtggacttccacacataggaacatttggagaagttgcaaggaccacaatgatattaaatgcaattgaatctgtgtctgattttgaagtaaatcttatcgctttttctgatgatatggatggacttaggaaagtccctgacaatgttcctaatcaggatgtcttatcaagtaatttacataaacctcttacatctatacctgatccctttggcacccatgagagctttggatctcataacaacaacatgttaaaagaatttttagatcaatttaattttaaatataattttaaaagtgcaacagaactctataaatcaggtttttttgatgagcagattattaatgttctagaaaattatgaagagatcaaagggattgttttgcctactttaggtgaagaaagaaggaaaacttatagcccttttctcccagtctgcccagatacaggtaaagtccttgaagttgagataaaatctatagataagaaaaacaaatctattacttatgataacgataacaaagaatatgagactttggtaacaggaggaaattgtaaactacaatggaaagttgattgggcaatgagatggattgctcttaaaattgactatgaaatgtatggaaaagatcttataccaacatttcaattgtcttctaaaatctgcaaagctctaggtggaaagcctccagagaattttttttacgaactttttttagaccagaatggagaaaaaatttcaaagtctaaaggcaatggtcttaccatagag

SEQ ID NO: 305464 - DNA, 403 bp, Unknown
  Bacterial polypeptide expressing nucleotide sequence isolated from the Sargasso Sea
atttgtagaacccaaacttatacaaccaacatttttgatatattatccgacagaaatgtctcctttggcaaaagcaaagacagataatccaaactatgtagaaagatttgaagcatttattggtggaatggaaattgctaattcatattctgaactcaatgatccgatcattcaaagagaacgatttgaagaacaagaagctttccgtgaaacatatacctcagaagaggattttgatcgtcttgatgaagactttttggaagccttagaatatggtatgccacccactggtggattgggtgtaggaattgatcgtctagtcatgatactcactgaacaagatacaatacgtgatgttgttctctttcctcaaatgcgcacagcaaaaaatacaaatgaataa

SEQ ID NO: 305465 - DNA, 944 bp, Unknown
  Bacterial polypeptide expressing nucleotide sequence isolated from the Sargasso Sea
cacatattgggaaccttcggggaagttgctagaacatcaatggttgtaaatgctctaaatcaacttactgatattccaaaagaaattattacattttctgatgatatggatggtttgagaaaagtaccagacaatgtaccaaataaagaattattagaaaataatttaagcaagcctcttaccaaagttccagatccatttaacaaattttctagttttggagaacataataatgaaatgctaaaaaaatttttggatcaatttggatttaaatatacatttaaaagttcaacagagctctataaatctggaaagtttaatgagactttaaaattagtttttaaaaattaccaaggtattatggatttaataattccgacattgggattagaaagacaaaaaacatattctccctttttaccgatatgtccagaaactgggaaagttttagaaataccagttttagaaactgatgaaaagaattttaaaattatttttgataataatggaaaaaaattagaaaaaagtattttgaacggagagtgtaaactccaatggaaagtagattgggctatgaggtggtattcactggatgtagatttcgaaatgtatggaaaagatttgattgaaagtgcaatactctcaactaaaataatcaatttacttgggaaaaggaatccatcaggatttgcgtatgaattatttttagatgaaaaaggtgagaaaatatctaagtctaaaggcaatggaataaccatagatcaatggttagaatttgcttccccagagagtctttcgttgtttatgtatcaaaaccctaaaagagcaaaaaaactttataaagaaattgtgcctaaagcagtagatgaatatttggatcttatttacaaatcaaaaacacaagatgataaaacactaattttaaatccagtttggcacgtgca

SEQ ID NO: 305466 - DNA, 922 bp, Unknown
  Bacterial polypeptide expressing nucleotide sequence isolated from the Sargasso Sea
aaaaaaggtaaaataacacttcaaacaggatatggtcctagcggcttaccacacataggtacttttggagaagtagcaagaacatcaatgatggttaatgccctaaatcaattgactgatctacctaaagaaataattacattttctgatgatatggatggtttgagaaaagttccagacaacgtacctaataaatacatattagaagaaaatttacacaaaccacttactcaagttcctgatccatttcaaaaatttaacagttttggcgaacacaataatgagatgttaaaaacttttttagataatttcaatttcgattataattttaaaagttcaacttctctttataagtcaggtttttttaattcatctcttaaagtaatattggaaaattatgaaggaataatgaacattatacttccaacattgggaaaagaacgacaaaaaacttatagtccatttttaccaatatgtcctgaaactggtcatgttttagaaattccagtaaaaaagattattaaggataaatcaaaaattatttttgataataatggaaaagaattagagataagtattttagatggaaattgtaaattacaatggaaggttgactgggcaatgagatggtatgctcttgatgttgattttgaaatgtatggtaaagatctaattgaaagtgcaatattatctacaaagataattaaattgattggtaaaacaaatccatcaggatttgcttatgaattatttttagatgaaaatggtgaaaaaatttcaaaatcgaaaggtaatggtattacaatagatcagtggcttgaatatgcctcacctgaaagcttgtcactatacatgtatcaaaatcccaaaagagcaaagaaacaatataaagatatagttctaaaaacagtagatgaatatt

SEQ ID NO: 305467 - DNA, 688 bp, Unknown
  Bacterial polypeptide expressing nucleotide sequence isolated from the Sargasso Sea
catgaatcatcaagaagaaccatcttcatctacgggacaaccaacttttattaaaacacctcgcagagagatacagactcgaaatatgaatcagtatgagtatattcaatcaatcaggaagcatgatgtaacattcggaattggacctgctggtacaggtaaaacctatttagctgtagctgctgccattgagtctcttcagaggcaagatgtcaaaagaataattctagtgaggcctgcggttgaagcgggagaaaaccttggctttcttcccggtgatttatctcagaaggttgatccatatctcaggccgatgtatgacgcactttatgaaatgatgggatttgagcaagtttctaatttaatagagagaagaacaattgagctcgcgcctttggcatttatgagagggcgatccttgaatgaaagctttattattttggatgaagcgcaaaacactactgtagaacaaatgaaaatgtttttaaccagaatggggtttggctcaaaatctgttgtcaatggagacattactcagattgatttacctacggaaaagaaatcaggtcttgagcatgcgttaagtgttgtgtcagacatagataagattgcttctgtgcatttttcacataaagatgtcgtcaggcatcgaattgtgcaagaaattgtggaggcatatgaaaagaac

SEQ ID NO: 305468 - DNA, 259 bp, Unknown
  Bacterial polypeptide expressing nucleotide sequence isolated from the Sargasso Sea
atgggagttggccaacgcctattctgagttgaactaccctctccagcagcgcaaactgatggaagaacaggtagaacgtggacgtggaggtgaatcagaaacccagcctctggatgaagatttcctgaggtgtgttgaatatggaatgccaccgatgggaggaatcggattcggcattgaccggatggtgatgctcctgaccggacaaaccacgattagagacgtgatcctatttccaaccatgcgaccggagcaataa

SEQ ID NO: 305469 - DNA, 184 bp, Unknown
  Bacterial polypeptide expressing nucleotide sequence isolated from the Sargasso Sea
aatgacagatcagaatcaaaccgttcaggacgaaaataagctcatcgccgagcgtcgtgccaaactcgaaacgctgcgtgaaaacagcaaatctaatggccacccgaacgacttccgtcgggaacatctggcggctgatctgaaagctgaacacggtgaaaaaagcaaagagcagcttgctgaa

SEQ ID NO: 305470 - DNA, 922 bp, Unknown
  Bacterial polypeptide expressing nucleotide sequence isolated from the Sargasso Sea
agaaaaaatattataaaaaaaaaaggtttaattactttccaaactggttatgggccaagtggattaccgcatatagggacttttggtgaggtcgccagaaccactatgatgattaatgctctcaatcatatagaaaaaataaatcatgagcttattactttttctgatgatatggatggattaagaaaagttcctgataatattcctaatgatcaagttttaaaagataacttaggaaaaccattaaccaatattccagatccatttaaaaaatttgatagctttggcaagcataataatgagaagcttaaagaatttttaaataaatttaatttcaaatttacttttaagagctcaacagaaaattataagaatggtatttttaataaatcgcttataagagttgcagaaaaatacgaagatgtaatgaacattattcttccgacattacgagaggaaagaagaaaaacatactgcccatttttaccgatttgtccaaaaacagggaaggtgttggagataccactgttagaaatagacaacaaaactggaaaagcaatttttgataatagaggagaaaaaatagagataagtattttagacgggaactgtaaattacagtggaaagtagactgggcaatgagatggtttactttcgatgttgattttgaaatgtacggtaaagatttaactgaaagcgctatcttatcaaataagatttgcaaaacccttggaaaaaatccacctaatggttttgcttatgaactttttttagacgaaaaaggagaaaaaatttctaaatcaaaaggaaacggaatttctatagatcagtggcttagatacgcatcaccagaaagtctctctttttatatgtatcctaatccaaaaagagcaaaaaaactttatgcagaagttgtaccct

SEQ ID NO: 305471 - DNA, 778 bp, Unknown
  Bacterial polypeptide expressing nucleotide sequence isolated from the Sargasso Sea
acggatcttcctaaagaaataattacattttcagatgatatggatggacttagaaaagttcccgaaaatatccctaacaaagatattttggaaaataatttgcacaaacctttaacaaatgtgccagatccttttaaaaaatttaatagtttcggagagcataataatgaaatgttaaaaaattttttaaataattttaaatttaaatatacttttaaaagttcaactgaactttacaagtcaggtttttttaatgatactttgaaattaattttaaaaaaatatagtgaaataatggatataattattccaacattaggcaaagaaagacaaaaaacttattctccatttttaccagtttgtccagataccggtgttgttttagaagttccagttttagaaatagataataaaaattcaagaattatttttgataataatggaaaaaaattagaaaagaatattttggatgggcattgcaaacttcaatggaaagtagactgggcaatgagatggtatgctttagatgttgattttgaaatgtatggtaaagatctaattgaaagtgccatcttatctacaaaaattataaaaatattaggaaaaactaacccttcaggttttgcttatgagctatttctggacgaaaaaggagaaaaaatttctaaatcaaaaggcaatggaattacgatagatcaatggttagaatatgcttctcctgaaagtttatctttatttatgtatcaaaacccaaaaagagcaaaaaaattatatagag

SEQ ID NO: 305472 - DNA, 754 bp, Unknown
  Bacterial polypeptide expressing nucleotide sequence isolated from the Sargasso Sea
ttggaagaagatgaatattggaaaccaactcctcctgattatatggatggaatagaaccccattggagagaaataagaacattggtattagattctgcaagtcaatttcctgcaaaacctccattaccatatgatttgacaaaaggaagtcctttttacaatcagcttatggaggtatatgagattggaaataaattaagtaaagaacaaatagaaattgccagcttctgggattgtaatccatttgttactcaccatcgtggtcatgctatgtttgctactaaaaaaattactcctggtggacattggattggaattacagcaatcgcaactagagttgctaaaagtagttttgatgaagctgtaaatgcttatgcaaatgtttccattgcactgtttgattcttttataagttgttgggatgagaaatgggagaccatagttgttagaccagagaccttaattaataaatatattgatgaagactggttgccaatccttcaaaccccaccttttcctgagtatacaagtggacattccgtcatttcaagggcagctgcacttgctttaacagatatttatggtgaaaatttccaatttaatgacacttcagaactagaatatggacttccagctagaaaattcaattcctttattagtgcttctgaggaagctgctatctctaggctttatggaggaattcattatatgatggctattgaagaaggggtaaatcagggtcaagaaataggag

SEQ ID NO: 305473 - DNA, 369 bp, Unknown
  Bacterial polypeptide expressing nucleotide sequence isolated from the Sargasso Sea
aagagattagttgtcggaggttttgataaagtttttgaaataaggagaaacttcagaaatgaaggaatatcaactcaacataatcctgaattcactatgctcgaaatctatgaagcttattctgattttaacgatatgatgaactttattgaaaaacttgtattgaattgcttaaaggatcttgatttaggtcaaactatttcctatctaaatcattctattgactttaaactcccatgggagagggttagcatgatagagtggacaagtaattttctaggttttgatgttttaaataatataaaagagcttttcaattatgcttcgaaaaataatatagagcattttgatcaagaaggaagagtcata

SEQ ID NO: 305474 - DNA, 658 bp, Unknown
  Bacterial polypeptide expressing nucleotide sequence isolated from the Sargasso Sea
ttgtttaaacaacatatagtgaccgaacaagaaaaaattaggagagaaaaacttgaagagctaaaaaagcttggaattgatccttatccagctgaactttatcctgtaacaaatttttcttcagatttaatctccaaatatgaagataaaaagcaagtggtaattgctggtagaattatgtctaggcgaattcaaggaaacgcttcttttgcagaaattttggataataaaggtagaattcaagtatattttaatagagatgagatttgtgagggagatgataaaactaaatataacatagtttacaaaaggttacttgatattggagatataattggcatacatggtgaactgtttaaaacaagagttggagaaatcactgtattagttaaagatttcaaaattcttaataaatcactacgaccacttccactaccaaaagttgattctcaaggaaaagaatatgatagttttactgatttagaacaaagatacagacaaagatatgttgaccttatagtaaaccaaagtgtaaagaaaacatttataaagagaacaaaaattattaattcaataagaaattttttaaataataaagaatatctcgaggtagagactccaattttacaaccaattccaggggagcaacagctaggcc

SEQ ID NO: 305475 - DNA, 984 bp, Unknown
  Bacterial polypeptide expressing nucleotide sequence isolated from the Sargasso Sea
cttttggagagtagctagaacctcgatgatggttaatgctctaaaaaatttacctgatttgccaacagaaataataacattttctgatgatatggatggtttaagaaaagttccagaaaatgttccaaaaaaagaattactaaaagaaaatttacataaacctttaactcaagttccagatccttttggaaaatttaatagttttggtgaacacaacaatgaaatgttaaaaacttttttgaatagttttaattttgaatataattttaaaagctcaacatctctttataaatcaggttattttaattctgctctacaaaaaattttagaaaattatgacggaataatgaatattattttgcctacattaggaaaggaacgtcaaaaaacttatagcccatttttacccatatgtcctaacaccggacatgttttggaaataccagtaaaaaatattaataaagataaatttactattgtttttgataatgatggaaaagatcttgagacaagcatcttagatggaaattgtaagttacagtggaaagtcgattgggctatgagatggtatgcgttagatatagattttgaaatgtacggaaaggatcttattgaaagtgcaattttatcaacaaagataattaaattaattggaaaatcaaatccctcaggttttgcttatgagctttttttagatgaaaaaggagaaaaaatttctaaatcaaaaggcaatggtattacaattgatcagtggctcgagtatgcatcaccagaaagcttatcattatatatgtatcaaaatcctaaaagagcaaaaaaactttataaagaaatagtaccaaaagctgtagatgattatttggattttattgaaaaagcaaaaactcaaaatgatttacagctacttatgaatccagtttggcatgtacataacagtaaagtgcctaaagaaaatatgattatgtcttttttcatgttgttaaa

SEQ ID NO: 305476 - DNA, 800 bp, Unknown
  Bacterial polypeptide expressing nucleotide sequence isolated from the Sargasso Sea
gagataattacattttctgacgatatggacggattaagaaaagttccagataatgttccaaatcctgaacttttaaataaaaatttacataaaccattaacaagtattcccgatccatttaaaaaatttaatagttttggcgaacacaataatgaaatgttaaaaagttttttaaataaatttaattttaaatatattttcaaaagttcaacatccctttataaatcaggattttttaactctgcactagaaaatgttttgcataactttcagggcattatggatattattattccaacattaggtaaagaaagacaaaaaacttatagtccttttttaccaatttgtcctgaaactgaagttgttttagaaattcctataaaaaaaattataaaagataaatctaaaattatatttgataataatggaaaagagcttgaaacaagtatttttgatggtaattgtaaattacaatggaaagtagattgggcaatgagatggtatgcattggatgttgattttgaaatgtatggtaaagatttaattgaaagtgcaattttatctacaaaaattgttaaattgttaggcaaaaatagtcctaatggttttgcttatgaactttttttagatgaaaaaggagaaaaaatttcaaaatctaaaggtaatggcattactatagatcagtggcttaattatgcctcacctgaaagtttatcactttttatgtatcaaaaccctaaaagagcaaaaaaactttacaaagagattgttcctaaggcagtggatgaatatttagaatt

SEQ ID NO: 305477 - DNA, 814 bp, Unknown
  Bacterial polypeptide expressing nucleotide sequence isolated from the Sargasso Sea
aaaattgagctcagcccccactttattcaggagcgctcccctcaagagtgccaacgcttcatggacatgatcgccgcctcgatgctgacccaagtcgagccggttggcgccgcgattcacctcgccctggacgtgcaaggctgggagccgcccaaagacttcatggaacgcttcgtcacccgctccaagaagatcatgcggatcgacggcatcgacacgctggaattcgaccataaccacatcgccaccacctatggccgcggcgaaacctacatgtttggcacggcaggcgcgctgcaatgctgtatctataacaagaccttagaagccaagcaccgcgataaaatgcacttctgggaaggcatctggcagaacgccgtcgatgacgacctaaacggcatctacaaccccgaggaaaccgtctggcggatcgaattacggttccaccagtccgtcctccgtgagtacgcgcaaggcatcccctgcaacgtcgacaccggcgaagtgctcgatcacactcacggctttagccgcttcgtcgacgtggtaccgcaccttaccggcctatggcgtactgccatgcaatcctaccgcctggacacccgccgcaacctcatcgaccccgcgtggcagatcctccaagacgacgcccgtttttactgccatgaacccggcttcatgtacaagcgagcgcggaaagcgcctgggctcggcaacgaaaagaacgtcaccctggcgttcggtaatttgattagcatctacgctcgtcagggtatccgcaccgatcaagccatcggctacctcaagcgctccg

SEQ ID NO: 305478 - DNA, 862 bp, Unknown
  Bacterial polypeptide expressing nucleotide sequence isolated from the Sargasso Sea
atccgtcccagatccttttgagttgtttaatagttttggtgaacataataattcaaaacttaaagattttttaaatagatttaatttgcctttttcttttcaaagttcaacagatgcttataaatcaggattgttcaatgaaacaataaagaaaattataaaaaattatgatgaaattattaatgtagttcttccgacacttggtgaagaaagaagaaaatcttatagtccattttttccaattagtgaaataactggtaaaatattgcaagttccaattgaagaaattaataatgaagaatttactgtttcatattatgaggacggtgtattgaaatccaaatcagttttagatggcaattgcaaacttcaatggaaagttgattgggcaatgaggtgggctgcttttggtgtagattatgaaatgtgtggaaaagatttaacagagagttataccctatcatcaaagatatgtaagataatcggttctaagcctcctgaaaatttaatttatgaactatttctcgatgaaaatgctgaaaaaattagtaagtcaaaaggcaatggtataagcatcgatgattggcttaaatactctattgaagagagtttggccatgtttatgtatcagagaccaacaactgcaaagaaactctattttgatgtaatacctaaaaacaccgatgaatatttaacacacgttaataaattagagtccgatgatctaaatccagataaccctgcttggcatattcataaagctgaaaatccatcatataaatcaaaaattaattatagtttaatcctaaatattatatcagtttgcaagtctgaggaccctaatgtgatttttggtttataa

SEQ ID NO: 305479 - DNA, 829 bp, Unknown
  Bacterial polypeptide expressing nucleotide sequence isolated from the Sargasso Sea
tacctttcaaaccggatatggtcctagtgggttaccacacattggaacttttggtgaagtatcgagaacctcaatgatgataaatgcgctaaatcacataaagaagatcgactgcgagctaataacattttctgatgatatggatggccttagaaaagtgcctgataacattccaaacgaaaaaatattacatgataatattggaaaaccacttacatctattcctgatccgtttgaaaaatatagtagttttggtgaacataataataaaatgttaattgaatttttaaacaagtttaaatttgattttatttttaaaagttcaacagaaaattacaaaaaaggtatatttaataattccttagaaagagttttagaaaaatttgatgatattatgaatattattttaccaacactaggaaatgaaagaagaaaaacttatagtccctttttaccagtctgtcccgaaacaggtaatgttttggaaattccagttcaagaaatagacaaaaaaaataaaactatagtttttaataataacggaaagaaacttaaaacaggtattttaaatggaaaatgtaagttacaatggaaagtggactgggcaatgcgatggtttacatttgatgtagattttgaaatgtatggaaaagatttaattgaaagtgcaattttatcaaacaaaatttgtaaagttatgggcaaaaaaccacctaatggttttgcttatgaacttttcttggatgaaaaaggcgaaaaaatttctaaatccaaaggcaatggaatctccattgaacagtggcttaaatatgcatcacctgaaagttta

SEQ ID NO: 305480 - DNA, 985 bp, Unknown
  Bacterial polypeptide expressing nucleotide sequence isolated from the Sargasso Sea
tacattttcggacgacttagatggcttaagaaaggtaccagataatgtcccaaataaagatgtgctaaataaaaatttacataaaccacttacaaatattccagatccatttgaaaaatttaaaagttttggagagcataataatgaaatgctcaaaaaatttttggataaatttaaatttgaatacaaatttatgagttcaacaaatttatataaatctggtttttttaattctacactaaaaaaaatattagataattacgagggtataatgaatataattattccaacattaggaaaagaaagacaaaaaacatattcacctttcttacctatatgtaatgaaaccggtaaagttttagaaataccaatcattgaaatagacaaaaaaaattcatctttagtttttgataataatggaaaaaaattgaaggcaagtattttagatggtaactgcaaacttcaatggaaggtagattgggcaatgagatggtatacgcttgatgttgattttgaaatgtacggaaaagatttaattgagagcgcaattctatcaagtaaaataattaaacttttaggaaaaaataatccttcaggttttgcttatgaattatttcttgatgataaaggtgaaaaaatatcaaagtctaaaggtaatggtgtaactattgaggaatggttggattatgcttcaccagaaagtttgtcgttgttcatgtatcaaaatccaaaaagagctaaaaaattatataaggagattgtaccaaaggctgtagatgaatatctagatttaatagaaaaaagcaaaaaacaggatgcacgagaactattgctgaatcctttgtggcatgtccataatggtaatattccatctgaggataacattatgagtttttccatgcttttaaatttagttgaaacaagcaatgcatcatctgaagaaatactctggaaaattgtaaaaactataaaacaaatgttgcta

SEQ ID NO: 305481 - DNA, 826 bp, Unknown
  Bacterial polypeptide expressing nucleotide sequence isolated from the Sargasso Sea
aattatactacaaactggatatgtcccctcaggactacctcacattggaacattcggagaagtggcaagaactggcatggtagtaaatgctttaaactatttaacagatttgccaaaagaaattatcaccttctctgatgatttagatggattaagaaaagtaccagataatgttccaaacaaagatatactcaaaaaaaatttacataaacctctaacagatattcccgatccatttggaaaatttaaaagttttggcgaacataataatgagatgctcaaaaaatttttagatcaatttaactttaaatataaatttatgagctcaactagtttgtataaatctggattttttaattctactctaaaaaaagtattagataattatgaggggataatgaatataatcattcccacattaggtaaagaaagacagaaaacttattcgccttttctaccaatatgcaatcaaacaggtaaagttttagaaataccaattattgaaataaataagaaaaattcatctttaattttcgataattatggaaaaaaattggaggcaagtattttggatggcaattgtaagcttcaatggaaagtagattgggcgatgagatggtatactctagatgttgattttgaaatgtatggtaaagacttaattgaaagtgcaattctatctaataagattattagacttttaggaaaaaataatccttcaggttttgcttatgaactatttcttgatgacaaaggtgaaaaaatatcaaaatccaaaggcaatggggtaaccattgagcaatggcttaagtatgttcaccagaaa

SEQ ID NO: 305482 - DNA, 904 bp, Unknown
  Bacterial polypeptide expressing nucleotide sequence isolated from the Sargasso Sea
atggatgggctaagaaaagttccagaaaatgttcctaaccaagatctgttaattaaaaacctgcataaacctttaactaaagtacctgacccttttggaaaatatgacagttttggagaacataataatgaaatgttaaaaaaatttttaaataaatttagttttaactacaaattcataagctctactgatttatattcaaacggtttctttaataaaagtcttaaaattattttagaaaatttggatgaaattatgaatataatcttaccaactttaggtaaagataggcaaaaaacttattctccatttttacctatctgcccagaaacaggtatagttttagaaataccaataaaagaaatagataaaaaaaattttaaattaatttttgataataatggcaaagaattagagaaaagtattttagacggtaattgcaaactacaatggaaagttgattgggcaatgcgttggttcgcattagatgtagattttgaaatgtatggaaaagatttaatagaaagtgcaattttatccactaaaataattaaagttcttggtaaaaaaaatccatcaggttttgcttatgaactctttttggatgaaaatggagaaaaaatttcaaaatctaaaggtaatggaataactatagacgaatggctaaattatgcttcacctgaaagcctatcaatgtttatgtatcaaaatccaaaaagagcaaaaaaactctataaagaaattgtttcaaaagcagttgatgaatactttgattttatggaaaaaagcaaaaaacaaagtcaattacaaattttaatgaaccctctttggcacgttcataatggcgaaattccttacgaaaattcgataatgaatttttcaatggttattaaatcttgtagag

SEQ ID NO: 305483 - DNA, 525 bp, Unknown
  Bacterial polypeptide expressing nucleotide sequence isolated from the Sargasso Sea
aatggaaaaagataatattggtggcgaaaaagccataattgaagaaagaagaaagaagctagaacaacttagagataagggtgatgcttatggaaactcattcaaacctcaaaataatgcaaagaatcttcatgaagaatatggagcattttctaaagaagagcttgctgataaaaatattaaaaatatctctattgccggtcgtattgttttaaaaagagtcatgggaaacgctagttttgcaactttaagagatgcatctggagatattcaaatctacgtaacaaaaaataatgtagatgagagcgtttacgaagattttaaaacatgggatctaggagacatagtgggcgtatcaggctctttatttagaacaaaaacagatgaattgactattgatgtttgggatttagaaatgattacaaaatctttaagacctatgccagagaaatttaaaggcttaaccgatattgaagcaagatacaggcaaagatatcttgatttgatgacaaataattcaactaa

SEQ ID NO: 305484 - DNA, 196 bp, Unknown
  Bacterial polypeptide expressing nucleotide sequence isolated from the Sargasso Sea
agacaggtggaacgtggacgtggaggtgaaacagaaactcatcctctggatgaagatttcctgaggtgtgttgaatatggaatgccaccgatgggaggaatcggattcggcattgaccggatggtgatgctcctgaccggacaaactaccataagagatgtgatcctctttccaacaatgcgaccagagcaataat

SEQ ID NO: 305485 - DNA, 913 bp, Unknown
  Bacterial polypeptide expressing nucleotide sequence isolated from the Sargasso Sea
tacattttctgatgacatggatggattaagaaaagttcctgataatgttcccaaccaagaattgttgcaacaaaatcttcacaaacctttaacaaaagtgcccgatccttttcaaaagtttaatagttttggagaacataataatgaaatgctgaaggactttttaaatagttttaattttaaatataattttaaaagttctacatttttgtacaaggaaggattttttaatccaactttgaaaataattttagaaaattatgaaggaataatgaatattattttaccaacacttggtaaagaaagacaaaaaacatacagtccctttttacctgtatgccctgacacaggccatgttttggagatacctgttattgagattgatcggtctaattctaaaataatattcgataataaaggtaaaaaattagagagtagtattttagatggcaattgcaaattacagtggaaagtagattgggcaatgagatggtttgccttagatattgattttgaaatgtatggtaaggatttgattgaaagtgcaattttgtctacaaaaatcattaatttattaggtaaaaagaatccatcaggatttgcatacgaactttttctagatgaaaagggtgagaaaatttcaaaatctaaaggcaatggaataaccattgatcaatggttgaagtatgcttcaccagaaagtttatctttatacatgtatcaaaatccaaaaagagcaaaaaaactttataaagaaatagttccaaaagcagtagatgaatatttagataacattgaaaaatccaaaaaacagactgagcagcaattagtaatgaatccagtgtggcatattcacaatgggagcattccaaaagaagacatgattatgagttttttcatgttattgaactta

SEQ ID NO: 305486 - DNA, 607 bp, Unknown
  Bacterial polypeptide expressing nucleotide sequence isolated from the Sargasso Sea
aatggataaagaaaatattagtggcgaaaaagccctcattgaagagagacggaaaaagttagatcaacttcgagacagaggagatgcatacggcaattcatttaaaccaaaaaataatgcatcaagtcttcatgaagaatatggtgacgtctcaaaagacgatctagcagaaaagaatatcaaagatatttctgtggctggtcgaattgtcttaaaaagagtcatgggtaatgcaagtttcgcaaccttacgagatgcgtccggggacattcaaatctatgtgacaaaaaataatgttgatgagagtgtttatgaagattttaaaacatgggatcttggagatattgttggtgtatcaggctctctgtttcgaactaaaaccgatgagttaacaatagatgtatgggatttagaaatgataactaaatcattaagaccaatgcccgaaaaatttaaaggtttaacagatatagaagcaaggtatagacaaagatatttagacttaatgacaaataatgatacaaagaaagttttcattaaaagaacaaaaataattgattctctaagaaagaaaatgaatgaatcaggctatttagaagttgaaacg

SEQ ID NO: 305487 - DNA, 178 bp, Unknown
  Bacterial polypeptide expressing nucleotide sequence isolated from the Sargasso Sea
catgtatggagatgatgagttagacagattagacgaagactttctcactgcaatagaactaggaatgcctcctaccggaggactaggaatgggaatagatagattagttatgctactcaccgaagaaattagcataagagacgctatcattttcccgcatatgcgaacacttaaatga

SEQ ID NO: 305488 - DNA, 606 bp, Unknown
  Bacterial polypeptide expressing nucleotide sequence isolated from the Sargasso Sea
aatgtttgaaggttttaagagtaaatacgtaaaagtaaaaaaaggtaaagtcttttgtaaagttaaaggagatggtcctcctttattattgctccatggttaccctcaaacgcatttaatgtggcataaaacagctccagagttatctaaaatttttacagttgttgcagcagacctaagaggttatggaaatagtttagctccaccatctgacagtaaacattttaattattctaaaagagaaatggcgagtgacatgaaacaaatgatggtaaaattggggtatgccaagttttttgttgcaggccatgataggggtggaagagttgctcatagattggcaagagatcacagaaaaaacgtgcttgctctcagcgttttagatatttgtccaactttagatatgtacgaactaacaactagagattttgcaaaagcttacttccattggtttttcttaattcaaccaaaatggctacctgaaagaatgataatgagtgatccaagaaaatggatgaagtattgcttggataaatggtcaggcaatcataaatttggaaaagttgaagagggttacataaagtgctttaaacaaccaaagagaat

SEQ ID NO: 305489 - DNA, 1006 bp, Unknown
  Bacterial polypeptide expressing nucleotide sequence isolated from the Sargasso Sea
ttttcagactggatatggaccgagtggcttacctcatattggaacttttgtgaaagtagcaagaacaactatgatgataaatgcattaaatcaatttgaaaaaataagatctgaattaataactttttctgatgatatggatggtttaagaaaagttcctgaaaatatacctaacaaagatatattagaaaagaatttagggaagcctttaacaagcataccagatcctttcaaaaaatttaaaagttttggcgaacacaataataatatgttaaaagattttttaaaggaatttaattttagttttaattttaaaagctcaactaataactataaaactggtatttttaataattctcttcaaagagtcgcagaaaaatatgaagaaataatgaacataattttaccaacattaggaaatgagagaaaaaaaacttatagtccttttttgccaatttgcaaagagactggtaaaatattagaaattccaatcgttgagataaaaaaaaaggagtcaaaaataatttttgacaataatggaaaaaaaattgaagctggtatgttaaatggggaatgcaaactccaatggaaagtagattgggcgatgagatggtttacttttgatgtcgattttgaaatgtatggtaaagatttaattgaaagtgcaatattgtcgaaaaaaatttgtcaagttcttggtaaaagcccacccaatggttttgcttatgagttattcttggatgaaaaaggggaaaaaatttcaaaatcaaaaggcaatggtatctcgattgatgaatggttaaaatatgcttcaccagaaagcttatccctttatatgtttcaaaatccaaaaagagctaaaaaactttatgacgaagttgttcctaaagcagtagacgagtacctggaactattagaaaaatttgaaaaacaagatgaaagaaagagattactcaatcctatatggcatgttcacaacggaaaacctccaaaagaaaaaatcgtc

SEQ ID NO: 305490 - DNA, 948 bp, Unknown
  Bacterial polypeptide expressing nucleotide sequence isolated from the Sargasso Sea
tttgaaagatagaaaagaaattatcaaaaaaaagagaaaaataacttttcaaacaggttatggacctagtggtttaccccacattggtacttttggtgaagtagcaagaactacaatgatgataaacgctttaaactatattgaaaaaattgaccatgagctaataacattttctgatgatatggatggtttaagaaaagtgcctgacaatattcctaatgaagaaattttaaaaaaaaatttaggtaaacctttaacttctataccagacccattcaaaaagtttgatagttttggagaacataacaatgaaaaattaaaagaatttttaaataagtttaattttaaatttaattttaaaagttcaacagaaaattacaaaaaaggaatttttaacgactctcttattcgagtggttgagaaatatgatgaaataatgaatataattttgcctactctgagagaagagagacgtaaaacctactctccatttttacctatctgcccaaaaactggaaaagttctagaaatacctttagtagataaggataaaaaaactggaaaagttgtttttaataataatggtgaaaaaatagagacaagtatctttaatggtaactgtaaattacagtggaaggtagactgggcaatgcgatggtttactttcgatgtagatttcgaaatgtatggaaaagatttgagtgaaagcgccatattatccaataaaatatgccgtgcattaggaaaaagtcctccaaatggatttgcatatgaattatttttagatgaaaaaggagaaaaaatttctaaatcaaaaggcaatggtatttcactagaacaatggttaagatatgcctcgcctgagagtttgtcattgtacatgtatcctaatcccaaaagggcaaagaaactttactcagatgtagttcctaaacagttgatgattat

SEQ ID NO: 305491 - DNA, 838 bp, Unknown
  Bacterial polypeptide expressing nucleotide sequence isolated from the Sargasso Sea
acagagctaataacattttcagatgatatggatggtttaagaaaagttcctgagaacatacctaatgataaaattttacatgaaaatattggaaaaccattaactgatattcctgacccttttaaaaaatttaaaagtttcggtgaacataataataaaatgctgatagatttcttaaaaaaatttaattttaattttaattttaaaagctcaacccaaaattataaaaatggcatatttaacaattctattataagggttttagaaaaatttgatgatattatgaatattattttgcctactttaagaagtgaaaggagaaaaacctacagcccatttttaccaatttgtcctgaaactggaaaagtattagaaataccagtaatcgaaatggataagaaaaaaaatacattagtttttgataataatggaaaaaaaattaagacagaaatattaaacggtaaatgcaaattacaatggaaggtagactgggcgatgagatggtttgcattcgatgtagattttgaaatgtacggtaaagatctaatagagagcgcaatagtatctagtaaaatttgtaaagtaatgggtaagcaaccacctaatggttttgcatatgagttattcttagatgaaaaaggagaaaaaatttctaaatcaaaaggaaatggaataaccattgaacaatggttaagatatgcttctcctgaaagcttatcactttacatgtatcaaaacccaaaaagggcaaaaaaactttatccagatgttatccctaaagctgttgacgaatatctttcttttattgaaaaatatgaaaaccaaaaagaaaaagaaa

SEQ ID NO: 305492 - DNA, 541 bp, Unknown
  Bacterial polypeptide expressing nucleotide sequence isolated from the Sargasso Sea
aatggaaaaagataatattggtggcgaaaaagccattattgaagaaagaagaaagaagctagaacaacttagagataagggtgatgcttatggaaactcattcaaacctcaaaataatgcaaagagtctttttgaagaatatggagcattttccaaggaagagcttgctgataaaaatattaaaaatatctccatagctggtcgaattgttttaaaaagagttatgggaaatgcaagttttgcaactttaagagatgcgtctggagatattcaaatctatgtgacaaaaaataatgtagaggagagtgtttacgaagattttaaaacatgggatctaggagacatagttggtgtttcaggctctttatttagaacaaaaacagatgaattgactattgatgtgtgggatcttgaaatgattacaaaatctttaaggcctatgccagagaaatttaaaggcttaacagacattgaagcaagatacaggcaaagatatcttgatttgatgacaaataattcaactaaagaaatttttattaaa

SEQ ID NO: 305493 - DNA, 925 bp, Unknown
  Bacterial polypeptide expressing nucleotide sequence isolated from the Sargasso Sea
ggactcccacatatagggacatttggagaagtggcgagaacttcaatgatagttaacgcattaaaccacttaacagaactacccaaagagatcataactttttcagatgatatggatggtttacgaaaggtccctgaaaatgtacccaatcaagatatattaataaaaaatttaaataagccactaactcaagttcctgatccttttggaaagttcaatagttttggggaacataataatgaaatgctaaaatctttcctaaataattttaaatttaagtatacttttaaaagttctacagagctttatagaaacggattttttaatgaaacgttgaaaattattttagataattttgacaaaataatggatattattttaccaacattaggaaaggaaagacaaaaaacctactctccttttttaccgatttgtcctgaaacaggaaaagttttagaaattcctgttaaagaaattaataagaaaaataataaaattattttcgaaaataacggaaaagatctcgagacgaatattttagatggtaattgtaaattgcagtggaaggtagattgggcaatgcgatggtatgcactagatgtggattttgaaatgtatggaaaagatctaattgagagtgcaatcttatcttcgaaaattataaagactttaggtaaaaataatccatcaggttttgcttatgaattatttttagatgaaaaaggtgaaaaaatctcaaaatcaaaagggaatggtattacaattgacgagtggttaaaatatgcttcaccagaaagtttatctctttttatgtaccaaaacccgaaaagggcaaaaaaactatataacgagatagtatcaaaagctgtagatgaatatctaagttatactgaaaagggaaaaactcaaaatcagtcgcaacttt

SEQ ID NO: 305494 - DNA, 863 bp, Unknown
  Bacterial polypeptide expressing nucleotide sequence isolated from the Sargasso Sea
gcatggccatttattgaggcaaaaaaaattataaaaaaagctcgagccaacaataagcaaaaaattagattacaaaccggatatggccccagtggactaccgcatatcggaacatttggtgaagttgcaagaacaacaatgatactaaatgccataaaattgatatcagagattgaggtggaacttattgcattctcagatgatatggacggacttcgaaaggtacctgacaatgttcccaaccaaaatatattatcagagcatcttcataaaccactcacatcaattccagatccatttgagaccagtaagagttttggcgatcacaataatgaaatgttgcaacagtttctagataaatttggttttaattacacattcaaaagcgcaactgaactctatacctcaggtttttttgataaccaattaataaatgtattaaataattatgattcgattaaaaatattattctcccaacattaggagaagaaagaaaaaaaacatatagtccatttcttccaatatgtcccgactctgggcatgttttagaagttgaaattgtctcaattaatctcgctagcaatacaattacatatataagtaaaaataaagaagttgagcagtctattttaaaaggaaaatgtaaacttcaatggaaagttgattgggcaatgcgatggggtgctcttaatattgattatgaaatgtatggaaaagatttaatcccaacttttcacctttctgcaaaagtaagccgagcacttggttatccacctccagagaactatttttatgagctgtttctagatcaaaatggagaaaaaatatcaaagtctaaaggcaatggacttactatcgagga

SEQ ID NO: 305495 - DNA, 913 bp, Unknown
  Bacterial polypeptide expressing nucleotide sequence isolated from the Sargasso Sea
ggccttcaaattaatttgcttttcagatgatatggatggtttacgtaaagttccttcaaatattcctaaccaggaaagtatgtctaattacattggtcacccacttactaaagttccagacccctttcagactcattcatcatttggagagcataataattcaagacttaaatcatttttagatagttttgattttgaatacgaattttatagcgcaactgattgctataaaagcggcttatttgacaaaactttaattaaggttttagataattatgagaaaataaagcaaataatacttcctacactcggagaagaaagaaggaaaacttattcaccttttttgcctatctgtcagaaaactggaaaagtgcttgaagtttccataaatgaaataaataaaaaaaatgggacaattacatacactgatccagctgataatgagaaagttactatttctgttacaggtggaaaatgcaaattacagtggaaatgtgattgggcaatgcgctgggatgcacttggagttgactatgagatggctggtaaggatttaatagattctgttactctatctagtaaaattaataaacaaattggttcaagaccccccgagggcttcaattatgagttatttttagatcaaaacggtgaaaaaatttctaagtcaaaaggaaacggattaactattgaagagtggttaagttatggcccccaagaatcactttcttattttatgtatggacacccaaaaagagcaaaaagactgtactttgatgtaattcctaaatcagttgatgaatatttaactcaaattaaaaattttatttctcagtctgatgaagagcgattaaacaatccttctctatatgttcacaatattcaacctagtgaaattcaaaagaaaatataa

SEQ ID NO: 305496 - DNA, 1045 bp, Unknown
  Bacterial polypeptide expressing nucleotide sequence isolated from the Sargasso Sea
ggagaagtagcaagaacctcaatgattgttaatgctttaaaccatttatcagaccttcctaaagaaataattactttttctgacgatatggatggattaagaaaagttcctgaaaatattcctcatcctaaaaaacttgaagaaaatcttcataaacccttaactcaagttccagatccttttggaaaatttaatagttttggcgaacataataatgaaatgttaaaaaactttctcaataaatttaattttaaatataattttaaaagttcaacatttttatataaatctggttttttcaacgacacattaaaattaattttagaaaattacgaaagaataatgaatataattattccaacacttggtaaggaaagacaaaaaacatattctccatttttaccaatatgtccagatacaggagttgtattagagatacccgtctcagaagttgatactaaaaattcaaaaataatttttgataataacggaaaaaaattagaacagagtattttagatggaaattgtaaattacaatggaaagtagattgggctatgaggtggtatgcccttgatgtagattttgaaatgtatgggaaagatttaattgagagtgcaattttgtccacaaaaattataaaattattgggcaagtcaaatccatctggctttgcttatgagttatttttagatgaaaaaggtgaaaaaatatctaagtcaaaaggaaatggtattacaatcgatcaatggttagagtatgcatcacctgaaagtctttccttgtatatgtaccagaatccaaaaagagcaaaaaaactttatagagaagtagtaccaaaggctgtagatgaatatctcgattttatcgaaaaaggtagaactcaaaacgaacttcaaaaactaatgaatcccgtttggcatgttcataattcagagataccagaggaaaattcaattatgtccttctcaatgctattaaatttagttgagaccagtaatgccgataataaagaattactttggaagtttgttaaaaaatataaga

SEQ ID NO: 305497 - DNA, 966 bp, Unknown
  Bacterial polypeptide expressing nucleotide sequence isolated from the Sargasso Sea
tatgacaatagtaaatgaaaattcaaaagcatggccatttatagaagctagaaagatagtcaagagagctaacctcaaagatcattcaaaaatcaagcttcagactggttatggaccaagtggacttccccacataggaactttcggagaagtcgcaaggaccaccatggtgctaaatgctataaaagctgtatctgactatgaagttgaattgattgctttttctgatgatatggatggattaagaaaagttcctgataatgttcctaataaggacattttggaaaaaaatttacacaaaccactcacctcgattccagatccttttgaaacatcaaagagttttggaaaccataacaatgagatgttgcaagcatttcttgataagtttgggttcaaatattcttttaagagcgcgacagagctttataagtcaggattcttcaatgaccaattaattaaagttttaaattcttatgatgagattaaaaaaataatattaccaacattaggagaggaaagaaaaaaaacttacagtccatttttaccaatttgcccagaaacaggacacgtactcgaagttgaaattatttcaattaatactgaaaaaaatacggttgtgtatcttcagaataataaggaaattgaacagtctattttagatggtaattgcaaattacaatggaaagtggactgggcaatgaggtggtgtgctttagatattgattatgaaatgtatggtaaagacttgataccaacttttcaactttcatccaaagtatgccgtgctttaggacatcaacctcccgaaaattatttctatgaattgtttcttgatcagaatggtgaaaagatttcaaaatcaaagggaaatggtttgagtattgaagaatggctatcttatgcgcctaaggaaacattaagttactttatgtaccaaaatccaagaagagcaaaaaaactatt

SEQ ID NO: 305498 - DNA, 1567 bp, Unknown
  Bacterial polypeptide expressing nucleotide sequence isolated from the Sargasso Sea
aatgcttgagtctgaactaattcaatcaacatcttcttggccatttgttgagatccgaaaattattaaaagaaagaaaagatataataaataaaaaaaataaaattatttttcaaactggatatggcccaagtggtttaccccacataggtacttttggggaagtatcaagaacttccatgatgattaacgcattaaatcacataaaaaaaattgaatctgaattaataacattttccgacgacatggatggactaagaaaagttcccgaaaatattcctaatgaaaaaattctacatgataacttaggaaagcctcttacaaatattccagatccatttaaaaaatataaaagctttggagagcataacaacaaaaagttaatagaatttttaaataaatttaaatttcaatttaaatttaaaagttcaacagaaaattataaaaaaggagtatttaacgattctataatcagagttttagaaaaatatgaagatataatgaatattattttacctacattaagaagcgaaagaagaaaaacatacagtccttttctaccaatttgtgttgatactggtaaagttttagaaattcctgttttggaaataaataaaaaaaataataaaataatttttaataataatggaaaaaaaattgaagtaagtattttggatggaaattgtaagttacaatggaaagttgattgggcaatgcgatggttcgcctttgatgtagattttgaaatgtacggaaaagatttaattgaaagcgctataatatctggaaaagtttgtgaggttttaggcaaaagacctccaaatggatttgcttatgaattatttttagatgaaaatggagagaaaatatctaaatcaaagggaaatggaatcaccattgagcaatggttgagatatgcatcccctgagagtttatctttatatatgtaccagaatccgaaaagagcaaaaaaactttacccagaagttgttccaaaagctgtagatgaatatttatcttatattgaaaaatatttcatgcaaaaaaataatgagaaaattttaaatccagtttggcatatacacaatgggtcgccaccaaaagaaaaaattgtaatgcctttttctatgttattaaatattgttggttcaagtaatgctaaaaaaaaagatgttttatggaaatttattaaaaaattccaccaagaattagatcctaaaactcataaaattttagatagtcttactgaatatgcaataaattattttattgatcgtgtagaaccaaaaaaaaattttaaaaagccaaatgatattgaaaaaaaagccctaactaatcttataaatgtattaaaaaaagtatctcaggattctccgccagagcaaatccaaactttaatttacacagcgggaaaagagaatggctatagtaaagatttaagagcatggtttaaattaatatatgaagtaatttttggtgaagaaaatgggcctagaatgggtttttttataagtttctttggtataaaagagacaattgatttaatggaaaaaaagttgaaaatataa

SEQ ID NO: 305499 - DNA, 1519 bp, Unknown
  Bacterial polypeptide expressing nucleotide sequence isolated from the Sargasso Sea
atgtcagataataatgtgattaaaacggtttcagcttggccttttgtcgaaataagaaagttattaaaagatagaaaaaatttaattaaatcaaagaatagaattacatttcaaactggttatggtcctagcggattgccacatataggtacttttggagaagtagcaaggacttcgatgatgataaatgctttacgtcatttagaaaaaattgatacagaattaataactttttctgatgatatggatggattaaggaaagtaccagacaatataccgaatgatgatattttaaaaaaaaatattggaaaacccctttcttcaataccagatcccttcaaaaagtttaatagtttcgcagagcacaataacgcaatgcttaaagaatttttaaataaatttaatttcaaattttcttttcaaagttcgaccgaaaattataaaaaaggagtgttcaacgaatcattaaaaagagttgctgaaaaatatgatgacattatgaatattattcttccaacattaagatctgaaagaaaaaaaacttattgcccctttttacctatatgtcccgaaactggtaaagttctagaaatacctatgaaaagtctagaaaaaaaaagtggaaaaataatttttgaaaataatgggaagaaaattgaaagatctatttttaatggagattgtaaattgcagtggaaagtagattgggcgatgagatggtttacttttgacattgattttgaaatgtacgggaaagatcttactgaaagtgcaattttatcaagtaaggtttgtaaaattttaggtaaaacaccaccgaatggttttgcttatgaactttttttagatgagaggggagaaaaaatatcaaaatcgaaaggaaacggtattacgatagaggaatggcttaaatatgcatcgccggagagcctttcattgtttatgtatcaaaatcctaaaagagcaaaaaagttgtattcagaagttgtgcctaaagctgttgatgaatatttatctctcattgaaaaatttcatgagcaaaaagagaaagatcaattatcaaaccctgtttggcatgttcacaatggaaaacctcctaaagaaaaaattgtaatgccattttctatgcttttaaatttggtaggctccagtaacactgatgataaacaagtattatggaaatttattaatagatttcataaagacgttaatccagagaaaaaccccattctcgaccatctaacagagtgtgctattaaattttttaaagacaaattaaaaccaaataaaatttataaaaaaccaaacgaaaaagaaaaaaaagccttaattaatcttgctgaaaatattgaaaaaattaatgaaaatacaccaccagaagaaattcaaaccgtagtatattccgtgggaaaagacaatggctataaagaaaatcttagagattggtttaaattaatttatcaagttttatttggagatgtagacgggccaagactaggattttttgtaagtttttttg

SEQ ID NO: 305500 - DNA, 1108 bp, Unknown
  Bacterial polypeptide expressing nucleotide sequence isolated from the Sargasso Sea
catgattaaaaaagaagttttagacaaaaccagtgcctggccttttgtagaggctaaaaaaatgctgagagaaagaaaatcgttcatagaaaaaaaaggaaaaatcatattacaaactggatacggaccgagcggtttacctcacataggtacttttggagaagttgcaaggacctccatgatggtaaatgcattaatgcaattaacagatttacctgctgaaattataactttttcagatgatatggatggtttaagaaaagttccagagaatattcctaatcaaaaattactacaggaaaatcttcataaaccactaactgaggttccagatccatttgaaaaatttaatagttttggtgaacacaataacgaaatgctaaaggattttttaaatagttttaattttaagtatagttttaaaagttcaacagcattgtacaaaactggatattttaactcaacgttaaaaataattttagataattatgatggtataatgaatattatactcccaactctaggtaaagaacgtcaaaaaacttactgcccgtttttgccaatatgtccagacactgggcatgtacttgaaataccagttgttgaaattaataaagaaaaatctcaaataatttttgataacaatggtaaaaaacttgaaaaaagtattcttgatgggaactgtaaacttcaatggaaggttgattgggccatgagatggtatgctcttgatattgactttgaaatgtatggtaaagatttaatagaaagtgcgatattgtctacaaaaattatcaacttacttggtaaaaaaaatccctctggttttgcatatgaattatttttagatgaaaaaggtgaaaagatttctaaatcgaagggaaatggaatcactattgatcaatggttaaaatatgcatctccagaaagtttatctttatatatgtatcaaaacccaaaaagagcaaaaaaactatataaggaaattgttccaaaggctgtagatgaatatttagataacattgaaaaatcaaaaaaacaaacagatcagcaactgataatgaatccggtctggcatgttcatgaaggtaaaatcccaactgaagaa

SEQ ID NO: 305501 - DNA, 1387 bp, Unknown
  Bacterial polypeptide expressing nucleotide sequence isolated from the Sargasso Sea
aatgatggtgaatgcgcttaatcaactaacatatttaccaacagaaattattacattttctgatgacatggatggattaagaaaagttcctgataatgttcccaaccaagaattgttgcaacaaaatcttcacaaacctttaacaaaagtgcccgatccttttcaaaagtttaatagttttggagaacataataatgaaatgctgaaggactttttaaatagttttaattttaaatataattttaaaagttctacatttttgtacaaggaaggattttttaatccaactttgaaaataattttagaaaattatgaaggaataatgaatattattttaccaacacttggtaaagaaagacaaaaaacatacagtccctttttacctgtatgccctgacacaggccatgttttggagatacctgttattgagattgatcggtctaattctaaaatattattcgataataaaggtaaaaaattagagagtagtattttagatggcaattgcaaattacagtggaaagtagattgggcaatgagatggtttgccttagatattgattttgaaatgtatggtaaggatttgattgaaagtgcaattttgtctacaaaaatcattaatttattaggtaaaaagagtccatcaggatttgcatacgaactttttcttgatgaaaagggtgagaaaatttcaaaatctaaaggcaatggaataactattgatcaatggttgaagtatgcttcaccagaaagtttatctttatatatgtatcaaaatccaaaaagagcaaaaaaactttataaagaaatagttccaaaagcagtagatgaatatttagataacattgaaaaatctaaaaagcagactgagcaacaattagtaatgaatccagtgtggcatgttcacagtggaaatgttccaaaagaagatatgattatgagtttttcaatgttattgaatttagtagaaactagtaatgcagatagtaaagatctgttatggaagtttgtaaagaaatacaaatctaatattctagaaactaattttcctatttttgatggattagtaagctacgcaataaaatattttaatgatgtaattaagtctcaaaaaaaatacaaaacaccttctgaaagtgaaaaaaaagctcttgaagctttaattaaaactctagaaaaatgcaatgatcagatgccaccagaggaaattcaaactttgatttattctactggaaaagaaaatggttatgctgaaaatttaagagattggtttaaacttatttatgaggtggtttttggtgatgaaaatggaccaagaatgggattttttataagtttttttggtgttaatgaaacaaaagaccttataatgagtaaactcaaataa

SEQ ID NO: 305502 - DNA, 1201 bp, Unknown
  Bacterial polypeptide expressing nucleotide sequence isolated from the Sargasso Sea
tggccgtttgttgaggcaaaaaagattctcaaagaaaggaaaaaatacatagataaaaaagaaaaaattatactacagactggatatggtccttcaggattaccccatattggaacatttggagaagttgcaagaacaagcatggtagtcaacgccttaaattacttaacagatttaccaaaagaaattattacattttctgatgatctggacggtttgagaaaagtaccagataacgttccaaacaaagatatacttaaaaaaaatttgcataagccgcttacagatattcccgatccgtttggaaaatttaaaagttttggggaacataataatgaaatgctcaaaaaatttctggatgaattcagttttaagtataagtttatgagttcaacggctttatataaatctggattttttaatgatacactaaaaaaaatattagataattatgaagggataatggaaataattattcctacattaggtaaagaaagacaaaaaacatattcaccatttcttcctatatgcaaagaaacaggtcacgtgttagaaatacccattgtcgaaataaataaaaaaaattcatctttaatttttgataataacggaaaaaaattggagacaagtattttggatggtaattgcaaacttcaatggaaagtagattgggcaatgagatggtatactcttgatattgattttgaaatgtatggaaaagacttaattgagagtgcaattttatctactagaataattaaactcttaggaaaaaataatccttcgggttttgcctatgaactatttcttgatgataaaggtgaaaaaatttcaaagtcaaaaggaaacggtgtaactattgaggaatggcttaattatgcttcaccagaaagcttatccttgtttatgtatcagaatccaaaaagggcaaaaaaattatataaagaaattgtaccaaaggctgtagatgagtatttagatctaatcgaaaaaagtaagaaacaggatgcacgagagctgttgcttaatcctttatggcacgttcataatggcaaaattcctttcgaagatagtatcatgagtttttccatgcttttaaatttagttgaaactagcaatgcttcatctgaagaaatactttggaaatttgtaaaaaattataaaaaagatgtcgctaaagacaagtttccctatatttaat

SEQ ID NO: 305503 - DNA, 1564 bp, Unknown
  Bacterial polypeptide expressing nucleotide sequence isolated from the Sargasso Sea
atgattaaaaaagaagttttagacaaaaccagtgcatggccttttgtggaggccaaaaaaatgctgagagaaagaaaatcgttcatagaaaaaaaagggaaaattacgctgcaaactggatatgggccaagtggtttacctcacataggcacttttggagaagttgcaaggacttctatgatggttaatgctttaaagcaattaacagatttaccaactgaaattataactttttcagatgatatggatggtctaagaaaagttccagaaaatattcctaatcaaaatttgttaaatgaaaaccttcacaaaccgttgactgaggttccagatccatttgggaaattcaacagttttggtgaacacaacaatgaaatgctgaaagattttttaaatagttttaattttaaatacacttttaaaagttcaactgagttatataaaacaggatattttaacccgactttaaaaataatcttagataattatgatggtataatgaatattatacttccaacacttggtaaagaacgtcaaaaaacttactgcccattcttaccaatatgtccagacacaggacatgttcttgaaatacctattatagagattgataaagaaaaatctcaaataatttttgataataaaggaaaaaaacttgaaaaaagtattcttgacgggaactgtaaacttcaatggaaagttgattgggccatgcgatggtatgcccttgatattgattttgaaatgtatggcaaagatttaatagaaagtgcaatattatctacaaaaattattactttacttggtaaaaaaaatccctctggttttgcctatgagttatttttagatgagaaaggggaaaaaatttctaaatcaaagggaaatggcattactattgatcagtggttaaagtacgcatctccagagagtttatcattatatatgtatcaaaatccaaaaagagcaaaaaaactttataaagaaattgtcccaaaagctgtagatgaatatttagataatatagaaaaatcaaaaaaacaaactgaacaacaactaataatgaatccagtttggcacgtccataacggtaaaattccaagtgaggaaatgattatgactttttcgatgttgttaaatttagttgaaacaagcaatgcagatagcaaagatttactttggaaatttgttaaaaaatacaaatcagatattcatgaagaaaactttccaatatttgatggattagttgcatatgcaattaagtattttaatgacgtaattaaatctcaaaaaaaatacaaaataccaaatgaaattgaaaaagaagcactaaaggctttagttaaaactttagaaaaatgtaacgatggtatgtcacctgaagatatccaaactttaatttactcagctggtaaagaaaatgggtatgctgacaaacttagagattggtttaaattaatttatgaagttgtcttcggtgatgaaaatggtccaagaatgggtttttttataagtttttttggtgtaaacgaaactaaagagcttataaccagtaaattaaaataat

SEQ ID NO: 305504 - DNA, 605 bp, Unknown
  Bacterial polypeptide expressing nucleotide sequence isolated from the Sargasso Sea
tatgtcagatcaaaataaaagtttaaagcagataatggattttagactagagaaattagatgcattacgagaagctggtattaacccttatccagtaaagtttgacccatcacattctagtgcgttcatcaagtcaaactacgatgagatagagggggaaactgttaaaattgctggacgaatcatggccttaagaaagatgggtaaagcatctttctctcaattaatggactctgagggtagaattcaattttttattcgaagagatgatgttggagatgaatcttattcgtgttttaagcttctagatattggtgattatgtgggagttgagggatttgtctttactacaaaaacaggtgaaatatctatccatacttcagctatatctgttttagcaaaaagtattcgtccattacctgttgttaaagaaaaagatggtcaagtatttgactcgttttcagataaagaacttcgttatagaaaccgacatttagatctaatattaaacccggaagtaaaggaaacatttattagccgtgccgcaattattagatcaataagagaatttttagataataaaggtttccttgaggttgagacac

SEQ ID NO: 305505 - DNA, 1609 bp, Unknown
  Bacterial polypeptide expressing nucleotide sequence isolated from the Sargasso Sea
atgacaacaaaattaaaaataaatgattttagcaaggaagctcttgaaaagtgcaacacttggccttttcaagaagctaaaaaaattattaataggctaaaatatctttctgaagataagttagtagtctttgaaacaggatatggtccttcagggcttccgcatataggtactttttgtgaggttttcagaaccaaccttgttagaaaggcttttaccttattaacaggcaggccttcaaaattagtttgcttttcagatgacatggatggcttgcgcaaagttccttcaaatattcctaaccaggaaagtatgtctaattatgttggtcacccacttactaaagttccagacccctttcagacacattcatcatttggagagcacaataattcaagacttaaatcatttttagatagttttaattttgaatatgagttttatagcgcaactgattgctataaaagtggcttatttgacaaaactttaattaaggttttagacaattatgagaaaataaagcaaataatacttcctacactcggagaagaaagaaggaaaacttattcaccttttttacctatttgtcagaaaactggaaaagtacttgaagtttctatcaatgaaataaataaaatgaatgggacaattacatacactgatccagttgatgatgcgaaagttactatttctgttactggtggaaaatgcaaattacagtggaaatgtgattgggcaatgcgctgggatgcacttggagttgactatgagatggctggtaaggatttaatagattctgttgctttatccagtaaaattaataagcaaataggttcaagaccccctgagggcttcaattatgaattatttttagatcaaaacggtgaaaaaatttctaagtcaaaaggaaatggattaactattgaagagtggttaagttatggcccccaagaatcactttcttattttatgtatgggcatccaaaaagagcaaaaagactgtactttgatgtaattcctaaatcagttgatgaatatttaactcaaatgaaaaattttatttctcaatccgatgaagagcaattaaacaatccttctctatatgttcataatattcaacctagtgaaatgccaaaagaaaatacaactatccctttttctcttttactaaacttagcttccgtatgccatgcagaagatccagagattatttggggctttattgaaaaatactcacctggagccaaattacagaaaaataagtttttagaaaatatggttaatctatcagttgtatattttaatgatatgatcaaaccaaataagaaatatcgcctgccggacgataatgagacaaaggcattaaaagaattatctaacggtttaataaaattagataaatcttcatcatctgaggaaattcaaaaactagttttttcaataggcaaagaaaataattttgaaaatcttagagattggtttaaaagcctatacgaaatattactcggtcagagtgagggtccaagaatgggttcttttatctcattgtatggaattaaagaaactaaaaatttaattgatgacgctcttttaggaaagcttaaatagt

SEQ ID NO: 305506 - DNA, 1489 bp, Unknown
  Bacterial polypeptide expressing nucleotide sequence isolated from the Sargasso Sea
catgttactaaatagccaaattagtgaaaactcgaaagcctggccaattttggaagctagaaggatcattaatcaaatccaaaaaaaaaataaaaaaaaaataagacttcaaactggctatgggccaagcggacttccacacatagggactttcggagaagtcgcaaggaccaccatggtgctaaatgctataaaagctctatctgactatgaagttgaattgattgctttttctgatgatatggatggattaagaaaagttcctgataatgttcctaatcaggaaattttggaaaaaaatttacacaaacctcttacttcgattccagatccctttgaaacatcaacaagttttggaaatcataacaatgagatgttacaagcatttcttgataagtttgggttcaaatattcttttaagagcgcgacagagctttataaatcaggattcttcaacgaccaattaattaaagttttaaattcttatgatgagattaaaaaaataatattaccaacattaggagaagaaagaaaaaaaacttacagtccttttttgccaatttgcccagaaacaggacacgtactcgaagttgaaattatttcaattaatactgaaaaaaatacggttgtgtatcttcagaataataaggaaattgaacagtctattttagatggtaattgcaaattacaatggaaagtggactgggcaatgaggtggtgtgctttagatattgattatgaaatgtacggtaaagacttgataccaacttttcaactttcatccaaagtatgccgtgctttaggacatcaacctcccgaaaattatttctatgaattgtttcttgatcagaatggtgaaaagatttcaaaatcaaagggaaatggtttgagtattgaagaatggctgtcttatgctcctaaggaaacattaagctactttatgtaccaaaatccaagaagagcaaaaaaactatttcttgatgtgatccccaaatcagttgatgaatttttgagtcatcttaataaatttaaggatcaaaaagatgaggaaaaaattgaaaatccagtttggcatatcatgaatagtcataatcatattggttcaatacctatctctttcaatttaatattaaatttagtttcagctagtggaaagagtgatccagatttcattctagattttataaaaaaatatgatgactcagttatcaattctgatcataattttatgctagaacttataactggagcaatatcatttgaaaagaatgtaaatgccgataaaattcagtttaaagtgcccagtgaagaagagaaaagtatttttttagatttaataaatcgaattgagcttttgccagaaaatgttgatgctgagactatacagactgaaatctatcaaattggtaaagattataagtttgataatttaagagactggttcaaacttatttatcaggttctttttggcaaaagtgatggaccaaga

SEQ ID NO: 305507 - DNA, 1567 bp, Unknown
  Bacterial polypeptide expressing nucleotide sequence isolated from the Sargasso Sea
aatgcttgaatctgaactattaaaatcaacatcttcttggccatttgtcgaaattcgaaagcttttaaaagatagagacagtataataaagaaaaaaaataaaattatttttcaaacaggatatggtccaagtggtcttccacatatagggactttcggagaagtatcacgaacctcaatgatgattaatgccttaaagcatattaaaaaaattgaaacagaattaataactttctcagatgacatggacggtttaagaaaagttcctgagaacataccaaataataaagttttacatgataatttaggaaaaccattgactgaaattcctgacccttttaaaaaatttaaaagttttggtgaacacaataataaaatgctaatagaatttcttaaaaaatttaatttcacttttacttttaaaagttcaacacaaaattataaaaatggcactttcaacaactcaattataagagttttagaaaaatttgatgatatcatgaatattattttacctactttaagaagtgaaagaagaaaaacatattgtccatttttaccaatatgtccagaaacaggaaaagtattagaaataccagtaatcgaaatggataagaaaaaaaacacattagtctttgataataatggaaaaaaaattaaaacagaaatactgaatggcaaatgtaaattacaatggaaggtagattgggctatgagatggtttgcatttgatgtagattttgaaatgtacggtaaagatcttatagagagcgcaataatatcaagtaaaatttgtaaggtaatgggaaaacaaccacccaatggttttgcttacgagttatttctagatgaaaaaggagaaaaaatttcgaaatcaaaaggaaatggaataactattgaacagtggttgaggtatgcttctcctgaaagcttatcactttacatgtaccaaaatccaaaaagagctaaaaaactttacccagatgtagttcctaaagctgttgacgaatatctttctttgattgaaaaatatgaaaaccaaaaagaaaaagaaaaactcttaaatcctgtatggcatattcataacggttctcctcctaatgaaaaaatagttatgccattttcaatgttattgaatattgttggatcaagtaatgcaaaaactaaagaagtattatggaaatttattaaaaaattccatagtgagctagacccaaaaagtcataaaattttagacgaactcacaaattatgctattaactactttacagatgaggttgaaccaaagaaaaaatataaaaagccaaacgattctgaacaaaaagctttaaaaaatttaatatctgttttaaagcaagtgtctcaagataccccagcagaggaaatacaaacaaagatttacactgcaggaaaagaaaatggttatagtaaaaatttaagagactggtttaagttaatatatcaggtctgttttggagaggaaaacggcccaagaatgggtttttttatcagcttttttggggttaaagagacaattgatttaatggaaaaaaagttgaaaatataa

SEQ ID NO: 305508 - DNA, 531 bp, Unknown
  Bacterial polypeptide expressing nucleotide sequence isolated from the Sargasso Sea
aatggaaaataaaagcttaaaacaaatcattgataatcgacttgaaaaattaaaaaaaattcgtgaattaggcgtagaaccttatgcttatgattttacatgttctaataatacatcagaaataaatgataagttaattgactctaaagtttccatagctggaagaattatgtcactgaggagaatgggaaaagcatcttttgccaatattcaagatcaagagggtcgtattcaattgtacattgcaagagatgacgttggagaagataattataatctttttaagcttaccgacataggtgattttgttggcattgaaggtaaggttttcaaaacaaaaactgatgccttgacaattaaagtttctcatttgacaattttatctaaaagcattaaacctattcctgatgttaaagagaaagacggagaaaaatataatttagtttccgataaagaacttagatatcgaaaaagattccttgatttgattattaatcctgaaacaaaggaaaattttataaaagatcaaaa

SEQ ID NO: 305509 - DNA, 1564 bp, Unknown
  Bacterial polypeptide expressing nucleotide sequence isolated from the Sargasso Sea
catgattaaaaaagagaattttgataaaacaagtgcatggcctttcgttgaagcaaaaaaaatgcttcgagaaagaaaatcttttatagaaaaaaaaggcaaaataattctccaaacaggttatggtcctagtggacttccacatataggaacttttggagaagttgcaaggacatcaatgattgtaaatgcactaaaacatttgactgatttaccaaccgaaatcattactttttcagatgatatggacggtcttagaaaagtacctgacaacgttccacaaaaagaattattagaaaaaaatttacacaaaccgcttactaatgtgcctgatccctttcaaaaatttaatagttttggtgagcataataatgaaatgttaaaaaaatttttaaacaattttaaatttaaatataattttaaaagttcaacatcactttataaatcaggtttctttaactcttctctccaagttattttagagaattatgatggtataatgaatataatacttcctacactaggaaaagagagacaaaaaacgtacagtccatttcttccaatttgtccggttacaggtcatgttctagaaatacctgtaaaaaatattaataaagaaaaatctattattgtttttgataataatggaaaagatttggaaacaagcatttatgatggaaattgtaaattacagtggaaagttgattgggctatgagatggtatgcactagatgttgattttgaaatgtatggaaaagatcttatagagagcgcaatactttcaacaaaaattatcaaattgattggaaaaacaaatccctcagggtttgcatatgaactatttttggatgaaaaaggagagaagatttcaaaatcaaagggaaacggcatcactattgatcaatggttagagtatgcttctcctgaaagtttgtcgctgtatatgtatcaaaatccaaaaagagcaaaaaaactttacaaagaaatagtttcaaaaactgtcgatgattatttggatctgattgagaaagcaaaaaatcaaaatgagttgcagctacttatgaatcctgtatggcatgttcataatagtttggtgcctaaagaaaatatgattatgtcgttttcaatgttattaaacttggtcgaaacaagtaatgctgacagcaaagaacttctttggaaatttgttaaaaaatataaaaaagacatttcggagaaagataatcctatctttgataatttagtaggctatgcaataaaatattttaacgacgtaataaaattgaaaaaaaaatataaaaaacctaatggtgaggaaaaaaaagctttagaagctctggtaaaaactttagataaatgtgacgacaaaatgaaaccagaagatattcaaacaatgatatattcgaccggtaaagaaaatggatacactgagaaccttcgagattggtttaaattaatttacgaagtagtttttggagacgaaaatggaccaaggatgggtttttttataagtttttttggtgtgaaagaaacaaaagatcttatattaaataaaattaaataa

SEQ ID NO: 305510 - DNA, 1564 bp, Unknown
  Bacterial polypeptide expressing nucleotide sequence isolated from the Sargasso Sea
atgataaaaaaagaaaacttagaaaaaacaagctcttggccaatcgttgaagcaaaaaaaatgcttagagaaagaaaatcttttttagaaaaaaaaggtaaaattacactacagactggatatggcccaagtggacttcctcacataggaacatttggagaagttgctagaacttctatgatggttaatgcgttgaaacaattaactgatcttccaacagaaattatcactttttctgatgacatggatggtcttagaaaagtaccagacaatgtacccaataaagaattgttagaaaaaaaccttcataaacctttgacagacgtaccagatccttttgaaaaatataatagttttggtgaacataataatgagaaattaaaaaagtttttaaataattttaattttaaatataatttcaaaagctctactcaattgtataaatcaggtttttttaatccaacacttcaaattattttagataattatgatggaataatgaatatcattatgcctactttaggaaaagaacgtcaaaaaacttattgtccatttcttcctatttgtccagaaacaggacatgttttggaaattccagttaaagaaattgataattctaagtctaaaattgtgtttgataataaaggtaaagatttagaatcaagcatattagatggtcattgtaaacttcagtggaaagtagattgggccatgagatggtatgcgttagatgttgactttgaaatgtacggaaaagatctgatagaaagtgcaatattatccactaaaattattaaactaattggaaaaaaaaacccatctggttttgcttatgaactctttttggatgagaaaggggaaaagatttctaaatcaaaagggaatggaataacaatcgagcaatggttggagtacgcctcaccagaaagtttatcattatatatgtatcaaaatccaaaaagagctaaaaaactttataatgagatagttccaaaagcggtagacgaatatttggaatttattgaaaaggctaaaactcaagatgagcttcagttactgatgaatccagtatggcatgttcataatggtagtgtcccaaaagaaaaaatgattatgtcattttctatgttattaaatcttgtagaaacaagtaatgcagaaaataaagaattattatggaagttcgtaaaaaaatataaggaaaatatttctgaaaaagatcaccccatttttgataatctagttggttatgctattaaatattttaacgatgtaataaaagccaaaaaaaaatataaaatacctgatcaaatagaaaaaaaagcactagaggctctaatatcaaccttagataaatgtaatgacaagatgtctcctgaagaaattcaaactttaatttattcaacaggaaaagaaaatgggtattcagaaaatttgagagactggtttaaattaatttatgaagttgtatttggagtcgaaaatggccctcgaatgggtttttttataagtttttttggtgttaaagaaactaaagatcttataataaataaaattaaataat

SEQ ID NO: 305511 - DNA, 1366 bp, Unknown
  Bacterial polypeptide expressing nucleotide sequence isolated from the Sargasso Sea
atcagatctccctaaagaaataattactttttctgacgatatggatggacttagaaaagttcctgaaaatattcccaattctgaaaaacttgaacaaaaccttcataaacccttaactcaagttccagatccttttgaaaaatttaacagttttggtgaacataataatgaaatgttaaaaaatttcttagataaatttaagtttgaatacagttttaaaagttcaacagttttatataagtcaggttttttcaatgatacattaaaattaattttagaaaattatgagggaataatgaacataattattcctactcttggtaaagaaaggcaaaaaacatattctccatttttaccaatatgtccagatacagggattgtattagagataccagtttcagaattagatactaaaaacttaaaaataatttttgataacgatggaaaaaaattagagcaaagtattttagatggaaattgtaaactacaatggaaagtagattgggctatgagatggtatgcccttgatgtagattttgaaatgtatggcaaagatttaatagagagtgcaattttatcttcaaaaatcataaaattattgggtaagtcaaatccatctggttttgcatatgagttatttttagatgaaaaaggtgaaaaaatatcaaagtcaaaaggaaacggtattacaattgatcaatggttagagtacgcatcgcctgaaagtctttccttgtatatgtaccagaacccaaaaagggcaaaaaaactttatagagaagtagttccaaaggctgttgacgaatatctcgattttattgaaaaaggtaaaactcaaaacgaacttcaaaaactaatgaatcctgtttggcatgttcataattcagagataccagaggaaaattcaataatgtccttttcaatgctattaaatttagttgagactagcaatgctgataataaagaattactttggaaatttgtaaagaaatataaaaaagatattaatgaagatatgcatccaatttttgacaagttaatatcttatgcaattaaatattttaatgacgtaataaaatctaaaaagatttataaaaaacccaatgaaagcgaaaagattgctttaaaggctttagtaaactctttaaataactgcgatgatgcaatgaaaccagaggatattcagactacaatttatacagtcggcaaagaaaatggctataaagaaaatttgcgtgattggttcaaattgatttatgaggtagtttttggggtagaaaatggaccacgatttggtttttttataagcttttttggggttcaagaaactaaagaactaataaaaagtaaattagaaaatgtttaa

SEQ ID NO: 305512 - DNA, 1087 bp, Unknown
  Bacterial polypeptide expressing nucleotide sequence isolated from the Sargasso Sea
atggaaaaaagtttattagataaagcaaaaaattctaatgcctggccatttcaggaagcattaagaatattaaaaagtttaaatggaaagactcctgataaaggctatgttttatttgaaactggttatggtccatctggtttaccgcacataggcacatttggtgaagtagcaagaacaattttagtaaaaaatgcttttaatataatatctgatattcctaccaaacttattacattttctgacgatatggacggtttaagaaaagttccagataatattcccaatcaagacatgcttaaaattcatatagataaacctttatcaaaagttccagatccatttgaaaaatataatagctttgcagaacataataacgaaaagctaaaatcatttttaaaccaatttaactttgagtatgagtttaaatcttccactgattgttatttaaatggtgatttcgataaaacacttataaatatattaaataattatgaaaaaatacttgaaataattctgccaactttaggtaaggacagaagaaaaacctatagcccatttcttcccatatgtgaagaaacaggtaaagtacttcaagtgcccgttaaaaatataaatttaaataatggtactatagaatatacaaatgaaaagggacaaaatattatcacagaagttactaaaggtaaatgtaaactgcaatggaaagcagactgggcaatgcgttgggaagcgttagatgttaattatgaaatgaatggcaaagatctaacaccttcatttgatctttcaaaaaaaattgttcaaataattgggggtaaagcccctgtaaatatggtgtatgaattattcttagatcaaaatggagaaaaaatatcaaaatctaaaggtaatggtttatccatagaagaatggttatcatacggaactgaggaaagtcttaccctatatatgtatcagaatcctaaacgtgcaaaaagattatattttgatactataccaaagaatgttgatgaatattcacgttttttatcaagtgctaaaaatcaagatattgaattattaattaaaaatcccagtatggcat

SEQ ID NO: 305513 - DNA, 1325 bp, Unknown
  Bacterial polypeptide expressing nucleotide sequence isolated from the Sargasso Sea
tgatatggatggtctaagaaaagttccagataatgttccaaaaaaagaaatattaaataaaaatctacataagcctttaacaagtattccagatccttttgaaaaatttgatagttttggaaaacataataatgaaatgctaaaaaaatttctaaatgattttaattttagttatacttttaaaagttctacagagctttataaatctggtttctttaactcatctcttaaaattgttcttgataattatcaatctattatggaaacaattttaccaactcttggaaaagaaaggcaaaaaacttattgtccgtttttaccaatatgtccagaaactgggatagttctagaaatacctgtaatagaaattaataaaaaaaaatctacaattatttttgataataatggaaaaaaactagaaactagtgttttagatggtaagtgtaaattgcaatggaaagttgattgggcaatgagatggtatgcgcttgatgtagattttgaaatgtatggaaaggatttaattgaaagtgcaattttatcaaaaaaaataataaaattattaggaaaaaatgatccttcaggatttgcatatgaattattcttggatgaaaaaggagaaaagatttctaagtcaaaaggtaatggaattacaattgaaaattggttaaattatgcttcgccagaaagtttatctctttttatgtaccaaaatccaaaaagagcaaaaaaactttataaagaaattgttccaaaagctgtagatgaatatttagattttattgaaaaaggaaaatctcaaaatgaattacagttattaatgaatccagcatggcatgttcacaatggaaaaataccaaaagaaaaaacaattatgcctttttcaatgctgttaaatttagttgaaacaagtaatgctaatacaaaagaattattatggaaatttgtaaaaaaatataaaaagaatattatagataatgaatatccaatttttgataatttaataaattatgcaataagatattttaatgatgtaataaagcagaaaaaaagttataaaaaaccaaaccatgaagaaaaaaaagcacttgaagctttagtcgagtcattagaaagttgtaatgacaatatgcaaccagaggatattcaaaccaaaatttattctgtaggtaaagagaatggatataaagaaaatttgagagattggtttaaattaatttacgaagtagtttttggagatgaaaatggtcctaggatgggcttttttataagtttttttggagttaatgaaacaaaacaacttattaaagaaaaaataaaataat

SEQ ID NO: 305514 - DNA, 1567 bp, Unknown
  Bacterial polypeptide expressing nucleotide sequence isolated from the Sargasso Sea
tatgcttgaatctgatctaataaactcaacatcttcttggccatttgttgaaataaggaaacttttaaaagatagaaaagaaattatcaaaaaaaaaaataaaattacttttcagacaggctatggtccaagtggattaccacacattggaacttttggtgaggtttcaagaacctctatgatgataaatgcgttaaatcatattaataaaattgatacagagttaataactttctccgatgacatggatggacttagaaaagttccagataatattcctaacgataaaattttacatgataatattggaaaaccacttactgcaataccagatccattcaaaaaatatggtagtttcggtgaacataacaataaaatgctaatagaatttttaaaaaaatttaattttaattttattttcaaaagttcaacagaaaactataaaaaaggtatatttaacaattctctagaaagggtattcgaaaaattagaggatattatgaatattatattacctacacttggtagcgaaaggcgaaaaacttacagtccttttttgcccatatgtcctgaaaccggtaaagttttggaaattccagtaatcgaaatagataaaaaaaataaaacattagtttttgataatgcaggaaaaaaaataaaaactagtattttaaatggcgaatgtaaattacaatggaaagttgattgggcaatgaggtggtttacatttgatgtagattttgaaatgtatggaaaagacttgatcgaaagtgcaatcttatcaaataaaatttgtaaagccatgggtaagcaacctccaaatggttttgcatatgaactttttttagatgagaaaggagagaaaatttcaaaatctaaaggtaatggaattactattgagcagtggcttaaatatgcttcaccagaaagtctatcactttacatgtatcaaaatccaaaaagagctaaaaagctttatccagatgtagtaccaaaggcagttgatgaatatttatcctacatagaaaaatttgaaagccaaaaagaaaaagaaaaacttttaaatccggtatggcatattcatagcggtttacccccaaaagaaaaaataattatgccattttcaatgttattaaatatagttggatccagcaatgcaaagaaaaaagatgttttatggaagttcataaaaaaatttcataaagaaatagaaccaaaaaaccataaaattttagatgagcttactgattatgcaattaattattttatagatgaagtcgaaccaaaaaaaaaatttaagaaaccttctgttgaagaaactaaagccttaaaaaacttaatagcatctttaaaaaaggttacccaagatacccctccagaagatatacagacaataatttatacttcaggtaaagagaatggatatagtgataatttgaggaactggtttaaattaatttatgaagttatttttggtgaagaaaatggtccaagaatgggctttttcataagtttttttggactaaaagagacaattgatttaatggaaaaaaagttgaaaatataa

SEQ ID NO: 305515 - DNA, 1393 bp, Unknown
  Bacterial polypeptide expressing nucleotide sequence isolated from the Sargasso Sea
atgcttgataatgacataattcagtctacctcatcctggccatttgtagaagtaaggaagcttttgaaggatagaaaagatttaataaaaaaaaaaaatagaattactttccaaacaggatatggcccaagcgggctaccccacattggtactttcggcgaagtggcacgtacctcaatgatgataaatgctttaaactttattcaaaaaattgatcatgaattaataacattttctgatgatatggatggattaagaaaagttcctgataatatcccaaacgacgaagtactaaaaaaaaatctaggtaaaccgcttacatctattcctgatccattcaataagtttaatagttttggcgaacataataatgaaatgctaaaagaatttcttaaaaaatttaattttaaattcaattttaaaagctcaactcaaaattataaaaaaggagtttttaataattctctattgagagttttagaaaaatatcaagaaataatgaatataattttgcctactttaagagaggaaagaaggaaaacttattgtccatttttacctatttgtcctaaaacgggtgttgtacttgaaattccgctgttaaatatggatcaaaagtctggaaatgtaatttttgacaataatggtgaaaaactagagataaatattttgaacggcaattgtaaactacaatggaaagtagattgggcgatgcgatggtttacttttgatgttgattttgaaatgtacggaaaagatttaactgaaagtgcaatattatctaataagatttgtagaactttaggaaaaaatcctccaaacggatttgcttatgaattgtttcttgatgagaaaggagaaaaaatttcaaaatctaaaggaaatggaatttccatcgaacaatggttaagatatgcctcaccagaaagtttggctttatacatgtatccaaatccaaaaagggctaaaaaactctattcagaagtagttccgaaaaccgttgatgagtatttatctcttattgaaaaatacccaactcaagatataaaagatcaaatacaaaatccagtatggcatgttcataatggaaaacctccaaaagaaaaaattgtaatgcctttctcaatgctgttaaatatagttggatctagtaatgcagataataaagatgttctctggaaatttataaatagatttcacaaagagattaaaccagaagatcatcagattctagatagacttacagaatacgcaataaattattttaaagataaagtagagcccaaaaaaaaatttaaaaaacctaattcaaaagaaaaaaatgctttagaaaatctgattaaaaaattgaaaaaaattgatcaatcacttagcccagaagaaatcaaaccta

SEQ ID NO: 305516 - DNA, 964 bp, Unknown
  Bacterial polypeptide expressing nucleotide sequence isolated from the Sargasso Sea
attgaaaacatcaacattagaatttgaaataaatccaatcgataattcaatccttgcaaatttattggggacatttgacagtaatattagatcgattgaaaatgaactaaatatacaaattaaaaacagaggcaatttattcctccttgagggccagaaaagaaagcttcccttaggcgagagaatactcttagagctacatgccattgcaagcaaagaaagcatcgataaagaaaaagttcatctcgttataaaaaagatcatgaatcatcaagaaaaaccatcttcatctacggagcaaccaacttttattaaaacgcctcgcagagagatacagactcgaaatatgaatcagtatgagtatattcaatcaatcaggaatcatgacgtaacattcggaattggacctgctggtacaggtaaaacctatttagctgtagctgctgccattgagtctcttcagaggcaagatgtcaaaagaatcattctagtgaggcctgcggttgaagcgggagaaaaccttggctttcttcccggtgatttatcacagaaagttgatccatatctcagaccgatgtatgacgcactttatgaaatgatgggatttgagcaagtttctaatttaatagagagaagaacaattgagcttgcgcctttggcatttatgagagggcgatccttgaatgaaagctttattattttggatgaagcgcaaaacactactgtggaacaaatgaaaatgtttttaaccagaatggggtttggctcaaaatctgttgtcaatggtgacattacccaaattgatttacccacagaaaagaaatcaggtcttgagcatgcgttaagtgttgtgtcggacatagataagattgcttctgtgcatttttcacataaagatgtcgtcaggcatcgaattgtgcaagagattgtagaagcatacgaaaagaataaagacaacaaatga

SEQ ID NO: 305517 - DNA, 1445 bp, Unknown
  Bacterial polypeptide expressing nucleotide sequence isolated from the Sargasso Sea
tgggtatggtcctagtggattaccacatattggaacatttggtgaggtagccagaacaacaatgattttaaatgccataaagtcattatcagaaattgaagtggaacttattgctttttccgatgatatggatggacttcgaaaagttcctgacaatgttcctaataaaaatatattagaggaacatcttcataaaccactcacttcaattccagatccatttgagacaagtaagagttttggagatcacaataatgaaatgttgcagcagtttttagataattttggttttaagtacacatttaaaagtgctactgaactttatacttcagggtattttgatgaacaattaatcaatgtattaaaaaattatgaatcgataaaaaatattattcttccaacactaggcgaggaacgaaaaaaaacatatagtccatttcttccaatatgcccaaagtctggacatgttcttgaagttgaaattatttcaattaatcctgataaaaatacaattacatatgtgaataaaaataaagaagttgagcaatctatcttaaaaggaaaatgcaaacttcaatggaaagttgattgggcaatgcggtggggcgctcttgatattgattatgagatgtacggaaaagatttaatacctacgtttcaactttctgcaaaagtaagccgagcacttggctatgcagctccagaaaattatttttatgaactatttctggatcaaaatggagaaaaaatatccaaatctaaaggtaatggtctcacaatagaggaatggttgtcatatgcacctaaagaaatattaagctattttatgtatcaaaacccaagaagagctaagaaactctttcatgacatcattccaaagtcatctgatgagttcttaggccacttaaacaaatttaatacgcaatctgatcaagagcagattgaaaacccagtctggcatatcatgaatggcgaaaactctataggaaatgtaaatgtaacatataaccttatattaaatcttgttgctgcgagtggaaaaaatgatcctgcaactattttagattttgttaagaaatacgatgaaaatattaatagttctaatagacaattcatcaatgacttaattaaaggggcaattaattttgaaagagacattacatcagagaaaataaactttaagaccccatctagcgaagaaagaaaaatctttgaggatctaataaatagattgcgtagtcaggcagatagtgcagatgccgaaaccattcaaactgagatatatcaaataggaaaagatcataattttgaaaacctcagggattggtttaaacttatttatcaagtactttttggcaaagaagacggacccagatttggaacttttattgcgatatatggaataaaacagacaattgagttaatcgaagaaaagttaaaataaa

SEQ ID NO: 305518 - DNA, 1179 bp, Unknown
  Bacterial polypeptide expressing nucleotide sequence isolated from the Sargasso Sea
ttttctgatgatatggacggacttagaaaagttcctgaaaatattcctaatttcaaaaaactcgaagaaaatcttcataaacctttaacacaagttccagatccttttgaaaaatttaaaagttttggagaacataacaatgaaatgctaaaaaattttttagataaatttaatttcaaatataattttaaaagctcaacagcattatataaatctggtttttttaatgacacattaaatttaattttagaaaactatgaagggataatgaatataattatacccactcttggcaaagaaaggcaaaaaacatattcgccctttttacctatttgtcctgatacaggagttgtactagagataccagtatcagaattagatagaaaaaactcaaaaattatttttaataacaatggtaaaaaattagaacagagtattttggatggaaattgtaaattacagtggaaagtagattgggctatgagatggtacgctttagatgttgattttgaaatgtacggaaaagatttgattgagagtgcaattttatcaactaaaattataaaactattaggaaaatcaaacccttcaggatttgcttacgaactgtttttagatgaaaaaggtgaaaaaatatccaagtcaaaaggaaatggaattacaatcgatcaatggttggagtatgcatcacctcagagtctttctttatacatgtaccaaaatccaaaaagagcaaaaaagctttacagagaggtagtgcctaaggctgtggatgaatatcttgattttattgaaaaaagcaaaactcaaaacgaacttcaacagcttatgaatcctgtttggcatgttcacaatgcaaaaattccagatgaaaattcaattatgtctttctcaatgttgctaaatttagttgagacaagtaatgctgacacaaaagatttattgtggaagtttgttaagaaatataaaaaagatattaatgagaatgaacatcctatttttgataacttaataggttatgctattaaatattttaatgacgctataaaatctaaaaaaatttataaaaaaccaaatgaaaaagaaaaaattgctttagatgcactagtaaaatctttagataattgtgacgattcaatgaaaccagaggatattcaaacgactatttatacagttggc

SEQ ID NO: 305519 - DNA, 1564 bp, Unknown
  Bacterial polypeptide expressing nucleotide sequence isolated from the Sargasso Sea
atgattaaaaaagaaaacttagaaaaaacaagcgcatggccattcgttgaggcaaaaaagttacttagagaaagaaaatctattattgaaaaaaaaggaaaaatcacacttcaaactggctatggaccaagtggattacctcacataggaacttttggagaagttgccagaacttcaatgatggtaaatgccttacagcatttaactgatcttccaacagaaattctgactttttcagatgatatggatggattaagaaaagtacccgaaaatgttcctaacaaagaattactagaagaaaatttgcataaaccgcttacacaagttccagacccttttaaaaaatttaaaagctttggtgaacataataatgaaatgttaaaagattttttgaataattttaaatttatttataattttaaaagttcgactaaactttataaatcaggtttttttaatccctctttagaagttatattaaaaaattatgagggaataatgaacatcatattaccaactttaggaaaagaacgtcaaaaaacttatagcccttttttgcccatatgtcctgagacagggcacgtattagaaattccagtaaaagagataaacgaaaaaaaatctataattatttttgataacaagggaaaagatctagagtctagtgttttagatggatattgtaaattacaatggaaagttgactgggctatgagatggtatgctttagatattgattttgaaatgtatggaaaagatcttatagaaagtgcaattttatcatcaaaaattatcaaactaattggaaaaactaatccgtctggttttgcatacgagttattcttagatgaaaaaggggaaaaaatatcaaaatcaaaaggaaatggtattacaattgatcaatggcttcaatatgcttcacctgaaagcttatcattatacatgtatcaaaatcctaaaagagctaaaaaactttataatgaaattgttcctaaagctgtggatgagtatctagactcaattgaaaaagcaaaaaatcaagatgaattacaattattaatgaatcctgcttggcacgtccacaatagtaatgttccccaagaaaatataattatgtctttttcaatgttattaaatcttgttgagactagtaacgcagataataaagaacttttatggaagtttgttaaaaaatataaagaaaatatctcagaaaaagatcatcctatttttgataatctagtggattatgctatcaaatattttaatgacataatcaaaacaaagaaaaaatacaaaactccaaatttagaagaaaaaaaagccctagagtctctagtcaaaactctagaaacttgtaatgataaaatgtcacctgaagatattcaaacattaatttactcaactggtaaagaaaatggttatgcagaaaatcttagagattggtttaagttgatttatcaagtggtatttggtgacgaaaatggtcctcgaatgggtttttttataagtttttttggtgttaaagaaacgaaagatcttataataaataaaattaaataat

SEQ ID NO: 305520 - DNA, 1465 bp, Unknown
  Bacterial polypeptide expressing nucleotide sequence isolated from the Sargasso Sea
atgatcacccttcaaactggatatggtcctagcggtttaccccacatagggacttttggagaggttgctagaacctctatgatagtaaatgctcttaaacaattaacaaatcttccaacagaaattattactttttcagatgatatggatggactaagaaaagttcctgataatgtgccaaatcaaaaattattaaaggaaaatttacataaacctttaacggaggttccagatccatttaataaatacaaaagttttggagagcataataatgaaatgcttaagaattttttgaatagttttgattttaattattcttttaaaagttctacttatttatataaatcaggattttttaattcaaccctcaagctaattttacaaaattatgatggaataatgaatattattttgccaactctaggcaaagagagacaaaaaacttatagcccttttttaccaatctgtcccgagagtggacatgtattagaaataccagttttagaaatcgataaagataactcaaaaataattttcgattataatggaaaaaaattagaaaaaagtattttaaatggacactgcaaacttcaatggaaagtggattgggcaatgagatggtacgcattagatgttgattttgagatgtatggaaaagatcttattgaaagtgcaattttatcaacaaaaattataaaattattaggcaaaagaaatccttcaggatttgcttatgaattatttttagatgaaaaaggtgaaaaaatttctaagtcaaaaggtaatggaattacaattgatcaatggttagattatgcctcacctgaaagtttatcactatatatgtatcaaaatccaaaaagagcaaaaaaactttataaagaaatagtccccaaagctgttgatgaatatttagattttattgaaaaagcaaaaaaacaagatgaattacaactcctcatgaatcctgtttggcatgttcacaatagcgagattccaaaagaaaatatgattatgactttttcaatgctacttaatcttgtggagacaagtaatgcagataataaagatcttttatggaaatttgttaaaaaatataagactgatatatctgaaaaagatcatcctatttttgacaagttagttggatatgcaattaaatattttaatgatgttataaaattaggaaaaaaatataaaaaaccaaataataatgagaagatggcactagaagctttaataaaaactttagataagtgtaatgacaaaatgacacctgaggatattcaaactttaatctattcgactgggaaagaaaatggctattcagataaccttagagattggtttaaattgatttatgaagttgtatttggagatgaaaatggtcctagaatgggtttttttataagtttttttggtgttcaagaaacgaaagatcttatattaaataaaattaaataat

SEQ ID NO: 305521 - DNA, 1576 bp, Unknown
  Bacterial polypeptide expressing nucleotide sequence isolated from the Sargasso Sea
tatgcactgggcggattataccgcacaaaggctcatggagcgaggggacgaacaggtctccgcttccgggataactccttctggagaattccatatcggtcacctgagggagattctctcggccgaaatgatccacagggcctgcctggatgcaggaatgagttcgaaatacatattcattgtagactcgatggatccgttgaggagagtctacgacttcctctctccagaatacgaggagttcatcggttgccccctagcattcatccctgctcctggagaggacgggagcccgggagatgggagcgttacctatgccgatcacttcctctctccattccttgacgctcttgaacaaattggagtcaggcccgaagtggtcatgaatcatgagacctacgagaaggggctattcgcggaatatatcgacacagctatcagcaatagggaagagataagggagataattcagcaaatctcaggaagagagttgccctctgactggtttccctacaatccaatgggctccgacggcagtatggacggagtgaccgtgacaggatacgagaagccatacgtgatttggagagattcctcgggaaacgagggtaaatcggacataagaaaggcacatggcaagatgccttggagggttgattgggctgccagatgggtgattcatgggataacctgtgagcctgcaggcaaagaccacggagctgctggagggagttatgacaccgggattccgatatgcagattacttggtgggaacccaccggacaaaattgtctatgagtggatccaactgaagggaatgggacccatgtcaagctcctctggcctaacgattggacctatggaagccctgtctctggttcctccggagatactccgctacgtcattgcaagaagcaagatcaaccggcacattgagttcgataccgggagtgcgcttttccagactgctgacgagtacgagagattggttgccaaccccattcgggatcaggaagaaatgagcaagcgacaattggtagcggctgagactcagcgtggggcaatcagactaagccaagtcaaccctgagtcggaccctattgactccgttggaggggtttctttcaggcatctgtctatgctagctcagattaagtcgtcagatggagatgtttggtcgtctctgaatagatccgggcatatcgaaggagatcctagcgattccctcagggtgaggcttgcccggatgaggagttggatagggggggcccacttccctgaggatgcaaagctggagattcgaagcgagatcggcgatgatgcaagggctgagattggcagggatggtatcgctttcctcagaagcctatcgggcctactttccgagtgcgagtggaccgatgcaggaatcggagagtcaatatcggaagcatgcgattccactggagtctctaggaaggagggttttgcctccatatactgggcaataattggcagaaggcatggccctaaggcctcatcactactgttcgaaatggataggggagatattgtatcccttcttgggagttcatag

SEQ ID NO: 305522 - DNA, 1015 bp, Unknown
  Bacterial polypeptide expressing nucleotide sequence isolated from the Sargasso Sea
tatgctagataataacgtaattcaatctctttcggcatggccatttgtagaaattagaaatttgctaaaagagagaaaagacttaattaaatctaaaaataaaataatttttcaaacaggttatgggcctagcggtttacctcatattggaacttttggagaagttgcaagaactactatgatgattaatgcattacatcaattaaataaaatagaaactgagttaattactttttccgacgatatggatggtttgagaaaagtgcctgagaatattccaaatgaggaaatattaaaaaaaaacttaggcagacctctttcctcaattccagatccatttggcaagtttaatagttttgctgaacataataatacaatgcttaaacaatttttaaaaagatttaattttgaattttcatttaaaagttcaactgaaaattataaaaaaggcaaattcaatgaatcacttaaaagggtagcagaaaaatatgaagagattatggaaataatattaccgacattaagatctgaaaggagaaagacttattgtcctttcttacctttgtgcccagagacaggaaaagtattagaaatcccaatgttacatttagaaaaaaatactggaaaagtaacttttgataataatggtaaaaaaatccaaacagatatttataatggtaattgtaaattacaatggaaagtagattgggcaatgagatggtttacatttgatgtagattttgaaatgtatggtaaagatcttacagaaagtgcaatattatcgagtaaagtttgcaaagttttaggtaaggttcctcccagcggtttcgcttatgaactttttttggatgagaaaggtgaaaaaatttcaaaatcaaaaggaaatggcataaccatagaggaatggctgaattatgcatcacctgaaagtctttcattgtatatgtttcaaaatcctaaaagagcaaaaaaactttactcggatgttgtacctaaagcagtagacgaatattta

SEQ ID NO: 305523 - DNA, 463 bp, Unknown
  Bacterial polypeptide expressing nucleotide sequence isolated from the Sargasso Sea
atgacagaaaatctatcggaaaatgatctcataaaacaacgcagatctaaattagaagaacttagaaatcggggtaatgcctatccgaactcatttaggagagactccttatctcaggatttgaaagatcagtgcgagggtttgtctaaagaggatttagaagcaaaagagatgacagtatcagtagcaggaagaattatgcttcagcgcataatggggaaagctagttttataactttgcaggatatgaaggggcaaatacaggcatatgttagatcgaatgacctgcctgaaggtcaatatgatgattttaaaacttgggatcttggagatattgttggaatcaaggggaagctttttctcacaaaaactgaagagttaacagttaatgctgaatctatagaaatgcttactaagtccttaagacctcttcctgaaaaacattctggtcttgttgataaag

SEQ ID NO: 305524 - DNA, 138 bp, Unknown
  Bacterial polypeptide expressing nucleotide sequence isolated from the Sargasso Sea
attatattgaagcactagagtatggattgcccccttgcgctggggtaggtataggcatagacagattggtcatgctccttactggagtagattccattcgagatgtattattatttcctcagatgaaacctaaataaa

SEQ ID NO: 305525 - DNA, 197 bp, Unknown
  Bacterial polypeptide expressing nucleotide sequence isolated from the Sargasso Sea
gattgaagatcaggttgcagcaaaagattcaggtgataaagaggcaatggattatgatcatgattatattactgcattagagcatggtatgcctcctgcagtaggggttggaatgggagtggatagattagtaatgttattgactaatcagtcctcaataagggatgttttgttatttcctcaacttaagtcttaga

SEQ ID NO: 305526 - DNA, 321 bp, Unknown
  Bacterial polypeptide expressing nucleotide sequence isolated from the Sargasso Sea
attagcaaattcttttcctccaatgaaactaatccagattatgctgataggtttgaattattcattggaggaaaagaatttgctaatggtttctgtgaactaaatgatcctgatgatcaggcatctagatttgaagatcaggttgctgcaaaagactccggtgataaagaagcaatggattatgaccatgactatataactgctctggaacatggaatgcctccagcagttggagttgggatgggagttgatagattggtgatgctactcacaaatcaatcgtcaaaaagagacgttttattatttcctcaactcaaatcg

SEQ ID NO: 305527 - DNA, 673 bp, Unknown
  Bacterial polypeptide expressing nucleotide sequence isolated from the Sargasso Sea
atgagtgaagataaaataggcggcgaaaaagctattcttgaagaaagaagaaaaaaactcgaaaacctaagggacaaaggtgttgcttatgctaactcttttcgtccaaagaatagtactaatgaaattcataaactatatggtgacatctctaaggatgatttagccgaaaaaaatattaaaaacatttcaattgcaggaagaattgttctaaagagagtaatggggaatgcaagctttgccactttgcgagatgccagcggagatattcagatatatgtaaccaaaaataatgttgatgaaagtatctatgatgattttaaaacatgggacttgggagatattgtcggagtttcgggatcactattcaggacaaaaacagatgaactcacgattgaggtttgggacttagaaatgattactaaatcattacgaccgatgccagaaaagtttaaaggtttaacagatgttgaggctagatataggcaaagatatctagatttaatgacaaatactcaaacaaaagaagtttttataaaaagaacaagaattattgactcagcaagaaaaaagatgaatgagagaggttatttagaggtagagactccaatgatgcatcctttggcaggaggagctgtagcaagaccttttgtaactcaacacaatgcttagg

SEQ ID NO: 305528 - DNA, 526 bp, Unknown
  Bacterial polypeptide expressing nucleotide sequence isolated from the Sargasso Sea
ctggaagccattaacaaattagggtcaatttcgtttcattcaatgagtgattctgatgtccagcttttacttgaacaaaacggctgggaacttgagggagattataaccgtggactggcaactcagcttgtgtttgaaaaaacttgtgaagatcagcttgttcagccaacttttataactgaccatcccagggaaacaagtccgttatgcaagcaaaaccgtcagaatccggaattaattgaaaggtttgaggccttcatcaatggctgggaaatagccaacgcatattctgaactgaatgatccggttatacagcgcggactaatggaagagcaggtggaacgcggaaggggaggagagaaggatactcatcctcttgatgaagattttctgcgtgcaatggagtatggaatgccccctatgggaggagttggatttggaattgatcgaatagtaatgcttctaacaggacaatctacaattcgtgacgttatattctttccaaccatgcgtactgaattttgag

SEQ ID NO: 305529 - DNA, 775 bp, Unknown
  Bacterial polypeptide expressing nucleotide sequence isolated from the Sargasso Sea
aagaaaaagatatttagatttaattattaataaatcatctcaaaaaacatttattaaaagatctaagattattaattcaataagagatttttttaacgaaaaggattatctagaagttgaaacaccaattttacaacctatttatgggggtgcagcagctcgaccttttaaaacctatcataatacattggatatgcctctatatttgagaatagctaatgaattgtatttaaaaagattaataattggtggatttaaaggcgtatatgaatttggcaaggactttagaaatgaaggtatgtctaggtttcataatcctgaatttacccaatgcgaattatatgtggcttataaagattatatatggatgatgaattttcttgaagatttatttgttaaagtttgtttggatcttaatggtaatacaaatattaaatgtggtgaaaatgaaatcaattttaaaaagccatggaaaaaatatacaatgtatgaagtaataaaaaaatttactggaatagatgttacgaacatggggaaaaaggaacttttaaacttatgtaaagacctaaaaataaaaactgataattcaatgggaagaggaaaattaatcgatgaaatatttggagaaaaatgtgagaaaaatttaattcaaccaacctttatcactgattatccaattgagatgtccccactggcaaaaaaacatagatcaaaggagggcgtagtagaaaggtttgaattaatatgtaatggaaaggagttatgtaatgctttt

SEQ ID NO: 305530 - DNA, 163 bp, Unknown
  Bacterial polypeptide expressing nucleotide sequence isolated from the Sargasso Sea
gatactcatcctctggatgaagattttcttcgtgcaatggagtatggaatgcctcctatgggaggagttggatttggaattgatcgaatagttatgttgcttacaggtcaatctaccattcgtgacgttattctatttccaaccatgcgtaatgaattttaag

SEQ ID NO: 305531 - DNA, 520 bp, Unknown
  Bacterial polypeptide expressing nucleotide sequence isolated from the Sargasso Sea
tttgtctgaaatcagagaatcccgcttacaaaaagctaattcattagtaagtaaaggatttccttcttacgcagagagttttagagtttcccatactacacaatttcttattcaaaaattttattatcttgaaaatggtcaagaggaaggctttaatgtttctcttgcgggtagagtgatggcaaaaagagtaatgggtaaaatcgcttttttcacaataagcgatcaagaaggtcagattcagctttatttagataaaaggataataaactgtaattcagaaaaccaaaaactactttcttttgaagatattaaggaaatagtagatattggtgattggataggcgtctacggaactattaaaaaaactaataaaggtgagctttcaattaaagtagaaaaatgggaaatgttatcaaaatcattacatcctttacccgataaatggcatggattgactgatattgaaaaaagatatagacaacgttatttagatttaatagtaaatcctcactccaaa

SEQ ID NO: 305532 - DNA, 832 bp, Unknown
  Bacterial polypeptide expressing nucleotide sequence isolated from the Sargasso Sea
caggtctcttcctgaaaaatggcatggattaaaagacaaagagacaagatttagacaacgttatcttgactttattgtaaatgatgaagcaaaaaagacaatagatacaagattcaaggtgctgcagctcgttagggaatttatggtaaatgatggttttgtagaagtcgagactccaacccttcaaccaaaagctggtggagctattgctaaaccttttacaacacaccataatgcaatgggtatagacatgtttcttcgaattgcccccgagctttatttgaaaagattaataataggtggatacgaaaaagtttttgaagtaggaaaggtctttagaaacgaaggtattgatcaaacgcactctcctgaatttacaatgatggagagctatgaagcatatacagatgtcaatggcgtaatggacatggttgaaaaaatgtgcgaacacatatttaaagaattaaaccacaatcttaatgttgaatttgcagataaagaagctgactttagttttccatggaaaagagtaagcatgtttgaattagtcagtagtcattttgaaattgaaataaaatataattcagaattaaaagacattcaaagtcagctgattgaaaaacacgatattgatgttgaatcgacaagcatcggtgttttagtttatgaattatttgaaaatcatattgaagataatattcttaatccaacatttgtgactgattatccaaaagaggtttcaccatttgctagagaaagcaaagagacagaaggagttactgaaaggtttgaactatttgcatttggtagtgaattagcaaacggattctca

SEQ ID NO: 305533 - DNA, 262 bp, Unknown
  Bacterial polypeptide expressing nucleotide sequence isolated from the Sargasso Sea
cggtaaagaatttgctaatggcttttgtgaattaaatgatcctgacgatcaagcttcaagatttaaaaaacaggttgaggcaaaagattctggtgataaggaagctatggattatgatcatgattacataacagctctagaacatggaatgcctccagcagtgggagtaggtatgggagtagatagactagtaatgctcttaacaaatcagtcctcaattagagacgtcttattatttcctcaacttaaatctaacgaataa

SEQ ID NO: 305534 - DNA, 174 bp, Unknown
  Bacterial polypeptide expressing nucleotide sequence isolated from the Sargasso Sea
atgctttagagattggcatgccgcctactggaggattaggcataggcattgatagattaattatgttaattactaatagctcatcaattagagaagtaattccttttccattgttaaaaccagaaataacttcaaaaaaaaatgaaaaattacccttaaatgaagtaaaataga

SEQ ID NO: 305535 - DNA, 208 bp, Unknown
  Bacterial polypeptide expressing nucleotide sequence isolated from the Sargasso Sea
tcaggcatctagatttgaagatcaggttgctgcaaaagactccggtgataaagaagcaatggattatgaccatgactatataactgctctggaacatggaatgcctccagcagttggagttgggatgggagttgatagattggtgatgctactcacaaatcaatcgtcaataagagacgttttattatttcctcaactcaaatcgtaa

SEQ ID NO: 305536 - DNA, 136 bp, Unknown
  Bacterial polypeptide expressing nucleotide sequence isolated from the Sargasso Sea
gacgaaaatcgcttgatagcagagcgccgcgcaaagcttggtgcattgcgtgaagcgggccccgcatttcccaatgatttccgccgcacagcgttggccggttatctgcagagggattttgaatctcaggacaagg

SEQ ID NO: 305537 - DNA, 365 bp, Unknown
  Bacterial polypeptide expressing nucleotide sequence isolated from the Sargasso Sea
aattgaacctacatttatttataattatccaatcgagatatctcctttatcaagatcgctggatgaagataactcagttgcagaaaggttcgagctttttgtaaacgggaaagaattaggaaattctttctctgagttaaatgacccagaagaacaagcagctcgtttcgagtcacaagtaaaagagaaggatgcaggagatgaagaagccatgcattttgatagagactacatagaggctttggagtatggcttggcaccttgtgctggagtaggaattgggatagataggctagtgatgctctttacaggacaagaaagcattagggatgttgttctattccctcaactgaaaaataagtaat

SEQ ID NO: 305538 - DNA, 217 bp, Unknown
  Bacterial polypeptide expressing nucleotide sequence isolated from the Sargasso Sea
cctgatgatcaggcttcaagatttgaagcacaggtcgctgctaaggattccggagacaaggaagcaatggattttgataaggattatattacagcactggagcatggaatgccgccagcagttggagtagggcttggaatagatagattagtaatgcttctaacaaatcaatcatctataagagacgttttgctatttccgcaattaaaaaactaat

SEQ ID NO: 305539 - DNA, 323 bp, Unknown
  Bacterial polypeptide expressing nucleotide sequence isolated from the Sargasso Sea
ttcacctctatcaagaagaaatgaagataatccagattttgctgataggtttgaattatttataggtggtaaggaatttgctaatggcttttgtgaattgaatgaccctgatgatcaggcatcaagatttgaagatcaggtcgctgcaaaggattctggtgataaagaagcaatggattttgatcaagattatataactgcactagagcatggtatgccgccagcagtgggtgttggattgggtgttgataggctagttatgttattaacgaatcaatcatctataagagatgttctgttattcccacaactaaaaaattaat

SEQ ID NO: 305540 - DNA, 610 bp, Unknown
  Bacterial polypeptide expressing nucleotide sequence isolated from the Sargasso Sea
tatggacaacgataatgaatatataaaagttagaagagaaaaaattcaaaagcttcgcgatgaaggaataaacccttttaaaaatgatataaagccatctattcttattattgacttgatagatacatatgctgtaactgatccagaaagtttcgaaaaagatttaaaagtttattcgattgttggaaggatcacggctattagaagttttggaaagtctgcttttattcagattaagcaggatgataataactttcaagtttttatttcaaaagaaacattaggtatagaatcattagatttctttaaaaaatttatagacataggagattttatttttgtagaaggaacatgtttttttactaaaactaagcaattaacattagatgctacaagaatggaacttttgacaaaatctttgagaccattacctgaaaaatggcatggactgaccaacaaagagactagatataggcaaagatatttagatttaatatccaactctgatgttagaaaaatttttgagattcgttcaaaaattttttcttcaataagaaattttctttcaaaaaataaattcaccgaagttgaaactccaattttacataaa

SEQ ID NO: 305541 - DNA, 210 bp, Unknown
  Bacterial polypeptide expressing nucleotide sequence isolated from the Sargasso Sea
atcaggcttcaagatttgaagcacaggtcgctgctaaagattctggagataaggaagcaatggattttgataaggattatattacagcactggagcatggaatgccgccagcagttggagtagggcttggaatagatagattagtaatgcttctaacaaatcaatcatctataagagatgttttgctattcccgcaattaaaaaattaat

SEQ ID NO: 305542 - DNA, 484 bp, Unknown
  Bacterial polypeptide expressing nucleotide sequence isolated from the Sargasso Sea
aatgagtgattctgatgtgcagaatttacttgaacaaaacggctgggaacttgaaggagattacaaccgtggactggcgacacagcttgtgtttgaaaaaacatgtgaagatcagcttgttcagccaacttttataattgaccatcccagggaaacaagtccgttatgcaagcaaaaccgtcagaatccggaattaattgaaaggtttgaggtcttcatcaacggctgggaaatagccaacgcatactctgaactgaatgatccggttattcagcgcggactaatggaagagcaggtggaacgcggaagaggaggagaaaaagaaactcatcctcttgatgaagattttctgcgcgcaatggagtatgggatgccacctatgggaggagttggatttggaatagatcgaatagtgatgcttctaacgggacaatctaccattcgtgacgttattttctttccaaccatgcgtactgaatcatag

SEQ ID NO: 305543 - DNA, 148 bp, Unknown
  Bacterial polypeptide expressing nucleotide sequence isolated from the Sargasso Sea
ggattttgataaggattatattacagcactggagcatggaatgccgccagcagttggagtagggcttggaatagatagattagtaatgcttctaactaatcaatcatctataagagatgttttgctattcccgcaattaaaaaattaa

SEQ ID NO: 305544 - DNA, 429 bp, Unknown
  Bacterial polypeptide expressing nucleotide sequence isolated from the Sargasso Sea
tatgacagaagaaatttcacaaaatgaactcttagcacaaagaagagagaagttagaagcgttaagatctaagggaaacgcctatcctaacaattttaggagagattcattgtctcttaaacttcatgagtcttatggagaccaaaaaaaagaagatttagaagaaaaagatataaaagtcaaagttgcaggacgaattatgctgcagagagtaatgggcaaggcaagttttatcaccattcaagacatgcaaggacaaattcaagcttatgttaggtcagactctataggagatgaaatttacaaagattttaagacatgggacttaggcgatatcgtaggaatagaaggaaccctgtttaagacaaaaacagatgaattaactgttaacgctgagagtgtatctcttttaacaaagtcattaagacc

SEQ ID NO: 305545 - DNA, 481 bp, Unknown
  Bacterial polypeptide expressing nucleotide sequence isolated from the Sargasso Sea
atcgaggaactgcgcgcgattgcatcagaacatgaaatccctattaaagatggttatgggcccgggaaactgatcttggaaatctatgaaaagaccacggagagttcgctatggggtcccgtctacgtgacggactatccgatcgaagtatcgcccctgtctcgcgagcacagatccaacccaggtatgaccgagcgtttcgaagcaatattggcaggaagagaactctgcaatggtttcagcgaactcgtagatcccgaacaacaacggatccgattcgaagagcaggcggcacaaaatgcaggcggggacgacgaagcgatggttgtggacgaagactatctgcgggccctcgaatatggtttgccgcccaccggaggggtaggtataggcattgatcgcctagcgatgcttcttaccggcgcaacaagtattagagatgtcgttttgtttccgacgttgcgaccggaacagacatagg

SEQ ID NO: 305546 - DNA, 210 bp, Unknown
  Bacterial polypeptide expressing nucleotide sequence isolated from the Sargasso Sea
gtagattaatggaagaacaggttgaacgaggtagaggcggagaaaaggatactcatcctttggatgaagattttcttcgtgccatggagtatggaatgcctccaatgggaggagttggatttggaattgatcgaatagttatgttgcttacaggtcaatctaccattcgtgacgttattttatttccaaccatgcgtactgaattttaag

SEQ ID NO: 305547 - DNA, 373 bp, Unknown
  Bacterial polypeptide expressing nucleotide sequence isolated from the Sargasso Sea
gaaaggtgatgatgaagcaatgtttattgatatggactttattaaatctttagagtatggaatgccccctacatctggaattggaatcggaattgacagactggttatgcttatgactgataaaacttcaattcaagaagttctattttttccccaaatgaaaccgataaaaaaagaacctgatatttccgaagatgcaaaggttatttttaataggttaaaaaatattgagcaaattcttttagctgactttaaatcagaatttgatttatcaaataagaaatgggataaagttttaaaagagcttaggggaaatgatttaatagatatatttaaatctgatgatggaagtttattcatcaaacctgtttaa

SEQ ID NO: 305548 - DNA, 679 bp, Unknown
  Bacterial polypeptide expressing nucleotide sequence isolated from the Sargasso Sea
ggcttacgttgattatgaatcaataatgagattagttgaagaaatggtttctggggcctgtttagaaataaatggttcatacgaccttgattacggagatgaaatcggaataattaatttaaagccaccatggaaaagaattgaactgaaagaagcaattttaaaattttctggatttgattttatgtcaataaaaaatatagatgaactgtcagcaaaaatgaaagaaatgaatattcacgttgaacctaattcctcatgggcatcaatgattgataaagttatatctgacaaagttgaacctaatttaatacaaccaactttcttgattgactacccagtagaaatgtctccacttgctaaaagaaagtctgctggtggtgatattgttgaaaggtttgaagctttcgtcatgggttctgaattggcaaatgctttttcagaattaaatgacccaattgatcaaagagaaagatttgaagaccaagaaaaaatgagaaaaaaatttaatgatgaagaaatggatagacttgaagaagatttccttgtagcaatggaacatggaatgccaccaactggagggcttggattaggaattgacaggctaattatgttgctaaataaaaaaacaacgattagggatgtagttttattccctcaattaaaatccatagactaa

SEQ ID NO: 305549 - DNA, 699 bp, Unknown
  Bacterial polypeptide expressing nucleotide sequence isolated from the Sargasso Sea
gatgacagaacaacaagtacaacagcaagaagaatcccaactcgttgcggctcgaagagcaaaaatgcagcgatggatcgatgactacaatgtctatccttggggaaaccgcgttgatggtctggcttcactcgcagaagccagagctcaattcagccaagaagcacatgatgcttctaaggaagagggcgggaaggatgagcgaccccgggtgaaagttgcaggaagatgcattcaacacagagcgatgggcaaattgactttccttgtcattcgtgatgaaacaggcgacttacaaatcagttgctcaaaggcggccttgccaatggagcaattcaaagttgcgagtaaactcgattatggcgacatcatcgttgctgaggggcctattggggctacacagaagggtgaaatctgcgtttgggcagaatcatttgaactttcgtgcaagtcactcgtgccgccacctgaaaaattccacggcattagcgacgctgaacttcgttaccgtcagcggtacgtcgatatgtatacgaatccagaaactattgacacctttaaaaagcgttcagacattattcgagcaattcgttcgtacatggaaacagatgcgttcgttgaagttgaaactccaatgatgcaaccgcttgctggtggcgctgcagcaagaccattttcaacacatcacaatgcactcga

SEQ ID NO: 305550 - DNA, 610 bp, Unknown
  Bacterial polypeptide expressing nucleotide sequence isolated from the Sargasso Sea
attaaagccattacccctaccaaaggaagatagggaaggtaatttatatgatgaatttaatgatcccgaacttaggtttagacaaagatatgttgatttaattgtcaattcgggagttaaagaaacattcattaaaagaacgttaataacaaatagcattcgagaatttttaaatcaaagagaatatcttgaggttgagaccccaatcctacaaccaatccccggtggagcaactgctagaccttttttgacacatcataatgcactaaatattcctttatacctaagaatagcaaacgaattatatttaaaaaggcttatcgtgggtggatttgaaggagtatacgaattcgcaaaagatttcagaaatgaaggaatggatagaactcataatccagaatttacaatacttgaactttacgtttcgtataaagattataattggatgatggatatgactgaacgacttttagaaaaagtatctatagattcaacaggaagtactaaaataaaagttgataataatattattgattttaaagcaccatataaaagaatttcaatttttggtgctataaaaaaatttacaggagttgatatatctaaaatg

SEQ ID NO: 305551 - DNA, 648 bp, Unknown
  Bacterial polypeptide expressing nucleotide sequence isolated from the Sargasso Sea
aatgactgatgacaaaaaaaatatcgaaaatacaatcttagaggaaagaagacaaaaacttgaacagcttcgtgataaaggtgatgcctatagcaactctttcaaacctaaaaatactgcaaaagcaataattgaagcttttggagagaagacaaaggatgagcttgtatcagagaaagtaaaaaatatttcaattgcgggaaggatcgttctcaaaagagttatgggcaatgcaagcttcgcaacattacgagatggttctggagatattcagatttatgtttctaaaaataatatcgaagagtcaatttatgccgattttaaaagttgggatcttggagacataattggtgtatctggctcattatttagaacaaaaacagatgaactcacagttgaagtttgggatttagagatgatcactaaatcattgagaccaatgcctgaaaaatttcaaggactcaaagatattgaagcaagatatagacaaagatatcttgatcttatgtctaacaaacaaacaaaagaaacttttatcaaaagaactaaaattattgattctataagatcaaaaatgaatgaaaaagactatcttgaagtcgaaactccaatgatgcaccccattgcaggtggcgctgtagcaaaacc

SEQ ID NO: 305552 - DNA, 832 bp, Unknown
  Bacterial polypeptide expressing nucleotide sequence isolated from the Sargasso Sea
ttatcaaaaagcattaggccgcttccaatagttaaagaaaaagaaggggaggtctttgatgcttttaaggataaagaattaaggtatcgtaatcgtcatttagatttaatagtcaatccagagactagagatgtatttaggaaaaggacagaaattatatctgatatcaggtcaactcttgattcaaagcaatttttggaggtagagacacctgttttacagccaatttatggaggagctaatgctaggcctttcacgacatatcacaatgcattagggcagaaattatttcttagaattgccgatgaactttatctaaaaagattaataattggaggatttgagaaagtatacgaaattgcaaaggactttagaaatgaaggtatggatagaagtcataatccggaattcacaatgcttgaattttactgggcatatgcagactataatgattgcatggttttagttgaagagctgataagaaatgctgcaaaaaaagttggaaacttatcaatcaagtggggagaaagtgatatagatttgtcaaaaaaattcgaacgcaaaacattttatggattattgaatgaagaaatcggtttggatatttcttcattggatgacaatggtctttttgatgtatgtaaaaataaaaatttagaaatagataaaaatgcaaatactgggcaaatgttggatagcttgatgagtaatttgattgagccaaagctaattaacccaacatttgttatagattatccaaaatctatatctcctcttgcaaaattaaaacgagatggtagtcaggatattgtgaaagatttgaattatttat

SEQ ID NO: 305553 - DNA, 189 bp, Unknown
  Bacterial polypeptide expressing nucleotide sequence isolated from the Sargasso Sea
atcaggttgcagcaaaagattcaggtgataaagaggcaatggattatgatcatgattacattactgcattagagcatggaatgcctcctgcagtaggcgttggaatgggagtggatagattggtaatgttattgactaatcagtcctcaataagggatgttttgttatttccacaacttaagtcttaga

SEQ ID NO: 305554 - DNA, 670 bp, Unknown
  Bacterial polypeptide expressing nucleotide sequence isolated from the Sargasso Sea
tatgcttgaattctatgaggcatatggatctttggacagaacaactcgatttgttcagaaattagttcaagacagcatttctgcagtgaatgattcactaagcatcatttatgaagataaggaactcaatttagagagtgactttgaggttaaatctttaaaagatttagtgcaggaaaaattaaagatggcactagatacagaaaaacaaatctttgatgccgctaaaaaaactggattgaaaataaaaagtgattgggggtggggaaaaattcttttagaactttttgaagaacatgttgagaaaaatttatggagcccgacgtttgtaaaagactatccatatgaagtatcaccattatcaagaagaaaaaatgaaaataaggatttcacagatagaattgaactatttatagcaggcagagagtttgctaacttcttctgtgagttaaacgacccgattgatcaagaagaaaggtttgatatgcaactgaaacaaaaagatttgggtgatcaagaggcaatggcttttgatgatgattatatcaacgcattaaagcatggaatgccaccagcgactggtgttgggttaggcattgataggcttgtgatgttagccacaaataaaagttctattagggatgttgttcttttcccaaccttgaaatag

SEQ ID NO: 305555 - DNA, 434 bp, Unknown
  Bacterial polypeptide expressing nucleotide sequence isolated from the Sargasso Sea
tatgactgaccaacaaactgacgataacaaattgattgcagagcgccgtgctaagttaagcgctattcgtgagcagtgccgtgcaaacggtttccctaacagcttccgtcgcgaaaattacgctgacgaattacaagctaagttcggtgaattcgataaagaaacgctgcaagagcagggtaataaagtaagcatcgccggacgtattatggcaaaacgcggtccatttatgttgcttcaagacatgactggacgtattcaggcctatgctgacaaagatacgcagaaagtgcttaaagccaaatatggtgcgttagatattggcgatattattggtgttgccggtgatttgcacaaatctggcaaaggcgacttatacgttaatatggccgaatacgagctgctgactaaagcactgcgcccgttgcccgaga

SEQ ID NO: 305556 - DNA, 760 bp, Unknown
  Bacterial polypeptide expressing nucleotide sequence isolated from the Sargasso Sea
gatgacagacgaaaaagatcttattagagaaagaaaaaagaaattagaaaatatttcagaattctcgccagcatatccgaataaagtaattaaatctgacacaaccaggtctttaataaatacttgctctaacgaagacaaaaagagtctagaagaaaaaaatattttaacgaatatatgcggtagagtcatgactataagagaaatgggtaactcagtttttgcagatctgcatgatgaatacggaaagattcaaatataccttaacaagaaaaatttagatgaaatatcacagaatatgtttaaaaacttagatcttggagatatagttggaatatcaggtataatatttaaaacaaaaacccaagagcttacaataaatgttgactcttttttgattctgtcaaaatgccttagaccgctcccggaaaagtttcatggtattgctgacgttgaaataaaatacagacaaagatatttagatttaatgacaaattttgaaacacgcattcatttcaaaaaacgctctaagattataaaaataatcagaaattacttcgatgagagagattatattgaggttgaaacaccgatgatgcatataataccaggaggcgctaatgctaaaccatttattactcatcacaattcattagacatggatctttttctaagaatagcacctgaactttttttaaaaagatgtattattggtggctatgaaaaagtttttgaaataaatagaagttttagaaatgaa

SEQ ID NO: 305557 - DNA, 601 bp, Unknown
  Bacterial polypeptide expressing nucleotide sequence isolated from the Sargasso Sea
atgataatcaaatcgaaagaagaaaatattccagatatagatcttaccccgccatggaaaaggcttgatttgcgcaaaactcttattgataaggtaggtattgattttcttgaaattaatgaaagaaatttattagttcaaaaaatgaaagaattaaaaattcatgtagatgaaaatgctacatggggtagattacttgacaaggtcatatcttcatctatagagcctgatttaatccaacctcattttctcgtagattatcctcttgaaatgtctcctttagcaaagaaaaaacctggttctgagaatgtagttgaaagatttgaggcttttgttatgggctctgaattagctaatgcatttagtgaactaaatgatcctattgatcaaagaaaaagatttgaagatcaagaaaaaatgagagccatacaaggtgatcttgaagctgatcgcttagatgaagattttttagttgcaattgagcatgggatgcctccaactggaggtcttgggttaggtgttgacagattgacaatgcttttgtctggggaatcttctataagagagattctgctttttcctgctatgaggaagcaataat

SEQ ID NO: 305558 - DNA, 236 bp, Unknown
  Bacterial polypeptide expressing nucleotide sequence isolated from the Sargasso Sea
ttcagagttgaatgatccagatgatcaggctgaacgttttgaagatcaagtcaaagccagagatgggggagatgatgaagcaatgttttttgatcaggattatatagaagcacttgagtatggtatgcctcctaccgctggtttgggagttggtatagatagacttgtgatgcttttctcaaatcaagcgtcaattcgtgacgtgctactttttcctcacatgaggtctaagtaag

SEQ ID NO: 305559 - DNA, 512 bp, Unknown
  Bacterial polypeptide expressing nucleotide sequence isolated from the Sargasso Sea
catgtctgaacaaaacactcctattgaagaacatcaagacgttaataaactgattgctgagcgaaaacataagctggctggcttgcgtgaactgggtaacccatttccaaacgactttcgccgtgatgcgacttccgatcagatccatgcccagtacgagcacctgagcaaagaagagctggaagagaaaaaaatccgtgtcacagtagcaggccgtattatgctgcgccgtatcatgggtaaagccagctttactactattcaggacgtgggtggcaagttgcaattgtatgtagcacgcgacagtctcgcagaaaatgtctacaacgaaggctttaagaaatgggatttaggcgacattatcggtggtagcggtgtgttgtttaaaactcagaccggtgagctgaccgtctggctggacgaaagtcgtctgctgacaaagcgctgcgtccactgccggacaaattccatggttttaacgatcaggaagcttggtaccgtcaacgttattt

SEQ ID NO: 305560 - DNA, 179 bp, Unknown
  Bacterial polypeptide expressing nucleotide sequence isolated from the Sargasso Sea
aaaaggcgatgaagaggcgcagccagtggacgaaaatttcatacgtgcaatggaggtgggtatgccaccaacaggcggtgtgggaatcggtattgataggctagttatgcttctcacaaacaatcgttggataagagacgtaatatttttccctacaatgagagaagaaaaacgttaat

SEQ ID NO: 305561 - DNA, 681 bp, Unknown
  Bacterial polypeptide expressing nucleotide sequence isolated from the Sargasso Sea
aatggatactgaaaacataagtggcgaaaaagccttaattgaagagagacggaaaaaattaaagcatcttagagatagaggcggtgcttatagtaattcgtttaaacctcagaataatgcttttaaacttcatgaagaatatggagagttttcaaaagaagatctagcagagaaggatgttaaggatatttctattgcaggacgaattgttttaaaaagagtaatgggtaacgcaagtttcgctacattacgtgatgcgtcaggtgacatacaaatttatgttacaaaaaataatgttgatgaaactgtttatgaagattttaaaacctgggatttaggtgatatcgttggtgtctctggggcattatttaaaacaaaaactgatgagctaacaattgatgtatgggatctagaaatgattactaaatcattaagacctatgccagagaaatttaaaggccttacagatattgaagcaagatataggcagagatacttagatttaatgactaataatgaaactaaaaatgttttcatcaaaagaactaaaatcattgactctctgagaaaaaagatgaatgaatgtgattatttagaggttgaaactccaatgatgcatcctcttgctggcggagctgttgcaagaccttttataactcaacataatgctcttggacagga

SEQ ID NO: 305562 - DNA, 1447 bp, Unknown
  Bacterial polypeptide expressing nucleotide sequence isolated from the Sargasso Sea
ttgaaaaaacttgaaattttaaatgaaaaagggattgatccttatccaacagatttcaagcctacacataatacaaaggattgccttaatttgttggacgaaactgaaaaaaaagatttagaaaaaagtaatgacatacactctgcaggaagaattactgcaataagaaaaatggggaaagctgtttttattgatatacttgatgaagcaggaaaaatccaattattagctagaaataatactattgacgacgcaacagaagagttaatagaactattagatataggagattggctaggggtaatcggccctgtgtttcgcacaagaagaaacgaacctactattcaagttaattcgcttaaaatgttatctaagtccattaaaccactgcctgaaaaatggcacggattaaagaatgtagaaacacgatatagacaacgatatttagatttgattgctaacagagatgtattaaatattgtaaagcaaagagatagcatagttttcgaactaagaaaatttatgaaagaactagggtttgtagaagttgatactccaattttggttcctattcctgcaggaggaatggcgcatccttttaaaacgtatcacaatgctttagacagagagttatatttaaggatagcaacagaattgtatttaaagagaatgatagttggtggaattgaaaaagtttttgaaattggtagattatttagaaatgagggaattgatagcaatcacaatcctgaatttactactatggaatcatacgaagcatatgcggactacaatgacgtgatggagatggtagaaaacttgtttgcccatatagtttttaatttaaaaggaacctacgaaattccttatggtgaaaacaaattaaacttcaaacctccatggaagcgaatgaacttaagacaaagtttgattgaaaaatcagggattgattatgaagaatgtaatgatcttgaagttttgaaggaaaaaatgagcaacataggcattgatgttcgaaatcaattaagctgggcgggactgatggataagttaatttcagagaaactagaacctgatcttattcaacctacttttttaattgattaccctttagaaatgtcaccattagctaagcgatcaaaagataatcctaatatagttgagagatttgaaggatttatagctggaatggaagtttgtaatgcctttactgagctaaatgatcctgtagatcaaagaactagatttgaaaaccaagaaaaattaagagaagaatttcccgaagaagaaagagatcggttagatgaagattttttgatagcattagaacacggtatgccaccaactggtggagttggtattgggattgatagaatggttatgttaattttaaaccaaccatctattagagaagttattacttttcctcagctaagatctttatgat

SEQ ID NO: 305563 - DNA, 727 bp, Unknown
  Bacterial polypeptide expressing nucleotide sequence isolated from the Sargasso Sea
atgaacgatcatcttgatcaacgtcaaatcagggttaccaaactcgaaacacttcggggaaaagggatcaatccctatccttattcttttcagaacagtcacacccttccagaacttctggaaataggtaagatcctggttgaaagccaggaagaggtttcgatctccggaaggttgatggcactccgtggcaaggggaaagcggtgtttgcaaacatccaggcccaacatcaacggttgcaaatttacatccgcaaagacgaggtgggagaggattcgttcgatgtttttggaatgtgtgacattggcgatttcctgggattgcagggaacgatgatgcataccaagactggggaactgactcttagagtaaaaaatctgcagattcttaccaaagccgtaaggccaatgccggttcccaaggtacaggagaaggatggagaaaagatcattcatgatgaagtacgggacaaagaattcagataccgacaaaggtatgtggatttgaccctcaatcccgaggtcgcaaaggttttccgtcagcgtaatctaatgatgcagaccattcggaactatctcaacgaacaggggtttctagaagtcgaaactcctacccttcagcctgtttatggcggcgccaatgcaaccccttttcacacccatcacaaggcgctggaccagacttttttccttcgtatcgcaaatgaactttatttaaaaagatgat

SEQ ID NO: 305564 - DNA, 169 bp, Unknown
  Bacterial polypeptide expressing nucleotide sequence isolated from the Sargasso Sea
tctggtgataaagaagcaatggattacgatcatgactatataactgcgcttgagcacggtatgccaccagctgttggagtgggcttaggagtcgatagattagtaatgttgctcaccaatcaatcttcaataagagatgttttattatttcctcaattaaaaagttaat

SEQ ID NO: 305565 - DNA, 892 bp, Unknown
  Bacterial polypeptide expressing nucleotide sequence isolated from the Sargasso Sea
ctgggcggcgcttcgcccgtcatttatcactcaccacaatgcgctggacatgccaatgtacctgcgtatcgcgccagagttatacctcaagcgtttagtggttggtggttttgagcgtgtgttcgaaatcaaccgtaacttccgtaacgaaggtctgtcgccacgccataacccagaattcactatgatggaattctatatggcctatgctgactacaaagatctgatggacttaaccgaagaactgttaagctctatcgcgattgaactgttaggcagcgcgcaaatgccatacggcgagcacactgttgatttcggtggcccatacgctcgtctgagcatgttagaagcgattcagaagtacaatcctgacaacgcgactatccaagccatgacctacgagcaagtgaaagatcttgaattcatgcgtgaactggcgatcagcctaggcatcaagattgagaagttctggacctgtggtcagctattagaagaaatcttcggtgaaaccgctgaatggcagctaatgcaaccgactttcatcactggctacccagcggacatttcgccactggcacgtcgtaacgatgacaaccacttcatcaccgaccgttttgaattcttcatcggtggccgtgaagtagctaacggtttcagcgagttaaacgatgctgaagaccaagacagccgctttaaagcgcaggttgatgcgaaagatgcgggtgacgacgaagccatgttctacgatgcagactacatcactgcactggaacacggtttaccaccaacagcgggtcaaggtatcggtatcgaccgtttagtgatgctattcactaacactcacactatccgtgacgtgatcctgttcccagcgatgcgcccacaggcctaa

SEQ ID NO: 305566 - DNA, 875 bp, Unknown
  Bacterial polypeptide expressing nucleotide sequence isolated from the Sargasso Sea
aatggaaaataaaagtttaaaacaaattatagacaatcgacttgaaaagttaaaaaaaatccgtgaattaggaatagagccttacgcatatgactatgatagctctcatcatacatcagaaataaatgaaaagttaattgattctaaagtttctttagcaggaagagtcatgtctcttaggaaaatgggcaaagcatcatttgctaatattcaggaccaagaaggacgcatccaattttatattgcaagagacgacgttggtgaagataattataatttatttaagctaacggatataggtgattttgttgggattgagggcaaggtttttaaaactaaaacagatgcattaactattaaagtttcccacctaacaatcttatctaaaaacataaagccaatacctgatgttaaagaaaaagatggtgaaaaatataatttagtttcagataaagaattcagatatagaaaaaggtttcttgatttaattattaatcctgaaacaaaaaacaattacgtaaaaagatttaaaataattaactctattagatcgtttttaaatgatcatggatatattgaggtagaaacacctgtcttgcaaccaatatacggaggggcaaatgccaagccatttaccacacaccataacgcattagatcaggatttttaccttcgtattgcaactgagttatatttaaagcaattgattgtaggtggatttgaaaaggtttatgaactttctaaagattttagaaacgagggcatagataggagccataatcctgaattcaccatgctagaattttatcaagcttattctgattataattttatgatggattttgttgaacaaatgtttaaaaaagttgttaagg

SEQ ID NO: 305567 - DNA, 964 bp, Unknown
  Bacterial polypeptide expressing nucleotide sequence isolated from the Sargasso Sea
aatgtccggtgaaaaaaaatacgatttattcaaattgctagatattggcgattttataggaattgatggaatcgtttttaaaactaaagttggtgaggtatcagtaagggctaatgactttacaatcctaagtaaatcgataagaccactacctgtcgttaaggaaaaagatggtcaagtttatgatgcttttaataataaagaacagagatatagaaaacgatatctagatttaattataaatccaaaggtaaaagaaattttcataaaaagatctttaattattaaaactataagagactttttagatagtaggaatttcttagaggtagaaacccctgttcttcaacctttatatggaggagcaaatgctagaccatttgttactcatcataatgctttggatcaaaaactatttcttagaattgcagatgaattatacttaaaaagattaattattggaggatttgaaagggtttatgaaatctctaaagattttagaaatgaaggaatggatagaaatcataatcctgaatttaccatgctagaattttactgggcttatgctgattatgaagataatatgctaatagtcgaagaaatgataaaagaggttgcaaaaaaaatttcagtcaaaaaaatcaaatggggaaaatcattaattgatattacaaagccatttaaaaagcgaccaattatgcaacttctttcagatgctgtgggcgaagatgtttcccaaaaagatgaaagctctttaaaaaaaatctgtgatagaagaaatattgacactaataataaaaattatggtcaattaattgatgagatgatgagtgaattagttgaacctaatttaattgagccgacttttgtaattgattatccaaaagccatctcccccttagcaaaaaaacatagaaataacgatccagatttagtcgaaagatttgaactatttattggagga

SEQ ID NO: 305568 - DNA, 738 bp, Unknown
  Bacterial polypeptide expressing nucleotide sequence isolated from the Sargasso Sea
cttgtatctgaggattgcaacagaattgcatcttaaaagacttgtggtgggtggatttcaaagggtctatgaacttggaagaatttttagaaatgagggaattagcactagacataatcctgaatttacttctgttgaaatttatgaggcctttgcagattatttcgacatgatggatttaacagaaaaattactttcttcagtttgcgaaaagatttgtggatcgaccaaaattaattatcaagagcaagaaatagatttgcaacctccttggagaagggccacgatgcatgatttagttaaggaatttactggaattgattttgaattatttggagacaatgctgatgatgctaaggctgaaatgagtcgagaggggcttcaagtgcccgacaaggcttatactgttggaagcctattaaatgaagcttttgaacaagcagtagagcctgaactgattcagcctacatttgtgatggattatccaattgagatttctccattggctagaaaacatagaactaaaaaaggtttagtggaaagatttgaacttttcattgttggtagagaaactgccaatgcttttagcgaattaattgaccctattgatcaaagagaacgtttacttttacagcaagcgaaaaaagaagcaggtgatcttgaggctcaaagcttggatgaggattttatcaatgctcttgaagtcggaatgcctccaacaggaggtctcggaatagg

SEQ ID NO: 305569 - DNA, 444 bp, Unknown
  Bacterial polypeptide expressing nucleotide sequence isolated from the Sargasso Sea
gattaggtaaggagacagataaaagttggggaacaggtagattattactggaaatatttgaggaaaccgttgaggaaaaacttattaatccaacatttgttacagagtatccagtagaagtttcacctctttcaagaagaaaccctgacaacccagattttgcagatagatttgaattatttattggtggaaaagagtttgcaaatggtttttgtgagcttaatgatccagacgatcaggcttcaagatttgaagcacaggccgctgccaaagattctggagacaaggaagcaatggattttgacaaggattatattacagcgctggagcatggaatgccgccagcagttggagttgggcttggaatagatagattagtaatgcttctaactaatcagtcatctataagagatgttttactattcccgcaattaaaaaattaat

SEQ ID NO: 305570 - DNA, 127 bp, Unknown
  Bacterial polypeptide expressing nucleotide sequence isolated from the Sargasso Sea
tgagatcggtaacggcttcagcgagctgaacgatgccgaagatcaggcgcagcgtttccaggatcaggttaacgccaaagatgcgggtgatgatgaagcgatgttctacgacgaagactacgttacc

SEQ ID NO: 305571 - DNA, 985 bp, Unknown
  Bacterial polypeptide expressing nucleotide sequence isolated from the Sargasso Sea
taccgccagcgttatgtggacttgatcgttaacgaggacactcgaaagacgttccagatccgcgccaaaattgtggccgggattcgcaactttctggtacaaaaagatttcgtggaagcggaaacacccatgctgcaggtgattccaggcggcgcgactgcacgtccgtttattactcaccacaatagcttagacatggacatgtacttgcgcattgcgccggaactgtacttgaagcggttggtggtcggcggtttcgaaaaagtgttcgagattaaccgtaacttccgcaatgaagggctctcgacccggcataacccggaattcaccatgctggaattttaccaagcgtttggtgattaccacgacctgatgaacctgaccgaagaaatgctgcgcaccttggccgagacggtgttgggcagcacggatgtggcttaccagggcgatgtgtttgattttggcaaaccttttacccgcatgacggtgttcgattccattttgcattttaatcctgatattgatgccgccaaattggcagatattgagggcgctcgagagatcgccaccggcttggggattccgcttaaagacggttacggcttgggtaaggtgcagatcgagatttttgagaagacggtggaacaccgcctgaaagatcccacctttattaccgagtatcccaccgaggtttcgccgctggcgcgtcgcatggacgataacccctttgtgacagagcggtttgaattttttgtgggtggtcgtgaaattgccaacggcttctccgagttgaatgatgcggaagaccaagccgagcgtttccgtcagcaggtggaagaaaaagccgcaggtgacgacgaagccatgttctacgatgaagattatgtggtcgcgcttgagcatggcctgccaccgaccgctggtgagggcatcggcatcgatcgtctggtaatgttgtttaccgaatgcaccgtccattcgtgac

SEQ ID NO: 305572 - DNA, 868 bp, Unknown
  Bacterial polypeptide expressing nucleotide sequence isolated from the Sargasso Sea
attcctggcggagcagcagctcgtccgtttattactcatcataatgctttagacgtccctctatatttgaggatagcaaacgaactttatttaaaaagactcatcgtgggtggttttgaaggagtttatgagtttgctaaggattttagaaatgagggtatggacaggacacataatcctgaatttacccaaatggagatttatgttgcttacaaagactacatatggatgatggaatttactgagcaaatgttagaaacaatttgtttagaagttttagggactacagagcttcagattggagataacatggtaagttttaaaaagccattcaaaagaatttcaatgattgactcaattaaagagcatactggaattgatattgccaacatgaatcaagaacaattaatagaaacttgtaaaaaattggaagttccatttgacagctcaatgggtaaaggcaaattaattgatgaaatttttggcgaaaaatgtgaaggcaattacattcagcctacatttattactgattatcctgttgagatgtctcctttatgcaaaaaacatagagacaatccgcatcttacggaaagattcgagctaatggtgaatggtaaagaattagccaatgcttattctgagttaaatgatccaattgatcaaaaagaaaggtttgaacaccagctaaaattagctgaaaaaggagatgacgaagcaatgtttattgatcttgactttgttagagctctcgaatatggtatgcctccaacttcaggaatgggaattggaattgatagattagtgatgtttttgtgcaatcaaccttccatacaggaagtcttattttttcctcagatgaaacccgaag

SEQ ID NO: 305573 - DNA, 985 bp, Unknown
  Bacterial polypeptide expressing nucleotide sequence isolated from the Sargasso Sea
gaattctcaatcgctggtcgaatgatggcaaaaagagtcatgggaaagtccagtttctctcgaatcaaagatggaaaaggatcgatccaagtttttttgagtaattctgatctgggcgatgaggcttatgaaagctttaaaacaatggatgttggagacatcgtttgggtaagaggctcgctctttcgaaccaaaacagatgaattaacactgaatgtgaaggagcttgttcttctcagcaagtctctcaggccattacctgaaaaataccatggtttaacagataccgagattcgctataggagaaggtatttagacctcatgatgtcagaggagagtgctgaggtattcaagatcaggtcaaaagtggttacccagataagatcttttctgaatgatctagatatgatggaagttgaaactccgatgatgcatccgataccaggtggagcagttgcgagaccattcatcactcatcacaatacactcgatcaagatttctatttgagaattgcgcccgaactctatttaaagcgtcttacagtgggtggctttgatcgtgtctatgaaatcaatcgctcatttagaaatgagggagtttctacacagcataaccctgaattcaccatgctagaactatatgttgctcatgaaacgccagattttctcatgaacatgattgaggatatgatgagggcgatttctcaagaattatttgggtctgataagatcgaatatcaaggagaaacgatcgattttgcaggccattttcagaggctcaccatggaggagtcagttttaaaatacaatccagaattagacaaagaaaaaatcagagatgctgaatatctgagatcatttgctgaaggcatagatatctcagtcgaaaataatgctggcgctggaaagattttatttgagatttttgaaaagacagtggaacatcaactccaacaacccacttacattacgtcttaccccagag

SEQ ID NO: 305574 - DNA, 865 bp, Unknown
  Bacterial polypeptide expressing nucleotide sequence isolated from the Sargasso Sea
gtcctggtgacgataaaaactttatataacgaagttttcaaaaaactaattgatttaggtgattttgttggaattgaaggaactttgtttacgacacaagttggtgaaaaatctgttagagtatctaatttaactttattaagcaaaacacttcgtccgttaccgttaccaaaaacagatgctgaaggcaatacatttgacgcttttgtggatccagaattgcgttacagaatgcgttatgtggatttagtagttaacccaaaagtaaaagaagtttttgtaaagcgtacaaaattgttttctgctatgcgaaatttcttcaaccaagcgggttacatggaagttgaaactccagttttacaagctattcctggtggtgcagctgctcgtccgttcattacacatcataatagtttagatattcctttgtatatgagaattgcgaatgaattatatctaaaaagattgattgttggtggttttgatggtgtatatgaattttctaaaaacttcagaaatgaaggaatggacagaacacacaatccagaatttacagcaatggaaatttatgtagcttataaagactacaattggatgatggaatttactgaaaacttgttagaacactgtgcaattgaagttaatggtacaccagaaactacttttggagaacacaaagtaagcttcaaagctccttatgaacgagttactatgactgatgctataaaacaatttacaggatttgatattactggaaaatctgaaaaagaattatttgaagccgcacaatctatgggaattgctgttgatgaaactatggggaaaggaaagttaattgatgaaatctttggtgaaaaatgtgaag

SEQ ID NO: 305575 - DNA, 887 bp, Unknown
  Bacterial polypeptide expressing nucleotide sequence isolated from the Sargasso Sea
ctttacaaaattatatccaaactctttcaaacgtaatactaatagccatgatctaagacaaaaatttgataaaaaaactaaagaggagttagaatcagaagaaggaatattttctgtaagcggaagattattaactgtaagaaagatgggtaattcaacttttgctaatctccatgatgactccggtaagatacaactatttttatcaaaaaatggaactggcaaggacatgtataagcttcttgatcacactgatttaggagatattgttggagcgaaaggaagaattttcaaaacaaaaactggtgagttatcaattaacgtcacagaatataacgttctatcaaaatcattaagacctctaccagagaaataccatggactctctgacattgagataaaatatcggcaaagatatttggacttaatgatttctgaggactcgagaaaagtattcaaagatcgtattaatattgtttcgaagataagaaaattctttgaagaggaagcctatttagaagttgaaacacctatgatgcatcctatagcaggaggtgcagcagctaaacctttcgtgactcatcacaacagtttagatatggatttatatttaagaattgctcctgaattatacttaaaaagactaattatagggggatttgaaaaagtttttgaaatcaatagaagctttagaaacgaaggactttctgtaaaacataatccagaatttactatgattgaattctacgcagcctatgaagattacgattatcttatgaattttatagaacgactaattcgatctctgattaactctgttggtttaagtgaatcatttaaatatcaagattttgagatagatacaaaaaaatcattgaaagactgaa

SEQ ID NO: 305576 - DNA, 804 bp, Unknown
  Bacterial polypeptide expressing nucleotide sequence isolated from the Sargasso Sea
aatggataaagataatttaagtggcgaaaaagcattaattgaagaaagaagaaaaaaactagagcagcttagagataagggtaacgcttatggtaattcttttaaacctgagaataatgctgaagatctgcatgagaagtatgatgaattttctaaagaggagctggttgagaaaaaaataaaagatatttcagttgctggccgtattgttttaaaaagggtaatgggcaatgcgagctttgcaactttaagagattcttctggcgatattcaaatatatgttaccaaaaacaatgtagaagaaagtgtatatgaggattttaaaacctgggatcttggagatattgttggagtttcagggaccatttttagaactaaaactgatgaattgacaatagatgtttgggatttagagatgattacaaaatcattaagacctatgcctgaaaaattcaaaggattaactgatatcgaagcaagatatagacaaagatatcttgatcttatgaccaatactgatacaaaagaaatttttattaaaagaacaaaaattattgattccatgagaacaaaaatgaatgagcgtggttatcttgaggttgaaaccccaatgatgcatccattggctggaggcgcagtggcaagaccgtttataactcaacacaatgcttttaggccagatctttacctaagaatagctccagagctttattttaaaagacttctggtagggaggattgaaagggtttttgagattaatagaaagttcagaaacgaagggtttatcactaaacataatcctga

SEQ ID NO: 305577 - DNA, 397 bp, Unknown
  Bacterial polypeptide expressing nucleotide sequence isolated from the Sargasso Sea
actagaaatatttgaggaaaccgttgaggaaagacttgttaatcctacatttgttacagaataccctgttgaagtttctcctctttcaagaagaaatcctgacaacccagattttgcagatagatttgagttatttattggtggaaaagagtttgcaaatggtttttgtgagcttaatgatcccgatgatcaagcttcaagatttgaagcgcaggtcgctgctaaagattctggagacaaggaagcgatggattttgacaaggactatattacagcgttagagcatggaatgcctccagcggttggagtagggcttggaattgatagattggtaatgcttttaaccaatcagtcatctataagagatgttttgctattcccgcaattaaaaaattaa

SEQ ID NO: 305578 - DNA, 775 bp, Unknown
  Bacterial polypeptide expressing nucleotide sequence isolated from the Sargasso Sea
ttcaggaatgagggcgtcagcacccgccacaaccctgaattcacttcagtcgagatctatcaagctttcgctgattacaacgacatgatggatctcaccgaggagctgatcagctcggtaagtcatcaggtctgcggcagcacccagatcaactaccaaggtaccgaaatcaatttggccccaggttggcgccgggccaccatgcatgagctggtgcaagaagccactgggcttgatttcagtggtttcagcagtcgtgaggaagccgcttcggccatgaaggtcaaagggttgcaaacccctgctctggctgattcggtgggccgtttgctgaatgaagcgtttgagcaggccgttgaagaaaccctgattcaacccaccttcgtcaccgattaccccgttgagatttcacccttggcgcggccccaccgcagcaaacctgggctagtggagcgttttgagctcttcatcgttggccgggagcatggcaatgcttttagtgaactgacggatccggtggatcagcgccagcgtttggaggcgcagcaagagcgacgtgcagcaggtgatttggaggcgcagcgcgtcgatgaggacttcttgatggctttggaggtggggatgcctcccactggtggcttggggattggcattgaccggttggtaatgctgctcaccgatagcccttcgatccgcgatgtgatcgcgttccctttgctgcggccagaaagccgtgatgggtccgccgcagtggataatggttccactgagtaga

SEQ ID NO: 305579 - DNA, 739 bp, Unknown
  Bacterial polypeptide expressing nucleotide sequence isolated from the Sargasso Sea
atttcaaatattatcaatgaacataatgatattgaagaaggtattcatacaggcatatctgtaactgttagagggagattattaaatgcaaggtcgtttgggaaattattattctatgacatattagatcaatctggaaaaattcaattacttgtaaattctggtgaaattgaggatatttatctgaggctttttgaaaattttgatattggcgacataattgcagtaaacggagaggtaattaaaactaaaaaaggggagctttcaattaaagtaaaccagtcaacaatactatctaaaagcttaagatcatttccagagaaatggcatggattaaaagataaagaaacaagatttaggcaaagatacttggatttaatagtaaaccccgagtcaaaaaaaattctagaaactagatcaaaggtaataaagcttataagagtatatttacatgaaaatagttttgtagaggtggaaactccaatattgcaaactaaagctggtggtgcgatagcaaagccctttacaactcaccataatgctttaggtttagacatgtatttaagaattgcaccagaactttatctaaaaagactaattattggtggatttgaaaaagtatttgaattaggaaaaattttcagaaatgaaggtattgatcaaacacatttaccagaatttacgatgttagagagttatcaggcatacgttgatgcaaattctgttatggacatggttg

SEQ ID NO: 305580 - DNA, 715 bp, Unknown
  Bacterial polypeptide expressing nucleotide sequence isolated from the Sargasso Sea
tagaaatgaaggtatatcaactcaacataatcccgaattcactatgcttgaaatttatgaggcttattctgattttaacgatatgatgaacttgattgagaagcttatattaaattgtctagaagatcttaatttagctaaaactatttcctatcaaaatcattctattaattttcaacttccttgggagagggtcagcatgattgagtggacaaaaaactttttaggttttgatgttttgaacaataagaaagagctgttcaattatgctttgaaaaataatatagaacactttgaacaggaaggaagagttatatcggaagtttttgaaactaacttttttaaagaaaaatataatcctatttttgtttacgaattccctattgatatttcaccacttgctagaagaaatgataaaaataaattgattgctgatcggtttgagctttatataaacggtaaagaaattgcaaatgctttttcagaattaaatgattccgatgatcaaaaacagagatttgaaaaacaattaaaattaaaagaacagggtgatgatgaagcaaacgatatggatcttgattatgttgaagctttatcatatggcttacctccgacagcaggtgctggtctaggtattgatagacttgtgatgctgctaaccgattctccatctattagggacgttatattgtttccacatttgagagacgaatga

SEQ ID NO: 305581 - DNA, 598 bp, Unknown
  Bacterial polypeptide expressing nucleotide sequence isolated from the Sargasso Sea
ttaactactcctgggaggcgcgcgactcttatgattttgatagaagaacatgctggtttagatgtttctcttgatacccctatagaagaccttcgtagcatttgcaaaaagctagatatagaagtcttgcccgcttggggagctggaaaactacttcttgaaatatatgagaaggcggttgaaccgaatttatggggaccttgctttgtcacagaataccccagtgaagtttcccctctttcaagagagcaccgtcagaaaccaggatataccgaaaggtttgaagcaattgttgcaggcagggagatcctaaatgggttctctgagcttgttgatgctcaggagcaacagaaacggtttgaggaacaactagcgcaaaataaagctggagatgaagaagcgatggttgtcgactcagactatgtccgtgcgttggagtatgggcttcctccaacaggcggtattggcataggaattgatcgcttggtgatgctattagctgatgttcaaacaatccgtgatgtgatacttttcccgacgcttcgacccgagcaacaaaccagcccacaaagcgaaccggactcacttaaggactagg

SEQ ID NO: 305582 - DNA, 679 bp, Unknown
  Bacterial polypeptide expressing nucleotide sequence isolated from the Sargasso Sea
attgaattctatagcgcatatgaaaactatgaatatttgatgcaaactattgaagacctatttaaatcactgatattgaatcttaatatcaacaaaaaatctaactatcaagactttgaaatagattattcaacgcctttcaaaagaattacttttcatgagtgcattgcagaaaatgctgataattttgataatactcagatcaatgatctaagctatttaatgaaatattgtctcgagaataacttgaaaactcaaaatgaaacctccatagaaattttacagcttgaaatatttgaaaaaatgatagagaaaaaattaatttctccaacatttgttacacattatcctaccaaagtaagcccactagctagggctacggatgacaatcctgatttaactgagagatttgaactttttgtagcaggaagagaaatagcaaatggtttttcagaacttaatgatccattagaacagtcaaaaaggttttcaaatcaactatcagtatcagatgatgaaaaaatgaaatatgacgaagattttataaaagcaatggagtatggcatgccgcctactgccggagccggcattggcattgatagattaatcatgctattgacagacaagtcatctattagagatgtattattatttccacacatgaaacctaaatcataga

SEQ ID NO: 305583 - DNA, 898 bp, Unknown
  Bacterial polypeptide expressing nucleotide sequence isolated from the Sargasso Sea
aatggaaaataaaagtttaaaacaaattatagacaatcgacttgaaaagttaaaaaaaatccgtgaattaggaatagagccttacgcatatgactatgatagctctcatcatacatcagaaataaatgaaaagttaattgattctaaagtttctttagcaggcagagtcatgtctcttaggaaaatgggcaaagcatcatttgctaatattcaggaccaagaaggacgcatccaattttatattgcaagagacgacgttggtgaagataattataatttatttaagctaacggatataggtgattttgttgggattgagggcaaggtttttaaaactaaaacagatgcattaactattaaagtttcccacctaacaatcttatctaaaaacataaagccaatacctgatgttaaagaaaaagatggtgagaaatataatttagtttcagataaagaattcagatatagaagaaggtttcttgatttaattattaatcctgaaacaaaaaacaattacgtaaaaagatttaaaataattaactctataagatcgtttttaaatgatcatggatatattgaggtagaaacacctgtattgcaaccaatatacggaggggcaaatgccaagccatttaccacacaccataacgcattagatcaggatttttaccttcgtattgcaactgagttatatttaaagcaattgattgtaggtggatttgaaaaggtttatgaactttctaaagattttagaaacgagggcatagataggagccataatcctgaattcaccatgctagaattttatccagcttattctgatttatattttatgatggggatttgtgaaacaatgtttaaaaaagttgttaaggaccttgatatgaaaaaaatatca

SEQ ID NO: 305584 - DNA, 540 bp, Unknown
  Bacterial polypeptide expressing nucleotide sequence isolated from the Sargasso Sea
atcctaaatcaatgagtcccctaacaaaagagcacagatcaaatcctaatctcacagaaagatttgaattaattgtgaatggaatggaaattgcaaatgcatattcagagcttaatgacccaattgaccaattaaaaagatttgaagatcaatttgaattaagtaagaaaggtgatgatgaagcaatgtctattgatatggactttattaaatctttagagtatggaatgcctcctacatcaggaattggaattggaattgatagactagttatgcttatgactgataaaacatcaattcaagaagttttattcttccctcaaatgaaaccaataaaaaaggaacccgatatttccaaagatgcaaagattatttttaatagactcaaaaatattgagcaaattcttttagctgactttaaatcagaatttgatttatcaaataagaaatgggataaagttttaaaagagcttaggggaaatgatttaatagatatttttaagtctgatgatggaagtttattcatcaaacctgtttaat

SEQ ID NO: 305585 - DNA, 533 bp, Unknown
  Bacterial polypeptide expressing nucleotide sequence isolated from the Sargasso Sea
catgaccgaacagaacaacccggccgaatcgagtaccgcggccgccgtgccggcgcaggacgacaacaagatcatcgccgagcgccgcgagaagctcgcggagatccgccagcaaggcgtcgcgttccccaacgattttcgcccgacgcaccatgccggtgatctgcaagccaagtaccgcgagctggagcaggctgctctggaagcggaaccggtgcaggtggccattgcgggacgcatgatgctcaagcgcgtgatgggcaaggccagctttgccaccgtgcaggacagcaccgaccgcatccagttctacatcagccgcgacgccgtgggcgaagacgtctacgccagcttcaagaagtgggacttgggcgacatcgtggcggcgcgcggcacgctgatgaagacgaagaccggcgaactgtcggtggctgtgacggagctgcgcctgctctcgaagagcctgcgtccgctgccgggcgactactacggcctggctgaccaggagcagaagtaccgccagcgctacgtcg

SEQ ID NO: 305586 - DNA, 778 bp, Unknown
  Bacterial polypeptide expressing nucleotide sequence isolated from the Sargasso Sea
tcccgagttgtatttaaaacgattggtagtgggaggtttagaaaaggtttatgaaattaataggaattttagaaacgaaggtctatcaaccaagcataacccagaatttaccatgcttgaattttatgaggcttatgcagattacgaagatcaaatgaactttgtagaagaaataatagtttctcttgcaaagagagtttttgattctaactctattgagatagagggaaagaatttagatataacaaaaggttttgaaagattatctttagttggttctatagctaaatacttagaagtggaagaagacaaattatccgatcgatcttttttagaggatctagccaagaagttagagattgaaaatgtcgataaatcagaaatgacggatggaaaactgcaattagatatttttgagaaaggtgtagaagataaattaattgaacctacttttattatttcttatcccaaagatgtttctcctctttcaagaacttcggataccgaacccaattttgttgatcgttttgagttgtttattggaggaaaggaaatagcaaatggattttctgaattaaatgatcccgatgatcaagctgagagatttaagctccaagtagaacaaaaagcttctggtgacgaagaagcaatggaatttgattctgattatattgaagccctagagtatggattgcctccttgcgctggggtaggtgtaggcatagacagattggtcatgcttctgacgggagtagaatctattcgagatgtattatta

SEQ ID NO: 305587 - DNA, 909 bp, Unknown
  Bacterial polypeptide expressing nucleotide sequence isolated from the Sargasso Sea
gttaaagattttaaacttttaacaaaatctttaaatcctatgcccgaaaaacatgcaggcttaactgatatagagactatctacagacagagatatgtagatttgatgagcaataaagattcaagggaagtttttgtaaaaagaaataaaatcgttcaatctattcgaaaaaatttagaggaagcaggattcttagaggttgaaaccccaatgatgcatcctattcctggaggtgccaatgctaaaccatttaaaactcatcacaatgcacttgataaagaattatttttgagaatagctccggaattatatttaaaaagattgctggttggaggatttgaaaaagtttttgaaattaatagaaattttagaaacgaaggcttatcaacaatacataatccagaattcactatgcttgaattctatgaggcatatggatctttggatagaacaactcgatttgttcagaaattagtaaaagacagcatttctgcagtaaatgattcacttagcatcatttatgaagataaggaactcaatttagagagtgactttgaggttaaatctttaaaggatttagtgcaggaaaaattaaacatggtacttgatacagaaaaacaaatctttgatgccgctaaaaaaactggattgaaagtaaaaagtgattgggggtggggtaaaattcttttagagcttttcgaagaacatgttgagaaaaatttatggagccctacgtttgtaaaagactatccatatgaagtatcaccattatcaagaagaaaaaatgaaaacaaggattacacagatagaattgaactatttatagcaggcagagagtttgctaacttcttctgtgagttaaacgacccgattgatcaagaagaaaggtttgatatgcaactcaaacaa

SEQ ID NO: 305588 - DNA, 880 bp, Unknown
  Bacterial polypeptide expressing nucleotide sequence isolated from the Sargasso Sea
atgccagagaaatttaaaggcttaaccgatattgaagcaagatacaggcaaagatatcttgatttgatgacaaataattcaactaaagaaatttttattaaacggacaaaaattatagactcaatgcgaagaaaaatgaatgaagtaggatatctcgaagtagaaactcctatgatgcaccctctagcaggtggtgctgtggcaagaccatttgtaacgcagcacaacgcacttggacaagacctttttttaagaatagcacctgaactttacttaaaaagattgcttgtgggtggttttgaaaaagttttcgagattaatagaagcttcagaaatgaaggcttatctactaagcataatcctgaatttactatgatggaatggtatgaggcatatgcttcaatgcaagatcaaatggatcttacaaaagatattattttaaatgctgctttagctgcaggctgtgaagaatcaatagaatgggatgaaaacaaaattaatcttggtaactttaaacaatcaacactttcagaacttgtagttgaatataatcctgaattaaaagataaagatttatctgataaaaaaattcttgaacagcatttaaagagtactagtgtaaaaattgaaaaagtatggggtccaggcagattacttttagaaatttttgaggaaacagttgaatctaaattaatagatccaacttttgtaactgaataccccgttgaggtttcacctctttctagaagaaatgaacacaaaccagatttcgcagataggtttgaactatttataggtggaaaagagtttgcaaatggtttttgtgagttaaatgatcctgatgatcaagcatcaagatttgaagatcaggttgcagcaa

SEQ ID NO: 305589 - DNA, 919 bp, Unknown
  Bacterial polypeptide expressing nucleotide sequence isolated from the Sargasso Sea
tcaattactctaatacaaaaatcacttagacctatgccagaaaaacataagggcttggctgatatggaggttaaatatcgtcaaagatacttggatttaatgagcagtccagaatcaaaagaagtgtttgttaaacgctctcaaattgtttcatctataagatcttcaatgcttgaggatggttttcttgaagttgagactcctatgatgcactcaatccctggtggagctgttgcaaaacccttcataacaaaacataacgcgctcgatagagagcttttcttaagaattgcacctgagctatatctaaaaaggctcttagttggaggttttgaaaaggtttttgagattaatagaagttttcgaaatgaaggcttatcaactagacataacccagagttcacaatgctcgagttttattcagcttttgcaacatttactggcaccatggactttacgaagactattattcagtcagcatctaaggctattggaaatgataatgaaatcgagtgggatggcgataaaattaatctatctaatttttctaaaaaaactattaatgatttagttcttgagcataactcagaattaaagtctgctgatttggataatttagaaatgcttataaattatgcagaatcaatcaaagtaccattgaaggattcttggggaccaggaaaaattttattagagatttttgaaaaaactgtagaaaataatcttattcagccaacttttgtaactgattatcctgtagaagtatcaccgctatcacgaagaaataatgacaatccatccattgctgataggtttgaactttttataggcggaaaagagatcgctaatggattctgtgagttgaatgatcctgatgatcaagcagaaagatttaaggagcaagttatggctaaagcag

SEQ ID NO: 305590 - DNA, 960 bp, Unknown
  Bacterial polypeptide expressing nucleotide sequence isolated from the Sargasso Sea
aacataagttggctggcttacgtgagatgggtaacccatttccaaatgattttcgccgtgatgccacttctgaccagatccatgctcagtacgagcatctgagcaaagaagagctggaagagaagaaaatccgtgtcactgtggcaggtcgtatgatgctgcgtcgtattatgggtaaagccagctttaccactatttctgatgtcggtggcaagctgcagttgtatgttgcacgcgacagtctgcctgagaatgtctataacgaaggctttaagaagtgggatttaggcgacatcataggcggtagcggtgtgttgtttaaaactcagacgggtgagctgacggtatggttagacgaaatccggttgctgaccaaagccttgcgtccattgccggacaaattccatggtttaacagaccaggaagcttgttaccgccagcgttatttagatttgattgtgaacgatcagtcacgcaaaacctttttaatccgttcaaaaactgtggcttatatccgtcagttttttaacagcaaaggctttttagaagtagaaaccccaatgctgcaaagcattccaggtggtgcttcggcccgtccttttgagacgcaccacaatgcgctggatatgcaaatgttcctgcgtattgcaccagagctgtatttaaagcgtttagtggtcggtggttttgaaaaagtatttgagctgaaccgtaacttccgcaacgaaggcgtttctacccgtcataaccctgaattcactatgctggaattctactgggcttatgccgattacaacgatttaatggatatcactgaagagttattccgcggtctggcgcagtctgtgctgggcaccactgaagtgccttatcagggcaacctgtttgatttcggtaaaccttttgcccgtatgtcagtgactgaatctattctgcactacaacccagaaggaagttaga

SEQ ID NO: 305591 - DNA, 736 bp, Unknown
  Bacterial polypeptide expressing nucleotide sequence isolated from the Sargasso Sea
atggaaaaagtttttgaaatcaatagaaatttcagaaatgagggcctttcaacaaaacataatccagagtttactatgctagagttttataccgcttatgtggattataaatttcaaatggattttgtcgaaaatatgctccgaaccatagagaaaaatttaaacgctaataattcaattttttcaaataaatttcacaggttttctatggatgaatcaatcgctaatcataatacaatcgatattgaggaattagctaataaagaaactttagttagtttttgtgaaaagaagaaaataaaaataaacaagtccgatcaaattggaaatataaaaaatgaaatttttgaagcaactgtagaagataaactaattgaacctacatttatttataattatccaattgagatatctcctttatcaagatctctggatgaagataattcagttgcagaaaggtttgagctttttgtgaacgggaaagaattaggaaattctttttcagagttaaatgacccggaagaacaagcagcacgtttcgagtcacaggttaaagaaaaggatgcaggagatgaagaagctatgcattttgataaagactacatagaggctttggagtatggcttggcaccatgtgctggagtaggaattggaatagataggttagtaatgctctttacaggacaagaaagcattagagatgttgtcttgtttcctcaactaagaaataagtaat

SEQ ID NO: 305592 - DNA, 610 bp, Unknown
  Bacterial polypeptide expressing nucleotide sequence isolated from the Sargasso Sea
ataccaggtggagcagttgcgagaccattcatcactcatcacaatacactcgatcaagatttctatttgagaattgcgcccgaactctatttaaagcgtcttacagtgggtggctttgatcgtgtttatgaaatcaatcgctcattcagaaatgagggagtttctacgcaacataatcctgaattcaccatgttggaactatatgttgctcacgaaaccccagattttctcatgaacatgattgaggatatgatgagggcaatttctcaagaattatttgggtctgaaaagatcgaatatcaaggagtaacgatcgattttacaggccattttcagagactcaccatggaggagtcagttttaaaatacaatccagaattagacaaagaaaaagtcagagatgctggatatctgagatcatttgctgaaggcatagatatcgcggtcgaaaatgatgctggtgctggaaagattctatttgagatttttgaaaagacagtggagcatcaactccaacaaccgacttacattacgtcttaccccagagaaatctcaccactttcaagagcgaatgatgatgatccttggatcgtaaatcgttttgaatttt

SEQ ID NO: 305593 - DNA, 797 bp, Unknown
  Bacterial polypeptide expressing nucleotide sequence isolated from the Sargasso Sea
aattgttaaccctgaagctagagaaacatttatcaaaaggacaaaaattattaatgaaataagatccacattaaattctaaacaatttttagaggttgaaactcctgtgcttcagccaatctatggcggtgctaatgcaaggccttttacaacacatcataatgctttagatcaaaaattatatttaagaattgctgatgaattatatctaaaacgtttaatcattggtgggtttgaaaaagtatatgaactttctaaagattttagaaatgagggtatggataggaaccataatccagaatttacaatgttagaattttactgggcgtacgcagattttaatgattgcatggaattagttgaagaaataatacgtaatgcagctaaaaaaattggtgatttaaaaattaaatgggggcattatgatatagatttgtcaaaaaagttcgataaaaagtctttttcccagctcattaaggaagcaactgacactgacttttctaaattaagcaacaatgaaatgctggaagtatgcgatctgcacaacgtagaagttgataaaaatagtaacaaaggccaaattattgactccataatgagtgagctcgttgaacctaaacttattaaccctacatttgttatagattatccaaaatctatatcccccctagcaaaattaaaacgagatggtagtgaggaaatagtggaaaggtttgaactttttattggtggttcagagtttgctaattctttttcagaattaaatgatcccatagatcaaagattaagacttgagg

SEQ ID NO: 305594 - DNA, 820 bp, Unknown
  Bacterial polypeptide expressing nucleotide sequence isolated from the Sargasso Sea
attagaaaatgttgcaatcgattgtaatggaaaatctgttgttgagtatggagataaacaaattgaatttaaaggtccttataaaaaaatagggataattgatgcaataaaagaagaaactggaatagatgcgttatcactaaatgagagtgaattaagagaggctgcacaaaaaattggtgttgaaatagatgatactatgggtaagggaaaaataattgatgaaatttttggtgaaaaatgtgaatcaaagttcatacaaccgacttatattattgattaccctaaggaaatgagccccctaaccaagcaacatagggataatccgctactaacggaaagattcgaacttctaataaatggtagtgaaattgcaaatgcttattctgaattaaatgatccaattgatcaacttgaaagatttgaggaacaactaaagctctccgaaaagggagatgaagaagcaatgtttattgattatgactttgtaagatctcttgaatatggcatgcctccaacatctggaattggaattggaattgacagactagttatgcttctaactaaccatagatccattcaagaagtcatcttttttcctcaaatgaaacccgagaatgaattaaaaatagatttaaatgaagatgagaaattaatctacatcaaggtaaaagaattaaagaaaactgatttgcttgccctgaaggaatctacaggtttaagtaataaaaaatgggacaaaagcataaaactactaacaaaaaacaacttagttaaagtctcaaaaaacgatcagggtctattcgtagagatcgtttaa

SEQ ID NO: 305595 - DNA, 487 bp, Unknown
  Bacterial polypeptide expressing nucleotide sequence isolated from the Sargasso Sea
cctgcaggatgtcgacaaggcccgcgccatcgccaagaaggccggcgccaaagtgcttggccatgaaggcctgggcaagctgcaggtgatgattttcgaagagctggtggagagcaagctggagcagccgcacttcattaccgagtatccgttcgaggtatcgccgctggcccgccgcaacgaccagaaccccaacgtcaccgaccgcttcgagctgttcatcggtggccgcgagatcgccaacgcctactccgagctcaatgacgccgaagaccaggccgaccgcttcctcgcccaggtggccgagaaagacgccggtgacgacgaagccatgcactacgacgccgacttcgtccgcgctctggagtacggcatgccgcctaccgccggtgagggcatcggcatcgaccgcctggtgatgttgctgaccaactcgccgtcgatccgcgacgtcatcctgttcccgcacatgcgcccgcaggcttga

SEQ ID NO: 305596 - DNA, 905 bp, Unknown
  Bacterial polypeptide expressing nucleotide sequence isolated from the Sargasso Sea
agctaattcactcgttagtaaaggatttgcttcttacgcacagagctttaaggtatcgcatactaccagttttcttattcaagaatttgattatttagaaaatggtcaggaggaagacttcagtgtttctcttgctggcagagttatggcaaaaagggtaatgggtaaaattgcctttttcacaataagcgatcaagaaggtcagattcagctttatctagataaaaggataattgatttaaatttagaaaaacaaaaattactttcttttgaagatattaaggaaatagcagatattggtgattggataggagtttacggaactattaaaaaaactaataaaggtgagctttcaattaaagtcgaaaaatgggaaatgttatccaaatcattacaacctttaccagataaatggcatggattgactgatattgaaaaaagatatagacaacgttatctagatttaatagttaatcctcatgctaaaaatgtatttaaaacaagagcaaaatgtataagttttataagaaaatggctagataatagaaattttttagagatagagactccaattctgcaatctgaagctggaggtgctgaagcaagaccatttataactcatcacaatacattagatatccctttgtatctaagaatagctacagaattacatttaaaaagaatggttgttggaggatttgagaaagtatatgaattgggaagaatcttccgcaatgaagggataagtactaggcataatccagaatttacctcagttgaaatttatgaagcttattctgattatgtcgatatgatgaatttaactgaagaattgattaaagatatcgtagctgaggcatgtgggtccttaactataaattatcaaaataaagaaatagattttt

SEQ ID NO: 305597 - DNA, 778 bp, Unknown
  Bacterial polypeptide expressing nucleotide sequence isolated from the Sargasso Sea
aaaaattatagactcaatgcgaagaaaaatgaatgaagtagggtatctcgaagtagaaactcctatgatgcatcctctagcaggtggtgctttggcaagaccatttgtaacgcagcacaacgcacttggacaagacctttttttaagaatagcacctgaactttacttaaaaagattgcttgtgggcggttttgaaaaagttttcgagattaatagaagcttcagaaatgaaggattatctactaagcataatcctgaatttacaatgatggaatggtatgaggcatatgcttcgatgcaagatcaaatggatcttacaaaagatattattctaaatgctgcttcagctgcaggttgtgaagaatcaatagaatgggatgaaaacaaaattaatcttagtaactttaaacaatcaacactttcagaacttgtagttgaatataatcctgaattaaaagacaaagatttatctgataaaaaaattcttgaacagcatttaaagagtataagtgtaaaaattgaaaaagcatggggtccaggcagattacttttagaaatttttgaggaaacagttgaatccaaattaatagatccaacttttgtaactgaataccccgttgaggtttcacctctgtctagaagaaatgaacacaaaccagatttcgcagataggtttgaactatttataggcggaaaagagtttgcaaatggtttttgtgagttaaatgaccctgatgatcaagcatcaagatttgaagatcaggttgcagcaaaagat

SEQ ID NO: 305598 - DNA, 960 bp, Unknown
  Bacterial polypeptide expressing nucleotide sequence isolated from the Sargasso Sea
gatggatgagatttctgtttctgcaagaaaattaacgattttatgcaaatctatccgacctttacctgtagttaaagaaaaggacgatcaaacttttgatgcatttattgataaagaacagagatatcgtaaccggcacttagatttgattgtaaacccatctataaaagagacattccttaaaagagcaaaaataattcaaggattaagaaaatatcttgataatttatcttttttggaagttgaaacccctgttttgcagccaatttatggaggcgcaaatgcccgtccatttacgactcatcacaatgcgctagatcaaaaattctatttaagaattgctgacgaactatatttaaagcgattagtgataggtggtatagatcgtgtttatgaaatggccaaagattttcgtaatgaaggaatggatagaaatcataatcctgaatttacgatgctagaattttattgggcctatgcagattatgaagataacttgaatttggtagaggatatgatccgctcaattgctaaaagtattgatgcattgaaaataaattggggaaaaatgaaaatagatttatccaagccgttcattagaaaacccatatttgatttattaaatgaagcgacgggtgagaacttagaaaatattggattagatgaactaagaaaaatatgtaaagcaaataatattgaaactgaaaaatctgcaaactacggtcaattgctagatggtctcatgggtacgcttgttgaaccaaaccttattcaaccaacatttgttatagattatcctaaggaaatttctcctttggcaaagaaacatcgtaataataatccaaatttagttgaaaggtttgagttatttattggaggtgctgagtttgcaaatgctttttctgagttaaatgacccaattgaccaaagacaaagatttgaatcacaatctaagttagc

SEQ ID NO: 305599 - DNA, 775 bp, Unknown
  Bacterial polypeptide expressing nucleotide sequence isolated from the Sargasso Sea
tgataaaggaaagattcaaattttcataaagaaagataatgttggtgataaggtttatgaagcatttaacttgatggatataggcgattttgttggaattcgtggctttgtttttaaaacaaaagttggtgagatttcaatatctgctgaaaaatttgatgtattatcaaaaagtataagacctttacctattgttaaagaaaaagagggggagatctatgacgcgtttaaagataaagagcttcgatacaggaacagacatttggatttaatagttaatccagaaactagagaaacattcatcaaaaggacaaaaattattaatgaaataagatccacattaaattctaaacaatttttagaggttgaaactcctgtgcttcagccaatctatggcggtgctaatgcaaggccgtttacaacacatcataatgctttagatcaaaaattatatttaagaattgctgatgaattatatttaaagcgtttaattatcggtgggtttgaaaaagtatatgagctgtcaaaagattttagaaatgagggcatggatagaaatcataatccagaattcacaatgctagaattttattgggcgtacgcagattttaatgattgcatggaattagttgaagaaataatacgtaatgcagctaaaaaaattggtgaattaaaaattaaatggggtgaatatgatattgacttgtcaaaaaagttcgataaaaagtctttcttccagcttatcaacgaagcaactgacactgaatttttcaaa

SEQ ID NO: 305600 - DNA, 936 bp, Unknown
  Bacterial polypeptide expressing nucleotide sequence isolated from the Sargasso Sea
gatgtcgggagaagataattataatttatttaaacttactgatataggtgattttgtaggaattgtaggaaaggtttttaagaccaaaacagatgctctgacaattaaagtttcgcaattaacaattttatcgaaaaacattaaacctattcctgacgttaaagagaagaatggagaaaaatttaacctggtttcagataaagaatttagatatcgaaaaaggttccttgatttgattattaatcctgaaacaaaagaaaattatataaaaagatttaaaattattaactcaattaggtcttttctaaatgacaatggatatattgaagtagaaacacctgtattgcaaccaatttatggtggagcaaatgcaaaaccatttaccacacatcataacgcattagatcaagatttttatctacgtattgcaactgagctttaccttaaacagttgattgtaggtggattcgaaaaagtgtatgagttatcaaaagattttagaaatgaaggtattgatagaagtcataatcctgaatttaccatgttagaattttatcaagcctactcagattataattttatgatggattttgttgaagagatgtttaaaaaagtaactaaagatttagaaatgaaacagatttcatgggatggacataaaattgattttagtaaaaagtttgctcgtaaaacaatgggtgaattaatcaaagaccatactggtaatgatatagatatatctaatcactcagaagtatttaatctttgcaaagaattgaagcttgaggttaataagaaagacagcctggctaatttaattgatgaaataatgagaaggaaagttgaaccaaatttaattcaaccaacttatgtcattaatcatcctgttgaaatttcacctttagcaaaagtaaatagagatggtgataaagattt

SEQ ID NO: 305601 - DNA, 376 bp, Unknown
  Bacterial polypeptide expressing nucleotide sequence isolated from the Sargasso Sea
ctaattcaaccaacatttgtaattgattatcctaaagcaatatctccgctagctaaagcgcatagggatggtgaccctaatttagtcgaacgttttgaattatttattggtggagcagagtttgctaactctttttcagaattaaatgatcctattgaccaaagagaaaggctagaagctcaagcaatattaagagatcgtggtgatgatgaagcacaaccagttgatgaaaattttattcaagctatggaatgcggaatgcctccaacaggcggggttggaattggtattgaccggctaacaatgttacttacaagtaatagatggataaaagatgtgattctgttcccaacattgcgatctgaaagtccttgaa

SEQ ID NO: 305602 - DNA, 349 bp, Unknown
  Bacterial polypeptide expressing nucleotide sequence isolated from the Sargasso Sea
gctgctagcgctcctctcctcaccgcagtatggcccttgttctccctccttcttttcgccggcgcctggcagcttcgaggccttcgtgtacgggcgggagctagcgaacgccttctcggagctgacggaccccgtagaccagcgcgagcgcttcgagctgcaggcggccaaaaaggccgcgggcgacgacgaggcccacgacgtcgacgaggagttcctcgccgcccttgagcaaggcatgcccccaacaggaggcctgggcattggcatcgaccgcctcgtcatgctcctcaccgacgcgccgtcgatccgcgacgtcatcgcgttcccgctgttacgaaaggattaa

SEQ ID NO: 305603 - DNA, 412 bp, Unknown
  Bacterial polypeptide expressing nucleotide sequence isolated from the Sargasso Sea
caagctgcaggtgatgattttcgaagagctggtggagagcaggctggagcagccgcacttcatcaccgagtatccgttcgaagtgtcgccactggcgcgtcgcaacgacgacaatcccaacgtcaccgaccgcttcgagctgttcatcggtggtcgtgagatcgccaacgcctactccgagctcaatgacgccgaagatcaggccgagcgcttcctcgcccaggtggccgagaaggatgctggtgacgacgaagccatgcactacgacgccgacttcgtccgcgccctggaatacgggatgccgccgacggctggtgaaggcatcggcatcgaccgcctggtgatgctgctgaccaactcaccgtcgatccgcgacgtcatcctgttcccgcatatgcgtccgcaggcttga

SEQ ID NO: 305604 - DNA, 691 bp, Unknown
  Bacterial polypeptide expressing nucleotide sequence isolated from the Sargasso Sea
agaccatttaaaactcaccataatgcattagatcagcaattttatttaagaattgctgatgaactttatttaaaacgattagttatagggggaattgatcgagtttatgaaatagcaaaagattttcgaaatgaaggaatggataaaaatcataatcctgaatttacaatgctagagttttattgggcctatgcagattatgaagataatatggatttagttgaagacatgatacgatcaattgctaaaagtataaatgcattaaaaataaattggggggaaatgaaaatagatctatcaaaacctttccagcgtaaaccaatttttaaattattaaaagaagctacaggggaagacttagaaaaagttggaataaatgaactaaaaaagatttgtattaagaataatattgaaattgaaaattctgctaattatggtcaattacttgatactcttatgagttcgttagttgaaccacatcttgttcaaccaacatttgttgtagactatccaaaggaaatctctcctttggcaaagaaacatcgtaataataatccaaatttagttgaacgatttgaattatttattggcggtgcagagtttgcaaatgcctttactgaactaaatgatccgatcgatcaaagggaaagatttgaatctcaagcaaaattggctaaagagggagatgatg

SEQ ID NO: 305605 - DNA, 518 bp, Unknown
  Bacterial polypeptide expressing nucleotide sequence isolated from the Sargasso Sea
tgttttaacttataacaaagatctaaacaaaaaagatttaaatgacaggtcagtactcgagaaatattttaaaggacttggaaagaagtcagataaaagctggggaattggtagattattattggaaatatttgaagaaaccgttgaggaaagacttattaatcctacatttgttacagagtatccagtagaagtttcaccgctttcaagaagaaactctgacaatccagattttgcagatagatttgaattatttattggcggaaaagagtttgcaaatggtttttgtgagcttaatgatcctgatgatcaagctttaagatttgaagcgcaagtcgccgctaaagattctggagacaaggaagcaatggattttgacaaagattatattacagcgctggagcatggaatgccgccagcagttggagtagggcttggaatagatagattagtaatgctactaactaatcagtcatctataagagatgttttgctattcccgcaattaaaaaattaat

SEQ ID NO: 305606 - DNA, 884 bp, Unknown
  Bacterial polypeptide expressing nucleotide sequence isolated from the Sargasso Sea
aatgcgaagaaaaatgaatgaagtaggatatctcgaagtagaaactcctatgatgcaccctctagcaggtggtgctgtggcaagaccatttgtaacgcagcacaacgcacttggacaagacctttttttaagaatagcacctgaactttacttaaaaagattgcttgtgggtggttttgaaaaagttttcgagattaatagaagcttcagaaatgaaggcttatctactaagcataatcctgaatttactatgatggaatggtatgaggcatatgcttcaatgcaagatcaaatggatcttacaaaagatattattttaaatgctgctttagctgcaggctgtgaagaatcaatagaatgggatgaaaacaaaattaatcttggtaactttaaacaatcaacactttcagaacttgtagttgaatataatcctgaattaaaagataaagatttatctgataaaaaaattcttgaacagcatttaaagagtactagtgtaaaaattgaaaaagtatggggtccaggcagattacttttagaaatttttgaggaaacagttgaatctaaattaatagatccaacttttgtaactgaataccccgttgaggtttcacctctttctagaagaaatgaacacaaaccagatttcgcagataggtttgaactatttataggtggaaaagagtttgcaaatggtttttgtgagttaaatgatcctgatgatcaagcatcaagatttgaagatcaggttgcagcaaaagattcaggtgataaagaggcaatggattatgatcatgattatattactgcattagagcatggtatgcctcctgcagtaggggttggaatgggagtggatagattagtaatgttattgactaatc

SEQ ID NO: 305607 - DNA, 826 bp, Unknown
  Bacterial polypeptide expressing nucleotide sequence isolated from the Sargasso Sea
gattacaaagtctttaaggccaatgccagaaaaatttataggtttaactgatatagaagcaaggtatagacaaagatatcttgatttaatgaccaatactaataccaaagaaatctttataaaaagaacaaagataattgattcaatgagacaaaaaatgaatcaagttggttacttagaggttgaaactccaatgatgcatccacttgcaggcggagcagtggcacggcctttcaaaactcaacataatgctcttggaagagatctttatttgagaattgcaccagaattatatttaaaaaggcttttagttggtggttttgaaaaggtttttgagattaataggagttttagaaatgaagggctttcaactaaacacaatccagaatttactatgatggaatggtatgaagcatatgcaaccatgcagaatcaaatggatttaacccgagacataatattaaatgcctcttctgctattggatgtgaatcaataatagaatggagtgacgtaaagattaatttaaataattttactcaatccagcttaacaaatttaatactagagcataataaagatctttcaaaagatgatatgaataacccaaataagcttgagaaatttttaaaagataaaaaaataaaagttgaaaagggtttgaaaattggcagaatgctgcttgaaatttttgaacaaacggtagaatctaaattaattgatccaacatttgttactgaataccctgttgaggtttcacctctatcaagaagaaatgaagataatccagactttgctgataggtttgaattatttataggaggtaag

SEQ ID NO: 305608 - DNA, 869 bp, Unknown
  Bacterial polypeptide expressing nucleotide sequence isolated from the Sargasso Sea
tgtcgctcgcccatttgaaactcatcacaatacattagatatgaagctttttcttaggattgcgcctgagttgttcttaaaaagacttgtcgtaggtggatttgagagagtttatgagataaatcgtaatttcagaaatgaaggagtgtctacacaacacaatccagaatttactatgttagaactttatcaggcctatgcagattatgaggattttatggtgctgattgaagacatgatgtctgagatatcagttggtattcataagtcagaatccatcatctatcaagaaaaagagattaacttcaaaggtccttttcatagaatgacaatggaagaagcaattataaaatataaccccgatttgaataaagaaaatatcagagataaggcttacctagaaaattacgcaaatcaattaagtataaaaattgaggaaacatataatgctggaaaaattcaggcagagatttttgaaaaaacgtgtgaagagcacttagttgagccaacttttatttatgcttatccaacagaagtttctcccttgtcaagaaggaatgacagtgatccttttatcactgatcgttttgaattttttgtatttggacgtgagctagcaaacggcttttcagaattgaatgatcccgaagatcaatccgagcgtttcaaagcccaagttaaaatgctggaacaaggagataatgaagcaatgtcatatgatcatgattacattagagctttagagtatgggttgccacccacagcaggcttaggaattggaattgacagattggttatgttatttacagattctgcttccataagggatgtgcttctttttccatacatgaggaacgaaaaggctgaaa

SEQ ID NO: 305609 - DNA, 551 bp, Unknown
  Bacterial polypeptide expressing nucleotide sequence isolated from the Sargasso Sea
atttgagagaaaatctttcaaccaattaattgagtcagctacggggtacaacataaatgatatggatgatataaaactaagggatatatgtagagaaaaaggaattacccttaaggatgatgcaaaatttggtcaaatgctggatgaattaatgagccaagttattgaaccagggttaattcagccaacctttgtaatagattatcctaaaataatttctccattagcgaaagagcatcgcaacggtaacaccaatttagtggaacgttttgaattatttattggaggtacagagtttgcaaactcattttctgaactaaatgaccccattgatcagcgccaaagacttgaggaacaagcaaaattacgtgatttaggagatcaagaagcacaacctattgatgaggatttcattcaagctatggaatgtggtatgccaccaacagggggggttggtataggtattgatagacttacaatgctattgacaggaaatagatggatcaaagacgttatcttgtttcctacacttaggtcagaatctatctgat

SEQ ID NO: 305610 - DNA, 826 bp, Unknown
  Bacterial polypeptide expressing nucleotide sequence isolated from the Sargasso Sea
ggaaactcattcaaacctcaaaataatgcaaagactcttcatgaagaatatggagcattttctaaagaagaacttgctgataaaaatattaaaaatatctctatagccggtcgaattgttttaaaaagagttatgggaaatgctagctttgcaactttaagagatgcttctggagatattcaaatctacgtaacaaaaaacaatgtagaggagagcgtttacgaagattttaaaacatgggatctaggagacatagttggtgtttcaggctctttatttagaacaaaaacagatgaattgactattgatgtatgggatctagaaatgataacaaaatctttaaggcctatgccagagaaatttaaaggcttaaccgatattgaagcaagatacaggcaaagatatcttgatttgatgacaaataattcaactaaagaaatttttattaaacggacaaaaattatagactcaatgcgaagaaaaatgaatgaagtaggatatctcgaagtagaaactcctatgatgcaccctctagcaggtggtgctgtggcaagaccatttgtaacgcagcacaacgcacttggacaagacctttttttaagaatagcacctgaactttacttaaaaagattgcttgtgggtggttttgaaaaagttttcgagattaatagaagcttcagaaatgaaggcttatctactaagcataatcctgaatttactatgatggaatggtatgaggcatatgcttcaatgcaagatcaaatggatcttacaaaagatattattttaaatgctgctttagctgcaggctgtgaagaatcaatag

SEQ ID NO: 305611 - DNA, 262 bp, Unknown
  Bacterial polypeptide expressing nucleotide sequence isolated from the Sargasso Sea
tcagaatttgctaattctttttctgaattaaatgaccctatagatcaacgaaaaagattagaggagcagtcttcattacgagcatcgggcgatgaagaggcacaaaatttggatgaaaactttattcaagctatggaatgcggaatgccaccaacaggtggtgtcggtattgggattgatcgtttggtaatgttattaactaataatagatcaataaaggatgtaattttattcccaattctaagatcagaaaatagctaac

SEQ ID NO: 305612 - DNA, 784 bp, Unknown
  Bacterial polypeptide expressing nucleotide sequence isolated from the Sargasso Sea
caattactttttgattccaaaaagatcagtttcaaaaaaccatttaagcgaattacaatatttgatgctattgaacaatatacaggttatgatatttcaagtatgcaagagaatgaactcagagatatctgcaagaagatggatatagaggtaacagatcaaatgggtgagggtaagttaattgatgcaatatttgggaataaatgtgaaaaagaaattattgacccaacatttatcatggactatcctaaatcaatgagcccattaactaaagaacatagagataatgtaaacctaactgaaagatttgaattaatagtaaatggtatggagatagcaaacgcttattctgagctaaatgatcccattgatcaattaagcagatttgaaaaacaactagaacttagtaaaagaggagatgaagaggcgatgtttattgataaagattttataagatctcttgaatacggaatgccccctacatcaggaattggaattggaattgatagatttattatgctgatgactgataatacatctattcaagaagtattattctttcctcagatgaagcctgaaaatccaagtcttgacatttctgaagaatcttctaaaattctgaatataataaagaataacgtagagctgaacatagacgatttaaaaggaaaaattgatttttcaaataaaaaatgggataaattccttaaggaacttagagataaagggttaataacaatctttaaggatgaaagagatcagatattagtcaagctgacttaaa

SEQ ID NO: 305613 - DNA, 351 bp, Unknown
  Bacterial polypeptide expressing nucleotide sequence isolated from the Sargasso Sea
tcaatcatcctgtcgaaatttcacctttagcgaaagtgaatagggatggagataaagattttacagagagatttgaattatttattgcaggaatggagtttgcaaatggtttttcagagctgaatgatccaattgatcaaagaaaaagatttgaagatcaatcaagaaagaaagatggaggagatgaagaagcatttccaattgatgaaaactttcttgaagcgattgagactggaatgcccccaacagcaggagtaggaattggaattgatagattagttatgctattaatcgatactcgatggataagagatgccataattttccctaccttaaaatcccttaaatgaa

SEQ ID NO: 305614 - DNA, 734 bp, Unknown
  Bacterial polypeptide expressing nucleotide sequence isolated from the Sargasso Sea
tagaagctttagaaacgaaggactttctactaaacataatcctgaatttactatgatggagtggtatgaagcatatgcaacaatgcaaaatcagatggatttaaccaaagatatcattgtgaattccgctaaagctatagattgtggtgagaggattcagtgggatgagctagagattgatcttggaaagttctctcagaagaagttatcagaccttgttttaagttataacaaagatctaagtaaaaaagatttaaatgacaggtcagcactcgagaaatattttaaaggactaggaaaggagtcaggtaaaagttggggaacaggtagattattactggaaatatttgaagaaaccgttgaggaaaaacttattaatcctacatttgttacagagtacccagtagaagtttctcctctttcaagaagaaaccctgacaatcctgactttgcagatagatttgaattatttattggtggaaaagagtttgcaaatggtttttgtgagctcaatgatcctgatgatcaggcttcaagatttgaggcacaggtcgctgctaaggattctggagataaggaagcaatggattttgataaggattatattacagcactggagcatggaatgccgccagcagttggagtagggcttggaatagatagattagtaatgcttctaactaatcaatcatctataagagatgttttgctattcccgcaattaaaaaattaat

SEQ ID NO: 305615 - DNA, 589 bp, Unknown
  Bacterial polypeptide expressing nucleotide sequence isolated from the Sargasso Sea
aaaatctcaattgaaggcaaggattatgatctctctaagccttttaagaagataggattgctcgagtcagttgctacaaaactttctataccggttacagatctttctgataggaaaaaactagaggagctgtctaagaaacataatatcgaagactacaaatcttattctgatgggaaattacagtttgaattatttgaaaaaatagtagaagacgacttaattgaaccaacctttattattgattacccggtagaagtttctccgctttcgaggctttctgatgataaagagggcatagttgataggtttgaacttttcattggtggtaacgagattgccaatggcttttcagagttaaatgacccagaagatcaagctgaaaggtttaaaaatcaggttgaacaaaaagcttctggagatgaagaggccatggaatacgatgccgactacatcgaagcgcttgagtacggtctaccaccttgtgcgggcgttggtattggaatagataggcttgtaatgttattcacaggagcagaatctatccgagatgtcttactattccctcaaatgaaacctaagtcttaaa

SEQ ID NO: 305616 - DNA, 652 bp, Unknown
  Bacterial polypeptide expressing nucleotide sequence isolated from the Sargasso Sea
atgagtaaaaaagaactttcagaacaagaaattcaaagacgagaatctcttaaaaaactacgagaaattggaattaacccataccctgcagaattatttccggtgaccgattttgcaaagtctcttattcaaaaatatgaagaggaaaaagaagtctgtattgcaggaagaataatgagtagaagaattatgggaaaagcttcctttgcagaaattcaagattcaactggaagaattcaagcgtattttaatagagatgaaatctgtaaagaagaggataaaacattatataattctgtatttaaaaaactattagatattggcgattttattggaattcgcggaaaaatgtttaaaacacaagttggagaaacctctatacatgttacctcttttatggttcttagcaaatcacttcgccctctgcctcttcctaaaacagatgccgatggaatcgttcatgattctttttcagacccagaaacgaggtatagacaacgctacgttgatcttgtggttaacccctcagtaaaagaaacttttataaagcgctccaagattatttcttctatgagaaattttttgaatagcaaagactaccttgaagtagaaactcctatactgcaatctattccaggaggtgctgctgccc

SEQ ID NO: 305617 - DNA, 307 bp, Unknown
  Bacterial polypeptide expressing nucleotide sequence isolated from the Sargasso Sea
gatccggatttgaccgaccggtttgaactgttttccgccggccgggagttggcgaacggtttttcagagttgaatgatcccgaagaccaggcgcagaggtttcgctatcaggctcaagccaaggcgaagggggatgaagaggcgatgttttatgatgcggattacgtcatggcattggaatatggtttgccgcctaatgctgggggcggactcggcgtagaccggtacgtaatgatcctcactgatagcccctcgatccgcgatgtgctgcttttcccgcatatgcgtccggaatctgccgaatagc

SEQ ID NO: 305618 - DNA, 874 bp, Unknown
  Bacterial polypeptide expressing nucleotide sequence isolated from the Sargasso Sea
taatcaaactaaagaaatatttataaaaagaacaaggattattgactcagccagaagcaagatgaatgagagaggttatttagaggtagagacaccaatgatgcatcctttggcaggcggagcagtagcaagaccttttataacccaacacaatgctttaggaagagatttatatttacgaattgctccagagctttatctaaaaagacttttagttggaggttttgataaagtttttgaaataaatagaagctttagaaatgaaggtctttcaactaaacataaccctgaatttacaatgatggagtggtatgaagctttcgcaacgatgcaaaatcagatggatttaacaaaagatatcattactaacgcagctaaagctatagattgtggtgagaagattcaatgggatgagatagagattgatcttggcaagttctctcaggagaagttatcagaccttgtcttaagttataacaaaggtttaagtaaaaaagacttaaatgacagatcagcactcgagaaatattttaaagggctaggaaaaaaaacaaataaaacttggggaactggtagattattactagaaatatttgaggaaaccgttgaggaaaaactcattaatcctacatttgttatagagtacccagtcgaagtctctcctctctcaagaagaaaccctgataatccagacttcgcagatagattcgagttatttattggtggaaaagagtttgcaaatggtttttgtgagctcaatgatcccgatgatcaggcttcaagatttaaggcacaggtggctgctaaagattctggagacaaggaaagcatggattttgacaaggattatattacagcgctggagcatggaatg

SEQ ID NO: 305619 - DNA, 554 bp, Unknown
  Bacterial polypeptide expressing nucleotide sequence isolated from the Sargasso Sea
tcacccatttgatcggatgacttgctgggaagctataatcacacattctgattatacgaaaagtgagctgcttgatgcaacgcgtgcggttgaaatagcaaaagcacatggtattgatacaacgcatatggggttgggtaaaatacacatggagttatttgaagccgttgctgaaaaagagctgattcaacccacgttcattaccgcttttccaaaagaggtgtctccgcttgcgcgtgcgagtgatgaagacgattttgttacggatcgttttgagttttatgttgttgggcaagaattggctaatggtttttctgaattgaatgaccctgaagatcaagcatcacgttttcaagctcaattggatgcaaaggcagctggggatgaagaggccatgagctttgatcatgattacataacggcgcttgagcatgggttgcctcctacagcaggagaaggtattggcatagaccggttagtgatgctatttactaattcgccgtctattcgagaggtaattttatttccattgttgcgtcataaggaggcatagt

SEQ ID NO: 305620 - DNA, 697 bp, Unknown
  Bacterial polypeptide expressing nucleotide sequence isolated from the Sargasso Sea
gaattcaccatgctagaattttattgggcatatgctgattatgaggattgtatggaattagtagaagatcttattagaagatctgcaaaaaaaataaatgcattgaatattaattggggtggtatggatattgatctatccaaaaaatttattagaaaaccttttatagagctacttaatgaggcgacaggacacgatatatcagaactagaccaaaaacaacttaaaaaaatatgttctgaaaaagacattgatattgatgacaattctaatctaggtcaaattcttgatgcattgatgagccagttagtagaaccaaaactaattcaaccaacatttgtaattgattatcctaaagcaatatctccactagctaaggcacataggaatggaaaccctaatttagtcgaacgttttgaattatttattggtggagcagagtttgccaactctttttcagaattaaatgaccctattgaccaaagagaaaggctagaagctcaatcaatattaagagatcgtggtgatgatgaagcacaaccagttgatgaaaatttcattcaagctatggaatgcggaatgccgccaacgggtggggttggtattggtattgaccggctaacaatgttacttacaagtaatagatggataaaagatgtgattttattcccgacattgcgacctgaaagttcttgaa

SEQ ID NO: 305621 - DNA, 808 bp, Unknown
  Bacterial polypeptide expressing nucleotide sequence isolated from the Sargasso Sea
gaccgttaccaaggtctggatatcggtgacatcatcggcgtaaccggtcagttgcacttgtctggtaaaggcgatctgtacgtgaacatggaagagtaccaactgctgactaaagcactgcgtcctctgccagaaaaattccacggcttaaccgaccaagaaactcgttaccgccaacgttatgtggacttaatcgttaacgaagaatctcgtcaagccttcgtcatgcgttcaaaagtggttgctgctatccgtaacttcatgatcaaaaaagagttcatggaagttgaaaccccaatgatgcacgtgatccctggcggcgcttcagcccgtccatttatcactcaccacaatgcgctggacatgccaatgtacctgcgtatcgcgccagagttatacctcaagcgtttagtggttggtggttttgagcgtgtgttcgaaatcaaccgtaacttccgtaacgaaggtctgtcgccacgccataacccagaattcactatgatggaattctatatggcctatgctgactacaaagatctgatggacttaaccgaagaactgttaagctctatcgcgattgaactgttaggcagcgcgcaaatgccatacggcgagcacactgttgatttcggtggcccatacgctcgtctgagcatgttagaagcgattcagaagtacaatcctgacaacgcgactatccaagccatgacctacgagcaagtgaaagatcttgaattcatgcgtgaactggcgatcagcctaggcatcaagattgagaagttctggacctgtggtcagctattagaag

SEQ ID NO: 305622 - DNA, 484 bp, Unknown
  Bacterial polypeptide expressing nucleotide sequence isolated from the Sargasso Sea
aatggaggatcaggaacttcttattcttttagaaaatgaagaattgaaactggaaggcaattggaaccgggggcttgcgattcaacttctgtttgaagagaaatgtgagaagcaactgatccagccaaccttcatcactggacatcccaaagaaaccagtcctttgtgcaaggagcaccgtgaaaacccggatttgatcgaacgctttgaagccttcatcaacggatgggaattggccaacgcttattctgagttgaacgaccctctccttcagcgcaaactgatggaagaacaggtggaacgcggccgtggaggcgaatcagaaacccagcctctggatgaagatttcctgaggtgtgttgaatatggaatgccaccgatgggaggaatcggattcggcattgaccggatggtgatgcttctgaccggacaaaatactataagagatgtgatcctctttccaaccatgcgaccagagcaataa

SEQ ID NO: 305623 - DNA, 787 bp, Unknown
  Bacterial polypeptide expressing nucleotide sequence isolated from the Sargasso Sea
attcaaagatcgtattaatattgtttcgaagataagaaaattctttgaagaggaagcctatttagaagttgaaacacctatgatgcatcctatagcaggaggtgcagcagctaaacctttcgtgactcatcacaacagtttagatatggatttatatttaagaattgctcctgaattatacttaaaaagactaattatagggggatttgaaaaagtttttgaaatcaatagaagctttagaaacgaaggactttctgtaaaacataatccagaatttactatgattgaattctacgcagcctatgaagattacgattatcttatgaattttatagaacgactaattcgatctctgattaactctgttggtttaagtgaatcatttaaatatcaagattttgagatagatacaaaaaaatcatttgaaagactgaattttcatcaatctataatcaagtattgtgatggcatagccattgagaatataaatgattattctgctcttgagagcttttgtaaattaaatgacattgatataacaatcaaaggatctatacataaaacgcagttagatatttttgataaaatagttgaaagtaagctgatcaacccaactttcataacagaatatccaacagcagtttcacccctatcacgaagatcagatgataatccggaagttgttgaaagatttgagctatttattgcaggaagagaaattgctaatggtttctctgaacttaatgatccacaagaccaagcgcaaagatttagcgaacagttagaa

SEQ ID NO: 305624 - DNA, 675 bp, Unknown
  Bacterial polypeptide expressing nucleotide sequence isolated from the Sargasso Sea
tttgtctgaaataagagatgcccgcttacaaaaagctaattcactagttagtaaaggatttgcttcttacgcagagagttttagagtttcccatactacgaaatttcttattcaaaaatttgattttttagaaaatggtcacgaggaagaattcagtgtctctattgcaggtagagtgatggcaaaaagggtaatgggtaaaattgccttttttacaatcagcgatcaagaaggtcatattcagctttatttagataaaaggattattaactgcaatttagaaaagcaaaaattactttcttttgaagatattaaggaaatagtagatattggtgattggataggcgtctacggaactattaaaaaaactaataaaggtgagctttcaattaaagtagaaaaatgggaaatgttatccaaatcattaaagcctttacctgataaatggcatggattgactgatattgaaaaaagatataggcaacgttatctagatttaatagtgaatccgcattctaaaagtgtatttaaaacgagagcaaaatgtataagttttataagaaaatggctagataatagaaattttttagagatagagactccaatcctgcaatctgaagctggtggagctgaagccagaccatttataactcatcacaatacactagatattcc

SEQ ID NO: 305625 - DNA, 906 bp, Unknown
  Bacterial polypeptide expressing nucleotide sequence isolated from the Sargasso Sea
ttcggagagtaggtttagcgtccgaattgggcgaaagaaattcggtgaaaaaaacaaagatgaattagttcagcttgacttcgaaacatcggtagctgggagactagtcctgcaacgcaatatgggtaaggcaagttttatttcattgctagatatgtccgggcagattcagtgctatctaacacgtgatgcgctgggcgattcggcttatcaagagtttttagacttgtgggacctaggcgacatcgttggagttaaagggtcgttgatgaagacgaacaaaggagagctcactgttcgagcaacatctataaatttgctaaataaaacactgcaaccgttacccgagaaatttcatggcttaaccgatcaggaaaccaagtacaggcaaagatatttggatttgctctctaaccaagaagcgagggagctttttaaagttcggagtaaggtcctgaaatgtctaagagagttttttggcagccttggttacctggaggttgaaactcctatgatgcatccgattcctggaggtgccagcgccaggccttttgtcacccatcacaatgccctcgacatggatctttatctaagggtggcgcctgagctttatcttaagagattggtagtgggtggatttgagagggtgtttgagattaatcgaaattttcgcaacgaggggctttccacccgtcataaccctgagttcactatgcttgagttctatcaggcctactccgactacttggaattaatggatcttactgatgatatgttgatctttgtatcccagagtgtcttgaataagaccgagatagtttatcagggaacaaagatcgactttgctcgaaggtcggtgagaatgacgatggctgaagcgattatccaatacgccggggtgaaaga

SEQ ID NO: 305626 - DNA, 831 bp, Unknown
  Bacterial polypeptide expressing nucleotide sequence isolated from the Sargasso Sea
tttgtttaaacaacatatagtgaccgaacaagaaaaaattaggagagaaaaacttgaagagctaaaaaaacttggaattgatccttatccagctgaactttatcctgtaacaaatttttcttcagatttaatctccaaatatgaagataaaaagcaagtggtaattgctggtagaattatgtctaggcgaattcaaggaaacgcttcttttgcagaaattttggatagtaaaggtagaattcaagtatattttaatagagatgagatttgtgagggagatgataaaactaaatataacatagtttacaaaaggttacttgatattggagatataattggcatacatggtgaactgtttaaaacaagagttggagaaatcactgtattagttaaagatttcaaaattcttaataaatcactccgaccacttccactaccaaaagttgattctcaaggaaaagaatatgatagttttactgatttagaacaaagatacagacaaagatatattgaccttatagtaaaccaaagtgtaaagaaaacatttataaagagaacaaaaattattaattcaataagaaattttttaaataataaagaatatctcgaggtagagactccaattttacaaccaattccaggtggagcaacagctaggccatttataactcatcacaatgcattagatatacctctctatctaagaatttcagatgaattgtttttaaaaaaattgattgttggtgggtttgaagctgtttatgaattttcaagagattttagaaatgaaggaatggacaaaaatcacaatcctgaatttactatacttga

SEQ ID NO: 305627 - DNA, 899 bp, Unknown
  Bacterial polypeptide expressing nucleotide sequence isolated from the Sargasso Sea
cattttgcatccgaagctggtggtgctgaagcaagaccatttataactcatcacaatacattagatattccattatatctaagaatagctacagaattacatttaaaaagaatggttgttggaggatttgagagagtatatgaattgggaagaatcttccgtaatgaggggataagtacaagacacaatcctgaattcacctcagttgaaatttatcaagcttttgctgactatgtcgatatgatgaacttaacagaagaattgattaaagatatagtagctgatgcatgtggatctctaagtataaaatatcaaaataaagaaattgatttttccaaaccttggacaagaatatccatgaaagatagtgtcaaaaaatatacagggattgattttgattctttcagtggagactttcaagcagcgaaacaagccgttaaaaatataaatgttgatttttctaataaagtcaatactataggaagacttttaaatgaggtcttcgagcaaaaagttgaatcaaaactgatagaacccacttttgttatcgattatcctgttgaaatttctcctttagctaggcctcatcttgataataaagaaatggttcagagatttgaattattcattgttggtcgcgagctagcaaatgcgtttagtgagttgatagatccggtagatcaaagagaaagaatgcaattacagcaatctcttagagatgatggagatcttgaggctcactgcatagatgaagatttcttgaatgctttagagattggtatgccgcctactggaggattaggcataggcattgataggctaataatgttaattaccaatagtgcatctattcgagatgtaattcctttcccattgttaaaaccagaaataacttccaa

SEQ ID NO: 305628 - DNA, 684 bp, Unknown
  Bacterial polypeptide expressing nucleotide sequence isolated from the Sargasso Sea
tcaaactaacgcaaagctactttcttttgaagatcttaaaagaaattgtagatattggagattggataggtgtctatggaactattaagaaaactaataaaggtgagctgtcaataaaagtatctaaatggaaaatgttatcaaaatctttacaaccattacctgataaatggcatggtttaacagatatagaaaaaaggtatagacaacgttatttggatttaatagttaatcctctttcaaaaaacgtttttaaaacaagagcaaaatgtattagtttaataagaagatggttagatgaaaaaaattttttagaaatagagactccaattcttcaatctgaggctgggggagctgatgctaggccatttattactcatcacaatacattggacatacctctttatttaagaatagctacggaattacatctaaaaagaatggtggtaggtgggtttgagaaagtatatgagttaggacgtatttttcgtaatgaagggataagtacaaagcataatcctgaatttacttcagttgaaatatatcaggcattctcaaattatatcgatatgatggatttaactgaagatttaatcaaaaatattatatttacctgttgtgattccttagttattaactatcaaggaaaggtaattgatttttcaaaacctggaaaagaataac

SEQ ID NO: 305629 - DNA, 847 bp, Unknown
  Bacterial polypeptide expressing nucleotide sequence isolated from the Sargasso Sea
agaatagtcttaaaaagagttatgggaaaagtctcctttatgacactcgaggatacatctggacgtcttcaggcatatttttctttgaataatttgggagatagcctagaggaaattaaagattgggatttgggagatattgttggcataaaaggaaatctatttaggacaaaaaccgatgaactcacagttgaggttgaggaagctttactactcacaaaatccttgaatcctatgccggagaagcacaaaggaatctctaatatagagacgatatatagacagagatatatcgacctaatgagcagccaagaatctagggaactttttgttaaaaggaacaaaatcatacaatcgttacgtaagaatcttgaatctacaggatttttagaggttgagacaccgatgatgcatccaattccaggaggcgctaatgcaagaccatttgaaacacatcataatgctttagataaaaaactttacctaagaatcgctcccgaattatatctaaaacgactattagtcggagggtttgaaagggtttttgaaataaatagaaactttagaaatgaaggcatatcaacaattcataatccagaatttacaatgttagagttctatgaggcatatggaaatcttgaaaaaacaacaaactttattcaaaaattagtgcaagatagtgtacttgaagtaaatgacagtcttaaaattcaatatgatggaaagcctcttgatttatccaaaaattttaaagttatttctgtaaaggaattacttaaacaaaaacttgggattgaaaagttagagagttcaaaggaaatttttgatgccgcccaagaagcataac

SEQ ID NO: 305630 - DNA, 574 bp, Unknown
  Bacterial polypeptide expressing nucleotide sequence isolated from the Sargasso Sea
aaaagaaattattgatccaacatttatcatggactatcctaagtcaatgagccctttaactaaagaacatagggataatgtaaacctaactgaaagatttgaattaatagtaaacggtatggagatagctaatgcttattctgagctaaatgatcccattgatcaattaagcagatttgaaaaacaactagaacttagtaaaagaggagatgaagaagcgatgtttattgacaaagatttcataagatctcttgaatacggaatgccccctacatcaggaattggaattggaattgatagatttattatgcttatgactgataacacatctattcaagaagtattattttttccacagatgaagcctgaaaattctggtcttgacatttctgaagaatcttctaaaattcttaatataataaggaatagcaaagagctgaacatagatgatttaaaaggaaaaattgatttttcaaataaaaaatgggataaattccttaaagaacttagagagaaagggttaataacaatttttaaggataaagaagatcagatattagtcaagctgacttaa

SEQ ID NO: 305631 - DNA, 819 bp, Unknown
  Bacterial polypeptide expressing nucleotide sequence isolated from the Sargasso Sea
atatttcagacaattcgaaactatttactggaagaaggttttttagaagtagaaacaccaacccttcaatcagtttatggaggagcaaatgccactccttttgttacacatcataaggcacttgatcagcagttttttctacggatttcaaatgagctttacttaaagcgccttattgcaggaggatttgatgcggtatttgaatttgttaaggattttaggaatgaaggtattgaccgtactcacaatcctgaattttcttctttggagttttaccaagcatatgttgattacacaaaaatcatgcaacatacagaaaaaatatgtgaacgctgtgcactggcagtgaatgggaaaacaaagtttgaatatgaaggcagcactatagacatgaaagctccttggcctcgtttaaccatgctggaagccattaaagaattaggctcaatttcctttcattcaatgagcgattctgatgtaaaactattacttgaaaataacggctgggaacttgaaggggattacaatcgtggactggcaactcaactagtgtttgaaaaaacctgtgaagatcatcttattcagccaacttttataactgaccacccgagggaaacaagccctttgtgcaagcaaacccgtcaaaatcctgaattaattgaaagatttgaagtttttatcaatggctgggaaatagccaatgcatattcggaactgaatgatccggttattcaacgtagactaatggaagaacaggttgaacgtggtagaggaggagaaaaggatactcatcctctggatgaagattttcttcgtgca

SEQ ID NO: 305632 - DNA, 738 bp, Unknown
  Bacterial polypeptide expressing nucleotide sequence isolated from the Sargasso Sea
tgttcagaaacgaaggtatttccacacgtcataacccagaatttacaatgcttgaactctatgaggcttatgcagattacgaagacattatgagactagtagaagatttggtctctgaacttgccgtagaaatttgtggttcaacagtaattcaatacgacggtcgtgaattagacctttcaactccttggaaaagatctagtatgttggaccttttaaatgaaaaaattcaaactgaaatcaatttacaaaccccaatagaagagttgagaaaactttgtgaagatttttcagtcccatttaaagaacattatggagttggaaagttgattcttgaactttatgagaagacaactgaacctgagctgtgggggccaatttttgtaactgattacccccaagaagtatcacctctttcaagagctcataggagtaatcctgagttggttgagcggtttgaagctattgttgctggtcgggaactgtgcaacgcattttctgaagttgttgactcggaagaccagaggtcacgttttgccgcgcaggaaaagagtcgagatgcgggagatgaggaagcaatggttgttgatgaagattatttaagggctttggaatatggattaccgccaacaggtggactcggtataggaatagatcgcttagtaatgcttctcaccgatactcaggcgattcgagatgtaattcttttccccacgttaagacctgagcaagaataat

SEQ ID NO: 305633 - DNA, 574 bp, Unknown
  Bacterial polypeptide expressing nucleotide sequence isolated from the Sargasso Sea
gttcgacttcggcagccgtttgcacgtatgtcggtaaccgaatcgattctgcaccacaaccctgaaatcacgaaagagcaactggccacgcgcgagtcagtagcagccctgtgcaaaaccctgcacattgaagttaaaccaaactacggccacggccgactgttaatggaagtgtttgacgagctggtagaaaccaaactgcgtcacccaacttttattaccgagtacccggcagaagtgtcaccattggcgcgtcgtaacgaccacaacccggaaattaccgaccgctttgagttctttatcggcggccgcgagctgggtaacggctttagcgagctgaacgatgctgaagatcaggcggagcgttttcgcgagcaggtcgcacaaaaagacgccggtgacgatgaagccatgttctatgatgatgactttgtcaccgcgctggaacacggtttaccgccaacagcaggtcagggtatcggtatcgaccgcctggtcatgttactggccgacgccgcttccatccgcgacgttatcctgttcccgcatatgcgtttgcatcacgataagtaag

SEQ ID NO: 305634 - DNA, 788 bp, Unknown
  Bacterial polypeptide expressing nucleotide sequence isolated from the Sargasso Sea
taccaaggtctggatatcggtgacatcatcggcgtaaccggtcagttgcacttgtctggtaaaggcgatctatatgtgaacatggaagagtaccaactgctgactaaagcactgcgtcctctgccagaaaaattccacggcttaaccgaccaagaaacccgttaccgccaacgttatgtggacttaatcgttaacgaagaatctcgtcaagccttcgtcatgcgttcaaaagtggttgcagctatccgtaacttcatgatcaaaaaagagttcatggaagttgaaaccccaatgatgcacgtgatcccaggcggcgcttcagcccgtccatttatcactcaccacaatgcgctggacatgccaatgtacctgcgtatcgcgcctgagttatacctcaagcgtttagtggtaggtggttttgagcgtgtgttcgaaatcaaccgtaactttcgtaacgaaggtctgtcgccacgccataacccagaattcactatgatggaattctatatggcctatgctgactacaaagatctgatggacttaaccgaagaactgttaagctctatcgcgattgaactgttaggcagcgcgcaaatgccatacggcgagcacactgttgatttcggtggcccatacgctcgtctgagcatgttagaagcgattcagaagtacaatcctgacaacgcgactattcaagccatgacctacgagcaagtgaaagatcttgaattcatgcgtgaactggcgatcagcctaagcatcaagatcgagaaattctggacctgtgg

SEQ ID NO: 305635 - DNA, 524 bp, Unknown
  Bacterial polypeptide expressing nucleotide sequence isolated from the Sargasso Sea
attagaagaagcaacaggtactgatttatctaaaatcactaaagatgaaatgttagagttatgtgatgttaatagcataaaaattgataaaaatagtaatatcggacaaatcctcgatgcgctaatgagtaatctagttgaaccaaaattaattaatcctacttttgtgattgattatcctaaatctatttctccattggctaaattaaaaagagatggaagtaaagatatcgtagaaaggtttgagttgttcattggaggatcagaatttgctaattctttttctgaactaaatgaccccctagatcaaagatctcggcttgaagaacagtctaaattaagagaacaaggcgatgaagaagctcaacctatagatgaggattttattaatgctatggaaattgggatgcctccaactggtggtgttggtataggtatcgatagattagtaatgttgcttacaaataatcgttggattagagacgtaatattatttcctactatgaaatcagaaaaagaataaa

SEQ ID NO: 305636 - DNA, 870 bp, Unknown
  Bacterial polypeptide expressing nucleotide sequence isolated from the Sargasso Sea
ccagataaatggcatggactgactgatattgataaaagatatagacaacgttatctagatttaatagttaatcctcactctaaaaatgtatttaaaacaagagcaaaatgtataagttttattagaaaatggctagatagtagaaattttttagaaatagagactccaattcttcaatctgaagctggtggtgctgaagcaagaccatttattactcatcacaatacattagatattccactttatctaagaatagctacagaattacatttaaaaagaatggttgttggaggatttgagaaagtttatgaattgggaagaatcttccgtaatgaggggataagtacaaagcataatccagaatttacttcagttgaaatttatcaagctttttctaactatgtcgatatgatggatttaacagaagaactgattaaagatatcgtagctgatgcatgtggctctttagttataaattatcaagataaggaaattgatttttctaaaccttggttaagaatatccatgaaagatatagtcagaaaatatacagggattgattttgattctttcagtggagactttcaagtagcaaaacaagctgttgaaagtataaatgttgaattctctaataaagtaaatactatgggaagacttttaaatgaggtcttcgagcaaaaagtagagtcagaacttatagaacctacttttgttatcgattatcctgtagaaatttctcctttagctaggcctcatcttgataataaagaaatggttcagagattcgaattattcattgttggtagagagctagcaaatgcttttagtgagttgattgatccagtagatcaaaggcaaagaatgcaatta

SEQ ID NO: 305637 - DNA, 791 bp, Unknown
  Bacterial polypeptide expressing nucleotide sequence isolated from the Sargasso Sea
catgatgttacgcaggattatgggaaaagccagcttcttaaccatccaagacaccagtggccggattcaattgtatgtaaggaaagctgatttacctgacggaatatacgatgacttcaagacttgggatctcggcgacatagttggtggaagagggaggctgtttaaaactaataccggagaactatcggttcacttgaccgagatacgacttctcactaagtcactacgtccattgccggacaagcataagggcttgacggataccgagctcagatatcgacagcgttatgtggatctgatgactaataatgaaacgcgtgaggtctttacactacgttctaaagtcatagcagcaatccgccatttcttcgagtcgcgtggatttttggaagtcgagaccccgatgttacaggtaatccccggtggcgcgacggctcggccatttatcacgcaccataacgcgctcgatatcgatatgtatcttcgtattgcgcccgaactattcttgaaacgtttggtgatcggaggtttcgaacgtgtattcgagattaaccggaacttccgtaacgaaggcctctcaacacgccataatcctgaatttaccatgctcgaattctactgggcctattcagactaccgcgaccttattcacatgacagaagagttgctccgtgaagtagcaaaaaaagcttgcggtaaaacagttttttctcttgaggatggctctcgggtagatctggatcggccatttgatgccatgacagtgaaagaagctattttgaaatata

SEQ ID NO: 305638 - DNA, 655 bp, Unknown
  Bacterial polypeptide expressing nucleotide sequence isolated from the Sargasso Sea
tgctggtagagtgatggcaaaaagggtaatgggtaaaattgccttttttacaataagcgatcaagaaggtcagattcagctttatctagataaaaggattattaattcaaattcagaaaaacaaaaattactttcttttgaagatataaaggaaatagtagacattggtgattggataggcgtttacggatctattaaaaaaactaataaaggtgagctttcaattaaagtagaaaaatgggaaatgttatccaaagcattacaacctttgccagataaatggcatggattgactgatattgaaaaaagatatagacaacgttatctagatttaatagtgaatcctcactctaaaaatgtatttaaaacaagagcaaaatgtataagttttatacgaaaatggttagataatagaaattttttagagatagagactccaattctgcaatctgaagctggtggtgctgaagcaagaccatttataactcatcacaatacattagatattccgctttatctaagaatagcgacagaattacatttaaaaagattggttgttggaggatttgagaaagtatatgaattgggaagaatcttccgtaatgaagggataagtacaaggcataatccagaattcacctcagttgaaatttat

SEQ ID NO: 305639 - DNA, 922 bp, Unknown
  Bacterial polypeptide expressing nucleotide sequence isolated from the Sargasso Sea
agttgaaggtattcgtcgtttcttagcagatcgtgactttatggaagtagaaacgcccatgctgcaggttattcctggtggtgcgtctgcgcgtccatttgtgactcatcataacgcgcttgatatcgacatgtatttacgtattgcgccagagctttacttaaagcgtttagtggtaggtggttttgaccgcgtatttgaaattaaccgtaacttccgtaacgaagggttatcaacgcgtcacaacccagaattcactatgattgagttctaccaagcatacgccgattacatcgatctgatgaacatcaccgaagacatgctacgcaccgttgcaacaaatgttttaggcagcccaattgttgttaatacaacaaaagatgaaaacggcgaagtaatagactcagtagagtacgactttggtaagccgtttgagcgcctaagcatggctgatgctatcttaaaatataaccctgagtttgatgctgcggtatttaatgacccagaaaatcactttgaagaattaaaagcgtacgctaaacaagtgcacgttaaaattcctgaaaactgtgtttggggcccaggcaagtttttatgtgaaatatttgaagaaacggctgagcacatgcttatccaacctacatttattacaggttacccatgggaagtgtcgccacttgcacgtcgtaacgacgacaatgcatttgttaccgatcgctttgaattttttgttggcggacgtgagcttgcaaatggtttctcggagcttaacgatgcacaggaccaagcagaacgctttactcgccaagttgaagaaaaagacgcaggcgatgatgaggcaatgcattacgatgaagattacatacgcgcactagagtacggtttaccgcctactgctggtgagggtattggtattgaccga

SEQ ID NO: 305640 - DNA, 763 bp, Unknown
  Bacterial polypeptide expressing nucleotide sequence isolated from the Sargasso Sea
tacaggcaaagatatcttgatttgatgtcgaataattcgactaaagaaatttttgttaaacgaacaagaattatagactcaatgcgaaggaaaatgaatgaagtagggtatctcgaagtagaaactcccatgatgcatcctctagcaggtggcgcagtggcaagaccatttgtaacgcagcacaatgcacttggacaagacctttttctaagaatagcacctgaactttacttaaaaagattgcttgtgggcggttttgaaaaagttttcgagattaatagaagctttagaaatgaaggattatctactaagcataatcctgaatttactatgatggaatggtatgaggcatatgcttcaatgcaagatcaaatggatcttacaaaagatattattttaaatgctgcttcagctgcgggctgtgaagagtcaatagaatgggatgaaaatacaattaatcttggcaactttaaacaatcaacactttctgagcttgtagttgaatataatcttgaattaaaagataaagatttatctgataaaaaaattcttgagcagtatttaaagagtatgagtataaagattgaaaaatcatggggtctaggaagattgcttttagaaatttttgaagaaacagtcgaatctaaattaatagatccaacttttgtaactgaataccctgtcgaggtttcacctttgtcacgaagaaatgaacataaaccagattttgcagataggtttgaactattcatggaggaaaaga

SEQ ID NO: 305641 - DNA, 943 bp, Unknown
  Bacterial polypeptide expressing nucleotide sequence isolated from the Sargasso Sea
aaaccaactaactatagcaatcaattgaaaactgaatttaaaagttatgaaaataaggatgttttggttgctggtagaattatggctattcgtaagatgggtaaagcttcgttttttcacatagaagattctcaaggtagaatacaagtttatattaaaaaagatgaagttggggaatcacaatatgaagttttcaaattactagatataggggattttattggtgtaagtggatttgtttttaaaacaaaaaccaaagaaatatctttacacgcaaaatcaataacagttttagcaaaaagtatacgccctcttccaattgttaaggaaaaagatggtgaaacctttgattcatttgaggataaagaacagcgttataggaatagacatctagatttaattgtaaatccagatattaaggaagtatttaaaaagagatcattaataactagagctttaagatcttatttagatgcagaacaatttttggaagttgaaactccagttttgcaaccattatatggtggagcaaatgctaggccatttactacacatcataatactttagatcaaactttttatctacgtattgctgatgaattatatcttaaaagattgataattggaggatatgataaagtttatgagctatccaaagattttaggaatgaaggaatggatagaaatcataaccctgagtttactatgttagaatggtatgaagcatatagtgattataatgatcagatgaatagagtagaagaaataataagatttgctgcaaaatcaattggaaaattgaaaataaactggggagatattcaaattgatttgagtaagaaatttgataagaaaccttgcttcgatttacttaaagatgcaacgggaaaagacatattagatgctgatgaaaaaaagttacgagaaatatgtaagcagaata

SEQ ID NO: 305642 - DNA, 763 bp, Unknown
  Bacterial polypeptide expressing nucleotide sequence isolated from the Sargasso Sea
tttgttcaattaatggatgatgaaggtaaaatacagatttttgttcgtaataacgatattggggatgaaaattattctaattttaaattattagatattggtgactttattggtgtagaaggagaagtttttaaaacaaaaactggtgaaataacaattaaaacccataaacttactattcttgcaaaaagtattagaccactgcctattgtaaaagaaaaggatggtcaattatttgattcatttacagacaaagaacaaaggtataggaaacgtcatttagatcttatcctaaatcctgaagttagagaaacattccaaaaacgttcaaagattataagttccattagaaacttctttgataatcaaggttttctagaagttgaaacaccaatattgcaaccaatatatggtggtgccaatgcgagaccatttacgacacaccacaatacattaaatcaaaaactatatcttcgtatcgctgatgaattatatcttaaaagattaataattggaggatttgatcgtgtatacgaaattgcgaaaaatttcagaaatgaaggaatggatagaaatcataatcctgaatttaccatgcttgaattttactgggcatattcagattatgaagattgtatgaatcttgttgagcaactatttgcccatatagcaaaaaaattagattcattttatttagattggggcgattcaaaaattgatttaacgaaaaaatttcatcggaaatctttttttgaattattga

SEQ ID NO: 305643 - DNA, 334 bp, Unknown
  Bacterial polypeptide expressing nucleotide sequence isolated from the Sargasso Sea
atctccccttggcaaattaaaaagggatggcagtcaaaatattgttgaaagatttgaattatttataggaggttcagagtttgctaattcttttacagagctcaatgatccaattgatcaaagagagagacttgaggctcaagcgatactaagagaaaaaggtgacgaggaagcgcaacctatagatgaggattttatacgagcaatggaagtgggtatgccgccaacaggcggtgtgggaattggtattgataggcttgttatgcttctaacaaacaatcgctggataagagacgtaatattttttcctacaatgagagcagaaaagcgttaa

SEQ ID NO: 305644 - DNA, 946 bp, Unknown
  Bacterial polypeptide expressing nucleotide sequence isolated from the Sargasso Sea
atcaggatttattttctaaaacccattcctattgatagttattgtattgacttaaataacaaccatgaagaatccagtaaagaggatcttgagaatctcaataaagaggtagctattgctggaagaatgatggctaagagaattatgggtaaatccagcttttctaaaatcaaagatggaacaagttctattcagatatttcttaattcaaaaaatgtttccgaagaaatctatgaagactttaaaacctatgatgtcggcgatattttatgggttaaaggaaatttatttaaaactaaaactgatgaattgactattaatgctaatgagattgagttactcacaaaatcaataagacctttgccagaaaaatatcatggtcttaaagataccgagactaggtatcgcaagagatatctcgatttgattatgtctgatgagagtagggctgtttttgaaaatcgatcaaaaatcattaccacaatcagaaggtatcttaacgaacaagaaatacttgaagttgaaacacctatgatgcagccgatacctggcggtgctattgcaagaccatttgttactcatcacaatactctggataaggacttctatctacggattgcacctgagctttatttaaagcgtttggtcgtaggaggtatgcatagagtttatgaaattaatagatccttcaggaacgaaggagtttcgacacagcacaacccagagtttacaatgctagagctttatttagcatttgcttcttatgaggagatcatgacattagtagaagaaatgcttatagagatctctaaagatctatttggctcttccacaattacatatcaggacagggagtatgatttatctggcccatataaacgaattactttagaggaatcagtgatggaatttaatcctgatatgaatccagaaaaactaagggatc

SEQ ID NO: 305645 - DNA, 909 bp, Unknown
  Bacterial polypeptide expressing nucleotide sequence isolated from the Sargasso Sea
ttagcagatactgagacccgttacaggcagagatacctggatttaattatgaatcaggacgctttctcggtctttaagaccagaagcaaggtagtcgaactggtaagaaaatttcttaaactagaagggtatttggaagttgaaacgccgatgatgcatcctataccaggaggggcgaacgccaagcctttcattaccaagcacaatagcttagacatggatttatatttacggatcgctccggagctttatttaaaaaggctagttgtgggaggattcgagaaggtcttcgaaatcaaccgatctttcagaaatgagggactctcaacaaggcataaccccgagtttactatgttggagttttatgaggcgtatgcaacattcgaggatctgatggttttaacggaagagttattaaaaaatttggttaaagaggtgttaggcacagattatttaatctaccaggagaaaaaatactcctttgccggatctttcgagaagttaactatggtagaggctgtcaagcggttcaatccaacttatcatggggaaaatctgaaggatatgcgagtgctctcggagctagcatcgcaaataaaattgaaaattgaggatggttggggagagggtaaaattttggctgaaattttcgagaaaacctgcgagccgaatctagagggcccagtattcatcacacactatccttcagaggtttctccgttagcaagaaataacaaccaagatccttttttctgtgatcgcttcgaatttttcgtggcgggaagagagatagcaaacggattttctgaattaaatgacccagaggaccaagctcaacgttttagccttcaactggaagacaaggctaaaggggacgatgaggccatgcattttgatagtgactacata

SEQ ID NO: 305646 - DNA, 800 bp, Unknown
  Bacterial polypeptide expressing nucleotide sequence isolated from the Sargasso Sea
aaatttaaagaaattaattgttgggggcttagagaaggtttatgagctggggagggtatttaggaatgaaggcattgatcatagccataaccctgaatttaccactattgaaagctatgaagcatttgttgattacaatgcgataatggagcttgtggagcaattagtttcaggcgctgcctttaaagttaatggatcctttgaaattgattatggagaagaaattggagttatagatctgaagccaccatggaaaaggcttgatctacagaaagctataaaagatttttcaggcattgattttatatctattaaggatgaagcagaactttcaaatcaaatgagaaatttaggtatacatgttgaacctaactcttcgtgggcaacaatgatagacaaaataatatctgataaagtagagcctaatttgaaacaacctacttttttaattgattatcctgtagaaatgtctccattagccaaaagaaaagataggaatagtgacgtagctgaaaggtttgaggcttttgtgatgggttcagaactggcaaatgcgtttactgaactaaatgatccaattgatcaaagaaatagatttgaagagcaggagtctttaaggaaaaagtttaatgatgatgaattagatcgactagaagaagattttcttatcgcagttgaacacgggatgcctcctacaggaggtcttgggttaggaatagacagattggttatgttgataacaaaaaaaattacaattagagatgttgtattatttcctcaacttaaaacattagaataag

SEQ ID NO: 305647 - DNA, 823 bp, Unknown
  Bacterial polypeptide expressing nucleotide sequence isolated from the Sargasso Sea
gtcgccggatagccgggagaccttccgccgccgggcgcggctggtgagtggcatccgccgctggctggatcagcggggcttcctcgaaatcgagacgccggtgttgcagagcgaacccggtggtgccgatgcacgtccatttgagacccatcacaacgctcttgatctccccctcaccctgcgcatcgccaccgagctgcatctcaagcggctggtggtgggtggtttcgagcgggtgtacgaactgggtcggatcttccggaatgagggggtcagcacccgtcacaatccggaattcacctcggtggagatttatcaggcctattccgattacatcggaatgatggagctcaccgagcagatgatcagtgccgtctgtcaggaggtgtgcggcagctgccagatcacgtatcagggcacggagattgacctgagccctccctggcgccgagcgaccatgcatgagctggtggaggaggccaccgggctcgatttccggagctttggcagccgggaggcggcggcggcggcgatggtggccaagggcctgcatgctcccgagctggccgattccgtggggcgtctgctgaatgaggccttcgagcaagcggtggagacaacgctgatccagcccacctttgtgaccgattacccggtggagatttcacccctggcccggcctcaccgcagcaagcctggcctggtggaacgcttcgagctgttcatcgtgggccgtgagcatgccaatgccttcagtgagctcacggatccggtggatcagcgccagcgcctggaggcccagcaggcccgcaaggcggctggg

SEQ ID NO: 305648 - DNA, 700 bp, Unknown
  Bacterial polypeptide expressing nucleotide sequence isolated from the Sargasso Sea
ccgggcggtgcctcggcacggccgtttgaaacccaccataatgcgctggatatgcaaatgttcctgcgtattgcccctgagctgtatttaaagcggctggtagttggcggtttcgagaaggtgtttgagttaaaccgtaacttccgtaacgaaggcgtatcaacccggcataacccggaattcactatgctggaattctactgggcctatgccgactataacgacttaatggatttaactgaaaagttattccgtggcttagcactggacgtactgggcagcactgaagtgccgtatcagggcgaggtgtttgactttggtaagccgtttgcgcggatgtcggttacagaatcgatcctgcattacaacccgtcaattaccaaagagcagttggcgacccgtgagtcggtggctgagctggcgaaatcgctgggcattgaagtaaaagccaactatggccatggccgtattttgatggaagtgtttgacgagctggtagaaaccaagctgcggcatccgacctttattaccgaatacccggctgaggtatccccgctggcgcggcgtaacgacgataacccggagatcaccgaccgctttgaattctttatcggtggccgtgaactcggtaacggctttagcgagctgaacgatgccgaagatcaggccgagcgtttccgcgagcaggtcgcgcaaaaag

SEQ ID NO: 305649 - DNA, 351 bp, Unknown
  Bacterial polypeptide expressing nucleotide sequence isolated from the Sargasso Sea
gctttgatattaaagaaatagttcagagatttgaattattcattgttggtcgagaactggcaaatgcgtttagtgagttgatagatccagtagatcaaagagaaagaatgcaattacagcaatctcttagagatgaaggagatcttgaggctcactgtatagatgaagattttttgactgctttagagattggcatgcctcctacgggaggattaggtataggcattgataggctaattatgttaattactgatagcgcatcgataagagatgtaattcctttcccattgttaaaaccagaaataacttccaaaaaaagtgaaaaattaccctcgaatgaagtaaaatagt

SEQ ID NO: 305650 - DNA, 875 bp, Unknown
  Bacterial polypeptide expressing nucleotide sequence isolated from the Sargasso Sea
catgaaggaagtaacagaaaaaagttcgtcaggggaaaataaacttatagcagaccggcgcgaaaaactcggtaggctgcgcattgggaatgcatttccaaatgatttccgtcgtgattcattagcaggagaactgctttcagcctatggggagcgctcaggatcaattcttgataaagattgcataactgttcgtgttgcaggtcgaatgatggcaaaacggatcatgggaaaagctagttttatcaaaatccaggatagctctggtcagatacagatatatattgagaaagatagggtatctgttgaaatctaccaggcgtttaaatcttgggatgttggggatattttgggcgtagaaggagaactttttaagacaaaaactggtgaattatcaatacgtgcagagcaaataagattgctcgtaaaatcacttcgaccaatgcccgaaaaatggcacggccttgtagatcaagagttgaaggtaaggcaacggtatgttgatctaattgttagtgatgaaactcgtagagtatttcagttacgtacggaaattatccgattcctgcgttcttcactcgatacattaggctttttggaagttgagacgccgatgatgcaccccattccaggcggggctatcgctaagccatttgctacgcatcacaatgctcttgatataccactctatcttcgggttgctcccgaactgtatcttaagcgtttattggtaggagggtttgaacgtgtttatgaaattaatagaagtttccgtaatgaaagtatttcaacccatcataatccagagttcacaatgttggaggtgtatcaagcatatgcaaactacagggattttatctcgcttacccaaacac

SEQ ID NO: 305651 - DNA, 889 bp, Unknown
  Bacterial polypeptide expressing nucleotide sequence isolated from the Sargasso Sea
tttacaattcttgaactttatgttgcttataaagattatttctggatgatggaattaacagagtcattaattgaaaaagtatgtatagagttaaatggagattcctcaattaattttgactcgaagaaaattagtttaaaaaaaccttttaagcgaatttcaatatatgattcaataaaaaaatatacaggttatgatatttccagcatggatgaaaatgagcttagagatatttgtaaaaagatggatattgagatatctgatcaaatgggtgaagggaaattaattgatgcaatatttagcaataaatgtgaaaaagaaattattaatccaacattcattattgactatcctaaatccatgagtcctttaacaaaagaacatagagagaactcaaatttaacagaaaggtttgagttaataataaatggtatggaaatagcaaatgcttattctgagttaaatgatcctattgatcaattaagtaggtttgaagaacaactaaaactaagcgaaaaaggagatgaagaagcaatgtttatagataaagattttataagatcattagagtacggaatgcctccaacctcggggataggaataggaattgatagattaattatgcttatgaccaacaatacatctatacaagaagtactattttttcctcaaatgaagcccgaaaataccagtaaagatatttctgatgaattatcaaaaattctagatgttataaaaaataaagaggagttgaatataaatgatttaaaaagtaagtttaatttttcaaacaaaaaatgggataaattccttaaagaacttagagaaaaggagttaataacaattattaaggataaggaaaatcaaatattagtcaaaccgagttaaa

SEQ ID NO: 305652 - DNA, 850 bp, Unknown
  Bacterial polypeptide expressing nucleotide sequence isolated from the Sargasso Sea
agtgcgcgacaccttttacattcgttccaacattattcgttacatcagaaagtatttggacgaacgcgatttcctcgaagtcgagacgcctatgatgaacatgatcgccggtggtgccaccgctcgtccgttcatcacgcaccacaacgacttgaacatgacgctcttcatgcgcatcgcgcccgagctttacctcaagcagctcgtcgtcggcggcatcgagcgcgtgtacgagatcggtcggcagttccgtaacgagggcatcgacatgacgcacaacccggagttcaccacgtgcgaattctaccaagcgtacgcggattacaatgacttgatgacgatgacggaagaaatggtctccggtatggtgtacgccatcaagggctcgtacaagattcaataccacgccaacggcccggatgaggatccgatcgagattgatttcacgcctcccttccgccgaatctccatgatctccggcctcgaagaagcgctcaacatcaagttcccgtccaccgacttctccacccaagagaacgaagacttcttgaagaacttgatcaaggagttgggcgtcgagatgcagccgccgttcaccacggcgcgcatgctcgacgaactcgtgggcgagtacttggaatctcagctcgtgaacccgggtttcatctgtgatcacccgcaaatcatgtctccgctcgccaagtaccaccgcagcattccgggcatgacggagcgcttcgagctcttcgtcaacaccaaggagttgtgcaacgcgtacaccgagttgaacgatccgatcgaccagcgcgagcgtttcgccgagcaagccaaggccaagtctagcggtgac

SEQ ID NO: 305653 - DNA, 449 bp, Unknown
  Bacterial polypeptide expressing nucleotide sequence isolated from the Sargasso Sea
gctaggagtttcaactgaggatacgtggggtctaggtaagtactggatggagattttcgaggcagtagtcgagaagcactttctccaaccaacttacatcaccgaatacccagcagaagtctcgccactcgcaagattgaatgatcgaaactcatttgtaacagatcgcttcgagctattcatatgcgggagggagtatgcgaatgggttttccgagctcaatgatcctgtcgatcagactgagcgctttaaaaagcaggtcgccctgaaagattcaggggatcatgaggccatgcacttcgatgaggattatataacagcactagagtatggcctgccgcccacggcgggagagggtgtcggtattgatcggcttgtgatgttactaaccgattccccaagcataagagatgttttattgttcccgcaaatgagacccataaattaac

SEQ ID NO: 305654 - DNA, 235 bp, Unknown
  Bacterial polypeptide expressing nucleotide sequence isolated from the Sargasso Sea
ttcagaattaaatgatcccgaggatcaagcagagcgttttaaaaagcaagttgaagaaaaaaatgccggggatgccgaagcaatgcattttgatgatgactatataaaggcgcttgaatatgggatgccgccaaccgcgggtgagggtattggtattgataggttagttatgtttttaactgattcttcatcaatcagagatgtaattttatttcctcatatgagacaaaagtaa

SEQ ID NO: 305655 - DNA, 915 bp, Unknown
  Bacterial polypeptide expressing nucleotide sequence isolated from the Sargasso Sea
ataatttcaggatgttgtttagcagggcgtatcagaagcagacgtataatgggtaaagcatcttttgttgaccttcaagatagtgaaggacgtatacaactttaccttaacagagatgaaatatgtcctggtgatgataaggccatgtataatgatgtcttcaagaaatatcttgaccttggtgattttattggaataagaggttctgtttttataacaaaagttggtgcaatttcaattttggtgaaagagcttgttgtattatctaaggcaatcagaccacttcctgttgtaaaagaaagtgatggtgtaatgcatgatgcatttagcagtgcagatcttaaatatcgtcaacgttatgttgaccttgttgtaaattcagaagttaaaaatacatttatacaaagaacaaagcttacaaactctataagaagctttttaaatgaaagaggttatcttgaggttgagactccaattcttcagcctattcatggtggtgctgctgcaaggccatttattacacaccataatacattagacatgccactttatttacgtattgctaatgaactgtatttaaagcgtttgatagttggtgggtttgatggtgtatttgagtttgcaaaggatttcaggaatgaaggtatggataggacacacaatccggagtttacacaggtagagctttatgttgcctataaggactatttatggatgatggacctaacagaggagatgatagaaaaagcagttcttgatctacatggccaaactaaggttatggtcggagataaggaaattgactttaagagaccatggaaaagatatacaatgtttgaggcaattaaggaatttactggcattgatatttctaaaatggaagaagaagagctgtttaaaacagctaaggagctt

SEQ ID NO: 305656 - DNA, 750 bp, Unknown
  Bacterial polypeptide expressing nucleotide sequence isolated from the Sargasso Sea
aatgtcagatattcaagacgaaaatcatttaatcgaagaaagaaaaaagaaactaatagaacttaaaaaaagtggcataaattatccaaattcctttagaagatcaaatctatctttctctttgattgaggattactcagagtttagcaaagaggaattgaccaaaaaaaacatatctgtttctgtggcaggaagaattatgttgaggcgaattatgggcaaagccagtttttctactatccaagacatgactggcagaattcaactttatttgcgacaagacgctattgataattatgaactttttaaagactgcgaccttggagatattgttggagcaaaaggagttttatttaaaaccaatactggtgaactctctattcaagtcaatgaattttatttattaactaaatctttaagaccgctgccggaaaaacatcttggattgtctgatgtagagacaaagtataggaaacgatatttagatcttttaacaaattcagagtctcaagaagtctttgaaattagaagtaaagtggtaaatgaaatcagacaattcttgataaaagataactttatagaagtcgaaactccgatgatgcatccaatcccaggaggcgcaacagccaaacccttcgtcactcatcacaatgcccttgatatgcagctatttttaagggtagctcctgagctttatctaaagagactagtaatcggaggcatggaaaaagtttttgaaatcaataggaa

SEQ ID NO: 305657 - DNA, 323 bp, Unknown
  Bacterial polypeptide expressing nucleotide sequence isolated from the Sargasso Sea
gatgaaatttttcggtgaaaaatgtgaatcaaagttcatacaaccgacttttattatagattatccaaaggaaatgagcccactaaccaagcaacacagggataatcctctactaactgaaagattcgaacttctaataaatggtagtgaaattgcaaatgcttattctgaattaaatgatccaattgatcaacttgaaagatttgaagaccaactaaagctttcggaaaagggagatgaagaagcaatgtttattgattatgactttgtaagatctcttgaatatggtatgcctccaacatctggaataggaattggaattg

SEQ ID NO: 305658 - DNA, 817 bp, Unknown
  Bacterial polypeptide expressing nucleotide sequence isolated from the Sargasso Sea
aaagttttcattaaaagaacaaaaataattgattctctaagaaagaaaatgaatgaatcaggctatttagaagttgaaacgccaatgatgcatcctttagctggtggcgcagtagcacgtccatttgtaactcaacataatgccctgggacaagatctttatttaaggattgcgccagaactttatttaaaaagacttttagttggaggttttgaacgcgtttttgaaattaatagaagtttcagaaatgaaggcttatctacaaaacataatccagaatttacaatgatggagtggtatcaagcatatgcaagcatgcaagatcaaatggatttaacaaaagatattattttaaatgctgctaaagcagctgactgtgaatcgaaaattgaatggggagatattaaagttaacctaaataattttaaacaatcaactctttcagatttagttttagagtttaataaagaattaagtaaagatgatttaagtaataagaaaaaacttcaaaatattttgaccgacaataaagtaaaagttgaaaaaagctggggtattggcagaattcttttggaggtatttgaagcaactgcagaaggcaaattaatcgatccaacatttgttacagaatatcctgttgaagtttcgccattgtctagacgaaatgaagaaaatccagattatgctgatcgttttgaattatttataggtggaaaagagtttgctaatggtttttgtgaacttaatgatcctgatgatcaagctactaggtttgaagaacaagtggccgcaaaagactcaggagataaagaagcca

SEQ ID NO: 305659 - DNA, 789 bp, Unknown
  Bacterial polypeptide expressing nucleotide sequence isolated from the Sargasso Sea
cggaagcgtcaaaagaagcgataagggggagttatccatcgtccctgcgcaggtgcaaatgttgacaaaggcgttgttacctctgccggataagtggcacggtttgacggacgtcgagaagcgataccgtcagcgttacgtggatttgatcgtgtcgccggacgtgcgaaacaccttcaaggcgcgctcgaacatcatctccaccattcgacgcatgctcgacgacgacggctttttggagatggagacgccggtgttgcacacgcaagccggaggcgcggacgccaagccgttcaacacctttcacaacgcgctcggcatgcaactcacgctgagaatcgccaccgagcttcacctgaagcgtctcatcgtcggcggatttgagcgcgtgtacgaactcggtcgcgtctttcgcaacgaaggcttgagcacgcggcacaatccggaattcacgtccatcgaggtgtaccaggcgtacgcggacgtcacggacatgttggagctcaccgaggagatgatttgccagtgtgcgatgcgcgcgtgcggtacgttgacgattccgtacggtgacttgactatcgatctcagccagagaccgtggcgacgagcgccgatgaacgacttggtcaaggaggccactggcgtcgacgtcatggcgttcggcgacgatttggaaggcgccaaggcggcggcgattcccgcgctcaaggcgcactcgaagaaagcgggcgaaggcatcaagggcgtcaaggcggccgcgagcgtcggacacgtcttgaacgaaatgtt

SEQ ID NO: 305660 - DNA, 673 bp, Unknown
  Bacterial polypeptide expressing nucleotide sequence isolated from the Sargasso Sea
ttcgattttgctaaatctatcggaatcgacgtaaacgaaacgatggggaaagggaaattaattgatgaaatttttggcgaaaaatgtgaagggaacttcattcagccgacatttattactgattatccgatcgaaatgtcacctttaaccaaaaaacacagaagcaaagatggtcttacagagcgttttgaattgatggtttgtggtaaggaaatcgcaaatgcttattcagaattaaatgatccgattgatcagagagaacgtttcgaagagcagctgaaattatcagagaaaggtgatgatgaagcaaccggatttatcgatgaagacttccttagagctttggaatacggaatgccgccaacttccggtctgggaatcggaatggacagactgattatgttcctgacgaataatccatctattcaggaagtcttattcttccctcagatgagacctgaaaaagtggttccgcagattgaattgggagaagatgaaaaagtaattctggagattttaaattctcaggaaaatgcattttctttagcagaagtgaaagaaagaagccagttatccggtaaaaaatgggataaagcttcaaaaaatcttactaaacatggtatggtaaaagtggaaaaaattgatgataatgttttgatgaagctggtttaaa

SEQ ID NO: 305661 - DNA, 373 bp, Unknown
  Bacterial polypeptide expressing nucleotide sequence isolated from the Sargasso Sea
cagcttattcagccaacttttataactgaccatccgcgggaaacaagccctttgtgcaagcaaacgcgtcagaatcctgaattaattgaaagatttgaagtctttatcaacggctgggaaatagccaatgcatattcggaactgaatgatccggttattcaacgtagattaatggaagaacaagttgaacgtggtagaggaggagaaaaggatactcatcctctggatgaagattttcttcgtgcaatggagtatggaatgcctcctatgggaggagttggatttggaattgatcgaatagtaatgttgcttacaggtcaatctaccattcgtgacgtaattttattcccaacaatgcgtactgaattttaag

SEQ ID NO: 305662 - DNA, 511 bp, Unknown
  Bacterial polypeptide expressing nucleotide sequence isolated from the Sargasso Sea
actgggttcagacatatcaaagatggatgaaaatgaaatttttgatgaatgcaaaaaacataatttagagatagataaaaaatcaaatattggtcaaatgttggacgctttgatgagcaatttagttgaaccccaacttattaatccaattttcgtcacagattatccgaaagctatatctccacttgcaaagttaaagcgtgatggaagtaaaaatattgttgaaagatttgaattatttattggtggttctgaatttgctaattcttttacagaattaaatgaccctattgatcaaagagaaagacttgaggaacaagcaatgttaagggagaaaggtgatgaggaggcacagcccatagatgaggagtttttgcgtgctatagaggttggtatgcccccaacaggtggtgtaggaattggtgttgataggcttgttatgctgcttacaaacaatcgctggattagagatgtgatatttttccctacaatgaaatcagaacaaaaataa

SEQ ID NO: 305663 - DNA, 301 bp, Unknown
  Bacterial polypeptide expressing nucleotide sequence isolated from the Sargasso Sea
ccctaatttagtcgaacgttttgaattatttattggtggagcagagtttgccaactctttttcagaattaaatgatcctattgaccaaagagaaaggctagaagctcaagcaatattaagagatcgtggtgatgatgaagcacaaccagttgatgaaaattttattcaagctatggaatgcggaatgcctccaacaggcggggttggaattggtattgaccggctaacaatgttacttacaagtaatagatggataaaagatgtgattctattcccaacattgcgatctgaaagttcttga

SEQ ID NO: 305664 - DNA, 577 bp, Unknown
  Bacterial polypeptide expressing nucleotide sequence isolated from the Sargasso Sea
cctgagcgtgagcgagcttcgtgatacccgcctggagaaagcccaggcattgatcgagtgcggccagacgccctacgccctgcgctttgagcccagcaatcgcaccgctcagcttcaaaaagcccacgccgatctgcccaatggcgaagagcgtgatgtcttcgttgcgatcgctggtcgtgtcatgacgcgccgggtgatgggaaagcttgctttcttcaccctggctgatgagaccggccctattcagctgttcatcgaaaaagctgcgcttggggagggtttcaagcagatcaccagcctggtggatgccggcgattggatcggggtcaagggcaccttgcgccgcactgatcgcggcgaactgtctgtgaaggtcgccgagtgggagatgctcagcaaaagccttcagccgttgccagataaatggcatggcctagcggatgtggaaaagcgctatcgccagcgctacctggacctgatcgtttcacccgatacgcgagacactttccgccgccgggcgcagctggtcagcggcatccgccgctggttggatgagcgtgattttctggagatc

SEQ ID NO: 305665 - DNA, 814 bp, Unknown
  Bacterial polypeptide expressing nucleotide sequence isolated from the Sargasso Sea
ttttaccttcgaattgcaacagagttatatttaaagcaattgattgtaggtggatttgaaaaggtttatgaactttctaaagattttagaaacgagggcatagataggagccataatcctgaattcaccatgctagaattttatcaagcttattctgattataattttatgatggattttgttgaacaaatgtttaaaaaagttgttaaggaccttggtatgaaaaaaatatcatgggatggccataaaattgattttagcaaaaagtttgcacgaaaaactatgggagaactaattaaggatcatactggaaatgatattgatatctctgatcattcagccgtttataaagtttgtaaagatttaaagcttgaggttagtaaaaacgatagcttagctactttaatagatgaaatcatgagaagaaaagttgaaccaaatctaattcaaccaacatatgtaatcaatcatcctgtcgaaatttcaccgttagctaaagtgaatagggatggagataaagattttacagaaagatttgaattgtttattgcaggaatggagtttgcaaatggtttttcagagttgaatgatccaatagatcaaagaaaaagatttgaagatcaatcaagaaagaaagacagtggagacgaagaagcatttccaattgatgaaaactttcttgaagcgattgagactggaatgcctccaacagcaggggtaggtattggaattgatagattagttatgctattaattgatactcgatggataagagacgccataattttccctacattaaaatcccttaaatgaa

SEQ ID NO: 305666 - DNA, 784 bp, Unknown
  Bacterial polypeptide expressing nucleotide sequence isolated from the Sargasso Sea
ttgtctgaaataagagaagcccgtctacaaaaagctaattcactagttagtaaaggatttgtttcttatgcagaaaattttaaagtttcccataatacaacatttctcattaaaaaatttgattatttagaaaatggtgaagaggaagatttcagagtttccttagcgggaagagtgatggcaaagagggtaatgggtaaaatcgcctttttcacaataagtgatcaagaaggtaagattcagctttatttagaaaaaaaaattattgatcataatttagaaaaccaaaaattactttcttttgaagatattaaggaagtagttgatattggtgattggataggcgtttacggaaaaattaaaaaaactaataaaggtgagctttcaattaaagtagaaacatgggaaatgttatcaaaatcattacagcccttaccggataaatggcatggattgactgatattgaaaaaagatatagacaacgttatctagatttaatagtcaatcctcattctaaaaatgtatttaaaacaagagcaaaatgtataagctttataagaaaatggctagagaaaagaaattttttagagatagagactccaattctgcaatctgaagctggtggtgcagaagcaagaccatttattactcatcacaatacattagatattccgctttatttaagaatagctacagaactgcatttaaaaagaatggttgttgggggatttgagaaagtttttgaattgggaagaatctttcgtaatgaagggataagtacga

SEQ ID NO: 305667 - DNA, 905 bp, Unknown
  Bacterial polypeptide expressing nucleotide sequence isolated from the Sargasso Sea
gatgatggttggagaaattccttataataattttaaattgttagacattggagatttcgttggagtcgaagggaatatatttaaaactaagactgaagaaatatctatacgtacagataaacttactgtgcttgcaaagagtattaggccattacccatagttaaagaaaaagatggcaagcaatttgatgcttttttagataaaggacaaagatatagaaaacggcatttagatttgattttaaaccctgatgtaaaacaaacttttattgataggtccaatataattaagtcaattagaagctttttagattataatggttttctagaagttgaaactccaattttacaaccaatatatggaggtgcaaatgctagaccatttacgactcatcataatactttaaatcaaaaattatatttaagaatagcagatgaattatacttaaaaagattaattataggagggtttgataaagtttatgaactgtctaaagattttagaaatgaaggtgtagataggagccataatccagaatttacaatgttagaattttaccaagcctatgcagactataaagattgtatggatattgttgaaaaaatgattcttaatgctgccaaaactgttaattctgaaaaaatactatttgataatatagaaattaattttagagaacgatttgatagaaagagttactttgacttactaaaagatgaaacaggtcatgatttaaaggatttttcagaaagaaagctaaaggcagtttgccttgaaaataaaattagccttgaggataatttaaataaaggacaaatgcttgatgcattaatgagtaatcttgtggaacctaagttgataaaacctacttttattattgattaccccaagtttatttcacctt

SEQ ID NO: 305668 - DNA, 838 bp, Unknown
  Bacterial polypeptide expressing nucleotide sequence isolated from the Sargasso Sea
agaccttttattacgcaccacaatacgttagatatcccgctttatttgagaattgcaaacgaactgtatttaaagagacttattgttggcggatttgaaggggtgtatgagtttgctaaagattttagaaacgaaggcatggatagaacccacaatcccgaattcacacaaatggaaatttatgtagcctataaagactacaaatggatgatggattttacagagaagatgcttgaaactatatgtttagaagtgcttggaacaaccgaagttaaaatcggtgaaaaaacagtaagttttaaaagcccttttaagcgtatcaccatgttagattcaattaaggaacacactggtgtagatatttcaaagatgaatgagccagaaatcagagaagtatgtactaatcttggtgtggaagtagatgaatctatggggaaaggaaagcttattgatgaaatttttggtgaaaaatgtgaaggcaattatatccaacccacttttattacggattaccctgtagaaatgtctccactttgcaaaaaacatagaaataaccctgaacttacagagcgatttgaacttatggtaaatggaaaagaattagctaatgcatattcagaactaaatgatccaatagaccaaaaagaacgttttgaagatcaagttaaattagctgaaaaaggtgatgatgaagccatgtttatagatctagattttataagagctttagaatatggtatgccacctacatcaggtatgggtataggaattgacagattggttatgtttctatgtaatcaaccttctatacaagaagtgctacttttcccgcaaaaat

SEQ ID NO: 305669 - DNA, 286 bp, Unknown
  Bacterial polypeptide expressing nucleotide sequence isolated from the Sargasso Sea
ttggaagtggcaaatggtttctccgaattaaacgatccggatgatcagcgtcagcgttttgagctgcaaatgcagcaaaaagctcaaggagatcatgaagcaatgccgtacgatcatgattacgttgaagcattggaatacggtctgcctccaactgctggtgaaggtattggaatcgatcgtttggtgatgttgatgaccaatgcgccatccatacgagatgtgattttatttcctctgatgcgaccgaagtctcaaatcgataccaataccaacgacgaatgag

SEQ ID NO: 305670 - DNA, 895 bp, Unknown
  Bacterial polypeptide expressing nucleotide sequence isolated from the Sargasso Sea
tcgtggactgggaacagagccttatccatactcttttgtgcaaagccacacaattttacaggtaaaggagcaggcagaagaactacttgaaaatcagcaaattataatgattgctggacgtatgcttgctgtaagggggaaggggaaggctattttttgcaatattcaggctcaacataaacgcttgcaggtttatgtcagacttgacgttgtaggtgaatctatatttgaaatttttaagctgtgtgatattggtgatcatttaggagtatctggcacgttaatgcgaacaaacactggagaaattactttaagagcaagcgaagtggaattactggctaaatctattcgtccattaccaattccaaaagttcaggaaaaggatggacatcgtattgtttacgacgaagttaaagacaaagaatttcgctatcgtcagagatatgtagacttaattttaaatccacatgtgtcagaagtttttcgaaagcgtgctcttatttttcagacaattcgaaattatttaatcgaagagtgttttttagaagtcgagactccaactcttcaatcagtttatggcggagcaaatgccaccccttttgttacgcatcacaaggcacttgatcaacaattttttcttcgcatttcaaatgaactttacctgaagcgactgattgcgggagggtttgatgcggtatttgaatttgttaaagattttagaaatgaaggaattgaccgtacacacaatcctgaatttactatgttggaattttatcaggcatatgttgattacaccaagatcatgtatcatatggaaaaaatatgtgaacgttgtgcacttgcagttaacgggaaaacacagtttgaatatgaaggcaatactattgacatgaaa

SEQ ID NO: 305671 - DNA, 867 bp, Unknown
  Bacterial polypeptide expressing nucleotide sequence isolated from the Sargasso Sea
catgacagaaaatctttcagaaaatgagcttataaaacagcgaagatctaaactagataatattagaaaaaatggtattgcatatccgaataccttcaaaagagattctttatctcaggatttaaaggaaaaatgtgctggatattcaaaagaagacttagaaaagaagcacatagaagttactgtagccggaaggattatgctacagcgaataatgggaaaggctagctttattactttgcaagatatgaagggtcagatacaagcatatgtaagatcaaatgacctcccagagggacaatacgaagattttaagacatgggaccttggagatattgttggagttaaaggtaaactttttctaacaaaaactggcgaacttacagtcaatgcagaatcaatcgagatgctcactaaatcattaagaccacttcctgaaaagtattctggacttgttgatacagaacaaagatacagaaaaagatatcttgatctgattactaatcctgagagccttgaagtatttaaaaaaagaagcttaattataagttttattagagaatattttgttttgaatgaatatcaagaggtggaaacacccatgatgcactccatcttgggtggtgctgcagctaaaccatttactactcatcataacgctcttgatatggatctatatttaagaatagctccagaactatatttaaaaaggcttgtggtagggggcatggagaaggtttttgagattaatagaaatttccgaaacgaaggactttctaccaaacataatcctgaattcactatgcttgagtattattctgcctatgctgacttcaatgatcaaatgtcttttatagaagacctatt

SEQ ID NO: 305672 - DNA, 768 bp, Unknown
  Bacterial polypeptide expressing nucleotide sequence isolated from the Sargasso Sea
tatggaacttccgtatcaattctccgttactgcaactacaaaggaaattcgcgcagactatgcctcgttagacgagggtactggttcaggaaagagcgtgactattgccggaagacttatgttgaggcgggtccagggcaaggtagcttttggtgatctacaggatatgagcggacgcatacaactctttgcccctgcaaaggtaactcctgaatttgactcgttcacgagcctcaatatcggcgactggatcggtgtaacaggtgagatcatgaaaacgaaacgaggagagctatcagtaaaagtcgaacaatgggtaatccttgcctcggcgaataggcctttccccgacaagtggcatggtattactgacccagatttacgttatcggcaaagatatgtagatctatgggtcactgaagaggcgcgtgaaaattttctaatacgcagcaacacgctttcacttactcgccgctggcttgaggctaagaactttctagaggtagaaactcccgtctttcacccaattcctgggggggctttggctcgaccattttcgacacatcataacgcgcttgacacagaactttatcttcggattgcccccgaattgtatttaaaaagattgatcgttggaggatttgagagagttttcgaaatagcccgagtgttcagaaacgaaggcatctcttccaagcataatcctgagtttacaatgcttgagctctaccaagcttatgctgattggaacgagatcatggaattggc

SEQ ID NO: 305673 - DNA, 367 bp, Unknown
  Bacterial polypeptide expressing nucleotide sequence isolated from the Sargasso Sea
aatgagccaacttttattattgattatccagtagaagtatctccactttcgaggctttctgatgataaagatggcttagttgataggtttgaacttttcatcggtggtaacgagattgccaatggcttctcagagttaaatgaccctgaagatcaggccgaaaggtttaaagcacaggttgaacaaaaggcttcgggtgacgaagaggccatggaatacgatgcagactacatcgaagcgcttgagtacgggctaccaccttgtgcgggtgtgggtattggaatagataggcttgtaatgttatttacaggagctgaatctattcgggatgtgctgttattcccacaaatgaaaccaaagtcctaaa

SEQ ID NO: 305674 - DNA, 778 bp, Unknown
  Bacterial polypeptide expressing nucleotide sequence isolated from the Sargasso Sea
atgtcagatattgagccgaaggaagacttgagccagatcttgcgccaccgacgtgagaagcttgaagaggttgtgaagcgcggtatgcagccattcgtatacaactactcagccacatcaagtacggtagcagcggtcgaaggatttgaagctgccgaagctgctgggacactcgacgaagaaggccacagtgaaccagtgaaggttggtggtcggttggtaggatggcgtgatatgggacgaagcgtgttcgcccaccttgaagacggacaaggccgcattcaactctatttccggaatagcgtagtcggtgaatcgtcgtttgaagcgctctcggtcctggatataagtgactggatcggtgcagagggtaggatgtttcgcacgcgcacgggtgaagtcaccgtacaggttgaagagtggaccctgctcacgaagtcgctccggcctctgccgtttgggaaggtggaaacagatgcccagacaggagaacggacggtttacggagggtttcaagatcaagagggtcggtatcgacagcgttatgcagacctcgcggtgcatcctgacgtgcgcgaggtgtttagaactagggcgaaagtgatcactgaactccgccggtttctagatggagaaggttttcttgaagtggagacaccggtcctccagcctctatatggaggggcttcagcaagaccctttgtgacccatcaccactccttggatcagaggatgtacctgcgtatagcggatgagctgtatctaaagcgactcgttg

SEQ ID NO: 305675 - DNA, 760 bp, Unknown
  Bacterial polypeptide expressing nucleotide sequence isolated from the Sargasso Sea
atagatcgtgtttatgaaatagccaaagattttcgcaatgaaggaatggatagaaaccataatcctgaatctacgatgttagaattttattgggcctatgcagattatcaagataacttggatatagttgaagatatgattcgctcaattgctaaaagtattgatgcattgaaaataaattcggggaatatgaaaatagatttgtcaaagtctttcataagaaagcccttttttgatttattaaatgaagcgacgggtgaggatttagaaaatattgaaatagatgagctaaaaaaaatatgtaaatcaaataatattgaaactgaaaaatctgcaaactatggtcaattgctagatagtctcatgggcaaccttgttgaaccaaatcttattcaaccaacatttgttacagattatcctaaggaaatttctcccttggcaaaaaaacatcgtaataataatccaaatttagttgaaaggtttgagttatttatcggaggcgctgagtttgcgaatgcattttctgagttaaatgaccctattgaccaaagacaaagatttaagtcgcaagctaagttggctaaagaaggagatgctgaagcacatcctgttgatgaaaattttcttcaagctgttgaatctggtatgcctcctacagcgggagtcggtattggagttgatcgcttagttatgttgctaacagaaaatgtttctataaaagatgtaatactttttcctgctctaagaaacgaagaatagc

SEQ ID NO: 305676 - DNA, 847 bp, Unknown
  Bacterial polypeptide expressing nucleotide sequence isolated from the Sargasso Sea
ttttgaggatcttaaggaaatagtagatattggggactggataggcgtttgcggaactataaaaaaaactaataaaggtgagctttcaattaaagtagaaaaatgggaaatgttatccaaatctttacaacctttaccagataaatggcatggtttgactgatattgaaaaaagatatcgacaacgctatctagatttaatagttaatcctaactctaaaaatatatttaaaaaaagagcaaagtgtattagttttataagaagatggctggataaaagaaatttcttagagatagagactccaatcctacaatctgaagctggtggtgctgaagcaagaccattcatcactcatcacaatacattagacattccgctgtatttaagaatagctacagaattacaccttaaaagaatggtggttggaggatttgataaagtttatgaattgggaagaatcttccgtaatgaggggataagtacgaagcataatccagaatttacttcagttgaaatttatcaagctttttctaattatgtcgatatgatggatttaacagaagaattgattaaagatatcgtaattaacacatgtggttctttagttattaattatcaaagtaaggaaattaatttttctaaaccatggttaagaatatccatgaaaaacattgtaaaacaatatacaggtattgactttgattcttttgggggagattttcaagcagcaaaactagctgtacaaagtatagatgtagatctttctattaaagtaaattcaattggcagacttttaaatgaggtctttgagcaaaaagttgagtcacagcttgtgcaacctactttt

SEQ ID NO: 305677 - DNA, 556 bp, Unknown
  Bacterial polypeptide expressing nucleotide sequence isolated from the Sargasso Sea
ttatcaaaaaagttccatcgcaaaccatttttagaaatactaagtgaagtatcgggccataatcttgataattttgatgagcaaaaaatcagcaatatttgtaaagaaaaagggatagaattagatgaaaattctaatcttggccaaatgttagatggattaatgagtgcactagttgaaccaaaccttattgagcctacatttattatagactatccaaaggtaatttctccattagcaaaaacacaccgcaatggcaatccaaatattgttgaacgttttgaactatttattggtggtgctgaattcgcaaattcattttctgaactcaatgatccaattgatcagagaaaacgattggaagaacaagtagcactaaaagatcttggtgatgaagaagctcagcctatagatgaaaactttattcaggcaatggaatgcggcatgcctcctacaggtggtgttggtattggcattgatcgacttgttatgctattgacaggtaatagatggataaaagatgttatcctatttccgacactaagacctgaataaa

SEQ ID NO: 305678 - DNA, 773 bp, Unknown
  Bacterial polypeptide expressing nucleotide sequence isolated from the Sargasso Sea
gatgctttcagaacaagagcaaattagaagagaaagccttaaaaaaattattgattatgggatagacccttatccagcttcagagtacaaattcactcattatacaaaacaaataaaagaaaattataaagaaggtcaaaaagtagtaattgctggaagattaatgagaagaaaaattcaaggcaaggcaagtttcggtagtattaaagactcaaaaggtaaaatacaaatttatataaatagagatataatttgtcctaatgaagataaatctatttataacgacttatttaaaaaatggattgatcttggggattttattggggttgaaggaaaagtatttaaaacaatggtaggcgaaatttctataaatgtagaaaaatttcatttacttagtaaagctcttaaaccattacctcttccaaaaatagattccaatggtaatattcatgatgcatttaatgatcctgaacttcgatatagaaggagatatgtagaccttattttaaatgataatgttaaagaaacttttctcaaaagaaccaagattattaattctatgagaaaatttttagcaaacagagactatatagaggttgaaacacctattttacaaaccattcctgggggagcggctgctagaccatttgttacacatcacaatgctttagatattcctctgtatttaagaatagccaatgaattatatttaaaaagattaatagttggaggatttgaaggagtatacgagtttgcaaaggatttcagaaatg

SEQ ID NO: 305679 - DNA, 656 bp, Unknown
  Bacterial polypeptide expressing nucleotide sequence isolated from the Sargasso Sea
cacggtattagtaaaagatttcaaaattctaaataaatcactacgaccacttccactcccaaaagttgattctcaaggaaaagaatatgatagttttactgacttagaacaaagatacagacaaagatatgttgaccttatagtaaacccaagtgtaaaggaaacatttataaagagaacaaaaattattaattctataagaaattttttaaataacaaagattatctcgaggtagaaactccaattttacaaccaattccaggtggagcaacagctagaccatttataacacatcacaatgcattagatatacctctttatctaaggatttcagatgaattgtttttaaaaaaattgattgttggtgggtttgaagctgtctatgaattttcaagagattttagaaatgaaggaatggacagaaatcacaatcctgaattcacaatacttgaactttatgttgcttataaagattatttctggatgatggaacttactgaatcattaattgaaaatgtatgtctagaaattcatggtaaaactaaagttgaatttgattccacaacaatagattttaaggcaccatacgagaggatatcaattactgaagctattattaaatttactggtcatgacatatcaggtaaaagtgaaa

SEQ ID NO: 305680 - DNA, 641 bp, Unknown
  Bacterial polypeptide expressing nucleotide sequence isolated from the Sargasso Sea
gatggatttaaccaaagatatcattgtgaattccgctaaagctatagattgtggtgagaggattcagtgggatgagctagagattgatcttggaaagttctctcagaagaagttatcagaccttgttttaagttataacaaagatctaagtaaaaaagatttaaatgacaggtcagcactcgagaaatattttaaaggactaggaaaggagtcaggtaaaagttggggaacaggtagattattactggaaatatttgaagaaaccgttgaggaaaaacttattaatcctacatttgttacagagtacccagtagaagtttctcctctttcaagaagaaaccctgacaatcctgactttgcagatagatttgaattatttattggtggaaaagagtttgcaaatggtttttgtgagctcaatgatcctgatgatcaggcttcaagatttgaggcacaggtcgctgctaaggattctggagataaggaagcaatggattttgataaggattatattacagcactggagcatggaatgccgccagcagttggagtagggcttggaatagatagattagtaatgcttctaactaatcaatcatctataagagatgttttgctattcccgcaattaaaaaattaat

SEQ ID NO: 305681 - DNA, 750 bp, Unknown
  Bacterial polypeptide expressing nucleotide sequence isolated from the Sargasso Sea
gatgtcagataaaaattcaaaaagtgacaatcgattagtcgatgagagaagagaaaaactcaatagcctgagagaaggcggtttcaactatccatccacgatagaaattaactcatctactctttcaatcatcgatgagtatgactcgatgaaaaaagaggaccttgagggaattgatagagacttctcaatcgctggtcgaatgatggcaaaaagagtaatgggtaagtccagtttctctcgaatcaaagatggaaaaggatcgatccaattttttttgagtaattctgatctgggtgatgaggcttatgaaagctttaaaacaatggatgttggagacatcgtttgggtaaaaggctcgctctttcgtaccaaaacagatgaattaacactgaatgtgaaggagcttgttcttctcagtaagtctctcaggccattacctgaaaaataccatggtttgaccgataccgagattcgctacagaagaaggtatttagacctcatgatgtcagaggagagtgccgaggtatttaagatcaggtcaaaagtcgttacccagataagatcttttctgaatgatctagatatgatggaagttgaaactccgatgatgcatccaataccaggtggagcagttgctagaccgttcgtcacccatcacaatacactcgatcaagatttctatttgagaattgcgcccgaactctatttaaagcgtcttacagtgggtggctttgatcgtgtctatga

SEQ ID NO: 305682 - DNA, 889 bp, Unknown
  Bacterial polypeptide expressing nucleotide sequence isolated from the Sargasso Sea
tcaaaaaaaattctagaaactagatcaaaggtaataaagcttataagagaatatttacatgaaaatagttttgtagaggtggaaactccaattttgcaaactaaagctggtggtgcgatagcaaagccgtttacaacacatcataatgcgttaggtttagacatgtatttaagaattgcaccagaactttatctaaaaagactaattattggtggatttgaaaaagtatttgaattaggaaaaattttcagaaatgaaggtattgatcaaacacatttaccagaatttacgatgttagagagctatcaggcattcgttgatgcaaattctgttatggacatggttgaggatatgtgtacatatgtttttaaaaatttagaaactgatacaaagttgcattttggtgaaaataccgctgatttttcgggtccatggaaaagagaaagcatgtttgatatggtttccgaaaaattaaatatagacatacaatttaattcagattttaagaaaattagtaaggaattaaaaaagcaaggagttgattttgaagccaaatcaattggattacttgtttacgaactttttgagaatttcgtagaaaaagaaatcatcgatccaacatttgtaattgattatcctgttgaagtttcaccttttgcgagggaaaagaaagatgaaaaaggcataacagagaggttcgaactttttgcatttggtagtgaattagcaaatggtttttcagaacttatcgattcagaagaccaggccaaaagattaaaggaacaagcgattaaaaagaatgatggtgatgaagaagcccatgttgaagatgaagataatgttgaagctttacagtatggcttacctccacactggtggtttaggtttt

SEQ ID NO: 305683 - DNA, 925 bp, Unknown
  Bacterial polypeptide expressing nucleotide sequence isolated from the Sargasso Sea
caagaatttgattatttagaaaatggtcaagaggaagactttagagtttctcttgctggtagagtaatggcaaaaagggtaatgggtaaaattgccttttttaccataagcgatcaagaaggtcagattcagctttatctagataaaaggattgttgatttaaatttagaaaaacaaaaattactttcttttgaagatatcaaggaaatagtagatattggtgattggataggcgtacacggaactattaaaaaaactaataaaggtgagctttcaattaaagtagaaaaatgggaaatgctatctaaatcattacaacctttgccagataaatggcatggattgactgatattgaaaaaagatatagacaacgttatctagatttaatagtgaatcctcactctaaaaatgtatttaaaacgagagcaaaatgtataagttttataagaaaatggttagataatagaaattttttagagatagagactccaattctgcaatctgaagctggtggtgctgaagcaagaccatttataactcatcacaatacattagatattccgctttatctaagaatagcgacagaattacatttaaaaagaatggttgttggaggatttgagaaagtatatgaattgggaagaatctttcgcaatgaggggataagtacgaggcataatcctgaattcacttcagttgaaatttatgaagcttattctgattatgtcgatatgatggatttaactgaaggattgattaaagatatattagctgatctatgtgggtctttaattataaattatcaaaataaagaaattgatttttctaaaccttggttaagaatctccatgaaagatattgtcaaaaaatatacagggattgattttgattcattcagcggagactttctagcagcaaaaaaag

SEQ ID NO: 305684 - DNA, 708 bp, Unknown
  Bacterial polypeptide expressing nucleotide sequence isolated from the Sargasso Sea
ggcataatccggaatttacgatgctcgaatgctatcaggcttactcggattatcgcgatcttatcgaaatgactgaccagctattgagtgaattggtccattcggtctccggcagtagcaagattgtatatcagggtagggagtacgattttagtaagggtgctcagcaaattacgatgagtgaatcaatttgctcacataccgcgattgaggaaaatcgaatcaacgatgaagattatctgcgtcacgtgttaggggatattggggtaaggtgcgaggaggcctggggaataggaaaactgcaactggaactgtttgaggcgcaagtcgaagacaagttggaggaccctacttatgtaaccgaataccctgcagaggtatcgccccttgctagacgaaaggatggtaacccagaggtgaccgatcgattcgagttgttcatcggtggcagagagtatgcgaatgggttctcagaattgaatgaccctgtcgatcagtcagaaagatttcaacgtcaatctgaactcaaagaaagtggggacagcgaggccatgcatttcgatcatgattacataaccgctttggaatacgggttgcccccgactgctggcgagggcataggcattgatcggttagtcatgttcctaacgaatgcgccctccatacgagatgtcctgcttttccctcagttacgcaatagtagctaaa

SEQ ID NO: 305685 - DNA, 644 bp, Unknown
  Bacterial polypeptide expressing nucleotide sequence isolated from the Sargasso Sea
tgtgacaaaaaataatgttgatgagagtgtttatgaagattttaaaacatgggatcttggagatattgttggtgtatcaggctctctgtttcgaactaaaaccgatgagttaacaatagatgtatgggatttagaaatgataactaaatcattaagaccaatgcccgaaaaatttaaaggtttaacagatatagaagcaaggtatagacaaagatatttagacttaatgacaaataatgatacaaagaaagttttcattaaaagaacaaaaataattgattctctaagaaagaaaatgaatgaatcaggctatttagaagttgaaacgccaatgatgcatcctttagctggtggcgcagtagcacgtccatttgtaactcaacataatgccctgggacaagatctttatttaaggattgcgccagaactttatttaaaaagacttttagttggaggttttgaacgcgtttttgaaattaatagaagtttcagaaatgaaggcttatctacaaaacataatccagaatttacaatgatggagtggtatcaagcatatgcaagcatgcaagatcaaatggatttaacaaaagatattattttaaatgctgctaaagcagctgactgtgaatcgaaaattgaatggg

SEQ ID NO: 305686 - DNA, 742 bp, Unknown
  Bacterial polypeptide expressing nucleotide sequence isolated from the Sargasso Sea
tttgaatcaatagaagctttagaaacgaagggactttctgtaaaacataatcccgaatttactatgattgaattctacgcagcctatgaagactacaattatcttatgaattttatagaacgactaattcgctctctgattaactctgttggtttaaatgaattattcaaatatcaagattttgagatagacacaaaaaactcatttgaaagactgaattttcatcaatctatgatcaagtattgtgatggtataggcaatgaaaatataaatgattattctgctcttgagagcttttgtaaattgaacgacatagatataacaataaaaggatccatacataaaacacagttagatatttttgataaaatagttgaaagtaagcttatcaatccaactttcatcactgaatatccaacggcagtttcacctttatcacgaagatcagatgataatcctgaagttgttgaaagatttgagttatttattgctggaagagaaattgctaatggtttctctgaacttaatgatccacaagatcaggcgcaaagatttagcgaacagttagaaaaagatgacgaaaaaatgaattatgattctgatttcattactgctatggagtatggtatgccaccaacagctggtgcaggaatcgggatagatagactggtgatgttactgactaattcagcatccattagagatgtattattttttccattaatgaagcctaagacttaag

SEQ ID NO: 305687 - DNA, 535 bp, Unknown
  Bacterial polypeptide expressing nucleotide sequence isolated from the Sargasso Sea
gatgagcatgtatgaggccttgcaagaattggcagatattgattctgagtcaatggaggatcaggaacttcagaatcttttagaaaatgaagaattgaaactggagggtaactggaaccgggggcttgcgattcaacttctgtttgaagagaaatgtgagaagcaactaatccagccaacctttatcactggacatcccaaagaaaccagtcctttgtgcaaggaacaccgtgaaaatccggaactgatcgaacgctttgaggccttcatcaacggatgggaattggccaacgcctattctgagttgaacgatcctctccttcagcgaaaactgatggaagaacaggtggaacgaggccgcggaggtgaatcagaaacccagcctctggatgaagattttctgagatgtgttgaatatggaatgccaccgatgggaggaatcggattcggcattgatcggatggtgatgctcctgaccggacaaaccacgataagagacgtgatcctctttccaaccatgcgaccagagcaataa

SEQ ID NO: 305688 - DNA, 867 bp, Unknown
  Bacterial polypeptide expressing nucleotide sequence isolated from the Sargasso Sea
ttcaagcactgggacctgggcgacatcctgggcgccgagggcacgctgatgaagaccaagaccggcgagctgtctgtcaaggtgaccagcctgcgcctactcaccaagagcctgcgtccgctgcccgacaagttccacggcatggccgaccaggagcagaaataccgccagcgctatgtggacctgatcaccgacgagcaggctcgcaagcgcttcgtggcccgcagcaaggccgtgagcggccttcgcgagttcatggtgagccatggcttcctcgaagtcgagacgccgatgctgcaccccattccgggcggcgccaatgccaagccgtttgtcacgcaccacaacgcgctggagcaggagatgtacctgcgcattgcgcccgagctgtacctcaagcgcctgatcgtgggcggcttcgagcgtgtgttcgagatcaaccgcagctaccgcaacgaaggtatctcggtgcgccacaaccccgagttcaccatgatggagttctacgcggcgtactggaactacctggacctgatggacttcacggagacgctgatccgcgaagtggcgctcaaggccacgggcggcctgcagatgacctaccagggccgcccggtggacctgtcgcagcccttcgcgcgcctgaccatccgcgaggccatcttccagcacaccgaggccggtgcgcatgtggacgataccgcctggctcatcagcgcgctgaaaaagctgggcatgacggaagagaaggacaagctctccagccgcaccctggccagcctgcaggtgctgtactttgaagaaacggtggaagacaagctgtggcagcccaccttcatcatggagcacccgaccgagatctcgcca

SEQ ID NO: 305689 - DNA, 415 bp, Unknown
  Bacterial polypeptide expressing nucleotide sequence isolated from the Sargasso Sea
aaaattatagagcctacttttgttatagattatcctattgaaatttctcctttagctaggcctcatattgataataaagaaatggttcagagattcgaattattcattgttggtcgagagctagctaatgcttttagtgagttgatagatccagtagatcaaagagaaagaatgcaattacagcaatctcttagagatgaaggagatttggaagctcattgtatagatgaagattttttgaatgctttagagatcggaatgcctcctactggaggattaggcattggcattgatagattaattatgctaattactaatagtccatctatcagagacgtaatccctttcccattgttaaaaccggaaataacttcttataaaaatgaaaaatcaccctcgaatgaagtaaaataag

SEQ ID NO: 305690 - DNA, 1453 bp, Unknown
  Bacterial polypeptide expressing nucleotide sequence isolated from the Sargasso Sea
attgaaagagcaagacgaaaataatttatttgaagtacgaaaagaaaaattaaaaaaacttagggagcaaggaaaggactatcccaattcattcaggagaaatgaattagccaaggaattaattaaagagtactcagatttaagcaaagatgacttagaaaacacaagtatcagcgttaaagttgctggtcgaattatgcttcgaaggctcatgggaaaagccagttttactacgatccaagatatgagcgcacaaattcagctttatttaagagaagatactttaaataactacgatgattttaaaacttgggatattggagacatcattggcgttgaaggagagctttttaaaaccaacacaggcgaactatcaatcaaagtaactgaagctattctattaaccaaatcactaaaacccttacccgaaaaacatcaaggacttgttgacgtggaacagagatatcgaaaaaggtatttagatctcttagttaatgaggaagcaagagaagtttttttagccagaagcaagattatttctgagactaggaattactttgattcaagtgggtttatagaggttgagacaccaatgatgcatcccattcctggaggagctgcggccaaacctttcgtaactcatcacaatgctttaggaatggatttgtatttaagaattgctccagaactttacttgaagaggcttgttgttggaggttttgaaaaggtttatgagattaatagaaattttagaaatgaaggattatctactaaacataatcctgaatttactatgttggaattttataccgcttatgaagattatgattttcagatgaattttgtggaggcattaataaagcatctttctaatttagaacaaagcaaaagatcttttaaaaaatttaaaagagtatcttttgacgaagcgctcactaaaaatacatctcttaataaaaaagatttagacgatatagatagcctaagaaaatttgcaaaatcattaaaaattgaaaatttcaaaactttatctattggcaaattaaaagctgaaatttttgagtcagaagttgaagataagctctctgaaccaacttttatctataaatatcctctggagatttctcctctatcaagaaaatcagaaggtgatgagggatatgtagatagatttgaacttttcatagatggtaaagagattgcaaatggtttttctgagttaaatgatccagaagaccagctagaaagattcaaaatgcaaatggaagataaagaaaagggtgatgaggaagctatggagatggatttagactatattgaggcgcttgaatacggccttgcaccttgtgctggtgttggcataggactggatagattggtaatgttacttacgggaatagattccataagggacgtaattttatttccgcaattaaaaaacaaggggaactag

SEQ ID NO: 305691 - DNA, 469 bp, Unknown
  Bacterial polypeptide expressing nucleotide sequence isolated from the Sargasso Sea
tatgcgtgaactggcgatcagcctaggcatcaagattgagaagttctggacctgtggtcagctattagaagaaatcttcggtgaaaccgctgaatggcagctaatgcaaccgactttcatcactggctacccagcggacatttcgccactggcacgtcgtaacgatgacaaccacttcatcaccgaccgttttgaattcttcatcggtggccgtgaagtagctaacggtttcagcgagttaaacgatgctgaagaccaagacagccgctttaaagcgcaggttgatgcgaaagatgcgggtgacgacgaagccatgttctacgatgcagactacatcactgcactggaacacggtttaccaccaacagcgggtcaaggtatcggtatcgaccgtttagtgatgctattcactaacactcacactatccgtgacgtgatcctgttcccagcgatgcgcccacaggcctaa

SEQ ID NO: 305692 - DNA, 1102 bp, Unknown
  Bacterial polypeptide expressing nucleotide sequence isolated from the Sargasso Sea
ttgtctgaaataagagaagctcgtttacaaaaagctaattcactcgttagtaaaggatttgcttcttacgcacagagttttagggtttcaaccactacaaaatttcttactcaaaaatttgattatttagaaaatggtcaagaggaagactttaaagtttcacttgccggaagagtgatggcaaaaagggtaatgggtaaaattgcttttttcacaataagagatcaagatggtcagattcagctttatctagataaaaagattattaacttaaatttagaaaaacaaaaatccctttcttttgaagatatcaaggaaatagtagatattggtgattggataggtgtctacggaactattaaaaaaactaataaaggtgagctttcaattaaagtagaaaaatgggaaatgttatccaaatcattacaacctttgccagataaatggcatggattgactgatattgaaaaaagatatagacaacgttatctagatttaatagtgaatcctcactctaaaaatgtatttaaaacaagagcaaaatgtataagttttataagaaaatggctagataatagaaattatttagaaatagagactccaattctgcaatctgaagctggtggtgctgaagcaagaccatttataacccatcacaatacattagatattccgctttatctaagaatagctacagaattacatttaaaaagaatggttgttggaggatttgagaaagtatatgaattgggaagaatcttccgtaatgaggggataagtacaaggcataatccagaattcacctcagttgaaatttatcaagctttttctgactatgtcgatatgatgaatttaacagaagaattgattaaagatatcgtagctgatgcatgtgggtctttaattataaattatcagaataaagaaattgatttttctaaaccctggactaggatatctatgaaagaaattgtcaaaaaatatacagggattgattttgattccttcagtggagactttcaagcagctaaacaagctgttaaaagtataaatgttgatttctctaataaagtcaatactattgggaagacttttaaatgag

SEQ ID NO: 305693 - DNA, 1455 bp, Unknown
  Bacterial polypeptide expressing nucleotide sequence isolated from the Sargasso Sea
aatggataacttttcaaaatcagaaaaagaaatttacgacttaagaaagcaaaaaattaactttcttaatgagctgacatctaattcttttcctacaaaatttaatgaatctgtaaaagtagcagatgtaataaaagaacattctgaaattaaagatggtgaacataccggggtcaatgtctccattcgtggaagaatattaaatgcgagatcatttggaaaattattattttatgacctactagatcagtctggcaaaattcaactgttgataaattcaggagaaattgatgagttgtatttaaagcttttcgagaattttgatattggtgacatcattgctgtcaatggcgagataattaaaactaaaaaaggtgagctttcaattaaggtaaatgaaacgacgattttgtcaaaaagcttaagaacgctccctgaaaaatggcacggcctgaaagataaagaaactagatttcgacaaagatatcttgacttaatagtcaatccagaatccaaaaggattcttgaaacccgatcaaatgttgtgagactattgagagaatatctccacggcactgaattcattgaagtagagactccaatccttcaatcaaaagccggcggggcgatagcaaagccttttcagactcaccataatgcacttaatttagatatgtacttaagaatcgcccctgagttgtatttaaaaagacttgttattggtggatttgaaaaagtttttgaaattggaaaaatatttaggaatgaaggaattgaccaaacccatcaacctgaattcacaatgttagaaagctatcaagcttatgcagatatgaacattgttatggatatggttgaagatatgtgtaattatgtgtttgataatttagaaattgataaaaaattagaatttaacgatgaagaagcatctttttcgggaccatggaaaagagttagcatgtatgatctagtttcagaaaaatttggtattaaaataaattttaattcaaaattcgaagatttaagctctaaattaactgatcagaatattgattttgaggcaaaaacgtttggccttttagtgtttgaattatttgagaattttattgaaaaagaaattaaagatccaacttttgttatagattatccggttgaagtctcaccatttgcgagagagaagaaagatcaacaaggtgttaccgatagatttgagctatttgcttttggaagtgaacttgccaatggattttctgaattaattgatccagaagatcaatctttcagactgaaagaacaagctatcaaaaaaagtgctggagacgaggaggctcacgtagaagatgaagattatgttgaggctttacagtatggtcttcctccaacgggaggcttaggttttggaatagatagatttgttatgatgctggttggaaaaccatcaataagagaagttat

SEQ ID NO: 305694 - DNA, 1504 bp, Unknown
  Bacterial polypeptide expressing nucleotide sequence isolated from the Sargasso Sea
atgtcttctccgtcaccaattgataccgatcagccttcgtctactgtcactgctcttctccaggcacgtcgagataaactggcaaaacttcaggaacttggaatcgatccatggggcagtcgattcgataactcccaagctgttgcatcgattcgaaaagagggagaatccatcgctcaggatgctgatgatgggccaaccgttcgtgttgcgggccgcatcatgctactccgcaatgctggtcgattggtctttcttgatcttgttgaccgcactggccgccttcaggtcatgatcggtaaaaagcaggtcggcccagatacctggccagtcgtgggctgccttgatcttggtgatattatcggagtcgaaggcagacttggttattcaaactctggtgaaatgacaatcttcgccagcagtctgacattcctcacgaagtcacttgaaacaccgcccgataaatatcacggcctcgtcgatccagagttgcgtcaacggatgcgttacctcgatctgattcacggtgagggtgtacgcgacagatttgttgctcgaagccgaattattgaggcaatacggcgtgtccttaccgatcgtggctatcttgaagttgaaggaccaacacttcaagaaaccgctggtggagcggcagcccgtcctttcacaactcatcacaatgcactcgacatgccactggtgatgcgaatcgctctagagctccatctgaaacgattgcttgttggtgggatggaacgagtttttgagctgggtcgtgtctatcgcaacgaaggcataagcccccgacacaatcctgagttcaccatgatggaggcatacgaggcctatggtgattacgcctccatgatggacctgacagaagctgtactcgttgcagccgctgaggccgcaggcacaccggagacattcaattggatggggcacgacgtcagcctgaagccaccctttcctcgaaagcgatacgatgacttgcttgctgaggtgacgggctgtgacccagaggatccagcgagcgtggcggctgaggcgtcaaagcatgaaattgaaacagcgggccggcacccagatgtcatcaagagtgaacttttcgaggaaacggttgaaaagacactctccggcccaatcttcgtcattgattatccagcggctgtctgcccactgaccaagagaaaaagtgatgctccggacattgctgagcgatttgagctgtacgttgctggcatggagttagccaatgcctataccgaactcaatgatcctgatctccaggaagagctttttcggacacagttagacggtctttccgacgatgaatccatggcccgaatggatcatgatttcattaaatcacttcgacacggcatgccaccagccggtggcctcggtattggaattgatcgccttgtcatgtttttgacacaggccagttcaatccgagacgtcatcctctttccgattcatcgtccccacactggcggctgat

SEQ ID NO: 305695 - DNA, 1468 bp, Unknown
  Bacterial polypeptide expressing nucleotide sequence isolated from the Sargasso Sea
aatggattctaaagatttaacaaaggtgcaaaaagacagagaggaaaaacttaaaattcttagagaaaaaggttttaattatccaaataaatttgaaaagaaagattatctaggcgagatttcatcaaaatttagcaaaagttcaaaaagctcacttgaggataaaaaagtttccatatgcacagcaggcagaatagttctgaaacgtgttatgggtaacgcagcttttatgacgctagaggatagttctggaaggttacagatttttttatctagaaataaactaaatgaaaaattagatgaagccaaagacttagatttaggcgatatcattggagttaaaggtattttgtttagaacaaatactgatgaacttacagtagatcttgattctttcgagctgttaacaaaatcacttaaaccaatgccagaaaaacataaaggattaacagatatagaaactatttatcgtaaacgctatttggacttaatgagcaatcctgaatcaagagaagtgtttataaaaagaaataaaattattaagtctcttcgaacaaatcttgaatctaacggatttttagaagttgaaactccaatgatgcatccaataccaggaggagcaaatgcaagaccttttgaaactcatcataatgcattagataaaaaactttaccttagagtagccccagagctatatttaaaacgacttcttgttggaggatatgaaaaggtttttgaaatcaatagaaatttcagaaatgagggtatttcgacaattcataaccctgaatttactatgctcgaattctatgaagcatatggagatttacaaagaactgcaaaatttatccagaaattgattcaagatagcattcttgccgtcaatgattcattgaaaattacctatgatcaaaaaaatattaattttgaaaaagactttgaaataaggtcactcaaagagttagttaaggaagagctaaatgttgaatctttagagaatgaagaggatatatttgatcttgcaaaaaagaaaaaaataaaaatagaaaaaaactggggttggggtaaggtgcttcttgagctatttgaaaagtttgttgagaaaaaattatggcaaccaacttttgttaaagattatccttttgaggtgtctcctttatctagaagaaaagatgaagagaaagaatttactgatagagttgagctatttattgcaggcaaagaatttgcaaacttttttaatgagttgaatgatcctcatgatcaagaacagaggttcttagatcaagttaaacaaaaagactcaggagatgacgaggcaatgttctttgatgatgactatcttgatgctctataccatggaatgcctccagcagtaggtgtaggtatcggtatagatagattgattatgcttgcaactgataagacatcaattagggatgtagttttttttcctactttaaagtaa

SEQ ID NO: 305696 - DNA, 913 bp, Unknown
  Bacterial polypeptide expressing nucleotide sequence isolated from the Sargasso Sea
caagttggttacttagaggttgaaactccaatgatgcatcctcttgcaggtggagcagtggcaaggccctttaaaactcaacataacgcattgggcagagacctttatttaagaattgcgccagaattatatttaaaaaggcttttagttggtggttttgaaaaggtttttgagattaataggagttttaggaatgaagggctttcaactaaacacaatcctgaatttactatgatggaatggtatgaagcatatgcaaccatgcagaatcaaatggatttaacccgagacataatattaaatgcctcttatgctgctgggtgtgaatcaataatagaatggaatgacacaaagattaatttaaataattttactcaatccagcttaacaaatttaatactagagcataataaagatctttcaaaagatgatataaataatccaaagaagcttgagaaattcttaaaagataaaaaaataaaagttgaaaagagttggaaaattggcagaatgctgcttgaagtttttgaagaaacagtagaatctaaattaattgatccaacatttgttactgagtaccctgttgaggtttcacctctatcaagaagaaatgaagataatccagattttgctgataggtttgaattatttataggtggtaaggaatttgctaatggcttttgtgaattgaatgaccctgatgatcaggcatcaagatttgaagatcaggtcgctgcaaaggattctggtgataaagaagcaatggattttgatcaagattatataactgcactagagcatggtatgccgccagcagtgggtgttggattgggtgttgataggctagttatgttattaacaaatcaatcatctataagagatgttctgttattcccacaactaaaaaattaat

SEQ ID NO: 305697 - DNA, 744 bp, Unknown
  Bacterial polypeptide expressing nucleotide sequence isolated from the Sargasso Sea
aatgactgaagaacaaaaaagctttaaacaaattgttgagtatcgtaaagaaaagcttgaaaagttgatttctaaaggagtaaacccttaccccgcgctatttaaaccaacccacaaaagtagcgaagtaattttaaactttgatgctcttaacaatagctctttacatttagcaggtagaattatttctatccgaaaaatgggaaaggcttcatttttcaatattcaagatagttcgggtaaaatccagattttcataaaaaaagatgaagttggtgattctgaatatgaggtttttcaattaatggatattggcgatatagtaggaattgaagggattgtttttaggacaaaagttggagaagtttctgtcaaaacggtaaaattatcagtgctttgtaaagctattagacctcttcctattgttaaagaaaaagaagatgaggtttttgatgcatttagcggaaaggagcaaaggtatagaaatagacatctagatttaattgttaatagcgatgtaagagaaacttttgtaaaaagatctcaaatcattaagagtattcgctcttttttagatgacttgggatttctagaggttgaaactcctgttcttcagccaatatatggaggagctaatgcaaaaccatttaccactcatcataacgccttgaatcaaaagttatatcttagaattgcagatgaactataccttaaaaggttaataatagggggaatggatagggt

SEQ ID NO: 305698 - DNA, 882 bp, Unknown
  Bacterial polypeptide expressing nucleotide sequence isolated from the Sargasso Sea
tatgactgaccaacaaacagacgataacaaattgattgcagagcgccgtgcaaagctaagcgctattcgcgagcagtgccgtgcaaacggtttcccaaacagcttccgtcgcgaaaactatgcggatgagcttcaagctaagttcggtgaattcgacaaagaaacgctacaagggcagggtaacaaagtaagcatcgctggccgtattatggcaaagcgtggccctttcatgctgctccaagatatgactggccgtattcaggcatacgcagataaagacacgcaaaaagcgcttaaagcaaaatatggtgcactggatattggtgacattattggcgtggcgggtgacctacataagtcaggtaaaggcgacctttacgtgaacatggagcaatacgagttgctaactaaagcacttcgtccattgccagaaaaattccacggcttgagcgaccaagaaacgaaatatcgccagcgctacgtagatttgatcacaagtgaacaaacgcgcaaaacgttcatgatccgtagcaagatcgtaaacggaattcgtaactatctgactaagcgtgactatttagaagtagaaacgccaatgctacaggttattcctggtggcgcgacggcgaagccgtttgtaactcaccacaatgcgctagatattgatatgtacttacgtattgcgccagagctttaccttaagcgcctagtggttggtggttttgagcgtgtgttcgaaattaaccgtaacttccgtaacgaaggcttatcaacccgtcacaatccagagtttactatgcttgaattctaccaagcgtatgcagactacaatgacctgatgaaccttactgaagatatgctgcgcacgctggcagaagatat

SEQ ID NO: 305699 - DNA, 1504 bp, Unknown
  Bacterial polypeptide expressing nucleotide sequence isolated from the Sargasso Sea
atgagcgaccaacaactcgaccacaacgaactgcaacaggaagaaaacaagctgattgcccagcgcaaggaaaagcttgctgccgtccgtgagcagggcattgccttccccaacgatttccgccgcgaccgcctgtgcgccgacctgcagaaacagtacgagggcaagagcaaggaagagctggaagccgccgccatcccggtcaaggtggccgggcgcatcatgctcaaccgtggcgccttcatggtcatccaggatacgtccgggcgcctgcaggtctacgtcaaccgcaagaccctgccggccgagcaactggaagcggtcaagcacttcgacctgggcgacatcatcgctgccgagggcaccctggcccgctcgggcaagggcgacctgtacgtcgacatgcagaacgtgcgcctgctgaccaagtcgctgcgcccgctgccggacaagcaccatggcctgaccgacaccgagcagcgctaccgccagcgctacgtcgacctgatcgtcaacgaggaagtgcgccacaccttccgcgtacgttcgcaggtgatcgcgcacatccgtcgtttcctcaacgagcgcggtttcctcgaagtggaaaccccgatgctgcagaccatccccggcggcgctgcggccaagccgttcgagacccaccataacgcgctggacatggccatgttcctgcgtatcgccccggagctgtacctcaagcgtctggtggtcggtggcttcgagaaagtgttcgagatcaaccgcaacttccgtaacgaaggcgtttcgacccggcacaaccccgagttcaccatgctcgagttctatcaggcctatgccgactaccgcgacaacatggacctcaccgaggagctgttccgcgagctggccctggccgtgctgggcagcaccgacgtgccgtatggcgacaaggtgttccacttcggcgagccgttcgtgcgcctgtcggtgtacgactccatcctcaagtacaacccggacatcaccgaggctgacttcaacgacgtcgagaaggctcgcgccattgccaagaaggccggcgccaaggtgctcggccacgaaggcctgggcaagctgcaggtgatgattttcgaagagctggtggagagcaggctggagcagccgcacttcatcaccgagtatccgttcgaagtgtcgccactggcgcgtcgcaacgacgacaatcccaacgtcaccgaccgcttcgagctgttcatcggtggtcgtgagatcgccaacgcctactccgagctcaatgacgccgaagatcaggccgagcgcttcctcgcccaggtggccgagaaggatgctggtgacgacgaagccatgcactacgacgccgacttcgtccgcgccctggaatacgggatgccgccgacggctggtgaaggcatcggcatcgaccgcctggtgatgctgctgaccaactcaccgtcgatccgcgacgtcatcctgttcccgcatatgcgtccgcaggcttgat

SEQ ID NO: 305700 - DNA, 1108 bp, Unknown
  Bacterial polypeptide expressing nucleotide sequence isolated from the Sargasso Sea
tttaccagataaatggcatggtttgactgatattgaaaaaaggtatagacaacgttatctagatttaatagttaatccgcattctaaaaatgtatttaaaacaagagcaaagtgcataagttttataagaaaatggctagataatagaaattttttagagatagagactccaattctgcaatccgaagcaggtggtgctgaagcaagaccatttataactcatcacaatacattagatattccgttgtatttaagaatagctacagaattacatttaaaaagaatggttgttggaggatttgagaaagtgtatgaattgggaagaatcttccgtaatgagggaataagtacaagacataatccagaattcacatcagttgaaatttatgaagcttattctgattatgtcgatatgatgaatttaactgaagaattaattaaagatattgtagctgatgcatgtggttctttaattataaattatcaaaataaagaaatagatttttctaaaccttggtcaagaatatccatgaaagatattgtcaaacaatttacagggattgattttgattctttcaatggagactttctagcggcaaaacaagccgttaaaaatataaatgttgatttctctaataaagtcaatactatgggaagacttttaaatgaggtcttcgaacagaaagtggaatcaaaactgatagaacccacttttattatcgattatcctgttgaaatttctcctttagctaggcctcatcaagataataaagaaatagtgcagagatttgaattatttattgttggtcgagagctggcaaatgcgtttagtgagttgatagatccagtagatcaaagagaaagaatgcaattacagcaatctcttagagatgaaggagatcttgaggcccattgtatagatgaagattttttgaatgctttagagattgggatgccgcctactggaggattaggtataggcattgataggctaattatgttaattactaatagcgcatcaattagagatgtaatccctttcccattgttaaaaccagaaataacttccaaaaaaagtgaaaaattacccttgaatgaagtaaaataa

SEQ ID NO: 305701 - DNA, 1296 bp, Unknown
  Bacterial polypeptide expressing nucleotide sequence isolated from the Sargasso Sea
tcttcatcgagaaggcctttctgaatttagccagttcgaatgatcccgatgcctttgcgcatctcactggccttgttgattctggcgatctgattggcgtggagggcaccctgcgtcgcactgatcgcggtgagttgtcagtgaaggtttcggcctggaccatgctcagcaaaagcctgcagccattgcccgataaatggcatggcttggctgatgtggagaagcgctaccgccagcgctatctcgatctgattgtctcccccgagacgcgggagacttttcgccgccgtgctcgattggtgagtgctattcgtcgttggctcgacgagcgtgatttccttgaaattgagaccccggtgctgcagagcgagcctggaggcgctgatgctcgtccctttgagacccatcacaacgctcttgatttatcgctgaccctgcgcattgctactgagctgcatctcaagcgattagtggtgggcggttttgagcgtgtttacgaactaggacggattttccgtaatgagggcgttagtacccgccacaaccctgagttcacgtcggtggagatctatcaggcctatgccgattacaccgacatgatggatctgaccgaacagctcatcagtgaagcctgcgagcaagtctgcggcggcacccagatcagttaccaaggcacagctatcgatctttcccccgggtggcggcgagccaccatgcatgagctcgttcaggaagccactggccttgatttcaactctttcgcaactcgtgaggaggcagccgaggccatgcgtgctcaaggtctccaggttccggcgctagctgattccaccggccgtctcctgaatgaagcctttgagcaggcggtggagacgaccttgatccagccaacttttgtcaccgattacccggtggagatctcacccctggctaggccgcatcgcagtaagccagggttggttgagcgctttgagttgttcatcgttggccgcgagcatggcaatgccttcagtgagctgaccgacccggttgatcagcgccagcgccttgaatcccaacaggctcgtcgtgctgccggtgatcttgaggctcagcgggtggatgaggatttcctcatggcgctggaggtgggcatgcctcccaccggtggtcttggcatcggcatcgaccggctggtcatgcttttgaccgatagcccctcgatccgtgatgtgattgctttccctttgctgaagccggaaagccgagattggaccgcaacagtggataatggttccactgagcagatttcctagc

SEQ ID NO: 305702 - DNA, 1462 bp, Unknown
  Bacterial polypeptide expressing nucleotide sequence isolated from the Sargasso Sea
attgctagaattaagaaaggctaagcttgatgagcttagatcttctggaaatgcttttccgaataaattcaaaagagactcattagccaatgatctgcactcttcttatggagaactagagaatgaagacttggaaaagaaaaaagacgttttttctgttgctgggagaattatgctccaaagaataatgggcaaagcaagttttatgaccattcaagatatgtctggtcaaatacaagcctatttaaccaaaaatgatctgcccgaaggtgtatatgattcttttaaaacttgggatctaggtgatattgtcggcgttaaaggtaagctttttaaaaccaagacgggtgagctgactatacacgctaatgagatagaactattaaccaagtctttgaagcctttacctgaaaagcatgctggattggttgatactgaacaaaggtatagaaaaaggtatttggatttaatcaccaatgaagaaagtctagaaatatttaagcaaagaagtttcttgattaaagagatcagaagtttttttgatgacgaaggatttatggaggttgaaactccgatgatgcattccacactaggtggagcagctgccaaaccttttgttacacatcacaacacacttgatttagatctgtacttaaggattgcgcccgaattgtatttaaagaggctagtcgttggcggaatagaaaaggtttttgaaattaatagaaattttaggaatgaaggcttatctacgaaacataatccagagtttactatgttggaatattacactgcgtacgctgattttgatgaccaaatgtcatttttagaaaagttgtttgcgcatttagccagtgaattaaatggttcttctaagatttcaattgaaggtaagaattatgatttatcgaagccttttaaaaggattgggttgcttgaatcagtcgcaacaaaactttctatagctgaagaagacctttccgaccgaaagaaactagaagagttatcgaaaaaacataagatagaagactataaatcttattcggatggaaaattacaatttgaattatttgagaaggttgttgaagacgatttgattgagccaacttttattgtcgattatccggtagaggtttctccactttcaagactttctgatgataaagaaggcatagtggataggtttgagcttttcattggcggcaacgagattgccaacggattttctgagttaaacgaccctgaagatcaagcagaaagatttaaagcgcaagtagaacagaaagcttcaggagatgaagaggccatggaatacgatgaagactacatcgaagctcttgagtacgggttacctccttgcgcaggagtgggtattggaatagataggcttgtaatgttatttaccggagcagagtctatccgagatgtcttactattccctcaaatgaaacctaagtcttaa

SEQ ID NO: 305703 - DNA, 791 bp, Unknown
  Bacterial polypeptide expressing nucleotide sequence isolated from the Sargasso Sea
tatgcagtatcacgataatagcttaataaatagcagacttataaaactaaataaaatcaaagaactagggattgacccctatccagctaggtattcccgtacatctgacatattaacgtctgtcaataattttattgaacaagaatccgagtcctccgatccacataatgatgatggcgataaaataaccctggcagggagaatcatagcaatcagaggaatgggtaaagcaaaattcattgatatccgtgattatagtgacacaattcagattctatttagatccaatgtcctaggagaacagttcgaattacttgaccatctagacataggtgattttataggtgccaaaggtaatgttatgaggactaggacaggacaagtaaccttacatgccgatgaattcactatcctatgcaaaggaatcagacctctgccggaaaaattccacggtttaaaagacactgaaactcgctacagacaacgatatttagatttaatcgccaacgaagaagttataagtactttcgccaatcgcagcaagctcttaacagctttaagagaatttatgaatgatcgtggcttcattgaagtcgagacaccagttttagtacctataccagcaggtgctcatgccaagccatttgtaacattccacaacgcattagacgagaatttatacctccgtatagctactgaattatatttgaaaagattaatcattggaggttttgacaaagtatatgagataggcagggtattccgaaatgaaggagtggatcaaaatcaca

SEQ ID NO: 305704 - DNA, 550 bp, Unknown
  Bacterial polypeptide expressing nucleotide sequence isolated from the Sargasso Sea
tttataagaaaaccattttttgaacttttgagtgaagcccctggtcataatatggccgatttagatgaaaaaaagctcagagaaatatgtactgaaaaagagataagcattgatgttgattttaatctagggcaaatacttgatgaattaatgagtgaattagttgaaccaaaacttatccagccaacttttgtaatagattatcctaaagagatatctcctttagcaaaagcacataggaatggaaatccaagtatagtagaacgttttgaattatttataggaggtgcagagtttgcaaactctttttcagagctaaatgacccaatcgatcaaagaaatagattggaagctcaagcactgctcagagagagaggtgatgatgaagcacagccaattgatgagaactttattcaagccatggaatgtggcatgccaccaactggtggagttggtataggtattgaccgccttacaatgcttctgactggcaatcgctggataaaggatgtgatcttattcccgatcttgcgttctgaaaatatataaa

SEQ ID NO: 305705 - DNA, 1540 bp, Unknown
  Bacterial polypeptide expressing nucleotide sequence isolated from the Sargasso Sea
ttgtctgaaattaaagaagcgcgcttacaaaaagctagttcactcgtgaataaaggatttgcttcttacgcacagagctttaaggtatcacatactaccagttttcttattcaaaaatttgatcatctagaaaatggtcaagaggaagacttcagtgtttctattgctggtagagttctggcaaaaagggtaatgggcaaaattgcctttttcacaataagcgatcaagaaggtcagattcagctttatctagataaaaggattattaatttcaatttagaaaaacaaaaattactttcttttgaagatctcaaggaaatagtagatattggtgattggataggagtctatggaactattaaaaaaactaataaaggtgagctttcaattaaagtagaaaaatgggaaatgttatccaaatcattacaacctctcccagataaatggcatggattgactgatattgaaaaaagatatagacaacgttatttagatttaatagtaaatcctcactctaaaaatgtatttaaaaccagagcgaaatgtataagttttataagaaaatggctagataatagaaattttttagagatagagactccaattctgcaatctgaagctggtggtgctgaagcaagaccatttataactcatcacaatacattagatattccgttgtatttaagaatagctacagaattacatttaaagagaatggttgttggaggttttgagaaagtctatgaattgggaagaatcttccgtaatgaggggataagtacaaggcataatccagaattcacctcagtggaaatttatgaagcttattctgattatgtagatatgatgaatttaactgaagaattgattaaagatatcgtagctgatgcatgtgggtctttaattataaattatcaaaataaagaaattgatttttctaagccttggttaagaatatccatgaaagctattgtcaaaaaatatacagggattgattttgattctttcagtggagactttctagcagcaaaacaagccgttaaaaatatcaatgttgattgttctaataaagtaaatactatgggaagacttttaaatgaggtcttcgagcaaaaagtagaatcaaaacttatagaacccacttttattattgattatcctgttgaaatttctcctttagctaggcctcatcatgataataaagaaatagttcagagatttgaattattcattgttggtcgagaactggcaaatgcgtttagtgagttgatagatccagtagatcaaagagaaagaatgcaattacagcaatctcttagagatgaaggagatcttgaggctcactgtatagatgaagattttttaaatgctttagagattggcatgccgcctacgggaggattaggtataggcattgataggctaattatgttaattactaatagcgcatcgattagagatgtaatccctttcccattgttaaaaccagaaataacttctaaaaaaagtgaaaaattaccctcgaatgaagtaaaatagt

SEQ ID NO: 305706 - DNA, 1495 bp, Unknown
  Bacterial polypeptide expressing nucleotide sequence isolated from the Sargasso Sea
aatgtctgaagagaataaaagtttaagtcaaataattaattacagaattgaaaagctatccaagttaaaagaaatgggttttgagccttatcctcataaatatgacagaactcatagcagtacagaaatattaaataattttgagaatctagaagataaagatgtttctatatctggtagggttatggcattaagaaaaatggggaaggcatcatttatccatattatggatgcatttggtcagattcaggtttttataaagaaggacactgttggtgaaaaagtttatgaagcttttaaattaatagatatcggcgattttttagggatatgtggattggtttttaaaacaaagacgcaagagatctccattaataccaggcagtttactattttatcaaaaagcattaggccacttccaatagtaaaagaaaaagaaggggaggtgtttgatgcttttaaggataaagaattaaggtatcgtaatcgtcatttagatttaatagtcaatccagaaactcgagaggtgtttaggaaaaggacacaaattatatctgatatcagatcaactcttgattcaaaacaatttttggaggtagagacacctgtgttacagccaatttatggaggagcaaatgcaaggccattcacgacacatcacaatacattagggcagaagttatttcttagaatcgccgatgaactttatctaaaaagattaataattggtggatatgagaaagtatatgaaattgcaaaggactttagaaatgaaggtatggatagaagtcataaccctgaattcacgatgcttgaattttattgggcatatgcggattataatgattgcatgattttggttgaagagatcataagaagtgctgcaaaaaaagttggaaaattaacaattaaatggggagaaattgatatagacctttcaaaaaaatttgaatgcaaaacattttatggattattaaatgaagcaaccggtaaggatatctctttattggatgataatgacctttttgatgtatgtaaaagtcaaaatttagaaatagaaaaaaatgcaaatactgggcaaatgttggatagcttgatgagtactttgattgagcctaaactaattaacccaacatttgttatagattatccaaaatctatatctccacttgcaaaattaaaacgagatggtagtcaaaatattgttgaaagatttgaattatttataggaggttctgagtttgctaattcatttacagagcttaatgatcccattgatcaaagagaaagacttgaggcgcaagcattactaagagaaaagggtgacgaagaggcgcagccaatagatgaagattttattcgtgcaatggaggtgggtatgccaccaacaggtggtgtgggaataggtattgataggcttgttatgcttctaacaaataatcgttggataagagacgtaatattttttcctacaatgagagcagaaaaacactaa

SEQ ID NO: 305707 - DNA, 1027 bp, Unknown
  Bacterial polypeptide expressing nucleotide sequence isolated from the Sargasso Sea
gagcaaagatatagaaaaagatacttagatctgattacaaactcagaaagcttagaaattttcaagaaaaggagtcaaataataagctctataagagagttttttataaatcacgaatatttagaagtagaaactccaatgatgcactctattctcggtggcgcagcagctaaaccatttacaactcatcataatgcattggatatggacctttatttgcgtatagcacctgaattatatttgaagagactcgtggttggtggaatggaaaaagtttttgaaataaatagaaattttagaaatgaagggttatctacaaaacataatcctgaatttacaatgttagagtactataccgctttcgctgattttaatgatcaaatggagtttctagagagactttttaaatttgtttcagaagaagtattgggctcatcaaagttagaaactgaaaatataagctatgatttttctaaaccatttcaaagaattagtttgaaagaaacagtttctaagaaactttctatcgatcctatctcatttgatgatagaggtttccttctggatttaggaaaaagatataagtttgaagatatagaaaatctgtcaaatggaaaaattttatttggattatttgaagagcttgttgaatcagaattaatcaatccaacattcattactggatatcccaaagatgtatcgcctctatcaagagtttcggatgaaaaccctcatgaagttgatagatttgagttatttattggaggtaaggaaatagctaatggattctcggaattgaatgatcctgatgatcaggcagaacgttttcaagatcaggtatctcaaaaatcagcaggtgacgaagaggctatggaattcgattctgactacatcgaggctttggagtatggtttaccaccctgtgcaggggtaggaatcggtattgatagattggtgatgttacttacaggtgctcaatccatcagggatgtactcctattcccgcaaatgaagccaaaaaattagc

SEQ ID NO: 305708 - DNA, 1474 bp, Unknown
  Bacterial polypeptide expressing nucleotide sequence isolated from the Sargasso Sea
gatgacagacgaaaaagatcttataagagagagaaaaaagaaattagaaaatatttcagaattctcgctagcatatccgaataaagtaattaaatctgacacaaccaggtctttaataaatacctgctctaacgaagataaaaagagtctagaagaaaaaaatattttaacgaatatatgcggtagagtcatgaccataagagaaatgggtaactcggtttttgcagatttacatgatgaatacggaaagattcaaatatatcttaacaagaaaaatttagatgaaatatcacagaatatgtttaaaaacttagatcttggagatatagttggaatatcaggtataatatttaaaacaaaaactcaagagcttacaataaatgttgactcttttttgattctgtcaaaatgccttagaccgctcccagaaaagtttcatggtattgctgacattgaaataaaatacagacaaagatatttagatttaatgacaaattttgaaacacgcattcatttcaaaaaacgctctaagattataaaaataatcagaaattacttcgatgagagagattatattgaggttgaaacaccgatgatgcatataataccaggaggcgctaatgctaaaccatttattactcatcacaattcattagacatggatctttttctaagaatagcacctgaactttttttaaaaagatgtattattggtggctatgaaaaagtttttgaaataaatagaagttttagaaatgaagggctatcgattaaacataatcctgaattcacaatgattgaattctatagcgcatatgaaaactatgaatatttgatgcaaactattgaagacatatttaaaacattggtactgaatcttgacatcaacaaaaaatcatactatcaagactttgaaatagattattcaacacctttcaaaagaattacttttcatgagtgcatagcagaaaatgctgataattttgataatacccatatcaatgatttaagttatttaaagaaatattgtctcgagaataatttgaaaactcaaaatggaacctccatagaaattttgcagcttgaaatatttgaaaaaatgatagagaaaaagttaatttctccaacatttgttacacattaccctaccaaggtaagtcccctagctagggctacggatgacaatcctgatttaactgagagatttgagctttttgtagcaggaagagagatagcaaatggtttttcagaactaaatgatccattagaacagtcaaaaaggttttcaaatcaactatcagtatcagacgatgagaaaatgaaatacgatgaagattttataaaagcaatggagtatggcatgccgcctacggccggagccggcattggtattgatagattaatcatgctattgacagacaagtcatctattagagatgtactattatttccacacatgaaacctaaatcataa

SEQ ID NO: 305709 - DNA, 808 bp, Unknown
  Bacterial polypeptide expressing nucleotide sequence isolated from the Sargasso Sea
gatgtcagataaaaattcaaaaagtgacaatcgattagtcgatgagagaagagaaaaactcaatagcttaagagagggtggtttcaactatccatccacgataaaaattaactcatctactgcttcaatcatcgatgagtatgactcgatgaaaaaagaggatcttgagggcattgatagagaattctcaatcgctggtcgaatgatggcaaaaagagtaatgggaaagtccagtttctctcgaatcaaagatggaaaaggatcgatccaagtttttttgagtaattctgatttgggcgatgactcttatgaaagctttaaaacaatggatgttggagacatcgtttgggtaagaggctcgctctttcgaaccaaaacagatgaattaacactgaatgtgaaggagcttgttcttctcagtaagtctctgagaccattacctgaaaaataccatggtttaaccgataccgagattcgctataggagaaggtatttagacctgatgatgtcagaggagagtgctgaggtattcaagatcaggtcaaaagtcgttacccagataagatcttttctaaatgatctagatatgatggaagttgaaactccaatgatgcatccgataccaggtggagcagttgcgagaccattcatcactcatcacaatacactcgatcaagatttctatttgagaattgcgcccgaactctatttaaagcgtcttacagtgggtggctttgatcgtgtttatgaaatcaatcgctcattcagaaatgagggagtttctacgcaacataatcctgaattcacc

SEQ ID NO: 305710 - DNA, 769 bp, Unknown
  Bacterial polypeptide expressing nucleotide sequence isolated from the Sargasso Sea
atggataaagaaaatttaagtggagaaaaagctctcatagaagagagaagaaaaaagcttgagcaacttagggataagggagatgcttatggtaactcttttaaacctcaaaacagtgcaagcaaacttcatgaggaatatggagttttttcaaaggaagaccttgtaaaaaaagatattaaaaatatttcagtagctggtcgaattgtgcttaaaagagtaatgggtaatgcaagttttgcaacactcagagattcatcaggagatattcaaatatatgtaacaaaaaataatgttcatgagtcagtttacgaggattttaaaacttgggatttaggagacattgttggtgtatcaggttctttattcagaaccaaaacagacgagctgactatagatgtatgggatctagaaatgattacaaaatcattaaggcctatgccggagaagtttaaaggacttaccgatatagaagcaagatataggcaaagataccttgatttaatgactaataacgaaacgaaagaagtttttgttaaaagaaccaaaattatcgattcaatgagaagaaaaatgaatgagtatggttacttagaagtagagacaccaatgatgcatcctttagctggcggtgcagtagcaaggccatttgtgactcaacataatgctctggggcaagatttgtatttaaggattgccccagaactatatttaaaaagacttttagtaggtggctttgatagagtattgaaattaatagaagtttaga

SEQ ID NO: 305711 - DNA, 1492 bp, Unknown
  Bacterial polypeptide expressing nucleotide sequence isolated from the Sargasso Sea
atgagtgaagataaaataggcggcgaaaaagctattcttgaagaaagaagaaaaaaacttgaaaacttaagggacaaaggtgttgcttatgctaattcttttcgaccaaagaatagtgcaaatgaaattcataaactatatggcgaaacctctaaagatgatttagccgaaaaaaacattaagaacatttcaattgcaggaagaattgttctcaagagagtaatggggaatgcgagctttgccactttacgagatgccagcggagatattcagatatatgtaaccaaaaacaatattgatgaaagtgtatacgatgattttaaaacatgggatttgggggatattgtcggagtttctggatcgctattcaggacaaaaacagatgaactcacgattgaggtttgggacttagaaatgattactaaatctttacgaccgatgccagaaaaatttaaaggcttaacagatgttgaggctagatataggcaaagatatctagatttaatgacaaatacccaaactaaagaaatttttataaaaaggacaagaattattgactcagcaagaaaaaagatgaatgaaagaggttatttagaagtagagactccaatgatgcatcctttggcaggaggagctgtagcaagaccttttgtaactcaacacaatgctttaggaagagacttatacttacgaatagctccagagctttacctcaaaagacttttggttggtggttttgataaagtttatgaaataaatagaagctttagaaatgaaggactttctactaaacataatcctgaatttactatgatggagtggtatgaagcatatgcaacaatgcaaaatcagatggatttaaccaaagatatcattgtgaatgcggctaaagctatagattgtggtgagaggattcagtgggatgagttagagattgatcttggaaagttctctcaggagaagttatcagaccttgttttaagttataacaaagatctaagtaaaaaagatttaaatgacaggtcagcactcgagaaatattttaaaggactaggaaaggagacagataaaagttggggaacaggtagattattactggaaatatttgaggaaaccgttgaggaaagacttattaatcctacatttgttacagagtacccagtagaggtttcccctctttcaagaagaaaccctgacaatccagactttgcagatagatttgaattatttattggtggaaaagagtttgcaaatggtttttgtgagctcaatgatcctgatgatcaggcttcaagatttgaagcacaggtcgctgctaaagattctggagataaggaagcaatggattttgataaggattatattacagcactggagcatggaatgccgccagcagttggagtagggcttggaatagataggttagtaatgcttcttaccaatcagtcatctataagagatgtattactgtttcctcagttaaagaattaga

SEQ ID NO: 305712 - DNA, 1696 bp, Unknown
  Bacterial polypeptide expressing nucleotide sequence isolated from the Sargasso Sea
aatgtcaaacctttctgaacaagagctaattagaagagaaaagctcaaaaaaattagagagctgggtatagagccctatcctgctgacttattcaaaatttctagtaattcaaaaacaattaagtccaactttaaagaaggtagtaaagtaatagtagctggtagattaatgtctagaagaattcaaggtaatgctagctttgctgaattgcaagatagttcaggaagaattcaagtatactttaatagagatgaaatctgtacaagtgaagataaatctaaatacaatgaattatataaaagactattagatattggagatataattggaatagagggtgaattattcaaaactaaggttggggaaaaaacaataatggttaaagattttaaattgctatccaaatctttaaagcctcttcctctcccaaagactgatgctgaaggcaatgtatatgatgaatttacttcaccagaacttagatatagacagagatacgtggacttaatagttaataaaaatgtaaaggatacatttataaaaaggtctaaaattatttcatctataagaaattctcttgaaaatgaggaatttattgaggttgagacaccaattcttcaaccaattccaggaggagctgcagcaaaaccatttatcactcaccacaactctttaaatattccactatatatgagaatcgcaaatgagttatatttaaaaagacttattgttggtggttttaatggggtttttgagtttgcaaaagattttagaaatgaaggaatggatagaacacataatcctgaatttactaatcttgaattctatgtagcttataaagattacaactggatgatgagttttacagaaaaactattagaaaatgttgcaattgattgtaatggaaaatctattgttgagtatggagataaacaaattgaatttaaaggtccttataaaaaaatagggataattgatgcaataaaagaagaaacaggaatagatgcgttatcactaaatgagagtgaattaagagaggctgcacaaaaaattggtattgaaatagatgatactatgggtaaaggaaaaataattgatgaaatttttggtgaaaaatgtgaatcaaagttcatacaacctacttttatcattgattatccaaaggaaatgagcccactaaccaagcaacatagggataatccgctattgactgaaagatttgaacttctaataaatggtagtgagattgcaaatgcctattctgaattaaatgatccaattgatcaacttgaaagatttgaggaccagctaaagctctcagaaaagggagatgaagaagcaatgtttattgattatgactttgtaagatctcttgaatatggcatgcctccaacatcgggaataggaattggaattgatagattagttatgcttctaactaaccacaaatccattcaggaagttatattttttcctcaaatgaaacccgagaatgaattaaaagtagatttaaatgaagatgagaaattaatctacgatagagtaaaagaattaaagaaaactgatctaacttccttgaaggaatcttctggtttaagtaataaaaaatgggacaaaagcataaaactactcacaaaaaataacttagttaaagtctcaaaagacgatcaaggtctattcgtagagatcgtttaa

SEQ ID NO: 305713 - DNA, 1495 bp, Unknown
  Bacterial polypeptide expressing nucleotide sequence isolated from the Sargasso Sea
atgtcagatcaacataaaagcttaaaacaaataatggcatttcgtttagaaaaattggatacactaagaaaagctggcgttgacccatatcctgtaaaattcaatccatcacactctagtgagagcatcaaatcaaattatgatgaattagaagggaaatcagttaaaattgctggtcgaatcatggccatcagaaagatgggtaaagcatcttttgcgcagataatggattgtgaagggaaaatccaattttttattcgaagagatgatgttggtgatgaatcttattcatattttaagttattagatattggtgattacgtaggagttgaaggattagtatttactacaaagacaggagagatatctgttcatacttcaaccatcactattttagcaaaaagtatccgcccattacctgtagtaaaagaaaaagatggtcaagtgtttgattctttttcagataaggagcaacgctatagaaaccgacacctagatttaatacttaatcccgaggtaaaggaaacatttattaagagggcatctataattagatcgatcagagaatttttagatgcgaaaggttttcttgaagtagaaacaccggttttgcaaccattgtatggtggtgctaatgcacgcccttttactactcatcacaattcattggatcaaaccctttatctaagaatagcagatgaactttatttaaaaagactgattataggtggttttgatagagtatatgaaatagcaaaagattttcgaaatgaagggatggatcgaaatcataaccctgaattcaccatgctagaattttattgggcatatgctgattatgaggattgcatggaattagtagaagatcttatcagaagatctgcaaaaaaaataaatgcattgagcattaattggggtggtatggatattgatctatccaaaaagtttattagaaaaccttttatagagctacttaatgaggcgacaggccacgacatatcagaactagaccaagaacaacttaaaaaaatatgttctgaaaaagacattaatattgatgacaattctaatctgggtcaaattcttgatgaattaatgagccagttagtagaaccaaaactaattcaaccaacatttgtaattgattatcctaaagcaatatctccgctagctaaagcgcatagggatggtgaccctaatttagtcgaacgttttgaattatttattggtggagcagagtttgccaactctttttcagaattaaatgaccctattgaccaaagagaaaggctagaagctcaagcaatattaagagatcgtggtgatgatgaagcacaaccagttgatgaaagttttattcaagctatggaatgcggaatgcctccaacaggcggggttggaattggtattgaccggctaacaatgctacttacaagtaatagatggataaaagatgtgattctattcccaacattgcgatctgaaagtccttgaa

SEQ ID NO: 305714 - DNA, 1486 bp, Unknown
  Bacterial polypeptide expressing nucleotide sequence isolated from the Sargasso Sea
catggaaaacttatctgaagacagaataattaaagatagacttgaaaaacttgaaaaattacgaaaattaaaaattgatccctatccaaatagatgggagaaagatcgaactataatccatgatgctattacagcatatgatgattccaatgaaagtgctaattctaagcaattatgcatctctggaagaattattgctaaaagagcaatgggaaaaattatattctttgatatcaaagatcaatcaggaaaaattcaattacattataaggaagaagaatccgaaataaataaagactttttagatttaattgatattggagatattgttggagtagagggacatttatttagaactcgtagaggagagcttaccttagatttacacgatattgttattctgaccaaagcaataaggcctttacctgataaatggtcgggtttaaaagataatgaaataagatataggcaaagatatttagatcttatttctaatgaggagtctctagaaattgctgtgaaaagatctaaggctatttcatcagtaagaaactttatgaataatagaggttttttggaagtagaaacccctatattggttgatattccagctggtggcagggcaatacctttttcaacctatcatgagtctcttgagaaagacctttttttaagaatagccacagaacttcacttaaaaaaattgatagtaggtggaattgaaaaagtttatgaaataggtagattatttaggaatgaaggaattgatcatgatcataatcctgaattcacaactatggaatcatatgaagcttatgaagactataatactgttatgagaatggttgaagatttagtctcttatgtttcaattgaagtaaatggaactacaaaaattaatatatctgatgatcttactattgatttagcaccaccttggcaaagactagatttaagaaaagctattattgataatacagggatagattttttgaagtttaaaaataataatgatttagccaatgaaatgaagaataaagggtttgttgctgaccagaatgaggcttggggaatattgcttgacagattgatctcacaaggagttgaacctaaactcattaaacctacatttctattagattatccaatagaaatgtctcctttagcaaagttaaaacctggatctaaagatgtagtagaaagatttgaagcatttgtattgggccatgaattggcaaatgcatttacagaattaaatgatcctattgatcaaaggaatagatttttagaacaagaaaaacaaagaaaaaatcttggagataaagaggctgataggctagatgaagatttccttatttcaattgaacatggtatgcctccaactggtggtttgggtattggtattgatagattaataatgcttattacagctcaagatcaaattagagaagttttgttatttccacaattaagaagtaaaaaataa

SEQ ID NO: 305715 - DNA, 893 bp, Unknown
  Bacterial polypeptide expressing nucleotide sequence isolated from the Sargasso Sea
tgagacaccaatgatgcatcctttagctggcggtgcagtagcacgtccatttgtaactcaacataatgccctgggacaagatctttatttaaggattgcgccagaactttatttaaaaagacttttagttggaggttttgaacgcgtttttgaaattaatagaagtttcagaaatgaaggcttatctacaaaacataatccagaatttaccatgatggagtggtatcaagcctatgcaagcatgcaagatcaaatggatttaacaaaagatattattttaaatgctgctaaagcagctgactgtgaatcgaaaattgaatggggagatattaaagttaacctaaataattttaaacaatcaactctttcagatttagttttagagtttaataaagaattaagtaaagatgatttaagtaataagaaaaaacttcaaaatattttgaccagcaataaagtaaaagttgaaaaaagctggggtattggcagaattcttttggaggtatttgaagcaactgcagaaggcaaattaatcgatccaacatttgttacagaatatcctgttgaagtttcgccattgtctagacgaaatgaagaaaatccagattatgctgatcgatttgaattatttataggcggaaaagagtttgctaatggtttttgtgaacttaatgatcctgatgatcaagctactaggtttgaagaacaagtggctgcaaaagactctggagataaagaagccatggactatgaccaagattatattacagcgcttgaacatggtatgccgccagcagtaggagttggaatgggtgttgataggctagttatgttattgactaatcagtcttctattagagatgttttgttatttcctcaattgaaatcttagt

SEQ ID NO: 305716 - DNA, 1105 bp, Unknown
  Bacterial polypeptide expressing nucleotide sequence isolated from the Sargasso Sea
actgaatgtgaaggagcttgttcttctcagcaagtctctcagaccattgcctgaaaaatatcatggattgactgataccgagattcgctataggagaaggtatctagatcttatgatgtcagaggagagtgctgaggtattcaagatcaggtcaaaagtcgttacccagataagatcttttctgaatgatctggatatgatggaagttgaaactccaatgatgcatccgataccaggtggagcagttgcgagaccattcatcactcatcacaatacactcgatcaagatttctatttgagaattgcgcccgaactctatttaaagcgtcttacagtgggtggctttgatcgtgtctatgaaatcaatcgctcatttagaaatgagggagtttctacgcaacacaatcctgaattcaccatgttggaactatatgttgctcacgaaaccccagattttctcatgaacatgattgaggatatgatgagggcgatttctcaagaattatttgggtctgataagatcgaatatcaaggagaaacgatcgattttacaggccattttcagaggctcaccatggaggagtcagttttgaaatataatccagaattaagcaaagaaaaagtcagagatgctgaatatctgagatcatttgctcaaggcatagatatctcagtcgaaaatgatgctggtgctggaaagattttatttgagatttttgaaaagacagtggaacatcaactcacgcaacccacttacattacgtcttatcccagagaaatctctccactttcaagagcgaatgatgatgatccttggatcgtagatcgttttgaattttttataatgggcagagaattagcaaatggatttcaagagttgaatgatcctgatgatcaggctgaacgttttgaagatcaggtcaaagccagagatgggggagatgacgaagcaatgttttttgatcaggattatattgaagcacttgaatatggtatgcctccaacagctggtttgggagttggtatagatagacttgtgatgcttttctcaaatcaagcgtcaattcgtgacgtcctactttttcctcacatgaggtcgaaataa

SEQ ID NO: 305717 - DNA, 1498 bp, Unknown
  Bacterial polypeptide expressing nucleotide sequence isolated from the Sargasso Sea
aatggatgaaaaagtagatcagctaaaagtcaggttaggtaaacttgaaaaaattcgtgaattgggtactgagccttatccttattcttttaagcaaagccatacacttttagaggtgatagagcagtcagataaactacttgaaaatcagcaaattataacaattgctggacgcatgttggcaatcagaggtaaaggtaaagccagtttctgcaacattcaggctcaacataagcggctgcaggtatatgtcagacttgacgttttaggtgaatcagcatttgaaatgtatatgttgtgtgatataggtgaccatttaggtgtatctggctcattaatgaggaccaacacgggtgaacttactttacgagcaagtaaagttgaattgcttgctaaatctgttcgtccattgccagttccaaaaattcaggaaaaagaaggtcaacggattgtatatgacgaagtaacagacaaagaatttcgttatcgtcagcgttatgtagatttaattttaaatccccatgtttcagaagtttttcgtaaacgagctcttatatttcagacaattagaaactatttactggaagaatgttttttagaagtagaaacaccaacccttcaatcagtttatggaggagcaaatgccaccccttttgttacacatcataaggcacttgatcagcagttttttttgcggatttcaaatgagctatacctaaagcgacttattgcaggaggatttgatgcggtatttgaatttgttaaggattttaggaatgaagggattgaccgtactcacaatcctgaattttcttctttggaattttatcaggcatatgttgattacaccaagataatgcatcatacagaaaaaatctgtgaacgttgtgcactggcagtgaatgggaaaacaaagtttgaatatgaaggtaatactatagacatgaaagctccttggcctcgtttaaccatgctggaagccattaaagaattaggctcaattccctttcattcaatgagcgattctgatgtgcaactattacttgataataacggctgggaacttgaaggtgattacaatcgtggactggcaactcaacttgtgtttgaaaaaacctgtgaagataagcttattcagccaacttttataactgaccatccgaaggaaacaagccctttgtgcaagcaaacccgtcagaatcctgaattaattgaaagatttgaagtctttatcaacggctgggaaatagccaatgcatattcggaacttaatgatccggttattcaacgtagattaatggaagaacaggttgaacgtggtagaggaggagaaaaggatactcatcctctggatgaagattttcttcgtgcaatggagtatggaatgcctcctatgggaggagttggatttggaattgatcgaatagttatgttgcttacaggtcaatctactattcgtgacgttattttatttccaaccatgcgtactgaattttaa

SEQ ID NO: 305718 - DNA, 1477 bp, Unknown
  Bacterial polypeptide expressing nucleotide sequence isolated from the Sargasso Sea
aatggaaaataaaagtttaaaacaaattatagaaaatcgacttgaaaagttaaaaaaaatccgtgaattaggaatagagccttacgcatacgactatgatagctctcatcacacatcagaaataaatgaaaagttaattgatactaaagtttctttagcaggaagagttatgtctcttagaaaaatgggtaaagcatcatttgctaatattcaggatcaagagggacgcatccaattttatattgcaagagacgacgttggtgaagataattataatttatttaagctaacggatataggtgattttgttgggattgagggcaaggtttttaaaactaaaacagatgcattaactatcaaagtttcccatctaacaatcttatctaaaaatataaagccaatacctgatgttaaagaaaaagatggtgagaaatataatttagtttcagataaagaattcagatatagaaaaaggtttcttgatttaattattaatcctgaaacaaaaaacaattatgtgaaaagatttaaaataattaactctataagatcatttttaaatgatcacggatatattgaggtagaaacacctgtattacaaccaatatacggaggggcaaatgctaagccatttaccacacaccataatgcattagatcaggatttttaccttcgtattgcaacagaattatatttaaagcaattgattgtaggtggatttgaaaaggtttatgaactttctaaagattttagaaacgagggcatcgatagaagccataatccagaattcactatgctagaattttatcaagcttattctgattataattttatgatggattttgttgaacaaatgtttaaaaaagttgttaaggaccttgatatgaaaaaaatatcatgggatggtcataaaattgattttagcaaaaagtttgcacgaaagactatgggagaactaattaaggatcataccggaaatgatattgatatatctgattattcagccgtttataaagtttgcaaaaatttaaagcttgaggttagtaaaaaggatagcttagctactttaatagatgaaatcatgagaagaaaagttgaaccaaatctaattcaaccaacatatgttatcaatcatcctgtcgaaatttcacctttagcgaaagtgaatagggatggagataaagatttcacagagagatttgaattatttattgcaggaatggagtttgcaaatggtttttcagagttaaatgatccaattgatcaaagaaaaagatttgaagatcaatcaagtaagaaagatggaggagatgaagaagcatttccaattgatgaaaactttcttgaagcgattgagacaggcatgcccccaacagcaggagtaggaattggaattgatagattagttatgctattaatcgatactcgatggataagagatgccataattttccctaccttaaaatcccttaaatga

SEQ ID NO: 305719 - DNA, 1453 bp, Unknown
  Bacterial polypeptide expressing nucleotide sequence isolated from the Sargasso Sea
tatgacagataaacctaccgaaagtgagttactagaattaagaaaagctaagctagatgaacttagagcttctggaaacgcttttcctaataaatttaagagagattctttggcagatgatctgcattccttatatggagaattggagaataacgatctagagaagaaaaaagaagtttattcagttgcaggcaggattatgcttcaaagaataatgggcaaagctagctttatgaccattcaagacatgtctggtcaaatacaggcatatctaacaaaaaatgatctaccagaaggtgtatatgaatctttcaaggcttgggatcttggtgatattgtcggtctcaaagggaagttatttaaaactaaaaccggtgaactcactatacatgctaatgagatagaactattaactaagtctttaaagcctttaccagaaaaacatgctggactggttgatactgagcaaagatacagaaaaaggtatttagatttaattacaaatcaagatagccgtgaaattttcaaacagcgaagctttttaattaaagagatcagaagtttctttgacggtgaaggttttatggaagtagaaactccaatgatgcactctactttaggaggagctgctgctaagccctttattactcatcacaacacacttgatttagatctgtatcttaggattgcacctgaattgtatttaaagaggttggttgttggaggaatagaaaaggtttttgaaattaatagaaattttaggaatgaagggttgtctactaaacataatccagaatttactatgctggaatattacacagcttatgctgattttaatgaccaaatgttgtttctagaacgattatttggacacctctctaacgaattgagtggaacgtctaaaataacaattgaaggtaaggactatgatttatctaagccttttaaaagaataggattacttgaatcaatagcaacgaaactttctatatctatagatgatctctctgataggaataaactcgaagaactttctaaaacccataacattgaagactataaatcatactctgatggaaagttgcaatttgaattgtttgaaaaagttgttgaagacgatttaattgaaccgacttttattattgattacccagtagaagtatctccactttcacgactttcagataacaaagaaggtctagtggatagatttgagctttttattggcggtaatgagattgccaatggtttctctgagttaaatgaccctgaagaccaagctgaaagattcaaagcacaggttgaacaaaaggcttcaggtgatgaagaggccatggaatacgatgaagaatacatcgaagcgcttgagtatgggctacctccttgtgcaggagtaggtataggtatagacaggctagtgatgctcttcacgggagccgagtctatacgagat

SEQ ID NO: 305720 - DNA, 805 bp, Unknown
  Bacterial polypeptide expressing nucleotide sequence isolated from the Sargasso Sea
gtggtgggtggtttcgagcgggtgtatgagctgggccggatttttcgcaacgaaggggtcagcacccgccacaaccctgaattcacctcggtggagatctatcaggcttattccgattacatcggaatgatggagctcaccgagcagatggtgagcgctgtttgtcaggaggtgtgcggaagttgccagatcacctatcagggcaccgagattgatctcagccctccctggcgtcgggccacgatgcatgagctggtggaggaagccaccggtcttgatttccagagtttccagagccgggaggaggccgcggcagcgatggcagccaagggcctttatgcgcctgcactggcggattccgtggggcgtctgctgaatgaagccttcgagcaggcggtggagacaactctgatccaacccacctttgtgaccgattacccggtggagatttcgccgctggcgcggcctcaccgcagcaaacccggcctggtggaacggtttgagctgttcatcgttggccgcgagcatgccaatgccttcagtgagctcaccgatccggtggatcagcggcagcgtctggaggcccagcaagcccgcaaggccgccggggatctcgaagcgcagggcttggatgaggacttcgtcacggccctcgaggtgggcatgcctcccaccggtgggttaggcattggcatcgatcgtttggtgatgctgctcaccgacagcccgtcgatccgcgatgtgatcgccttcccgctcctgcggccggagcccagggcggaggatgcccccgcaatgggataat

SEQ ID NO: 305721 - DNA, 760 bp, Unknown
  Bacterial polypeptide expressing nucleotide sequence isolated from the Sargasso Sea
cgtcagcacgcgccacaaccctgaattcacctcagtggagatctatcaggccttcgctgattacaacgacatgatggatctcaccgaggagctgatcagctcggtgacccagcaggtctgcggcagcacccagatcacttaccaaggcaccgaaatcaatttggccccgggctggcgccgggccaccatgcatgaactggtgcaagaagccaccgggcttgatttcacgggctttagtagccgcagagaagccgccgccgccatggaagccaaggggctgcaaaccccagccttggccgattcggtgggtcgtttgttgaatgaggcctttgagcaggccgtggaagaaaccctgattcagcccaccttcgttaccgactatcccgttgagatctcaccgttggcccggccgcaccgccgcaagccagggctggtggagcgttttgagctgttcatcgttggccgcgagcacggcaatgccttcagtgagctcaccgatccagtggatcagcgtcaacgcctggaggcccagcaagagcggcgcgcagccggtgatctggaggcgcaacgcgttgatgaggactttttgaatgcccttgaggtgggcatgcctcccaccggcggtttgggcattggcattgatcgcttggtgatgctgctcaccgatagcccctcgatccgcgatgtgatcgcgtttccgctgctgcggcccgaaagccgtgacgggtccgccgcagtggataatggttccactgagtag

SEQ ID NO: 305722 - DNA, 939 bp, Unknown
  Bacterial polypeptide expressing nucleotide sequence isolated from the Sargasso Sea
ttcatgagaaaaaaatgaatgaagcaggctatcttgaagttgaaacacccatgatgcatcctttagcaggaggagctgttgcaagaccttttattactcaacataacgctttaggacaagatttatatttaagaatagctcctgagctctatttaaaaagattattggttggaggatttgaaaaagtttttgaaatcaataggagttttagaaatgaaggactttcaactaagcataatccagaatttacaatgatggaatggtatcaagcatatgcaagcatgcaagaccaaatggatttaacgcgagatatcattttaaatgctgctgaggctgcagcttgtggtacagatttagaatgggatagcgtcaaaataaacttaggcaactttaatcaatcaacactatcagatttagtaactaagcataataaagatctaacaagcaatgatttaacagaccgaaagaagcttgaagagtttttaaataataggaagattaaaattgaaaagagctggggtattggaagaatgctcctagaaatatttgaagaaactgttgaatcaaacctaattgatccaacttttgtaaccgaatatcctgttgaagtctcaccgctatcaagaagaagcgaagataatcctgaatttgcagatagatttgagctatttattggcggtaaagagtttgcaaatggattttgtgaattaaatgatccagatgatcaggcttcgagatttgaggatcaagtcgctgctaaagattctggtgataaagaggcaatggattatgatcatgactatattactgctcttgagcatggaatgccgccggctgttggtgtcggaatgggcgtagacaggcttgttatgttgcttacaaatcaatcatcaatcagagatgttcttttattcccacaattaaaaagtagcgaataag

SEQ ID NO: 305723 - DNA, 1006 bp, Unknown
  Bacterial polypeptide expressing nucleotide sequence isolated from the Sargasso Sea
gacattagccctgaatcttttcaacctgacaatataaattatagaatttctggaagagtcatagctattagaagttttgggaagtcagcttttataaagatagtggataatatggaaagaattcaaatatttatatctaataattcagcaggcaaagaaaaaatggatttttttaaaaaatttgtagatgtaggagactttattggaatagagggccattgttttttcactaagactcaggagctatctatagaagcaaaagatattgaaattttaactaaatcaataaatacactcccagaaaaatggcatggcttgacaaatgttgagacaagataccgtcaaagatatgttgatttaatttcaaatgatgaagttaaacagatttttttacaaagatcgcagattgtaaataacataagaaatttcttagtaaataagggcttcctagaagttgaaacaccgattcttcataccgtagcaggcggcgctgccgcgaaaccttttaaaacttatcataatactcttgatatggacttaatactaaggattgcacctgagctccatttaaaaagattagttgttggcggtatggaaaaagtgtttgaaattgggagaaattttagaaatgagggtatatcaacgcaacataatcctgagttcacaatgatagagctttatgaggcatattcaaattatgaattaatgatgaatatgattgaagaactggttattagttgtgttgatttatattccaatgatagaaagatagtttatcaagaaaaagaaattgactttaatggaccatgggaaagagttcatatgatagaatggctctctgaaaagttaggctattctgttttggacaattcagacaaaatattaaaagaggcagataaaatgaagattaaccactttgacttacctggaaaagcaattacagaaatatttgaggaaaaatacttaaagggagttctaaacccagtttttgtttatggtttcccta

SEQ ID NO: 305724 - DNA, 295 bp, Unknown
  Bacterial polypeptide expressing nucleotide sequence isolated from the Sargasso Sea
actggcaaatgcgtttagtgagttgatagatccagtggatcaaagagaaagaatgcaattacagcaatctctaagagatgaaggagatcttgaggctcactgtatagatgaagattttttaaatgctttagagattggcatgccgcctacgggaggattaggtataggcattgataggctaatgatgttaattactgatagcgcatcgattagagatgttatccccttcccattgttaaaaccagaaaatacttccaaaaaaagtgaaaaattaccctcgaatgaagtaaaataa

SEQ ID NO: 305725 - DNA, 1489 bp, Unknown
  Bacterial polypeptide expressing nucleotide sequence isolated from the Sargasso Sea
tatgacagaaaatctatcagaaaatgaacttcttcaacaaagaagatcaaaattagatgagctaagaaagaaggataaagcttatcctaactcgttcagaagggattcactatctcaagatcttaagaatcaatatgctcaaatgtccaaggaggagctggaagaaaattctatagaagtttctgttgccggaagaatcatgcttcagaggataatgggaaaggcgagtttcataaccttgcaagatatgaagggtcaaattcaagcctatgttagatctaatgatcttccagatggagactacgaagagtttaagacctgggatctaggagatattgttggtatcaaaggaactttgttcataacaaaaacaggtgaattgacagttaatgctaattccatcgaaatgcttacaaaatctttgaggccacttccagaaaaacattctggattagttgatacagagcaaaggtatagaaaaagatatttagatttaattaccaatcaagagagcttagaagtttttcaaaagagaagtcaaattataagttccatcagggatttctttataggtcatgaatatttagaagtagagactcccatgatgcattctattttagggggtgcagctgccaagcctttcactactcatcataatgctttagatatggatttatatttaagaatagctcctgaactatatttaaaaaggttggttgttggaggtatggaaaaagtttttgaaataaatagaaatttccgaaatgaaggactgtcaacaaagcataatcctgaatttacaatgctggagtactatacggcttatgccgattttagtgatcaaatggatttcatagagaaattattcaagcatatttcaaaccaagtatttggaactttcaagttgaagcaagatggcattgaatttgatttttcgcaaccatttaccagaattaggttaaaggattcagtagctcaaaaattatctgtcgactcaaatctcttagataatagagactttcttctggagatcggagaaaaatataagattgagaatcttaaaaatttatcaaatgggaaaatattattcgagttgtttgaggagcttgtcgaagatgatttgatcgatccaacatttattacaggatatcctaaagatgtttctcctttatcaaggtctactgatggagatgattcagaagttgatagatttgaacttttcattggagggaaagaaatagctaatggattctcagagttaaatgatcctgatgatcaagcagagcgttttaaagatcaagtggctcaaaagtctgcaggagacgaagaagctatggagttcgattctgactatgttgaggctcttgagtatggtttaccaccttgtgcaggggtagggataggaattgataggttggtaatgcttcttacaggagcacaatctataagagatgtactcctgtttcctcagatgaagccaaaagtttaa

SEQ ID NO: 305726 - DNA, 1243 bp, Unknown
  Bacterial polypeptide expressing nucleotide sequence isolated from the Sargasso Sea
caaaaacatttcaattgcaggaagaattgttctaaagagagtaatgggtaatgctagcttcgccactttacgagatgccagcggagatattcagatatatgtaaccaaaaataatattgatgaaagtatctatgatgattttaaaacatgggacctgggggatattgtcggagtttcagggtcattatttagaacaaaaacagatgaactcacgattgaggtttgggacttagaaatgattactaaatcattacgaccgatgcctgaaaagtttaaaggcttaacagatgttgaggctaggtataggcaaagatatttagatttaatgacaaatacccaaactaaagaaatttttatcaaaaggacaagaattattgactcagcaagaaaaaagatgaatgaaagaggttatctagaagtagagacaccaatgatgcatcctttggcgggaggagctgtagcaagaccttttgtaactcaacacaatgctttaggaagagacttattcttacgaatagcccctgaactttacctcaaaagacttttggttggtggttttgataaagtttatgaaataaatagaagctttagaaatgaaggactttctactaaacacaatcctgaatttactatgatggagtggtatgaagcctatgcaacaatgcaaaaccagatggatttaactaaagatatcattgtgaatgcggctaaagctatagattgtggtgagaagattcagtgggataagttagagattgatcttggaaagttttctcaggagaagttatcagaccttgtattaagtcataacaatgatctaagtaaaaaagacttaagtgacaggtcagcactcgaggaatattttaaaggacttggtaaggatacagataaaagttggggaactggcaggttattactagaaatatttgaggaaaccgttgaggaaaagcttattaatccaacatttgttacagagtatcctgtcgaagtttctcctctttcaagaagaaacccagataatccagacttcgcagatagatttgagttatttattggtggaaaagagtttgcaaatggtttttgtgagctcaatgatcctgatgatcaggcttcaaggtttgaagcacaggtcgcagctaaagattctggagatcaggaagcaatggattttgacaaggattatattacagcgctggagcatggaatgcccccagcagttgggggtagggctaggaatagatag

SEQ ID NO: 305727 - DNA, 1489 bp, Unknown
  Bacterial polypeptide expressing nucleotide sequence isolated from the Sargasso Sea
tatgacagaagaaagaaaaagccttaatcaaattataaatattcgtaaagaaaaattaaataaaattatttccaaaggcattaatccttatcctccaatatttaaaccaacacatttaagcggcgagattttatcaaatttcaaaacccaagaaaaaaaattagtctctcttgccggaagaattttatctatacgaaaaatgggtaaagcttctttttttcatttgcaggatagtatgggaaagattcaaatttttattaaaaaagatgacataggtgaatctgaatatgaaaacttccagttattagatattggtgactttgtaggcatcgaaggagatgtttttaaaacaaaagttggagaaatatctgtcaaggttaaatccatgaccattctttgtaaatctattagacctctaccgattgtaaaagaaaaggaagacgaggtctatgatgcatttacaagcaaggaaatgagatataggaacagacaccttgatctaattgttaatcctcaagttcgtgagactttttataaaagaactaaaataatttctagtattagatcattcttagataaccttgggtttcttgaggttgaaacacctattcttcaaccaatttatggaggagcaaatgcaaggccatttacaacctatcacaatgctttagatcagcaattttaccttagaatagctgatgagctctatttgaaacgtctaattgttggtggaattgatagagtatacgaaatatctaaagattttcgtaatgaaggaatggatcgtaatcataatccagagtttacaatgcttgaattttattgggcctatgcagactatgaagataacatggaattagttgaaaaaatgattagaagcgtatcaaagcaagttgattcttcaaaaataaattgggatggtaatgaaattgacctaacaaaaaagtttaaaagaatcccattttttaagctactgaatgaaaaactaggagaagacatttctcaattagacattaataagttaaaaaaactttgtatagctaataatctttcaattgaaaagaatgaaaattacggtcaattattagatcaacttatgagtgagtttatagagccagagttgattcaaccaacatttgttacagattaccccacagtaatatcacccctagctaagaagcatagaaatggaaattctgatattgttgagagatttgaacttttcattggtgggtctgagtttgcaaatgcatttagcgagcttaatgatccagttgatcaaagagaaaggttcgaatctcagcaaaaattagccatcaaaggagatgaagaggcccatcctgtagatgagaactttcttcaagcgattgaaagcggaatgcctcccacagctggggttggtattggtatagatcggctagtaatgcttttaacaggaaatagatcaataaaagatgtaattttatttccagcaatgaaaaatgaataa

SEQ ID NO: 305728 - DNA, 1525 bp, Unknown
  Bacterial polypeptide expressing nucleotide sequence isolated from the Sargasso Sea
tttgtctgaaataaaagaagcacgcttacaaaaagctaattcactcgtaagtaaaggatttgcttcttatgcgcagagttttagggtatctaatactacaaaatttcttattcagaaatttgattatttagaaaatggtcaagaggaagactttagtgtttctcttgctggaagagtaatggcaaaaagggtaatgggtaaaattgccttttttacaataagcgatcaagaaggtcagattcagctttatctagataaaaggattgttgatttaaatttagaaaaacaaaaattactttcttttgaagatatcaaggaaatagtagatattggtgattggataggcgtatacggaactattaaaaaaactaataaaggtgagctttcaattaaagtagaaaaatgggaaatgctatctaaatcattacaacctttgccagataaatggcatggattgactgatattgaaaaaagatatagacaacgttatctagatttaatagtgaatcctcactctaaaaatgtatttaaaacgagagcaaaatgtataagttttataagaaaatggctagataatagaaattttttagagatagagactccaattctgcaatctgaagctggtggtgctgaggcaagaccatttataactcatcacaatacattagatattcctctttatctaagaatagctacagaattacatttaaaaagaatggttgttggaggatttgagaaagtttacgaattgggaagaattttccggaatgaggggattagtacaaggcataatccagaattcacctcagttgaaatttatcaagctttttctgactatgtcgatatgatgaatttaacagaagaattgataaaagatatcgtagctgatgcatgtggttctttaattataaattatcaaaatcaagaaattgatttttctaaaccttggacaagaatatccatgaaagatattgttaaaaaatatacagggattgactttgattctttcagtggagactttcaagcagcaaaacaagccgctaaaagtataaatgttgatttctctaataaagttaatactataggaagactattaaatgaggtcttcgagcaaaaagtagaatcaaaacttatgcaacccacttttgttatcgattatccggttgaaatttctcctttagctagacctcatcttgataataaagaaatggttcagagatttgaattattcattgttggtcgggagctggcaaatgcgtttagtgagttaatagatcctgtagatcaaagagaaagaatgcaattacagcaatctcttagagatgaaggagatcttgaggctcactgcatagatgaagatttcttgaatgctttagagattggtatgccgcctactggaggattaggcattggcattgataggctaattatgttaattactgatagtgcatcaattagagatgtaatacctttcccgttgttaaaaccagaaataacttccaaaaaagtgaaaaattacccttga

SEQ ID NO: 305729 - DNA, 1528 bp, Unknown
  Bacterial polypeptide expressing nucleotide sequence isolated from the Sargasso Sea
atgaccgaaccgacccaaacgcagcccgccgtcaccgcggacgaaaaccagatcatctctgagcgccgcgagaagctgcgcgccctgcgcgagcaaggcgtcgcctacccgaacgatttccggcccgagcaccacgctgccgacctgcaggcgaaattcgccgactcggacaaggccacgctcgaagcgaacccggtcgaggtgtcggtcgccggtcgcatgatgctcaagcgcgtgatgggcaaggcaagcttcgcgacggtgcaggacggttcgggccagatccagttcttcgtgacgcctaacgacgtcggcgcggaaacctacgacgcgttcaagaagtgggacctcggcgacatcgtcgccgcgcgcggcgtgctgttccgcacaaacaagggcgagctgtcgatccagtgcaaggagctgcgcctgctgtcgaaggcgctgcgcccgctgccggacaagttccacggcctgtcggaccaggaaatgcgctaccgccagcgctacgtcgacctgatcgtcacgccggaaacgcgcgacacgttccgcgcccgcaccaagacgatcgcgtcgatccgcaagttcatggacaacgcagagttcatggaagtcgagacgccgatgctgcacccgatcccaggcggcgcggccgcgaagccgttcgtcacgcatcacaacgcgctcgacatgcagatgttcctgcgcatcgcgccggagctgtacctgaagcgcctgatcgtcggcggcttcgaacgcgtgttcgaaatcaaccgcaacttccggaatgaaggcgtgtcgccgcgtcacaacccggaattcacgatgatggagttctacgccgcgtacaccgactaccgctggctgatggacttcaccgagcagctgatccgccaggcggcgatcgatgcgctcggcaccgcgacgatccagtaccagggccgcgagctcgacctcgcgaagccgttccaccgcctgacgatcacgcaggcgatccagaagtacgcgccggactacaccgacggccagctgtcggacgacgcattcctgcgcaccgagctgaagcgcttcggcgtcgacgtgtcgcagccggcgttcctgaacgcaggcatcggtgcgctgcagctcgcgctgttcgaggaaacggccgaggcgcaactgtgggagccgaccttcatcatcgactacccggtcgaggtgtcgccgctcgcacgcgcatcggatacggtgccgggcatcaccgagcgtttcgagctgttcatgaccggccgcgaaatcgcgaacggcttctcggagctgaacgatccggaagaccaggccgcgcgcttcaagaagcaggtcgagcagaaggacgcaggcgacgaggaagcgatgttcttcgacgccgactacatccgcgcgctcgaatacgggatgcccccgaccggcggctgcgggatcggcatcgaccgtctcgtgatgctgctgaccgacagcccgacgatccgcgacgtgctgctgttcccccacctgcgccgcgaagactgat

SEQ ID NO: 305730 - DNA, 1537 bp, Unknown
  Bacterial polypeptide expressing nucleotide sequence isolated from the Sargasso Sea
catgtctgaacaaaccactactccggaagtcgaccaaactctcgatctgaacaacgagatgcaggagcgtcgttccaagctggccgccttgcgcgcccagggcaaccccttccccaacgacttccgtcgtgacagcctctccggcgatctgcacgccgagtttggtgacaagagcgccgacgaactggccgcactgggtaaacgggtgaagattgccggtcgcatcatgacccgccggatcatgggcaaggcatctttcgccaccctgcaggacatggctggcaagatccaggtctacgtcacccgtgacgacctgccggaaggcttctacaacgagcagttcaagaagtgggatctgggcgacatcgtgggtgtcgaaggtaccctgttccgcaccaacacaggcgaactctccattcatgtctccgacattcgcctgctgaccaaggccctgcgcccgctgcccgagaagcacaaaggcctgaccgaccaggaagcccgctgccgtcagcgttacctggatctgatcgccaacgaagagtcccgcaagactttcgtgacccgtaccaaggtcgtggccggtatccgcaagttcctgaacgacaagcgcttcatggaagtggaaacccccatgatgcaggtcatcccgggtggcgcctctgcccgtccgttcatcacccaccacaatgcgctggacatcgacatgtacctgcgtatcgctccggagctctatctgaagcgtctggtggtcggtggtttcgagcgtgtgtacgagatcaaccgcaacttccgtaacgaaggtatctccgttcgccataaccccgagttcaccatgctcgagttctatatggcctacgccgactacatcgacctgatggatctcaccgaagagatgctgcgcaccctggcacaggacattctgggcgacaccaagatccgttacgccaaagagggcgaagagggcctgaccatcgacttcggtcagccgttccagcgcctctccatggttgactccatcctgaagtacaacccggatgtgacccgtgacgatctggcgaccctggagaaggccaccgccgtcgccaagcgcctgaagatcgagctgatgaagagctgggagctgggccacgtgatcaccgcgatcttcgaagagaccgtggagcacatgctgctgcaaccgaccttcatcaccgagtacccggccgccgtttctccgctggcccgtcgcaacgaccagaacccggacgtcaccgaccgcttcgaattcttcatcggcggccgcgagctggccaacggcttctccgagctgaacgatgcggaagatcaggccgagcgcttccaggctcaagttgaccagaaagccgcaggcgatgacgaagccatgttctacgacgccgacttcgtgaccgcgctggaacacggtctgccgccgactgccggtcagggtatcggtatcgaccgtctggtgatgctgttcaccaacagccacaccatccgcgacgtcatcctgttcccggctctgcgtccacaaaagtaa

SEQ ID NO: 305731 - DNA, 1468 bp, Unknown
  Bacterial polypeptide expressing nucleotide sequence isolated from the Sargasso Sea
aatggatactaaagagttaacaaaagttcagaaagatagagaagagaaattaaaaaagctcagatcagaaggttttaattttccaaatgattttgaaaaaaaagatcaaattggagatctagttgagaaatataattctttagctaaagaaaagcttgaagcaaaaaaagttacagttaaaacagcaggcagaataatgcttaaaagagttatgggcaatgctgcttttatgacttttgaagattcaacaggtagaatccagacttatttctctaaagacaacttagccgaacaacttgattcagttaaagaattagatatgggagacataattggagttgaaggcgttttatttagaacaaaaacagatgagctaactgtagaagttaaaaaaattagattattaacaaaatcgttaaagcctatgcctgaaaagcataaaggattaacagacattgagacaatatatagacaaagatatgttgacctgatgagcaacccagaatctagagagctttttgtaaagagaaataagattattcagtctttaagaaaaaatttagaagaagaggggtttttagaggttgaaactccaatgatgcatcctattcctggaggtgctaatgctagaccatttgaaacacatcacaatgcattagataagcaattatttttaagagtagctccagaactctatttaaagagattgttagttggaggctatgaaaaagtatttgaaattaacaggaattttaggaatgaaggtatatcaacgattcataatcctgagtttacaatgctggaattctacgaagcttatggcgatctaaacagaacagctaaattaatacaaaaacttgtacaagacagtgtcttagcagttaatgattcattaaatatagcttatgaagataaacctttaaatttagaaggagattttagagttgttgcgcttaaagatttagttaaagaaaagttaaagttatcaagccttgatactgaagatgaaatttttaatgcagcgaaagagaacaaactgaaattacataaaagttggggatggggcaaagtattacttgagctattcgaagcttttgtagaaaaagatctatgggagccaacttttgtcaaagattatccatatgaagtatctccattatctagaagaaaggatgataatgaagactacactgacaggatggaactttttattgcaggcagggaattttcaaattttttctgtgagcttaatgatccacatgatcaggaacaaagatttactgatcaagtagaacaaaagaaagcaggagataatgaggcaatgttctttgatgacgactatataaatgcattacaacatggaatgcctccagcggtaggtgtaggtattggtattgatagattaatcatgcttgcaactgatagacgttcaattcgagatgtagttttttttccaactctaaagtaa

SEQ ID NO: 305732 - DNA, 829 bp, Unknown
  Bacterial polypeptide expressing nucleotide sequence isolated from the Sargasso Sea
gagtcattaattgaaaaagtatgtctagaaattaatggtaagactaaagtgacatttgattcaaaaaaaatagattttaaggcaccttatgaaagggtatcaattactgatgctataacaaaatttacaggttataatatctcaggtaaaaatgaaagtgaattaaggtcaatttgtaaagatctctcaattgaaatagatgatagcatgggagaaggaaagttgatagatgcaatatttggtaataaatgtgaaaaaaactttatcaaccctacatttattacagattatccaaaatcaatgagtcctcttactaaagaacatagatcaaaccccaatcttactgaaagatttgagttaattgtaaatggaatggagattgcaaatgcttattcagaacttaacgatccaattgatcaattaaaaagatttgaagatcaattagaattaagtaagaaaggtgatgatgaagcaatgtttattgatatggactttattaaatctctagagtatggaatgcctcctacatccggaattggaattggaattgacagacttgttatgcttatgactgataaaacatcaattcaagaagttttgttttttcctcaaatgaaaccaataaaaaaggaacctgaaatttctgaagattcaaaggtagtttatgataaacttaaaaatattaatgagattcttctagttgattttaaatctgaatttgatatatctaataagaaatgggataaaattttaaaagagctaagaggcaatgatttaatagatatttttaagactgatgatggcagtttattcatcaaacttatctagt

SEQ ID NO: 305733 - DNA, 1492 bp, Unknown
  Bacterial polypeptide expressing nucleotide sequence isolated from the Sargasso Sea
aatggataaagaaaatattagtggcgaaaaagccctcattgaagagagacggaaaaagttagatcaacttcgagacagaggagatgcatacggcaattcatttaaaccaaaaaataatgcatcaagtcttcatgaagaatatggtgacgtctcaaaagatgatctagcagaaaagaatatcaaagatatttctgtggctggtcgaattgtcttaaaaagagtcatgggtaatgcaagtttcgcaaccttacgagatgcatctggcgacattcaaatctatgtaacaaaaaataatgttgatgagagtgtttatgaagattttaaaacatgggatcttggagatattgttggcgtatcaggatctctgtttcgcactaaaacagatgagttaaccatagatgtatgggatttagaaatgattactaaatcattaagaccaatgcccgaaaaatttaagggtttaacagatatagaagcaaggtatagacaaagatatctggacttaatgacaaataatgatactaagaaagtttttattaaaagaacaaaaataattgattctcttagaaagaaaatgaatgaatcaggctatttagaagttgagacaccaatgatgcatcctttggccgggggtgcagtagcacgtccatttgtaactcaacataatgccctgggacaagatctttatttaaggattgcgccagaactatatttaaaaagactattagttggaggttttgaacgcgtttttgaaattaatagaagttttagaaatgaaggcttatctactaaacataatccagaatttaccatgatggagtggtatcaagcttatgcaagcatgcaagatcagatggatctaacaaaagatattattttaaatgctgccaaagcagctgactgtgaattgaaaattgaatggggagatataaaagttgacctaaataattttaaacaatcaactctttcagatttagttttagagtttaataaagaattaagtaaagatgatttaagtgataagaaaaaacttcaaaatattctaaccagcaataaagtaaaagttgaaaaaagttggggtattggaagaattcttttagaagtatttgaagcaactgtagagagcaaactaatcgatccaacatttgttacagaatatcccgttgaagtttcgccactatctagacgaaatgaagaaaatccagattatgccgatcgatttgaattatttattggtggaaaagagtttgctaatggtttttgtgaacttaatgatcctgatgatcaagctaccagatttgaagaacaagtggctgcaaaagactctggagataaagaagctatggactatgaccaagactatattacagcgcttgaacacggcatgccgccagcagtaggagtcggaatgggtgtagataggctagtaatgttattgactaatcagtcttctattagagatgtgttgttatttccccaattgaaatcttag

SEQ ID NO: 305734 - DNA, 955 bp, Unknown
  Bacterial polypeptide expressing nucleotide sequence isolated from the Sargasso Sea
aagatcaaaaataattaattctatcagatcttttttaaataatcacggatatattgaagtagaaactccagtattgcaaccaatttatggaggagcaaatgctaaaccatttactactcatcataatgcattagatcaagatttttatctacgaattgcaactgagttatatttaaaacagttaattgtaggtggatttgagaaagtttatgaactctcaaaagattttagaaatgaaggtattgatagaagtcataaccctgaatttaccatgctagaattttatcaagcttactcagattataacttcatgatggattttgttgaagagatgtttaagaaagtagttaatgatttaggtatgaaaaaaatatcatgggatggtcacaaaattgattttagtaagaaatttgtccgtaaaacgatgggagagctaattaaagatcatactggtaatgaggtagatatttcaaaccattcagcagtatacaagctctgtaaagatttaaagcttaaggttactaagaaagatagtttagctactttaattgatgaaataatgagaagaaaagttgagccaaatttgattcaaccaacctatgtgataaatcatcctgttgaaatatctccactagcaaaggtaaatagagatggaaataaagattttaccgagagatttgaattatttattgcgggaatggaatttgcaaatggcttttcagagctaaatgatcccatcgaccaacgaaaaagatttgaagatcagtccaagaaaaaagacagcggagatgaagaagcatttcctattgatgaaaattttttagaggcaattgaaactggaatgcctccaacagcaggagtaggcattggaattgatagattggttatgctacttatagatactcgatggattagagatgctataatttttcctacattaaaatcccttaaatga

SEQ ID NO: 305735 - DNA, 1309 bp, Unknown
  Bacterial polypeptide expressing nucleotide sequence isolated from the Sargasso Sea
atgtcagaagaaaataaactaatattagaaagaaagagaaaattacaggcgctctcagaattgaccgcgctatatcctaatgatttcaggcgaaatatctctgtccaggaacttgtggctaaatatggcgataaagctaaagaggatttagaaggagaagatactacatatttaatagcaggaagaatactaacaatcagaaaaatgggaaattcaacttttgcaaatctacatgatgattcaggaaagatacaactatttctctcaaaaaatggaacaggcaaagaacagtatagtctccttgatcaaacagatctgggtgatatagttggcgtaaaaggagtaatattcaaaacgaaaactggtgaacttactcttaacataactgagtatagaattctctctaaatcattgagaccgcttcctgaaaagtatcatggattgtctgatattgagataaaatatcgacaaagatatttggatttgatgatttctgaggaatctaaaaatgtctttaaagatcgaattaaaataatctcattgataaggaaatacttcgaggataataaatattttgaggttgaaaccccgatgatgcatccaatagctggtggtgcagcagcaaaaccatttattacacatcataactctctagatatggagctttatttaaggatagcgcccgaattatatttaaaacgattgataattggaggatttgaaaaagtatttgagatcaacagaagtttcagaaatgagggtctatcagtgaaacacaacccagaatttactatgatagaattttatgctgcgttcgaagactatcattatctaatgaactttattgaagagttattcaagtcactatttgattctctcggttttaaaaacactgtgacatatcaagaacaagctataaatatcacaaaaaaatttgaaaggataaacttccatgactctattattaaattttgtgattcgatcagttcagagaatctaaatgactacagttatcttgagagctattgtaaaaatcatgatattgaagtatcagtcaaagattcactgcataaaactcaattagatatctttgagaaaaaagttgaaggtaagcttattcagccaacattcataactgaatatccaacagcagtctcaccactatcaagacgtgtagatagtaaccctgagattgttgagaggtttgaattgttcatagctggaagagaaatagcaaacggcttttctgaattaaacgacccgatagaccagtcagagagatttcatgatcagttggccactgatgaaa

SEQ ID NO: 305736 - DNA, 1489 bp, Unknown
  Bacterial polypeptide expressing nucleotide sequence isolated from the Sargasso Sea
aatgtcagatcagcaaaaaagtttaaagcagattatggatttccgccttgaaaaattagatcaactaattaataatggtattaatccttatcctgtaaaattcaattcaactcatttaagtcatgagattattgaaaacttctcagaatatgaagggaagagtgtagtaattgcaggaagaataatggtaattcgaaaaatgggtaaagcttcctttttccaggtgatggattcaagtggaagaatacaaatattcattagaagggatgatattggagatgctagctattctaattttaaattattagatatcggggattttattggaattgaaggagaagtatttaaaacaaaaactggtgaaatttcaattaagacaacagtaatgacgattcttgcaaaaagtattaggccattaccagttgttaaggagaaggatggccaatactttgattcatttacagataaagaacaaagatataggaatcgtcatttagatttaattcttaatcctcaggtacgagaaacatttcataaacgtacgaaaattattcgtgagatcagaaatttccttgataataaagggtttttagaggtagagactccaatactgcaaccgatatatggtggtgcaaatgctagaccttttacaactcaccataatgcacttaatcaaaaactttttcttcgcattgctgatgaattatatctcaagagattaataattggaggcatagatcgcgtgtacgaaatgtctaaggattttcggaatgaaggaatggataggaatcataatcctgaattcacaatgcttgaattttattgggcatacgcagattatgaagactgtatggaccttgttgagcaattatttcatcaagttgctaaaaaagtaggctcacataatttatcttggggtgacaataatattgatttatcaaaaaaatttcatcgcaaaccatttttagaagccttaggtgaggcaacaggtcataattttgatgagtttgatgaagaaaaagtcagaaagatttgcaaagaaacagggatagaactagaagaaaattctaaccttggccaaatgctagatggattaatgagtgcactagttgaaccgaagcttattgaacctacatttatcatagactatccaaaggtgatttctcctctggcaaaaacacaccgcaatggcaatccaaatttggtcgaacgttttgagttgtttattggcggtgctgaatttgcaaattctttttctgaactaaatgatccaatcgatcaaagaaaacgattggaggatcaagtaaaactaaaagatctcggtgatgaagaagctcagcctattgatgaagacttcattcaggcaatggaatgtggcatgcctcctacagggggtgttggtatcggaattgatcgacttgtcatgttattaacaggtaatagatggataaaggatgtaatcctatttccgaccctaagacctgaataa

SEQ ID NO: 305737 - DNA, 859 bp, Unknown
  Bacterial polypeptide expressing nucleotide sequence isolated from the Sargasso Sea
gatgtcagataaaaactcaaaaagtgacaatcgattagtcgatgagagaagagaaaaactcaatagcctcagagagggcggtttcaactatccatccacgatagaaattaactcatctactgcttcaatcatcgatgagtatgactcgatgaaaaaagaggaccttgagggcattgatagggaattctcaatcgctggtcgaatgatggcaaaaagagtcatgggaaagtccagtttctctcgaatcaaagatggaaaaggatcgatccaagtttttttgagtaattctgatctgggcgatgacgcttatgaaagctttaaaacaatggatgttggagacatcgtttgggtaagaggctcgctctttcgaaccaaaacagatgaattaacactgaatgtgaaggagcttgttcttctcagcaagtctctcaggccattacctgaaaaataccatggtttaacagataccgagattcgctataggagaaggtatttagacctcatgatgtcagaggagagtgctgaggtattcaagatcaggtcaaaagtggttacccagataagatcttttctgaatgatctagatatgatggaagttgaaactccgatgatgcatccgataccaggtggagcagttgcgagaccattcatcactcatcacaatacactcgatcaagatttctatttgagaattgcgcccgaactctatttaaagcgtcttacagtgggtggctttgatcgtgtctatgaaatcaatcgctcatttagaaatgagggagtttctacacagcataatcctgaattcaccatgctagaactatatgttgcccatgaaaccccagattttctcatgaacatg

SEQ ID NO: 305738 - DNA, 1504 bp, Unknown
  Bacterial polypeptide expressing nucleotide sequence isolated from the Sargasso Sea
atgactgaacaagtacaagatgaaaacaaactgattgccgagcgtcgtgccaagctagaaagcattcgcccgaactgcagcgctaatgctcaccctaatactttccgtcgcacccacaaagcggctgagttgcaggaaaaatacggtcaaaacactaaggaagaacttgaagccttaggttttaaaaccagcatcgctggccgtatcatggcaaaacgtggcccattcctggtaatccaagacgtgtctggtcgtatccaagcttacgctgaaaagggcgttcaagcggatctgaaagaccgttaccaaggtctggatatcggtgacatcatcggcgtaaccggtcagttgcacttgtctggtaaaggcgatctatatgtgaacatggaagagtaccaactgctgactaaagcactgcgtcctctgccagaaaaattccacggcttaaccgaccaagaaacccgttaccgccaacgttatgtggacttaatcgttaacgaagaatctcgtcaagccttcgtcatgcgttcaaaagtggttgcagctatccgtaacttcatgatcaaaaaagagttcatggaagttgaaaccccaatgatgcacgtgatcccaggcggcgcttcagcccgtccatttatcactcaccacaatgcgctggacatgccaatgtacctgcgtatcgcgcctgagttatacctcaagcgtttagtggtaggtggttttgagcgtgtgttcgaaatcaaccgtaactttcgtaacgaaggtctgtcgccacgccataacccagaattcactatgatggaattctatatggcctatgctgactacaaagatctgatggacttaaccgaagaactgttaagctctatcgcgattgaactgttaggcagcgcgcaaatgccatacggcgagcacactgttgatttcggtggcccatacgctcgtctgagcatgttagaagcgattcagaagtacaatcctgacaacgcgactattcaagccatgacctacgagcaagtgaaagatcttgaattcatgcgtgaactggcgatcagcctaggcatcaagatcgagaaattctggacctgtggtcagctattagaagaaatcttcggtgaaactgctgaatggcagttaatgcaaccgactttcatcactggctacccagcggacatttcgccactggcacgtcgtaacgatgacaatcacttcatcaccgaccgttttgaattcttcatcggtggccgtgaagtggctaacggtttcagcgagttaaacgatgctgaagaccaagacagccgctttaaagcgcaggttgatgcgaaagatgcgggtgacgatgaagccatgttctacgatgcagactacatcactgcactggaacacggtttaccaccaacagcgggtcaaggtatcggtatcgaccgtttagtgatgctattcactaacactcacactatccgtgacgtgatcctattcccagcgatgcgcccacaggcctaag

SEQ ID NO: 305739 - DNA, 319 bp, Unknown
  Bacterial polypeptide expressing nucleotide sequence isolated from the Sargasso Sea
gatggttcagaggtttgaattattcattgttggtcgagagctggcaaatgcgtttagtgagttgatagatccagtcgatcaaagagaaagaatgcaattacagcaatctcttagagatgaaggagatcttgaggctcactgtatagatgaggatttcttgaatgctttagagataggtatgccgcccactggtggattaggcataggcattgataggttaattatgttgattactaatagcgcatcaattagagatgtgattcctttcccattgttaaaaccagaaacaacttcaaaaaaaatgaaaaattacccttga

SEQ ID NO: 305740 - DNA, 997 bp, Unknown
  Bacterial polypeptide expressing nucleotide sequence isolated from the Sargasso Sea
aatgagtgactcaaatattagcggcgaatcctctatcctagaggaaaggcgaaggaagcttgaagagcttagggagcgaaacattgcctacatcaataactatactccaacaaattcttctaaggatcttcacgacgcatatgatcatctaaacaaagaggaccttgaatctaaaaaaattactaacttgtcattggctggaagaatagtattaaagcgagtgatgggtaatgcaagttttgtcaccataagggatggatctggcgatattcaagtatatataactaaaaataatatagatcctgacttatataaaaattttaaaacctgggatcttggagacattattggtgttagcggcaatttatttaagaccaaaacagaagagctcactatcgaggcgcattcaattattcttattaccaaagccttgaggcctatgcctgaaaagtttaaaggccttgttgatgttgaaattaaatatcgacaaagatatttagacttaatgagtagccctgaatcaaaagaagtatttgaaaacagatctagaattgtttcctcagttagatccactatgcttgaagatggttttttggaagttgaaactccaatgatgcattcaatacctggcggtgctgttgcaagaccctttgtcactcaacataatgctctcgatagagaactttttttaagaatagctcctgaactgcatctaaaaagattattgattggtggttttgagaaggtttttgaaattaatagaagctttagaaatgaaggtttatcaacaaggcataatccagaatttaccatgttagagttttacgcagcatttgctacattcaacggaactttagattttacaaaaaatataattcaaactgcctctgaagctattggtaataaaaataacattgagtgggatggagacaaaatagacttatctaatttctcgataaaaagtcttaatgatttagttttggagcataacccctga

SEQ ID NO: 305741 - DNA, 1489 bp, Unknown
  Bacterial polypeptide expressing nucleotide sequence isolated from the Sargasso Sea
atgacagaaaaactaacggaaaatgagcttcttgaacagagaagattaaaacttgatgcactaaggaataggggagttgcctacacaaattcctttagaagagattctttatctcaagatttaaaaagtcaatttgacggaacatctaaagaagaattagaagagcaatctcacgaagttgctattgccggcaggattatgttgcagaggattatgggtaaagctagtttcataactttgcaagacatgaaaggacaaatccaagcttatatccgatcgaacgatattcctgaagggcaatatgatgaatttaaaacatgggacctcggggatatcgtaggaataaagggaaaattattcctaacaaaaacaggagaattaactgttcatgcagattcaatacaaatgttaactaaatctttaagaccattacctgaaaaacattctggacttgttgacacggagcaaagatatagaaaaagatacttagatctgattacaaactcagaaagtttagaaattttcaagaaaaggagtcaaataataagctcaataagagagttttttataaatcatgaatatttggaagtagaaactccaatgatgcactcgattctcggtggcgcagcagctaaaccatttacaactcatcataatgcattggatatggacctttatttgcgtatagcacccgaattatatttgaagagacttgtggttggcggaatggaaaaagtttttgaaataaatagaaattttagaaatgaagggttatctacaaaacataatcctgaatttacaatgctagagtactataccgctttcgctgattttaatgatcaaatggattttttagagagactttttaaatttgtttcagaagaagtatggggctcatcaaaattggaaactgaaaatataagctatgatttttctaaaccatttcaaaggattagtttgaaagaaacagtttctaagaaactttctatcgaccctatctcatttgacgatagaggtttccttctagatttaggaaaaaaatataagtttgaagatatagaaaatctgtcaaatggcaaaattctatttggattatttgaagagcttgttgaatcagaattgatcaacccaacattcattactggatatcccaaagatgtatcgcctctatcaagagcttcggatgaaaaccctcatgaagtagatagattcgagttatttattggaggcaaggaaatagctaatggattctcggaattgaatgatcctgatgatcaggcagatcgttttcaagatcaagtatctcaaaaatcagcgggtgacgaagaagctatggaattcgattctgactacatcgaggctctggagtatggtttaccgccctgtgcaggggtaggtatcggtattgatagattggtgatgttactgacaggtgctcaatccatcagggatgttctcctattcccgcaaatgaagccaaaaaattagc

SEQ ID NO: 305742 - DNA, 590 bp, Unknown
  Bacterial polypeptide expressing nucleotide sequence isolated from the Sargasso Sea
agacattaaattaaactatcaagagaatatcattgactttaaaactccattaccaaaaataaaattttatgatgcaattgaaaaatatgccatagatattgatgtatctaagttaaatgacagggaatatatagaatcatactgcttatctcaaagtataaaaataagcgatgatcactctattgctaaagcccatctagatatttttgaaaaattagtagaaaaacagtttatcaatccaactttcgtcactcattatccaactgaagtttcacctttatcaaggagctttgatgataatcctgagttggttgaaaggtttgagttatttattgcaggtagagaaatagcgaacggtttttctgagcttaatgatccacaggaacaatcaaaaagattcaaggcacagtctgaatctaatgatgatgagaaaatgagctatgatggtgattttattactgccttggaatatggaatgccacctacagctggcgcgggaattggaatagatagactaattatgctttttactaattcaccttcaattagagacgtgcttttattcccgcatatgaaacctaagaaataat

SEQ ID NO: 305743 - DNA, 940 bp, Unknown
  Bacterial polypeptide expressing nucleotide sequence isolated from the Sargasso Sea
tttattaagaaatttatggagtcgaagggatttattgaagttgaaactccaatcttacaacctaaagctggaggcgctatagcaaaaccttttacaacgcatcataatgctttagatattgatatgtttcttaggatagctccggagttgtatcttaaaagattaatagttggaggcttcgaaaaagtgtttgagctaggcaaagtatttcgaaatgaaggaatagatcaaacacactcgcccgaatttacaatgatggaaagttatgaggcttatgttgatgtaactacggtaatggatatggtagaaaatatgtctacatatatatttgatgaattaggaattgaaaagaatattaaatttatggatattgaagccgatttttctggaccatggaaaagagttagtatgtatgagcttgtttcaaaaaagtttaaagttgatattaagcatgactctgatataaaaaaggtaaaacgtgaattaaaaaagaacttagacatcaaaccagaagccaaaacggttggcctgttagtttatgagctttttgaaaactatattgaagacgatattactagtcctacttttgttacagactatccagttgaggtttcaccatttgctagagaaaacaaaaagaaacccggggttactgaaagatttgagttatttgcatttggaagtgaactggctaatggattctctgagttgattgactctgaagaacaggaagatagattaaaggcacaggcacagcaaaaagccaaaggtgatgaagaggcacatgttgaagatcaagactatgtagaagctctccagtacggattgccacctactggcgggctaggatttggagttgatagatttgtaatgattttaaccaacaatatctcaataagagaagtgttagctttcccacatttaaaaccagaaaattaat

SEQ ID NO: 305744 - DNA, 985 bp, Unknown
  Bacterial polypeptide expressing nucleotide sequence isolated from the Sargasso Sea
cccagaagcacgggaggtctttcgtattcgtgcggcgacggtgcaatgtatccggcaatttctggtggagcggcagtttgttgaggttgagacgccgatgctgcaccccattgccggtggtgccacagcgagaccctttattacgcatcacaacacgctagacatggagatgtatctccgtgtggccccggagctctatctcaagcgcctgaccgttggcggcctggagaaagtatttgagatcaaccgtaacttccgcaatgaagggctttcgacccggcataaccctgagttcacgatgctggagttctactgggcgtatgcggattaccgtgacgccatggatcttacagaagagctgatgcgagagcttacgcaatcggtgttgggctcgacagaagtggtttatggcgacgctaccttccactttgatcgaccctttgagcgaatgaccgtcgtggaggccatactcaagcacaatcccgacctgacgagcgacgatatcgctgagcgagacgccgccgccgcggtcgccgagcgatttggtataaaagtcgagaagagctggggcctcggcaagatccaaatcgagatttttgaggagacggccgaggcgcagttgcaggaaccaacctttatcactgcgtaccccatggaagtatcgccactggctcgacgcaacgacgacgatcctttcgtgacggatcgcttcgagttttttgttggcgggcgggagctggccaacggtttcagcgagctcaacgacgcggaggatcaggcggatcgcttcaaagcgcaggtcgcagctaaagaagctggggacgatgaagcgatgcactttgatcacgactacattcgcgccctcgaatatggcctgccgccaacggcgggcgaggggattggtattgatcggcttgtcatgttgctgaccaattcaccgtctattcgggatgtgattctattccctcatcttcggcacgaataa

SEQ ID NO: 305745 - DNA, 1504 bp, Unknown
  Bacterial polypeptide expressing nucleotide sequence isolated from the Sargasso Sea
gatgactgaacaagtacaagatgaaaacaaactgattgccgagcgtcgtgccaagctagacagcattcgcccgaactgcagcgcgaatgctcaccctaataccttccgtcgcacccataaagcggctgagttgcaggaaaaatacggtcaaaacactaaggaagaactcgaagccttaggttttagaaccagcatcgctggccgtatcatggcaaaacgtggcccattcctggtgatccaagacgtgtctggtcgcatccaagcttatgctgaaaagggtgttcaagcggatctgaaggataaataccaaggtctggatatcggtgacatcatcggcgtaactggtcagttgcacttatctggtaaaggcgatctgtacgtcaacatggaagagtaccaactgctgactaaagcactgcgtcctttgccagaaaaattccacggcttaaccgaccaagaaacccgttaccgccaacgttatgtggacttaatcgttaacgaagaatctcgtcaagccttcgtcatgcgttcaaaagtggttgcagctatccgtaacttcatgatcaaaaaagagttcatggaagttgaaaccccaatgatgcacgtgatcccaggcggcgcttctgcccgtccatttatcacgcaccataatgcgctggacatgccaatgtacctgcgtatcgcgccagagttatacctcaagcgtttagtggtaggtggttttgagcgtgtgttcgaaatcaaccgtaacttccgtaacgaaggtctgtcgccacgccataacccagaattcactatgatggaattctatatggcctatgcagactacaaagatctgatggacttaaccgaagaactgttaagctctatcgccattgagttattaggcagcgcgcaaatgccatacggcgagcacaccgttgatttcggtggcccatatgcccgtttaagcatgttagaagcgattcagaagtacaatcctgacaacgcgactatccaagccatgacttacgagcaagtgaaagatcttgaattcatgcgtgaactggctatcagcctaggcatcaagatcgagaagttctggacctgtggtcaactattagaagaaatcttcggtgaaaccgctgaatggcagttaatgcaaccgaccttcatcactggctacccagcggacatttcgccactggcacgtcgtaacgatgacaatcacttcattaccgaccgttttgaattcttcatcggtggccgtgaagtggctaacggtttcagcgagttaaacgatgctgaagaccaagacagccgctttaaagcgcaggttgacgccaaagacgcaggtgacgacgaagccatgttctacgatgcagactacatcactgcgctggaacacggtttaccgccaacagcgggtcaaggtattggtatcgaccgtttagtgatgttattcactaacactcacactatccgtgacgtgatcctgttcccagcgatgcgcccacaggcttaa

SEQ ID NO: 305746 - DNA, 1636 bp, Unknown
  Bacterial polypeptide expressing nucleotide sequence isolated from the Sargasso Sea
tttgaaactttcagagcaagaaaaaataagaagggaaaaattagatgaattaatcaagcttggaattaacccctatccagcaaaactatatcctgttgatcatctatctaatgacattaaaactaaattttctgaaaataaaaaagttataattgccggaagaataatgtctaggagaattcaaggtaatgcatcatttgctgaaattcttgatagtaaaggtaaaattcaagtctactttaatagagatgaaatatgtaaaggtgagaacaaagaaaaatataacattatatataaaaagcttcttgatataggagatataattggaatagaaggggaactttttactacaaaagtaggagaaaaaactgttttagttaaagattttaccctgcttaataaatctcttcgccctttacctctcccaaaagaagactctgatggaaaaacatatgatgaatttactgatactgaacaaagatacagacaacgatatgttgatctaatagtaaatccagaggttaaagaaacatttataaaaagaactaaaattatcaatcttataagagattttctaaataataaaggataccttgaggttgagactcctatcttacagacaattcctggaggagctaatgctaggccttttgttactcaccacaatacattggatattcctctttaccttagaattgctgatgagcttttcctaaaaagattaattgtaggaggctttgatgctgtttatgagttctcaagagattttagaaatgagggtatggataaaaatcataatcctgagtttacaattcttgagctttatgttgcttataaagattatttctggatgatggagctaacagaatctctccttgagaaagtatgtatagaattaaatggagatacatcgattacttttgattctaaaaagatcagtttcaaaaaaccatttaaacgaattacaatatttgatgctattaaaaaatatactggatatgatatttcaaatatgcaagaaaatgaactcagagatatctgtaaaaagatggatatagagacaacagataaaatgggtgagggtaagttaattgatgcaatatttgggaacaaatgtgaaaaagaaattattgatccaacatttatcatggactatcctaaatcaatgagccctttaactaaagaacatagggataatgcaaccctaactgaaagatttgaattaatagtaaatggtatggagatagcaaacgcttattctgagctaaatgatcccattgatcaattaagcagatttgaaaaacaactagaacttagtaaaagaggagatgaagaagcgatgtttattgacaaagatttcataagatctcttgaatacggaatgccccctacatcaggaattggaattggaattgatagatttattatgcttatgactgataacacatctattcaagaagtattattttttccacagatgaagcctgaaaatcctagtcttgacatttctgaagaatcctctaaaattctcaatataataaggaataacaaagagctgaacatagatgatttaaaagggaaaattgatttttcaaataaaaaatgggataaattccttaaggaacttagagagaaa

SEQ ID NO: 305747 - DNA, 1489 bp, Unknown
  Bacterial polypeptide expressing nucleotide sequence isolated from the Sargasso Sea
tatgtcaacagaaaaacaaagcttgaaagaaataatcaattttaggatgcaaaaattagaaagattgcgtgaagctggcgtagatccttttccacataattttaaacccacaaattatagtaatgaaattaaagatcaatttaaagttttagaaaataaagatgtaattgttgctggtcgaattatggcaatgcgtaaaatgggtaaagcgtcattttttcacatagaagattccgatggcagaatacaagtttatattaaaaaagatgaagttggtgattcgctttataatatattcaaattactcgatataggtgattttattggtgttaatgggtttgtttttaaaactaaaacaaaagaaatatctgttcatgcaaaatcaataacagttttggcaaaaagtatacgcccgcttcctatcgttaaggaaaaggatggtgaaacatttgattcttttgaagacaaagaacagcgttatagaaatcgtcatttagatttaattgtaaacccagaagtaaaagaagttttcaggaaaagaactataataacatcagcgcttagatcatatttagataatgaaggattcttagaagttgaaacacctgtgctccagccattatatggtggagcaaatgcacgaccttttaaaacacaccataatacacttgatcaaacactctatcttcgaatagctgatgaattgtacctaaaaagactgattattggtggtattgataaggtatatgagttgtcaaaagattttagaaatgaaggtatggatcggaatcataatcctgagtttacaatgttggaatggtacgaagcatacagtgattacaatgatcagatgaatagggtagaggatattataagatttgcagcaaactcaattgataaaatgaaatttgattggggtgatgttagtattgatttaagtaagaaatttgataggaaaccatatctagacttactgaaagatgcgacaggtgaggacttattagaagctgatataaagaaattacgatcagtatgcaaagaaaatagtattgagataagcaataaagaaaattatggccaattattagatgaattaatgcgtaggttagttgaaccaaatcttactcagccagtatttatcattgatcatccaagagaaatttcacctcttgctaaatctcatcgttctggtgaagtcaaattagttgaaagatttgagttatttattggaggtgctgagtttgcaaattctttctctgagttaaatgatcctttagatcaacgggatcgtttagagaatcaagcaaaactccgtgaaaaaggtgatgatgaagctcaaccaattgatgacagcttcatcgaagcaatggaatgcggtatgccgcctaccggaggggttggtttaggtgtagataggttagttatgctattgactaataacagatccattcgagacgtcttattgtttcctgctatgagaaacatctaa

SEQ ID NO: 305748 - DNA, 169 bp, Unknown
  Bacterial polypeptide expressing nucleotide sequence isolated from the Sargasso Sea
catgtactacgacgaagatttcgtcacagcactggaacatggtttaccgccaacagctggtcagggcattggtatcgaccgtctggtgatgttactggccgacgcgccaagcatccgtgacgtcattctgttcccacatatgcgtcacagcgacaagcagggttcttaa

SEQ ID NO: 305749 - DNA, 1096 bp, Unknown
  Bacterial polypeptide expressing nucleotide sequence isolated from the Sargasso Sea
taatgagatagaactattaactaagtctttaaagcctttaccagaaaaacatgctggactggttgatactgagcaaagatacagaaaaaggtatttagatttaattacaaatcaagatagccgtgaaattttcaaacagcgaagctttttaattaaagagatcagaagtttctttgacggtgaaggttttatggaagtagaaactccaatgatgcactctactttaggaggagctgctgctaagccctttattactcatcacaacacacttgatttagatctatatcttaggattgcacctgaattgtatttaaagagattggttgttggaggaatagaaaaggtttttgaaattaatagaaattttaggaatgaaggcttatctacgaaacataatccagagtttactatgttggaatattacacggcgtatgctgattttaatgaccagatgtcattcttagaaaagttatttgctcatttagctagtgaattaaatggctcatctaagatttcaattgaaggtaaggattatgatttatcgaagccttttaaaagggttggattgcttgaatcagtcgcaacaaaactttctatagctcaagaagaccttttcgatcgaaagaaactagaagagttatcgaaaaaacataagatagaagattataaatcttattcggatggaaaattacaatttgaattatttgagaaggttgttgaagacgatttgattgagccgacttttattgttgattatccggtagaggtttctccgctttcaagactttctgatgataaagaaggcatagtggataggtttgagcttttcattggcggtaacgagattgccaacggattttctgagttaaatgaccctgaagatcaagctgaaagatttaaagcgcaagtagaacagaaagcttcaggtgatgaagaggcaatggaatacgatgaagattacattgaagcactagaatatggtttgcctccatgtgcaggagttggtatcggaatagatagacttgtaatgttatttacgggtgcagagtcgataagagatgtcttgctattccctcaaatgaaacctaagtcttaa

SEQ ID NO: 305750 - DNA, 1357 bp, Unknown
  Bacterial polypeptide expressing nucleotide sequence isolated from the Sargasso Sea
tatgacagacaaacctaacgaaagcgaattgctagaattaagaaaagctaagcttgatgagcttagatcttcaggaaatgctttccccaatcaatttaaaagagactcattagccaatgatttacattcttcttatggagaattggaaaatgaagacctagagaagaaaaaagatgttttttctgtagctggtagaattatgctgcaaagaataatgggcaaggcaagctttatgactattcaggacatgtcgggtcagatacaagcctatttaactaaaaatgatttaccagaaggggtttacgatgcttttaagatttgggatctgggtgacattgtcggcattaaaggaaagctctttaaaaccaagacaggtgaactaactattcatgctgatgaaatagaactactaactaagtcattaaaacctttacctgaaaagcatgctggattagttgacactgaacaaagatatagaaaaaggtacttagatctaataaccaatgaagacagtcgtgaaatatttaagcaaagaagttttttaattaaagagataagaagtttctttgatgatgaaggttttatggaagtagagactccaatgatgcattccactttagggggagctgctgcaaagccttttgttacacaccacaatactcttgatttagatctatatcttaggattgcacctgagttatatctaaagagacttgttgtcggtggcatagagaaggtctttgagataaatagaaattttagaaatgagggtttgtctactaaacacaatccagaatttactatgttggagtattacacagcatacgctgactttaatgatcagatgtcatttctagaaagactatttgcttatctatctcatgaattgaatggtacttccaaaatctcaattgaaggcaaggattatgatctatctaagccctttaagagaatagggttgctcgagtcagttgctacaaaactttctataccggttacagatctttctgacaggaacaaactggaagagttatctaagaaatataagattgaagaatataaatcttatccagatggaaaattacaatttgaattatttgaaaaagtagttgaagacgacttaattgagccaacttttattattgattatcccgtagaagtatctccactttcgagactttctgatgataaagagggcttagttgataggtttgaacttttcatcggtggtaacgagattgctaatggcttttcagagttaaatgatccagaagatcaagctgaaagatttaaagcacaggtagaacaaaaggcttcaggtgatgaagaggccatggaatacgatgccgactacatc

SEQ ID NO: 305751 - DNA, 1445 bp, Unknown
  Bacterial polypeptide expressing nucleotide sequence isolated from the Sargasso Sea
aatggataatgaaaatttaggcggcgaaaaagctattcttgaagaaagaaggaaaaaattggatcaacttagagataggggctctgcatatggaaattcatttaaacctcaaaacagtgcaaagaatttgcatgatgaatatggaggtttttctaaagaagacctagccaaaaaaaatataaaaaatatttctatcgcaggtcgtattgttcttaaaagagtaatgggaaaggcaagttttgcaacattgagggatgcgtctggagacatacaaatttatgtaactaaaaataatgtggatgaagatgtttatgaagattttaagacatgggatcttggagacattgttggagtttcaggtactttatttagaacacaaaaagatgagctaacagttgatgtttgggatttagagatgataacaaaatcgttaagaccgatgccagaaaagtttaaaggactaaccgacatagaagctcgttacagacaaaggtacttagatttaatgacaaatacttcaaccaaagaagttttcataaaaagaacaaagataattgattcaatgagaaaaaaaatgaatgaagtgggctatcttgaagttgaaacacccatgatgcatcctttagcaggtggggctgtcgctagaccgtttattactcaacacaatgctttaggacaagatttatatttaagaatagctcctgagctttatttaaaaagattattagttggaggatttgaaaaagtgtttgaaattaataggagttttagaaatgaaggactctcaactaaacataatccagaattcacaatgatggaatggtaccaagcatacgcaagcatgcaagatcaaatggatttaacaagagatattattttaaatgctgctgaagctgcggcttgtggcacagatttagaatgggataacgtcaaaataaacttaggcaattttagtcaatcaacactttcagatttagtaattgggcataacaaagatctaacaaaggatgacttaacagaccaaaagaagcttgaagagtttttaaataataggaagattaaaactgaaaagagctggggtgttggaagaatgctactagagatttttgaagaaacggttgaatcaaatctaattgatccaacctttgttactgaatatcctgttgaagtctcaccactatctagaagaaatgaagagaaccctgaatttgcagatagatttgagctatttattggtggtaaagagtttgcaaatggattttgtgaattaaacgaccctgatgatcaggcttcaagatttgaagatcaagtagccgctaaagattctggtgataaggaagcaatggattatgatcatgactatataactgctcttgagcatggaatgccgccagcggttggtgtcggaatgggtgttgatagacttgtttatgttacttacaaac

SEQ ID NO: 305752 - DNA, 880 bp, Unknown
  Bacterial polypeptide expressing nucleotide sequence isolated from the Sargasso Sea
cgagatgcgtctggcgacattcaaatctatgtgacaaaaaataatgttgatgagagtgtttatgaagattttaaaacatgggatcttggagatattgttggtgtatcaggctctctgtttcgcactaaaacagatgagttaaccatagatgtatgggatttagaaatgataactaaatcattaagaccaatgcccgaaaaatttaaaggtttaacagatatagaagcaaggtatagacaaagatatttagacttaatgacaaataatgatacaaagaaagttttcattaaaagaacaaaaataattgattctctaagaaagaaaatgaatgaatcaggctatttagaagttgaaacgccaatgatgcatcctttagctggtggcgcagtagcacgtccatttgtaactcaacataatgctcttggacaagatctttatttaaggattgcgccagaactatatttaaaaagattattagttggaggttttgaacgcgtttttgaaattaatagaagttttagaaatgaaggcttatctactaaacataatcctgaatttaccatgatggagtggtatcaagcttatgcaagcatgcaagatcagatggatctaacaaaagatattattttaaatgctgctaaagcagctgactgtgaatcgaaaattgaatggggagatattgaggttgacctgaataattttaaacaatcaactctttcagatttagttttagagtttaataaagaattaagtaaagatgatttaagtgataagaaaaaacttcaaaatattttaaccagcaacaaagtaaaagttgaaaaaaattggggtattggaagaattcttttagaggtatttgaagcaactgtagagaggtaaa

SEQ ID NO: 305753 - DNA, 1477 bp, Unknown
  Bacterial polypeptide expressing nucleotide sequence isolated from the Sargasso Sea
catgcggaccatcctggtgcgggccaccgaataccaaaccatcatgaccgaaccgacccagcctaatgcggcccagaatgtcgcgcccgaggtagacgacaacaagatcatggccgaacgccgcgaaaagctgcgcgagctgcgtgagcaaggcgtcgcctatccgaacgatttccgccccacgcatcacgccgaagatctgcaaacgcagtacgccgggaccgacaaggaagcactcgaagccaatccgctcgaagtcgcgatcgccggccgcatgatgctcaagcgcgtgatgggcaaggcaagctttgcgaccgtgcgcgacgggtcgggtcagatccagtttttcattacgccggccgacgtcggccaggaaacgtacgacgccttcaagaagtgggacatgggcgacatcgtcgccgcgcgcggcgtgctgttccgcaccaacaagggcgaactctcggtgcgctgtaccgagctgcgtttgctgtcgaagtcgctgcgcccgctgccggacaagttccatggtctcgccgatcaggaaatgaagtaccgccagcgctacgtcgacctgatcgtcacgccggaaacgcgcaagaccttcatcgcgcgcaccaaggcgatgtcgtcgatccgcaagttcatggcggacgccgatttcatggaagtcgaaacgccgatgctgcacccgattccgggcggcgcggcggccaagccctttaccacgcaccacaacgcgctcgacatgcagatgttcctgcgcatcgcgccggaactgtatctgaagcgcctcgtggtcggcggcttcgagcgcgtgttcgagatcaaccgtaacttccgcaatgagggcgtgtcggtacgccacaatccggaattcacgatgatcgagttctacgcggcgtacaccgattacaagtggatcatggacttcaccgagcagttgatccgccaggcggcggtcgacgcgctcggcagcgccacgatcacctatcagggccgtgaactcgatctggccaagccgttccatcgtctgacgatcagccaggcgatccagaaatacgcaccgcaatacacggacgcacaactcagcgacgacgcattcctgcgcacggaactgaagaagttcggcgtggacgcatcgcagccgcagttcctgaacgcgggcgtgggcgcactgcaactggcgttgttcgaagagaccgccgaatcgcaactgtgggagccgactttcatcatcgattacccgatcgaagtgtcgccgctggcgcgcgcgtcggacaagttcgatggcatcaccgagcgcttcgagttgttcatcacgggccgtgaaatcgccaacggcttctccgagctgaacgatccggaagaccaggctgcccgcttcaagaagcaggtcgaccagaaagacgccggcgacgaagaagcgatgttctacgacgccgactacatccgcgcgctggaatacggcatgccgccg

SEQ ID NO: 305754 - DNA, 1028 bp, Unknown
  Bacterial polypeptide expressing nucleotide sequence isolated from the Sargasso Sea
tttgtttaaacaatatatagtgaccgaacaagaaaaaataaggagagaaaaacttgaagagctaaaaaagcttggaattgatccttatccggctgaactttatcctgtaacaaattattctacagatttaatctctaaatatgaagataaaaaacaagtagtaattgctggtagaattatgtctagacgaattcaaggaaacgcttcttttgcagaaattttggatagtaaaggtagaattcaagtatattttaatagagatgagatttgtgagggagatgataaaagtaaatacaacttagtttataaaaggttacttgatattggggatataattggtataaatggtgaattatttaagaccaaagttggagaaatcacggtattagtaaaagatttcaaaattcttaataaatcactaagaccacttccattaccaaaagttgattctcatggaaaggaatatgatagttttactgatttagaacaaagatacagacaaagatatgttgaccttattgtaaaccaaagtgtaaaggaaacatttgtaaagagaacaaaaattattaattcgataagaaattttttaaataataaagattatctcgaggtagagactcccattttacaatcaattccaggtggagcaacagctagaccatttataactcatcacaatgcattagatatacctctttatcttagaatttcagatgaattgtttttaaaaaaattgattgttggtgggtttgaagctgtttatgaattctctagagattttagaaatgaaggaatggatagaaatcataatcccgaatttacaatacttgaactttatgtagcttataaagattatttctggatgatggaactcactgaatcattaattgaaaaagtatgtttagagcttcatggtaaaactaaacttgaatttgattcgaaaaaaatagattttaaggctccatatgagaggatatcaattactgaagctattattaaatttactggttatgacatctcaggtaaaa

SEQ ID NO: 305755 - DNA, 1117 bp, Unknown
  Bacterial polypeptide expressing nucleotide sequence isolated from the Sargasso Sea
caaaacagatgaactaaccatcgatgtatgggatcttgaaatgattactaaatcattaagaccaatgccagaaaaatttaaaggtttgactgatatagaagcaaggtatagacaaagatatcttgatttaatgactaatactaatactaaagaaatctttataaaaagaacaaagataatagattcaatgagacaaaagatgaatcaagttggttacttagaggttgaaactccaatgatgcatcctcttgcaggtggagcagtggcaaggccctttaaaactcaacataatgccttgggcagagacctttatttaagaatcgctccagaattatatttaaaaaggcttttagttggtggttttgaaaaggtatttgagattaataggagttttaggaatgaggggctttcaaccaaacacaatcctgaatttactatgatggaatggtatgaagcatatgcaaccatgcagaatcaaatggatttaacccgagaaataatattaaatgcctcttctgctgctgggtgtgaatcaacaatagagtggggtgatataaagattaatttaaataattttacacaatccagcttaacaaatttaatactagagcataataaagatctttcaaaagatgatataaacaaccaaaagaagcttgagaaattcttaaaagataaaaaaataaaagttgaaaagagttggaaaattggcagaatgctgcttgaagtttttgaagaaacagtagaatctaaattaattgacccaacatttgttactgagtatcctgtcgaggtttcacctctatcaagaagaaatgaagataatccagattttgctgataggtttgaattatttataggtggtaaggaatttgctaatggcttttgtgaattgaatgatcctgatgatcaggcatcaagatttgaagatcaggtcgctgcaaaggattctggtgataaagaagcaatggattttgatcaagactatataactgcactagagcatggtatgccgccagcggtaggtgttggattgggtgttgataggctggttatgttgttaacgaatcaatcatctataagagatgttctgttattcccacaattaaaaaattaa

SEQ ID NO: 305756 - DNA, 499 bp, Unknown
  Bacterial polypeptide expressing nucleotide sequence isolated from the Sargasso Sea
tgaggaaaatagaatcgacgatgaagattttctgcgtcacgtgctaggggatattggggtaaggtgcgaggaggcctgggggattggaaaactgcaacttgaactgtttgaggcgcaagtcgaagacaagttggaagacccaacttatgtgaccgaatatccggcagaggtatcgccccttgccaggcgaaaggatggtaacccagaggtgaccgatcgattcgagttattcatcggtggtagagagtatgcgaatgggttttcagaattgaatgatcctgtcgaccagtcagaaagatttagacgtcaatctgaactcaaagaaagcggggacagcgaggccatgcatttcgatcatgattatataaccgctttggagtatgggttgccgccgactgctggcgagggcataggcattgaccggttagtgatgttcctaacgaatgcgccttctataagagatgtcctgcttttccctcagttacgcaatagtagctga

SEQ ID NO: 305757 - DNA, 1468 bp, Unknown
  Bacterial polypeptide expressing nucleotide sequence isolated from the Sargasso Sea
atggatattaaagaattaacaaaagttcagaaagatagagaagataaattaaaaaagttgagatcagaaggctttaactttccaaatgatttcgagaagaaagaccaaattggagatttggtagagagttatggctctttaaccaaagataaacttgcatcaaagaaagtagcagttaaaacagcaggcagaatcatacttaaaagagtcatgggtaatgctgcttttatgacttttgaagacccaacaggaaggatacagacttatttctctaaagataacttagctaaagagctcgattcagtaaaagaacttgatatgggagacataattggtgtggaaggctcactattcagaaccaagacagatgagctgacgatagaagtaaaaaaaattaggctgttaacaaaatcattaaaacctatgcctgaaaaacataaaggattaactgatatagagacaatctatagacaaagatatgttgacttgatgagtaaccctgattcgagagagctttttgtaaagagaaataagattattcaatctatgagaaaaaatctagaagaagcagggtttttagaagttgaaacacctatgatgcatcctattccgggcggcgctaatgcaaaaccatttgaaacacaccacaatgcattagacaagaaactattcttaagagttgcaccagagctttatttaaaaagattgctggttggtggatatgaaaaagtctttgaaattaatagaaattttaggaatgaaggcatatcaacaattcacaatcctgagtttacaatgctggaattttatgaggcttatggagagttaggcaggacggccaaactaatacaaaagcttgtacaagatagtgttttagcagttaatgattcgttaaatatatcctacgaagataaacctttaaacctaaaagaagattttaagattgttgcactgaaagatttagtcaaagaaaagctgggtctaccaagtcttgatactaaagatgaaatttttagtgcagccaaagacaacaaactaaaattacataagagctggggttggggcaaagtattattagaactatttgaagcatttgtagaaaaagatctatgggaacctaccttcgttaaagattacccatatgaagtatcaccgttatctagaaggaaagatgatgatgatgactatactgataggatggagctttttattgccgggagagagttttctaattttttctgtgagcttaatgacccacatgatcaggagcagagattcactgaccaagtagagcaaaagaaagcaggagatagtgaggcaatgttctttgatgatgactatataaatgctctccagcatggcatgccaccagctgtaggtgtaggaataggcattgatagactaattatgcttgctacggatagacgttcaattcgcgatgtagtttttttcccaactctcaaataaa

SEQ ID NO: 305758 - DNA, 1015 bp, Unknown
  Bacterial polypeptide expressing nucleotide sequence isolated from the Sargasso Sea
tacgtcgaccttatcgtaaatcaagactcccggcatgtgtttcaagttcgatctaaaataataaggaccatcagaaattatttcgaaggtgcagactttatggaagttgagacacctatgatgcaagtgatacctggaggagcaacggcgagacctttcataactcatcataacgctctagatcaggagatgtatcttcgagtagctcccgaactttatttaaaaagattagtcgttggaggttttgaaaaggtttttgagcttaatagaaattttagaaacgaaggactttcaactcgacataatcctgaattcaccatgcttgaattctatcaagcatacgcgacatatttcgatttgatggatttaacggaagacctattcaaaactctttctcgagaagttacaggcgattcaattgttacttatcaaggctctacttatgacttctctaaaccatttcgaagaatgacagtgcttgaagcggtcgaaaaccattgtgctgtgaagcaggaacaacttaaaacaaaagaagctgcaatagatacagcaaaatcactagatgtgactttggatgaaaagtggggaattggtaaaattgttatggagatatttgaacagcgggtagaggccaagttagaccaaccaacttttatcaccgaatatccgattgaagtatcaccgttagcaagaaaaaatgaaatttcgtctgaagttacggaccgctttgagttaatcattggaggtcgcgagttggctaatgggttttctgagttgaatgatccggaagatcaggcgcaaagatttgcaattcaggcagctgaaaaagattcaggtgacaaggaagctatgcactttgatgaagactacattaccgcactcgaatacggcttgcctccaaccgcgggcgaaggaataggtatagatcgattgataatgttatttactaattcgccctcgataaaagacgtgttacttttcccgcatatgcggcctgaaaaagatagtgattgag

SEQ ID NO: 305759 - DNA, 457 bp, Unknown
  Bacterial polypeptide expressing nucleotide sequence isolated from the Sargasso Sea
aacttatgcagaatctattaagatttctgtgaaagatcaatggggcgagggaaaaattttattagaaatttttgaaaaaactgtagaggaaaatcttattcaacctacgtttgtcatcgagtacccggttgaagtctctcctttgtcaagaagaaataatgataatccattaattgcagacagatttgaattattcattggaggcaaagagctagccaatggtttttgtgagttaaatgatcctgatgatcaggctcaaagattccgtgatcaggtaaaagctaaggctgatggtgatgatgaggcaatgggatttgatgaggattatattaccgcattagaacacggcatgccgcccgcagtaggagtgggtttgggtatagataggttggttatgatgttaactaatcaaagctcaatcagggatgtaatactatttcctcagttaaaatcttaa

SEQ ID NO: 305760 - DNA, 1128 bp, Unknown
  Bacterial polypeptide expressing nucleotide sequence isolated from the Sargasso Sea
agactaataaaggtgagctgagtatccatgtaaattctattgaattgctgactaaatcacttagaccgctaccagaaaaatatcatggcttaacagaccaagaacttcgttatcgtcaacgttatgttgatctgattatgaatgagaaaacacgcaatacatttaaaataagatcaaagatcatagattttatacgctcatatttaaagagtgaaaattatatagaagtcgaaacacccatgatgcatgttattccaggaggagcaactgctagaccttttatcactcatcataatagtttagatatggaactttttcttcgtatcgcaccagaattatatttgaaacgtttggttgtcggtggaatcgagaaagtatttgaaataaaccgtagttttagaaacgaaggattgtctcctaggcataatccagagtttacaatgcttgaattttatcaggcctattctgattatgaagatttaatgaatttaactgaaaatatgatgcgtgagttgactttaaatcttttcaatactcacgaagttacttatcaagaacaggtttatgatttaggaaaaccatttgagagattgtcattatttgaatctattttgaaatataataagactatatccgatgaagatctaaggtcattagaaaagattcgcagtattgctaaagaattagatgtattcatagaggatagctatggattaggtaaaattcaggtagaaatttttgaaaaaacggttgaatcgaagttattatcaccaacttttataacacaatttcctactgaagtttctccattagcgagaaagaataacgatgatccttttgttactgatagatttgagttttttattgctggtcgagaaatcgcaaatggtttttctgaattaaatgacccagaggatcaagctgaacgatttagaaaacaggttgaagataaagaagcaggagatgatgaggccatgcactttgatgatgattatataaaagcgcttgagtatggtatgccgccaacagctggagagggcattggtatcgatagattagtaatgtttttaaccgattcagcctcaatacgagatgttattttgtttccccatttgagacagaaataaa

SEQ ID NO: 305761 - DNA, 1051 bp, Unknown
  Bacterial polypeptide expressing nucleotide sequence isolated from the Sargasso Sea
aaaataccatggtttaaccgataccgagattcgctataggagaaggtatttagacctcatgatgtcagaggagagtgctgaggtattcaagatcaggtcaaaagtcgttactcagataagatcttttctgaatgatctagatatgatggaagttgaaactccgatgatgcatccgataccaggtggagcagttgcgagaccattcatcactcatcacaatacactcgatcaagatttctatttgagaattgcgcccgaactctatttaaagcgtcttacagtgggtggctttgatcgtgtctatgaaatcaatcgctcatttagaaatgagggagtttctacacagcataatcctgaattcaccatgctagaactatatgttgctcatgaaaccccagattttctcatgaacatgattgaggatatgatgagggcgatttctcaagaattatttgggtctgataagatcgaatatcaaggagaaacgatcgattttacaggtcattttcagagacttaccatggaggagtcagttttaaaatataatccagaattagacaaagaaaaagtcagagatgctggatatctgagatcatttgctgaaggcatagatatctcagtcgaaaatgatgctggagctggaaagattctatttgagatttttgaaaagacagtggagcatcagcttcatcaacccacttacattacttcttaccccagagaaatctcaccactttcaagagcgaatgatgatgatccttggatcgtagatcgttttgaattttttataatgggcagagaattggcaaatggatttcaagagttaaatgatccagatgatcaggctgaacgttttgaagatcaggtcaaagccagagatgggggggatgacgaagcaatgttttttgatcaggattatattgaagcacttgagtatggtatgcctcctactgctggtttgggggttggtatagatagacttgtgatgcttttctcaaatcaagcgtcaattcgtgacgtgctactttttcctcacatgaggtcgaaataa

SEQ ID NO: 305762 - DNA, 1111 bp, Unknown
  Bacterial polypeptide expressing nucleotide sequence isolated from the Sargasso Sea
ttgtctgaaataaaagaagcgcgcttacaaaaagctagttcactcgttaataaaggatttgcttcttacgcacaaagctttaaggtatcacatactaccagttttcttattcaaaaatttgattatctagaaaatggtcaagaggaagacttcagtgtttctattgctggtagagttctggcaaaaagggtaatgggcaaaattgcctttttcacaataagcgatcaagaaggtcagattcagctttatctagataaaaggattattaatttcaatttagaaaaacaaaaattactttcttttgaagatctcaaggaaatagtagatattggtgattggataggcgtctatggaactattaaaaaaactaataaaggtgagctttcaattaaagtagaaaaatgggaaatgttatccaaatcattacaacctctcccagataaatggcatggattgactgatattgaaaaaagatatagacaacgttatttagatttaatagttaatcctcactctaaaaatgtatttaaaaccagagcgaaatgtataagttttataagaaaatggctagataatagaaattttttagagattgagactccaattctgcaatctgaagctggtggtgctgaagcaagaccatttataactcatcacaatacattagatattccgttgtatttaagaatagctacagaattacatttaaagagaatggttgttggaggttttgagaaagtctatgaattgggaagaatcttccgtaatgaggggataagtacaaggcataatccagaattcacctcagtggaaatttatgaagcttattctgattatgtagatatgatgaatttaactgaagaattgattaaagatatcgtagctgatgcatgtgggtccttaactataaattatcaaaataaagaaattgatttttctaagccttggtcaagaatatcaatgaaagctattgtcaaaaaatatacagggattgattttgattctttcagtggagactttctagcagcaaaacaagccgttaaaaatatcaatgttgtttgttctaataaagtaaatactatgggaagacttttaaatgaggtcttcgagc

SEQ ID NO: 305763 - DNA, 1078 bp, Unknown
  Bacterial polypeptide expressing nucleotide sequence isolated from the Sargasso Sea
aatgattacaaaatcattacggcctatgcctgagaagtttaaaggcttaactgacatagaggctagatataggcaaaggtatcttgatttaatgactaacaatgaaacgaaagaagtttttgttaaaagaaccaaaattattgactcgatgagaaaaaaaatgaatgagtgtggttacttagaagtagaaacaccaatgatgcatcctttagctggcggcgcagtagctagaccatttgtgactcaacacaatgcactaggacaagatttgtatttaagaatagctccagaactatatttaaaaagacttttagtaggtggttttgatagagtatttgaaattaatagaagttttagaaatgaaggcttatcaactaaacacaatccagaatttacaatgatggagtggtatcaagcatatgcgagcatgcaagaccaaatggatttaactaaagaaattatcacaaacgctgcagatgctgctggatgcaaatcaaaaatacaatggggagatttagaaataaatttagataatttcaaacaatccactctttcagatttaatattagattttaattctgatctatcaaaagatgacttgagtaatcagaaaaagcttgaaaaaattctgaaagataaaaaagtaaaaattgaaaaaaattggggcattggaaggattcttcttgaggtttttgaagagacagtagaagaccaattaattgatccaacatttgtaacagagtatccagtagaagtctctccattatcaagacgcaatgaaactaatccagattatgctgataggtttgaattattcattggaggaaaagaatttgctaatggtttctgtgaactaaatgatcctgatgatcaggcatctagatttgaagatcaggttgctgcaaaagactccggtgataaagaagcaatggattatgatcatgactatataactgctctggaacatggaatgcctccagcagttggagttgggatgggagttgatagattggtgatgctactcacaaatcaatcgtcaataagagacgttttattatttcctcaactcaaatcgtaa

SEQ ID NO: 305764 - DNA, 313 bp, Unknown
  Bacterial polypeptide expressing nucleotide sequence isolated from the Sargasso Sea
tttcagaagaaccctgacaatccagactttgcagacagatttgaattatttattggtggaaaagagtttgcaaatggtttttgtgagctcaatgatcctgatgatcaggcttcaagatttgaagcacaggtcgctgctaaggattctggagacaaggaagcaatggattttgataaggattatattacagcactggagcatggaatgccgccagcagttggagtaggacttggaatagatagattagtaatgcttctaacaaatcaatcatctataagagatgttttgctattcccgcaattaaaaaattaat

SEQ ID NO: 305765 - DNA, 1489 bp, Unknown
  Bacterial polypeptide expressing nucleotide sequence isolated from the Sargasso Sea
atgacagaaaaactaacggaaaatgagcttcttgaacagagaagattaaaactcgatgcactaagggagaggggagttgcctatacaaattcctttagaagagattctttatctcaagatttaaaaattcaatttgacggaacatctaaagaagagttagaagaacaatctcacgaagttgctattgccggcaggattatgctgcagaggattatgggtaaagctagtttcataactttgcaagatatgaaaggacaaatccaagcctatatccgatcaaatgacattcctgaaggtcaatatgatgaatttaaaacatgggatctaggagatatcgtaggaataaagggcaaattattcctcacaaaaacaggagaattgactgttcatgcagattcaatacaaatgttgactaaatctttaagacctttgcctgaaaaacattcgggattagttgacacagagcaaagatatagaaaaagatacttagatctgattacaaactcagaaagcttagaaatttttaagaaaaggagtcaaataataagctctataagggagttttttataagtcatgaatatttggaggtagaaactccaatgatgcactctattctaggtggcgcagcagctaaaccatttacaactcatcacaatgcattggatatggatctttatttgcgtatagcacctgaattatatttgaagagacttgtggtaggaggaatggaaaaagtttttgaaataaatagaaattttagaaatgaagggctatctacaaaacataatcctgaatttacaatgctagagtactataccgctttcgctgattttaataatcaaatggattttttagagagactttttaaatttgtttcagaagaagtattaggctcatcaaaattggaaactgaaaacataagctacgatttttctaaaccatttcaaagaattagtttgaaagaaaaagtttctaacaaactttctatcgatcctatttcatttgatgatagaggtttccttctggatttaggaaaaaaatataagtttgaagatatagaaaatctgtcaaatggaaaaattttatttggattatttgaagagcttgttgaatcagaattaataaacccaacattcattactggatatcccaaagaggtatcgcctctatcaagagcttcggatgaaaaccctgatgaagtagatagatttgagttatttattggaggtaaggaaatagctaatggattctcggaactgaatgatcctgatgatcaggcagaacgttttcaagatcaggtatctcaaaaatcagcaggtgacgaagaggccatggaattcgattctgactacatagaggctttagagtatggcttacctccctgtgcaggagtgggtatcggcattgatagattggtgatgttacttacaggtgctcaatccatcagagatgtactcctattcccgcaaatgaagccaaaaaattagc

SEQ ID NO: 305766 - DNA, 1021 bp, Unknown
  Bacterial polypeptide expressing nucleotide sequence isolated from the Sargasso Sea
aaatgtatttaaaacaagagcaaaatgtataacttttataagaaaatggctagataatagaaattttttagagatagagactccaattttgcaatctgaagctggtggtgctgaagcaagaccatttataactcatcacaatacattagatattccgctgtatttaaggatagcgacagaattacatttaaaaagaatggtcgttggaggatttgagaaagtatatgaattgggaagaatcttccgtaatgaggggataagtacaaggcataatccagaattcacctcagttgaaatttatcaggcttttaccgattatgttgatatgatgaatttaacagaagaattaattaaggatatcttagctgatgcgtgtgggtctttaattattaattaccaaaataaagaaattgatttttctaaaccttggttaagaatatctatgaaagatatcgtcaaaaaatatacagggattgattttgattcttttaatggagactttttagcagcaaaacaagctgttgaaagtataaatgttgatttctctaataaagttaatactatgggcagacttttaaatgaggtcttcgagcaaaaagtagaatcgaaacttatagaacccacttttgttatagattatcctgttgaaatttctcctttagctagacctcatcttgataataaagaaatagttcagagatttgaattattcattgttggtcgagagctggcaaatgcgtttagtgagttaatagatccagtagatcaaagagaaagaatgcaattacagcaatctcttagagatgaaggagatcttgaggctcactgtatagatgaagattttttgactgctttagagattggcatgcctcctacgggaggattaggtataggcattgataggctaattatgttaattactgatagcgcatcgataagagatgtaattcctttcccattgttaaaaccagaaataacttccaaaaaaagtgaaaaattaccctcgaatgaagtaaaatag

SEQ ID NO: 305767 - DNA, 190 bp, Unknown
  Bacterial polypeptide expressing nucleotide sequence isolated from the Sargasso Sea
agatgaagatttcttgaatgctttagagattggcatgcctcctactggaggattaggaataggtattgatagactcattatgttaattactaatagcgcatctattagagatgtaatccctttcccattgttaaaaccagaaataacttccaataaaaatgaaaaattacccttgcatgaagtaaaataa

SEQ ID NO: 305768 - DNA, 1141 bp, Unknown
  Bacterial polypeptide expressing nucleotide sequence isolated from the Sargasso Sea
tttcatcaattagatcctcacttgagaatgaaggtttttgttgaagttgaaacaccaattttacaaccaatacctggtggtgctgcagctaaaccatttataactcatcataattcactgaacattcccctatacatgagaattgcaaatgaattgtatttaaaaagactaattgtaggaggatttgatggtgtatttgaatttgctaaagattttagaaacgaaggaatggatagatcacataatccagagtttacaaacttagagttttatgtagcctataaagactacaactggatgatgagttttacagaaaaattacttgaaaaagttacaattgatactcttggatcctcaactgttaaatttgaaaataaagagattaatttcaaaggaccatatgaaaaaattgggattcttgatgcaataaaaaatgaaacaggaattgacgctttgagccttaatgagagagaattagctgaagccgcaaaaaaaattggagttgaaattgatgaaacaatgggcaagggtaaaataattgatgaaatttttggtgaaaaatgtgagtcaaatttcattcagcctacttttataattgattatcctaaagagatgagtcctttaacaaaggaacacagagaaaatccacaactaactgaaagatttgaattattgattaatggaagtgaaatagctaatgcatactcagaacttaatgatcctattgatcagcttgaaagatttgaagatcaattaaaactatctgaaaaaggtgatgaagaagcaatgtttatcgatcacgattttgtaagatctctggaatatggaatgccgccaacatcaggtataggtattggtatagatagattggttatgttgctaactaatcatcgttcaatacaagaagttattttcttcccccaaatgaagcctgaaaataatgcattagctgatttaagtattgatgaaaaatccatctacaatcaagtaaaaaatcttgaaaaagttgaactcaactttgtaaaggatagctctggtcttagcaacaaaaaatgggataaaagcattaaaaatcttacaaaaaaaaatttagttaaagtttcaaaaacaaatgagggactatttattgaaatagtttgat

SEQ ID NO: 305769 - DNA, 1468 bp, Unknown
  Bacterial polypeptide expressing nucleotide sequence isolated from the Sargasso Sea
atggataataaagaagaagaacatcgattaattaagcatagaaaagaaaagctagaaaggattaaagaaagtagaaatccttacaagaataattatgcaagaacacatcaatgtaaagatgtcattaacgatgagagtttaattgacaattcaaatattaaagtatcggttctaggaagaatgtcatcaaaacgaatgatgggtaaatccaattttgctcatattaaggacatgtcaggtaaacttcagttttttgtagataaaactaaattagatcaaaatcatttttctgagttcaaaatatctgatattggtgatgttatttcaataagtggaaatatttttttaacaaaaacaaaagaaattacattaaattgtgaaagttttgaaatagtcactaagtctcttaggcctataccagaaaatttttatggattagctgatcaagaaataaaatatagaaaaagatatctcgatcttatatgtaatgaagaaacaagagatatatttataaaaagatcaaaaattattaagttaattagagactattttgaaaaaaataattatattgaggttgaaactcccatgatgcataaaatcccaggcggcgctaaagcaaggccatttaccacacatcataatactttagatatggatctttatatgaggattgcaccagagcttttcttaaaaaaactgattgtcggtggtttcgagaaaatttttgaacttaatagaaattttagaaatgagggagtttcctctaagcataatccagagttttcaatgattgagttttatcagtcatatgctacttttgaggatctgatgaagtttactcaagagcttctaaaattcatagcaatggaactttctaactcgcatattataaattatcaaggaaatgaaattgatttctcgaagtcttttgacgttttagatatgaaagattctatcttaaaatataatgaagatataacagaaaatgaccttaacaataaagacagtttaaaaaaaatattttcaaatataaaaattccatacaatgatggtagcagtttaggggaattacattttgaactttttgaaaaaactgtggaggcaaaattaattaatccaacttttattactaatcaccctgttgaagtttctccacttgcaagacttaatgataataataaagaaatgacagataggtttgaactgtttattgctggaaaagaaattgcgaatggtttttcagaacttaatgatcctgaggatcaaaaaagaaggtttgaaaaacagattgctctaaaagataaaggtgaccttgaggcaatgcattatgatgaagaatttattgaagctttagagtatggcatgcccccgacagcaggagagggtataggtattgataggctaattatgctatttactaattcatcttctattagagatgttttgctatttcctctaatgagataat

SEQ ID NO: 305770 - DNA, 526 bp, Unknown
  Bacterial polypeptide expressing nucleotide sequence isolated from the Sargasso Sea
ctcagaacttgtagttgaatataatcctgaattaaaagataaagacttatctgataaaaaaattcttgagcagtatttaaagagtataagtgtaaaaattgaaaaagcatggggtcctggcagattacttttggaaatttttgaagaaacagtcgaatccaaattaatagatccaacttttgtaaccgaataccccgttgaggtttcacctctttctagaagaaatgaacataaaccagattttgcagataggtttgaactatttataggtggaaaagagtttgcaaatggtttttgtgagttaaatgaccctgatgatcaagcatcaagatttgaagatcaggttgcagcaaaagactcaggagataaagaggcaatggattatgatcatgactatattactgcattagagcatggtatgcctcctgcagtaggtgttggaatgggagtggatagattagtaatgttgttaactaatcaatcctcaattagagacgtgttattatttcctcagttaaaatcctaa

SEQ ID NO: 305771 - DNA, 1450 bp, Unknown
  Bacterial polypeptide expressing nucleotide sequence isolated from the Sargasso Sea
gaaagaagaaagaagctagatcaacttagagataagggtgatgcttatggaaactcattcaaacctcaaaataatgcaagaagtcttcatgaagaatatggaacattttctaaagaagagcttgtagataaaaatattaaaaatatttctatcgccggtcgaattgttttaaaaagagttatgggaaatgctagtttcgcaactttaagagatgcatctggagatattcaaatttacgttacaaaaaataatgtagaggagagtgtttatgaagatttcaaaacatgggatttaggagacatagttggtgtttcaggctctctatttagaacaaaaacagatgaattaactattgatgtatgggatctagaaatgattactaaatctttaaggcccatgcctgagaaatttaaaggtttaactgatattgaagcaagatacagacaaagatatcttgatttaatgacaaacaattctaccaaagaaatttttattaaacggacaaaaattatagactcaatgcgaaaaaaaatgaatgaggtagggtatctcgaagtagaaactcctatgatgcatcctttagctggcggtgctgtggcaagaccatttgtaactcagcacaacgcacttggacaagatctttttttaagaatagcgcctgaactttacttaaaaagattactcgtagggggatttgagaaagtttttgagattaatagaagcttcagaaatgaaggactatctactaagcataaccctgaatttactatgatggaatggtacgaagcatatgcatcaatgcaagatcaaatggatcttacaaaagctattattttgaatgctgcctcagccgcaggctgcgaagaatcaatagaatgggatgaaaacaaaattaatcttggtaattttaaacaatcaacactttcagaacttgtagttgaatataatcctgaattaaaagataaagatttatctgataaaaaaactcttgaacagcatttaaagagcataagtgtaaaaattgaaaaagcatggggcccaggaagattgcttttagaaatttttgaagaaacagtcgaatctaaattaatagatccaacttttgtaactgaataccctgtcgaggtttcacctttgtcacgaagaaatgaacataaaccagattttgcagataggtttgaactattcattggcggaaaagagtttgcaaacggtttttgtgagttaaatgaccctgacgatcaagcatcaagatttgaagatcaggttgcagcaaaagactctggtgataaagaagcaatggattatgatcatgactacattactgcactagagcatggtatgcctcctgcggtcggtgttggaatgggggttgatagattggtgatgttactgactaatcagtcttcaattagagatgtattgttatttcctcagcttaagtcataga

SEQ ID NO: 305772 - DNA, 844 bp, Unknown
  Bacterial polypeptide expressing nucleotide sequence isolated from the Sargasso Sea
tgccataaaatttacgggattatcagatgaacagattaaccgcattataacaccactagaaggaatttatctaataattgaccatatcagaacactaatctttgcaatttcagatggcgcacttcctagcaatgtcggaggaggatacaaccttcgaataatgctacgaagaattgtttcaactatggacagattaaagctaaaatttgatttggatgaaataatcgacatacagattgattatttgaaaaatacatacccagaattagaagatacacgagacgatgtaaaagagattatttcaatcgaggcaggcagatacgatagttcaaaacaaagaatgcagaaaattgttagtaaattagacaaagaaccaagtgtaacagatttgataagactttacgaatctgatggagtaactccagaatatctaaaggaaatgaaagtaatttcagaaattccatcaacattttacgcaaagctttctgatttgcaccagtcaaagaaacaaaaagagcagttaaccttgccactagaaggaattccagatacagaacttttgttttatggtgacgacccaagagagtttagtgcaaaagttttgaaggtgtttgataattttgtagttctagataaaactggattttatgcaagaggtggaggtcaagaaccagatcatggaaagattgcagaatgtgacatagtggacattacaaaacacggtaacatagtagttcatgaaattaaaggagaaattccaaaagaaggtgatacagtttcgtgtgtagttgattcaacaagaagagatggcataacaaaaaatcatacaagcactcacatcata

SEQ ID NO: 305773 - DNA, 277 bp, Unknown
  Bacterial polypeptide expressing nucleotide sequence isolated from the Sargasso Sea
gcgctgctggcgctggtcgaccagttgaagaacaagctgggcagcgctgtgattctgctcggtggtgtgttcgacgagaaggtggtgctggtcgctggtgtgacccaggatctgaccgccaaggtcaaggccggtgacctgatgcgtcaggccgcggcagccgtgggcggcaagggtggcggtcgcccggacatggctcagggcggcggcgtagatgccggcaagctggatgaagccctggctctggccgctactctggtcgagcaggcttcgtaac

SEQ ID NO: 305774 - DNA, 784 bp, Unknown
  Bacterial polypeptide expressing nucleotide sequence isolated from the Sargasso Sea
taatgaaacaattagaaataatatctctactaaaatagaaactatgagctttaagaaggctcaagacaaaggagcgctggctttttttggagacaaatatggagatcaagtgcgcgtactttcgattggcggaaacttttctgttgaactatgcggtggaactcatgttgattcagcaggggatattggttttgtaaaagtaactagtgaatcaagtatttcatcaggcgtcagaagaattgaagcttgcagtggaaaagatgcggaagatttctcaaataaatttcaaaattctgggcaagaagcaatgaggcttttgaacgtgaatgaagagggtcttatttcaaaaattaaagagttgatggaaaagaacagtgagttagaaaaatcgattaaatcatcacaacaaaaagaattaggcgaagtaataaagagccttgaacaggatattattcaaattaattcttataaagttatcttaaaggaatttgaaggaattaacttaggttcagcaagatctttcatagatgaactaaaaaataaaaatgaaaacttaatttgtgttcttgcttcgaaagatggagataaatcaagcttattggtttcatcttcaaaatcaattccaaaagatgttttcagttcaaatgatttgttacaatccctcgcttcattgataggcggtaaaggcggaggtaaaccagatcatgcacaagcaggcggtagtcaagttaaaaactttgaaaaagttttttctgaagctacaaaatatattcaaaatctttaa

SEQ ID NO: 305775 - DNA, 805 bp, Unknown
  Bacterial polypeptide expressing nucleotide sequence isolated from the Sargasso Sea
attcctctatcctatttctaaagatcaaatttctaagattgagactttagttaactcttggattatggaaaatcatgccctagaaataaaaaatatgtctaagagtgaggctcttgagaagggcgcagtcgccatgtttggagaaaaatatgatgatgaagtgcgcgttgttaatgtaccaggagtttcaatggaactttgtggcggcacacatgttaaaactacatccgaattaggttcttttaaaataattagtgaggaaggcatctcagccggagtaagaagaatcgaagcattatcaggtcaatcagcattagactatttcagcgatagaaatgcattagtaaaccaactaagtgatttgttaaaagcaaatcctaatcaactttttgaaagggttaataatttgcaagcagagcttattaataagaataaagagatacaaaaaatgaaagatgaaattgcatattttaaatactcttctataaaatcatccgcagaaatagtaaattctttttcaattttagtaaatcagattgatggcttagatgggaaatctttgcaatctgcagcacttaatttaacttctcatttgggaaataaagcaatagtgattcttgggggaataccaaatccagaaaatagaaagttgttatttgttgtttctttaggtgatgatgtagtaaaaataggattgcatgcaggtaaattaattaatgagattgcaagaatttgttcgggaggtggaggaggaaagccaaactttgctcaagcaggtgctaaagatattgataagtttaagtga

SEQ ID NO: 305776 - DNA, 622 bp, Unknown
  Bacterial polypeptide expressing nucleotide sequence isolated from the Sargasso Sea
tgtttgtggtggatttcatatggagatgttttaggagcaggaaagggttggtctatcacaattaattttagtgacagtattcaagaacagtttttaaaattttttgaggacgagcaaaaatttacacttggtgtttgtaatggatgccaaatgctttcctccataaaagaaataattcccggaacagattcttggccaagtttccaaaagaatcattccgatcaatttgaagcaagactgagtcaggtaaaaattctaaaatcaaaatctgtgctgttaaataatatggaagactggtcgctaccaattattgtttcgcatggagagggtagagcaagttttgaaaatgaagatgaaataaataaactttttgattcagaaaagatctgtatgactttcgttgactcgtctggatatcatactgaacaatatccattgaacccaaataaatcaccctcaggaattacaggaattacaaatgataatggaaacataacaatcatgatgcctcacccggaaagagtttttcgttctcatcaattttcatggaaaccattatcttggggagaattttctccttggatgcagatctttattaatgctaaaaaatttgtgagttagc

SEQ ID NO: 305777 - DNA, 859 bp, Unknown
  Bacterial polypeptide expressing nucleotide sequence isolated from the Sargasso Sea
gagggtgggggacaagaacctgactttggagagataatacatcctaatggaacttctaaagttttagattgtcagaaacaaggaacttatgtaatacacttttgtgattcaaaaattaaagttggaacggtaattcacggagtagtagactatgatagaagaaaacaactaatggatcatcatactagtgttcatattgttggtggagcggctagaaaaatactcggacctcacgtatatcaagcaggttccaatgtttcagaggaatacggaagattagatattactcattataagagattgactagagacactttagataagatcgaatctttagcaaatgaagtattacaagatgtagattatacaacaaaatcagaattggatagaaaggatgcagatttaatttatggttttgatttatatcaaggaggcgcgccaaaatcaaaaaacattagaatcttggaaattggaactcatgatacacaagcatgcggaggcacacatcacgacattccaggtaaaattggccaaattagagttgtcaggtcaacattagttcaggatggggtagaaagattacaaattgtagctgggaatgcagcattaggttatggaagaagacaagatcaattaattcgagattcagcgtctacttttggtgtttctgaaaaagatttgcctaaaacatctggtagattttttgaagaatggaaattacaaaggaaaaagattgaacaattagaagccgaaataatcagacttagaacttctggggttgatggagacgattcaagtgaggttgatggagttcggataattattatggaagttgaaagtgatattaagcaaatgacaa

SEQ ID NO: 305778 - DNA, 147 bp, Unknown
  Bacterial polypeptide expressing nucleotide sequence isolated from the Sargasso Sea
aatgaaaaaaaatcttactactaatgaaatcagaaatatttaccttgaatattttcaggaaaatggccatgagttagtagaaagtgcttccttaattccacataacgatccatccttattgtttactaatgctggcatggttccttt

SEQ ID NO: 305779 - DNA, 834 bp, Unknown
  Bacterial polypeptide expressing nucleotide sequence isolated from the Sargasso Sea
gatgaatgtgagtctacctccaatcaatttcaaggtatttcacgaaaatggctattttcgtaaacaatgccgtgttaccaacctatggttttggacttgtgaccatgatagagacacctgtggtgataccgaggaagatgaatacacattcataggtgcgccaattatcgaaggattccctcaaagaggacgtgaattaaaggatgccatgcgtgagactttcctttcatttttagaaaaacatgaacacacccgtatcgatccttatccaattcttgctcgctggcgagacgacatccatcttaccatagccagtatcgcagatttccaacctcatgttacttctggagaagtggagcctcctgctaatcctttagcaatttcacaaccttgtattaggctgaatgatgttgatgctgtgggccattcgggaagacatctaaccacttttgagatgatggcacatcacgtatttaatcgcccagatgaaggccgcttattctattggatggaagagtgtgttgcatattgtcatcagttgttatgtggtacattctcaattgaaccaaaggagatcacctatgtggaaaacccttggtctggcggaggaaatgctggtgcagcggttgaagtaatcgttggaggtttggaattagcaaccttagttttcatgaaccttgaggagagtactgaaggtaatattgagataaagggtgtgaattacagagagatgccattacaaattatcgatactggatatggtttggaaaggttttgttgggcagctgctggaactccaacgatctatgaggcaatatatcctgaaagtgtaga

SEQ ID NO: 305780 - DNA, 892 bp, Unknown
  Bacterial polypeptide expressing nucleotide sequence isolated from the Sargasso Sea
ccatcaaacaacgggattgacagatgaacagattaatcgcattattaccccgctagaaggaatttacctcataattgatcatattagaacactaatctttgcaatttcagatggagcacttcctagtaatgttggaggcggatacaatcttcgaataatgttaagaagaattgtttcgaccatggacagattgaaattaaaatttgacttggatgaaataatcgacatacaaatagattatttgaaaaatacctatcctgaattagaaaaaactagagaagatgtaaaagaaataatttcaattgagacaggaagatatgacagttcaaagcaaagaatgcaaaaaattgttagtaaattaaacaaagaaccaaaagttgaagatttgataacactttacgaatcagatggagttacaccagaatatcttaaagaaatgaaggtaatatcagagattccatcttcattttattccaaactttctgatttacatcaatcaaaaaaacaaaaagaacaagttaacttaccattagaaggaattccagatacagaactactgttctatgatgaagatcctagagaatttgatgcaaaagttttgaaatcatttgaaaattttgttgttttagataaaactgcattttatgcaagaggaggaggtcaagaaccagatcatggtaaaatttctggtcaggaaatagtagacattacaaaacatggaaacattgtcgttcatgaaattaaaggagaaattccaaaagaaggagatgtagtttcttgcatagtagatgcaaaaagacgtgatggaattacaaaaaatcatacaagtacacacatcatcaatacttcagcaagaagtgttctaggttcatgggtatgggcacactctgca

SEQ ID NO: 305781 - DNA, 117 bp, Unknown
  Bacterial polypeptide expressing nucleotide sequence isolated from the Sargasso Sea
ggcgttcaggccttcgagctgtacgacacatatggcttccctctggagctcactcaggagattgcagaagagcagggcctcacggtggaccttgatggctttgaggtggcgatggag

SEQ ID NO: 305782 - DNA, 858 bp, Unknown
  Bacterial polypeptide expressing nucleotide sequence isolated from the Sargasso Sea
ttagttgtaacaggtcaaagtcaaataaaaggtaatttgttattaagcggatcatctacttttgctggtgttttatcagcctcaaatatagttgcctcgggatcagcaatattaaaagatacattaaacgtatcaggaacaacaacactcgccactacactgaacgttaatggagatgtgcaagcagctaaagacgtacacattgtaggaggtttaacaatctctggtacttttgcacccggtcttatctcttcttcatccccaattcaaacgagtgatcaagtgcgtgtcggtgaaacactacatgtatccggcgcaacaacactagctggtcttttatcctcgtccgcacctatacaaacaagcgatgatctccgagtcggcgaaattctatatgtttcgggtgctattaacggtgctagtttagcagttggtagtatcgatgttaatgatggcaacattgctaatgttggcgatattgatgcagatagcgttagcgtagcggatgctgctaatggactaaacatcgactttagtggtgctaatactggtacaggattgattaccattgcagacaaccttgctgctgcacttactgtcaaagaaggcagtaatgagatcgttaagattgtttcctcaaattcatcagaagaaattgtccttggttacaagcttgatttaggtgataacgatattgagaatgtaggaactatttctgccgacgttatacaacctgatgcagccggcacgggacttgacattcagtttgaaggaaatacaactaccaataaaattagtttaactgacaacctagccgatgcgcttaatgttacagaggctggtaactcatacatgaag

SEQ ID NO: 305783 - DNA, 685 bp, Unknown
  Bacterial polypeptide expressing nucleotide sequence isolated from the Sargasso Sea
tttggtgaagaatatgacgatgatgtaagagttctcacaatgggagagaactcgtattcagttgagttatgtggaggtacacatgtttccagaactggtgatataggattctttactatcacatcgcaatccagtgtagcttctggtataagaagagttgaagctattgctggtatgcaggcattaaactatataaaaaaattaaaagaagttaattcctcaattcaaaaccttttgaatgtttctacagatgatatacacgataaaataaaatcattaattgatgaaaacaaggctttaaaaagcaaaggaactcaaagttcaaaaagagaaatagtcttttcagaaagcattgaaatcaatgactggaaattggttattcagcaagtgcaattagatgacaccaaagatttaaggttgctagcagatgagcaaaaaaatacaaacgaaaaagtatgtgttgttatcttttcagaacaaaataataagattgcgttagtttgtggagttaccaaaaatcttacagataccttatcagcaaaagatatagtttctgttatatcagaaaaaattggtggaaagggagggggtaggtctgactttgcacaaggagcaggtgagtctaaaaatattaaagatttcgtgacatctatacaagattcagtaaaatccctcgctaaataga

SEQ ID NO: 305784 - DNA, 709 bp, Unknown
  Bacterial polypeptide expressing nucleotide sequence isolated from the Sargasso Sea
aatgaataaaaaaataacttctgaaatttttagagatgatccttataaaaaggaatgtgaggctaaaattttagactttggagacaattggattatattaaatcaaactgttttttatgctgaagggggcggtcaacttggcgatactggattaattaaagtaggtcaacaagaaatacaaattgaaaatacaataaaggaaaatgacttaattaaacatatttttaattccaaatttgattttgaaattggagataatgttacctgtataattgactgggacagaagatacaaactaatgaaaatgcatacttctttgcatctattatgttctttggtcaatgcaaaagttacaggtggttcagttggtgacggaaaaggaagactggacttcaatttagacttcaagccaaataaagaggaactaaaagataatttaaacgatcttattcaaggtaatcatgatataactatttcttggataagtgcacaagaactagacaaaaatcctaatctagtaaaaacaatgtcagttttacctcctcgcactaatggatcaattagaatggttcgtataggagataatattgatttccaaccttgtggaggtacgcatgttaaaaatacttctgaaataggtttagttgaaattaacaaggttgaaaacaagggaaaacttaataaaagagttgctatatctctagtttag

SEQ ID NO: 305785 - DNA, 545 bp, Unknown
  Bacterial polypeptide expressing nucleotide sequence isolated from the Sargasso Sea
cgcttatctgaacgagcgcgatgcggttgtgaagcagctgggggatcgctttaaggctcagccgtccgagatcgttgaccgtgttgcggtacttcaggaggagctcaagtccaccggcaaggcgctggctgcggctcaggccgagctggcggtggccaaggcgggagctctggctgccaaggccgaggccgtgggtgagttccagctactggtggaacgccttgacggcgtggatggggccggtttgcagggggcggcccagagccttgcggatcagctgggggatggtgcggccgtggtgatcggcggtctgccgaatccggctgacctgggcaaggtgatcctggtggcggccttcggcaagcaggtgattgccgccaagcttcaggcggggaagtttatcggtgccattgccaagctttgcggcggcggcggcggcggccgcccgaacctggcgcaggctggcggtcgtgatggtgctcaactgacgtcagctttagaggccgctgctgttcagttgcagcaggcgctggcgaatgcatgat

SEQ ID NO: 305786 - DNA, 151 bp, Unknown
  Bacterial polypeptide expressing nucleotide sequence isolated from the Sargasso Sea
agctggcgatgtgatcaaacattttgcgggtgagctcggtggcaaaggtggcggtcgacctgatatggcacaagggggtggttccgatgtcgcggccttgccaacagtactggcgtcactccccgagtgggtcgcagctcaactgggttga

SEQ ID NO: 305787 - DNA, 439 bp, Unknown
  Bacterial polypeptide expressing nucleotide sequence isolated from the Sargasso Sea
tttggattgggaaagaagatacaaacttatgaaaatccatacttgccttcacctcctatgctcaataattgatggtaaagtaacgggtggctctgtgaatgatgggaaaggtagattggattttaatttagactataaaccaaacaaagaagaggttaaaattaaacttaataaattaattcaaggtaattataacatcaattattcatggataaatcaaaaagaattagatgaaaacccacatctaataaaaactatgtcagttcttccaccaagaacaaatggtaaaataagaatggttagaataggtgaagacattgattatcaaccatgtggtggaacacatgttaaaaatacctctgaaattggtaatattgaaattaataaaatagaaaataaaggtaaattaaataaaagaattgctttatctcttacataa

SEQ ID NO: 305788 - DNA, 775 bp, Unknown
  Bacterial polypeptide expressing nucleotide sequence isolated from the Sargasso Sea
attgcagataagacgatctgaagaattgcttcttgaagaatataggaaaggttcaattcgcggaacaatacatacatgtattggtcaagaaatttttccagtactattagcagatcaaactgaggattatttttggttttctaatcatcgtggacatggtcactatattgcgaaaacaaatgactttgaaggattatttgcagaaatacttggaaaagaaaattcagttgcacacggtgtaggaggtagtcaacatttatcaaacaagaactttttatctaatggaattcagggaggccaagctgcaattgcagctggttattcttcgaatataaataaaagcaaacagtataaaagcttgatgtttattggtgatggcactttaggggctggaccaatttatgaagcatggaatatggcaagcttatataattcaaaagtaatttatgtattagaagataatgaaatcgcccaatcaacacctgcaattaacacgttttcgggtgatattaaaaaaagagttgaaggatttggattaaaatatttagaaacctctgataagagtatcgaggaaatgaaaatagctattaaagaagctgttggatcttcaagccagggtactccaactttaattcatttacatacaaaacgtctttcatcacattcaaaaagtgatgataatcgctctcctgaatatattaaaaaattatctgaagacgatttattaaatgttcatcttaaaaaagaagacatatcatatgaccaaaaagagatt

SEQ ID NO: 305789 - DNA, 869 bp, Unknown
  Bacterial polypeptide expressing nucleotide sequence isolated from the Sargasso Sea
tgcaattgatgaaatcactggtggtgctggtactgatgttatcggtggtacatacggaacagatggtggagcgactacaacaagttatgctcctggtgatgttgttgatggcgcaggtggttctgatacattaaaactttctattgctggtacttcaactggtgctagtgactctattacaggtatcacattaaagaacatcgaaacaattgatgttacaaactttgaaacagatgaaacagatactacaacaatcgaatcatcactatatagtggtgtagagactgttggattagttgcttctagtagttcaggtgatactttatttacgaatttaccaaatctagtaaatgttaattataagaattcagctggtgacttaaatgttggtttccaagcagccgttgttgctggttcagctgacgcagttactctgaatcttaataataacgtagctggtggtactgttacgcttgcaagtattgaaagcgttacagtgaatgcaggcgcagttaaatctactttagctggtcttgcagctacatctgctacttcattaacacttgctggtgcaacaaaaacaacaattactgctgcaatgggtgcttcgttaaaaactattgatctaactgctcaaacaggtggtgcagatatcactgttgcaacaacagcaactttaatagttacgggtggtcctggtgatgatacaattaactttgattcatctttgaattctcttggtgctgacatcttctcaggtggagctggtacagatacggttgaaattgatgatgctgctactcttactgctactgcaacagccggacttactggtattgaagttctagctgctggtgcaactgactcaa

SEQ ID NO: 305790 - DNA, 661 bp, Unknown
  Bacterial polypeptide expressing nucleotide sequence isolated from the Sargasso Sea
tgccctgcttggggaaggtcattgtcagctggcgtgcgacgggtcaccggcgtggtcgggtccgcagcgaagcaggctcaccacaccgcgaagaagctcagcagtgaaatcgatgaagttgccaaatccagtgacgaccactttgctgaagctttagccgcactcttgaaaaacatcgaatctgccaccgtctccttgtccgcccgggctgtcatcgaaactcaactggttcctcttcgcgaccgcgccaaacaacttcggaaggcggcggccgcgggcagccgtgacttggccattgatcacgcccgtcagttggttccagagtcggcgggatttgtgatcgctcgcgtggatatggccggcgaccgcgatgctttgatggcggccttggatacggttcgcggtaaccagccagaagcgccggtactcctcttggcggccgatcttgaagaaaacaaagtcagcattgtcgcgcgggtgccagaggctggcatcgccaagggtctgaaggctggggattgggcgcggtgtgctgcggaggcgtgtggcggcaaaggcgggggccgtcccgacatggcccaggcgggcggaaaagatgccactctcgctgatgcggctatggaggcggcgcgacacttcgccaatgagcgcttagcctgat

SEQ ID NO: 305791 - DNA, 683 bp, Unknown
  Bacterial polypeptide expressing nucleotide sequence isolated from the Sargasso Sea
aatgacaattgagttattcagaaacgattcatatttgaaagaacataatacaactatctctgaatttgtacctgaaggtttagttctaaatgaaactattttttatcctgaaggtggtggacagccaggagatgaaggttcaattacagtagataatcaaacaattaaagttgttggaactagatatatcgataataaattagttcatttgattgaaaatgttgatggtttaaaaaaagatgaagacgtcaaattaaatttaaattggattaaaagatatagttatatgaaagtgcatacttcacttcatctgttatgttcaattatacctttccctgttacaggaggttctataggtgatggaagaggtcgtttagactttgatcttgaaagtaagcctgacaaagaagaagtattagataaaattaatatgttaattgatgaagactattcaatttatatatcaagcataacagataaagagttagacgaaaatccagaattagttagaactatggcggtgaaacctccaagaggatcagggcaaataagaatgataaaaattggagataatattgattttcagccatgtggtggaacacatgtaaataaaacatctgagattaatcatgttaaatctgtaaaaatagaaaacaaaggtaaaatgaataaaagaataattt

SEQ ID NO: 305792 - DNA, 850 bp, Unknown
  Bacterial polypeptide expressing nucleotide sequence isolated from the Sargasso Sea
gttattgatatgtatgaatcttcatatccagaacttcaagacaataaagataaaatcctaaagttatttataaaagaagaagagatatttcaaaaaacacttaataaaggattacaggaaattaacaatctaatatcttccaacaaatcaataactcctaaagatgctttttatttatttgaaacttttggattcccttacgaactgactaaagaaatatctgcagaaaataaaattgatattaatgacgaagactttaataagttatatgatgagcacaaggagaaatctaaagctgaaaaatcattaggaaatgagaatatggaaatagaagttgagttgaatgaatttgttggttatgaaaacacagaatctaaatcaaaaatatatcaagttgaaccttacgatgataaatttataatctttacagaagaaaacccattttatttcgaagctgggggacaaatatcagacaaaggtgtaataacaatagatgatacttctattgaagtaatagatgtttttcaagcaaacaatggtgcaactggtctaatcgttgattctgatattttcaaagtagatcaagaagttgagctatctgttaacaaaagttttagatcaggtgtttctaaaagtcatacaggagcacatatagtccattctgcattacgtaatattcttggagaccatgttgctcaagctgggtcgaatgttacacctggtaaatttagatttgatttcagccataccgaaaaggtttctcaggaggagttagatgaaatatttgctttatctaatagtgcagtatttgaagactatgaagttaataccaatattatgaatattgatg

SEQ ID NO: 305793 - DNA, 172 bp, Unknown
  Bacterial polypeptide expressing nucleotide sequence isolated from the Sargasso Sea
ggtcattgccagaggtcagcaggccggcaagttcatcggcacggtggcgaaagcctgtggcggcggcggcggcggccgccccaacctggctcaggctggaggccgcgacggcggcgccctcgatggggcactcgcccaggccagggttgctttgcagcaggccatggcgtga

SEQ ID NO: 305794 - DNA, 742 bp, Unknown
  Bacterial polypeptide expressing nucleotide sequence isolated from the Sargasso Sea
ttttggagagaagtacggtgaagaagtcagagtagtgtttatgggaaaagagtctaatggttttttttcaactgagttatgtggaggaacacacgttaaaaacacaaaagaagttggaaaatttaaaattattagtcagtcttcaattgcatctggagtaaggagagtagaagctctaagagacaagcaacttactgagcatgagaattctcaagaaaaagatagaacgttaaaagaaaaaactaataaagaacaattagaaaaaattaaaaaagaaattttaagttataaaattaagccagatttaagtgaaaacaaagacttagtagagaatttaaaaaatttaaacaaacaacttgaaaaaataaaagttcaaaatgttattaaagataaaaataaaaataaaattaaagacaaaaaaattgataattatgtaattagagaacaagttctcaatgactttccgccaaaagaattgagaagtgtaattgatcaaggaaaaaaggatatcaaaaaaggtataataataagcatttctacttttgaggataaagttggagttgccgttggaattacaaatgatcttattacaaaatatgatgcagtaaagtttgtaaaaattgcctctgaaatacttggaggaaaaggtggcggaggtagaaaagattttgcacaagccggaggtattaacaaagataaaattgaggaagcttttaaagctataaccgataaagttatttaa

SEQ ID NO: 305795 - DNA, 718 bp, Unknown
  Bacterial polypeptide expressing nucleotide sequence isolated from the Sargasso Sea
gaagaagtaagagtattatctatggggaatgaagaaagtaagtatttttcaactgaattatgtggtggtacacacgtaagaaatacaggagatattggtaaatttaagattataaaccaatcttcaattgccgctgggattagaagagtcgaagcattaagagacaaacagttagacgattacctaaaaaataaagagaaaatatcagatctatctgctcaaaaagatgaggaatctatcaatgaattatctgaaaaaataatcaagcttggaggaaaaccaaatttggatatccaagaccaaaaaggattgattaaagatttgtcaaagcaattagaacatttaagcaccaaatctatattggaggataaatcaaaaaatataattaaagatgaaataattaacggagtaaaaataagacttcaaaaggtagagggcctgcctcctaaagatttaagaaaattagttgataatggaaaaaaagaatttgatgaaggaatagttgttgtatttgcaagcaaagatgaaaaagtagggttagcagttggcgttactgaaaaattaactaacaagtatgatgctgttaaacttgctaaacttggatcagaaataattggtggtaaaggaggtggaggcagaaaagattttgctcaagctggaggccaagataaatccagaatagacgaagctttagaaaaaattaaatctttagtttaat

SEQ ID NO: 305796 - DNA, 949 bp, Unknown
  Bacterial polypeptide expressing nucleotide sequence isolated from the Sargasso Sea
atctttgcaatttcagatggcgcacttcctagcaatgttggaggtggatacaatcttcgaataatgctacgaagaaatgtttcaaccatggataggatgaagctaaaatttgatttggatgaaattatagacatacagattgattatttgaaaaatacatacccggaactagaagatacacgagacgatgtaaaagagattatttcaattgaggcaggcagatacgatagttcaaaacaaagaatgcagaaaattgtcagcaaactagacaaagaaccaagcgtaacagatttgataagactttacgaatctgacggtgtaactccagaatatctaaaagagatgaaagtaatttcagaaattccatcgacattttacgcaaagctttctgatttgcatcaatcaaagaaacaaaaagaacaattaactttgccattagaaggaattccagatactgaacttttgttttatagtgacgatccgagagagtttgatgcaaaagttttgaaggtgtttgataattttgttgttctagataaaacaggattttatgcaagaggaggaggtcaagagccagatcacggaaaaattggagattgtaacatagttgacattacaaaacatggcaacatagtggttcatgaaattaaaggagaaattccaaaagaaggtgatacagtttcttgtgcagtggattcaacaagaagagatggcataacaaaaaatcatacaagcactcacatcataaatacatcagcaaggagcgtcttaggttcatgggtttggcaacactcagcattcaaagaagcagatcatgcaagattagacattacacatcattctgcattaacagatgaagatgtagtgaagattgaagaggcagcaaatggaattattgaaaaatcaataccagtaaagatagagaactttgaccgaggtactgcagaac

SEQ ID NO: 305797 - DNA, 723 bp, Unknown
  Bacterial polypeptide expressing nucleotide sequence isolated from the Sargasso Sea
atggtgaagaagtaagggtattatctatgggaaatgaaaaaaataaatatttctcaacggaattatgtggtggaacccatgtaagaaatactggagatattggtaagtttaagatcataaatcagtcatcaattgcggctggtgtaagaagagttgaagccttaagagaaaagcagctagaaaaatatttgaaagaaaaagaaaaactttctgatctttcaatccaaaaaaatgaagaggttataaaaaatctttctgaaaaaataattaaatttggcgcgaaaccaaatttatataataaaaatccaaatgaaataattaaagaattaacaaaacaattagatcaattgtctgtagaagtaattcttcaagataaaactaaaaatattatttctgaagaaaaaataaaatctacaaaagttagatttcaaaaaatagaaggccttccaagcaaagaattaagaaaattagttgataaaggtaaaaaagatttaggagatggaattgtaattatatttacagtcaaagatgataaaattggtctagctgtcggagtaactgatagcctaactaaaaaatataatgctgtcgattttgttaaaaaaggatcagaaattataggaggaaaaggcggtggtggtagaccagattttgcacaagcagggggtgtagaaattgatgaaattgatgaagcaataagaaaattaaaaaatttaatttaat

SEQ ID NO: 305798 - DNA, 559 bp, Unknown
  Bacterial polypeptide expressing nucleotide sequence isolated from the Sargasso Sea
aagtcaaagcagtgtagcctctggtatcagaagaattgaggcattgtctggtcctagagctcaagaatatttatcaaatcttaagaatcaaactattcaactccaaaaactattaaatgcacctgctgaggaaattgaagataaggtaagtaagcttttaaaggaaaataaaagcttaaaaaaaggcggtaagactgccaaagcagccacaattaaatcttcttatactcatgatattgataactttaaattagtaattgaagaggcagaatcagaggatatcaaagaattaagaccactgcttgatgaaaaaacaaaaaatgcaaataactctgtctttattcttctaagctctaaaaacgaaacattaactattctctgttccgtatcaaaagacctccaatcaagaatttcagcaaaagatctaattaatgctctaacgtcacctattgaaggtaaaggtggtggaagagtagaatttgctcaaggcgcaggcaagccttctgatagagaaaaatttgtttctgatatccctaatatcgtacaatcgctcgcataa

SEQ ID NO: 305799 - DNA, 114 bp, Unknown
  Bacterial polypeptide expressing nucleotide sequence isolated from the Sargasso Sea
aaatttatgtaagagcaacaagttcacaaggatgtataaggctgggaggtaaacataacgatctagaaaatgtgggtatacccttcgtcaccatactttttttgaaatgctagg

SEQ ID NO: 305800 - DNA, 202 bp, Unknown
  Bacterial polypeptide expressing nucleotide sequence isolated from the Sargasso Sea
catgaattcaaatcagattaggtcaacatttctcaattattttaaaaacaatggacatgaggttattcattctagttctctagtaccagataatgatcctactctaatgtttgctaactctggaatggttcaatttaagaatatttttacaggtaaagagacaagagattacaacagagcgactactgctcagaaatgtgta

SEQ ID NO: 305801 - DNA, 958 bp, Unknown
  Bacterial polypeptide expressing nucleotide sequence isolated from the Sargasso Sea
atatccgtgataaaaagtttttttggagttatcagcagtttctttgtaaagattttagaatatactaatgcgggaacaaccatgttgttgggagaatttgcaagtatagataaatacggtttcatatttgtatttcaagcattacctattattatatttttttcagcattaacatctgtattattttatcttggaattattcaaaagattgtgcagtttttagcatggtccttaaaaaaactattagggatttcagggccagaaagtttaacagtcgcgggaaatatcttcttaggacaaactgaagcaccacttttaatcaaggcctatttggaaaagatgaaccgttcagaactttttttagttatgttgggtggaatggcaacagttgctggaagtgtaatgggagcctacattggttttctagggggtgatgaccctattgagcgattggcttttgccaaaagtttattggcagcgtcggtaatggctgcacccggagcagtggttgttgcaaaaataatgtatcctcaaacagataagataattgaacatataaccatcccaactgataaaattggcaataattttattggtacactttcaatgggcacagccgaaggtgttagaatggccgttaatgttggtgctatgttattagtatttatatctctaattgcaatgataaatggagttttctttggtataggtgatggattaggactaaataaatgggtaattgaaaacacgccttatcaaaatttttcaattgagttaattttgggatatttgtttgctcctttaatgtggttaatcggagttgaaacaatggatgtggccataatgggacagcttttggggttgaagctcgtagctagtgaatttgtaggctatattgaattggcatcgttgaaagacattaacaatacactccactttgggtaccaaaaatcgatcc

SEQ ID NO: 305802 - DNA, 314 bp, Unknown
  Bacterial polypeptide expressing nucleotide sequence isolated from the Sargasso Sea
tggggtcgatggcggcggactgcaaagcgctgcacaaggcttggctgatcagctcggtgatggtgctgctgttgtgtgggggggtctgcccgatccaagcgatctgggcaaggtgatcctcgtggccgcatttggcaaagcggtggtcgccaagggccaaaaggccggccagttcattggtggtgtggccaagctctgcggcggcggcggcggcggtcgccccaacctggcccaggcaggcggccgtgatggggcagcccttgatggtgccctggagcaggccaaaagcttgttgcagcaggctcttgcttgaa

SEQ ID NO: 305803 - DNA, 577 bp, Unknown
  Bacterial polypeptide expressing nucleotide sequence isolated from the Sargasso Sea
aatggggttcggcgacatcagtattccgtactgggaagaatccggtcacgtactaaagatttgtaaggtcacaggtttgagattctggaccagggacatcaatagggatacctgtggcgataccaatgaagatccttacacatttataggaaatccgattattgaaggatttgattctaggggaaaacagctcaaagatgagatgagggagactttcctgagcttctttgactctaaggggcatactagaattgacccatatccggttatcgccagatggagggatgatatccatcttacaatagccagcatagctgattttcagcctcatgtgactagtggcatggtccctcctccagcaaatcccctagggatcagccaaccatgcattaggctaacagacgtagccgcagtagggcgttctggaaggcatctttccacatttgaaatgatggcacatcatgccttcaacagaccaatggatgggaacgtagtatattggatagatcgatgtgtaagatactgcgatgaattgctagttgaaaaactgggcatcaagtccactagtatcacctat

SEQ ID NO: 305804 - DNA, 145 bp, Unknown
  Bacterial polypeptide expressing nucleotide sequence isolated from the Sargasso Sea
ccttgatcgtggactaaaattacttgaagatgaactatcgaaggttcccaaaggtcaagagttttctggagaaactgctttcgaattatatgacacgtatgggtttcctcaagaccttactcatgacgcattaatagagaggggc

SEQ ID NO: 305805 - DNA, 664 bp, Unknown
  Bacterial polypeptide expressing nucleotide sequence isolated from the Sargasso Sea
gctgcgcgagtgaccaaagtgaacagcgatggcgttattctcgataaaactgtgttctatcctcaaggcggaggacagcctggtgatacagggtttataaaaagcactagcggcgggattggcagagttaccaatacggtgaaaaatcgtgaaagtggtgatcatgtgcacttaattgaaaatgcgcaaaagttctgtgttggggatttggtttttgccgaaattgactggccccgaagatattgttttatgagaatgcactctgcgttacatattttatgttcaattgttaaaggaggagttacgggggggcaaatcggaacagaaaagagccgtttagattttgacttgggtgaggagaagttggacagaaattatatacagaatacgatgaatcttattataaaaaatgatcactcactgctagcaaaatgggtttcagagagagaattagagcaaaagccagagcttataaggactatgtccgttaaacctccctcaggagcgggacatatcaggctaatagatattaaaggtgtcgatatacaaccatgcggcggaactcatattgcgcgcactagtgaaataggtgctatccgcgttggaaagatagaaaataaaggaaaaagaaaccgtcgaataaatattcatttgtcagattaag

SEQ ID NO: 305806 - DNA, 709 bp, Unknown
  Bacterial polypeptide expressing nucleotide sequence isolated from the Sargasso Sea
atgaataaaaaaataacttctgaaatttttagagatgatccttataaaaagggatgtgaggctaaaattttagactttggagacaattggataatattagaccaaactgttttctatgctgaagggggcggtcaacttggcgacactggattaattaaagcaggtcaacaagaaatacaaattgaaaatacaataaaggaaaatgacttaattaaacatatttttaattccaaatttgattttgaaattggagataatattacctgtataattgactgggacagaagatacaaactaatgaaaatgcatacttctttgcatctattatgttctttggtaaatgctaaagttactggtggttcagttggtgacggaaaaggaagactggacttcaatttagactacaagcccaataaagaggaactaaaagataatttaaacgatcttattcaaggtaatcatgatataactatttcttggataagtgcacaagaactagacaaaaatcctaatctagtaaaaacaatgtcagttttacctcctcgtactaatggatcaattagaatggttcgtataggagataatattgattaccaaccttgtggaggtacacatgttaaaaatacttctgaaataggtttagttgaaattaacaaggttgaaaacaagggaaaacttaataaaagagttgctatatctctagtttagg

SEQ ID NO: 305807 - DNA, 611 bp, Unknown
  Bacterial polypeptide expressing nucleotide sequence isolated from the Sargasso Sea
agcggcggacagcctggtgatatggagagctgatatatctaacaacaaagtgtgcccaattgaaaatacaattaaaggccctgatggcgatattatcttgattccaaaatcagactcagaacttccatcaaaggatgatgagtgtcagcaggtgattaattgggaaaaacggtacaagcatatgcgtactcatacagcactgcacttattatctgttgtaattcctctgcctgtcacaggcggccaaatagcgttcgagaaagggcgtttggatttcaatatgccagatgcccccaaggacaaggaagtgatcgagcgtgaacttaataacttaatcacatctaatctttgtgtgacagaccagtggattgccaatgatgagttgcgaaggaatccaggtttagttaaaactatgtccgtaaaaccacctatgagttctggtaggatacgacttgtgaaaatcagcgataaagacgtccagattgatttgcagccatgcggaggaacgcatgtcttaaatacttcagaaatagggccggtcagattaggaaaaatagaaaataaaggccgacagaatagacgagtttctatttcactagatcatgtttaaa

SEQ ID NO: 305808 - DNA, 709 bp, Unknown
  Bacterial polypeptide expressing nucleotide sequence isolated from the Sargasso Sea
ttggataataataaaaattctattattaaagtaagtaaattagaaaagccttcattgggatcactaggcattaaaacagacgtaaatgaaataatgggtctagatatttggactaaaatgaaggcgtctgatataattgaacattttaattacattccagacatactattaagtaaaagcctacacatttttttaagcgatttgtacttaagcacgtctaatccaccaattggtaattcagataatatagttaaattcttagaaactagattatataaaattaaaagtggtggagagagccaaaaattatatcaattagttactcagttgccaggaggcaaaaggtgggatttttggaaacgttggcagacagaatatgaactaataaaccgtcaagataaaaaagcgtgccaatatgttaacaaaaaatcaaaagttaattcggataacttctggcaaatggctcgaattttttgttttgcgatagacggtaaagtaaaccagtcagagtttatactggatttaataaaatcaagaggtttttcagacaaaatttttgaaagtttatttcagattattaataataacgaaaaaacttttaatttagaaaatgaatataataaaattcagcctttacatgtaattatgatggatactttaaagataccaattaaagcaaattacattgctcattttgcggttgagtaca

SEQ ID NO: 305809 - DNA, 232 bp, Unknown
  Bacterial polypeptide expressing nucleotide sequence isolated from the Sargasso Sea
atgacatctcaactaattaaaaaaatagttactggagatgagataagaaatgcttttttaaaattttatagtgaaaaattacataaaatcattccaagtgcatctttgattccagatgaccctacggttatgctcacaattgctggaatgctaccttttaaaccagtttttttaggtttaaaagaaagaccatcaaaaagggctacatctagccaaaagtgcatcagaacaa

SEQ ID NO: 305810 - DNA, 688 bp, Unknown
  Bacterial polypeptide expressing nucleotide sequence isolated from the Sargasso Sea
ttttcaaaagaattatgtggtggtacacatgttgatcgaactggtgatattttaaattttaaaattattaatcaatctaatgtagcctcaggtataagaagaatagaagctttaacaaatattgcagttgatcagcatactaaagaaaaaatgcagttgggtaataaaatattaaaagaaaacatggacaaaatttcaatactaatagatgagttaaaagattttgataaaaattttaattatgtttatgatcaaaatagtgatttaacaaataatataaaagaattaaaaaaactattagaccaaaagaagcaaaataaaaataaagaaacttcttcacaaaatatagtggtggaactaatcaatgatataaattttgtatatttagtagctgaaaattatccaactaaaattttaaaacaatttattgatgatcaaaaaaacaaatatcaacaaaaatgtgcatctctaataatttcacataatagtgataaactatctattgttcttggtgttactgaagatttaacatctgattttgactcagctaaagttatccaagaagtatcaaaaatcttaggaggcaatgggggtggaggtcgtaaagatttggctcaagctggaggagcaagtttagataatattgaccaggctattgaaaaaattaaatctaatttaagtttctaat

SEQ ID NO: 305811 - DNA, 199 bp, Unknown
  Bacterial polypeptide expressing nucleotide sequence isolated from the Sargasso Sea
atggcttctttaaacgaaattcgttcaacttttttaaactactttaaaaaaaatgatcatgaaatagtttcttccagcccgctagttcctagaaacgatcccactttgatgttcacaaattctgggatggttcaatttaaaaatctttttaatgggcttgaaaaacgagactatttaagagcccgtgaccgctcaaaag

SEQ ID NO: 305812 - DNA, 831 bp, Unknown
  Bacterial polypeptide expressing nucleotide sequence isolated from the Sargasso Sea
ttggaacgttggcagatagaatatgaattaataaaccgtcaagataaaaaagcgtgccaatatgttaataaaaaatcaaaaataaattcggataatttttggcaaatggctagaatattttgtcttgcaataaatggtaaagtaaaccaatcggagtttatactagatttaattaaatcaaggggcttttcagacaaaatttttgaaaatttgttccaaattattagtgataatgaaaaaacttttaatttagaaaatgaaaataataaaattcagcctttacatgttattatgatggataccttaaagataccaattaaagcaaattacattgcacattttgcagttgaatatacagattctcttttatcacttacttatttaaccccgagtgcaagatcttttcttttagacaaaaaaatgaattatagtttcgtaaatactaataaaataactgaaaattataaatctgtagctgatggcaatattgatataaaaacggctttatctagttacacaaaaatacctaatgggctgaatagggccaacatttggcttgcaataataacgatgaaggatgaaataaaaaaagcagagtcaataataacgtttattaaactagaaattaaaaatggtagatttaaagatgttgccgatttatacatccctattttagaaaagatagataaatcttctctaactagagaactaaatgattcaataaataaattgatgataatgtccaaaccaaacttgtatccggataatagtttagcaaatcttataatgttaaagaaaaacaagacttgggattgggaattaattctaaaa

SEQ ID NO: 305813 - DNA, 700 bp, Unknown
  Bacterial polypeptide expressing nucleotide sequence isolated from the Sargasso Sea
atgacagaagaactatttagaaataattcctatattcaagattgtgaagcaaaaattattgatataattgatgaaggcataattcttgataaaactatattttatccagaaggaggtgggcaacctggcgataatggacaatttaaatttaatggtaaaaattttgaaattacgagtacttcgtataaagataaaaaaatcgttcattttgtgaacaatacatcagaatttgatcttaatcagaatataaattgtcaaattaattgggaaagacgcttcaatatcatgagggttcatacatgtttacatcttctatgctctctaataaaggcgccagttactggtggccagataaatgaaagaaaaggaagattggattttgatgttgaaacgaagcctgatagggaatttatcctagaaaatataaataaactaatagaagaaaaacatgatgtaaaaatttcaagcataacagaagaagaattagataaaaatcctgatttggtgagaactatggctgttcaacctcctagaggaacaggaaaaattagaatgatatcaataggtgaaaatattgattatcaaccttgtggtggaactcatgtaaggaatactggtgaaattagttcggtatcaaaagttaaaattgaaaataaaggcagaatgaataaaagagtaattctggaatttaataattaat

SEQ ID NO: 305814 - DNA, 1438 bp, Unknown
  Bacterial polypeptide expressing nucleotide sequence isolated from the Sargasso Sea
gatggcagcatacaaaaaaaagggattctcaataggaatatttatatttctggttatgcagtttatgtctcccccttctggtttaagtgaagttggatgggatgttgcttctgtagcagttctaatggcaatatggtgggcaacagaaacagttcctgttgcaattactgcacttcttccgctcgctcttttcccgctattgggcgttacgtcgtttgataatgctgcacttccatatgctaacaaaaatatttatctatttttgggtggttttatgcttgctcttggaattgaaagctcaggattacataaaagaattgctcttaaaatgattatttcagttggctcaagtggaagaaagcttgttggaggctttatgctggtagcagcattaattagtatgtgggtaatgaatacatctacaacattaatgttacttccaattggattagcggtctgcactgtcatgtcagaaactattccaggtctatctgataaagataaatcaaattttgacacagctctgcttcttggaatcgcatacgctgcaacaatcggcggtatgtcaacgttaatcggaacagctccaaatattgtgttcagtgcctttatgcaagatacctatggtgttgaaatctcaatgtttgattggatgatgttaggggtacctctagcttcgattatgctttttggtgcatggacattactaacaaaatatgtgtttccaattagctttactgcttcaactgaagcaagagatgagctaaaaacaatgcttttaaatatgggagatttttctaaagacgaaaagagaatttctataatctttggcttggcagtttttgcatgggttttcagaacattgttgaataaaattgattttttgtctggacttactgatgctgggattgcaattattgcagcaattttaatttttatgacgccatctgcatctaaaaaaggcgatttattaaaatgggagcgatcaaaagacctcccatggggactcttaattttgtttggtggtggtttgtcacttgctgctcaaataagctcaagcggtcttggagtttggattggaaacagtcttttagttttgagttcagttccaccaatattactaatcttggcagtcgcaactttaattattttcttaactgaaatcacaagtaatgtaacaaccacgacaaccttcttacctgtttttggagctcttgcaattgctattggtatactacccgtatcattaacagttccagtttgccttgcagcaagttgtgctttcatgcttccggtcgcaactccaccaaatgctattgtttacggatctaataagtttactatcgcaacaatgatgagagctggctttgcacttaatatcattggcatactagttgttacagtatttgcttattattttgctcctttaattttttaa

SEQ ID NO: 305815 - DNA, 733 bp, Unknown
  Bacterial polypeptide expressing nucleotide sequence isolated from the Sargasso Sea
gatgacgacacaagcactgtttcgcgaagacgcatacctcacgcaatgcgacgcggtcgtcctgaacgtcggcgacgacggcatccggctcgaccgcaccgtgttctatccgctcggcggcggccaggccggcgacaccggcacgctgacgctgcccgacggcagcacgatcgcgattgccgatacgcgcaaggccaggttcgacggcgcaacccccgacgacgccgtgcacgtgcccgcaccggggcaggaggcgagtgtcgcggcgctcgagcccggcatgcgcgtggtcgctcaaatcgactggctgcgccgctatcgccacatgcggctgcataccgcggcgcacctgatgtgcgcggtgctgccgtacgcggtcgacggttgcagcgtgacggccgactacgtgcggctcgatttcgcgacatccgatgcaatcgaccgcgacgacgtcgagcggcgcctcgccggcctcgtggtcggcgcgcacccggtcacgaccgaatggatcaccgacgacgagatggccgcacggccggacctcgtgcgcacgatgagcgtgaagccgccgatgggcctcggccgtgtgcggctgctgcgcatcgagcaggtcgacctgcagccgtgcggtggcacgcatgtgcgcaatacgtccgaaatcggcgagctgcgggtcgcgaaactggaaaagaagagcgcgcgcacccggcgcctcgtactggagtttgcatga

SEQ ID NO: 305816 - DNA, 862 bp, Unknown
  Bacterial polypeptide expressing nucleotide sequence isolated from the Sargasso Sea
atgaataaatggatctatattgttttattagttgggctgtttgcaatatcaacatcgcccattattgcaaagcttttacctgtagttccagctgttgccattgcattctggagaatggcaactgctagttcaattctctgggcatacagccttataaagccgcaacctcaaattaaagaaggcaatatcaagcttgtattttttgctggttttctaatggctatgcactttattttttggtttggggcgctaaagcttacctctattgccagcacaactatattgggaattgttgctcctgcctttaccctgatttttgaacgcttttattataaaagagagctgagctgggcaacaatctttgcgctgtttataatatttataggttgtttggttgttcaaattaatgatatagaaaatgttgggggagctgctcttggaaatataatggcaattgtttctgcaatatttctaggtggcttgtttcttttagggtctattatacgaaagacaactccagttatatcatatacaagaatgctttttagtgtatctgcgatagttttgttgatagtttcgtttgttttacattcgccgctacttggctactcaaacattgattatttttggcttctaatgcttggtttagtaccaacgttaatcggacataccgcttttagctattccgtaaaatttatttccccttcagttatagcagcaattccacttggtgaaccaataatcgcttcaggccttgcttggcttctgtttagtgaaaaagtttcttttaatgttgctgttggtggaatttttatagggattggtttaatactgttaattaaaaataatacagaaaaataag

SEQ ID NO: 305817 - DNA, 2770 bp, Unknown
  Bacterial polypeptide expressing nucleotide sequence isolated from the Sargasso Sea
gatgtcgatagaaagtacatttcggaatttcgtgtacggtcggattagcggcaacaagcggcctgtcgatctccatttcggtctcgcccaacgcacggtcggccatctgctggcgctccatcacgccgatattcgcgaagggttgatatcggggatcgacgggcaactgacctgcgtgtccacccacgcgcatctatcgccagcgctgtttctcggtctgcccgtgtcggtccggctgacgaccgatcggggcggcatacgagcgatcaatgcgatcgtgcacgacgcgcgagccggtcaatccgacggtgaactgaccgtgtaccagttgcacgtgtgcgacgccctgtcgctgatggaccgccgcacgaacgcccgcatgttccgatcgtgcagcgtggtcgacattctggcgacgctgatgaacgagtggaaacatcgcagccccgcactcgcgcaggcattcgatttcgacctgtcggcattgcgggccgaacgctatccggtgcgcgaactgacacggcaggtgaacgagtccgacgcgcgcttcatccggcgtctgttgcgtcgggatggcatcacggtatttgcgaaagccggaccgatcggcggggcgagcggcatgcccgacgaacgcccggtccacacgctcctgttttgcgatgatccctatcgcctggcggaagcgccggccggcaccctccgcatccatccacgcgatgccggcgtcgaacaacgcgacacggtgacgctctttgcatgctgccaaagcctgtcgtccggcaaagtcagccgtccgtcgtgggactacaagaaagcccgtgtagacgaatccacgaccgtcaccggcatcgatcagggcgagtcggggaacgaccttgcgcacctgctgaccgacgtcgcgatcgacattccgcacgtcggcgattcgtggagcgatcacgatcgcatcacgcgcgaccggatgctcgcgcatcagttcgaagccgtacgccatgaaggcatcagcagcgtgcgcgacatgccggtcggtcactggttcacgttgaccggcgaccccgagctggatatgaagcccgccgatcatcgccagtttgtcgtcacgtcggttcggcacgatatctggaacaacctgccgaagatcctggcaggtcgcgtgaacgggctgttcgcggcaagccgtcacctggcgcaagtcgttccgccggcaccggccgatgcatcggaacgaacggacacgcgctatgagaacagtttcacgtgcgtgcgacgcggcgtgccgctcaagccttcctacgatccgcgaatcgatgtgccgccggttcacctgctcaccggtacgatcgtcggcacacaaggcgaggaagtgttttgcgatgaggccggccgcgtgcgcgtgcagattcacggctacgacccggtcgatcacgcccacgcgcaaggcgccggaacgaccggcctggccggcgacagtgcgccgattcgcgtcggcgcaagcctggcggggaaacacttcggcgcgcttttcctgcctcgggtcgggatggaggttttgctgggcagcctgtcgggcgatccggaccgtctggtgatcatcgggattttgagcaacggtgcgaacccgcccgcgaccttcagcgataccggttcgctacccggcaaccgttacctgtccgggatcaagaccaaggaaatcaagggccatcggtacaaccagcttcgcctggacgatacgccgtcgcaaatttcggcgcagttggcgagcgaacatgcgcactcccaattgaatctcggctatctgacgcagccccgtaacgatggacacgggagcgaccggggtgaaggcgcggaactgcgcaccgacgccgctgcggcgttgcgcgccgcccagggcatgctgttgacgacctatgcgcggtcgcacgcgaccggtggtcagctcgatcgcgacgagctgatccgcttgctcgaccaatgcacggcgttgttcgagtcgctcggagattacgccggccagcatggcgggcaatccgccgacacgggcggccaggacaacctcgtcagcgcattccgtcactggaaacccggcggttcggaatcccgtgccacgggtgacgcatccgcgttcatggcgttcggcgcgcaagcggggtcgctgaacgtcacgccgaaaacgcacgtcatgtatgcgggcgagaacatcgatcagattgcgcaacaacacatgcagatcacgagcggcgagcggatcaatctgcatgccgggcatggcgtcgcgatgttcgcgcacagcaacggcgtatcggcgatcgcgaatcaggggaaagtggccattcaatcgcagaacgacgacacgcagatcgagtccggaaaaaacattcggttgactgccgccgacgggaagcttgctggcacggcaagcgacgaagtcgtattcgtcacgtccggcggcgcgtatctcaagctgcatggcggcgatatcgaactgggatgccccggcaagttcaccgtgaagtcgaacggtcatgcatgggacggccccgcaagcatgggcgtcgacttgccgacattcgatcaacgtgcgctcggccgcgtcccgaagctggtccgcccaacggacggtaacgcggcaccggggttcgaaggacaggttcgaacggcatcgggaacactgtcggatttgacgaccgacatggccggggaactgcctgaggtcgataccgaccggttcgagaggctggcggtgcagttcaccaagaagaatgtttaa

SEQ ID NO: 305818 - DNA, 1366 bp, Unknown
  Bacterial polypeptide expressing nucleotide sequence isolated from the Sargasso Sea
tatgccaaaaacatctccatctttattatctttaattggcgacacacctttggtcgaaataaaaaatattgatactggcctatgtaaactttttgtaaaaatggaatctcataatcctgggggctctataaaagatcgaacggcttcgtatatcattgatcaagcagaaaaagatggattattaaaacccggcgggactattattgaagctacggcaggaaacacaggtattggcctagcattagttggcattcttaaggggtatagagttgtcttagttattcctgataagatgagtcttgaaaaagttgctcatcttaaggcattaggtgctgaggtcatattcacaagatctgatgtaggaaaagatcatccagagtattaccataatatggctgaagatcttattaaaaaaattccaggatcattctatgctgatcaatttaataatcctgctaatgttttggctcatgaagaaacaacaggacctgaaatcttcgagcaaatggatggagatttagatgcttttatagctggtgtaggaagtggaggaacaatctctggagttggaaaatatttaaaaaaagtctctgcaaaaacaaatattattgcagcagatccaataggctcagtaattactgacgctgttaagactggaacctataaatatggtggtggttcatggtttgttgaaggaattggtgaagattttataccaacaaattgtgacttatctgttattgatgatgctattagtgtttctgacaaagaagcatttgaagcaatacatattttactaaagaaagaaggcattttagctggttcttctgcaggaacattatttgcaggagcaataaaatggtgcaaaaatcagaaagagcctaaaagggtagtcactttgatatgtgatactggtaataaatacttatctaaagcctttaatgagaaatggctaattcataatgatctaataattaaagatcctaaaggagaccttcaggatgtaattgcttttagggcagacaaaaatcaaataatttatgtaaatcctaatgatacacttgccacggcatttaatagaatgaataattctgatatatcgcaactcccagttctcaaagaagaaaaattgatagggatgattactgaaactgatattttaaatcattgtagaaatcaaaaaggttttgaaaagagtgtctcagaatgtatgcaaaaaaattataattctttagaaattaattcttcgttggatgatttaattgaactattaaaagaaaacaatatagctattatcttaaataaagaaaaatttgttggtatcattacaaaaattgatttgttggcatatttaaaaaggaattag

SEQ ID NO: 305819 - DNA, 685 bp, Unknown
  Bacterial polypeptide expressing nucleotide sequence isolated from the Sargasso Sea
aatgatttaccttaaagatagttacatcaagaattttgaagagaaaattgtattaattgaggaagacaaaatcatcactcaagatagctctttttatgcccaaagtggcgggcaacctggagataaaggaatattggaaatcaatgatcaaaaattcaacgttatcaatacaattaagcatgaattaggcatagcccatgttgttgatacagaaattagtgatctttcgggggatatcaaagggcatattgattgggatcatcgttatcgtttaatgaagatgcacaccactatgcatcttttgtgcgcagcattaccttattatgttactggaggttcaattggattagaaaaaagccgattagattttgatttaggaaaggaaacatttgaatttgaaacgttaaacaaaattattaatgaatttattcaacaatccctctcgattacatatcagtggattacaaatgaagagcttgatcaaaaacctgaattggttcgcacactttctgtcaaacctccaagaacaaatgataaaattcgtttggttaaaattggagatattgatttacagccatgtgggggaactcatgtagccaatactagtgagattggagaatttaaatttattaaatatgagagtaaaggaaaaatgaataagcgtgttcagtttactcttatataa

SEQ ID NO: 305820 - DNA, 298 bp, Unknown
  Bacterial polypeptide expressing nucleotide sequence isolated from the Sargasso Sea
aaataaagaggaactaaaaaataatttaaacgatcttattcaaggtaatcatgatataactatttctcggataagtgcacaagaactagacaaaaatcctaatctagtaaaaacaatgtcagttttacctcctcgcactaatggatcaattagaatggttcgtataggaaataatattgattaccaaccttgtggaggtacgcatgttaaaaatacttctgaaataggtttagttgaaattaacaaggttgaaaacaagggaaaacttaataaaagagttgctatatctctagtttag

SEQ ID NO: 305821 - DNA, 628 bp, Unknown
  Bacterial polypeptide expressing nucleotide sequence isolated from the Sargasso Sea
atgtggcggcacacatttaaaagacacaggggaggccattttatttaaaattattcaagaaacaggagtatcttcaggagtaagaagaattgaaggattaacaagaaagagtgctatagatttttttagatctaaaaatgatattttagatagcatcgttaaaaaattaaatactcaatatagtcaagttacaaataaattagaacaattgataaatgaaaaagatcaattaaaacaagagattaatcggttaaaaaaagaaaatttaacacaaaactcaacaaactccagtattgatttaaatggaattttgttcgaagcaaaagtttatgatgatctagtccctaaagaacttaaacaatatgctgaaaagttattaaattcaaaaaaacttgatgttgtctgtattatctcaaaattcaatgaaaaggtttcatgtgttataaatattaatgctaatcttttgaaaaaatttgatgctatcgaacttgtaaatgttgttgcagaaaatgttgatggaagtagggggggtggtagacctgatatggcacaagctggaggtcaaaatattaaaaaaatagatttcgcactggaaaagttgaaaaattttataaaagagagaatataa

SEQ ID NO: 305822 - DNA, 250 bp, Unknown
  Bacterial polypeptide expressing nucleotide sequence isolated from the Sargasso Sea
atgacatctcaattaattaaaaagatagttactggagatgagataagaaatgcttttttaaaattttacagtgaaaaatttcataaaatcattccaagtgcatctttgattccggatgaccctacggttatgctcacaattgctggaatgctaccttttaaaccagtttttttaggtttaaaagaaagaccatcaaaaagggctacatctagccaaaagtgcatcagaacaaacgatatagaaaacgttg

SEQ ID NO: 305823 - DNA, 229 bp, Unknown
  Bacterial polypeptide expressing nucleotide sequence isolated from the Sargasso Sea
tctgccggatcctggcgatatgggcaaggtgatcctggtagcggctttcggcaagcaggtgatcgctgccaagctccaggccggcaagttcatcggcggcattgccaaacagtgcggcggtggcggcggtggacgcccgaacctggcccaggccgggggacgcgatggtgctgccctccctgctgctcttgagtccgctcgctccgagctggctgcagcgttggcttag

SEQ ID NO: 305824 - DNA, 430 bp, Unknown
  Bacterial polypeptide expressing nucleotide sequence isolated from the Sargasso Sea
atgactgatctgcttttcaatcaagatagttacttaaaagaaacagaagctagtattattggagttgaagaaaatattatacaactggatagaacaattttttatgcagagtctggtgggcaacctggagatcaaggcgagattgtattaaaagaccaagttcttaaagtgatagatactaaaaaaggatcaaagcctaatgaaattttgcatattgttgatggtcccattgatcaaagcttaattaatcaatctgctgaacttaagatcaattgggaactcagatatgcgcatatgaaaatgcattcgagttgccatattttgtgtagcttagttgatgcccttataacaggcgcatcggttggaagcgctaaaacaagaatagattttgatgttgatccatcgatgctcaataaagaagagttaaaga

SEQ ID NO: 305825 - DNA, 705 bp, Unknown
  Bacterial polypeptide expressing nucleotide sequence isolated from the Sargasso Sea
ttctttcgatgggagacgaggatgggaagtatttttcaactgaattgtgtggtggtacccacgtaaaaaacactggtgatattggtaaatttaagattgtcagtcagtcctcaattgctgcaggggttagaagaattgaggcattaagagacaagcaattagaggaatatttaaataataaagagaaattatcaaacctatcagcagaaaaagatgaagaaacaataaaagatttaagtcagcaaattattaaattaggaggaaaaccaagtttagatgaaactgatcaaaaaactttgattaaaaatttaactaaacaattagagattatttcagttaatgcaattttagaagataaatcaaaaaacatcattaaagatgaagaaattaatggaattaaattaaaacttcaaaaaatagatggattacctccaaaagaattaagaaaacttatagataaaggtaaaaaagatttaggtgaaggtattgtggttgtgtttgcaaataaagatgacaaggttggattagctgttggagtaactgacaatttaaccagcaagtttgatgcagttcaatttgttaaagttggatctgaaataattggtggcaaaggtggtggaggaagaaaagattttgcccaggcaggtggacaagataaagaaaaaattgatgaggcttttgaaaaaatcaaatctttaatttagc

SEQ ID NO: 305826 - DNA, 829 bp, Unknown
  Bacterial polypeptide expressing nucleotide sequence isolated from the Sargasso Sea
ctgaagcaaaagcaaaaccgcgttctgaggtatgcggttcttaggcacggtgtgatcattttctttctgttgaccatattgcttcccttgacttgggtgttgatgctatccatcaagtcattgccggattcgatgcgagggaatttttggcccaggcgttttgacttcagtcattatgggtatgtttttgataagatagaaaccctaccttacaacctttttaacagtatttatgttactggagctacggttttaattacgaccttctgtgctgttttggcaggatatgctttggtccatctcaaaccccggggtggacctttcatcgtggcaatctttctttcctccctttattttccaacccgagtggtttcaatcataacggtttatgaaatccaggattatttaggtctgatcaacagtacttctggtttaatcctcccctatataaccctgaatcttgctatcagcgttttgataatgcgcagtatctttcaattggttccccatgaactgattgacgcggcaagaatcgatggtgcggggccttggatgactttgtgggtggtgggtttgccgctggctaaaaatgggttggtggtcgtcattatcgtgaattttgtgacagcatggggagagtatcttctgtgtgcaacactttctaatgatcagttggtgaggaccatgccggtggttttggcttctgctcatgggggtatggggcaatgggcatggcccagaatcgctgcagtttatatcatcgtggtactcccaggaatcatcgcttttactttcgcccaggcgtctgtttttcaaaggattgatggaa

SEQ ID NO: 305827 - DNA, 563 bp, Unknown
  Bacterial polypeptide expressing nucleotide sequence isolated from the Sargasso Sea
aaaaggaatattggaaatcaatgatcaaaaattcaatgttatcaatacaattaagcatgaattaggtatagctcatgttgttgaaactgaaattagtgatctttcgggggatatcaaagggcatatcgattgggatcatcgttatcgtttaatgaagatgcacaccactatgcatcttttgtgcgcagcattaccttattatgttactggaggttcaattggtttagaaaaaagccgattagattttgatttaggagaggaaacatttgaatttgaaacgttaaacaaaattattaatgaatttattcaacaatcccactcgattacgtatcagtggattacaaatgaagagcttgatcaaaaacccgaattggttcgcacactttctgtcaaacctccaagaacaattgataaaattcgtttagttaaaattggagatattgatttacagccatgcgggggaactcatgtagccaatactagtgagattggagaatttaaatttattaaatatgagagtaaaggaaaaatgaataagcgtgttcagtttactcttatataat

SEQ ID NO: 305828 - DNA, 1366 bp, Unknown
  Bacterial polypeptide expressing nucleotide sequence isolated from the Sargasso Sea
attgagccttagtatcattattttagccgcaggtcagggtaaacgaatgcactctgataaaccaaaggttttgaatttattggcaggcaaaccattgattaggcatgtctacgaaacagcaaccaaaatagattatagaaaaatctatatagtctacggtcatggagcggatcaggttctccgtgcgcttgatgaagattcaaaaatttcttgggttgagcaaaaagagcagttagggaccggtcatgcagttaaacaagttctcccggatattcctaatgatgatcatgtcttagttttgtatggcgatgtacctttaattagtgaagcatcattaatgaaattagtaaatgctgcaactgattcagacttttctctccttacagcttactttgatgaaccatatgggtatgggcgtataattcgtaacgataatgataatattatttcaattatagaagagaaggatgcatcagaaaaacaaaaagagatatctgaggttaatgctggatttatggttgttaaggctgaattattaaatgaatgtgtaaattctctgaacaatcaaaacaaacaagaggagtattatttgactgatattgtcgcgttggctgttaataaaaaaactaaagtctcgactgttttagctgagtcgacaattgaggtgcagggaattaatacgcgagctcagttatctgaggcagaacgttattatcaggtattacaagcacatgatttaatggataaaggtgttggaatatctgatccgtctagatttgacttgcgtggaaacctacaagcaggttctgatattgaaattgatgttaatgtagtaatggaaggcaaaataaagatgggcgacaacgtgtatattgcaccaaattgcattattaaaaatagtgtaattggaaataatgtacaagttttagcaaactccataattgaaaattcaattattggcaaggattgtgtaattggtccatttgcaagaattcgtcctgattctgttttaggtgagcatgtgcatgtgggaaattttgttgaggtaaagaagagctcgcttggaaatcgtacaaaagctaatcacctgagctatattggtgatgctgaagttggcattgatacaaacatcggagcgggagtaataacttgtaattatgatggtgccgataaacataaaacagtaattggtaacgatgtttttgtgggttcagatgcacagctaattgcaccaataacaattcaagatggctcaacaattgcagcaggcgctacaataacaaaagatgttgccagcgatagtttagcaattagcaggattgagcaaaaaacaatcccctcatgggacaggccaaggaaaaagtaa

SEQ ID NO: 305829 - DNA, 706 bp, Unknown
  Bacterial polypeptide expressing nucleotide sequence isolated from the Sargasso Sea
tttgattaatattgttgaaaataagtttaaaattgagaaggaacttctattgtcattgatgggcattgaaacaaattatggaacttatgttggaaaaatggatatcctttcctcactagcaactttaagttatgataaaagaagatctgaattttttactaaagagcttttaatcttattaaaattaattgatgaaaatcagatagattataaatcattgtatggttcatgggcaggtgcatttggtttttttcaattcatgccctcaaccataaaaaatcacgcaattgattttaatacagataattatattgatttaaaaaattctcatgatgcttatgcttcagcagctaattatcttaaaaaaattggttggaaaaaagactcaccttgtttttatagaatagatcttaaagaagatattccaaaaaaatatttgaatgtttctgcaaaaaaactccaaaataaaaaaaaattaggattttttaagaaatatattgataattatgatgatataagctttttaaaatcaaattataatgttgcaataatcactccagacaaagatattattcctggtgcagatactttaaatcctgcatatattgtatttgataactacgaaataattctccaatggaatagatctctaagatttgctttagctgtttgtaccttaaaagataaatttaaaaatgaattataa

SEQ ID NO: 305830 - DNA, 1366 bp, Unknown
  Bacterial polypeptide expressing nucleotide sequence isolated from the Sargasso Sea
atgtctaaaatatccccatctttattatctttaatcggcgaaacccctttggttgaaataaaaaatatagatacaggcttatgtcagctgtatgtaaaaatggaatctcataaccctggaggttcgataaaagacagaacagcttcttatattattaatcaagcagaaaaagatgggttattaaaacctggcgggacaattatcgaggcaacagctggaaatacaggaatagggttagcgttagtgggcatacttaagggatatagagtccttttagttattccagacaagatgagtctagaaaaagttgctcatctcaaggcacttggagcagaagttatttttacaagatctgatgtaggcaaagatcatccagaatattatcataatgtagccgaaaagcttgttaatgagattcaaggatcattttatgctgatcaattcaataatcctgcaaatattcttgcgcatgaagaaacaacaggaccagaaatttataatcaaatggatggaaatatagatgcttttgtagccggtgtaggaagtggcgggactataactggagttggtagatatttaagaaaagtttctccgcaaacaagtatagttgctgctgatccgataggatcagtaattaaagatgctgttaagacagggtcttataagtatgatggaggatcatggtttgtagaggggattggagaagatttcattcctaataattgtgatctcgaagttatagatgatgctataagtgtttctgacaaagaagcttttgaagccatacatatattgttaaaaaaggaaggtattttagctggctcttcagcagggacattatttgcaggggccattaaatggtgcaaaaatcaaaaagaagaaaaaagagtagttactttaatatgcgatactggcaataaatacttatctaaggcttataatgaaaagtggttaattcataacgatctaataattaaagatccccaaggagatctacaggatgtaattgcctttcgagcagataaaaatcaaataatttatgttaaaccggaagatactcttgctacagcttttaataggatgaataattcagatatctctcagttaccaatattagataaagaaaaattggttggcatgattacagaaaacgatattttaaatcattgtacaaatagcaaagggtttgaaaagaaagtatcagaatgtatgcaaaaaaattatgtatctcttcaaattaattcttctttagaggatttaattgaattattaaaagaaaacaatattgctattattttaaaagaagaaaaatttgttggtattattactagaattgatctgcttgcatatttgaaaaggaattaga

SEQ ID NO: 305831 - DNA, 573 bp, Unknown
  Bacterial polypeptide expressing nucleotide sequence isolated from the Sargasso Sea
tttttataataacaagtcaaagcagtgtagcctctggtatcagaagaattgaggcattatctggtcctagagcccaagaatatttatcaaatcttaaaaatcaaactattcaactccaaaaactattaaatgctcctgctgaagaaattgaagataaagtgagcaagcttttaaaggaaaataaaagcttaaagaaaggtggcaaaacagccaaagcagccacaattaaatcctctaatacacatgatattgataactttaaattagtaattgaagaggcagaatcagaggatatcaaagaattaagaccactacttgatgaaaaaacaaaaaatgcaaataactctatctttattcttttaagctctaaaaacgaaacattaactattctttgttccgtatcaaaagaccttcaatcaagaatttcagcaaaagatctcattaatgctctaacgtcacctattgaaggtaaaggtggtggaagagtagaatttgctcaaggtgcaggcaagccttctgatagagaaaaatttgtttctgatatccctaatatcgtacaatcgctcgcataaa

SEQ ID NO: 305832 - DNA, 905 bp, Unknown
  Bacterial polypeptide expressing nucleotide sequence isolated from the Sargasso Sea
aaaggatataaatactaaaggtattactattggggtagataacaaagtaagcgatagatatctttacggatatacaattagatatactaaagacgacgtgaggtcgggaactcctggaacctcattagatactgatggttacagcctttccacctatgcaagcctaatgacgggtgaaaataaatttattgacggtatttttggttttagcaaacttgatttaaaaaatgttagaaaaagtggcagtaataccttgaatggagacagagatggtgcacaattatatggatctataaattactctactgttttaaatagaaataatttaaatatttcgccaaatatcagatttgattttagccatacacgtctagaagaatattcagagactggaaccgacgcattagattatgatgatcaaacaattaaaaacggtgctttatattccggtattaacttaaacaatatatttaaattaaataatataaattttataccttctactggtattgaattaggattagatattagtccttcttcagatgtttctataaaatatgtttctgatcccaatacgacttatacgagatcaattgatcagcaagaaccaaaaagtggtaaagtaaaattaggcttagatgtaattactcaaactggattttcattgaccactttatatgaaagaaatcaaagcgagaacagtcacagtgatacattttacttaggaacagcttatataaaattaagggaagttcagtatgcactttctattcaagataatgttgcgtctgctaattatggtaaaaaattaaatggtttcgatattttatttgaaacagattatgatttacttagtgaatatcccgagtatgaagctaacttaaaaatttctagtacattttaaa

SEQ ID NO: 305833 - DNA, 898 bp, Unknown
  Bacterial polypeptide expressing nucleotide sequence isolated from the Sargasso Sea
tatggctgcatataaaaagaaaggattctcaattggaatattcgtatttcttttaatgcaattttcaccagctccatctggattgaatgatgttggttgggatgttgcagctgttgctgtcttaatggcaatctggtgggcaactgaaactgtgcctgttgcaattactgcacttttaccacttgctttatttcctcttctaggagtcacatcatttgataatgcagcacttccttatgcaaataaaaatatatacctatttttaggaggatttatgctagctctaggtattgagagttcaggacttcataaaagaattgctctcaaaatgattattgctgttggttcaagtggaagaaaacttgttggaggattcatgctcgtagctgcactaataagtatgtgggtgatgaatacttcaacgactttaatgttgttaccaattggattagcagtttgcacagtaatgtctgagactatacctggtttatcagacaaagataagtcaaattttgataccgcacttcttttaggtatagcctatgcggcaacaattggaggaatgtcaactcttattgggaccgccccaaatattgtttttagtgcatttatgcaggatacatatggtgttgagatatcaatgtttgattggatgatgttaggagttccccttgcaagtataatgttaatcagcgcatggattctattaactaaatatgtatttccaataagcttcactgcttcgactgaagcaagaaatgagctaaaaacaatgcttataaaaatgggagatttttcaaaagatgaaaaaagaatttctgtgatttttggtattgctgtatttgcttgggtttttaggacattgcttaataagatagaatttttatctggattaaca

SEQ ID NO: 305834 - DNA, 1222 bp, Unknown
  Bacterial polypeptide expressing nucleotide sequence isolated from the Sargasso Sea
atgttgttaataattgcgactatagctgttttgggcgttctgcttctatttatatgggatacgagcagagaccaagaaacaaacagtaatattttttcctattatacccctttttatgcagaatctatcgtaaggcatgcatatgtatcgtcgccagagtcggtttggaaatccttaacagacctaggcgcttatcaatcttggtttccaaatattaaccgcttgcttccaaaagttgatacagatagatatgttcatcaattttcatttaataagttttctttattaccgggcgctgagtttttactccgaccaaacagctggtcacctttttataaaagtaaggttgtggttgttgatgaaaatgcacaaatatcatttgatttaaaaacaaaccctttttatcgagagtatgtcgatttttcgctaaaagctgaaccttatggcacctctattgtttgccgaaggtcaagccgtggtttgttttcaatcctttctttgtggggtttttctagttcaaaatataaaattcttgaaaacctaggcttttttataccttcggatataaaagatgaagaagaagaaataggtgtggaaagcagcattcccaccttaagccgagaagcaactatagctcaatcggtacaggctggcctcgatggaaatatggatttaataaatgctattccagataaacctacaaggggaatggcaaaggcaacgctggtccaagtaaaacgaaaaggcggggtgttaccagacaacttaaaagatgcgctatctgaaacgccttctgttgcaagtgctccaaaaaaggcttctaaagagaatggtggttttaattcagttgaagagcaaattcattatcttgtaaaccttgctttagatggaaacgatgaaccgttgaatgctgttgataacaaggttgttcgcggaaaagcaaaagccatgattgttaaaattaagcgtggttcacttgatcgaccaactatgccatcaacccctactaagcctgtagtatcagatataaaagattctgaaaccaaactagaagaacctgatttaagcgtttctaaagatgaggatgagcaaggtttgattgataggttggttgaggctggcgtgggtggcaatatggatgaaataaacgcgttagaaaacagagtgttacgcggaaagataaaagcagctattgtaaaaaagaaacgtgaacaaaaatagt

SEQ ID NO: 305835 - DNA, 691 bp, Unknown
  Bacterial polypeptide expressing nucleotide sequence isolated from the Sargasso Sea
agaatctttatttggtgaaaagtatgaagatcaggtaagagtcttatcaattggtgaagatgatttttctcttgagctttgtggtgggacacatatttctagaacaggtgatcttggtatctttataataacgagtcaaagcagcgtagcttctggtattagaagaattgaggcattatctggtcctaaagctcaagaatatttatcaaatcttaagaatcaaactatacaacttcaaaaactattaaatactcctgcagaagaaattgaagataaagtgagtaagcttttaaaggaaaataaaagtcttaagaaaagcggcaaaacttccaaagtagccacaattaaatcctctaatactcatgatattgataactttaaattagtaattgaagaggcagaatcagaggatatcaaagaattaagaccattgcttgatgaaaaaacaaaaaatgcaaataactcaatttttattcttttaagctctaaaaacgaaacattgactattctttgttctgtatcaaaagacctgcaatcaaggatttcagctaaagatcttattaatgctctaacgacacctattgaaggcaaaggcggaggaagagtagagtttgctcaaggagcaggtaagccttcagatagagaaaaatttgtttctgatatccctaatatcgtacaatcgctcgcataa

SEQ ID NO: 305836 - DNA, 166 bp, Unknown
  Bacterial polypeptide expressing nucleotide sequence isolated from the Sargasso Sea
atggctaaaacattaaatgaaatcaggtcagcattcttagattattttgaaaaaaatgatcataaaatagttgagtctagcaatttagtcccgaataatgacccaacattgatgtttgcaaattcaggaatggtccaatttaaaaatgtgtttacaggactgggaa

SEQ ID NO: 305837 - DNA, 704 bp, Unknown
  Bacterial polypeptide expressing nucleotide sequence isolated from the Sargasso Sea
tggtgagaaatatgaagatactgtcagggtgttaaatattggtggggagttttcttgtgaattatgtggcgggacacatgtcgaacgttccggtgatataggtgtatttaaaattatttcagaatcaggtatagcttcaggggtaaggcgtattgaagcaattactggccttgaagcatttgtctggattgaaaatatggaagcaaagttacaacgaatggcagaatcattgaaatctaatgtagaaacagttgactctaaactcaatttacaacttgaaaaaactcgtaaacttgaaaaagagttattacaacttagaggtaaattagccagcaatgcgggtttaaatttgcttgaggaaaccactgtaattgatgatattagtattgttgctaaatcaattgatactgctgatccgaaaagtcttcgtgatgccgttgatcagcttaaaaataaacttgggacagctgtattaattcttgcgactgttaatgaatcaaaggtgagcttagttgcaggcgttactgacgacacgactaatcgcattaaagcgggtgacttggtaaattttgtagcagaacaggttggagggcgagggggaggacgtcctgatatggcacaagccggaggcgatgatcctaagagattagaaagtgctttagcaaaagttccagattgggtccgtagccaacttaaaaactaaa

SEQ ID NO: 305838 - DNA, 781 bp, Unknown
  Bacterial polypeptide expressing nucleotide sequence isolated from the Sargasso Sea
gaaaaaattgttaaccaagaggctttaaacaatcttgaagtaaaaactgaattaatgaagctcgatgatgcaatgaaatcaggggcaatggcactttttggtgaaaaatatgacaatgatgtaagagttcttacaatgggagagaactcttattcagttgagttatgtggaggtacccatgtttccagaactggcgatatcggattctttactatcacatcccaatccagtgtagcttctggtataagaagagttgaagctattgctggtatgcaggctttaaactatataaaaaaattaaaagaagttaattcctcaattcaaaaccttttgaatgtttctacagatgatatacacgataaaataaaatcattaattgatgaaaacaaggctttaaaaagcaagggaactcaaagctcaaaaagagaaatagtcttttcagaaagcattgaaatcaatgattggaaactggttattcagcaagtgcaattagatgacaccaaagatttaaggttgctagcagatgagcaaaaaaatacaaacgaaaaagtatgtgttgttattttttcagaacaaaataataaggttgcgcttgtttgtggagttactaaaaatcttacagataccttatctgcaaaagatgtagtttctgttatatctaaaaaaattggtggaaagggaggaggtaggcctgactttgctcaaggagcaggcgagtctaaaaatataaaagatttcgtgacatctatacgagattcagtaaaatccctcgctaaataga

SEQ ID NO: 305839 - DNA, 211 bp, Unknown
  Bacterial polypeptide expressing nucleotide sequence isolated from the Sargasso Sea
aatgagcgatattagaaataagtttcttgattattattcaagaaaaaatcatgaaattatagaatcaagcaatattgttccaaataatgatccaaccttaatgtttacaaattcaggcatggtacaatttaagaatgtatttacaggagttgaaaataagccttacaaaacagcggtcacttcacaaaaatgcataagagcaggcggaaaa

SEQ ID NO: 305840 - DNA, 802 bp, Unknown
  Bacterial polypeptide expressing nucleotide sequence isolated from the Sargasso Sea
agagaaagctaaatctttgggagtgatggctctatttggtgagacctatgatgcagactcggttcgtgtcgtacagatggggccgtccatcgagttatgtggcgggacacatgtgagctctacgggtgttatccagtcctttcgacttctttcagagtcagcgattgcggcgggggtgcgtcgtattgaagcgatctcaggggatgaggtgttagccgcatatgaggagcagtgcctggatgcgatacggatcactatagagaaaaagttggataagttggcgtcttataatgaggttatcgcgtcttataatgagtcgatattaacgtttccagatattgatttagccgacttagatcgccaagatttaatggattataatacgcgggcagaccgtgtcctaaaaaaagcagagaaccgtgtaagactggtcaaaagtcgggccgtcgttcagacggatttctcggcgtttattatgcagattaagggtatttcagtgttcatgcatgtgtttgaggggtatgacccggccatgttacgggatgtgtcggatcaggtggtacagggctatgcccctgtgattgtgattgcggcctcttgtaaggaagggaaaggggttctgttggttcggttatctgaagatatagatctaactgttattacagcggcacaggtggtgtctgtgattacggatattacaggggggggtggaggtgggaaaccgcgcatggtgcaagcggggggcttaagagagattaaactgaaccaggcgattttagccgctaaaacgtttctggaaaac

SEQ ID NO: 305841 - DNA, 441 bp, Unknown
  Bacterial polypeptide expressing nucleotide sequence isolated from the Sargasso Sea
ttggtttaggtgaagcaaaggatgattcaaaaattatcgaaaaagctcaagaagaactaagtttaataacaggtcaaaaagcaattaaaacgaaagcaaaaaaagcaattgcaggctttaaaataagagaaggaatgccccttggagcttctgttactttaagaaataaaatcatgtacgagtttcttgatagattaattaacatcgctattccaaggataagagattttagaggactcgactcaactagttttgatggaaacggtaacttttcttttggtgttaaagagcagataatctttcctgaaattaattatgataaaattgataaagtaagaggtttggacataacaatttgcactaatgcaaacaataatgaagatgctcttgaattattaaaaaactttaatatgccttttagaggcgtagaaacaaattagg

SEQ ID NO: 305842 - DNA, 734 bp, Unknown
  Bacterial polypeptide expressing nucleotide sequence isolated from the Sargasso Sea
gaaatatgatgaagaagttagagttttgtctatgggaaaagaaaatggaggctatttttctactgaattgtgcggaggaacgcatgttaaaaatacaaaagatattggaaggtttaaaatagtcggtcaatcatctattgcagctggcattagaagaatagaggcgctaagagataagcagttggaggattatgaaaaatctacaaaactagataaatcttcaaaagagaaaaatctgaaagatcagatcaatattgtaaaaaaagaattatccaaacataaaatcaaacctgactataaagaagatttagagttatcagaaaatttgaagaatttaaacaaacaactagataaaattaaagttcaaaatattattaaagataaaaataaaaatattattaaagataaaaaatttggctcatttattctaagacagcaggttcttaccgattttccctctaaagaattaagaagcataatagatcaaggtaaaaaagacattaaacaaggtattgtagttagcatctccacttttgaaggaaaagttggagttgctgttggtataacagaagaattaattaaaaaatatgatgctgtaatgcttgtaaagattgcttctgaaattcttggaggtaaaggtggcggaggaagaagagattttgctcaagctggaggagtcaaaaaagataaaattgaagatgcctttaaagctttaaataaaaaaattaattaag

SEQ ID NO: 305843 - DNA, 193 bp, Unknown
  Bacterial polypeptide expressing nucleotide sequence isolated from the Sargasso Sea
aacctgatcgcgggcgtgaccaatgacctgaccggcaaggtcaaagctggtgagctggtcaatctggtggcccagcaggtgggtggcaagggcggtggtcgtcccgacatggcacaggcgggtggtacccagcctgaggcggtgccggcggcgctgcaatccgttcactcctggctggaagagcgcctgtaag

SEQ ID NO: 305844 - DNA, 863 bp, Unknown
  Bacterial polypeptide expressing nucleotide sequence isolated from the Sargasso Sea
tacccaccagctcgacgacaagggcaaaacgtcgttgaaagtgattggtgaccacagccgtgcggtgacgcagttgatctgcgatggcgtgaccgccagcaacctgggccgcggctacatcctgcggcggcttctgcggcgggtggtgcgccatggccgtctcctgggcatcgacaagcccttcctggtgaccatgggtgaagcggcgattgccctgctgaagggggctcaccccagcgtgattgagcgccaggaggtgatcctggccgaactccaacgggaggaggcgcggttcctcgagaccctggagcggggcgaaaagctactggcggaggtgctggccagcaacccgacccagatctccggcgcccaggcctttgagctgtacgacacctatggcttccccctggagctcacccaggagattgcagaagagcagggcctcacggtggaccttgatggctttgaggtggcgatggaggaacagcgtcagagggccaaggccgcggctgtgagcattgacctcaccctgcaggatgcgatcgagcaggtggctgctgagcagcccgccacggcgttcaagggttacgacgccctggatcagcccagcacggtgcaggcgttggtcgtgaacggggcgccggcctcaacggcgtcggccggagatgtcgtgcaagtggtgctcgacagcacacccttttacggcgaaggcggcggtcaggtgggggatcgcggatcgctcagtggtgtcgacgtgatcgtggccatcgactccgtgagtcgcagccgcgatgtgttcgtgcattccggacgaatagaacgcggtcatctggccgtgggggacaccgtcaatgcccaggttg

SEQ ID NO: 305845 - DNA, 740 bp, Unknown
  Bacterial polypeptide expressing nucleotide sequence isolated from the Sargasso Sea
tattaaaataaataatatagtcaatgatgtagtaacaggatccactgaagttcaaacaagaataatgaccccaaaagaagcagttcgtatgggtgcacttgcattatttggagaaaagtatggggaggaagtgagagtggtttttatgggaaaggaaaacaatggttttttttcaacagaattatgtgggggaactcatgttaaaaacactaaagaagttggcaagtttaaagtaataagtcaatcatctattgcatcaggagttagaagagttgaggcattgagggataagcaattagaagaatatgaaaaaacgaaaagtgaagataagtctcagaaagagtcaaaactaagaaaagaaatagaattaattaaaaaagaacttcaaaaatataaaattaaacctgaatataaagaagatttagatttatctgaaaatttaaaaaatttaaataaacaactcaataaagtaaaaattgaaaatatcaagaaagataaaagaaaaaatataattaaggataaaaaaatcgggaacgtattaattcgagagcaaattttaaaagattttcctccaaaagaactgagaggaataattgatcaaggaaaaaaagatataaaatctggaatcgtaattagcatttcaacatttgaagacaaggttgggttagcagtaggggtttctaatgatttgacaacgaaatatgatgctgttgatctagtgaaagctgctgtaataattt

SEQ ID NO: 305846 - DNA, 247 bp, Unknown
  Bacterial polypeptide expressing nucleotide sequence isolated from the Sargasso Sea
cttgaaaaaggtgctttagctttttttggtgaaaaatatggagaagaagtgagagtagtttctatgggagcggaaaataactcttacttttcaacagaattatgtggtggaacacatgtaaaaaatacaggagatattggaaaatttaaaactgttagccaatcctcaatagctgctggagttagaagggttgaagctttaagggacaaacaactcgaaatattcttaaaaaataaggaaaaaatgt

SEQ ID NO: 305847 - DNA, 613 bp, Unknown
  Bacterial polypeptide expressing nucleotide sequence isolated from the Sargasso Sea
gcgtactggcgatatcggcctgctgaagatcagttcagaaagcggtattgctgcgggtatccgtcgtattgaggcggttgttggtcaggctgctcttgatttcgtcgcccgtgaagaagcgacgttgacaacgattgcccgtgctctgaaagggtcgactgataacgtgggcgataaggtcgaacagttgatcagtcgtagccgtcagttagaaaaagaactggatgcactgaagagcaagcttgcttccagcgccggttcagatctggcaggtcaggcgaaagatgtaaacggtgtaaaagtactggccgccgaactggatggcgccgatgtacccgcgctgcgtaacacgatggaccagctgaagaacaaactggggtccgcggtgattatgctggcctctgccaatgacgggaaagtgaccctgcttgccggtgtgactaaagacctgatcggtaaggcgaaggcgggtgacgccgttaaagaagtggctgcttacgttgatggccgtggtggtggtaaaccagaaatggcgcaggccggtggtcagaaaccagaaggtattgccgatgcgctcaaagcctttgaagagtgggcggctgctaagctctga

SEQ ID NO: 305848 - DNA, 823 bp, Unknown
  Bacterial polypeptide expressing nucleotide sequence isolated from the Sargasso Sea
tctgatggtgtagtaccaactaacgaaggaaggggttatgtactcagaagattaataagacgagctattagagcttacaatcaattaaatgcatcagattcaagcctttctttcttaatagaaatagtaattgatatgtattcgtcttcatatccagatcttcaagacaataaagataaaatcttaaagttatttataaaagaagaggagatatttcaaaaaactcttaataagggattacaggaaattaataatctaatatcttccaataaatcaatatctcctaaagatgctttttatttatttgaaacttttggatttccttacgaacttactaaagaaatatctgtagaaaataatatcgatattaatgacgaagacttttataagttatatgatgagcacaaggagaaatctaaagctgaaaaatcattaggaaaagaatatatggatatagaagttgagttgaatgaatttgttggttatgaaaaaactgaatctaaatcaaaaatatatcaagtagaatcttatgatgataaatttgtaatttttacaaaagaaaacccattttattacgaagctggaggacaaatatcagacaaaggtctaataacaatggatgataattccattgaagtaatagatgtttttcaagcaagcaatggcgcaactggtctaatcgttgattctgatattttcaaagtcgatcaagaagtagaactatccgttaacaaaagttttagatctggtgtttctaaaagtcatacaggagcacatatagtccattcagcattgcgtaatattcttggtgaccacgttgctc

SEQ ID NO: 305849 - DNA, 929 bp, Unknown
  Bacterial polypeptide expressing nucleotide sequence isolated from the Sargasso Sea
tattgtacattcgtctctaagagcaattcttggagatcatgtcgcacaagcgggttcatatgttgcaccaggaagatttagattcgattttagtcactctgagaaagtgtcgaatgaacaattatctgaaatattttcattgagtaacaaaaatgtatttcaagatttacatgtttctacaaaagtaatgaatattgatgaagcaaaaaaagaaggtgctttagctttttttggggataaatatgaaaacgacgtaagagtagtcaacataggtgaattttctaaagaattatgtggcggaactcatgtcggaaattccaatgaaattggattaattgtattattaaatgaatcatcaataggttctaatttaagaagagtagaaatgttatcgggttatgaagcttatgattttatgactaatgcttacaattcctataaaaatgtaagtaacattcttaaaactaatattgatgatgtgccaacaaaattagaaaattttttaaatacatatgaagagttaaaagcaaaaattgacaaatataaacaaattgaaaataatcaaattgtagaaaacatatctaataatataaacgtaataaacaaatttaaaacatatgttggctctattgaaactgatagtgtcgatagtttgagaaacatagctgttacagctattaataatgaggtagctgattatgtttacttgatctcgaaaatagaaagtaaatatgtaattgtttcgatgaagaatgaaaagataattaaagattttaacgtttctgatttagtaattgaaacatctcaaaattatggaggtggtgcatcaaaagatgaaactttatctattggtggcggaccaaaagattattcaattgataatactttaattttcgtcaacgagaacttaaataaaatactcaagtgaa

SEQ ID NO: 305850 - DNA, 619 bp, Unknown
  Bacterial polypeptide expressing nucleotide sequence isolated from the Sargasso Sea
ataagtgataacaattcatcatcttatagtgttgaattatgtggaggaacacatgtaaaaaaaacatctgagataggaaactttaaaataataagtgagtcatcagctgcatcaggaataagaagaattgaggcgttaagaggaaatgatttgataagttattatgaaacaagatctaagcaaatagaaattgatttagaaaagaaaaaaataacagaggatgccaaaaaaaataacttagaaaaaataaaaaaacttagtcaaaacatacaagaaaaaataaaagatggtgaaacgttaattgtggaaacgtgtaataatttgaaggcaaaagacttaagatcaattctagatcaatgtaaatctcaatttttgaaaaatggagttataattatttgtgctataaatgatggtaaaattagttttttagttggtgtcacaaatgagttatctaacaatttatctgctagtgatgttgctttatatgcagctaaaattactaatggaaaaggtggcggaggtagaaaagattttgctcaatcaggcggtatatattcagaaaaaataaatataaaagagagtcttcagaaatttctaaaagaaaatatccctaattagg

SEQ ID NO: 305851 - DNA, 799 bp, Unknown
  Bacterial polypeptide expressing nucleotide sequence isolated from the Sargasso Sea
atgaaaaaatttcaagaacatcaggctaaatccagtgcttttaaaaaggagatgtcagatgttgataaatttgatgtagattgtaacgtatttacaggttacgaaaatacaaatactacaagtgaagtaacatttgtgcagaatgaaaatggttctacaacgatatttacagaatctacaccattttattttgaagctggaggtcagatatctgaccaaggctcaatagtatttgaggataaagagtatacggtagctgatgttgttcaatctagttctggtgcaaccggcttagtaataaatgaagaaatcaaaattcaatcaggacagaaggttgaatcaaaagtaaacgaaaaatttagaagatctgtatctaaaagtcatacatctgcacatatagttcactcatctttaagaaatatacttggtgatcatgtagctcaggcaggatcatatgtcgctcctggaaggtttagatttgactttagtcattcagaaaaagtgacacaggaggaacttaatgagatcttcacattaagtaataaaaatgtgttttctgatttgaaagtagatacaaaaataatgaatattgacgaggccaaaaaagaaggtgcattagcattttttggagataaatatgatgacgatgtaagagtagtaaatattgggagcttctctaaagaactttgtggaggcacacatgtatctaattcaaacgaaataggattaattgttttattaaatgagtcatctattggttcaaatctaagaagagttgagatgctatcaggattgaagc

SEQ ID NO: 305852 - DNA, 105 bp, Unknown
  Bacterial polypeptide expressing nucleotide sequence isolated from the Sargasso Sea
ttcttttggctgaaggagttttaccttcaaatgaaggtcgtggatatgttttaagaagaattatgagaagaggaatgaggcattcttcatttgttaggatctaaa

SEQ ID NO: 305853 - DNA, 829 bp, Unknown
  Bacterial polypeptide expressing nucleotide sequence isolated from the Sargasso Sea
attgagtgacaaacagctagaagaaattgaaaacatagttaatttggtaatccgccaaaacattagtacggacatttatgaaactgcttatgacgaggcaatcagttccggaataattgctctgtttggggaaaaatacggagatgttgtcagagtagtaaaaatctcagatttttcagaagaactttgtggcggttgccatgtaaaagctacaggacaaattggacagttccgcctagtttccgaagaaggaattgccgctggtatcaggaggattgttgctgttacgggtaaacaggcagaattaatgtcccaagagcagggcagagtcacacgcgcattgcgtcaactattaaatgttcctgaggcagaaattcctgaaatgacagaaaaacttgctgaagaaaaaagacagctggaaaaagaagttcagtcccttaagagtaaggccgctcttcaaggcatatcagaactggtggcacaagctgaagatgttgagggggtgtctgttcttgctagggaaattgaggcagattcagcagaaatgctccggaatataggtcattctgttagagaacaaatttcttcaggaattgcatggctggctacaacaataaataagaaaagcaccttgctctgcgtagtttcagatgacttgattgaacgtgggattaaggctggagatatggtaaatgaggttgcaaaaattgcggatgggcaaggaggaggtaagcctaatatggcacaagccggtatcaaagccccagaaaaaattcccagtgcattagctgcaacaacagccatagtgcgagaaaaacttataaattaa

SEQ ID NO: 305854 - DNA, 125 bp, Unknown
  Bacterial polypeptide expressing nucleotide sequence isolated from the Sargasso Sea
taaggatcaagatggtgacagatatatagagatttggaatttggtatttatgcagtttgagcaaattcaaaagataaaagaattgatttacctaaaccatctgttgatacagggatgggtttaga

SEQ ID NO: 305855 - DNA, 832 bp, Unknown
  Bacterial polypeptide expressing nucleotide sequence isolated from the Sargasso Sea
gtgatattcaagttagttcaatctttaattgaacaaatgggtggtgcttttccagaattaattactcaacaattaactatagaaaacacaataaaggatgaagaaattaaattcaaagatacccttgataggggtatgagtttgttaatgaatgaaatagatgtgaaagtttctccaggtgtactttcaggtcaaaaagcttttgaattatatgataccttcggctttccattagatttgacagaagatgtattaagatcatatggctggaaagttgatcaccagggttttcaaaaatgtatgaatgaacaaaaaatcaaagcaagaaaggcttggtcaggctcaggtgatgatgcttataatcaagatattttaaaattattattagattcacctcctactaactttagaggatatgatgaaaatacttttgaaactaaaattgatttaattataaaaaataataaaattgtagataatgtatcagctaatgaacaagttgatattatatgcaatgagacaattttttatgctgaatctggtggtcagatatcagataaaggtgttatcataggaaaaaattttaaggctaatattttaaattcaaaaaaaataactgttggaaacggtaaaattatttttgtttcaacaatagaaattgtatcaggaaaaatcacagttggtgatataattaaccaagtaatggattttgattttagaaaacaaatatgttcacatcattcagcaactcatcttcttcatgaagcattgagacaaaaattaggtttgcatgtcgcgcagaaaggttcattggttactaatgaaaaactaa

SEQ ID NO: 305856 - DNA, 770 bp, Unknown
  Bacterial polypeptide expressing nucleotide sequence isolated from the Sargasso Sea
aatgattcatataaatttttggaaagaaatagtttctgaagacaaaattattcttggcagtaaaaaagataatttttgggaaatgggaaatattggtccttgcggtccttgttctgaaattcatattgatattagagatgaaaaagaaaagaaaaaaaatcctggtgcagctttgataaacaaagatcatcctgaggtaatagaactatggaatctcgtatttattgaattcaatagaaaatctgatggttctttagagaagttgcctaaaaagcatgttgatactgggatgggttttgaaagactttgtatgattctgcagtctaaaaaatcaagttatgacacagatgtttttcagccaattatcagagaaattgaaaacttggcaagcgtaaagtatggaaaacaagaaaatattgatcgatcgattagagtaattgctgatcattttagaactgtatatttttcaattgcagagggccaattacccagtaatacaggagcgggatatgtaatcagaagaatattaagaagagctattcgttacggatttacttttttaaatcaaaaaaaaccatttattcacaaattagtagacactctaagtcaacaattaaactctgttttttctgagcttgaaaaagaaaagagactggcttataatgtaataagggaagaagaaagttcttttcttaaaactttagatcaaggactagttcttttagaaaatattattgaaacaaataaaagcaaaacaattgatgggaaaa

SEQ ID NO: 305857 - DNA, 199 bp, Unknown
  Bacterial polypeptide expressing nucleotide sequence isolated from the Sargasso Sea
atggccgacaaatcattaaatcaaataagaaatacattcttgaaatattttgagaaaaatggccatacaattgttgactcaagcaatcttgtcccaaataacgatccaactttaatgtttgccaattctggaatggtacagtttaagaatgtatttacaggactgaaaagagagattacaaaaaagctacgacctctca

SEQ ID NO: 305858 - DNA, 726 bp, Unknown
  Bacterial polypeptide expressing nucleotide sequence isolated from the Sargasso Sea
taagttatatgatacatatggttttccaatagatttaactagattaatggcaaaagaaaagagtatatttgttgatgaaaaaggttttttagaatgcatggctcaacaaaaagaacgttctagatctcagtcagattttagagttacagaaaataacattgattggatttcttctaatgacaatttaacttcgatatttgttggatattctgatgcaactagtgatgcaaaaattataaaattcagagaattatctaataaaaattatgaattaattttagataaaactcctttttatccagaatcaggtggtcaaattggtgatattggctatattaagaataagaatttaaattttaaggttctagacactcaaaatagagaaggaaatatatctcatataggttttttagaaaacggtgaaattaaattaggtgaaaaagttgtagctgcaatagattgtaatagaagattaaaaataaaatctaatcatactgcaactcatattttgcatgaatctttaaagcaaacattaggtgcacatattcagcagtcaggttctttggttacagaccaaaaattaaggtttgatttaactcattatgaaaaaataacagacaatcaaattattgaaattgaaaataaaatcaataaaataataagagaaaattacaatgtttctactacgattcaggattttgaagaagctagaaaaaatggtgcagt

SEQ ID NO: 305859 - DNA, 890 bp, Unknown
  Bacterial polypeptide expressing nucleotide sequence isolated from the Sargasso Sea
atttgattttagccacaataaacctattgaaaaagaggaaatgagtaaaataaataatttagtaaatgagatagttacaagagcctcagatgtacaaacaagaataatgacaccaaaagaagcagtaaaaatgggcgcacttgcattgtttggagaaaagtatggagaggaggtcagagtagtttttatgggaaaagaaaataatggttttttttcaacagaattatgcggaggcactcatgttaaaaacaccaaagaggtaggaaagtttaaagttattagccaatcttcaattgcttctggtgttaggagagtagaggcattaagagataaacaattaaaaaaatttgaagaaatacaaattaaagataagtctcagaaagaaactgatattaaaaacgaaatagatcttattaaaaaagaacttcaaaaattgaaaattaatcctgattttaaaggaaatttagacttatttgaaaatttaaagaatttaaataaacaattaaataaagtaaaaattgaaagtataaagaaagataaaaacaaaaacataattaaagataaaaaaattggaaatatattaattcgagaacaaattttaaaagatttccctccaaaagaacttagaaatgtaatcgaccaaggtaaaaaagatattaaatcaggaattgtaattagtatttctacatttgaagataaggttggtctagctgtaggagtctctcaagatttgacttcaaaatatgacgctgtagctttggttaaagttgcatctattattttaggtggtaaagggggtggtggtagaaaagattttgcccaagcaggcggtgtgaacaaaaataaaattgaggaagcttttagagaaatatctaaaaaaattagttaag

SEQ ID NO: 305860 - DNA, 670 bp, Unknown
  Bacterial polypeptide expressing nucleotide sequence isolated from the Sargasso Sea
gcattggcattatttggagaaaagtatgctgatgatgttagagttctttccataggtgttaaagataacaatacttacagtactgagttatgtggtggaacacatgtaaataacacctctgaaataggtgaatttgaaataattaatgaatcttcagtttcttctggaataagaagaattgaagcactaagggatgaggatttaaaactttataaagagaaaaaaatttctaaagaacaagaaacagaagaaaaaaaaatacaatctgaaaaattgaaagtaatttataataaaaatatatctgaaataaaaaaacaaattgatgaaaagataaaggaggatactcaaacacatttaattgttgaattttatgatgatttaaaagtttctgatttaaggaatatagttgattatgctaagaagtctttcaagcgtgaaggggttattgttattggagcaaaaaatgataataaaattagttatctagttggtgttagtgatcaattgtcaaataatattggtgctaatgatattgcacaatatgcatcaagtatttctaatggaaagggtggcggaggaagaaaggattttgctcaatcaggtggtgaaattataaatgagagtgatcagattaaacaaataaaatcatttattatcaataagttataaa

SEQ ID NO: 305861 - DNA, 157 bp, Unknown
  Bacterial polypeptide expressing nucleotide sequence isolated from the Sargasso Sea
atgaactctaatgacgtaagaaatgcatttattgattattttaaaaataatgatcatagacatgtcaaatctggatctttagtaccagaaaatgatccatccctaatgtttgctaattcaggaatggttcaatttaaaaatgtttttacaggccatg

SEQ ID NO: 305862 - DNA, 804 bp, Unknown
  Bacterial polypeptide expressing nucleotide sequence isolated from the Sargasso Sea
tcgaatccagggtgaatgacaaaatcagggaaaatatcccaaccgagatctatcagaccgaataccagaaagcgattgattcaggaattgtcgccatgttcggagaaaaatacggggatgtggtcagggtgatcaagctcggagatttttctgaagaactctgcggcgggtgccatgtcaaatccaccggacagatcgggcatttccgcctggtctctgaggaggaaatgcttccggaatcaggcggtttgtcggagtcacgggggattcaggctgagtccatcagccgccaggagaaccgtgtggcccaaaatctaagacaacttctcaatgtgccggtagagaaagtcaccgaaaccgttgaaaaactgcttgatgagaagcgaggactggaaaaagaaatccaggagatgcggaaacagaatgcggggttcaacgctggaagcctcctcaaagaagcagagttgatcggagatgtccatgtgctcgcaaggcaggttgaagttcaatccatggacgaattcagaagtatggcagattctctgagaaagcagctgaataatggcgttgcctggctttcagcagaaattgatggaaagagttctctcttatgtgttgtctcggatcctttgctcgagcgcgggctgaaagccggtgaactcgtcaatgcggtagcttctctggcaaaaggcaaagggggcggtaaaccccacatggcccaggccgggatcaaggcacctcaactgctgccccaggctttaaaccaggctccagatctcctgagacaaaaattggggctctgaa

SEQ ID NO: 305863 - DNA, 727 bp, Unknown
  Bacterial polypeptide expressing nucleotide sequence isolated from the Sargasso Sea
aatacagttattgaggaaggatcagatgttgaaactcaaattatgaccccagacgacgctgtaaatgctggagcacttgctctatttggagagaaatattctgatgaggtaagagtgttaaaaataggaaagatgagaaataaaactttcagtattgaattatgtggcggtacacatgttgagaacacaagtcagattgggaaattaaaaatagttaatgaatcatcggttgcttcaggagttagaagggtagaagctctgcgcggtgaagacttgaaagtttatcaaatgaataaagcagcggagaataagaaaatagaagaaaaaaaattaattttagaaacagataaatcaaaatcaaaagaggtagttaataatttaatcaaagaagttaatgatgaaatttcaaataataaaagcaccatcattatcttttgtgataattctaaaagctctgcgttaagacctgtaattgataatgccaaaagaaaattcaaaaatggtggtattattgttctaggttcaaaaaaagacaataaaatcagctacctagttggtgtaacagacaacctcacaaaggtcattggtgcagatgatattgctttgttcgcttcttcagtttctaatggaaaaggaggaggtggcagaaaagattttgctcagtccggtggcgatttaattaatgaaaccgaccaaaaaaacaaaatactgaaatttattactgata

SEQ ID NO: 305864 - DNA, 203 bp, Unknown
  Bacterial polypeptide expressing nucleotide sequence isolated from the Sargasso Sea
tatggcaaaaacactaaatgaaataagaactacttttctcaaatattttgagaaaaataatcacactattgtggagtctagtaatttagttcctaataatgatcctacattgatgtttgctaattcaggaatggtccagttcaaaaatgtgttcacaggacttgaaaaaagagattatgttcgtgcaactacctcacaaaaat

SEQ ID NO: 305865 - DNA, 693 bp, Unknown
  Bacterial polypeptide expressing nucleotide sequence isolated from the Sargasso Sea
tggtcgcaatgggaggccaggcggaaccattttctgtcgagctttgtgggggaacccacgtcgctcgcaccggtgacatagggttttttcaaattttatcagaaagtgcggtagctgccggcgtgcgaagaatagaagctgtcgccagtgtgagtgccgagacgcacgtttatcaacagctagatttgctagatgaagtttcacttgagctccggagcagtcggggggacgttctaaagagagtaagtagtctgcttggagatcgtaaaaaactcgaaagtgagctctcgcagttacggcgaaaacttgcaagtgcccctaatcccgatggtaagagtgcgggggctaacgttttagaaatcggaaatctcaaatatgccgctcgcttgcttgagaatgtgccgtcaaaagaccttaaaggtatggttgacgacgttaaaaaacaaatcggtagtggagttgttgcaataatttcagtgacggatggcaaggcgtcaatagttgtcggtgttactgaagacgcgaccgactttttgaacgctgtcgatttagtgaaaatagggtcggcggccctgggtggaaaaggcggcgggggtagatcggatatggctcaagcgggtggtcctaatgcgagcggggctgagcgagccatagatgagattagggaggcgatagctgtgaagtctaattagt

SEQ ID NO: 305866 - DNA, 553 bp, Unknown
  Bacterial polypeptide expressing nucleotide sequence isolated from the Sargasso Sea
agcgtttcatcaggagttcgaagaattgaagctgtcacaggtgctaaggcattagaactagtactcgagatacgatctcaactgcaagatgttcaaggaatattaaatgttggagcttctaaggttagctccaaagttgaagacttggttaaagaaaataaatccttaaaaaaaggtaatacaagtaaagctaaatcttcagtggatcttaaagaagtgattcataaaattaagaaccttgatttggttttgatagaggcagatacccaaaatatccaagatttaaggctgctggttgatagttctaaaaaagaccaatcgcaaagatgcgttttaatcttgagccaccaagattctaaagttgtgatggtctgcggagtgactgaagatattcaagaatcattgagcgccaatgatgttattcaagcaatcgccaaggcctctgatggaaaaggtggtggtcgcaaggattttgctcaaggagcaggtgtagctgataattttgaagaatttgttaattctattcctgatatcgtacaatccatcgcttaat

SEQ ID NO: 305867 - DNA, 859 bp, Unknown
  Bacterial polypeptide expressing nucleotide sequence isolated from the Sargasso Sea
ttccgggcagaaattaatttctggttttaaagcttttgaactttatgatacttatggatttcctctagaacttactttagaaattgctgaagaaaatagtatcagtgtagatgtaaagggttttgaagaagaaatgaatgcacaaaaagagagagctaaagctgcttcaagtaatattgatttgacattagagggatcattagagcgagaaatagatctttttaacaaaactgtttttaatggttatgagtcactcctttcggaagctgaaataaagggtatattcttggattcaacattagttaagcaagcaagtgaaggtcggaaagttttaattgttcttgatcagacaactttttatggagaatctggcggacaagttggtgatattggaacgatattttcaaaagatgtagaggtcttggttgataatgttatgcgaaagaaaaatgtttttttacattatggaacgatcaaaaaaggaatattaactattggacaaaaagttaagactaatgttagctcctctaatagagctaaggctgctgcaaatcatacagctactcatttattacaatctgcacttaaatcagttgttaatgaaagtgttggacaaaaaggttcattagtagcctttaataaattacgatttgactttaattcctctaaccctatttctaaagatcaaatttccaagattgagactttagttaactcttggattatggaaaatcatgccctagaaataaaaactatgtctaagagtgtggctcttgaaaagggcgcaatcgccatgtttggagaaaaatatgatgatgaagtgcgcgttgttaatgtaccaggagtttcaatggaactt

SEQ ID NO: 305868 - DNA, 841 bp, Unknown
  Bacterial polypeptide expressing nucleotide sequence isolated from the Sargasso Sea
gagactattaataagttagttaatgaatatgtagtaaatagttctgaggtatcaacaagaattatgacaccaaaagcagctatagaaaagggtgcgcttgctttctttggagaaaaatatggagaagaagttcgagttgtttcaatgggtaaggaaaaagaagcatatttttcaacagaattgtgtggaggaactcatgttaaaaatactggagatattggaaaatttaaaactataaaccaatcatctattgcagcaggagtaagaagaattgaggctctaagagataaacaacttgaagagtttattaataataaagagaagttgtcgattttatctacaaaaaaagatgaaaagactattaaagatttgtcttcacaaatcataaaacttggaggtaaaccaaatattgagataaaagatcttaaagaactcattaaaaatcttacaagacaacttgaacaattaaatgttagctcagttcttaaggacaaaacaaagaatattattcaagatcaagaaattaataatattaaagttagatttcaaaaagtgcaagatctaccatctaaagatttaagaaaattagttgatagtggaaagaaagaattaggcaatggtattataataatttttgcaagtagtgaaggtaaagttggtttaggagttggtgttacagataaattaattgataaatacgatgctgttaaatttgctaaattaggttctgagatcattggtggaaaaggtggtggcggtagaaaggattttgcacaagcaggggggcaagatcaaaataagattgatgaagcttttgaaaaaataaaatctttaatttaat

SEQ ID NO: 305869 - DNA, 811 bp, Unknown
  Bacterial polypeptide expressing nucleotide sequence isolated from the Sargasso Sea
gaatctttatcagatgaagagatatccaaaattgaagaattagtaaatcaagaaatactaaagaattcagctgtaagcacaaaaataatggatttagaagatgctaagaattcaggtgcagagtctttatttggtgaaaagtatgaagatcaggtaagagtcttatctattggtgaagatgatttttctcttgagctttgtggtggaacacatatctcaagaacaggggatcttggtattttcataataacaagtcaaagcagtgtagcctctggtatcagaagaattgaggcattgtctggtcctaaagctcaagaatatttatcaaatcttaaaaatcaaactattcaactccaaaaactattaaatgctccagctgaagaaattgaagataaggtgagtaagcttttaaaggaaaataaaagcttaaaaaaaggcggtaaaaccgccaaagcagctacaattaaatcctctaatactcatgatattgataactttaaattagtaattgaagaggcagaatcagaggatatcaaagaattaagaccactactcgatgaaaaaacgaaaaatgcaaataactctatctttattattctaagttccaaaaatgaaacattaactattctctgttccgtatcaaaagaccttcaatcgagaatttcagcaaaagacctcattaatgctttaacatctcctatcgaaggcaaaggaggtggaagagtagaatttgctcaaggcgcaggtaagccttccgatagagaaaaatttgtttctgatatccctaatatcgtacaatcgctcgcataaa

SEQ ID NO: 305870 - DNA, 199 bp, Unknown
  Bacterial polypeptide expressing nucleotide sequence isolated from the Sargasso Sea
aatgagtgaaattagaagaaaatttcttgattatttctcaagaaaccgtcatgaaattgtggattccagtaatattgttccaaataatgatccaacattaatgtttacaaattctggaatggttcaatttaaaaacgtctttactggcatagaaaagaagaactttaaaactgctacaacatctcagaaatgtatagag

SEQ ID NO: 305871 - DNA, 760 bp, Unknown
  Bacterial polypeptide expressing nucleotide sequence isolated from the Sargasso Sea
tatgggtgcccttgcattatttggggaaaagtatggagaagaagttagggtagtttttatgggaaaagaaaataacggttttttttcaacagaattatgtggcggtactcatgttaaaaacactaaagaagtcggaaagtttaaagttataaaccaatcctcaattgcatcaggagttagaagagttgaggcattaagagacaagcaattagaggcatatgaaaaaatgcaaaaaaaagataagtctcaaaaagaaactaatattaaaaatgaaattgagtttgttaaaaaagaacttcaaaaattaaaaattaatcccgattttaaagaaaattttgatttatctgaaaatttaaaaaatttaaataaacaactaagtaaagtaagaatagaaattattaagaaagatgaaagtaaaaatatagttaaggataaaaaaatcggaaatatattaataagagagcaaattttaaaagattttcctccaaaagaacttaggaaagtaatcgatgaaggtaaaaaagatattaaatcaggaattgtaattagtatttctattttcgaagataaggttggtttggctgttggagtctctaaagatttgacctcaaaatatgacgctgtagtgctagcaaaagctgcttctgttattttaggaggtaaagggggtgggggcagaaaagattttgcccaagcaggtggtgtagataaaagtaaaatcgaggaagcttttaaagaaatatctaaaaaaattaattaa

SEQ ID NO: 305872 - DNA, 933 bp, Unknown
  Bacterial polypeptide expressing nucleotide sequence isolated from the Sargasso Sea
gatccatttaatgcaaaataattatcctgatttaaaaagtaataatgatttaattttgaatgagataaaaattgaagaagtaaggtttagggaaactcttgaaaggggagagaaattgttggatgagttaatttcttcagggcagaaattaatttctggttttaaagcttttgaactttatgatacttatggatttcctctagaacttactgtagaaattgctgaagaaaatagtatcagtgtagatataaagggttttgaggaagaaatgaatgcacaaaaagagagagctaaagctgcttcaagtaatattgatttgacattagagggatctttagagcgagaaatagatctatttaacagaactatttttaatggttatgattcacttctttccgaagctgaaataaagggtatattcgtggattcaaaattagttaagcaagcaactgaaggtcagaaagttttaattgttcttgatcagacaactttttatggagaatcaggcggtcaagttggtgataatggaacgatattttcaaaagatgtagaggtattagttgataacgttattcgaaagaaaaatgtttttttacattatggaatcatcaaaaaaggaatcttaactattggacaaaaagttaaaactaatgttgcatcctctaatagggccaaggctacggcaaatcacacagctactcatttattgcaatctgctctcaagtcagttgttagtgatagtgttggtcaaaaaggttcattagtagcctttaataaattacgatttgactttaattcttctaatcctatttctaaagctcaaatttctatgattgaaaatcttgtaaactcttggattatggaaaatcataccctacaaataaaaaatatgtctaagagtgaggctctcgaaaagggcgcagtggccatgtt

SEQ ID NO: 305873 - DNA, 191 bp, Unknown
  Bacterial polypeptide expressing nucleotide sequence isolated from the Sargasso Sea
tatggcagacaaaacactcaatgaaataagaaatactttcttaaagtattttgaaaagaacgatcataagattgtggaatctagtaatttagttccaaataatgatcccacattgatgtttgctaactctggaatggtccagtttaagaatgttttcactggattagaaaaaagagattatgtaagagcaa

SEQ ID NO: 305874 - DNA, 996 bp, Unknown
  Bacterial polypeptide expressing nucleotide sequence isolated from the Sargasso Sea
aggggttttgaagaagaaatgaatgtacaaaaagagagagctaaagctgcttcaagtaatattgatttgacattagagggatcattagagcgagaaatagatgtttttaacaaaactatttttaaaggttatgagtcactcctttcggaagctgaagtaaagggtatattcttggattcaacattagttaaggaagcaagtgaaggtcagaaagttttaattattcttgatcagacaactttttatggagaatctggcgggcaagttggtgatattggaacgatattttcaaacgatgttgaggtcttggttgataatgtcatgcgaaagaaaaatgtttttttacattatggaacgatcaaaaaaggaaaattaactattggacaaaaagttaagactaatgttagctcctctaatagagctaaggctgctgcaaatcatacagctactcatttattacaatctgcacttaaatcagttattaacgaaagtgttggacaaaaaggttcattagtagcctttaataaattacgatttgattttaattcctctaatcctatttctaaagatcaaatttctaagattgagactttagttaactcttggattatggaaaatcatgccctagaaataaacaatatgtctaagagtgaggctcttgaaaagggcgcagtcgccatgtttggagaaaaatatgatgatgtagtgcgcgttgttaatgtaccaggagtttcaatggaactttgtggtggcacacatgttaaaactacatccgaattaggttctttcaaaataattagtgaggaaggaatctcagctggagtcagaagaatcgaagcattatcaggccaatcagcattagactatttcagtgatagaaatgcattagtaaaccaactaagtgatttgtttaaagcaaatcctaatcaactttttgaaagggttaatattttgcagcagagcttattaataagaataaagagatacaaaaaaatg

SEQ ID NO: 305875 - DNA, 787 bp, Unknown
  Bacterial polypeptide expressing nucleotide sequence isolated from the Sargasso Sea
acttctattgaagtaatagatgtatttcaagcaagcaatggcgcaactggtttaatcgttgattctgatattttcaaagtggatcaagaagttgagctatctgttaacaaaagttttagatctggtgtttctaaaagtcatacaggagcacatatagtccattcagcattgcgtaatattcttggagaccacgttgctcaagctggctcgaatgttacacctggtaaatttagatttgatttcagccataccgaaaaggtttctcaggaggagttagatgaaatatttgcattatctaatagtgcagtatttgaggattatgaagttaataccaatattatgaatattgatcaagctaaaaatgaaggtgcgttagctttttttggtgacaaatacgaagatgatgttcgagttgtaaatattggagatttttcaaaagaattatgtggtggaacacatgttcataattcacatgatgttggacttattgtactattacaggaatcttctataggttcaaaccttagaagggtagagatgctctcaggtaaactagcttatgaatttttatctaatgcttacaagtcatataaatctgtatcgaatattttaaaggtaagtgttgacgatgttcaaaataagcttcaatcacaattagaaactttggaaacttatgaagaaaaattcaaaaaagttagagaacaagaaatatcaaatcttgttagtaatattgatgaacataaaaaagaaataaataattacaaagtatatataaaagaagtgtctc

SEQ ID NO: 305876 - DNA, 637 bp, Unknown
  Bacterial polypeptide expressing nucleotide sequence isolated from the Sargasso Sea
tcttattcagttgaattatgtggaggaacccatgtaaaaagaactggagacataggtttttttataataataaatcaatctagtgttgcctcaggcattagaaggattgaagcaattgctggaatgaaatcaatagaatatataaataaaattagaaaaataaatacatcacttcaatccgaattaaatgtatccaatgaagatattcaagaaaaaattaaatctttagtagaagaaaataaaaaacttaaaaaacagtcaggaaaaaataaatcaaaagaatctataattttttccaaaacatacgaaatagatgattggaagttaatagttgaacaagttggaattgaagatacaaaagaacttagagagctagcagacaatcaaaaaaatacaaatgaaaaagtttgtgctgtaatttttaatgctgataaaaacaagattgcattagtctgtggagttactaaaaatctaacagatttaatatctgcacaggaagtcgtttcggtcttatcagaacaaattggtggcaaaggtggaggaaggcctgactttgctcaaggtgcaggtgaaacagaaaatataaaagatttcgtgacttctattgtagattcagtaaaatctctcgcaaaataaa

SEQ ID NO: 305877 - DNA, 803 bp, Unknown
  Bacterial polypeptide expressing nucleotide sequence isolated from the Sargasso Sea
ttaaggactgttttgggtgaccatgtagaacagagagggtctttggtaaatgaagacaagctaaggtttgattttgttcataagaaacaagtttcgaaagaagagataaaacaaattgaagcaatagttaattcagaaataagagctaatagtgaaaccattactgaaaccatgcccatcaaagaggctgaaaagaaaggagccttagctttctttggggataaatatggtgagcaagtaagggtattgtctatgggtggcgatttctctgtagaactttgcggcggtactcatgtacaaagaacaggggacataggttattttaaggtaatggcagaaactagcatttctgcaggtgtacgtcgaatagaagctctaacaggggaagccgctctaaatctttcacaagacagtcatgataatttagactcactagctctccagctgaacacttcttcagaacaggtttcagaaaaagtatcccaactcattgatgctaataaatcactcaaacaagaagtcgacaaacttaaatcaagtaatttgtcagctacagcttcagacttatcacttgagtctgaagaaattgaaggcataaaagtctttgcccacaagatggagggcctagattcatctgcgttacgagaaactgctgaccagctcagaaataaagaaaaaaattctttgatagtgctgatttctattttcgaagataagattcctatcgttatcgctaggcataaagatttagaaaaagtagatgcaagaaaagtgatgaaccacatggtaaacctcttaggtgg

SEQ ID NO: 305878 - DNA, 808 bp, Unknown
  Bacterial polypeptide expressing nucleotide sequence isolated from the Sargasso Sea
gcagaaattgagaggttagtaaatagtaaaattagagagaatttggaagtagagacaaaaataatggaaatatctgatgctattaattctggagccatagctttttttgacgaaaaatatagtgataaagttcgggttctcagtatgggcaacttctcggctgagctatgtggtggtacgcatgtatcgcagacgggtgaactaggattctttaaaattctttctgaatcctcaattgggtcaggaactaggcggattgaagctctttgtgggattgaggcagagcgtcacgcgagtaatattgaaaaattagtaagaattataagctctacccttgaaactccggaagtcaaaattctagataagttaggtttattgattgaagaaaaatctaatcttgaacgtgagttaaaaaaatataaagaatcctcattagataacattgttaacgatgtttatgagcgcgcagaagaaattaataatataaaatttgtttttgctaaattagataacgttgagcctaaagagctaaggagactcgcagacaatttaaaaaatcgcccaacagcaaacggtattattgtagtcctagcttcgtctttgggtaagaaacttaggttagtagtgggagtcagtaaaaaattatcaaacaacattagtgcggtggagttgataaatcacatggtgaagcaagatggtggaaaaggcggtggtaggtccgacttagcgcaagctggtggggagtttattagcgagtttaaagatttaatagagtttggtaaagactggatcactgaaaatatatgag

SEQ ID NO: 305879 - DNA, 121 bp, Unknown
  Bacterial polypeptide expressing nucleotide sequence isolated from the Sargasso Sea
gacgaagatggggatcgattatgtgagatttggaatttagtgtttatgcaatatgagcaagtttcaaaagacaaaagaatagtttaccaaaaccatccgttgatactggtatggggctaga

SEQ ID NO: 305880 - DNA, 172 bp, Unknown
  Bacterial polypeptide expressing nucleotide sequence isolated from the Sargasso Sea
atggccgacaaatcactaaatcaaataagaagtacatttttaaaatacttcgaaaagaatgaacataaaattgttgaatctagcaatctagtaccaagcaatgatcctacattaatgtttgataattcaggaatggttcaatttaaaaatgtttttacaggcttagaaaaaa

SEQ ID NO: 305881 - DNA, 280 bp, Unknown
  Bacterial polypeptide expressing nucleotide sequence isolated from the Sargasso Sea
gcagatcatttacgtgctagctcatttttaattgctgaaggtgttttaccatcaaatgaaggtagaggctatgtgttaaggaggatcatgagaagaggaatgagacactctcacctacttggttctaaagagccaattttttttaatatatttaaaactcttaaagatgaaatgaaaggtaattactcagagatagagagagcagaatctttaataaaagaaacactgagaatggaggaagaaaaatttttagttctattagatagaggtataaaaattt

SEQ ID NO: 305882 - DNA, 156 bp, Unknown
  Bacterial polypeptide expressing nucleotide sequence isolated from the Sargasso Sea
attgctggattcagtgatgataaaataataagaatttctacaaaagataatttctggtcaatgggagaaactgggccatgcggaccttgctcggaaatattttatgatcatggtgaaagttatattggcaaacctcctagtgaagcagatgaaacg

SEQ ID NO: 305883 - DNA, 778 bp, Unknown
  Bacterial polypeptide expressing nucleotide sequence isolated from the Sargasso Sea
gcagatcatcgcggacgaggaggagtcgttcgggaagacgctgctgaagggcatcgagcagttcaagaagatcgccgcgaaggcgcgggaggaggggcgcgacgtcatcgacggcgcgtcggcgtttctgctgtgggagtcgttcgggttccccaacgatctcaccgagatcatggcggaggagatcggcatgaaggtggacggcgcggggttcgaggcggcgtttgcggcggcgcaggagaagagccgccagggcgggaagaaatccaccgggcccagcctcctcttcgaggcggaggcgacggcgtggctgcaaaacaacggcgtggcgacgacggacgacgagcacaagtacgcgcccggcgccaacccggacgccacgatcaaggccatcctcaccctggacgggttcgtcgagaccaccgagtccgtccccgcggaccagcccatcgggatcgtcctggaccggacgagtttctacgccgagtccggcgggcaagtcgccgacgtcggcacgctgcggtgccccggcggcgcgctcgccgtctccgacgccaaggtcgccgcgggcttcgtcctgcacgccgtctcgcccgagggccggtgcgccggcgcgatcaaggtgggcgacgggtgcgccgtcctcgtggactacgaccgccgctcgaagatcgcgcctaaccacacgatgacgcacgtgctgaaccacgcgctgcgcgccgtgctcggcgacgaggtggaccagaagggctctctggtggacgacgagaagctccgc

SEQ ID NO: 305884 - DNA, 803 bp, Unknown
  Bacterial polypeptide expressing nucleotide sequence isolated from the Sargasso Sea
acgcagctgatctgcgatggtgtcaccgccagcaacctgggccgcggctacatcctgcggcgcctgctgcgccgggtggtgcgccatggccgcctgctgggcatcgacaaacccttcctcgtcaccatgggcgaggcggcgattgctctgctgaagggggctcaccccagtgtgattgatcgccaggaggtgatcctggccgagctccagcgtgaggaagcccgcttcctcgagacccttgagcgcggtgagaagttgctggcggaggtgctggcctccaagcccacccagatcagtggtgcccaggccttcgagctgtacgacacctatggcttcccgctagagctcacccaggaaatcgccgaggagcagggcctggccgttgacctcgatgggttcgaggcggcgatggaggaacagcgccagcgggccaaggcggccgcggtgagcatcgatctcaccctgcaggatgcgatcgaccaggtggtggcggatcaggcggccacctgtttcgagggctatgaagctcttgatcaagcctcctgcgtgcaagcgttggttgtgaacggtgagccagccagcaccgccaaggcaggtgatgcggttcaggtggtgctcgacaccacgccgttctatggagagggcggcggtcaggtgggcgatcgcggggtgcttgcgagcagcgatctgattgttcggattgagtcggtgagccgcagccgcgatgtcttcgtccatgccgggcgggtgaaacgcggcgagctagccttgggcgacaccgtgagggcccaggtggaccgtgc

SEQ ID NO: 305885 - DNA, 736 bp, Unknown
  Bacterial polypeptide expressing nucleotide sequence isolated from the Sargasso Sea
ggtgctttagccttatttggagaaaaatataccgaagaggtgcgtgttgttggaatgggggatgttcaagggaatacttattcgacagagttgtgtggcggaacccatgtaaataggaccggtgatattgggcagttcaagttgctttctgagagtggagtatctgctggtatacggcgtattgaggctgttgttgggttagctgctaatttacatactaattcgatccagaattcattaaatgaggttgccgctttgttgaaagtgacacccttggaagtaccaagtcgtgtagaaatattaattcaggaaagaaaaaagctagagaaagaaatgaatgacttgagaagatcttttgcggcaggtgatgattctaaaggaaaaagtgagttagcaaagaatatctctggcatcaactttgttggcagaacattaacagatgttccaccaggccaacttaagagttttgctgatgaattaatggccaaaatagataacgggatagttgtcgttctaacaaataccaaaggaaaggcttctttagttatcaaagttagtgaagacttgtcgggtaaaattagcgctgtggaattatgtcaaattggatccaagattttgggaggaaatggtggaggtggtcgacctgaaatggctcaagcaggaggtcctaatagttcttcaataccactcgcactggagacaatcgaaaccgcaattagggacagaagtatttagg

SEQ ID NO: 305886 - DNA, 99 bp, Unknown
  Bacterial polypeptide expressing nucleotide sequence isolated from the Sargasso Sea
agttttctggagaaactgcttttaaattatatgacacgtatggatttccgttagacctaacacaggatgccttgagagagaagggtcggggttgttaac

SEQ ID NO: 305887 - DNA, 856 bp, Unknown
  Bacterial polypeptide expressing nucleotide sequence isolated from the Sargasso Sea
tactgatgaagagttagtaactattgataagctagttaatgcatatgtttcaaatagttctgaggtaacaacaagaattatgacaccaaaggctgcaatcgaaaaaggagcgctagctttttttggtgaaaaatatggagaagaagtccgtgttgtatctatgggaaaggaaaaagaagcatacttttcaacagaattatgtggaggtacacatgttaaaaataccggtgatattggaaaatttaaaactgtaagccaatcgtctatcgctgcgggtgttagaagagttgaagcgttaagagataaacaacttgaggattttattaagaataaagaaaaattatcaactttatctactcaaaaagatgaagaaaccattaaagatttgtcatcgcaaattattaaacttggaggcaaaccaaatgttgataataaagatttaaaagaaattataaaaaatctttcacgacaacttgaacaactaaatgtcagttcagttcttcaagataaaactaaaaacattattaaagatgataagataaataatataaaagttagatttcaaaaagtgcaagatttacctcctaaagatttaagaaaattagttgataatggtaaaaaagaattaggggatggcattgtgattgtatttgcaagcagtgaaggtaaagttggcttggctgttggaattactgaaaaattagttgataaatatgatgcagtaaaatttgcaaaattaggatcagagacaattggtggaaaaggcggcggtggtagaaaagattttgctcaagcaggaggtcaagataagagcaaaattgatgaagcttttgaaaaaattaagtctttaatttaa

SEQ ID NO: 305888 - DNA, 843 bp, Unknown
  Bacterial polypeptide expressing nucleotide sequence isolated from the Sargasso Sea
ataacaaattatattatgatagatataggcagacctttacatgcgtatgatatagacaaaattaaaggtaaaactcttagaattacaaaatctaataaaggcgaaaagttttttgcactaaatggaaacgcttacgagttagatgataacatgcttgttatttgtgatgagcaaggtgttgacgatttagctggtattatgggtggagaaagaacgggcgtcactaaagatacaacaagaatgtttttagaggctgctatttttgactctgtttcaatagcaaacactggaagaaaactaaatttaaattctgatgccagatatagatttgaaagaggtttagattataactctccagagttagtaatgaattatgcagcagagatgattaataaaatttgtggtggaaaatttagtaaaatagtcaatttcaaattagaacaaaaaaataaaataattaattttgaaccaaatattatttatcaattaacaggcgttaaaattgaaaacaaattatctaaatcaattttagaaaaattgggtttcaaaataatctctgaagataatatttggaagataatacctcctacttggaggccagatatagatggaattgcagatattgttgaggaaatcgtcagaataagtgggtatgaaaaaattccttctataaaattgtcaagaagtaattatattgcaaagccagcgatgagtactaagcatcgtcaagctttttttgcctcaagaatacttgcaagtaggggctataatgaagtaattactttttcatttttgaataagacattggctaaacaatttaatggagggggattggctttaaat

SEQ ID NO: 305889 - DNA, 865 bp, Unknown
  Bacterial polypeptide expressing nucleotide sequence isolated from the Sargasso Sea
gaagctgaaataaagagtatattcttggattcgacattagttaagcaagcaagtgaaggtcagaaagttttaattgttcttgatgagacaactttttatggagaatctggcggtcaagttggtgatattggaacgatattttcaaaagatttagaagtattagttgataacgttattcgaaagaaagatgtttttttacattatggaacgatcaaaaaaggaatattaactattggacaaaaagttaagactaatgttaaatcctcaaatagagccaaagctgctgcaaatcatacagctacacatttattacaatctgctctcaaatcaattgttgatgaaagtgttggacaaaaaggttcattagtagcttttaataaattaagatttgactttaattcttctaatcctatttctaaagatcaaatttttaagattgagagtcttgttaattcctggattatggaaaatcatatcctagaaataagaaatatgtccaagagtgaggctcttgagaagggtgcaacagcaatgtttggagaaaaatatgatgatgaagtgcgcgttgttaatgtgccaggagtttcaatggaactttgtggtggcacgcatgttaaaactacatccgaattaggatctttcaagataataagtgaggaaggaatctcagcaggagtcagaagaattgaagcattatcaggtcaatcagcatttgactatttttgtgataaaaatgctttagtaaatcaactaagtgatttgttaaaagcaaatcctaatcaactttttaaaagggttaataatttgcaagcagagcttattagtaaaaataaagagatacaaaaattgaaagatgaaatagcct

SEQ ID NO: 305890 - DNA, 746 bp, Unknown
  Bacterial polypeptide expressing nucleotide sequence isolated from the Sargasso Sea
attatttggagaaaagtatggagaagaagtaagggtggtttttatggaaaaagaaaataacggttttttttcaacagaattatgtggtggtactcatgttaaaaatactagagaagttggaaagtttaaagttataagccaatcctcaattgcatcaggtgttagaagagttgaggcattaagagacaagcaattagaggcatatgaaaaaatacaaaaaaaagataagtctcaaaaagaaactaatattaaaaatgaagttgagcttgttaaaaaagaacttcaaaaattaaaaattaatcctgattttaaagaaaatctagatttatctgaaaatttaaaaaatttaaataaacaactaagtaaagtaagaattgaaattattaagagagataaaagtaaaaatatagttaaggataaaaaaatcggaaatatattaataagagagcaaattttaaaagattttcctccaaaagaacttagaaaagtaatcgatgaaggtaaaaaagatattaaatcaggaattgtaattagtgtttctatttttgaagataagattggcttggctgttggagtctctaaagatttgacctcaaaatatgacgctgtagttctagcaaaagctgcttctgttattttaggaggaaaagggggcgggggcagaaaagattttgcccaagcaggcggtgtagataaaagtaaaatcgaggaagcttttaaagaaatatctaaaaaaattagttaag

SEQ ID NO: 305891 - DNA, 202 bp, Unknown
  Bacterial polypeptide expressing nucleotide sequence isolated from the Sargasso Sea
atggctgacaaatcattaaacgaaataagaaatactttcttaaaatattttgagaaaaatggccatacaattatcgactcaagcaatcttgttccaaataacgatcctacattaatgtttgcaaattctggaatggtccagtttaaaaatgtatttactgggcttgaaaagagagagtatcaaagagcaacaacatctcaaa

SEQ ID NO: 305892 - DNA, 164 bp, Unknown
  Bacterial polypeptide expressing nucleotide sequence isolated from the Sargasso Sea
tatgaaatctaatcacgtccgtaatgcattcatagattattttaagaacaatgatcataaacatttaaaatcaggatctctgatcccagagaatgacccttcgttaatgtttgcaaactctggaatggtgcaatttaaaaatgttttcactggtatggaaaaaa

SEQ ID NO: 305893 - DNA, 711 bp, Unknown
  Bacterial polypeptide expressing nucleotide sequence isolated from the Sargasso Sea
caatgaattcaggtgcaatggcactttttggtgaaaagtatgatgatgatgttagagttctcacaatgggtgagaactcttattcagtagagttatgtggtggcactcatgttgctagaactggtgatattggattctttatcgttacaacacaatcaagtgttgcttctggtataagaagagttgaagctgttgctgggatgcaggctttaaactatataaaaaaattaaaagaagttaattcctcaattcaaaaccttctaaatgtctctgcaaatgatatacaagataaaataaaatcactcattgatgagaataagaatttaaaaagtaaagaaaataaaagcacaaaaagagaaatagttttttcagaaagttttgaaatcaatgattggaaactagttattctgcaagttcaattagatgacaccaaagatttaagattaatagccgacgagcaaaaaaatacaaacgaaaaagtttgtgttgttattttttcagaacaaaataataagattgcccttgtttgtggagtcactaaaaatcttacagataccttatctgcaaaagatatagtttctgttgtatctgaaaaaattggtggcaaaggtggtggtagacctgattttgctcaaggagctggcgagtctaaaaatattaaagatttcgtgacatctatccaagattcagtaaaatccctcgctaaataga

SEQ ID NO: 305894 - DNA, 814 bp, Unknown
  Bacterial polypeptide expressing nucleotide sequence isolated from the Sargasso Sea
attgagagttcaacaaattgaaaatttagttaatgaaactattagaaataatatctctactaaaatagaaactatgagctttaagaaggcgcaagataaaggtgcgctggctttttttggagataaatatggcaatgaagtacgcgtactttctataggcggagacttttctattgaattatgtggtggaactcatgttgattcagcaggggatattgggtttgtaaaagtaactagtgaatcaagtatttcatcaggcgtcagaagaattgaggcttgcagtggaaaagacgcggaagatttctcaaataagtttcaaaattctgggcaagaagcaatgaaacttttgaacgtgaatgaagagggtcttatttcaaaaattaaagagttgatggagaaaaacagcaagttagaaaaatcaattaaattatcgcaacaaaaagaaataggcgaagtaataaagagtcttgaacaggatattattcaaattaattcttacaaagttattctaaaggaattggaaggaattaacttaggttcagcaagatctttaatagacgaactaaaaaataagaacgaaaacttaatttgtgttcttgcttcaaaagatggcgataaatctagcctattggtttcatcttcaaaatcaattccaaaagatgttttcaattcaaatgatttgttacaatccctcgcttcattgataggcggtaaaggtggaggtaaaccagatcatgcacaagcaggtgggagtcaagttaaaaactttgaaaaagttttttctgaagctactaaatatattcaaaatctttaa

SEQ ID NO: 305895 - DNA, 429 bp, Unknown
  Bacterial polypeptide expressing nucleotide sequence isolated from the Sargasso Sea
attccgctttgagggaagttttaggtgataaagtttttcaaaaaggttcattggttaatgatgaaaaattgagatttgattattcacacggtgtgaaacttactaaatctgaaattgaagaaattgaaaatatcgttaatttggaaatagaaaaagccacttctacagaaactaaattaatgagctatcaagatgctatagattctggcgcattagcgttctttggtgataagtatggagatcaggtaagagttgtaagtcttggcggagagttttcagtagaattgtgtggcggtacgcacgtaaagaatacttctgagatagaagggtttattatatctaatgaaacttctgtatcatcaggagtaagaagattagaagctatgactggatacaaatttaataaagaaatcaaaagaagctattagc

SEQ ID NO: 305896 - DNA, 671 bp, Unknown
  Bacterial polypeptide expressing nucleotide sequence isolated from the Sargasso Sea
tgattttaactattttgaggcaatcccaatagaagagttgcaacagattgagcaggttgttaatcatgaaattatgaaaaatacggcagttgaaacgcgagagatggcattagcagatgtgcaaaataatccaagaattcaggcggtatttgatgataaatatggtgatagagttagagttgtgggtgttggcaatttttctcaggagctttgtggaggaacgcatgttcaatttacgggagatataggttcatttcgtattgtttcagaaagttctattgcatcaggtgtaagaagaatcgaggcggtgacaggtatggaggcggttgattggactgcagaagaacacgagttgctgattggggttagtcaaaaattgagtgttaagccaaatgaattacctgctagaattatttcattaaacaatcaattacgtgaagctgagaaaaaaattaaaagtatgcaatctcagttggcaacatcaaatattgactcttatattgagaatctaatagagattaatggggtgccttttctatcgcttcatattggagagttgccaatggataatttgagacaggtgttagatcaattaagacaaaaaatttcttctggtgtagtacttgttgcaagtgagagttctggtaaagcatgttttgctacgagtatat

SEQ ID NO: 305897 - DNA, 843 bp, Unknown
  Bacterial polypeptide expressing nucleotide sequence isolated from the Sargasso Sea
aaattaataacatagtaaatgaaattgtagcaggatcttctgaggttcaaacaagaattatgaccccgaaagaggcagtgaaaatgggtgcccttgcattatttggtgaaaagtatggagaggaagtaagagtggtttttatgggaaaagaaaataatggttttttttcaacagagctttgtggaggaactcacgttaaaaatacaaaagatgtcggcaaatttaaagttatcagtcaatcttcgatagcgtcaggagttaggagagtagaggcgttaagaggtaagcagttggaagattatgaaaaaatacaaaaaaaagataaatatcaaaaagagtctgatctgaaaaatgagataaaatcaattaaaaaagaacttgaaaatttaaaaatcaaaccaaattacatcgaaaatttagatttacatgaaaatttaaaaaatttaaataaacaaatttataaaataagaattcaaaacataaagaaaaataagagtaaaaatataattatagataagaaagtcggcaacatattagtaagagaacaagttttaaaagattttccaccaaaagaactaagaagtataatcgatgagggaaaaaaagagattaaatctggaattatagtcagtgtttccacttttgaagataaagttggtttagctgttggagtctctcaagatttgatctcaaatttcgatgctgtcgaacttgtaaaagctgcatcaactattttagggggcaaaggaggcggtggtagaaaagattttgcccaagcaggaggtgtagataaaaataaaattgaggaagcttttaaagcaatattagagaaaattaattaag

SEQ ID NO: 305898 - DNA, 847 bp, Unknown
  Bacterial polypeptide expressing nucleotide sequence isolated from the Sargasso Sea
aattttgaatgagataaaaattgaagaagtcaggtttagggaaactcttgaaagaggagagaaattgctagatgagttaatttcttcagggcagaaattgatttctggttttaaagcttttgaactttatgatacttatggatttcctctagaacttactgtagaaattgctgaagaaaatagtatcagtgtagatgtaaagggttttgaagaagaaatgaatgcacaaaaagagagggctaaagctgcttcaagtaatattgatttgacattagagggatcattagagcgagaaatagatctttttaacaaaactgtttttaatggttatgatttacttctttcggaagctgaaataaagggtatattcttggattcaacattagttaagcaagcaagtgaaggtcagaaagttttaattgttcttgatcagacaactttttatggagaatctggcggtcaagttggtgatattggaacgatattttcaaaagatgtagaggtcttggttgataatgttattcgaaagaaaaatgtttttttacattatggaacgatcaaaaaaggaatattaaatattggacaaaaagttaagactaatgttaaatcctctaatagagctaaggctgctgcaaatcatacagctacccatttattgcaatctgctctcaaatcaatcgttaatcaaagtgttggacaaaaaggttcattagtagcctttaataaattaagatttgactttaattcttcaaatcctatttctaaagatcaaatttctaagattgagactttagttaactcttggattatggaaaatcatatcctagaaataaaaaaatatgtctaa

SEQ ID NO: 305899 - DNA, 773 bp, Unknown
  Bacterial polypeptide expressing nucleotide sequence isolated from the Sargasso Sea
aacatagatactggtatgggtttagagagaatagcaatgattatgcaagaaaaagaatctttgtttgaaacagatttatttagttcaatacataaagaactatcaaaaaaaataaaaaactcaaatgctaaatatgaaaaaatcattttagatcatataaaagcatccacttttatgcttagtgatggtgtagttcctactaacgaaggtagaggttatatcttaagaagacttattagaagagctttaagagcttacaataaattaactgaggaaccatcgtcactcgattttcttatcaaagaagttacaaaattgtacagcgaaccttatcctgaacttgataataatattgaaaaaataacaaaattatttaaaactgaagaggatttatttggcaaaacattagataaaggaatccaagaaattaatacaattcttgaaacaggtgaactatctgcaaaacaagctttctatctatttgaaacttacggttttccttttgaattaactcaagaaattgctcttgagaacaaaataactctaaatgaagaagaatttcaacaatatttcgaaaatcataagattaaatctaaaggttcctctactaaaataaatcaaaatatgaaattagatatagataccaatgatttctgtggatatgaaacaatagataccgtatctgagatatatcatgtagaacctctaaaaaataaatctataatatttaccaaaataaatccattctatttcgaagcaggtggacaaatttc

SEQ ID NO: 305900 - DNA, 847 bp, Unknown
  Bacterial polypeptide expressing nucleotide sequence isolated from the Sargasso Sea
attaaaaaagaggatatttatgtatctgtatttgaaggatcaaaagaggataatcttgaatttgatcaagtagcttttgacgaatggaaaaagttttttagtgaaaacagaattataagtggtaacaaaaaagataacttttgggagatgggagatgtaggaccttgtggaccatgttctgaaatccacattgatctaagatctgaatcagataagaaaaaaattaaaggagcggatcttgtaaataaagaccatcctcaagttgtagaaatatggaatctagtattcatccaattcaatagaaagaaagatggatccttaataaaacttgataaacaatatgtggatactggaatgggacttgagagactttgtatggcactacagaaaaaagagtcaacttacgacacggatttatttgcagatattattaaaaaaattgaagatatttcaaataaaaaatatttgtcaggtgatgaaaatattgatattgctataagagtcatctctgatcatattagagccttaatattcacaatttcagatggtcaaataccaagcaataatggacctggatatgttatcaggagaattctaagaagagctataagatatggatatacaaatcttgacataaagactccattcatctatgaacttgttgatgtagtaatctcaaaatatctgactatttatcctgacttaaaaaatcagagtgaatacattacctcattaattcatgaggaagaaaaaggtttcctcaaaacattaaatcaaggtctttcccttataaatcaaattattgagtctaatccaaatgataagaaaattagcggtgaagattctt

SEQ ID NO: 305901 - DNA, 700 bp, Unknown
  Bacterial polypeptide expressing nucleotide sequence isolated from the Sargasso Sea
aagcggggcagaggcatgtttggtgagaaatatgatgatgaggttagagttgttgatttaggagataaattctcaattgagttatgcggtggtacacatgtaaagaggactggagatataggaactttctttattaccaatgagtcaagcgtagcatctggcgttagaagaattgaagcagttgtaggaaaagaagcactaaatttaatcaataactctatggaatctctaagagaaatacaaaaacttctaaaagtgccagctagtgagataagttcaaaattagcaaaaattattgatgaaaataagcaattaaggaaaaatcaatctgctaaagtttctaaaccaaaggttattaaaaaaagtattattaaatctgctaatgcatcatttgagattatgcaaattgatgaagacgaaattaatattttaagagcccagtctgatatattaaaacaagaaaataattcaaattctcatatcatttttggtattgggaaagacaaatcatcaatcgttatttctgtagtagatgcaaaagttggcactttctctgcaaaggaactattgtcccaaataatagcatctttggggggtaagggaggaggcaaagatatttttgcacagggcgttattgaaagtactgacccaaaaagtattatgaattcaattgatgatgttataaactcctcgctctaaa

SEQ ID NO: 305902 - DNA, 577 bp, Unknown
  Bacterial polypeptide expressing nucleotide sequence isolated from the Sargasso Sea
tatgtttgttattcttagcgaatccagcgtttcatcaggagttcgaagaattgaagctgtcacaggtgctaaggcattagaactagtactcgagatacgatctcaactgcaagatgttcaaggaatattaaatgttggagcttctaaggttagctccaaagttgaagacttggttaaagaaaataaatccttaaaaaaaggtaatacaagtaaagctaaatcttcagtggatcttaaagaagtgattcataaaattaagaaccttgatttggttttgatagaggcagatacccaaaatatccaagatttaaggctgctggttgatagttctaaaaaagaccaatcgcaaagatgcgttttaatcttgagccaccaagattctaaagttgtgatggtctgcggagtgactgaagatattcaagaatcattgagcgccaatgatgttattcaagcaatcgccaaggcctctgatggaaaaggtggtggtcgcaaggattttgctcaaggagcaggtgtagctgataattttgaagaatttgttaattctattcctgatatcgtacaatccatcgcttaa

SEQ ID NO: 305903 - DNA, 231 bp, Unknown
  Bacterial polypeptide expressing nucleotide sequence isolated from the Sargasso Sea
gaagatggggatagatttatagaaatttggaacttggtctttatgcagtttgaacaagttacaaaagataaaagaattaatcttccaaaaccatctgttgatactggaatgggattagaaagaattgcagctttattacaagggtcacatgataactatgaaacagatcattttaaaaaaataattaattctgcatctgaaattgtaaaagttaaatcagacaaatctaat

SEQ ID NO: 305904 - DNA, 646 bp, Unknown
  Bacterial polypeptide expressing nucleotide sequence isolated from the Sargasso Sea
gagttatgtggcgggacgcacgtcgaacgtacgggcgatattggcgcatttaaaatcacttcagaatcaggcattgcatctggagtaaggcgcattgaagcaaccacaggcataggcgcactcgattggattgagagtaccgaagataagttgcagcgaatagcaaaacttttgaaatcggatacagaaaccgttgattccaaactaaccgcacaacttgaaaaaaatcgtaaacttgaaaaggaactactagatcttaaaagcaagctaacgagttcagcgggttcagatttaattcaaaatgctgaagttatagatggtataagtattattgcgagatcccttgataataccgatccaaaaaatcttcgtgatgttgttgaccaactaaaaaataaattagggacagctgttttggttctagcgacagtcaatgattctaaggttagtttggttgcaggagtaaccaatgatacaacaagtcgaattaaggccggtgaactggcaaattttgtcgccgagcaggttggtggtaaagggggaggtcgccctgatatggctcaggcgggaggagataatccaaaggagcttgaaagtgctctagcaaaagttccgcaatgggttcgtgatcagctagaaagttaaa

SEQ ID NO: 305905 - DNA, 732 bp, Unknown
  Bacterial polypeptide expressing nucleotide sequence isolated from the Sargasso Sea
gccgcggctcatcctgcggcgtctgctgcgccgggtggtgcgccacggccgcctgctgggcatcgacaaacccttcctcgtcaccatgggcaaggcggcgattgccctgctgaagggggcccaccccagcgtgatcgagcgccaggaggtgatcctggccgagctccagcgggaggaagcccgcttccttgagacccttgagcgcggcgagaagttgctggcggaggtgctggcctccaagcccacccagatcagcggtgcccaggcctttgagctgtacgacacctatggcttcccgctggagctcacccaggagatcgctgaggagcagggcctggccgttgacctcgatggcttcgaggcggcgatggaggaacagcgccagcgggccaaggcggccgcggtgagcatcgatctcactctgcaggatgcgatcgaccaggtggtggcggatcaggcggccacttgtttcgagggctatgaagccctcgatcacgcctcctgtgtgcaggcgttggtggtgaacggtgaaccagccagcaccgccaaggcgggtgatgcggttcaggtggtgctcgacaccacgccgttctatggagaaggcggcggtcaggtcggtgatcgcggcgtgcttgcgggcagcgatctgattgttcggattgagtcggtgagccgcagccgcgatgtcttcgtccatgcagggcgggtggaacgcggccagctcgccttggc

SEQ ID NO: 305906 - DNA, 1918 bp, Unknown
  Bacterial polypeptide expressing nucleotide sequence isolated from the Sargasso Sea
ttgcttgtagctaaccgaggcgaaattgcatcgagggtttttaggactgcaaaaaaaatgggcctcagaaccgttgcaatatacaccgaagcagacaggcattcaccctacgtaggcgatgccgatctatctgtaaaaatagaatcatcgtatctcgactcagatgcgattatttctgcagcaaagaagtcaggtgctgaagccattcatccgggctacggattcttatccgagaaccatgaatttgcaatgagggttcaaaatgaggagatcgtctgggttgggcccgatccacagtcaattcaaatcatgggcgataaaattgaagcgaagaaacatgccattaaggccaatttgccaatattggaatcggtcaatgacgcaagctctgttaaaaacataggttatcccttgatgatcaaagcagctgctggaggcggtggaaaggggatgcgtattgttcgtgatgaatctcaactcgaagaatcaatcaatctggctaaaaaggaagcattgaatgcattcggcgatgatcggattttcattgaaaaatacattgaacgctccagacacattgaggttcaggttattgctgacaagcatggcaattttcttcaccttggcgaaagagagtgctcaatacaaagaaggcatcagaagatcattgaggagagcccttcatccagaatcgatcctaaacaaagagaaaaactcacaaaagcatcaatatcattggcaaaacaaatcaactatgtttcggctggaaccattgagtttttatacgacgacgactcagatgaattgtggtttttggaaatgaataccaggcttcaagtggagcacccggtgacggaaatggtcaccggtatagacatcgtcgaaatgcaactaaaaattgcagaccatcaagccattgaattttctcaatcggatgtcctttttaatggtcactccatcgaagcaagaatctatgctgaagatcctgtaaatgattttcttccatcgaatgggaagctcattgcggatcgaaaacatctctcgaatgaaatccgttgggacacaggtgtatccgaaggaatgacgattggtaccgattttgatccaatgttagcaaaagtgatttctcatgatgtaagcagagatctcgcagcttcaaaacttgcaaaagaactagaaaaaacccattttgggggatttccaaataacattgattttctgataaatattctaagagatgagaattttttaaaaggagacacaaccacagattttatagatcgatgcaaaccatcacgttcgatagaactcgattttgttgaaacaaactttttgctgacttctgctgcattgtggttgcaacacgaaagccgcaccaatgctaatgtcttaagtcacattccctccggatggcacaatgcgagacttccgcatcagcgagtctctttttcgattgacgatcaagacatcacagtgcggtacaaaagaatgagagacggttcatttgttaatgacaataatcagattgccgtcattaatgaagtgacagatcaatccattgacattgaattcgataaaattcgaagaatagtcaatattactaaacacgatgacttgctcttgatacaacatgaaagagggaataagttgatcgaattgctccccagatttaagaacgatcaggaattggtgcagaaaggctcattggtttctccaatgcccggtaaggtcatggaaataaatgtaaaggtcggagatgacgttattaaaggacaaacactgcttgtgatggaggccatgaaaatgaatcaatccatttcctccgatcaagatggaattgtagaggagatttatgtcaatgagggcgatcaactggaaaccggaacatcgcttttattggtaaagtccagcgatgaatgac

SEQ ID NO: 305907 - DNA, 175 bp, Unknown
  Bacterial polypeptide expressing nucleotide sequence isolated from the Sargasso Sea
tatggcagacaaaacactcaatgaaataagaaatatttttctaaagtattttgagaagaatgatcacaagattgtggaatctagtaatttagttcccaataacgatcctactttaatgtttgccaattctgggatggttcagtttaagaatgtttttacaggattgaaaaaagag

SEQ ID NO: 305908 - DNA, 313 bp, Unknown
  Bacterial polypeptide expressing nucleotide sequence isolated from the Sargasso Sea
atgaattctaaccttatcagatctaatttcataaagttttttgaggaaaaaggtcactcttttgtccaatcttcatctatagttgcaaagaatgatccatcattaatgtttaccaatgcaggtatgaatcagttcaaaaacatctttttaggtaatgaatctagtaaagtaaaacgtgtcgctaactctcagaaatgtttaagagtttcaggaaaacataacgatttagaggaagttggtgctgatcactaccatcataccatgtttgaaatgctgggtaattggagttttggcgattatttaaaaaagagat

SEQ ID NO: 305909 - DNA, 166 bp, Unknown
  Bacterial polypeptide expressing nucleotide sequence isolated from the Sargasso Sea
tagactaagatttgactttagtcacaataaaccaattgaaaaagatgaaatggtcaaaataaataaaattgttaatgaaatggtcgaaggtggtagtgacgtacaaacaagaataatgacacctaaagaagcagtcggtttaggagccttagcattatttcggtga

SEQ ID NO: 305910 - DNA, 202 bp, Unknown
  Bacterial polypeptide expressing nucleotide sequence isolated from the Sargasso Sea
atggcagacaaaacactcaatgaaataagaaatactttcttaaagtattttgaaaagaacgatcataagattgtggaatctagtaatttagttccaaataatgatcctacattgatgtttgcaaattctgggatggttcagtttaaaaacgtttttacaggattagaaaaaagagattacgttagagctaccacttcacaaa

SEQ ID NO: 305911 - DNA, 272 bp, Unknown
  Bacterial polypeptide expressing nucleotide sequence isolated from the Sargasso Sea
aatgacatctcaattaattaaaaaaatagttactggagatgagataagaaatgcttttctaaaattttatagtgaaaaattacataaaatcattccaagtgcatctttaattccagatgaccctacggttatgctcacaattgcaggcatgctaccttttaaaccagtttttttaggtttaaaagaaagaccatcaaaaagggctacatctagccaaaagtgcatcagaacaaacgatatagaaaacgttggagttacagctagacatcaca

SEQ ID NO: 305912 - DNA, 184 bp, Unknown
  Bacterial polypeptide expressing nucleotide sequence isolated from the Sargasso Sea
atggctgacaaaaccttaaatgaaataagaaatactttcttaaagtactttgaaaagaatgagcataaagttgtcgagtctagtaatttagtacctaataacgacccaaccttaatgtttgctaattctggtatggttcaatttaaaaatgtattcacaggtttagaaaaaagagattatgtaa

SEQ ID NO: 305913 - DNA, 672 bp, Unknown
  Bacterial polypeptide expressing nucleotide sequence isolated from the Sargasso Sea
aaaaatatggagatacagtaagaacaatacgctttggaaaatcaattgaactatgtggagggtgccatgtgaaaaatacttcagaaatattatttttcaaaattattaatgagtctgctattgcatcaggaataagaagaattgaggcaattactggtgatgctgtcatttcacattttgagcagcaaagcatggttcttgataaaattggagatctaattaagaatcaagatccagtgaaagtctttgaaaactttgtaaatgaaaataattctctaaaaaaggaaatacaagagctaaatagatttaagattagtgctttgaaggaagaattgaagaaaattgttattaaaaaaaatgatttattttttttatctaaggaagtagacttagatgtgaaaaatatgaaagaactagcttttgaattagggagcgatatcaatagtctttatttagttttgggaacgaaaaaaaacaataagccgacgttgtgctgtttcatttctaaagatctcgtaaagtccaggaattacgatgcctctgaggttgtgaagaatttgtgtaaatatattgatggaagtggtgggggacaaaaattttatgcatctgcaggaggaaaaaaaatcagtggtttaaaagaagcattagatatctcaatatcttttttataaa

SEQ ID NO: 305914 - DNA, 1614 bp, Unknown
  Bacterial polypeptide expressing nucleotide sequence isolated from the Sargasso Sea
tttgaaaccgaaaattaaaaatgaaaatactaaatttgaaagaattgtattagaccatatgaaggcttctacatttatgctatcagatggagttgttcctacaaatgaaggaaggggttatattttacgtcggttaatcaggagggcaattagagctttttatggcttatcaaccaatattgaaagcttagagtttttaattaatcccataattgatgtttatgctgatcactatccagaattattaaagaataaagccaagatattaaaactttatttaactgaggaaaaattatttcataaaacattagaaaaaggaacaatcgaaattcaaaagttaattaaagataaaaaatcatttaatgaagagaaagcttttttcttatttgaaacatttggatttccatatgaattaacaaaggaaatagcatttgagaatggcattacacttgaagatagtaaatatatgaaaaaatttgaagaacatcaggctaaatcaagtacgtttaaaaaagaatcgactgaaaattcaaatattgaagttgattgcaatatttttacaggatatgaagaaacatcaactcttagtgatgtattgatggtaagtgtaaatgaattgtctacaactatttttatggaaaaaaatccattctatttcgaagctggaggtcagatatccgatcaaggcaaaattatttatgaagataatgaataccaagtagatgaggtaatccaaacaagttctggggctattgggattacaatcaatcaaagtttaaccatttctaaaggtgaaaagattgaatcagtagtggacgattcctttagaaggtctgtttcaaaaagtcatacgtcagcacatattgtacattcatctctcagacaaattcttggagatcatgtcgcacaagcgggttcatatgttgcaccaggtagatttagattcgactttagccattctgagaaagtatcatcagaacaattatctgaaatattcacattaagtaacaaaaatgtatttcaggatttagatgtttctacaaaagtaatgaatattgatgatgccaaaaaagaaggtgcattagctttttttggtgataaatatgaagacgatgtaagagtagtcaacataggggaattttcaaaagaattatgtggcggaactcatgtggggaattccaatgaaattggattaattgtattattaaacgaatcgtcaataggttctaatttaagaagagtagagatgttatctggttatgaagcttatgattttatgactaatgcttacaattcctataaaaatgtaagtaacattcttaaaactaacattgatgatgtgccatcaaaattagaaacctttttaaatacctatgaagagttaaaatcaaaaatagacaaatataagcaaattgaaaataatcagattgtagacagcatatcaaataatttaaacgtaataaacaaattaaaaacatatgttggctctattgaaactgatagcgttgatagtttaagaaatattgctgttacggccatcaataatgaggtagctgattatgtttacttgattgcaaaaattgatagcaaatatgtaattgttttcgatgaaaa

SEQ ID NO: 305915 - DNA, 646 bp, Unknown
  Bacterial polypeptide expressing nucleotide sequence isolated from the Sargasso Sea
tctgtcgaatttctgtgggggttgtcatgttaatcgaacaggtgatattggtttttttaaaatcataagtgagacaggtatttctgcaggggttaggaggatagaggcagtcacaggagatggagctagggaatttatctatcaaagagaacaggtgcttaaagagctcggtgaattggtcaagtcgggggtaaatgatctggtttcgaaagtgagacagattaatgagagtaatcgtgttttggaaaaagaaattgaatttcttaagcagaaaattgctaaaagcgctggaaatgaattggttgatcaagcaattgatctaggtgatgtaaaattattggttgcaaaagtggagggatttaacagcaaatctctacgagattctgttgatcaattgaaaaataaattaggcacatcagtcatcgtgctagcaacagtgagtgatgataaagtcagcatggttgctggtgttagtaaggatttgacgggcaaaattaaagcaggtcagctggtgaatatgattgccgaacaggtgggtggaaaaggtggaggccgacctgatatggcaatggcaggcggaacagaaagttctgctctacccgaagccttggaaagtgttgaaacatgggtaaaggctaaactttaa

SEQ ID NO: 305916 - DNA, 1918 bp, Unknown
  Bacterial polypeptide expressing nucleotide sequence isolated from the Sargasso Sea
ttgcttgtagcaaatcgaggagagatcgcctcaagggtcatcagaactgctaaaaagatgggtctgaaaaccgttgcaatttatacagaagcagacaggcattcgccatatgttatagatgctgatttatcagtaaagatagaatcatcttatcttgattcggatgccattatttctgcagcaaagacaacgggcgccggcgccatacatccgggttatggattcttatctgagaatcatgatttcgctacaaagattcaagatgaagggatcatatgggttgggcccaattctgactcgatccaaatcatgggagataaaatagaagcaaagaaacatgccattaaggccgaaatgccaatacttgaatcagtgaatgatgcagcttctgcaaaggatattggatacccattaatgattaaggcagctgccggtggtggtggaaagggcatgcgtattgtcgatgatgaatctcaactcgatgaatcgattaaacttgcaaagcaagaagcaatgaatgcatttggagatgatcgtatatttattgaaagatacattgaacgctctagacacatagaggttcagattattgcagacaaacatggcaatgttctccatcttggtgaaagagaatgctcgattcaaaggaggcatcagaagatcattgaagaaagtccttcgcctagaattgaccccgaacaaagagacaaactgacacaagcatcattgtcattggcaaaacagatcaattatgtatccgctggaaccattgaatttctatatgatgatgattctggtgagatctggtttttagaaatgaacaccagacttcaagtcgagcatccagtaaccgaaatggtcacaggcatagacattgttgaaatgcagctgaggatagcagatgaccaaccaataactatatctcaatccgaagtctcttttcaggggcactcaattgaagcaaggatatatgctgaagatccagcaaatgattttctcccctcaaacggaagactcattgcagatcgaaatcgcgatgacaaaaatattcgatgggatacaggtgtatctgaagggatgatgatcggtaccgattttgaccctatgctagcaaaagtgatttctcatgatgaatccagagaactcgctgcagcaaaactcagaaaagagctagaaaactgtcatttcggtggatttgtaaataacatcgactttctgataaacatactgggcaatgagagttttttgaacggtgatacgaccacagattttattgctcgttacaatccacctcgatcgatagaaatcgattcaaatgaaatgagctttctactaatggcaaccacattgtggttgcaacataaaaaccgatccaatgccgttgttttgggccacattccatctggctggcacaatgcaagacttccatatcaacagacttcatttgaattggatgaaacagaactcacagttcgatacaaaaggcagagagacggctcatttattgatgagaaaaatcaggttgccttcatcaatcatgtcacaaatgaatctattgatattgaatttaataagttaagacgaagagtcaatatcactcagtatgagaatttgctgctcgttcaacatgacaagggcaacaagttgattaaattgattcccaggttcaaaaatgaacaagagcttatacaaaagggctcattggtatctccaatgccaggaaaagtcacagagataaatgtgaaaacaggagacaaggttgagaaagggcagaatctgcttgtgatggaggccatgaagatgaatcattctatttcatcaaatcaagatggaatcgttgaggaaatttatgtccaagagggtgatcagttagaaactggaacatcattgttattcataaagtccggcgatgagtgat

SEQ ID NO: 305917 - DNA, 763 bp, Unknown
  Bacterial polypeptide expressing nucleotide sequence isolated from the Sargasso Sea
atggcattgtttggagaaaaatatagtgatgaagtaagagtagtaactatgggtcaagataatgaagttttcttttcaaaagaattatgtgggggaactcatgttaataaattaggtgaaataaataaatttaaaataactaatcagtctagtgtagcatctggaattagaagaatagaggctgtatctaatatttcggttgataaatatattacagaaatagaaaggaatttattagaaaaagataaaaatcaagataatcaaattgaagatttaaaaaataaaataaaaaaaattaattctgattataattttaaaaatcaatttgatgacaaaggtttattaattaaagaattaagtcagatacacgaaaaattaaaacaaaatatgtctatatcaaaaaatattgacaatattgttattaaaaaaatcaaagacttaaattttatatatttaattgctgaagattatcctagtaaatccctgaaaacatttattgatgagcaaaaaaaacaatataataaaaaaagtgtttcattaataatttcaaataatcaaaacaaactatctatagtattaggagttactgaagatattacagatattttcgatgcttcaaaagaaataagagaaatttcaactattctcggtggcaagggtgggggtggaagaaaagatctcgctcaaggaggtggatcaaacgttagtcaaattgaggaaagtttaaggtatgtagaagataaattaaattccattatttagt

SEQ ID NO: 305918 - DNA, 166 bp, Unknown
  Bacterial polypeptide expressing nucleotide sequence isolated from the Sargasso Sea
atgaaagccgccgaaatccgcgagaaattcctcaagttcttcgaatcgaagggccatacgatcgttcgctcgtcgagccttgtgcccggcaacgacccgaccctgctctatggcaattcgggaatggtgcagttcaaagatggttcctcggcgcggaatcgcgtcc

SEQ ID NO: 305919 - DNA, 721 bp, Unknown
  Bacterial polypeptide expressing nucleotide sequence isolated from the Sargasso Sea
atgactgaccttcttttcaatcaagatagttacttaaaagaaacagaggctagtattattggagttgaagaaaatattatacaattggatagaacaattttttatgcagagtcaggtggacaacctggagatcaaggtgagattgtattaaaggaccaagttctcaaagttgtagacactaaaaaaggatcaaagccgaatgaaattttgcatattgttgatggtcccatcgatcaaagcttaattaatcaatccgccgaacttaagatcaattgggaactcagatatgctcatatgaaaatgcattcgagttgccatattttgtgtagcttagttgatgcccttataacaggcgcgtcggttggaagtgctaaatcaagaatagattttgatgttgatccatcaatgctaaataaagaagagttaaatgagaagattagggatattattagtaaagactatcccataatcataaatcaaattacaggagatgaactaaaatcaaatcctcacttagctaaaggggctgccgtttcacctccagttatagataacaaagtacaaacagttcaaattggtgagggagaaaacattatcgatcttcaatgttgtggaggaacacattgccaatctacaaaagaaattggaccacttgagattggaaagattgaaaataaaggtaagagaaacaggcgaattaatataaggtttagttcatgac

SEQ ID NO: 305920 - DNA, 721 bp, Unknown
  Bacterial polypeptide expressing nucleotide sequence isolated from the Sargasso Sea
ggatttagaagatgctaagaattcaggtgcagaatctttatttggcgaaaagtatgaagatcaagtaagagtgttatctattggtgaagatgatttttctcttgagctttgtggtggaacacatatctcaagaacaggggatcttggtatttttataataacaagtcaaagcagtgtagcctctggtatcagaagaattgaggcattatctggtcctagagctcaagaatatttatcaaatcttaaaaatcaaactattcaactccaaaaactattaaatgctcctgctgaagaaattgaagataaggtgagtaagcttttaaaggaaaataaaagcttaaaaaaaggcggtaaaaccgctaaaacaaccacaattaaatcctctaatacacacgatattgataactttaaattagtaattgaagtagcagaatcagaggatatcaaagaattaagaccactacttgatgaaaaaacgaaaaatgcaaataactctatctttattcttctaagctctaaaaacgaaacattaactattctctgttccgtatcaaaagacctacaatccagaatttcagcaaaagatctcattaatgcgttaacactacctattgaaggcaaaggaggtggaagagtagaatttgctcaaggcgcaggcaagccttccgatagagaaaaatttgtttctgatatccctaatatcgtacaatcgctcgcataa

SEQ ID NO: 305921 - DNA, 373 bp, Unknown
  Bacterial polypeptide expressing nucleotide sequence isolated from the Sargasso Sea
attggcgagtcagcaaggtgctgatatgcttagtaatgcagtagagataaatggcgttaaagttcttattgcgaatttggaaggtgttgaagcgaagtcattgcgttcaatgatggatgacattaaaaaccgaattggtgaagggatcgtagtattaggtgtggctaatgacgcgaaagtgaatcttattgctggcgttactaaaaacctcactagtaaagttaaagcgggcgagctagttaactttgttgcatcacaagtaggtggcaaagggggcggtcgtccagatatggcacaggcaggcggtgaccagcctgaaaacttgggccaggcgctagattcggttaacgcttggttacaagataagctataa

SEQ ID NO: 305922 - DNA, 175 bp, Unknown
  Bacterial polypeptide expressing nucleotide sequence isolated from the Sargasso Sea
atgggccaaattttacttaccgatgtcaggaaaaaattcttagattattttaaaaaaaacaatcataagatcgtagactctagcaacttagtcccaaacaatgatcctaccttgatgtttaccaactcaggtatggttcaatttaaaaatgttttcacaggattgaaaaaagaga

SEQ ID NO: 305923 - DNA, 889 bp, Unknown
  Bacterial polypeptide expressing nucleotide sequence isolated from the Sargasso Sea
tttgattttagtcataataaacctattgaaaaagacgaaatgataaaaataaataatatagtaaatgaaataatagcaggagcctccgatgtacaaacaagaataatgacaccaaaagaagctgttagtatgggtgctcttgcactatttggagaaaaatacggagaggaagtaagagtggtttttatggggaaggaaaataatggttttttttcaactgaattatgtggaggtacacatgttagaaatactggagaagttggaaagtttaaagttataagccaatcctcgattgcctcaggtatcagaagagttgaggcattaagagataagcaactagaagagtatgaaaaaacacaaagtaaggataagtctaagaaagagtctaaccttaaaaaggaaatagagttaattaaaaaagatcttcaaaaattaaaaatcaaacctgattataaggaaaatttagatttatctgaaaatttaaaaattttgactaaacaacttaataaattaagaattgaaagtattaagaaagataagagcaaaaatataataaaggataaaaaaattggaaatatattaattcgggaacaaattttaaaagattttcctccaaaagaacttagagatattatcgatcaaggaaaaaaagatatcaaatctggaataatagtttgtatttctacatttgaagataaggttggtttagctgtaggaatttcacaagatttgacatcaaaatatgatgctgttgatcttgtaaaaactgcatctactattttaggaggcaaaggaggcggcggtagaaaagattttgctcaagcaggaggtgtagataaaaacaaaatcgaggatgcctttaaaggaatatttaagaaaattaattaag

SEQ ID NO: 305924 - DNA, 1271 bp, Unknown
  Bacterial polypeptide expressing nucleotide sequence isolated from the Sargasso Sea
agcctggcatgatattgagatttcagaattaatagaagattcagaggattattttaaagttactgactgcctagacgtatggtttgattctggggtgactcatgcaagtgttttgagtgaaaacgacgagttgaattttccagctgatttatatttagaaggttctgatcagcatagaggttggtttcaatcatctctgttaacaagcatggctattaatggagagcctccctataagggtgttttaacccatggatttgtagtcgacagcgaaggaaagaagatgtctaaatccataggtaatgttatttctccccagaagatatgggatacgatgggatcagatgtacttagagcatggatagcttccacagattacacgaaagaaattgtcctttcagatgacattctaaaaagaacttcagattcttatagaagaataagaaacacagttaggtttttattaggaaaccttagtgattttaaacatgatgatagtgtgagtaaggataaatttaccgagcttgataaatggatgatatctaggaccaaaagtctacaagaagaaataagaaaagattacgaaaactttcatttccatcaagcatttcagaagattcataatttttgtgcaaacgatctaggaggattttatcttgatatccttaaggacagactttacacagctaaaacagactgtgatgctagaagatcagctcaaacagcattatcaaatattttacaggctttattgagatggataagtccaatactgagttttacggctgaagaagcatggcttttaatgaaagaggatgaagaatcagttcatcttttagaatggtttgaagattggcatgattttggtgaattgaagatctctgatgacgactggaacaaagtcttagaaataagatctgaagtaaacaaacatattgaagaggccaggaatcaagaaattattggatcttctcttgatgcagacttagaattaaattgcagcaaagaacttaaagagtttcttgatatcttcgaagaagagctaagatttatatttatcacttctgatgcaaaagttaatttatcagaaaaaggaatcgtaactggcgtagagggcttaaagataaaagtagctaagacccaaaatcaaaaatgcatcagatgctggcatagtagaccagaagttggaacgatcaagcaccatgaaaccatatgccaaagatgctttgaaaacgtaaagggcaaaggtgaaataagactttttgcttaga

SEQ ID NO: 305925 - DNA, 934 bp, Unknown
  Bacterial polypeptide expressing nucleotide sequence isolated from the Sargasso Sea
ggtccttgcggtccttgttctgaaatacattactatgttggggatgaggttgacaatcaagatgcaagccatgtaaatcattcttctgattactgggagctttggaatttagtttttattcagaataatagactaaaagatggtacgcttgaagatttacctaagaaacatgttgatactggagctggactagaaagaatttgctctgttcttcaaggcaagaattcaaattacaaaacggatttattttcaaagactatatcagatttagaaaaaatatcaaaaacgaaatatgctgataatgaagtgacatataatgttatatgcgatcatattagaatgctatcatttgctatagctgatggagtattgccatcaaatgaaggtagaggctatgttgtaagaagagttttaagaagagcatctaaatttgtaatgaatcttgatattaaagaaccaattctatataaattagttcaatcagttgtttctacgatgtctgattcttattctgaactgacaacaaaacaagaacatatagaacaaacaatattaagcgaagaagaatcttttcttcttactcttgaaaggggagtgattcaatttgaaaaaattataaaaaactcttctaaaattataagcggttccgatgcatttaagctgtatgacacttatggattccctttcgatttaacagaattaatggcagaagaaaaaggaatgactgttgataaaaaaggttttgatgaagcaatgcagaagcagaaagatctcgcaaaaagtagtcaaaaatttacttttgataaaagtaatgttaaatggattttagataatgatggaagccattcagaatttattggctatgattcagaagaaagtcaaagcaaaataatgaagtgggcaaatgaagatgatcagatttttattgttttag

SEQ ID NO: 305926 - DNA, 979 bp, Unknown
  Bacterial polypeptide expressing nucleotide sequence isolated from the Sargasso Sea
agtaattaaatttattataaaagataacaaagaagtcaattatctctcggaaggcgaggaagggtatatagttttaaaccaaactcctttttatggtgagtcaggtggacagcttggtgatactgggactattaaatgtggagataataattttaatgtgacggatgtacaaaaaaaattcggggatatgtttatccattatggtaaagtaaaaaaaggtaaacttaatttaaatgataatgttgaattaggtatagactacgagcgaagaaaaaacattagagcatatcactctgcaacacatctacttcatgaatctttaaggagaactttaggtaatcatgtaatgcagaaaggatcacttgttgcacctgatagacttagatttgattttagtcacatgaaacccatatctgaaagtgaattagataaaattaataaaattgttaatgaaattgttgataataaaagcgaagttatcacaagactaatgacacctaaagaaggtatggaacatggagctttagcgttatttggagaaaaatatggagacgaagtaagagtagtgtttatgggtgaagaaggtaacaaatatttttcaacagaactatgtggcggaacacatgtaagaaatacaagtgaagttggaaaatttaaagttgtaagtcaatctgcaatagcatcaggtgttagaagagtagaagcattaagagataaacaactcgaaaaatatttgaatgaaaaagaaaaaaatttaaatgttgctagtcaaaaagatcaggatcaaatagatgatctgtcagatcaaattaaaaagttaggtggtaagcctaatacgagttcacctgataaaaaaataattataaaagaattaagtaaacaattggatctacttaatgttaaaaatgttcttggagacaaaaacaaaaatattattaaggatgagaatataaataatataaaagtaagatttcaaaag

SEQ ID NO: 305927 - DNA, 919 bp, Unknown
  Bacterial polypeptide expressing nucleotide sequence isolated from the Sargasso Sea
catcacactttctttgaaatgcttggcaactttagttttggagactactttaaagaggatgcaatccaattggcatgggatttcattaccaatgaactcaaacttgaaaaggatcgtctttgggtaaccatttttgaagatgatgatgaggctgcaagcatttggcttgaaaagattggagtatcagctgatagacttgttcgactgggcgaaaagtctaacttttggtctatgggtgatactggaccatgcggtccttgtagcgagatattttatgatcatggcgatcatatcgatggcggtcctcctggatcagatgatgaagatggcgatcgtttcgtagaaatttggaatcttgttttcatgcaatttgatagacaagcaaatggggagcttgttaacttgccaaaaccatcagttgatacaggtatgggattagagcgaattgcagcagtgatgcaaggtgtaagcagtaactatgatattgatttatttcaaaaaataattgctgcaataaaaaaccaatcagaaaaaggggaggagagtcactatagagtcatcgctgatcatattcgatcctcttcttttctcattatggatggagttacccctgataatgagggcaggggttatgttctaagaagaataatcagaagagcattgaggcatggtcatgatctggaaattgaatccccattctttttcaagcttgtagatgttttagcaggagaaatggggcaaacatatccagagcttctcaataagaaagattacatagagcgaatcatcttgatggaagaagagagattcgctgcaacgctttcacagggaatgagtttattacagaaagaatttgaccgatcaaatgatgaaatgatatcgggtgaattcgcattcaagttatatgacacatatggct

SEQ ID NO: 305928 - DNA, 1029 bp, Unknown
  Bacterial polypeptide expressing nucleotide sequence isolated from the Sargasso Sea
tatggctaaaacattaaataaaatcaggtcagcatttttggattattttgaaaaaaatgatcataaaataattgagtctagcaatttagtgccaaataatgacccaacattaatgtttgctaactctggaatggtccaatttaaaaatgtgtttactggactggaaaaaagagattatcatagagctacaacatctcaaaaatgtgtaagagcaggtggtaagcacaacgatcttgaaaacgttggctatactccaagacaccatactttttttgaaatgttgggaaacttttcttttggtgattattttaaagaaaaagctattgaacttgcgtggaatttaataactaaagaatttggtttagacaaaaataggctttatgtaactgtctaccatgacgatgatgaagcctttaattactggaaaaaaattgctgggttaagtgaagataaaatcataaggatagcaacatctgataatttttggtctatgggtgaaacaggaccttgtggtccttgttctgagatattttatgatcatggagaacacttagaaggcggtttaccaggatcaaaaaatgaggatggagacagatttatagaaatttggaatttagtctttatgcagtatgagcaaatttcaaaagataaacgaattaatctgccaaaaccatcagttgatactggaatgggtttagagagaattgctgcattgcttcaaggaactcacgacaactatgaaacagatcattttaaaaaaataataaaatctgctgcagaaattttaaaagtcgagcctaataacaataatttagcaagttttagagtaatagcagatcacttacgagcaagttcatttttaattgctgaaggggtattgccatcaaatgaaggaagaggttatgtactaagaagaattatgagaagaggaatgaggcattcccacttgcttggttctaaagagccaattttttataatatttttaaaactttaaaagatgagatgaaaggtaattactcagaaataga

SEQ ID NO: 305929 - DNA, 904 bp, Unknown
  Bacterial polypeptide expressing nucleotide sequence isolated from the Sargasso Sea
aatgatactcgtgcttatcatttctgcaacacatttattacatgagtcactaagaagagttttaggaactcatgtaactcaaaaaggttctttagttgaaccaagtcgcttaagatttgattttagtcatatgaaaccaatttctagtgaggaaattgataaaatagaaacatttataaattctatggtttcaaaaaaaacagatgttagaactagattaatgacaccagatgaagctgttgaaaacggtgcattagcgttatttggagaaaaatatggtgaggaagttagggtactttctatgggtgatgaaaatgggaagtatttttcaacagagctttgtggtggaactcacgttaaaaatactggtgatattggaaaatttaaaataataagccaatcttcaattgctgcaggagttagaagagtagaagctttaagagataaacaattggaagattatttaaaaaataaagaaaaattatcaagtatatcttcagaaaaaaatgatgaaataattaaagacttaactcaacaaataactaacttgggtggtaagccaacattagatcaaacagaccaaaaattattaattaaaaatttaacaaaacagttggaaactttatcagttaaattaattttgaatgataaaacaaaaaacaaaataaaagatgaagaaattaaaggagttaaaataagatttcaaaatgtagaaggtcttccacctaaagaattaagaaaacttgtggatgatggtaaaaaagaattgggagatggaatagtagtagtatttgctagcaaagataacaaagtaggagttgcagttggtataacaaataatttaactgaaaaatttgatgctgttaagtttgtaaaattaagttctgaaattattggtggccaa

SEQ ID NO: 305930 - DNA, 329 bp, Unknown
  Bacterial polypeptide expressing nucleotide sequence isolated from the Sargasso Sea
aatgaataccaatgagataagagaagcatttctagaattctttaaaagcaaggatcataatattgtttcttcaagttctctagtacccaataatgatgacactttgcttttcactaatgccggcatggttcagtttaaagatgtctttttaggccaagaaaaacttaaatattccagagccactacttcccaaaaatgtattcgtgctgggggtaagcataatgatcttgaaaatgtaggctatacacttcgccatcatactttttttgaaatgctagggaactttagctttggtgactattttaaagaggaggctatagtttttgcat

SEQ ID NO: 305931 - DNA, 985 bp, Unknown
  Bacterial polypeptide expressing nucleotide sequence isolated from the Sargasso Sea
atcccagcggtgtgtccgtgcaggcggaaaacataacgatctagagaatgttggttataccgcgaggcaccacacattttttgaaatgctcggaaatttcagttttggcgattactttaagaaggaagcaatttcatatgcatgggtgtatttgaccgatgtattaaaaattccagaatccaaactctgggtaacagtttttgaggatgatgatgctgctgctaatatttggttaaaagaaattggtatctcatctaagcagtttagtcgttgcggagaaaaagataatttttggtcagtaggcgacaccggtccatgtggtccttgtagtgaaattttttatgatcatggtaaagagatacctggcggaccgcctggctcaaaagatgccgaactggaccgctatgttgaaatatggaatttagtatttactcaatacaatcgtaattctgatggttcgttaacaccaattcctcacccttcagttgataccggaatgggtcttgaaagaattactgccgttatgcaaggggtgcacaataattttgagattgagttattcaaaaaaatcatcagtaagattcatagtttttgcaataccaagcagattgatatcgtatcaactcgtgttgtggcagatcatattcgttcttgttcctttttgttagcggatggcgttattccatctaatgagggtcgtggttatgttttaagacgaataattcgaagagcaattcgtcatggtaataaattaggattgaaggaaccattcttttacaaattagttgaggtgcttgagaatcaaatggggcaagcctatcccgagctatcaaaatcaaaaacgaatattgagagtgtcttacttaatgaagaagagcgttttgccgaaacgcttgatcaggggttgaaaattctggatgatattattgcaaagataaaaggcgatgaaattcaaggtgaagatgtttttcgtttatatgataca

SEQ ID NO: 305932 - DNA, 964 bp, Unknown
  Bacterial polypeptide expressing nucleotide sequence isolated from the Sargasso Sea
atttatgcagagtcaggtgggcaggttggtgatagaggtatgtttaaatctaaaaatgcagagggcagtattttagattgcaaaaaatctggaaaagtttttatgcaccttataaagttagacaaaggaagcttaaaaattgatgataaaattaaagttaacgtgaataaagaaaaaagagagaaaactgaagctcatcattctgctacccatttagtccatgctgcactaaaaagcgtgcttggagatcatgttaagcaaaagggttcacttgttgatgagcacaaacttagatttgatttctctcatgatgaacctctatctgacaaagagatatccaaaattgaagatttagtaaatcaagaaatactaaagaatttagctgtaagtaccaaaataatggatttggaagatgctaagaattcaggtgcagaatctttatttggcgaaaagtatgaagatcaagtaagagttttatcaattggtgaagatgacttctctcttgagctttgtggcggaacacacatttcaagaacaggcgatcttggcatctttataataacaagtcaaagtagcgtagcttctggtattagaagaattgaggcattatctggccctagagctcaagaatatttatcaaatcttaagaatcaaactattcaacttcaaaaactattaaatgctcctgctgaagaaattgaagataaagtgggtaagcttttaaaggaaaataaaagtcttaagaaaggtagcaaaactgccaaagtagccacaattaaatcctctaatactcatgatattgataactttaaattagtaattgaagaggcagaatcagaggatatcaaagaattaagaccagtgcttgatgaaaaaacaaaaaatgcaaataactcaatttttattcttttaagctctaaaaacgaaacattgactattctctgttctgtatcaaaagacctgc

SEQ ID NO: 305933 - DNA, 817 bp, Unknown
  Bacterial polypeptide expressing nucleotide sequence isolated from the Sargasso Sea
aatgacatctcaactaattaaaaaaatagttactggagatgagataagaaatgcttttttaaaattttacagtgaaaaattacataaaatcattccaagtgcatctttgattccagatgaccctacggttatgctcacaattgctggaatgctaccttttaaaccagtttttttaggtttaaaagaaagaccatcaaaaagggctgcatctagccaaaagtgcatcagaactaacgatatagaaaatgttggagttacagcaagacaccacactttttttgaaatgcttggtaatttttcttttggagattattttaaaagagaagctattcaatgggcttgggaattagttactaatatttatcaactttctgttgaaaatataattgtaagtgtttttcacgaagacgaagagtctgcaaaaatttggagagatgaaattggtattcatccagataggatagtgaaactaggtgaggaagataatttttggtcatctggcaaaacaggtccatgtggaccttgttcagaactttattatgattttcatcctgaaaagggtctgcagaaaattgatttagaagatggagatcgttttattgaattttataatcttgtttttatgcaatataatcgtgatcctaatggaaaattgacagatttaaaatttaaaaatattgatacaggaatgggtcttgaaaggatggctcaaatactacaaaaaaagcaaaataattatgagacagatttaatttttcctattattcaaaaaatttgtgagattgcaaatattgattatttttcttcagatggataa

SEQ ID NO: 305934 - DNA, 865 bp, Unknown
  Bacterial polypeptide expressing nucleotide sequence isolated from the Sargasso Sea
cgacaactatgaaactgatctattcaaagatttaataaaaaaaatagcatcgaacttgggtgcactaaatcttgaaaatccatctcttagagttatcgcagatcatttaagatctagttcttatttgatagctgatggcctttccatttctaatgaaggcaggggttacgtccttagaagaatcataagaagagctttgaggcacgcacataagttgagtcctgattatgaaaaacctctttcaggccttgtgaaggagttagtttcccaaatgggtaaagagcacgctcttttaagtaaaaataaaaaaatcatagaaaaaaccatagaaaaagaagaacaacagttctccctaactttaagaaatggtatgcgcatttttgaggatgagacaccgaaggatgttaatgaagtatctggtgaactcgctttcaaactttatgatacttttggatttcctctagacatgaccatagatcttgcaagggagaaaaatatttcagtaaacataaaggagtatgaggaactaatggaacaacagagagatcttgcaaaagcttcatctaatttcgattctctgatgccatcatcaatttccttagataagccaactaactttatcggatatgacaaaagcaaatgtaaatctaaagtgctaatgatttttgtaaatcaaaaagagcaagaaacattagagggcgattcagatgcaatattaatcttaaataaaacacctttttatgctgagtcaggaggtcaagttggcgatcaaggttctatttcaagtgaagacttcatttttgaagtaaaagatactcagaaggtaggagatcaattcatacacattggtaatttgcaagaagga

SEQ ID NO: 305935 - DNA, 901 bp, Unknown
  Bacterial polypeptide expressing nucleotide sequence isolated from the Sargasso Sea
aatgagggaagaggatatgttcttaggagaattatgagaagaggaatgaggcattcgcatttactcggatcaaagaagccaattttttttaatatttttaaaactttactagacgagatgtctggaaattatccagaattaaaaagagctgaagctttaattaaagaaactttaaaaatggaggaagaaaaattcttagttcttcttgatagaggtatgaaaattttagatgaagaagttacaaagatagacaaagtgcttcctggcgaagtagctttcaaactttacgacacttatggttttccattagacctaactcaagacattttaaaaaataaatcactgcaaatagacaataaaaaatttgaagatttaatgaaacagagcagagagcttgcaaagaaaaattggaaaggctcaggagatactgctattgatgatatttggttcgcgattagagataagttgggtgctacggaatttcttggttatgaaactgatcaagcagaaggtgtaattcaatcccttctaaaaaataatgcacaagttgaaaaattaaaagaaggcgacgaaggtataataattttaaatcaaacaccattttatggtgagtccggtggtcaagttggagacacaggggaaattatatcaaataattttaaatttaaagtttcagatgtacagaaaaaattaggggatctttttgtacattatggaaaagttatttcaggtgaaatcacaatcaatgaaaatgtagaattaaaaattgatgttaaaagaagggaaaatataagagcttatcattcagctacgcatttacttcacgagtcattaagaagagttttaggtacacatgttacacaaaaaggatctttagttgaagcagatagattaagatttg

SEQ ID NO: 305936 - DNA, 883 bp, Unknown
  Bacterial polypeptide expressing nucleotide sequence isolated from the Sargasso Sea
tctaaaggtgtgaatagctccaatgaatattgggagctttggaatttagtttttattcaaaataatcgcttaaataatggagatttagaaagccttcctcaaaaacacgttgatacaggtgctggtttcgaaaggattgtttcggtattacaaaaaacatataataactatacaacagatttgttttttcccataataaaagaaacagaagctcttacagaaagaaattttcaggataatcctgctccatttcaagtgattgctgatcatattagaatgttagggttttcaatcgctgacggctgcatgcctgggaatgaagggcgaggctatgttttaagacgtatactgagacgagcagcgcgctttggaagggaattaggccaagaagatccatttttattccaacttaccggtactctttgcgatatcatgggtgatgctttccccgagatagtagaaaaaaagattcacattgaaaaggttgttcaatcagaagaaaaaatatttggaaatacacttggacgaggtttaaatcattttgataaagttttagcaaatctatctggaaataaaatctctggtaaagaagcatttaggttgtatgacacatatggttttccacttgatcttacgcagttactggcaagagagaatggcatttcagtagatgataaaggatttaaaagtgaaatgaaggagcaaagacaaagagctaaatcttcagctaaattcactcaccaagtagaagacttggactgggttaaggtacttgaagaagaaagttttgattttgtaggatatgagactacaaagtcaaagtctcaaattttgcgttattctgcccaaaaagatcaagttctagttgttatgaatacatcgc

SEQ ID NO: 305937 - DNA, 973 bp, Unknown
  Bacterial polypeptide expressing nucleotide sequence isolated from the Sargasso Sea
tttaggatatgaaactaatcaagccgaaggagttgttatttcattattgaaaaataataaagaagttgaaattttaaattctggagatgaaggaatgattataacaaatcaaaccccattttatggagagtcaggaggtcaaatcggcgacaaaggaaaaattatctcaggagagtttaaatttgaagtatcggatgtccaaaaaaaattaggcgatctatttgttcattatgggaatgttaaaaatggttcagtaaaattgaatcagaacgtagaaatgaaaattgatgtagaaagacgtgaaaacattagagcctaccattcagctacgcatttactacacgagtcacttagaagagttttgggttctcatgttactcaaaaaggatctttagtagaaccagaaagacttaggtttgattttagtcacatgaagccaatttcatcagatgaaattgaaaaaattgagacccaagttaattcaatggtagaaaagaaatcagatgttaagactagattaatgacacccaaagaagctgtagaaaacggagcccttgctttgtttggcgaaaaatatggagatgaagttagggttttatcaatgggtaatgatgacaataaatttttttcaactgaactatgcggcggaactcacgttagaaatacagcagatattggtaaatttaagataattagccaatcttctatagccgcaggagttagaagagtagaagcgcttagagacaaacaattagaagattatataaaaaacaaagaaaaactatctgatctttcagctcaaaaagatgaagaaacaactaaaggtttatcagaaaaaataattaaacttggtggaaaaccaaatttagataatcaagatcaaaaagggttaatcaaagaattatcaaaacaacttgagcaattaaatattaaatcaattttagcagataaatctaaaaatataattaaagat

SEQ ID NO: 305938 - DNA, 1083 bp, Unknown
  Bacterial polypeptide expressing nucleotide sequence isolated from the Sargasso Sea
tagaattgtaaaaatttcaacatctgacaatttttggtctatgggtgaaacaggtccctgtggaccttgttctgaaattttttatgatcacggcgataaattgaagggtggtcctccaggtagcccaaatcaagatggagatagatttatagaaatttggaaccttgttttcatgcaatttgaacaaatctcaaaagaaaaaagagtagatttacccaaaccttcagtagacaccgggatgggactagaaagaattacagcagttctacaggggactcatgacaattatagtatagatcactttaaagaattgatgagtgcatcatctgaaattacaaaaacaaagattgataataaaactatagctagccatagagttattgcagatcatttgagagcaagcagcttcctaattgcagaaggagttttgccttcaaatgaaggccgtggatatgttcttagaagaatcatgagaagaggtatgcgacacgcgcatacactaggaagtaaaaatccaatattttatcaattatttgatgttctcttgagtgagatgtcacagagttatcctgaacttaaaaatggaaaagatttaattgtagaaacactaagaaatgaggaggaaaagttttcttcgcttttagatagaggaatgaaaattttagatcaaaatttatctaaagtgaaaaatgatactttaccaggagagatagcctttaaactttacgatacttatggctttccattagatttaactgcggacattttaaaaaataaaaatataaaaattgatacaaatgcttttgataaagaaatggaaaaaagcaaacaaattgcaagagctagctggaagggttctggcgataaatctttagatgaaaggtggtttaagataagagaaaaattaaaaccgactgaatttttaggttacgaatttgacaaagcagaagcagtaattctcaaaatatctaaaaataataaatttgtagatcaagctaacaaaggtgatgaagttgaaattattactaatcaaacaccattttatggagagtccggaggacaagttggcgatgaaggaactat

SEQ ID NO: 305939 - DNA, 404 bp, Unknown
  Bacterial polypeptide expressing nucleotide sequence isolated from the Sargasso Sea
catgaattccagtgaaattagatccactttcttaaattattttaaaaaaaatggtcatgagatagtacactcaagtcctctagttccgcacaatgatccaacacttatgtttgcaaactctggaatggttcaatttaaaaatatttttacaggaaaagagaagagagattataatcgagctgttacttctcaaaaatgtgtaagagcaggaggtaagcacaacgatttagagaacgtaggttatactgcaagacaccatactttttttgaaatgttagggaatttttcttttggtgattattttaaggatcaggcaatagaatttgcttggaatttaataactaaagaatttaaaatagaaaaagaaaaattattagttactgtttttagtgaagatgaagaag

SEQ ID NO: 305940 - DNA, 864 bp, Unknown
  Bacterial polypeptide expressing nucleotide sequence isolated from the Sargasso Sea
gttttttataatttgtttgagactcttaaaaatgaaatgtcaggcaattatccagaattaaaaagagctgactctctaattaaagaaactttaaaaatggaagaagagaaatttttagtacttttagatcgaggaataaaaattctaaatgatgaaatatctaaaatagataaagtgcttccaggagatgttgcttttaaattatatgatacttatggttttccattagaccttactgaagatatattaagaaataaatctctttctattgatacaaaaaaatttcaatcgttaatgaaagaaagtagagagcttgcaaagaaaaattggaaaggatctggagatgctgcagttgaggatatctggtttggtattagggataaattaggtgctactgaatttttaggctatgaaacaaatcaagctgaaggagtaatcttgtctttactcaaagataataaagaggttcaagaattaaaatcgaatgatgaaggaatgattataactaatcaaacacctttttatggcgagtctggtggtcaagtcggtgatacaggagaatttattaatggtaattttaaatttaaggttaaagatgttcaaaaaaaattaggagatctttttgtacattatggaaaagtgttaagtggatcaattaaacttaaagacaatgttgaaatgaaaataaatgaagaaagaagaaatgatacaagagcatatcattcggccacacacttacttcatgaatcattaagaagagttttaggtacccatgtaacacaaaaaggttcgttagttgaaccaaacagattaagatttgatttcagtcatatgaaaccaatctcagatgaagaagtaaataaa

SEQ ID NO: 305941 - DNA, 949 bp, Unknown
  Bacterial polypeptide expressing nucleotide sequence isolated from the Sargasso Sea
gactatttaaaagaggaggcaattgtttatgcttgggagtttttaacagatgttctcaagcttgataaagataaattatggattactgtttacaaggatgatgatgaggctaaagaaatttggataaaaaaaattggtatcgatccggatagaattgcaaagcttggagataaagataatttttggtctatggctgatactggaccttgtgggccttgctcagaaatattttttgatcatggagacaaatatgaaggaactccgccaggagaagatggagatgagggcgatagatttgtagagatatggaacttagtatttatgcaattcaatcgagattcaggtggcgtactgcacgatttaccaaaaccatcagttgatacgggaatgggactagaaagaattgctgcagtaatgcaaggagtggggtcaaactatgatactgatatcttttcaaatctaattatagaatctgagaaagtgcttggaaatgttggagatgtctctcataaagtaattgcagatcatttaagatcttcatgctttttaatttcagatgatatttttccatccaatgaaggaagaggctatgttctcagaagaatcttaaggagagctatcagacacggctacaagattggagcagataagccttttatgcataagttagttaaaacttttgttgacgcaatggggaatgcgtatccgcaattaaaaaatgatgagggaagaattgaaaaacttatcaaaaatgaagagactcagtttttacaaactcttgataaaggtattcaaattttggactctactctaacagcagggaatgaagaaactatttcaggagacttagcctttaagcttcatgatacttatggttttccatttgatctgactgccgatattgcaagagaaaagggtattgatatagatgaaaaaggatcaagaagaa

SEQ ID NO: 305942 - DNA, 673 bp, Unknown
  Bacterial polypeptide expressing nucleotide sequence isolated from the Sargasso Sea
tatggctgacaaaacattaaatgaaataagagaaacgtttcttaaatattttgaaaaaaataatcataggatcgttgaatctagcaatttagttccaaataatgatccgactttaatgtttgcaaattctggaatggtacagtttaaaaatgtgtttacaggattggaaaagagagattataagagagctacaacttctcaaaaatgtgtaagggctggtggtaagcataatgatttagaaaatgttggttatacacccagacatcatacattctttgaaatgttgggcaatttttcatttggagactactttaaagaaagagcaatagaacttgcatggaatttggttacaaaagatttcgatattaataaaaataggctttgtgtaacggtttttcatgaagatgatgaagcatttaacttttggaaaaaaatagcaggtttaagtgaagataaaataattagaataccaacttcagataacttttggtcaatgggagagacgggtccttgtgggccatgctctgagattttttttgatcatggtgataaactagaaggaggtttaccaggtacaaaagatcaagatggagatcgttatattgagatatggaatcttgtatttatgcaatttgaacaagtttcaaaagataaaaagaataaatttacctaa

SEQ ID NO: 305943 - DNA, 856 bp, Unknown
  Bacterial polypeptide expressing nucleotide sequence isolated from the Sargasso Sea
tctacgctttgacctgactcattttgaaaaaatatcacaggatgaaattattaaaatagaaaaaatggttaaccaacagatactcttaaatacagaggttgaagtagctgtccaaggatttgatgaggccaaggaggcgggagcagaggcgttattcggtgaaaaatatggtgacgaagtaagagtagttaaagtctctgactattcgcttgagctatgtgggggaactcatgtaaacagaactggtgacattggttcattcaaaatcacagatgagtcatcattatcatcaggagtccgtcgcattgtagcagttactggcaatcaagcgttatcaaagatgcaggcagattcaactattttgaatgatcttcaatcgctattgaacactccacccagtgaaatggttgagagaatagagggcctatttaaggataaaaaagaacttgaaaagaaactaaaaaacagacaaacagatggaagtagtgaagcacaaatcatggacaaatttgaagaggccggtacatatgaaattttagtcgcaaaaactaaatcgtcaagcatggatgatcttaaaatgttaggggactctgtttttaaaaagatgaaaagtggattggctgtgatattctcagctggcgacgaaaaaccaatggctgttgtagtggtttcaaaagatttgaacaagagcggaattcttgctggtgacattgcaaaaaaagtaggaggctttatgggtggtggtggtggcggcaaacctcaccttgcaaccgcaggtggtaaaaacaatgatgcaattcacgacgctatgaactctgcaagaaaattaattaacgaagtaatcggtggagaataa

SEQ ID NO: 305944 - DNA, 832 bp, Unknown
  Bacterial polypeptide expressing nucleotide sequence isolated from the Sargasso Sea
cgtggagtctgattgcaaaataatttcaataataaaagagagtaaatctgtaaataaagttaaaaaagatcaagaagcaattattttattaaatcaaacaccgttttatggagaaagtggtggccaagttggtgatcagggattttttgaaaatgataactttaagtttgaagttaacaatacaacaaaaatattaggaaactattttttacataaaggtaaagtaattactggcagttgtgaaattaatgatactattaaagcaagtgttaatgtagagaatagaaactttattaaatacaatcattcatcaactcatttattacatgccgctcttaggaaaatactaggcaagcacgttactcagaagggttctttggtaaattcagaaaaactcagatttgatttcagtcataataatccgattgaaaaagatcaactcataaatgttgaagaaattgtaaatgatcaaattcaaaaagatggaattgttgaaataaaagttgtcgatcaaaaaaaagctattgaagaaggtgcaatggcattgtttggagaaaaatatagtgatgaagtaagggtagtaactatgggtcatgaaaatgaaactttcttttcaaaagaattatgtgggggaactcatgttactaaattaggtgaaataaacaaatttaaaataactagtcagtctagtgtagcgtctggaattagaagaatagaggccgtgtccaatattttagttgataaatatattaaagaaatacaaagcaatttattagaaaaagataaaaatcaagataatcaaattgaagatttaaagaataaaataaaaaaa

SEQ ID NO: 305945 - DNA, 943 bp, Unknown
  Bacterial polypeptide expressing nucleotide sequence isolated from the Sargasso Sea
aacaaacatattaatggagaagtagcatttaaattatacgacacctatggatttcccttagatttaacacaagattatttgaaaagtaaaaatattgaagtcgatataaaagcatttgaacaaaaaatgttagatcaaaaggaaagagcgcgacaaagctggaaaggtacaggagacatcgaggatgaaggtatttggtttgaaataacttctaaaatagagccaacagaatttttaggatattctgatatggaagctgattgtaaaataatttcaatcatatcagaaagtaagtcattagataaaattaaaaaagatcaagaagcaattataatattaaatcaaacacctttttatggagaaagtggtggtcaggtgggagatcagggtttttttgaaaatgataactttaagtttgaagttatgaatactacaaaaatatttggaaactattttcttcacaaaggtaaagtaattagtggtgaatgcaaaattgaagataccattaaagcaagcattaatacagtgaatagagattttattaaatataatcattcttcaactcatttattacatgctgctctaagaaaaatactgggcaagcatgtcacgcagaagggttcacttgtaaattcagaaaaacttagatttgattttagtcacaataatccaattgaaaaagatcaacttataaatgttgaaaaaattgtaaatgatcaaattcaaaaaaatggaattgttgaaattaaaattgtggatcaaaaaaaagctattgaagaaggtgcgatggcattatttggagaaaaatatagcgatgaagtaagagtagtaacaatgggtcaagaaaatgaatcattcttttcaaaagaattatgcggaggaactcatgttgttaaattaggggaaataagtaaatttaaaataactaatcaatctagtgttg

SEQ ID NO: 305946 - DNA, 838 bp, Unknown
  Bacterial polypeptide expressing nucleotide sequence isolated from the Sargasso Sea
catgaagttgttgattctagccctttgattccagctaatgatgaaacattattatttactaatgctggcatggttcagtttaaagatgtttttttaggctctgataaacgcccctataaaagagctacaacaactcagcgatgcatacgtgcaggcggaaaacataatgatttagagaatgttggttataccctcaggcatcatactttctttgaaatgttgggcaattttagttttggagattattttaaagaagaagccattcagctcgcttggaattttttaaccaaggagctaaatttagaaaaagaaaaattatggatttcagtttttagagaagatgacgaagcagcagaaatttggtcatcaaaaattggtattgatcctgagaggattgttagattagatgaagaagataatttttggtctatgggtgatacaggcccctgtgggccttgctcagaaatttactacgatcatggcgagcaatatgaaggtactcctcctggatcaccaggggatgatggagacagatttgtagaaatttggaatttagttttcatgcagttcaatagggatgctgcgggtaaattgacccctttacctaaaccgtctgttgatactggaatgggtttggaacgagtagctgcagtaatgcaaggcgttaattcaaattacgaaacagacctttttctcaatctaattaaagcctctgaagacgccattcagtctccaggagagccatctcataaggtaattgcggatcacatcagaagtgttagttttttaattgctgatggtattactccttctaatgagggaagaggatatgtgttgc

SEQ ID NO: 305947 - DNA, 715 bp, Unknown
  Bacterial polypeptide expressing nucleotide sequence isolated from the Sargasso Sea
catggtttcaaaaaaatctgatgtaaaaactagattaatgacacctgatgaggcagttgaaaatggtgctctagcattatttggggaaaaatacggagatgaagtaagggttctttcaatgggagacgaggatggaaaatatttttcaacagagttgtgtggtggaacacacgtcaaaaacactggtgatattggtaaatttaagatcgttagccaatcctcaattgctgctggggttagaagaattgaggctttgagagataaacaattagaggaatatttaaaaaataaagaaaagttatcaaacctatctgcagaaaaagatgaggaaacaattaaagagttaagtcagcaaattattaaattgggaggaaagccaagtttagaagaaactgaccaaaaaactttaattaaaaatttaactaaacaattagagactatctcagtaaatgcaattttagaggataaatctaaaaatgttattaaagatgaagaaattaatggagttaagttaagactccaaaaaatagatggattgcctccaaaagaattaagaaaacttgtagataaaggtaaaaaagatttaggtgagggcatcgtggtagtgtttgcaaataaagatgacaaggttggattagcagttggagtaactgacaatttaaccaacaagtttgatgcagttcagtttgttaaagttggatctgaaataattggt

SEQ ID NO: 305948 - DNA, 274 bp, Unknown
  Bacterial polypeptide expressing nucleotide sequence isolated from the Sargasso Sea
aaggttaagagtggatctataaaactacatgaaagtgtagagttaaaaattgatgtggaaagaagagataatactcgtgcttatcattcagcaacccatttgctacatgaatctttacgaagagttctaggtactcatgtaactcaaaaaggctcattagtagagccaagtagattaagatttgatttcagccacatgaaacctattttgaacgaggaaattgataaaatagaagagtttgtaaacacatggtttcaaaaaaatctgatgtaaa

SEQ ID NO: 305949 - DNA, 1090 bp, Unknown
  Bacterial polypeptide expressing nucleotide sequence isolated from the Sargasso Sea
tctctcttcctgctgccatctggtgttcaagagaccaaattcttaggttacgatcagctcaagtctgactctgaaattcttgtaatgtgggacggccaagagagggttgagaatgctcttaaaggacaagaaatatacttagcatgcaatcaaacaccattttatgcagaatctggtggtcaaatcggagataaaggaaagtttgcatctgacaatgctactggtaatattttagattgtagaaaacaaggtaaggtatttattcacaaagctatcgtagaaagtggagaaattaaaaaaggtgatttaattgaaatgagcgtagaaaaagaaaaaagaatagctatagcaattcatcactcaagtacacatttgttacatgctgccttgcgagaagttttgggcgatcatgttcaacaaaaagggtctttagtagatgaaactaagttacgttttgatttttctcatgataagtctttaactcaggacgaaattgcaacaatagaaagaattgttaacaaagaggccctcaataatcttgaagtaaaaactgaattgatgaagctcgatgatgcaatgaaatcaggggcgatggcactctttggtgaaaaatatgacgatgatgtgagagttcttacaatgggagagaactcttattcagttgagttgtgtggaggtactcatgtaactagaactggcgatataggattctttactatcacatcccaatccagtgtagcttccggtataagaagagttgaagctatcgctggtatgcaggctttaaactatattaaaaaattaaaagaagttaattcctcaattcaaaaccttttaaatgtttcctcagatgatatccatgacaaagtaaaatcattaatcgatgaaaataaggctttaaaaagcaaaggaaccaaaagcacaaaaagagaaatagttttttcagaaagctttgaaatcaatgattggaaattgattattcaacaagtgcaattagatgacaacaaagatttaagattcctagccgacgagcaaaaaaatacaaatgaaagagtatgttttgttattttttcagaacagaataacaaga

SEQ ID NO: 305950 - DNA, 880 bp, Unknown
  Bacterial polypeptide expressing nucleotide sequence isolated from the Sargasso Sea
tgcactaaaaagggtacttggagatcatgttaagcaaaagggttcacttgttgatgagcacaaacttagatttgatttttctcacgatgaatctttatcagaggaagagatatccaaaattgaagatttagtaaatcaagaaatactaaagaattcagctgtaagcactaaaataatggatttagaagatgctaagaattcaggtgcagagtctttatttggcgaaaagtacgaagagcaggtaagagtgttatctattggtgaagatgatttttctcttgagctttgtggtggaacacatatctcaagaacaggggatcttggtatttttataataacaagtcaaagcagtgtagcctcaggtatcagaagaattgaggcattatctggtcctagagctcaagaatatttatcaaatcttaaaaatcaaactattcaactccaaaaactattaaatgctcctgctgaagaaattgaagataaggtgagtaagcttttaaaggaaaataaaagcttaaaaaaaggcggtaaagccgcaaaagcagccacaattaaatcctctaatacacacgatattgataactttaaattagtaattgaagagtcagaatcagaggatatcaaagaattaagaccactacttgatgaaaaaacgaaaaatgcgaataactctatctttattcttctaagctctaaaaacgaaacattaactattctctgttctgtatcaaaagatcttcaatcaagaatctcagcaaaagatctcattaatgctttaacgatacctattgaaggcaaaggtggtggaagagtagaatttgctcaaggcgcaggcaagccttccgatagagaaaaatttgtttctgatatccctaatatc

SEQ ID NO: 305951 - DNA, 998 bp, Unknown
  Bacterial polypeptide expressing nucleotide sequence isolated from the Sargasso Sea
gaaacacatgatcgatttgtcgaaatttggaatcttgtttttatgcaatatgaacaagtagatgaaaataatagactaagtttacctaggccatcaattgatacaggaatgggaattgagcgaatagctgctgtgatgcaaggtactaacgataattatgagattgatttatttaaaaaactcattgatcattcaattcatataacaaaaaaaaatgataaagaattaatttcaagtcatcgtgttattgctgatcatctaagatcatcatcatttttaatagccgatggtgttttaccatcaaatgaaggcagagggtatgtactcagaagaattatgcgaagagctatgcgacatattcaacttcttggttacaacgataccatgttatcagatttatttactactctctcaaacgaaatgtcatcagcatatccagaattacgaagggctgaaaacttaattagagaaacattaagctatgaagagattaaatttaaagatttattgtttagagggatgaaacaacttgaagacgaacttaaaccccatcaagaaggtcagatttttcctggttcaaaggctttcaaactatatgatacatatggttttcccttagatctaacgcaagatattcttagatctaaagatattgaagtagatatcaaggggtttgaccaaagtttagaagatcaaaaaagccgggcacgatctagttggtcaggctctggagataaatcaactgaaaagatatggtttaatctatcaaataaaattaacaaaacagaatttattggatatgaaaacaatgtttcgcaagctgaagttctatctattattagtaatggtactgaagttgatcaaatatcaaaagatcaacaaggttgtataatcctaaatcaatctattttttacgcagagtcaggtggccaaattggtgatattggatatatcagatgtggagaaagcaattttaaagtcactgatacacaaaaaaa

SEQ ID NO: 305952 - DNA, 865 bp, Unknown
  Bacterial polypeptide expressing nucleotide sequence isolated from the Sargasso Sea
catgaattctaatcaaattaggtcgacatttttaaattactttaaaaaaaatgaacataaaattgttcattcaagtccacttgtaccacataatgatcctacacttatgtttgcaaattctggcatggttcaatttaaaaatatttttacaggtaaagaaaaaagagattataatcgcgcagttacctctcaaaaatgtgtaagggctggaggtaaacacaatgacttagagaatgtgggttacactacaaggcaccatacattttttgaaatgttaggaaatttttcttttggagattattttaaagattatgcaatagaatttgcatgggatttaattacaaaagaatttggtatagataaaaaaaaattactagttactgtttttaatgaagatgaagattcttaccatctttggaaaaaaatttcaggtttagatgatgataaaattataaagataagtacatcagataatttttggtctatgggtgatacaggaccatgtggtccgtgttctgaaattttttatgatcatggtgataaatttcctggaggtcccccaggtagtcctgatgaagatggagatcgatttattgagatttggaatttagtttttatgcaatatgagcaaattaactcctctcaaagaatcaatcttccaaaaccttcaattgatacagggatgggtttagaaagaatgacagctttattaaatggcacaaatgataattatgatactgatctttttaaaccattaattaataagtcgattgagttactcaatatcgaaagtttaaatacaagtccgagtcatagagtaatagcagatcatttgagagcatcttcatttctaatgcagaggagt

SEQ ID NO: 305953 - DNA, 972 bp, Unknown
  Bacterial polypeptide expressing nucleotide sequence isolated from the Sargasso Sea
accaagggcagtcttcgtcaacgccgacagcggccagtgcatagaaatttggaacctcgttttcattcaatacaacgccaacgaagacggcacctttgcaccactggccgctaagcatgtggataccggcatgggcttcgagcgcgtggccgccatcattcaaacaacacagaacttcaccaacttctccaagccggtttccaattacgacacggacgtcttcagtcccatttttgctgaactcgaaaagctcagcggcaaacgatacacctccacactgccggacggcgaaccgaacgaacaggaacagatcgacatcgcctttcgcgtgatcggcgatcacatccgcacgctgagcttctccattgccgacggcattttgccaggaaacaacgatcgcaattacgtgttgcgccgcatccttcggcgcgctgtgcggtatgggcgcacgctgggttttcaggaaccgtttttctacaagctcgtcgatgtgctggccgatagtatgggcgaatttttcccggaactccaacagcgccgcgagttggtgcagcaaaccatccgtaccgaggaagagtccttcaacaagaccctcgaccgcggcatcgaactgttccgtgaagaagccaacagcttgggcgacaccaaggagctctccggcgaattcgctttcaagctgtacgacacctatggcttcccgctcgacctaaccgaactcatggcccgcgaagccggcctgagcgtgaataccgctggctttgagaggctcatggagcagcaacgcgaacgcgcgcgtgccgctcagaaaaaggaagtcatcagcgtctccagcttgtcttccgatgcccaaactgagtttgtcggattcgatcaactcactgccgacgccaccgtgctcgaagtcgtcgatgaaaagaaacgcacgggcatcgtcctggatcgttccccgtttacgccgagatgggcggtcaa

SEQ ID NO: 305954 - DNA, 817 bp, Unknown
  Bacterial polypeptide expressing nucleotide sequence isolated from the Sargasso Sea
gttaatgagtacataagacaaaattcatttgtacagacgcgaataatgacgcctgatgatgctagagaaataggagctcaagctctttttggagaaaaatatggggacgaagtccgtgttgtatctatgggtgataaaataaactcaggtaaaggacttggaggtcaaacctattctttggaactctgcggagggacccatgttaaacaaaccggagaaattggggcttttacaattttgtcagatagcgcctctagtgccggggtccgtcgcatagaagctcttactggtgaaaacgctataacacatctggccaaaaagtctcagcaggtaaatgaattgagcgctttcctaaaggtttcagctgacgaacttactcaaagagtaaatgttttaattgaagaaaggaaaaatctcacgagtgaagttgccgaacttaagagaaaacttgcactttctggtaaaggaaacggtgaggcagcgaaatctgagcagataaatggagtttccttttttgctcaaatctattctggaatttctggaaaagacttaccttcactagttgatgaacacaaagaccgcttaaaaagtggcgttattcttctaattacagaaaatgacaatagagttgcggtggccgccggtgtttcttctgatctaaccgataaaatttcagctgttgacattgtgcgtattgccgtcccggaactaggaggaaaaggaggaggagggcgcgcagatcttgctcagggtggcggatcagatatatcaggagcagatggggcaataacagcagttaaaaaattgcttaaataac

SEQ ID NO: 305955 - DNA, 882 bp, Unknown
  Bacterial polypeptide expressing nucleotide sequence isolated from the Sargasso Sea
actttctatagatgcaaatgaaagaaaattatcagcaactaatcatacttcaactcatatcttacatcagtcattaaaagatattttaggtaagcatatatcacaaaagggatctttagtttcttcagagagattaagatttgattttagtcataataatccattaacaaaaaaagatttgtttaaaattgaggatcatatcaataaaaaaattagagataattctgaggttttaatacgtgaaatggacatttatcagtcaaaaaacgaaggtgcaaccgctttatttggagaaaaatacggagatattgttagagttgtttcatttggtaaaagttcagacgcgaacaaatcttattggtcaattgaactttgtgggggaacacacgttaaaagaacaggtgaaataggtttactaaaaattattagtgaaggatctgtatcttctggcataagaagaattgaagcaattactggcacaaaagcattagaatgggtaaacgaaaaatatgatattttaaaaaatataaatgaattaatgaagtcttctgatgaaaacttggttgataaaatcatttctcttaacgaagataaaagaaaaattgaaaaagaattcaataattataaaaataactattcacagccttctaatagtactgaaaaagtagttcaaatcggtgatataaaatttattagtaaagtttttaatgatgtatctcctaaaaacctcaaaggaatagctgataaaattatttataatcaaagtgattgtgttgtggcagtaattacaattgaaagtaataaaatatctttagttgtaggtgtaacaagagagcttagcaatagaataaatgctgttgatttagtaaagattggttcttc

SEQ ID NO: 305956 - DNA, 574 bp, Unknown
  Bacterial polypeptide expressing nucleotide sequence isolated from the Sargasso Sea
gatgaaaacaagtgatatcagaaaagcttttttagatttttttaattcaaagaatcatgaagttgttgcttcaagctctctagttccgccaaatgatgaaactttattatttacaaacgcaggaatggtgcagtttaaggatgtcttcttagggactgagactaaaaattttaaacgagctgcaacctcacaaagatgtattagagctggaggcaagcacaatgatctagaaaacgttggttataccttaagacaccatacattttttgaaatgttgggtaattttagttttggagactattttaaagaagatgctattaaattcgcgtgggaatttttaacagaggaacttaagctagataaagaaaaattatggatcactgtttataaagacgatgatgaggctgaagaaatttggaaaaatattattggaattgatccgggcagaatagctagattaggtgatgatgataatttttggtctatgggtgacacaggaccatgcgggccatgctctgaaatattttatgatcatggagaacacattgatggaacacctccaggggccgaaggt

SEQ ID NO: 305957 - DNA, 367 bp, Unknown
  Bacterial polypeptide expressing nucleotide sequence isolated from the Sargasso Sea
atggcagacaaaacactcaatgaaataagaaatactttcttaaagtattttgaaaaaaacgatcacaagattgttgagtctagcaatttagttcctaacaacgatcctacattaatgtttgcaaattctggcatggttcagtttaagaatgtatttacaggattagaaaaaagagactatgtgagagccacaacctcacaaaaatgtgtaagggcaggtggtaagcataacgatttagaaaatgttgggtatacacctcgtcaccatacattttttgaaatgttaggaaacttttcttttggagattattttaaagaagaagcaattcattatgcttgggacttaataacaaaagattttgaataga

SEQ ID NO: 305958 - DNA, 831 bp, Unknown
  Bacterial polypeptide expressing nucleotide sequence isolated from the Sargasso Sea
gatggttttaggcaagcatgtgcaacaaagggggtctttagttgatgatgaaaagatcagatttgatttttctcatcatcaatcactcacaggaagcgaaattagagaaatagaaacaattgtgaatgaaaaaattgatgagaatattgatgttcaaacaagtatcatgaagcatgatgaggcgattgagtcaggagcgatggctctttttggtgaaaaatatggagatgatgtaagagtattggatgttggagatttttcaaaagagctgtgcggtggaacacatgtcgaaaatacaaatgaaattggaatatttaaagttgtttctgaatcaagcatatcttcaggaacaagaagaattgaggcaataacaggagacaaagctttgaagtgggcaaaagagacagagcatctggttgaatcactgacggatctacttcaaaccagaagagaggatgtcaccactaaagttgaatccttgttagattcaaataagaaactgcaatctgaaataaaacaactgaagtcaaagattgcatcaggacaatctgttgcagacatagatagctcagaaaatatcaatggaatcaattacttgtataaagaactcgagaatgatattgaaccaagcgtcatgcgtggcgctattgatcagtttaaaagtaagttgaaatcaggagtgatcattctttcttctgtaaaccagaaaggaaaggtgacatttacaattggtgtaactgatgatttgacatcgatgatagaagcaaaatcaattgctgaaactatttcttctgctttggatggaaatggaggaggtaaaggtaactttgc

SEQ ID NO: 305959 - DNA, 548 bp, Unknown
  Bacterial polypeptide expressing nucleotide sequence isolated from the Sargasso Sea
gttgccgagaccggtcaagtacgtcgaggagtggccgtccaagcgcgtgcgcgacgccttcgtcgattacttcgcggagaagcacaatcacacccgttggccgtcttccccggccgtcccggtcgatgacccgactttgctcttcgcaaacgcgggaatgaaccagtacaagcccatcttcttgggtaaggctgatcccaagacgggcctcgccaagctcaccaaggcgacgaacacgcagaagtgcatccgcgctggtggtaagcacaatgatttggatgacgtcggtaaggacacgtaccaccacaccttctttgagatgctcggtaactggtcgttcggtgattacttcaaggagcaagccatcgcgatggcgtgggacctgctcaccaccgtgtacatgcttcctgaggatcgtctctacgcgacgtactttggtggcgacgaagccctaggcttggaaccggatctcgaagcccgcgacatctggctcaaatatcttccggcgaaccgcgtcatgccgttcggttgcgccgacaacttctggg

SEQ ID NO: 305960 - DNA, 937 bp, Unknown
  Bacterial polypeptide expressing nucleotide sequence isolated from the Sargasso Sea
atagacaaaaatagactttatgtgactgtttttcatgaagatgatgaggcttttaatttttggaagaaaatagctggtttaagtgatgatcgaattttaagaatttcaacatcagataatttttggtctatgggtgaaacaggaccatgtggcccttgttcagaaattttttatgatcatggagatcatttaaaaggtggattgccaggcacaaaagatgaggatggagatcgatttattgaaatatggaatttagtttttatgcaatatgagcaagtaacaaaagacaaaagaataaatttacctaaaccttcggttgatactggtatgggtttagaaagaattgcagctcttttacaaggaacacatgataattatgaaactgatcattttaaaaagttaattcaatcgacttcagatattgttaagaaaaaacctgatcaaaaaaatctttcaagttttagggtcatagctgatcatttaagagcaagttcttttttaattgctgaaggagttttgccgtctaatgagggtagaggttatgttcttagaagaattatgagaagagggatgagacattcacatttattaggatctaaagaaccagtattttataatttatttgatacgttgaaaaatgaaatgtcaggcaattatccagaattaaaaagagcagagtcattgattaaagaaactctaagaatggaagaagagaaattcttagttcttttagatagaggtataaaaattttaaacgatgagatatccaaaatagataaagtgcttcctggggatgttgcatttaaattatacgacacctatggttttccattagatcttactgaagatattttaagaaacaaatctctttctatcgatacagaaaaatttcaatctttgatgaaagaaagtagagaacttgctaaaaaaaatggaa

SEQ ID NO: 305961 - DNA, 1008 bp, Unknown
  Bacterial polypeptide expressing nucleotide sequence isolated from the Sargasso Sea
tagaattgcgaagcttggagataaagataatttttggtcgatggctgatactggaccttgcggcccttgctcagaaatcttttttgatcatggagataaatatgaaggaacaccgccaggtgaagatggagatgagggcgatagatttgtagagatatggaacttagtctttatgcaattcaaccgagacacagatggcgtgctgcatgatttaccaaaaccatcagttgatactggaatgggactagaaagaattgctgcagtaatgcagggagtaggatcaaactatgaaactgacatcttttcaaatctaattgaagaatctgagaaagtacttggaagtactggagatgtctcccacaaagtaattgctgaccatcttagatcttcatgtttcttaatttcagatgatgtttttccatctaatgaaggaagaggttatgttctcagaagaatcttgcgaagagctattagacacggctacaagataggagcagataagccttttatttataagttagttaaaactttcgtcaacgcaatggggaacgcctacccacaattaaaaaatgacgaagaaagaattaaaaaactcatcaaaaatgaagagactcagtttttacaaaccctcgataaaggtattcaaattttggactctactcttgtagaaggtaataaagaaattatttcaggagatttggcctttaagcttcacgacacttttggttttccatttgatttgacggctgatattgcaagagaaaagggtattgatattgatgaaaaaggattcaagaagaatatggaatctcaacaacaaatgtcaaaggcatctagttcgtttgtgtcaaagactcctactgcagaggatgtaaaggaaacagattttattggttatgaaaatctgtcttcagactcaaatgtaatagcaatttggaataaaaatgaaaaagttgagcttgctaacgagccacaagaatactttatagcacttaaccagacttcaat

SEQ ID NO: 305962 - DNA, 742 bp, Unknown
  Bacterial polypeptide expressing nucleotide sequence isolated from the Sargasso Sea
atggcaacttctcctcttacaacgaatgaagtaagaaagatttatttagacttttttgtagagaaagatcacacactcgtcgagagcgcttcattggttccattgaatgaccccaccttgttattcatcaatgccggaatggcaccttttaaagatcttttattaggagtggaaaaaagaaattatacaagagcggtcagttcacaaaggtgtatgcgggcaggtggaaagcacaatgatcttgataatgtcggttataccgccagacaccatactttttttgaaatgctcggcaattttagttttggagattacttcaaagaagatgcaatttcttttgcatgggaacttttaacagaaagatacaagatagatccaaaaaaattatggataaccgtccatgatagtgatgatgagtctgaagaaatttggatcaaaaagataggtattgatcctgaaagagtttcaagactcggtgatgaagacaatttttggacaatgggagatacaggaccttgtggaccatgcagtgaaatattttatgatcatggcgatcatcttgaaggcgatcctccaagaccaggcaatgacccaggagaccgatatatagaagtttggaaccttgtttttactcaatttgataaaggtcaagatggatctttgaagccactacctaatccatgcgtcgacacaggcatgggcttggaaaggatggcagctgtaatacaaaatgaactataaa

SEQ ID NO: 305963 - DNA, 982 bp, Unknown
  Bacterial polypeptide expressing nucleotide sequence isolated from the Sargasso Sea
tgttcacgaaagtgatgatgagtcagaagatatatggataaataaagttggagttgatccagcgagagtttctagattagatgacgaggaaattttttggactatgggagatacgggtccctgcggtccctgcagcgaaatctattatgatcacggcgaccatcttgaaggagatcctcctaaattaggaaatgaaccaggagatcggtttgtagagatctggaatcttgtatttactcaatttgatagaagtaaagatggtagtttaagtcctcttccgaatccttgtgttgatacaggaatgggcttggaaagaatggcagctgtcctgcaaaatgaaaacaataattatgaaaccgatattctgaagtctatagtccaagaagcggcaaaaattagtggagagaatgatctaacaaacccctcactaagagtaatatcagatcatttaagagcctcttcgttcctgattgcagatggcgttgtgccttctaatgaaggaagaggatatgtcttacgcagaattataagacgcggccttagacatgctcacaaacttggaatgaaagatgggattctctctaagcttgtacatgttttggaagaaaaaatgggtattgcttatcccctacttgtaaaaaactcagatattattaaagctaatttacttaaagaggaagaacagttttccactactttagagcagggtatgcaattacttgaatctgcagttgaggacttagaaaacaacgaaattccaggtgatatcgtcttcaaactttacgatacttatggatttccagttgatatgactgctgattttgcacgcgagagggatctaattgttgatttaaacgaatacgaagccttaatgctagaacaaaaagaaagaggtaggtcatcgagtaacttcaacacactcatcccagaatctttaaacatcgaaggcgaaactgccttcttaggatacgatacccattca

SEQ ID NO: 305964 - DNA, 853 bp, Unknown
  Bacterial polypeptide expressing nucleotide sequence isolated from the Sargasso Sea
aatgagcaaaattttgcttacagatgtaagaaaaaattttttagaatattttaaaaaaaacaatcatcaaattgttgactcaagtaatttagtacctaataacgatccaacactaatgtttactaattcaggaatggtccagtttaagaacgtatttactgggttagaaaaaagaccctataaaactgcgaccacatcacaaaaatgtgtgagagcaggtggaaaacacaatgatctagaaaatgttggttatactcctagacatcacaccttttttgaaatgctaggaaatttttcatttggtgattatttcaaagagcaagccatccatcatgcttggaatttgttaactaaagattttggattaccaaaagaaaaattattagtaactgtttttcatgaagacgaagacgcactcaatctttggaaaaaaatatcggggttaagtgaaaataagataattaaaatatcaacatctgataatttctggtccatgggtgatacggggccatgtggcccatgctctgaaatattttatgatcacggtgataagttaaaaggtggaattccaggaagccctgatgaagacggtgatagatttattgaaatttggaatcttgtatttatgcaatttgaacaaatatctaaagataaacgaattgatttacctaaaccttcagttgatacaggtatgggactagagagaatgacagcagtccttcaaggcactcacgataattataaaattgatcactttcagaaaattatggatgtttcatctgatattacaaaaacttcaatcgatgataaaacgatcgcaagccacagagtaattgctgatcatttaagagca

SEQ ID NO: 305965 - DNA, 958 bp, Unknown
  Bacterial polypeptide expressing nucleotide sequence isolated from the Sargasso Sea
atgacaacgaaacatttcaactcctggaaaaaaattgcaggattgccagaaagtagaatctacaaaatatccacaagtgacaatttttggtccatgggtgatttaggtccttgcggtccttgttctgaaatatttttcgatcacggagatcatttaaaagggggtcctcctggaaccaaagatcaggatggagatcgttttattgaaatatggaatttagtttttatgcaatttgaacaagtttcaaaagaggaaagaataaatcttccaaaaccatcagtagatacaggaatgggtctagaaagaatttcagctctacttcaaggcacgcatgataattacgaaatagatcattttaaaactttaattgaagcttcatcaaattttacaaaaactaaagtaacaaaagaaaatatagcaagtcacagagttattgccgatcatcttagagctagttcatttttaatagccgaaggagtcctgccatcaaatgaagggagaggttatgttctaagaagaattatgagaagaggaatgagacattcacatacgctgggtagcaaagaatctattttttataaaatggtgccaactttaatcggtgaaatgtcagattcttaccctgaattagaaagagcgcaacctttaattatagaaactttaaaaacagaggaagaaaaattttcttcattacttagcagaggaatagaaattttaaacgagaatttaaacaaagtaaaaaataattcttttccaggtgaaattgcttttaaattgtatgatacttacggttttccaatagatttaacggcagacattctaaaaaataaaaatataaaagttgatgttcatggttttgataatgaaatgaaaaaaagcaaagatttagcgcgcgcaaactggaaaggatctggtgacaaatctttagaagagaaatggtttaaaattagggaacaaa

SEQ ID NO: 305966 - DNA, 963 bp, Unknown
  Bacterial polypeptide expressing nucleotide sequence isolated from the Sargasso Sea
actgggtgaaattatatcaaataattttaaatttgaagtaaccgatgttcaaaaaaaattaggtgatttatttgttcattatggaaaagttgttagtggatctttaaaattacaagataatgttgaattaaaaatagatgttgagagaagagataataccagagcttatcattccgcaacacatcttctacatgagtcattaagaagagttctgggtgatcacgtaacccaaaaaggctctttagttgaaccaagtagattaagatttgattttagtcatatgaagccgatacagaatgaagagattgataaaattgaagaatttgtaaacagcatggtttcaaaaaaatcagaggtaaaaactagattaatgacacctgatgaagcagttgaaaatggtgctttagcattatttggggaaaaatatggtgatgaagtaagggttctttcaatgggagatgaggatggaaaatatttttcaacagaattatgtggcggaacacacgtcaaaaacactggtgatattggtaaatttaagatcgtcagccaatcatcaattgctgcaggtgttagaagaattgaggctttaagagacaagcaattaaaggaatatttagaaaaaaaagagaaattatcaaacctatctgcagaaaaagacgaagaaacaataaaagatttaagtcagcaaattattaaattaggaggaaaaccaagtttagaagaaactgatcaaaaaactttaataaaaaatttaactaaacaattagaaactatctcagtaaatgcgattttagaggataaatcaaaaaatattattaaagatgaagaaattaatggagttaagttaagacttcaaaaaatagatggattgcctccaaaagaattaagaaaacttgtagataaaggtaaaaaggatttaggcgaaggtattgtggttgtatttgcaaataaagatgacaaggt

SEQ ID NO: 305967 - DNA, 879 bp, Unknown
  Bacterial polypeptide expressing nucleotide sequence isolated from the Sargasso Sea
tatggctaaaacattaaatgaaatcaggtcagcattcttagattattttgaaaaaaatgatcataaaatagttgagtctagtaatttagtcccgaataatgacccaacattgatgtttgccaattctggaatggtccaatttaaaaatgtgtttactggactggaaaagagagactatcaaagagctacaacatctcaaaaatgtgtaagagcaggtggtaagcataacgatcttgaaaatgttggctatactccaagacaccatacgttttttgaaatgttgggaaacttttcttttggcgattattttaaagaaagagctattgaacttgcgtggaatttaataactaaagaatttggtttagataaaaataggctttatgtgactgtctaccatgatgatgacgaagcctttaattactggaaaaaaattgctgggttaagtgaagataaaatcataaggatagcaacatctgataatttttggtctatgggtgaaacagggccttgtggtccatgttcagaaatattttatgaccatggagaacacttagaaggtggattgccaggaacaaaaaatgaggatgggaatagatttatagaaatttggaatttagtctttatgcagtatgaacaaatttctaaagataagcgaattaatctgcccaaaccatcagttgatactggaatgggtttagagagaattgctgcattgcttcaaggaactcacgacaactatgaaacagatcactttaaaaaaataattaactctgctgcagaaattttaaaagttcagcctaataacgataatttagcaagctttagagtaatagcagatcacttacgagcaagttcatttttgattgctgagggtgtttt

SEQ ID NO: 305968 - DNA, 955 bp, Unknown
  Bacterial polypeptide expressing nucleotide sequence isolated from the Sargasso Sea
aaatttcagttgatggactaccagaaacaatatttttcgggttatgaatctttgtcttctgaagcaagcaaggttctaggactttgggttaagggtgaaactcaaaaaacagtttcaaaggaagaaaatgctctcatcgttttagataaaacgcctttttatgcagaatctggtgggcaaattggggatcagggctttattttgaatgatactttcaaagctaaagttagcgattgtactaagctcggaaaagtttttgtgcatgaggtggaagtgatggatgggaagatttctttaaatgaaaaagtttcttcacaagtaggacctctccacagaaatctatcagccgcacatcattcagcgacacatttattacatgcggctctgaaacaagttcttggaaatcatgttcagcaaaagggctcacttgttggtccatctaaactaagatttgatttcagtcataaaaaagcagtgacttacgaagagctgatacaaattgaaaacattgttaatgaaaaaatagcaactaatgctaatacgcaaaccaaaattatgaatctagatgatgctatagcgcttggtgcagaagcgatgtttgatgaaaagtatgaaaatgaggtcagagttctttcaatggcagataatttttctgttgaactgtgtggaggaactcatgttaaaaaacttggagaaataggaaccctaattattaccagtgaatcaagtgtatcctcaggtgtcagaagaattgaagcattggtaggtaaacctgcatcagatttaattaagcattcactagaaaatttaaacgagctgaaagaaaaactaaaagtttcagaagaccagctctcttcaagaaaagatgtactgttaagagaaaataaagatttaaagaggggaaaacaatcccagactaatttagaatctaagtccaatataaaaaatataatcc

SEQ ID NO: 305969 - DNA, 1087 bp, Unknown
  Bacterial polypeptide expressing nucleotide sequence isolated from the Sargasso Sea
tatgatacttatggatttcctctagagcttactgtagaaattgcagaagaaaatagtatcagtgtagacataaagggttttgaagaagaaatgaatgcacaaaaacagagagctaaagctgctgcaagtaatattgatttgacattagagggatcattagagcgagaaatagatctttttaacaaaactgtttttaatggttatgattcactgctttcggaagctgaaataaagggtatattcttggattcaacattagttaagcaagcaagtgaaggtcagaaagttttaattgttcttgatcagacaactttttatggagaatctggcgggcaagttggtgatattggaacgatattttcaaaagacgtagaggtattggttgataatgttatacgaaagaaaaatgtttttttacattatggaacgattaaaaaaggaatattaaatattggacaaaaagttaatacttatgttagctcctctaatagagctaaggctgctgcaaatcatacagctactcatttattgcaatctgcacttaaatcagttgttaacgaaagtgttggacaaaaaggttcattagtagcctttaataaattacgatttgactttaattcctctaatcctatttctaaagatcaaatttctaagattgagactttagttaactcttggattatggaaaatcatgcactagaaataaaaaatatgtctaagagtgaggctcttgaaaagggcgcagtcgccatgtttggtgaaaaatatgatgatgaggttcgcgttgttaatgtaccaggagtttcaatggaactttgtggtggtacacatgttaaaactacatccgaattaggttctttcaaaataattagtgaggaaggaatttcagccggagtaagaaggatcgaagcattatcaggccaatcagcattagactatttcagtgataggaatgctttagtaaatcaactaagtgatttgttaaaagcaaatcctaatcaactttttgaaagggttaataatttgcaagcagagcttataaataagaataaagagatgcaaaaaatgaaagatgaaattgcatatt

SEQ ID NO: 305970 - DNA, 817 bp, Unknown
  Bacterial polypeptide expressing nucleotide sequence isolated from the Sargasso Sea
atggggtctctaaaaaatcttgatgtaaaaactagattaatgacacctgatgaagcagttgaaaacggtgctttggcattgtttggtgaaaaatacggagatgaagtaagggttctttcgatgggagatgaggatggcaagtatttttctaccgaattatgtggtggaacacatgtaaaaaatacaggagatattggtgaatttaagattgtcagccaatcttctattgctgcaggggttagaagaatagaggcattaagagaaaaacaattagaggaatatttaaaaaataaagagaaattatcaaatctatctgcagaaaaagatgaggaagcaattaaagatttaagtcagcaaattattaaattaggtggaaaaccaagtttagatgaaactgaacagaaaactttaattaaaaacttaactaaacaattagagactatttcagtaaatgtaatcttagaagataaatcaaaaaatattattaaagacgaagaaattaatggagttaaattaagacttcaaagaatagatggattacctccaaaagaattaagaaaacttgtagataaaggtaaaaaagatttaggcgaaggtattgttgtagtgtttgcaaataaagatgacaaggttggattagctgttggagtaactgaaaatttaatcaacaagtttgatgcagttcaatttgttaaagttggatctgaaataattggtgggaaaggtggcggaggaagaaaagactttgctcaagctggtggacaagatcagtcaaaaattgaagaagcttttgaaaagcttaaaagtttaatttaat

SEQ ID NO: 305971 - DNA, 1057 bp, Unknown
  Bacterial polypeptide expressing nucleotide sequence isolated from the Sargasso Sea
aaaaataaatctttaaaaattgataatgaaaaattccatgctcttatgaatgagagtaaagaacttgctaaaaagaattggaaaggttcaggagatagcgcaatagatgatatctggtttgacattaaggataaattaggctctacagaatttttaggatatgaaactaatcaagccgaaggagttgttatttcattgttgaaagataataaagaagttgaaattctaaattctggagatgaaggaatgattattacaaatcaaaccccattttatggagagtccggaggccaaattggcgacaaaggaaaaattatctcaggggagtttaaatttgaagtatcagatgtccaaaaaaaattaggtgatctatttgtacattatggaaatgttaaaaatggctcggtaaaattaaatcagaacgtagaaatgaaaattgacgttcaaaggagagacaatattagagcctatcattcagctacccatttactacacgagtcgcttagaagagttttgggctctcatgttactcaaaaaggatctttagtagaaccagagagacttaggtttgattttagtcatatgaaaccaatttcttctgacgaaattgaaaaaattgagacccatgttaattctatggtagagaaacaatcagatgttaaaactagattaatgacacctaaggaagctgtagaaaacggagctcttgctttgtttggcgaaaaatatggagatgaagtcagagttttatcaatgggcaatgaagataataagtatttttcaactgaattatgtggaggaactcacgttagaaatacaggagatattggaaaatttaaaataatcagccaatcttcaatagccgcaggagttagaagagtagaagctttaagagataaacagctagaagattatttaaagaataaagaaaaaatatcagatctttcagctcaaaaagatgaagaaacaactaaaaatttatcagaaaaaataatcaaacttggtggaaaaccaaatttagacattcaagatcaaaaagaattaatcaaagaactat

SEQ ID NO: 305972 - DNA, 953 bp, Unknown
  Bacterial polypeptide expressing nucleotide sequence isolated from the Sargasso Sea
ttttctttggagattatttaaagaaaaagcaattgaactagcttggaacttggtaacaaaagattttggtttagacaaaaataggctttatttcacagtttttaacgaagatgaagaagcacttaatctttggaaaaaaataacaggacttggagaagataaaattataaagattgcaacatcagataatttttggtccatgggtgaaacaggtccttgtggcccttgctcagaaatattttatgatcatggtgaccatctaaaaggtggattacctggaacaaaagatcaagatggcgatagatacatagaaatttggaatttagtatttatgcaatttgaacaaatttctaaagaaaaaagaataaatttaccaaaaccttccgttgatacaggaatggggttagagagaaccgcagctttgcttcagggtacacatgataattatgaaacagatcattttaaaaaattaataaattcaatttctgaagcagttaaagcaaaacctgatcaaaaaaatatttctagttttagagtaatagcagatcatttgagagcaagttcatttttaattgcagaaggtgttttgccatcaaatgaaggaagaggctatgtattaagaagaattatgcgaagagggatgagacattctcatttactaggatcgaaacaaccaattttttataatatttttaaaactttaatggatgagatgtcagcaaactaccctgaacttgtaagagcagagtcattaattaaagaaactttaaaaacagaagaagaaaaatttttagttttactagaaagaggaatgaaaattttaaatgacgaaatttcaaaaattgataaagttttacctggtgaagtagcttttaaattatatgacacatatggatttcctctagacttgactgaagatattttaaaaaataagtcattaaaaattgataata

SEQ ID NO: 305973 - DNA, 879 bp, Unknown
  Bacterial polypeptide expressing nucleotide sequence isolated from the Sargasso Sea
ttaaagcgagcagagcctttaataacagaaactttaaaaaatgaagaagaaaagttctcctcattattaaatagaggaatagaaattttaaatgataatttaaataaagtaaaaaataattcctttcctggcgaagtggcatttaaactatacgacacttatggatttcctttagatcttacagcagacattttaaaaaataaaaatatacaggtcgataatgttggttttgacagagaaatggaaaaaagtaaaaagattgcaagagcaaactggaaaggatctggagataaatttttagaagaaaaatggtttaaagttagagaagaaattaatcccacagaatttttgggctacgaatttgataaacttgaaggagttattattaaaatatcgaaaggtaaagattttgttaatgaagcaaaagttggagatgaagttgaaatagtaactaatcaaacgccattctatggtgaatcgggtggtcaagttggagatcaaggaataatctattctaatgattgcaaggtaacaattaaagatacccaaaaacaaatgggtgatattcatgttcactatggaagaattgaaaaaggttcattaaaagttaatcaaacagtaaatcttgagattgatgttcaaagaagaaatgatgcaagagcttatcattctgccacacatttacttcatgaggctttaagaagaacattgggtaagcatgtaactcaaaaaggttctttggtaagtcccgaaaaactaagatttgatttcagtcacaacaaaattattgaaaaaaaagagcttgaaaatattgaaaaatatgtaaatgacatggttaatacagcagctgacgttaagactaggattatgacaccaaaa

SEQ ID NO: 305974 - DNA, 976 bp, Unknown
  Bacterial polypeptide expressing nucleotide sequence isolated from the Sargasso Sea
aggtcttatcattttgaaaaaatattctctgaaatcggagatgaaaaagttatcagtggctctgctgcatttaagctatatgatacctatggtttccccttggacctcactcagctcatggcaagagagcgtggtttacatgttgaagaggaagagtttaatagtttgatggatgagcagaagaaaaaagcaaaagaatctggaaaatttatgaatgactccaatgaagttcagtggattcaggtttctgatggtacagattcagaatttgttggttattcaacacacatttctcattctaggattagaaaatatgctaaaaataatgaaactttacttgttgttctggatcaaacgcctttctacgcagagtctggtggccaggtaggtgatgttggaattataaaaggggccagtggagagttgaaagttttagatgttaaaaaagataatgaaacccatattcacttttgtagtggggagcttgataatgtagaggaagagcttgagtgtatggttgataatcagcatagaaattctgtaaaaaataatcataccgctactcatttgatgcacaaggcgctcaaagaagtccttggtgaccacgttaatcaagcaggttcgcttgttcatcctgactatctacgctttgacttgactcactttgaaaaaatatcacaggatgagattattaatatagaaaaaatggttaaccagcagattctcttaaacacagaggttgatgtgactgtccgaggatttgatgaggcgaaggaggctggagcagaagcactatttggcgaaaaatatggtgacgaagtaagagtagttaaagtcgctgactactcacttgagctgtgtggaggaactcatgtagacagaactggtgatattggttcattcaaaatcacagatgagtcatcattatcatcaggagtccgtcgtattgtagcagttactggaaaacaagcggtat

SEQ ID NO: 305975 - DNA, 988 bp, Unknown
  Bacterial polypeptide expressing nucleotide sequence isolated from the Sargasso Sea
tatggcaaaaacattaaacgagatcagatcaacttttttagattatttcaaaaaaaatgatcacaagatagttgagtctagcaatctggttccaaataatgatccaacattaatgtttgcaaattcaggcatggtccagtttaaaaatgtttttaccggattagaaaaaagggattatcaaagagctactacttctcaaaaatgtgtaagagcaggaggtaaacataacgatcttgaaaacgttggctacactccaagacaccatacattttttgaaatgcttggaaatttttctttcggagattacttcaaggaaaggggaattgaacttgcttggaatttaattactaaggattttggattaaataaagatagattatatgtaacagtatttcatgaagacgatgaagccttcaatttttggaagaaaatagcgggttttagcgacgatagaattattaggatagcaacttctgataacttttggtcaatgggcgaaacgggcccttgcggaccttgttcagagatattttatgatcatggagatcatttaaaaggtggtttacccggaaccaaagatgaggatggcgatagatatattgagatatggaatttagtcttcatgcaatttgagcaagtttcaaaagataaaagaattaatcttccaaaaccttctgtagatactggaatgggtttagagagaattgcagcattacttcagggcacacatgataattatgaaacagatcattttaaaaaattaattagttctatttctgaatttacaaaagttaaacaagatgaaaataatttatcaagctttagagtaattgcagatcacctaagagctagctcatttcttcttgcagaaggagtattaccctcaaatgaaggtagaggttatgttcttagaagaataatgagaagaggaatgagacattctcatttgttaggttctaaagaaccagtcttcaataaaattttttga

SEQ ID NO: 305976 - DNA, 1072 bp, Unknown
  Bacterial polypeptide expressing nucleotide sequence isolated from the Sargasso Sea
agttactcaaaaattgattatagaaaacacaataaaggatgaagaaattaaattcaaagatacacttgatagaggtatgagtttattaatgaacgaaataaatgacaaagtctcaccaggcgtactttcaggtcaaaaagcttttgaattatatgacacctatggatttccattagatttaacagaagatgttttaaaatcatatgggtggaaggttgaccaccagggttttgaaaaatctatgaatgaacaaaaaattaaagcaagaaaggcttggtcaggttcgggtgatgatgcttataatcaagatattttaaaattattattagatttaccacctactaactttagaggatatgatgaaaatacttttgaaactaaaattgatttaattataaaaaataacaaagtttatgataatgttttagcaaatgaaaaagttgatattatatgcaatgagacaattttttatgctgaatctggtggacagatatctgataaaggggttatcataggaaaaaattttaaggctaatattttaaattctaaaaaaattactgttggaaacggtaaaattatatttgtttcaacaatagaaattgtaacaggaaaaatcacagttggtgatataatcaaccaagtaatagatttagatttcagaaaacaaatatgctcacatcattcagcaactcatcttcttcatgaagcattaagacaaaaattaggtttgcatgtaactcaaaaaggttcattggttactaatgaaaaactaagatttgattttagtcatcaaaaaccaatttcttcagaattaattaaagaaattgaagatgaggtaaattatagaatattttgtaacgataaagttaccactaaagttatgtctcccgaaaaggctattgaaaaaggagctatagctctatttggagaaaaatatggagatgaagtcagagttgtatcaattggaaaaagtatagataatgaaagagaggcttggtcagttgaattatgtggaggcacacacgtaaaaaatacttctgaaatttcaacctttaaaatattatcagagact

SEQ ID NO: 305977 - DNA, 998 bp, Unknown
  Bacterial polypeptide expressing nucleotide sequence isolated from the Sargasso Sea
ttatcttgaagaggtcgggatagacaattttcatcataccttttttgagatgctagggaattggtctttcggtgattactataaatccgaagcgattcagtgggcatgggagttatttactgaagtttgggggctagataagaatagactttgggttagtgtttacaatgaagatcaagaagcatttgacctatggccaaaagttacagatattgacccaaagcgtgtacttaagtgcggtaaaaaagataatttttgggaaatgggtgagactggtccttgtggcccttgttctgagattcattattttataggtgaagatttaaataagcagactccaaaaggcgtaaataattcagatgaatattgggaattgtggaatttggtctttatacagaataaccgtttagatgatggtagccttgaaaatcttccacaaaaacatgttgatactggagctggttttgagaggatagtctctgtattgcaaaaaacatacaataattataccaccgatctatttttgcctattattaaagaaacggagtctcttacaggacaaaactttatagataatcctgctccattccaagttatcgctgatcatattaggatgttagggttttcaatcgctgatggttgcatgccaggtaatgaaggtagaggttatgttttaagacggattttaagaagagcagctcgatttggaagaatcttgaatcaaaaagatccctttatctttcagcttacagatgtcctttgtgatattatgggtgatgcttttcctgagataaaagaaaaaaagattcacattgaaaaagtcattcgatcagaagaagaaatatttggaaatactctcggtagaggtttaaatcattttgataaagttctttcaaatctatcaggaaagaatattcccggcaaagaagcttttaaactatatgatacttatggctttccacttgatcttacacagctactggctagagaaaaaggta

SEQ ID NO: 305978 - DNA, 886 bp, Unknown
  Bacterial polypeptide expressing nucleotide sequence isolated from the Sargasso Sea
agtcataacaaaccaaacacctttttatggtgagtcaggcggtcaagttggagaccaaggaattatttcaaattctaaatgtaaaattaatattcaagacacacaaaaaaaaatgggcgacctatttgttcattatggaacagttcaaaaaggaacattcgcagttggagatagtgtaaatcttgaaataaacattcaaaaaagaaacaatgcaagagcaaatcattctgcaacacatttacttcatgaggctttaagaagaacacttggtaaacacgtgactcaaaaaggatcattagtaagtccagatagactaagatttgattttagtcacagtaagcctattgaaaaagatgaagtggtaaaaattaataaaattgttaacgaaatagtaaatggtgctagtgatgtacaaacaagaattatgtctcctaaagaagctgttaatttaggagccttagccttatttggcgaaaagtatggtgatgaagtcagagtagtttttatgggaaaagaaaagaatggtttcttttccacggaactatgtggtggaacacatgttaaaaacacaaaagaagttggagagtttaaagtaattagccagtcatcaatagcttctggaattagaagagtagaagcattaagaaaaaaacaacttcaagattatgaaaaatcactcaaagaagataagaatttaaaagaagaaaatcttaaaaaccaaatcaatttaataaaaaaagatttattaaaacttaaagtgaaaccagattttaaggataatgttgatttatcagaaaacttaaaaaatcttaataaacaattagaaaaaattaaaattaaaaagataattgaagataaaaataaaaatattataaaagataaaaaa

SEQ ID NO: 305979 - DNA, 950 bp, Unknown
  Bacterial polypeptide expressing nucleotide sequence isolated from the Sargasso Sea
aattaaagacaacaaagagtcaaaatctttatctactggtgaagaaggaatgattattaccaatcaaaccccgttttatggagagtcaggaggacaacttggagacaaaggtacaattgtttccggtaactctgtttttgaagtagaagatacacagaaaaaacttggagacttatttgttcattatggatctttgaaaactggtgaaataaaaatcaatgatatagtagagatgaaaatagatgtggagagaagagataatttaaaagcttatcattctgctacacatttacttcacgagtcattaagaagaaccttaggtaaacacgttatgcagaaaggatcattagttgctccagataggttaagatttgattttagtcatatgaaaccaattactaatgaagaactagagactatagataaattagttaatgaatatgtttcaaatagttctgaagtaacaacaagaattatgacaccaaaagcagctatagaaaaaggtgcacttgctttctttggagaaaaatatggagaagaagtccgtgttgtatctatgggtaaagaaaaagaggtatatttttcaacagaattgtgtggaggaacacatgtcaaaaatactagtgatattggaaaatttaaaactgtaagtcaatcgtctattgctgcaggtgttagaagagttgaggctctaagagataaacaacttgaggattttattaaaaataaagaaaaattatcaactttatctactcaaaaagacgaagaaaccattcaagatttgtcatcacaaattattaaccttggaggtaaaccaaaggttgataataaagatttaaaagaaattataaaaaatctttcaagacaacttgaacaattaaatgttagttcagttctttcagataaaactaaaaatattattaaagatgatcagataaataatataaaag

SEQ ID NO: 305980 - DNA, 784 bp, Unknown
  Bacterial polypeptide expressing nucleotide sequence isolated from the Sargasso Sea
atggctgacaaatcactaaacgagataagaaaaactttcttaaaatattttgagaaaaacggtcatacaatcgttgactcgagtaatttagtgccaaataacgatccaaccttgatgttcgcaaattcaggaatggttcaattcaaaaatgtttttactgggctggaaaaaagagattataaaagagctacaacttctcaaaaatgtgttcgtgctggtggaaaacacaatgatttagaaaatgtaggatataccccaagacatcacacattttttgaaatgctgggcaacttttcatttggagattactttaaagaaagagcaattgagcttgcttggaacttaattacaaaagattttggattagacaaaaataaactttatttcactgtttttaatcaggatgatgaagcctttaatttgtggaagaaaataacaggttttggcgaggacagaataattagaatagcaacatcagacaacttttggtcaatgggcgaaacaggaccttgtggaccatgttctgagatattttatgaccacggagatcatttacaaggaggtcttccaggaacaaaagatcaagatggtgatagatatattgaaatctggaatttagttttcatgcaatatgagcaagtaactaaagataaaagaattgatttacccaaaccatccgttgatactggaatgggactggagagaattgctgcattactgcaaggtacacatgataactataaaacagatcactttttaaaattaataaattcaatttctgata

SEQ ID NO: 305981 - DNA, 961 bp, Unknown
  Bacterial polypeptide expressing nucleotide sequence isolated from the Sargasso Sea
atgaataccaatgagataagagaagcatttctagaattctttaaaagcaaggatcataatattgtttcttcaagttctctcgtacccaacaatgatgacactttgcttttcaccaatgcgggcatggttcagtttaaagatgtctttttaggccaagaaaaacttaaattttccagagccaccacttcccaaaaatgtattcgtgctgggggtaagcataatgatcttgaaaatgtaggctatacgcttcgccaccatactttttttgaaatgctcgggaactttagctttggtgactattttaaagaggaggctatattttttgcatgggagtttttaactgatgttctcaaactagataaggatagattatggattacagtttataaagatgatgacgaggcaaaagaaatttggataaataagattggcattgatccggatagaatcgcaaagcttggagaaaaagataatttttggtcgatggctgatactggaccttgtggcccttgctcagaaatcttttttgatcacggagataaatatgaaggaacaccgccaggcgaagatggggatgagggcgatagatttgtagagatatggaacttagtctttatgcaattcaaccgagattcagatggtgtgctgcatgatttaccaaaaccatcagttgatactggaatggggctagaaagaattgctgcagtaatgcagggagtaggatcaaactatgaaactgatatcttttcaaatctaattgtagaatccgagaaagcgcttggaaatgctggagatgtctcccataaagtaattgctgatcatctcagatcttcatgcttcttaatttcagatgaggtttttccatctaatgaaggaagaggctatgttctcagaagaatcctaaggagagctattaggcatggctataagattggagcagatcagccttttatgcataagt

SEQ ID NO: 305982 - DNA, 889 bp, Unknown
  Bacterial polypeptide expressing nucleotide sequence isolated from the Sargasso Sea
atgaatgagtttgataaagaaatgcaagctcagaaggatcaatcaaaaaaatcttggaaaggtagctataataatgaagacgaaataatattgaaaaaattattttcaaatttgaatgaaacaaaatttttagggtatgaagataaaactgcagaagaaataataataaaaattatagtagaaaataatgaaaccaataaatttaatgataaagagaaaaaagcatcattaatttttaatagcactcctttttatgctgaagggggagggcaaattggtgatgcaggtaaaattgtaaataatgatttcgtttttaaagttattgatacacaaaaactaggcagaaatatttatacacatataggctttttacaggatggccaaattagtttaaatactaaagccaagttattagtcgacataaatagaagaaaaaaaattactgcacatcattcagctacccatttattacatagatctttgagacaaatactaggtaaccatataactcaaaaaggttcgttagtttctgaaagtaaattacgatttgatatttcacattcacaatctattccacttgaaacattaaaaaaaatagagaaagacataaatacccaaataatcaataactatccagtaaaactgaatatttgtaaaaaagataaagctttagaaatgggggcgatggctatttttggtgagaagtatgaagatacagttagagttgtaagtatgggagaaataactggtaaagaatattctgtagaactttgtggaggcacacatgtaaaaaatactggagaaataggagtatttaaaataatttctgagtccagtttagcctctggtattagacggatagaagctgtagctggcctagcagctttag

SEQ ID NO: 305983 - DNA, 816 bp, Unknown
  Bacterial polypeptide expressing nucleotide sequence isolated from the Sargasso Sea
ataatgatccaacattgatgtttgctaattcaggtatggttcaatttaaaaatgtttttactggcttggaaaaaagagattatcaaagagcgactacttcacaaaagtgtgtaagagcaggtggaaagcacaatgatttagaaaatgttggatatactccaagacaccacacattttttgaaatgttaggaaatttttcttttggagattattttaaagaaaaagcaatacattatgcttgggatttaattactaaagattttggaatagataaaaatagactttatgtaactgtatttcatgaggatgatgaggcttttaatttttggaaaaaaatagcgggtcttagtgaagatagaataatcagaatctctacatcagataatttttggtctatgggggaaactggcccttgcggtccttgttcagaaattttttatgatcatggagatcatttaaaaggtggtttgcctggcagcaaagatgaagatggagatagatttattgaaatttggaatctggtctttatgcaatatgaacaagttacaaaagacaaaagaattaatcttccaaaaccttctgttgatactggcatgggtttagaaagaattgcagccttacttcaaggaacacatgataattatgaaactgatcattttaaaaaactaattcaatcaacatcagatattgtaaataaaaagccagatcaaaataatctatcaagctttagagttattgcagatcatttaagagcaagttcatttttaatcgctgaaggggttttaccatcaaatgagggcagaggttatttctaag

SEQ ID NO: 305984 - DNA, 932 bp, Unknown
  Bacterial polypeptide expressing nucleotide sequence isolated from the Sargasso Sea
gaggcattccacctactggggttctaaagagccaattttttataatatttttaaaactttaaaagatgagatgaaaggcaattactcagaaatagaaagagctgagtctttaataaaagaaacactaagaatggaagaagaaaaatttttaattcttttagacagaggtattaaaatattaaatgacgaaataactaaaatagacaagatattacctggagaagtagcctttaaactctatgatacttacggttttccattagacctgacacaggacatcttaaaaaataaatcattaacaatagataacgataaatttcaaagtttaatgaaagaaagtaaagaacttgctaaaaaaaattggaaaggatctggtgatagtgcgatagatgatatctggttttcgataaaagatagattaggtccttcagaatttctaggctatgaggcagatcaagcagagggcattatattatcattattaaaagacaacaaagaagtaaatgaacttaatgagaatgatgaaggaattattattttaaatcaaactcctttttatggagaatctgggggacaggttggagatactggtgaaataatatctggagactttaagttcgagataacagatgtccaaaaaaaattaggtgatctatttgcacattatggcaaagttaaatcaggaagcataaagattaaagacaatgttgagatgaaaattgatatagatagacgtaataatataagagcttatcactcagcaacacatcttttgcatgagtctttaagaagagtattaggcactcatgttactcaaaaaggatcattagtagcaccagatagattaagatttgattttagccatatgaagcctatttcagaccaggaaatagaaaaaatagaaaatcatgttaattctatggttcaaaaaa

SEQ ID NO: 305985 - DNA, 880 bp, Unknown
  Bacterial polypeptide expressing nucleotide sequence isolated from the Sargasso Sea
aatgaaaatagatattgaaagacgtaacaatcttaaggcatatcattctgcaacccatttattacatgagtctttgagaagaacattgggaaaacacgttatgcaaaaaggatctttagttgcgcctgatagactaagatttgattttagtcatatgaaaccaattacagaggatgagctaacaattattgataaattagttaatgaatacgtacaaaacaaaactgatgtaactacaagaattatgacaccaaaagctgccattgaaaaaggtgctttagctttttttggtgaaaaatatggagaagaagtgagagtagtttctatgggagcggaaaataactcttatttttcaacagaattatgtggtggaacacatgtaaaaaatacaggtgatattggaaaatttaaaactattagccaatcctcaatagctgctggagttagaagggttgaggctttaagggacaaacaactcgaaatattcttaaaaaataaggaaaaaatgtcaaacctttctgcacaaaaggatgaagacaatattaaggatgtttctgctcaaataattaaattaggtggaaaaccaaatttagaaaataaagatacgaaaggattaattaaagaccttaataaacaattagaacaattaaatatccaatctgttttaggtgataaaacaaaaaatataattaaagatgaaagtattaatggtacaaaaattagattacaaaaagttcaagatttatctccaaaagacctaagaaaacttgttgatgcaggtaaaaaagaattacgtgaaggtatagtagttgtttttgcaaataaagatgagaaagttggtcttgctgtgggtgtaacagaaaatttaacaaataaatac

SEQ ID NO: 305986 - DNA, 889 bp, Unknown
  Bacterial polypeptide expressing nucleotide sequence isolated from the Sargasso Sea
aaaaatggtcacgaaatagttggatcaagtaatttagtaccaaacaacgatcctacgttaatgttcgctaactcaggaatggttcaatttaaaaatgtatttacaggacttgaaaaaagaaactacaaaagagctactacctcacaaaaatgtgtaagagcagggggcaaacacaatgatttagaaaatgtaggttacaccccacgacatcatacttttttcgaaatgttgggtaatttttcatttggagactactttaaagagcgtgcaattgaacttgcttggaatttaattactaaagattttggaattgacaagaataagctttattttacagtatttaatgaggatgatgaggctttcaatttatggaagaaaattactggttttggagacgacagaattataaagatttctacatcagataacttttggtctatgggtgaaacaggaccatgcggaccttgttcagagattttttacgatcacggggatcaactatctgggggactgcccggaactaaagaccaagatggagatagatatatagaaatttggaatttggttttcatgcaatttgaacaaatttcaaaagataaaagaattaatctaccaaagccctcagttgatactggtatgggcttagagagaattaccgctttattacaaggtactcatgataattataaaagtgatcattttaaaaaattaattgaatctatatcagacacggtaaatgtaaaagctgatgaaaataacattgcaagttttagagtgattgcagatcatctaagagcaagctcatttttattagctgaaggagtattaccctcaaatgaaggaagaggttatgttctaagaagaattatgagaagaggaatgagacact

SEQ ID NO: 305987 - DNA, 839 bp, Unknown
  Bacterial polypeptide expressing nucleotide sequence isolated from the Sargasso Sea
tcatttgttaggatctaaagaaccagtctttaatcaaatctttgatgcattgaaagatgaaatgaaaggaaactatcctgaattagaaagatcagaaactttgattaaagaaacattaaaaatggaagaagaaaaatttttagtattacttgatagaggaataaaaattttgaatgatgaaatttcaaaaataaaaaaggttttaccaggtgaagtagcttttaaattatatgatacttatggtttcccgttagacttaacggaagatattttaaaaaataaatctttgaccgttgatcaaaataaatttgatgagctaatgaaaaagagtaaagagcttgcaaaacaaaattggaaaggttctggagatgcctctgaagaagaaatctggtttggtataaaagataaaataggacctacagagtttcttgggtatgagtttaaccaatcagaaggagtagtgttatcaataattaaaaataataaagaagcacaaaatatttcaaatggtgaggaagggataattattactaatcaaacccctttttatggagagtctggtggacaagtcggagatcaaggaacaatagtatctggtaattcagtatttgaggttacagatactcaaaaaaaacttggagatctgtttatacatcacggaactctcaaatctggagagatcaagattaaagatgttgtagaaatgaaaatagatattgaaaggcgcaataatcttaaagcatatcattctgcaactcatttattacatgagtctttgagaagaacattaggaaaacacgttatgcaaaaaggatctttggttgcacctgataggttaa

SEQ ID NO: 305988 - DNA, 880 bp, Unknown
  Bacterial polypeptide expressing nucleotide sequence isolated from the Sargasso Sea
tactcatgataattatgaaacagatcatttcaaaaaaataatttactcagcatctgaaattgtaaaagttaaatcagataaatctaacctatcaagctttagagttatagctgatcacttgagagcaagttcatttttaattgctgaaggtgttttaccttcaaacgaaggaagaggatatgttcttagaagaattatgagaagaggaatgagacattctcatttacttggatctaaggaaccagttttttataatttgtttgatactcttaaaaatgaaatgtctggaaattatcccgaacttgtaagagccgagtctttaattaaggaaactttaaaaatggaggaagaaaaattcttagttctattagacagaggaattaaaattttaaatgatgaaatatctaaaatagataaagtgttaccaggtgaggtagcttttaaattatacgacacctatggtttcccattagatcttaccgaggatattttaagaaataaatcaatgtcaattgatacagaaaagtttcaatctctgatgaaggaaagtagggagcttgctaagaaaaattggaaaggttctggcgatgctgcagttgaagatatttggtttggaataaaagataagttagaagcaacagaattcttaggatatgaaaccaatcaagctgaaggtgtagtcctatctctcttaaaagacaataaagaggtagatcagttaaaagaaaatgatgagggaatgattatagtaaatcaaactcctttctatggtgagtctggaggtcaagtcggtgatactggtgaaataatttcaaatgattttaaatttgaagtaactgatgttcaaaaaaacttggagatttatttgtccattatggaa

SEQ ID NO: 305989 - DNA, 840 bp, Unknown
  Bacterial polypeptide expressing nucleotide sequence isolated from the Sargasso Sea
tcgaaagactattgctagtcacagagtaatttctgatcatcttagagcaagtagtttcttaatagccgaaggaatattgccttccaacgagggtcgaggatatgttctaagaagaataatgagaagagggatgaggcatgctcattcattaggaagtaaatcaccagttttttataaactttttaatgttttactaagtgaaatgaaaaatagttatccagaactagaaactggtaaagacctgatagttgaaactttaagaaatgaagaagagaaattctcttctttacttgaaagaggaatgaaaattttagatgaaaatttaaataaagtaaaagataatactttacctggctcagtagctttcaagttatatgatacttatggttttcctttagacttaacagcagacattttaagaattaaaaatatccaagttgacaacgttgcatttgaaaaagaaatggaaaaaagtaaagctttagctagagctaattggaaaggttctggtgataagtcagttgaagagaagtggtttaaaattagagaggaactaagtccaacagaatttttaggctatgaatttgataaagcagagggagtcgtattaaaaatttctaaaaataataaatttgttgatagcgcaaataatggggatgagatagaaattattacaaatcaaacaccattttatggagagtcaggaggtcaagttggggaccaaggaataatttttaactctaattgtaaaataaatataactgatacccaaaaaaaaatgggagatctttttgttcatataggtaaaaataaaaaaggctctataaagataggccaaaa

SEQ ID NO: 305990 - DNA, 970 bp, Unknown
  Bacterial polypeptide expressing nucleotide sequence isolated from the Sargasso Sea
aagagctagctcatttcttcttgcagaaggagtattaccctcaactgaaggcagaggttatgttcttagaagaataatgagaagaggaatgagacattctcatttgctgggttctaaagaaccagttttcaataaaatctttgatacattgaaagatgaaatgaaaggaaattatcctgaattagaaagatcagaaactttaattaaagaaacattaaaaatggaagaagaaaaatttttagtattacttgatagaggaataaaaattttgaatgatgaaatttcaaaaattaaaaaagttttaccaggtgaagtagcgtttaaattatatgatacttatggtttcccactagatttaactgaagacattttaaaaaataaatctttgactgttgatcaaaataaatttgatgaactaatgaaaaagagcaaagaacttgcaaaacaaaactggaaaggttctggagatgcctctgaagaagaaatctggtttggtataaaagataaaataggacctacagagtttcttggatatgagtttgaccaatcagaaggagtggtgttatcaataattaaaaataataaagaagcacaaaaaatttcaaatgatgaggaagggataattattactaatcaaacccctttttatggagagtctggtggacaagttggagatcaaggaacaatagtatctggtaattcagtatttgaggttacagatactcaaaaaaaacttggagatctgtttatacatcatggaattctaaaatctggtgagattaagattaaagacgttgtagaaatgaaaatagatattgaaagacgtaacaatcttaaggcttatcattctgcaactcatttattacacgagtctttgagaagaacattgggaaaacacgttatgcaaaaaggatctttagttgcgcctgatagactaagatttgattttagtcatatgaaaccaatttac

SEQ ID NO: 305991 - DNA, 844 bp, Unknown
  Bacterial polypeptide expressing nucleotide sequence isolated from the Sargasso Sea
tatacaccaagacatcacacattctttgaaatgctaggaaatttttctttcggaaattatttcaaggaaaaagctatatattatgcttgggaattactgacaaaagatttcggtattccaaaagacaaactatcagtcactgtatattttgaggaccatgaagcttttaaattatggaaaaaagtagccggattacctgaaagtaaaattgtcaaaatttctacaactgataatttctggtctatgggtgaaacaggcccatgcggtccttgttctgagatattttatgatcacggtgaccagcttaaaggtggaccacctggcagtccagaccaagatggcgatagatttattgaaatttggaacctagtatttatgcaatttgagcaagtttcaaaaggcaaaagagtagatttgcccaaaccttcggttgatacaggaatggggttagaaagaataacagcagttcttcaaggaacacacgataattacagtatagatcattttacaaaattgatgagcgcatcatcggaaatcacaaaaactaaaatagaccaaaaaactatagcaagccatagagtgattgcagatcatcttagagctagcagcttcttaatagctgaaggagttttgccatcaaacgaaggtcgtggttatgttttaagaagaattatgagaagaggtatgcgccatgcacatacactcggaagtaaaaaaccaatattctacaaattattcgacgttctattaaatgagatgtcacatagttatcccgaaatcaaaagaggtaaagatttaattattgaaacattaaaaaacgaagaagaaaaattttcatcacttt

SEQ ID NO: 305992 - DNA, 892 bp, Unknown
  Bacterial polypeptide expressing nucleotide sequence isolated from the Sargasso Sea
gaagttcctcattgggtgccatcacaggataagaccctactttttactaatgctggtatggttcaattcaaagattatttcacaggtgagcaaaagccactttatgattccgctacgtccgtccaacggtgcgtccgcgccggaggaaaacataatgatttaaataatgttggctttacctctcgccatcacactttttttgaaatgttaggaaactttagttttggctcatattttaaagaagaagcgattgcttttgcatgggacctcctaacgaatgaatttaatatttcaaaagaaaagttattagtaactgtatataaagatgatgatgaggccgccaaaatttggagaaaaaaaattaatgttccagaaaacaaaattattaaatgcggtgaaaaggacaatttttgggcaatgggggacatcggtccgtgtggtccctgtacagaaatattttatgatcatggtccgaacgtagaaggggggcctcctgggaccccaaacgaaggcggcgatagatttgttgaaatttggaacctagtttttatgcaatatcagatggattcgaccggtgtgaaaaacctacttccaaaaccagcggtggatacaggtatgggtttggagcggatcgctgcagttttacaaaatgtaacgggtaattatgagatagatcttttcaaaaaacttaataatgctgtgatgaaatctttgggtaacgatgtggaaaatgtttctattttgcgcattatttctgatcatattagatcagctgcttttctgataatggatggtgtcgtgccgggaaatgagggaagaggttatgttctcagaaggattatccgccgtgcattacgttatgggcataaggtaaatgataagaaactgtttt

SEQ ID NO: 305993 - DNA, 589 bp, Unknown
  Bacterial polypeptide expressing nucleotide sequence isolated from the Sargasso Sea
tatgaaaactcgggagatccgaaagcagttccttgattacttcgctgcaaacgggcacgaaatcgtgtccagcagtccgttagtgccccataacgatcccacgctgctctttaccaacgccggtatggtgcagttcaaggatgtttttctcgggcaggacaaaagagcctataaccgtgcggtgaccgcgcaacgctgtgttcgtgccggcggcaagcataacgatctcgacaacgtgggctacacggcccggcatcataccttttttgagatgttgggcaatttcagctttggcgactatttcaagcgcgaggctattgagcacgcctggacattgctgaccgaaggatatggtctgccagctgaaaaactctgggtcacggtatttgatgaggacgacgaggctgcagatatctggctaggcgacatgggggttcctgccgagcgtttcgcacgcattggtgcgagcgataatttctgggccatgggcgacaccggtccgtgtggtccctgcagcgagattttctacgatcacggccctgaggtggcaggaggcccgccagggactccggaagctgatggtgaccgc

SEQ ID NO: 305994 - DNA, 838 bp, Unknown
  Bacterial polypeptide expressing nucleotide sequence isolated from the Sargasso Sea
gaaactgttgaaaaaggaataaaaattttagatgaggaaatatctaattctacaaatatatttaatggagaagtagcatttaaattatacgatacctatggatttcctttagatttaacacaagattatttgaaaagtaaaaatattgaagtcgatataaaaacatttgaacaaaaaatgttagatcaaaagcaaagagcgagacaaagctggaaaggtacaggagacattgaggatgaaggcatttggtttgaaataacttctaaaatagagccaacagaatttttaggatattctgatatggaagctgattgtaaaattatttcaatcatatcagaaagtaagtcagtagataaaattaaaaaagatcaagaagcaattataatattaaatcaaacacctttttatggagaaagtggtggtcaggtgggagatcaggggttttttgaaaataataactttaagtttgaagttattaatactacaaaaatatttggaaactattttcttcacaaaggtaaagtaattagtggtgaatgcaaaattgaagatactattaaagcaagcataaatacagtgaatagagattttataaaatataatcattcttcaactcatttattacatgctgctctaagaaaaatactgggcaatcatgtcacacagaagggatcacttgtaaattcagaaaaactaagatttgattttagtcacaataatccaattgaaaaagatcaactcataaatgttgaaaaaattgttaatgatcaaattaaaaaaaatggaattgttgaagttaaaattgtggatcaaaaaaaagctattaaagaaggtgcga

SEQ ID NO: 305995 - DNA, 556 bp, Unknown
  Bacterial polypeptide expressing nucleotide sequence isolated from the Sargasso Sea
atgaaaagtgctgaattacgccaggcctttctggactattttgccagccaggggcacaccaaggtgtcgtcctcctcactggtacctgctaatgacccgacactgttgtttactaacgcgggcatgaaccagttcaaggatgtttttctgggacgtgagtcccgggattacactcgtgctacaagctcccagcgctgtgtccgcgccggcggtaagcacaatgacttggaaaacgtgggttatacggcgcggcatcacaccttcttcgagatgctgggcaacttcagcttcggggactatttcaagcgcgaagcgatcaagtttgcctgggagttcctcactggcaccttggggctaccggaagagcggctgtgggttactgtgcatgtttccgacgatgaagccgctgatatctggctaaaagaaatgggagtcagtgccgagcgcttctcacggttggacgaagacaacttttggcaaatgggcgataccggcccatgcggcccgagctctgaaattttttatgaccacggcgccgatgtgcccggtggcccac

SEQ ID NO: 305996 - DNA, 541 bp, Unknown
  Bacterial polypeptide expressing nucleotide sequence isolated from the Sargasso Sea
tatgaattcaaatcagattaggtcaacatttctcaattattttaaaaaaaatggacatgaggttattcattctagttctctagtaccagataatgatcctactctaatgtttgctaactctggaatggtacaatttaaaaatatttttacaggtaaagagacaagagattacaacagagcaactactgctcaaaaatgtgtaagagcaggaggtaagcataatgatttagaaaatgtaggatacactacaagacaccatactttttttgaaatgttaggtaatttctcttttggagattattttaaagagttggccatagaactagcttggagtctaattactaaagaatattcaataaataaagacaggctattagtaactgtttattctgatgatcaggaagcttttgatttatggaaaaaaatagctggattgtctgaaaataaaattattaaaattagtacatctgataatttttggtcaatgggtgaaactggtccttgtggtccatgttctgaaatattttatgatcatggtgac

SEQ ID NO: 305997 - DNA, 802 bp, Unknown
  Bacterial polypeptide expressing nucleotide sequence isolated from the Sargasso Sea
agtaaaaaaccgattttttacaaattattttatgttcttttaaatgaaatgtcaaagagctatcccgaattaaatacaggaaaagatttaattgtagaaacattgaaaaacgaggaagaaaaattttcatctcttttagaaagaggaatgaaaattttagaacaaaatttagaaaaagttaaaaataatactttacctggtgagatagccttcaaactttatgatacttacggttttcctttagatcttactgccgatattttaaaaaataaaaatattaaaattgatacctcagaatttgataaagcaatgcagaaaagtaagcaagtggcaagagcaagctggaaaggttctggtgataagtcggtagaggaaaaatggtttaaagtaagagagcatttgaatccaactgaatttttgggttacgaattagataaagctgaaggagtaattttaaaaatatcaaaagataataaatttgttgaaaatgcaaaagaaggcgatgaagttgaagttataacaaatcaaacaccattttatggtgagtcaggaggacaggttggagaccaagggattatttcaaactctaaatgtaaaattactataaaagatacccaaaaaaaaatgggcgacctatttgttcattacggaaaagttcagaatggttcgattaaagttggtgaaagtgtaaatcttgaaataaatgttcaaaaaagaaataattctaaagccaaccattctgcaacacatttacttcacgagtctttaagaaggacacttggtaaacacgtaactcaaaagg

SEQ ID NO: 305998 - DNA, 266 bp, Unknown
  Bacterial polypeptide expressing nucleotide sequence isolated from the Sargasso Sea
tatggcttctttaaacgaaattcgttctacttttttaaattactttaaaaaaaatggtcatgagattgttgcttctagcccattagttccaagaaacgaccccacgttgatgttcactaattctgggatggtccaatttaaaaatctttttacagggctggaaaaaagagattatttaagagctgttaccgcccagaagtgcgtgcgggctggcggaaaacataacgacttagataatgttggttacacagcgcgccatcatactt

SEQ ID NO: 305999 - DNA, 751 bp, Unknown
  Bacterial polypeptide expressing nucleotide sequence isolated from the Sargasso Sea
tatggctgataaatcactaaatgaaataagaagtacttttctggggtattttaaaaaaaatgatcataagattatagagtctagtaatttagtgccaaataatgatccaactttaatgtttgcaaactccgggatggtacaattcaaaaacgtattcacaggactagaaaagagaaattataaaaaagctaccacttctcaaaaatgtgtgagagctggaggaaaacacaatgacctagaaaatgttggatatactcctagacatcatacgttttttgaaatgctaggaaatttttcttttggagattattttaaagaaagagcaatagagcttgcctggaatttagttacaaaagattttggaattgataaaaataggctttatgtaacagtttttcacgaagatgatgaggcgtttaatttttggaaaaaaattgcaggcctagataaagatagaataattagaataccaacctcagataacttttggtctatgggtgagacaggaccttgtgggccttgttctgagatattttttgatcatggtgaaaaattaaaaggaggattgccaggttcaaaagatcaagatggagatcgttacattgagatatggaatcttgtttttatgcaattcgaacaagtttcaaaagataaacgaattgatttaccaaaaccatctgtagatacaggtatgggtctagaaagaattacagctttattgcaaggaactcatgataactacgaaacagat

SEQ ID NO: 306000 - DNA, 664 bp, Unknown
  Bacterial polypeptide expressing nucleotide sequence isolated from the Sargasso Sea
gaaatgaaaggaaattatcctgaattagaaagatcagagactttaattaaagaaacattaaaaatggaagaagaaaaatttttagtattacttgataggggaattaaaattttgaatgatgaaatttcaaaaataaaaaaagttttaccaggtgaagtagcatttaaattatatgatacttatggttttccactagatttaacagaagatattttaaaaaataaatctttgactgttgatcaaaataaatttgatgagctaatgaaaaagagcaaagaacttgcaaaacaaaactggaaaggttctggagatgcttcagaagaagaaatctggtttggtataaaagataaaataggacctacagagtttcttggatatgagtttaaccaatcagaaggagtggtgctatcaataattaaaaataataaagaagcacaaaatatttcaaatggtgaggaaggaataattattactaatcaaacccctttttatggagagtctggtggacaagttggagatcaaggaacaattgtatctggtaattcagtatttgaggttacagatactcaaaaaaaacttggagatctgtttatacatcatggaattctaaaatccggtgagattaagattaaagatgttgtagaaatgaaaatagatattgaaa

SEQ ID NO: 306001 - DNA, 733 bp, Unknown
  Bacterial polypeptide expressing nucleotide sequence isolated from the Sargasso Sea
atggcaaaaacattaaatgagataagaagcacttttctaaattattttaataaaaacgatcataagattattgaatcaagcaatttggttccaaataatgatcctactcttatgtttgccaattcaggcatggtccaatttaaaaatgtatttactggcttagaaaaaagagactacaaaagagctactacttctcaaaaatgtgttagagctggaggaaagcataatgatcttgaaaatgtaggctatacaccaagacatcataccttttttgaaatgttgggaaatttttcttttggtgattatttcaaagatagagcaattgagcttgcttggaatttaataacgaaagattttggtttagacaaaaatagactttatgtaaccgtttaccatgaagacgaagaggcatttaacttgtggaagaaaatagccggatttaatgatgataaaataataagaatagcaacttcagataatttttggtcgatgggtgaaaccgggccctgtggaccatgctcagaaattttttatgatcacggagaacacttaaaaggtggtctacctggctcaaaagatcaggatggagatagatttattgaaatttggaatttagtttttatgcaatttgaacaaatttcaaaggaaaaaagaattaatctaccaaagccttcagtagataaagggatgggattagaaagaatagcagctttattacaaggcactcatgata

SEQ ID NO: 306002 - DNA, 875 bp, Unknown
  Bacterial polypeptide expressing nucleotide sequence isolated from the Sargasso Sea
aaaaatatactcaaaattaaatttagatcctactgaatttttaggttttgaaacactgactactaaatctaaagtgttagctattattcaaaataatgaaattaaagaaaaaatttatgaaggagaagattttgaaataatcactgataaatctcctttttacgcagaaaaaggaggtcaaataggtgacacaggtaaaggtttttcagaaactggagaatttgaaataattgacacaacttctccatatggaggggtttttatacataaatcaaaaatgaaatcaggagaaattacaaaaaactctctcataaagttagaagtttccgaagatagaagagaaaaaataaaaagaaatcacacagctacacatttacttcatgcagccttaagagaaattattggaatacatgttcgtcaatctggatcactagttcatcctgattatctaaggtttgactttactaatctagagtcactaagtgaatcttctataaaaaaagtcgaagaaaaagttaatgattatataagaaacaatttagaagttgaggtttgcaacacgacttataataaagcaatagaagacggtgctttagcattttttgatgataaatatgagcatgatgtaagaacaataaaaattgatgctccatggagctttgaactatgtggcggaacccatatgagtagaactggaggcataggattatttaagattgtttcagaagctggcataggatctggtaataggaggatttttgcaactacaggtatagcaaccgaaaatatagttgaaaacaatcaaactattgtaagagaaataatgaaaaccctaagttcaaatactgaagatgttattgataaatttaattcat

SEQ ID NO: 306003 - DNA, 799 bp, Unknown
  Bacterial polypeptide expressing nucleotide sequence isolated from the Sargasso Sea
ataaaaattttaaatgatgagatctctaaaattgataaaattttaccaggagaagtggcttttaaactttatgacacttatggttttccattagatttaactgaagatattttaaaaaataaatctttaaagatagataataaaaaatttcattctcttatgaaagaaagtaaagaacttgcaaaaaaaaattggaagggatcaggagatagcgcaattgaagatatttggtttagtataaaagataaattaggaacaacagagtttttaggttatgagactaaccaggcggaagggaaaattttatctcttcttaaaaataataaggaagttaaagaattaagctccggtgatgaagctatgattattgttaatcagacaccattttatggggagtcaggtggacaagttggagacaaaggagaaattgtatctggagaatttaagtttgtggtatctgatgttcaaaaaaaaataggagatctatttgtacattatggaacagttaaaagtggttcaataaaattaaatcaaaatgttgagctgaaaattgatgtacaaagacgtgataatattagagcttatcattcagcaactcatttattacatgaatctttgagaagagttttaggttctcatgttattcaaaaaggatctttggtagagccagacagacttagatttgattttagccatatgaaaccaattactcctaatgagattaataaaattgaagattttgtgaattcaatggttaagaaaaaatcagaagttaaaactagattaatgacccctaaag

SEQ ID NO: 306004 - DNA, 865 bp, Unknown
  Bacterial polypeptide expressing nucleotide sequence isolated from the Sargasso Sea
gagcgcaccaagcgcaaccactcggctacgcacctgctgcatgcggctctgcgcaatatcctgggtgaacacgttacccagaagggctcgctggtcgacccggacaaactgcgattcgacttctcccatttcgaagccgtgacgccggagcagctgagagagatcgagcgtacggttaacgaacagatcctggagaacacgccggtagatatcgacattaccgatatggataccgcgaaggaaaaaggagcgatggctctgttcggcgagaagtacggcgatgtagtacgggtgctcaccatgggtaccgacaaatactctgttgaactgtgtggtggtactcacgttgcccgtaccggcgatatcgggttgttccgcattacctccgaaagcggcatttcctctggcgttcgtcgtattgaggctgtaaccgggttgggtgcgctggaatgggttgatgaaaccgagcgtacactgcgcgagaccgcacgtctggttaagggcacccgtgattctgtcgtcgacaaggtcaagcaggttctggaccgcaatcgccagcttgagaaggatgtcgatgccctgaaagcaaaactggcgagttccgcgggtactgatctggctggttccgcggtcgaagtggcaggcctgaaggtggtggcctccgagatggaaggcgctgaccgcaaggccttgatggaaactgcggatcagctcaaaaacaagttgggcgagggcgttgtggtgctggccactgtcgaagacggaaaggtggtgctggtggccggtgttaccaagtccgccaccaaccgcatcaaggctggcgacttgatgaagcatctggcctcgctggtagatggcaaaggcg

SEQ ID NO: 306005 - DNA, 791 bp, Unknown
  Bacterial polypeptide expressing nucleotide sequence isolated from the Sargasso Sea
tataccccaagacaccatacattttttgaaatgctcggaaacttttcttttggggattattttaaagagagagcaatagagcttgcatggaatttgataactaaagattttggattagataaaaatagactttattttactgtttttaatgaagatgaagaagcatttaaactttggaaaaaaatatcaggcttaaatgaaaataaaataatcaaaatttctacttcagataatttttggtcgatgggtgaaacaggtccatgcggaccctgttctgaaattttttatgatcatggagatcatttaaaaggcgggcttcccggaagcaaagaccaagatggcgatagatatattgagatttggaacttagtttttatgcaatatgaacaggtttcaaaagataaaagaatagatttacctaaaccttcggtagatacaggtatgggtcttgagagaatggcagctctcctccaaggtacacatgataattataaaactgatcattttttaaaattaattaattcaatctctgaaactgtaaaagtaaaacccaatgaaaataatttatcaagttttagagtgatagccgatcacttaagagcaagttcgtttctacttgctgaaggtgttttgccatctaatgaaggaagaggttatgtccttagaagaattatgagaagaggaatgagacactcacatttattaggatctaaagaaccgattttttacaatatttttaaaactcttttagatgaaatgtctaaaaattatccagagataaaaagggcaga

SEQ ID NO: 306006 - DNA, 918 bp, Unknown
  Bacterial polypeptide expressing nucleotide sequence isolated from the Sargasso Sea
ccacgttactcaaaagggatctttagttgagccaagtagattaagatttgattttagtcatatgaaaccaatttctaatgatgaaatcgataaaattgaacaattggtgaattcaatgatatctaaaaaaacagacgtaaaaactcgattaatgacacctgatgaagcagttgaagatggtgctttagctttatttggtgaaaaatatggagaggaagtgagggttctttcaatgggtgatgatggtggaaaatatttttctaccgaactttgtggaggaactcatgttaaaaatacaggtgatattggtcaatttaaaattaccagtcaatcttccattgctgcaggagtaagaagaattgaagctttaagagataaacaattagaaaattttttaaaaaacaaagaaaaattacttaatcaatcttctgaaaaaaatgatgaattaataaaagatcttacaaaacaaataattggattgggaggtaaaccaaatatagaccaatcagatcaaaaattattaattaaaaatttgaccaaacaattagaaaacttatctgtaaaagttatactaaatgacaagacaaaaaatcaaattaaggatgaggaaattaaaggtataaaaattagatttcaaaatgtagatggtcttccccctaaagaattaagaaaacttgtagatgatggtaaaaaacaattgggcgagggaattgttgtagtttttgctaacaaagatgaaaaggttggtgttgcagttggtgtaacaaataaattgattgataaatttgatgctgttaaatttgttaaattaagttctgagattattggtggtcaaggcggaggtggaagaaaagattttgctccagcaggtggacaagatccaaataagattaaggaagcttttgaaaaattaaatct

SEQ ID NO: 306007 - DNA, 851 bp, Unknown
  Bacterial polypeptide expressing nucleotide sequence isolated from the Sargasso Sea
gatggagcatattgagcttgcttggaaattgattaccaaggaatttggtttagaaaaagatagactttttgtgacagtatttcatgaagatgacgaagcttttaatttttggaagaaaatagctggtttaaatgatgataaaatcattagaatagctacttcagacaatttttggtctatgggcgaaactggtccttgtggtccatgctcagagatattttatgaccatggcgaccatttaaagggaggacctccaggttcaaaagatgaggatggagacaggtttatagaaatttggaatttagtatttatgcagtatgagcaaatttcaaaagataaaaggattaatttacccaagccctcagttgatacaggaatgggactagagagaattactgccttacttcagggtacgcacgataattataaaactgaccattttaaaaaattgattaatacaatttctgaagcagttaaagtaagccctaacgaaaataatctttcaagttttagagttatagcagatcatcttagagctagttcttttttgatagctgaaggtgtcttaccttcaaatgaaggcagagggtatgtgcttagaagaataatgagaagaggtatgagacattcacatcttttaggatcgaaggaaccaattttttacaatatttttaaaactttaaaagaggaaatgaaaggaaattaccctgaagttgaaagggcagaatctttaataaaagaaaccttaaaaatggaagaagaaaagtttttagttttactggatagaggaataaatattttgaataatgaaatttcaaaaatagataaggtacttccaggtgaagttgctt

SEQ ID NO: 306008 - DNA, 556 bp, Unknown
  Bacterial polypeptide expressing nucleotide sequence isolated from the Sargasso Sea
atgaagaccgctgaaattcgtaactgtttcctctccttttttgaggagcgaaagcacgctgtaaagtcgtcatcatccttggtgccgacggacgaccccaccttgctctttacgaacgcggggatggtccagttcaagaaggtgtttctgggccaagaagacctcggggtgaagcgcgctgctacatcgcagaagtgcgtgcgtgcgggcggtaagcataatgatctcgaggaggttgggcggacgactcggcaccacaccttttttgagatgctgggtaacttctcattcggcgactacttcaaaagggatgccattcggtacgcgtttgagctcctcactgatgtatatggtttagagcctgagcgcctgtatgcgactgtgcatgattcagacgacgaggcagaagatatctggttgaacgatatcggattgccggcggatcgcgtctatcgacttggtgacaaagacaacttttggcagatggcagacactgggccatgtggtccgtgctcggagctgcattacgatcttcgagacgagccggagcctgtct

SEQ ID NO: 306009 - DNA, 187 bp, Unknown
  Bacterial polypeptide expressing nucleotide sequence isolated from the Sargasso Sea
tatgaaagccgccgaaatccgcgagaaattcctcaagttcttcgaatcgaagggccatacgatcgttcgctcgtcgagccttgtgcccggcaacgacccgaccctgctctttaccaattcgggaatggtgcagttcaaagatgtgttcctcggcgcggaatcgcgtccgtatgcgcgcgccacgacc

SEQ ID NO: 306010 - DNA, 757 bp, Unknown
  Bacterial polypeptide expressing nucleotide sequence isolated from the Sargasso Sea
gatgaaaacgaatgaaataagacaagcatttatcaaattctttgagacggaagggcatcagagcgtcaagagttcgcctctgattcctgcaaatgattcaacactcttgtttacaaacgctggaatggttcagttcaaggacatttttttaggaaaagaagatcaaggctttacaaaagcagtcagtgctcagagatgtttaagagcaggtggtaagcacaatgatcttgaaaatgttggttatacatcacgtcatcacactttctttgaaatgcttggcaactttagttttggagactactttaaagaggatgcaatccaattggcatgggacttcattaccaatgagctcagactcgaaaaggatcgtctttggataaccatttttgaagatgatgatgaggctgcaaaaatttggcttgaaaaggttggagtatcagctgatagacttgttcgactgggtgaaaagtctaacttttggtctatgggtgatactggaccatgcggtccttgtagcgagatattttatgatcatggagatcatatcgatggcggtcctcctggatcagatgatgaagatggcgatcgttttgtagaaatatggaatcttgtcttcatgcaatttgatagacaagcaaatggggagcttgttaacttgccaaaaccatcagttgatacaggtatgggattagagcgaattgcagcagtgatgcaaggtgtaagcagtaactatgatattgatttatttcaaaaataa

SEQ ID NO: 306011 - DNA, 823 bp, Unknown
  Bacterial polypeptide expressing nucleotide sequence isolated from the Sargasso Sea
ggaaattttaaacaagtttcgagtgatttatcctgggtactcatttctgatagtaaggattctatttttcttggttatgaacaaatagaatctcaatcacaaatatgtaagtatgcgacaacagatgattataatgttttagttctagataagactcctttttatgcagaatcaggtgggcagattggagacactggagttataaaaattggtgatgatactttaactgttatggattgtcaaaaaaatggggatgaaattcatcatatatgctcagggtcatttaataatgaaaaattactagagccagttctatgtataatagatttaaaccgtagacaaagaataaggaaaaatcataccgcaacacatcttttacatgcagcattgaaaaaaactttaggagatcatattcaacaagctggttcattagtgcatccagattatttgcgttttgatttaacccattcagaaaaaatatctaatgatgaggtatcagaaatagagaatttagtgaatgacgaaattcagaaaaatgtaaggttagatatttcaattaaaaattttgatgtagccaagtctgaaggtgctgaagcattgtttggtgaaaaatatggagataaagtacgtgttatatctattggtgatttttctatggagctttgtggaggtactcatgtaaatagaactggggatattggcttacttaaaattactgaagagtctagccttgctgcaggagtgagaaggatggtagccgttaccggccctgaagcaataaactattttcagaacaaagtaagtattgttcaagaattgcagg

SEQ ID NO: 306012 - DNA, 925 bp, Unknown
  Bacterial polypeptide expressing nucleotide sequence isolated from the Sargasso Sea
cagagcataccattcagcaactcacttattacacgagtctcttagaagagttttgggtactcatgtaacccagaaaggttcattagttgaagcagatagacttagatttgactttagtcatatgaagccaatatcagatgaggagataaataaaattgagcaacatgttaattcaatggttaatacaaaatctgaagtaaaaacaagacttatgaccccaaaagaggcagttgaaaatggtgctttagcattatttggtgaaaaatatggagatgaagtaagagtactatcaatgggagacgaaaagagtaaatatttttcaacagagctttgcgggggcacacatgttaaaaatacaggagatattggcaaatttaaaatagttagtcaaagctctatcgctgctgggataagaagagttgaagcactaagagataaacaacttcaggaatacttaaataataaagaaaaattatcagatctatctgctcagaaagatgaaaagactataaacgatctttcttctaaaataataagattgggtggcaaaccaaatttagacaataaagatcaaaaaggtttaattaaagacttgtcgaaacaattagatcaattaaacgttgatctaatattaaaagataagtctaaaaataaaataaaagacgaaaaaataaatggtgttaatgtaagattacaaattgtagaggatttaccaccaaaagatttaaggaaattagtagatcaaggtaaaaaggatttattagaaggaatagttatagtatttgctaacaaagatgaaaaagttgggttagcgattggtataacagataagttaatttcaaaatatgatgcggttaaatttgcaaaacttggttcaaagattactggtggaaatggcggtggtggtagaaaagattcgctcaag

SEQ ID NO: 306013 - DNA, 916 bp, Unknown
  Bacterial polypeptide expressing nucleotide sequence isolated from the Sargasso Sea
atagataaagttttaccaggtgaagtcgctttcaaactttacgatacttatggatttccattagatttaacacaagatattttaaaaaataaatcactagaaatagataataaaaaatttgatgacctaatgaaacaaagtagggaacttgcaaagaaaaattggagaggttctggagatagcgcagttgatgatatttggtttgcaattagagataaattgggagcaacagagtttcttggatatgaaactgatcaggcagaaggtgttgtgaaatctttgttaaaaaacaatgaacaagtcgagtctttaaaaactggtgatgagggtatgataattctaaatcaaacacctttttatggagaatctggaggacaagttggtgatactggagaaataataacaaacaattgtaaatttgaagtttcagatgttcagaaaaaattaggagacctatttgttcattacggaaaagtaatttctggtgaaattaaaattaatgaaagtgttgaactaaaaattgacgttgaaagaagagaaaatataagagcctatcattccgcaacacacttattacatgagtcattgagaagagttttaggaacgcacgtgacacaaaaaggatctttagtagaggctgataggctaagatttgactttagtcatatgaagccaatttcacctgaggaaatagagaaaattgaaagttttgttaattcaatggttgagactaaatctgatgtaaaaactagacttatgacaccaaaagaagctgtagataatggtgccttagctttatttggagaaaaatatggcgatgaagtaagagttttatccatgggtgatgaaaaaaataaatatttttctacagaattatgtggtggtacgcacgtaagaaatacagctgatatcggaa

SEQ ID NO: 306014 - DNA, 866 bp, Unknown
  Bacterial polypeptide expressing nucleotide sequence isolated from the Sargasso Sea
gtcagataaatctaatctttcaagttttagagttatggctgatcacttgagagcaagttcgttcttaattgctgagggagttttaccctctaatgagggaagagggtatgttcttcgaagaattatgagaaggggaatgagacattctcatttacttggatctaagaaaccagttttttataatttgtttgatactcttaaaaatgaaatgtctggaaactatccagaacttgtaagagctgaatctttaattaaagaaactttaaaaatggaagaagaaaaatttttagttcttttagatagaggaataaaaattttaaatgatgagatatccaaaatagataaagtgttaccaggtgaagtagcttttaaattatatgacacctatggtttcccattagatcttaccgaagatattttaagaaataaatctatgttaattgatattaaaaaatttcaatctttgatgaaggaaagcagggaacttgctaaaaaaaattggaaaggctccggtgatgcagcggttgaaaatatttggtttggaataaaagataaagtagaagcaactgaatttttaggatacgaaactaatcaagctgaaggtatcgtattatctcttttaaaagataataaagaagttgatcaattaaaagaaaatgatgagggaatgattatagtaaatcaaactcctttctatggtgagtctggaggtcaggtcggagataatggtgaaataaaatcaaacgattttaaatttgaagtaacagatgttcaaaaaaaattaggtgatttatttgtacactatggaaaggttaaaagtggatctataaaattacaggaaagtgtagagttaaaaattgatgtgg

SEQ ID NO: 306015 - DNA, 948 bp, Unknown
  Bacterial polypeptide expressing nucleotide sequence isolated from the Sargasso Sea
gcttcagatttcttaggatatgaaactgatcgagcagaaggaattattctatcattgttaaaaggcaataaagaagtaagtgaactaaatgaaaatgatgaaggaatggttattgtaaatcaaacccctttttatggggagtcgggtggacaagtcggagacactggacaaatcatttcaggaaacttcaagtttgaaatatcagatgtacaaaaaaaattgggagatttatttgtacattatggaaaggttatatctggtaaaattaaggttaaagataatgtcgaaatgaaaattgatgttaaaagacggaataatgtaagagcatatcactcagcaactcatcttttacatgagtctttgagaagagtgttaggtactcatgtcactcaaaaaggatctctagtagcccctgatagactaagatttgattttagtcatatgaaaccaatttcagagcaagaaatagaagaaattgaaagttatgtaaattcaatggttgaaaaaaagtctgatgtgaaaacaaggataatgactccaaaagaagcagtcgataatggtgcacttgcactttttggagaaaaatatggggaagaggtaagagttttatcaatgggagatgaggaagaaaaatatttttctacagaactttgtggtggaacacatgtaagaaatactggcgatataggtagatttaaaataattagccagtcatcaattgcagcaggtgtaagaagagttgaagctctaagagaaaatcaattaaatgagtttttaaaaaataaagaaaaattgtctgatttgtcagcacacaaagataaagaaatgattaatgatttgtcaaaacaaatagttaaattaggaggtaaacctaatttagaaaataatgacattaaaagtttgataaaagatttatcaaaacaactagaatttctaaaattcacatca

SEQ ID NO: 306016 - DNA, 373 bp, Unknown
  Bacterial polypeptide expressing nucleotide sequence isolated from the Sargasso Sea
gggccgtgctcagaaattttttatgatcatggcgaaaaattgaaaggtggacctcctggtagcgctgatcaagatggagacagatttatagagatatggaatcttgtatttatgcagtatgaacaaatttccaaagaaaaaagaattaatttacctaaaccatcagtagatacaggtatgggactagagagaatgactgctgtacttcaaggaactcatgacaactatgaaatagaccatttccaaaaaattatgtcatcatctgcagaaattaccaaaaccccaattagtgaaaaaacaatagcaagtcatagagtaattgctgatcatttaagagctagtagttttttaatagctgagggaattttacctt

SEQ ID NO: 306017 - DNA, 867 bp, Unknown
  Bacterial polypeptide expressing nucleotide sequence isolated from the Sargasso Sea
aagccaaacaggagatgcagttgaaataattactaaccaaacaccattttatgcagaatcaggaggacaagttggtgaccagggcataatttattctaatgactgtaagattattattattgatactcaaaaaaaaatgggggatcttcatgttcattatggaaaaattgaaaagggatctttaaaagttaatcaaactgtcaatctagaaattgatattaacaaaagaaataatgctagagcctatcattctgccacccacttacttcatgaggctttaagaagaatacttggcaagcatgttactcaaaaaggatctttagttagttctgaaaaacttagatttgattttagccataataaacctatcgaaaagttcgaaatcgaaaaaatagagaagtacgttaatgatatgattgatacggaggtagatgttaaaacaagaattatgacccctaaagaggctgtcgctaaaggtgctttagccatgtttggggaaaaatatggagaagaggttagagttttatctatggggaaagaaaacgggggatatttttctaccgagctttgtgctggcacacatgttaaaaatactagagatataggaaagtttaaaattatcaaccaatcatcaattgcagctggtgtcagaagagtagaaggtttaagggaaaagcagttagaagattatgaaaaatctttaaaaaaaaacaaatctttaaaggaaaaaagtctgaaagatcagatagattcaattaaaaaagaattatcaaaatataaaattaaacctgatttaaacaatgaactagaattatccgaaaacataaaaaatttaaataaacaattagatcaaattaaaattgaaag

SEQ ID NO: 306018 - DNA, 786 bp, Unknown
  Bacterial polypeptide expressing nucleotide sequence isolated from the Sargasso Sea
cgagctaatcactcagctactcacttggttcatgaggcgttgcgccgccgcctaggagatcatattacccaaaagggctctctagtctccgctgatcgtatgcggtttgatatctcacacccaaaagcaatcacgaccgaagaactcgtgatggtggaggaggatgtaaacgaacagattcgagctaactcgaaggttacgacacgtcttatggaacctgatacagcagttgaagcaggcgcaatggctttgttcggtgaaaaatatggcgaagaagtgcgtgttgtttctatgggacaggatgggtctaaaaaaagtaaccgcatttactccaccgagctttgtgggggaacacacgtagaccgaactggagatattggtttatttaagattgtctctgagagcgcagtagctgccggtgttcgtcgtatagaagttgtcactggaaaaggagctgaagcctttacccgacttcaggagtttgctttgcgggaagttgctggtgtcttaaagacttctcctgaaaaagcggttgagcggcttgaacgtcttgtcaaggaacgtcgtcaactggagcgtgaactccagaatgcacgtcgcgaattagcaacgaatggtggtggtggctctaaaccaaaatctaaggatttgggtggcatatctctcattcggaaaacccttgaagggatgccagcgagagaattaaaaaacttggtagatggaatgaagggggaattaagctctggggtagtcgcaataatctcgaacacagacggcaaagcttcg

SEQ ID NO: 306019 - DNA, 901 bp, Unknown
  Bacterial polypeptide expressing nucleotide sequence isolated from the Sargasso Sea
gatgagggaaccaatgatgtacaagatggttgaagctctcaatcgagaaatgggagctgcttttccagagcttatggaggccagggaactaattgaggatagtttgttaaccgaagaaattaaattcaaagatactttggaaagagggttaaaacttttagatgttgaactatctagattgaaagaaggagataaagtttcgggagatgttgctttcaaactttatgatacatatggctttcctctagacttaactcaggacacgcttagagagaaaagttttgaggttgatttaccagggtttcaaaaagcaatggagttgcaaaaacaaaaagcaagacaagcttggtcaggttcgggtgataaaaagcttgagcttatctggtttgaccttgagcatcgacttggggcaaccgaatttttagggtataactctacagggtctcaggctaagattttagctttagtggtaaaaggtattgagcaaaatcaagtaacccaaaatgacctagtcgatgttgtgtttaatcaaactccattttatggagaaagtggggggcaagtaacagataagggaaaaatctttaatgatttgatggaaggggttgtcgaaagtgttcaaaaagttggaaaccttctggtgcataaggtgctcatattaaggggaaaaatatctgttggtgacttggcagacctagaggtggatacggtacgtagagaggcaattacatctaaccattcggcaacacatctaatgcatcaagcattaaaagatactcttgggtctcatgttaaccagagaggatctattaatgataatgaaaaaattcggtttgatttttctcataatagcccgcttactgctgatgaaattattctgattgaagacattgttaaataa

SEQ ID NO: 306020 - DNA, 691 bp, Unknown
  Bacterial polypeptide expressing nucleotide sequence isolated from the Sargasso Sea
aaggagctttaagaagacgttaggaaagcatgttacacaaaaaggttctttagtaagcccagaaaagcttagatttgattttagtcacaataaacctattgaaaaaaaagaaattgaaaaaatagaaaaatatgtgaatgacatggttaatacagctgctgatgttaaaactagaattatgacacctaaagaagcagtagaaaaaggggctttagctatgtttggagaaaagtatggtgaagaagttagagttttatctatgggtaaagaaaatggtggatatttttccactgaactttgcgggggaacacatgtaaaaaatacaaaagatattggaaagttcaaaattataagccaatcttcaattgctgctggtataagaagggtagaaggtttaagagaaaagcagttagaagattttgagagatctttacaaaaagataaatctttaaaagaagaaaatttgaaaaatcaaatagaatcaataaaaaaagaattatcaaaatataaagttaaacctgattataaaagtgatctagaattaactgaaaatattaaaaatttaaacaaacaattagacaaaataaaaattgaaaatattattaaggataaaagtaaaaatattattaaagataaaaaaataggttcttttgttttgagacaacagattcttatagattttcccttctaa

SEQ ID NO: 306021 - DNA, 888 bp, Unknown
  Bacterial polypeptide expressing nucleotide sequence isolated from the Sargasso Sea
gcctggcacaaaagatcaagacggagatagatatattgaaatttggaatttggtatttatgcaatttgaacaaatttctaaagaaaaaagaataaatttaccaaaaccatctgtagatacaggaatggggctagagagaattgctgctttgctacaaggtacacatgataattatgaaacagatcattttaaaaaattaataaattcaatttctgaagcagttaaagttaaacctgatgaaaaaaatgtttctagttttagagtaatcgcagatcatttgagagcaagttcatttttaattgcagaaggtgttttgccatcaaacgaaggaagaggttatgtattaagaagaattatgagaagaggaatgagacattctcatttactaggatctaaacaaccaattttttacaatatttttaaaactttaatggatgagatgtcagtaaattatcctgaacttataagagcagagtctttaattaaagaaactttaaaaacagaagaagaaaaatttttagttttattggaaagagggatgaaaattttaaatgaggaaatttcaaaaattgataaagttttacctggtgaaatagcttttaaattatatgatacatacggatttcctctagacttaactgaagatattttaaaaaataagtcattaaaaatagataataaaaaatttaaaactttaatgaatgaaagcagagaacttgctaagaaaaattggaaaggatcaggtgatagttcagtcaacaagatatggtatgaaattaaagatagattaagcccatcagaatttttaggttatgaaactgactatgctgaaggaaagattttatcattattaaaagataacaaagaagttaaaagtttatctgctaa

SEQ ID NO: 306022 - DNA, 505 bp, Unknown
  Bacterial polypeptide expressing nucleotide sequence isolated from the Sargasso Sea
aataagttaaggttcgatttttcacataagcaacctttatctcaagaagaaatcgcaaagatagaagctattgtaaataaagaagctctaaataatttagaagttaagactgagctgatgaaacttgatgacgctctaaaatctggagcaatggcactgtttggtgaaaaatatgatgatgatgtaagagttttatcaatgggtaataattcatattcagtagagttatgtggtggtactcatgttaagagaacaggggatataggattttttattattacgagtcaatcaagtgtagcttctggaataagaagaattgaagcagttgccgggatgaaatcgatagaacatataaataaaattcgagaaataaactcatctcttcaatctgtattaaatgtttcttcagaagatattcaagagaaaattaaatctttgatagaagaaaataaagaacttaaaaaaaaatcaggaaataaaaaatcaaaaaaatcagtagtttttt

SEQ ID NO: 306023 - DNA, 746 bp, Unknown
  Bacterial polypeptide expressing nucleotide sequence isolated from the Sargasso Sea
gattgattgggcttgggagttattaacagaggtttataaattagataaatcacgtctttatgtaacggtatttgaaggagatgaattagatggaacaaaagaagactcggaagcaatttctttttggtcaaaacatgttcaaaaaaaagaaattataaaatgttcaaaaaaagataatttttgggaaatgggagatgttgggccatgtggtccatgctcggaaatccacatggatattcgttcagaagctgaaagatcaaaaataaaaggaagagacttagtcaataaagatcaccctcaagttatagaaatatggaatttggttttcatggaataccttagaaaggcagatagaagtttagttcctcttcctcaaaaacatgtggatactgggatgggacttgaaagacttgctgttgctcttcaggaaaaaaaatcaaactatgacattgatttgtttcaatctttgataaagaaaacagaagagttatccagaattaaatatggtgctaacccaaaaacggatatagcgctaagaattgtttctgaccatgttcgagcaataagtttttctatagctgatggacaacttccatctaatacaggagcgggttatgtaattagaagaattttaagaagagcggtacgttatgggtatcaggttttagaaataaaagaaccttttatgtacaatatagccacaacattggtagaacaaatgggggatgcttatccggaattaacca

SEQ ID NO: 306024 - DNA, 790 bp, Unknown
  Bacterial polypeptide expressing nucleotide sequence isolated from the Sargasso Sea
tcgcgcttatcactcagcaacccatctattacacgagtccttaaggagagttttgggtacacatgtagctcaaaaaggatctttagtagagccaagtagattgagatttgatttcagccatatgaagccaattttgaatgaggaaattgataaaatagaggagtttgtaaacacaatggtctctaaaaaatctgatgtaaaaactagattaatgacacctgatgaggcagttgaaaatggcgctttggcattatttggggaaaaatacggagatgaggtaagggttctttcaatgggagacgagaatggaaagtatttttcaacagaattgtgtggtggaacacacgttaaaaacactggtgatattggtaaatttaagattgtaagtcagtcatcaattgctgcaggggttagaagaattgaggctttgagagataaacaattagaggagtatttaaaaaataaagaaaaattatcaaacttatctgcagaaaaagacgaggaaacaattaaagatttaagtcagcaaattattaaattgggaggaaaaccaagtttagaagaagctaaccaaaaaactttaataaaaaatttaactaaacaattagaaactatctcagtaattgcaattttagaggataaatcaaaaaatattattaaagatgaagaaattaatggagttaaattaagacttcaaaaaatagatggattacctccaaaagatttaagaaaacttgtagataaaggtaaaaaagatttaggagaaggtattgtggttgtgtttgcaaat

SEQ ID NO: 306025 - DNA, 918 bp, Unknown
  Bacterial polypeptide expressing nucleotide sequence isolated from the Sargasso Sea
gctcagaaatttttctatgatcacggtgaaaaattaaaaggagaacccccaggaagctcagatgaagacggagatcgatttattgagatatggaatttagtatttatgcagtacgaacaaatttcaaaagataaaagaataaatttaccaaaaccatcagtagatactggaatgggccttgaacgaatgacagctgtccttcaagggacgcatgataattataagattgaccactttaaaaaaattatgggtgcatcttccgatttattgaagtcacctataaatgagtcaacaattgcaagtcacagagttattgcagatcatttaagggcttgtagttttctaatcgctgaaggaatattaccttctaatgaaggaagaggatatgttttaagaagaattatgagacgtggtatgagacatgctcattctttaagaagcaaagatcctattttttataagttatttgatattttattaaatgaaatgaaaagtagttatcctgaattaattactggcaaagaattaataattgagactttaaaaaatgaggaagaaaaattttcttctcttttagaacgcggaatgaaaatacttgatgaaaatttgactaaagtttcaaataaaacttttccaggatcaacagcatttaaattatatgatacttatggtttccctttagatttaactgccgacatattaaaagggaagggaattaaagtagataatgttggttttgaaaaagagatggaaaaaagtaaagctcttgcgcgatctaattggaaagggtctggagataggtctgttgaagaaagatggtttaaaataagagaagaaattaatccaactgaatttttaggttacgaatttgataaagcagaaggtgttgttattaaaatttcaaaagatggtaagttt

SEQ ID NO: 306026 - DNA, 169 bp, Unknown
  Bacterial polypeptide expressing nucleotide sequence isolated from the Sargasso Sea
catgaaaactaatgaaatcagacaatcttttttagatttcttcgaatctaaaaatcatcagattgtttcatcaagcgcattagtcccaaacaatgatgaaactttattgtttacgaatgctggtatggttcagttcaaagatgtttttcttggaactgataaaaaaagt

SEQ ID NO: 306027 - DNA, 868 bp, Unknown
  Bacterial polypeptide expressing nucleotide sequence isolated from the Sargasso Sea
aaaaggatcattagtaaattcaaaatacttaaggtttgacttttctcacttttccaaaatttcaaaagaagaattagaagaaattggaaacatcgtttcctcagaaatattaaagaatagtcctcttgaggaatttcgatcaatggcaatagatcaagcaaaagaaatgggtgctatggcattgtttggagaaaaatatggtgagaaagttagggtaattaaatttgcagattcggtagagttgtgcggaggtatacacgtgccttccacatcaaaaatagcatgttttaaaatactaagtgaatcttctattgcatcaggaattagaagaatagaagccatcacagaaagtacagcttggtcttattataaaacacaagaccaagtaacagaagaattaaaaaccatattaaaaaaccctaaagatttatcaaaagcagttttagatctttctcaaaaaaacgttcagctttcaaaagagcttgaaaagcttcagaaagaaaaagcaagaggtttaaaaaaagagcttgtttcgaaaatagaaatccttggtgatgtttcttttttaggtcaaatagtagatttagagtcatcatcagtgaaggatattttatttcaattaaaatcagaaaatcaaaactttgttggtgttttgggaacaaaaacaggtgccaaatgcacaattagtattgctctttctgatcaactaaccaaagacgggaaacatcatgctggaaaaatcataaaagaactttcacaattaataaaaggaggaggcggaggccagtctttttttgcaacagcaggcgggtcaaatccgaatggtcttaatgaagcgattttaaaagctaaagaaatcttttcttaa

SEQ ID NO: 306028 - DNA, 867 bp, Unknown
  Bacterial polypeptide expressing nucleotide sequence isolated from the Sargasso Sea
gcaaaaaaatagatcaaagtctaaaaagaatgatgatttatctgactggatcttaataaatgataaaatctccagtagtgttttcaaaggttatgaccttaacgaagttgaggctaaaatttgtaaatatagagaagcaaaatctgaggatggtagtgtaagttatcatattgtcacaaatatgacaacattttatcctgaaggtggaggccaaataggggatactggtaaacttatttcttcagctgatgaaattcaagtcattgattcatacaaagatagtggtgacattatacatttaactaaaaaactaccttctaatttagaatctcaagttaagcttaaagttgctactaaaaggagatctttgattgaagcgaatcatactggtacacatttattacatcaagcacttagaaatattctcggtgatcatgtagagcaaaggggttcaatgatatcagatgagatgttcagatttgacttctcacatccatctaaactttctagttcagatatacactcaataaataactttgttaattctaaaataaaagaatcaattccacttgttgaaaatagagaagaggattatgaaagagcaataaataatggtgcaatcggtttatttacagaaaaatacgaagacaaggttagaacagtaaaatttgatgaatcatatgagttatgtggaggtacacatgctaaaaatacaagtaaattaaagacatttagtataatttcagaagtctctcaggcttttggaataagaagaattacagcaacatgtaatgaggaaattatcctaaaggaacttgaaaagaagaaagcctcgaaagaaaaagctgccaacgaaaaagcgaataa

SEQ ID NO: 306029 - DNA, 868 bp, Unknown
  Bacterial polypeptide expressing nucleotide sequence isolated from the Sargasso Sea
catgcacatacacttggaagtaaaaatccaatattctttaaattatttgatgttctattaaatgagatgtcacaaagttatcctgaacttaaaacaggtaaagatctaattgttgaaacattaaaaaacgaagaagaaaaattctcttcacttttagataggggaatgaaaattttaaatcaaaatttagaaaaagttaataacaatactctaccaggagaaatagcttttaaactttatgatacatatggttttcctttagatttaactgctgatattttaaaaaataaaaaaattaaaattgatacgaatacttttaataaagaaatggaaaaaagcaaagaagtggctcgagctagttggaaaggctcaggggataaatctattgaagaaaaatggtttaaggtaagagaggagcttagtccaacagaatttttaggttatgaatttgataaagccgaggcagtaattttaaaaatatctaaagatgataaatttgttgatggtgcaaaaacaggagatgaaatagaaattataactaatcaaacgcctttttacggagagtcaggaggacaagttggtgatcaaggtattatttatacttcagactgcaaaataaatattaaagatactcaaaaaaaaatgggtgatctttatgttcatacaggcaaagttgaaaagggatcaattaaaatcggtcaaagcgtaaatttagaaattgatataaacaaaagaaataattcaaaagctaatcactctgcaacacatctattacatgagtctcttagaagaatcttaggcaaacatgttacacaaaaagggtctttggtaagtccagacagacttagatttgatttcagtcacaaca

SEQ ID NO: 306030 - DNA, 907 bp, Unknown
  Bacterial polypeptide expressing nucleotide sequence isolated from the Sargasso Sea
ttgccacacaggtccatgccccatgcgggcaaggtgtttcccggttcgttggcaaaagacactcaagtgaatgctgaagtgaatgcacaaagccgaagtgctaccgcggccaatcactctgcgacgcatttgctgcacgctgtgcttcaggaggtactgggcgctcatgttcagcagagaggctcgttggtaaacaacgaaagattgcgatttgatttctcgcatggcgatgcgatgtccggcgctgagatcaacgaagtcgagcgtctcgtgaatcagcaggtccgggcgaataatgatgtcggcacacgtctcatgaaactagaagacgcgcgagcgcagggtgctgccgcgctcttcggagaaaggtacgaggaagatgtgcgggttgtatcgatgggagagttctccctcgagctttgcgggggcacgcatgtgcggcgcaccggtgatatcggcagtttccggattatttcagagggcggtattgcggcgggcgtgcgccgcgttgaggccttgaccggcgaagccgcctacgtgcatggggtcaatgaaagcgagacgctcaaccggctggccgcagtcttgaaaaccggtcgctctgatcttgaagaacgtgccaccagcctctcgacacgggttcgagagctcgagcgcaaggtcgagcacttgcagggccaattggctgcaggcggcatgggcgatgatcctgcaagcgagattcaggaagttaacgggatacgcgtgctcgttaagcgctatgacgacgtagatatcaaagggcttcgggtaatgatggatcgactgaaagatcgactgggctcggcggtggtggtcttgggaggagtgcaaaacggtaaggcgaccctcctggtgggcgtcagcaaggatctcaccgattgctgtc

SEQ ID NO: 306031 - DNA, 494 bp, Unknown
  Bacterial polypeptide expressing nucleotide sequence isolated from the Sargasso Sea
catgaattctagtgaaataagatctaaatttttaaattactttaaaaaaaatggtcatgaaatagttcattcaagtccacttgttccacataatgacccaacgcttatgtttgcaaattctggaatggttcaatttaaaaatatttttaccggtaaagaaaagagagactataatcgtgctgttacatctcaaaaatgtgtaagagcaggtggcaagcataatgatttagagaatgtaggttatactgcaagacaccatacattttttgaaatgttaggaaatttttcttttggagattattttaaagatgatgcaataaaattttcatgggatttaatcacaaaggagcttggcattgataaaaaaaaattattagttacagtttttaatgaggatgaggatgcatacaatttatggaagaaaatcgcaggtttaagtgatgataaggttataaagataagtactgctgataacttttggtcaatgggtgaaa

SEQ ID NO: 306032 - DNA, 846 bp, Unknown
  Bacterial polypeptide expressing nucleotide sequence isolated from the Sargasso Sea
agggagatcgtccgcgactttctcttctacattgggacagaaaataacggtaaaagaggctgtcgagtttacgggctacgaaaactcatctgaaaaaactagcattgtttctttgtatgatttggaaggtaacgaaagggattttcttgaattgggtcaagaaggaattatttgcttaagcaagacccctttttacgcagaatctggtggtcaggtcggagacgctggtgttatagagagcagcgataagcagttcagcgtgtcggatactcagttgagtggagaccagtacttgcatatagggaaagtgagcgctggtgtttttaaatcaggggaaaccgtcactgctgagataaatgttccacaacgtgatagaacacgaaaaaatcattctgcgactcacctgatgcatgccgcgttgagaaaagtgttagggcttcacgttgaacagaaaggatcgttagtaaatgacgaaaaactccgctttgatttctctcacgatggaaacattaccaatgatgagcttacccaaattgaaaatatggttaatgcggaaattgtcaaaaactcgctggtctcgactgaattgatgtcgccggaacaggcgattgaaaaaggtgcaatggcactgttcggggaaaaatatggtcaggtggtgcgggtccttacaatggggacggattattctgtcgaattgtgtggtggtactcacgtcaataggactggggatataggagtttttaagataataagtgaagtcgggatttcatcaggaacgcgtcgtattgaagcgctaactggtttgaaggcaatggaagaaattcgctccaatgaaggttatttgaa

SEQ ID NO: 306033 - DNA, 841 bp, Unknown
  Bacterial polypeptide expressing nucleotide sequence isolated from the Sargasso Sea
aaaactgttgagaaatattcagatattatgtgggggagaagtgaagaaactgatgaagctataagagtagttgcagagcacgctaggtcagcatcatttcttataggggatggagtgtcccctagtaatactggtagaggctatgtacttagaagattaattagaagaggaatgttgttcgctaaaaaattaaatcttttagactccccgctatcttcattagttgatgtgataagcagagagatgggagaatactacccagaattagttgataataaaaactttattattgaagtcatatctaaagaagaagagaattttagtaaaactttgtctaatggacaatcagtactagatggaatgattaattttagaataaaaaataaaaacagagaatcttcagataatttctctaaaggcttaaaaattgcagcaaatgaatctaaaaaatcaaatgcgaaaaactttgataaatcattaacaggtagagaggcttttattctttatgatacttatggatatcctgttgaaattacaattgaagtagcaaaacaaaataatttagatcttgatgtagatagtttctacaaagagcttgaaaatcagaaaaaagtttcaaaagaaaaaagtgatcaatttaataaaggtcaaaatttagaaatctttaaacatttagatataccttccaccaaatttgttggatatgaaaaaactaatcataattctaaagtaatcagtatcattcataatgataaaattgtagagtctattgaagaagaatctaatgcccaaataattgtttctgagactccattttatgctgaaaggggagggcaaattg

SEQ ID NO: 306034 - DNA, 791 bp, Unknown
  Bacterial polypeptide expressing nucleotide sequence isolated from the Sargasso Sea
aatacaatcaacttccgaaatagttaagaaaaaaccagaacaaaataatctttcaagttttagagtaatagcagatcatttgagggcaagttcattcttaattgccgaaggagttttgccatcaaatgagggcagaggttatgttcttcgaagaataatgagaaggggaatgagacactcgcatttgttaggatctacagaaccagttttctataatttatttgatactttaaaaaatgaaatgtcaggcaattatccagaattaaaaagagcagagtcattaataaaagaaactttaaaaatggaggaagaaaaatttttaattcttttagatcgaggaataaaaattttaaacgatgagatatcaaaaatagataaagtgcttccgggcgatattgcttttaaattatatgatacctatggttttccattagatctaacagaagatatattaaaaaataaatcactttctattgatacaaaaaaatttcaatcattaatgaaagaaagtagagagctcgccaagaaaaactggaaaggttctggagatgctgcagtagaggatatttggtttggaataagagacaagttaggtgctacagaatttttaggttatgaaacaaaccaagctgaaggggtaattttatcgttattaaaagataacaaagaagttaaagaattaaaatcaggtgatgaaggaataattattactaaccaaacacctttttatggagagtcaggtggtcaagtaggagatatcggaggatttaagaatggagagtttagattca

SEQ ID NO: 306035 - DNA, 285 bp, Unknown
  Bacterial polypeptide expressing nucleotide sequence isolated from the Sargasso Sea
aatgacatctcaactaattaaaaaaatagttactggagatgagataagaaatgcttttttaaaattttacagtgaaaaattacataaaatcattccaagtgcatctttaattccagatgaccctacggttatgctcacaattgctggaatgctaccttttaaaccagtttttttaggtttaaaagaaagaccatcaaaaagggctacatctagccaaaagtgcatcagaacaaacgatatagaaaacgttggagttacagctagacatcacactttttttgaaat

SEQ ID NO: 306036 - DNA, 830 bp, Unknown
  Bacterial polypeptide expressing nucleotide sequence isolated from the Sargasso Sea
tgcagttcttcaaggaactcacgataattatagcatcgaccattttaaaaaattgatgtccgtatcttcagaaattacaaaaactaaaatagacaacaagactatcgcaagtcatagagtgattgcagaccatcttagggcaagcagttttttaatagccgaaggagtgttaccttcaaatgaaggccgtggttatgttttaagaagaattatgagaagaggcatgcgtcatgctcatacacttggaagtaaaaatccaatattttataaattatttgatgttctttcagacgaaatgtcgaaaagctatcctgagcttaaaagaggtaaagatttaattgttgaaacattgaaaaatgaagaagaaaaattttcttctcttttagatagaggaataaaaattttggatcagaatttactaaaagtgaaaaataatactttgccaggagaaatagcttttaaactttacgacacctatggttttccactagatttaactgctgacattttaaaaaataaaaaaatcaaaattgataccaatgcttttgataaagaaatggaaaaaagcaaggaagtagctagagctagctggaaaggttcaggcgataaatttgttgaagaaaaatggtttaaagtaagagaagaactaagccccacagaatttttaggttatgaatttgacaaaaccgaaggagtgattttaaaaatatcaaaagataataaatttgttgatagtgtagaaacaggagatgaagtagaggttataaccaatcaaacacctttttatggagagtctggaggacaagttggggatcaaggtattatttata

SEQ ID NO: 306037 - DNA, 906 bp, Unknown
  Bacterial polypeptide expressing nucleotide sequence isolated from the Sargasso Sea
aaacaaagatcctatatttcacaaattattccccacttttttaagtggtattagagaatcatacccagaattggcaagagcaaaggatcttattattaatacactattaaatgaagagactaaatttaaagggactttagaaaaaggtattaaaattttagaagaagaaatttctaattcaacaaatatttttgatggagaagttgcatttaaattgtacgatacttatggttttccattagatttaacacaggattatctaaagagtaaaaatattgaggttgacttaaaaactttcgataaaaaaatgttagatcagaaacaaagagctagacaatattggaaaggtacgggtgatattcaagatgataatatttggtatgaaataacttctgaaatagaaccaacagaatttctaggttatagagatatagaagcagaatgtagaattttagcaatagtatcaagtggaaataaaacaaatatcattgaaaaagatcaggatgcagtaattatattaaatcaaactcctttctacggtgaaagtgggggtcaagtaggcgataagggctttttagaaaatgataattttaagtttgaagttgtaaacacaactaaaatatttggaaattattttcttcatacgggcacggttataaatggacaatgcaaaattaatgataatataatagcatctataagtagtgaaaatagaaatctaattaaatataatcattcatctacacatttgttgcacgcaactcttagaaaaactctaggcaatcatattacacaaaaaggatctttagtaaattctgaaaaactcaggtttgattttagtcacagtaatccaatcgatacagaacaaattaataatattgaagctattataaatgatcaaataaa

SEQ ID NO: 306038 - DNA, 836 bp, Unknown
  Bacterial polypeptide expressing nucleotide sequence isolated from the Sargasso Sea
taatgaaatcagacaatcttttttagatttcttcgaatctaaaaatcatgagattctttcatcaagcgcattagtcccaaacaatgatgaaactttgttgtttacgaatgctggtatggttcagttcaaagatgtttttcttggaactgataaaaaaagttataagcgagcatcaacgtcacaaagatgcattagagctggcggaaaacataatgatttagagaatgtcggttatacacttcgtcatcatactttttttgaaatgctaggtaattttagttttggtgattattttaaagaggaggccattgaatttgcttgggagtttttaactgaagttttaaaacttgataaagacaaattatggatcacagtttacaaagacgatgacgaagcagaagaaatttggaaaaataaaatcggtatagatcctaaaagaattgcgagacttggtgatgaggataatttctggtcaatgggtgacaccggaccatgcggaccttgctctgaaattttttatgatcatggtgatcatattgaaggaacaccaccaggagccgatggtgatgaaggagatagatttattgaaatatggaatcttgtctttatgcaattcaatagagacgagagtggtgatatggagcctcttcctaagccttcagtagatacaggaatgggtcttgaaagaattgctgcagtgatgcaaggcgttaattcaaattatgaaacagatatttttaaagatttaatcattgcttcagaaaaaatactcggtgataagggcagcacttctcataaagttatcgctgaccatataagatcaagtgtatttttaa

SEQ ID NO: 306039 - DNA, 850 bp, Unknown
  Bacterial polypeptide expressing nucleotide sequence isolated from the Sargasso Sea
ggttgcgtccaaaattctgattgtatggtgcaaataactgatacgaaaaagtttgctggtttgtttattcattcgggcacggttgctaaaggttacatcgaagaaggggatagtgtttcactatttgttgaagctgagagaagaaacagaattaaagccaaccattctgctacccacttattgcatgaagcgcttagacagttactaggcgatcatgttgcgcagcgtggatctctaaatggtgaagacagactacgctttgattttagccaccattcatttttaagtaacgaagaaattcagtcgattgaaaagtcggttaataagtacataaggcaaaattcatctgtgcagacacgaattatgacgcctgatgatgccagaggaattggagctcaggctctttttggtgaaaagtatggagacgaagtccgtgttgtttctatggggtatcaaaaagacacaggcaaaggtcttggtggtcaaacttactctttggagctttgtggaggtattcatgttaaaaaaacgggtgaaattggtgcttttacaattttgtcggatagtgcgtcgagtgctggggtgcgtcgcatcgatgctcttactggtgaaagtgccacaatacatctggccaagaggtctcagcaagtaaatgatttgagcgctttcctgaaagtttcagctgacgaacttactcaacgggtaaatgttttgctggaagaaaggaaaaacctgacaaatgaagtggcagaacttaaaaggaaacttgcgctttcaggtgaaggaaatggtgaaatagcgaaaaccgagaagataaatggtatttcctttttgctcagatctactcggg

SEQ ID NO: 306040 - DNA, 897 bp, Unknown
  Bacterial polypeptide expressing nucleotide sequence isolated from the Sargasso Sea
aattcaaaatcaatttcaggtaaagaagtttttgagttatttgacacttatggttttccatcggatctaacatctttgattttgaaagaaaggcagatgacattcaacaatgaagattatcaaacagagttaagtaagcagagagaaaggtcaaaacaatctacaaagactattgcttcagattggattattttgaatgaacaacaaggaaatgatttttgtggctacgataaattaagctgcgatactaagataaatcaatacagaaatattagtatgaatggtaaacaagtttgtcaaattattttgaatgaaactccattttatccagaaggaggaggacaagctggtgataaaggaaaattaatttttgaaaataaatctgaaattattgtttatgatactaaaaaagaaaatggtaagatcattcattataccgatttatcagacatagattttaaaaaaaatgttactgcagttgttaattctttgaatcgtaatgattcttcttcaaatcatacttcaacacatcttttacatcaagctcttagaaatgttttgggagatcatgttgaacagaaaggttcatcagtatcttcggaaaatttgcgatttgatttttctcattttaagaaaattgaagaacaacaattaaaagaaattgaaaattttgttaatgataaaatcgattgttcacttgatttaatcgaaacaagagatgaagattatgatactgcaattagtaaaggagcaattggcttatttggagaaaaatatggaaagaaggttagaacaattaagtttggagaatcatatgaattatgtgggggtacacacgtaaaaaatacccttaatattagaaattttttgataatttctgaaagttcaattgcatca

SEQ ID NO: 306041 - DNA, 892 bp, Unknown
  Bacterial polypeptide expressing nucleotide sequence isolated from the Sargasso Sea
aattttaaatgaggaaatttcaaaaattgataaagttttacctggtgaagttgctttcaaattatatgacacttatggttttccattagatttgacccaagatattttaaaaagtaaatctttaacaattgataacgataaatttaatactttaatgcaagaaagtagagagcttgctaaaaaaaattggaaaggttctggagatagtgctgttgatgatatttggtttggaattagagaaaagttaggcgcaacagaatttttaggttatgaaacaaatcaagctgaaggagtagtgctttcattattaaaagataataaagaagtagatcagattaactctggtgatgaggcaatgattattatcaatcaaactcctttttacggagagtcgggtggacaagttggtgacaaaggagaaattatttcaggtgaatttgtttttgaagttgaagatgtacaaaaaaaacttggagatttatttgttcactatggaaaagttaaaaaaggatcaattaaaaataatgaaaatgtggagatgaaaattgatattgaaaggcgagataatgtaagagcgtatcattcagcaacacatttattgcacgagtctttaagaagagttttaggcacacatgttactcaaaaaggctcattagttgagcctgatagattaaggtttgattttagccatatgaaaccgatttctagtgatgaaatagagaagatagaaacatacgtaaattcaatggttagtaataaatctgaggttaaaacaaggataatgacacctaaagaggcggtaaataatggagcattagcattgtttggtgaaaaatatggagatgaggtgagagttttatcaatggggagtgaaaaaaataaatatttttca

SEQ ID NO: 306042 - DNA, 909 bp, Unknown
  Bacterial polypeptide expressing nucleotide sequence isolated from the Sargasso Sea
gatcaatgaaccagttttttttaatttgtttgatactcttaaaaatgaaatgtctggcaactatccagaattagttagagcagagtctttaattaaagaaactttaaaaatggaggaagaaaaattcttagtactattagatagaggaataaaaattttaaatgatgaaatatctaaaatagataaagtgttgccaggtgaagtagcttttaaattatatgatacttatggttttccattagatcttaccgaagatattttaagaaataaatttatgtcaattgatactgaaaagtttcaatctttgatgaaggaaagtagagagcttgctaagaaaaattggaaaggttctggtgatgcagtggttgaagatatctggtttggaataaaagataaattagaagcaactgaatttttaggatacgaaaccaatcaagctgaaggtgtcgtgttgtctcttttaaaagacaacaaagaagtagaacagttaaaagaaaatgatgagggaatgattatagtaaatcaaactcctttctatggtgagtctggaggtcaggtcggtgatacaggtgaaatagtatcaaatgattttaaatttgaagtaaccgatgtccaaaaaaaactaggagatttatttgttcattatggaaaggttaagagtggatctataaaactacaggaaagtgtagagttaaaaattgatgtggaaagaagagataatactcgtgcttatcactcagcaacccatctgctacatgaatctttacgaagagttctaggtactcatgtcactcaaaaaggctcattagtagagccaagtagattgcgatttgatttcagtcatatgaagcctattttgaatgaagaaattgataaaatagaagaatttgtaaacaaaatggtgtctaa

SEQ ID NO: 306043 - DNA, 705 bp, Unknown
  Bacterial polypeptide expressing nucleotide sequence isolated from the Sargasso Sea
catgaaaaattcaaagcaaatacgacaggaattcatctctttttttgaaaaaaaaggtcatcattttgtacgtagtgctcctgttgttccaaatgacgaccctacacttctattttcaaattctggaatggcacagtttaaagatgtatttttagggactggaataagggattacaatcgtgcggttaattcgcaaaagtgcataagagccagcggaaagcacaacgaccttgaagatgtaggatatgacaattaccatcatacattttttgagatgctcgggaactggtcttttggcgactattttaaaaaagaggcgatagaatgggcatgggagttaatgaccgtacaatgggggctaccaaaagaaaaaatgtgggctacggtttttgctggaggagacggagtagaggctgatgaagatgctgaaaacctttggaagaactgtacggatattcatgcagaacagattctacgttttgacaaaaatgacaacttttgggaaatgggggaggtaggtccgtgtggtccttgttcagagctgcatattgacctaggtcaaggctcttgtcccttctcagaaaagcatgaatgtgcggtaaaccttgaaggatgctggcgatttgtggagctttggaatctggttttcatgcaatatcagcgttttgcagatggacatctggaagagctttcagctcagcatgt

SEQ ID NO: 306044 - DNA, 186 bp, Unknown
  Bacterial polypeptide expressing nucleotide sequence isolated from the Sargasso Sea
ggcttattcaaaatagtatctgaaagcggtattgctgcaggtgttcgccgtatagaagcagtaactggcgcagatgcagttgcttatgtaagtgagcaagagcaacagcttagcgatgtagcagcgctagttaaaggcgatagcgcatcggtacttgaaaaagtaactgcgcttcttgagaagtct

SEQ ID NO: 306045 - DNA, 465 bp, Unknown
  Bacterial polypeptide expressing nucleotide sequence isolated from the Sargasso Sea
tatgaataagactaaaaattcagtaaatgcaattcgttctaagtttataaattattttaataaaaatgatcatgaggttataacttcaagtaatcttgtgccgaacaatgatcctaccctgttatttacaaatgctggtatggtacagtttaaaaacgtttttacaggtttagaaataagagactacaatagagctgtaagttcgcaaaagtgtctgcgtgctggtggaaagcataatgatcttgaaaatgtaggcagaacggctagacatcacacattttttgaaatgttaggtaatttttcatttggagattatttcaaagagaaagcaatatttcaagcttgggaattattaacaaaagagtatgaaattccaaaagaaaaattgctagttacaatttttcatgatgatacagaggctgaaaatttatggaaaaaaatttctggattaagtgaaaaaaaaat

SEQ ID NO: 306046 - DNA, 775 bp, Unknown
  Bacterial polypeptide expressing nucleotide sequence isolated from the Sargasso Sea
aaaagaagcagttagtcttggagctttagctttatttggtgaaaaatatggtgatgaggtaagagttgtttttatgggaaaagaaaacaatggtttcttttcaacagaactatgtggtggaacacatgttaaaaatactaaagaagttggagaattcaaagtaattagtcaatcgtccatagcatctggagtaagaagagtggaagcattaagaaacaaagaacttcatgactacgaaaattctttaaaaaaagataagtctttaaaagagaaaaatcttaaaaaccaagttgatttagtacaaaaagaacttacaaaacttaaaataaaaccggattataaagataatatggatttatcagaaaatttaaaaaatcttaataaacaattagacaaaattaaaattaaaaagattattgaagataaaaataaaaatgtcatcaaagataaaaaagttgcaaattttgtatttagacaacaagtcttgatagatttcccacctaaagaattaagaagcgtaatagaccaaggaaaaaaagatattaaaaatggtatagtaatcagtatatctatttttgaaggtaaagttggaatagccgttggtttaacccaggaattaacaaaaaaatttgatgctgttaaacttgttaaagttgcttccgaggttcttggtggaaagggtgggggaggtaggaaagattttgcacaggctggaggttctcataaagacaagattaaggaagcttttaaaattttaaatgataaaattagttaa

SEQ ID NO: 306047 - DNA, 910 bp, Unknown
  Bacterial polypeptide expressing nucleotide sequence isolated from the Sargasso Sea
aaagatttgcgagtagctaatagtcaaaaatgtattagagttagcggaaagcataatgatttggaagaagtcggaagagatggatttcaccatactttttttgagatgcttggcaattggtcattcggtgattattacaaaaaagaagcgattgaatggtcatgggaattatttacagaggtttggaagcttgataagtccagattgtgggttactgtttttgaagaagatgatgaagcttttgagttatggaaaaatcaaacagatatagatccaaatcgaattattcgttctggtgcaaaggataatttttgggaaatggctgagactggaccatgtggtccttgctcagagattcattattatgttggaaataatccagaagatcaacaagctgaaatggtaaataactcttctgaatattgggaattatggaatcttgtatttattcaatttaatcgccttaaagatggaactatggaggatttgccaaaaaaacatgtagatactggtgcaggacttgaaagaatttgttcagtattacaaaacaaagattcaaattataaaactgatttattttcaaaaacgattgaagatttagaaaatttttcaaacaaaaaatatcaagattttgaggtttcatataatgttatttgtgatcatataagaatgctgtcatttgcaattgctgatggagttattccatctaatgatggtagaggttatgttgtaagaagagttttgagaagaggttcaaaatttgctatgaatttagaaattaaagaaccgattctatacaaattggttgattcagtggtttcgacaatgtcttctcattacccagagctgaaagaaaagcaagaatatattgagcaaactatttctttacgaagaacagtcattcttacga

SEQ ID NO: 306048 - DNA, 608 bp, Unknown
  Bacterial polypeptide expressing nucleotide sequence isolated from the Sargasso Sea
tatgatttctaaccaggtaagaaatactttcattgattactttaaagagcaaggacactcccatgtgagctctagttcccttgttccagataatgacccaaccttaatgtttgctaattctggaatggttcaatttaagaatgtatttactggattagagaaaagatcatatacaagagctacaacttcacaaaaatgtgtaagagcaggtggtaagcataatgatttagaaaatgtaggttttactacaagacatcatactttttttgaaatgcttggtaacttttcatttggtgattatttcaaagaagatgcaatttattttgcttgggatttaattacaaaaaaatatgaaattaatccggataaacttttagttactatttaccatgacgatgaacaggctgaaaaattctggaaaaagattgctcaattacctgatagcagaattattaagatctctacatcagataatttttggtccatgggagatactggcccatgtggcccttgctcagagatcttttatgatcatggagagaaatattttggtggacctccaggttctcctgatgaggacggtgaccgttttattgagatatggaatt

SEQ ID NO: 306049 - DNA, 765 bp, Unknown
  Bacterial polypeptide expressing nucleotide sequence isolated from the Sargasso Sea
tatggctgacaaaaccttaaatgaaattagaaatacgttcttaaagtattttgaaaagaatgaacataaaattgttgagtctagtaatttagttcccaataatgatcctacattgatgtttgctaattctggcatggttcagtttaaaaatgtattcacaggtttagaaaaaagggattatgtaagggctactacttctcaaaaatgtgttagggcaggtggaaaacataatgatcttgagaatgttggttatacacctcgtcatcacacattctttgaaatgcttggaaacttttcttttggagattattttaaagaacaagcaattcattatgcttgggatttaattacaaaagattttggcattgataaagaccggctttatgtgactgtttttcacgaagatgatgaggccttcaatttttggaagaaaatagcgggttttagtgatgatcgaattattagaatagctacatcagacaatttttggtcaatgggagagacaggtccttgtggcccttgttctgaaattttttttgaccatggagatcatttagctgggggactgcccggttctaaagacgaagatggggacagatttattgagatttggaatttagtattcatgcagtatgaacaagtttcaaaagacaaaagaataaatttgccaaaaccatctgtggatactggtatggggctagaacgaattgcggcactgcttcaaggaactcatgataactacgagacagatcattttgaaaaaat

SEQ ID NO: 306050 - DNA, 928 bp, Unknown
  Bacterial polypeptide expressing nucleotide sequence isolated from the Sargasso Sea
aaagagcccagttttttataaaatttttgaaactctaaaaaatgaaatggaaggcaactatccagaattaaaaagatcagactccttaattaaagaaacactaagaatggaagaagagaaatttttagttttacttgatagaggaattaaaattttaaatgatgaaatttcaaaaattaaaaaagttttacctggagaagtcgcatttaagttgtacgacacttatggttttccattagatttaacagaggatattttaaaaaataaatctttaaatgttgatcacaaaaaatttgaagaaataatgaaaaaaagtaaagagctagccaaaaaaaactggaaaggttctggtgatagttctgaggaagaaatctggttctctataaaagataaaattggacctacagaatttttaggttacgagtctaatcaatctgaaggagtgatattaaatattataaaaggaaataaagaagttaacagtttatctaataatgaagacggcattataataacaaaccaaactccattttatggcgagtctggaggacagcttggtgatacaggaactatagtatctggaaattctatttttgaagttaatgatacacaaaagaaacttggtgatttatttgttcactacggatgcttaaaaactggggaaatgaaaacaagtgatgttgtagaaatgaagattgatgtggaaagaagagaaaaccttaaagcatatcattcagcaacacatctattacatgaatctctaagacgaactttaggtaaacatgtaatgcaaaaaggttcgttagtagcacctgaccgccttagatttgattttagtcacatgaaacctatttcaaatgaggaattagaaacaatagataaacttgttaatgaatatgttaagaataataccgaggttacaacaaga

SEQ ID NO: 306051 - DNA, 604 bp, Unknown
  Bacterial polypeptide expressing nucleotide sequence isolated from the Sargasso Sea
atggcagacaaaacactcaatgaaataagaaatactttcttaaagtattttgaaaagaacgatcacaaaatagtggaatctagtaatttagttccaaataacgatcctacattgatgtttgctaattcaggtatggttcagtttaagaatgttttcacaggattagaaaaaagagattatgcaagagccacaacatcacagaaatgtgtaagagcaggcggtaaacataatgatttagaaaatgttggttacacaccaaggcatcatactttttttgagatgttgggaaatttttcttttggagattattttaaagaacaggcaatccattatgcgtggaacttaataactaaagattttggaatagataaaaataaaatttatgtaactgtttttcatgaagacgatgaagcctttaatttttggaagaaaatagcgggttttagcgatgatagaataataagaatagcaacctcagataatttttggtcaatgggtgagacaggtccttgtggaccttgttctgaaatattctttgatcatggtgatcatttaccaggtggattgcctggaagtaaagatgaggatggagatagatttatag

SEQ ID NO: 306052 - DNA, 838 bp, Unknown
  Bacterial polypeptide expressing nucleotide sequence isolated from the Sargasso Sea
gatttgagcttgccgaaagaaaaactgctagtaacggtatattcagaggatgaggatgcagcaacgctatggaaaaaagtcgcaggcttaaatgacgagagaataataagaataccgacgtcggataatttctgggctatgggtgataccggcccttgcgggccatgctcagaaatattttttgatcatggcgagaaggtggaaggtggaccgccggggagttctaacgaagatggagatagatttattgagatctggaacttggtctttatgcaatatgagcaggtaaccaaggatgaacggatagatctgccgaagccttccatcgatactgggatggggctggagcgtatcgccgcaattcttcaaggtagtcacgataactacgagattgatctcatgaggtcgttgatagaggcatcagcacatgcgtccaatacggatccagatggttcagctaaggtgtcacacagagttattgcagatcacttgagagcgtcatcctttttgattgctgacggggttcttccatcgaatgaggggcgcggttatgtcgtaagacgtatcatgcgcagggcaatgagacacgcgcatcttttaggctgtgtggagccgctaatctggcgcttagttcctgccttgagtaaacagatgggtgaagcatttcccgagctaataagggcagaaagtttgatcgtcgaaacgctgaagctggaagaaacgcgatttaaagagacacttgctcgaggattgcggcaattggaggatgccactaacaagttgtcagatactaaaaaccttccaggtgaagtagcttttaagctctacgatacattcg

SEQ ID NO: 306053 - DNA, 849 bp, Unknown
  Bacterial polypeptide expressing nucleotide sequence isolated from the Sargasso Sea
ttaaatgttaatttaaagattaatcacgaaagaagaagttcatgtaaagcctaccattcagctactcatattctacatcaagcattaagagatattttaggagaacatgtgacacagaaaggctctcttgtttcatttgacaagcttaggtttgattttagtcatcataagccaatgactaatgaagaactaagaaacgttgaaagaattgcaaatgaagtgattaatagtgcgtctgatgttcaaactaaattaatgaaatcagatgatgctataaattctggagcattagcattatttggagagaaatatgctgatgatgttagagttctttccataggcgttaaagataacaatatttacagtactgagctatgcggtggaacacatgtaaataatacctctcaaataggtgaatttgaaataattaatgaatcttcagtttcatctggaatcagaagaatcgaagcactaagggatgaggatttaaaactttataaaaagaataagctttctgaagaatctgaaatagaagaaaaaaaaatacaatctgaaaaactgaaagtaatttctaataaaaatatatctgaaataaaaaaacagattgatgaaaatataaaggagaataatcatacacatttgattattgaattctatgatgatttaaaagtttctgatttaaggaatatagttgattatgctaagaaatcctttgaacgtgaaggggttattgttattggatcaaaaaatgctggtaaaattagttatcaagttggtgttagtgatgaattatcaaatagtattagcgctaatgatattgcacaatatgcatcaagtatttctaatgga

SEQ ID NO: 306054 - DNA, 553 bp, Unknown
  Bacterial polypeptide expressing nucleotide sequence isolated from the Sargasso Sea
atgaattctaaagatatacgtaactcctttatccaatattttgagaaaaaggaccataaatttcatcgtagttccccagttgttccaatagatgacccaacgctactttttacaaacgctggaatgaaccagttcaaacctgtattcttgggccaggtggaaccaaaatataaaagagctgccaatagtcaaaaatgtattagggtttctggtaagcataatgaccttgaagaagttggcgtagatacatttcaccataccttttttgaaatgttaggcaattggtcctttggagattattataagaaagatgcaattgaatgggcatgggatctctttactaatgagtggaaattagataaagaaaggttatgggcgacagtatacgtagatgatgatgaagcttttgatctctggacacaggtcactgatattaaacctgaaagagtgatcaggtgtggtaaaaaagataatttctgggaaatgagcgagacaggaccttgcggtccatgttctgagatacattactatgttggtgacgatccaaagtaat

SEQ ID NO: 306055 - DNA, 877 bp, Unknown
  Bacterial polypeptide expressing nucleotide sequence isolated from the Sargasso Sea
ttaatagctgatggtattttacctagtaatgaaggcagaggatatgttttaagaagaattatgcgaagagctatgaggcatgtacataagctaggcattaaagacttacatatgtataaattggtagatagtttaaaaaatattatgggaaggtcttttgatgagttaaaaagagctcagcctttaattgagaatactttaatgcaggaagaagaaaaatttagagaaactttagagagaggtattggtttgctaaataaatctattgataatttgagaaattcagagccattatcaggagaagttgcatttaaattatatgatacatatggattcccagtagatttaactgcggatattttaagaggacatggtaaagaattagattacgaaggttttaaagctaatatgaaccaacaaaaagataaagcaagaaaatcatggagtggttctggggagcaagaaacttcagaaattttaataaaattgaaagaaaagcataatgaatcagaatttgttggatatgaaaagatttctgagcaaataaaaataatttcaattataaaagatgatgaagagttagttgaggcagtaatagataatgaagtatctgtgattacagataaaactcctttttatggtgagtctggaggtcaggaaggagatataggattttttgaatgggagaatggtagtgcaaaagttgttgatacaattaaagttgatgacataataattcattcggtcaaggttttagaaggagttttaaaggttaatagtaaaattatggctaatgtagatcttaatagaagagattcgctaaaaattcatcacagtgctacccatttacttcacgaatcattaagaagacatgttg

SEQ ID NO: 306056 - DNA, 361 bp, Unknown
  Bacterial polypeptide expressing nucleotide sequence isolated from the Sargasso Sea
atggctaaaaaaacactaaaaaatgtaagaaaatcattcttggattatttttcaaacaaggatcatcatatcgtagattctagtaatttagtaccaagtaacgacccgacattgatgtttactaattctggaatggttcaatttaaaaatgtttttacaggacttgaaaagagagaatataaaagagctgtaacatctcagaaatgtgttagagctggaggaaaacataatgatttagaaaatgtaggttatacaccaagacatcatacattttttgaaatgctaggaaatttttcttttggagattattttaaggatgttgctattgaattagcatggaatttaataactaaagaattca

SEQ ID NO: 306057 - DNA, 889 bp, Unknown
  Bacterial polypeptide expressing nucleotide sequence isolated from the Sargasso Sea
aattatcctgaacttaaaagagcagagtctttgattaaagaaactttaaaaatggaggaagaaaaatttttagttttattagatcgaggaataaaaatattgaatgatgaaatttctaaaattgacaaagtacttcctggtgaagttgcatttaaattatatgatacttatggctttccgttagacctcacagaagatattttaagaaataaatctttatccattgatacaaaaaaatttcaatcattaatgaatgagagtagggaacttgctaaaaaaaattggaaagggtcaggagattcagcagttgaagacatttggtttagtatcaaagatagattgggtgttacagaattcttaggttatgaaactaaccaagctgaaggtacagttttatctttattaaaaaataataaagaagttaaagaactaaaatctaaagatgagggaatgattataacaaaccaaacacctttttatggtgaatctggaggtcaagttggtgatactggagaaattgtttcaggagattttaaatttgaagtaactgatgttcaaaaaaaattaggggatctttttgttcattatggaaatgtaataagtgggtctgtaaaaattaaagataatgtagaaatgaaaataaatgttgaaagtcgaaacgatacacgtgcttatcattctgcaacacatttattacatgagtcattaagaagagttttaggaactcatgtaactcaaaaaggttcattagttgaacctagtcgtctaagatttgattttagtcatatgaaaccaatttctaccgatgaaattgataaaatagaaagatttataaattcaatggtttcaaaaaaaacagatgttagaaccagattaatgacaccagaga

SEQ ID NO: 306058 - DNA, 952 bp, Unknown
  Bacterial polypeptide expressing nucleotide sequence isolated from the Sargasso Sea
tatgagccaatttttgttgactgatataaggaaaaaatttcttaattactttaagcaaaataatcatgaaatagtagattcaagtaatttggtccctaataacgatccaactttaatgtttacaaattcagggatggttcaatttaaaaatgtattcactggtttagaaaaaagaccatataaaagagccaccacatcccaaaaatgtgtaagagcaggaggaaaacacaatgatttagagaatgttggttatacccctcgccatcatacattttttgaaatgttaggaaatttttcttttggcgattactttaaagaacaagcaatagagcatgcttggaaattgttaactaaagattttgaattaccacaagaaaaactttcagtaacagtttttaatgaagacgaagattcttttaaattatggaaaaagattgctggtttaagtgaaaataaaataattaaaatttcaacttctgacaacttttggtctatgggagacactggcccatgtggaccatgttcagaaatattctatgatcatggagataaacttaaaggagggcctccaggtagcacaaatgaagatggagatagatttatagaaatatggaaccttgtttttatgcaatacgaacaaatttcaaaagaaaaacgaatagatttacccaagccttcagtagatactggaatgggccttgaaagaatgactgccgttctacaaggaactcatgacaattataagattgatcattttaaaaagattattgaagcttcatcagatatcattaaaacaccaattgacaacaaaaccattgccagccatagaataatttctgatcatttaagagctagtagcttcttaatagcagagggaatactaccttctaacgaagggagagggtatgtcctaagaagaataatgagaagaggtatgagacatgctcattcg

SEQ ID NO: 306059 - DNA, 845 bp, Unknown
  Bacterial polypeptide expressing nucleotide sequence isolated from the Sargasso Sea
taaatatctaagatttgatttttctcactttaaaaaaattgaggaatccaaattgaatgcaattgaagattttgttaataataaaattgatgaatcaattgagttgatagaaaatagaagtgaaaattatgaagacgctacaaagaaaggagttgttgcattgtttaatgaaaaatatggtaagaccgttcgatctgtaaaatttggaaattcttatgaattatgtggaggaacacatgttaaaaatacaattcaaatcagaaactttgtcataacttctgaaagctccatcgcgtctggaattaggagaattgaggctatttctggcccctcagccctaaaatatcttagagagaaaaataaagaaattaaagatatatcaaatatattgtcaagcaaatcaaatttaattgactctatcaaaaatattaaagaccagaatactcaaatatcaaagaatctaaaatcaagtcaaataaaattaattgatttttatgttgattcctggtcaaatcaaacagaaaaaattaattcatttaattttttattcaaaaaattaaacttagagccatcttttgtaaagtcattgtgcttaggtcttagcaaaaaaatagaaaatcacatcataattttaataactgtgtcaaataacagatttagtattttttctgcagtttcaggttttgttgttgaaaattcaaatataaccgcatctgaaattattaaaagaatttgtgattcaattggtggtggcggtggtggccaggaaaagtttgctgctgggtcaggacctaaaactgataaaatagaattgattatatcaaaattaaaagatactttttaat

SEQ ID NO: 306060 - DNA, 638 bp, Unknown
  Bacterial polypeptide expressing nucleotide sequence isolated from the Sargasso Sea
gatgaccagtgcgagcgatgtccgcagcggatttctcgattattttgcgaataatggccatgaaattgtttcgtcgtcgccactggttccgcggaacgatccaacattactatttactaacgccgggatggtgcagttcaaggacatttttgtcgggacggaacagcggccgtatacccgagcgacgacatcgcaaaaatgtgtccgcgcgggcggaaagcataacgatttggaaaatgtcggttacaccgcccgacatcatacgttcttcgaaatgcttgggaatttctcttttggggattacttcaaggatctcgcaatcgaattggcttggaaccttgtgacgaaggagtatggcctcgatccgtcgcggttgctggttacggtttattcggaagacgaggaggcggcgttactttggcgcaaaatcgcggggcttcccgatgaaaaaattatccgcatttcgacttcggataatttctgggcaatgggaaataccgggccgtgcgggccttgttccgagatattttatgatcacggtccatccattcctggcggaccgcccggaagtgcggaggaggatggcgaccgcttcattgagatctggaacttagtcttcatgcaatatcaacaggttg

SEQ ID NO: 306061 - DNA, 796 bp, Unknown
  Bacterial polypeptide expressing nucleotide sequence isolated from the Sargasso Sea
aatgatttagaaaatgtaggttacacaccacgacatcatacttttttcgaaatgttgggtaatttttcatttggagattactttaaagagcgtgcaattgaacttgcttggaatttaattaccaaagattttggaattgataagaataagctttattttacagtatttaatgaggatgatgaggccttcaatttatggaagaaaattactggttttggagacgatagaataataaagatttctacatcagataacttttggtcaatgggtgaaacaggaccatgtggaccttgttcagagattttttacgatcatggggatcaattatctggtggattgcctggaactaaagaccaagacggagatagatatatagaaatttggaatttggttttcatgcaatttgaacaaatttcaaaagacaaaagaattaatctaccaaagccatcagtcgataccggtatgggtttagagagaattaccgctttattacaaggtactcatgataactataaaagtgatcattttaaaaaattaattgaatctatatcagacacggtaaaagtaaaagctgatgaaaataatattgcaagttttagagtgattgcagatcatctaagagcgagctcatttttattagccgaaggagtattaccctcaaatgaaggaagaggttatgttctaagaagaattatgagaagaggaatgagacactctcatttattaggctcaaaagatccagtgtttcacaatatttttaaaagtttattaaatgaaatgtcagatagctatccag

SEQ ID NO: 306062 - DNA, 834 bp, Unknown
  Bacterial polypeptide expressing nucleotide sequence isolated from the Sargasso Sea
tttgattttagtcacatgaaacctattttgaatgaggaaattgataaaatagaagagtttgtaaacaaaatggtctctaaaaaatctaatgtaaaaactagattaatgacaccagatgaggcagttgaaaatggtgctttagcattatttggtgaaaaatacggagatgaagtaagagtgctttcaatgggagacgaggatggaaagtatttttcaacagaattatgtggcggaacacacgtcaaaaacactggtgatattggtaaatttaagattgtcagtcagtcctcaattgctgcaggggttagaagaattgaggctttgagagacaaacaattagaggattatttaaaaaataaagaaaaattatctaacctaactgcagaaaaagatgaggaaacaattaaagatttaagtcagcaaattattaaattgggaggaaaaccaagtttagaagaaactaaccagaaaactttaattaaaaatttaactaaacaattagagaccatctcagtaaattcaattttagaggataaatctaaaaatataattaaagacgaagaaattaatggagttaagttaagacttcaaaaaatagatggattaccaccaaaagaattaagaaaacttgtagataaaggtaaaaaagatttaggcgaaggtatcgcggttgtgtttgcaaataaagatgacaaggttggattggctgttggagtaactgataatttaaccagcaagtatgatgcagttcaatttgttaaagttggatcagaaataattggtggtaaaggtggtggaggaagaaaagactttgctcaagctggtggacaggat

SEQ ID NO: 306063 - DNA, 888 bp, Unknown
  Bacterial polypeptide expressing nucleotide sequence isolated from the Sargasso Sea
agatcctcatggaagggtagtggagatggagatacccaaaaactatggtttgatttagctaaaaaaataaaaccaacaacttttgaaggatataaagagacaactataatagcaaatatatcagcattagttttaaactctgagcaagttcaaaatttaagtgataataatgaacaatctgcaattataactaataaatcttgtttttatgctgagtctggtgggcaagttggagacaaaggcactattatttcagatactgctgaatttaaagtaacagatacaagaaaaacccctcaaggtatatttattcattttggtaatgtaacttcaggaaattttaaaataggtcaagaagtcaaacttaaaattgatactagtttaagagatcttataaaaaaaaatcactcagcgacacatttacttcacgcagcgttaagaaataatttagggacacatgtagcacagcgtggatctttggttaatgaggataaactacgttttgactttagtcataataaacaaatatctactgaacaaatagaaattattcaaaaagaagtaacaagcataatttctaattcttgtgaaacacaaattgatattaaatctcaagatgaagccattaaacaaggtgctatggctttatttggtgaaaaatatggcgatgaagtcagagttgttactcttggagaaaataataataaaccctattcaattgaattatgtgggggaacacatgtaacaaatgttcaaaatatcaaaaaatttcatatcattagtgaagagtctgtttcttcaggagtgagaagaatagaagcttataccggagatagggttgatgaatttataagcaacaaaattaaagaaagtaaattgcttgaaaaa

SEQ ID NO: 306064 - DNA, 898 bp, Unknown
  Bacterial polypeptide expressing nucleotide sequence isolated from the Sargasso Sea
gcatgtacacaaaaagggtctttggttagtcccgaaaaacttagatttgatttcagtcataataagcctatagaaaaaaatgaaattgataggatagaagaatacgttaacaaaatggtcaaaaccgcagcagatgttaaaattagaattatgacgcctaaagaagcagtcaagaagggtgctttagcaatgtttggagaaaaatatggagatgaggttagagttttatcaatgggtaaagaggatagtgattatttttccactgaactttgtggcggtacacatgtaaaaaatacaaaagacataggaaagtttaaaataataagccaatcatcaatcgcagctggcattagaagagttgaagctttaagagctgaacagctagagagttttgaaaaaattcaaaaacaagataaatcctttaaagaaaaaaatttaactgatcaaatagatttaattaaaaaagagttaattaaaaataaaattacacctgattataatataaatctaaaattatctgaaaatgttaaaattctaaataaacaattagagaaaattaaaatacaaaatattattaatgataagagtaaaaatttcattaaagataaaaaaataggcacttttatacttagacagcaagtccttaaagatttaccaccgaaagaattaagaaatattgttgatcaaaacaaaaaagacattaaagaaggaattgtagttagtttttctacatttgaaggtaaagttgcaattgctattggtataacaagtggattaactaaaaaatttgacgctgttacacttataaaagtcgtttcagaagctattggtggaaaaggtggtggtggaagaaaagattttgcacaagcagggggaacaaaaatagataaaatagatg

SEQ ID NO: 306065 - DNA, 789 bp, Unknown
  Bacterial polypeptide expressing nucleotide sequence isolated from the Sargasso Sea
aggaaaaatcatactgcaacacatcttttgcatgcagcattgaaaaaaactttaggagatcatattcaacaagctggttcattagtgcatccagattatttgcgttttgatttaacccattcagaaaaaatatctaatgatgaggtatcaaaaatagaaaatttagtgaatgacgaaattcagaaaaatgtaaagttagatatttcaattaaaaattttgatgtcgctaagtctgaaggtgctgaagcattgtttggtgaaaaatatggagataaagtacgtgttatatctattggtgatttttctatggagctttgtggaggtactcatgtaaatagaactggggatattggcttgcttaaaattactgaagagtctagccttgctgcaggagtgcgaaggatggtagccgttaccggccctgaagcaataaactattttcagaacaaagtaagtattgttcaagaattacaaggtattttaggcgcaaagtctgatgagattagttctagagtaagccatttaattgatgaaagaaaagtattagagaagaaattaaagcagaaaagaagtagctctgcttttaatgcaaaggtaattatagaagatgcattaaaagtaaatgaacataacataatagtgtccgaggttgattctgaatcattagatgaattaaaaaggtttggagatcaaactttaaatgtattagaaagcggtattgcagtccttggtagtaataaaggagcgaagcctgctgcagttattgtagtgaccgatgatattataaaa

SEQ ID NO: 306066 - DNA, 484 bp, Unknown
  Bacterial polypeptide expressing nucleotide sequence isolated from the Sargasso Sea
tatggcagacaaatcactaaatgaaataagatctacatttctaaaatattttgaaaaaaatgatcacagaatagtggagtcaagcaacttagttccaaataacgatcctacattaatgtttgccaactcaggaatggtgcagtttaaaaacgtatttactggattagaaaaaagggattacaaaagagcaactacttctcaaaaatgtgtaagggcaggaggtaagcataatgatctagaaaatgttggctatactccaagacaccacactttttttgaaatgttaggtaatttttcatttggtgattactttaaagaaaaagcaatattttatgcttgggatttaatcacaaaagattttggactagataagaaccgactttattttacagtctttagtgaagatgatgaggcctttaatttgtggaaaaaagtcacaggttttaatgacgatagaataattagaattccaacttcagacaat

SEQ ID NO: 306067 - DNA, 832 bp, Unknown
  Bacterial polypeptide expressing nucleotide sequence isolated from the Sargasso Sea
gaacaaatttggtttggtgtaaaagataaagttggtccaacagaatttttaggttatgagtttaatagatcagaaggagttgttttatcaattgtaaaagataacaaagaaacagaaaaattatcagcaaaagaggaaggagcgattgtaaccaatcaaacacctttttatggagagtcaggagggcaattaggtgatacaggaaaaatatcaataggagattttatatttgaagtaagtgatactcaaaagcaacttggtgatttatttattcattatggaactttaaaaaatggagaaatcaagatcaatgatgttgttgaaatgaagattgacgaagaaagaagaggtaacctaaaggcatatcattcggctacacatttattacacgagtctttaagaagaacgttgggaaaacacgttatgcaaaagggctcacttgttgcaccagatcgtctaaggtttgattttagccatatgaaaccaataacaaatgaggaattggtaaagattgataaaatagttaatgattacgttactaatagtactgaagtgactacaagaattatgactccaaaagcagctatagaaaagggagcgctagctttctttggtgagaagtatggtgatgaagtgcgagtagtttcaattggtaaagagaaaaatacatatttttcaacagaactttgtggcggaacccatgttaaaaatactggtgatattggcaaatttaaaataattagccaatcatcaatcgctgcaggcgttagaagagtagaggctttgagagataaacaacttgaagattatatgcaaaataaggaaaaacttc

SEQ ID NO: 306068 - DNA, 812 bp, Unknown
  Bacterial polypeptide expressing nucleotide sequence isolated from the Sargasso Sea
ccctgaacttattgaagctaaggaattgatagaggatagtctacacaatgaagaggttaagttcaagacaactttagacagagggttaaagattttagataatgaaatcataaacttaaaagacggagataaagtatcaggagaagttgcatttaagttatatgatacatacggtttccctgtagatttgacgcaagatactcttcgggagaggcaattgcaggttgatttaaagggctttgagcgggcaatggaattgcagaaagaaagggcaagaaaggcttggtctggatcaggtgacaaaaaattagatgttatttggtttgaactgggcagtaagttaggggcaacagagttcttagggtacaatacgttaagatcacaggcaaaggttttgtctttagtaattaaaggagttgagcaagcgaaagtcagtgacaatgatttagttgatgcagtctttaaccaaacaccattctatgctgaaagtggtggtcaggtggctgatattggtagagcttttaatgatgaaatggaggccgttattgaagatgtgcagaaaattggaaatctctttgtccacaaattgagggtgctcaaaggtaaaatttcttctggagatcttctaaggttggaagtagacaactcaaatcgagaaggaatatcagctaaccactcagcaactcacctaatgcatcaagctttgaaagatgtgttcggatcacatgtaaatcagagaggatctcttaatgatgctgaaaaaatccgatttgatttttcacatgacaggcctttatcaagcaaggatataa

SEQ ID NO: 306069 - DNA, 726 bp, Unknown
  Bacterial polypeptide expressing nucleotide sequence isolated from the Sargasso Sea
tctctagtaccagataatgaccctactctaatgtttgctaactctggaatggtacaatttaaaaatatttttacaggtaaagagacaagagattacaatagagcgactactgctcagaaatgtgtaagagcaggtggtaagcataatgatttagaaaatgtaggatacacgacaagacaccatactttttttgaaatgttaggtaatttctcttttggagattattttaaagagttagcaatagaactagcttggaatctaattactaaagaatattcaataaataaagatagactattagtaactgtttattctgatgatcaggaagcttttgatttatggaaaaaaatagctggtttgtctgaaaataaaattattaaaattagtacatctgataatttttggtcaatgggtgaaactggtccttgtggtccttgttctgaaatattttatgatcatggtgataaatacgaaggaggccctccaggttctccaaatgaagatggtgatagatttatagaaatatggaatttagtatttatgcaatatgagcaaatatctaaatctgagagaataaatcttccaaaaccctccattgatactggaatgggactagagagaatgacagctcttttagatggttctaacgataattattcaacagatttatttcaaccgattataaatgaatcaacaaaactatgcggcgatgagagttcaataaca

SEQ ID NO: 306070 - DNA, 972 bp, Unknown
  Bacterial polypeptide expressing nucleotide sequence isolated from the Sargasso Sea
tatgaatgaaaggaaacagagcacaaaattagcttggaagggatctggcgatgaagcagttgataaaatttggttctctttaaaagaaaaaataggggcaacagaatttctcggttatgagcatgagaaatcagaagctattgttttatctttaataaagaaaggaaaagaagttaaagaaataaacgaaggtgatgaagcggaattagttactaatcaaacaccattttatggagagtcaggcggacaaataggagatacgggatatatttcaaatagtaaatccaattttcaagttatagacacacaaaaaaaacttggagatttatatgttcatcgtggcaaattaatctcaggaaaaataaaaattaatgatacactaattctatccattgaaagtgaaagaagggccaacataagagcatgtcattcagcaactcatttacttcatgaggcattaaggcgaactttgggtaagcatgtaatccaaaaaggatcgtttgttggaccagatagattaagatttgattttagtcacacaaaaccaattcaagaagacgaagttaaaaaaatagaagaatatgtaaacagaatggtgaaaagtaatagtgaagtaagaaccaggctgatgacacccaaagaagctgtagaaaatggcgccttggctctttttggagaaaagtatggggaagaggtcagagttctttctatggggaatgataaagataaatatttttcaacagaactttgtggtggaactcatgtgaaaaatacttcggaaattggtgattttaaaatcgttggtcaatcagctattgctgcaggagttagacgtgtagaagccttaaggtcaacacaactagcaaactatttaaaaaagaaagaacaagcttctgaagatttacataaagttacatcggacaaaaatataagtttacaagaaaaaataaaaacttttggacaaaaacccat

SEQ ID NO: 306071 - DNA, 394 bp, Unknown
  Bacterial polypeptide expressing nucleotide sequence isolated from the Sargasso Sea
tatggcaaaaacattaaacgagatcagatcaacttttttagattattttgaaaaaaatgatcacaagatagttgagtctagcaatttggttccaaataatgatccaacattaatgtttgcaaattcaggcatggtccagtttaaaaatgtttttactggattagaaaaaagggattatcaaagagctactacttctcaaaaatgtgtaagagcaggaggtaaacataacgatcttgaaaatgttggttacactccaagacaccatacattttttgaaatgcttggaaatttttctttcggagattacttcaaggaaagaggaattgaacttgcttggaatttaattactaaagactttggattaaataaagatagattatatgtaacagtattt

SEQ ID NO: 306072 - DNA, 897 bp, Unknown
  Bacterial polypeptide expressing nucleotide sequence isolated from the Sargasso Sea
tgatttagaaaatgttggttacacaccaagacaccatacattttttgaaatgttgggaaatttttcttttggtgattattttaaagaaaaagcaatacactatgcttgggatttgataacaaaagattttggtttagataaaaatagactttatgtgacagtgtttcatgaagacgatgaggcatttaatttttggaagaaaatagcaggtctaagcgatgatagaataattaaaatttctacgtcagataatttttggtcaatgggtgaaacaggtccgtgtggtccttgttcagaaatattttatgatcatggagatcatttaaaaggtggattgcctggaagtaaagatgaagatggagatagatttattgaaatttggaatcttgttttcatgcaatatgaacaagttactaaggataaaagaataaatcttccaaaaccttctgtagatactggaatgggtttagaaagaatagcagccttacttcaaggtacgcatgataattatgaaacagatcattttaaaaaattaattgaatcgacatcagatatagtcaaaaaggagccagatcaaaaaaatctttcaagtttcagagttattgcagaccatctaagagctagttcgtttttaattgctgaaggagttttaccttcaaatgaaggacgaggctatgtgttaagaagaatcatgagaagaggtatgagacattctcatttacttggatctaagaaaccttttttttataatttattcgaaactctgaaaaatgaaatgtctggaaattatccagagcttaaaagagctgaatctttaataaaagaaactttaaagatggaagaagagaaatttttagtgcttcttgatcgtggaataaaaatattaaatgatgaaat

SEQ ID NO: 306073 - DNA, 556 bp, Unknown
  Bacterial polypeptide expressing nucleotide sequence isolated from the Sargasso Sea
atgacaccaaaagaagctgttggtttaggagcattagctttatttggcgaaaagtatggtgatgaagtcagagtagtttttatgggaaaagaaaagaatggtttcttttccacggaactatgtggtggaacacatgttaaaaacacaaaagaagttggagagtttaaagtaattagccagtcttcaatagcttctggaattagaagagtagaagcgttaagaaataaacaacttaaagattatgaaaagtcactcaaagaagataagtctttaaaggaaaaaagtcttaaagaccaaattaatttaataaaaaaagatttattaaaacttaaagttaaaccagatttaaaagataatttagatttatctgaaaacttaaaaaatctaaacaaacaactagaaaagattaaaataaaaaggataattgaagataaaaacaaaaacattataaaagataaaaaagttggtagttttttattcagacaacaggttttgaaagatttcccacctaaaggaattaagaagtgtaatagatcaaggaaaaaaagatattaaa

SEQ ID NO: 306074 - DNA, 859 bp, Unknown
  Bacterial polypeptide expressing nucleotide sequence isolated from the Sargasso Sea
aaagattttgtagatcaggcaaaaattggagataatgttgaaatagtaactaatcaaacacctttctacgcagaatctggaggtcaggtaggagacaaaggaataatttattctaatgactgtaaagtaattgtagaagacacccaaaaaaaaatgggtgatattcatgttcattatggaaaagttgataaaggttccttaaaagtaaaccaaagtgtaaatttagaaataaacattaatagaagaaataattctcgagcttatcattcagccacacatttgcttcatgaggctttacgcaggacacttggtaaacatgttactcaaaaaggttctttagttagtcctgagaaactcagatttgattttagccataatagacctattgaaaaaaaagaaattgaaaagatagagaagtatgtaaacgatatggttaatacagcagcagatgttaaaactagaattatgacacccaaagaagctgttgaaaaaggagcattagctatgtttggagagaaatatggagacgaagttagagttttatcaataggaaaagaaaacggaaattatttttctaccgaactatgtggaggcacacatgttagaaatacaaaagatattggaaagttcaaaataataggccagtcatcgattgcagctggagtaagaagaatagaagctttaagagctgagcagttgataaattatgaaaattctttaaaaaaagataaatctttaaaagaaaaagatttaaaagatcaaatagacttagttaaaaatgagttattaaagcataaagttaaacctgattatagtagcgatttagggttatctgagaatataaaaaatcttaataaac

SEQ ID NO: 306075 - DNA, 733 bp, Unknown
  Bacterial polypeptide expressing nucleotide sequence isolated from the Sargasso Sea
aatgacatcatctgaggttagacaaaaattcattgatttttttaagtcaaaagatcataaacaaatatcttcagcatctatcttaaacaattatgatgataaccttatgtttacaaatgctggtatgaatcaatttaaaaatatttttataggaactcaaaaacctaatgatttaagaattgttaattctcaaaaatgtctaagagtatcaggaaaacacaatgatcttgaagaggttggaatagatacatatcatcatactttttttgaaatgcttggaaattggagttttggagattatttcaaagaagagattatcaattggtcatttgaactattgactgatcactataaaattgataaagacgatttatatgtaactatttttaaaggttctacagaagataatactccagcagatgaggagtcatttaattattggaagaaattatttccagatgaaaaaataatctattgcgataaaaaggaaaatttctgggagatgggagagtatggaccatgtgggccatgttctgaaatccatattgacattagatcaaaagatgaaaaaaataaaattaatgccagagatctaataaataaagatcatcctcatataattgaaatatggaatcttgtatttatacaatataatcgtttgacggatggctcacttaaaaagcttgataataaatatgttgatactggaatggggcttgaaagactttgcatg

SEQ ID NO: 306076 - DNA, 725 bp, Unknown
  Bacterial polypeptide expressing nucleotide sequence isolated from the Sargasso Sea
ttcaaaagacaaaagaattaatttacccaagccttcggttgatacaggaatgggcttagaaagaattacagcgcttcttcaagggactcacgataattatgcaactgatcattttaaaaaattgattcaagcatcctcagaagcagttaaaaaaaaacctgataaatcaaatatttcaagctttagagttattgctgatcatttgagagcaagttcatttttaattgctgaaggtgtactaccttcaaatgaaggaagaggatatgttctaagaagaattatgagaagaggtatgaggcattcccatttacttggggcaaaaaaaccaattttttataatatatttaaaaccttacaggaagaaatgtctcaaagctatccagaattagatagagcacagtctttaattaaagaaactttaaaaatggaagaagaaaaattcttaactcttttagatcgtggaatcaaaatactaagtgatgagatttctaaaattgataaaatattaccaggagaagtagcatttaaactttatgatacttatggatttcccctagacttaactgaggatatcttaaaaaacaaatctttaaaagttgatcacaaaaaatttgattctttgatgaaagaaagtagggaacttgcaaaaaaaaattggaagggttctggggatagctccgtagatgaaatttggtttagcattaaagataagttgggtccgactg

SEQ ID NO: 306077 - DNA, 956 bp, Unknown
  Bacterial polypeptide expressing nucleotide sequence isolated from the Sargasso Sea
aaaagtggctggattcccagatagtaaaataattaaaatctcaacatcagataatttttggtcaatgggtgaaactggaccatgtggaccttgttctgaaattttctttgatcatggagataaattaaaaggagacccacctggaagctcaaatcaagatggagatagatttattgaaatttggaaccttgtttttatgcagtttgaacaagtttctaaagaaaaaagaattaatttacccaaaccatcagttgatacaggaatgggtttagagagaataaccgctgttctacaaggtacccacgataattatgcaatagatcactttaaaaaactcataacagcttcatccgaaattactaatactaaaattaataatgacacaatatcaagtcatagagttattgctgatcatttgagagcaagtagttttcttatagccgaaggagttttaccttctaacgagggaagaggctatgttcttagaagaattatgagaagaggcatgagacacgcgcacacacttggaagtaaacagccaatttttttcaaattattcaatgttttattaaacgaaatgtcggaaagttatccagaattaaatactggaaaagatttaattatagaaacattaaaaaatgaggaagaaaaattttcatctctgttagatagaggaatgaaaattttagatcagaatttggaaaaagttaaaaataacatcctacctggtgaaatagctttcaagttatatgatacatatggatttccattagaccttactgctgatattttgaaaaataaaaatattaaaattgatacccctgcatttgataaagcaatgcataaaagtaaagaattagctagggcaagctggaaaggatctggtgataagtcattagaggaaaaatggtttaaagtaagagaacaatttgaccccacagaatttttaggttacg

SEQ ID NO: 306078 - DNA, 499 bp, Unknown
  Bacterial polypeptide expressing nucleotide sequence isolated from the Sargasso Sea
atggcggacaaatcactaaatgaaataagaagtacatttctcaaatacttcgagaaaaatgatcataaaattgttgagtcaagtaatctagtcccaaataatgatccaaccttaatgtttgctaattcaggaatggttcagtttaaaaatgtatttactggtctagaaaaaagagattatcaaagggctaccacttcacaaaaatgtgttagagcagggggtaaacataatgacttagaaaatgttggttacacaccaagacaccatactttttttgaaatgttgggaaatttttcttttggagattatttcaaagaaaaaggaattgagcttgcgtggaatctaatcactaaagattttggtttagacaaaaataggctttatgtaactgtttttcatgaggatgatgaggcttttaatttttggaagaaaatagcaggttttagtgacgataaaataattagaattgcaacatcagacaatttttgtcaatggggga

SEQ ID NO: 306079 - DNA, 795 bp, Unknown
  Bacterial polypeptide expressing nucleotide sequence isolated from the Sargasso Sea
gaagtaaaaagcttatccagtaatgatgaaggtatgataattacaaatcaaacacctttttatggagaatctggaggccaagttggagataccggagaaattacctctgtagattttaaatttgaagtacatgatgttcaaaagcagctaggggacttatttgttcattatggcaaagtaactaaaggttctattaaagtgaacgataatgttgaaatgaaaattgatataaatagaagaaacgatgttagagcttatcattccgcaactcatttattgcatgagtcattgagaagagttcttggtactcacgttactcaaaaaggatccttagttgaaccagatcgattaagatttgattttagtcatatgaagcccatttcgaatgatgaaataaaaaaaattgaaaattttgtaaattcaatggttgaaaaaaaatctgaagtaaaaacaagaattatgaccccaaaagaagctgttgataacggtgcattagccctttttggtgaaaaatatggagatgaagttagagttttatcaatgggtagtgaaaaagaccgttatttttcaacagaattgtgcggtggaactcatgtaagaaatacaggcgatataggaaaatttaaaattattagccaatcttctatagcagcaggagtgagaagggttgaagctttaagggataaacagctacaagaatatttaaataaaaaggaaaaacttagtgaccttgaaaatgagaaaattcaagaaacaattaaagatttatctcaaaaaataattaaattaggagga

SEQ ID NO: 306080 - DNA, 344 bp, Unknown
  Bacterial polypeptide expressing nucleotide sequence isolated from the Sargasso Sea
tatggcagacaaaacacttaatgaaataagaaatacatttctcaaatattttgagaaaaatgatcatactatcgttgagtctagtaatttagttccaaacaatgatccaacgcttatgtttgccaactctggcatggttcaatttaagaatgtttttactggtttagaaaaaagagactatcagagggctacaacatctcagaaatgtgttagggcaggtggaaaacataatgatcttgaaaatgttggctatactccaagacaccatacttttttcgaaatgttaggaaacttttcatttggagattacttcaaagagagagctgtagaacttgcatggaaat

SEQ ID NO: 306081 - DNA, 811 bp, Unknown
  Bacterial polypeptide expressing nucleotide sequence isolated from the Sargasso Sea
ggatatgttattagaagaattctaagaagagctgtaagatatggatatacaaatcttgatataaaaactccattcatttatgagcttgttgatatagtaatctcaaaatatttgactatttatcctgacttaaaaaaccagagtgagtacattagttcattaatttatgacgaagagaaaggtttcctcaaaacattaaatcaaggcctttcccttataagtcaaattattgagtctaatctaaataataagataattagtggtgaagattcttttaagctttatgatacatatggattccccattgacctcacatcattaattgcaaatgaaaatgattttcaggttgatatagaaggatttaatgaatatatgaaaattcaaaaaagcagatctaagtcaacaagtaatgaagagattaaagagtgggttattgtgggtgagacatcatcaaataatatatttaaaggatatgaccattatgaacttgaatcaaaagttttcaagtatcgagagtctataaatagtgaaggagatactcaataccatcttgtgacaaatgaaacccctttctatcctgaaggaggcgggcaaattggagatactggagaaattatttcaaactcatcgtctgttactgtaaaaaatacttttagagatggtgaagacataattcatcttgtagataatttgccaattgaactgggtgacactttattaatgaaaattgataaaaatagaagagtatccattcaaagaaatcatacttcaacccacctccttcaatttgcactaaaaaaaatattaggaa

SEQ ID NO: 306082 - DNA, 606 bp, Unknown
  Bacterial polypeptide expressing nucleotide sequence isolated from the Sargasso Sea
aatgaaaacgaatgaaataagacaagcatttatcaaattctttgagtcggaagggcatcaaagcgtcaagagttcgcctttgattcctgcaaatgatccgacactcttatttacaaacgctggaatggttcagttcaaggacatttttttaggaaaagaagatcaaggtttcacaaaagcagtcagtgctcagagatgtttaagagcaggtggtaagcacaatgatcttgaaaatgttggctatacatcacgtcatcacactttctttgaaatgcttggcaactttagttttggagactactttaaagaggatgcaatccaattggcatgggatttcattaccaatgaactcaaacttgaaaaagatcgtctttgggtaaccatttttgaagatgatgatgaggctgcaagcatttggcttgaaaagattggagtaccagctaatagacttgttcgactgggtgaaaagtctaacttttggtctatgggtgatactggaccatgcggtccttgtagcgagatattttatgatcatggcgatcatatcgatgggggtcctcctggatcagatgatgaagatggcgatcgtttcgtagaaatttggaa

SEQ ID NO: 306083 - DNA, 382 bp, Unknown
  Bacterial polypeptide expressing nucleotide sequence isolated from the Sargasso Sea
aaaatgtaaacttaatgataatataaaagcatctataaataacgaaaacagaaacttaattaaatataatcattcatctactcatttattacatgcagctcttagaaaaactttgggaaatcatgttacgcaaaaaggatctttagttaatgctgcaaaacttaggttcgattttagtcataatcatcctatagaaaaagaaaatattcatagtattgaaacaattgttaatgaccaaataaggagcaatagcagtgttgatataaaaattattgatcaaaaaaaagcaattgaagaaggtgccatggctttgtttggcgaaaaatatgaagacgaggtaagagttataactatgggaaatgaaaatggctcatatttttca

SEQ ID NO: 306084 - DNA, 839 bp, Unknown
  Bacterial polypeptide expressing nucleotide sequence isolated from the Sargasso Sea
cagttgacagaccataccattccgggcgatttggcctttgagttgtatgatacctatggttttcctgtggacctgactgccgatgtggcgcgtgagcagggcatgcatgttgatatgccagcttttgaagcaaacatggcgacgcaaaagcaacgctctaagcttgcacatcagtttacaggaggccatgatattgcattggatgcgatgcaccaaagccaatttttgggtcatgatagattgcttgcaaaaggtactgtattggctttattcaatcataaggctagtggtacggattatttagatgcaggtgacacaggtatggtagtgcttgatcaaacacctttctatgctgaggctggtggtcaagtaggtgatgagggggtgctgcgttggtcgggtggccaagctgtggttacagatacccaaaagcgaggaaaggccattgtgcactatgtacagctttctgaaggtcatttggcagtgggtgatgtggtgcatgctgaggtggccccaagcaggcaagccatttgttgccatcattctgcgacgcatttattgcatgccagtttacgtatgcacttgggagatcaagtggtgcaaaagggctcattagtcacggctgagcgtttgcggtttgattttgcctatgatgcgccggtgcgtcagtctgatctggatgccattgagcgcagtgtcaacgcatgtatccgtgccaatgtgccggttcaaacacaagaaatgtcattggtagaggccaaagacagtggcgtgatgatgttgtttggtgagcgttacaaagcgcaggtgagggtgctgagcatgggtgatttttcagc

SEQ ID NO: 306085 - DNA, 757 bp, Unknown
  Bacterial polypeptide expressing nucleotide sequence isolated from the Sargasso Sea
agaaaaaaatgaaattgaaaaaattgaaaagtttgtaaacgatatggttaatactgcggcggatgtcaaaacgagaatcatgacacccaaagaagcagttgaaaaaggagctttagctatgtttggagagaaatatggtgatgaagttagagttttatcaatgggtaaagaaaacggaggatttttttcaaccgaactttgtggaggtacccatgttaaaaatacaaaagatattggtaagtttaaaataataagccaatcatcaattgcagctggcgttagaagagtagaggctctaagagataagcagttagaagattatgaaaattctttaaagcaagacaaatctacaaaagataaaaatttaaaaggtcaaattagtacaattagaaaagagttattaaaattaaaagttgaacctagttatattgaggggtttttaaaatcaaaagaagaaaaagatttaccagaacaatataagtcactaagcaaagtgttagaggctattaaaattcagaatgtcattaaagatgcaagtaaaaatattattaaagataaaaaaattggttcttatactttaagacatcaggttcttacggattttccaccaaaagaattaagaaatgtagtagatcaaagcaaaaaagatattaaacaaggtatagttgttgggttttcaacttttgaaggtaaagttggtgtagctgtcggaataacaaaagaattaactaaaaaatatgatgctgtaacgcttgta

SEQ ID NO: 306086 - DNA, 225 bp, Unknown
  Bacterial polypeptide expressing nucleotide sequence isolated from the Sargasso Sea
tatggctcaaaaaacactaaatgaaataagagaaacattcttaaaatatttcgaaaagaatgatcataagataattgagtctagcaatttagttccaaataatgatccaacattgatgtttgcaaattcaggtatggttcagtttaagaatgtatttactggtttagagaaaagagattataaaagagccaccacttcacaaaaatgtgtaagagctggtggaaa

SEQ ID NO: 306087 - DNA, 862 bp, Unknown
  Bacterial polypeptide expressing nucleotide sequence isolated from the Sargasso Sea
gggattagttactgatatttatggactttcttctgagaatataatagtgagcgtgtttcatgaagatgatgattcggtaaagatttggaaagaagatatcgggattcatccagaaaggataattaagcttggagaaaaagataatttctggtcttcaggaaaaacaggtccttgcggaccatgttcggaattatattatgactttaaaccagagaaaggtcttcagaatattgatttagaagatggtgatcgttttatagaattttataatcttgtatttatgcaatataaccgtgaccctgctggtcaattgacagatttgaaatacaaaaatattgatactggaatggggcttgaaagaatggctcaaatattgcaaaagaagaagaataattacgaaacagatttgatttttccaattattcaaaaagcttctgagatatccaaaattgattattattcttcagatgaaagaaccaaaatctctttaaaaattattggagatcatataagagcagttatacatttaatttctgatggggtagtagcaagtaatcttggaaggggatacatattaagaagactgattcgaagaatggttagacatggaaggttgttaggcttaaaaaatgaatttttatcgaaacttgcaagtgtaggtattaaattaatgcaagagaattatccagatttaaaaaataattatgactatatattgagtgagataaaaattgaagaaataagatttagagaaactcttgatagaggtgagaaattactagatgaattgatttcatcgggtcagaaaatgattactgggtttaaagcatttgaactttatgatacttatggctttccacta

SEQ ID NO: 306088 - DNA, 876 bp, Unknown
  Bacterial polypeptide expressing nucleotide sequence isolated from the Sargasso Sea
tattgaaatttggaatctagttttcatgcaatttgaacaaattgactcaaatacaagaatagatttgccaaaaccttcaatagatacaggtatgggattagagagaataactgctttattaaatgggacaaatgataattataaaactgatctttttttacctctaattaataaatcaatagaattgtcaaacgataatagtcagagtttaaacccaagtcatcgggttattgcagatcatattagatcctcttcatttttaatagcagatggtgttacaccttcaaatgaaggaagaggttatgtattaagaagaattatgagaagaggaatgcgacatgcgcattctcttggaaataaagaacctatatttcataaaatttttccaacattattaaaaacatttaaagattcatatcctgaaattactagagccaaagatttaattcttaatacatttattaatgaggaaactaaatttaaagaaacagttgagaaaggtcttaaaatattagaagaacaaatttcattatctcctaaaaaactaaatggagaaatagcattcaaattatatgatacatatggttttccactagatttaactcaagattatcttagaacaaaaaaaatagaggttgatatagattcatttaatttcaaaatgaaggaacaaaaagatagagctcgtaaaaactggaaaggaactggagataaagaagatcaaaaaaaatggtttgatattactgaaaatctaaatccaactgaatttcttggttatgaacaaagtgaaacagaaagtgtaattgtttctattataaatataaaatcagatacagagacaaaaaaattatctgtagaagatgagggtattattat

SEQ ID NO: 306089 - DNA, 313 bp, Unknown
  Bacterial polypeptide expressing nucleotide sequence isolated from the Sargasso Sea
atgaaaagcgcagaaatccgtgaagccttcctgagcttcttcgaagaaaaagggcacacccgtgtcgcttccagctcgctgattccggcgaacgacccgaccctgctgttcaccaacgcgggcatgaaccagttcaaggactgcttcctgggcctggaaaagcgcgcctatacccgcgccaccaccagccagaagtgcgtgcgtgccggcggcaagcacaacgacctggagaacgtcggctacaccgcgcgtcaccacaccttcttcgaaatgctgggcaacttcagcttcggtgactattcaagcgtgacgc

SEQ ID NO: 306090 - DNA, 928 bp, Unknown
  Bacterial polypeptide expressing nucleotide sequence isolated from the Sargasso Sea
tatgacagcaaaactgattgttgatagttcacataggagcgccgtctcatcaaatcactcagcaacccatttgctgcacgaaactctaagaacagttttgggggagcatgtggtgcaaaagggatcattgaatgattcgaatagactcagatttgattttagtcattctaggcccgttaatgagaaacagctattacagatagagaagatcgttaactcatttataagacaaaattctgaggttaaaacacgaataatgacaccagaggatgccaagaacttgggtgcaaaggctttatttggggaaaaatatggggatgaagtccgcgttgtatctatgggcagagataatggtcgtggtagtggagttacatcaaattcttattctgtagaactatgtggtggcactcatgttcggcgtacgggggaaattgggatttttaaaatcacctcagaagctgcgtcgtcgagtggagtacgacggatagaagcactgacaggggaaggcgccctaaagataataaacaattttgatatgcagttgaccgatatttctttggctctgaagtctggtcgaagtgatgtagtacccaagctgcgaagtttactgcaagaaaataaaaatctaaaaaatcaaatctctgatttacaaaaacagttagcgatgaagtcagaaaatacttctgaaataaagtcaaaagttcaaagcgtaaatggaattaagtttttgggacaaacaataagtggtgttgcaaacaaagaactacgaaacatcttagattcgtataaagaagaattaggttcgggtataatactgttgctttcaacttcagaagataaagtgtcgattattgctggggttacagaggatttgactgataggatttctgccgttgatgtagttaaactagcttcagaagaaactggt

SEQ ID NO: 306091 - DNA, 674 bp, Unknown
  Bacterial polypeptide expressing nucleotide sequence isolated from the Sargasso Sea
aattaaaaccgaagaggagagcttcttaagaacactagatacgggcctagagttattagaaatgttatgccaaaaatataaatcaaccaagttgttaccaggtgaagaggtatttaaattatatgatacttatggttttcccattgatttaaccaatataattgttaaagaaaaaagttttagtattgaccatgaagggtttgaaaagcaaatggagtcgcagcgaaagcgatctaagcaggcacgttgtcatgaagctacttttgaggatgaaccaggcggtggagaagctagactggtcaaaacaccagaggatagactccaaatgtctaggcatcatacaggaacacatttattacatactgctttacgaaatacgttaggttctcatgttaagcaagcaggcagtttggtagatttagatagattgcgttttgatttttttcattatgaaaaaattagtgtggatcaattaaaaaaaatagaaaatgaaattaatctaaagataagagaaaatattatagtagatacgtttacgaccacacttgaagatgctaaagctaagggcgccttagctttttttaaggataaatatggtgataatgtcagagttgttaaaattggagattattcaattgaatgctgtggcggtcatcatgtgtcccaaacgatag

SEQ ID NO: 306092 - DNA, 852 bp, Unknown
  Bacterial polypeptide expressing nucleotide sequence isolated from the Sargasso Sea
cggcaagttaacagggcaagaagatctatcaaatccctcccttagagttatagcagatcatttaagagctgcttcatttttaatagctgacggtgttattccttccaatgaaggcaggggctatgttttaagaagaattattagacgtgcacttagacatgctcacaagttaggaatgaatgagccaattctttccagtcttgttcctgttctagagaagcgtatgagtgaagctcatccagtattgactaagaatttggaaataatacaagcaaacctatcaaaagaagaagaacaattttcttcaacccttgaacagggcatgcaattactcgaatcagaagtaaagaaactagaaggtcataaaatatctggagaggtagcctttaaattatatgatacatatgggtttccagttgatatgactgctgattttgccagagaaagaaacctgatcgttgatatggaaatgtacgattcattgatgcttgagcaaaaagaaagagcaagatcttccggtaattttagctcgataattcctgagtctctgaatattgaaggagcaactaatttcctgggttatgaatctcatgtatctgattccaacattgttgaaatattttccaaaacaagcactaaagaagaggttaatgagggagaagaagctttattattgttaaatcaaactccattttacgcagaatctggtggccaaataggagataaaggttatatagaatctgctgattctatttttgaagtatatgatactcaaaagaaaggagatcactttctccatatagggcatgtaaagtctggatcctttaaaaaaagcgataatgtaaaagctga

SEQ ID NO: 306093 - DNA, 914 bp, Unknown
  Bacterial polypeptide expressing nucleotide sequence isolated from the Sargasso Sea
aatgaggcatgctcatacgttaggaaataaagatacagtatttgataaaatttttccaacgttattggatatttttaaaactgcataccctgaattaataagagctaaagatttaataattaatacttttattaacgaggaaactaaattcaaagagacagtagaaaaaggtttaaaaattttagaggatgaaatctctgtatcttcaaataaactagatggtaaaattgcatttaaattatatgatacatatggctttccattagatttaacacaagattatctcaaatcaaaaaatgtggaagttgatgttgagaatttcaatcaaatgatgaaagagcaaaaagaaagagctcgaaaaaattggaaaggcacaggtgatcaagaggatcaaaaaaactggtttaaaattagtgagaatttaagctcgacagaatttttaggctatgagcaaactgagtctgaaagtgaaattacctctatagttaagagtgatagcaaaactgatcagctaaatgaaggtgaaaatggaattatcattttaaaccagacaccattttatggagaaagtgggggtcaagttggtgatataggtactatagtgtttgagcacaatacttttgaggtaaaagatacgactaaattattcggctcattttatttgcaccatggcaaagtaaaaaaaggaaaatttaaaattggagatagtgtaacagctacaattgattcatataaacggcaattaataaaatgtaatcattcttcaactcatctgctacacgcttcacttagaaaaattcttggaaatcatgtttcacaaaaaggttcattggttaatagtgaaaaattaaggtttgattttagtcataatgaaccaataacatcagataatattataaaaattgaaaattttg

SEQ ID NO: 306094 - DNA, 938 bp, Unknown
  Bacterial polypeptide expressing nucleotide sequence isolated from the Sargasso Sea
tgaacactgggggctaccgaaagataaaatgtgggctacagtttttgctggaggagatggtgttgaagctgatgaagaagctgaaaatttatggaaggattgtaccgatattgagcccgaaaagatactgcgtttcgacaaaaatgataatttttgggaaatgggggaagtaggtccatgcggtccttgctctgagttgcatattgatctgggtcagggaacatgtcctctctcaaacaaacatgagtgttcagtaaaccttgatggatgctggcgatttgtagaactttggaacttggttttcatacaatatcaacgttttgaagacggacatcttgaagagcttgcagctcagcatgtcgataccggaatgggacttgagcgaatttgtagagttctgcaggaagttgattcaaactacagcacagatcttttttccccaattatagataaaataagtgaagttactggacaggcatattcaggaaatgaaaaccgtgttgcatttagcgttattgcggatcatttgaggtcacttagttttgcagtcgccgacggagcgctaccttcaaacgaaggtcgaggatacgtactacgaagaatgcttcggcgcgcaacaaggttcggaagagttttaaatatgcatgagccttttatttataaattggttcccactctggctgaagcaatgggtaatgctttccctgaaataaataaacagcaggatcatgttcaaaatgttattcaggccgaagaatccagttttggtaagacactagacagaggtttagaaatttttcagaaaatgatttctagcaccgaaacaaaatcctcaaagatgatttcaggtgaagatgcttttaagctatatgacacttttgggttccctgttgatttgacacgcctaatgagtcaggaatatggatttgaagttgatg

SEQ ID NO: 306095 - DNA, 594 bp, Unknown
  Bacterial polypeptide expressing nucleotide sequence isolated from the Sargasso Sea
acctgatgaggcagttgaaaatggtgctttagcattgtttggtgaaaaatacggtgatgaagtaagagttctttcgatgggagatgaggacggtaagtatttttctactgaattatgtggtggaacacacgtcaaaaacactggagatattggtaaatttaagattgtcagtcagtcctcaattgctgcaggtgttagaagaattgaggctttaagagacaaacaattagaggaatatttaaaaaataaagagaaattatcaaacctatctgcagaaaaagatgaggaaacaattaaagatttaagtcagcaaattataaaacttggtggaaagccaagtttagaagaagctgatcaaaaaactttaattaaaaatttaactaaacaattagagactatctcagtaaataaaattttagaggatgaatctaaaaatattattaaagacgaggaaattaatggaattaagttaagacttcaaaaaatagatggattgcctccaaaagaattaagaaaacttgtagataaaggtaaaaaagatttaggtgaaggtattgtggttgtatttgcaaataaagatgacaaggttggatt

SEQ ID NO: 306096 - DNA, 904 bp, Unknown
  Bacterial polypeptide expressing nucleotide sequence isolated from the Sargasso Sea
atagataaaattttacctggtgaagttgcttttaagctttatgacacatatggtttccctttggatttgactcaagatattttaaaaaataaatcactacaaattgataatcaaaaatttgaagagttgatgaagaaaagcagggagcttgctaagaaaaattggaaaggatcaggcgatagcgctgttgatcgcatatggtttgcaattaaagataaattaggaccaacagaatttcttggttacgaaacagtacaagctgaaggagttattaaatctctattaaaaaaaaacgaacaggttgaatcattaaagactggcgatgaaggaatgattattgttaaccaaactcctttttatggggagtcaggaggtcaagttggtgataccggagaaatagtttctaataattttaaatttaaagtttcagatgttcagaaaaaactgggagatctcctcgttcattatggaaaagtaatctcaggtgaaattaaaattagccaaagcgttgagttaaaaattgacgttgaaagaagagaaaatataagagcctatcattcagcaacacatttgttacacgagtctctcagaagagttttgggaacacacgtcatgcaaaaaggatcattggttgaggctgacagattaagatttgatttcagccacatgaaaccgataacaccagatgaaataaataaaatagagagttatgttaattcaatggttgatacaaaatctgaagtaaaaactagacttatgacaccaaaagaagctgtagataatggggctttagctctttttggtgaaaaatatggtgatgaagtaagagtattatcgatgggaaatgaaaaaagtaaatatttttcaactgaattatgtggaggaactcatgtaagaaatacag

SEQ ID NO: 306097 - DNA, 464 bp, Unknown
  Bacterial polypeptide expressing nucleotide sequence isolated from the Sargasso Sea
tacatttctcaaatactttgagaaaaatgatcataagattgttgagtctagcaatttagtcccgaacaatgatccaacgctaatgtttgccaactctggcatggttcaatttaaaaatgtgtttactggtttagaaaaaagagactatcagacagccacaacatctcagaaatgtgttagggctggaggaaaacataacgaccttgaaaatgttggttacacaccgagacatcatactttttttgaaatgttaggaaacttttcgtttggagattattttaaagaaagagcaatagaacttgcttggaatttaataacaaaagattttggcttagataaaaataagctttattttacagtgtttcatgaggacgaggaggctttaaagttatggaaaaaaatcacaggttttggcgatgacaggataataaaaattccaacttcagataatttttggtctatgg

SEQ ID NO: 306098 - DNA, 412 bp, Unknown
  Bacterial polypeptide expressing nucleotide sequence isolated from the Sargasso Sea
atggctgacaaatcattaaatcaaataagaagtacttttcttgagtattttgaaaagaatgatcataagattgtagaatccagcaacttagttccaaataatgatccaacattaatgtttgctaattctgggatggtgcaatttaaaaatgtatttactggccttgaaaaaagagattatcaaagagctactacttcacagaaatgtgtaagagcaggtggaaaacataacgatctagaaaatgttggttatacacctaggcaccatacatttttcgaaatgcttggaaatttttcttttggagattactttaaagaaaaagcaattgaattagcctggaacttaataacgaaagattttggcttggatagaaataggctttatttcacagtttttaacgaagatgacgaag

SEQ ID NO: 306099 - DNA, 568 bp, Unknown
  Bacterial polypeptide expressing nucleotide sequence isolated from the Sargasso Sea
atgactgaaaactctttatcagatataagaaaagaatttttagattttttttcaataagaaaacataacgtagttcaatcctctccattagttcctcataatgatgattcactgctgtttactaatgcaggaatggtacaattcaaaaatatttttacaggattagataaacctgaaaacggaaatagagcagttacagcacagaaatgtgttagagctggaggaaaacataatgatttagaaaatgtaggtttaactaaaagacatcatactttttttgaaatgttgggaaatttttcttttggtgattatttcaaggaagatgcaatagaaatggcatgggagctattaactaaaaactaccaaatagatagagagaaattatatattactgtttaccatacagatgatgaggcctttaacatttggaaaaaagtaacagggttttcagactcaaaaattttaaaaataagtactagcgataatttttgggaaatgggagactctggaccatgtggcccatgctcagaaatattttttgatcatggtccagaattttcaggtggac

SEQ ID NO: 306100 - DNA, 841 bp, Unknown
  Bacterial polypeptide expressing nucleotide sequence isolated from the Sargasso Sea
ccaggtgatgtagcttttaaattgtatgatacctatggttttcctttagatcttacagaagatattttaagaaataaatcaatgtcaatcgatactgaaaagtttcaatctttaatgaaagaaagtagagagcttgctaagaaaaattggaaaggttctggtgatgcagcggttgaagatatctggtttggaataaaagataaaattgagccaactgaatttttaggatatgaaactaatcaagctgaaggtgttgtgttatctcttttaaaagctaataaagaagttgatcaattaaaaaaaaatgatgaaggaatgattatagtaaatcaaacccctttttatggcgagtctggaggtcaagttggtgatactggtgaaatagcaacgaatgattttaaatttgaagtaaccgatgttcaaaaaaaattaggtgatttatttgttcattatggaaaagtaaagagtggatctataaaattacaggaaagtgttgagctaaaaattgatgtagaaagaagagataatactcgtgcttaccactctgcaacccatttattacatgagtctttaagaagagttcttggtactcatgtaacccaaaagggatctttggtagagccaagtagattaagatttgatttcagtcacatgaagccaattttgaatgaagaaattgataaaatagaagactttgtaaacacaatggtctctaaaaaatctgatgtaaaaactagattaatgacacctgacgaggctgttgaaaatggtgctttggcattatttggtgaaaaatatggagacgaagtaagggttctttcgatgggagatgaggatggga

SEQ ID NO: 306101 - DNA, 330 bp, Unknown
  Bacterial polypeptide expressing nucleotide sequence isolated from the Sargasso Sea
catgcaatcgaccaatgacatccgccaggcgttcctggatttcttcgcggcgaacgggcacgagattgtctcgtccagcctgctggtgccccacaacgatccgaccctcatgttcaccaacgccggcatggtgcagttcaaaaacgtctttatcggccaggaaagccgggattattgccgcgccaccacctcgcaaaaatgcgtgcgcgccggcggcaagcacaatgatctggaaaatgtgggctacaccgcccgccaccacacctttttcgagatgctaggcaacttctcctttggcgactatttcaaggacgaggccatcgagctcgc

SEQ ID NO: 306102 - DNA, 852 bp, Unknown
  Bacterial polypeptide expressing nucleotide sequence isolated from the Sargasso Sea
tcttttagagagaggaatgaaaattttaaatgatgaaatatataaagtcgaaaaaactttgtcaggcgagattgcttttaaactttatgatacttatggttttccattagaccttacagaagatattttaaaaagtaagtcgttaactgttgatcataaaaaatttaaatctttgatgcagcaaagcagagatcttgcaaaaaaaaactggaaaggttcaggtgatagttcagttgatggaatttggtttagcattaaagataagttgcaacctactgaatttttgggttatgaaaccaatcaagctgagggaatagtactttctttaattaaaaataataaagaagtagaaagtttaaataatggtgatgaagctatgataattttaaatcaaacacctttttatggagaatcaggtggccaaataggtgatacaggagttattctttcaggaaagtttaaatttaaagtgagtgatgtacaaaaaaaaattggagatctatttgttcattatggaaaagttgaaagtggatcaatcaaattaaaggaaaacgtagaaatgaaaatagatgttgatagaagagaaaatattagagcttaccattcagcaacccatttgcttcatgagtcattaagaagagtgttgggagagcacgtaattcaaaaaggatctctagttgctcctgacaggttaagatttgattttagtcatatgaaaccaatatcaagtgatgagataggtaaaatagaaaagtttgtaaatgaaatggtagatacaaaatcagaggtaaaaacaagattaatgacacctaaagaagcagtagataatggtgcacttgcgctatttggtga

SEQ ID NO: 306103 - DNA, 742 bp, Unknown
  Bacterial polypeptide expressing nucleotide sequence isolated from the Sargasso Sea
tatgaaatcagaattagttcgtaaaaagtttctagattttttctcctcaaaacgacatgaaattgttgactctgcctctatggttgtaaaaaatgattcaacattaatgtttacaaatgctggtatgaatcaatttaaggaattttttttagggaataacaaacctaaaaatactagaataactaatacacaaaaatgtttaagagtttcaggaaaacataacgatttagaagaagtaggtattgatacatatcatcacactttttttgaaatgttaggtaattggagttttggggattattttaaaaaaaatgctattaaatggtcttgggaacttttaactgaagtttacaatattgataaaaaaaacctttacgttacaatttttgaaggggataaaaaagaaggattgagtttagatgaggaatcatttgaatattggagtcaaataataccaactgacaggatactaaggggaaataaaaaagataatttctgggaaatgggggatcagggtccttgtggaccatgttcagagattcatattgatattaggtcagaggttgataaaagtttagttccaggatgggagctggttaataaagaccatccacaagttattgaggtatggaatcttgtatttattgaattcaatcgaaaatcaaatggatcattagaaaaacttccttctaagcatgttgatactggtatggggttagaaagattatgtatggtacttcaa

SEQ ID NO: 306104 - DNA, 757 bp, Unknown
  Bacterial polypeptide expressing nucleotide sequence isolated from the Sargasso Sea
tatggctaaaacattaaatgaaattaggtcagcatttttagattattttgaaaaaaatgatcatacgatagttgagtctagcaatttagtcccgaataatgacccaacattgatgtttgccaattctggaatggtacaatttaaaaatgtgtttactggactagaaaagagagactatcaaagagctacaacatctcaaaaatgcgtaagagcaggtggtaagcataacgatcttgaaaacgttggctatactccaagacaccatacattttttgaaatgttgggaaacttttcgtttggcgattattttaaagaaagagctattgaacttgcgtggaatttaataacaaaagaatttggtttagacaagaacaggctttatgtaactgtctaccatgatgatgatgtggcttttaattactggaaaaaaattgctgggttaagtgaagataaaatcataaggatagcaacatctgataatttttggtctatgggtgaaacaggaccttgcggtccttgttcagaaatattttatgatcatggagaccatttagaaggtggattaccagggaccaaaaatgaagatggggatagatttatagaaatttggaatttagtcttcatgcaatatgagcaaatttcaaaagacaaacgaattaatctgccaaaaccatcagttgatactggaatgggattagagagaattgctgcattacttcaaggaacccatgataactacgaaacagatcatttaaaa

SEQ ID NO: 306105 - DNA, 946 bp, Unknown
  Bacterial polypeptide expressing nucleotide sequence isolated from the Sargasso Sea
aatgggcgaaactggtcctggcggtccttgttcagagattttctatgatcatggcaatcatttaaaaggcggtttaccaggtactaatgatgaggatggagatagatttattgaaatttggaacttagtctttatgcaatttgagcaagtttcaaaagataaaagaattaatctcccgaaaccatcagtggataccggaatgggtcttgaaagaattgcagccttgcttcaaggaactcatgataattatgaaacagatcattttaaaaaattaattaatgctacttctgaaattgtaaaagttaaaccaaatgaaaaaaatctttcaagttttagagtcatagctgaccatttgagggctagctcatttttaattgcagaaggtgtgttgccttcaaatgaaggaagaggatatgttcttagaagaattatgagaagaggaatgagacattctcatttactaggttctaagaaaccaattttttttaatatctttaaaactttaatggatgaaatgaaagacaactatcctgagcttcatagagcagagtcattaattaaagagactttaaaaatggaagaagaaaagtttttggttcttttagatagagggattaaaatattatatgatgaaatttctaaaatagataaagttcttccaggagaagttgcttttaaactttatgatacttatggcttcccattagatttaactgaagatattttaaaaaataaatctttaaaaattgataatgaaaaatttcactctttgatgaaacaaagtagagagcttgctaagaaaaattggaaaggttcaggtgatagcgctgtcgatgatatatggtttggtattagagagagactaggtgcaactgaatttttaggttatgaaactaatcaagcagagggagtaatattatctttacttaaagataacaaagaagtt

SEQ ID NO: 306106 - DNA, 877 bp, Unknown
  Bacterial polypeptide expressing nucleotide sequence isolated from the Sargasso Sea
cactctcattttttaggaaccaagaagccaattttttttaacatttttaaaacattaatgaacgaaatgtcaggtaattatccagagttaaaaagagctgagtctttaattaaagagacacttagaatggaagaagaaaaatttttaattcttctagagagaggtatgaaaattttgaatgaagaaattacaaaagtagataaagttttaccaggcgaggttgcttttaaactttatgatacctacggttttccattagatctgacagaagatattttaaaaaataaatctattaccatagatcataataaagtgaattctttgatgaaagaaagtcgagagctcgctaagaaaaattggaaaggatctggagatagttccgtcgaagatatttggtttggaataaaagataagttaggacctacagaatttttagggtaccaaagtaataaagcagaaggaattatattatcattaattaaaagcaataaagaggtaaaaactttaaccaaaggtgatgaagctatgattattgttaatcaaacacctttttatggagagtcgggagggcagattggcgatacaggttatattacctctggtgaattcaaatttaaagttgaagatgtacaaaaaaaattaggtgatttatttgttcattatggaaaagtagagagtggggagattaaactaaaagaaaacgttgaaatgaaaatagatgtggaaagaagagataatataagagcttatcattctgcaactcatttacttcatgaatcattaagaagagttttaggaactcatgtcactcaaaagggatctttggttgctccagatagattaagatttgattttagtcatatgaagccaattacta

SEQ ID NO: 306107 - DNA, 928 bp, Unknown
  Bacterial polypeptide expressing nucleotide sequence isolated from the Sargasso Sea
ttggaaatattaacaaaagattttgagttaccgaaagaaaagctttcagttacagtctttaatgaagatgaagactctttcgaattatggaaaaagattgctggattaggagaagataaaataattaaaatttcaacttctgataacttttggtcgatgggagacactggtccatgcggcccatgttctgaaatattctatgatcatggagataaacttaaaggagggccacccggtagtgccaatcaagatggagatagatttatagaaatatggaacctcgtttttatgcaatacgaacaaatttcaaaagaaaaacgaatagatttacccaaaccttcagtagatactggaatgggccttgaaagaatgactgccgttcttcaaggaactcatgataattataatattgatcattttaaaaaaattattgaagcctcatcagatattataaaagctccagtcgataacaagactattgccagccatagagtaatttctgatcatttaagagctagcagcttcttaatagcggagggaatattaccttctaacgaaggtagaggttatgttctaagaagaataatgagaagaggcatgaggcatgctcattctttaggaagtaagtctcctgttttttataaactttttgatgttttgcttaatgaaatgcaaaacagttacccagaattaaaaataggcaaagatcttataattgaaactttaaaaaatgaagaagagaaattttcttctctgcttgaaagaggtatgaaaattttagatgaaaatttaaataaagttcaaaataataaattacctggttcagtagcttttaaattgtatgatacttatggttttcccatagatttaacagcagatattttaagaactaaaaatattcaagttgaccacgttgcattgaagaaga

SEQ ID NO: 306108 - DNA, 601 bp, Unknown
  Bacterial polypeptide expressing nucleotide sequence isolated from the Sargasso Sea
tatggcggataaatcattaaatgaaataagaagtacgttcttaaaatattttgaaaagaataatcataagattgttgaatctagtaatttagttccaaacaatgatccgacattaatgtttgccaattctggaatggttcagttcaagaatgtatttactggtttagaaaaaagagattatcaaagagcaaccacttctcaaaaatgtgtcagagcaggaggcaaacataatgatttagaaaatgttggttacactccaagacatcatactttttttgaaatgttgggaaatttttctttcggggactattttaaagaaagaggaattgaacttgcatggaatttgatcactaaagattttggtttaaataaaaatagactttacgtaacagtttttcatgaagatgatgaagccttcaatttttggaagaaaatagcgggttttagtgatgatagaattatcagaatttcgacatcagataatttctggtcaatgggtgaaacaggtccttgtggaccttgctcagaaatattctacgatcatggtgatcatttaaaaggtggtttaccaggaacaaaggatcaagatggagatcgtttt

SEQ ID NO: 306109 - DNA, 691 bp, Unknown
  Bacterial polypeptide expressing nucleotide sequence isolated from the Sargasso Sea
tttgttaggatctaaagagccaatcttttacaaaatttttgactcgttaaaaaatgaaatgtcaggaaattatccagagcttgaaagatctcaatctttaatcaaggaaactttaaggatggaggaggagaaatttttagttttacttgatagaggtatcaaaattttaaatgatgaaattgcaaaaatagacaaagttttacctggtgatgtcgctttcaaattatatgacacctatggttttccattagatcttactgaagatattttaaagaataagtcattaaaagttgatcatcaaaaatttgatgaattaatgaaaaaaagcaaagaacttgcaaaaaagaattggaaaggttctggagatagctctgaggaagcaatttggttttcaattaaagataaaactggtccaacagaatttttaggttacgagtctaatcagtctgagggtgttgtgttaaacctaattaaagataacaaagaaacaaaatctttatcttctggtgaagaaggaatgatcattaccaatcaaaccccgttttatggagagtcaggaggacaacttggagataaaggtacaattgtttctggtaattctgtttttgaagtagaagatacccaaaaaaaacttggagacttattgtgttcattacggatctttgaaaactggggagagaaaatcaatgat

SEQ ID NO: 306110 - DNA, 916 bp, Unknown
  Bacterial polypeptide expressing nucleotide sequence isolated from the Sargasso Sea
gcgggatcatttaagagctagcagttttttaattgctgagggaatattgccttctaatgaaggtcgtggatatgttttaagaagaatcatgagacgtgggatgagacatgctcattccttaggaagcaaagatcctgttttttataagttatttgatattttattgaatgaaatgaaaagtagttattctgaattaattaccggtaaagaattaataattgagactttaaaaaatgaggaagaaaaattttcttctcttttagaacgaggaatgaaaatccttgatgaaaatttagctaaaatttcaaataaaacctttccaggatcaacagcatttaaattatatgatacttacggattccctttagatttaacagccgatatattgaaagggaagggaattaaagtagataatgttggttttgaaaaggagatggaaaaaagcaaagctcttgcacgagctaattggaaaggctcgggggatagctctgttgaggaaagatggtttaaaataagagaagaaataaattcaactgaatttttaggttatgaatttgataaagcagagggtgttattatgaaaatttcaaaagatggcaagtttgttgactcagctagcactggagatgaggtagaagttataactaatcaaactccattttatggggagtcaggaggtcaagttggtgatgagggttatatttttaattcagattgtaaaataagaattaacgatactcaaaaaaagatgggagacttatttgttcattatggaaaaattgaaaaaggtttaatctcaatcggacaaaacgttaatttagaaatagatgtttctaagagaaataattctaaagcttatcattcagcaactcatttattacatgaatcattaaagaagaactttaggaaaacatgt

SEQ ID NO: 306111 - DNA, 781 bp, Unknown
  Bacterial polypeptide expressing nucleotide sequence isolated from the Sargasso Sea
gaaaaacttagatttgattttagtcatggtaattctattgagaatgaaacaattgttaatattgaagaaattgttaatgatcaaataaagaaaaattgcaaagttgatatagaatttattgatcaaaaaaaagcaatttcagaaggtgctatggctttatttggtgaaaaatatggagatgaggtaagagttgtatctatgggtgatgaaaatggttcatttttttcaaaagaattgtgcggaggtacacatgttgataaacttggagaaattaataaatttaaaataacaaatcagtctagtgtagcttctggcataagaaggattgaagcagtttctaacattacagtggcaaagtttttaaatgaattagaaaaaaataattttgaaaaagaaaatttacaaaaaaatcagatagaagagttaaagttaaagattaaatctataaaccctaaatataattttaaaagctctgatgatgataagtttgcgtatttaaaagaattgaatctagcatacgaaaaattaaaacaaaataattctattttaaaaaatattgataatattatcactaagaaaattaataatataaattttatttatttagttgccgaagattttccaaataaatctcttaaaagttttatcgacgaacaaaagaaaaaatatacaaataaaagtgtatcattaataatctctaatgatcaaaaaaaattatctatagttttaggtgtatctagtgatattgccgacacatttgatgcatctcaaagaaattaaa

SEQ ID NO: 306112 - DNA, 670 bp, Unknown
  Bacterial polypeptide expressing nucleotide sequence isolated from the Sargasso Sea
gaatctagtaatttggttccaaataatgatcctactttaatgtttgctaattcagggatggttcaatttaaaaatgttttcactggattagaaaaaagagattacgttagagccacaacttcacaaaaatgtgtaagggcaggtggtaagcataatgatttagaaaatgttggttatacgcctaggcaccacactttctttgagatgttaggaaatttttcatttggtgattattttaaagagcaagcaattcattatgcatgggatttaataaccaaagattttggaatagataaaaacaggctttatgtaacggtgtttcatgaggatgatgaagccttcaatttttggaagaaaatagcgggttttactgatgataggattataaggatagcaacttcagataatttctggtcgatgggtgagacaggtccatgcggcccatgttctgaaatcttttttgaccacggagatcatttatcaggaggtttacccggttctaaagatgaggatggggacagatttatagaaatttggaacttggtctttatgcagtttgaacaagttactaaagataaaagaattaatcttccaaaaccgtcagttgatactggaatgggattagagagaattgcagctttattacaaggttcgcatgataactatgaaa

SEQ ID NO: 306113 - DNA, 469 bp, Unknown
  Bacterial polypeptide expressing nucleotide sequence isolated from the Sargasso Sea
tacgaaaacggatctgtttgcaagtctgattcaggccgtgatgaaagtaacgaatactaaagattcgacagataaatccctttgcgtgattgctgaccatatacgggcctgttcttttctaataatagacggtgtaatacctggaaatgaaaagcgtagttatgtgcttcgtcgaattattcgtagagcaattaggcatggttacatgcttggtatggagaagcctttctttcacaaactagtgaagtctcttgagagcgagatgggagatgcttatccggaattgagatctcaaagagagcatgttgaaaggatcctgcttcaggaagaagagcggtttgcagagactctttctcaaggcatgagaattttggagtcagttattgaagatcgccctgagggtggggtggtatcaggtgaaaccgtttttaaactttatgatacttatgggtttccaaaagatcttgct

SEQ ID NO: 306114 - DNA, 879 bp, Unknown
  Bacterial polypeptide expressing nucleotide sequence isolated from the Sargasso Sea
tttggtcatgggtgaaaccggtccttgcggaccttgctctgaaatattttttgatcacggtgataaattaaaaggcggcccccctggaagtccagatcaagaaggggatagatacattgaaatatggaacctcgtttttatgcaatttgaacagatatctaaggataaaagaatcgatttacctaagccatcagttgatacaggaatgggtttggagagaataacggctgttctacaaggcactcacgataattatgcaatagatcattttaaaaagctaattttagcatcatcagaaattacaaatacaaaaatagacaataacacaatcgcaagccatagagttgttgccgatcatttaagagcaagtagttttctaattgcagaaggtgtcctaccatctaacgaaggaagaggctatgttctaagaagaattatgagaagaggcatgagacacgctcatactcttggaagtaaaaaaccgattttttttaaattatttgacgttctattaaacgaaatgtcaaaaagttatccagaattaagtaatggaaaagatttaataatagaaacattgaaaaatgaggaagaaaaattttcatctcttttggaaagaggaatgaaaattttagatcagaatttagaaaaagtaaataataaaaccttacccggcgaaatagcttttaagctttatgacacatatggatttccgttagatcttactgccgatattttaaaaaataaaaatataaaaattgatatttctgcatttgaaaaggcaatgcaaaaaagtaaggacttggctagagcaagctggaaaggctcaggcgataagtctatagaggaaaaatggttcaaaataagagaacaattaaatcc

SEQ ID NO: 306115 - DNA, 829 bp, Unknown
  Bacterial polypeptide expressing nucleotide sequence isolated from the Sargasso Sea
gctttccccgaacttattgaaagaaaacatactattgaaaactctcttaaggaggaagagacacggtttaaacttactctagatagaggtcttaaacttttaggcgatgagcttgctaagcaaaaagacagcaaacttttctcaggtgaagtggctttcaaattatatgatacttatggtttccctctagatctaactgaagatgtgctgagagagaatgatagaaaagtagatatagaagcttttgacatgaagatgaaagaacagcgtcataaggcacaagcatcttggattggatcaggagataaagccgaagaaaaaatatgggctgatctaagatcgaatgaagatgctacagaatttttaggttatgaaagcgagaaaagtcagggtctaatttcaaagattataagagatgggaagtatgaaaaagaaatttctgctgacgcatctggtatcatagttatgaatcaaacttgcttttatggtgagtctggaggtcaggttggggatcaaggacggctgcgaggtgtcaatggggaaggacaagtaatagacacaaaaagggttggacaaatttttttacactttgttgaggtaaagaaaggttattttgaagttggtgataacttagaacagcatataaataacgatcttaggttggatattaaaagaaaccactctgcaacccacttagtgcatgaggcactaagaagggtagccggagatcacgtagcgcaaagagggtccctcaataacagtgacaggcttcgatttgactttagtcatgataaacctttaacagaagaacaaatttttttaactgagc

SEQ ID NO: 306116 - DNA, 976 bp, Unknown
  Bacterial polypeptide expressing nucleotide sequence isolated from the Sargasso Sea
ttagaaagaaaatttctaagttatttcaaaagaaataatcatgaaataatagagtcgagtaacattgttccgaataacgatcctaccttaatgttcactaactcgggcatggttcaatttaaaaatgtgtttactggaattgagaataaatcatttaaaaccgcaactacttcccaaaaatgcattagagctggaggaaagcataacgatttagagaatgttggttatacaccaagacatcacactttttttgaaatgttgggaaacttttcttttggcgactattttaaggaaaaagcaatctattatgcttgggagttattaaccaaagaccttagtattcccaaagacagattatccgctacagtattttcagaggatgaagaagcatttaaattatggaaaaaagtagcaggactaccagagagtaaaattattagaatatcaactgcagataatttttggtctatgggtgaaacagggccatgtgggccttgctctgaaatattctttgatcatggggacaagctaaaaggaggtccacctggaagtcccgaccaagatggtgatagatttattgaaatttggaatcttgtttttatgcaatttgaacaagtttccaaagataaaagaattgatttaccaaaaccatcggttgatacaggtatgggtttagagagaataacagccgttctacaaggtacccatgacaattatgcaatagatcactttaaaaaattaatttcagcctcatctgagattacaaatactaagataaataatgacacaatcgcaagtcatagagtcattgctgatcatctaagggcaagtagttttttaatagccgaaggtgttttaccatcaaatgaaggtagaggttatgttctgagaagaattatgagaaggggtatgagacacgcgcacacattgggaagtaaaaaaccaattttttataaattatttaatgtctttcaaa

SEQ ID NO: 306117 - DNA, 859 bp, Unknown
  Bacterial polypeptide expressing nucleotide sequence isolated from the Sargasso Sea
aattatatgaaagctatattaaatgatcaaaataaaaacaatggtagtgttgagataaaaattatgatcaaaaaaaaagcaattgaagagggtgctatggctttatttggtgaaaaatatggagatgaggtaagagttgtaactatgggtgatgaaaatggttcatttttttctaaagaattatgtggaggaactcatgttacaaaacttggagaaattaataagttcaaaataataaatcaatccagtgttgcttcaggaataagaagaattgaagctgtatctaacatttcagtagaaaaatttttaaaagaagtacaaaaaactaatattgaaaaaaataatctacattcaaaacaaatagaagaattagtattaaaaattaaagatataaacccagaatataattttaaaagctcatctgataacaaggttttgtatataaaacaattgaatcaaatatatgaaaaattaaaacaaaataattctattttaagcaatatcgataatataattatcaaaaaaattaatgatattaattttatttacttaatcgctgaggattttccaaataagtctcttaaaacttttattgatgagcaaaagaaaaaatatccaaataagagtatctcgttaattgtatctagtgttcagaaaaagttatctattgttttaggtgtatctgatgacattgcggatatatttgatgcctctaaagaaattaaaaatatttctactattttagggggtaaagggggtggaggtagaaaagatatggcacaagctggaggaactgatatctctcaaatagataattgtattgagtatatagaaaaacaaataatttctattaattagc

SEQ ID NO: 306118 - DNA, 733 bp, Unknown
  Bacterial polypeptide expressing nucleotide sequence isolated from the Sargasso Sea
catgaaaactaatgaaatcagacaatcttttttagatttctttgaatcaaaaaatcatgagattgttccatcaagtgcattggtgccaagtaatgatgaaaccctactgtttactaatgctggcatggttcagttcaaagatgtttttctcggaactgataaaaaaagttataaaagagcatcgacatcacaaagatgtataagagctggcggaaaacataatgatttagagaatgttggttatacgctccgtcatcatacattttttgaaatgctgggtaattttagttttggtgattattttaaagaagaggccattgagtttgcttgggagtttttaactgaagttcttaagcttgatagaaataagttatggataactgtttacaaagacgatgatgaagcagaagaaatttggaaaaataacattggaatagaccctaaaagaattgccagacttggtgatgaagataatttttggtcaatgggtgatacagggccatgcgggccttgctctgaaatattttatgaccatggcgatcatatcgaaggaacacctccaggagccgatggtgatgaaggagatagatttgttgaaatatggaatcttgtctttatgcaattcaatagagatgaaagtggagatatggaacctcttccaaagccttcagttgatacaggaatgggtctcgaaagaattgctgcagtgatgcaaggtgttaattcaaactat

SEQ ID NO: 306119 - DNA, 580 bp, Unknown
  Bacterial polypeptide expressing nucleotide sequence isolated from the Sargasso Sea
atggcaaaaacattaaacgagatcagatcaacttttttagattatttcgaaaaaaatgatcacaagatagttgagtctagcaatttggttccaaataatgatccaacattaatgtttgcaaattcaggcatggtccagtttaaaaatgtttttaccggattagaaaaaagggattatcaaagagctaccacttctcaaaaatgtgtaagagcaggaggtaaacataacgatcttgaaaacgttggctacactccaagacaccatacattttttgaaatgcttggaaatttttcttttggagattacttcaaggaaaggggaattgaacttgcttggaatttaattactaaagattttggattaaataaagatagattatatgtaacagtatttcatgaagacgatgaagccttcaatttttggaagaaaatagcgggttttagcgacgatagaattattaggatagcaacttcagataacttttggtcaatgggcgaaacgggcccttgcggaccttgttcagagatattttatgatcatggagatcatttaaaaggtggttacccggaaccaaagatga

SEQ ID NO: 306120 - DNA, 637 bp, Unknown
  Bacterial polypeptide expressing nucleotide sequence isolated from the Sargasso Sea
tatggcagacaaaacactcaatgaaataagaaatacttttctaaaatattttgaaaagaatgatcataagattgtagagtctagtaatttagttccaaacaatgaccctacattgatgtttgcaaattctggcatggttcagtttaagaatgttttcacagggttagaaaaaagagattacgttagagccacaacttcacaaaaatgtgtaagagcaggtggtaaacataatgatctagagaatgttggttacactccaaggcaccacactttctttgaaatgttaggaaatttttcttttggtgattatttcaaagagcaagcaattcattatgcatgggatttaataaccaaagattttggaatagataaaaacaggctttatgtaactgtatttcatgaggatgatgaggccttcaatttttggaagaaaatagcgggttttagcgatgataggattataaggatagcgacttctgataatttttggtcaatgggagagacaggtccttgtggtccttgttctgaaatcttttttgaccacggagatcatttaccaggaggtttgcctggttctaaagatgaggatggagatagatttatagaaatttgggaacttagtttttatgcagtttga

SEQ ID NO: 306121 - DNA, 937 bp, Unknown
  Bacterial polypeptide expressing nucleotide sequence isolated from the Sargasso Sea
taatttatggaaaaatattgcaggtttagatagcaataagattataaagattaatacatctgataatttttggtcaatgggtgatactggaccctgcggtccttgttctgaaatattttatgatcatggagataaatattctggtggacctccaggaagcccaaatgaggatggtgacagatttatagaaatttggaatttagtttttatgcaatttgagcaaataaactcatctgagagagttaatcttcctaaaccttcaattgatacagggatgggcttagagagaattacagcgttattaaatgggactaatgataattataatacagatctttttaatcctctgatagataaatcaattcagttattaaataatgagagttttaataaaagtccaagccatagagtaatagcagatcatttaagatcttcatcttttctaattgcagatggtgtcatgccttctaatgaaggtagaggttatgttttgagaagaattatgagaaggggaatgagacatgctcactctcttggaaataaagatccaatttttgcaaaattgtttcctacattattggaaatatttcagaattcttatcctgaactggagagagccaaggatttaattttaagtacttttttgaatgaggaaaataaatttaaagaaacagtcgaaaagggactaaaaattttagaagaagaaatttcctcatctccaaaaaaattagatggagaagttgcatttaaattatatgacacttatggttttcctctagatttaactcaagattacctcagatcaaaaaatattgaggtagatattgagtcattcaatataaaaatgaaagagcagaaggacagggcgcgtcaaaattggaaaggtacaggcgatatagaagatcaaaaaaaatggtttcaaataactgaaaattta

SEQ ID NO: 306122 - DNA, 643 bp, Unknown
  Bacterial polypeptide expressing nucleotide sequence isolated from the Sargasso Sea
atgaattctaatcatattagatcaacttttcttaattattttaaaaataatggtcacgaaattgttcattcgagtccactagttcctcataatgatccaactctaatgtttgctaattcaggcatggttcaatttaaaaatatttttacaggtaaagaaaaaaaagattataatcgtgctgttacttcacaaaagtgtgtaagagcaggtggaaagcataatgacttagaaaatgtaggctataccgcaagacaccatactttttttgaaatgttaggtaatttttcttttggtgattattttaaggatcaggcaatagaatttgcttggaatttaatcactaaagaatttggaatagagaaagaaaagttactagtcactgtttttagtgaagatgaagatgcttataattattggaagaaaattgcgggactaagtgatgataagattataaaaataaatacatctgacaatttttggtcgatgggagatactggtccttgtggaccatgttcagaaattttttatgaccatggagaaaaatatccaggtggcccgccaggaagtcctgatgaagagggtgatagatttattgaaatttggaaccttgtttttatgcaatttgagcaaaataacttcttca

SEQ ID NO: 306123 - DNA, 756 bp, Unknown
  Bacterial polypeptide expressing nucleotide sequence isolated from the Sargasso Sea
ttttataggttacgagtatttatcttcagactcaaatgtaatagcaatatggaataaaaatgaaaaagttgagcttgctaacgagccacaagagtactttatagcgctaaatcagacttcaatttatgcagaatcaggcgggcaagttggcgatagaggtatttttaaatctaaaaatgcagaaggcagcattttagattgcaaaaaatctggaaaagtttttatgcaccttataaagttagacaaaggaagcttaaaaattgatgataaaattgaaatcaacgtgaataaagaaaaaagagagaaaactgaagcacatcattctgccactcatttagtccatgctgctcttaaaagagtattaggagatcatgttaagcaaaagggttcacttgttgatgagcataagcttagatttgatttctcccatgatgaatctttatctgatgacgagatatccaagattgaagatttagttaatcaagaaatactgaagaattcatctgtaagcaccaaaataatggatttggaagatgctaagaattcaggtgcagaatctttatttggcgaaaagtatgaagatcaagtaagggttttatcaattggtgaagacgacttttctcttgaactttgtggtggaacacatatttctaggacgggcgatcttggtatctttataataactagtcaaagcagtgtagcttctggtgttagaagaattgaggcattatctggcccaagagctcaagaatattt

SEQ ID NO: 306124 - DNA, 859 bp, Unknown
  Bacterial polypeptide expressing nucleotide sequence isolated from the Sargasso Sea
tataataaaaacaaagtctctcaccatgttattgctgatcatattcgtatgctcagctttgcaattgctgacggagctatgccttccaatgaaggaagaggttatgttctaaggcgcatacttcgccgtgcttcaagatatggtagaatgttaaagaaaaaggatccttttttatataaactcgttgatcaagtcatagaagttatgggtgagagtttccctgaattagtagataaaaaaacgcatattcaaaaagtaattgaatctgaggaaatttccttcaatagcacattagaacgaggtttgattcattttgaaaaatatgtaaataataatgcgaatataatttctggggatgaggcctttaaattatatgatacttatggattcccattagatttaacacaacttatggctcgagaacatggcttagaagtagacgaaacaggatttcataaaaatatgaagaaacaaagagatagagctaaagctgccggaaattttaagcaagttactgaagatttatcttgggtagttgtttcagacaaccaaaattcaaactttcttggatatgaacacattgagtcagattctgatatatgtaaatatgcagttacagataattatacgattctagttttagaccaaactcccttttatgctgaatcaggtggacaaattggagatacaggtattattatatctggggatgataaattgaatgttttggattgccaaaaaagtggggaagaaatacatcatatctgttctggtgcattcaataaggaaagattatcagaaaaagttacttgcagggtggattataaacgtcgacaaagcattagaaaaaatcatacgg

SEQ ID NO: 306125 - DNA, 928 bp, Unknown
  Bacterial polypeptide expressing nucleotide sequence isolated from the Sargasso Sea
acttacggtttcccattagatcttactgaagatattttaagaaataaatcaatgtccattgataaagataaatttaaatctttaatgaaagaaagtagagaacttgctaaaaaaaattggaaaggttcaggagatgctgtagtcgaagatatttggtttgggattaaagataggttagagccaacagaatttctaggttatgaaacaaatcaagctgaaggtgttgttttgtctttgttaaaggaaaataaagaagttgatcagttgaaagaaaatgatgagggaatgatcattgtaaaccaaactccattttatggagagtctggaggtcaagtgggagatactggtgagatcgtatcaaatgaatttaaatttgaggtgacagatgttcagaaaaaacttggagacctatttgtacactatggaaaagtagtcagtggttccataaagctcaaagatagtgttgaaatgaagataaatgttgaaaggagagatgacactagagcttatcactctgcaactcatcttttacacgagtctttaagaagagtattaggggatcatgtaacccaaaaaggttctcttgtagagcctagcagattgagatttgattttagccacatgaagccaatccaaaatgatgaaattgataagatagagaaatttgtaaacaatatggtttcaaaaaagtcagatgtaaaaacaaggttaatgacacctgatgaagccgtggaaaaaggagctttagctttatttggtgaaaaatatggagatgaagtgagggtactttctatgggagatgaagatggaaagtatttttcaacagaattatgtggtggaactcatgtaaaaaatactggagatattggaaaatttaaaatagtcagccaatcttcaatagctgcaggaataagaagagtagaggctt

SEQ ID NO: 306126 - DNA, 376 bp, Unknown
  Bacterial polypeptide expressing nucleotide sequence isolated from the Sargasso Sea
tatgggccaaattttacttacagatgtaaggaaaaaatttttagattattttaaaaacaataatcatcagatcgttgagtctagtaatttagttccaaataatgaccctactttaatgtttaccaattccgggatggttcaatttaagaatgtatttactggcctagaaaagagacaatataaaacagctactacttctcaaaagtgcgtaagagcaggaggaaaacataatgatttagaaaatgtgggatatacgccaaggcatcataccttttttgaaatgttaggaaatttttcatttggtgattattttaaggaacaagctataactcacgcatggaatttacttactaaagatttcgaattgcccaaagaa

SEQ ID NO: 306127 - DNA, 507 bp, Unknown
  Bacterial polypeptide expressing nucleotide sequence isolated from the Sargasso Sea
tatgaaaaatatatcattaaatgaaatcagaaaagaatttatcgattattttaaaaataatggacatgaagttgttaaatcaagcaacctagtaccagataatgatcctacattgttatttgctaattcaggaatggttcaatttaagaatacttttacaggcctagaaaaaagattatattctagagctgttacatcacaaaaatgtattagggcaggtggtaaacataatgatctagaaaatgtaggacatacagcaagacatcataccttttttgaaatgttaggtaatttctcttttggggattatttcaaagaagaagcaatatatcttgcttggaatttgcttacaaaagtttttgagttaccagaaaaaaaattgttagtaacaatatttcatgaagacacagaagcagaaaaattgtggaaaaaaatttctgggctaaaagaagacaaaataattaaaatatctactagtgataacttttggagtatgggagagacagg

SEQ ID NO: 306128 - DNA, 796 bp, Unknown
  Bacterial polypeptide expressing nucleotide sequence isolated from the Sargasso Sea
gcaaaaaagaattggaaaggttctggggatagttctgaggaagcaatttggttttcaataaaagataaaactggtccaacagaatttttaggttacgagtctaatcagtctgagggtgttgtattaaacttaattaaagataatacagaaacaaattctttatcttctggtgaagaaggaatgatcattaccaatcaaaccccgttttatggagagtcaggaggacaacttggagataaaggcacaattgtttctggtaattctgtttttgaagtagaagatacgcaaaaaaaacttggagacttatttgttcattacggatctttgaaaactggagaaatgaaaatcaatgatgtagtggaaatgaaaatagatgtagagagaagagataatctaaaagcttatcactctgcaacccacttactccatgagtcattaagaagaactttgggtacacatgtcatgcaaaaaggatcattagttgctccagataggttaaggtttgactttagtcatatgaaaccaattacagaagaagagttagaaactatcgataaattagttaatgaatatgtttcaaatagttctgaggtaacaacaagaattatgacaacaaaagctgcaattgaaaaaggagcactagctttttttggtgaaaaatatggagaagaagttcgtgttgtatctatgggaaaagaaaaagaagcatacttttcaacagagttatgtggaggaacacatgtcaaaaataccggtgatattggaaaatttaaaactgtaagccaatcgtctattg

SEQ ID NO: 306129 - DNA, 874 bp, Unknown
  Bacterial polypeptide expressing nucleotide sequence isolated from the Sargasso Sea
gttgttttggataaaacaccattctatgctgaatctggagggcaagtaggggatgtaggaagtatatcttttaatggaaatgagttaaatgttgttgacgtacagaaacaaagtgaaatgatagtccatatctgtaaaggtgatgtctcgagctggaataaagctagtaatgttgaatgtgtagtcgatgcatctcatagaaataatgttaaaagaaatcacactgcgactcatttattacatgcatccttaaaggaagtattaggtgatcaagtacaacaggcaggttcgctggttcatccagactaccttcggtttgatcttacgttttttgaaaaaatttcaaaagatcaaattagaaagattgagaaaatagccaattcacaaatattgttaaatagcagtttgcatgtatcagttaaagcatatgatgatgccataagtagtggggtcgttgctatttttggtgaaaaatatggcgagcaagtaagagtagtttcaactggtaaattttctaatgagctatgcggtggaactcatgttgacagtactggcgatattggtttattaaaaattgttgaggaatcctctttagcttccggggttagacgtatagtagctgttaccggtgaagctgcattgaaactatttcaaaaccaatcagaattaatgtcagaaattcaacgaaaacttaactgtaatgaagatgagctttctgatcgagtaaagcagctatatgaagataaaaaagcacttgagaaaaaaattaaattattaagcagatccgatgaatctgaaatttcccaatgggttgaagactcatttaaagttaatggttattttattgttgtaaggaaaattaagtatggagatg

SEQ ID NO: 306130 - DNA, 838 bp, Unknown
  Bacterial polypeptide expressing nucleotide sequence isolated from the Sargasso Sea
atgcaatgcgttgacactggaatggggctggagagaattacagcggtaaagcagaaagttacaaacaattaccagattgactcttttcaacgccttatcactgaggttgctgcgttgctgaacgtgagtgatctagagcacgcttctattagggtaatagcagatcatatccgctccacctgctttctaatcagtgacggggttttaccttcaaatgagggtaggggatatgtcctacgcaggattataaggcgggctttgcgtcatggacacaagcttgaaaacgctggcgcttttttctccgacctagtttctgttgtggttgcagagatgggagacgcctatccctccgtcagggaagctgagagtgaaataaaaaaaattgtcttgaaagaagaaaatcaattccaagctactcttgatcagggccttagaattttaaaggaagaaataacggatatagagggagaagaaatacccggtgagtttgccttcaagctctacgacaccttcgggtttccggttgatttgacggctgatattgctcgagagaacggcatggtcgttgatatgaatggttttgatagagcaatgcatgagcaaaaagaaagagcgcgctccgcaagtaatttctcaagcgccaatcaggagaggctatctctcgatttaacgactgagtttttaggatacgaggaactaaattgtcgcgctaaaattattggtttgttgcacaaaggtgtgagcgcagaagaagtaagtggagaggggctcttctcaataatactagataaagcgaccttctatgccgaagccggcggccaaataggagatatggaga

SEQ ID NO: 306131 - DNA, 787 bp, Unknown
  Bacterial polypeptide expressing nucleotide sequence isolated from the Sargasso Sea
ctcggcgacgaaggcatcgatctcgaggacgacgaccgcttcatcgagttctacaacctggtgttcatgcagtacaaccgcgacgctgagggcaccctcacgccgctggccaaccgcaacatcgacaccggcatgggtctggagcggatggcgcagattctgcagaaggttcccaacaattacgaaaccgacctgatctttcccctgatccaggcggccgctgatctggcgggagtcgactaccaccagctcgacgacaagggcaagacgtcgttgaaggtgatcggcgatcacagccgtgccgtcacccagatgatctgcgatggcgtcatcgccagcaacctgggccgcggctacatcctgcggcggctgctgcgccgggtggtgcgccatggccgcctcctgggcatcgacaagccgtttctggtgccgatgggggaagcggcgattgccttgatccaaggcgctcaccccagcgtgatcgaccgccaggaggtgatcctggctgaacttcagcgggaggaagcccgcttcctcgagaccctcgaacgcggcgagaagttgctggcggaggtgctggcctccaagccaacccagatcagcggcgcccaggcgtttgagctgtacgacacctatggcttcccgctggagctcaccgaggaaattgccgaagagcatggactctcggtggaccttgctggattcgaggccgccatgcaggaacagcgccagagagccaaggccgcagccgtgagccttgatctcaccctccaggatgcgatcgagc

SEQ ID NO: 306132 - DNA, 488 bp, Unknown
  Bacterial polypeptide expressing nucleotide sequence isolated from the Sargasso Sea
gatgaaggctgacgatctcagggaagcgtacctcgccttttttgaatcaaaaggctgcatccgtaggccaagcgatgtgcttgttcctcgctgggacccctccgtgctattcacaccagctggcatgaatcagttcaaggatcacttcctcgggaaatgcaagctggacttcacacgagcaacatcctgccaaaagtgcctgaggacaggggatattgaaaacgttgggcgaacaccacggcatcatacgtttttcgagatgctgggaaactttagctttggcgactactttaagcgcgaggcaattctttgggcctgggaatttcttacgagccgcgattggttgaatatcgcccctgagttactttccataacagtctatgaagacgacaacgaggcatactgcatctggtctgacgaaattggagtgcccttcactcgtatcacacgaatggggggaaagatgacatttctgggcggctggtgct

SEQ ID NO: 306133 - DNA, 843 bp, Unknown
  Bacterial polypeptide expressing nucleotide sequence isolated from the Sargasso Sea
taagatttgattttagtcataacaaacctattgaaaaagaggaaatgattaaaataaataatatagttaatgaaatagtagagggttctactgatgtgcaaacaagaataatgaccccaaaggaggcagttaatatgggtgctctcgcattatttggagaaaagtatggggatgaagtaagagtagtatttatgggtaaggaaaataatggtttcttctcaaccgaattatgtggaggaactcatgttaaaaatactaaggaagttggtaagtttaaagtaataagccaatcttctattgcatcaggagttagaagagttgaggcattaagggacaagcaattagaagaatacgaaaaaacacaaaaagaagataaatctctgaaagagtcaaatcttaaaaaagatataagattaattaaaagtgaactacaaaaattaaaaattaaacctgattttaaagaagatttagatttgtatgaaaatttaaaaaatttgaataaacagctagataaagtaaaaattgaaggtataaagaaagataaaagtaaaaatattattaaggataaaaagattgggaatatattaattcgagagcaaattttaaaagattttcctccaaaagaactaagaagtataattgatcaaggaaaaaaagatattaaatctggaattataattagtatttctacgtttgaaggtaaggtgggtttagctgtaggtatttctcaagatttgacctcaaaatataatgccgtagatctagtaaaagctgcgtcagcaattcttggaggcaaaggaggtggtggtagaaaagaattttgctcaagccaggtggagtaga

SEQ ID NO: 306134 - DNA, 871 bp, Unknown
  Bacterial polypeptide expressing nucleotide sequence isolated from the Sargasso Sea
gaatgagggtcggggatatgttttaagaagaattatgcgaagagggatgagacatgctcattctttaggaagcaaaagtccagttttccataggctttttgaagttttattgaatgaaatgaagaatagttatccagaattaaataatggtagtgaactaataattgaaacacttaaaaatgaggaggagaagttttcatctcttcttgaaagagggatgaaaatattagaggaaaatcttagtaaagttaaaaacaaaactcttccaggatcaatagcatttaaattgtacgatacttacggctttcctctagatctaacagcagatattttaagaggaaaaaatataaaggtagacaataatggatttgataaggaaatggaaaaaagtaagactttggcaagagctaattggaaaggatcaggagataaatctttagaggaaaaatggtttaaaattagagaagaactcaatccaacagagtttctaggttatgaatttgataaagcagagggtgtagtaattaaaattttaaaaaatggaaaatttgttaattcagcaaactctggagaagaaattgagattatttcaaatcagacgccattttacggagagtcagggggtcaagtgggtgatcagggttatatctttaattcagattgcaaaattaaaataaatgatacccaaaaaaaaatgggggatctctttgtacattttggtaaaattgagaatggatcagtatcggttggtcaaaatattaatttagagatcgataaaatcaaaagaaaaaattctaaagccaatcattccgctacacatttattgcatgaatccttaagaaggacattaggaaaacatttatgcaaaaag

SEQ ID NO: 306135 - DNA, 715 bp, Unknown
  Bacterial polypeptide expressing nucleotide sequence isolated from the Sargasso Sea
atgcttagttcagaaataagaagaaaatacttagatttttttgaaaatcaaaaacatcaaataatgccaagttcttcattaattcctgctgaagatcccacattattattaactacagctggtatggttcaatttaaaccatattttactggagaaatttccactgatattaccagattcaccagttctcaaaagtgcttcagagtaactgacttagaagaagttggagacgaaactcatcttacattctttgaaatgttaggaaactttagtattggtgattattttaaaaaagaagcgattatctggtctcttgattttgtaacaaactatttaggactagaaaaagaaaagttatgggcaactatttataccgatgacgatgaagcacttaatttatggataaatgctggaattccagaaaatagaatacgtagattcggagattctgataatttttggggaccagctggtgcagaaggtccttgtggaccctgtagtgaattgcattatgattttggtggaccatgtacagcaaataatgatgataattgtggaccaaattgctgtgcgagatttttggaattatggaatcttgtttttatgcaatactttcaagatttggaaggaaatagaaccccattacctaatccaaatatcgatacaggaatgggtcttgagagagcagcaatgattttacaaaaagtaaattcac

SEQ ID NO: 306136 - DNA, 715 bp, Unknown
  Bacterial polypeptide expressing nucleotide sequence isolated from the Sargasso Sea
atggcagacaaaacactcaatgaaataagaaatactttcttaaagtattttgaaaagaacggtcataagattgtggagtctagtaatttagttcctaacaatgatcccacattgatgtttgctaactctggaatggtccagtttaagaatgtttttacaggattagaaaaaaaagattatgttagagccacaacatcgcaaaaatgtgtaagggcaggtggtaagcataatgatttagagaatgttggttacacgcctcgtcaccatacattctttgagatgctaggaaacttttcttttggagattattttaaagaacaagcaattcattatgcttgggatttaataaccaaagattttggaatagataaaaatagactttatgtgacagtgtttcatgaagatgatgaagccttcaatttttggaagcaaattgcgggttttagcgatgatagaataattagaattgctacatcagataatttttggtctatgggtgagacaggtccatgtggcccttgttctgaaatattctttgatcatggtgatcatttaccaggtggattgccaggaagtaaagatgaagatggagatagatttatagaaatttggaacttggtctttatgcagttcgaacaagttactaaagataaaagaattaatcttccaaaaccatctgttgatacaggaatgggacttgagagaatagctgctt

SEQ ID NO: 306137 - DNA, 213 bp, Unknown
  Bacterial polypeptide expressing nucleotide sequence isolated from the Sargasso Sea
catgaaaactagtaatgacatacgccagtcttttttggagtttttcaaatcaaaagaccacgaaattatatcgagtagctcactagttccctcgaacgatccgaccttgttgtttacaaatgcgggcatggttcagtttaaagatgtattcctagggcgtgaaagtttgccatataaacgtgctgcgtcatcccagcggtgtgtccgtgcagg

SEQ ID NO: 306138 - DNA, 556 bp, Unknown
  Bacterial polypeptide expressing nucleotide sequence isolated from the Sargasso Sea
atggctcagaaatcattaaatcaaataagagaaactttcttaaaatattttgagaaaaatgatcataagattgttgagtctagcaatttagttccaaataacgatccaacattgatgtttgctaattctggcatggttcaatttaaaaacgtatttacaggtttagagaaaagagactatcaaagagcaaccacttcacaaaaatgtgtaagggcaggtggaaagcacaatgacttagaaaatgtaggttatacaccaagacaccacactttttttgagatgttaggaaatttttcatttggtgattattttaaagaaaaagcaattcattatgcgtgggatttaattacaaaagattttggaatagataaaaataaaatttatgtgacagtttttcatgaagatgatgaagcattcaatttatggaagaaaatagcaggttttagcgatgatagaataataagaatttctacatcagataatttttggtcaatgggagaaacaggtccttgtggaccatgctcagaaattttctatgatcatggagatcattaaa

SEQ ID NO: 306139 - DNA, 907 bp, Unknown
  Bacterial polypeptide expressing nucleotide sequence isolated from the Sargasso Sea
caaactctcgataaaggcattcaaattttagactccactcttgcagaagggaataaagaaattatttcaggagatttagcctttaagcttcacgatacttttggttttccatttgacctaacggctgatattgcaagagaaaagggtattgatattgatgaagaaggatttaagaagaatatggaatctcaacaacaaatgtcaaaggcatcgagttcgtttgtgtcaaagattcccactgcagaggatattaaggaaacagattttattggttatgaacatttgtcttcaaactcaaatgtaatagcaatttggaataaaaatgaaaaagttgagcttgctaatgagccacaagagtactttattgcacttaaccagacttcaatttatgcagagtcaggtgggcaggttggtgacagaggtatgtttaaatctaaaaatgccgagggtagtatcttagattgcaaaaaatctggaaaagtttttatgcaccttataaagttagacaaaggaagcttaaaaattgatgataaaattgaagttaacgtgaataaagaaaaaagagagaaaacagaagctcatcattcagctacccatttagtccatgctgcactaaaaagggttctaggagatcatgttaagcaaaagggttcccttgtcgatgagcacaaacttagatttgatttctcccatgatgaatctctatcagatgaagagatatctaaaattgaagatttagtaaatcaagaaatactaaagaattctgctgtaagcaccaaaataatggatttagaagatgctaagaattcaggtgcagagtcattatttggtgaaaagtatgaagatcaggtaagagtcttatcaattggtgaagatgatttttctcttgagctttgtggggaacaca

SEQ ID NO: 306140 - DNA, 941 bp, Unknown
  Bacterial polypeptide expressing nucleotide sequence isolated from the Sargasso Sea
atcaagttttagagtaattgctgatcacttaagagcaagctcatttcttttagccgaaggagttttaccatcaaatgaaggtcgcggatatgttctaagaagaattatgagaagaggaatgagacattctcatttgttaggatctaaagaaccaattttttataaaatttttgactcattaaaaaacgagatgtcaggaaactacccggagcttgaaaggtctcaatctttgatcaaagaaactttaaggatggaggaagaaaaatttttagttttactagatagaggtatcaaaattctaaatgatgaaattgcaaaaatagacaaagttttacctggggatgtcgctttcaaattatatgacacctacggttttccattagatcttactgaagacattttaaagaataaatctttaaaagttgatcatcagaaatttgatgaattaatgaaaaaaagcaaagagcttgcaaaaaagaattggaaaggttctggggatagttctgaggaagcaatttggttttcaataaaagataaaactggtccaacagaatttttaggttacgagtctaatcagtctgagggtgttgtgttaaacctaattaaagataacaaagaaacaaaatctttatcttctggtgaagaaggaatgatcattaccaatcaaaccccgttttatggagaggcaggaggacaacttggagacaaaggtacaattgtttctggtaattctgtttttgaagtagaagatacacaaaagaaacttggagacttatttgttcattacggatctttgaaaactggagaaatgaaaatcaacgatgtagttgaaatgaaaatagatgtagagagaagagataatctaaaagcttatcattctgctacacacttactccacgagtcattaagaagaactctaggtaaacatgttatgcaaaaag

SEQ ID NO: 306141 - DNA, 879 bp, Unknown
  Bacterial polypeptide expressing nucleotide sequence isolated from the Sargasso Sea
tattttgaattaaaaaaatcacaaaagtttatagaagaaaatcttaagaatgaagaaattaaattttcagaaacacttcaaactggtttgtcaattttaaatgatgaaataaatacaaaaaaaccaaaacaactttcagccgatttagcttttaagctttatgatacatatggatttccgatcgatgtaactcaaaatatcttaacagagaaaaacattaaacttgatatcaatcaatattttgaaattgtaaaaaaaaataaggagaaacaaaagaattcatggacaggtagtggtgagaaatcctctaataaattttatcttgaacttaaaaatgtagtcaaggaaacacattttgttggttacagtcaaacgaaaactaaagcagaactgaggtgtataattagggaggaaaagttctcagatgagattttagttgataataataacattttcttagtttttaataaaaccccattctatgctgaatcgggtggtcaaattggtgattcaggaaagatattttctgaaaatggtgaatttatatgtaatatttcagatacaaaaaaagtagaaggagaaatttatttacatcaaattgaaaaaaatgaacaaaaaaaaattattaaaggaacaaagtatattctttcaattgacaaggaaagaagagaaaaaattagaaataatcactcggctactcaccttcttcatcaatctttaagaaatattttaggagaacatgtcagtcaaaaaggatcattagttagtgatcaaaaacttcgatttgattttacatataataaatcacttactaataagcaaatctatgaaatagaaatgtttgttaataaaactattagattgaatttaattcaaact

SEQ ID NO: 306142 - DNA, 844 bp, Unknown
  Bacterial polypeptide expressing nucleotide sequence isolated from the Sargasso Sea
gataaaataaaaagaaaaaattctaaagccaatcattctgctactcatttattacatgaatctttaagaaggacattaggaaaacatgttatgcaaaaaggatcattagtttcgcctgaaagattaagatttgattttagccacagcaagccaatagaaaatcaggaaatagccaaaataaataaaatagttaatgatatcgtcgaaggttcgtctgatgtccaaacaagaattatgactccaaaagaggcagttagtatgggtgctttagctttatttggtgaaaaatatggtgaggaagtaagagttgtgttcatgggaaaagaaaataatggttttttttcaaccgaattatgtggaggaactcacgtaaaaaacactaaagaggttggcaaatttaaaattgttagtcaatcatccattgcctcaggggtaagaagagtcgaagcgttaagagataaacaattagagcagtatgaaagaacacaaaaacaaaacaaatctttaaaagaaacaaatcttaaagaggaaatagaattagtaaaaaatgaattacaaaattataaaataaagccagattataaagataacgcagatttatctgaaaatttaaaaaatttaaataaacaattaaatagaataaaaattgaaagtattaaaaaagataaaaacaaaaatataataaaagataaaaaagttggcaatatactaataagagaacaaattttaaaagattttccacctaaagaacttagaaatattatagaccaaggaaaaaaagatattaaatctggagttataattagtatttctatatttgaggataaggtaggcttagcagtag

SEQ ID NO: 306143 - DNA, 820 bp, Unknown
  Bacterial polypeptide expressing nucleotide sequence isolated from the Sargasso Sea
atgggtttagagagaatcgcagctttgctacaaggtacacatgacaattatgaaacagatcattttaaaaaattaataaattcaatttctgaagcagttaaagttaaacctgatcaaaaaaatgtttctagttttagagtaatcgcagatcatttgagagcaagttcgtttttaattgcagaaggtgttttaccatcaaacgaaggaagaggctatgtattaagaagaattatgagaagagggatgagacattctcatttactagggtctaaacaaccaattttttacaatatttttaaaactttaatggatgagatgtcaggaaattatcctgaacttataagagcagagtcgttaattaaagaaactttgaagacagaagaagaaaaatttttagttttattggaaagaggaatgaaaattttaaatgatgaaatttcaaaaattgataaagttttacctggtgaagtagcttttaaattatatgatacatatggatttcctctagatttaactgaagacattttaaaaaataagtcgttaaaaatagacaataaaaaatttgaaactttaatgaatgagagcagagaaattgctaagaaaaattggaaaggatcaggtgatagttcagtcaataagatatggtttgaaatcaaagatagattaggtccatcagaatttttaggttatgaaactgactatgctgaaggaaagattttgtcattattaaaagataacaaagaagtaaaaagcttatccaataatgatgaagagatgataattacaaatcaaacacctttttatggagagtctggtggcc

SEQ ID NO: 306144 - DNA, 859 bp, Unknown
  Bacterial polypeptide expressing nucleotide sequence isolated from the Sargasso Sea
agaccatgggccatgtggaccctcatctgaaattcatgttgatattagatcaaatgaggaaaaaaataaaattcctggaatcaatttagttaataaaaatcatcctgaagttattgaaatttggaacctagtatttattgaatttaatagaaaaatggacggtagtttggaaaaattacctgaaaaacatattgatactggaatgggcttggaaagattagcgatggtaattcagggatacaagtccaactatgatacagacgtttttaaaccgatgattaaagaactagaaaaactatgtaatgtaaagtatggtttagtaagtgaaattgatatagcaattagggttgttgttgatcatgttagggccatagcgttctcaattgctgatgggcaattaccttccaacaatggacctggttatgtaatcagaagaatattgagacgaggagttagatatggctacacttttttaaatcaaaaaactcctttcatatataagttgattaaaaaattatcttctcaatttttgcatacttttcctgaaattaatgcacaaattgatttaattgaaaatgttataaaggatgaggaaaattccttttttagaactttagaaaatggaattattaaacttaatcaaatagtcaaaaaactaaaagatgataaaatttctggaaatgatgcttttttattatacgatacctatggatttccgattgatctgacatctttaatacttaaagaaaaaggtttgtattatgatcagaaaaaatttaatacattattaaaccaacaaaaagaaagatcaaaatcagaaaaactccaatcatctgatgattggaatgtaataaaaaaa

SEQ ID NO: 306145 - DNA, 935 bp, Unknown
  Bacterial polypeptide expressing nucleotide sequence isolated from the Sargasso Sea
cttcttgcagaaggagtattaccttcaaatgaaggtagaggttatgtccttagaagaataatgagaagaggaatgagacattctcatttgttaggctctaaagaaccagtcttcaataaaatctttgatacattgaaagatgagatgaaaggaaactatcctgaattggaaagatcggaaactttaattaaagaaacgttaaaaatggaagaagaaaaatttttagtattacttgatagaggaattaaaattttgaatgacgaaatttcaaaaataaaaaaagttttaccaggtgaagtagcgtttaaattatatgatacttatggtttcccgttagacttaacagaagatattttaaaaaataaatctttgaccgttgatcaaaataaatttgatgagctaatgaaaaagagtaaagagcttgcaaaacaaaattggaaaggttctggagatgcctctgaagaagaaatctggtttggtataaaagataaaataggacctacagagtttcttggatatgagtttaaccaatcagaaggagtggtgttatctataattaaaaataataaagaaacacaaaatatttcaactggtgaagaaggaataattattactaatcaaacacctttttatggagagtctggtggacaagtaggagatcaaggaacaattgtatctggtaattcagtatttgaggttacagatactcaaaaaaaacttggagatctatttatacatcatggaattctaaaatctggtgagattaagattaaagacgttgtagaaatgaaaatagatattgaaagacgtaacaatcttaaggcttatcattctgcaactcatttattacacgagtctttgagaagaacattgggaaaacacgttatgcaaaaaggatctttggttgcgcctgatagactaagatttgattttag

SEQ ID NO: 306146 - DNA, 857 bp, Unknown
  Bacterial polypeptide expressing nucleotide sequence isolated from the Sargasso Sea
agcaagagcaaactggaaaggatcaggagataaatatcttgaggaaagatggtttaaagttagggaggaaatcagtcctactgaatttctaggatacgaatttgataaagctgagggtgtaataattagaatttcaaaaaatggaaaatttgttgacactgcaaatacaggagatgaaatagaagtcattacaaatcaaacaccattttatggagagtctggcggtcaagtcggtgatcagggttatatttttagttcagattgtaaaataatagtaaatgatactcaaaaaaaaataggagatttatttgtccactatggaaaaatagaaaaaggatcaatatcaattggacaacacgttaatttagaaatagatattttaaaaagaaataattcaagggctaatcactcggctacacatttattacatgagtctctaagaaggactttaggaaaacatgtgacacaaaagggatcattagtctcgcctgaaaggttaagatttgattttagtcataacaaacctattgaaaaagacgaaatgactaaaataaataatatagttaatgaaatagtagcgagctcttctgatgtgcaaacaagaataatgacccctaaagaggcagttaaaatgggtgctttagcattattcggagaaaaatatggggatgaagtaagagtggtttttatgggtaaggaaaataatggtttcttctcaacagaattatgtgggggaactcatgttaaaaacactaaagaagttggtaagtttaaagtaataagtcaatcatctattgcatcaggagtgagaagggttgaggccttaagagataagcaattagaagaatatgaaaaaa

SEQ ID NO: 306147 - DNA, 724 bp, Unknown
  Bacterial polypeptide expressing nucleotide sequence isolated from the Sargasso Sea
cagttgcctgtttggcgagaaatacggagatcaagtccgcgttattactgtggctgatttttcaaaagaattatgtggcggaacacatgtcgatcgaactggtgacattggattatttaaaattacggaagagacatctttagcatctggagtacgtagaatcgttgctgttacagggcccaaagcggttgaatttattcaagatcaggtagcagctttagatgaggtcaaatcgcaattaaaatgcaatcttaattcaattccagatcgtttaggtcaattaatcaaagataacaaaactttagaaaaagaattaaagaaacaaaaaaaatctaactcatcatttaatcctgaaagtctattgaaagaagcgttaattattgaagataaaactatagttatcaaaatgacagatgccgaggatatggatagcctaaaagattttggcaatagtcttcttgtaaaattaaagaatggaattggagtccttggcgctgtagctgacaagccgatgttggttgttgttgtcacagatactttaattaaagcaggaattaaggctggtgaccttgcaaagcagattggatctatcatgggtggcggtggaggtggtcgcccgaacctcgcaacggctggcggtaaagatcaaaaatctcttgaaaccgctatggaaaaagcgaaagatattattataaaaaatattgaggaaaaaaatgcagtataa

SEQ ID NO: 306148 - DNA, 678 bp, Unknown
  Bacterial polypeptide expressing nucleotide sequence isolated from the Sargasso Sea
aggatcgctcgtaagcccggatagacttagatttgattttagccataacaaacctatcgaaaaagctgaaatgactaagataaataaaattgttaatgaaatggtagatggtgcaagtaatgtacagacaagaattatgacaccaaaagaagcggtaaatctgggagctttagctttatttggggaaaaatatggtgatgaagttagagtggtttttatgggaaaggacaataatagatttttttcaactgagttatgtggtggaacacacgttaaaaatactaaagaaattggagaatttaaagtaatcagccagtcatccatagcatcaggagtgagaagggttgaagcattgagagacaaagagttacaaaattacgaaaaatctttaaagaaagataaatctttgaaagaaaaaaaccttaaggatcaagttaattttgtaaaaaaagagttattaaaatttaaactaaaaccagattataaagatgatcttgatttatcagaaaatttaaaaaatcttaataaacaatttgaaaaaattaaaattcaaaagatcattgaagataaaaataaaaatattataaaagataaaaaagttggcaatttcatattgagacaacaagttttgattgattttccccctaaagaattaagaagtgtaatagatcatggaaa

SEQ ID NO: 306149 - DNA, 640 bp, Unknown
  Bacterial polypeptide expressing nucleotide sequence isolated from the Sargasso Sea
tatggctgacaagactctaaatgaaataagaagttcattcttgaattattttcaaaagaatgatcacacaatagttgaatctagtaatttagtaccaaataatgatccaactcttatgtttgcaaactcaggaatggttcaatttaagaacgtatttactggtcttgaaaaaagggactataaaagagccacaacttctcagaaatgtgtaagagctggaggaaaacataatgatttagaaaatgttggatacacaccaaggcaccacacattttttgaaatgctaggtaatttttcgttcggagattattttaaagaaagagctatagagctagcttggaatttaataactaaagattttggattagataaaaataggctttattttactgtatatcatgatgatgatgaggcttttaacttgtggaagaaaatatctggtttaaatgacgataaaataatcaggatcccaacttctgacaatttttggtctatgggtgaaacaggtccttgcggcccttgttctgagatattttttgaccatggagaccatttacaaggaggtttaccgggcactaaggatcaggatggtgacagatatatagagatttggaatttggtattcatgcagtttgagcaa

SEQ ID NO: 306150 - DNA, 747 bp, Unknown
  Bacterial polypeptide expressing nucleotide sequence isolated from the Sargasso Sea
tgaggaagaaaaaaatcagatagaagatttaataaatttggagatttcgaaaaacacaaaaagcattgtagagactatgtctatgcaagaagcccaagcaaagggagctatagccttttttggagacaaatatggtgacgaagtaagggttttaaatttaggagaaggtttttctatagagctttgtgggggaacacatgtgaaggaaacggggcaaattgaattcatgaaaataacttctgaatctggaatttcttctggcgttagaaggatagaagctgtaacaggagaaggtgcaaagaatcttttaagcaacttaaagaatagttatctagaaattggaaaacaattgcatgttgaaacaaaaattgacgatccatctaatgatttagatctttttagatctctaaatgaaattttattaagtatttctaaggaagtaagcacaagcgttgatcaagttcagaataagattaaccaattaatagatgaaaatagatctctaaatgaagaacttgggattaaagaaagaagcaataaagcttctgatttattgaaagcaactcagtctcttgttgaagaaaacaaaaaattaaaagaacagaagaagaaacttacctcaaagaacataggatcttctgttgaggatttaattgaagaagctatagatatacaaagttataagctagttactaaaaggtacgatggcatggaggcctctggcatgagggaagctgcggatagact

SEQ ID NO: 306151 - DNA, 784 bp, Unknown
  Bacterial polypeptide expressing nucleotide sequence isolated from the Sargasso Sea
gcgttgcgcaataagttgggtgatcatgttactcaaaaaggttcgctcgttgggccagataggctacgttttgatattagtcaccccaaaccggttagccctgaagaaatatctgaagtgatgaaacaggttaaccttgaaattcagaagaataccgaggtcctgacccggctcatgactcccgatgaggcaatagaaatcggtgctatggctctatttggtgaaaaatacggtgaagaggttcgcgtagtgacaatgggtaacgttgacggggccccttactcgctagagttgtgcggcggcactcatgtaggtcgaaccggcgatatagggtcttttttcattgtttctgaaagtgcggtagcggccggcgtaaggcgaattgaagctgtaagcggagaggcggtcttggctcacatgactgaaacggacgcacaattaaaagaagcgtcagctctccttaatgtggcgccggaccaagttccagataggatcactgcgttactttcagaaagaaaaaggctggaaaatgagctttcggcagtacgtcgaaaacttgctattggtgaaagtggaacgaatgaaagccatagtgacattaaattgatcgctggaatttcatttataggccgtgttttggaaggaattcctgcgcgtgagctgaaatcatttgcagatgacttaaaaaatcaaattggttcaggtgtaattgctatttgtgcaaccgacgatgacaaggcctctcttgttgttgctgtaacagatgatattttgaataaattcg

SEQ ID NO: 306152 - DNA, 781 bp, Unknown
  Bacterial polypeptide expressing nucleotide sequence isolated from the Sargasso Sea
aattcagaaaggttcacttaaagtgggtgaaagtgtaaatcttgaaataaatgttcaaaaaagaaataattctaaagctaatcattctgcaacacatttacttcacgagtctttaagaaggacgcttggaaaacacgtcacacaaaaaggatcactagtaagtccagacagacttagattcgattttagtcataacaaacctattgaaaaagatgaaataattaaaataaacaaaattgtaaatgaaatggtcaaaggtgcaagcgatgtaaaaacaagaattatgacaccaaaagaagcagttagtctcggcgctttagctttatttggtgaaaaatatggcgatgaagtcagagttgtttttataggtaaagaaaataatggtttcttttcaacagagctatgtggtggaacacacgttaaaaatactaaagaagttggagaattcaaagtagtaagtcaatcatcaatagcatccggaataagaagggtagaagcattaagagacaaagaacttcatgactacgaaaataatttgaaaaaagataagtctttaaaagagaaaaatctcaaggatcaaattgatttagtaaaaaaagagttaacaaaattaaaaataaaaccaaattataaagataatatggatttatcagaatacttaaaaaatcttaataaacaattagaaaaaattaaaattaagaatataattgaaaataaaaataaaaatattgtcaaagataaaaaaattgcaaattttgtgtttagacaacaagtcttaact

SEQ ID NO: 306153 - DNA, 856 bp, Unknown
  Bacterial polypeptide expressing nucleotide sequence isolated from the Sargasso Sea
cgtcatcatacatttttcgagatgttaggaaatttttctttcggagattattttaaggaggaagcgatattttttgcttggaacctgattaccaaagaatttggtatatcaaaagacaagttatgtatgaccgtatattcagaagatgatgaagcatttaatttatggaaaaaaataaccggctttaatgaaaataaaataattaaaatctccacttccgacaatttttggtcaatgggagacactggtccatgtggtccatgttcggagatcttttatgatcatggtgaaaagttgaaaggtggccctccaggttcgaaggatcaagatggagatagatttatagaaatttggaatttagttttcatgcaatttgaacaagtcacaaaagataaaagaataaacttacctaagccatctgttgatacaggtatgggtttggagagaatgacagctgtattacaaggtacacacgataattatgaaattgatttatttaaaaaattaattgatgcgagtgcagaaattacaaagtcacctgtatccaataaaacgatagccagtcatagagtaatttctgatcatttgagagcttcgtgttttttgattgcggatggcctgatgccttcaaacgagggcagaggatatgttttgagaagaattatgagaagaggaatgaggcatgcggaaaccttaggtggcaaatctaataccttatcgagtttaataaatactctcatatcacagatgtcatccgaatataatgaattaagcagagcaaaagaattaataactgaaacaattatgaatgaagaagataagttttctactatgttaaacaaaggaatgaaggttc

SEQ ID NO: 306154 - DNA, 658 bp, Unknown
  Bacterial polypeptide expressing nucleotide sequence isolated from the Sargasso Sea
atgacatctaaagaaattcgtgattcattttttgatttttttgaatcaaagaaacatagtatcgtatctagctctcctgtagttttgccttcagatcccacgcttttatttaccaatgcagggatgaatcaatttaaagagatatttttaggggctcgtgatgctcaagaaaaacgtattgcaaatagtcaaaaatgtattcgggtttccggaaagcataatgatttagaagaggtagggcgtgatacctatcaccacaccttttttgaaatgttaggtaattggtcatttggtgattattataaaaaagaagcaatagcttgggcatgggaattaatgacagaagtatggggactagataaaggtcgaatatgggctactgtttaccaaacagatgaggaagcattagagctatggaaagaagtaactgacattaatccttgtcaaattcttcgttttgatgaaaaagataatttttgggaaatgggagaaacaggtccatgtgggccttgctcagagattcattatgatttaactcctgagggaaatgcttcagcagagatgataaatgctgatttacccgaggttattgaaatttggaatttagtttttattcagtttaatcgacggtctgatggcactctcgaagagttagccg

SEQ ID NO: 306155 - DNA, 769 bp, Unknown
  Bacterial polypeptide expressing nucleotide sequence isolated from the Sargasso Sea
tatggaggataaatcattaaatgaaataagaaatacatttctgaaatacttcgagaaaaacgatcacaggattgttgagtcgagtaacttagtgccaaataatgatcctacattaatgtttgctaattcaggaatggtacagtttaaaaatgtatttacaggtttagaaaaaagagaatatcaaagagcaactacatcacagaagtgtgtaagagcgggtggaaaacataatgatctagaaaatgttggttatacaccaagacatcacacattttttgaaatgttaggaaatttttcttttggagattactttaaagaaagaggaatagaactcgcttggaatttgataactaaagacttcggtttaaataaagataaaatttatgtaactgtatttcatcaagatgatgaagcatttaatttttggaagaaaatagcgggttttaatgaaaaaaagattataagaatttcgacgtcagataatttttggtctatgggcgagacaggtccatgtggaccatgctcagaaatattttatgatcatggagatcatttaaaaggtggtctaccaggcactaaagaccaagatggagatcgttttatagaaatttggaatttggtttttatgcaatatgaacagatttcaaaagataaaagaattgatttaccaaaaccatcagtagatactggtatggggttagaaagaataactgcattattacaaggtacacacgataattatcaaacagaccattttaagaaactgata

SEQ ID NO: 306156 - DNA, 853 bp, Unknown
  Bacterial polypeptide expressing nucleotide sequence isolated from the Sargasso Sea
ttagtatttatgtcctatgagcgattagccaatggtgatcagacacctttgccgaatccttgtgttgatactgggatggggcttgaaagaattgctgcagtgttacaaagtgtgcattcaaattacgaaacagacgtatttcagttcttaatggatgctgttgctcaatgtgaaccttcaaaatcctgtactcaggtcactttacaagtggttgcagatcacttacggtctattttgtttcttatgacggatggcgtgattccaggtaatgaaggtagatcatatgtattacgccgtatcattagacgtgctttaaggtatttgtatcaagatggctttaattcaccatgccttttcaaaatgttacctgcagtggctgcgattatgggcgaggactatccagaactaaagttacaacttcatcatcatcaatcacaatgtgagaaagaagaaataaaatttttcaatacattggaccaagggatgtcattacttcattcacatttagagcatcattctcatgtggctggtgatgtcatctttaaattgtatgatacgtacggttttcctgtggacctcaccgaagatattgtgaatgatcacaatggtacattggatcttgaaggttatgagcaatgtatgaaagagcagaaagaacgatcaaaacaacatcaaaaatttaaagatgttctcaattatgatgtcagtggattgatgaaaacacagtttttgggatatgaggtgttggcgtctaatgctaaagtggttcgtttatatcaaaaaggtgagtctatagatcaatgtcaaggcgaagccgaaatgattgttgatcgaacaccttttatccagaggg

SEQ ID NO: 306157 - DNA, 316 bp, Unknown
  Bacterial polypeptide expressing nucleotide sequence isolated from the Sargasso Sea
atggctaaaacattaaatgaaatcaggtcagcattcttagattattttgaaaaaaatgatcataaaatagttgagtctagcaatttagtcccgaataatgacccaacattgatgtttgccaattcaggaatggtccaatttaaaaatgtatttactggactggaaaagagagactatcaaagagctacaacatctcaaaaatgtgtaagagcaggtggtaagcataacgatcttgaaaatgttggctatactccaagacaccatacgttttttgaaatgttgggaaacttttcttttggtgattatttaaagaaag

SEQ ID NO: 306158 - DNA, 268 bp, Unknown
  Bacterial polypeptide expressing nucleotide sequence isolated from the Sargasso Sea
catgaaagcctccgatatccgccaaaaattcctgacgttctttgagggcaagggccacaccgtggtgcgctcctcgccgctggtgccgggcaacgacccgacgctgctgttcaccaactccggcatggtgcagttcaaggacgtctttctcggtaccgacaagcgcccgtacgtgcgcgcggcctccgtgcagcgctgcctgcgcgccggtggcaagcacaacgacctggaaaacgtcggctatacggcgcgccaccacacgttcttc

SEQ ID NO: 306159 - DNA, 868 bp, Unknown
  Bacterial polypeptide expressing nucleotide sequence isolated from the Sargasso Sea
tttgattttagtcatatgaaaccaatttcagatgaagagatcagtaaaattgaagaatatgtaaataaaatggtttcgacaaagtctgatgttaaaacaagactaatgactccaaaagaagctgtagataacggcgccctggctctttttggagaaaaatatggagaagaagtaagggttttatccatgggcgatgaaaagaataaatatttttccacagaattatgtggtggtacgcatgttaaaaatacaggagatattggtaaatttaaaataattaatcaatcttcgatagcagctggtattagaagagtagaagctcttagagataaacagctaaatgaatacttaacaaaaaaagaaaaacaatctgatttatcatcacaaaaaaataaagaggtaattaataatttgtcccaaaaaataatagatcttggaggcaaaccaagtttagataacgaaaatcaaaaaaatctgattaaggatttaacaaagcaacttgaaacattatctgttaaaaatgtattaaaagataaatcaaaaaatattattaatgatcaaacaattaaaggaataaaattaagatttcaaaaagtaattgatctagcacccaaagatttaagaaaattagttgataatggaaaaaaagaaataggagaaggcgtagtggtggtttgcgctatcaaagaaggaaaaattggattagctgtaggagtaacaagtaaattaattaaaaaatataatgcagttgaaattgcaaaagctgcatctaaaaaaattggtggcaaaggtggaggcggaagaccagattttgctcaagctggcggagacgattccagcaaaatagatgatgcgttgaaaaaataaa

SEQ ID NO: 306160 - DNA, 875 bp, Unknown
  Bacterial polypeptide expressing nucleotide sequence isolated from the Sargasso Sea
ttctccttcggtgactactttaaggaaggggcgattcccttcgcgtgggagttgctcaccaagacggtcgccgacggtggctacggattcgatgagtctcgactgtgggtcacggtgtatctcgacgacgacgaggccatcgatatctggcaccgggatgtgggtcttccgttggatcgcattcagcgacgcgggcaggccgacaactactggtctatgggggtgccggggccgtgcggaccctgttcggagatctactacgaccgaggacctgagtacggcatcgagggaggtcctatagccgacgagaaccgctacctcgaagtgtggaacctggtcttcatgcaattcgagagaggtgcaggtccggcaaaagaggactaccccattttgaatgagcttccgaacaagaacatcgatactggaatggggctcgaacgaatggcggccctgctgcagggcgtcgacaacatctacgagatcgacacgacacggagcatcctggacaccgcgagccaattgaccggtgcccggtatggaaagtccgaacgcgatgatgttgcgttgcgggtggttgccgatcacgctcgaacctgcacgttcctgatcggtgacggagtggtgcccggcaacgaaggtcgggggtacgtgcttcgacgcctgatgcgacgggtgattcgcaacatgcgcatcctgggggcaggagagccgacgatgtcgcagctgatcgatgcgaccgtccaggcgatggcgccccagtacccggagttgaatgacgaagttgagcggattcgcagcgtcgccatcggtgaggaatccacgttcgagacgacgttacgtaccggaactgtgttgttcgagactgcggtcgccga

SEQ ID NO: 306161 - DNA, 850 bp, Unknown
  Bacterial polypeptide expressing nucleotide sequence isolated from the Sargasso Sea
aaaaaagatgggagatcttttcgtacacacaggtaaagttaaaaagggttctataaagataggtcaaagcgttaatctagaaatagatacagaaaaaagaaataattcaaaagccaatcattctgcaacccatttattgcacgagtctttaagaaggacactaggaaaacatgtaactcaaaaaggatcgttggtatctcccgaaagattaaggtttgattttagtcataataaacctattgaaaaagaggagataaaaaaaataaataaagttgtaaatgagatagtagacggttcgactgatgtacaaacaagaataatgactcctaaagaagctataaaaatgggagctttggctctgtttggagaaaaatacggggaagaagtcagagtagtatttatgggaaaagaggctaatggtttcttttcaactgaattatgcggaggaacacacgttaaaaatacaaaagaagttggaaaatttagagttgttagtcagtcttctattgcatctggagtaagaagagtagaggctttaagagataagcaacttaatgagtatgaaaaatctctagaaaaagataaatcattaaaagaaaggacagctaaagaacatttagaaaaaattaaaaaagaactgttaatttataaaattaaaccagatttaaatgaaaataaagatttagcagagaatttaaaaaatttaaataaacaactcgaaaaaataaaaattcaaaacgtaattaaagataaaaacaaaaataaaattaaagacaaaaatattggcaatatcataataagagaacaggttctaaacgattttccaccaaaagaattgagaagtgtaatt

SEQ ID NO: 306162 - DNA, 337 bp, Unknown
  Bacterial polypeptide expressing nucleotide sequence isolated from the Sargasso Sea
atgggccaaattttacttaccgaagtaaggaaaaaatttttagattatttcaaaaaaaataatcatcagatcgttgagtctagtaatttagttccaaataatgatcctactttaatgtttactaattccgggatggttcaatttaaaaatgtatttactgggatagaaaagagacaatataaaacagctactacttctcaaaaatgcgtaagagcaggaggaaaacataatgatttagaaaatgtgggatatacaccaaggcatcataccttttttgaaatgttaggaaatttttcatttggtgattattttaaggaacaagctataacccacgcat

SEQ ID NO: 306163 - DNA, 885 bp, Unknown
  Bacterial polypeptide expressing nucleotide sequence isolated from the Sargasso Sea
gatgaattcaaaccatataagatcaatatttttagaatattttaaaaaaaatggacatgaaattgttcattcaagttcactagtaccacacaatgatcctacactgatgtttgcaaactcaggaatggttcaattcaaaaatatttttacaggaaaagagaataagaattataatcgtgctgcaacatcacaaaaatgtgtacgggctggtggaaagcacaatgatttagaaaatgtaggatatactgcaagacaccatactttttttgaaatgttaggtaatttttcttttggcgattactttaaagatcaagcaattgagtatgcctggaatttaataacaaaagaatttggaattaataagaaaaatttgcttgtaacagttttttctgaagatcttgaatcatatgattactggaaaaaaattgcaggtctttccgaagacaaaataattaaaattaatactgccgataatttttggtcaatgggagatactggtccttgtggcccatgttctgaaattttttttgatcatggtgataaatataagggcggaccaccaggcagtaaagatgaggatggagatagatttatagaaatttggaatttagtttttatgcaatttgagcaaattaataaatctgaaagaattaatcttcctaaaccttccatagatactggaatgggactagaaagggtaacagctttattacaaggaactaatgataattatgctactgatttatttcaacctctaataaataaatcgattgatttaactaataatgaatctttcattaatagtcctagccatagagttattgctgatcatataagatcatcatctttttttaatagcagatggaatttttgccttctaatgaa

SEQ ID NO: 306164 - DNA, 919 bp, Unknown
  Bacterial polypeptide expressing nucleotide sequence isolated from the Sargasso Sea
atacgatacttatggttttccattagatcttactgaagatatcttaagaaacaaatctctttctattgatacaaaaaagtttcaatcactaatgaaagaaagcagagaacttgctaagaaaaattggaaaggatctggagatgctgtggttgaagatatctggtttagtatcagagataaattaggtgctacagaatttttaggttatgaaacaaaccaagctcaaggggtaattttgtcgttattaaaagacaataaagaagttaaagaattaaaatcaagtgatgaaggaatgattattactaaccaaacacctttttatggagagtcaggtggtcaagtaggggatattggaggatttaaaaatggtgagtttagatttatggtaacagatgtacaaaaaaaattaggagacctttttgttcattacggaaaagtcttaagtgggtctgtaaaacttggcgataatattgaaatgaaaatagatgaagttagacgaaacaatacaagagcttatcattcagctacacatttactacatgaatcattgaggagagttttaggcactcatgtaacacaaaaaggatctctggtagagccaagtcgactaaggtttgactttagtcatatgaaaccaatatcaaatgaagaaatagataaaatagagacatttgttaattcaatgattacaaaaaaatctgatgttagaacgagacttatgacaccagacgaagcagtggagaatggcgcattagcactttttggagaaaaatatggtgatgaagtaagagtactttcaatgggagatgaagatggaaaatatttttcaacagaactatgtggcggaactcatgttaagaacacaggcgatattggtaatttaaaatataaatcaatcctcgatagcagctggtgttag

SEQ ID NO: 306165 - DNA, 277 bp, Unknown
  Bacterial polypeptide expressing nucleotide sequence isolated from the Sargasso Sea
atgtcaaaaacactaaatgaaataagaactacatttctaaaatattttgagaaacacgatcacaaaattgttgaatctagcaatttggtacccaacaatgatcctactttgatgtttgctaattcaggaatggttcagtttaaaaatgtatttactggattagaaaagagaaactataagagagccactacttcacaaaaatgtgtaagagctggaggaaaacataacgatttagaaaatgttggttatacacccaagacatcatactttttttgaa

SEQ ID NO: 306166 - DNA, 940 bp, Unknown
  Bacterial polypeptide expressing nucleotide sequence isolated from the Sargasso Sea
acgaaggaaataataataaccaatcaaacacctttctacggagaatctggaggacaagttggtgatacaggagttattgcttctgaaaaatttacttttgaagtaaatgatgttcaaaaaaaactaggtgatcttttcgttcattatggaaaagtagctaagggttcaattaaattaaatgatagcgttgaaatgaaaatagatataggcagaagagaaaatataagagcctaccactctgcaacacatttgttacatgaatcgctaagaagagttttgggcacgcatgtaattcaaaaaggatcgctagttgcaccagatagattaagatttgactttagtcatatgaaacctatttcttcagaagaaattcaaaaaatagaagcttttgtgaatttaatgattgaaaaaaaatctgatgttaaaacaagaatgatgacccctaaagaagcagtaaacaatggtgctttagctttatttggagaaaaatatggtgatgaagttagagttttgtccatggggagcgagaaagataaatctttttcaacagaattatgtggcggaacacacgtaagaaacactggggacataggaaaatttaagataattagtcaatcttcaatagcagctggtattcgaagagtagaagctttgagagacaaacagcttcaagagtatttcaatgaaaaagcaaaattgtcagatctttcaagccagaaagacgaagaaaaaattaaagacttagctttaaaaattgttaaatttggaggaaagccaaatttagaaaatagaaatccaaaagatttaataaaagatttaacaaagcaatatgaagacttttcagtaaaatctatactgggtgataaaagtaaaaatataattgttgataaaaatattaataatataaaagttagatttcaaaaaatttctgatttacctc

SEQ ID NO: 306167 - DNA, 777 bp, Unknown
  Bacterial polypeptide expressing nucleotide sequence isolated from the Sargasso Sea
aactttattatttacaaacgcaggaatggtgcagtttaaggatgtcttcttagggactgagactaaaaattttaaacgagctgcaacctcacaaagatgtatcagagctggaggcaagcacaatgatttagaaaatgttggttataccttaagacaccatacattttttgaaatgttgggtaattttagttttggagactatttcaaagaagatgctattaaattcgcgtgggaatttttaacagaggaacttaagcttgataaagaaaacttatggattactgtttataaagacgatgatgaggctgaagaaatttggaaaaatattattggaattgatccggccagaatagctagattgggtgatgatgataatttttggtctatgggtgatacaggaccatgtggtccatgctctgaaatattttatgatcatggagaacatattgatggaacacctccaggagcggaaggtgatgaaggtgatagatttatcgaaatatggaatcttgtctttatgcaatttaatagagatgaaagtggaaaaatggaaccactcccaaaaccatctgttgatactggaatgggattagagagaattgcagctgtccttcagggcgtaaattcaaattatgaaacagatgtatttaaagacttaatcaatgcttcagaaaaaattcttggcagtaatggaagtacatctcataaagttattgctgatcatattcgatcaagtgtttttttaatatctgatggagtaattcctgaaaaagaagg

SEQ ID NO: 306168 - DNA, 823 bp, Unknown
  Bacterial polypeptide expressing nucleotide sequence isolated from the Sargasso Sea
cgtcaatctcgatatgcttccttagggttagtttcacaatttactgggtatgaaaaaataaacgatcaatcgcatgttcttcttttaatgcgtgatgaaatgattgtgcagcagttaaatgctggtgatcatgccgaaattatcctcgaatctacatctttctaccctgagggtggaggacaaataggtgatcgtggtgaaattatcacttctactggaaaattcttggttgaagatactcaaaaattcggtgactctatcattcattttggtcaaatgaatgatgggaagattgatgccggtgttgaagtagaatctagagttgatagtgatttccgtttaggcgctatgagaaatcataccgctactcatttacttcatgcggctttacgtaaagaattaggtgttcatgtaaaacaagcaggatcttatgtaggtcctgatagacttcgattcgattatacgcatcctgaagcgcctacttacgaaaatttgcaatcaatacaagctttagtaaatgaaaaagttcgtgatgacattgttggttcaacatttgtattaccctatgctgaagcagttgatcgaggtgctgtcgctttttttgaagataaatatcaagatcaggttagagtagttgaatattgtgttgcaccacatagtcattctgctgaagctggatgtttcagtagtgaattttgtggaggaacacatattcattcaactggtcaaattggacgtatgcaaattattgcagaatccagtattggtgcaggattacgtcgtattgaggctgtgacagggccagaagctgaagcatttgtta

SEQ ID NO: 306169 - DNA, 604 bp, Unknown
  Bacterial polypeptide expressing nucleotide sequence isolated from the Sargasso Sea
tatggcaaaaacacttaatgaaataagaaatatttttctcaaatactttgagaaaaatgatcatacaatagtagaatctagtaatttagttccaaataatgatccaacattaatgtttgcaaactcaggaatggttcagtttaaaaatgtatttaccggacttgaaaaaagagattacgttagagcaactacttcacaaaaatgtgttagagcgggtggaaaacataacgatttggagaatgttggttatacaccaagacaccatacattctttgagatgttaggaaatttttcatttggagattactttaaagatagagcaatagagcttgcttggaatttagtaactaaagattttggtattgataaaaataggctttacgtaacggtttttcatgaagatgatgaggcatttaacttttggaaaaaaattgctggcttaagcgaagataggataattagaataccaacttcagataatttttggtcgatgggggaaactggtccatgtggtccttgttctgaaatcttttttgatcatggagagaaaataaaaggtggtttacctggcaccaaagatcaagatggcgatcggtatatttga

SEQ ID NO: 306170 - DNA, 725 bp, Unknown
  Bacterial polypeptide expressing nucleotide sequence isolated from the Sargasso Sea
caccatacattttttgaaatgttagggaacttttcttttggagattactttaaagaaagagctattggacttgcttggaatttaataacaaaagaatttggattaaataaagatagactttatgtaactgtttatcatgatgatgatgaagcctttaatttttggaaaaaaattgcaggattaagtgaaaataaaattataaggatagcaacatctgataatttttggtctatgggcgagactggaccctgtggtccttgttctgaaatattttatgatcatggagatcatcttgaaggcgggttgcctggaacaaaaaatgaggatggagatagatatatagaaatttggaatttagtttttatgcaatttgaacaaatttcaaaagataaaagaattaatctaccaaaaccatcggttgatacaggaatgggtctagagagaattgctgcattactacaaggcacccatgacaactacgaaacagatcattttaaaaaaataataaattctacagcagaaattttaaaagttaatccaaacaaagaaaatttagcaagttttagagttatagcagatcatttacgtgctagctcatttttaattgctgagggagttttaccatcaaatgaaggaagaggttatgtattaaggagaatcatgagaagaggaatgagacactctcacttacttggttctaaagagccaattttttttaatatatt

SEQ ID NO: 306171 - DNA, 861 bp, Unknown
  Bacterial polypeptide expressing nucleotide sequence isolated from the Sargasso Sea
aaggtctgcagaatattgatttagaagatggagatcgttttattgaattttataatcttgtttttatgcaatataatcgcgatcctaatggaaaattgacagatttaaaatttaaaaatattgatacaggaatgggccttgaaaggatggctcaaatattgcaaaaaaagcaaaataattatgagacagatttaatttttcctatcattcaaaaaacttgtgagattgcaaatattgattatttttcttcaaatcataaaaacaaaatttctttaaaaattattggagatcatacaagagctgttattcatttaatttccgatggagtagcagcaagtaatctcggcaggggttatatattaagaaggcttattagaagaatggtcagacatgggagattattaggtataacaaatgaatttttaccgaatattgctactgtggggatcaatttaatgaaaaaaaattatcctgatttaaaaaataataatgatttaattttgaatgagataaaaattgaagaagtacggtttagggaaacccttgaaaggggagagaaattgctagatgaattaatttcttcaggtcagaaattaatttctggttttaaagcttttgaactttatgatacttatggatttcctctagaacttactgtagaaattgcagaggaaaatagtatcagtgtagatgtaaagggttttgaagaagaaatgaatgcacaaaaagagagagcaaaagctgcttcaagtaatattgatttgacgttagagggatcattagagcgagaaatagatctttttaacaaaactgattttattggttatggttcacttctttctgaagccagaaataaatagg

SEQ ID NO: 306172 - DNA, 904 bp, Unknown
  Bacterial polypeptide expressing nucleotide sequence isolated from the Sargasso Sea
ttgtatgacacctttggtttcccttttgatctaacagcacttatagcaaatgaacgcggctatgaaattgatcaaattggatttgatacagccatggaagaacagaagtctaggtctcgagcggcggctacctcaaaaataggagattgggtattattaaacgagtctggtaaagaaaaatttattggatatgatcagttaagttcagaagttaaaattatacgttttcgaaaaatgactactgctaaagaaggagatttttatcaactagtatttgattcaactcctttttatccagaaggaggaggtcaggttggagacaaaggatatttagaatcttcaaacggagatgtattttacattttagatactaaaaaagaaaacaatttaattattcaccattctaagacactacctgaaaaattagaagaatcccataatgcagttgttgatccaaagcaacgccatcgctcttcttgtaatcatactgcaactcatcttatgcatcaagcattacgttctatattggggaatcatgtagaacaaaaaggttctatggtacattccgggatgtttcgttttgatttttcccactttactaaagtaagtaaagatgaacttaaagaagttgagcagtttgtaaatgcaagaattcatgaaaaaattcctttagacgaaaagcgaaattctccatacagtgaagctataaagcaaggagccatagctctttttggagagaaatatggagatgaagtacgaaccattagatttggccaatctatagagctttgtggaggaacacatgtagataatacttctgagatatggcatttcaagattacttcagaaagtgctgttgcgtctggaattagaagaattgaagccattaccggagatgctgcca

SEQ ID NO: 306173 - DNA, 161 bp, Unknown
  Bacterial polypeptide expressing nucleotide sequence isolated from the Sargasso Sea
aaatgttggctatacatcacgtcatcacactttctttgaaatgcttggcaactttagttttggagactactttaaagaggatgcaatccaattggcatgggatttcattaccgatgaactcaaacttgaaaaggatcgtctttgggtaaccattttttgaa

SEQ ID NO: 306174 - DNA, 820 bp, Unknown
  Bacterial polypeptide expressing nucleotide sequence isolated from the Sargasso Sea
tatattgaaaaaattatcaaagctgaagaattatcattcaatgaaactcttgatagaggcattttgcattttagcaaagttattggtgatatgtctggcaaaactattgctggagcagaggcttttaaactgtatgatacctttggatttcctttggatttaacacaggtaatggcgcgcgaaaagggtctttctgtggactcaaaaggctttgaaaaggaaatggcgctccagaaaaaaagggcaaaatcttcggagaaatttaaatccaaatccacagaaattaactggacagttgttaaggatgtcagcaactcaaaatttaagggctatgagtccacttttttatccgcggatatcgttaaatattcttcaaataagaatgagcactatgttgttttaaatcaaactccattttatgctgaatctggagggcaggtagctgataccggtactattttaggcgatgagattaatttaaaggtgcagaatgtacagtttgaaggggagatgatcattcataaatgcaccggtgaaataaatggaaaaaatttctctgttaaatgtcaggttgatgaaagccgcaggcagaggataagaaaaaaccatactgcaacccaccttatgcacaaagcacttaaagttgttttaggcgaccatgtgcagcaggcaggatctttggttcatcctaattatttaagatttgatatcactcattttgaaaagattacaagtgatgagattaaagagatagagcagatagtcaataatgagattctctcaaataataagctagatattgcaatacaatcctttgatg

SEQ ID NO: 306175 - DNA, 403 bp, Unknown
  Bacterial polypeptide expressing nucleotide sequence isolated from the Sargasso Sea
tatggcttcattaaacgaaattcgttctacttttttaaattactttaaaaaaaatggtcatgaaattgttgcttgtagccctttagttcctagaaacgatcccacgttgatgtttactaactctgggatggtccaatttaaaaatctttttacagggcttgaaaaaagagattatttgagagctgttaccgcccagaagtgcgtgcgggctggcggaaaacataacgatttagataatgttggttatacagcgcgccatcatactttttttgaaatgttgggaaatttttcgtttggtgattattttaaatcagaagcaattcctcttgcttggaatttgataaccaaagaatttggaattcctgccgaaaagttatatgtaactgttttccatactgatgat

SEQ ID NO: 306176 - DNA, 832 bp, Unknown
  Bacterial polypeptide expressing nucleotide sequence isolated from the Sargasso Sea
aaatttaatataggtgatagtataaaagccttaattgacccaaaaaaaaggaagttaattgaatgcaatcattcttcgactcatttattacatgcttctctaagaaaaattcttggaaatcatgtttctcaaaaaggctcattagttaacagtgaaaaattaaggtttgattttagtcataatgaaccaattagcaaagataacattataattattgaaaattttgtaaaaaaagaaatagatgcaaattcgcaagtaaatattaaatcagtagatcatcaaaaagcgattgatgaaggagcaatggctctattcggtgaaaaatatggtgaggaggttcgtgttgtatcaatgggcacatttgaggatgataaaatattttcaaaagaattgtgtggaggtacacacgttgataagactggagatattttaaattttaaaataatcaatcaatctagtgtggcttctggtattagaagaatagaggctttaacaaatattgcagttgatgaatataataaacataaaattcagctcgataaaaaagttttggaggaaagcataaaaaaaatattaacacttatagatgagttaaagatgtatgataaagattttagttatagttatgatgaaaatggtgatttaactaataatattaaagaattaaaaaaattactagatcaaaataagcaaaataaaaataaagaaacctcatcacaaaatatagttaatgaaaaaataaatgatatcaattttgtttatttaatagctgaaaattatcccactaaaatattaaaacaatttgttgatgatcaaaagaacaaatataaaa

SEQ ID NO: 306177 - DNA, 739 bp, Unknown
  Bacterial polypeptide expressing nucleotide sequence isolated from the Sargasso Sea
gccagcaaatgatgggaggggatacgtgttgcggcgcatcatgcgaagagcaatgcgccatatccatttgctcggttcaaaaaaacccatcatgcataatcttgtcgtatcgctaatccaacaaatgggtagcgcttatcctgaattaggacttgcacagtcgttgatcgaggaaactctacttcaagaagaaacacgttttagacagactcttgatcgcggattaaaattacttgatgatgaattggcaagggttcccgaaggcgaggagttttctggagaaactgctttcaaattatatgacacgtatgggttccctctagaccttacacaagatgctttaagagagaagggtagggttgttaacactgccgcgtttgatatcgcaatggcggatcaaaaagctaaagcgcgtgcggcttgggttggtacagggcaacttactgatgatgcgatttggtttgagcttgcagataatatcttaccaactgaattcttaggttacgaaactgacacggctgaggcccaattactaaaattagttaaggatggagttgaagttttatcggccaaagcaggtgatacagttcaactaattttcaatcaaacacctttttatgcagaaagtggtggtcaagtaggtgatcagggttacgtccaaacctctgattgtttgatacaaataaatgatacaaaaaagtttgctggtttatttatacattcaggctcggtttcaaca

SEQ ID NO: 306178 - DNA, 905 bp, Unknown
  Bacterial polypeptide expressing nucleotide sequence isolated from the Sargasso Sea
tttgagcaaaaaaaatactgcattttctagcgatacacttggttttgtggataaaaatctcatatcctcctttgagggttataatcaaaattctctttctgcaaaagtattagcaatatacaaggatggctctattgtagacctggttaaagcaaaaaattcagaactcattattatttttgataaaacaccattttatcctgaaggtggaggccaaatttctgatataggtgtattagaaaataatgactgtagcttatccattgtaaatgttcaaaagattggaaattcgattgtacataaagcagttttaaaaaatgggacaattaagaaaagtgataaatttaatctcaaaattgatacacgtaggagaaaatctatcgccattcatcattctagtacacatcttctccatcaggcattaagggatgttctagggaatcatgtagagcaaaaaggatcacttgttactgatgagggcctaagatttgatttttcacataacaaagcattaagtaaagacgagataagtcgcatagaaaaaattatagcattcgaaattgacgaagctaaaaaaactttgataaatcaaatgagttataaagatgcaattaaagcaggtgcattagctttttttgatgaaaaatatgaagatgatgtaagagttcttaacattggaactaaatctatggaactgtgcgggggaactcatgtcgataatactaatgatataaaaatttttaagattttaaatgaacaaagtatatctaatggcgttagaagaattgaagcagttgcaggaaatgaagcatataatgaattccaaaaagcatttaatctaaatagagatatagcaagtttattaggagtaagtcctgataaaattgctaataagattgattctt

SEQ ID NO: 306179 - DNA, 940 bp, Unknown
  Bacterial polypeptide expressing nucleotide sequence isolated from the Sargasso Sea
tcagaaatacatggaaaagatgcatttaagctatatgatacttatggatttccacttgatttaactcagcttatggctgaagaaagaaagatgactgttgatatagatggttttgatgttgaaatgaaaaatcaaaaagagttagctaaatctggtcaaaaatttgaaatggataatcttgatttaaaatggaacttagaaactaaaagcacccattcgatttttgttggttatgaaaatgaaagtatttcttcgaaaattataaatcacgctgaaagtggagacgacataataatcattttagaaaacacacctttttattccgagtctgggggtcaaattggcgatacaggtataataaggaatgatgacttctcagctagagtcaatgatacccaaaaaaatggagattatgttttacatatatgctcactaacaaatggcgctatcggtgacaatctttctgtagattgcatgatagacgttgatagaagaaataatattaaagtgaatcatacagcaactcacttacttcatcaatcgttaaaagatgttttaggtggacatgtaaatcaggcaggatcattagttcatccagaatatttaaggtttgatattactcatccaaataaaatttcttcaaaggaattagaagatattgagttgattgtaaatcagaaaataagtgaagatatcactgttgaaacaagcattaaaagtttggaagaggctaaaaaagagggcgcaaccgctttatttggtgaaaaatatgaagatgaagtaagggtagtttcaatgggcgagttttcaaaagaattgtgtggaggaacccatgtttcgagtacaggtaaaatcaataaatttaaaataaagcatgataaagcaatttcttctggtattcgaagaataaatgctatcactcataatcaggttgattgta

SEQ ID NO: 306180 - DNA, 816 bp, Unknown
  Bacterial polypeptide expressing nucleotide sequence isolated from the Sargasso Sea
attggttgaagcagatagattaagatttgattttagccatatgaagcccatttcttcagaagaaattgataaaattgaaatatttgtgaattcaatggtggataaaaaaacagatgtaagaactagaatgatgacaccaaaagaggctgtagataatggagctttggcattatttggagaaaaatatggagatgaagtaagagttctatctatgggtaatgaaaaagataaatacttctcaacagaactatgcggaggaacgcatgtaagaaatacaggtgacatagggaaatttaaaattgtaagccagtcatctattgcagcaggagttagaagagtagaggctttaagagataaacaattacaagaatttttacataaaaaaaacgtattgtcagatatttcagttcaaaaaaatcaagaggttattaaagatttaacagaaaaaattattaaacttggtggaaaacctaatttagaaaatgatgatcaaaaaattataattaaagatttaaacaaacaattagatcaacttttaactaaatcaattttaagtgataaattaaaaaatataattaaagacaaaataataaataaaattaatgttagattccaaaaagttattgacttacatccaaaagatttaagaaaattagttgatgaaggtaaaaaacatttaaaagaaggaattataatagtttgtgcagtaaaagatggtaaaattggattagcagttggagttacagataaattaacaaacaaatatgatgcagttaaatttgttaaaattggatcagaaattgtagggggaaaagg

SEQ ID NO: 306181 - DNA, 810 bp, Unknown
  Bacterial polypeptide expressing nucleotide sequence isolated from the Sargasso Sea
ttttttacaaaaaataatcaccaaaaagttgaatccagtaaccttgtaccaaataatgatcctacgttaatgttcacaaattctggaatggttcagtttaagaatgtttttactggattagaaaaaaggtcatacaataaagctacaacctcacaaaaatgcgttagagcagggggtaagcataatgatcttgagaatgtaggttatacccctaggcaccataccttctttgagatgttaggaaatttctcttttgggaattattttaaagagcaagcgattaaatacgcatgggatttgttaactaaagatttcaaaattccaaaggatagattatttacaacagtatattcagaagacgaagattcatttaatctttggaaaaaaattgcaggtctaccagagagcaaaattgtaaaaatatcaacatcagacaacttttggtcaatgggggatacaggtccttgcggtccctgctctgaaatattttatgatcatggagacaaacttaaaggtggaccaccgggttcaaaagaccaagatggagatagatttattgaaatttggaatcttgtttttatgcaattcgaacaaatttccaaaaacaaaagaattaatttacctaaaccctctgttgatacaggtatgggtttagagagaatgacagcagttttacaaggtactcatgataactatgaaatcgatcactttaaaaaaattatttcagcttcatcagaaattataaatagtaaaattgatagtaacacaattgcaagtcatagggtaatcgctgatcatctcagagcaagt

SEQ ID NO: 306182 - DNA, 766 bp, Unknown
  Bacterial polypeptide expressing nucleotide sequence isolated from the Sargasso Sea
tcttatagaataatctctgatcacttgaagtcgataatctttttgatggctgaaggtataattccttcaaatgaaggaagaggttatgtacttcgaagaataattagaagagctttacttaatgtcaataaattaaaccccagaattataattcttcataagttagttgatgatgtaataaaaaaatatagcgggacttatacagaattagaaaaagcaattctgttcataaaaaataatttaaagaatgaagaagaaaaattttctgaaactctctctaccggtctagaattattaaatgctgaaattaaaagtcttaagagtaaaaaatttaaacccgaggtagcttttaaattatatgatacctttggatttcccgtagatatgacagaatctatattaaatgataaaaaaataagtttagatatgaataaatataagtccttaattgaactaaataaaaaatctcaaaaaaaatcctgggttggaagtacaaatacagatattaataaactaaataataaaattataaaagaggtttcaagaacagagttttgtggctatacaaaaaattattgtgatgcaagattattgtgtattacagaaaaaaataaatttgttgattctattaaaaaatgtaaagaaaacattttgatttttaataaaacaccattttatgccgaagctggaggtcaagtaggtgattctggtgaaatatacaattctgcaagaaagttagtaggcgaaatctctgatacaaaaaaga

SEQ ID NO: 306183 - DNA, 907 bp, Unknown
  Bacterial polypeptide expressing nucleotide sequence isolated from the Sargasso Sea
tggaatttaataactaaagaatattcaattagtaaggatagattgctagttactgtttattctgaagatcatgaagctttcaatctatggaaaaaaattgcaggtttatctgaaaataaaataatcaaaataaatacttctgataatttttggtcaatgggcgaaactggaccctgtggcccttgttctgaaatattttttgatcatggcgataaatatgaaggtggacctcctggatcacccaatgaagatggggatagatttatagaaatatggaatttggtttttatgcagtatgaacaaatatctaaaactgaaagaatagacctaccaaaaccttcaattgacactggtatgggtttagagagaatgacagcacttttagatggatcaaatgataattatgcaactgatttatttcagcctattataaatgagtctataaatttatgtggtgatgaaaaatcaattaaccatccaagccatagagtaattgctgatcatttaaaatcctcctcttttttgatagcggatggcgtaatgccatcaaatgaagggagaggttatgttctaaggagaataatgagaagaggtatgagacatgcacatactttaggtaacaaagatccgattttttataaattattcccaactttcttaaaaggcattaaagaatcttatccagaattagacagagctaaagatttgattttaaacactcttataaatgaagaaactaaatttaaagaaacagttgaaaaaggaataaaaattttagaagaagaaatatccaattcatctaataagtttgatggagaaatagcatttaaattatatgatacatatggtttcccattagacttaactcaggattatttaaagagtaaaaatattgaggttgatttga

SEQ ID NO: 306184 - DNA, 939 bp, Unknown
  Bacterial polypeptide expressing nucleotide sequence isolated from the Sargasso Sea
gatttgacagcagacattgctcgagagcaagatttagatttggatgaggagggctttaatagttgcatggatgaacaaataaaaaattcaaaatcagcaagtaaatttaaaggattgcaattagatttgtcctcgattaaagaaacaaagtttttaggttatgaagagttatgcgggaagggaaaagttttaggaatatgggatgaatccaatgcaatagataatgcatcagatcaaaatgagtgcttcattgcagttgataaaacacctttttatgcagaatcaggtgggcaaattggagatcagggaagctttactttttctggaggtcacggaaccgttcaagattgtataaagcaaggtaagatttttctccacagaattaaagtacaagagggagtcatcaaaaaaaatgacaaattggaattatcagttgatgcaagtaaaagaaaggccgcttcggtcaatcattctgccactcacttaatgcatgcggctttgaaagatgttcttggtgatcatgttcatcaaaaaggctcactattagattctaataagctacgatttgatttttcacattctaaggcagttaccaaagctgaaataaaggaaatagaattaattgttaatcaacatattcaaattaactccgaggtaaccactaaaataatgcagcttgatgacgcgcttaagattggagccgaagccatgtttggagaaaaatatgaagatgaggttcgggttgtttatattggtggcgaattttctgtagaactttgtggtggaactcatgtaagaagaaccggtgatattggaatgttttcggttacaagtgaatcaagcatttcctcgggagtaagacgtattgaagctttggctggacaaggtgctgttcaatcgatgttagaagctcgtaatcatttacaagatctgcaagga

SEQ ID NO: 306185 - DNA, 905 bp, Unknown
  Bacterial polypeptide expressing nucleotide sequence isolated from the Sargasso Sea
aagagcaaccacttcacaaaaatgtgtaagagctggcggtaaacataatgatttagaaaatgttggttatactccaaggcatcatacattttttgagatgcttggaaatttttcttttggagattactttaaagagaaagcaattcacctcgcatggaacttaataacaaaagattttggattagataaaaataggctctatttcacagtttttagcgaagatgatgaagcgtttaatctttggaaaaaaattacaggatttggtgatgatagaataattaagataccaacttcagataacttttggtcaatgggagaaactggaccttgtggtccttgctcagaaatattttatgatcatggtgaccatttaaaaggtggtttgcctggtactaaagaccaagatggtgacagatatattgaaatttggaatttagtattcatgcaatacgagcaagtctcgaaagataaaagaattgatttaccaaaaccatctgttgatactggaatgggtttagaaagaatagctgcattgcttcaagggacacacgataattatgaaacagatcattttaaaaaaataataggctctatatctgaagaattaaaagttaagcctgataaaaacaatttgtcgagttttagagtgattgcagaccacttaagagcaagttcttttttactagcagaaggagttttaccctcaaatgaaggcagaggttatgttctaagaagaattatgagaagaggcatgaggcacagccacctacttggatcaaaaaagcctatcttttttaatatatttaaaacattgatggatgaaatgtcaggtaattatccagaattaaaaagggcaaactcactaatcaaagagactttaaaaatggaagaagaaaaattttagt

SEQ ID NO: 306186 - DNA, 892 bp, Unknown
  Bacterial polypeptide expressing nucleotide sequence isolated from the Sargasso Sea
gacctcagcgaaaaagatgagatctcgtcatcaaatgctgactgcaatttgatcctcgaacaacatgggcccacagacttcgttggctacgaagcaaacgaagttatagcaaaagttctctactgcgacggagactcagttatcctggaccgctctcccttttatgctgaagcaggcggccaggtcggtgaccggggcactatagacggagagagcggctctgctctcatcaaagatacggtttatggagccgtaggtcagcatctacatattgttgaatcgattaaaggggaattaaagactggagataaggtagtcggcgctatcgacatatcgcatcgtttagcagttcagaggcatcatacaggaacgcacctgctgcactgggcgctacgtcaagtcttaggtgaccacgttaaacagcaaggatcctgggtaggggctgaaaggcttcgattcgatttcagtcatttcgagccgctcacaaatgaacagatagaacgaattgaagaccttgctaacactgaggtcttctcaggtgaagaaatggaaatcattgaaacgagcatgaatgaagccaaagaaatgggagctatcgcattcttcggagacaaatatggtgaccaagttcgcgttctcagagcaggagcgaactctcttgaattgtgtggcggaactcatgtaaatcatctaggcgatgtaggcccagtcaagatcctctcagaagggtcaatcggctcaaatatcaggcgcatcgaagccgttgcaggatctgcctcagtcagcttacttcgccagcaggagttagtgattggtgaaacagcaagcctcattggggttcctccggcaaatttgattgaagggttagagaaaaagcttcgcgaaatagaag

SEQ ID NO: 306187 - DNA, 262 bp, Unknown
  Bacterial polypeptide expressing nucleotide sequence isolated from the Sargasso Sea
atgggccaaattttacttaccgatgtcaggagaaaattcttagattattttaaaaaaaataatcataagatcgtggactctagcaacttagttccaaacaatgatcctaccttaatgtttaccaactcaggcatggtccaatttaaaaatgttttcaccggtttagaaaaaagagattataaaacagctacaacatctcaaaaatgtgtaagggcaggaggaaaacataatgatttagaaaatgttggttacactccctaga

SEQ ID NO: 306188 - DNA, 810 bp, Unknown
  Bacterial polypeptide expressing nucleotide sequence isolated from the Sargasso Sea
aataaaaatcaacgatgtagtagagatgaaaatagatgtggagagaagagataatttaaaagcttaccattccgctacacacttgcttcatgagtctttaagaagaactttaggtaaacatgttatgcaaaaaggatcattagttgctccagacagattaagatttgactttagtcatatgaaaccaattactaatgaagagttagagactattgataagctagttaatgaatatgtttcaaatagttctgaagtaacaacaagaattatgacaccaaaagctgcaatcgaaaaaggcgcactcgctttctttggagaaaaatatggagaagaagttcgtgtggtttcaatgggtaaggaaaaagaagcatatttttcaacggagctgtgcggaggaacacacgtcaaaaatactgctgatattggaaaatttaaaactgtgagccaatcgtctattgctgcgggtgtaagaagagttgaagctcttagagataaacaacttgaggattttattaagaataaagaaaaattatcaactttatccactcaaaaagatgaagagactattaaagagttatcatcccaaattattaaacttggaggcaaaccaaatgttgataataaagatttaaaagaaatcataaaaaatctctcaagacaacttgaacaactaaatgttagttcagttcttcaagataaaacaaaaaatatcattaaagatgataagataaataatataaatgttagatttcaaaaagtacatgatttaccacctaaagatttgagaaaacttgttgatactggaaaaaa

SEQ ID NO: 306189 - DNA, 259 bp, Unknown
  Bacterial polypeptide expressing nucleotide sequence isolated from the Sargasso Sea
gctttcaagttatatgatacttatggatttccattagatcttacagaagatattttaagaaataaatcattgacgattgataaagaaaaattccaatctttaatgaaagaaagtagagaacttgctaaaaaaaattggaaaggatctggtgatactgctgtagaagaagtttggtttggaattaaagacaaaatagaagcaactgaatttttaggttatgaaaccaaccaagcagaaggagtaattttatcactgtaaa

SEQ ID NO: 306190 - DNA, 931 bp, Unknown
  Bacterial polypeptide expressing nucleotide sequence isolated from the Sargasso Sea
ctggaaaaagttaataattatgaaactgatttatttgagtatatattcaaagaaattgctgaaaaaactaaaactaccctaaatgataattttttaataccttacagaattatttctgatcatttgaaatcaattatttttatgatgtctgaggggattcttccttctaatgagggaagaggttatgtgcttagaagaataataagaagagcattattgaatgttaataaactgaaccctaagtcaatcatactatataagctcgcggacgaggtgataaaaaaatatagtgaaaattacgaagagcttacaaaagcttcattatttatcaaaaataatttaaaaaatgaagaagaaaagttttctgaaacactcatgataggtttggatttacttgataaggaaattaaaagactaaacggaaaagacttcaaaccagagatagcttttaaactttacgatacatatggatttcctatcgatatgacggaatctatactgaaatctcaaaatattaatttggatattaaaaaatataagcttctagttgagcataataaaaaattacaaaaaaattcttgggtagggagtggtgaaatagaaagtaataaaatatataatgaaatttcaaaaattgctccagaaactcagttctgtggatatgaaaaaggtggttgtgatgcaaaattgttatttatcgttaataatggaaaatttgttaaaacaattgaaaatgctaaccaatgttttctaatttttgataaaaccccattttatggagaagcaggcggacaaattggtgattcaggaaaaatatttagttcatcaaaaaaatttttaggggaaatatcggatacaaaaaaggttggaaaaaatatttaccttcattttttaaaaaatattaattataagattaagattaatcaaagtt

SEQ ID NO: 306191 - DNA, 988 bp, Unknown
  Bacterial polypeptide expressing nucleotide sequence isolated from the Sargasso Sea
aaatttccaccaagggataatttttggtccatgggtgaaacagttccatgtgacccttgctctgagatattttatgaccatgtgagaaaatttaccggaaagttacccagtgaagctgacgaaactggtgacagatttgttgaaatatggaatctagtttttatgcaattcgaacaattgaattcgaacgagagaattgatctgcctaagccctcaattgatactggtatgggaattgagagaattgctgctgtcatgcaaggcacaaatgataactaccaagttgatagtataaaagaaattattaacaattcaatagatctaactaaagctgacgacaataagttaatttcaagtcacagagtgattgcagatcatctacgttcttcatgttttttaatagctgatggcgtattaccttctaatgagggaagaggctatgtactgagaagaatcatgagaagagcgatgcgacatgttcacctgcttcaatacaaagacactttaatgcataaattagtgccaaccctgacgcttaacatgaaggacgcttatccagaattgttaagggcagaagtattaatcaaagagacattaaagtatgaagaggaaaaattcaaaaatcttttagaaaaaggtattaaacaattagattctatatctcaaaatcttggacctaatgatatttttccaggagaatctgcatttaagctatatgatacttatgggtttccaattgatctaactcaggacatattaaaaagtaaaaatattactatagatattgaaagttttaataaaaaacttgatgcgcaaaaagaattagcacgaaaaaattggtcaggcgcggggggagctgcaacagatagaatttggtttgaattaaataacgaattacctgcaacagaattccttgggtataatagcacagaaactcaaggagaagttttgtcaataatcaaaaaagatcaaagagtgaaaaagttag

SEQ ID NO: 306192 - DNA, 720 bp, Unknown
  Bacterial polypeptide expressing nucleotide sequence isolated from the Sargasso Sea
tatgaacaaatatcaaaattctgagagaataaatctaccaaaaccttcaattgatactggaatgggattagagagaatgacagctcttctagatggttctaacgataattattcaacagatttatttcaaccgataataaatgaatcaacaaaactatgtggcaatgaaagttcaataacaaatcctagtcacagagtaattgcagatcacttaaaatcttcttcttttttaattgctgatggagtcatgccatcaaatgaaggtagaggatacgtcttacgaagaataatgagaaggggaatgcgacatgctcattctttaggtaataaagaaccagtatttcataagctattccctatttttttagatggaattaaaaattcatatcctgaattagatagagcgaaagatctaattataaatacattaaagaatgaagaaactaaatttaaggaaactgttgaaaaaggaataaaaattttagatgaggaaatttctaactcaacaaatatatttaatggagaagttgcatttaaattatacgatacctatggatttcccttagatttaacacaagattatttgaaaagtaaaaatattgaagtcgatataaaaacattccaacaaaaaatgttagatcaaaaggaaagagcgagacaaagctggaaaggcacaggagacatcgaggatgaaggtatttggtttgaaataacttctaa

SEQ ID NO: 306193 - DNA, 767 bp, Unknown
  Bacterial polypeptide expressing nucleotide sequence isolated from the Sargasso Sea
tatggctgataaatcgttaaatgaaataagaactacctttttagaatattttaaaaaaaatgatcataaaattgtagaatccagtaatttagttcctaataacgatcctacactgatgttcgcaaattcaggaatggttcaatttaaaaatgttttcactggattagaaaaaagagattacaaaagagcaactacatcacaaaaatgtgttagggccggtggaaaacataatgatttagaaaatgttggctatactcccagacatcataccttttttgaaatgcttggaaatttttcttttggagattattttaaagaaagagcaattgaactagcctggaatttaattacaaaagactttggattagacaaaaataggctttatttcactgtttttcatgaggatgaagaggctcttaatttatggaaaaaaataacaggatttagtgaagataaaataattaaaattccaacatcagataatttttggtcaatgggagaaacaggaccttgcggcccatgttcagaaatattttatgaccatggtgaacatttaaaaggaggtttgccaggaacaaaggatcaagatggggatagatatattgaaatttggaatttagtatttatgcaattcgaacaagtttctaaagataaaagaatagatcttcctaaaccatcagtagacactgggatgggtctagagagaattgcagccctattacaaggtactcatgataattataaaactgatcattttaaaaaattga

SEQ ID NO: 306194 - DNA, 524 bp, Unknown
  Bacterial polypeptide expressing nucleotide sequence isolated from the Sargasso Sea
attataccctcagcatctgtaattaaccaatcagacaaaaacttaatgtttacaaatgctgtaatgaaccagtttagaaatatttttttaggcaatcaagaatccaaattatttagagtggctaattcccaaaaatgtcttcgagtttctggaaagcataatgatcttgaagaggttggtgttgatacatatcaccatactttttttgagatgttaggaaattggagttttggtgattattttaagaaggaaataattgaatggtcatttgatttaattgtaaatatttatggaattaataaagaagatgtttatgtctctgtttttgagggatctaaagaagacaacctagaatttgatcaagttgctttcgatgaatggaaaaaattttttagtgaagatcgaattataagtggtaataaaaaagataacttttgggagatgggagatataggaccatgtggcccatgttctgagatccacattgatttaagatcagaatcagataagaaaaaaattaaagg

SEQ ID NO: 306195 - DNA, 865 bp, Unknown
  Bacterial polypeptide expressing nucleotide sequence isolated from the Sargasso Sea
acggctgcaggaatggttcctttaaaagattattttttaggtaataaaacaacagatactccaaatatggtctcttcacaaaaatgtataagaaccattgatatagacatcataggagcgactgatagacatttatctttttttgaaatgttagggaactttagtgtaggtgaatattttaaggaagatgcaattaaatattcttatgaatacataacagaagttcttaaagtagataaagacaaattgtggttcactgtttataaagatgacgatgaagcatatgatatctggaaaaatgtcattggtgtaccagaaaaacgtatccaaagaggaaatgaggataatttctggcatatgaatatacctggaccttgtggtccatgttcagaaatattcattgatagaggttcaaaatatggtgaagatggcggccctattggtggtggtgaagatagattcattgaaatatggaatttggtatttatggaatctattcaagaccaaccatttcaagttatagatgaactacccaaaaagaatatagatacaggtatggggcttgaaagaatagcaatgataatgcaagacaaagataatttattcgatactgatctattcaaaccactgcatgatgcactattaacaaaaataactgtaaacgataataaatatgaaaaaataattattgatcatattaaatcctcaacgttcatgatctctgatggtgtagtaccaactaacgaaggaagaggttatgtactaagaagattaataagacgagctattagagcttacaatcaattagatgcatcagattcaagccttactttcttaatagaaatagtaattgatatgtattcgt

SEQ ID NO: 306196 - DNA, 891 bp, Unknown
  Bacterial polypeptide expressing nucleotide sequence isolated from the Sargasso Sea
aggagatggtgatcgatttatagaaatttggaacttagttttcatgcagtatgaacaagtttcgaaagataaaagaatagatcttcctaaaccgtcagttgatactggaatgggtttggaaagaatatcagctttacttcaaggaactcatgacaattatgagactgatcattttaagaaattaattcaatcaacttctaatatcgtaaagaaaaaacctgatcaatcaaatctatcaagttttagggttatagcagatcatttgagagcaagttcatttttaattgccgaaggagttttgccatctaatgaaggtagaggttatgtgcttagaagaattatgagaagagggatgagacactctcacttattaggatcaaaagagccagtattttataatttatttgaaactcttaaaaatgaaatgtcaggcagttatcctgagcttaaaagagcagagtctttaatcaaagaaactttaaaaatggaggaagaaaagtttttagttttattagaacgaggaataaaaatattaaatgaagaaatatctaaaatagataaagttctacctggagatattgctttcaaattgtacgacacttatggttttccactagatcttactgaagatattttaagaaataaatctttatctatagacactaaaaaatttcaatcattgatgaaagaaagtagagagcttgcaaaaaaaaattggaaggggtctggagatgctgcagttgaagatatttggtttggtataaaagataaattaggatctacagaatttttaggttacgaaactgatcaagctgaaggtgtcgttttgtctttattaaaggagaacaaagaagttaaagaattaagatctaatgaggaaggaatgattat

SEQ ID NO: 306197 - DNA, 697 bp, Unknown
  Bacterial polypeptide expressing nucleotide sequence isolated from the Sargasso Sea
tatgcaaatcaatgatataagatcaagcttcttggactattttaagtcgaatgaacatacagttgttcattcaagccctcttgtgccgaacaacgacccaacattgatgtttacgaactctggaatggttcaatttaaaaatgtattcactggtcttgagaatagggaataccaaagagctacaacctcacaaaaatgtttaagggcaggtggaaagcataatgatcttgaaaacgttggctacactttaaggcatcatacattttttgaaatgttgggcaatttttcttttggagactactttaaagacgaagcaattgaatatgcatggaattatataactggcgaactaggtatcaataaagataaattatacgtaacaatttatcatgatgatgagcaggcatattctgcctggaaaaaaatcactagttttagtgatgataaaattatcagaatatctacaaatgataatttctggtcaatgggtgatactgggccatgtggcccatgttctgaaatattttatgatcatggagaaaactatcatggtaatccaccaagtgaagctgatgaaactcatgatcgatttgttgaaatatggaaccttgttttcatgcaatatgaacaagtggatgaaaataatagattaagtttaccaaagccatcaatcgacacaggaatgggaattgaacga

SEQ ID NO: 306198 - DNA, 160 bp, Unknown
  Bacterial polypeptide expressing nucleotide sequence isolated from the Sargasso Sea
catgaaaactaatgaaatcagacaatcttttttagatttcttcgaatctaaaaatcatcagattgtttcatcaagcgcattagtcccaaacaatgatgaaactttgttgtttacgaatgctggtatggttcagttcaaagatgtttttctttggaactga

SEQ ID NO: 306199 - DNA, 757 bp, Unknown
  Bacterial polypeptide expressing nucleotide sequence isolated from the Sargasso Sea
aaaagaaccagttttttacaatctatttgaaactttaaaaaatgaaatgtctggaaattatccagagttaaaaagagcagagtcattaattaaagaaactttaaaaatggaagaggaaaagttcttagttttattagatcgtggaataaaaatactaaatgatgaagtttcaaaaatagataaagttttaccaggtgaggtggcatttaaattgtatgacacttatggttttccattagatttaactgaagatattttaaaaaataaatcattattaattgatacaccaaagtttcatgaactaatgaaacaaagcagagaactagcaaaaaaaaactggaaaggttcgggagatacggcggttgaaaatatttggtttggtattagagataaatttggtgcaacagaatttttaggctatgaatcaaatcaagcagaaggattagttttaactattttaaaagataataaagaagtcaaagaattaaaaaaaggtgatgaaggcatgattataactaatcagacacctttttatggagagtcaggaggtcaagttggggatactggagaaataatttctaatgattttaaatttgaagtttcagacgttcaaaaaaaattgggagatctatttgtccattatggaaaagtaattgatggttcaataaaattaaatgacaatgttgagatgaaaataaatatagaaagaagagatgatacaagagcttatcattcagcaacacattgcttcatgagt

SEQ ID NO: 306200 - DNA, 406 bp, Unknown
  Bacterial polypeptide expressing nucleotide sequence isolated from the Sargasso Sea
tatggctaaaacattaaatgaaatcaggtcagcatttttagattattttgaaaaaaatgatcataaaatagttgagtctagcaatttagtcccgaataatgacccaacattgatgtttgccaattcaggaatggtccaatttaaaaatgtatttactggactggaaaagagagactatcaaagagctacaacatctcaaaaatgtgtaagagcaggtggtaagcataacgatcttgaaaatgttggctatactccaagacaccatacgttttttgaaatgttgggaaacttttcttttggtgattattttaaagaaagagctattgaacttgcgtggaatttaataacaaaagaatttggtttagataagaataggctttatgtaacagtctaccacgacgatgat

SEQ ID NO: 306201 - DNA, 865 bp, Unknown
  Bacterial polypeptide expressing nucleotide sequence isolated from the Sargasso Sea
tctgcaacacatatacttcatgaggcgctcagacaagttttaggcgagcacatatcacaaaaaggatctcttgtagatggcaatagattaagatttgattttagccatcaaaagctaatcacaaaggaagaaatattggatatcgaaaaattagcaaataatatagtgatgcaaaataatcctgtagaaacagaaattatgacaatagaagatgcaataaatagtggtgcaagagctctctttggcgagaagtacggtaaggaggttagggtggtttcaatgggtgaaaatgataatcaaaaattttctattgagttatgcggggggatacatgcaaaaagtacaggtgatattggactaataaaaattatgtccgaacaaggtattgcctctggtgtgcgaagaattgaggctattacgggcgaaaatgcagttaattttcttaccagtcagaatacacgaatgcagagaactcaggagcttctcaatgtacagggagatgacgtcatcgaaaaattggaagctattttaaaagaaaaaagacatgtagaaagagagcttgagaatataagaaaaaaagataaatttcaaaaaattggtaacaaacttgatgaaattagtgttggtgaaattacgctaatatatcaaaaccttgttgatgtatccacgaaagagttaaggcagttaatggatgaaacaaaggcaaaagttaaatcagcaataattgttctaatcggtaatcaggaaggtaaaataatgataattgtcggtattacagaggatgttttggctaaatatagtgctaatgatatcattaaaattatagctaaattctctgatataaaaggcggtggttcggaatgat

SEQ ID NO: 306202 - DNA, 535 bp, Unknown
  Bacterial polypeptide expressing nucleotide sequence isolated from the Sargasso Sea
tatggctcaaaaatcactaaatcaaataagagaaactttcttaaaatactttgagaaaaacgaccataagattgttgagtctagtaatttagttccaaacaatgatccaacactgatgtttgcaaattctggaatggttcagtttaaaaatgtatttacaggtttggaaaaaagaaattatcaaagagctacgacttcacaaaaatgtgtaagagcaggtggaaagcataatgacttagaaaatgttggttatacaccaagacatcatacattttttgagatgttaggaaatttttcttttggtgattactttaaagaaaaagcaattcattatgcatgggatttaattactaaagattttggattagataaaaataaaatttatgtaacagtatttcatgaagatgatgaagcatttgatttttggaagaaaatagcgggttttaatgatgatcgaattataagaatttctacatcagataatttttggtcaatgggagaaacaggtccatgtggtccatgttcagaaattttt

SEQ ID NO: 306203 - DNA, 885 bp, Unknown
  Bacterial polypeptide expressing nucleotide sequence isolated from the Sargasso Sea
gcagaggttatgttctaagaagaattatgagaagaggcatgagacattcacacttattagggtcgaaagagccagttttttacaatctatttgaaactttaaaaaatgaaatgtctggaaattatccagagttaaaaagagcagagtcattaattaaagaaactttaaaaatggaagaggaaaagttcttagttttattagatcgtggaataaaaatactcaatgatgaagtttcaaaaatagataaagttttaccaggtgaggtggcatttaaattgtatgatacttatggttttccattagatttaactgaagatattctaaaaaataaatcattatcaattgatataccaaagtttcacgaactaatgaaacaaagcaaagaactagcaaaaaaaaactggaaaggttcgggagatacggcggttgaagatgtttggtttggtattagagataaattaggtgcaacagaatttttaggctatgaaacaaatcaagcagaaggattagttttaactatgttaaaagataataaagaagttaaagaattaaaaaaaggtgatgagggcatgattataactaatcaaacacctttttatggtgagtctggaggtcaagttggggatactggagaaataatttctaatgattttaaatttgaagtttcagacgttcaaaaaaaattgggagatctatttgttcattatggaaaagtaattgatggttcaataaaattaaatgacaatgttgaaatgaaaataaatatagaaagaagagatgatactagagcttatcattcagcaacacatttgcttcatgagtctcttagaagagttttaggaacgcacgtaacacaaaaaggatctttagttgaacccaagtaga

SEQ ID NO: 306204 - DNA, 937 bp, Unknown
  Bacterial polypeptide expressing nucleotide sequence isolated from the Sargasso Sea
ttcgataaagatagccaaaagtcttaatctagaaatagatgtagaaaaaagaaataattctaaagccaatcattctgcaactcatttactgcacgagtctttacgaaggactttgggcaaacacgtaactcaaaaagggtcgttagtttctcccgaaagactcaggttcgattttagtcataatagacctattgaaaaagaagagatgaataaaataaataaagttgtaaatgaaatagtagaaagttctactgacgttcaaacaagaataatgacacctaaagaagctataaaaatgggggctttagctctctttggagaaaaatatggtgaagaagtcagagtagtatttatgggaaaagaggctaatggttttttttcaacagagctatgtggaggaacacatgttaaaaacacaaaagaagttggaaaatttagagttgttagtcagtcatcaatcgcatctggggtaagaagagtagaggcccttagagacaaacaacttactgagtatgaaaaatctcaagaacaagacaaaactttaaaagaaaaaacaaccaaagaacagatggaaaaaattaaaaaagaactcttaaattttaaagttgagcctgatttaaataaaaataaagatttagctgagaatttgaaaaatctaaataaacaacttgaaaaattaaaaattcaaaacgttattaaagataaaaacaaaaataaaattaaagacaaaaagattggtaattttacaatcagagaacaagttttgagggattttccaccaaaagaattgagaagtgtaattgatcaaggaaaaaaagatattaaaaaaggtataataataagcatttctacttttgacgagaaagttggagttgctgttggcgttacaaatgatcttatttcaaaatatgatgcagtgaagtttgtgaaaatgcct

SEQ ID NO: 306205 - DNA, 979 bp, Unknown
  Bacterial polypeptide expressing nucleotide sequence isolated from the Sargasso Sea
taaggaagaatctattaattggagttatgagttacttacaaaaacttatggattaaattcagatgatttatatgtttctgtttttgagggagataaaaaagataaaacctctaaagataacgaagcttatgaaatatggtctaaaatagttcctagtgaaaaaattattcttggtggtaaaaaagacaatttttgggagatgggtgatactggtccatgtggtccatgctcagaaatacatattgacttaaggtctgattctgaaaaatctaaaacaccaggaaaggatttggttaatacggatcatcccaatgtgatagagctatggaatttagtatttatacagttcaaccgaatgtctaatggtgatttagttgaacttcctcaaaaacatatagacacgggaatggggttcgagagacttgttcgcgtgattcagaaaaaagaatcaaactacgatactgatattttttcacccttaattaaatctattgaatcactttccaataaaaaatatggttcaaatctaaaagttgatatagccatgagggtggtttcagatcatgtaagggctgtttctttttgtatttgtgatggacaaattccaggaaatacaggtgcaggttatataattagaagaatattgagaagagctgttcgctacggatatacgtttttgaaaataaaagaaccttttatatataatttagttgatacagtatcatacttgtttttagattttttccctgaacttgaaaaaaacaagaacctaataaaaacaattattaaagaagaagaaagcgtatttttaaagacattgtctctcggaatttcaagattggactcaattacaaaaaagttaaattcaaatacggtttcaggaaagttagtgtttgaattatacgatacttatggtttccccgtcgatttgacatccctcatattaaaggaaaaaaacataacatataaccagcaagaa

SEQ ID NO: 306206 - DNA, 855 bp, Unknown
  Bacterial polypeptide expressing nucleotide sequence isolated from the Sargasso Sea
attttgagactatttaaagagcaagcaatagatcatgcttggaaattgctcactaaagattttcaattacctaaagaaaaactctccgttacagtttttcatgaagatcaagagtcttttaatttgtggaaaaaaattgctggattaagtgaggataagataattaaaatttcaacatctgataatttttggtctatgggagatactggaccttgtggaccatgttcggaaatattttatgatcatggagaaaaacttaaaggaggcccaccaggaagtgtagatcaagatggggacagatatatagaaatatggaatcttgtttttatgcaatacgagcaaatctcaaaaaataaaagaattaatctacccaaaccatcggttgacacaggaatgggtcttgaaagaatgacagctgttctacaaggaacacacgataattataacattgatcattttaaaaaaattatatctgcatcatcagattttattaaatcaccaattaacgtaaaaactattgcaagccatagagttatatcagaccacctaagagctagcagttttttaatagctgaaggaattttaccttcgaacgaggggcgtggttatgttttgagaagaataatgagaagaggaatgagacatgcgcacgctttaggaagcaagactcctgtttattataaactttttgatgttttactcgatgaaatgaaaaatagctatccagaattagaaacaggtaaagatcatattgtagagactttaaaaaatgaggaagaaaaattctcttctcttcttgaaagaggaatgaaaattttaaaagaaaatttaaataaagtacaaaataatacgtta

SEQ ID NO: 306207 - DNA, 380 bp, Unknown
  Bacterial polypeptide expressing nucleotide sequence isolated from the Sargasso Sea
tatgagccaatttttattgactgatataaggaaaaaatttcttaactattttaagcaaaacaatcatgaaatagtagactcaagtaatttggttcctaataatgatccaaccttgatgtttactaattccggaatggttcaatttaaaaatgtttttaccggtttagaaaaaagaccatataaaagggccacaacatctcaaaagtgtgtaagagcaggaggaaaacataacgatttagaaaatgtaggttataccccaagacaccatacattttttgaaatgttaggcaatttttcttttggagactattttaaagagcaagccatagatcatgcttggaaattattaactaaagattttgaactaccaaaaggaaaaa

SEQ ID NO: 306208 - DNA, 766 bp, Unknown
  Bacterial polypeptide expressing nucleotide sequence isolated from the Sargasso Sea
atgcaatttgaacaaatttcaaaagaaaaaagaattaatttaccaaaaccttcagttgatactggtatgggattagagagaatagcagcattactgcaaggcactcatgataattataaaactgatcacttcaaaaaattaatagattcaatctctgagactcttaaagtaaaagcagaagaagataatatcgcaagttttagagttatagctgatcacctcagagccagctcttttttaattgctgagggagttctaccttctaatgaaggtagaggttatgttttaagaagaattatgagaagaggaatgagacattctcatttattgggatccaaacaaccaattttttttaatatatttaaaactttgatggatgaaatgaaaggaaactatcctgaaattgaaagagcacaatctttgatcaaagaaactctaagaatggaagaagaaaagtttttagttcttttagatagaggaataaaaattttaaatgaggaaatatctaaaatagagaaagttcttccaggcgaggtggcttttaaactttatgacacatatggctttccactagatttaacagaagatattttaaaaagtaaatcacttacaattgataatggtaaatttaattctttgatgaaacaaagcagagaactggctaaaaaaaattggaagggttctggagacagcgcaattgacgatatatggtttggcataaaagataaattaagtaccacagaatttctcggctacgaaacaaacc

SEQ ID NO: 306209 - DNA, 966 bp, Unknown
  Bacterial polypeptide expressing nucleotide sequence isolated from the Sargasso Sea
agtagcagcttgggttccagaaaatgatcccagtctcctgtttactaatgcggcaatggttcaatttaaagatgtgtttctaggcaaagataaacgcgcctattcaagagctgtttcttcgcaaagatgtgttcgggctggcgggaagcataatgaccttgaaaatgttggttatacagcccgccaccatacattttttgaaatgttaggtaacttcagtttcggtgactactttaaagaggatgcaattcgtttcgcctgggaatttcttacagaaattttaaaattgcctgaggacagactatggatcaccgttcatattactgatcaagaggctgaggacatttggttaaatgaaattggtatagaccctgaccggattactcgacttgatgaggataatttttggcaaatgggtgatacaggtccttgtggcccatgtacggaaatattttgggatcacggggaacatgtccgcggcgggcctcctggcagtccggacgatgaccttgatagatacgtcgagatctggaatttagtctttatgcagtttgaacgaggttccgatggacagatggttgcgctccctaaaccctcaattgataccggaatgggtttagagcgaatctcagcggtgatgcaaggtgtgcacagtaattatgatattgatctttttaaatatctgatcaattcagcagccaaaattgtcagatgtgctgacattggcgatgactctttaaaggtaatcgctgatcacattcgttcatgtgcatttcttgctatggatggagtgattccttctaatgagggacgaggctatgttcttagacggattattcgacgagcccttcggcatggccataaattaggagcagattcgttatttttttaccagctcatccccgcacttgttgaggtaatgggagacgcatatccggaattaaaaaatcagcaaaaccgattatc

SEQ ID NO: 306210 - DNA, 616 bp, Unknown
  Bacterial polypeptide expressing nucleotide sequence isolated from the Sargasso Sea
atgagtgaaattagaagaaagtttcttgaatatttttcaagaaacgatcataagatagttgattccagcaatattgttcctaataacgatccaactttaatgtttacaaattcaggaatggttcaatttaaaaatgttttcacaggattagaaaaaaaacctttcaaaacagcaaccacatcacaaaaatgcattagagctggtggaaaacacaacgatcttgagaatgttggttatacaccgagacatcatacattttttgaaatgttaggtaatttttcatttggagattattttaaggaaaaagcaatttattatgcgtgggaactgttaacaaaagattttggtcttccaaaagaaaaattatcggcaactatttattctgaagacgaagaggcttttaaattatggaagaaaatagctggtttgtcagagaatagaattattaaaatttcaactgcagataatttttggtctatgggagaaacaggtccatgtggtccttgttcagaaatattttatgatcacggagaaaaattgaaaggtggtctaccaggaggttcaaatgaagacggcgacaaatttattgaaatttggaatttggtattcatgcaat

SEQ ID NO: 306211 - DNA, 279 bp, Unknown
  Bacterial polypeptide expressing nucleotide sequence isolated from the Sargasso Sea
tatggctgaaaaaaccttaaatcagataagagaaacattcttaaaatattttgagaagaatgatcacaagattgttgagtctagcaatttagtaccaaataatgatccaactttgatgtttgctaattctggaatggttcagttcaagaatgtatttaccggtttggaaaaaagagattatcaaagagcaaccacctctcaaaaatgtgttagagctggaggaaaacataatgaccttgagaacgttggttatactccaagacaccatactttctttga

SEQ ID NO: 306212 - DNA, 839 bp, Unknown
  Bacterial polypeptide expressing nucleotide sequence isolated from the Sargasso Sea
tatgagaagagctattagacaaatttatactttaaacattaaagaacctagtttttataaactagttccaacacttttagatcaaatgggaaaccactacaaggagttaaacagctatcaggaattaataatcaaatcaattctaaatgaagaagaaaaatttttagaaacacttgaaaaaggtttaagaattttagaagaagaaaatactagaagtaataataaattattttcaggaaaagttgcctttaaactttatgatacttacggatttcccttagatttaacagaagatatgttaaagactaaaactaaaaaggttaacctagaagagtttaacgaggaaatgaaaaaacaaaaagagttatctaaaaaatcttggaaaggagatgttcaaaataaaaatgaaactatttggaaaaaaatttcttctgaagtcccacctacaaattttttaggttatgaaaaaacctcatctctagggagggtccttaaaattgtttttaatggaagtaaagtcgaagaagcaaatcaaactaataaaaatatctcattagtttttgatcagacgcctttttatgcagaagcaggaggacaagttggagatactggaataataaaaggagaaaatttctatttcgaagtgcacgatacccaaatgatgcaaaataaaatatatgaacatagtggagttcttctcaaaggaagagttagaattggagacaaagctagtttagaaattaatttagaaaaaagaaaaaaaatagcggctaatcattcagcaactcatcttctacatagtgcattaagaaagaagttgggaaaacatatcacgcaaa

SEQ ID NO: 306213 - DNA, 608 bp, Unknown
  Bacterial polypeptide expressing nucleotide sequence isolated from the Sargasso Sea
gatgaaaacttcagagctcagggaagcttatttatcttttttcgaaaataaaggccatcgaagaattccggccagctcgcttattcctagaaatgaccccactctactctttacgaattcgggtatggtccagttcaaggacccgttattgggtaaagaggacccaggatataagcgtgctacgtctgcccagtcatgtgtcagagctggcggtaaacataatgatttagagaatgtgggttataccgcgcggcaccatactttttttgagatgatgggtaattttagtttcggtgattactttaaggaggaaaccatatcctgggcgtgggagttcattcaaaaagagatgggacttcctgaggaaaagttatggattacagttcatccggatgatgatgaatcaaggaagatatggcggaataagattggaatcaaagccgagcgaattatagatataaaagagaatttttggacaatgggcgacacaggcccgtgtgggccaaacacagagatcttttttgaccatggagaagaaatatttggaggaccaccgggaagtccagacgaagatggagaccgttttgttgaattttggaatttggttt

SEQ ID NO: 306214 - DNA, 556 bp, Unknown
  Bacterial polypeptide expressing nucleotide sequence isolated from the Sargasso Sea
tatggcagacaaatcattaaatgaaataagaagtacgtttcttaaatactttgagaaaaatgatcataagattgttgagtctagtaatttagttccaaataatgatccaaccttaatgtttgcaaattcaggaatggttcaatttaaaaatgtttttactggtttagaaaaaagagattatcaaagagcaacaacctcacaaaaatgtgttagagcaggtggcaaacataatgatttagaaaatgttggttatacaccaagacaccatactttttttgaaatgttaggaaacttttcttttggagattattttaaagaaagaggaatagaactcgcatggaatttaattactaaagattttgggttagataaaaataggctttacgtaacagtttttcatgaggatgatgaagcatttaatttttggaagaaaattgcgggttttagcgatgataggataattagaattgcaacatcagataacttttgggtcatgggtgagactggtccttgcggtccttgctcagaaatatttatgatcatggagatcatttaa

SEQ ID NO: 306215 - DNA, 357 bp, Unknown
  Bacterial polypeptide expressing nucleotide sequence isolated from the Sargasso Sea
aatgaattccaacaaaattagatcaacatttttggagtattttagtaaaaatggacatgaaatagttcattctagtccgttagttccacataatgatccaagtttaatgtttgcaaattctggaatggttcaatttaagaacatatttacaggaaaagagaaaagagactataaaagagctgttacatcacaaaaatgtgtaagagcaggtggcaagcataatgatttagaaaatgtaggttatactgctaggcaccatacattttttgaaatgttaggcaatttttcttttggtgattatttcaaagatgaagcaatacaatttgcatggaatttaataactaaagaatttggtat

SEQ ID NO: 306216 - DNA, 840 bp, Unknown
  Bacterial polypeptide expressing nucleotide sequence isolated from the Sargasso Sea
gatgagtaaaaaaacattaaaaaatgtaagaaaatcatttttggattattttgaaaaaaatgatcaccaattagttgattccagcagtctggttccaagtaatgacccaactttaatgtttactaattctggtatggttcaattcaaaaacgtttttacaggacttgaaaaaagagaatataaaaaagctgtaacttcacagaaatgtgtgagggcagggggaaaacacaacgacctagaaaatgttggttatacacctagacatcatacattttttgagatgttgggaaatttttcttttggagattattttaaagatgtagcgattgaacttgcatggaatttaattaccaaagaatttggaatatcaaaagataaacttagcgtgagcgtttatgcagatgataaagaagcttttaaactttggaagaaaattgcaggattaccagaaaatagaatttacaagatagcaacaaacgataatttttggtcaatgggagatctaggcccatgtggaccctgttcagaaatattttttgaccatggagatcatttagaaggtggtcctccaggaagcaaaaatcaagatggagacagatttatagagatatggaatctagtttttatgcagtttgagcaactttcaaaagataaaagaatagatcttccaaagccatcagtagatacaggcatgggcttagaaagaatctcagcattacttcaaggcactcatgataattatgagattgatcactttaaaactttaatcaaggtttcatctgaattaacaaaaagcaaagttagaaaagaaaatgtagcgagtcatagagttatagcaga

SEQ ID NO: 306217 - DNA, 688 bp, Unknown
  Bacterial polypeptide expressing nucleotide sequence isolated from the Sargasso Sea
ggccttgtttggagaaaaatatggcgatacagtgcgcatgatacaatttggagattccaaagaattgtgcggaggaattcatttgcctgccactggtaatattgggctgtttaaaattaccacggagagcgctgttgctgcaggggtaagacgcattgaagccttgggaggcgcaaaagcttatgcagcaatcaaggccgaggaaacccaattgaatgcgataaaagatagtctgaagaatccaaaggacctattgcaagcagtagacagcttaatggaggaaaacaaaagcttgaaaaaagagatggaaggtctgaagaacaaggctgccggacaattgaaagaggaattaatcaagaaagtagtacaaaaagacggcgtgaatgtcatcattgaggaggtggaattggatgcagcacaaattaagaatttggcctttcaattgaaggctagtatggaaaatctatttttagtattgggctccaaaaccaaccaccgtccttcattgacagtattgctttctgaaagtgttgtcgaacaaaaagacttgaacgcttccaccattgttcgagaattggcacaccatatccaaggtgggggggggggacaagccttttttgctacggcaggcggtaaaaagcccgaaggaattggtgcggctttagatcatgcaaaaagtttgatttaa

SEQ ID NO: 306218 - DNA, 991 bp, Unknown
  Bacterial polypeptide expressing nucleotide sequence isolated from the Sargasso Sea
tgttaaagcatatcattcagcaacccatttattgcatgagtctttaaggagaatactaggaacacacgtgatgcaaaaaggatcattagttgctccagatagattacgttttgactttagtcatatgaagccaatttctaatgatgaaatggtaaaaatagatgagtatgtaaaccaaatcgtgaataaaaaatcagaggtgattacaagaattatgacacctaaggaaggtattgctcatggtgcattagcattatttggagaaaagtatggagatgaagttagagttgtttttatgggtgaagaaggaaataaatatttttctactgaattatgcggtggaacacatgtaaaaaataccagtaatattggtaattttaaagtggttagtcaatcagctatagcagcgggtgttagaagagttgaagctcttagagacaaacaattagatgaatttttaaaaaacaaagaaaaacaatctagtctttctgaacaaaaggatgaagaaacaataaaaattttatctgaagagattaaaaaacttggtggaaaactaaacataaataaagaaaataaaaaagatttaattaaagaattaaataaagaattagaaaagttatccatcaacgaaataataaataatagatcaaaaaatattattaaagatgaaaaaatcaatggtgttaatataagaatgcaaaaaattgatggtcttcctccaaaagaattaagaagattaattgatagtggaaaaaaagaaataggcgagggaatagtaattatttttgcaagtaaagacgacaaagtaggtttagcagtaggtgtaacagataagcttaaaagtaaatacgatgctgttaaatttgttaaaaatggatcagaaattattggtggaaaaggtggtggtgggagacctgatttcgctcaagccggaggagtaaacaaagataaaattgaggatgcttttaaaagcttaaaggctttagtttaa

SEQ ID NO: 306219 - DNA, 385 bp, Unknown
  Bacterial polypeptide expressing nucleotide sequence isolated from the Sargasso Sea
atggctgacaaaaccttaaatgaaataagaaatactttcttaaagtactttgaaaagaatgagcataaaattgtcgagtctagtaatttagtacctaataacgacccaaccttaatgtttgctaattctggtatggttcaatttaaaaatgtattcacaggtttagaaaaaagagattatgtaagagctactacttctcaaaaatgtgtcagggctggaggaaaacataacgaccttgaaaatgttggttatacacctcgtcaccacactttctttgagatgctaggaaacttttcttttggagattattttaaagaacaagcaattcattacgcttgggatttaattactaaagattttggcattgataaagatcggctttagt

SEQ ID NO: 306220 - DNA, 724 bp, Unknown
  Bacterial polypeptide expressing nucleotide sequence isolated from the Sargasso Sea
gttgaaaaaggaataaaaattttagatgaggaaatttctaactcaacaaatatatttaatggagaagtagcatttaaattatacgatacctatggatttcccttagatttaacacaagattatttgaaaagtaaaaatattgaagtcaatataaaaacatttgaacaaaaaatgttagatcaaaaggaaagagcgagaaaaagctggaaaggtacaggagacatcgaggatgaaagcatttggtttgaaataacttctaaaatagagccaacagaatttttaggatattctgatatggcagctgattgtaaaataatttcaatcatatcagacagtaagtcagtaaatacaattaaaaaagatcaagaagcaattataatattaaatcaaacacctttttatggagaaagtggtggtcaggtgggcgatcagggtttttttgaaaatgataatttaaagtttgaagttatcaatacaacaaaaatatttggaaaatattttctccacaaaggtaaagtaattagtggtgtatgcaaagttgaagataccattaaagcaagcattaatacagtgaatagagattttattaaatataatcattcttcaactcatttattacatgctgctctaagaaaaatattgggcaagcatgtcacgcagaagggttcgcttgtaaattcagaaaaacttagatttgattttagtcacaataatccaattgaaa

SEQ ID NO: 306221 - DNA, 802 bp, Unknown
  Bacterial polypeptide expressing nucleotide sequence isolated from the Sargasso Sea
aaaattagtacatctgataatttttggtcgatgggtgaaactggtccttgcggtccatgttctgaaatattttatgatcatggtgataaatatgaaggaggccctccaggttctccaaacgaagatggtgatagatttatagaaatatggaatttagtatttatgcaatatgagcaaatatctaaatctgagagaataaacctaccaaaaccctccatagatactggaatgggattagagagaatgacagctcttctagatggttctaacgataattattctacagatttatttcaaccaattataaatgaatcaacaaaactatgtggcgatgaaagttcaataacaaatcctagtcacagagtaattgctgatcacttaaaatcttcctcttttttaattgccgatggagtaatgccttcaaatgaaggtagaggatacgtcttacgaagaataatgagaagaggaatgcgacacgctcattctctaggtaatgaagaacctgtatttcataagctatttcctatttttttagatggaattaaaaattcatatcctgaattagatagagcaaaagatctcattactaatacattaatgaatgaagaaactaaatttaaggaaactgttgaaaaaggaattaaaattttagatgaggaaatttctaactcaacaaatatatttaatggagaagtagcatttaaattatacgacacctatggatttcccttagatttaacacaagattatttgaaaagtaaaaatattgaagtcgatataaaaacatttgaacaaaaaatgt

SEQ ID NO: 306222 - DNA, 811 bp, Unknown
  Bacterial polypeptide expressing nucleotide sequence isolated from the Sargasso Sea
tcagatggtattttgccatcaaacgagggtcgtggttatgtgctgagaagaataatgcgacgggctattaggcatggatataaaattggagctaagaaacccttcttgcataaattggtaaaagctttagttaaggagatgggtactgcttttcctatgttagtagacaatcaaaaatccatagagaagattgttcatgaagaagaaaagaaatttcttgaaactttagaaaaaggcattgagatcttagaaaaagagattaagtctattgattcaaatgttattcctggagaaattatctttaaattacatgatacgtatggttttccattcgatttgacagcagacatcgctcgagagcaagatttagatttagatgaggagggctttaataattgcatggatgaacaaataaaaaattcaaaattagcaagtaaatttaaaggattgcaattagatttgtcctctattaaggaaacaaagtttttaggttatgaagacttatgcgggaagggaaaggttttaggaatatggaatgaatccaatgcaatagataacgcatcagatcaaaatgagtgcttcattgcagttgataaaacacctttttatgcagaatcaggtgggcaagttggagatcagggaagctttactttttctggaggtcatggaaccgttcaagattgtataaagcaaggtaagatttttctccacagaattaaagttcaagaaggagtcgtcaaaaaaaatgacaaattagaattatccgttgatgcaagtaaaagaaaggctgcttcggtccatcattccgcca

SEQ ID NO: 306223 - DNA, 747 bp, Unknown
  Bacterial polypeptide expressing nucleotide sequence isolated from the Sargasso Sea
aagaagctcaaaatatgggtgcgcttgcattatttggtgaaaaatatggagaaaaagttagagtagtttcaatgggtaaggatttaaaaaatgatatttattcaacggaattatgcggaggaactcatgtaaatagatctggagatataggagcgtttaaaatcatttcagaatctgctttaggttccggtgtcagaagaatagaagctgtagctggaaatgcagctattaaatatttccaatctgaaagtaaaattttagagaagttaagttcagatttaaaggtaaataatgataaaataatagatagagttaattccttattagacgataaaagaaaattagaaaaaaagattattgaattaaataaaacattaaacacttctaatttgtctaataataagactgattatgaaaatgtaggtgatgtaaaggttatatctaagattatgaatgacataccgtcaaaagaactaaaaggattagttgacgcattcaaaaaagagctgaaagaagggattgtagttttaataagtattacaaataataaggcttctttagttataggagtaacacaaggtttggtaaatgcttatgatgcagtagatttgactaaaattggagtagaagttttaggaggaaaaggtggaggaggtagatctgatttagctcaaggtggtgggcctaattataaagaatctgaggcttctatttccgcaattttaaataaaataaaaaatggttaat

SEQ ID NO: 306224 - DNA, 877 bp, Unknown
  Bacterial polypeptide expressing nucleotide sequence isolated from the Sargasso Sea
gggtttcctctagatttaacacaagattatttaagatcaaaaaatattagtgtagatgttgaatcatttgatgccgcaatgaaacttcaaaaagaggaagctagatcctcatggaagggtagtggagatggagatacccaaaaactatggtttgatttagctaaaaaaataaaaccaacaacttttgatggttataaagagacaactataatagcaaatatatcagcattagttttaaactctgagcaagttcaaaatttaagtgataataatgaacaatctgcaattataactaataaatcatgtttttatgcagagtctggtgggcaagttggagacaaaggcactattacttcagacactgctgaatttaaagtatcagatacaagaaaaacccctcaaggtatatttatacattttggtaatgtgacttcaggaaattttaaaataggtcaagaagtcaaacttaaaattgatactagtttaagagatcttataaaaaaaaatcactcagctacacatttacttcacgcagcgttaagaaataatttagggacacatgtagcacagcgtggatctttggttaatgaggataaactacgttttgactttagtcataataaacaaatatctactgaacaaatagaaattattcaaagagaagtaacaagcataatttctaattcctgtgaaacacaaattgatattaaatctcaagatgaagccattaaacaaggcgctatggctttatttggtgaaaaatatggcgatgaagtcagagttgttactcttggagaaaataataataaaccctattcaattgaattatgtgggggaacacatgtaacaaatgttcaaaatatcaaaaaatttcata

SEQ ID NO: 306225 - DNA, 898 bp, Unknown
  Bacterial polypeptide expressing nucleotide sequence isolated from the Sargasso Sea
gattctctaaaggtgattgcagatcacattcgctcttgtgcctttttgatagcagatggggtttctccttcaaatgagggacgaggctatgtgcttcgaaggattatacggagagcgataagacatgggcataaactcggaaaaaaagaacttttttttcatcgccttgtaagcccgttagctgaagaaatgggggaggcttatagtgttctttcagaacaatctgatctgctcagcgagactcttcgagaggaagaggagcgatttctagagactttggataacgggatgaaaatacttgttgaacacattgataaatccaagaataaagatatcgatggggaggtagcttttcagttgtatgatacttacggttttcctgttgaccttacagctgatgtggccaaagagtacggtgtcgctgtggatatgtctggatttgatactgctatggagcgacagcggaatttgggtagacagtctcatcaatttgcgaggagcgattctaaaatagatgttgttgttagtagcataaaaggacattcctatgacacttctttcgttgggtatgattctctgcgctctgattcaacggttaaaaaaatctttgtagatggagtagaaaaagaggtcttatctcaagatgatgaggctatcctcgttcttgatcgcactcctttctacgccgaatctggagggcaagtgggggacattggatgtattagggggcaagagagcctattcgaggtgcttgatacgcaggtgtctgatggctgttacttgcacattggtaaacaggtttctggctcaatggagtcaggtcaaactatcgaagccgaagtagaccctaaaaccagagagagaactagatccaatcattctgctacccatttggtac

SEQ ID NO: 306226 - DNA, 787 bp, Unknown
  Bacterial polypeptide expressing nucleotide sequence isolated from the Sargasso Sea
agatgttcagaaaatgggtgattcaattattcatatctgtgaggctaaaaataaaaacttaaaaaacaatgtccctgacaattcaacaattactgcatcagtggatgaaaaatcacgattatcaacaacaaacaatcatactactgctcacctgatgcatgaggcattgagacaggttttaggagaacatgtaactcaagcagggtctcttgtcaatccacaaatgttaaggtttgactttacacattttgaaaaagtgagtgacactcagctggaagaaattgagaacatagtcaatttggtcatccgccagaacattaatactgagatttatgaaactccttatgacgaggcaatcaattcaggaataattgcacagtttggtgaaaaatacggagatgttgtcagggtagtaaagatctctgatttttctgaagaactttgtggaggatgccatgtaaaagctacagggcaaattggacagttccgcctagtttctgaagaggggattgccgctgggataaggagagtagttgctgttacagggaaacaagcagaattgatgaatcaggagcagggcagagtcacacgtgcattgcggcaactattgaatgtccctgaagaaaaaattcctgaaatggcagaaaaacttgctgaagaaaaaagaaagcttgaaaaagaagttcaatcccttagaagcaaagtagctctagaaggcatagctgaaatggtggcacatgccgaagatgttgagggggtttctgtgcttgctagggaaattgatgca

SEQ ID NO: 306227 - DNA, 793 bp, Unknown
  Bacterial polypeptide expressing nucleotide sequence isolated from the Sargasso Sea
aaaggagggctacctgggaccaaagatcaggacggtgacagatacattgaaatttggaacttagttttcatgcagtacgaacaaatatcaaaagaaaaaagaatagatttaccaaaaccttctgttgacactggtatgggccttgaaagaatcgcggcgcttcttcaaggtacacacgataattataaaacagatcatttcatgaaacttattaattcaatttctgaaactattaaggttaaacctaatgaaacaaatttgtctagttttagggtaatagcagatcatttaagagcaagctcttttttgttggctgagggggttcttccatctaatgaaggtagaggatatgttttaagaagaattatgagaagaggtatgagacattgtcatttacttggatctaaagaaccagttttttttaatatttttaaaacactaatgaatgaaatgtctggaaactatccagaattaatgagagctgagtcgcttattaaagagactttaagaatggaagaggaaaaatttttagtacttttagatcgtggaatgaagatattaaatgatgaaataaataaagttgataaaaaattatctggtgaagttgcttttaaactttacgatacatatggatttcctctagatctaactgaagatattttaaaaaataaatcattaaccttagaccacaaaaaatttgatgaattaatgataaaaagtaaagaacttgctaaaaaaaaggggaaaggatctggagatagctcggtagacgaaatttgttggaataaaagac

SEQ ID NO: 306228 - DNA, 707 bp, Unknown
  Bacterial polypeptide expressing nucleotide sequence isolated from the Sargasso Sea
catgaaattagctgaaataagaaaaaaatttcttaaatactttgaatcaaagaatcatgaaattgttaattcaagtgacttaataccgcatggcgatgacagcatactctttacaaatgctggtatggtccaatttaaagacacatttctaggcttagaaaaaagaaagaaaagtgcaacttcctctcaaaaatgtctaagagttggaggtaaacataacgatctcgagaatgtaggtttcactacaagacatcaaacgttttttgagatgctcggtaactttagttttggtgaatatttcaaagaaggtgccattgattatgcatgggagtttttgactaaagaattaggcatccctgaggaaaagctttttattacagttcacaaaaatgatcaggaatctgagaaatattggcttgaaaatattggcatcaataaagaaaaaattgctcgtcttggagatgaggacaatttctggtcgatgggagaaacaggaccatgtgggccttgttctgaaattttctatgattatggcagacaatttgaaggtgttgtgcctggtgcaggggatactggagacagatacgtggaaatttggaaccttgtcttcatggaattcaatcgagatactaaaggaaatctaactccactaccaaataagtgtgttgatacaggtatgggcttagaaagaatttgctccgtattac

SEQ ID NO: 306229 - DNA, 391 bp, Unknown
  Bacterial polypeptide expressing nucleotide sequence isolated from the Sargasso Sea
atggcagacaaaacacttaatgaaattagaactacttttctcaaatattttgagaagaatgaccataaaattgtggaatctagtaatttagttcccaataatgatccaacattaatgtttgcaaattcaggaatggttcaatttaaaaatgtttttactggattagaaaaaagagactataaaacagcaaccacatcccaaaagtgtgtaagagctgggggaaaacataatgatcttgaaaatgttggttatacacctaggcaccatacattttttgagatgctgggtaatttttcttttggggattattttaaagaaagagcgattgaactagcttggaatttagcaaccaaagactttggtttagacaaaaataggctttatttcacag

SEQ ID NO: 306230 - DNA, 568 bp, Unknown
  Bacterial polypeptide expressing nucleotide sequence isolated from the Sargasso Sea
gcagaaaggttccttagtaggttcagagcgtttacgttttgacttctcacattttgaagcggtcaaagccgatgaaattcgccgcattgagcagatggtgaatgagcaaattcagcaaaaccacgaagtgttgacccgtctgatgaatgtcgatgacgccaaagctgcaggcgctatggcgctgtttggtgagaaatacgatgacgaagtgcgtgtactgagtatgggcgacttctcgattgaactttgtggtggtacgcacgtgtcccgcaccggtgacatcggcctgtttaaaattgtggttgaaagcggcatagctgctggtattcgccgtattgaagctgtgactggagaaggcgctttagcttttgtgcataagctggaacaacaagctcaaactgtagcctcaatgctcaaaggcgacattttctctattgctgacaaagtgcagcaagctatggacagccgcaaagccttagaaaaagagctggagcaattaaaagctaaactcgccagtgctgccggtgcttccatgctggagcaggtgcagatgattaacggcgtgaaa

SEQ ID NO: 306231 - DNA, 853 bp, Unknown
  Bacterial polypeptide expressing nucleotide sequence isolated from the Sargasso Sea
tctctgaaaattggtgatgcagtacaggctgatgtggatgaagcacgtcgtgcgcgtattcgcctgaaccactccgcaacgcatctgatgcacgcggcgctgcgccaggttctgggcacacatgtggcacagaaaggctcgctggttaacgataaactactgcgcttcgacttctctcataccgaagcgatgaagcctgctgaaatccgtgctgttgaaaatctggtgaatgcgcaaatccgtcgcaacttgctgattgaaacgaacatcatggatctcgaagcggcaaaagccaaaggcgcaatggcgctgtttggcgagaaatatgacgaccatgtgcgcgttctgagcatgggtgatttctctactgaactgtgtggcggtactcacgccagccgtacgggtgatatcggtctgttccgcatagtgtccgagtcaggtactgcggcaggcgttcgtcgtatcgaagcggtaaccggtgaaggcgctatacaaaccgtgcatgctgagagcgatcgcttaagcgatgttgcgcagctgctgaaaggcgatagccagaatatcgctgacaaagttcgttccgtgctggagcgtacacgtcaactggaaaaagaattgcagcaattgaaggaacaggctgcggcgcaggagagtgcaaatctttccagcaaagcggttgatatcaacggtgtgaagctgctggtcagtgaactcgcggacgttgagccgaaaatgttgcgtaccatggttgatgatctgaaaaatcaactggggtctaccgttatcgttctggcaacggtagtggaaggtaaggtttctctgattgcgggtgtgtctaaggacgtgacagatc

SEQ ID NO: 306232 - DNA, 574 bp, Unknown
  Bacterial polypeptide expressing nucleotide sequence isolated from the Sargasso Sea
aagcaaccttgttccaaacaatgatcccacgtttatgtttgctaattcaggcatggttcaatttaaaaatgtatttacaggtttagaaaaaagagattacaaaacagcaactacttcgcaaaaatgtgtaagagcaggtggaaaacataatgacttagaaaatgtaggctacactccgagacatcatacattttttgaaatgttaggtaatttttcttttggagattattttaaagaaagagcgatcgagttagcatggaacttgataactaaagattttggtttagataaaaataggctttattttacagtttttaatgaagatgaagaagcatacattctttggaagaaagttagtggtttaggagatgatagggtaataaaaatctccaccactgataacttttggtccatgggagaaacaggcccttgcggcccttgttcagaaattttttttgatcatggagaccatttaaaaggtggtttgccgggtaccaaagatcaagatggtgacagatacattgaaatttggaatttggtttttatgcagtttgaacaaatttctaaagataaa

SEQ ID NO: 306233 - DNA, 569 bp, Unknown
  Bacterial polypeptide expressing nucleotide sequence isolated from the Sargasso Sea
tatggcagacaaaacactcaatgaaataagaaatactttcttaaagtattttgaaaagaacgatcataagattgtggaatctagtaatttggttcccaataacgatcccacattgatgtttgccaactctggaatggtccagtttaagaacgtttttacaggattagaaaaaagagattacattagagctactacttcacaaaaatgtgtaagggcaggtggtaagcataatgatttagaaaatgttggttacacaccaaggcaccacactttctttgagatgttaggaaacttttcttttggtgattactttaaagagcaggcaattcattatgcttggaacttaattacaaaagattttggaatagataaaaacagactttatgtaactgtatttcatgaagatgatgaggcctttaatttttggaagaaaatagcgggttttagcgatgatagaattataagaatagcaacctcagataatttttggtcaatgggtgagacaggtccttgtggtccatgctcggaaaattctttgatcatggtgatcatttacctggaggattacc

SEQ ID NO: 306234 - DNA, 421 bp, Unknown
  Bacterial polypeptide expressing nucleotide sequence isolated from the Sargasso Sea
aatgagtgaaattagaagaaagtttcttgaatacttctcaagaaacggacatgaagtagtcgattcaagcaatatagttcctaataacgatccaactttaatgtttacaaattcaggtatggttcaatttaaaaatgttttcactggattagaaaaaaaatctttcaaaacagcaaccacatcacaaaaatgtattagagctggcggaaaacataatgatcttgaaaacgtaggttataccccaagacatcacacattttttgaaatgttgggaaatttttcatttggagattattttaaagaaaaagcaatttattatgcatgggaattattaacaaaagattttgctcttcctaaagaaaaactattagcaactgtttattcggaagatgaagaggcttttaaattatggaagaaaata

SEQ ID NO: 306235 - DNA, 798 bp, Unknown
  Bacterial polypeptide expressing nucleotide sequence isolated from the Sargasso Sea
atcacggtgcgcacatttggggaggtcctccgggaacaccagaagaagacggcgaccgctttatcgaaatttggaacctggtatttatgcagtttaacaaacaagctgacggtaccatggagccactccctaagccttcaatcgataccggtatgggcctagaacgtatttccgctatcttgcagaacgtgcacagcaactacgagatcgaccttttccaaaacttgatcaaatcagcagcatcaattgttcgaagcgaagatttagaaaataaatcgctacgggtcatcgccgatcacattcgttcgtgcagcttcttaatttgcgatggtgttatgccatcgaatgaagggcgcggatacgtattacgccgcattatccgtcgagctgttcgccacggctatcagcttggcgcaaacgatatcttcttctacaagcttgtggcatcacttgcaaaagaaatgggtgaagcatacccagaacttgtagaccagctaccggtaattgaaaaagtactgcgtgttgaagaagagcagtttagcaaaacactagcccgtggtatggctattctaaacgatacgttagaaaccttagaaggcgatacagtaccgggtgacgtggtgtttaaactttacgacacttatggcttccctactgatttaaccaatgatgtagcgcgtgagcacgaccttaagatcgacgaagaaacttttgaagcagccatgcaggcgcagcgtgcccgtgcacagcaggcaagtaactttggcgcagactacaacagtaaactcgcccattgat

SEQ ID NO: 306236 - DNA, 841 bp, Unknown
  Bacterial polypeptide expressing nucleotide sequence isolated from the Sargasso Sea
tactttgagaaaaatgatcatactatagtagaatctagtaatttagttccaaataatgatccaacattaatgtttgctaactcaggaatggttcagttcaaaaatgtatttactggactagaaaaaagagattacgttagagccactacatcacaaaaatgtgtcagagcaggtggaaaacataatgaccttgaaaatgttggttatactccaagacaccatacattttttgagatgttgggaaatttttcatttggggactatttcaaagatagagcaatagagcttgcttggaatttagtaacgaaagattttgggattgataaaaataggctttacgtaacagtttttaatgaagatgatgaagcatttaacttttggaaaaaaattgctggcttaagcgaagacaggataattagaatatcaacttcagataatttttggtcaatgggggaaactggtccatgtggtccttgttctgaaatcttctttgatcatggagacaaattaaaaggaggtttgccaggaacaaaagatcaggatggagatcggtatattgaaatatggaaccttgtatttatgcagtttgagcagattacaaaagataaaagaattaatttaccaaaaccatctgtagatactggaatgggtttagagagaattgcagctttattgcaaggaactcatgataactatgaaacggatcattttaaaaaaattataagtgctacatccgaagccgtcaaaaagaagccagatcaaaataatttgtcaagctttagagttatagctgatcacttaagagcaagttcatttttaattgcagaaggaagttttacct

SEQ ID NO: 306237 - DNA, 775 bp, Unknown
  Bacterial polypeptide expressing nucleotide sequence isolated from the Sargasso Sea
ttcgaagtaatagatgttcaaaaaaaattgggtgatttatttgttcattatggaaaagttttaaatggaagtattaaattaaacgaaaatgttgagatgaaaattaatgttgaaagaagagacaatataagagcttatcattccgcaacacatttgctccacgagtcacttaggagagttttaggcgaccatgtaattcagaaaggatcgctagttgagtctgatagattaagatttgattttagtcatatgaagccaatttcttcagaagagattaacaaaattgaaacatttgtgaattcaatgataaataaaaaaacagatgtaaaaacaaggataatgtctccaaaagaagcagtagataatggcgcattggctttatttggtgaaaaatacggagatgaagttagagttttatcaatgggagatgaaacagataaatatttttctacagaattatgtggaggaacacatgtaagaaacacaggagatataggtaattttaaaattgttagtcaatcatctatcgctgctggagtcagaagggtagaagcattaagagaaaagcaattacaagaatttttaaataaaaaagaaaaattatcaaatctttctagtcaaaaaaatgaagagatcataaaagatctatcagaaaaaattattaaatttggaggtaaaccaaatttagaaaatgacaatcagcaaggtttagtaaaagatttaacaaaacaattaaatcaactttttgttaaatcaattttaagagataaatcaa

SEQ ID NO: 306238 - DNA, 846 bp, Unknown
  Bacterial polypeptide expressing nucleotide sequence isolated from the Sargasso Sea
atcgaccttggagaaggtacctgtccgctttcgcaggaacatgaatgtgcggtcaacgtcgaaagttgctggcgttttgttgaactctggaacctggttttcatgcagtaccagcgcttccctgacaagcacttagaaccgcttcctgctcagcatgtagataccggaatggggttggaacgcatctgccgggttctgcaacaagttaattcgaattacagtaccgacctctttgttccgattttaagaaggatttcagaagtcacagacacgactgacaagtctggggaaatcggtgtggcctacagggtgattgcagaccatctccgttcccttagtttcgcgattgcagacggagccattccctccaatgagggtcgaggttatgttcttcggagaatgcttcgaagagccactcgttttggacgggttctggggatggaaaaacccttcatgcaccaattggtgggaacactatcagaagttatgggagatgcttttccggaattgtcagctcagcaaaaacatattgaaaaagtgattgaatcggaagaatccagtttcggccagaccctggatcgtgggctggagatttttgagcaaatggcatcttcttccagaacttcagaaaacggaggtctttccggagaagacgcattcaaactctatgatacctacgggtttccggtggatttgacacgattgatgtgtgacgaacgtagattgaatgtggatgaaatgggttttgaaaatttaatggaggaacaaaggacccgggctcgtgaagcaggtaaatttagattaaccctcgatgactggaccgaattcaaagagggggaatccgaa

SEQ ID NO: 306239 - DNA, 907 bp, Unknown
  Bacterial polypeptide expressing nucleotide sequence isolated from the Sargasso Sea
ggatatgttttaagaagaataatgagaagagggatgagacatgctcactctttaggtagcaaaaatcctattttctacaaactttttgatgttttgttaacagaaatgaagaatagttatcctgagttaagtaatgctaaagaattaatagtagagacattaaaaaatgaagaagaaaaattctcttctctgcttgaacgtggaattaaaatattagatgaaaatttaggcaaagttcaaaataaaactctccctgggtcaatagcatttaaattatatgatacctacggttttccattagacttaacagcagatatcttaagaggaaaaaatataaaagttgacaatgttacttttgaaagagaaatggaaaaaagtaaagcattagcaagagctaattggaaaggatctggagataaatctatagaggaaagatggtttaaaattagagaagagcttaaacccactgaatttttaggttatgaatttgataaagcagaagcggtaattgtaaaaatttctaaaaatggcaaatttattgacacagctaaatctggagaagagattgagatcattacaaatcaaacaccattttatgcagagtctggcggtcaagtaggtgatcaaggttatatttttagctcagattgcaaaattaaagtttatgatacccaaaaaaaaatgggtgatttatttgttcattatggaaaaattgaaaaaggaaaaatatcaattggacaaaatgttaacttagaaatcgatgtttcaaaaagaaataattctaaagccaatcattctgcgactcatttgttacacgagtccctaagaagaactttaggaaaacatgttacgcaaaaaggttcattagtttctccagataggcttagatttgatttagccacaacaa

SEQ ID NO: 306240 - DNA, 787 bp, Unknown
  Bacterial polypeptide expressing nucleotide sequence isolated from the Sargasso Sea
atgtttgctaactctggaatggtacaatttaaaaatatatttacaggtaaagagacaagagattactacagagcaactactgctcaaaaatgtgtaagagcaggcggtaagcataatgatttagaaaatgtaggatacactacaagacaccatactttttttgaaatgttaggtaatttctcttttggagattattttaaagagttggccatagaactagcttggaatctaattactaaagaatatgaaataaataaagacaggctattagtaactgtttattctgatgatcaagaagcttttgatttatggaaaaaaatagctggtttgtctgaaaataaaatcattaaaattagtacatctgataatttttggtcaatgggtgaaactggaccttgcggtccatgttctgaaatattttatgatcatggtgataaatacgaaggaggccctccaggttctccaaacgaagatggcgatagatttatagaaatatggaatttagtatttatgcaatatgagcaaatatctaaatctgagagaataaatcttccgaaaccctccattgatactggaatgggattagagagaatgacagctcttctagatggttctaacgataattattcaacagatttatttcaaccgattataaatgaatcaacaatactatgcggcgatgaaaattcaataacaaatcctagtcacagagtaatagcagatcacttaaaatcctcctcttttttaattgcagatggagttatgccttcaaatgaaggtagaggat

SEQ ID NO: 306241 - DNA, 613 bp, Unknown
  Bacterial polypeptide expressing nucleotide sequence isolated from the Sargasso Sea
tatggcagacaaaacacttaatgaaataagaactacatttctcaaatactttgagaaaaacgatcataagattgttgagtctagcaatttagttccaaacaatgatccaacgctaatgtttgccaactctggcatggttcaatttaaaaatgtgtttactggtttagaaaaaagagactatcagacagccacaacatctcagaaatgtgttagggctggaggaaaacataacgaccttgaaaatgttggttatacaccgagacaccatactttttttgaaatgttaggaaatttttcatttggagattattttaaagagagagctatagaacttgcttggaatcttataacaaaagattttggcttagataaaaataagctttattttactgtgtttcatgaggaccaggaggctttaacattatggaaaaaaatcactggttttggtgatgacagaataataaaaatttcaacttcagataatttttggtctatgggagaaactggtccatgtggcccttgttcagagattttttatgatcatggagaccaccttgaaggaggcttacctggtacaaaaaatcaagatggcgacaggtacatagaaatttgg

SEQ ID NO: 306242 - DNA, 898 bp, Unknown
  Bacterial polypeptide expressing nucleotide sequence isolated from the Sargasso Sea
ctcacccaggaaatcgcagaagagcagggcctcacggtggaccttgatggctttgaggaggcgatggatgaacagcgccagcgggccaaggccgcggctgtgagcattgacctcaccctgcaggatgcgatcgagcaggtggctgctgagcagcccgctacggcgttcaagggttacgacgccctggatcagcccagcacggtgcaggcgttggtcgtgaacggggcgccggcctcaacggcgtcggccggagatgtcttgcaagtggtgctcgacagcacacccttctatggcgaaggcggcggtcaggtcggcgatcgcggatcgctcagtggtgtcgacgtgatcgttgccatcgattcagtgagtcgcagtcgcaatgtgttcgtgcactccgggcggatggaacgcggtcatctggccgtgggggacaccgtcaaggcccaggtggatcggagctgccggcgtcgggcccaggccaatcacaccgctacgcacctgctccaggctgcgctcaagcaggttgttgatccggggatcggccaggctggctccctggtggacttcgaccggctgcgcttcgacttccattgcccgacggcggtcaccgctgagcaattggcgcagatcgaaacgttgatcaacggctggatcgctgaggcccacagcctcgaggtgcaggagatggcgatcgatcaggccaaggcggctggtgccgtcgcgatgttcggcgagaaatacgccgatgtcgtgcgggttgtcgacgttccaggtgtgtcgatggagctctgcggcggcacccacgtggccaacaccgccgagatcggcctgttcaaaatcgtggcggaaagtggtgtcgctgccggcatccgccggatgaagcagtggcgggaccagc

SEQ ID NO: 306243 - DNA, 796 bp, Unknown
  Bacterial polypeptide expressing nucleotide sequence isolated from the Sargasso Sea
tagaatattttgcaacgatagagttatcactaaagttatgtctcccgatcaagctattaaaaaaggtgctatagctctttttggagaaaaatatggagatgaagttagagtagtatcaattggagaaagtattgataatgaaagagaggcttggtcagttgaattatgtggaggcacacatgtaaaaaacaccgctgaaatttcaacatttaaaatattgtcagagacaggtgtttcatctggagttcgcagaattgaagccttaacaaatattgctgcaataaattattataacaacgagatcgataaaatcaaatttatttcttcttatgtgaaaacaaatagtgctcaggtaacaaaaaaaattgaacaactagtctcagaaaatcaaaaactcaataaagaattaaaacttcttaaaaacaaatctcatgtaaattatgataataattcaactaaagaaacaataaatggaattatatttgagtataaaatttatgataatttagtagttaaagaattgaagcctaatgctgaaaattttatcaaaaataataattcaaatattgtttgtttaattagtaaaattgataataaagcctctatagtaatcgctgtagagaaaacactcacttctaaaattagtgcagtagaaatggtaaatgaagtctcatcgatcttaggaggtaaaggaggtggtgggagaccggatatggctcaatctggaggatcagatccaaaaaatagtctacaagctattaataagataaaagattacattaaacgtaaaatttag

SEQ ID NO: 306244 - DNA, 897 bp, Unknown
  Bacterial polypeptide expressing nucleotide sequence isolated from the Sargasso Sea
cgtcgaggaaagatggtttaaagttagggaggaaattaatcctactgaatttttaggatacgaatttgataaagctgagggtgtaataattaaaatgtcaaaaaatggcaaatttgttgacacggcaaataaaggagatgaaatagaagtcattacaaaccaaacaccattttatggagagtctggtggtcaagtcggtgatcaaggttatatttttagttcaaattgtaaaataatagtaaatgatacgcaaaaaaaaatgggagatttatttgtccattatggaaaagtagaaaaaggatcaatatcaattggacaacatgtaaatttagaaatagatattttaaaaagaaataattcaagggctaatcattcggcgacacatttattgcatgagtctctaagaaggaccttaggaaaacatgttactcaaaaaggatcattagtctctcctgaaagattaagatttgattttagtcataataaacctattgaaaaagaagaaatgagtaaaattaataatatagtaaatgaaatagtagaaggatcctctgatgtacaaacaagaataatgactccaaaagaggcagtaagtatgggcgctctcgctttatttggagaaaagtatggagaagaagtaagagtagtttttatgggaaaagaaaataatggttttttttcaacagaattatgtggtggtacacatgttaaaaacactagagaagttggaaaatttaaaattataagccaatcctcaattgcatcaggtgtcaggagagttgaggcattaagagataaacaattagaggaatatgaaaaaatgcaacgaaattataagtctcaaaaagaaactaatattaaaaatgagattgaattagttaaaaaagaacttcaaaa

SEQ ID NO: 306245 - DNA, 889 bp, Unknown
  Bacterial polypeptide expressing nucleotide sequence isolated from the Sargasso Sea
tacaaagacgacgatgaatctaaagatatatggctcaatttaggaattgaggaaaagtatatatataagtttggagatgaggataactggtggggacctgctggtgatgaaggaccatgtggtccttgttcagaattacattattaccagggagataagaaaaatatggaatttgataacccaaaatggggtccaaatcttcatgatgattttgtagaactttacaatcttgtttttactcaattttatagagacttagatggtaatgataaacctttgcctttcaacaacatagatacaggaatgggactggagagaactgtatctgtactaaataatcaaaaaacagcttataagacagatattttttcaaatcatttggaaatgttgaatgatcgcgtcgataataatgatgatttgtcacaaaaatttaagagaattattgctgaacatggaagatccgcatcatttcttattgcagatggtgtattacctgaaaacactggaagaggatatgttctaagaagattaataagaagagcaatggtaacttcaaaaaaacttaatttagactaccctgttcttagtccagttgcggatatcacatcaaaaaaacttagtcatgtatatccagaactttctgaaaagttaagttttataaaatcagtactcgataaagaagaggaaaactttaataggacattaagttttggtactcaggtattgtatgaacttatcaataaaagaaatattgaaactgataaaaaaataattattacaaacgatgcaaaagaagtatctaaagatattttcgaaaaaatcaatagtaaagaaaacaaaaaactcttatcaggtatagaagcattcatactttacgatacatatggct

SEQ ID NO: 306246 - DNA, 886 bp, Unknown
  Bacterial polypeptide expressing nucleotide sequence isolated from the Sargasso Sea
gtcacttagaagagttttgggaacacatgtgactcaaaaaggttctttagttgagtcagatagactaaggtttgattttagtcatatgaaaccaatttctccggaagaaataaaaaaaattgagggcttagttaattcgatggtcacaaaaaaatctgatgtaaaaacaagaataatgacaccaaatgaggcagtaaataatggtgctttagctttatttggtgagaaatatgatgatgaagttagagttttatctatgggcactgaagaagcaaaatatttttctacagaattatgtgggggaacccatgtaaaaaatactagtgaaattggagaatttaagattgtaagccagtcatcaattgcagccggcataagaagagtcgaggccttaagagatcaacaattgaaggaatttttaaataaaaaagcagaactgtcagatatttcaatacaaaaaaacaaagagatagtaaaagatttgtctgcaaatattattaaacttggtggaaagccagatttgaaaaataatgatcagcaaaatttaataaaagaactaactaaacaattagatcaattaacaattaattcagttctaaatgataaatcaaaaaatattatttgtgatgataatataaataatattaaagttagatttcaaagagtttttgacctaccatcgaaagaattaagaaaacttgttgataaaggaaaaaaggaattagaacaagggatagtaatagtttttgcaagcaaagatgggaaaattggtctagctattggcgttacaaataagttaataaaaaaatatgatgctgtaaaattagttaaaattggttcagaaattatggaggcaaaggtggcggcggaagatctgacttgctca

SEQ ID NO: 306247 - DNA, 841 bp, Unknown
  Bacterial polypeptide expressing nucleotide sequence isolated from the Sargasso Sea
actgtttataaagacgatgatgaggctgaagaaatttggaaaaatattattggaattgatccaggcagaatagctagattaggtgatgatgataatttttggtctatgggtgacacaggaccatgcgggccatgctctgaaatattttatgatcatggagaacacattgatggaacacctccaggggccgaaggtgatgaaggcgatagatttatcgaaatatggaatcttgtctttatgcaatttaatagagatgaaagtggaaaaatggaaccactcccaaaaccatctgttgacactggaatgggattagaaagaattgcagcggttcttcagggcgttaattcaaattatgaaacagatgtttttaaagatttaatcaatgcttcagaaaaaatacttggcagcgaaggaagtacatctcacaaagttattgctgatcatattcgatcaagtgtttttttaatatctgatggagtaattcctgaaaaagaaggaagaggctatgtcttgagaagaataatgagaagaggcatcagacatggatataaaattggtgccaaaaaaccatttatgcatttacttgtaaaagatttaataaaactaatgaattctgcttacccagaattaaagaaaaaacaaaaagatattattgaattaattaagaatgaagagattaaattctttgaaacgcttgagactggaatagaaatacttgaagaaactatttccaatatgaaaaataaaactctgtctggcgatgtagtttttaaattacatgacacttatggttttccatttgatttgactgcagatattgcaagagaaaagcagcttgata

SEQ ID NO: 306248 - DNA, 920 bp, Unknown
  Bacterial polypeptide expressing nucleotide sequence isolated from the Sargasso Sea
tatgataccctatggatttccattagatttaactgaagatattttaaaaaataaatccttaaaaattgatcatgaaaaatttcaaagtttgatgaaagaaagcagagagcttgctaaaaaaaattggaagggatcaggagacagtgccatagatgatatttggtttggtgttagagaaaaacttggcgcaacagaatttttaggttacgaaactaatcaagcagaaggtgttgtattgtcattatttaaagacaataaagaggttgatcaattaaaatcaggtgaagaaggtatgataattgttaatcaaacgcctttttatggagaatctgggggacaagttggagatgaaggagaaataatttcaggagattttaaatttgaagttaaagatgtacaaaaaaaattaggagatttatttgttcattatggaaatgtgaaaaatggatcaataaaattaaatagtagtgtagaaatgaaaataaatgtttcaagaagagataatattagagcataccattcagctacacatttattgcacgaatctttaagaagagtcttgggagagcatgtaactcaaaagggatcattagttgaaccagagagacttagatttgattttagccatatgaagccaataagtgtagatgaaatcacgaaaatagaaacatatgtgaacacaatgatagaaaaaaaatctgatgtaaaaaccagactaatgactccaaaagaagctgtagaaaatggagctttagcattatttggagaaaaatatggagaagaagtaagagttttatcaatgggagacgaagaaagtagttatttttcaactgaattatgtggaggaactcatgtcagaaataccggtgatattggtaaatttaagatagtaagccaatcttcaatagcagcaggagtac

SEQ ID NO: 306249 - DNA, 805 bp, Unknown
  Bacterial polypeptide expressing nucleotide sequence isolated from the Sargasso Sea
aatggtaatcgctaaccaaacgccgttctatgccgaatcaggcggtcagatgggcgacaagggtgttttatttaagaccgatggcgcggagttttcgattgatgacacgattaagcgtcttgaaaacattcacgtgcatataggcactctgcgtaaaggaaacctggcgaagggtgatacggtagaaatgcgcgtcgagcccgatagacgaaagttcctacgcgcgaaccactcggtgacgcacctattgcatgcggcccttcgtgaacacctcggcaaccacgtagcccaaaagggctcgctggtggcgccgggctatctacgcttcgacttcagtcatccgaaggcggtttcgcaggaggatctactggcaatcgaattcgaggtcaacgcccgtatccgagaaaacgcccctgtgataacacggcagatgacgccggatgaggcgcaggaggccggcgcggtagcattgttcggtgaaaaatacggggaggaagtgcgggtcgtatcaatgggcgtcgggaagtttgatactgatttaccctactctatggaactctgcggtggtactcatgtcgcaagtactggcgaaatcggggtttttaagataacgtccgaatctgctgtcgcggcgggcgtgcgcagggtcgaggccaagacggggagctcagcgctcgaatacattgctaagcgcgaagcgatcgtcgtaaatgcagcgcaggcacttaatgccgcgccgagcgacgtaccaatccgggtaggggcattgcttaacgaacggcgctcgaggaacgagagatatctg

SEQ ID NO: 306250 - DNA, 722 bp, Unknown
  Bacterial polypeptide expressing nucleotide sequence isolated from the Sargasso Sea
aatgaaaaccagtgaaatcagacaatcttttcttaacttttttgattcaaaagatcataaagtggtaccttctagctctctagttccaaacaatgacgaaacgttattatttacaaatgctggcatggttcaatttaaagacatatttcttggaacagaaacaaaaaactatagtagagcgactacttcgcaaatatgtattagagctggtggcaagcacaatgatttagagaatgttggttacacgttgagacaccatacattttttgagatgcttggtaattttagtttcggtgattattttaaagaggatgcaatcaaatatgcttgggaattcttaacagaggttttaaagctagataaggataaactctggataacagtttataaagatgatgatgaggctgaagaaatttggaaaaacaccattggagtagatgcaagcagaattgcaagacttggtgatgatgaaaatttttggtcgatgggtgatacaggaccatgtggaccatgttctgaaatcttttttgatcatggagaacatattgaaggatctccaccaggtgccgatggagacgagggagatagatttgtagaaatttggaatcttgtattcatgcaatttaatagagatgaagacggaaacatggaaccactacctaaaccctctgttgatactggaatgggtcttgaaagaatatctgctgtaatgcagggcgtga

SEQ ID NO: 306251 - DNA, 607 bp, Unknown
  Bacterial polypeptide expressing nucleotide sequence isolated from the Sargasso Sea
tatggttgataaatcactaaatgaaataagaacaacgtttttaaagtattttgaaaaaaatgatcataaaattgttgattcaagcaacttggtcccaaacaatgatccaactttaatgtttgctaactctggaatggtgcaattcaaaaatgtatttactggccttgaaaaaagagattatcaaagagccaccacttcacaaaaatgtgtaagagcaggtggaaaacataatgatttagaaaatgttggttatacaccaagacaccatacattttttgaaatgcttggaaatttttcttttggtgattattttaaagaaagagcaattgaactggcatggaatttaataacaaaagattttgggctagataaaaacaggttatatttcacagtttttaacgaagataatgaagcttttaatctttggaaaaagataacaggacttggcaacgatagaataatcaaaatttccacatctgataatttttggtcaatgggtgaaactggaccatgtggaccatgctcagaaatattttttgatcatggtgatcatttgaaaggtggattacctggaagcaaagaccaagatggagataggtatatagaa

SEQ ID NO: 306252 - DNA, 919 bp, Unknown
  Bacterial polypeptide expressing nucleotide sequence isolated from the Sargasso Sea
tgagatacacatcgatttgagagaccctaaagagattcaagcagtccctacctcaaaacttataaataaggatcacccagaagtaattgagatatggaacttagtattcatagaattcaatcgaaaaattgatggttccttagagaatttaccagaaaaacatgttgacacagggatgggcttagaaagactttctatggctatagattcactaacatctacatatgatactaatatttttaggtcaataataaaatcattagaaaaaatttcaggaaaaaagtatggagtagaaaaagaaataaatatagcatttagggtaatttgtgatcatataagagcaattgtattaactatatcggacggtgctataccatcaaataataaggcaggttatgttataaggagaattttaaggagagcagtaagatatggatactcaacacttcaattgaaagaaccttttcttaatgagttatctcaatcagtaattgtagagtataaagatatttttaaaaatctaagttctcagagtgattttataaaggaggtaattctagaggaagagaagacttttttatcaactcttgataaaggattaaagaaaataaatgaatatggagaatcttctaaaaaggtatcgggagaattagtttttgagttatatgatacatatggttttcctattgacctaactgagcttatttttagagagaagggaatcaacatcgataaagagaaatttaatgaactgctagaaactcaacgaaacagatcaaggaatgtgagtaaagcaatatctgatgaatggaaaattctaaagaaaggtaaaaaactgacctcatttattgggtatgaggaagataattcactatctcaaattattatgtacagaaaggtcagtgaggatgaaaataca

SEQ ID NO: 306253 - DNA, 717 bp, Unknown
  Bacterial polypeptide expressing nucleotide sequence isolated from the Sargasso Sea
cttacgaacgcttgaaaagggagttattcaatttgaaaaaattttaagcaatacatccggatcagaaatacatgggaaagatgcatttaagctatatgacacttatggatttccacttgatttaactcagctaatggccaaagaaaaaaagatgaccgttgatatagatggttttgatgttgaaatgaaaaatcaaaaagagttagctaaatctggtcaaaaatttgaaatggataatcttaatttaaaatggaaccttgaaactaaaagtagccattcaatttttgttggatatgaaaatgaaagtatttcttcgaaaattataaatcacgctaaaaatggagacaacataataatcattttagaaaatacacctttttattccgagtctggaggtcaaattggtgatgcaggtataataagtaatgatgacttctcagctagagtcattgatacccaaaaaaatggagattatgttttacatatatgctcacttacaaatggcgctatcggtgataatctttctgtagattgcatgatagacgttgatagaagaaataatattaaaatgaatcatacagcaacccatttactacatcaatccttaaaagatgttttaggtgatcatgtaaatcaggcaggatcattagttcatcctgaatatttaaggtttgatatcacccatccaaaaaaaatttctttaaaggaattagaaga

SEQ ID NO: 306254 - DNA, 442 bp, Unknown
  Bacterial polypeptide expressing nucleotide sequence isolated from the Sargasso Sea
tgataaaattttacctggagaagttggttttaaactttatgatacgtacggttttcccctggatcttactgaagatattttaaaaaataaatcattaaaaattgataataaaaaatttggtgaacttatgaaacaaagccgagaacttgcaaagaaaaattggaaaggttcaggagatagtgcaattgatgatatttggtttggaattaaagataaattaggaccaacagaatttcttggatatgaaactaatcaagcggagggagtggtacaaacattattaaaaaataataaggaggttaacagtttaaaaatgaacgatgaaggcatgataatagttaaccaaacacctttttatggagagtctggaggacaagttggtgatactggagaaatattaccaatgattttaaatttaaagtttcagatgttcagaaaaaac

SEQ ID NO: 306255 - DNA, 938 bp, Unknown
  Bacterial polypeptide expressing nucleotide sequence isolated from the Sargasso Sea
acatgatacttttggatttccatatgatttgacagcagacattgctcgcgagcaggatttagatttagatgaggagggttttaatagatgcatggaagaacaaattaaaaattcaaaatcagcaaataaatttaaagggttgcagctagatttgtcttcaattaaagaaacagaatttttaggctatggtgagttattcggaaagggtaaggtcttgggaatttggaatgaatccaatgaaatagataatgcttctgataaaaatgagtgctttattgcgtttgataaaacaccattctatgctgaatcaggaggtcaagttggagatcagggaacatttttatttgctggaggtaatggagctgttcaagattgcatcaagctaggtaagatttttctacatagaattaaagtagaaaagggagttatcaacataaatgacaaactagaattatctgttgatgcaagcaaaagaaaagctgcttcaattcatcactctgccactcatttaatgcatgcagctttaaaagatgttcttggtgaccatgtgcatcaaaagggttcattgttagattctaaaaaactgagatttgatttttctcattctaaagcagttacaaaggatgaaattgagaaaatagaattgattgttaatcagcacatacaaaataactctgaggtggaaacgaaaataatgaagcttgacgatgcgcttgatattggagcagaagctatgtttggagaaaagtatgaggatgaagtgcgagttgtttatattgggggtgaattttctgtagagctatgcggcggtactcacgttgcaagaactggtgatataggaatgttttcagttacaagtgaatctagcatttcttcaggggtaagaagagttgaggcggttgctggtcaaagcgcagttaaaataatggtggaagctc

SEQ ID NO: 306256 - DNA, 856 bp, Unknown
  Bacterial polypeptide expressing nucleotide sequence isolated from the Sargasso Sea
ccatgttctgaaattttttatgaccatggagaaaaattaaaaggagggccacctggaagcccagaacaagatggagatagatttattgagatatggaatctcgtctttatgcaatacgaacaaatttctaaagaaaaaagaattaatcttcctaaaccttcagtagatacaggcatgggtcttgagagaatgactgctgtactacaaggtacacacgataattatgaaatagatcattttaaaaaaataatggcatcatcatcagaaataactaaaactccaattaatgagaaaactatagctagtcatagagttatagctgatcatcttagagctagtagttttttaattgctgagggaattttgccctcaaacgaaggtcgaggttatgttttaaggagaataatgcgaagaggtatgagacacgctcattctcttggaagtaaatcaccgctttttcacaaactttttaatgttttgttaaacgaaatgaaaattagttatcctgaattaacaaatggtaaagatcttattattgaaactctaaaaaacgaagaagaaaagttttcttcacttcttgaaagaggaatgaaaattcttgatgataatttgtccaaagtaaaaaataatattctaccaggttcagtagcttttaaattatacgacacctatggttttccggttgacttaactgctgatattttacgaacaaaaaatattaaagttgatagcaattcctttgaaaaagaaatggaaaaaagcaaagctttagcgagagcaaactggaaaggatctggagataaatctgttgaagaaagatggtttaaaatcagagaagaattaaaacctaactgaa

SEQ ID NO: 306257 - DNA, 871 bp, Unknown
  Bacterial polypeptide expressing nucleotide sequence isolated from the Sargasso Sea
accctagaaaatgtcggctatactccaagacatcatactttctttgaaatgttaggaaacttttctttcggtgattattttaaggaaagagcaattgaacttgcttggaatttaatcacaaaagattttggtttagataaaaataggctttatttcacagtctttaatgaagatgatgaagcttttaatttgtggaaaaaaatatctgggtttggtgatgacaaaattatcaaaatttcaacatcagataacttttggtcaatgggtgaaacaggcccttgcggcccatgctcagaaatattttacgatcatggtgatcatttaaaaggagggcttccaggaagcaaagatcaagatggtgaccgatatattgaaatatggaatttggtctttatgcaatttgaacaaatttcaaaagaaaagagaattaatttaccaaaaccatcagtagatacaggtatgggattagaaagaatagcagctttacttcaaggaacacatgataattataaaactgatcattttttaaaattaataaattcaatttctgaagctgtaaaagtaaaacctaatgaaaataatctttcaagttttagagtgattgcagaccacttaagagcaagctcatttttaattgcagagggagttttaccttctaatgaaggaagaggatatgttttaagaagaattatgagaagaggaatgagacattctcatttacttggatccaaagatccaatcttttttacaatttttaaaactctagtcgaagagatgtctggaaattatcctgagttaaaaagagccgaatctttagttaaagagactttaagaatggaagaggagaaatttttagtcttgctagatagag

SEQ ID NO: 306258 - DNA, 889 bp, Unknown
  Bacterial polypeptide expressing nucleotide sequence isolated from the Sargasso Sea
atgggattagaaagaatagcagctgtttttcaaggtacacacgataattacagtattgatcattttaaaaaattgatgttagcatcatcagatatcactaaaactaaaatagataaaaaaactgtagcaagccacagagttattgcagatcatcttagagctagtagcttcttaatagcagaaggagttttaccttcaaatgaaggtagaggttatgttttaagaagaattatgagaaggggtatgcgtcatgcacatacacttggaagtaaaaacccaatattctataaattatttgacgttctattaaacgaaatgtcacaaagccatccagaacttataagaggaaaagatttaattgttgaaacattaaaaaatgaagaggaaaaattttcgtcacttttagatagaggaatgaaaatattaaatcaaaatttagaaaaagttaaaaataataccttgccaggagaaatagcttttaaactttatgacacttatggttttccactagatttaactgcagatattttaaaaaataaaaaaattaaaattgacaccaatgtttttgataaagaaatggaaaaaagtaaagaagtggctcgggcaagctggaaaggatcaggcgataaatctgttgaagaaaaatggtttaaagttagagatgaacttagtcccacagaatttttaggttacgaatttgataaagctgaaggaataattttaaagatatcaaaagataataaatttgttgaaagcgcaaaaataggagatgaagttgaaattataaccaaccaaacacctttttatggagagtctggaggacaagttggtgatgtgggtattatttatagttcggattgtaaaataaatataaaagatacccaaaaaa

SEQ ID NO: 306259 - DNA, 928 bp, Unknown
  Bacterial polypeptide expressing nucleotide sequence isolated from the Sargasso Sea
tcaaactacgaaatcgatttattccaagcacttattgctgctgcggctaaagtaacaaacgcacaagatttagatgataaatcgttacgcgttgtggctgaccacattcgttcgtgtgcgttcttagtgtctgacggcgttatgccatcaaacgaaggccgtggttatgtactacgtcgtattattcgtcgtgcagttcgtcacggtaacaagctaggcgctaaaggtgcattcttctacaagctagttgctgcactaattgagcaaatgggtcaagcgtatccagagcttgctaagcaacaagaaattattgaaaaagtactgcgtatcgaagaagagcagtttggtaaaacacttgagcgtggtctggctattttagaagaaagcctaactgacatcgaaggtgatgtaatcccaggtgacttagtattcaaactttacgatacttacggtttcccagcagacttaacggctgacgtggcgcgtgagcgtttcatgacgattgatgagcacggcttccaagagtgtatggctgttcagcgtaagcaagcacagcaagctggtaagtttggtgctgattacaaccaacaacttaagtctgaaaaacacacagactttaaaggttacgatgcagaacattacacaggtactgtggttgaacttttctctgaaggtcaatcggtttctgtacttgaagatggtcaagaaggtatcgcaatcttagaccgcacaccgttttatgctgaatcaggtggtcaggttggtgacacgggtgtgttaaaagttgctggtggtgagtttgtagtgactaacaccacgaaacttggtaatgcatttgcacaccatggtcgtgtacaaggccgtattggtacaaacgataaagcagaggcaacaattgatgcagcacgtcgcgatagcatcaagaaaa

SEQ ID NO: 306260 - DNA, 844 bp, Unknown
  Bacterial polypeptide expressing nucleotide sequence isolated from the Sargasso Sea
atgaaatcacatgaaattagaaaaagatttctagaatattttaataaacagggacatgaaataatacattctggaccattggtcccacataatgatcctactttaatgtttgctaattcaggaatggttcaatttaaaaatgtatttaccggtaaagaaaaaagaaaaaatttaagagcaacaacttcacaaaaatgtgtacgtgctggtggaaagcataatgatttagaacaagttggttatacaaaaagacaccatactttttttgaaatgttgggcaatttttcatttggtgattattttaaagatttagcaatacaattttcgtgggaattgataacgaaagaatttgagattgataaaaataaaattttaattacagtatataaagatgacgaagagtcttttgagatatggaaaaaaatttctggtttagatagcagtaaaataataaaaatttcaacttctgataacttttggtctatgggagaaacaggaccttgcggtccttgctctgaaattttttatgatcatggagaaaaatttcagggaggaccacctggaagtaaaaatgaagatggagatagatttgttgagatttggaacttagtatttatgcaatatgagcaaatttctgaaaataataggattaatcttccaaaaccatcaattgatactggaatgggattagaaagaattactgcattacttcaaaatactaatgataattatatgactgatatctttaattcattaattaatagatcaattgaattaactgaatcaaaagaaaattcaagctcaccaagccatagagttatatctgatcatttaagatctgcag

SEQ ID NO: 306261 - DNA, 757 bp, Unknown
  Bacterial polypeptide expressing nucleotide sequence isolated from the Sargasso Sea
ggatttccattagatttaacagaagatattttaaaaagtaaatccttaaaaatagatcatgaaaagttcaatactcttatgaaagatagtaaagaactggcaaaaaaaaattggaaaggatcaggtgatagtgcagttgatgatatatggtttggaattaaagaaaaaattagtcctacagaatttttaggatacgaaacaaatcaagctgaaggaattgtattgtcgttattaaaagataatttagaagttaaagaacttaattctggtgatgaaggaatgataatagtaaatcaaacacctttttatggtgaatctggaggtcagataggagataggggtcaaattatatctggcgattttatatttgaagtttttgatgttcaaaaaaaaataggtgatttatttattcattatggaacagttaaaaaaggtttagttaaaattaatcaaaatgttgaattgaaaatagatgttcttagaagagataatatcagagcttatcattcagctactcatttattgcatgaatctttaagaagagttttgggatctcatgtaactcaaaagggatcgttagttgagccagatagattaaggtttgacttcagtcatatgaaacctatttccgcagaagaattaagtaaaattgagacatatgtaaattcgatggttgaaaaaaaatcagatgtaaaaacaagaataatgactccaaaaaaagcagtggaaaatggagctttagcattgtttggtgaaa

SEQ ID NO: 306262 - DNA, 805 bp, Unknown
  Bacterial polypeptide expressing nucleotide sequence isolated from the Sargasso Sea
cccttgccaaaaccttctgtagacactggcgccggtttggagagacttgcagctgttctccagagagtacacagtaactatgaaattgatctctttcagtcgctattaaaggacgtggcaaaggttaccaagtcaaaagatttcaccggttcttcacttaatgtcattgcagaccatattcgttcgtgtgcatttttaatagttgacggtgtgttaccgtctaacgaagggcgaggatatgttctacggcgaatcatcaggagagcagtcaggcatggacatcaacttggaatgaaggatcccttcttttatctgttgactggcaccttatgcgatgtaatggggcaggcgtacccggaattagttgaaagaaaacaatttgttgagacagtattaagagaggaagaggagcaatttgcgaggaccttagacaacgggatgacaattctagagcgagagcttgaaaatataaatggagatacgctttcgggggaaactgtctttcaactctatgatacctttgggtttccagtggatttgaccgcggatgttgcccgaggtcgtaacctgaaaatcgatatgaaaggttttcaagcctcgatggatcaacaaaggagctcagccagggcagccagcagctttggaatcagtgaaaaactagatatagactcgtctcttgttactgagtttaccggttacgattctttggatggaaaaggcagaattatagaaatcttcgcaagtagcggtgaaagactcgataaagttcctgctaatgaggaggtttatttgctgttagatcaaa

SEQ ID NO: 306263 - DNA, 601 bp, Unknown
  Bacterial polypeptide expressing nucleotide sequence isolated from the Sargasso Sea
gtagcagatggaatcagtccttccaatgagggaagaggttatgtattaagaagaattataaggcgtgctttgaggcatgctgacaagctaggatcaaagcaaccagtattgtcttctatggtgccaactttagtgaaacaaatgagtaatgcttaccctattttgaagaaaaatagcaagcttataaaagctaatattcttcaagaagaggaacaatttgcatcaaccttggtccaaggtatgggtcttctaaaagaagaagttaaaaacttaaaaggaaaaactattaaaggggagctcatttttatgttatatgatacttacgggtttccccctgatatgacagcagattatgccagagaaaataacttaaaggttgatttaaaagggtatgaagaggccatgactaaacaaaaagaaagaggaagagaagcgagtacttttggatcagttattccagaatctcttaatttaaaaggcagtactaatttcgttgggtacgaaaaagatgaagttaaagcaaaaatagtagaattagtctctctttcagacggtaaagcgcaagaaaaaataaaggaaaaccaagaagctgttgtaattc

SEQ ID NO: 306264 - DNA, 807 bp, Unknown
  Bacterial polypeptide expressing nucleotide sequence isolated from the Sargasso Sea
catgataattataaaagtgatcattttaaaaaattaattgaatcgatatcagataccgtaaaagtaaaagctgatgaaaataacatcgcaagttttcgtgtgattgcagatcatctaagagcgagctcgtttttattagctgaaggtgtattaccgtctaatgaagggagaggctatgttctaagaagaattatgagaagaggtatgagacactctcatttgttaggctcgaaagatccagtgtttcacaatatttttaaaagtctattagatgaaatgtcaaatagttatcctgaattagatagagctcaatcattaattaaagaaactttaaaaatggaagaagaaaaatttttagttttactcgaaagaggcatgaaaattttagatgaggagatctccaagatagataaagtcttaccgggtgaagtagcatttaaattatacgatacctatggttttccattagatttaactgaagatattcttaaaaataaatctttaaaaattgataacgataagtttcaaagtcttatgcaagaaagtaaggattttgcaaaaaaaaattggaaaggttctggtgacactgctgttgatgagatttggtttgatataaaagataaagtcggagcaactgaatttctgggctatgaaaaaattcaatcagagggagttattttaaaacttatcaaaaataataaagaagttgatagtttaaaaaccggtgagaaaggaatgattgttgtaaaccaaacacctttctacggtgaatctggtggtcaattaggagatattggaaaaataaat

SEQ ID NO: 306265 - DNA, 829 bp, Unknown
  Bacterial polypeptide expressing nucleotide sequence isolated from the Sargasso Sea
gctgattttgaaaaggagatggaaaaaagcaaagctcttgcgcgagctaattggaaagggtcaggagataagtctgttgaggaaagatggttcaaaatcagagaagaaataaatccaactgaatttttaggttatgaatttgataaagcagaaggtattgttattaaaatttcaaaagatggtaaatttgtagactcagctggcactggagatgaggtagaagttataacaaatcaaactccattctacggggagtcaggcggtcaggttggtgaccaaggttatatctttaattcagattgtaaaatagaaattaacgatactcaaaaaaaaatgggagatttatttgtccattatggaaaaataaaaaaaggctcaatttcaattgggcaaaacgttaggttagaaatagatgttctaaaaagaaataactctaaagcttatcattcagcaactcatttattacatgagtcattaagaagaactttaggaaaacatgtcactcaaaaaggttcgttagtttcaccggataggctaagatttgattttagtcataataagcctatagaaaaagaggaaatggaaaaaataaataatattgtaaacgaaattatagttggttctactgatgtacaaacaagaataatgactccaaaagaagcagtaagcatgggcgcattagcattatttggtgaaaaatatggacaagaagtgagagtagtttttatgggaaaggaaaataacggttttttctcaacagagttgtgtggaggtactcacgttaaaaatactaaagaggttggtaaatttaaagttataagtcagtctt

SEQ ID NO: 306266 - DNA, 883 bp, Unknown
  Bacterial polypeptide expressing nucleotide sequence isolated from the Sargasso Sea
attgatcatgaaaaatttcaaagtttgatgaaagaaagtagagagcttgctaaaaaaaattggaagggatcaggagacagtgccatagatgatatttggtttggtgttagagaaaaacttggtgcaacagaatttttaggttacgaaactaatcaagcagaaggtgttgtattgtcattatttaaagacaacaaagaggttgatcaattaaaatcaggtgaagaaggtatgataattgttaatcaaacacctttttatggagaatctgggggacaagttggagatgaaggagaaataatttcaggagattttaaatttgaagttaaagatgtacaaaaaaaattaggagatttatttgttcattatggaaatgtgaaaagtggatcaataaaattaaatagtagtgtagaaatgaaaataaatgtttcaagaagagataatattagagcataccattcagccacacatttattgcacgaatctttaagaagagtcttgggagagcatgtaactcaaaagggatcattagttgaaccagagagacttagatttgattttagccatatgaagccaataagtgcagatgaaatcacgaaaatagaaacatatgtgaacacaatggtagaaaaaaaatctgatgtaaaaaccagactaatgactccaaaagaagctgtagaaaatggagctttagcattatttggagaaaaatatggagaagaagtaagagttttatcaatgggagacgaagaaagtagttatttttcaactgaattatgtggaggaactcatgtcagaaatacaggtgatattggtaaatttaagatagtaagccaatcttcaatagcagcaggagtaagaagagtggaggctttaagagataaac

SEQ ID NO: 306267 - DNA, 253 bp, Unknown
  Bacterial polypeptide expressing nucleotide sequence isolated from the Sargasso Sea
gatggctgaaaaaacattaaaaaacgtaagaaaactatttttagattattttttaagtaagaaacataagattgtggattctagcagcttggttccaagcaatgatccaactttgatgttcacaaactctggaatggtgcaatttaaaaatgtttttacgggtttagaaaaaagagattacaaaagagctgttacttcgcaaaaatgtgttagagccggaggcaagcataacgatttggaaaatgtaggctat

SEQ ID NO: 306268 - DNA, 616 bp, Unknown
  Bacterial polypeptide expressing nucleotide sequence isolated from the Sargasso Sea
ttttatggagagtcaggtgggcaagtaggtgaccaaggttatatttttagttctaactgcaaaattaaaataaatgatactcaaaaaaaaatgggagatttatttgttcattatggaaaaattgaaaatggatcaatcaaaataggagaaaatgttaatttagaaattgataaaaaaaaaagaaataattctagagctaatcattccgcaacacatttgctacatgagtcactaagaagaacattgggaaagcatgttacacaaaaaggatctttggtttcccctgaaagactaagatttgattttagtcataacaaacctatcgaaaaagaggagatgattaaaattaatagaatagtgaatgaaattgttgatagatcctcagacgttcaaacaagaataatgacacccaaagaggcagttagtatgggcgctttagctttatttggtgaaaaatatggtgatgaggtgcgagttgtttttatgggaaaagaaaacaatggttttttttcaaccgaactatgtggaggcacacatgtaaagaacaccaaagaagtgggtaaatttaaaattataagccaatcttcaattgcttcgggagtcagaagagttgaag

SEQ ID NO: 306269 - DNA, 844 bp, Unknown
  Bacterial polypeptide expressing nucleotide sequence isolated from the Sargasso Sea
cggcacgcccacctaatggacgttcctgaacctctcatgtggaaattagtgcccacccttgttcaagaaatgtcggaggcatttccggagctccttcgggcccagtcgctcattgcagagacacttaagcttgaagaaacccgtttcagagaaactttaggaaggggcatgcgcctacttgaggaagcaacaagcaaactccgctccgaccaagaactttccggcgaaattgctttccaactgtacgatacctatggattccccctagatttaacggaagacgcccttcggcaacagggccgtaacgtcaaccgcatagagtttgacaaagcaatggacaagcaacgcgcactcgctaagagcaattggtcaggatccggtgatcaagcaacggagcaaatgtggtttgacttgaaacagatgcatggagccagtgaatttctgggttatacaactacttcggcagaggcgacggtgcttgccgtaatttcagagcaaaatattgtcgatgtcgcggcggccggagcacccgtcatggttttggtcaatcaaacacctttctatggggaatctggtgggcaggttggagatatcggaacgatatcagacccacacgggctccatattgatgtcaccaaaaccgtgagaaaggccgacgacttaataatacatataggcacaatcaaagcaggaactttatctccgggcaacattatcgatttgcgggtgaactctgaaaaaagaaatgctgctcgacggaaccactcggcgacacaccttttacacgctgcactgagaaaccatctaggagatcatgtggctcaaaagggttcactagtaagtc

SEQ ID NO: 306270 - DNA, 948 bp, Unknown
  Bacterial polypeptide expressing nucleotide sequence isolated from the Sargasso Sea
gaaggtcgtggttatgtgcttcgaagaataatgcgaagggctatcaggcatggatataaaattggtgccaagaaaccctttatgtataaattggtaaaagctttagtcaaggagatggggcccgccttttccatgttagtagacaagcaaaaatccatagagaaaattgttcatgaagaagaaaagaaatttcttgaaactttagaaaaaggcattgagatcttagataaggagattaagtctattgattcaaagattattccaggagaaattatttttaaattacatgatacttttggttttccattcgatttgacagcagacattgctcgagagcaagatttagatttagatgaggagggttttaatagctgcatggaggaacaaatcaaaaattcaaaatcagcaagtaaatttaaaggattgcaattagatttatcttcaattaaggaaacacagtttttgggctataaagaattgtctggagagggtaaggtcttagggatttggaatgaatctaatgcagtggataatgcatcagataaaaatgagtgctttattgcatttgataaaacacccttttatgcagaatcaggcggccaagttggagatcagggaagcttttctttttctggaggccatggaattattgaagattgcatcaagcaaggtaagatttctctccatagaattaaagtgcaagaaggagtcgtcaaaaaaaatgacaaattagaattatctgttgatgcaggtaaaagaaaggctgcttcagtccatcattctgctactcacttaatgcatgcagctttaaaagatgttcttggtgatcatgtgcatcaaaagggctcactattggattctaataagttacgatttgatttttcacattctaaggcagttaccaaagatgagatcaaggaaatagaattaattgtcaatcaatatatc

SEQ ID NO: 306271 - DNA, 829 bp, Unknown
  Bacterial polypeptide expressing nucleotide sequence isolated from the Sargasso Sea
gaatttttaggttatgagtttgataaagcagagggagttgttataaaaatttctaaagataataaatttgtggatagtgctgacgcaggaagtgaagttgaaattataacaaatcaaacacctttttatggagaatccggaggtcaagttggagatcagggaataatatttaattctgattgtaaaataaatattactgatactcaaaaaaaaatgggagatctttttgtacataccggaaaaattgagtctggcacaataaaaattggtcaaagcgttaatcttgaaataaatgttgaaaatagaaataactctaaagctaatcattctgcaacacatctgctacatgagtctttaagaaggactttaggtaaacatgtgacccaaaaaggatcattggtttctccagaaagattaagatttgattttagtcataacaaaccgattgaaaaagaggagatgattaaaattaataaagttgtaaacgaaatagttgacggatcaactgaggtacaaacaagaataatgacacccaaagaggctattaaattgggtgctttagccctttttggagaaaaatacggtgaagaagttcgagtagtatttatgggcaaagagtctaatggttttttttcaacagagctttgcggagggacacatgtaaaaaatacaaaggaagttggaaagtttaaagttattagtcagtcatcaattgcttctggggtaagaagagtggaagccttaagagataaacagcttcaagagtatgagaaattccaaaaacaagataaatcaataaaagaaaaaacaagcagagatcaattagaaa

SEQ ID NO: 306272 - DNA, 895 bp, Unknown
  Bacterial polypeptide expressing nucleotide sequence isolated from the Sargasso Sea
gatagaggaataaaaattttaaatgatgagatatcgaaaatagataaagtgctaccaggtgaagtggcttttaaattatatgacacctatggtttcccattagatcttaccgaagatattttaagaaataaatctatgttaattgatactaaaaagtttcagtctttgatgaaggaaagtagagaacttgctaaaaaaaattggaaaggatccggtgatgcagcagttgaaaatatttggtttggaataaaagataaattagaagcaactgaatttttaggatacgaaactaatcaagctgaaggtgtcgtattatctcttttaaaagataataaagaagttgatcaattaaaagaaaatgatgagggaatgattatagtaaatcaaacccctttctatggtgagtctggaggtcaggtaggtgatactggtgaaatagtatcaaatgattttaaatttgaagtaactgatgttcaaaaaaaattgggtgatttatttgtccattatggaaaggttaaaagtggatctattaaattacaggaaagtgtagaattaaaaattgatgtggaaagaagagataatactcgtgcttatcattcagcaacccatctgctacatgaatctttacgaagagttctaggtactcatgtaactcaaaaaggctcattagtagagccaagtagattaagatttgatttcagtcacatgaaacctattttgaatgaggaaattgataaaatagaggaatttgtaaacaaaatggtttcaaaaaaatctgatgtaaaaactagactaatgacacccgatgaggcagttaaaaatggagctctagcattatttggtgaaaaatacggcgatgaagtaagagttctttcgatgggagatgaggatggta

SEQ ID NO: 306273 - DNA, 697 bp, Unknown
  Bacterial polypeptide expressing nucleotide sequence isolated from the Sargasso Sea
atgattataactaatcaaactcctttttacggtgagtcaggaggacaacttggtgataaaggcacaatagtttctggaaattccgtatttgaagttgaggacacacaaaaaaaacttggagatttatttgttcattatggatcagtgaaaactggagaaattaaaattaatgatgtagttgaaatgaaaattgatgttgagagaagaaataatttaaaagcttatcattctgcaactcacttgcttcatgagtctttaagaagaactttaggtaagcacgtgatgcaaaaaggatcattagttgcaccagatcgtttgaggtttgactttagtcacatgaaaccgattactaatgaggaattagagacaatagataaattagttaacgaatacgttaaaaatggttctgaagtgaccacaagaattatgacacctaaagctgcaatagaaaagggagcgctagctttttttggtgaaaaatatggtgaagaagttcgtgtcgtttcaatgggtaaggaaaaagatgcttatttttcaacagaattatgcggtggaacccatgtaaaaaacaccggagatattggaaaatttaaaacagtcagtcaatcatctattgctgcaggagtaagaagagttgaagctttaagagacaaacggcttgaggattttattaagaataaagaaaagctttcaactt

SEQ ID NO: 306274 - DNA, 759 bp, Unknown
  Bacterial polypeptide expressing nucleotide sequence isolated from the Sargasso Sea
acgttcttaaaatactttgaaaagaatgatcataagattgttgagtccagtaatttagtgccaaataatgacccaacactaatgtttgctaattctggaatggtgcaatttaagaatgtatttactggtttagagaaaagagattatcaaagagcaaccacttctcaaaaatgcgtaagggcaggtggtaaacataatgatttagaaaatgttggatataccccaagacaccatactttttttgaaatgctaggaaatttttcttttggagattattttaaagaaagaggaatagaactagcgtggaatttgataaccaaagactttggccttgataaaaataggctttatgtaactgtttttcatgaggatgacgaggcttttaatttttggaagaaaattgcaggttttaatgatgataaaataattagaattgcaacgtcagataatttttggtcgatgggtgaaactgggccatgtggtccttgctcagaaatattttatgatcatggtgatcatttaaaaggaggattgccaggaaccaaagatcaagatggtgatcgctttattgaaatttggaatttagtctttatgcaatatgagcaagtttcaaaggataaaagaatagatttaccaaaaccatctgtcgatacaggaatgggattagagagaattgcagctcttttacaaggtacacacgataattatcaaactgatcattttaagaaattaataagttcaatatctgaagttacaaaa

SEQ ID NO: 306275 - DNA, 697 bp, Unknown
  Bacterial polypeptide expressing nucleotide sequence isolated from the Sargasso Sea
atgacattatcaactgctgacttacgtaacaagtttatcgattattttaaaagccatagccaccaagcggtggcgagctcgtcactggtaccggcagatgatcccacacttctttttaccaacgcgggcatgaaccagtttaaagactgcttcttaggtgcggaaaagcgcagctatacccgtgcggtatcatcgcagcgctgcgttcgcgcaggtggtaagcataacgaccttgagaacgtaggttacactgcgcgtcaccataccttttttgaaatgctgggtaatttcagctttggcgattatttcaaaaaagaagcgatagagtttgcgtggaatttccttaccaaagaaattggtttgccaaaagaaaagctcttagtcaccgtttattcagaagatgacgaagcgttcgacatctgggaaaaccacattggtgtgccaaaagaaaagattattcgcattagcacgtcagataacttctggtctatgggcgataccggtccatgtggtccttgctctgaaatcttctacgatcacggtgcgcacatttggggaggtcctccgggaacaccagaagaagacggcgaccgttttatcgaaatttggaacctggtatttatgcagtttaacaaacaagctgacggtaccatggagccactccctaagccttcaatcgataccggtatgggcctag

SEQ ID NO: 306276 - DNA, 752 bp, Unknown
  Bacterial polypeptide expressing nucleotide sequence isolated from the Sargasso Sea
aaaatcctcctcttttttaattgcagatggagttatgccttcaaatgaaggtagaggatatgttttacgaagaataatgagaaggggaatgcgacacgctcattctttaggtaataaagagcctgtttttcataagctattccctatttttttagatggaattaaaaattcataccctgaattagatagagcaaaagatctgattactaatacattaatgaatgaagaaactaaattcaaggaaactgttgaaaaaggaattaaaattttagatgaggaaatttctaactcaacaaatatatttaatggagaagtagcttttaaattatacgacacctatggatttccattagatttaacacaagattatttgaaaagtaaaaatattgaagtcgatataaaaacatttgaacaaaaaatgttagatcaaaaggaaagagcgagacaaagttggaaaggtacaggagacatcgaggatgaaggcatttggtttgaaataacttctaaaatagacccaacagaatttttaggatattctgatatggaagccgattgtaaaataatttcaatcatatcagaaaataagtcagtagataaaattaaaaaagatcaagaagcaattataatattaaatcaaacacctttttatggagaaagtggtggtcaggtgggagatcagggtttttttaaaaacgatagctttaagtttgaagttatgaatactacaaaaatatttggaaactattttcttc

SEQ ID NO: 306277 - DNA, 805 bp, Unknown
  Bacterial polypeptide expressing nucleotide sequence isolated from the Sargasso Sea
taccctccatacaggtgcaggctatgttatcagaagaatacttaggcgtgcagttcgatatggatatcagtttttaaattttaaggagccttttattcatttactggttgatgattttgtttcttcttttgatggatattacaaagaattggacagccaaaaagaattcattgctaaaatcatttttgaggaagaatcatcatttttcaaaacattaagctcaggaataaaaagaattgatgagattgtaaaaaagtgtcaaaaggacaagacaacgctaatttcaggagagcaatgttttgaattatatgatagttttggatttcctttggatttgacaagattattggcagtagaaaataatctttctattgatcaaaaaggctttgataaatgtcttgaagaacaacgaagtaggtcaaagcaagatgcttcaaagcaactgggtgactggatagtggtaaaagaggatgatgttcaggaatttataggttatgatcacactaagaccacccttctaattacccaatacagagaagtaactctgaaaaaagagaaattatttcaacttatttttaatcttactcctttttatccagaaggtggaggtcaagttggagatactggattcatacaaagtaacgagcagaaaataaccattatagatactaaaaaggaaaatggtgtaattgtccatttcgtaaaagaacttccaaaaaatctgaaggcaaattttctagcacaggtaaatgaaagatatagagaagatacagctaaaaaccatagtgcaactcatttattacat

SEQ ID NO: 306278 - DNA, 717 bp, Unknown
  Bacterial polypeptide expressing nucleotide sequence isolated from the Sargasso Sea
tatgcaaaaaggatctttagttgcgcctgatagactaagatttgattttagtcatatgaaaccaattacagaggatgagctaacaattattgataaattagttaatgaatacgtacaaaacaaaactgatgtaactacaagaattatgacaccaaaagctgccattgaaaaaggtgctttagctttttttggtgaaaaatatggagaagaagtgagagtagtttctatgggagcggaaaataactcttatttttcaacagaattatgtggtggaacacatgtaaaaaatacaggtgatattggaaaatttaaaactattagccaatcctcaatagctgctggagttagaagggttgaggctttaagggacaaacaactcgaaatattcttaaaaaataaggaaaaaatgtcaaacctttctgcacaaaaggatgaagacaatattaaggatgtttctgctcaaataattaaattaggtggaaaaccaaatttagaaaataaagatacgaaaggattaattaaagaccttaataaacaattagaacaattaaatatccaatctgttttaggtgataaaacaaaaaatataattaaagatgaaagtattaatggtacaaaaattagattacaaaaagttcaagatttatctccaaaagacctaagaaaacttgttgatgcaggtaaaaaagaattacgtgaaggtatagtagttgtttt

SEQ ID NO: 306279 - DNA, 859 bp, Unknown
  Bacterial polypeptide expressing nucleotide sequence isolated from the Sargasso Sea
ttattacatgctgctctaagaaaaatactgggcaagcatgtcacgcagaagggctcacttgtaaattcagaaaaacttagatttgattttagtcacaataatccaattgaaaaagatcaactcatgaatattgaagaaattgtaaatgatcaaattcaaaaaaatggaattgttgaaataaaaattgtggatcaaaaaaaagctattgaagaaggtgcgatggcattgtttggagaaaaatatagtgatgaagtaagagtagtaacaatgggtaaagaaaatgaatcattcttttcaaaagaattatgcggaggaactcatgttcttaaattaggggaaataagtaaatttaaaataactaatcaatctagtgttgcgtctggaataagaagaatagaggctgtatctaatgttgcagtggataaatatattaaagaaatagaaagaaatttattagaaaaaaataaaaaccaagataatcaaattgaagatttaaagaataaaattaaaaagattaatgctgattataattttaaaaatcaatctgaagacaaaggtttgttaattaaagaattaattcagatatatgaaaaattaaaacaaaatatgtctatatcaaaaaatattgataatattgttgtaaaaaaaatcaaagaattaaatttcatatacttggttgctgaagactaccctaataaatcattgaaaacatttattgatgagcaaaaaaaacaatataataaaaatagtgtttcgttaataatttcaaataataataacaaactatctatagtgctaggagttacagaagatattacagaactttttgatgcttcaaaaagaaataagagaaatttcg

SEQ ID NO: 306280 - DNA, 801 bp, Unknown
  Bacterial polypeptide expressing nucleotide sequence isolated from the Sargasso Sea
cgcgagaaatgataggattagtcgccacgtcgtcagagcttcttctgctgctgcgtctgcgaacgcagacactcaaaagtcgaccaacaaagataattccggtcgatccattcgcaaacggttcttagacttttacgaaaataaaggtcacgcggttttaccgtcctcttcgttagttccggaggatccaaccgtcttattaaccatcgccgggatgttgcagttcaagccaattttcatgggtcagaaagaacgcgaggtgaaatcggcgacgactagtcagaaatgcgtacgaacgaacgatatagagaacgtcggggtgacggcgagacatcacacgtttttcgaaatgctcgggaacttttctttcggggattatttcaaaaaggaagcgtgcgaatgggcttgggagttgagcgtgaaagagctcggaatcgacccagacaggatttgggtgtccgtgtttgagagcgacgacgaggcgttgggtatttggagggatcaaattggcgttcctgaagctaaaattttgagaatgggcgccgaggataacttttgggcggctgggccgacggggccatgtggaccatgcgcggaattgtattatgatttcaagcccgagttgggtgtggaaggcgtgaaggatttaaacgacgactcgagatttgtagagttttataacttagttttcatggagttgtcgagagatgcaaacgggaaaacaaccccgctgaagaataagaacatcgatacagggatgggattagaacgagtcgcgcagatttttacaaagaaaccaaa

SEQ ID NO: 306281 - DNA, 373 bp, Unknown
  Bacterial polypeptide expressing nucleotide sequence isolated from the Sargasso Sea
atggcagacaaaacactcaatgaaataagaaatactttcctaaagtattttgaaaagaatgatcataagattgtagaatctagtaatttagttcccaacaacgatcctacattgatgtttgctaattctggaatggtccagtttaaaaatgttttcacaggattagaaaaaagagattacgttagagctactacttcacaaaaatgtgtaagagcaggtgggaaacacaacgatttagagaatgttggttacacaccaaggcaccatacattctttgagatgttaggaaacttttcttttggtgattattttaaagagcaagcaattcattatgcctgggatttaataaccaaaagattttggaatagataaa

SEQ ID NO: 306282 - DNA, 778 bp, Unknown
  Bacterial polypeptide expressing nucleotide sequence isolated from the Sargasso Sea
ctcgtccccgaggaccccacggtcttgctcacgatcgcgggcatgcttcagttcaagccggtgttcatgggccaggaggagcgcaaggtccctcgcgcgacgacgacgcagaagtgcgtgcgcacgaacgacatcgagaacgtcggggtcaccgcgcgccaccacaccttcttcgagatgctcggcaacttctccttcggcgattacttcaagcgcgaggcgatcgagtgggcgtgggagctcgcgacgaaggagtacggcctcgacgccgagcgcgtctgggtcagcgtcttccgcgaggacgacgaggcgtacgccatctggcgcgacgtcgtcggcgtcccggagtcgcgcatcaagcgcatggacgaggcggataattactgggcagcgggccccaccggcccgtgcgggccgtgctcggagctgtactgggacttcaaacccgagctcgggatcgacggctcggaggacctggacgacgactcgcggttcatcgagttctacaacctcgtgttcatggagttcagccgggacgccaagggcgagacgacgccgctcgcgcggaagaacatcgacacgggcatgggcctcgagcgcatggcgcagattctgcagggcgcgccgaacaactacgagacggatctcatccgccccgtcatcgacgcggcggcggcgatggcgggcatctcgtacgactcggcggacgacgcgcagaagctcaagctcaaggtcatcggcgaccacacgcgcgcggtggcgtacctcatcgcggacg

SEQ ID NO: 306283 - DNA, 817 bp, Unknown
  Bacterial polypeptide expressing nucleotide sequence isolated from the Sargasso Sea
actggttttggagatgatagaataataaagatttctacttcagataacttttggtctatgggtgaaacaggtccatgtggaccttgttcagagattttttacgatcacggagatcaattgtctggtggtttgcctggaactaaagaccaagatggagatagatatatagaaatttggaatttggttttcatgcaatttgaacaaatttcaaaagataaaagaattaatctaccaaagccctcagttgataccggtatgggcttagagagaattaccgctttattacaaggcacgcatgataattataaaagtgatcattttaaaaaattaattgaatcgatatcagataccgtaaaagtaaaaagtgatgaaaataacatcgcaagttttcgtgtgattgcagatcatctaagagcgagctcgtttttattagccgaaggtgtattaccatctaatgaaggaagaggctatgttttaagaagaattatgagaagaggtatgagacactcccatttgttaggttcaaaagatccagtgtttcacaatatttttaaaagtctattaaatgaaatgtcagatagttatcctgaattagatagagctcaatcattaattaaagaaactttaaaaatggaagaagaaaaatttttagttttactcgaaagaggtatgaaaattttagatgaagagatctccaagatagataaggtcttaccgggcgaagtagcatttaaattatatgatacatatggttttccgttagatttaactgaagatattcttaaaaataaatctttaaaagttgataacgataagt

SEQ ID NO: 306284 - DNA, 817 bp, Unknown
  Bacterial polypeptide expressing nucleotide sequence isolated from the Sargasso Sea
ccctcagttgacacaggaatgggattagaaagaatagcagcagttcttcaaggaactcacgataattacagcatagatcattttaaaaaattgatgaatgcatcatcagaaattacaaaaactaaaatagacaacaaaactatagcaagccacagagtgattgcagatcatcttagagcaagtagctttttaatagcagaaggggttttaccatcaaatgaaggtcgcggttatgttttaagaagaattatgagaagaggtatgcgccacgcacatacacttggaagcaaaaacccaatattctacaaactatttgatgttctgttaaacgagatgtcacaaagttatcctgaacttacaagaggaaaagatttagttgttgaaacattaaaaaacgaagaggaaaaattttcatcgcttttagacagaggcatgaaaatattaaatcaaaatttagaaaaaattaaaaataatactttaccaggtgaaatagcttttaaactttacgatacctatggttttccattagatttaactgctgatattttaaaaagtaaaaaaatcaaaattgataccaatgtttttgacaaagaaatggcaaaaagcaaagaaatagctcgagctagctggaaaggatcaggagataaatctattgaagaaaaatggtttaaagtaagagaagagctgaatcccacagaatttttaggatatgaatttgataaggctgaaggagtgattttaaaaatatcaaaagataataaatttgttgatagtgcaaaaacaggagatgaagtagaggttataactaatcaaacac

SEQ ID NO: 306285 - DNA, 763 bp, Unknown
  Bacterial polypeptide expressing nucleotide sequence isolated from the Sargasso Sea
atgcgcacgctaaatgatattaggtctacatttttagattattttaaaaggcagggacacgaagttgtccaatctagtccattggtgccccgaaatgaccctacattgatgtttgctaattctggcatggtgcagtttaaaaatttgtttactggggtagaaacaagagattataaacgcgctgtaacctctcaaaaatgtgttagagcaggtggtaaacataatgatcttgataatgttggctacactgctcgtcatcatacttttttcgaaatgttgggtaacttcagctttggggattactttaagtctgaagcaataccatttgcatgggaactgattacaaaagaatttgatattcctaaagaacgacttcttgtaactgtttatcatacagatgaggaggctgcgctgctgtggaaaaaggtagcagggcttcccgatgataaaataatacgaatttcgactaacgataatttttggatgatgggggccactgggccatgtggaccatgtacagaaatattttttgatcatggtgagaaatattggggtggcccaccaggctcgcctgaggaagatggtgatagatttgtagaaatttggaaccttgtatttatgcaatatgagcagtttgaagatgggacaaggaaagatcttcctaatcaatctattgatactggtatgggcatcgaacgcgtagcggctttactgcaaggtacaaatgacaactatgaaactgatcttattagggcccttatcg

SEQ ID NO: 306286 - DNA, 588 bp, Unknown
  Bacterial polypeptide expressing nucleotide sequence isolated from the Sargasso Sea
tggtgctgtctttagtgtggttgataccatcaaagtaagtaaagcttttgcccataaaggcagcttaaagggcgctttggctatcggtgatttagtcgatgcggccattgataatgcccgtcgtgaagctattcggaaaaatcactcggccacccacttgttgcacgcagcgctgcgcactgtcttgggtgagcacgtgacgcaaaaaggctctttggtaggttcagaacgtttacgttttgacttctcgcattttgaagcagtaaaagccgatgaaatccgtcgcattgagcagatggtgaatgaacaaattcagcaaaaccacgaagtgttgacccgtctgatgaatgtcgatgacgccaaagctgcaagcgctatggcgctgtttggtgaaaaatacgatgacgaagtgcgtgtactgagtatgggcgacttctcgattgaactttgtggtgggactcatgtgtcccgcactggtgatatcggcctgttcaaaattgtggtcgaaagcggtatagctgcaagtattcgtcgtattgaagctgtgactggcgaaagtgctttagcttttgtgcataagctggaaca

SEQ ID NO: 306287 - DNA, 808 bp, Unknown
  Bacterial polypeptide expressing nucleotide sequence isolated from the Sargasso Sea
ttttaaaaaaaatggacatgaggttattcattctagttctttagtaccagataatgatcccactctaatgtttgctaattctggaatggtacaatttaaaaatatttttacaggtaaagaaacaagagaatataatagagcgactactgctcagaaatgtgtaagagcaggtggtaagcataatgatttagaaaatgtaggatacacgacaagacaccatactttttttgaaatgttaggtaacttctcttttggagattattttaaagagttggctatagaactagcatggaatctaattactaaagaatattcaataaataaagatagactattagtaactgtatattctgatgatcaggaagcttttgatttatggaaaaaaatagctggtttgtctgaaaataaaattattaaaattagtacatctgataatttttggtcaatgggtgaaactggtccttgtggtccatgttctgaaatattttatgatcatggtgataaatacgaaggaggccctccaggttcaccaaacgaagatggtgatagatttatagaaatatggaatttagtatttatgcaatatgagcaaatatcaaaatctgagagaataaatctaccaaaaccctccatagatactggaatgggattagagagaatgacagctcttctagatggttctaacgataattattcaacagatttatttctaccgataataaatgaatcaacaaaactatgtggtgatgaaagttcaataacaaatcctagtcacagagtaatagcagatcacttaaaatcttcctct

SEQ ID NO: 306288 - DNA, 778 bp, Unknown
  Bacterial polypeptide expressing nucleotide sequence isolated from the Sargasso Sea
ggaaagcataatgatttagaaaatgttggtcacactgcaaggcatcatactttttttgaaatgctaggtaatttttcatttggagattactttaaggaaaaagcaatttattttgcttgggatctattaacaaaagaatttggtttttcaaaagataaattactagttacttattatcatgacgatatagaagccaaaaaaatatggaaaagtgtttctgggttagacgataaaaaaatcattgctattaatacaaatgataatttttggtcaatgggtgatacaggtccatgcggtccatgctctgaaattttttatgatcacggtgagagcatctttgggggtccaccaggcagcaaaaatgaggatggtgatagatatattgaaatttggaacttagtgttcatgcaatttgagcaaatagataatcaaaaaaggattaatttaccaagcccgtcaatcgacacaggtatgggattagagagacttgcagcaatattacagggtaaacatgataattatgatatagatttgatggaaaaattaattaccgcaagtgctaataaatcatcaactaataaagatggaaaatttaaagtttctcatagagtcattattgaccatttacgatcatcgagttttttaattgctgatggaattttaccttctaatgaggggaggggttatgtattaagaagaattatgagaagaggtatgaggcatgcacatattttagggtgtaaggatccactattttgtaaattagtaccagatctaa

SEQ ID NO: 306289 - DNA, 855 bp, Unknown
  Bacterial polypeptide expressing nucleotide sequence isolated from the Sargasso Sea
ttttggattagataaaaatagactttatgtgacagtatttcatgaggatgatgaagcctttaatttttggaagaaaattgcgggttttaacgatgatagaataattagaattgcaacttcagataatttttggtcgatgggtgaaactggaccatgtggaccatgctcggaaattttttatgatcatggagatcatttaaaaggtggattacctggaacaaaagatgaggatggagatcgatttattgaaatttggaatttagtctttatgcaatatgaacaaatatcaaaagataaaagaattaatcttccaaaaccttctgtagatactggaatggggttggagagaattacagctttactacaaggtacacacgataattatgaaacagatcacttcaagaaattaattcaatcaacatcagatatagttaaaaaaaaacctgatcaaaataatctctcaagctttagggttattgcagatcatttaagagctagcacatttttaattgctgagggagttttaccatcaaatgaaggaagaggttatgtcttaagaagaattatgagaagaggaatgaggcactctcatttacttggatcaaaagagccagttttttataatttatttgaaaccttaaaaaatgaaatgtctggaaattatcctgaactaaaaagagcggagtcattaattagagaaactttaaaaatggaggaagaaaaatttttagtattattggatcgaggtattaaaatattaaatgatgaaatatctaaaatagacaaggtgcttccaggagatgtcgcttttaagttatatgatacttatggatttccactagacttaacagaaga

SEQ ID NO: 306290 - DNA, 760 bp, Unknown
  Bacterial polypeptide expressing nucleotide sequence isolated from the Sargasso Sea
atttctgaatttacaaatgtaaaacaagatgaaaataatttatctagctttagagtaattgcagatcacctaagagctagctcatttcttcttgcagaaggagtattaccctcaaatgaaggcagaggttatgttcttagaagaataatgagaagaggaatgagacattctcatttgctgggttctaaagaaccagttttcaataaaatctttgatacattgaaagatgaaatgaaaggaaattatcctgaattagaaagatcagaaactttaattaaagaaacattaaaaatggaagaagaaaaatttttagtattacttgatagaggaataaaaattttgaatgatgaaatttcaaaaattaaaaaagttttaccaggtgaagtagcgtttaaattatatgatacttatggtttcccactagatttaactgaagacattttaaaaaataaatctttgactgttgatcaaaataaatttgatgaactaatgaaaaagagcaaagaacttgcaaaacaaaactggaaaggttctggagatgcctctgaagaagaaatctggtttggtataaaagataaaataggacctacagagtttcttggatatgagtttgaccaatcagaaggagtggtgttatcaataattaaaaataataaagaagcacaaaaaatttcaaatgatgaggaagggataattattactaatcaaacccctttttatggagagtctggtggacaagttggagatcaaggaacaatag

SEQ ID NO: 306291 - DNA, 920 bp, Unknown
  Bacterial polypeptide expressing nucleotide sequence isolated from the Sargasso Sea
tttgaaaagctccaaaatccgggaatcctacataaaatattttgagaatcaaggacatgtcaacgaaccaagtgcttccttgattccctctggtgatccaacattattgtttacaagtgcggggatggttcctttcaaagcttattttatgggtgagcaagtccctccttctactaggatgactagtatacaaaaaagttttagaaccacagacattgatgaagtaggagatcataagcatttaaccttttttgagatgttggggaatttcagttttggagactactttaaagaagaatcaattacttatgcatgggaggtttgcactaaggtttttgggctaaatcctgacaaattttatatcactgtgcatttagatgatgatgaagcttacgattattggcaccataccatcggcatccctattgatagattatatagatacgggaataaagacaactggtggggtcctgccggagaagaaggacctacagggccttgttcggaattgcattatgataccggagcagtaaaagggtgtggggatttactcagtgttgatgaattaacaggatacgaaaggcttgaaaatgaagggaaaacagtaaaatggggcccaggttgccatcccaactgcgacaattgtgaaaggtttgtagagttatggaatctggtattcacgcagttctatcaagatacagatgggcagcgcactaaccttccctctcctaatattgatacaggaatggggcttgaacgtgttacggccgttcttcaagataaaagtaatgtatatgagacagacttgttttctccaattattaactctattgaagatttgacagggtcaaaatatggaggagaagaatctactgactactctatcagagtagtggcagaacatggtagggcggctactt

SEQ ID NO: 306292 - DNA, 853 bp, Unknown
  Bacterial polypeptide expressing nucleotide sequence isolated from the Sargasso Sea
aagacgcgctacaagattcggaagagttttaaacatgcatgagcccttcatctataaacttgttcccattttggcagaggtaatgggtgaagcattcccagaaataaatacacagcaggaacatgttcaaaacgttattaagtcagaagaaactagtttcggctctaccttggacagaggtttggatatttttcagaaaattatttcaagcactgagactaaatcatcaaagattgtttcaggtgaagatgctttcaagctttatgatacttatggtttccccattgatttaacgcgtcttatgacgaaagaacatggttttgaagttgatgaaatggagtttgaaaaattaatggtaaaacaacaagaacgtgcccgcgaagcagcaaagtttaaaacaattccgaataaatggattgaaatttctgaaggacatgattccaaatttataggttatgataccttcaccacagaatctaaactacgccgcttttctcttaatgattcagggcaatggcagtttattttggacactacccctttctacgcagaatcaggtggtcagattggtgatcaaggatttttgcaacaaaataataatatttggaaagtattagatgtccagaaaatgggtgattcgattattcatatttgtgaggctgaaaataaaagatcaaaaaacattgttcctaacaattcaaaaattacagcttctgtagatgaaaattctagattatcaacaacaaacaatcatactgcagcgcatctcatgcatgaggggctgcgtaaggtattaggtaatcatgttacgcaggcaggttctctggtcaatcgggaaatgttaaggtttgac

SEQ ID NO: 306293 - DNA, 575 bp, Unknown
  Bacterial polypeptide expressing nucleotide sequence isolated from the Sargasso Sea
aatgaattctaaccttatcagatctaatttcataaagttttttgaggaaaaaggtcactcttttgtccagtcttcatctatagttgcaaagaatgatccatcattaatgtttaccaatgcaggtatgaatcagttcaaaaacatctttttaggtaatgagtcgagtaaagtaaaacgtgtcgctaactctcagaaatgtttaagagtttcaggaaaacataacgatttagaggaagttggtgctgatcactaccatcataccatgtttgaaatgctgggtaattggagttttggcgattattttaaaaaagagattatcaattggagtctagaaattttgactaaagtttataaactaaataaagatgacttatatgtaacggtttttgaaggcaataaagaagatcaattagacaaagatatagaagcatataaattttggtctgaaataattaataaggaaaaaattgttcttggagataaaaaagataacttttgggaaatgggcgatacaggaccatgtggtccctgttcagaaatacatattgatttaagatcttctgatgacaaaaata

SEQ ID NO: 306294 - DNA, 811 bp, Unknown
  Bacterial polypeptide expressing nucleotide sequence isolated from the Sargasso Sea
ccttctgttgacacaggaatgggcttagaaagaataactgcagttcttcaaggaactcatgataattacaacatagatcactttaaaaaattaatgtctgcatcatcagaaattacaaaaaccaagatagataatgaaactattgcaagtcacagagttattgctgaccatcttagagcaagtagctttttaatatcagaaggagttttgccttctaatgaaggtcgcggctatgttttgagaagaattatgagaaggggaatgcgtcatgcacacacattgggaaccaaagatcccattttttataaattgtttgatgttcttttaaaagagatggcacagagttacccagagttaaaaagaggcaaagatttgattatagaaacattaaaaaatgaagaagaaaaattttcttcattattagatagaggaatgaaaattctaaaccaagatctgaaaaaaataaaaaataatatttttccaggtgaaattgctttcaagctttatgacacttatggttttcctctggatcttactgcggacattttaaaaaataaaaatattaaaattgataatgatgcttttgataaatcaatggaaaaaagcaaagaacttgctcgcgccagctggaaaggatcaggagataaatctttggaggagaaatggtttaaagctagggaagaacttaagcccacagaatttttgggttatgagcttgataaagcagaaggcgttgttctcaagatatcaaaaggtaaagattttattaaagaagcaaagacaggcgatgatgtagaaatagtaactaacc

SEQ ID NO: 306295 - DNA, 763 bp, Unknown
  Bacterial polypeptide expressing nucleotide sequence isolated from the Sargasso Sea
aatttttggaagaaaatagcaggttttagcgacgatagaataattagaatagcaacttcggataatttttggtcaatgggagagacaggaccatgtggaccttgttcagaaatcttttttgatcatggtgatcatttgcatggcggattacctggtaccaaagatgaggatggagatagatttattgaaatatggaacttagtcttcatgcaatttgaacaagtcacaaaagataaaagaataaatcttccaaaaccatctgttgatacaggaatgggtttagagaggattgctgcattacttcaaggcactcatgataattatgaaacagatcattttaaaaaaataattaattctgcatcagatataattaaaattaaatcagataaatcaaatctatcaagttttagagttattgcagatcacttaagagcaagttcatttttaattgctgaaggggtattgccatctaatgaaggaagaggctatgtgcttcgaagaattatgagaagagggatgaggcactctcatttgttaggagctaaggatccagtattttcaaaattgtttgatacattgttaaacgaaatgtcaggaaattatcctgaacttaaaagagcagagtctttaattaaagaaactttaaagatggaagaagaaaaatttttagttcttttagatagaggaattaaaattttaaatgatgaaatttctaaaatagacaaagttttaccaggtgatattgcctttaaactttatgaaa

SEQ ID NO: 306296 - DNA, 922 bp, Unknown
  Bacterial polypeptide expressing nucleotide sequence isolated from the Sargasso Sea
agctttattgcaaggcactcatgacaattatcaaacagatcactttaaaaaattaattgattctatatctgaaactataaaagttaaacaagatcaaaataatatttctagctttagagttatagctgaccacttaagggctagttcttttttgatagcggaaggagttttaccttctaatgaaggaagaggctatgttcttagaagaataatgagaagaggcatgaggcactcacacttacttggttccaaagaaccaattttttataatatttttaaaactttaatggaagaaatgaaaggaaactattcagagttacaaagggcagagtctttaattaaagaaactttaaaaatggaagaagaaaaatttttagtacttctggatagaggaataaaaattttaaataatgaaattacgaaaatagataaagttttacctggagaggtagcatttaaactttatgatacttatggttttccattagatttaactgaagatatattaaaaaataaatctttaaaaattgataatgaaaaattccatgctcttatgaatgagagtaaagaacttgctaaaaagaattggaaaggttcaggagatagcgcaatagatgatatctggtttgacattaaggataaattaggctctacagaatttttaggatatgaaactaatcaagccgaaggagttgttatttcattgttgaaagataataaagaagttgaaattctaaattctggagatgaaggaatgattattacaaatcaaaccccattttatggagagtccggaggccaaattggcgacaaaggaaaaattatctcaggggagtttaaatttgaagtatcagatgtccaaaaaaaattaggtgatctatttgtacattatggaaatgttaaaaatggctcggtaaaataa

SEQ ID NO: 306297 - DNA, 676 bp, Unknown
  Bacterial polypeptide expressing nucleotide sequence isolated from the Sargasso Sea
aatgagtgaaataaggggcaaatttcttgactatttttcaagaaacaaacaccaaaaagtagattcgagcaatatagttcctaacaatgatccaaccctaatgtttacaaactctgggatggtacaatttaaaaatgtttttacaggaatagagaaaaagtcttttaaaatagcaactacatcacaaaaatgtattagggcgggtggtaagcataatgatttagaaaatgttggatacaccccaaggcatcatacattttttgaaatgctaggaaatttttcttttggagattattttaaagaaaaagccattttttatgcctgggaattattaaccaaagattttggtattcctaaggatagattatctgcaacagtttattcagaggatgaggaagctttcaaactatggaagaaaatagccggactaccagaaagcaaaattgttaaaatttcaactactgacaatttttggtctatgggagaaactgggccgtgtggtccttgctctgagatattctacgatcatggcgataaactaaaaggaggccctcctgggagtcctgatcaagatggagatagatttattgaaatttggaaccttgtttttatgcaatttgaacagatttctaaaaataaaagagttgatttacctaagccatcagtcgacacaggg

SEQ ID NO: 306298 - DNA, 715 bp, Unknown
  Bacterial polypeptide expressing nucleotide sequence isolated from the Sargasso Sea
gctaccgagtttcttgggtatgaaactcaggaagcattcggcaaagttcttcatatcgtttgtgatggatcccaagttaacaaggccgttaaaggtcaagaggtgcaacttgtttttaatcaaacgccattttttggcgagtcaggagggcaagtttctgattcaggacggctaatttcagatctaggtaagggagacatttgtagagttgaaagaaaaggtaatttgtatgttcattttacaaagataacagagggaaatatcgttactaatgccgaagttaatttaaaagtgaataaacacctccgccagtcaaccagtcgaaaccattccgctacccatcttatgcatgaggctctaaggtttgtattaggtaatcacgttactcagagaggttccttaaacgattctaagagactgaggtttgatttcaaccattctaaaccggtgactagagccgaattgctttctgtagaagccagcgtaaattatcaaatacgccaaaactcatcggtcaatacccgaataatgacactctcggaagccaaagcaataggcgctaaggcattgtttggagagaagtatggagaagaggttagggtggtttcaatgggtgtgagagaaaaagcagtagaagaaactcagaatgatactttttcagtcgagctctgtggtggtactcatgtaaaaaataccggagatattggctttttta

SEQ ID NO: 306299 - DNA, 951 bp, Unknown
  Bacterial polypeptide expressing nucleotide sequence isolated from the Sargasso Sea
ttttagtgaagatgaagaagcttacaaatactggaaaaaaattgccggattaagtgacgagaagataattaaaataagtacatctgacaatttttggtcaatgggagaaacaggtccttgtggaccatgttcagaaattttttatgaccatggcgataaatatgcaggcggaccaccaggaagtccaaatgaagaaggtgatagatttattgaaatttggaatcttgtgtttatgcaatttgagcaaataacttcatctgaaagaattaatcttccaaaaccttctattgatactggtatgggcttggagcggatctcagctttattaaataagactaatgataattatagtacagatttgttttctcctttaattactaagtctatagatttgttaaatgatgaaagtcatttaaacagccccagtcatagagttatagctgatcatctaagatcctcatcttttttaattgctgatggtgtcacaccctctaatgaaggcagagggtatgttcttagaagaataatgagaagaggtatgagacatgcccatactctaggaaataaaaatccagtatttgataaaatttttccaacattattagatatttttaaaactgcataccctgaattgattagagctaaagatttaataatcaatacctttattaatgaggaaactaaatttaaagagactgtagaaaaaggtctaaaaatattagaagatgaaatctctttatcttcaaataaactagatggtaaaattgcatttaagttatatgatacatatggctttccattagatttaacgcaagattatcttaaatcaaaaagcattgaagttgatgttgagtctttcaatcaaatgatgaaagagcaaaaagaaagagcacgtaaaaactggaaaggcacaggtgatccaggagatcaaaaaaactggtttaaaattac

SEQ ID NO: 306300 - DNA, 926 bp, Unknown
  Bacterial polypeptide expressing nucleotide sequence isolated from the Sargasso Sea
gctcgaaaaaagaaattacaaaagagctaccacatcacagaaatgtgttagggcaggaggtaaacataatgatcttgaaaatgttggatacacaccaaggcatcacactttttttgaaatgttgggaaatttttcatttggtgattattttaaagatgttgctattgagttagcatggaatttaataactaaggaatttcaaatcccaaaagagaaaatcagtgtaagtgtgtactcagaggatatagaagcttttaatttatggaaaaaaattgctggtctatccgaaagtaaaatttataaaatatctacaagtgataatttttggtcaatgggagatctaggtccttgcgggccctgttctgaaatattttatgaccatggagatcatctaaaaggtggacctccaggtagcaaagatcaagatggagatcgttttatagaaatatggaatttggtatttatgcaattcgaacaagtttcaaaagataaaagaataaatcttccaaaaccatctgtggatacaggaatgggcttagaaagaatttcggctttacttcaaggaactcacgataattatttgacagaccattttaaaattttaattgaaacttcatcaagtttaaccaaaactaaagtaactaaggaaaatatatcaagtcatagagttatagcggaccatctaagggctagctcatttttgattgctgaaggagttttgcctgcaaatgaaggcagaggttatgttttaagaagaataatgcgaagaggaatgagacattcacatactttaggtagtaaagagccaattttctataaaatgattccaactctgattaaggaaatgtcagattcttatcctgaactaaagagggcagagccgttaattacagagaccttaaaaaatgaagaagaaaattttcttc

SEQ ID NO: 306301 - DNA, 856 bp, Unknown
  Bacterial polypeptide expressing nucleotide sequence isolated from the Sargasso Sea
ttgtaaaataatttcaatcatatcagaaagtaagtcagtagataaaattaaaaaagatcaagaagcaattataatattaaatcaaacacctttttatggagaaagtggcgggcaggtgggagatcatggtttttttgaaaatgatagctttaagtttgaagttatgaatactttaaaaatatttggaaactattttcttcacaaaggtaaagtaattagtggtgaatgcgaaattgaagatattattaaagcaagtattaatacattgaatagagattttattaaatataatcattcttcaactcatttattacatgctgctctaagaaaaatactgggcaagcatgtcacgcagaagggctcacttgtaaattcagaaaaacttagatttgattttagtcacaataatccaattgaaaaagatcaactcatgaatattgaagaaattgtaaatgatcaaattcaaaaaaatggaattgttgaaattaaaattgtggatcaaaaaaaagctattgaagaaggtgcgatggcattgtttggagaaaaatatagcgatgaagtaagagtagtaacaatgggtcaagaaaatgaatcattcttttcaaaagaattatgcggaggaactcatgtagttaaattaggagaaataagtaaatttaaaataactaatcaatctagtgttgcgtctggaataagaagaatagaggctgtatctaatgttgcagtagataaatatattaaagaaatagaaagaaatttattagaaaaaaataaaaaccaagataatcaaattgaagatttaaagaataaaattaaaaagattaatgctgattatatttttaaaaatcaatctgaa

SEQ ID NO: 306302 - DNA, 835 bp, Unknown
  Bacterial polypeptide expressing nucleotide sequence isolated from the Sargasso Sea
acacatcttttacatgaatctctgagaagagtattaggggatcatgtaactcaaaaagggtctcttgtagagcctagcagattgagatttgattttagtcatatgaagccaatccaaaatgatgaaattgataagatagagaaatttgtaaataatatggtttcaaaaaagtcagatgtgaaaaccaggttaatgacacctgatgaagccgtggaaaaaggagctctagctttatttggtgaaaaatatggtgacgaagtaagggtactttcaatgggagatgaagatggaaagtatttttctacagaattatgtggtggaacccatgttaaaaatactggagacattggaaaatttaaaatagtcagtcaatcctcaatagctgctgggattaggaggatagaggctttaagagacaaacaattagaggattatctgaaaaataaagaaaaactttcagcgttatcctctgaaaaagataatgaaaccgttaaagatttaagtgagcaaatcatcaagcttggagggaaacctagcttggaccaatctgatcaaaaaaacttaattaaaaacttaacaaaacaattagaaacactttctgtaaattcaattttaaatgatgaatcaaaaaatattattaaagaccaagatattaatggaattaaattaagacttcaaaaagttgatgatcttcctcctaaagagttaagaaaattagttgatcaaggcaaaaaagatttatcagaaggtattgtggtagtttttgcaagcaaggatgacaaagtaggaatagcagtaggggttacagaaagcttaacaagtaaatatgatgctg

SEQ ID NO: 306303 - DNA, 598 bp, Unknown
  Bacterial polypeptide expressing nucleotide sequence isolated from the Sargasso Sea
aatgaactcatctgttgttagagaaaagttttttgatttttttaaagataaacagcatcagataattccgtcagcatctgtaattaacgaaacagataaacacttgatgtttactaatgctggaatgaatcaatttagaaatatttttactggagatcagaatccaaaattttctagagtagcaaactctcagaaatgtttaagagtttcaggtaagcataacgatcttgaggaagtaggaattgacacatatcatcatacattttttgagatgcttggtaattggagttttggagattattttaaaaaagagattatagggtggtcgtatgaactgatgacaaaagtatatggtttaagaagcgaagatttatatgtttctgtttttgaaggttcaaaagaggataaactagattacgatgaagaatcattaaatgaatggaaaaagtatttttcagtagacaaaattataaatggtaataagaaagacaatttctgggaaatgggagatattggtccttgtgggaccttgtcagagattcacatcgatcttagatcatcctcagaaaaaaagaaaataaaagatcagagcttgtaa

SEQ ID NO: 306304 - DNA, 664 bp, Unknown
  Bacterial polypeptide expressing nucleotide sequence isolated from the Sargasso Sea
tagaatagatatagcaaaaaataatgatgaaatattctttgcatgtaatcaaactcctttttatgcagaagctggaggacaaataggcgataagggaaaatttgcatctaattcgtctgctggtagtattttagattgtaagaaacaaggaaaggtatatttacatagggcaataattgagaaaggaaaaattaatacaggcgatgttatcaagatgagtgttgaaaaagaaaaaaggtctgcaattactatacatcactcttcaactcatttagttcatgcggcgcttagagaagttttaggagaccacgttcaacaaaaaggatcattagttgatgaaaataaacttaggtttgatttttctcattcaaagcccttaactcaaaaagaaattagcaagatcgaagaaattgtaaacaaggaagcgcttaaaaatcttgaggtgaaaacagagttaatgaaactcgatgatgcacttaaatctggagctatggcgttatttggtgagaagtatgacgacgatgtcagagtacttactatgggagaaaattcctattctgttgaattgtgtggagggacacatgtcaatagaactggtgatattggattatttgtaatcactaatcaatcaagtgttgcctctggaattagaagaattgaagca

SEQ ID NO: 306305 - DNA, 888 bp, Unknown
  Bacterial polypeptide expressing nucleotide sequence isolated from the Sargasso Sea
agactttggtttagacaaaaataggctttatttcacagtttttaacgaagatgaagaagctcttaaactttggaaaaaagtaactggattaagtgaggacaaaataattaagatttcaacatcagataatttttggtccatgggtgaaacaggcccatgtggcccttgttcagaaatattttatgatcatggagaccatttaaaaggaggattaccaggaacaaaagagcaagatggagatagatacattgaaatttggaatttagtatttatgcaatttgagcaaatttctaaagacaaaagaataaatttaccaaaaccatctgtagatacaggaatgggtttagaaagaattgcagcattactacaaggcacacatgacaattatgaaacagatcattttaaaaagttaattaattcaatttcagacgcagtaaaagttaaacaagatcaaaaaaatatttctagctttagagtaattgcagatcatttgagagcaagttcgtttttaattgcagaaggtgtcttaccatcaaacgaaggcagaggttatgtattaagaagaattatgagaagagggatgagacattctcatttactaggatcgaaacaaccaattttttacaacatttttaaaactttaatgcatgagatgtcaggaaattatcctgaacttgtaagagcagagtctttaattaaagaaactttaaagacagaagaagaaaaatttttagttttattggaaagaggaatgaaaattttaaatgatgaaatttctaaaatagataaaattttaccaggcgaagttgcttttaaattatatgatacttatggatttcctctagacttaaccgaagatattttaaaaaataagtcattaaaaataga

SEQ ID NO: 306306 - DNA, 892 bp, Unknown
  Bacterial polypeptide expressing nucleotide sequence isolated from the Sargasso Sea
cagaaaggctcctatgttgactcgtctaaattaagatttgattttagtcataaaaaagctctttctgtatctgagttgtcggaagtagagaggctagttaacagccagataagagctaactacccgatagaaactgaaataaaggatttccaaaaagcccttgaggatggtgcagtagcattttttgaggagaagtattctgatgaagtaagggtgttgacaatgggctctttttcatcagagctctgtggaggtactcacgctttacgaacaggagatttgggtatcttcaaaattacctctcaaacctcggtaggttctggcctccgaagaatcgaggcggtctgtggcgaaaatgcggaaatctttatttctgataatcaaaggaagctctcgagcatttcggaactggtaaaatcgagtaccgacaggttggaagaaaaaatcaccgacctggtaagaatgaagggtaaactagaaaaagatatagccactctcaaaaagaaacttacgggagatggtcaggatgatttgagtaatgcgatagaagtgttcggtgaagtaaaagtagtaagtaaatttttacaagattcgagtatggacatattaagagatagttgtgaccgtttgaaagataaacattctaatataatagtggttttgggaactgttgaggaggataaagtccgcttggttgcaggagttacgcgagatttaagtgaagagataagtgcagtagaactaataaatttcgtggccgaccaggtgggtggtaaaggcggtggtcgcccagacatggctcaggctggaggctctaagcctgaatatttggaacccgcattaggaacggtgaacgaatgggtaaagagcaaactttgtgatgcaaagtgat

SEQ ID NO: 306307 - DNA, 526 bp, Unknown
  Bacterial polypeptide expressing nucleotide sequence isolated from the Sargasso Sea
atgagccaaattttgcttacagatgtaagaaaaaagtttttagaatattttaaaaaaaacaatcatcaaattgtcgactctagtaatttagtcccaaataacgatccaacactaatgtttactaattcaggaatggtccagtttaaaaacgtatttaccggtttggaaaaaagaccatacaaaactgctaccacgtcacaaaaatgtgtaagagcaggtggtaaacataatgatttagaaaatgttggttatacacctagacatcacactttttttgaaatgctaggaaatttttcattcggtgattattttaaagagcaagctattcatcatgcctggaatttactgaccaaagattttgggttaccaaaagaaaaattatcagtaacagtatttcatgaggatgatgatgcatttattctttggaaaaaaataactggtttaaatgagaataagataatcaaaatatcaacatctgataatttttggtcgatgggagatacaggaccttgcggaccttgctctg

SEQ ID NO: 306308 - DNA, 646 bp, Unknown
  Bacterial polypeptide expressing nucleotide sequence isolated from the Sargasso Sea
acaaggttaatgaccccagatgaagctgtagaaaacggagctttagcgttatttggtgaaaaatatggagatgaagtgagagtgctttctatgggagatgatgatggaaaatatttctccacagaattatgtggtggaacccatgttagaaatactggggatattggaaaattaaaaatagtcagccaatcttccatagctgctggagtaagaagaatagaggctttgagagacaaacaattagaggattacttaaaaaataaagaaaaactatcagcgttatcctctaaaaaagatgatgaaaacattaaagatttaagtgaacaaatcactaaacttggaggtaaacctaatttggatcgatctgatcaaaaaaatttaattaaaaatttaacaaaacaattagaaacactttctgtaaattcaattttaaataataagtctaaaaatattattaaagaccaagacattaatggaattaaattaagacttcaaaaagttaatgatctccctcctaaagagttaagaaaattagttgatcaaggtaaaaaagacttatccgaaggtattgtggtagtctttgcaagcaaagaggacaaagttggaatggcagttggcataacagaaagtttaacaagcaaatata

SEQ ID NO: 306309 - DNA, 970 bp, Unknown
  Bacterial polypeptide expressing nucleotide sequence isolated from the Sargasso Sea
atttctgatgatgtttttccatctaatgaaggaagaggctatgttctcagaagaatcttgcgaagagctattagacatggctacaaaataggagcagataagccttttatgtataagctagttaaaactttcgttaacgcgatgggtaatgcctacccgcaattgaaaaatgatgaaggaagaattaaaaaacttatcaaaaatgaagagactcagtttttacaaacgctcgataaaggcattcaaattctagactctactcttgcagaagggaataaagaaattatttcaggagatttagcctttaagcttcacgatacttttggttttccatttgatctgacggctgatattgcaagagaaaagggtattgatattgatgaaaaaggattcaagaagaatatggaatctcaacaacaaatgtcaaaggcatcaagttcgtttgtatcaaagattcctactgcagaggatttgaaggaaacagattttattggttataaacatatgtcttcagactcaaatgtaatagcaatttggaataaaaatgaaaaagttgagcttgctaatgaaccacaagagtactttatagcacttaaccagacttcaatttatgcagagtcaggtgggcaggttggtgatagaggttggtttaaatctaaaaatgctgagggcagcattttagattgtaaaaaatctggaaaagtttttatgcaccttataaagttagacaaaggaagcttaaaaattgatgataaaattgaagttaatgtgaataaagaaaaaagagagaaaactgaagctcatcattctgctacccatttagtccatgctgcactaaaaagggtccttggagatcatgtcaagcaaaagggttcactcgttgatgagcacaaacttagatttgatttctcgcatgatgaatctttatcagacgaagagatatccaaaattgaagatttagtaaatcaag

SEQ ID NO: 306310 - DNA, 437 bp, Unknown
  Bacterial polypeptide expressing nucleotide sequence isolated from the Sargasso Sea
tatggcagataaatcactaaatcagataagaaatacttttcttaaatattttgagaagaatggacataagattgttgagtctagtaatttagttccaaataatgatccgacattaatgtttgctaactctggaatggtgcaattcaaaaatgtatttacaggtcttgaaaaaagaaattatcaaagagctaccacttctcaaaaatgtgttagagcaggaggaaaacataatgatttagaaaatgttggatacacacctagacatcatacattttttgaaatgcttggaaatttttcttttggagattattttaaagaaagagcaattgaactagcttggaatttaataactaaagattttggtttagataaaaatagactttatttcactgttttcaatgaagatgatgaagcttttgctttatggaaaaagatat

SEQ ID NO: 306311 - DNA, 360 bp, Unknown
  Bacterial polypeptide expressing nucleotide sequence isolated from the Sargasso Sea
tatggctagcaaaacacttaacgaaataagaagcttgtttttagattattttgaaaaaaacgatcataagatagtagattctagcaatttagtaccaaacaatgacccaacattaatgtttgccaattcgggaatggtgcagtttaaaaatgtttttaccggattagaaaagagagactatcagagagcaacaacatctcaaaaatgtgtaagagctggtggaaaacataacgatctagagaacgttggttacactccaagacatcatacattctttgaaatgcttgggaatttttcttttggtgattattttaaagaaagagcaatagaactagctttaaatttaattactaaagactt

SEQ ID NO: 306312 - DNA, 679 bp, Unknown
  Bacterial polypeptide expressing nucleotide sequence isolated from the Sargasso Sea
ggtgaaacaggtccttgtggaccttgttcagaaatattttacgatcatggtgatcatttaaaaggtggattgccaggaacgaaagatcaagatggagatcgttttattgaaatttggaacttagtctttatgcagtatgaacaagtttcaaaagataaaagaatagatttgccaaaaccatctgtcgatacaggaatgggattagagagaattgcagctcttttacaaggtacacatgataattatcaaactgatcattttaaaaaattaataagctcaatatctgaagtaacaaaagtcaaacaagaagataaaaatatatcgagttttagagtaattgctgatcatttaagagcaagttcatttcttttagctgaaggtgttttaccttcaaatgaaggtcgtggatatgttttaagaagaattatgagaagaggaatgagacattctcatttgttaggatctaaagagccaattttttataaaatttttgactcattaaaaaaagaaatgtcaggaaattatccggagcttgaaaggtcacaatctttaatcaaagaaactttaaggatggaagaggaaaaatttttagttttacttgatagaggtattaaaattttaaatgatgaaattacaaaaatagataaagttttacctggtgatgtcgcatttaaattat

SEQ ID NO: 306313 - DNA, 868 bp, Unknown
  Bacterial polypeptide expressing nucleotide sequence isolated from the Sargasso Sea
atcttaaaaacacctggtaaagatttagtaaatcaagatcatccgcaggttgttgagttatggaatttagtttttatggaattcaaccgaaattctgatgggtcacttacttcactcaataaaaagcacgtagatacaggaatgggattggaaaggttggccatggttttacaaaataaaaccagtaattacgatacggatttatttaagcctttaatagaaaatcttgaacaaatttcccaaaagaaatacataccaaactctaagaataagaaacaagaaatcttaaatattgcctttagagtaattgtagatcacttaagagctgtttccttttctattactgatgggcaattaccttcaaacacaggcgctggttatgtgattagaagaattttaagaagagctattagatatgggtatcagttcttagatttcagagagccatttatttatttattagtcccaaaactggcaaataattttagtgaagtttttaatgaacttaaaaagaaccaagattttatttcaaagataattcaagaagaagagacctctttttttagaacactaagtggcggcattaagagaatggaagatatagtgaataatcaatctaaaattaagaatcaaaaaataagcggtaaactagcatttgagctttacgatagatatggttttccattagatttaactcaattaattgcatccgaaaacaatctaggaatagacattgaagagttcaataaaagtttggctaatcaacaaaaaagatcaaagattgatgctgttaaagattatggagattggattactattaaagaagatgatgttcaggaatttattggctacgatcatatagaagcac

SEQ ID NO: 306314 - DNA, 991 bp, Unknown
  Bacterial polypeptide expressing nucleotide sequence isolated from the Sargasso Sea
ggaactttaaaagttaaccaaactgtaaatctcgaaatagacgtaaatagaagaaataatactagagcttatcattctgctactcatttacttcacgaggctttaagaagaactttaggtaagcatgttacccaaaaaggatctttagtcagctcagaaaagcttagatttgattttagccacaacaaacctattgaaaaaaaagaaattgataaaatagaaaattatgtaaatgaaatggtaaaaacagcagctgatgtgaagactagaattatgacaccaaaagaggctgtatctaaaggtgctctagctatgtttggtgaaaaatatggagaagaagttagggttttatctatgggcaaagaaaacggtggatacttttctacagaactgtgcggaggtacacatgttaaaaatactaaagatattggaaagtttaaaattattaatcaatcctcaattgctgctggcgttagaagagttgaggctttaagagaaaaacagttagaagaatatgaaaaatctttaaaaaaagataaatctgctagggaaaaaaatcttaaagaccagatagatttaattaaaagagaacttataaaatataaaaagaaacctgattataatgaagatttagagttatctgaaaatataaaaaatttaaataagcaattagataaaattaaaattcaaaatatagttaaagacaaaaataaaaatataattaaagataaaaaaataggctcttttactcttagacatcaagtgcttactgattttccaccaaaggaactaagaaatataatagatcaaagcaaaaaagatattaaaaaaggtattgtagttgggttttctactttcgaaggaaaagttggagttgctgtgggaataacgaatgaattaacaaaaaaatataatgcagtatcacttgtaaagattgtctcagaggttattggcggaaaaggtgggggaggtaggaatgattttgcccaag

SEQ ID NO: 306315 - DNA, 736 bp, Unknown
  Bacterial polypeptide expressing nucleotide sequence isolated from the Sargasso Sea
gtagataaaattaaaaaagatcaagaagcaattataatattaaatcaaacacctttttatggagaaagtggtggtcaggtgggagatcatggtttttttgaaaatgataactttaagtttgaagttatgaatactacaaaaatatttggaaactattttcttcacaaaggtaaagtaattagtggtgaatgcaaaattggagataccattaaagcaagcattaatacagtgaatagagattttattaaatataatcattcttcaactcatttattacatgctgctctaagaaaaatactaggcaagcatgttacgcagaagggttcactagtaaattcagaaaaacttagatttgattttagtcacaataatccaattgaaaaagatcaactcataaatgttgaaaaaattgtaaatgatcaaattcaaaaaaatggaattgttgaaattaaaattgtggatcaaaaaaaagctattgaagaaggtgcgatggcattgtttggagaaaaatatagcgatgaagtaagagtagtaacaatggggcaagaaaatgaatcattcttttcaaaagaattatgcggaggaactcatgttgttaaattaggggaaataactaaatttaaaataactaatcaatctagtgttgcgtctggaataagaagaatagaggctgtatctaatgttgcagtagataaatatattaaagaaatagaaagaaatttattagaaaaaaata

SEQ ID NO: 306316 - DNA, 478 bp, Unknown
  Bacterial polypeptide expressing nucleotide sequence isolated from the Sargasso Sea
tatgaactctaatcatgtccgtaatgcattcatagattattttaagaacaatgatcataagcacgtaaaatcaggttctttagtcccagaaaatgacccctcattaatgtttgcgaattctggaatggtacaatttaaaaatgttttcactggaatggaggaaaaagatttcaaaagagctactacttcgcaaaaatgtgtcagagcaggtggtaaacataacgatttagaaaatgttggatttacaacaaggcaccacactttttttgagatgttgggaaatttctcttttggcgactattttaaagaagaagctattttatatgcatggaatttaatcacgaaagaattcaaaattaatgaaaataaattattggttactatatatcatgatgatgaagtcgctgaaaaattttggaaaaagattggaaatttacctgacaaaaaaataatcaaaatttcaagttctgataatttt

SEQ ID NO: 306317 - DNA, 544 bp, Unknown
  Bacterial polypeptide expressing nucleotide sequence isolated from the Sargasso Sea
ttgaaaacggctgaaattagaaaggcatttcttgaatattttaaagccaatgatcatatgatcgttgagtcatcttctttggttccaggcaatgacgagactttattatttacaaatgcgggcatggttcagtttaaagatatttttttaggtcaagagcagccaaaatcacttagagcaacctcctcacaaagatgtatcagagcaggcggaaaacataatgatcttgaaaatgttggctatacactcaggcatcatacgttttttgaaatgctgggtaattttagttttggagactatttcaagactgaagctattgaaatggcatgggacttcttaacaaatcatcttaatcttgaaagagataagctttggatatctgtatatcaggatgatgaggaggcggcacaaatttggctagagaaaataggcataagtaaggaaagactagtatttttaggagaagaagataatttctggtcaatgggggatacgggcccgtgtggaccatgctctgagatctattacgatcatggagaaaaat

SEQ ID NO: 306318 - DNA, 878 bp, Unknown
  Bacterial polypeptide expressing nucleotide sequence isolated from the Sargasso Sea
tatggtacaatttaagaatgtttttactgggacggaatcacgcccctataagcgagcgacgacatcccaaaaatgtgttcgagcaggtggtaagcataatgacttagaaaatgtgggttatacagcccgccatcatacattttttgaaatgctaggtaatttttcatttggtgattattttaaggatgtggctatagagttggcatggaaattgttaactaaggaatatgatttaccggctgagcgtttattggtaacggtatattcggatgatgacgaagcggccgacttatggaagcgaatagcaaatctacctgaagagaaaatcattcgtatatctactcaggataacttttggcaaatgggtgatacaggcccttgtgggccttgttcagaaattttctttgatcacggggaaaatgttcctggcggtccaccaggtagtccaaatgaagatggtgatagatttatcgaaatttggaatttagtattcatgcaatttgagcagcactcgcccgggaaccgtgtagcattaccgagaccttctatagatacagggatggggttagagagaatagcggctgttctccagggaaagcatgataattacgatatagatttaatgcgaagcctaattgaagcttccgctgaagaaaccaatacccaagctgatggagaaaactctgtaagccatagagttattgccgatcatctaagggcttgttcttttcttatagctgatggcgtgttgccttccaacgaaggtcgcggatatgtccttcgtaggattatgcgtcgagcaatgagacatgcgcatctattgggttctgatgacccgctgatgcatagattagttcctactctagtcagtgccatgg

SEQ ID NO: 306319 - DNA, 771 bp, Unknown
  Bacterial polypeptide expressing nucleotide sequence isolated from the Sargasso Sea
agacaccacacattttttgagatgcttggaaatttttcatttggagattattttaaagaaaaagctattttttatgcatgggaactactaacaaaagatcttggtataccaaaagaaaaactctcagttacggtatattcggaagacgaagaagccttcaaattatggaaaaaagtggctggattgccagaaagtaaaattataaaaatttcaactgctgataatttttggtctatgggtgaaacaggtccatgtggtccttgttctgaaattttttatgatcacggagataaattaaagggcggacccccaggcagcacagatcaagacggtgatagatttatagaaatttggaacctagttttcatgcaatttgaacaaatatcaaaagaaaaaagagtagatttacccaaaccttcagttgatactgggatgggtttggagaggataacagcagttttacagggaacacacgacaattatagcattgatcactttaaaaaattgatgaatgcttcatctgaaattacaaaaacaaagatagataatatcaatattgctagtcacagagtaatcgcagatcatcttagagcaagcagctttttaattgcagaaggagttttgccatctaatgaaggtcgcggttatgttcttagaagaattatgagaagaggcatgagacacgctcatacgcttggatgtaaaaatccagtattttttaaattatttgatgttcttttagaggagatgtcacagagctatccagagctt

SEQ ID NO: 306320 - DNA, 246 bp, Unknown
  Bacterial polypeptide expressing nucleotide sequence isolated from the Sargasso Sea
aatgaaggctaacgaaattagaaaaaggtttttaaactattttgaagatcacaatcacgagattgtaaagtcttcatcattaattccagccaacgatgaaactttactctttactaatgcgggtatggtgcaattcaaagatatattccttggtcaagaacaatcaaaatttgctagggcaacatcttctcaatgttgtataagggctggtggcaagcataatgatttggaaaatgtaggctatac

SEQ ID NO: 306321 - DNA, 745 bp, Unknown
  Bacterial polypeptide expressing nucleotide sequence isolated from the Sargasso Sea
aggtactataacttcaggtgatagtgaatttgaggtaaccgatgttcaaaaaaaaattggaaacttatttgtccactttggtaaagtttcaaaaggaacaattaaacttaaagataatgttgaactaaagataaactcagaaagacgtcaaaatataagagcatatcactcagcaacacatttattgcatgagtcactaagaaggactttaggaacacatgtaatgcaaaaaggatcattagttgcgccagacaggttaagatttgattttagtcatatgaaaccaattacagatgaagaaatgaaaaaaattgatgaaaatgttaataagtttgtaaactcaaagacagaagtcgtcacacgattaatgactcctgaagaaggaattgaacaaggggcaatggctttattcggtgaaaaatatggggatgaagttagagttgtgtttatgggtgaagaaggtaacaaatatttttcaacagaactttgtggcggaacacacgtaaaaaacactggtgaggttggtaaattcaaagtagttagccaatcatcaatagcagcaggtgttagacgggttgaagcattaagagataaacaacttgaagaatatttaaagtcaaaagataagatgtctagtttgtcttctcaaaaaaatgaagaaactatcaaatcattatcaagtgaaatcaccaagcttggaggaaaaccaattaaaaaatcagatgaccttaagattacaattaag

SEQ ID NO: 306322 - DNA, 560 bp, Unknown
  Bacterial polypeptide expressing nucleotide sequence isolated from the Sargasso Sea
tatggattcaagcaatttaattagaaaaaaatttctcgattatttcaaaaaacataatcataaagtatcagactcatcatcactgataccaaataacgatcctactttattatttacaaatgcaggcatggtccaatttaagaatatttttacaggggccgaaaagattaacagtaaaagaattgtaacatcacaaaagtgtgtccgtgcaggaggcaaacataacgatctagataatgttggttataccccgagacatcatacattttttgaaatgctagggaatttttcatttggggattattttaaagaagaagctatatattatgcctgggatcttttaaaaaatggatttgatatcgatctagataaattaatagtaactgttttttctgaagattctgaaagttttgatatttggaaaaaaatatctaattttcatgataaaagaataatcaaagtaaaatctaatgataatttttggtctatgggcaatattggtccatgcggcccatgtacagaaattttttatgattacgggaagaacctaaatggatcaa

SEQ ID NO: 306323 - DNA, 273 bp, Unknown
  Bacterial polypeptide expressing nucleotide sequence isolated from the Sargasso Sea
tatgaactctaatcatgtccgtaatgcattcattgattattttaagaacaatgatcataagcatgtaaaatcaggttctttagtcccagaaaatgacccatcattaatgtttgcgaactctggaatggtacaatttaaaaatgttttcactggaatggaggaaaaagatttcaaaagagctactacttcccaaaaatgtgtcagagcaggtggtaaacataacgatctagaaaacgttggatttacaacaaggcaccacactttttttgagat

SEQ ID NO: 306324 - DNA, 951 bp, Unknown
  Bacterial polypeptide expressing nucleotide sequence isolated from the Sargasso Sea
aatgaaaatagatattgaaagacgtaacaatcttaaggcatatcattctgcaacccatttattacatgagtctttgagaagaacattgggaaaacacgttatgcaaaaaggatctttagttgcgcctgatagactaagatttgattttagtcatatgaaaccaattacagaggatgagctaacaattattgataaattagttaatgaatacgtacaaaacaaaactgatgtaactacaagaattatgacaccaaaagctgccattgaaaaaggtgctttagctttttttggtgaaaaatatggagaagaagtgagagtagtttctatgggagcggaaaataactcttatttttcaacagaattatgtggtggaacacatgtaaaaaatacaggtgatattggaaaatttaaaactattagccaatcctcaatagctgctggagttagaagggttgaggctttaagggacaaacaactcgaaatattcttaaaaaataaggaaaaaatgtcaaacctttctgcacaaaaggatgaagacaatattaaggatgtttctgctcaaataattaaattaggtggaaaaccaaatttagaaaataaagatacgaaaggattaattaaagaccttaataaacaattagaacaattaaatatccaatctgttttaggtgataaaacaaaaaatataattaaagatgaaagtattaatggtacaaaaattagattacaaaaagttcaagatttatctccaaaagacctaagaaaacttgttgatgcaggtaaaaaagaattacgtgaaggtatagtagttgtttttgcaaataaagatgagaaagttggtcttgctgtgggtgtaacagaaaatttaacaaataaatacgatgcagttaaatttgcaaaactaggatctgaaaatattggcggaaaaggcggtggtggtcgtaaagactt

SEQ ID NO: 306325 - DNA, 786 bp, Unknown
  Bacterial polypeptide expressing nucleotide sequence isolated from the Sargasso Sea
ttaggcccatcagaatttttaggctacgaaaccgaccgtgctgaaggaaagattttatcattattaaaaaataacaaagaagtaaaaagtttatccgataatgatgaaggcatgataattacaaatcaaacacctttttatggagaatctggcggacaagttggagacactggagaaattacttctgcagaatttaaatttgaagttcaagatgtgcaaaagcaactaggagacttatttgttcattacggtaaagtaattaaaggttctattaaagtgaatgataatgttgaaatgaaaattgatgtaaatagaagaaatgatgttagagcttatcattctgcaacacatctgttacatgaatcattaagaagagtacttggtactcatgtaacccaaaaaggttccttagttgaacctgatagattaagatttgattttagtcatatgaagcctatctctacagatgaaattaaaaaaatagaaaactttgtaaattctatggttgaaaaaaaatctgaggtaaaaacaagaattatgacaccaaaagaagctgttgataatggtgcattagctctttttggtgaaaaatatggtgatgaagttagggttttatcaatgggtaatgaaaaagaacgttatttctcaacagaattgtgtggtggaacacatgtaagaaacactggtgatataggaaaatttaagattgtaagccaatcttcaatagcagcgggggtgagaagagtagaagctttaagggagaagcaattacaagaatatttaaaa

SEQ ID NO: 306326 - DNA, 936 bp, Unknown
  Bacterial polypeptide expressing nucleotide sequence isolated from the Sargasso Sea
tttgcgtagatctgctactaaagccaaccactcagcgacacatttattacacgaagcgttgagaattaaattaggccaccatgtggcgcaaaggggctcacttaatgcagcggatagattaagatttgattttagtcattctaaagcccttactaaaggagagttgcttgaagttgaacgttctgtaaatttttatatacgccagaatacagaggttactacaagggtaatgtctccagatgatgccagagaacttggagccacggctttattcggggaaaagtatggtgaggaagttcgcgttgtttcaatgggttataatcaaggaagtggtaagggcattgatggaaatggatattctttagagctatgtggtggaacacatgtaaaacgcactggggatataggagcatttgttattttgtctgatggtgccagtagttctggcgtaagacgtattgaggctttaactggcgaagcagctatggatcatcttgccaaacagcaaaattatctgtccgatattgcaattgaactaaagtctggttcatctgatattctttctcgagtaaaaagcctgatagcagaacgtaaatctctcgtaagtgaggtcgcgcagcttagaaaggatatggcactggggggcagctcttcgggacaagatgagttgaaaagcgaagatctttctggcgtgaattttttagcgaagcaattaaatggtatacctggcaaggagcttccaggcctaattgacggttataaacagaagctttcttcaggtgttattctacttatttcggaaaacgatggaaaagttgcagtcgcttccggcgttactaaggaccttttgtctaatatttctgccgtagatattgttaaaacagcagccaacaagctcggaggtaaaggaggcggcggcaggcccgatttggcgca

SEQ ID NO: 306327 - DNA, 298 bp, Unknown
  Bacterial polypeptide expressing nucleotide sequence isolated from the Sargasso Sea
gatgtctgaaaaaacactaaaaaatgttagaaaatcatttttaaactatttttctaacaaggatcaccaaattgttgattctagcaatttggtgccaagtaatgatcctacattaatgttcacaaattctggaatggtacaatttaaaaatgtttttactggtctcgaaaaacgtaattataaaagagctgtgacttctcaaaaatgtgtaagagcagggggaaaacataatgatttagaaaatgtaggttatacaccaaggcatcatacattttttgaaatgttaggaaatttttcc

SEQ ID NO: 306328 - DNA, 955 bp, Unknown
  Bacterial polypeptide expressing nucleotide sequence isolated from the Sargasso Sea
atggtgaaaaagtcgaaagcaaagataaacacggaaactcgaaccaatactactattcatcactcagcaacccatttattacatgcggctttaagatatgaacttggtaagggcgtgggtcaaaaaggttcttatgtaggttctaatagaatgagatttgatttttcatatcctgaagcgatttcggattcccaactacggaaaattgagatgttagtaaatagtaaaattagagagaacctaaaagtagagactaaaataatggacacatctgatgctattaattccggagctattgctttttttgatgaaaaatacggtaataaagttcgggtactgagtatgggtgacttctcaatagagctttgtggtggaacccatgtatcgcagacgggtgaactaggatatttcaaaattctttctgaatcgtcgattgggtctggaactagacgaatcgaagccctctgtggtattgaggctgagcgtcatgtaagtaggaccgaaaaattagtgaaaacaattatgtcgacccttgagacttcggaagtctcaattttagataaattgagttctttaatcgaagagaaatcaaacctggaaagtgaggtaaagaaatttaagaagtcatctttagatgacattgtcaatgatgtttacgagcgcgctgaagaaattaacaatgtaaagttagttttcgcgcaattagataacgttgagcccaaagagctcaggagactcgtagataatttaaaaaatcgaccgacgtcgcatggtattattgtgattttggcttccgcattaggaaagaaacttagattagttgtgggaatcagtaaaaaattatcaagcaatatcagtgcggttgagttgataaaacaaatggtgaaagaagaaagtggaaaaggtggtggtaggcctgacttagctcaggcaggtggagaattttcaagtaaat

SEQ ID NO: 306329 - DNA, 937 bp, Unknown
  Bacterial polypeptide expressing nucleotide sequence isolated from the Sargasso Sea
gattacaaaagagctgttacatcacaaaaatgtgttagagcaggaggaaaacataacgatttagaaaatgttggttatacgccgaggcaccatacattttttgaaatgttaggaaatttttcttttggagactattttaaggacgttgctattgaattagcatggaacttaattactaaagaatttcaaatatcaaaagataaacttagtgtaagtgtttatgctgaagataaagaagctcacgatttgtggaaaaaaatagcaggactaccagaaagcagaatttataaaatagcaacaaatgacaatttttggtcaatgggggacttaggcccttgcggaccatgttcagaaatattttatgaccacggtgatcacttacaaggaggacctccgggtagtaaaaatcaagatggagatcgatttattgaaatatggaatttagtttttatgcaatttgaacaagtttcaaaagacaaaagaataaatcttccaagaccatctgtagacacaggaatgggtttagaaagaatttcagctttactacaaggtactcatgataattatgaaatagatcattttaaaaccttaattgaatcttcttcaagcttaacaaaaactaaagtaactaaagaaaatatagcgagtcatagagttatagcagaccatcttcgagcaagttcatttttaattgcggaaggagttcttccttcaaatgagggcagaggttatgtattaagaagaataatgagaagaggaatgagacattcacatactctgggaagcaaggaagcaattttttatagaatggtaccaacattaattaaggaaatgtcagattcttatcctgaattaaaaagagcagaacctttaattacagagacattaaagacagaagaagaaaaattttcttcattacttgatagaggaatagaaa

SEQ ID NO: 306330 - DNA, 736 bp, Unknown
  Bacterial polypeptide expressing nucleotide sequence isolated from the Sargasso Sea
atggcaaaaacattaaacgagatcagatcaacttttctagattattttgaaaaaaatgatcacaagatagttgagtctagcaatttggttccaaataatgatccaacattaatgtttgcaaattcaggaatggtccagtttaaaaatgtttttactggattagaaaaaagggattaccaaagagctactacctctcaaaaatgtgtaagagcaggaggtaaacacaacgatctagaaaatgttggttacactccaagacatcacacgttttttgaaatgctaggaaatttctcttttggagattatttcaaggaaaggggaattgaacttgcttggaatttaattactaaagattttggattaaataaagatagattatatgtaacagtatttcatgaagacgatgaagccttcaatttttggaagaaaatagcgggttttagcgacgatagaattattaggatagcaacttctgataatttttggtcaatgggcgaaacgggcccttgtggaccttgttcagagattttttatgatcatggagatcatttaaaaggtggtttacctggaaccaaagatgaggatggcgatagatatattgagatatggaatttagtcttcatgcaatttgagcaagtttcaaaagataaaagaattaatcttccaaaaccttctgtagatactggaatgggtttagaaagaattgcagcattacttcagggcacacatgataata

SEQ ID NO: 306331 - DNA, 811 bp, Unknown
  Bacterial polypeptide expressing nucleotide sequence isolated from the Sargasso Sea
ggtgaggcaagttgaagatactattaaggcaagcattaatacagtgaatataaattttataaaatataatcattcatcaactcatttattacatgctgctctaagaaaaatactgggcaagcatgtcactcagaagggttcacttgtaaattcagaaaaactcagatttgattttagccacaataatccaattgagaaagatcaactcataaatattgaagcaatagttaatgatcaaattcaaaaaaatggaattgttgaaactaaaattgttgatcaaaaaaaagctattgaagaaggtgcaatggcattatttggagaaaaatatagcgatgaagtaagagtaataacaatgggtcaagaaaatgaattattcttttcaaaagaattatgtggaggaactcatgttgttaaattaggggaaataagtaaatttaaaataactaatcaatctagtgttgcatctggaattagaagaatagaggctgtatctaatgttgcagtagataaatatattaaagaaatagaaagaaatttattagaaaaaaataaaattcaagataatcaaattaaagatttaaagaataaaattaaaaagattaattctgattataattttaaaaatcaatctgaagaaaaaggtttattaattaaagaattaattcagatacacgaaaaattaaaacaaaatatttctatttcaaaaaatattgataatattgttgtaaaaaaaatcaaagaattaaattttatatatttgattgctgaagattaccctaataaatctttgaaaacatttattgatgagcaa

SEQ ID NO: 306332 - DNA, 830 bp, Unknown
  Bacterial polypeptide expressing nucleotide sequence isolated from the Sargasso Sea
ttctcaaaaatgtataagaactattgatatagacatcataggagagactgataggcatttatctttttttgaaatgttagggaactttagtgtaggtgaatattttaaggaagatgcaattaaatattcttatgaatacataacagaagttcttaaagtagataaagacaaattgtggttcactgtctataaagatgacgatgaagcatataatatctggaaaaatgtcattggtgtaccagaaaaacgtatccaaagaggaaatgaggataatttctggcatatgaatatacctggaccttgtggtccttgttcagaaatattcattgatagaggttcaaaatatggtgaagatggaggccctattggtggtggtgaagatagattcattgaaatttggaatttggtatttatggaatctattcaagaccaaccatttcaagttattgatgaactacccaaaaaaaatatagataccggtatgggacttgaaagaattgcaatgataatgcaagacaaagataatttatttgataccgatctattcaaaccattacatgatgcactattaacaaaaataactgtaaacgataataaatatgaaaaaataattattgatcatattaaatcttcaacgttcatgatctctgatggtgtagtaccaactaacgaaggaaggggttatgtactaagacgattaataagaagagctattagagcttacaatcaattaaatgcatcaaatacaagcctaactttcttaatagaaatagtgattgatatgtattcgtcttcatatccagaacttcaagacaataaagataaaatct

SEQ ID NO: 306333 - DNA, 805 bp, Unknown
  Bacterial polypeptide expressing nucleotide sequence isolated from the Sargasso Sea
gatgaagaagcatttaagcttgtggaaaaaaatatcaggcctaaatgaaaacagaataatcaaaatttctacatcagataatttttggtcaatgggtgaaacaggaccatgcggaccttgttctgagatattttttgaccatggagaccatttacaaggaggtttaccgggcactaaggatcaagatggtgacagatatatagagatttggaatttggtatttatgcagtttgagcaaatttcaaaagacaaaagaattgatttacctaaaccatctgttgatacaggaatgggtttagagagaatagcagcactacttcaaggcacgcatgataattatgaaacagaccatttccaaaaaataattggatcaatctcagaagcagtgaaagtaaaaccaaataaggaaaattttgcgagctttagagttattgcagaccacttaagagcatgttcatttctaattgcagaaggtgttctaccctcaaacgaaggcaggggatatgtcttaagaagaattatgagaagaggaatgagacactcacacttattaggatctaaagagccaatattttttaatatattcaaaactttaatggaagagatgaaaggtaattactcagaactttcccaagcagaagctcttattaaagaaacattaaaaatggaagaggaaaaatttttagttcttcttgatagaggcatcaagatattaaatgatgagataacaaaaataaacaaaaccttacctggtgaagtggcatttaaactttatgatacatacggatttccattagatttaact

SEQ ID NO: 306334 - DNA, 880 bp, Unknown
  Bacterial polypeptide expressing nucleotide sequence isolated from the Sargasso Sea
catgcttttaattgctgacggcgtccttccatcgaatgaaggaagaggatatgttttaaggagaatcatgagaagagcaatgagacacgtgcacattttgaattacaatgatttactgatgcacaaacttgcaccaacactaatttcaaacatgaaaatgtcctatcctgaacttgaaagagcagagtctctaataaatgaaacattgaaatatgaagaacaaaggttcagagatctattgtccagaggaattaagcaacttgatacaatgctcgataatttgaatggaaaaaccactctaaatggtcagtcagcatttaaactgtatgacacatatggctttccaattgatttaacgcaagatattttgagaaataagaaaattgaggtcgatattgatgattttaggaaatgtttggaggatcaaaaagaaaaagcaagaagtaattggaccggatctggtggtatagctaccgataaaatatggcttgaattaaataaaagtttatcccccacagagtttttaggctacacatctgaaaaaacagaaggcagtattatttctataataaaagatggcgcgttagttgatagtttacatagtggtgacaacggatcactcatactaaatcaaacagtattttatgctgagtctggaggacaaattggtgatacaggaacaatacaagccgataatttcaaatttgatgtctcagacacacaaagagaagggggcctttttgttcattatggtaaagtgatcaaaggagatatcaatacgggtacaggcgtacatttgtcaattaattctactagaagacgctcatgtaagacatatcattctgcaacacatattttacatcaagcactaagagaagtt

SEQ ID NO: 306335 - DNA, 931 bp, Unknown
  Bacterial polypeptide expressing nucleotide sequence isolated from the Sargasso Sea
aatgaaatgtcaggaaactatccagagttagttagagcagagtctttaattaaagaaactttaaaaatggaagaagaaaaattcttagttctcttagacagaggaataaaaattttaaatgatgaaatatctaaaatagataaagtgttgccaggtgaagtagcatttaaattatatgacacctatggtttcccattagatcttaccgaagatattttaagaaacaaatcaatgtcaattgatactgaaaagtttcaatctttgatgaaggaaagtagagaacttgctaagaaaaattggaaaggttctggtgatgcggcggttgaagatatttggtttggaataaaagataaattagaagcaactgaattcttaggatacgaaactaaccaagctgaaggtatcgtcttatctcttttaaaagataataaagaagttgatcaattaaaagaaaatgatgaaggaatgattatagtaaatcaaacacctttctatggtgagtctggtgggcaagttggtgatactggtgaaatagtatcaaatgattttaaatttgaagtaaccgatgttcaaaaaaaacttggagatttatttgtgcactatggaaaggttaagagcggatctataaaattacaggaaagtgtagagttaaaaattaatgtagaaagaagagataatactcgtgcgtatcattcagcaacccatctattacacgagtccttaagaagagttctgggtactcatgtaactcaaaaaggatctttggtagagccaagcagattgcgatttgatttcagccatatgaagccaattttgaatgaggaaatcaataaaatagaggagtttgtaaacaaaatggtttctaaaaaatctgaggttaaaacgagattaatgacacctgatgaggcagttgaaaatggtgctctagcat

SEQ ID NO: 306336 - DNA, 461 bp, Unknown
  Bacterial polypeptide expressing nucleotide sequence isolated from the Sargasso Sea
tatggctaaaacattaaatgaaatcaggtcagcatttttggattattttgaaaaaaatgatcataaaatacttgagtctagcaatttagtcccaaataatgacccaacattaatgtttgctaactctggaatggtccaatttaaaaatgtgtttactggactggaaaaaagagactatcaaagagctaccacatctcaaaaatgtgtaagagcaggtggtaagcataacgatctcgaaaatgttggctatactccaagacaccacacattttttgaaatgctgggaaacttttcttttggcgattattttaaagaaagagctattgaacttgcgtggaatttaataacaaaagaatttggtttagataagaacagactttatgtaactgtctaccatgacgatgatgaagcctttaattactggaaaaagattgctgggttaagtgaagataaaatcataa

SEQ ID NO: 306337 - DNA, 759 bp, Unknown
  Bacterial polypeptide expressing nucleotide sequence isolated from the Sargasso Sea
atattttttgatcatggggatcacttgaaaggtggtttgcctggcacaaaagatcaagatggagatagatatatagaaatttggaacttagtatttatgcaatttgaacaaatttcaaaagataaaagaataaatttacctaaaccatctgtagatacaggaatgggtttagaacgaataacagctttacttcagggaacacatgacaattacaaaacagatcattttattaagttaataaattctattggggaagctgtcaaaataaaaccaaatgaaaaaaatatttcaagttttagagttattgctgatcatttaagggcaagctcttttttaattgccgaaggtgttttaccatccaatgaaggacgcggatatgtattaagaagaattatgagaagaggtatgagacattctcatttgttaggttcaaaacaaccaatattttttaatatttttaaaacattgatgaatgaaatgtctgataattacccagagctaaaaagagctgagtcattagtaagagaaacattaaaaacggaagaagaaaaatttttagttctacttgaaagaggtatgaaaattttaaatgacgaaattaacaaagtcgacaaagttttacctggagaagttgctttcaaactttatgacacttatggttttcctttggatttaaccgaagatattttaaaaaataaatcactttctgtagatcataaaaaatttaaatcactaatgaacgaaagcagagaacttgct

SEQ ID NO: 306338 - DNA, 795 bp, Unknown
  Bacterial polypeptide expressing nucleotide sequence isolated from the Sargasso Sea
aaagattttaaattacctaaagaaaaactatcagttacagtttttcacaaagacgaagagtcatttaaactttggaaaaaaatagcaggtttaagtgacgacaagataataaaaatagcaactgcagataatttttggtcaatgggtgatacaggcccttgcggtccatgctcagaaattttttatgatcacggtgataaattgaaaggtggcccacctggaagtcctgatgaagatggtgatagatttatagaaatttggaaccttgtatttatgcaatacgaacaaatatcaaaagaaaaaaggattgatttaccaaaaccttcagtcgacacaggtatggggcttgagagaatgacagcagttttacaaggtactcacgataactataaaattgatcactttcaaaaaataatggctgcttcatctgatataacaaaaactcctatcgacagcaaaacaatagcaagtcacagagttattgctgatcacttaagagcaagtagttttttaattgctgaaggaatattaccttctaatgaaggccgaggatatgtcttaagaagaattatgagaagagggatgagacacgctcattctttaggtagcaaaaatcctattttttataaactttttgaagttttattaaacgagatgcagaacagttatccagaattaacaaatggtagagagttgatagttgaaactcttaaaaacgaagaagagaaattttcctctcttttagtacgtggtatgaaaatactcgatgaaaatttaaataaagtccaaaataaa

SEQ ID NO: 306339 - DNA, 895 bp, Unknown
  Bacterial polypeptide expressing nucleotide sequence isolated from the Sargasso Sea
taatcagactcctttttatggggagtccggtggtcaggttggtgacaaaggcacgataacttcaggcgaaaacgaatttgaggtaattgatgttcaaaaaaaaattggaaacttatttgtccactttggtaaagtttcaaaaggaacaattaaacttaaagataatgttgaattaaaaataaacaaagaaagacgtcaaaacataagagcatatcactcagcaactcatttattacatgaatctcttagaagaactttgggaaaacatgtaatgcaaaaaggatcattagttgcgccagatagattaagatttgattttagtcacatgaaaccaattacagatgaagaaatgaaaaaaattgatgaaaatgtaaacaagtttgtaaactcaaaaacggaagttgttacacgactaatgactcctgaagagggaattgaacaaggggcaatggctttattcggagaaaaatatggagatgaagttagagttgtgtttatgggtgaagaaggtaacaaatatttttcaacagaactatgtggcgggacacatgtaaaaaacacaagtgaggttggtaaatttaaagtagtcagccagtcatcaatagcagcgggtgtaagacgggttgaagcattgagagataaacaacttgaagaatatcttaagtcaaaagataagatgtctagtttgtcctctcaaaaaaatgaagaaactatcaaatcgttatcaaatgaaattacaaaacttggaggaaaaccaattaaaaaatcagatgaccttaagattactattaaggagctgacaaaacaattagaggaaataacagtaaagagtattttatcagataagaaaaaaaatattgttaaagatgaaaatattaaaaagattaatattaga

SEQ ID NO: 306340 - DNA, 846 bp, Unknown
  Bacterial polypeptide expressing nucleotide sequence isolated from the Sargasso Sea
gtgaaaataaatttgaggtaaccgatgttcaaaaaaaaattggaaacttatttgtccactttggtaaagtttcaaaaggaacaattaagcttaaagataatgttgaattaaaaataaactcagaaagacgtcaaaatataagagcctatcactcagcaactcatttgttacatgaatctcttagaagaactttaggaacacatgtaatgcaaaaaggatcactagttgcgccagatagattaagatttgattttagtcatatgaaaccaattacagatgaggaaatgaaaaaaattgatgaaaatgtaaataaatttgtaaactcaaagacagaagtcgtcacacgattgatgactcctgaagagggaattgaacaaggagcgatggcattatttggagaaaaatatggagatgaagttagagttgtgtttatgggtgaagaagataacaaatatttttcaacagaactttgtggtggaacacatgtaaaaaatactggtgaggttggtaaatttaaagtaattagccaatcatcaatagcagcgggcgttagacgagttgaagcattaagagataagcagcttgaagaatatctaaagtcaaaagataagatatctactttgtcttttcaaaaaaatgaagaaaccatcaaatcgttatcaattgaaataactaagcttggaggaaaaccaattaaaaaatctgaagatcttaaaattacgataaaggaactatcaaaacaattagaggaaataacagtaaagagtattttatcagataagaaaaaaaatattgtaaaagatgagaatattaaaaaaataaacattagatttcaaacaaattgat

SEQ ID NO: 306341 - DNA, 835 bp, Unknown
  Bacterial polypeptide expressing nucleotide sequence isolated from the Sargasso Sea
gactgcaaaataaaaataaatgatactcaaaaaaagatgggagatctctttgttcattatggtaaaattgagaatggatcaatatcagttggccaaaatattaatttagaaatcgataaaataaaaagaaaaaattctaaagccaatcattctgctactcatttattacatgaatccttaagaaggacattaggaaaacatgttatgcaaaaaggatcattagtttcgcctgaaagattaagatttgattttagccatagcaagccaatagaaaatcaggaaatagtcaaaattaataaaatagttaatgatatcatcgaaggttcgtctgatgtccaaacacgaattatgactccaaaagaggcagttagtatgggtgctttagctttatttggtgaaaaatatggtgaggaagtaagagtagtgttcatgggaaaagaaaataatggttttttttcaaccgaactatgtggaggaactcacgtaaaaaacaccaaagaggttggcaaatttaaaattgttagtcaatcatccattgcctcaggggtaagaagagtcgaagcgttaagagataaacaattagagcagtatgagagaacacaaaaacaaaaaaaatctttaaaagaaacaaatctcaaagaggaaatagaattagtaaaaaatgaattacaaaattttaaaataaagccagattataaagataatgtagatttatctgaaaatttgaaaaatttaaataaacaattaaatagaataaaaattgaaaatatcaaaaaagataaaaacaaaaatataattaaggataaaaaagttggcagtatagtaataagagaac

SEQ ID NO: 306342 - DNA, 352 bp, Unknown
  Bacterial polypeptide expressing nucleotide sequence isolated from the Sargasso Sea
atgttagtgcaatctactcaagctttacggaaggctttcatcgattattttaagagtaagcagcatgcgtttgttccgagtgcgagtttgattcctgtcgacgatgatacgctgttgtttacaaacgctgggatggttccgtttaagcaatattttcttgggcagtctaaaccccctttttctgcagcttgtagtgtgcagcgctgtttacgtgttggcggtaaacataatgatttagataatgtgggttatacttcacgacaccataccctgtttgagatgcttggtaattttagttttggcgcttatggcaagcgcgaagcgatagcttatgctatggattttttagtga

SEQ ID NO: 306343 - DNA, 899 bp, Unknown
  Bacterial polypeptide expressing nucleotide sequence isolated from the Sargasso Sea
aaaagagcaaccacttcacaaaaatgtgtaagagcaggcggtaaacataatgatttggaaaatgttggttacactccaagacatcacacattctttgagatgcttggcaacttttcttttggtgattactttaaagaaaaagcgattcaccttgcatggaatttaataacaaaagattttggattagataaaaataggctctatttcacagtttttagcgaagatgatgaagcgtttaatctttggaaaaaaattacaggatttggcgatgatagaataattaaaatacctacgtcagataatttttggtcaatgggagaaactggaccatgtggtccttgttcagaaatattttatgatcatggagaccatttaaaaggtggcttacctggcactaaagaccaagatggcgataggtacattgaaatttggaatttagtatttatgcagtatgaacaagtctcgaaagataaaagaattgatttaccaaaaccatcagttgatactggaatgggtttagagagaatagcagcattactacaaggcacacatgataactatgaaacagatcattttaaaaaaataataggctctatatctgaagaattaaaagttaagcctgataaaaacaatttgtcgagttttagagtgattgcagatcacttaagagctagctcctttttattagcagagggtgttttaccctcaaatgagggaagaggatatgttttaagaaggattatgagaagaggcatgaggcatagtcatttacttggatcaacaaagcctgtcttttttaatgtatttaagactttaatggatgaaatgtccggtaactatccagagttgaaaagggctagttcattgatccaagagactttgagaatggaagaggagaa

SEQ ID NO: 306344 - DNA, 825 bp, Unknown
  Bacterial polypeptide expressing nucleotide sequence isolated from the Sargasso Sea
ccgtttctggtgagcatgggtgaggcggccatcgccctgatgcagggggcttatccgcagctgcaggcgcgacgggacgtgatcctggctgagctgcaacgggaggaggcacgctttctggaaacgctggagcgcggcgagaagctgctggcggatgtgctggctgctggccccaaccagatcagtggtgagcaggctttcgagctgtatgacacctacggcttcccgctggagctcaccgaagaaatagcggaagaacagggtctcagcgttgatctagctggctttgaggcggcgatggaggcccagcgtcagcgggccaaggccgcagcggtgagcatcgatctgacgttgcagggggcgatcgagcagatggctgcccagcttgatgccaccgtgttccagggctacgaggccctcgagcagcccagctgcgtggtggccctggtagtcaacggtgagccggctcagcaggccgcggctggtgatgcggtgcaggtggtcctggatgccacgcccttctacggcgaggggggcggccaggtgggggatcgcggcagcctttgcggtgatgggttgatcgtggcgattgaggcggtgaatcgccagcgcgatgtgtttgtgcatgccggcacggtcgagcgcggtcgcctggtggttggggatgtggtgacagcgcaggtggatcgcgcctgccggcgccgcgctcaagcccaccacacggcgacgcatctgttgcaggccgcgctcaaacaggtggtggatgagggcatcagccaggcgggttcgctggtggactttgatcgtctgcgttttgacttccac

SEQ ID NO: 306345 - DNA, 881 bp, Unknown
  Bacterial polypeptide expressing nucleotide sequence isolated from the Sargasso Sea
aatttcagctgtgatgcaaggtactaatgataattatgaaattgatttatttaaaaaacttattgaccattcaattgaaataacgaaaaaaaataacaaggaattaatttcaagccaccgggtaattgctgatcatttaaggtcatcatcatttttaatagctgatggtgttttgccatctaatgaaggcagagggtatgtacttagaagaattatgcgaagagctatgcgacatattcaactacttggttacaacgataccatgttgtcagatttatttactactctttcaaacgaaatgtcatcagcctatcctgaattgcgaagagctgaaaacttaattagagaaacattaatttatgaagagactaaatttaaagatttattgttaagaggaatgaaacaacttgaagaagaacttaagccccatcaagatggtcagatttttcctggttcaaaggctttcaaactatatgatacatacggttttcctttagatctaacgcaagatattctcaggtctaaaaatattgaagttgatatcaaggggtttgaccaaagtttagaagatcaaaaaaatcgggcacgatctagttggacaggctctggagataaatcaactgaaaagatatggtttaatctatcaaataaacttaataaaacagaatttattggatatgaaaataatgtttcacaagcagaggtcctatctattattagtaatggtgccgaagttgatcaaatatcaaaagatcaacaaggctgcatgatcctaaatcaatctgttttttacgcagagtcaggaggtcaaattggtgatattggatacatcagatgtggagaaaagcattttaaggtcactgatacacaaaaaaaagaaa

SEQ ID NO: 306346 - DNA, 1003 bp, Unknown
  Bacterial polypeptide expressing nucleotide sequence isolated from the Sargasso Sea
catggttgcttcatctgatatcactaagaccccaattgataatagtacaattgctagtcatagagtaatcgcggatcatcttagagccagtagttttttaattgctgaaggaatattaccttcaaatgaaggtcgaggttatgttttaagaagaattatgagaagggggatgagacatgctcattctttaggaagcaaagatcctgttttttataaactttttgaagttttattaaatgaaatgaaaaatagttaccctgaattgatcaatgggaaagaactggtagtagaaactctaaaaaatgaagaggaaaaattttcgtctcttcttgaacgaggaatgaaaatactcaatgaaaacttaatcaaagtacaaaataaaactcttccaggttcagtagcttttaaattatatgacacttatggctttcctgtagacttaactgctgacattttaagaggtaaaaatattcaagttgataataatggtttcgaaaaagagatggaaaaaagtaaagctttagcaagggctaactggaaaggatcaggggataagtctgtcgaggaaagatggtttaaaataagagaggaaattaatcctactgaatttttaggatatgaatttgataaagctgagggcgtaataatcaaaatttcaaaaaatggcaagtttgttaattcagctaatgaaggagatgaaatagaagttattacaaatcaaacaccattttacggagagtctggaggccaagttggtgatcaaggttatattttaagttcagattgtaaaattaaagtaaatgatacacaaaaaaaaatgggcgatctatttgttcattatggaacaattgaaaaaggatcattatcagtagggcaaaatgttaatttagaaattgatattttaaaaagaaataattctagagctaatcactcggctactcatttgctacatgagtcattaagaagaactctaggaaagcacgtgacacaaaaggatcattag

SEQ ID NO: 306347 - DNA, 330 bp, Unknown
  Bacterial polypeptide expressing nucleotide sequence isolated from the Sargasso Sea
tatggcaaaaacattaaatgaaataagagaaacatttcttaaatattttgagaaaaacggacatagaattgttgagtcaagcaatcttgtaccaaacaatgacccgacattaatgtttgccaattcaggaatggtacagtttaaaaatgtatttactggattagaaaaaagggactaccaaactgcaactacatctcaaaaatgcgtaagagctggcggaaaacataacgatctagaaaatgtaggctatacaccaaggcatcatactttttttgaaatgcttggaaacttttcttttggtgattattttaaagaaagagctatcgagtt

SEQ ID NO: 306348 - DNA, 882 bp, Unknown
  Bacterial polypeptide expressing nucleotide sequence isolated from the Sargasso Sea
aatgttgggtaactttagctttggtgattatttcaaagaggatgccataaagtttgcatgggaatttttaacagaagttctaaagcttgataaagataagttatggataactgtttacaaagatgatgatgaagctgaagaaatttggaaagaaattattggggtcgatcctaaaagaatagccagattaggcgatgaagataatttttggtcaatgggagatacaggtccctgtggcccatgttcagaaatattttatgatcacggtgatcatattgatggaactccacctggtgctgagggtgatgaaggtgatagatatatagaaatatggaacctagtattcatgcaatacaatagggatgacgatggaaaaatggaacctcttccaaaaccatctgttgatacaggaatgggattagaaagaattgctgcagttatgcagggtgtgaattcgaattatgaaacagataccttcaaagatttaattacagcttcagaaaatttattaggaaataaaaaaagtacttctcataaagttattgcagatcatattaggtctacagtttctttaatatctgatggagtgattcctgaaaatgagggtagaggttatgttctcagaagaataatgagaaggggcataagacatggttataaaattggtgctaaaaaacctttcatgttcagtttagtcaaagacatggttcgagttatgagttctgccttcccggatttaaaagacaaagaaagtgacattgctgaattagtaaaaactgaagaaattaaattttttgaaaccttagagaaaggaatagaaattcttgaagaagaaatttcaaatatgtctgaagacattatctcaggagatgttgtatttaa

SEQ ID NO: 306349 - DNA, 735 bp, Unknown
  Bacterial polypeptide expressing nucleotide sequence isolated from the Sargasso Sea
tggagaatttaaatttgaagtacatgatgtgcaaaagcagttaggagacttatttgttcattatggaaaagtaattaaaggtactattaaagtgaatgataatgttgaaatgaaaattgatgtaaatagaagaaacgatgttagagcttatcattccgcaactcacttattacatgagtcattgagaagagtgcttggtactcacgtaacccaaaaaggttccctagttgaacctaatcgtttgagatttgattttagtcatatgaagcctatctctaatgaagaaataaaaaaaatagaaacttatgtaaattccatggttgataaaaaatctgaggtaaaaacaagacttatgaccccaaaagaagcagttgataatggtgcattagctctttttggtgaaaaatatggcgatgaagttagggttttatcaatgggtaatgaaaaagaacgttatttctcaacagaattgtgtggtggaacacatgtaagaaatactggcgatataggaaaatttaagattgttagccaatcttcaatagcagcgggggtgagaagagtagaagctttaagggataaacagctacaagaatatttaaataaaaaggaaaaacttagtgaccttgaaaatgagaaaattgaagaaacaattaaagatttatctcaaaaaataattaaattaggaggaaaacccaatattactgatgataatcatcaaactttaattaaagactt

SEQ ID NO: 306350 - DNA, 307 bp, Unknown
  Bacterial polypeptide expressing nucleotide sequence isolated from the Sargasso Sea
atggcagacaaaacacttaatgaaataagaagtacttttctcaaatattttgagaagaatggtcataaaattgtggaatctagcaatttagttccaaacaatgatcctacattgatgtttgcaaattcaggaatggttcaatttaaaaatgtttttactgggttagaaaaaagagattataaaacagcaaccacatcccaaaagtgcgtaagagctggaggaaaacataatgaccttgaaaatgttggttatacaccaaggcaccatactttttttgagatgcttggtaatttttcttttggtgatt

SEQ ID NO: 306351 - DNA, 877 bp, Unknown
  Bacterial polypeptide expressing nucleotide sequence isolated from the Sargasso Sea
catgagatctctgatagaggcatcagcacatgcgtccaatactgatccggatggttcagctaaggtttctcaccgagttattgcagatcacctgcgagcgtcatcctttttgatcgctgacggggttctcccatcgaatgagggtcgcggttatgtcgtaagacgtatcatgcgcagggccatgagacacgcgcatcttttgggctgtgtggagccgttaatgtggcgcttagttcctgccttgactaaacagatgggtgaagcatttcccgagctaaaaagggcggaaagtttaattgtcgaaacgctaaagctggaagaaacgcgatttaaagaaacacttgctcgaggattgcggcaattggaagatgctactaacaagttgtcagatactgaaaacctgccaggcgaaatagcttttaagctctacgatacattcggtttccctttggatctaacccaagatattttacgcggacaaggtaggaaggttgatttattagggtttgatcaggcgatggcagagcagaaagccgcagccagggccgcatggtcgggatccggcgaacttgccaccgaatcactttggctggaaataagagatcagatatcggcaaccgaatttttaggttattccactgagtttgcggaaggcgagattgtaggattgataatcaatggagagagtgtcaagacgacggatggctttcctacagatcaagaagtgacgataatttgtaatcagacaccattctatgccgagtccggtgggcaagtaggtgatacgggatatctaaaaattggtgctgaagcttcgtttagagtcaaagatgttcaaagacgggtgggggaccttttcaccctatattggtgttat

SEQ ID NO: 306352 - DNA, 763 bp, Unknown
  Bacterial polypeptide expressing nucleotide sequence isolated from the Sargasso Sea
gctgggtggaaaacataacgatttagagaatgtcgggtatactcctagacatcatactttttttgagatgttaggaaatttttcatttggagattattttaaagaacaggcaattttttatgcatgggaattgattacaaaagattttggattatcaaaagataaactttgtgtaactgtatattctgaggaccaggaagctttcgatttatggaaaaaaatagcaggtttggaatattgcaaaataatcaaaattgctacttcagataatttttggtcgatgggtgatactggtccgtgcggtccatgttcagaaatattttatgatcatggcgatcatttattcggaggacctcctggttcaaaagatgaggatggtgatagattcattgaaatatggaacttggtatttatgcaatatgagcaagtatctaaggaaaaaaggataaatttaccaaaaccctctgtagatactggtatgggtctagaaagaatggctgctgttttgcagggtacacacgataattatgagatagatttatttaaagagcttgtgaatttgagtgcagaaataactaatacaaaagttagcaacgaaactattgccagccatagagtaatatctgatcatttaagagcttcatgttttttaatagctgacgggctaatgccatcaaacgaaggtagagggtatgtacttagaagaattatgagaagagcaatgagacatgcaaatactcttggttctaaaaattttgtttta

SEQ ID NO: 306353 - DNA, 850 bp, Unknown
  Bacterial polypeptide expressing nucleotide sequence isolated from the Sargasso Sea
atgaaatcagccaaaataagaagtaaatttattaatttttttgaagaaaatgatcatcaaaatattcattctagttctttagtaccgcaaaatgatcctactttaatgtttgcaaattctggcatggtgcaatttaaaaatgtttttacgggaaaagaaaagagagattataaaagagctgtaactgctcaaaaatgtgttagagccggagggaaacataacgatttagagaatgttggatatacagctcgtcaccatacattttttgaaatgcttggaaatttttcttttggagattattttaaagataaagctatagaattatcttggaaattattgactgaagaatttgggctggaaaaaaatagacttttggtaacagtatttagtgaagatgatgaagcgtttaatttatggaaaaaaatagcaggattatctgaagataaaattataaaaattagtacatcagataatttttggtcaatgggagaaacaggaccatgtggaccatgttctgaaattttttttgatcatggagataaatatattggaggtcaaccaggaagtaaaaatgaagaaggtgatagatttattgaaatatggaatctagtttttatgcaatatgagcaaatttctaaagatataagagaaaatttacctaaaccttctattgatactggtatgggtttagaaagaattacagctttattacaaggaaccaatgataattattcaagtgatattttccaaccattgatcaatcaatctataaaactttgtaatgatgaaagtacaataaactctccaagtcataaagttattgctgaccatttaagatcagcatcattct

SEQ ID NO: 306354 - DNA, 890 bp, Unknown
  Bacterial polypeptide expressing nucleotide sequence isolated from the Sargasso Sea
gtcattaaaaatagataataaaaaatttgaaactttaatgaatgaaagcagagaacttgctaaaaaaaattggaaaggatcaggagatagctcagttaacaagatatggtttgaaattaaagatagattaggcccatcagaatttttaggttatgaaactgaccatgctgaaggaaaaattttatcattattaaaagataataaagaagtaaaaaatttatcctctagcgatgaaggcatgataattactaatcaaacacctttttatggagagtctggtggtcaagttggagatactggagaaattacctctggagaatttaaatttgaagtaagtgatgtacaaaaacagcttggagatttatttgttcattacggcaaagtaattaagggatctattaaattgaatgacaatgttgaaatgaaaattgatgtaaatagaagaaatgatgttagagcttatcattctgcaactcacttattacatgaatcattaaggagagtacttggtactcatgtaacacaaaaagggtctttagttgaacctgatagattaagatttgattttagccatatgaagcctatctccaatgaagaaataaaaaaaatagaaaattttgtaaattctatggttgaaaaaaaatctgaggtaaaaacaagaattatgacaccaaaagaagctgttgataatggtgctctagctctttttggtgaaaaatatggtgatgaagttagggttttatcgatgggcaatgaaaaagaacgttatttctcaacagaattgtgtggtggaacacatgtaagaaatacaggtgatataggaaaatttaagattattagccaatcttctatagcagcaggagtgcgaagagtagaagctttaagagaga

SEQ ID NO: 306355 - DNA, 859 bp, Unknown
  Bacterial polypeptide expressing nucleotide sequence isolated from the Sargasso Sea
tctttattcaaataatcgccttgagaatggcacacttgaagagctcccttctaagcatgtcgatactggggcaggattagaaagaatcgcagccgtcctacaaggtaagaatagtaattatgatactgacctttttgtgccaatcattgactcattagaaaaattatcgaactcttcctatcaaagtaatccaattccttttcgagtaatcggggatcatataaggatgttatgcttttctattgcagatggagcgcttccttcaaatgatggaagagggtatgttctacgacgtattcttagaagagcggctaggtttggaagacgaattggactcgttgaaccttttctttttcaactagtagataaggtttcttcaataatgggagatgtttttcctgaaataaaagataagaaaacgcacatagaaaaagtcttactctctgaggaaaaatcgtttaatataaccttagatagaggattaaatcattttgaaaaaattacctctgcgatagatgattctgtaattaatggatcagatgcgttcaaactttacgatacatatggttttcctcttgatttaacccagttgatggcaaaagaaaagggacttaaagtagatatagaaggatttaataagtccatgtctatacaaaagaaacaggcaaaagaagcaggaaaattcactcaaatctccagtaatattctttggaataagatatcacaaggtgaagattcaacttttgtgggatatgacacacttgactgtacctcaaagattcatagttatgcaacaattgatgataatatgctagttattttagatagaaacgcattttatgctgaatcgggagggcaa

SEQ ID NO: 306356 - DNA, 487 bp, Unknown
  Bacterial polypeptide expressing nucleotide sequence isolated from the Sargasso Sea
atggcagaaaaaacattaaaaaatgtaagaaaatcatttctaaattacttctcaaaaaacaaccaccaaattgtagattcaagcaatttagtaccaagcaatgatcccacacttatgtttacaaattcaggaatggttcagtttaaaaacgtttttacaggccttgaaaaaagagattacaagagggctgttacatctcaaaaatgtgtaagagccggaggaaaacataatgatttagaaaatgttggttatacaccaagacaccatacattttttgaaatgttaggaaatttctcttttggagattactttaaagatgttgcgattgaacttgcatggaatttgataacaaaagaatttcaaatatcaaaagataaactttgtgttagcgtttatgcggaagataaagaagctttcgatttatggaaaaaaattgcgggattaccagaaaatagaatttttaaaatagctacaaatgataattttt

SEQ ID NO: 306357 - DNA, 858 bp, Unknown
  Bacterial polypeptide expressing nucleotide sequence isolated from the Sargasso Sea
ctaaggagccagttttttataatttgtttgacactcttaaaaatgaaatgtcaggaaactatccagagttagttagagcagagtctttgattaaagaaactttaaaaatggaagaagaaaaattcttggttctattagacagaggaataaaaattttaaatgatgaaatatctaaaatagacaaagtgttgccgggtgaggtagcttttaaattatatgacacttatggtttcccattagatcttacggaagatattttaagaaataaatctatgtcaattgatactgaaaagtttcaatctttgatgaaggaaagcagagaacttgctaagaaaaattggaaaggttctggtgatgcagcggttgaagatatctggtttggaataaaagataaattagaagcaactgaatttttaggatacgaaaccaatcaagctgaaggtgtcgtgttgtctcttttaaaagacaataaagaagtagatcagttaaaagaaaatgatgagggaatgattatagtaaatcaaactcctttctatggcgagtctggaggtcaggttggtgatactggtgaaatagtatcaaatgattttaaatttgaagtaaccgatgtccaaaaaaaactaggagatttatttgttcattatggaaaggttaagagtggatctataaaaccacaggaaagcgtagagttaaaaattgatgtggaaagaagagataatactcgtgcgtatcactcagcaacccatctattacacgagtctttaagaagagttcttggtactcatgtaactcaaaaaggatctttggtagaaccaagcagattaagatttgatttcagtcacatgaagccaatttgaa

SEQ ID NO: 306358 - DNA, 453 bp, Unknown
  Bacterial polypeptide expressing nucleotide sequence isolated from the Sargasso Sea
aatgattaaccagaaaaattcagttaatgaaataagaaaaacttttattaactattttaaaactaataatcatcaagttatatcttctagtaatttagtaccagagaatgatcctactcttttatttacaaatgctggtatggtacagtttaaaaacatttttactggtttagaacatagagaatataataaggcagtatcatctcaaaaatgcttaagagcaggtggaaaacataatgatcttgagaatgttggtaggacagctaggcatcatactttttttgaaatgttaggtaatttttcttttggggattattttaaagaaaaagcaatacatcaagcttgggaattattaacaaaagaatatgaaattccaaaagaaaaattgttggtaactatttatcataatgacaaagaagctgaagaactatggaagaaaatttctgggtttaa

SEQ ID NO: 306359 - DNA, 363 bp, Unknown
  Bacterial polypeptide expressing nucleotide sequence isolated from the Sargasso Sea
aatgtcaggaaattatccagaacttataagagctgagtctttaattaaagagactttaaaaatggaagaggaaaaatttttagttctacttgagagagggattaaaattttaaatgatgaaatttctaaaattgacaaagtattaccaggtgaggtggcatttaaattatatgacacttacggatttccattagatcttactgaagatattttaagaaacaaatctatgtctattgatatagataattttaaatctttgatgaaagaaagcagagagcttgctaaaaaaaattggaaagggtcaggagatgctgctgttgaagatatttggtttgggattaaagataaattagaagcaacaga

SEQ ID NO: 306360 - DNA, 805 bp, Unknown
  Bacterial polypeptide expressing nucleotide sequence isolated from the Sargasso Sea
atgagaagagcgatgcgtcatgttcatctgcttcaatacaaagatactttaatgcatcaattggtcccaaccttaatgcttaatatgaacgatgcatatcctgaactgttaagggcagaagtattaatcaaagagacattaaagtatgaagaggaaaaatttaaaaaccttttagaaaaaggaattatgcaattagacaccatgtcccaaaaccttggatctaacgatatttttccaggagagtctgcatttaagctttatgatacttatggatttccaattgatctaactcaggacatattaaaaagtaaaaatatctctattgatatcgaaagttttaataacaaacttgaggcacaaaaagaattagcaagaaaaaattggtcaggcgcaggaggtgctgcgacagataggatctggtttgaattaaacaacgaattatctatgacagaatttcttggatataacggtacagaaacgcaaggggaagtattgtcaataatcaaaaatgatcaaagggtgaataagttagaagatggcgaaaaaggagtgctcatattaaaccaaactgttttttatgcagagtcaggtgggcaaattggggacacaggaataataaaaggagaaaattttgagttccaagttgaagacactcaaaaaagaggacaagtaattattcattcaggcgtaatggttagcggtacaatagaaattggtctaaatgcatccttgtcagttaatcaaaagcaaagaaatgattgcagggcatatcattcagcaacacatatttacatcaatctctaag

SEQ ID NO: 306361 - DNA, 954 bp, Unknown
  Bacterial polypeptide expressing nucleotide sequence isolated from the Sargasso Sea
gaaaaaagaaataatttgtagagcaaatcactcagcaacacatttattacatgagtctttaagaagaactttaggcaaacatgttacccaaaaaggttctctagtaagtcctgacagactaaggtttgattttagtcataataaacccatcgataaaaaagaaatggtagagataaataatatagtcaatgacataattaatggatcgagtgatatacaaactagaattatgacacccaaagaagcagtaagtatgggagcattggcgttttttggagaaaaatatggtgatgaagttagagtggtatttatgggtaaagaaaataatggtttcttttcaacagaattatgtggaggcacacatgttaaaaatacaaaagatgttggaaagtttaaagtgataagccaatcctcaattgcatcaggtatcagaagagtagaagctttaagggataaaaaattgaaagattatgagaattctttacaaaaagataaatctgtcaagcaaaaaatactaaaagaccagattgatgtaattagaagtgaactatctaagcttgaagtaaaaattgattacaaagataatctagagttaccagaaaatttaaaaaatctaaccaaacaattagaaagaattaaaattcaaaatgtaattaaagataaaagaaaaaatgttataaaagataataatttaggttcatttatatttaggcaacaagtactgactgattttccacccaaagaattaagaagcatcattgatcaaggtaaaaaagacataaaaaaaggcatcatcgtaagtatttcaacttttgaaggaaaagttggagtagcagtaggtataactaaagaattaacaaaaaaatatgatgctgtagagttggtaaaaactgcttccgagattctaggaggaaaaggcggtggtggcagaaaagattttgcacaggcaggtgg

SEQ ID NO: 306362 - DNA, 536 bp, Unknown
  Bacterial polypeptide expressing nucleotide sequence isolated from the Sargasso Sea
tatggcagacaaaacacttaatgaaataagaaatacttttctaaagtattttgaaaagaacgatcataagattgtggagtctagtaatttagttccaaacaatgatcctactttaatgtttgccaattctggaatggtccagtttaaaaatgtattcacaggattagaaaaaagagactacgtcagagctactacttctcaaaaatgtgtaagagcaggtggaaaacataatgatctagaaaatgttggttatacaccaagacaccacacattctttgagatgttaggaaatttttcttttggtgattatttcaaagagcaagccatacattacgcatgggatttaataacaaaagattttggaatagataaaaatagactttatgtaactgtatttcatgaagatgatgaggccttcaatttttggaagaaaatagcgggttttagcgatgatagaattataaggatagcaacttcagataatttttggtcaatgggagaaacaggcccttgtggcccttgctctgaaatatttt

SEQ ID NO: 306363 - DNA, 880 bp, Unknown
  Bacterial polypeptide expressing nucleotide sequence isolated from the Sargasso Sea
gcgtcaggatgtgattctttcggagctgcaacgggaggaagcccgttttctcgagacgttggagcgtggtgaaaagctgttggctgatctgttggctgctgaaccggcccagatcagtggagagcaggcttttgagttgtacgacacctacggattcccgttggaactcacgcaggagatcgctgaggagcatggtctcagtgtggatctctccggttttgagctggcgatggatgctcagcgtcagcgtgcgaaggccgctgccgtcagcatcgacctcaccctgcaggacgcgattgatcaggtcgtctccgatcttgaggtgaccacctttgatggctaccagtcactcgagagctccagcatcatccaggccctggttgcgaatggggaaccggtcacacaggccagtgcaggtgatgctgttcaggtggtgcttgaagcaacgccgttctacggagaaggcggcggacaggtcggcgatcccggtgtgctcaccggcagggatgtgattgtcacgatcgagtcggtgagtcgtcatcgcgatgtcttcgttcacaccggtcggattgagcgcggtcagctggcgatcggcgacaggattacggcccaggtggatcggagctgccggcgtcgggctgaggcccatcacaccgctacgcatctactgcaggcggcgctgaagcaggtggtggatcccgggattggtcaggcaggctccttggttgatgttcagcgtctccgcttcgatttccactgtccccgtgccgtgacgccggaggagctggagcgggtcgagatcctgatcaacgattggatcaccgaggcccatcacctcgaagtcgcggagatggagatcgagaaagcgaaagcagcagga

SEQ ID NO: 306364 - DNA, 703 bp, Unknown
  Bacterial polypeptide expressing nucleotide sequence isolated from the Sargasso Sea
gatgatatctggtttttcgataaaagatagattaggtccttcagaatttctaggctatgagacagatcaagcagaaggcattattttatcattattaaaagacaataaagaagtaaatgtgctgaatgaaaatgatgaaggaattattattttaaatcaaactcctttttatggagagtctgggggacaggtaggagatactggtgaaataatatccgcagattttaagttcgagataacagatgtccaaaaaaaattaggtgatctatttgtacattatggcaaagttaaatcaggaagcataaagattaaagacaatgttgagatgaaaattgatatagatagacgtaataatataagagcttatcactcagcaacacaccttttgcatgaatctttaagaagagtattaggtactcatgttacacaaaaaggatcattagtggcaccagatagactaagatttgattttagccatatgaaaccaatttcagaccaggaaatagaaaaaatagaaaatcacgttaattcaatggttcaaaaaaaatcagaagttaaaacaaggatcatgacgcccaaagaagcagtaaataatggagctctggcactctttggagagaaatatggagaagaagttagagtattatctatgggagatgagaaagaaaagtatttttccactgaattatgtggaggtacgcat

SEQ ID NO: 306365 - DNA, 827 bp, Unknown
  Bacterial polypeptide expressing nucleotide sequence isolated from the Sargasso Sea
aatgagtaatttttttccggaactaaaaagagagcaaaaattatctgaaaatgtaattagagaagaggagatttcttttcttaagactttagatcagggacttacaatgttaaactcacttttaaaatcatcaaaaaatggcttattaaatgggaaaaagatttttgaattatatgacacttacggttttcctgttgatttgactgctttgatcgctaaagagaataaatttgatattgatgagaaaggttttaatgaggaaatgaaaaaacaaaaagacagatcaagagctgatgcagcttcttcaatagacgactggaaagttgttttagatgatgattttgaggagtttgttgggtatgatttactcgaaacagatattaaaattactcgttatagaagaataaaaaacaaaaaagatggagacttgtatcaactagtttttaatttgacacctttttatcccgagggaggtggacaggtcggtgacaaaggatatttacaagaggaaaatggagaaatccattacattacagacaccaaaaaagaagacaatttaataattcatttttctaaatctattccaaaaaaaaccagtggaactttcaaagccatagttgacaagaatcaaagaagtagaacttgttccaatcatactgctacacatttaatgcatcaagctttgagaaaaatattaggatcacatgttgagcaaaagggctcaatggttcactctggcatgtttagatttgatttttctcatttttccaaggtatcaaaagatgaattaaaacaagttgaattatttgttaacgagagaattagag

SEQ ID NO: 306366 - DNA, 685 bp, Unknown
  Bacterial polypeptide expressing nucleotide sequence isolated from the Sargasso Sea
tatggcctcattaaacgaaattcgttctacttttttaaattactttaaaaaaaatggtcatgaaatcgttgcttctagccctctagttcctagaaacgatcccactttgatgttcactaactctgggatggtccaatttaaaaatctttttacagggcttgaaaaaagagattatttaagagctgttaccgcccagaagtgcgtaagggccggtgggaagcataacgatctagataacgttggttatacagctcgccatcatactttttttgaaatgttgggaaatttttcgtttgggaattattttaaatcagaagcaattcctcttgcttggaatttgataaccaaagaatttggaattcctgccgaaaagttatatgtaactgttttccatactgatgatgaagctgctttgatttggaaaaaagttggtgttcctgatgatcgtataataaaaattagtacttctgacaatttttggcaaatggggcctaccggcccatgcggaccttgcacagaaattttttatgaccatggtgagcaaatttggggtggaccgcctggatcgccagaggaagacggcgatcgtttcattgagatttggaacatagtatttatgcaaaatgagcggttagacgacggttcaatgaaagaacttgatattcaatctattgacacaggtatg

SEQ ID NO: 306367 - DNA, 466 bp, Unknown
  Bacterial polypeptide expressing nucleotide sequence isolated from the Sargasso Sea
catgaaaaatagtagttcagagattagaagtaaatttattgatttttttacatcaaaagggcatgtatatgtagattctagtccaataataccatcaaatgatgataaaactttgttgtttactaatgcaggcatggttcaatttaaggatatttttctcggtataaaagaatcaaaatacaaatctgccgttacaagccaaaaatgtttaagagctggtggaaaacataatgatcttgataacgttggatttacaaatagacatcatacattttttgaaatgttaggaaattttagttttggagattattttaaaattgaagctatacagtatgcatgggagtttttaactgttgagcttaaaattcctaaagataaaatgtggataacagtccatagctcagacgatgaagcaaaaaatatctggttagatgaaattggcatttcaaaggatagactctcaata

SEQ ID NO: 306368 - DNA, 760 bp, Unknown
  Bacterial polypeptide expressing nucleotide sequence isolated from the Sargasso Sea
aaaacttggagacttatttgttcattacggatctttgaaaactggagaaataaaaattaatgatgtagttgaaatgaaaatagatgtagagagaagagataatctaaaagcttaccattctgctacacacttactccacgagtcattaagaagaaccttaggtaaacatgttatgcaaaaaggatcattagttgctccagatagattaagatttgactttagtcatatgaaaccaattactgatgaagagttagaaactatcgataaattagttaatgaatatgtttcaaatagttctgaagtaaccacaagaattatgacaccaaaagctgcaattgaaaaaggagcactagctttttttggtgaaaaatatggagaagaagtccgtgttgtatctatgggaaaggaaaaagaagcatacttttcaacagaattatgtggaggtacacatgtcaaaaataccggtgatattggaaaatttaaaaccgtaagtcaatcgtctattgctgcgggcgttagaagagttgaagctttaagagataaacaacttgaggattttattaagaataaagaaaaattatcaactttatcgacacaaaaagatgaagaaacgattaaagatttgtcatcgcaaattattaaacttggaggcaaaccaaatgttgataataaagatttaaaagaaattataaaaaatctttcacgacaacttgaacaactaaatgttagttcagttcttcaagataaaaccaaaaacatt

SEQ ID NO: 306369 - DNA, 160 bp, Unknown
  Bacterial polypeptide expressing nucleotide sequence isolated from the Sargasso Sea
atgcaaactacaaatcaaatcagagacatttttttaaaattttttgagaaaaatgggcatcaaattgtttcttcaagcccgcttgtaccgagaaatgaccccacgttactttttaccaacgccggtatggttcaatttaaaaacgtctttacgggtgggg

SEQ ID NO: 306370 - DNA, 715 bp, Unknown
  Bacterial polypeptide expressing nucleotide sequence isolated from the Sargasso Sea
aaaaaattcttagattatttcaaaaaaaataatcataagatcgttgattcgagcaaccttgtccccaacaatgatccgactcttatgttcaccaactcgggtatggttcaatttaaaaacgtttttacaggattagaaaaaagagattacaaaacagcaacgacatctcaaaaatgcgtaagagctggcggaaaacataatgatttagaaaatgtaggatatacaccaagacaccatactttttttgaaatgctgggaaatttttcctttggagattatttcaaagaaaaggcaattattcatgcttggaacttgttaaccaaagattttcaactaccaaaagaaaaacttttagttacagtttttcatgaagatgaagaatcatttaaactttggaaaaaaatagcaggcttaagtggtgataagataattaaaatagcaacatcagataatttttggtcaatgggtgatacaggtccatgtggcccatgttctgaaatattttatgatcatggtgagaaattaaaaggcggaccaccaggaagtcctgacgaagacggagataggtttattgagatatggaatttggtttttatgcaatatgaacaaatatcaaaagacaaaagaataaatttaccaaaaccatcagtagatactggaatggggttagagcgaatgacagcagttcttcaaggaacgcacgataattataata

SEQ ID NO: 306371 - DNA, 898 bp, Unknown
  Bacterial polypeptide expressing nucleotide sequence isolated from the Sargasso Sea
aatgaattctaatgaaattagaaaaaaatttttaaaatattttgaaaaatatgatcatgaaataatccattcaagttcattggtgcctcataatgaccctactttgatgtttgctaattcaggaatggtgcaattcaaaaatatatttactggaaaagaaagtagaaaatataaaagggcaactacagcacaaaaatgcgtaagagctggggggaagcacaatgatttagaaaatgttggatacaccactagacaccatactttttttgaaatgcttggaaatttttcttttggtgattattttaaagaacttgcgatagaattagcatggaatttaattacgaaagagtttggcttagataaaaatcgccttttagtaacaattttttcagaagatgaagattctttaattttatggaaaaaaattgcggatttatctgaagataaaattatcaaaattaatacttctgataatttttggtcaatgggagatacaggcccttgcggtccttgttctgaaatattttatgatcatggtgataaatttaaaggtggtccaccaggctcaattaatgaagatggagatagatttatagaaatttggaatttagtatttatgcaatttgagcaaatttctaaatcagaaagaatagacttgcctaagccatcaatagacacaggtatgggtcttgaaagaattactgcattattaaatggttctaatgataattatgctactgatttatttaaacctataattaacaaatcaattgaagttttaaataacgatagtttaataaatagtccaagtcatagagttattgcagatcatttaaaatcttcttcatttttaattgctgatggtgttatgccatctaatgaaggtagaggctatgta

SEQ ID NO: 306372 - DNA, 610 bp, Unknown
  Bacterial polypeptide expressing nucleotide sequence isolated from the Sargasso Sea
catgtcggcgggcgagagcgtcgtcgccgacgcggcgcccgcggcgagcggcgacctcggctggccggcgggcaaggtgcgcgacgagttcgtcgcgtacttcgaggcgaaggagcacacgatggtgccctcgtcgcccgtcgtgccgtatgatgacccgacgctcctctttgccaacgcgggcatgaaccagttcaagccgctcttcgtgggccaggcgcagccggggagcgcgctcgcgaagctgacgcgcgcgacgaacacgcaaaagtgcatccgcgcgggcggcaagcacaacgacctcgaggacgtggggatggacacgtaccaccacaccttctttgagatgctcggcagctggtcgtttggcaactacttcaaggaggaggccatcgactgggcgtgggagctgctcacgatcacgtacggcctggacaaggaccgcttctacgcgacgtactttgagggcgacgaggcgctcgggctgcctcccgacgaggaggctcggcagctgtggatgcgctacctgcccgccgagcgcgtgctcccggggaacgccaaggacaacttttgggagatgggtgacacggggccgtgcgggccgtactcg

SEQ ID NO: 306373 - DNA, 841 bp, Unknown
  Bacterial polypeptide expressing nucleotide sequence isolated from the Sargasso Sea
attttagttttaggtgatgaggataacttctggcagatgggtgaaactggcccatgtggaccatgtacagaaatatattatgatcaaggagatggatttgatggggtattgccaactgtaggcgatcccaaagacagatacatagaaatatggaatttagtctttacacaatacaataaaacatcttctggggaaatggaggagctgccacaaaaatgtgtagatacaggaatgggcttagagagggttcaggcaattgtggaggggtttactgataattatgattccactttatttcaaaatcttagtcaatatattgattctaaaatctcgttaactaatgataatttatatataaaaaaaatattactcgatcacataagagcttgttgtcatctaattaacgacaatgtaattcctgatcgtgagggtagaggttatgttcttcgtcgaatacttagacgttcttcacgtttcgtgtataaaaataatataaaagaccctttcttataccaatgtgctgatgtaatctgcacttccagcaaggattttccagagctcaaaaaaaatttagctaaaattgttgatacaatcaaatccgaagaacaaaaatatttaaaaaccttaggtaagggcatagagctaattgatgattttttaaagaataaatcaaacctagacgctgaaacaatattcatgttgtatgatacttatggttttccctttgagattactcaagagatagcatcagaaaaaaatataacaatagataaagatggttatgaaaaacttatgatgaaccagaaagagagtgctagaaataaaaaagcatttactgata

SEQ ID NO: 306374 - DNA, 889 bp, Unknown
  Bacterial polypeptide expressing nucleotide sequence isolated from the Sargasso Sea
atgaaaggtaattactcagaaatagagagagctgagtctttaataaaagaaactttaagaatggaagaggaaaaatttttaattcttttagatagaggtattaaaatattgaatgaggaaataactaaaatagacaagatattaccaggagaagtagcttttaaactctatgatacttacggttttccattggatcttacgcaagatattttaaaaaataaatctttgacaattgatgatggtaaatttcaaagtttaatgaaagaaagcaaagaacttgctaagaaaaattggaaaggctcaggtgatagtgcggtagataatatttggttttcgattaaagatcgattaggtccttcagaatttctaggatatgagacggatcaagcagaaggcattattttatcattaataaaagacaataaagaggtaaatgaacttaatgagaatgatgaaggaattattattttaaatcaaactcctttttatggagagtctggagggcaagtaggagatactggtgaaataatatctggagactttaagttcgagataacagatgtccaaaaaaaattgggtgatctatttgtgcattacggcaaagttaaatcaggaaacataaagatcaaagataatgttgagatgaaaattgatatagatagacgcaacaatataagagcttatcactctgcaacacaccttttgcatgagtccttaagaagagtattaggcacccatgttacacaaaaaggatcattggtagcaccagatagactaagatttgattttagccatatgaaaccaatttcagaccaggaaatagaaaaaatagaaagttatgttaattctatggtccaaaaaaaatcagaagttaaaacaaggatcatga

SEQ ID NO: 306375 - DNA, 787 bp, Unknown
  Bacterial polypeptide expressing nucleotide sequence isolated from the Sargasso Sea
gtctcaaatcttgaggtgtctgtagaaaatgttagaaaaaagaagaatatttttattcattctggaattgttaatactggagttctaaagattaactcatctgttcagatgaatgttactccatcttttcgtcaacgaactacatcaaatcacaccgctacacatctattgcaatcagctttaaagttatcgattgactcaagtgtaagtcaaagaggctcgttagtttcaaatcatcgattgagatttgattttaatgctccaaaacctttgacaataaaagaacttgaagatatggaagtacgaataaatcaatggattaacgaagatcatccaattcaaattaaaacaatgccaatcaaggaggctatggctgctggtgcgttggcaatgtttggtgagaaatatggtgatgtagtacgtgttgttgatgttccaggcgtttctatggagttatgtggaggaacccatgtaactcgtacgtcacaactaggtacatttaagattattaatgagacaggtattgcttcaggaattagacgaatagaggctatagctggtccatcagttttagattattttaatgaacgtgatttggtagttaaggagttaagtaaatcattcaaagttcaatcatatgaaattgttgagagagtctcatcccttcaactggaattgaaagataaaacaaaagaacttatcaaagtaaaaaatgaactcgctttggcgaaggcattgggtttagcgagttatgcaaaatctgttgggaagagtaaattattaataa

SEQ ID NO: 306376 - DNA, 589 bp, Unknown
  Bacterial polypeptide expressing nucleotide sequence isolated from the Sargasso Sea
aatgaataccaatgagataagagaagcatttctagaattctttaaaagcaaggatcataatattgtttcttcaagttctctcgtacccaataatgacgacactttgcttttcactaatgccggcatggttcagtttaaagatgtctttttaggccaagaaaaacttaaatattccagagccactacttcccaaaaatgtattcgtgctggtggtaagcataatgatcttgaaaatgtaggctatacacttcgccatcatactttttttgaaatgctagggaactttagctttggtgactattttaaagaggaggctatagtttttgcatgggagtttttaactgatattctcaaactagataaagataagttatggattacagtttataaagatgatgatgaggcaaaagaaatttggataaataagatcggcattgatccggatagaatcgcaaagcttggagaaaaagataatttttggtcgatggctgatactgggccttgtggtccttgctcagaaatcttttttgatcatggagataaatatgaaggaacaccgccaggcgaagatggagatgagggcgataga

SEQ ID NO: 306377 - DNA, 844 bp, Unknown
  Bacterial polypeptide expressing nucleotide sequence isolated from the Sargasso Sea
atggccaaaacactaaatgaaattagatcagcattcttaggttactttgagaaaaacgatcataaaatagttgagtctagtaatctggttccaaataacgatccaacattgatgtttgcgaattcagggatggttcaatttaaaaatgtttttactgggttagaaaagagagattatcttagagctacaacttcacaaaaatgtgtaagagcaggtgggaaacataatgacctagaaaatgtaggttacaccccaaggcatcatactttttttgaaatgctaggcaacttctcttttggagattattttaaagaaagagctattgagcttgcctggaaattaataactaaggactttggtttagacaaaaatagactgtatgtaactgtgttccatgaagatgatgaagcatttaattattggaaaaaaatcgcaggtttaagtgaagatagaattattagaatagcaacttcagacaatttttggtctatgggtgaaacagggccatgtggaccatgctctgaaattttttatgatcatggtgatcatcttgaaggtggtttgcctggaacaaaaaatgaggatggtgatagatacatagaaatttggaatttggtctttatgcaatttgaacagatttcaaaagataaaagagtaaatttaccaaaaccttcagtcgatactggcatgggtcttgaaaggattgctgcattacttcaaggaactcatgataattacgaaactgaccattttaaaaaaataataaattcagcatcggaaattttaaaagttaaaccaaatgacgacaatttagcaagctttagagtaattgctgatcatttac

SEQ ID NO: 306378 - DNA, 936 bp, Unknown
  Bacterial polypeptide expressing nucleotide sequence isolated from the Sargasso Sea
gttctcttggcctgtggccggggggacgttgaagttgggcgatgacttgcgcatgagtgttgattccctccggcgctcgtcgcttcggtctcatcattcggccacgcatctcttgcacgcagcgctccgccgcaaattgggcgatcatgtagcgcaaaaaggttccttggtggcagacgaccgacttcggttcgatattagccatccaaggcccatcgacatgacctacctgttggagatcgaacaagccgtaaatgagcaaattcgggttaacactgacgtgaccacgcgcctcatgacgccagtggaagcagtggatgccggtgcgctggcattcttcggtgagaaatacggtgatgaggtgcgcgtcgtttcgatgggtatggacggcaatcaggcttattcaacggagctgtgcggcggaactcacgtgcggcgtacgggcgacatcggctattttaaagtattgactgaaggcgcggtggcgtccggcgtccggcgtatcgaagcggtgacgggtccagcagcggagcaggtcttggccgccgagtctgccgggcttgcggagacggcggcccttctcaaggtctcgccagccgatgtacccgcgcgggttggggctatcatggacgagcgccgtaagcttcaaaaagacttggcagatgcccggcgagagctggcaacgggtggcggcggtggaggttcgttgccaaacgtcaaggtggtcgagggtattaagtttgttggcaaagccctttcagacgtgccaccgaaagaattgaagagcgtggcggacgacttaaaggggcaagtggggtccggcgttgtggcgctgattactgagaacgaggggagagcctccctggttgtgggcgttacggcagatttggcggacaaactgagcgccgtggatctggtgcgcgccggttccgaggc

SEQ ID NO: 306379 - DNA, 621 bp, Unknown
  Bacterial polypeptide expressing nucleotide sequence isolated from the Sargasso Sea
tatggcaaaaacattaaacgagatcagatcaacttttctagattattttgaaaaaaatgatcacaagatagttgagtctagcaatttggttccaaataatgatccaacattaatgtttgcaaattcaggaatggtccaatttaaaaatgtttttaccggattagaaaaaagagattatcaaagagctactacttctcaaaaatgcgtaagagcaggaggtaaacataacgatcttgaaaacgttggctacactccaaggcaccatacattttttgaaatgcttggaaatttttctttcggagattacttcaaggaaaggggaattgaacttgcttggaatttaattactaaggattttggattaaataaagatagattatatgtaacagtatttcatgaagacgatgaagccttcaatttttggaagaaaatagcgggttttagcgacgatagaattattaggatagcaacttctgataacttttggtcaatgggcgaaacgggcccttgcggaccttgttcagagatattttatgaccatggagatcatttaagaggtggtttacctggaaccaaagatgaggatggcgatagatatattgagatatggaatttagtctt

SEQ ID NO: 306380 - DNA, 718 bp, Unknown
  Bacterial polypeptide expressing nucleotide sequence isolated from the Sargasso Sea
tggaagaaaatagcgggttttagcgacgatagaattattaggatagcaacttctgataacttttggtcaatgggcgaaacaggcccttgcggaccttgttcagagatattttatgatcatggagatcatttaaaaggcggtttacccggaacaaaagatgaggatggcgatagatatattgagatatggaatttagtcttcatgcaatttgagcaagtttcaaaggataaaagaattaatcttccaaaaccctctgtagatactggaatgggtttagaaagaattgcagcattacttcaaggtacacatgataattatgaaacagatcattttaaaaaattaattagttctatttctgaatttacaaaagttaaacaagatgaaaataatttatcaagctttagagtaattgcagatcacctaagagctagctcatttcttcttgcagaaggagtattaccctcaaatgaaggtagaggttatgttcttagaagaataatgagaagaggaatgagacattctcatttgctaggttctaaagaaccagtcttcaataaaatctttgatacattgaaagatgaaatgaaaggaaattatcctgaattagaaagatcagaaactttaattaaagaaacgttaaaaatggaagaagaaaaatttttagtattacttgatagagggataaaaatattgaacgatgaaatttcaaaaataaaaa

SEQ ID NO: 306381 - DNA, 556 bp, Unknown
  Bacterial polypeptide expressing nucleotide sequence isolated from the Sargasso Sea
gaggtctatcttcttttagatcagagcccgttttatgcagaatcggggggtcaaattggggatcaagggtttttgcgcaaagatgaagggcaattcaaagtgtttgatacccaaaagcagggaaatatccatattcatcgcggtattctggatcgtggcgattggaaggtaaacgatgttgtcgatgctgaggttacacaaagagaaagacatgccattacattaaatcactctgctacccatttaatgcacgcagccttgcgagctgttttagggaaacacgtatctcagaaaggatcgctggtcgatgccgaacgactgcggtttgatttctcacacgctcaggcattatcagaggacgagctcgaggcagtcgagatccaagttaacagtcaaatcttagctaattcgcaagtcaacaaagaagagatgccattacagttagcaaaggagcgaggtgctgttgctctttttggtgaaaagtatggtgaacaagtaagagttgtatcaatgggtggagagttctctatcgaattctgcgggggttgccatgtta

SEQ ID NO: 306382 - DNA, 491 bp, Unknown
  Bacterial polypeptide expressing nucleotide sequence isolated from the Sargasso Sea
tatggctcaaaaaacactaaatgaaatcagagacactttcttaaaatattttgaaaagaatgatcataagattgttgagtctagtaatttagttccaaacaatgatccaacattgatgtttgctaattcgggcatggttcaatttaaaaatgtttttacaggtttagaaaaaagagaatatcaaagggcgacgacatcacaaaaatgtgtaagagcaggtggaaagcacaatgatttagaaaatgttggatatactccacgacaccacacattttttgagatgttaggaaatttttcatttggagattattttaaagaaaaagcaatacattatgcttgggatttaattactaaagattttggaatagataaaaatagactttatgtaactgtatttcatgaggatgatgaggcttttaatttttggaaaaaaatagcgggttttagtgaagatagaataatcagaatctctacatcagataatttttggt

SEQ ID NO: 306383 - DNA, 173 bp, Unknown
  Bacterial polypeptide expressing nucleotide sequence isolated from the Sargasso Sea
aatgaataccaatgagataagagaagcatttctagaattctttaaaagcaaggatcataatattgtttcttcaagttctctcgtacccaacaatgatgacactttgcttttcaccaatgcgggcatggttcagtttaaagatgtctttttaggccaagaaaaacttaaatttt

SEQ ID NO: 306384 - DNA, 718 bp, Unknown
  Bacterial polypeptide expressing nucleotide sequence isolated from the Sargasso Sea
tcatctgaaagaataaatcttcctaaaccttcaattgatacaggtatgggtttagagagaataactgccttattaaatggcacaaatgataattatgacactgatctttttaaccctcttataaataaatcaattcagttacttaataatgaaagtttaaatgaaagtccaagtcatagagtaatagctgatcatttgagatcttcatcatttttgattgcagatggtgtcacaccttcaaatgaaggtaggggttatgttttaagaagaattatgagaagaggtatgcgacatgcacacactcttggaaataatgagccaatttttgataaaatgctccctcaattaattgaaacatttcaaaatgcttatcccgaactagaaagagcaaaggatttaattttaaatacatttttaaatgaagaaacaaaatttaaagaaactgttgaaaagggtcttaaaattttagaggatgaaatttctacttctccaaaaaaactagatgggaaaattgcttttaaactatatgatacatatggcttcccattagatttaactcaagattatcttaaatcaaaaagtattgaagttgatgttgagtctttcaatcaaatgatgaaagagcaaaaagaaagagcacgtaaaaactggaaaggaacaggtgatcaaggagatcaaaaaaactggtttaaaattactgaaaatttaagctcaactg

SEQ ID NO: 306385 - DNA, 808 bp, Unknown
  Bacterial polypeptide expressing nucleotide sequence isolated from the Sargasso Sea
attttaaatgatgaaatatctaaaatagataaagttttaccgggtgaggttgcttttaaattatacgacacttatggtttcccattagatcttaccgaagatattttaagaaataaattaatgtcaatcgatactgaaaagtttcaatctttaatgaaggaaagtagagaacttgctaagaaaaattggaaaggttccggtgatgcagcggttgaagatatctggtttggaataaaagataaaattgagccaactgaatttttaggatacgaaaccaatcaagctgagggtgtcgtattatctcttttaaaagataacaaagaggtagatcagttaaaagaaaatgatgaaggaatgattatagtaaatcaaactcctttctatggcgagtctggaggtcaggtcggtgatactggtgaaatagtatcaaataattttaaatttgaagtaaccgatgttcaaaaaaaactgggagatttattcgtccattatgggaaggttaagagcggatctataaaattacaggaaaatgtagagttaaaaattgatgtagaaagaagagacaatactcgtgcttatcactcagcaacccatctattacacgagtctttaaggagagttcttggcactcatgttactcaaaaaggatctttagtagagccaagtagattaagatttgatttcagccatatgaagccaattttgaacgaagaaatcgataaaatagaagagtttgtaaatgcaatggtctcaaaaaaatctgatgtaaaaactagactaatgacacctgatgaggcagttgaaaatg

SEQ ID NO: 306386 - DNA, 739 bp, Unknown
  Bacterial polypeptide expressing nucleotide sequence isolated from the Sargasso Sea
ctgagggtgttgttcaatcttttgttaaaaaataacgaacaggtagagtctttaaaggctggtgatgaaggtatgattattttaaatcaaacacctttttatggagaatctggaggacaagttggtgacactggagcaataataacaaacaattgtaaatttgaagtttcagatgttcagaaaaaattaggagatctgtttgttcattatggaaaggtaatttctggtgaaattaaaattaatgaaagtgttgaattaaaaattaacgttgaaagaagagaaaatataagagcttatcattcagcaacgcacttattacatgagtcattgagaagagttttaggaacgcacgtgacacaaaaaggatctttagttgaggcagatagattaagatttgacttcagtcatatgaagccaatttcacctgaagaaatagagaaaattgaaagctttgttaattcaatggttgagaccaaatctgatgttaaaacaagacttatgacaccaaaagaggctgtagataatggtgccttagctttatttggagaaaaatatggcgatgaagtgagagttttatcaatgggagatgaaaaaaataaatatttttctacagaattatgtggtggtactcatgtgagaaatacaggtgatattggtaaatttaaaattgtaagccaatcatcaatagctgcaggagtaagaagagttgaagcattaagagaaaaaacaattaaatgat

SEQ ID NO: 306387 - DNA, 817 bp, Unknown
  Bacterial polypeptide expressing nucleotide sequence isolated from the Sargasso Sea
caataagaaaatgaaagaacaaaaagatagagctagaaaaaactggaaaggtataggtgatcaagaagatcaaaaaaaatggtttcaaattactgaacatttaaattctactgaatttttaggttatgatcaaatagagtctgaaagtgaaattatttctataattaaaaaagatagtgaaattgataatctattagaagaagaagaagggattatcattttaaatcaaactcctttttatgctgaaagtggtggacaaataggggacagtggaaaaattatttttaataatagtgtttttgaagtatctgacacaacaaaattatttgggactttttatttacatcacggtaaagttacaattggtaattttaataaaggtaataatgttaatgctattattgatataaaaaaacgtgaattaataaaatctaatcattcatctacccatttattacattcttctttgagacaaatactaggtaaacatgtttctcaaaaaggttcattagttaataatgaaaaacttagatttgattttagtcataatgaaccaataagcctagaaaatattgttaaaattgaaaattatgtaaaaaaagaaattgaggcaaatacattagtagatacgaaaactatagatcatcaaaaagcaattgatgaaggagctatggccttatttggtgaaaaatatggtgatgaggtccgggtcatttcaatgggtactagagaaaataatcagatattttcaaaagaactttgtggaggtactcacgtggataaaactggagatataattgattttaaaataattaac

SEQ ID NO: 306388 - DNA, 801 bp, Unknown
  Bacterial polypeptide expressing nucleotide sequence isolated from the Sargasso Sea
aatattaaaaataataaattagatggcaaaatcgcatttaaactttatgacacatttggatttccccttgatttaacacaagattatcttaaatcaaagaaaatcgacgttgatgtagaatcttttgatacattaatgaagctacaaaaagaggaagctaagtcttcatggaagggtagcggtgatggaaatactgaaaagctttggtttgatattgcaagaaaaacgaatccaacagtatttaaaggatataaagagactattctaacgtcaaatgtaaccgcattggttttagactcagaagcggttgatgaattaagcgataaaacaaaacaatcagcaatcatcacagatgagtcatgtttttatgcagagtctggagggcaagttggagataaaggcataatttcctcagaaaatgcagaatttagagtaacagatactagaaaaactcctcaaggcgtttttattcattttggtaatgtaatttcaggtaattttaaaataggacatgaggttaaacttaaaattgatacgagtttgagagatcttataaaaaaaaatcactctgctacacatttgcttcatgctgctttgaggaataatttaggacttcatgtagctcaacgtgggtctttagttaatgagaataaattacgttttgacttcagtcataataaacaaatttcatcaaatcaaatagatactattcaaaaagaggtaacaaatattatttctaatacttgtgaaacacaaattgatattaagtctcaagaagaggctattaaactaggggctata

SEQ ID NO: 306389 - DNA, 797 bp, Unknown
  Bacterial polypeptide expressing nucleotide sequence isolated from the Sargasso Sea
ttttgaaaaaaatgatcataaaatagttgagtctagcaatttagttccgaataatgacccaacattgatgtttgccaattcaggaatggttcagtttaaaaatgtgtttactggattggaaaagagagactatcaaagagccacaacatctcaaaaatgtgtaagagcaggtggcaagcataacgatcttgaaaatgttggctatactccaagacaccatacattttttgaaatgttaggaaacttttcttttggcgattattttaaagaaagagctattgaacttgcgtggaatttaataacaaaagaatttggtttagataagaacagactttatgtaacagtctaccatgacgatgatgaagcctttaactactggaaaaaaattgctgggttaagtgaagataaaatcataaggatagcaacatctgataatttttggtctatgggtgaaacaggaccttgtggtccttgttcagaaatattttatgatcatggagaccacttagaaggtggattaccaggaacaaaaaatgaggatggggatagatttatagaaatttggaatttagtctttatgcagtatgagcaaatttcaaaaaataaacgaattaatctaccaaaaccatcagttgatactggcatgggtttagagagaattgctgcattacttcaaggaacgcacgacaactatgaaactgatcattttaaaaaaataataaactctgctgcagaaattttaaatgtcgagcctgataatgataatttagcaagttttagagtaatagcagatcact

SEQ ID NO: 306390 - DNA, 827 bp, Unknown
  Bacterial polypeptide expressing nucleotide sequence isolated from the Sargasso Sea
actttatgtaacagtttttcatgaagatgatgatgcttttaattattggaagaaaatagcgggttttaatgataatcgaataataagaattgcaacttcagataatttttggtctatgggtgagacaggaccttgtggtccatgttctgaaatattttatgatcatggagatcatttaaaaggtggtttaccaggctcaaaaaatgaagatggtgatcgttttattgaaatttggaaccttgttttcatgcaatatgaacaagtttcaaaagataaaagaattaatttgccaaagccttcagtcgatacaggtatgggattagagagaattgcagctttacttcagggtactcatgataattatgaaacagatcattttcaaaaactaattcaatcaacttctgaaattgttaagaaaaaaccagatcaaaataatctttcaagttttagagttattgcagatcatttaagagctagctcttttttaattgcagaaggagttttaccatctaatgaaggcaggggttatgtcctaagaagaattatgagaaggggtatgagacattcacatttgttaggatctaaaaatcctgttttttacaatttgtttgaaacgttaaaaaatgaaatgtcaggaaactatcctgaattaaaaagagctgggtcattgattaaagaaactcttaaaatggaagaagaaaaatttttaattcttttagatagaggaattaagatattaaatgatgaaataaccaaaatagataaagttcttcctggtgatgttgcttttaaattgtatgacacttatggatttcctttagatctta

SEQ ID NO: 306391 - DNA, 898 bp, Unknown
  Bacterial polypeptide expressing nucleotide sequence isolated from the Sargasso Sea
aatgaaatgtcaggaaattatccagaacttataagagctgaatcattgattaaagaaactttaagaatggaagaggaaaaatttttagttctacttgatagaggaattaaaattttaaatgatgaaatttctaaaattgataaagtattacccggtgaggtggcatttaaattatatgatacttacggatttccattagatcttactgaagatattttaagaaataaatcaatgtccattgatacagataagtttaaatctttgatgaaagaaagcagagagcttgctaaaaaaaattggaaaggttcaggggatactgctgttgaagatatttggtttgggattaaagatagattagaaccaacagaatttttgggttatgaaacaaatcaagcagaaggtgttgttttgtctttgttgaaagacaataaggaagttcatcaattgaaagaaaatgatgaaggaatgatcatagtaaaccaaacaccgttttatggagagtctggaggtcaagtaggggatactggtgagattgtatcaaatgaatttaaatttgaggtgacagatgttcaaaaaaaacttggggacttatttgtgcattatggaaaagttattagtggctcaataaagttaaaagacagtgttgaaatgaagataaatgttgaaagaaggaatgatactagagcttatcattctgcaactcatcttttacacgaatctttgagaagagtattaggtaatcacgtaacccaaaaaggttctcttgtagagcctagtagactgagatttgattttagccatatgaaacctattcaaaatgatgaaattaataaaatagagaattttgtaaataatatggtttcaaaaaagtcagatgtaaaaactaggttaatgacac

SEQ ID NO: 306392 - DNA, 614 bp, Unknown
  Bacterial polypeptide expressing nucleotide sequence isolated from the Sargasso Sea
aatgaaaacgaatgaaataagacaagcatttatcaaattctttgagtcgaaagggcatcaaagcgtcaacagttcgcctctgattcctgcaaatgatccgacactcttgtttacaaacgctggaatggttcagttcaaggacatttttttaggaaaagaagatcaaggtttcacaaaagcagtcagtgctcagagatgtttaagagcaggtggtaagcacaatgatcttgaaaatgttggttatacatcacgccatcacactttttttgaaatgcttggcaactttagttttggagactactttaaagaggatgcaatccaattggcatgggacttcattaccaatgaactcaaacttgaaaaggaccgtctttgggtaaccatttttgaagatgatgatgaggctgcaagtatttggcttgaaaaggttggagtatcagctgatagacttattcgactgggtgaaaaatctaacttttggactatgggtgatactggaccatgcggcccttgtagcgagatattttatgaccatggagatcatattgatggcggtcctcctggatcagatgatgaagatggtgatcgttttgtagaaatttggaatcttgttt

SEQ ID NO: 306393 - DNA, 737 bp, Unknown
  Bacterial polypeptide expressing nucleotide sequence isolated from the Sargasso Sea
gatgaaagaaagcagagagcttgctaagaaaaattggaaaggttctggtgatgcagcagttgaagatatttggtttggaataaaagataaaattgagccaactgaattcctaggatacgaaaccaatcaagctgaaggtgccgtgttatctcttttaaaagataataaagaagtagatcaactaaaacaaaatgatgaaggtatgattatagtaaatcaaacccctttctacggtgaatcaggtggacaagttggtgatactggtgaaatagtttcgaatgatttcaaatttgaagtaactgatgtccaaaaaaaattaggtgatttatttgttcattatggaaaggtaaagagtggatctataaaattacaggaaagtgtggaattaaaaattgatgttgaaagaagagataatacacgtgcttatcactcagcaacccatttattgcacgagtctttacgaagagttcttggcacccatgtaactcaaaagggatctttggttgagccaagcagattaagatttgattttagccacatgaagccaattttaaatgaagaaattgataaaatagaagagtttgtaaacacaatggtttcaaaaaaatctgacgtaaagactagattaatgacacctgatgaagcggttcaaaacggtgctttagcattatttggtgaaaaatacggtgatgaagtaagagttctttcgatgggagatgaggatggtaagtattttt

SEQ ID NO: 306394 - DNA, 862 bp, Unknown
  Bacterial polypeptide expressing nucleotide sequence isolated from the Sargasso Sea
cagttcaaatgtaaaattaatattcaagacacacaaaaaaaaatgggcgacctatttgttcattatggaacagttcacaaagggtcattcgcagttggagatagtgtaaatcttgaaataaacattcaaaaaagaaacaatgcaagagcaaatcattctgcaacacatttacttcacgagtctttaagaaggacacttggtaaacatgtgactcaaaagggatcattagtaagtccagatagactaagatttgattttagtcacaataagcccattgaaaaagatgaaatggcaaaaattaataaaattgttaacgaaatagtaaatggcgcaagtgatgtacaaacaagaattatgacacctaaagaagctgttaatttaggagctttagctttatttggcgaaaagtatggtgaggaagtcagagtagtttttatgggtaaagaaaataatggtttcttttccacggaattatgtggtggaacacatgtaaaaaatacaaaagaagttggagagtttaaagtaattagccagtcatcaatagcttctggaattagaagagtggaagcgttaagaaaaaaacaacttcaagattatgaaaaatcactcaaagaagataggtctttaaaagaaaaaaatcttaaagaacaagtttatttaataaaaaaagatttgttaaaacttaaagtcaaaccagattttaaggataatgttgatttgtcagaaaacttaaaaaatcttaataaacaattggaaaaagtcaaaattaaaaggataattgaagataaaagtaaaaatattataaaagataaaaaagttggtagtttcttattcagacaacaggtttttgaagatttcccac

SEQ ID NO: 306395 - DNA, 871 bp, Unknown
  Bacterial polypeptide expressing nucleotide sequence isolated from the Sargasso Sea
atgttttaaattatatgacacttatggttttccaattgatttgacagctcttatagcaggtgaaaagggatattcaatagacaaagatgaatttgataaagaaatgaatattcaaaagaaaaggtccagatcagcatcattactaaattcagaagattgggtcgtcttagaatctgattttgttgaagagtttgtaggatatgattatttgtcaaccgatgtaaaaattactagatatagaaaaattaaatcagctaaagaaggaaatttttatcaactagtttttaatcttacaccattttatccagaaggaggtgggcaagttggtgataagggttatcttcagtcatctaatggagatgttttttatattattgatacaaagaaagaaaataatgtaattcttcattacacaaaaaatttgccatctaatttaagagaagtatttaaggcagttgtagattctaaacaacgtttaaggacatcttctaatcatactgcgactcatcttttacatcaagctttgagatcaatacttggagatcatgttgagcaaaaaggatcaatggttcactcaggaatttttagatttgatttttctcacttttcaaagttgaaaacggaggaaattattgaaattgagcaatttgttaattctagaataatggaacatattccattggaagaaaacagaaatgaaccatataaagaagcaattaagaaaggagcaattggattatttggtgaaaaatatggtgatgttgtaagaacaataaaatttggacaatcatatgagctttgtggaggaactcatgttaacaacactcatgatatttggcattttaaaattatttctgaaacttctatgcct

SEQ ID NO: 306396 - DNA, 736 bp, Unknown
  Bacterial polypeptide expressing nucleotide sequence isolated from the Sargasso Sea
gaaggatcaccgccaggggaagatggagatgagggcgatagatttgtagagatatggaacttagtctttatgcaattcaaccgtgattcagatggcgctctgcatgatttaccaaaaccatcagttgatactggaatggggctagaaagaattgctgcagtaatgcagggagtaggatcaaactatgaaactgatatcttttcaaatctaattgtagaatctgagaaagtgcttggaaaggctggagatgtctcccataaagtaattgctgatcatcttagatcttcatgcttcttaatttcagatgatgtttttccatctaatgaaggaagaggttatgttcttagaagaatcttaagaagagctataaggcacggctataagatcggagcagataaaccttttatgcataagttagttagaactttcgttgacgcgatgggcaatgcctatccgcaattaaaaaatgatgaagaaagaattaaaaaaatcatcaaaaatgaagagacccagtttttgcaaactcttgataaaggtattcaaattttggactctactcttgcagaagggaataaagaaattatttcaggagatttggcctttaagcttcacgatacctttggttttccatttgatctgacggctgatattgcaagagaaaagggtattgatattgatgaaaaaggattcaagaagaatatggaatctcaacaacaaattcaaaggcatcaagttc

SEQ ID NO: 306397 - DNA, 646 bp, Unknown
  Bacterial polypeptide expressing nucleotide sequence isolated from the Sargasso Sea
atgagcgatattagaaagaagtttcttggctatttttctgtaaacaaacatgaaatcgtagagtccagtaatattgttccaaataatgatccaactttaatgtttacaaattctggtatggtccaatttaaaaacgtgttcacaggagttgaaaataagccattcaaaaccgctactacctcacaaaaatgtattagagcaggaggtaagcacaatgatctagagaatgttggttatacacctagacatcacactttttttgaaatgctcggaaacttttcttttggagattattttaaagaaaaagctatttattatgcatgggagttattgactaaagattttggaattcccaaagacaggctttcagcaacggtatattctgaagacgaagaagcttttaaattatggaaaaagatagctgggttacctgaaagtagaatagttaaaatatcaacatcagataatttttggtcaatgggtgaaactgggccttgcggaccttgttcagaaatattctttgatcatggagacaaattaaaaggtggtcctcccggaagtccaaaccaagatggagatagatttattgaaatttggaaccttgtctttatgcagtatgagcagatttccaaagataaaagaattg

SEQ ID NO: 306398 - DNA, 919 bp, Unknown
  Bacterial polypeptide expressing nucleotide sequence isolated from the Sargasso Sea
ggttttccattagacctgacacaagatattttaaaaaataaatcattaacgatagacaaagataaatttcaaagtttaatgaaagaaagcaaagaacttgctaagaaaaattggaaaggctcaggtgacagtgcggtagatgatatttggttttcgataaaagatagattaggtccttcagaattcctaggatatgagactgatcaagcagaaggtattattttatcattattaaaagacaacaaagaagtaaatgaattgaataaaaacgatgaaggaattattattttaaatcaaactcctttttatggagagtctgggggacaggtaggagatacaggtgaaataatatctggagactttaagttcgagatcacagatgtccaaaaaaaattaggtgatctatttgtacactacggcaaagttaaatcaggaagtataaaaatcaaagacaatgttgagatgaaaattgatattgatagacgtaataatataagagcttatcactcagcaacacaccttttgcatgaatctttaagaagagtattaggtactcatgttacacaaaaaggatcattagtagcaccagatagactaagatttgattttagccatatgaaaccaatttcagatcaggaaatagaaaaaatagaaaatcacgttaatttaatggttcaaaaaaaatcagaagttaaaacaaggattatgacccctaaagaagcagtaaataatggagctcttgcactatttggagagaaatatggagaggaagttagagtattatctatgggagatgagaaagaaaagtatttttccactgaattatgtggaggtacgcacgtacgaaacactggcgatattgaaaaattcaaaattattagtcaatcatctattgcagccaggtgtgagagagagtaga

SEQ ID NO: 306399 - DNA, 487 bp, Unknown
  Bacterial polypeptide expressing nucleotide sequence isolated from the Sargasso Sea
gatggctgaaaaaacattaaaaaacattagaaaatcgtttttagatttcttttctaaaaaagaacacaaaatagtggattccagcaatttggtaccaagcaacgatcccactttaatgttcactaattcaggcatggtgcaatttaaaaatgtttttacaggtctcgaaaaaagagattacaagagagctgttacatctcaaaaatgtgtcagagctggtggaaaacataatgatctagaaaacgttggctacactcctcgacaccacacattttttgagatgttaggaaatttttcttttggtgattattttaaggatgttgccattgaattagcgtggaatttaattacaaaagaatttcaaatatcaaaaaataaactgagcgttagtgtttattcagaagatacaaaagctcatgacttgtggaaaaaaatcgcaggattgccagaaagtagaatatataaaatatctacaaatgataatttt

SEQ ID NO: 306400 - DNA, 583 bp, Unknown
  Bacterial polypeptide expressing nucleotide sequence isolated from the Sargasso Sea
attgatactgaaaagtttcaatctttgatgaaggaaagtagagagcttgctaaaaaaaattggaagggctctggtgattcagcaattgaagatatttggttcggaataaaagataaaattgagccaactgaatttttaggatacgagactaaccaagctgaaggtgtcgtattatctattttaaaagacaataaagaagttgatcaattaaaacaaaatgatgaaggaatgattatagttaatcaaactcctttctatggtgagtcaggaggtcaggtaggtgatactggtgaaatagtttcgaatgaatttaaatttgaagtgattgatgttcaaaaaaaactaggagatttatttgtacattatggaaaggtaaaaagtggatctatcagattacaggaaagtgtggaattaaaaattgatgtagaaagaagagataatactcgtgcttatcactcagcaacccatctattacatgaatctttacgaagagttcttggtacccatgtaactcaaaaaggatctttagtagagccaagcagattaagatttgatttcagccatatggaagcccaattttgaa

SEQ ID NO: 306401 - DNA, 920 bp, Unknown
  Bacterial polypeptide expressing nucleotide sequence isolated from the Sargasso Sea
ttttgaaatgcttgggaactttagctttggtgactattttaaagaggaggctatagtttttgcatgggagtttttaactgatgttctcaaactagataaagataggttatggattacagtttataaagatgatgacgaggcaaaagaaatttggataaataagattggcgttgatccggatagaattgcgaagcttggagataaagataatttttggtcgatggctgatactggaccttgtggcccttgctcagaaatcttttttgatcatggagataaatatgaaggaacaccgccaggtgaagatggagacgagggcgataggtttgtagagatatggaacttagtatttatgcaattcaaccgagattctgatggcgtgctgcatgatttaccaaagccatcagttgatactggaatgggactggaaagaattgctgcagtaatgcagggagtaggatcaaactatgaaactgatatcttttttaatctaattaaagaatccgagaaagtgcttggaaatgctggtgatgtctcccacaaagtaattgctgaccatcttagatcttcatgcttcttaatttctgatgatgtttttccatctaatgaaggaagaggctatgttcttagaagaatcttgcgaagagctattaggcacggctataagattggagcagataagccttttatgcataagttagttaaaacttttgttaacgcgatgggtaatgcctatccacaattaaaaaacgacgaaggaagaattaaaaaacttatcaaaaatgaagagactcagtttttacaaacccttgataaaggcattcaaattttagactctaatcttgcagaggggaataaagaaattatttcaggagatttagcctttaagcttcatgatacttttggttttcccatttgat

SEQ ID NO: 306402 - DNA, 889 bp, Unknown
  Bacterial polypeptide expressing nucleotide sequence isolated from the Sargasso Sea
cgaaggccgtggttatgtgctgcgccgtattattcgtcgtgctatccgtcacggtaacaagctgggtgctaaaggcgtgtttttcagcaaactggttggtgctttggctgaacaaatgggtgaagcatacccagagctgattgaaaaacaggccgtaattgaaaaagtgctggcattagaagaagagcagtttggtaaaaccttagaacgtggtctgggtattcttgaagactccctagctcagctgaatggcagcactgttattccgggcgaagtagcctttaagctgtatgacacttacggtttcccgctggacttaaccagtgatgtggcgcgtgaacgcggtttaactgtggatcaggctggttttgaagcatcgatggaagcgcagcgtaaacgtgctcagcaggcttctaactttggtgctgattacaatcaggccttaacttcggcgcagtgcaccgactttaccggctacacccaaattcagggcaaagccaaagtggttgaaattctgctggaaggcaatgctgttaactcattgaccgatggacagcaggctttagtgatcctggatcaaaccccgttttatgctgagtccggtggccagtgtggtgatgcgggtgtattaacactggctaacggcgctgtattccaggttgctgacaccatcaaagtaggcaaagcttttgcgcacaaaggcagcttaaaaggtgctttggctattggcgatttagtcgatgcggccattgataatgcccgtcgtgaagctattcgtaaaaaccactctgccactcacttattgcacgctgcacttcgcactgtgttgggtgaacacgtgacacagaaaggctcattagtaggttctgagcgtttacgtttgacttct

SEQ ID NO: 306403 - DNA, 718 bp, Unknown
  Bacterial polypeptide expressing nucleotide sequence isolated from the Sargasso Sea
atgacagcgaaagaaataagacagacctttttagagtttttcaaaagcaagcaacatcatatcgtggcatcggcacctattgtggttaaaaacgacccaactttgatgtttaccaatgccggaatgaaccaatttaaagatttgtttttgggagaggccacggtaaaatatcctcgtgtggttgatacgcaacgttgtttacgtgtttcgggcaaacataacgatttggaagaagtaggtatcgatacttaccaccataccatgttcgaaatgttgggcaattggagttttggcgattatttcaaaaaagaagcaatagcttggagctgggaattgctgaccgaagtttataaaataccgaaagatcaattgtatgtttctgtatttgagggtgatgagaaagaaggtttgccgatggatactgaagcatttgaactttggaagcaatttgtaccagaagatcacatcgttttagggaataagaaagataatttttgggaaatgggcgatacggggccttgtggtccttgttctgaaattcacgtagattgccgtactgccgaagaacgtgccgatggtaaaggtaaatctttggtaaatgcagatcatccgcaagtaattgagatttggaacaatgtatttatgcagtttaaccgtttaaaagacggttcgctacaaaccttgccagcgcaacatgtagatactgaatgggtttgag

SEQ ID NO: 306404 - DNA, 756 bp, Unknown
  Bacterial polypeptide expressing nucleotide sequence isolated from the Sargasso Sea
aaaatggtgctttagcattatttggtgaaaaatacggagatgaggtgagggttctctcaatgggagacgaggatggcaagtatttttctactgaactatgcggcggaacacacgttaaaaacactggtgatattggtaaatttaagattgtgagtcagtcctcaattgctgcaggggttagaagaattgaggctttaagagataaacaattagaggaatatttaaaaaataaagaaaaattatcaaacctagctgcagaaaaagacgaggaaacaattaaagaattaagtaagcaaattataaaacttggtggaaagccaagtttagaagaagctgatcaaaaaactttaattaaaaatttaaataaacaattagagactatctcagtaaataaaattttagaggataaatctaaaaatattattaaagatgaagaaattaatggaattaagttaagacttcaaaaaatagatggattacctccaaaagaattaagaaaacttgtagataaaggcaaaaaagatttaggtgaaggtattgtggttgtattcgcaaataaagatgacaaggttggattagctgttggattaacagataaattaacaaataaatttgatgcagttaaatttgtaaaagttggatctgaaataattggtggtaaaggtggtggtggaagaaaagactttgcccaagctggtggacaagatcagtcaaaaattgaagaagcttttgaaaagcttaagggtttagtttaat

SEQ ID NO: 306405 - DNA, 868 bp, Unknown
  Bacterial polypeptide expressing nucleotide sequence isolated from the Sargasso Sea
atggatctagttaaagaaaaattaaaagctgaggagaacgcattttttaagacactttctgcaggggtaaaaatgtttgaacaaaatattccgaataaaggtaaagccatgtttgatggtgaaattgcttttaaattacatgatacatatggattcccaattgatttgacaactagcatggctttcgaaagagatttaaaagttgatttaatgcgtttcaatgaactcatggaaattcaaaaagcaggatcaaaaaataactccatgtttgatgttaaagatattgttgttgaccataaacttaagtctgatttcataggatatgatcaatttaatgctgagagcaattgcattaaactttttaattttgagggaagagaagtagaaaatatatctgaggttggttttggaatattctctgaaacacctttttatgcagaatcaggaggacagattggagatactggcactataagaaacaaagattgctatgcagaggttagagattgtaaaaaagtaggagatttccatctccacgagattaatgttttagatggacaattaaaagttaataaaaaatattctcttgcagtaaatgaggaaagaagaacaaaaattgtgagaaaccattctgctgctcatttgttgcattctgcattgagaatgacattaggcgactctgttcagcagagaggatcattagtgagtgaagaaaagctaaggtttgatttttcatatgaaaaaaagcttaccgcagagcaaattcaagacatagaaaatcttgtaaatgatcaaattgaaaaagaggttcaaacaaaaattagattaatgtcctttgaggatgcaaaaaagacaggagctttagctt

SEQ ID NO: 306406 - DNA, 619 bp, Unknown
  Bacterial polypeptide expressing nucleotide sequence isolated from the Sargasso Sea
atgagccaaattttacttacagatgtaagaaaaaagtttttagagtattttaaaaaaaataatcatcaaatagtagactccagtaatcttgtacctaataatgatccgactttaatgtttactaattctggaatggttcagtttaaaaacgttttcactggattagataaaagaccatataaaacagccacaacatcacaaaaatgcgtaagagcagggggaaaacataatgatcttgaaaacgtaggttacaccccaagacaccatactttttttgagatgctaggaaacttttcatttggagattattttaaagagcaagcaatccatcatgcttggaatttattaacaaaagattttaaactacctaaagaaaaactttctgtcacggtttttcatgaagatgatgaatcttttaacttatggaaaaaaatagctgggctaagtgaaaataaaataataagaatttcaacagctgataacttttggtcgatgggtgacactggaccgtgtggaccatgttctgaaattttttatgaccatggagaaaaattaaaaggagggcctcctggcagtccaaaacaagacggtgacagattcattgagatatggaatctcg

SEQ ID NO: 306407 - DNA, 531 bp, Unknown
  Bacterial polypeptide expressing nucleotide sequence isolated from the Sargasso Sea
aatgacttctacaacaaatgaaatccgagctaaattcctagattactttgtcgcgaacgatcatgaggttattccgtcatcgccactagtaccgcataacgaccccacattgctttttaccaatgcgggaatggtgcagtttaagaacgtttttactggcgtggaaactcttccatttaagcgagcggcgacttcacaaaaatgtgtccgagcgggtggaaaacataatgatttagaaaacgttggttacacggctcgccaccatacattttttgaaatgttagggaacttttcctttggtgattatttcaaggataatgcaattgaacatgcatggaaccttgtgaccaaggaatacggtatttcatcagacaagttattggtcacggtttttagtgaggataatgaagcttttgaattgtggaaaaaaatagccgggctccctgagagccgtatcatccgaataccgacaagcgataacttctggtcaatgggggatactggaccgtgtggcccatgttcagagatttt

SEQ ID NO: 306408 - DNA, 895 bp, Unknown
  Bacterial polypeptide expressing nucleotide sequence isolated from the Sargasso Sea
aaggtgctcggcgacgacgtctcgcaagccgggtcgctctgcggatttgatcgtctcagatttgactttaatggtcccaaggcgccgaccgaaacgcaactcgaggaggttgaaaacttagtcaacggttggatcgcgcagagcgcggcgctcaccgcggaagagatgcccatcgccgccgccaaggagaagggagcgacgatgatgtttggagaaaagtacggcgacgtcgtgcgcgtcgtcgacgttccgggcatctccatggagttgtgcggcggcacgcacgtgtctaacacggctgagattggcggatttaagattttaagcgaagccggcatcgcgagcggcatcagacgcatcgaagccgtctctggatcgggcgtcgtggagctcttgcaacagcgagacgccgtcgtcaagcaactcgccggcgcgcttcgcgtcccccccgaggaaatcgccggtcgagtcacgagtctacaaaaagacttgatcgccgcgcaaaagctcgccgattcccttcggggcgaactagccgtcgccaaggccggcgccttggtctccgaggcgaaacaagtcggccaatccaaggtgctcgtcgcccgtctcgacggcgtcgatcccgccgcgctcaaggtggccgccgaggacctcgccgctcgactcggcgacggcgccgccgtcgtcctcggcagcgccaacggtcaaaacgtcggtctcgtcgctctcttcgacgacaccgttcaaaaactcggccatctcaaggctggccaagtcctcggcgccgccgcgaaaaagtgcggcggcggcggcggcggcaagcccggcttcgcccaagccggcggtcgcgacgcctctcagctcgacgacgcccttcgcgacgccctcgacaccg

SEQ ID NO: 306409 - DNA, 859 bp, Unknown
  Bacterial polypeptide expressing nucleotide sequence isolated from the Sargasso Sea
ggaagcttaaaaattgatgataaaattgaagttaacgtgaataaagaaaaaagagagaaaactgaagctcatcattctgctacccatttagtccatgctgcactaaaaagggtgcttggagatcatgttaagcaaaagggttctcttgttgatgagcacaaacttagatttgatttctcccacgatgaatctctatcagacgaagagatatccaaaattgaagatttagtaaatcaagaaatactaaagaattcagctgtaagcaccaaaataatggatttagaagatgctaagaattcaggtgcagagtctttatttggcgaaaagtatgaagatcaggtaagagtcttatctattggtgaagatgatttttctcttgagctttgtggtggaacacatatctcaagaacaggggatcttggtattttcataataacaagtcaaagcagtgtagcctctggtatcagaagaattgaggcattatctggtcctagagctcaagaatacttatcaaatcttaagaatcaaactattcaacttcaaaaactattaaatgctcctgctgaagaaattgaagaaaaggtgagtaagcttttaaaggaaaataaaagtcttaagaaaggcggtaaaactgccaaagtagcctcaattaaatcctctaatattcatgatattgataactttaaattagtaattgaagaggcagaatcagaggatatcaaagaattaagaccagtgcttgatgaaaaaacaaaaaatgcaaataactcaatttttattcttttaagctctaaaaatgaaacattgactattctctgttctgtatcaaaagacctacaatcaaggattcagctaaaga

SEQ ID NO: 306410 - DNA, 853 bp, Unknown
  Bacterial polypeptide expressing nucleotide sequence isolated from the Sargasso Sea
atgaattctaaccttatcagatctaatttcattaagttttttgaggaaaaaggtcactcctttatccaatcttcatccatagttgcaaagaacgatccatcattaatgtttaccaatgcaggtatgaatcagttcaaaaacatctttttaggtaatgagtcaagtaaagtaaaacgtgtcgctaactctcagaaatgtttaagagtttcaggaaaacataatgatttagaggaagttggtgctgatcactatcatcataccatgtttgaaatgctgggtaattggagttttggcgattattttaaaaaagagattatcaattggagtttagaaattttgactaaagtttataaactaaataaagacgatttatatgtaacagtttttgaaggtaataaagaagatcaattagataaagatgtagaagcacataatttttggtctgaaataattgataaggaaaaaattgttcttggagataaaaaagataacttttgggaaatgggcgatacaggaccatgtggtccatgttcagaaatacatattgatttgagatcttctgatgataaaaataaaataccaggtaaagaccttgtaaataaagaccacccagaggttattgaattatggaatttggtatttattcaatataatagaaaggctaatggcaaactagaagaattacctgacaaacacatagatacaggtatggggtttgaaagattagccagaattgttcaaaataaagattcaaattacgatacagatcttttcttgccattaattgaggaaatatctaaaattactggaattaaatatggaaatgattctaaagatgaatgttgcatttaga

SEQ ID NO: 306411 - DNA, 659 bp, Unknown
  Bacterial polypeptide expressing nucleotide sequence isolated from the Sargasso Sea
aatgaaaacgaatgaaataagaaaaggatttatcaaatattttgagtcggaagggcatcaaagcgtcaagagttcgcctctgattcctgcaaatgatccaacactcttgtttacaaacgctggaatggttcagttcaaggacatttttttaggaaaagaagatcaaggtttcacaaaggcagtcagtgctcagagatgtttaagagcaggtggtaagcacaatgatcttgaaaatgttggctatacatcacgtcatcacactttctttgaaatgcttggtaactttagttttggagactactttaaagaggatgcaatccaattggcatgggacttcattaccaatgaactcaaacttgaaaaggatcgtctttgggtaaccatttttgaagatgatgatgaggctgcaagcatttggcttgaaaaggttggagtgtcagctgataggcttgttcgactgggcgaaaagtctaacttttggtctatgggtgatactggaccatgcggtccttgtagcgagatattttatgatcatggtgatcatattgatggcggtcctcctggttcagatgatgaagatggcgatcgtttcgtagaaatttggaatcttgtttttatgcaatttgatagacaagcaaatggggagcttgttaacttgc

SEQ ID NO: 306412 - DNA, 214 bp, Unknown
  Bacterial polypeptide expressing nucleotide sequence isolated from the Sargasso Sea
atgagcgaaatcaggaagaaatttcttgattacttttctaaaaatgaacacaaaaaagtagattcaagcaatattgttcctaataacgaccctactttaatgtttactaattcgggtatggttcaatttaaaaacgtttttaccggaatagagaataagtctttcaaaagagctactacgtcgcaaaaatgtatcagagcaggaggaaagcaca

SEQ ID NO: 306413 - DNA, 931 bp, Unknown
  Bacterial polypeptide expressing nucleotide sequence isolated from the Sargasso Sea
ctttggtgattatttcaaaaaagaatccattcagtgggcttgggaactaatcaccggcacgtggggattccccaaagagcgcctgtacgccactgtgtacaaaccgggcgttggcgatcctggcgaattcgaccaagaagcatatgattattggtcggaaatcttcaccgccgccgggctcgatccggccgtgcatatcgtcaacgggaacaagaaggataacttctggatgatgggcgacaccggcccatgcggtccgtgcagcgaactgcacatcgacctcacgcccgagggcgacacaaaaggcagcctagtcaatgccgataacggccagtgcattgagatttggaatctcgtctttatccaatacaacgccaacgaagacggcaccttcgtgccattggccgctaagcacgtggacaccggcatgggcttcgaacgcgtcgcggccatcatccagaccacgcagaatttcactgacttcaccaagccggtttccaattacgacacggacgtcttcagccccatctttgatgaactcgaaaaactcagcggcaagaaatatacttccacactgtcagatggtgggcccaatggacaggagaagatcgacatcgccttccgcgtgattggcgatcacatccgcacgctgagcttctctattgccgacggtattttgcccggcaacaacgatcgcaattacgtcttgcgccgcatccttcggcgcgccgtgcgttatgggcgcacactgggctttcaggagccgtttttctacaagctcgtcgatgtcctggccgaccacatgggcgagtttttcccagaactccaacaacgccgtgagctggtgcagcgaaccattcgtaccgaggaagagtcctttacaaaacactcgaccgcggtatcgacctcttccgcgaggaagccggcagct

SEQ ID NO: 306414 - DNA, 880 bp, Unknown
  Bacterial polypeptide expressing nucleotide sequence isolated from the Sargasso Sea
aatgtatttactgggcttagaaaaaagggattatcaaagagctactacatctcaaaagtgtgttcgagcaggtggaaaacataacgatttagaaaatgttggttacacacctagacaccacacattctttgaaatgttaggaaatttttcttttggagattattttaaagaaaaagcaatacattatgcctgggatttaattacaaaagattttggaatagacaaaaatagactttatgtaaccgtttttaatgaagacgatgaagctttcaatttttggaagaaaatagcaggtcttagcgaagatagaataattagaatttcaacatcagataatttttggtctatgggagaaacgggtccttgtggtccttgttcagaaattttttatgatcatggtgatcacttaaaaggaggtttacctggtacaaaagaagaagatggcgatcgttttattgaaatttggaacttagtttttatgcaatatgaacaagtttcaaaagataaaagaatagctctcccaaaaccttctgtggatactggaatgggtttagaaagaatagcagccttgcttcaaggtacacatgataattatgaaacagatcattttaaaaaactaattcaatcaacttctgatattgttagaaaaaaacctgatcaaaataatctttcaagttttagagttattgcagatcatttaagagcaagctcttttttaattgctgagggagttttaccatcaaatgaaggacgaggttatgttttaagacgtataatgagaagagggatgagacattctcatttgctaggatctaaggaaccagttttttacaatttgtttgaaactcttaaagatgaaatgtctggaaattatcctgaa

SEQ ID NO: 306415 - DNA, 214 bp, Unknown
  Bacterial polypeptide expressing nucleotide sequence isolated from the Sargasso Sea
tatggctgacaaaacattaaatgaaattaggagtacatttctcaagtattttgagaaaaatgatcacaagattgtggagtctagtaatttggttcccaataatgatccaacattaatgtttgcaaactcaggaatggttcagtttaaaaatgtttttactgggctagaaaaaagagattacaaaacagcaaccacatcccaaaaatgtgtaaga

SEQ ID NO: 306416 - DNA, 718 bp, Unknown
  Bacterial polypeptide expressing nucleotide sequence isolated from the Sargasso Sea
agctacaacttctcaaaaatgtgtaagagcaggtggaaaacataatgacttagaaaatgttggctacacaccaagacaccatacattttttgaaatgttaggaaacttttcttttggtgattattttaaagagcaagcaattcattatgcctgggatttaataactaaagattttggaatagataaaaacagactttatgtaactgtattccatgaggatgatgaggccttcaatttttggaagaaaatagcgggttttagtgatgatagaattattaggatagcaacttctgataatttttggtcaatgggagagacaggtccatgtggtccttgttctgaaatcttttttgatcacggagatcatttaccaggtggtttgcctggctctaaagacgaggatggcgatagatttatagaaatttggaatttagtctttatgcagtttgaacaagttactaaagataaaagaattaatcttccgaaaccatcagttgatactggaatgggattagagagaattgcagctttattacaaggttcacatgataactatgaaacagatcattttaaaaaaataattggttctgcatctgaaattacaaatgttaaatcagatcaatctaatctagcaagttttagagtaatagctgatcacttaagagcaagttcgtttttaattgctgaaggtgttttaccttcaaatgaaggaagagga

SEQ ID NO: 306417 - DNA, 893 bp, Unknown
  Bacterial polypeptide expressing nucleotide sequence isolated from the Sargasso Sea
ttttggtcaatgggtgagacaggtcccatgtggcccttgttctgaaatattctttgatcatggtgatcatttacctggaggattaccaggctctaaagatgaagatggagataggtttatagaaatttggaacctagtctttatgcaatttgagcaagtcacaaaagataaaagaataaatcttccaaaaccatctgttgatactggaatgggacttgagagaattgctgctttactacaaggcactcatgataattatgaaacagatcattttaaaaaaataattaattcagcttctgaaattgtaaaagttaaatcagataaatctaatctttcaagttttagagttatagctgatcacttaagagcaagttcatttttaattgctgaaggagttttaccttcaaacgaaggaagaggatatgttcttagaagaattatgagaagagggatgagacattctcatttactcggatccaaggaaccagttttttataatttgtttgatactcttaaaaatgaaatgtcaggaaattacccagagttagttagagcagagtctttaattaaagaaactttaaaaatggaggaagaaaaattcttagttctcttagacagaggaataaaaattttaaatgatgaaatatctaaaatagataaagtgttgccaggtgaagtagctttcaaattatatgatacttatggtttcccattagatcttaccgaagatattttaagaaataaatctatgtcaattgatactgaaaagtttcaatctttgatgaaagaaagcagagaacttgctaagaaaaattggaaaggttctggtgatgcagcggttgaagatatctggtttggaataaaagataaattagaagcaactgaattttagg

SEQ ID NO: 306418 - DNA, 970 bp, Unknown
  Bacterial polypeptide expressing nucleotide sequence isolated from the Sargasso Sea
tcgactatttttgtagaagatactataaaaattttagatattttgtttgtacataaatcaactattcaatcaggaagtttaaaaataggtgataaagtaaagtcttttgtagataaagaaagacgaaaaaatcttgcttcaaatcattcagcaactcatttacttcattcagcattaagaaaaatattaggtgaccatgtaaaccaaaaaggttcattagttactgatgataagttaaggttcgatatcagtcacccaaatcaaatttctagggatgaaataattaaaattgaaaacattgttaattcagaaatacggttaaataaatcagttgaaactaaggttatggattcaaaagatgctatgaattctggagctcttgctctttttggtgagaaatatagtgataaagtaagggttgtttcaatgggaagtaaagatagtcatggcaattgctattctaaagaactttgtggtggaactcatgttgagagaactggagacataggtttttttaagataattactgaaacatcagtttcatctggtgttagaagaattgaagcattgactggagacaaagcattagtttcaatacaagaagatgaaaaaataattcagaatatattatctaaattaaaagcttctaaagctgatataagtaataaattaaacaatttgattgatcaaaagaaagaattagaaagccaaataactaaattaaaaactgtaaaagttaaaaataacgatgatcaaaaaaactatattaaaaaaattgatggtttaaatttctataatagaaaattagaaaattacaactcttctgatatcagaaatattgttgatgatgctaaaaaactaattaaatctggtgttgtattagtttataatatcaaagataataaagtttctttaattgttggtgtgacgagcgatttatgtgagaatttaagtgctatagatctgcgaa

SEQ ID NO: 306419 - DNA, 876 bp, Unknown
  Bacterial polypeptide expressing nucleotide sequence isolated from the Sargasso Sea
aaactttaaaagttaaacaagatcaaaataatatttccagctttagagttattgctgaccacttaagggctagttcatttttgatagccgaaggagttttaccttctaatgaaggaagaggctatgttcttagaagaataatgagaagaggaatgaggcactcacacttacttggttccaaagaaccaattttttataatatttttaaaactttaatggaagaaatgaaaggaaactattcagagttacaaagggcagagtctttaattaaagaaactttaaaaatggaagaagaaaaatttttagtacttctggatagaggaataaaaattttaaataatgaaattaccaaaatagataaagttttacctggagaggtagcatttaaactttatgatacttatggttttccattagatttaactgaagatatattaaaaaataaatctttaaaaattgataatgaaaaattccacgatcttatgaaagatagtaaagaacttgctaaaaagaattggaaaggttcaggagatagtgcaatagatgatatctggtttggcattaaagataaattaggttctacagaatttttaggatacgaaactaatcaagccgaaggagttgttatttcattgttgaaagataataaagaagttgaaattctaaattttggagatgaaggaatgattataacaaatcaaaccccattttatggagagtccggaggtcaaattggtgacaaaggaaaaattatctctggagagtttaaatttgaagtatcagatgtccaaaaaaaattaggcgatctatttgtgcattatggaaatgttaaaagcggctcagtaaaattaaatcagaacgtgaaagaaaattgag

SEQ ID NO: 306420 - DNA, 804 bp, Unknown
  Bacterial polypeptide expressing nucleotide sequence isolated from the Sargasso Sea
aaagatacattgtcacgtggtttaaaaattctccaggaagaaatggaggacttgagtaccaataatattttatctggttcaactgcatttaaactttatgatacgtatggtttcccgttagaccttacgcaagattatttgagagggcatgactggcaggtagatatagacggttttgaaaaggctatgttggcacaaaaaaatgcggctcgtgcagcatggtcgggctctggatccaagacagaaagtagattatttttagaactagcggatagaaatggaagtactgagtttttaggatacggtcaggtatcatctcagggtatagtaacaaatatgattttagacaatgacgagacaaaaatttcttcaaaagatgaaaaagtgattgtcattactaatcaaacacctttttatgcagagtctggcggccaattaggagatactggctgcttttcttggccagaagggtttgccaatgttgaaaatactacaaaaatatcttctttatttttgcatcattgcaagatctctaaaggctcattgtcagtcggtcagccaatacaaatgaatgtagatgcggataggagagacaaattacgctctaatcatagttcaacgcatttattgcatgaagctcttcggcttacattaggagagcatgtggttcagaaaggttctcttgtagctcctgataaattaaggtttgatttttcgcataacgcacctgttagttcagagcaattggggattattgaagatattgttaatcatcaggttcaaatgaatacacttgtccaaacc

SEQ ID NO: 306421 - DNA, 400 bp, Unknown
  Bacterial polypeptide expressing nucleotide sequence isolated from the Sargasso Sea
tgatgaagaggcggcaaaaatttggctagagaaagtaggcataagcaaggaaagactcgtatttttaggagaggaagataatttctggtcaatgggggatacaggcccttgtggaccgtgctctgagatatattacgatcacggagaaaaatatgatggaacacccccgggttcagatggagatgagggcgatagatttgttgaaatttggaatctagtttttatgcaatttaacaaagataaagatggaaaaatgcataaattaccaaaaccctcagtagatacaggtatgggattagaaagaattgcagcggtaatgcaaggcgttaattcaaattatgagattgatttttttaagaacataatttcatcctcagagaaacttattggctcaagtgga

SEQ ID NO: 306422 - DNA, 763 bp, Unknown
  Bacterial polypeptide expressing nucleotide sequence isolated from the Sargasso Sea
tatgaagataaatagtttaagggactcattcatttcttactttgttaaaaatggacataaacatgttcattcaagtccccttgtgcctcaaaatgatcctactctgatgttcgctaattcaggaatggttcaatttaaaaatgtattcactggattagagaaaacagatttcaaccgtgccgtaacggcccagaaatgcattagggcagggggaaaacacaatgatttagaaaatgtaggctatacattaaggcatcacactttttttgaaatgttgggtaatttttcatttggagattattttaaagatgaagcgatagattacgcatggagatttatcacttctgaactaggaataaatagagataagctttgcgtaactatttatcacgatgatgagcaggcttacaacgcttggaagaagattaccagtttcagtgatgataaaataataagaatttctacaaaagataatttctggtcaatgggagaaacagggccatgcggaccttgctctgaaatattttatgatcatggtgaaaattatagtggtaaaccgcctagtgaaactgatgaaacgggcgatcgatttgtagaaatatggaatctagtttttatgcagtatgaacaagttgacttagtacatcgtattgatttgccaagaccttcaatagacacaggtatgggtattgagagaatagctgcggttatgcagggcacaaatgataattatcaagttgatagtatattagaaattattaat

SEQ ID NO: 306423 - DNA, 827 bp, Unknown
  Bacterial polypeptide expressing nucleotide sequence isolated from the Sargasso Sea
ctttttcgagatgctgggtaacttcagcttcggcgactatttcaagaaagacgcgatcacgttcgcctggacgttcctcaccggcgtgctgaagctgcccaaggaaaagctctgggtcaccgtgtacgcgacggacgatgaagcgtatgacatctggacccaggaaatcggtgtacctgccgagcgcatgatccgtatcggtgacaacaaaggcgcgccctacgcgtccgataacttctggaccatgggcgataccggcccgtgcggcccgtgcaccgagattttctacgatcacggcgacgatatctggggtggcccgccaggttcgccggaagaagacggcgaccgttacatcgagatctggaacaacgtgttcatgcagttcaaccgcaccgccgatggcgtgttgcatccgctgccggcaccgtcggtggacaccggcatgggcctggagcggatcagtgcggtgatgcagcacgttcactccaactacgaaatcgacctgttcaccaacctgctgagcgcctcggcggcagccattggctgcgccaatgaaggccagtcttcgctcaaggtggtgtcggaccacatccgttcctgcggttttctgatcgccgacggcgtgctgccttccaacgaaggccgtggctacgtgctgcgtcgcatcatccgtcgtgcgtgccgccacggtaacaagctgggcgctaccggcagcttcttctacaagatcgtggccgcgctggttgccgagatgggcgatgccttcccggaactcaagcaacagcaaagcaacatcgagcgggtgctcaaggctgaagaagagcagt

SEQ ID NO: 306424 - DNA, 875 bp, Unknown
  Bacterial polypeptide expressing nucleotide sequence isolated from the Sargasso Sea
tcagataagaagtacatttctcaaatactttgagaaaaatggtcacaaaattgtagagtctagcaatttggtaccaaataacgatcccacattaatgtttgctaattctggaatggttcaatttaaaaatgtgttcactggacttgaaaaaagagattataaaactgcaacaacctctcaaaaatgtgtgagagcaggaggaaaacataacgacctagaaaatgttggctatacgccaagacatcatactttttttgaaatgttgggcaacttttcatttggagattactttaaagaaagagcaattgaacttgcttggaatttaattacaaaagattttggattagacaaaaataaactttattttactgtttttaatgaggatgacgaggcctttaatttgtggaagaaaataacaggttttggtgaggacagaataattagaatagcaacatcagacaacttttggtcaatgggcgaaacaggaccttgtggaccatgttctgagatattttatgatcatggagatcatttacaaggaggtcttccaggaacaaaagatcaggatggtgatagatatattgaaatctggaatttagttttcatgcaatatgagcaagtaactaaagataaaagaattgatttacccaaaccatccgttgatactggaatgggactggagagaattgctgcgttacttcaaggtacacatgataactataaaacagatcactttttaaaattaataaattcaatttctaatactgttaaagtaaaacctacagataaaaacctgtctagttttagagtaattgcagaccatttaagagcaagttcatttttattagcagaaggagttttaccttcaaaatgag

SEQ ID NO: 306425 - DNA, 831 bp, Unknown
  Bacterial polypeptide expressing nucleotide sequence isolated from the Sargasso Sea
gtgggtcatacagctaggcaccatacatttttcgaaatgttaggtaatttttcatttggcgattactttaaagaaaaagctattttttatgcatgggatcttttaactaatgaatttggatttccaaaggataagttactggtgacattttatcatgaagatgatgaagctaaaattctttggaaaaaaatatctggtttggacgatagtaaaattattcctattcatacaaatgacaatttttggtctatgggtgacaaaggtccttgtggcccgtgttctgagattttttacgatcatggtgatagtatttttggtggtccaccaggaagcaaagatgaagatggagacagatttattgaaatctggaatttggtctttatgcaatatgagcaaattagcaataatgaaagaattaaacttccaaaaccatctatagatactggaatgggattagagaggcttgcagctgttttgcagggcaagcatgataattatgatattgatttacttcaaaaattaattgtttcatcagcagaatactcttcaacagacattaatggcaaattcaatatttctcatagagttattatagatcatcttagatcatcaagttttcttattgctgatggagtattaccatcaaatgatggaagaggttatgtcttaagaagaataatgagaagagggatgagacatgctcatattatagggtgtaaagacccactaatttataaattagttccttcccttatagacgctatgggggatgcatttccagagctaatatatgcaaaagatcttattactaatactttggagaatgaagaa

SEQ ID NO: 306426 - DNA, 805 bp, Unknown
  Bacterial polypeptide expressing nucleotide sequence isolated from the Sargasso Sea
atggctaaaacattaaatgaaataaggtcagcatttttggattattttgaaaaaaatgatcacaaaatagttgagtctagcaatttagttccaaacaatgacccaacattgatgtttgccaattctggaatggttcaatttaaaaatgtgtttactggactagaaaagagagactatcaaagagctacaacatctcaaaaatgtgtaagagcaggtgggaagcataacgatcttgaaaatgttggatatactccaaggcaccatactttttttgaaatgttgggaaacttttcgtttggtgattattttaaagaacaagctattgagcttgcgtggaatttaataacaaaagaatttggtttagataagaatagactttatgtaactgtctatcatgatgatgacgaagcatttaattactggaaaaaaattgctgggttaagtgaagataaaatcattagaatagcaacatctgataatttttggtctatgggagaaacaggaccttgcggtccttgctcagaaatattttatgatcacggagaccatttagaaggtggattaccaggaacaaaaaatgaggatgggaatagatttatagaaatttggaatttagtttttatgcagtatgagcaaatttcaaaagataagcgaattaatctgccaaaaccatcagttgatactggaatgggattagagagaattgctgcattacttcaaggaacgcatgataactatgaaaccgatcacttcaaaaaaataataaactctgctgcagaaattttaaaagtcgagcctaatatcg

SEQ ID NO: 306427 - DNA, 880 bp, Unknown
  Bacterial polypeptide expressing nucleotide sequence isolated from the Sargasso Sea
aggctatattcttcgtcgtctcatacggcgtatgattcgacatggtcgactggtaggtattaatcagccgtttttaccacagctggctaaagttgctattgagttgatgaaaaatgcttatcctcaattacttgagaaaaagaaaattattcttaatgagttgaaaatagaagaatctcgttttcttgaaacgcttgaacggggagagaaacttttggcagagataacaactcatgaatgtgatgttatctctggtgcgcaggcatttgagctttatgatacttatggttttcctttggaattaacagaagagatcgcgaatgaaaaaggtatttctgttgaccttactggctttgagaacgagatggcaaagcaacgtaaacgggcaaaagatgcctctgtcagtattgatttaactgaagaaggttcaattgaaagagaaatttctttatttgatgaaacaagatttgagggctatgaaaaattagaaatcactgcaactgtaataggcatctttaaaaataatgaattagtaaaacaagctgttcagggtgatttagtcaagattattgttaatagaacgcctttttatgctgagtcgggtggccaaattggagataaaggcttaataacgtctcaagatcttgaggtgtctatagaaaatgttcgaaaaaagaagaatatttttattcattccggaattgttaacactggagttctaaaagtgaactcacctgttcagatgaatgtgactccatcttttcgtcaacgaactacatcaaatcacaccgctacacatctattgcaatcagctttaaagttatcgattgactcaagtgtaagtcaaagaggctcgttagtttcaaatgatcgattgaga

SEQ ID NO: 306428 - DNA, 890 bp, Unknown
  Bacterial polypeptide expressing nucleotide sequence isolated from the Sargasso Sea
cgtttttattgctgagggagttttaccttcaaacgaaggaagaggatatgttcttataagaataatgagaagaggaatgagacattctcatttacttggatctaaggaaccagttttttataatttgtttgatactctaaaaaatgaaatgtctggaaactatccagaattagttagagctgagtctttaattaaagaaactttaaaaatggaagaagaaaaattcttagttcttttagatagaggaataaaaattttaaatgatgaaacatctaaaatagataaagtgttgccaggtgaagtagcttttaaattatatgatacctatggttttccgttagatcttactgaagatattttaagaaataaatcaatgtcaattgatacagaaaagtttaattctttgatgaaggaaagcagagagcttgctaagaaaaattggaaaggttctggtgatgcagcggttgaagatatctggtttggcataaaagataaattagacgtaactgaatttttaggatacgaaactaaccaagcagaaggtgtcgtgttatctcttttaaaagacaacaaagaggtagatcagttaaaagaaaatgatgaaggaatgattatagtaaatcaaactcctttctatggtgaatctggaggacaagtaggtgatactggtgaaatagtatcgaatgattttaaatttgaagtaaccgatgttcaaaaaaaacttggagatttatttgtccattatggaaaggttaagagcggctctgtaaaacttcaagaaagtgtagagctaaaaattgatgtggaaagaagagataatactcgtgcttatcattcagcaacccatttgctccatgaatcattacgaagagttctgggtactcatgtaa

SEQ ID NO: 306429 - DNA, 922 bp, Unknown
  Bacterial polypeptide expressing nucleotide sequence isolated from the Sargasso Sea
gattgcagagggggttttaccttcaaatgaaggtagaggttatgttttaaggagaattatgagaagaggtatgagacactcacattcactaggaagtaaggaacccattttttataaaatggtgccaatcttaattaatgaaatgtcagattcttacccagaattaaaaagagcagaacctttgattacagagacattgaagacagaagaggaaaaattttctttattgcttaacagaggaatagaaatcctaaacgagaatctaaataaagtaaaaaacaattcttttcctggtgaagttgcttttaaactatatgatacttatggttttccattggatcttactgcagatattttaaaaaataaaaatataaaagttgataatgctggttttgccagagaaatggagaaaagtaaaaaattagcccgttctaattggaaagggtctggagacaaatctttagaagaaaagtggtttaaagttagagagaaacttaatcccacggaatttttaggttatgaatttgataaacttgaaggtgttgtacttaaaatatcaaaaggtaaagactttgttaacgaagcaaaaactggtgacgaggtcgagatagtgactaaccaaacacctttttatgccgaatccggaggtcaagttggagataaaggaataatttattctaatgactgcgaagttgttattgaagacactcaaaaaaaaatgggagatcttcatgttcatattggaaaagttagtaaaggttctttaaaagctaaccaaagtgtaaatttggtaattgacgttaaaagaagaaataatgcaagggcatatcactcagcaacacatttactacatgaagctttaagacgaacacttggtaaacatgtgacacaaaaaggttctttagtcagtcctgaaaaactt

SEQ ID NO: 306430 - DNA, 838 bp, Unknown
  Bacterial polypeptide expressing nucleotide sequence isolated from the Sargasso Sea
tcaattattcatatctgtgaggctaaaaataaaaacttaaaaagtattgcccctgacaattcaacaattactgcatcagtggatgaaaaatcacgattgtcaactacaaacaatcatactactgctcacctgatgcatgcggcattgaggcaagttttaggcgaacatgtatctcaagcagggtctcttgtcaatccaaaaatgttaaggtttgactttacacattttgaaaaagttagtgacactcagctggaagaaattgagaacatagtcaatttggtcatccgccagaacattaatactgacatttatgaaactccttatgacgaggcaatcagctcaggaatcattgcacagtttggtgaaaaatacggagatgttgtcagagtagtaaaaatctctgatttttcagaagaactttgcggtggatgccatgtaaaagctacagggcaaattggacagttccgcctagtttctgaagagggaattgccgctggaataaggagagtcgttgctgttacaggtaaacaagcagaattgatgaatcaggagcagggcagagtcactcgtgcattgcggcaactattgaacgtccctgaagcaaaaattcctgaaatggcagaaaaacttgctgaagaaaaaagaaagcttgaaaaagaagttcaatcccttagaagcaagaccgctctagaaggaatagcagaaatggtggcacaagccaaagatgttgagggggtttctgtgcttgccagggaagttgatgcagattctgcagaaactctccggaatataggtaattctgttagggaacaaattccttcagggattgcctggctgt

SEQ ID NO: 306431 - DNA, 760 bp, Unknown
  Bacterial polypeptide expressing nucleotide sequence isolated from the Sargasso Sea
tatggcaaaaacattaaatgaaataagagaaacatttcttaaatattttgagaaaaatgaccataggattgttgaatcaagcaatcttgtaccaaacaatgacccaacattaatgtttgccaattcaggaatggtacagtttaaaaatgtatttactggattagaaaaaagagattaccaaagggcaacaacatctcaaaaatgtgtaagagctggtggaaaacataacgatctagaaaacgtaggctatacaccaaggcaccatactttttttgaaatgcttggaaacttttcttttggtgattattttaaagaaagagctattgagttagcttggaatttaataactaaagattttggaatagacaaaaacaagctgtatgtaactgtattccatgaagatgatgaagcctttaatttttggaagaaaattgcgggttttagagatgatagaattataagaatagcaacatcagacaatttttggtcaatgggggaaacgggtccgtgcggtccgtgctcagaaattttctttgatcatggcgaacaccttaaagggggcttgccaggttcaaaagatgaagatggggatcgttttatagaaatttggaacctggtatttatgcaatttgaacaggtaacaaaagataaaagaattaatttaccaaaaccatcggtcgataccggaatgggattagagagagttgctgcacttcttcaaggcacacatgataattatgaaacagatcattttaaaaaa

SEQ ID NO: 306432 - DNA, 877 bp, Unknown
  Bacterial polypeptide expressing nucleotide sequence isolated from the Sargasso Sea
gattttgaccgcaggcaaaacatttcgaaaaaatcatactgcaacacatcttatgcataaggcattgaaagaagttcttggagatcatgtacagcaagccgggtcactggttcatcccgattatcttaggtttgatttaacgcattcagaaaaaattacttcagagcagataaatgaaatagaaactatcgttaatcgtcaaatattgataaatagcaatataaatgtatcagttaaaccatttgatgaggctaaaaaagaaggtgctgttgctatgtttggggaaaaatatggagaggaagttcgagtaattacagtttcagacttttcaaaagagctttgcggtggtacccatgtagaccgtactggtgatattggattatttaaaattattgaagaatcatctctagcttctggagttcgtcgcattgtagcattgactggtcaaaaatctgttgaatattttcagaatcagttttctactctagaatctgttcagtcgcaattaaattgtagtaaagattctatagccgctaggttatcacaattattaggtcaaaagaaatctttagaaaaacaactaaaagataagaataaaagaagtgagacttttgatttagaatcattggtccagaacagtaaatctattgataattataaaatcattattgaaaaaacaaatgttcagtcaatggatgaacttaaaaatttaggtgattctttgttggattcaattagtagtggaattggcgttcttggcgctgatggagaaaaacctatgattgttgttattgtaacgcaggatttagtcaaattgggtataaaggctaatgatttagcgaggagtataggaaatttgatgggtggaggtggaggc

SEQ ID NO: 306433 - DNA, 731 bp, Unknown
  Bacterial polypeptide expressing nucleotide sequence isolated from the Sargasso Sea
ttctgcaactcatcttcttcatgaatcattaagaagagttttaggaactcatgttacacaaaaaggatctttagtagctccagatagattaagatttgattttagtcacatgaaaccaattactaacgaagagattattaaaattgaaaatcatgtaaacagaatggtccagacaaattctcaagtaaaaacaagattaatgacacctaaagaagctgttgataacggagctttagcgttatttggtgagaagtatggagaggaagtaagagttctttcgatgggagatgaaaaagataagtacttttcaactgagctttgtggaggaacacatgttaaaaatactggagacattggtaaatttaaaattaccagtcaatcatccatcgctgctggcattagaagaattgaagctttaagagataaacaattagaagattttttgaccaaaaaggaaaaattaactgatctctcacttcaaaaagatgaggaagttataaaaaatatttcagaacaaattataaaatatggtgaaaaaccaaatttaaaaatacaaaatcaaaaagaattaataaaaactcttaataagcagttagatgaaattataattacaaatatattaaaggataaatcgaaaaatataataaaagatcaacaaatcaaaaatgtcaatgtgagatttcaaaaagtaaaaggcttaaattccaaagatttaagaaagcttgttgata

SEQ ID NO: 306434 - DNA, 807 bp, Unknown
  Bacterial polypeptide expressing nucleotide sequence isolated from the Sargasso Sea
caatattattagatatttttaaaaatgcataccctgaattgatcagagctaaagatttaataattaatacctatataaatgaggaaacaaaattcaaggagactgtagaaaaggggctaaaaatattagaggatgaaatctctgtttcttcaaataaactagatggtaaaattgcctttaaattatatgatacatatggctttccattagatttaacacaagattatcttaaatcaaaaaacatagaagttgatgttgagacttttaatcaaatgatgaaagagcaaaaagaaagagctcgaaaaaattggaaaggcacaggagatcatgaggatcaaaaaaactggtttaaaattactgagaatttaaactcaacagaatttttaggctataagcaaactgagtctgaaagtgaaattacctctatagttaagagtgataacaaaactgatcagctaaatgaaggcgaaaatggaattatcattttaaaccagacaccattttatggagaaagtgggggtcaagttggtgatataggtactatagtgtttgagcacaatacttttgaagtaattgatacgactaaattatttggctcattttatttgcaccatggtaaagtaaaaaaaggaaaatttaaaattggagatagtgtaacagctacaattgattcatataaacggcaattaataaaatgtaatcattcttcaactcatctactacacgcttcacttagaaaaattcttggaaatcatgtttcacaaaaaaggttcatttggttaatagtgaaaaaaattaaggtttgat

SEQ ID NO: 306435 - DNA, 869 bp, Unknown
  Bacterial polypeptide expressing nucleotide sequence isolated from the Sargasso Sea
cttcttcaaatctaaattaaaatactctgattggaatattatagatgaaaatgctaaatctaattttattggatatgataaattaaaaagtgaaatgaatctaataagatttagggaagttgaaacagaatatggaatgaatctccatttagtatttgataatacaccattttatgctgaatcaggagggcagattggagatactggttcaattgagtcttcatcaaaagaggttatcgaaataatagatacaataaaggataatgattatataattcatgttactaataaaatgccatataatcaagactctccttttacaggtatagtacattcaaaaaggagacaacaaattacatcaaatcatacttcaacacatcttctaaatttggcattgaaaaaaatattaggaactaatgtagaacaaagagggtctatgatatcggaagaatcatttagatttgacttttcacatcaaataaaactttctaaagaggagcttaataaagttgaagaatatgtaaataacctaattaaagaaagtattgatttgatagaagaaagatctgcagattataaggaagttataaagaaaggtgcggtcggacttttttcagaaaaatatggagaaaaagtaagaaccattaagtttaatgactcatatgaattatgtggaggtacccatgtaaaaaatacaaaagatataggtagtttcaagattatctcagaagggtcccaagcctttggaattagaagaattgttgctacaagttctgagaaaaagatcttagaagaaaatcttaagcaaaagtctattaaagagaaggcagcaactgatcaggcaaatagattactcaaaaaagagaatg

SEQ ID NO: 306436 - DNA, 874 bp, Unknown
  Bacterial polypeptide expressing nucleotide sequence isolated from the Sargasso Sea
tttaaattctactgaatttttaggttatgatcaaacagaatctgaaagtgcaattatttctataattaaaaaagacagtgaaattaataatctattaacagaagaagagggaattatcattttaaatcaaactcctttttttgctgaaagtggtggacaaataggggatagtggaaaaattatttttaataataatgtttttgaagtaattgacacaactaaattatttggatccttctatttacatcatggtaaagtaacaactggtagttttaagaaaggtgataatgtaactgctattattgatacaaaaaaacgtgaattaataaaatgtaatcattcatctactcatttattacattcttctttgagacaaatactgggtaatcatgtttctcaaaaaggttcattagtaaataacgaaaaacttagatttgattttagtcataatgaaccaataagcctagaaaatattgttaaaattgaagattatgtaaaaaaagaaattgaagcaaatacattagtaaatacaaaaacagtagatcatcaaaaagcaattgatgaaggagctatggctttatttggtgaaaaatatggtgatgaggtccgagtaatttcaatgggcactatagaaaataataatatattttcaaaagaactttgtggtggtactcatgttaataaaacaggagatataattgattttaaaataattaaccaatcaagtgtagcttctggcataagaaggatagaggctttaagtaatattactgtcaatcaatataaacaagaacaaataaagttaataaaccaaaaaaaagaagcaaatcaaataaaaataaaagaacttataaaagaaataaagaaaatttga

SEQ ID NO: 306437 - DNA, 943 bp, Unknown
  Bacterial polypeptide expressing nucleotide sequence isolated from the Sargasso Sea
gatcatgcaatagttgagtctagcaacttagtacctaataacgatccaacattaatgtttgctaattctggaatggttcaatttaaaaatgtatttacgggattagaaaaaagaagctacaaaagagctactacttcacaaaaatgcgttagagcaggtggaaagcacaatgacttagaaaatgtaggctatacacctaggcatcatacattttttgaaatgctcggtaatttttcatttggagattactttaaagaaagagctatagaattagcttggaatttaattacaaaagattttggattagataaaaacaaactttattttaccgtttttaacgaagatgaagaagccctaaatctttggaagaaaattagtggttttggcgatgataaagtcattaaaattgcaacatcagacaatttttggtccatgggagagacaggtccttgcggcccatgttctgaaattttctttgaccacggcgaacatcttaaagggggtttgcccggctcaagagatcaagatggcgatagattcatagaaatttggaatcttgtttttatgcaatttgagcaagtttcaaaagataaaagaattaatttgccaaaaccttctgtagacaccggcatgggcttagaaagaattacggctcttcttcaaggaacacatgataattatgaaacagatcatttcaaaaaattaattcaatcagcttctgagtcattaaaaataaaacctaataaaagtaatatttctagttttagagttatagctgatcatttaagagcaagctcttttttaattgctgaaggtgtattgccttcaaacgaaggcagagggtatgtgcttagaagaattatgagaagaggaatgagacattctcatttattaggttctaagaaaccaattttttttaacatctttaaaacattacaagaag

SEQ ID NO: 306438 - DNA, 893 bp, Unknown
  Bacterial polypeptide expressing nucleotide sequence isolated from the Sargasso Sea
aggagtcgttctttcaataattaaagataagaaggaagtaaaaaatttaggtaatggagacgagggaattgtaatacttaatcaaacacctttctacggtgagtcaggaggtcaagtgggagatactggctacataatgtctggtgattttaaatttcaagtaaccgatgttcaaaaaaaattagatgatttatttgtccattatggaaaagtgataaatggaactataaaaataaaagataatgttgagatgaaaataaatgtggaaagaagaaataatataagagcctatcattcagcaacgcatctactacatgaatctcttcgtagagttttaggaactcatgtaattcagaaaggatctttagtagaagcagaaagattaagatttgattttagtcatatgaaaccaatttcgtctgaagaaattactaagatcgagggatttgttaattcaatgatcgatcgaaaaactgatgtcaggactagattaatgacaccaaaagaggcggtaaataacggagcattagcattatttggtgaaaaatatggagaagaggtaagggttttgtctatgggagatgaaaaggataaatatttttctacagagttatgcggtggaacacatgttagaaatactggtgatattggaaaatttaaaatagttagtcaatcatcaattgcggctggcattagaagagtagaggctctaagagataagcagcttaaggagtttttaaataaaaaagaaaaattatcagatatttcaagtcaaaaagatcaaaataatatcaaagatttatctgacaaaattattaaacttggtggtaagcctaatttaaataatgaagataaaagaaatttaataaaagatttaacaaaacaatacgatc

SEQ ID NO: 306439 - DNA, 718 bp, Unknown
  Bacterial polypeptide expressing nucleotide sequence isolated from the Sargasso Sea
atcactggttgctcatgacagattaagatttgattttagccacatgaaaccaatttcaagtgaggaaatagagaaaattgaaaaatttgtaaacgaaatggttgaaacaaaatctgatgtaaaaacaagattgatgacacctaaagaagcagtagataacggtgctttggctttatttggtgaaaaatatggagatgaagtaagggttctttcaatgggagatgaaaaaaataagtatttttcaactgagttatgcggtggaactcatgtaagaaatacaggtgacataggtaaatttaagattgtaaaccaatcatctattgctgcaggaataagaagagttgaggctttaagggataaacaattagaagattatttaactaaaaaagaaaaattatctgatctatcaacacaaaaaaatgaagaaattataaaaaatctttctgagcaaattatcaagttaggaggtaatccaaaattaaataatgataatcaaaaagatttaataaaaaatcttaataagcaatttgaccaactatccgtaagaggtattttaagtgataagtcaaagaatatcattaaagatgaaaaaattaaaaaaattaatgttaggtttcaaaaaattattggtatttcaacaaaagatctgagaaaattagttgatagtgggaagaaagaaataggtgaaggaatagtaattatattcgcatgcaaagac

SEQ ID NO: 306440 - DNA, 786 bp, Unknown
  Bacterial polypeptide expressing nucleotide sequence isolated from the Sargasso Sea
tcaaacacctttttatgctgaatcaggaggtcaagttggtgatcaaggcataatttattctgataagtgtaaaattattattaaagacactcaaaaaaaaatggaagatcttcatgttcattatgggaaagtgaaaacaggctctttaaaagttaatgaaaatgtaaatttagaaattgacgttgatagaagaaataatgcaagagcttatcattcagctactcatttactccatgaagctcttcgcaggacgcttggtaaacatgttactcaaaaaggttctttagttagcccagaaaaacttaggtttgattttagtcataataaaccaatagaaaaaagtgaaattgaaaaaattgaaagttatgtaaatgagatgattaacacatcagcagatgttaaaactagaatcatgacaccaaaagaagcagttaaaaaaggggctttagccatgtttggagaaaaatatggcgaagaagttagagtcttgtcaatgggtaaagaaaatggaggatatttttctactgagctttgtgggggaacacatgtcaaaaatactaaagatattggaaagtttaaaataataagccaatcgtcaatcgcagctggagttagaagagttgaagctttaagagataaacagctagatgactatcaaagatctgtaaacaaagataagtttttgaaagagaaaaatttaaaatatgaaatagatttaattaagaaagaattattaaaatataaagtagaacctattttaaataatgatttgaatctattcgaaaa

SEQ ID NO: 306441 - DNA, 259 bp, Unknown
  Bacterial polypeptide expressing nucleotide sequence isolated from the Sargasso Sea
atggcagacaaaacacttaatgaaataagaagtacttttctcaaatattttgagaagaatggtcataaaattgtggagtctagtaatttagttccaaacaatgatccaaccctaatgtttgcaaactcaggaatggttcaatttaaaaatgtttttactgggttagaaaaaagagattataaaacagcaaccacatcccaaaagtgcgtaagggctggaggaaaacataatgaccttgaaaatgttggttatacaccaa

SEQ ID NO: 306442 - DNA, 835 bp, Unknown
  Bacterial polypeptide expressing nucleotide sequence isolated from the Sargasso Sea
atgagcaagagcaccgctgagatccgtcaggcgtttctcgattttttccatagtaaaggacaccaggtagttgccagcagctccctggtaccgaacaatgaccctactttgttgtttaccaacgccgggatgaaccagttcaaggatgttttccttggcctcgacaagcgtaattattcccgcgcaaccacctcgcagcgttgtgtacgtgcgggtggtaagcacaatgacctggaaaacgtcggttacactgcacgtcaccacactttcttcgaaatgctgggcaacttcagcttcggcgattacttcaagcacgatgctattcaatatgcatgggaactgctgactggtgaaaactggtttgccctgccaaaagagcgtctgtgggtcaccgtctatgaaactgacgatgaagcctatgaaatctgggaaaaagaagtcggtattccgcgcgaacgtatcatccgcatcggtgataacaaaggtgcggcttatgcttccgacaacttctggcagatgggtgataccggtccttgcggtccatgcaccgaaattttctacgaccacggcgaccatatctggggtgggcctccgggaagcgcagaagaagatggcgatcgctacattgagatttggaacatcgtcttcatgcagttcaaccgtcaggctgacggcaccatggaaccgctgccgaaaccgtccgtggataccggtatgggtctggagcgtattgcggccgtgctgcaacacgttaactccaactatgaaatcgacctgttccgttcactgattgagtccgtggcgaaagtcaccggcgcgaccgatctgagcaaca

SEQ ID NO: 306443 - DNA, 871 bp, Unknown
  Bacterial polypeptide expressing nucleotide sequence isolated from the Sargasso Sea
attaatgtttgcaaattcaggaatggttcaatttaaaaatgtatttactggattagaaaaaagagattaccaaaaagcaacaacttcacaaaaatgtgtaagagctggaggaaaacataacgatctagaaaatgtaggctacacaccaaggcatcatactttctttgaaatgttgggtaatttttcttttggagattattttaaagaaagagcaattgagcttgcttggaatttaataaccaaagattttggattagataaaaataggatttacgtgacagtatttcatgaagatgatgaagcatttaatttgtggaagaaaatagcgggttttagcgaggataaaattattagaatagcaacttcagataatttttggtctatgggtgaaacaggcccatgtggaccttgttcagaaatattttatgatcatggcgatcatttaaaaggaggattgccaggatccaagaatgaagaaggagatcgatatattgaaatttggaatttggtcttcatgcaatatgaacaagtaacaaaagacaaaagaattaatttacccaaaccatcagtggatacaggaatgggtttagaaagaattgcggcattacttcaaggaacacatgataattatgaaaccgatcattttaaaaaattaataaattctacttctgaaattgttaaaattaaacctaacgaaaaaaatctatcgagttttagagttatagctgatcatcttagagctagttcgtttttaatttcagaaggagtattaccttcaaacgaaggaagaggatacgtgcttagaagaattatgagaagaggaatgaggcattcacatttgttagggtctaaagaaccaatcttttataat

SEQ ID NO: 306444 - DNA, 257 bp, Unknown
  Bacterial polypeptide expressing nucleotide sequence isolated from the Sargasso Sea
tatgaaagccgccgaaatccgcgagaaattcctcaagttcttcgaatcgaagggccatacgatcgttcgctcgtcgagccttgtgcccggcaacgacccgaccctgctctttaccaattcgggaatggtgcagttcaaagatgtgttcctcggcgcggaatcgcgtccgtatgcgcgcgccacgaccgctcagcgcagcgtgcgcgccggcggcaagcacaacgatctggaaaacgtcggctacaccgcgcgtcacc

SEQ ID NO: 306445 - DNA, 880 bp, Unknown
  Bacterial polypeptide expressing nucleotide sequence isolated from the Sargasso Sea
aactcgggaatggtcagttttaaaaatgttttcacaggtttagaaaaaagagattataaaagggcaacgacctcccaaaaatgtgttagagcgggtggtaaacataatgatttagaaaatgttggttacacaccacgacaccacacatttttcgaaatgcttggtaatttttctttcggagactattttaaagaaagaggtattgaactagcgtggaatttaattaccaaagattttggattagataaagacagactttatgtaactgtttttcatgaggatgacgaggcctttaatttttggaagaaaattgcgggttttagcgatgataaaataataaggattgcaacatcagataacttttggtcgatgggagaaactggtccatgcggcccttgttctgaaattttttatgatcatggcgatcatttatatggtggccttcctggaagcaaagaggaagatggggatagatttattgaaatttggaacttagtctttatgcaatttgaacaagtttcaaaagataaacgaattaatttaccaaaaccatccgtagatacaggaatgggattagagaggatagcagctttacttcaaggtacacatgataattacgaaacagatcattttaaaaaattaataaattcaacttcagaagctgtaaaagttaaaccaaacgaaaataatttatcaagctttagagttattgcagatcatttaagagcaagttcatttttaattgcagaaggagttctgccatcaaacgaaggaagaggatatgttctaagaagaataatgagaagaggtatgagacattctcatttactcggatcaaaagaaccaattttttataatatttttaaaactttaatggatg

SEQ ID NO: 306446 - DNA, 342 bp, Unknown
  Bacterial polypeptide expressing nucleotide sequence isolated from the Sargasso Sea
tatggctaaaacattaaatgaaattaggtcagcattcttagattattttgaaaaaaatgatcataagatagttgagtctagcaatttagtcccaaataatgacccaacattgatgtttgccaattctggaatggtccaatttaaaaatgtgtttactggactggaaaagagagactatcaaagagctacaacatctcaaaaatgtgtaagagcaggcggcaagcataacgatcttgaaaatgttggctatactccaagacaccatacgttttttgaaatgttgggaaacttttcttttggcgattattttaaagaaagagcaattgaacttgcgtggaattt

SEQ ID NO: 306447 - DNA, 856 bp, Unknown
  Bacterial polypeptide expressing nucleotide sequence isolated from the Sargasso Sea
ggagcatgttacacagaaaggatctttagtttcaaatgacaaattaaggtttgattttagccatcataaatcaatgacaaatatagaaattgaagatgtccaaaataaagtaaatgaaattatcaagaatgaatctgaggttgaaacacaaataatgtccccagatgatgccgtaaaggccggtgctcttgccttgtttggagaaaagtattcagatgaagtaagagttctcaaaataggcaaattaaatgacaaaatatatagtactgagttatgtggaggaacacacgtctcaaatacaagagaaattggggagctgaagattatcagtgagtcttctgttgcctcaggcgtaagaagaattgaggctttaagaggagatgacctgttaaaatttaatgaagagaagaagaatgaaaatcttaggtcagaagaaaaaaaattagatctaaaaaaagaaaaagaaatttctactgtaaatataaaacttcttaaagaagcgatacaaatgagcattagtaatgactctgatcaaaaaataattattgaattctgtgaaaatgtgccaattaatgaattaagaccactgatagataagtgtaaaaaactaatttctggagacggcgttataatcatctgcgttaaaaaggatgataagctaagtttcctaattggcgttactgatctattaactaacaaaattggagctgatgaaatagctaaatttgcatcttctatttcaaatggtaaagggggtggaggcagaaaagattttgctcaatcaggaggtatgctaattaatgaaaatgatcaaaaaaataaactgagagagtttattattgataagttacagtaa

SEQ ID NO: 306448 - DNA, 659 bp, Unknown
  Bacterial polypeptide expressing nucleotide sequence isolated from the Sargasso Sea
tatgcaatatgaacaagtttcaaaagaaaaaagaataaatcttccaaaaccatctgtcgatactggcatgggactagaaagaattgcagctttactgcaaggaactcatgataattatgaaactgaccattttaaaaaattaattcaatcaacatcagaattagttaaaaaaaaacctgacaataaaaacctttcaagttttagagttattgcagatcatttaagagcaagctcatttttaattgctgaaggggttttaccatcaaatgagggtagaggatatgtgttaagacgaattatgagaagaggaatgagacattctcatctattaggatccaaagaaccaattttttataatctgtttgaaacattaaaaaaagaaatgtctggaaattatccagaattaaagagagcagagtcattaattaaagaaactttaaaaatggaagaagaaaaatttttagtcttattagatcgtggaataaaaatattaaatgaggaaatatcaaaaatagataaaattcttcctggagatgttgcttttaagttatatgacacatatggtttccctttagatcttacagaagatattttaagaaataaaaatttatcaattgatacaaaaacatttcattctttaatgaaagaaagcagagatc

SEQ ID NO: 306449 - DNA, 541 bp, Unknown
  Bacterial polypeptide expressing nucleotide sequence isolated from the Sargasso Sea
gatgaattcaaatcagattaggtcgacatttctaaattactttaaaaaaaatggacatgaagttattcattctagctctctagtaccagataatgatcctactctaatgtttgctaactctggaatggtgcaatttaaaaatatttttacaggtaaagagacaagaaattacaacagggcaactactgctcaaaaatgtgtaagagcaggcggtaagcacaatgatttagaaaatgtaggatacacaacaagacaccatactttttttgaaatgttgggtaatttctcttttggagattattttaaagagttagccatagaactagcttggaatctaataactaaagaatatgcaataaataaagatagattattagtaactgtttattctgaagaccaagaagctttagatttatggaaaaaaatagctggtttatctgaaaataaaattattaaaattagtacatctgataatttttggtcaatgggtgaaaccggtccttgcggtccatgttctgaaatattttatgatcatggtgat

SEQ ID NO: 306450 - DNA, 829 bp, Unknown
  Bacterial polypeptide expressing nucleotide sequence isolated from the Sargasso Sea
tctggaattgttaatactggagttctaaagattaactcatctgttcagatgaatgttactccatcttttcgtcaacgaactacatcaaatcacaccgctacacatctattgcaatcagctttaaagttatcgattgactcaagtgtaagtcaaagaggctcgttagtttcaaatcatcgattgagatttgattttaatgctccaaaacctttgacaataaaagaacttgaagatatggaagtacgaataaatcaatggattaacgaagatcatccaattcaaattaaaacaatgccaatcaaggaggctatggctgctggtgcgttggcaatgtttggtgagaaatatggtgatgtagtacgtgttgttgatgttccaggcgtttctatggagttatgtggaggaacccatgtaactcgtacgtcacaactaggtacatttaagattattaatgagacaggtattgcttcaggaattagacgaatagaggctatagctggtccatcagttttagattattttaatgaacgtgatttggtagttaaggagttaagtaaatcattcaaagttcaatcatatgaaattgttgagagagtctcatcccttcaactggaattgaaagataaaacaaaagaacttatcaaagtaaaaaatgaactcgctttggcgaaggcattgggtttagcgagttatgcaaaatctgttgggaagagtaaattattaataagacgtttagatggagttgacggatctggattgcaatctgcggcttcaagtttgatagatcatttaggcaagtactctgctgttatttttggaggcattccaa

SEQ ID NO: 306451 - DNA, 778 bp, Unknown
  Bacterial polypeptide expressing nucleotide sequence isolated from the Sargasso Sea
gagagtacttggtacccacgttactcaaaaaggatcattggttgaacctgatagattaagatttgattttagccatatgaaacctatctcgaatgatgacataaaaaaaatagaaaattttgtaaattctatggttgaaaaaaaatctgaggtaaaaacgagaattatgacaccaaaagaagctgttgataatggtgcattagccctttttggtgaaaaatatggagatgaggtaagagttttgtcaatgggcagtgaaaaagatagttatttttctacggaactatgtggtggaactcatgtaagaaacacaggtgatataggaaaatttaaaattattagccaatcttctattgcagcaggagtgagaagaattgaagctttaagagaaaaacaattacaagaatatttaaataacaaggaaaaacttagtgatattgaaaatgagaaaattgaagaaacgattaaagatttatctcaaaaaataattaaattaggcggaaaacccaatattactagtgataatcagaaaaatttaattaaagatctaacaagacattatgaacagcttttagtaaaatcaactttaagcgataaatcaaaaaatattattgatgataaaattataaatgatgtcaaaattagatttcaaaaagtaattgatttacctcctaaagatttaagaaaactagttgataatggaaaaaaagaattaaaagaaggagtagtagttatttttgctgttaaagatgaaaaaattggattagcaattggcgtt

SEQ ID NO: 306452 - DNA, 907 bp, Unknown
  Bacterial polypeptide expressing nucleotide sequence isolated from the Sargasso Sea
attgataaagttttatctggtgaggtagcatttaagttatacgatacttacggttttccattagatctcacggaagatattttgaaaaataaatcgttaaaagttgaccatcaaaaatttgatgagttaatgaaaaaaagtaaagagcttgcaaaaaaaaattggaaaggatctggggacagctctgaggaggcaatttggttttcaataaaggataaaattgggcccacagaatttttgggttacgagtctaatcattctgaaggagtagtgttaaatttaatcaaaaataatctagaagctaaatcactagctacgggagaagagggaatgataataactaatcaaactcctttttatggtgagtcaggaggacaacttggtgacaaaggtacaatagtatctggaaattctgtttttgaagtcgaggatacacaaaaaaaacttggagatttatttgttcattatggatcagtaaaaactggtgaaatcaaaattaatgatgtagttgaaatgaaaattgatgttgaaagaagagataatctaaaagcatatcattcagcaactcatttactgcatgagtctttaagaagaactttaggtaagcatgtgatgcaaaaaggatcattagttgcaccggatcgattaagatttgactttagccatatgaaaccaattacaaatgaggaattagagacaatagacaagatagttaatgagtatgtgaaaaatagctcagaggttactacaagaattatgactcctaaggcagcaatagaaaaaggagcattagctttctttggtgaaaaatacggtgaagaagttcgtgttgtttcaatgggtaaggaaaaagaggcttatttttcaacagaaattatgcggtggaacacatgtggaaaaataccgg

SEQ ID NO: 306453 - DNA, 348 bp, Unknown
  Bacterial polypeptide expressing nucleotide sequence isolated from the Sargasso Sea
tatgagccaatttttgttgactgatataagaaaaaaatttcttaattattttaagcaaaataatcatgaaataatagattcaagtaatttagttcctaataacgatcctacattaatgtttactaattccgggatggttcaattcaaaaatgtttttacaggtctagaaaaaagaccttataaaagggccactacatctcaaaaatgtgtaagagctggcggaaaacataatgatttagaaaatgttggatatacacctcgtcatcatacattttttgaaatgctaggaaatttttcgtttggtgactattttaaagagcaagcaatagtacatgcttggaaattgtt

SEQ ID NO: 306454 - DNA, 622 bp, Unknown
  Bacterial polypeptide expressing nucleotide sequence isolated from the Sargasso Sea
aatgagggatattagaatgaaatttcttgattatttttcaagaaatggacatcaaaaagtggactcgagtaacattgttcctaataatgatccaactctaatgtttactaattcaggaatggtccaatttaaaaatgttttcacaggcatagaaaaaaagcagtttaagactgctactacatcgcaaaaatgcattagagcaggcggtaaacataatgatttagaaaatgttggttatacaccaagacatcatacatttttcgaaatgttgggaaatttctcatttggtgattattttaaggaaaaagcaatttattatgcttgggaattgctgacaaaagactttggtattccaaaagaaaaactttctgcaactgtatattctgaagacgaagaagcttttaaattatggaaaaaagttgctggattaccagaaagcaaaattgttaagatttcaacctctgataatttctggtctatgggagaaacgggcccatgtggtccttgctctgagatattttatgatcacggtgataagttgaaaggtgggcctccaggcagtacagatcaagatggtgatagatttatagaaattttggaatcttgtatttatgcaatttga

SEQ ID NO: 306455 - DNA, 967 bp, Unknown
  Bacterial polypeptide expressing nucleotide sequence isolated from the Sargasso Sea
tagtgatgatagaattataagaattccaacttctgataacttttggtctatgggagagactggaccttgtggaccatgttcagaaatattttttgatcatggtgaccatctaaaaggagggccgccaggtacaaaagatcaggatggagatagatttattgaaatatggaaccttgtatttatgcagtttgaacaagtttcaaaggaaaaacgaattgatttaccaaaaccctctgtagacactggaatgggactagaaagaatagctgctcttttacaaggaacacatgataattatgaaaccgatcattttaaaaaactaattcaatcaacttcagaagttgtgaaaaatgaaccagatgaaaaaaatatttcaagctttagagtaattgctgatcatttgagggcaagttcttttttaattgccgaaggagttttaccgtctaatgaaggaagaggatatgttttaagaagaattatgagaagaggaatgagacattctcatcttctcggagctaagaaaccaattttctttaatatttttaaaacactcaaggaagaaatgtctggaaactatcctgaattagaaagagcacaatctttaattaaagaaactttaaaaatggaagaggagaaatttttaactcttcttgatagaggaattaaaattttaaatgaagaaattactaaaattgataaagttttaccaggagaagtagcttttaaactttatgatacattcggctttccattagatttaacagaagatattttaaaaagtaaatctctaacagttgatcataagaaatttaaagatttaatgaaacaaagtagagaccttgccaaaaaaaattggaaaggatccggagacagctcaattgatgatatctggtttgctatcaaagacaaattaggaccaacagagtttttaggatatgaaacaaatcaagctgaaggaactgttctt

SEQ ID NO: 306456 - DNA, 756 bp, Unknown
  Bacterial polypeptide expressing nucleotide sequence isolated from the Sargasso Sea
tctttgaaaactggagaaataaaaattaatgatgtggtggaaatgaaaatagacatagagagaagagataacttgaaagcttaccattctgctactcacttgctccacgagtcactaagaagaaccttaggcaaacatgttatgcaaaaaggatcattagttgcacctgacagactaagatttgacttcagtcatatgaaaccaattaccaatgaggagttagagactatcgataagttggttaatgaatatgtttcaaatagttctgaggtaacaacaagaattatgacaccaaaagccgctattgaaaaaggggccttagctttttttggtgaaaagtatggtgaagaagttcgtgtagtttcaatgggtaaagaaaaagaagcttatttttcaacagaattgtgtggaggaactcatgtcaaaaatacgggagaaattggaaaatttaagacagtaagtcaatcatctatagctgcgggagtaagaagggtagaggctttaagagacagtcaactagaagaatatattaaaaatagagaaaaaatttcatcattatcaattcagaaagatgaagagaccgtaaaagaattatcagctcaaataataaagcttggtggcaaaccaaatattgaaaatgaaaatcttaaagaacttataaaaaatcttaacagacagcttgaacacttaaatgttagttcagttcttaaagataaaacaaaaaatattataaaagatcaagaaatcaataaaatt

SEQ ID NO: 306457 - DNA, 614 bp, Unknown
  Bacterial polypeptide expressing nucleotide sequence isolated from the Sargasso Sea
catggcccctgctgtcgcccgtccccgccgtggtgctgagatccgtgcagcgtttctggagttctacgaatcccgtggtcatcaacccatccccagtgcctcgctgattcctgaggaccccacggtgctgctcaccatcgccgggatgctgccgtttaagccggtgttcctcggccagcaggagcgtccagcgccgcgggccaccagcagccagaagtgcattcgcaccaacgacatcgaaaacgtgggccgcaccgcgcggcatcacacgttcttcgagatgctcggcaacttctcctttggggactacttcaagcagcaggccatcgaatgggcttgggagctcagcaccggggtgtttggccttgatcccaaaaacttggtggtgagtgtcttccgcgaagacgatgaagccgaggcgatctggcgtgatgtggtgggggtgagccccaagcgcatcatccgcatggatgaggccgacaacttctgggcttcaggtcccacgggcccttgcggtccctgctccgagatctattacgacttcaagcccgaactgggtgatgagggcatcgatcttgaggacgacagccgcttcatcgagttctacaacttgg

SEQ ID NO: 306458 - DNA, 766 bp, Unknown
  Bacterial polypeptide expressing nucleotide sequence isolated from the Sargasso Sea
ctgtgtccagggcgctttagcaatgtttggtgaaaaatatggagatgaggttagagttttgtctatgggtaaagaaaacgctggatatttttctacagaactttgtggaggtacacatgttagaaacacaaaagatattggaaaatttaaaattattaaccaatcatcaattgctgctggtgttagaagagtagaagctttaagagataaacaattagaagattatgaaaaatcttcaaaaaaagataaatttttaaaagaaaaaagtctaaagaatcagatagatttaattaaaaaagaattattaaaatataaagccaaaccagattacaaagaagatttagaattatctgaaaatattaaaaatttaaataagcaattagataaaattaaaattcaaaatataattaaggataaaactaaaaatgttataaaagataaaaaaataggatcttttactttaagacatcaagttcttactgattttccaccaaaggaattaagaaatatagtagatcaaagtaaaaaagacattaaagaaggtattgtagttagtttttctacttttgaagataaggttggtgttgcagttggagtaacaaaagaattaataaaaaaatacgacgcagtaacacttgtaaagattgcttctgaggtacttggtggcaaaggtggaggaggtagaaaagattttgctcaagcaggaggagcagataaaaataaaatagaagaagcttttaaaacattaagcaaaaaaattaattaa

SEQ ID NO: 306459 - DNA, 880 bp, Unknown
  Bacterial polypeptide expressing nucleotide sequence isolated from the Sargasso Sea
tgtcgaggaaaatggttcaaagttagagaagaattaaaaccaacagagtttttaggttatgaatttgaaaaagcagaaggcgttgttctaaaaatatctaaagacaataaatttgttgaaaaagcaaaagagggagatcggatagaaattattacaaatcaaacacctttttacggagagtcggggggccaagttggtgatcaaggagaaatgtttaactccgattgtaaaatacatataactgatacccaaaaaaagatgggagatctttttgtgcatacaggtaaaattaaaaagggttcgataaaaataggtcaaagcattaatctagaaataaatgttgaaaaaagaaataattcaaaagctaatcattctgcaactcatttattgcacgagtctttaagaaggactttaggcaaacatgtgactcaaaaaggatcgttagtaactcctgaaagactaaggtttgattttagtcataataaacctattgaagataaggagatgaaaaaaataaataaagttgtaaatgaaatagtggaagattcgactgatgtacaaacaagaataatgacacctaaggaagctataaaaatgggggctttagctctgttcggagagaaatatggtgaagaagtcagagtggtatttatgggtaaagaggctaatggtttcttttccaccgagttatgtggaggaacacatgttaaaaatacaaaagaagttggaaaatttagagttgttagccagtcttcaattgcgtctggggtaagaagagtagaggctctaagagataagcagctcaatgaatacgataaatctctagaaaaagataaaacattaaaagaaaaaataactaaagaacagttagaaaaaatca

SEQ ID NO: 306460 - DNA, 261 bp, Unknown
  Bacterial polypeptide expressing nucleotide sequence isolated from the Sargasso Sea
catgaagtcggttgatattcgccaaggctttattgacttttttgcaaccaaaggccatgcgtttgttcctgcagccccagtggtccctgaaaatgacccaacattgttatttactaatgcgggaatgaatcagtttaagccgtatttcctaggtacagaaggaccaaaaattaagcgtgcagttaattctcagccatgcattcgtgtgtctggtaaacacaatgatttagaggatgttgggcgagatacgtatcaccatac

SEQ ID NO: 306461 - DNA, 843 bp, Unknown
  Bacterial polypeptide expressing nucleotide sequence isolated from the Sargasso Sea
aatgcaaaattcaaatgattattcaaacaaaataagagaaacattcttaaatttttttaaaaaaaattcacattcagagattgagtcatcttctctgattcctaatgatgattcaactttactatttgtaaactctgggatggttcaatttaaaaaatggtttactggtgaagaaaatccaaaaaataagaatgttgtttccatacaaaaatgcttgagagcagggggtaaacataatgatctcgacaatgttggtttaaccccaagacatcatactttctttgaaatgctgggtaatttttcatttggtggctacttcaaagaagaggcaataaaatttgcatgggatttattaacaaaagaatattcaatagataaaaaaagattagttattactgtatataaggcagacgaactctcttttaaaatttggaaaaaaatttcagggtttaatgacgaaaaaataataagaatttcatccaacgataatttttggtccatgggtgactctgggccttgtggtccttgtagcgaaatattctttgacaatggtgaaagcataaaaggaggcttgcctggtactaaaaatcaggatggagacagatttgttgagatatggaacctagtttttatggaatatgaaaaaaaaggagatagtttagaaacactaccaggtaaatttgttgacacaggcatggggttagaaagaatattggcggttctaaatggaaaagttaataattacgatactgacttatttgaatatgttttcaaaagaatagaagaggaaactaaagcaaatttaaataaaaatttattgatacttttcagaataatttctga

SEQ ID NO: 306462 - DNA, 799 bp, Unknown
  Bacterial polypeptide expressing nucleotide sequence isolated from the Sargasso Sea
acctttttatggagaaagtggtggtcaggtgggagatcatggtttttttgaaaatgataactttaagtttgaagttatgaatactacaaaaatatttggaaactattttcttcacaaaggtaaagtaattagtggtgaatgcgaaattgaagatactattaaagcaagaattaatacattgaatagagattttattaaatataatcattcttcaactcatttattacatgctgctcttagaaaaatactgggaaagcatgtcacgcagaagggctcacttgtaaattcagaaaaacttagatttgattttagtcacaataatccaattgaaaaagatcaacttatgaatattgaagaaattgtaaatgatcaaattcaaaaaaatggaattgttgaaattaaaattgtggatcaaaaaaaagctattgaagaaggtgcgatggcattgtttggagaaaaatatagcgatgaagtaagagtagtaacaatgggtcaagaaaatgaatcattcttttcaaaagaattatgtggaggaactcatgtagttaaattaggggaaataagtaaatttaaaataactaatcaatctagtgttgcgtctggaataagaagaatagaggctgtatctaatgttgcagtggataaatatataaaagaaatagaaagaaaattattagaaaaaaataaaaaccaagataatcaaattgaagatttaaagaataaaattaaaaatattaatgctgattataattttaaaaagggatctgaggacaaaggtttgttaattaaagaattattc

SEQ ID NO: 306463 - DNA, 355 bp, Unknown
  Bacterial polypeptide expressing nucleotide sequence isolated from the Sargasso Sea
tatggctgaaaaaacactcaatgaaataagaaatacttttctaaaatattttgaaaagaatgagcacaagatagttgagtctagcaatttagttcccaataacgatccaacattgatgtttgccaactctggcatggttcagtttaaaaatgtattcacaggtttagaaaaaagagattatgtaagagctactacttctcaaaaatgtgtcagggctggaggaaaacataacgaccttgaaaatgttggttatacacctcgtcaccacactttctttgagatgctaggaaacttttcttttggagattattttaaagaacaagcaattcattacgcttggggatttaattactaa

SEQ ID NO: 306464 - DNA, 846 bp, Unknown
  Bacterial polypeptide expressing nucleotide sequence isolated from the Sargasso Sea
ttacttcatgagtctttaagaagaactctgggtaagcacgtgatgcaaaaaggatctttagttgcaccggatcgtttaaggtttgattttagtcatatgaaaccaattactaatgaggaattagagacaatagataaattagttaatgaatatgttcaaaatggttccgaggtcaccacaagaattatgacacctaaagctgcaatagaaaagggagcattagctttttttggtgaaaaatatggtgaagaagttcgtgttgtttcaatgggtaaggaaaaaaatacctatttttcaacagaattatgtggtggaacacatgtaaaaaatactggagttattggaaaattcaaaacagttagtcaatcatctattgctgcaggagtgagaagagttgaggctttaagagacaaacagctcgaggattttattaagaataaaaaaaagttatcaactttatctgtacaaaaagatgaggggactatcaaagatttgtcatcacaaataatcaaattaggaggtaaacctaaagttgacaataaagatttaaaagaaattataaaaaatctttcaaaacaacttgagcaattaaatgttagctcagttctccaagataaaacaaaaaatattattaatgaccaaaaaataaatgatataaaagttagatttcaaaaagtgcaagatttacctccaaaagatttaagaaaattagttgatagtgggaaaaaagaactcggtgatggaattataattgtctttgcaattagtgaagataaagttggtttaggggttggtgttaccgataaattagttgataaatatgatgctgtaaaatttgcaaagtta

SEQ ID NO: 306465 - DNA, 912 bp, Unknown
  Bacterial polypeptide expressing nucleotide sequence isolated from the Sargasso Sea
ggaaaacataatgatttggaaaatgttggttatacaccgagacatcatacatttttcgagatgttaggaaatttttcctttggtaattatttcaaagaaaaagcaattcattatgcatgggatttaattacaaaagattttggaatagataaaaataaactttatgtaacagtttttcatgaagatgacgaagcatacaatttatggaagaaaatagcgggttttagtgacaatagaataataagaatttccacatcagataatttttggtcaatgggtgaaacgggtccttgtggaccatgttcagaaattttctatgaccatggagatcatttaaaaggaggtttgcctggcacaaaagatgaggatggagaccgatttattgagatttggaatttagtatttatgcaatatgagcaagtaacaaaagataaaagaatagatcttccaaaaccatctgttgacactggtatgggtttagaaagaattgcagcactattacaaggaacacatgataattatcaaactgatcattttaaaaaattgattagttccatatcagatgtaacaaaggttgatcaggtagataataatatttcaagttttagagttatagctgaccacttaagagcgagctcatttcttttagcagagggtgtgctgccatcaaatgagggacgtgggtatgtactgagaagaataatgagaagaggaatgagacattctcatttattaggatctaaagaaccaattttttataaaatatttgactcactcaaaaatgaaatgtcaggtaattatcctgaacttaaaagatctgaatctttaattaaagaaactctaaaaatggaagaggaaaaatttttggttttacttgatagaggaataaaaattttgaatgaagaaatttct

SEQ ID NO: 306466 - DNA, 928 bp, Unknown
  Bacterial polypeptide expressing nucleotide sequence isolated from the Sargasso Sea
ttactaactaaagattttggactaccaaaagagaaattattagtaacagtttttcatgaagacgaagacgcatttaatctttggaaaaaaatatcagggttgagtgaaaaaaagataattaaaatatcaacgtctgataatttctggtccatgggtgatacaggaccatgtggcccatgctctgaaatattttatgatcacggtaataagttaaaaggcggaattccaggaagtcttgacgaagatggagatagatatatagaaatttggaatcttgtctttatgcaatttgaacaaatttctaaagataaacgaattgatttacctaagccttcagttgatacaggtatgggattagaaagaatgacagcagtccttcaaggcactcacgacaattataaaattgatcactttcagaaaattatggctgcctcatctgatatcacaaaaactacaatcgatgataaaacgattgcaagtcacagagtaattgctgatcacttaagagcaagtagctttttaattgccgaagggatattaccttctaatgaaggtcgaggatatgttttaagaaggatcatgagaaggggaatgagacacgctcattctctaggcagcaaaaaccctgtcttttataaactctttcaaattttattaaatgaaatgaaaagcagttatcctgaactaattaccggaaaagaattgatagtcgaaacactcaaaaatgaagaggaaaaattttcttcacttcttgaaagaggtatgaaaatattggacgaaaatttaaataaagtacaaaataaaactcttccaggtaaagaggcattcaaattatatgatacttatggtttccctttagacctaactgctgacatcttaagaggcaaagatattaaagtagataatgagaattcgagagggagatgaa

SEQ ID NO: 306467 - DNA, 917 bp, Unknown
  Bacterial polypeptide expressing nucleotide sequence isolated from the Sargasso Sea
aagcattttcttgaatacagaagaacctaaagatttacgagtagcaaatagtcttaaatgcattagagttagcggaaagcacaatgatttggaagaagttggaagagacggattccaccatactttttttgaaatgcttggtaattggtcattcggtgattattataaaaaagaagcaattgaatggtcatgggaattattcacaaaagtttggaaactagataaatccagattgtgggttactgtttatgaagaagacgatgaagctttcgagttatggaaaaatcaaacagatatagatccaaatcgaattattcgttctggtgcaaaggataacttttgggaaatggctgaaactggaccatgtggtccatgttctgaaattcattactatgttggaaataatccagcagatcaacaagctaaactggttaataattcttcagagtattgggaattatggaatcttgtattcattcaatttaatcgccttaaagatggaactatggaggatttgccaaagaaacatgtagacactggtgcaggacttgaaagaatttgttcagtattgcaaaacaaagattcaaattataaaactgatttgttttcaaaaacgattgaagatttagaaaatttttctaacacaaaatatcaagattttgaggtttcatataatgttatttgtgatcatataagaatgctgtcatttgcaattgctgatggagttgttccatcaaatgatggaagaggttatgttgtgagaagagttttgagaagaggttcaaaatttgctatgaatctagaaattaaagaaccgattctatacaaattggttgattcagtggtttcgacaatgtcttctcattatccagagctaaaaagaaaaacagaatatattgagcaaactattctttctg

SEQ ID NO: 306468 - DNA, 541 bp, Unknown
  Bacterial polypeptide expressing nucleotide sequence isolated from the Sargasso Sea
tatggcagacaaaacactcaatgaaataagaaatacttttttgaagtattttgagaagaatgatcacaagattgtggaatctagtaatttggttccaaataacgatcctacattgatgtttgcaaattctggaatggttcagtttaaaaacgtttttacaggattagaaaaaagagattatgtgagagccacaacatcacaaaaatgtgtaagagcaggtggaaagcataacgatttagagaatgttggttacacaccaagacatcataccttttttgaaatgttgggaaacttttcttttggtgattactttaaagaacaagcaattcattatgcatggaacctaattacaaaagattttggaatagataaaaacagactttatgtgactgtatttcatgaggatgatgaggcctttaatttttggaagaaaatagcgggttttagcgatgatagaataattagaattgccacatcagataatttttggtcaatgggtgagactggtccttgtggaccttgttctgaaatattctttgac

SEQ ID NO: 306469 - DNA, 825 bp, Unknown
  Bacterial polypeptide expressing nucleotide sequence isolated from the Sargasso Sea
gagaaactaggagcaactgaatttttaggatatgaaactaatcaagctgaaggtgttgttttatcattatttaaagacaacaaagaagtagatcaactaaattccggtgaagagggtatgattatagttaatcaaacacctttttatggagaatcaggaggacaagttggagatgtaggagaaataatgtcaggagaatttaaatttgaggtttcagatgtccaaaaaaaattgggagatttatttgttcattatggaaaagtaaaaagtggttcaataaaattaaataataatattgaaatgaaaataaatgttttaagaagagacaatattagagcataccattcagctactcacttattacacgagtccttgagaagagtattgggagaacatgtaactcaaaagggatctttagtagaaccagagaggcttagatttgattttagtcatatgaagccaataagctcagatgaaattaataaaattgaaacttatgtgaactcaatggtggaaaaacagtcagaagtaaaaacaaggttaatgacacctaaggaagctgtagaaaatggggctttggcactatttggagagaaatatggtgaagaagtaagagttctatcaatgggaaatgaagaaagtaagtatttctcaactgaattatgtggaggtacgcatgtaagaaatactggcgatattggcaaatttaagattataagccaatcttcaattgcagcgggcgtaagaagaatagaggcattaagagataaacaattagatgaatatctaaaaaataaagaaaaattatctggtttatctgctcaa

SEQ ID NO: 306470 - DNA, 578 bp, Unknown
  Bacterial polypeptide expressing nucleotide sequence isolated from the Sargasso Sea
tatggctgacaaatcattaaatgaaataagaaattcttttttaaaatattttgagaaaaatggccacaagattgtagattccagtaatttggtaccaaacaacgatccttctctaatgtttgcaaattctggaatggtacagttcaaaaatgtatttacagggttagaaaaaagagattatcaaagagcaactacttcacaaaaatgtgtaagagcaggaggaaaacacaatgatttagagaatgtaggttacactccaaggcaccatactttttttgaaatgttgggaaatttttcctttggagattattttaaagatataggaattgaacttgcatggaatttaattacaaaggattttggattagataaaaataagctttattttaccgtttttaaagaagatgaagaggctcttaatatttggaaaaaaattacaggatttggtgatgacagagtaattaaaatttccacatcagataatttttggtcaatgggagaaactggtccatgcggcccttgttctgaaatattttatgatcatggggatcatttaaaaggtgggttacctggaacaa

SEQ ID NO: 306471 - DNA, 550 bp, Unknown
  Bacterial polypeptide expressing nucleotide sequence isolated from the Sargasso Sea
atgaaaacgaatgaaataagacaagcatttatcaaattctttgagtcggaagggcatcaaagcgtcaagagttcgcctctgattcctgcaaatgatccgacactcttgtttacaaacgctggaatggttcagttcaaggacatttttttaggaaaagaagatcaaggtttcacaaaagcagtcagtgctcagagatgtttaagagcaggtggtaagcacaacgatcttgaaaatgttggctatacatcacgtcatcacactttctttgaaatgcttggtaactttagttttggagactactttaaagaggatgcaatccaattggcatgggacttcattaccaatgagctcaaacttgaaaaggatcgtctttgggtaaccatttttgaagatgatgatgaggctgcaagcatttggcttgaaaagattggagtatcagctgatagacttgttcgactgggcgaaaagtctaacttttggtctatgggtgatactggaccatgcggtccttgtagcgagatattttatgatcatggagatcatatcgatg

SEQ ID NO: 306472 - DNA, 928 bp, Unknown
  Bacterial polypeptide expressing nucleotide sequence isolated from the Sargasso Sea
aattatgatactgatattctgaagtctatagtccaagaagcggcaaaacttagtggagagaatgacttaacaaacccctcgctaagagtaatatcagatcatttaagagcctcttcgttcctgattgcagatggcgttgtgccttctaatgaaggaagaggatatgtcttgcgcagaattataagacgcggccttagacatgctcacaaacttggaatgaaagatgggattctctctaagctcgtacatattttggaagaaaaaatgggtattgcttaccccttacttgtaaaaaactcagatattattaaagctaatttacttaaagaggaagaacagttttccactactttagagcagggtatgcagttacttgaatctgcagttgaggacttaaaagacaacgaaattccgggtgatatcgttttcaaactttatgatacttatggatttcctgtagatatgactgctgattttgcacgcgaaagggatctaatagttgatttagacgaatacgaagccttaatgctggaacaaaaagaaagagctagatcatcgagcaacttcaacacactcatcccagaatctttaaacatcgaaggcgaaactgccttcttaggatacgataccgattcaacatcctcgaagatagtagagattatttctagctccgaagaagggaataaggatgaattacgagaaggggaagaaggactcatacttcttgatgagaccccgttttatgctgagtctggaggtcaagtaggagataaaggatttattcagtctgataattcacttttcgaagttcatgatacccagaaaaagggagatcaatttcttcatctaggtcatgttaaatcaggagtttttaataaaaatgattctgtaacagctgaaattaacacaacccacagaaatagaaaaa

SEQ ID NO: 306473 - DNA, 922 bp, Unknown
  Bacterial polypeptide expressing nucleotide sequence isolated from the Sargasso Sea
ttaaattattttaaacaaaatggtcatgaaattgtttcgtctagcccacttgttcctagaaacgacccgactttgatgtttactaattccgggatggtccaatttaaaaatctttttacggggattgaaaaacgtgactacttaagagccgttactgctcagaagtgcgtgcgggctggtggaaaacataacgacttagataatgttggttacactgcgcgtcatcatactttttttgaaatgttgggaaatttttcgtttggtgattattttaaatcagaagcaattcctctcgcttggaatttgataacgaaggaatttggtattccttccgaaaagttatacacaactgttttccatactgatgaagaggctgctttgatctggaaaaaagttggtgtccctgaagatcgcattattaaaataagtacgtccgataatttttggcaaatgggacccacaggcccttgtggtccatgcactgaaatattttacgaccatggtgaacaaatttggggagggccgcccggatcggcagacgaagacggtgatcgtttcattgaaatttggaatatagttttcatgcaaaatgagaggtttgatgatggctcgatgaaagaacttgatattcagtcgattgacacaggcatgggattggaacgtataggagctttgcttcaaggtagtcacgataattatgatacagatactatgagaaatctgatgttagcgtcagctgaagcaacttcctcagatcttgatggaaaacataatgttcatcacagagttatcgctgaccatttgcgctcaacagcttttttaattgctgacggcgtgttgccagcaaatgatggcaggggatatgtgttaaggcgtattatgcgcagagcaatgcgtcatgttcatttgcttggtcgaaaaa

SEQ ID NO: 306474 - DNA, 805 bp, Unknown
  Bacterial polypeptide expressing nucleotide sequence isolated from the Sargasso Sea
atggcccctgccgtcgcccgtccccgccgtggtgccgagatccgtgcagcgtttctggagttctacaaatcccgcggtcacacgcccatccccagtgcctcgctgattcctgaggaccccacggtgctgctcaccatcgccgggatgctgccgtttaagccggtgttcctgggccagcaggagcgtccagcgccgcgggccaccagcagccaaaagtgcattcgcaccaacgacatcgaaaacgtgggccgcacggcccggcatcacacgtttttcgagatgcttggcaacttctcctttggggattacttcaagcagcaggccatcgaatgggcttgggagctcagcaccgaggtgtttggccttgatcccaagaacttggtggtgagtgtcttccgcgaagacgacgaagccgaggcgatctggcgtgatgtagtgggggtgaaccccaagcgcatcatccgcatggatgaggccgacaacttctgggcttcaggtcctacagggccttgcggtccctgctccgagatctattacgacttcaagcccgaactgggcgatgagggcatcgatcttgaggacgacaaccgcttcatcgagttctacaacttggtgttcatgcaatacagccgtgatgcggaaggcacgctcacgccgctggccaacaagaacatcgacaccggtttgggcctcgagcggatggcccagatcctgcagggggtgcccaacaactacgaaaccgatctgatctatccgctgatcgaaacggccgccgacctggctgatgtcgactaccgccagctcg

SEQ ID NO: 306475 - DNA, 542 bp, Unknown
  Bacterial polypeptide expressing nucleotide sequence isolated from the Sargasso Sea
catgagcagcgtcaacgacatccgttcgacctttcttaactattttcacaaggacatgcaccagatcgtcgactcgagtctgctggtcccaaagaatgacccgaccttgatgttcaccaatgccggcatggtgcagttcaagaacctgttcaccggggttgagacgcgtgattacaaccgggccgtcacctcgcagaaatgtgttcgggctggcggtaagcataatgaccttgagaatgtcggctatacggcgcggcatcacactttttttgagatgctgggaaatttctccttcggtgactatttcaaggaccatgccatcgaaatggcctggaagctgatcactagggaatatggtctgccagctgaaaaactgcttgtcactgtctaccacgaggatgaggaggccgccgggctctggcgcaagattgccggcctcgatgatgaccgcattatccgcatcgccacctcgggacatttctgggcgatgggtgacaacggaccctgcggtccctgttcggaaatttttcttgatcatggcc

SEQ ID NO: 306476 - DNA, 604 bp, Unknown
  Bacterial polypeptide expressing nucleotide sequence isolated from the Sargasso Sea
aagctcaataacaaaccctagtcacagagtaatagcagatcacttaaaatcttcctcttttttaattgctgatggagtaatgccttcaaatgaaggtagaggatacgtcttacgaagaataatgagaaggggaatgcgacacgctcattctttaggtaataaagagcctgtatttcataagctattccctatttttttagaaggaattaaaaattcatatcctgaattagatagagcaaaagatctcattactaatacattaatgaatgaagaaactaaattcaaggaaactgttgaaaaaggaataaaaattttagatgaggaaatttctaattctacaaatatatttaatggagaagtagcatttaaattatacgatacctatggatttcccttagatttaacacaagattatttgaaaagtaaaaatattgaagtcgatataaaaacatttgaacaaaaaatgttagatcaaaagcaaagagcgagacaaagctggaaaggtacaggagacatcgaggatgaaggcatttggtttgaaataacttctaaaatagagccaacagaatttttaggatattctgatatggaagctgattgtaaa

SEQ ID NO: 306477 - DNA, 829 bp, Unknown
  Bacterial polypeptide expressing nucleotide sequence isolated from the Sargasso Sea
tcaagctttagagtaattgcagatcacttaagagctagctcatttcttcttgcagaaggagtattaccttcaaatgaaggtagaggttatgttcttagaagaataatgagaagaggaatgagacattctcatttgctaggttctaaagaaccagtcttcaataaaatctttgatacattgaaagatgaaatgaaaggaaattatcctgaattagaaagatcagagactttaattaaagaaacattaaaaatggaagaagaaaaatttttagttttacttgatagaggaattaaaattttgaatgatgaaatttcaaaaataaaaaaagttttaccaggtgaagtagcgtttaaattatatgatacttatggtttcccactagacttaacagaagatattttaaaaaacaaatctttaactgttgatcaaaataaatttgatgagctaatgaaaaagagcaaagaacttgcaaaacaaaactggaaaggttcgggagatgcttctgaagaagaaatctggtttggtataaaagataaaataggacctacagagtttcttggatatgagtttaaccaatcagaaggagtggtgttatcaataattaaaaataataaagaagtacaaaaagtttcaaatggtgaggcagggataattattactaatcaaacccctttttatggagagtctggtggacaagttggagatcaaggaacaatagtatctggtaactcagtatttgaggttacagatactcaaaaaaaacttggagatttgtttatacatcatggaattctaaaatctggtgagattaagattaaagacgtcgtag

SEQ ID NO: 306478 - DNA, 907 bp, Unknown
  Bacterial polypeptide expressing nucleotide sequence isolated from the Sargasso Sea
ccagacaaatggactgaaatttctgaaggagctgattcaaaatttgtaggctatgatactttcaccacagaatctaaactacgccgcttttctcaaaataaatctgggcaattgcagtttattttagatacaactcctttttacgctgaatcaggcggtcagattggtgaccaaggtgttctgaaacaaaacaataatacttggaatgttttagatgtacagaagatgggtgattctattattcatatctgtgaggctgaaaataaaagatcaaataacattgttcctgacaattctagaattacagcctctgtagatgaaaaatctcgattatcaacaacaaataatcatactgccgcgcatcttatgcatgagggacttcgtcaggtattaggcgaacatgttacccaggcgggctcccttgtcaatccagaaatgttaaggtttgactttacacattctgaaaaggtaagtgacgcgcaaattgaagaaattgaggacatggtcaatttgataattcgccggaacattaacacagatatttatgaaactccttttgatgaggcaatcagttcgggaataatagcactttttggagaaaagtacggagatgttgttagagtcgtaaaaatcgctgatttttctgaagaactttgtggtggctgccatgtaaaagctacaggacaaattggacagttccgcatagtttctgaagagggaattgccgctgggataagaagagtggtggctgttactggtaaagaggctgacttgatggctcaagagcaaggaagagtaacacgtgcattgcgccaactattgaatggtccagagtcgcaaattccagaaatgacaatgaaacttactgaagaaaaagacagcttgaaaaagaaattcaatccctgag

SEQ ID NO: 306479 - DNA, 571 bp, Unknown
  Bacterial polypeptide expressing nucleotide sequence isolated from the Sargasso Sea
atctggtttaaaattaaagacaagttagaaccaactgaatttttaggatatgaaactaatcaagctgagggaatagtagtttctttaattaaagataataaagaagtaaaaagtttaaataaaggtgatgaagctattatggtattaaatcaaacaccattttatggagaatctggcggtcaaataggtgatactggattaatcatttctggtgattttaaatttaaagttgaagatgttcaaaaaaaacttggagatctttttgttcactatggaaaagttgaaaatggatcaattaaactcaacgataatgtagaaatgaaaatagatgttgagagaagagataatataagagcttatcattccgcaactcatctacttcatgaatctttaagaagagttttgggaaaacatgtaattcaaaaaggatctttggttgcaccagatagactaagatttgattttagccacatgaaacctatctcaaatgaggagatagttaaaattgaaacatttgtgaatgaaatggttgagacaaaatcagaagtaaaaacaagattaatgacaccaa

SEQ ID NO: 306480 - DNA, 898 bp, Unknown
  Bacterial polypeptide expressing nucleotide sequence isolated from the Sargasso Sea
aatggttcaatttaaaaatgtttttacaggtcttgaaaaaagaaactataataaagctgttacatctcaaaaatgtgttagagctggtggaaaacataacgatctcgaaaatgttggctatacaccaagacatcatacattttttgaaatgttaggaaatttttcatttggcgattattttaaagacgttgcaattgaattagcttggaatttaataacaaaagaatttcaaatatcaaaagataagatctgtgtcagtgtgtactcagaggataaagaagcttttcaactatggaaaaaaattgctggtttaccagaaagtaaaatttataaaatatccacaagtgataatttttggtcaatgggagatttaggtccatgtggaccatgttctgaaatattttatgaccatggcaaccatttaaagggagggcctccaggaagtaaagatcaagatggggatcgttttatagaaatttggaatttagtatttatgcaatttgaacaaatttcaaaagataaaagaataaatcttccaaaaccatcagttgataccggaatgggtttagaaagaatttcagctttactacaagggactcacgacaattactcaacagatcactttaaaactttaattgaagcttcttcaaacttgaccaaaactaaagtaactaaagaaaatatatcaagtcacagagttatagcagatcatttaagagctagttcatttttgattgcagaaggagttttgccttctaatgaaggtagaggttatgttttaagaagaataatgagaagaggcatgagacattcacacacattaggcagtaaagaacctattttttacaaaatgataccaactttaattaagggaatgtctgattcttatccagagtaa

SEQ ID NO: 306481 - DNA, 517 bp, Unknown
  Bacterial polypeptide expressing nucleotide sequence isolated from the Sargasso Sea
atgtcggtcggcggtggcggcgtcgacggtggcagcgcggcggcgggtacggcggcgggcttcaagaccgtcgacgaggtgcgctccgccttcgtcgactacttcgtctccaaggctggccacacccactggcgctcgtcgcccgtcgtgccgcacgacgacccgacgctgctcttcatcaacgcggggatgaaccagttcaagccggtcttcctcggctcggcggacccgaactcggcgatgtcgaagctgaagcgcgccgccaactcgcagaagtgcatccgcgccggcggcaagcacaacgacctcgacgacgtcggcaaggacaactaccaccacacctttttcgagatgctcggcaactggtcctttggcgactattacaaggcggaggcgatcaagtgggcgtgggagctgctgacggaggtgtacaaaatcccggcggaccggctgtacgtcacgtacttcgagggctccgagaaggagggcctcgcgcccgacacggaggcgcgcgaca

SEQ ID NO: 306482 - DNA, 810 bp, Unknown
  Bacterial polypeptide expressing nucleotide sequence isolated from the Sargasso Sea
agttataaaaataagtacatcagataatttttggtcaatgggtgatacaggaccttgtggaccttgttctgaaatattttatgatcacggagataaatatcctggaggcccaccaggcagtcctgatgaggatggagataggtttatagaaatttggaatttagtttttatgcaatttgaacaaattaattcttccgaaagaattaatttgcctagaccttccattgatacaggtatgggtttagagagaataaccgccttactaaatggcacaaatgataattataacactgatctttttaatcctcttataaatcaatcaattcagttacttaataatgaaagtttaaactcgagtccaagtcatagagtaatagctgatcatttgagatcttcatcattcttaattgcagatggggttaccccctcaaatgaaggtagaggctatgttttaagaagaattatgagaagaggaatgagacatgcccacactcttggtaataaagagccagtttttgataaaatgctccctaaattaattgaaacatttcaaaatgcttatcctgaattggaaagagcaaaggatttaattttaaatacatttttaaatgaagaaacaaaattcaaagaaactgttgaaaaaggtctaaaaattttagaggatgaaatttctacttcttcaaaaaaattagatggtgaaattgcttttaaattatatgatacatatggcttccctttagatttaactcaagattaccttagagcaaaaaaaattgaggtagatattgaatcattcaataaaaaaatgaa

SEQ ID NO: 306483 - DNA, 685 bp, Unknown
  Bacterial polypeptide expressing nucleotide sequence isolated from the Sargasso Sea
tatggctcaaaaatcattaaatcagataagagaaacattcttaaaatattttgaaaagaatgatcataaaattgttgagtctagcaatttagttcccaataacgatccaacattaatgtttgcaaattccggaatggttcagtttaaaaatgtatttactggcttagaaaaaagagattatcaaagagcgactacttcgcaaaagtgtgtaagagccggaggaaaacataatgatttagaaaatgttggatatactccaaggcaccatacattttttgaaatgttaggaaatttttcgtttggagattattttaaagaaaaagcaattcattatgcttgggatttaattactaaagattttggaatagataaaaatagactttacgtaactgtatttcatgaagatgatgaagcatttaatttttggaagaaaatagctggtttcagtgatcatcgaattattagaattgcaacatcagataatttttggtcaatgggagagacaggtccgtgtggcccttgttcagaaattttttatgatcatggtgatgatttaaagggtgggttaccaggcagtaaggaagaagatggagatcggttcattgaaatatggaacttggtcttcatgcaatacgaacaagtaacaaaagataaaagaataaatcttccagaaaccttccgttga

SEQ ID NO: 306484 - DNA, 889 bp, Unknown
  Bacterial polypeptide expressing nucleotide sequence isolated from the Sargasso Sea
gcagaggtcctatctattattagtaatggtgctgaagttgatcaaatatcaaaagatcaacagggctgcataatcctaaatcaatctgttttttacgcagagtcaggtggccaaattggtgatattggatacatcagatgtggagaaagcaattttaaggtcactgatacacaaaaaaaagaaaatctaatcattcatgatggaatagtttctgatggggtatttaaaatagctgacaatgtagaattagaaatagatataaacagaagatcgtcatgtagatcatatcactctgcaacacatattttacaccaagctttacgggatacgcttggagaccatgtttctcaaaaaggatctttagtctcatatgacagactgcgattcgatttcagtcaccacaaaagcttatctgaaggtgaaattaaaaacatagaagcaattgttaacaacataattaattcaaactttaatgttgaaacaaaattaatgaaatctgaagacgctatcaattcgggtgctttagcattatttggagagaaatatgatgatgaagtaagagttttatcaataggtgataacaattcatcatcctatagtattgagttatgtggaggaacacatgttgaaaaaacatctgagataggaaatttcaaaataataagtgagtcatcagctgcatcaggaataagaagaattgaggcgttaagaggaaatgatttgataatttataatgaaacaagatctaagcaaatagagagtgatttagaaaagaaaaaaataacagaggatgctaaaaaaaataacttagaaaaaataaaaaaacttactcaaaacatagaagaaaaaataaaaaatggtgaaacgttaattgttgaaacgtgtaaca

SEQ ID NO: 306485 - DNA, 865 bp, Unknown
  Bacterial polypeptide expressing nucleotide sequence isolated from the Sargasso Sea
tttatgcatttacttgtaaaagatttaataaaactcatgaattctgcttacccagaattaaagaaaaaacaaaaagatattattgaattaattaagaatgaagagattaaattctttgaaacgcttgaaacaggaatagaaatacttgatgagactatttccaatatgaaaaataaaactctttctggagatgtagtttttaagttacatgatacttatggttttccatttgatttgactgcagatattgcaagagaaaagcagttagaaatagatgaagaaagattcaatgaatgcatgaatcaacaaaaacaaacctcgaaagcatcaagcagttttgtatcttcgctcccagcagcatctggaattgaagagactaaatttttaggttacgaaaatttagagtctgattcaaaagttttggttatttggaaagatcaggaaagaatagatgcagctaagaacaatgaagaaatattttttgcatgcaatcaaacacctttttatgctgaagcaggtggacaaattggagataaaggaaaatttgcatctcaatcgtcaactggtagtattttagattgtaagaaacaaggtaaagtatatattcataaggcaattgttgacaaaggaagcattaaaaccggtgacgttattaaaatgagtgttgaaaaagaaaaaaggtctgcaattgctatacatcattcatcaactcatttagttcatgcagcattaagagcggttttgggtgatcatgttcaacaaaaggggtccttggttgacgaaaataaacttagatttgatttttctcacactaaaccacttacgaaagaagaaattactaagattgaggatattgtaaataaag

SEQ ID NO: 306486 - DNA, 875 bp, Unknown
  Bacterial polypeptide expressing nucleotide sequence isolated from the Sargasso Sea
gttagtttcaccaaacaggcttagatttgattttagtcataataagcccattgataaagaggaaatgaaaaaaataaacaatattgtaaacgaaattgtagttggttctactgatgtacaaacgagaataatgactccaaaagaagcagtaagcatgggtgcgttagcattatttggtgagaaatatggcgaggaagtgagagtagttttcatgggaaaggaaaataacggatttttctcaacagaattgtgtggaggtactcacgttaaaaatactaaggaggttggtaaatttaaagttataagtcagtcttcgatcgcgtcagggatcagaagagttgaggcgttaagagacaaacagttagaggattatgaaaaaacacaaaaactagagaaatctcaaaaagagtcaaatttaaaagatgaaataagattaattaaaaaggaattacaaaaactaaaaataaagccagattataaagataatttagattcaattgaaaatttaaaaaatttaaataaacagcttaacaaagtaaaaattgaaagcattaagaaagataaaagtaaaaatataattcaggacaaaaaaattggagatatattaattcgagagcaaattttaaaagattttcctcctaaggaactaaggggaattattgatcaaggcaaaaaagagattaaatcaggtgttataataagcatttctacttttgagaacaaagtaggagttgctataggagtttctcaagatcttacgggtaaatttgatgccgtaacacttgttaagattgcatcagaaattttaggaggaaaaggtggaggtggaagaaaagattttgcacaagctggtggtgtcgatcaaaataaaattg

SEQ ID NO: 306487 - DNA, 688 bp, Unknown
  Bacterial polypeptide expressing nucleotide sequence isolated from the Sargasso Sea
aagaagaataatgagaagaggaatgaggcattctcattttcttggctctaaagagcctattttttataacatttttaaaactttaaaagatgagatgaaaggtaattactcagaaatagaaagagctgagtctttaataaaagaaacattaagaatggaggaagaaaaatttttaattcttttagatagaggtattaaaatattaaatgaggaaatagctaaaatagacaaaatattacctggggaagtagcttttaaactttatgatacctacggttttccattggatcttacgcaagatattttgaaaaataaatctttgacaattgatattgataaatttcagagtttaatgaaagaaagtaaagaacttgcaaagaaaaactggaaaggctcaggtgatagtgcagtagatgatatttggttttcgataaaagataaattagggccttcagaattcttaggttatgagacagaccaagccgaaggtattattttatccttattaaaagatgataaagaggtaattgaactaaatgaaaatgatgaaggaatgattattttaaaccaaactcctttttatggtgagtcaggtggacaagtaggagacactggtgaattaatatctggagactttaagtttgagatcacagatgtacaaaaaaaattaggtgatctgtttgtgcat

SEQ ID NO: 306488 - DNA, 766 bp, Unknown
  Bacterial polypeptide expressing nucleotide sequence isolated from the Sargasso Sea
atgcagtacgaacaaatttcaaaagataaaagaattaatttaccgaaaccctcagtagatactggaatgggattagaaagaattgcagctctacttcaaggcacacatgataattatcaaacagatcattttcaaaaactaattcaatcaacttcagatattgttaagaaaaaaccagatcaaaataacctttcaagttttagagttatcgcagatcatttaagagcaagttcatttttgattgctgaaggagttttaccatctaatgaaggtagaggttatgttcttagaagaattatgagaagaggaatgagacattcgcatttgttaggatctaaaaaccctgttttctacaatttatttgaaacactaaaaaatgaaatgtcaggcaattatcctgaattgaagagagccgagtcattaattaaagaaactcttaaaatggaagaggaaaaatttttaattcttttggatagaggaataaaaatattaaatgatgaaatatctaaaatagataaagttcttcctggtgatattgcttttaaattatatgatacttatggatttccgctagatctaactgaagatatcttgagaaataaatctttatcaatcgatacgaaaaaatttcaatctttgatgaaagaaagtagagaacttgcaaaaaaaaattggaaaggatcaggagatgctgcggtagaagatatttggtttgggattaaagataaattaggtgctacagaatttttgggttatgaaacaaatc

SEQ ID NO: 306489 - DNA, 854 bp, Unknown
  Bacterial polypeptide expressing nucleotide sequence isolated from the Sargasso Sea
tttagaggaaaatggtttaaagttagagaagagctcaaccctacagaatttttaggttatgaacttgataaagccgaaggggttgttctcaaaatatcaaaaggtaaagattttgttaaagaagcaaaaacaggtgatgaggtagaaatagtaactaaccaaaccccattctatgcagagtccggaggtcaggttggcgatcaaggaataatttattctaatgattgtaaagttcttatcaaagatacacaaaagaagatgggtgatctacatgttcatttgggcaagattgacaaaggttctttaaagactcatcagagcgttaatttagaaattaatgtagacagacggaataatgcaagagcttatcactcagcaacacatttacttcatgaagctctaagaagaactttaggaaaacatgttacccaaaagggatccttggtaagcccagaaaagctcaggtttgattttagtcacaacaaaccaattgaaaaaaaagaaattgaaaaaattgaaaaattcgtaaacgacatggttaataccgaagctgatgttaaaacaagaattatgacacccaaagaggccgttgaaaaaggagctttagctttgtttggtgaaaaatacggagaagaagttagagttttatctatgggtaaagaaaatggaggttttttttccacagaactgtgtggaggaactcatgttaaaaatacaaaagatattggaaaattcaaaatagtaagccaatcatctatagcagcaggggttagaagagtagaggctttaagagataaacagttagaagattatgaaaaatctacaaaacaggataaattttcaaaagaaaaaac

SEQ ID NO: 306490 - DNA, 881 bp, Unknown
  Bacterial polypeptide expressing nucleotide sequence isolated from the Sargasso Sea
tgggtaacggtttacgccgaagacgacgaagcctttgatatctggaaccaggaaatcggtgtgccggcggaacggattgtgcgcatcggggacaacaaaggcgcccgctacgcctccgataacttctggcagatgggtgataccggaccctgcggcccgtgcaccgagattttcttcgatcacggcccggatgtggcaggtgggcctcccggcagcccggaagaagatggcgaccgctacatcgaaatctggaacgtggttttcatgcagtacaaccgcactgccgacggcgagatgctgaacctgcccaagccctcggtggacaccggcatggggctggagcggattgctgcggttctgcagggtgttcacagcaactacgaaatcgacctgttccaggacctgttgaaggcggcatccgacatcctgggtggtgcggccaccacagaagcgtctctgcgcgtggtggcggatcatatccgttcttgcgccttcctgattgccgacggcgtgatgccgtccaacgaaggacgcggctttgttctgcgccgaatcattcgtcgcgcagctcgccacggcaacaagctcggtgctacccagccgtttttctacaagcttaccggcgctctggttgaactgatgggcgaggcctatccgcaattggtgagtagtcgcaagcagatcgaaaaggtgttgctgcaggaggaagaacagttcgccaagaccctggataaaggtctgcgcctgctggagcaggacattgcggagctgaagggtaccgagattcccggtgaaaccgtgtttacgctttacgatacctatgggttcccggtcgatctgaccaacgatattgcccgcgagcgtggtctgactctggatta

SEQ ID NO: 306491 - DNA, 854 bp, Unknown
  Bacterial polypeptide expressing nucleotide sequence isolated from the Sargasso Sea
agatgaagaaatgaaaaaaatcgatgaaaatgttaacaagtttgtaaactcaaaaacggaagttgttacgcgattaatgactcctgaagaaggaattgaacaaggggcaatggctttattcggtgaaaaatatggagatgaagttagagttgtgtttatgggtgaagaaggtaacaaatatttttcaacagaactttgtggcggaacacatgtaaaaaacactggtgaggttggtaaatttaaagtagtcagtcaatcatcaattgcagcaggtgttagaagagttgaagcattaagagataaacaacttgaagaatatctaaagtcaaaagataagatgtctagtttgtcttctcaaaaaaatgaagaaactatcaaatcattatcaagtgaaatcaccaaacttggaggaaaaccaattaaaaaatctgaagatcttaaaaccacgattaaggagctgacaaaacaattagaggaaataacagtaaaaagtattttatcggataagaaaaaaaatattgtcaaagaccaaaatattaaaaagataaatataagatttcaaaaagtagatgacttaccttttaaagaattaagaagacttgttgatcagggtaagaaagatatcaaagagggaattgtaattatatatgcaattaaagatgataaaattggtttagcagttggagttacagacactttaactgaaaagtatgatgcaataaaatttgtaaaatctggttcagaaattcttggtggaaaaggtggtggaggtagatctgattttgcccaagccggaggagttcattcaaataaaatagaagaaagttttgaaaagattaaaagcttaatttaac

SEQ ID NO: 306492 - DNA, 944 bp, Unknown
  Bacterial polypeptide expressing nucleotide sequence isolated from the Sargasso Sea
taaaagaaataaggaagttgatcaattgaaagtaaatgatgagggaatgatcattgtaaaccaaactccattttatggtgagtctggaggtcaagtaggggatactggtgagattgtatcaaatgaatttaaatttgaggtaacagatgttcagaaaaaacttggagacttatttgtacactatggaaaagtagtcagtggttccataaagctcaaagatagtgttgaaatgaagataaatgttgaaaggagagatgatactcgagcttatcactcagcaacccatcttttacatgaatctttgagaagagtattaggagatcatgttacacaaaaaggttctcttgtagagcctagcagattgagatttgattttagtcacatgaaaccaatccaaaatgatgaaattgataagatagagaaatttgtaaacaatatggtttcaaaaaagtcagatgtaaaaactaggttaatgacgccggatgaagctgtagaaaaaggagctttagcgttatttggtgaaaaatatggagatgaagtaagggtgctttctatgggagatgaggatggaaagtatttctcaacagaattgtgtggtggaactcatgttaaaaatactggagatattggaaaatttaaaatagtcagccaatcctcaatagctgctggggtaagaagaatagaggctttaagagacaaacaattagaggattatctgaaaaataaagaaaaactttcagcgttatcctctgaaaaagacaatgaaaccgttaaagatttaagtgagcaaattatcaagcttggaggaaaacctagcttggatcaatctgatcaaaaaaacttaattaaaaacttaacaaagcaattagaaacactttctgtaaattcaattttaaatgacaaatcaaaaatattattaaagaccaagatattaatggaattaa

SEQ ID NO: 306493 - DNA, 469 bp, Unknown
  Bacterial polypeptide expressing nucleotide sequence isolated from the Sargasso Sea
atgagtgaaattagaggaaagtttcttgaatacttttcaagaaatggacatgaaatagttgattcaagcaatattgttcctaataacgatccaactttaatgtttacaaattcaggaatggtccaatttaaaaatgtttttacgggattagaaaaaaaatcttttaaaacagctacaacatcacaaaaatgtattagagctggcggaaaacataacgaccttgaaaacgttggttatacaccaagacatcacacattttttgaaatgttaggaaacttttcatttggagattattttaaagaaaaggcaatttattatgcatgggaattattaacaaaagattttgctcttcctaaagaaaaactattagcaactgtttattcggaagatgaagaggcttttaaattatggaagaaaatagctggtttaccagaaaataaaattattaaaattcaaacagcagacaatt

SEQ ID NO: 306494 - DNA, 799 bp, Unknown
  Bacterial polypeptide expressing nucleotide sequence isolated from the Sargasso Sea
aggacatgttaaatcaggatctataaaaaagagtgattcagtggttgcggagataaattctgaacaaagaaataggataaagggcaatcatagtgctacccatttacttcatgccgctctgagagaagtgttgggcgaccatgtggaacaaaaaggctcattagttgaagaatccaggttgagatttgattttgctcacaatagctctattgatgctgaagatattcttgctattgaagatttaattaatacagagataaagaagaattctgaatcaatcacagagattctgcctattagcgaagctattgaaaaaggtgccattgccttttttggtgataaatatggtgaagaggttcgtgtcctcaatattggaaatggtttttctattgagctttgtggtggaactcacgttgagagaacaggtgaaataggcatgctaaagattacttctgaatcaggagtatctgctggtgtaagaagaatagaggcagtaactggcgttggcgctaatttattattggatgagctttcgcaaaattattctgctatcactaatgaactttttgttgaagatattgattctagagatggagttgaagcattggattacttacgttttcttgaagaagaaaatatttcctttgcagaagctctcaattgttcaaatgatcaagttttaaaaaagattattcagataaaagaagacaacaatgacttgttgaaagagttaaatagaggacctttagaatttatgatctttgatacctgcatagaggcaattgaaaaatctaattaa

SEQ ID NO: 306495 - DNA, 893 bp, Unknown
  Bacterial polypeptide expressing nucleotide sequence isolated from the Sargasso Sea
ttatcactctgcaacccatcttttacatgaatctttgagaagagtattaggagatcacgtaactcaaaaaggttctcttgtagagcctagcagattgagatttgattttagtcatatgaaaccaatccaaaatgatgaaattgataagatagagaactttgtaaataatatggtttcaaaaaagtcagatgtaaaaactaggttaatgaccccagatgaagctgtagaaaacggagctttagctttatttggtgaaaaatatggtgacgaggtaagagtgctttctatgggagatgataatggaaagtatttctccacagaattatgtggtggaacccatgtcaaaaatacaggagatattggaaaatttaaaatagtaagccaatcttcaatagctgcaggagtaagaagaatagaggctttaagagataaacaacttgaagattatttaaaaaataaagaaaaactttcagttttatcctctgaaaaaaatgatgaaaccattaaagacttaagcgagcaaattacaaagcttggagggaaacctagcaaagataattcagatcaaaaaaacttaattaaaaatttaacaaaacaattagataccctttctgtaaatttaattttaaatgataagtctaaaaatattattaaagaccaagacattaatggaattaaattaagacttcaaaaagttgatgatcttcctcctaaagagcttagaaaattggttgatcaaggaaaaaaagatttatctaaaggtattgtaatagtgtttgcaagcaaagatgacaaagtagggatagcagttggagttacagaaagtttaaacaataaatatgatgctgttgaatttgttaaaattggttcagagattattgggggcaaaggcg

SEQ ID NO: 306496 - DNA, 787 bp, Unknown
  Bacterial polypeptide expressing nucleotide sequence isolated from the Sargasso Sea
gccgatcacattcgttcgtgcagcttcttaatttgcgatggcgttatgccatcgaatgaagggcgcggatacgtattacgccgcatcatccgtcgcgctgttcgccacggctatcagcttggcgcaaacgatatcttcttctacaagcttgtggcatcacttgcaaaagaaatgggtgaagcatacccagaacttgtagaccagctaccggtaattgaaaaagtactgcgtgttgaagaagagcagtttagcaaaacactagcccgtggtatggctattctaaacgatacgttagaaaccttagaaggcgatactgtgccgggggacgtagtgtttaaactttacgacacttatggcttccctactgatttaaccaatgatgtagcgcgtgagcacgaccttaagatcgacgaagaaggttttgaagcagctatgcaggcgcagcgggctcgtgcacaacaagctagcaactttggtgcagactacaacagtaaactcgccattgaccacacaacctcatttactgggtacaccgatgtagaaggccaggcgaatgtggttgaacttatcgccgacaatgcgtttgtagagaagcttgaagacggtcaagaaggcgttgtggtattagatagcacgccgttctacgctgaaagcggtggtcaggcaggtgacaaaggcgtgcttcgcgtggctaacggtgaattcattgtgaccgacacccaaaaaatgggtaatgcgtttgcacacaaaggtattgctaaaggttcggtatctaaaggtgatacgg

SEQ ID NO: 306497 - DNA, 661 bp, Unknown
  Bacterial polypeptide expressing nucleotide sequence isolated from the Sargasso Sea
atggctaaaacgttaaatgaaataagatctacattcctagaatattttgaaaaaaacgaccacagaatagttgagtctagcaatttagttccaaataatgatccaacattaatgtttgccaactctggaatggtacagtttaaaaatgtattcactggtctagagaaaagagactatcaaagagccacaacatctcaaaaatgtgtaagagctggcggaaagcataatgatttagaaaatgttggctatacaccaagacaccatacgtttttcgaaatgttagggaacttttcttttggagattactttaaagaaagagctattgaacttgcttggaatttaataacaaaagaatttggattaaacaaagacagactttatgtaactgtttatcatgatgatgacgaagccttcaattattggaaaaaaattgcaggattaagtgaaaataaaatcataaggatagcaacttctgataatttttggtctatgggtgagactggaccttgtggcccttgttctgaaatattctatgaccatggagatcatcttgaaggtggattgcctggaacaaaaaatgaggatggagatagatacatagaaatttggaatttagtttttatgcaatttgaacaaatttcaaaagataaaagaattaatc

SEQ ID NO: 306498 - DNA, 997 bp, Unknown
  Bacterial polypeptide expressing nucleotide sequence isolated from the Sargasso Sea
tttgcgagagagaagagtttagatttagatttagatggctacgaatcattaatgcagagcaaaagagatcgagcgagatcgcccagtaatttgatttcaatgatacctgaatctttaaatattcagggtcatacagagtttgtgggctacgattcaaatgctataagttcaaatgtaatagagattattcctagcgaaagttcatctatgaaggatgaaattaatgaagacgaagaaggtatagtgctcctaacagaaacccctttttatgccgaatcaggaggtcaagtaggtgactcaggctatttgaagtctaatgaatccatcttcgaagtctatgatactcaaaaaaaaggagaccattttttacatataggagttgttaaatcaggaacctttaaaaaagatgaaactgttgatgctgaaatagatacaaaaaaaagagaacgaattaaaagtaatcatagcgccacacacctactgcatgcagcacttagaaatatccttggcgagcatgtcgaacagaaaggttcattagttgaagagtccaggttgagatttgattttgcccataatcaagcaatagattctacagagattcaagacatagaagatcaaatcaatgcagagattaaaaaaaatactaaatcccttacggaggttcttcctctggaagaagccattgaaaaaggggcagtagcattttttggcgaaaagtatggtgcagaagtaagagttcttaatctaggagaaggttattcagtcgagctttgcggaggaactcacgttgcttcaaccggagagattggactaatgaagatagtctccgagtcgggtatttctgcaggtgttagacgaattgaagctgtaacgggagatagtgcaaattatttgttagaagaactggaacaaaactttctttcaattaacgatgagttatttatcggagatattgattcaaataaatctggtatagaagcccctagattacattagg

SEQ ID NO: 306499 - DNA, 931 bp, Unknown
  Bacterial polypeptide expressing nucleotide sequence isolated from the Sargasso Sea
ttctaaagagccaattttttttaatatttttaaaactttaaaagatgagatgaaaggtaattattcagaaatagaaagagcagagtctcttataaaagaaacattaaaaatggaagaagaaaaatttttagttcttttagataggggtataaaaatattaaacgaggaaataactaaaatagataaaatcttccctggagaagtagcttttaaactatacgatacttatggttttccattggatcttacacaggatattttaaaaaataaatcattaaaaatagataatgataaatttcaaagtttaatgaaagaaagcaaagagctggctaagaaaaattggaaaggctcaggcgataatgctgtagatgatatatggttttcaataaaagataaattaggtccaacagaattccttggatatgagactgatcaagcagaaggcataattttatcattattaaaagataataaagaagtaaatgaacttaacgaaaatgatgagggtgtgattattttaaatcaaactccattttatggagaatctggtggccaggttggtgatacaggtgaaataatttctgaagattttaaatttgaaattactgatgtgcaaaaaaaattaggtgatctatttgttcactacggcaaagttatatcaggtagaattaaaattaaagataatgttgagatgaaaattgactctgaaagacgaaacaatattagagcatatcattcagcaactcaccttttgcatgaatcattaagaagggtattaggaacacatgttactcaaaaaggatctttagttgctccagatagattgagatttgattttagtcacatgaagcccatttcagatcatgaaattaaaaaaatagaaagtcatgttaattcaatggtgcaaaaaaaatccgaagttaaaacaaga

SEQ ID NO: 306500 - DNA, 814 bp, Unknown
  Bacterial polypeptide expressing nucleotide sequence isolated from the Sargasso Sea
aaatgtgtaggagcaggtggaaagcataacgatcttgaaaatgttggctatactccaagacaccatacgttttttgaaatgttgggaaacttttcttttggtgattattttaaagaaagagctattgagcttgcgtgggatttaataacaaaagaatttggtttagataagaacaggctttatgtaactgtctaccatgacgatgacgaagcatttaattactggaaaaaaattgctgggttaagtgaagataaaatcataaggatagcaacatctgataatttttggtctatgggtgaaacaggaccttgtggtccttgttcagaaatattttatgatcatggagaccacttagaaggtggattaccaggaacaaaaaatgaggatggggatagatttatagaaatttggaatttagtttttatgcagtttgagcaaatctcaaaagataagagaattaatctgcctaaaccatcagttgatactggaatgggtttagagagaattgctgcattgcttcaaggaacgcacgataattatgaaactgatcatttcaaaaaaataataaactctgctgcagaaattttaaaagtccagcttaataaagataatttagcaagttttagagtaatagcagatcatttacgagcaagttcatttctaattgccgagggagttttgccatcaaatgagggaagaggctatgtcctaagaagaattatgagaagaggaatgaggcattcccatcttcttggttctaaagaaccaattttttataatgtttttaaaactttaaaagatgagatgaaaggta

SEQ ID NO: 306501 - DNA, 430 bp, Unknown
  Bacterial polypeptide expressing nucleotide sequence isolated from the Sargasso Sea
atgaactcaaaagaattaagacaaaattttatagattactttacaaaaaagaaaggacacaccttcattcgaagctcctctgtatctccaattgatgaccctacattattatttactaatgcgggtatgaatcaatttaaagatattttcttaggaagtatcaaacctgaatcaactaaagttacaaattcacagaaatgtatacgagttagtggaaagcacaatgatcttgaagaggtaggtgtagataactttcatcatactttttttgaaatgttaggaaattggtcatttggtgattattataaatcagatgcaataaaatgggcatgggattatttaactgaagttttaagtttggataaatcaagattatgggtaactgtctacaagaatgatcttgaatcagaaaaccttggaaagagctgac

SEQ ID NO: 306502 - DNA, 640 bp, Unknown
  Bacterial polypeptide expressing nucleotide sequence isolated from the Sargasso Sea
agataatactcgtgcttatcattcagctacccatttgctacatgaatctttacgaagagttctgggtactcatgtaactcaaaaaggctcattagtagagccaagtagattaagatttgatttcagtcacatgaaacctattttgaacgaggaaattgataaaatagaaaattttgtaaacacaatggtttcaaaaaaatctgatgtaaaaactagattaatgacacctgatgaggcagttgaaaatggtgctctagcattatttggggaaaaatatggagatgaagtaagggttctttcaatgggagacgagaatggaaagtatttttcaactgaattatgtggtggaacacatgtaaaaaacactggtgatattggtaaatttaagattgtcagtcagtcctcaattgctgcgggggttagaagaattgaggctttgagagataagcaattagaagaatatttaaaaaataaagaaaaattatcaaacctatctgcagaaaaagatgaggaaactattaaagatttaagtcagcaaattataaaacttggcggaaagccaagtttagaagaggctgatcaaaagactttaattaaaaatttaactaaacaattagaggcaatctcagtaaatacaatt

SEQ ID NO: 306503 - DNA, 858 bp, Unknown
  Bacterial polypeptide expressing nucleotide sequence isolated from the Sargasso Sea
tatgataaaaaaatctaattcaaaatcaatttcaggtaaagaagtttttgagttatttgacacttatggttttccatcagatttaacatccttgattttgaaagaaaggaagatgacattcaacaatgaagaatatcaaacagaattaagtaagcagagagaaaggtccaaacaatccactaagacaattgcatcagattggattattttgaatgaacaacaaggagatgatttttgtggctatgataaattaagctgcgatactaaggtaaatcaatacagaaatattagtgtgaatggtaaacaagtttgtcaaattattttgaatgaaactccattttatcctgaaggaggaggacaagctggtgataaaggaaaattaatttttgaaaataaatttgaaattattgtttatgatactaaaaaagaaaatggtaagattattcattatacagatttatcagacatagattttaaaaaaaatgttactgcagttgttaattctttgaatcgtaatgattcttcttcaaatcatacttcaacacatcttttacatcaagctcttagaaatgttttgggagatcatgttgaacagaaaggttcatcagtaacatcagaaaatttgcgatttgatttttctcatttcaagaaaattgaagaacaacaattaaaagaaattcaaaattttgttaatgataaaattgatgattcaattgacttaattgaaaaaagagatgaggattacgatactgcaattagcaatggagcaattggtttatttggagaaaaatatggaaagaaagttagaacaattaaatttggagaatcatacgaattatgtgggggaactcatgtaaa

SEQ ID NO: 306504 - DNA, 820 bp, Unknown
  Bacterial polypeptide expressing nucleotide sequence isolated from the Sargasso Sea
aggtgggcaggttggagatagaggtaagtttaaatctaaaaatgccgagggtagtattttagattgcaaaaaatctggaaaagtttttatgcaccttataaagttagacaaaggaagcttaaaaattgatgataaaattgaagttaacgtgaataaagaaaaaagagaaaaaactgaagctcatcattctgctacgcatttagttcatgctgcattaaaaagggtgcttggagagcatgttaagcaaaagggctcacttgttgatgagcataaactaagatttgatttctctcatgatgagcctttatctgatgaagagataaccaaaattgaagatttagttaatcaagagatactaaagaattctgctgtaactaccaaaataatggatttggaagatgctaagaattcaggtgcagaatctttatttggcgaaaagtatgaagatcaggtaagagtcttatctattggtgaagatgatttttctcttgaactttgtggcggaacacatatttcaagaacaggtgatcttggtattttcataataacaagtcaaagcagtgtagcctctggtattagaagaattgaagcactatctggtcctagagctcaagaatatttgtcaaatcttaaaaatcaaactatgcaactccaaaaacttttaaatgctcctgctgaagaaattgaagataaagtaagtaagcttttaaaggaaaataaaagtcttaagaaaggtggtaaaactgccaaagcagccacaattaaatcctctaatactcatgatattgataactttaaattattaattgaagaggcagaa

SEQ ID NO: 306505 - DNA, 781 bp, Unknown
  Bacterial polypeptide expressing nucleotide sequence isolated from the Sargasso Sea
gttaaacaagaggataaaaacatatcgagttttagagtaattgctgatcacttaagagcaagctcatttcttttggccgaaggagttttaccatcaaatgaaggccgtggatatgttctaagaaggattatgagaagaggaatgaggcattctcatttgttaggatctaaagaaccaattttttataaaatttttgactcgttaaaaaacgagatgtcaaaaaattatccagagcttgaaagatctcaatcactaatcaaagaaaccttaaggatggaggaggaaaaatttttagttttactagatagaggtatcaaaattttaaatgatgaaattgaaaaaatcgataaagttttacctggcgatgttgcttttaagttatacgacacttatggtttcccattagatcttactgaagacattttaaagaataaatctttgaaagttgatcaacagaagtttgatgaattaatgaaaaaaagcaaacaacttgcaaaaaagaattggaaaggttctggagatagctctgaagaagcaatttggttttcaattaaagacaaaattggtccaacagaatttttaggttatgagtctaataggtctgagggtgttgtattaatcttaattaaagataacaaagaaataaaatctttatcttctgggcaagaaggaatgataattacaaatcaaaccccgttttatggcgagtcaggaggacaacttggagataaaggtactattgtttctggtaattctgtttttgaagtagatgatacacaaa

SEQ ID NO: 306506 - DNA, 759 bp, Unknown
  Bacterial polypeptide expressing nucleotide sequence isolated from the Sargasso Sea
gcaattgaacttgcttggaacttaattacaaaagaatttaaaataccgaaggataaaataattgttagtgtttacgctgatgatattgatgcatttaatttatggaaaaaaatagctggattgccagaaagtaaaatttacaaaatctcaacaaatgataacttttggtcaatgggagatctgggtccatgtgggccatgttcagaaatattttacgatcatggtgaacatttagaaggaggtcctcctggaagtaagaaccaagacggagatagatttatagaaatttggaatttagtcttcatgcaatttgaacaaatttcaaaagacaaaagaattaatcttcctaaaccgtcagtagacacagggatgggtttagagagaatttcagctcttcttcaaggtactcatgataattatgctactgaccattttaaaactcttatagaggcatcttcaagtttgacaaaaacaaaggttactaaagaaaatattgcaagtcacagagtaattgctgaccatcttagagcaagctcttttttaattgccgaaggtgttttgccatcgaatgaaggcagaggttatgttttaagaagaataatgagaagaggaatgagacactcgcatacactaggaagtaaagagccaattttccataagatgatacctacgctaataaaagaaatgtcagattcttatccggagctaaagagagcagaaccactaattactgagacgttaaaaaatgaggaagaaaaa

SEQ ID NO: 306507 - DNA, 840 bp, Unknown
  Bacterial polypeptide expressing nucleotide sequence isolated from the Sargasso Sea
gttatagctgatcacttaagagcaagctcttttttaattgcagaaggtgttttaccttctaatgaaggaagaggatatgtacttagaagaattatgagaagaggaatgagacattctcacctattaggatccaaggaaccagttttttataatttgtttgatacccttaaaaatgaaatgtcaggaaattatccagagcttgtaagagctgagtcgttgattaaagaaactttaagaatggaagaagaaaaattcttagttcttcttgatagaggaattaaaattttaaatgatgaaatttctaagattgataaagttttaccaggtgaggtggcatttaaattatatgacacatatggatttccgttagatcttactgaagatattttaagaaataaatcaatgtccattgatacagaaaaatttaaaaccttaatgaaacaaagtagagaacttgctaaaaaaaattggaaaggttcaggagatgctgctgttgaagatatttggtttgggattaaagatcggttagagccaacagaatttttaggttacgaaaccaatcaagctgaaggtgttgttttgtctttgttaaaggaaaataaggaagttgatcaattgaaagaaaatgatgagggaatgattatagtaaaccaaaccccattttatggagagtctggaggtcaagtaggggatactggtgagattatatcaaatgaatttaaatttgaggtaacagatgttcagaaaaaacttggggacttatttgtacattatggaaaagtagttagtggttccataaagctaaaagacagtgttgaaatgaagataaatgttgaaaga

SEQ ID NO: 306508 - DNA, 715 bp, Unknown
  Bacterial polypeptide expressing nucleotide sequence isolated from the Sargasso Sea
aattatgataatgatctttttttgccaattatcatagcactccaagaaatcgcaggctcatcttacagtagtaatccaatacctcatcgcgtcatttctgatcatattagaatgttatgtttttctattgctgatggtgcccttccatctaatgatggtagaggatacgtattaagaagaattttaagaagagcttcaaaatttggaagaaatattggtttagagaatccatttctattccagcttgtatctgtagtcggtgagattatgaaagatgtttttccagaaattttggaaaaaaaatctcatattgaaaaagtaattctatcagaggaagaatcatttaataatgctcttgaccgaggtctacatcattttgaaaaaaatattaaatcattaaaaggaaaaacgatcagtggcgagcaggcatttaaattatatgacacatatggttttccactagaccttactgtgcttttggccaaggaaaaaaatatggtagtggatatggatggcttcgagagttgtatggatgatcaaagaaagaaagcaaaagcaaagggtaaattttccacagtgtctgatgaattaagttgggaaatattatctgaggatgatgattcgaaatttttaggatatgacataactgatacaatatcagagattactcgtttttgtacaaaaggagataatttgacataccttattcttaatc

SEQ ID NO: 306509 - DNA, 835 bp, Unknown
  Bacterial polypeptide expressing nucleotide sequence isolated from the Sargasso Sea
tccaggattagaaaaaagagattacgtaagagctacaacttcacaaaaatgtgtaagggcaggtggtaagcacaatgatttagagaatgttggttacacgccaagacaccatacattttttgaaatgttgggaaatttttcttttggtgattattttaaagagcaagcaattcactatgcatgggatttaataacaaaagtttttggaatagataaaaatagactttatgtaactgtttttcatgaagatgatgaagcctttaatttttggaagaaaatagcgggttttagcgatgacagaataattagaattgatacatcagataatttttggtcaatgggtgaaacaggtccttgtggaccgtgttctgaaatattctttgatcatggtgatcatttacctggaggattaccagggtctaaagatgaagatggagataggtttatagaaatttggaacttagtattcatgcaatttgaacaagttactaaagataaacgaattaatcttccaaaaccttctgttgatactggaatgggattagagagaattgctgctttattacaaggatcacatgataactatgaaacagatcattttaaaaaaataattggttctgcatctgaaattaccaaagttaagtctgacaaatctaatttagcaagttttagagtaatagctgatcacttaagagcaagttcgtttttaattgctgaaggcgttttaccttcaaatgaaggaagaggatatgttcttagaagaattatgagaagagggatgagacattctcatttacttggatctaaagaaccagttttttacaattttgtttga

SEQ ID NO: 306510 - DNA, 928 bp, Unknown
  Bacterial polypeptide expressing nucleotide sequence isolated from the Sargasso Sea
actcaaaaaggatccttagtaagtccagatcgacttagatttgactttagtcacaataagcctatcgaaaaagacgaaatggttaaaataaataaaattgttaatgaaatagtagagggcgcaagtgaagtgcaaacaagaattatgacacctaaagaagctattagtttaggagccttagctttattcggtgaaaagtacggtgatgaagtcagagtagtttttatgggaaaagaaaagaatggtttcttttctacggaactttgcggtggtacacatgtaaaaaacacaaaagaaattgggaaatttaaagtaataaatcagtcatcgatagcctcaggaattagaagagtagaggctttaagaaataagaaactcaaagattatgaaaaattacttaaaaaagataagtctttaaaagaaaaaaatcttaaaaaccaagttgatttaattaaaaatgatttattaaaacttaaagttaaaccagattttaaagataacattgatttatcagaaaacttaaaaaatcttaacaaacaattagaaaaaattaaaattagaaacataattgaagataaaaataaaaacattgtaaaagataaaaaagttaatagttttttattcagacaacaggttttaaaagatttcccgccaaaagaattaagaagcgtaattgatataggaaaaaaagatattaaaaacggtattgtagttagcatttcaacttttgaaggcaaagtcggagtagccattggtttaactaaagaactaaccaaaaaatttgatgccgttcaacttgtaaaattagcttccgaagttcttggaggaaagggtggaggaggtagaaaagattttgcacaagccggaggatctcaaaaagaaaagattgaagaagtttttaaaattttgattgataaaattagttaag

SEQ ID NO: 306511 - DNA, 809 bp, Unknown
  Bacterial polypeptide expressing nucleotide sequence isolated from the Sargasso Sea
aggctatgaatttgataaagctgaaggaatggttttaaaaatatcaaaaggtaataatttttttgaaaatgcaaaaaagggtgatgacgttgaaattataacaaatcaaacacctttttatgctgagtcaggcggacaagttggggatcaaggaattatctcaaattctaaatgtaaaattaatattaaagatactcaaaaaaaaatgggcgatctatttgttcattatggaacagttgaaaaaggatcttttaaagttggagatactgtaaatcttgaaatacatattcaaaaaagaaacaattcaagagcaaaccactctgcaacacatttacttcatgaatctttaagaaggacacttggtaaacatgtaactcaaaaaggatcactggtaagtccagatagacttagatttgactttagtcacaataaaccaattgaaaaagatgaaatgattaaaataaataagattgttaatgaaatggtgcggggtgcaagtgatgtacaaacaagaattatgacacctaaagaagcagtaagtttaggcgccttagctttattcggtgaaaagtatggtgatgaagtaagagtagtttttatgggcaaagaaaaaaatggtttcttttcaactgaattatgtggtggaacacacgtaaaaaacacaaaagaagttggagaatttaaagtaattaatcagtcatctatagcctctggaataagaagagtagaagcattaagaaacaaacaacttcaagattatgaaaaatcacttaaaaaagacaaatctttaaaagaaaaaaatcttaaag

SEQ ID NO: 306512 - DNA, 833 bp, Unknown
  Bacterial polypeptide expressing nucleotide sequence isolated from the Sargasso Sea
ggtcttgaagatagctgctttgctgcaaggaacacatgacaactatgaaactgatcatttcaaaaaaattattaatgcaatagccgaaacagttaaaaagaaaccagatcaaaataatatttcaagttttagagtaatagctgatcatttaagagctagctcatttttaattgcagaaggagttttgccatcaaatgaaggaagaggatatgttcttagaagaattatgagaagaggtatgaggcattctcatttattaggatcaaaggaaccaattttttttaatatatttaaaactttgatggatgaaatgtcaggtaactatccagaaattaaaagagctgaagcattaataaaagaaactttaaaaatggaagaagaaaaatttttagttcttcttgatagaggaatgaaaatattagaggaagaaatttccaaaatagataaaattttaccgggtgaagttgctttcaaactttatgatacatatggattccctttagatttgacccaagatattttaaaaaataagtcactgcaaattgataatcaaaagtttgatcaattaatgaagcaaagtaaagagcttgctaaaaaaaattggaaaggatcaggtgatagtgccgttgatgatatatggttttcaattaaagataaattgggaccgacagaatttcttggttatgaaacagatcaggctgaaggagttatacaaactttaataaaaaacaatgaacaagtaaaatcattaaagaccggtgatgagggaatgattattgttaatcaaacacctttttatggtgagtcgggtggtcaagttggtgattctggag

SEQ ID NO: 306513 - DNA, 922 bp, Unknown
  Bacterial polypeptide expressing nucleotide sequence isolated from the Sargasso Sea
ccctcataatgatccaacgcttatgtttgcaaattctggaatggttcagtttaaaaatatttttactggcaaagaaaaacaaaattataatagagctgtgacttctcaaaaatgtgtaagagcaggtggaaaacacaatgatttagaaaatgttggttatactgctagacatcatacattttttgaaatgttgggtaatttttcttttggtgattatttcaaagataatgcaatagaatttgcttggaatttaattactaaagaatttgggatagatcaaaagaagttactagttacagtttttagtgaagatgaaacctcatataatttgtggaaaaaaattgcagggttaaatgataagaaaataataaaaattaacacttctgataatttttggtctatgggcgatacaggtccatgtggcccttgttctgagattttttatgatcatggtgaaaaatattctggaggacctccaggtagtaaggatgaagacggtgatagattcatagaaatttggaatttagtttttatgcaatttgaacagattagctcatctgaaagagttaatctacctaaaccatcaattgatactggtatgggtttagaaagaatatgtgcattattaaataacactaatgataattataaaactgatctttttattccattaattaataagtctattgatttacttaatgacgataatcaatcaaatagtccaagccatagagttatagcagatcatttacgatcatcctcatttttaattgctgatggtgtgatgccttctaatgagggaagaggttatgttttgagaagaatcatgagaaggggtatgaggcatgctcatactcttggaaataaagaaccaatctttgataaaatttttccaaccattattagatatattcaaagaatc

SEQ ID NO: 306514 - DNA, 703 bp, Unknown
  Bacterial polypeptide expressing nucleotide sequence isolated from the Sargasso Sea
agatttaattatagaaacgttaaaaaatgaggaagaaaaattctcatctcttttggaaagaggtatgaaaattttagatcagaatttagataaagttaaaaacaatattctgcctggagaaatagctttcaaattatatgacacatatggatttccattagaccttactgccgatattttgaaaagtaaaaatataaaagttgattcttctgcatttgataaagctatgctgaaaagcaaagagttagctagagctagctggaaaggatcaggcgataagtttgtagaagaaaaatggtttaaagtaagagaacaattgaacccgacagaatttttaggttacgaatttaataaagcagaaggaattgttttaaaaatattaaaagataataaatttgttgaaaatgcaaaagaaggtgatgtagttgagatcataacaaaccaaacacctttttacggcgagtctggaggtcaaattggcgacgaaggaattatttcaaatcctaaatgtaaaatcattataaaagatactcaaaaaaaaatgggagacctatttgttcattatggaacagttcaaaaaggatcatttaaagttggagataatgtaaatcttgaaataaatattcaaaaaagaaataattcaagagcaaatcattcagcaacacatttgcttcatgagtctttaagaagaacacttggtaaa

SEQ ID NO: 306515 - DNA, 868 bp, Unknown
  Bacterial polypeptide expressing nucleotide sequence isolated from the Sargasso Sea
tgaaaagaacaagcataaaattgtcgagtctagtaatttagttcccaataacgacccaacactaatgtttgctaattctggtatggttcagtttaaaaatgtatttacaggtttagaaaaaagggattatgtaagagccactacttctcaaaaatgtgtcagggcaggaggtaaacacaatgatcttgaaaatgttggctatacacctcgtcaccacaccttctttgagatgctaggaaatttttcttttggagattactttaaagaacaagcaattcattatgcttgggatttaatcactaaagattttggcattgataaagaacggctttatgtaactgtatttcacgaagatgatgaagccttcaatttttggaagaaaatagcgggttttagtgatgatcgtattattagaattgccacttcagacaatttttggtcaatgggtgaaacaggcccttgtggaccatgttctgaaatcttttttgaccatggagatcatttatctgggggattacctggttcgaaagatgaagatggggacagatttattgaaatttggaatttagtctttatgcaatatgagcaagtttcaaaagacaacagaataaatttaccaaaaccatctgtagatactggtatgggtttagagagaatagctgctttattacaaggttcacatgataactatgaaacagatcattttaaaaaaataattagttcagcatccgagattgtaaaagttaagtcagacaaatctaaccttgcaagctttagagtaattgccgatcatttaagagcaagctcttttttaattgcagaagggtgttttaccctcaaatggaaggaagaggatatgtacttagaa

SEQ ID NO: 306516 - DNA, 992 bp, Unknown
  Bacterial polypeptide expressing nucleotide sequence isolated from the Sargasso Sea
ggagatagatttattgagatatggaatcttgtctttatgcaatatgaacaaatttctaaagaaaaaagaattaatcttcccaaaccttccgtagatacaggcatgggtctggagagaatgaccgctgtgcttcaaggcacacacgataattatgagatagatcattttagaaaaataatggcatcatcatcagaaataactaaaacttccattaatgaaaaaactatagctagtcatagggttattgctgatcatcttagagctagtagttttttaattgctgagggaattttgccttcaaacgaaggtcgaggttatgttttgaggagaataatgcggagaggtatgagacatgcccattctcttggaagtaaatcaccactctttcataaactttttaatgttttgttaaatgaaatgaaaaatagctatccagaattaataaatggtaaagatcttataattgaaactttaaaaaatgaggaagaaaagttttcctcccttcttgaaagaggaatgaaaattcttgatgaaaatttgtccaaggtaaaaaataatactcttccaggatcaatagcttttaaattgtatgatacttatgggtttccggttgaccttactgcagatattttacgaacaaaaaatattaaagttgatagctcttcttttgaaaaagaaatggaaaaaagtaaagctttagcaagagcaaactggaaaggatctggagataaatctatagaagaaagatggtttaaaattagagaagaattaaaaccaacagaatttttaggttatgaatttgataaagctgaaggcgtagttttaaaattatcaaaagataataaatttgttgattatgcaagtgctggagataaaattgaaattataacaaatcaaacacctttttacggtgagtcaggtggtcaggtaggagatcaaggcattatctacacctctgagtgtgaaatcaatataatagatactcaaaaaaa

SEQ ID NO: 306517 - DNA, 811 bp, Unknown
  Bacterial polypeptide expressing nucleotide sequence isolated from the Sargasso Sea
tcaactccattttacggagagtctgggtggccaagtaggcgatcagggttatatttttaactcaaattgtaaaattaaaattaattatacacataaaaaaatgggagatttatttgttcattatggaaaagttgaaaagggttcaatttctattgggcaaagcgttaatttagaaattgatgttttaaaaagaaataatttaaaagcttatcattcagcaactcatttattgcatgagtcattaagaagaaccttaggaaagcatgtgacacaaaaaggatcattagtctctcctgaaaggttaagatttgattttagtcataacaaacctattgaaaaagaggaaatgactaaaataaataatatagttaatgaaatagtagagggttcttctgatgtgcaaacaagaataatgaccccaaaggaggcagttggcatgggtgctcttgcattatttggcgaaaagtatggcgaggaagtaagagtggtgtttatgggaaaagaaaataatggttttttctcaacagaattatgtgggggaactcatgttaaaaacaccagagaagttggcaagtttaaagtaataagtcaatcatctattgcatcaggagttagaagggttgaggcattaagggacaagcaattagaagaatacgaaaaaacacaaaaagaagataaatcccttaaagaatctaatctaaaaaaagatataaaattaattgaaaatgagctacaaaaattaaaaattgaacctgattttaatgaagatttagatttgtctgaaaatttaaaaaatttgaataaacagctg

SEQ ID NO: 306518 - DNA, 848 bp, Unknown
  Bacterial polypeptide expressing nucleotide sequence isolated from the Sargasso Sea
catggccgccgccgaatcgtcgccttctgcagcgtcagcgccccgcagcggggaggacatccgagaggcttttctgagcttctatgccgagcgcggtcaccagcgcatggccagcgcctcgttgattcctgaagatccgacggtgctgctcaccatcgccggcatgctgccattcaagccggtgtttctggggcagcagcagcggccggcgccgcgggccaccagttcgcagaagtgcattcgcaccaacgacatcgaaaacgtgggccgcacggcgcggcatcacacctttttcgagatgctgggcaacttctcgtttggggactacttcaagcagcaggcgatcgaatgggcctgggaactcagcacccaggtgtatggcatcgatcccaggaatctggtggtgagtgtgttccgggaggacgacgaagccgagcagatctggcgcgatgtggtgggagtgaaccccaaacggatcatccgcatggatgaggccgacaacttctgggcctccggccccaccggcccctgcggcccttgttcggagatctactacgacttcaacccggaactgggggatgagggcatcgatctcgaggacgacgaccgttttatcgagttctacaacctggtgttcatgcagtacaaccgcgacgccgagggcaccctcacgccgctggccaaccgcaacatcgacacgggtatgggcctcgagcggatggcccagatcctgcagaaggttcccaacaactacgaaaccgatctgatctttccgctgatccaggcggccgcggatctggcgggggtcgactaccaccagctcgacgagaagggcaagacgtcgttga

SEQ ID NO: 306519 - DNA, 599 bp, Unknown
  Bacterial polypeptide expressing nucleotide sequence isolated from the Sargasso Sea
tatggcagacaaatcactcaatgaaataagaaatacttttctaaagtattttgaaaagaatgagcataaaattgttgagtctagcaatttagttcctaataacgatccaacattgatgtttgctaattctggaatggttcagtttaaaaatgtttttacaggtttagaaaaaagagattacttaagagctactacttctcaaaaatgtgtcagggctggaggaaagcataacgacctcgaaaatgttggttatacacctcgtcaccacactttctttgagatgctaggaaacttttcatttggagattattttaaagaacaagcaattcattacgcttgggatttgatcactaaagattttggcatagataaagaccggctttatgtaactgtatttcacgaagatgatgaagccttcaatttttggaagaaaatagggggttttagcgatgacagaattataagaatagcaacttcagacaatttttggtcaatgggggaaacgggtccttgtggaccttgttctgaaatcttttttgaccatggagatcatttacctggaggattaccaggttctaaagatgaagacggggatcgat

SEQ ID NO: 306520 - DNA, 965 bp, Unknown
  Bacterial polypeptide expressing nucleotide sequence isolated from the Sargasso Sea
tatgacttcggcacaacttcgccgcgctttcctggacttttttgccagtaaaggccaccaaatcgttagcagcagttcactgatcccaggtaatgatccaaccttactcttcaccaacgctggtatggtgcagtttaaagacgtgtttttaggccaggacaaacgtagctataaccgcgctgtcacagcacaacgttgtttacgcgccggcggtaagcacaacgatttagaaaacgtaggttacacagcccgtcaccataccttctttgaaatgttaggtaacttcagctttggtgattatttcaaacaggacgctattcaatacgcctgggaatttttgactgaagtggtcaagctgccaaaagaaaaactctggatcactgtctacgccacagacgatgaagcttttgatatctggaccaaacatattggtgtgccagtagaacgtgcgattcgtattggtgataacaaaggcgcaccttatgcttcggataacttctgggctatgggcgacacaggtccttgtggtccttgtactgaaattttctacgatcacggcgatcacatctggggtggcccaccgggttcagctgaagaagatggtgaccgttttattgagatctggaacaacgtctttatgcagtttaaccgtcacgccgatggccggatggaacctctgccaaaaccaagcgtcgatacaggcatgggcctggagcgtattgcagctattttgcaaaacgtgcacagcaactacgaaatcgacacctttgcggcgctgattaaagccactgcagctatcacaggcgcgactgatttaaacgacaagtcattacgtgtggtcgccgaccatatccgcagctgttcttttttagtggctgacggtgtgatgccatccaacgagggccgtggttatgtgctgcgtcgtattattcgccgcgctatccgtcatggtaacaagctgggcg

SEQ ID NO: 306521 - DNA, 763 bp, Unknown
  Bacterial polypeptide expressing nucleotide sequence isolated from the Sargasso Sea
atgaattcaaatcagataaggtcgacatttctcaattattttaaaaaaaatggacatgagattattcattcaagctcgttattaccagataatgaccctactctaatgtttgctaactctggaatggtacaatttaaaaatatttttacaggaaaagagacaagaaattatagtagagcgactactgctcaaaaatgtgtaagagcaggcggtaagcacaatgacttagaaaatgtaggatacacgacaagacatcatactttttttgaaatgttaggtaatttctcttttggagattattttaaagaattagccatagagctagcttggaaactaattactaaagaatattcaataaataaagatagactattagtaactgtttattctgatgatcaggaagcttttgatttatggaaaaaaatagctggtttatctgaaaataaaattattaaaattagtacatctgataatttttggtcaatgggtgaaactggtccttgcggtccttgttccgaaatattttatgatcatggtgataaatacgaaggtggccctccaggttctccaaacgaagatggtgatagatttatagaaatatggaatttagtttttatgcaatatgagcaaatatctaagtctgagagaataaatctaccaaaaccctcaattgatactggaatgggattggagagaatgacagctcttctagatggatctaatgataattattcaacagatttatttcaaccgattataaatg

SEQ ID NO: 306522 - DNA, 760 bp, Unknown
  Bacterial polypeptide expressing nucleotide sequence isolated from the Sargasso Sea
tgataaagttttacctggtgaggtggcatttaaattgtatgacacatatggatttccactagatcttactgaagatattttaagaaataaatcaatgtccattgatacagaaaaatttaaaagcttaatgaaagaaagtagagagcttgctaaaaaaaattggaaaggttcaggagatgctgctgtagaagatatttggtttgggattaaagatcggttagagccaacagaatttttaggttacgaaacaaatcaagctgaaggtattgttttgtctttgttaaaagaaaataaagaagttgatcaattgaaagaaaatgatgagggaatgattatagtaaaccaaaccccattttatggagagtctggaggtcaagtgggagatactggtcagatcgtatcaaatgaatttaaatttgaggtgacagatgttcagaaaaaacttggagacttatttgtgcattatggaaaagtagtcagtggttctattaagctaaaagacagtgttgaaatgaagataaatatcaaaagaagagatgatactagagcgtatcactctgcaactcaccttttacatgaatctttaagaagagtattgggggatcacgtaacccaaaaaggttctcttgtcgagcctagcagattgagatttgattttagtcatatgaaaccaatccaaaatgatgaaattgataagatagagaactatgtgaacaatatggtttcaaaaaattcagatgtaaaaactaggttaatgaca

SEQ ID NO: 306523 - DNA, 954 bp, Unknown
  Bacterial polypeptide expressing nucleotide sequence isolated from the Sargasso Sea
gcgatttcttccaagaacttaacactgggagctgaagccattaaggaaacactctacaatgaggaaattaaatttagagaaactctaagtaaaggccttgagatacttggacaagaaataccaaatataaaaaataataaattagatggcaaaattgcttttaaattatatgacacctttggtttcccccttgatcttacacaagattatttaagatcaaaggatatcgatgttgatgtagagtcctttgatgcatcaatgaagattcaaaaagaagaagctagatcttcatggaagggtagcggtgacggtaatattgaaaagctatggtttgatattgctagaaaaacaaaaccaacagtatttaaaggatataaagatactactttaaaggcaactgtgactgcattggtcttagacttagaagcggttgatgagttaagcgataaaacaaaacaatcagcaattatcacagatgaaacatgtttttatgcagagtctggtgggcaagttggagataaaggcataatttcctcagaaaatgccgaatttagagtaacagatactagaaaaactcctcaaggcatttttattcattttggtaatataatttcaggtaattttaaaataggacatgaggttaaacttaaaattgatacgagtttaagggatcttataaaaaaaaatcactctgccacacatttgcttcatgccgctttgaggaataatttaggacttcacgtagctcaacgtggatctttagttaatgagaataaattacgttttgactttagtcataataaacaaatttcatcaaatcaaatagatactattcaaaaagaggtaacaaatataatttctaattcttgtgaaacaaaaattgatattaagtctcaagaagaggccatacaactgggggctattgctttgtttggagaaaatatggagaaaagg

SEQ ID NO: 306524 - DNA, 382 bp, Unknown
  Bacterial polypeptide expressing nucleotide sequence isolated from the Sargasso Sea
atggcaacttctcctcttacaacgaatgaagtaagaaagatttatttagacttttttgaagagaaaggtcacacactcgtcgagagtgcttcattggttccattgaatgaccccaccttgttattcatcaatgccggaatggcaccttttaaagatcttttattaggagtggaaaaaagaaattatacaagagcggtcagttcacaaaggtgtatgcgggcaggtggaaagcacaatgatcttgataatgtcggttataccgccagacaccataccttttttgaaatgctcggcaattttagttttggagattacttcaaagaagatgcaatttcttttgcatgggaacttttaacagaaagatacaagatagatccaaaaa

SEQ ID NO: 306525 - DNA, 463 bp, Unknown
  Bacterial polypeptide expressing nucleotide sequence isolated from the Sargasso Sea
catgaattctagtgaaataagatccacatttttaaattatttcaaaaaaaatggacatgaaatagttcattcaagtccacttatcccacataatgacccaactcttatgtttgcaaattcaggaatggttcaatttaaaaatatttttactggtaaagaaaatagagattataatcgtgctgttacatctcagaaatgtgtaagagcaggtggcaaacataatgatttagaaaatgtaggatataccgcaagacaccatacattttttgaaatgcttggaaatttttcttttggagattattttaaagatgatgcaataaaattttcatgggatttaattacaaaagaactaggcatagataaaaaaaaattattagttacagtttataaagaagatgatgatgcttacaatttatgggaaaaaaatttgcgggtttggatgatgataaagttattaagataa

SEQ ID NO: 306526 - DNA, 953 bp, Unknown
  Bacterial polypeptide expressing nucleotide sequence isolated from the Sargasso Sea
attgggcgaaattttacttacagatgttagaaaaaaattcttagattatttcaaaaagaataatcataaaattgtagactctagcaatctagttccaaacaacgaccctactctgatgtttaccaactcgggaatggttcaatttaaaaatgtttttaccggcttagaaaaaagagattacaaaacagctacaacatctcaaaagtgtgtaagagcaggagggaaacacaatgatttagaaaacgtaggatacacacctagacaccacactttttttgaaatgttaggaaatttctcctttggagattattttaaagaacaggcaattattcatgcttggagcttattaactaaggattttcaattgcctaaagaaaaactttctgtaacagtttttcatgaagatgaagagtcatttaaactttggaaaaaaatagcaagtttaagtgatgataaaataataaaaatagcaacttcagataacttttggtcgatgggggatactggtccttgtggaccttgttcagaaattttttacgatcatggtgaaaaattaccagggggaccaccaggaagtccagatgaagatggagataggtttattgaaatatggaatttagtattcatgcagtatgagcaaatatcaaaagaaaaaagaattgatttaccaaaaccttcagttgatactggaatgggacttgagagaatgacagctgttcttcaagggactcatgacaattacaagatcgatcactttaaaaaaattatggacgcatcttccgatttattgaagtctcctataaatgcgtcaactattgcaagtcatagagttattgcagatcattttagagctagcagttttttaattgctgaaggaatattgcctttctacgaagggcgtggatatgttttaagaagaattatgagacgtgggatgagacatgctcattctt

SEQ ID NO: 306527 - DNA, 827 bp, Unknown
  Bacterial polypeptide expressing nucleotide sequence isolated from the Sargasso Sea
aatagaagagattgtaaacaacatggtgtctaaaaactctgaagttaaaactagattaatgacacctgatgaggccgtagaaaacggtgctttagcattatttggtgaaaaatacggtgatgaagtaagagttctttcaatgggagacgaggatggaaagtatttttcaacagagttgtgtggtggaacacacgtcaaaaacactggagatattggtaaatttaagattgtcagtcagtcctcaattgctgcaggggttagaagaattgaggctttgagagacaaacaattggaggaatatttaaaaaataaagagaaattatcaaatctatctgcagaaaaagatgaggaaactattaaagatttaagtcagcaaattattaagttgggaggaaaaccaagtttagaggaaacagatcaaaaaactttaataaagaatttgaacaaacaattagagaccatatcagtaaatacaattttagaggataaatctaaaaatattattaaagacgaagaaattaatggagttaagttaagacttcaaaaaatagatggattacctccaaaagaattaagaaaacttgtagataaaggtaaaaaagatttaggtgaaggcattgtggttgtgtttgcaaataaagatgacaaggttggattagctgttggagtaacagacaatttaacaaacaagtttgatgcagtccaatttgttaaagttggatctgaaataattggtggaaaaggtggtggaggcagaaaagactttgctcaagctggtggacaggatcaatcaaaaattgaagaagcttttgaaaagcttaagagtt

SEQ ID NO: 306528 - DNA, 934 bp, Unknown
  Bacterial polypeptide expressing nucleotide sequence isolated from the Sargasso Sea
aggcgacaaggtaagtttcattttgataaaactccattttatgctgagagtgggggacaaattagcgataaaggtattggcaaaaaggaatcagggattattgaaatttttaatgttcaaaaaactaaagataatttttatttacaccaatctatagttaaaaaaggaatatttaaattgggagataagttggttcttgaaattaacactgattataggttctccatctcttctcatcattctgcaacacacattattcactatgcattgagaaatattctcggtactcatgttagacaagcaggttcattggttgaagattccagattaagatttgatttcagtcattttaacaatattgatgatataactataaaatccattgaaagattatgtaatgaaaaaataattgaaaattcgaaagttaccatcaatgaaaatgttgaatataaaaaagctattaaagaaggagctaatgcttttttcgaagagaaatatggagatttggtcagagttgttaagattggggattatagcatggagctatgtggtgggacacatgttaaaagctcaggtgatctaggatcgataacaatttcatcagaaaatagcatatcatcgggtattagaagaatcgaagcatacacctcgattccctcctataactttttattaaatttgagggacaagcttaatgtttcatcaagactattatcagcatctctcgaaaaagttcctgatgaaattgaaagattaaaaaaagaaaatatagagttaaagcataaaataattgaatttgagaaaagtatgagtaaaggcttagcaaatcaactcaaagaagatgccgtaataatcgagggtgtaaaggttatttcatttttaacaaatgatatgacagctaatgagctcaagtctttatgggatgaattaaagg

SEQ ID NO: 306529 - DNA, 520 bp, Unknown
  Bacterial polypeptide expressing nucleotide sequence isolated from the Sargasso Sea
tatggctaaaacattaaatgaaattaggtcagcatttttggattattttgaaaaaaatgatcataaaatagttgagtctagcaatttagtcccaaataatgacccaacattgatgtttgccaattcaggaatggttcaatttaaaaatgtgtttactggactggaaaagagagactatcaaagagctacaacatctcaaaaatgtgtaagagcaggtggtaagcataacgatctcgaaaatgttggctatactccaagacaccacacattttttgaaatgctgggaaacttttcttttggcgattattttaaagaaagagctattgaacttgcgtggaatttaataacaaaagaatttggtttagataagaacagactttatgtaactgtctaccatgacgatgatgaagcctttaattactggaaaaagattgctgggttaagtgaaaataaaatcataaggatagcaacatctgataatttttggtctatgggtgaaacaggaccttgcggcccttgt

SEQ ID NO: 306530 - DNA, 784 bp, Unknown
  Bacterial polypeptide expressing nucleotide sequence isolated from the Sargasso Sea
catgaaaaattcaaagcaaatacgacaggaattcatctctttttttgaaaaacgaggccatcgttttgtacgcagtgcccctgttgttccaaatgacgaccctaccctacttttttcaaattccggaatggcacagtttaaagatgtgtttttaggtactggaatacgagattacaaccgtgcggttaattcacaaaaatgtataagggccagcggcaagcacaatgacctggaagatgtgggatatgataattaccaccatacattttttgaaatgctagggaactggtctttcggagactattttaaaaaagaggccatagaatgggcatgggagttaatgactgatcaatgggggctgccaaaagagaaaatgtgggccactgtttttgctggtggagacggtgtagaagctgatgaagatgctgagaacctctggaagacctgtacagatattgcttcagaacagattctgcgtttcgacaaaaatgacaatttctgggaaatgggtgaagtaggtccgtgtggtccttgttctgaactgcatatagatctgggtcatggcacatgcccactctcagacaagcatgtatgtgcagtcaaccttgaaggttgctggcggtttgtagagctttggaatctggttttcattcaatatcagcgtttttcggatggacacctggaagagctttcagcccagcatgtagataccggaatgggattggaaagaatttgccgagttcttcaggatgctgatttcaattacagtacagatctttttgta

SEQ ID NO: 306531 - DNA, 931 bp, Unknown
  Bacterial polypeptide expressing nucleotide sequence isolated from the Sargasso Sea
gctactcatttgttacatgagtcattaagaagaactttaggaaaacatgttactcaaaagggttcattagtttcaccagacaggctaagatttgattttagtcataataagcccattgaaaaagaggaaatggaaaaaataaataatattgtaaacgaaattgtagttggttctacagatgtacaaactagaataatgacaccaaaagaagcagtaaacatgggagcattagcattatttggtgaaaaatatggcgaagaagtgagagtggtttttatgggaaaggaaaataatggatttttctcaacagaattgtgtggaggtacacacgttaaaaatactaaagaggttggcaaatttaaagttataagccagtcttcgatcgcctcaggtgttagaagagttgaggcattaagagataaacaattagaagattatgaaaaagcacaaaaactagataaaactcaaaaagagtcaaacataaaagatgaaatagcattaattaaaaaggaattacaaaaaataaaaataaagccagattataaagataatttagatttaattgaaaacttaaaaaatttaaacaaacagcttaacaaagtaaaaattgaaagtattaagaaagataaaagtaaaaatataatacaggacaaacaaattggaggtatattaattcgagagcaaattttaaaagattttcctcctaaagaattaaggggaattattgatcaaggcaaaaaagagattaaatcaggtgttattataagcatttctacttttgaggacaaagttggagttgctataggaatttctcaagatcttacggctaaatttgatgctgtaacacttgttaagattgcatcagaaattttaggaggaaaaggtggaggtggaagaaaagattttgctcaagctggtggtgtcgatcaaa

SEQ ID NO: 306532 - DNA, 874 bp, Unknown
  Bacterial polypeptide expressing nucleotide sequence isolated from the Sargasso Sea
gctaaaaaaataaaaccaacaactttcgagggctataaagagacatctgtattagcaaatatatcagcattagttttagactctgaggaagttcaaaatttaagtgataatcttgaacaatctgcaattataactgataaatcttgtttttatgcagagtctggtgggcaagttggagacaaaggcacaattacttcagatactgctgaattcaaagtaacagatacaagaaagacccctcaaggtatatttattcattttggtaatgtgacttcaggaaattttaaaataggtcaagaagtcaaacttaaaattgatactagtttaagagaactcataaaaaaaaatcactctgctacacatttacttcacgctgcattaagaaataatttaggaacacatgtagcacagcgtggatctttagttaatgaaaataaattacgttttgactttagtcataataaacaaatatcaactgaacaaatagaaattattcaaaaagaagtaacaaacataatttctaactcttgtgaaacacaaattgatattaagtctcaggatgaggctattaaacaaggcgcaatggctttatttggtgaaaaatatggtgatgaagtcagagttgtaactcttggaaaaaataataataaaccctactcaattgaattatgtgggggaacgcatgtaacaaatgttcaaaatattaaaaaattccatattattagtgaagagtctgtttcttcaggagtgagaagaatagaagcttgtactggagatagggtggatgaatttattaataataaattaaaagaaagtaaattgcttgaaaaaaaacttgacgataaaattagagatttaatcacacaaataaata

SEQ ID NO: 306533 - DNA, 906 bp, Unknown
  Bacterial polypeptide expressing nucleotide sequence isolated from the Sargasso Sea
accatctattgatactggaatgggcttagaaagaatgacagcacttttggaaggatcaaatgataattattcaactgatttatttcaacctcttataaatgaatctaaaaatttatgcggtgatgaaaactctattaataatccaagccatagagtaattgctgatcatttaaaatcttcttcttttttaatagctgacggggttttaccttctaatgaaggaagaggatatgttcttcgaagaattatgagaagaggtatgagacatgctcactcattaggaaataaagatcctatatttcataaacttttccctacttttttagatggaattaaaaaatcataccctgaattggaaagagcaaaagatcttattaccaatacttttttgaatgaagaaactaaatttaaagaaactgttgaaaagggtattaaaattttagaagaagaaatctctaattcaacaaatatatttgatggagaggttgcatttaaattatacgatacatatggctttccactagatttaactcaagattatttaaaaaatagaaatattaaggttgatttaaaaaccttcgataagaagatgttagatcaaaaacaaagagctagaaaaaattggaaaggaacaggagatattcaggatgataagatttggtatgaaataacttctgaaatagagccaacagaatttttaggctatcaagatatagcatcagaaagtaaaattttagcaataatatctaatggaaagaaaataaatatcattgaaaagaatcaaaatggattcattatattaaatcaaactcctttttatggtgaaagcggtggtcaagtgggtgataaaggttttttagaaaatgataattttaaatttgaagtgttaaatacaacaaaaatatt

SEQ ID NO: 306534 - DNA, 877 bp, Unknown
  Bacterial polypeptide expressing nucleotide sequence isolated from the Sargasso Sea
cctcctggaagtttagaccaagatggagatagatttattgaaatttggaaccttgtatttatgcaatttgaacaagtctctaatgataagcgaattgatttgcccaaaccatcagttgatacaggaatgggtttagagagaataacagctgtactgcaagggactcacgataattatgaaatagaccacttcaaaaagctaatttcagcatcatctgaaattactaatactaaaatagacaatcatacaatcgcaagtcatagagtcattgccgatcatttaagagcaagtagttttctaattgccgaaggtgttttaccttctaatgaaggacgaggttatgttcttagaagaattatgagaagaggtatgaggcatgcacatacactaggatgtaaaaaaccaattttctttaaattatttgatgttcttttaaatgaaatgtcaaagagttatccagaactaaatacaggaaaagatctaattttagaaacattaaaaaatgaagaagaaaaattttcatctcttttagatagaggaatgaaaattttaaatcaaaatttgcaaaaagttaaaaataatattttacctggagaaatagctttcaagctttatgatacatatggtttcccgttagatcttactgctgatattttaaaaaataaaaatataaaagttgatacctctgcatttgacaaagcaatgaaaagtagcaaggagaaggctagagcaagttggaagggttcaggtgataagtcggtagaggaaaaatggtttaaagtgagagaagaattaaatccgacagaatttttaggtttcgaacttgataaagctgaaggagtggttttaaaaatatcaatgggtaataaatttgtag

SEQ ID NO: 306535 - DNA, 934 bp, Unknown
  Bacterial polypeptide expressing nucleotide sequence isolated from the Sargasso Sea
cagaatgatccaacacttatgtttgctaattcaggaatggtgcaatttaaaaatgtttttactggattagaaaatagagactacaaaagagcagttactgcacaaaaatgcattagagcgggtggcaaacataatgatctagaaaacgttggatatactttgagacatcatactttttttgaaatgttaggaaatttttcttttggagattattttaaagatgatgcaattaattatgcctggaagttcattacatctgatctcgctataaataaagagaaactatgcgttacaatttatcatgatgatgaacaagcatatgttgcatggaaaaaagttgctggccttagtgatgacaggataattagaatttcaaccaaggataatttttggtccatgggtgaaacaggcccatgtggaccttgctctgagatattttatgaccatggtgagaaatttaccggaaagttacccagtgaaactgacgaaactggcgacagatttgttgaaatatggaatctagtttttatgcaattcgaacagttgaattcgaacgagagaattgatctgcctaagccctcaattgatacgggtatgggaattgagagaattgccgctgtcatgcaaggcacaaatgataactaccaagttgatagcataaaagaaattattaacaattcaatagatctaactaaagctgacgacaataagttagtatcaagtcatagagtgattgcagatcatctacgttcttcatgttttttaatagctgatggcgtattaccttctaatgagggaagaggctatgtgctgagaagaatcatgagaagagcgatgcgacatgttcatctgcttcaatacaaagatactttaatgcataaattagtctcaaccttgatgcttaacatgaaggacgcttatccagaatgttaag

SEQ ID NO: 306536 - DNA, 906 bp, Unknown
  Bacterial polypeptide expressing nucleotide sequence isolated from the Sargasso Sea
caaaagttaaattcggataaatctaatctagcaagttttagagtaatagctgatcacttaagagcaagttcgtttttaattgctgaaggggttttgccttcaaacgaaggaagaggatatgttcttcgaagaattatgagaagagggatgagacattcccatttacttggatctaaagatcctgttttttataatttgtttgacactcttaaaaatgaaatgtctggaaattatccggagttagttagagccgaatctttaattaaagaaactttaaaaatggaagaagaaaaattcttagttctattagacagaggaataaaaattttaaatgatgaaatatcaaaaatagataaagttttgccaggcgaagtagcttttaaattatatgacacctatggtttcccgttggatcttaccgaagatattttaagaaataaatctatgtcaatcgatactgaaaagtttcaatctttaatgaaggaaagtagagaacttgctaaaaaaaattggaaaggttctggtgatacagcggttgaggatatttggtttggaataaaagataaattagaagcaactgaatttttaggatacgaaactaaccaagctgaaggtatcgtcttatctcttttaaaagataataaagaagttgatcaattaaaagtaaatgatgaaggaatgattatagtaaatcaaacccctttctatggtgagtctggtgggcaagttggtgatactggtgaaatagtatcaaatgattttaaatttgaagtaaccgatgttcaaaaaaaacttggtgatttatttgtgcactatggaaaggttaagagtggatctataaaattacaggaaagtgtagagttaaaaattaatgtagaaagaagagataatactcgtgcgtatcat

SEQ ID NO: 306537 - DNA, 973 bp, Unknown
  Bacterial polypeptide expressing nucleotide sequence isolated from the Sargasso Sea
  misc_feature (973)..(973): n is a, c, g, or t
agataaagtaggagcaactgaatttctaggttatgcaattgtccaatctgaaggtgttattttgaaattgattaaaaataataaagaagttgatagtttaaaaactggtgagaaaggagtgattgttgtaaaccagacacctttctacggtgaatctggtggtcaattaggagatattggaaaaataaatttaggtaataattcatttacagtcaatgatgttcaaaaaaagttaggaaatttatttgtgcattatggagtaatggaaggaggaagtttgaaagttggggaaagcgtggaattaaaaatagatagtgcgagaagagaaaatattaaagcttatcattctgcaactcatcttttacatgagtctttaagaagaactcttggaaaacacgttatgcagaaaggttccttagttgctccggacagattacgtttcgattttagccatatgaaaccgatatccaatgacgagatgctgaaaattgaggaaatagcaaacgagatagttaataaaaaatcggacgtaataactagaattatgacacctgaagaaggcattgagcatggagcattagccttatttggagagaaatatggtgacgaggtaagagtggtttttatgggagatgaaggtaacaaatatttttcaactgaattatgtggcggaactcacgttaaaaatactggagatgttggaaaattgaaggttattagccagtcatccattgctgcaggagttagaagaattgaggctttaagggataagcaattagaggactttttaaaagataaagaaaaacaatcaaatttatcagctcaaaaagatgagaagactattgaaatgttaactaaagatataatatcttttggtggtaagccaaatttagaaaacaaaaatcctaaagacttgattaaagatttaacaagacaactagagaaattatcaataggtaaaattctaaatgan

SEQ ID NO: 306538 - DNA, 280 bp, Unknown
  Bacterial polypeptide expressing nucleotide sequence isolated from the Sargasso Sea
atgagcgaaatcaggaagaaatttcttgattatttttccagaaatgggcatcaaaaattagaatctagtaatattgttccaaataatgatccaactctaatgtttacaaattcgggaatggttcagtttaaaaacgtttttacaggattagagaaaaaacccttcaaaacagcaacgacctctcaaaaatgtataagagcgggaggcaaacataacgatctagaaaatgttggttatacaccaagacaccacactttcttcgaaatgttaggcaactttt

SEQ ID NO: 306539 - DNA, 794 bp, Unknown
  Bacterial polypeptide expressing nucleotide sequence isolated from the Sargasso Sea
ggatatatctggatttgaaaaaaaattagatgagcaaaaggaatctgctagaaaaaattggtcaggctctggatcaaatctattagataaaatttggtatggaatcagtgaaaagatacctgcaactgaattcattggctacactagtgaagaatctgaagctcaaattcttggaatagttaatgatggtaaagaagttgacagtatttcaattaaaaatgactgttcgttaattctcaatcaaactgttttttatgctgagtctggtggtcaaataggagatacaggtatcattagctctgacgaaggtgaatttgaagttacagacactcagaaaagacaaaatttaataatacataacggtcgtcttaaaagtggcaatatgagtgttaatttgaatgttaatttaaagattgatcacgaaagaagaagttcatgtaaagcttaccattctgctactcatattctacatcaagcattaagagatacattaggagagcatgtgacacagaaaggctctcttgtttcatttgataagcttagatttgattttagtcatcataagccattgactaatgaagaactaaggcacgttgaaaaaattgcaaatgaagtgattaatagttcttctgatgttcaaactaaattaatgaaatcagatgatgctataaattctggagcattagcattatttggagaaaaatatgccgatgatgtcagggttctatccataggtattaaaaataacaatatttacagtactgagttatgtggcggaacacatgtaaataata

SEQ ID NO: 306540 - DNA, 890 bp, Unknown
  Bacterial polypeptide expressing nucleotide sequence isolated from the Sargasso Sea
gatttagataatataggctttacaaccaggcatcattcattttttgaaatgttaggtaattttagtttcggagactacttcaaagaggaagctattcattatgcatgggattttcttacgaataatttaaaacttgatagtaaaaaactttatgtttctgttcatgaatcagatgatgtatctaaggatatatggttgaacaatataaaagttgatcctgataaagtcttagttttaggagatgaggataatttttggcagatgggggatacaggaccatgcggcccatgcacagaaatatattatgatttgggcagtaggtatgatggagttcttcctactgagggagatcctaaagacagatacatagaaatatggaaccttgttttcacgcaatataataaaacttcttcaggtaatctcgaagaactgcctcaaaaatgtgttgatacaggaatgggcttagagagagttcaatcaattgttgaaggtttatctgataattatgattcttcaatttttctagatttaaataattttatagattcaaaacttaatcttaaagctaaagaaaaatatgtaaaaaagattctgctggatcatattcgtgcatgttgtcatcttatcggtgataatgttatccccgatagagagggaagagggtatgttttaaggcgtattctgagaagatcttcacgctttatatataaacacaatattaaagagccatttttatatcaatgtgcagaagttgtatgtgaaaaaagtaaagactttcctagcttaaaaaaagatattattaaaattgtagatactattaaaactgaagaaactaaatatcttaagactttaggtaaaggaatagatattatcgagagtcatctaaaaaa

SEQ ID NO: 306541 - DNA, 246 bp, Unknown
  Bacterial polypeptide expressing nucleotide sequence isolated from the Sargasso Sea
tatggcagacaaaacacttaatgaaataagaagtacttttcttaaatattttgagaagaatggtcataaaattgtggaatctagcaatttagttcccaataatgatccaacactaatgtttgcgaactcaggaatggttcaatttaaaaatgtttttactggtctagaaaaaagagattacaaaacagcaaccacatctcaaaagtgtgtaagagctggtggaaaacataatgatcttgaaaatgt

SEQ ID NO: 306542 - DNA, 466 bp, Unknown
  Bacterial polypeptide expressing nucleotide sequence isolated from the Sargasso Sea
tatggctcagaaatcattaaatcagataagagaaactttcttaaaatattttgagaaaaacgatcataaaattgttgagtcgagcaatttagttcctaataacgatccaacattgatgtttgctaattctggcatggttcaatttaaaaacgtatttacaggtttagagaaaagagactatcaaagagcaactacttcacaaaaatgtgtaagagcgggcggtaaacataatgatttagaaaatgttgggtatacaccaagacatcatacattttttgaaatgttaggaaatttttcctttggtgattattttaaagaaaaagcaattcattatgcatgggatttaattacaaaagattttggaatagataaaaataaactttatgtaacagtttttcatgaagatgatgaagcattcaatttatggaagaaaatagcgggttttagtgatgacaaaataataaag

SEQ ID NO: 306543 - DNA, 577 bp, Unknown
  Bacterial polypeptide expressing nucleotide sequence isolated from the Sargasso Sea
atgaaaacaaatgatgttagaactgcatttcttgattattttaagaataatggtcatgaggttgtgcgctcatctcctttagtaccacataatgacccgtcgctcctttttactaacgctggcatggtccaattcaagaatgcattcaccggtttggagaaacctaattataattcagctgctacttcacaaaaatgtgttcgtgctggagggaaacataatgatttagaaaacgttggctatactgctcgccaccatacattttttgaaatgctgggtaatttttcttttggtgattattttaaagaacgtgccatagagttagcatggacattaattactaaagaatttggtgtagattccaaaaggctgcttgttactgtctatcacgaagatgaagaagcctttaagatatggaaaaaggtagcagggttttcagaaaaccgtattatccgtatatctacaaatgataatttttgggcaatgggtgataccggtccgtgtggcccatgttcagagatattttatgatcatggagatcacattctaggtgggccagcctggcagtgccgatgaa

SEQ ID NO: 306544 - DNA, 860 bp, Unknown
  Bacterial polypeptide expressing nucleotide sequence isolated from the Sargasso Sea
tcttagaagaataatgagaagaggcatgaggcactcacacttacttggttccaaagaaccaattttttataatatttttaaaactttaatggaagaaatgaaaggaaactattcagagttacaaagagcagagtctttaattaaagaaactttaaaaatggaagaagaaaaatttttagtacttctggatagaggaataaaaattttaaataatgaaattacgaaaatagataaagttttacctggagaggtagcatttaaactttatgatacttatggttttccattagatttaactgaagatatattaaaaaataaatctttaaaaattgataatgaaaaatttcatgctcttatgaaagagagtaaagaacttgctaaaaagaattggaaaggttcaggagatagtgcaatagatgatatctggtttggcattaaggataaattaggttctacagaatttttaggatacgaaactaatcaagccgaaggagttgttatttcattgttgaaagataataaagaagttgaaattctaaattctggagatgaaggaatgattataacaaatcaaaccccattttatggagagtcaggaggtcaaattggcgacagaggtaaaattatctctggggagtttaaatttgaagtatcagatgtccaaaaaaaattaggcgatctatttgtacattatggaaatgttaaaaatggctcagtaaaattaaatcagaacgtagaaatgaaaattgatgttcaaaggagagacaatattagagcctatcattcagctacgcatttactacacgagtcgcttagaagagttttgggctcaccatgttactcaaaaaaggatctttagt

SEQ ID NO: 306545 - DNA, 933 bp, Unknown
  Bacterial polypeptide expressing nucleotide sequence isolated from the Sargasso Sea
acaggccagatgggccaggcctttccggaactgctgcgcgcccaagccctgatcacggaaacgcttgagctggaagaaacccgcttcaaacgcacgtgggatcggggcttgaaactgctcgcggaagaaacggagagcctgaatgtcggcggtgagctggccggcgaggtggcgtttaagctctacgacaccttcggttttcccctggacctcacccaggatgcgctccggcgcgaagggtacggtgtcgacctcgccgggttcgacactgaaatggaacgccagaaggccgaagcccgtgcggcttggtccggctctggcgaagcggcgacggaacaggtgtggttcgggctccgcgagcaagtgggcgccacggatttcctgggctacgacgcggacgacgcggaaggccaagtgttagccctcgtggtcgatggcgagtcagtgacggaagcctcggatggcgcagacgtggccgtgatcaccaaccagacaccgttctatggggaatcaggcggtcagcaaggggacaagggcgcgctttcaactgagggcgtgacggttaatgtctcagacacccagaaaaagcttggtgacttgcatgtgcatatcggcacggtttccggtggtacattaaaagtcggagatgacctacgcatgagcgtggacgcggatcgccgcacgtctctgcggtcccatcactctgccactcacctcctacacgcgacgttgcgccgggccttgggggatcacgtggcgcagaagggttccctcgtggcggaggaccggttgcgttttgacatcagccaccccaaacccatcgcggcggaagaactctccgagatcgagagggccgtgaactaccagatacgggtgaacagtgacgtgaccacccggctcatgactcccgacgaagcagggaagccggcgcgc

SEQ ID NO: 306546 - DNA, 454 bp, Unknown
  Bacterial polypeptide expressing nucleotide sequence isolated from the Sargasso Sea
tatggcaaaaacattaaatgaaataagaactacatttctcaaatattttgagaaaaatgatcataagattgttgattcaagcaacctagttccaaacaatgatcccactttaatgtttgcaaattcaggcatggttcagtttaaaaatgtatttacaggattagaaaagagagactatcaaagagcaactacttcacaaaaatgtgtaagagcaggtggaaaacataacgatttagaaaatgttggatatacgcctcgccaccacacattctttgaaatgttgggaaatttttcttttggggattattttaaagaaagagcaatagaacttgcttggaatttaataactaaagattttgggatagataaaaatagactttatgtaacagtttttcatgaagatgaagaggcatttaatttttggaggaaaatagcaggttttagtgatgataga

SEQ ID NO: 306547 - DNA, 894 bp, Unknown
  Bacterial polypeptide expressing nucleotide sequence isolated from the Sargasso Sea
ttcgagcgtgagatgaaagcccagcgcgtgcgcgcacgttcggccagctcctttggcctggactacaacaccctggtcaaggttgacgtaccgaccgagttcaccggctacaaagccactgcgggctcggccaagatcgtcgccatctataaagacggcaagtcggtcgacgtgttgagcgaaggtgaagaggcggttgtggtgctggaccagacgccgttctatgccgagtcgggtggccagattggcgattgcggtttcctgagctcgacatccggtcgttttgatgtgcgcgacaccaccaagaccggcggggctttcctgcatcacggtgtgctggtgctgggcaacttgaccgtgggcgcaccggtagacacccaggtcgatgccgacgtacggcatgccaccgcgttgaaccactcggctactcacttgctgcatgccgcactgcgccaggtactgggcgagcacgtgcagcaaaaaggttcgttggtggacagccagcgcctgcgttttgacttcagccactttgaagcgatcaagcctgagcagatcaaggccctggaagacatcgtcaacgccgagattcgcaagaataccccggttgaaaccgaagaaaccgatatcgagaccgccaggaataaaggcgccatggcgctgtttggcgagaagtacggcgacgaagtccgcgtactgagcatgggcggcagcttctcggtagaactctgtggtggcatccacgccaaccgcaccggcgatatcggcctgctgaagatcatcagcgaaggtggtgtggcctcgggcgtacgtcgtattgaagcggtaaccggtgctgcggccctggcttacctcaatgcggccgaagaacaactcaaggaagcggccggcctggtc

SEQ ID NO: 306548 - DNA, 622 bp, Unknown
  Bacterial polypeptide expressing nucleotide sequence isolated from the Sargasso Sea
tgagtctttaagaaggaccttaggtaaacatgtgacccaaaaaggatcattggtttctccagaaaggttaagatttgattttagtcataacaaacctattgaaaaagaggagatgattaagattaataaagttgtaaatgaaatagttgaaggatctactgatgtacaaacaagaataatgacacctaaagaagcagttaaaatgggtgctttagctctttttggagaaaaatacggcgaagaagttcgagtagtatttataggcaaagaatctaatggttttttttcaacagagctttgtggaggaactcatgtaaaaaacacaaaagaagttggaaaatttaaagttattagccagtcatcaatcgcctccggggttagaagagtggaagctttaagagataaacaacttcaagagtatgagaaatttcaaaaacaagataaatttacaaaagaaaaaacaagcaaagatcaattagaaaaaattaaaaaagaactactaaggtataaaattaaacctgatttaaatgaaaacaaagacttagctgaaaatttaaaggttttaactaaacaactagaaataataaaaattcaaaatgttattaacgataaaaataaaaat

SEQ ID NO: 306549 - DNA, 874 bp, Unknown
  Bacterial polypeptide expressing nucleotide sequence isolated from the Sargasso Sea
aattgttgaaaaaggaaatataaaaacgggcgatgttataaaaatgagtgttgaaaaagaaaagagatctgctatagcaatccatcattcatcgacacacctggtgcatgctgcgcttagggaagttttaggcgaccatgtaaatcaaaaagggtctttagttgatgaaaataagttaaggttcgatttttcacataagcaacctttatctcaagaagaaattgcaaagatagaagctattgtaaataaagaagctctaaataatttagaagttaagactgagctgatgaaacttgatgacgctctaaaatctggagcaatggcactgtttggtgaaaaatatgatgatgatgtaagagttttatcaatgggtaataattcatattcagtagagttatgtggtggtactcatgttaagagaacaggggatataggattttttattattacgagtcaatcaagtgtagcttctggaataagaagaattgaagcagttgccgggatgaaatcgatagaacatataaataaaattcgagaaataaactcatctcttcaatctgtattaaatgtttcttcagaagatattcaagagaaaattaaatctttgatagaagaaaataaagaacttaaaaaaaaatcaggaaataaaaaatcaaaaaaatcagtagttttttctgagacttatgaaataaacgattggaagttgatagtagaacaagtagagattgatgatacaaaggatcttagagccttggttgatgatcaaaaaaatacgaatgaaaaagtatgtatcgtaattttaaatgcgtttaaaaataaggttgcattagtgtgcggcgtcacaaaaaatttaaccgattcattatcagcaaag

SEQ ID NO: 306550 - DNA, 844 bp, Unknown
  Bacterial polypeptide expressing nucleotide sequence isolated from the Sargasso Sea
ttcagcgactcacttgttacatgagtcattaagaagaactttaggaaaacacgtaacacaaaaaggatcattagtttcacctgagaggttaagatttgacttcagtcataacaaacctatcgaaaaagacgaaatatccaaaataaaccaaatagttaataaagttgtagagggctcatctgaagttcaaacaagaataatgactccaaaagaagcggtaagtatgggcgctttagctttatttggggaaaaatatggagacgaggtaagagtagtgttcatgggtaaagaaaataatggttttttctccactgaattatgtggaggtactcatgttaaaaatacaaaagaaataggaaaatttaagataataaagcaatcatctatagctgcaggagtaagaagagttgaagctttaagagataaacaattaaaagactatgaaaatcttgaactagtagaaaaaaaagagaaatcaaaggaagctttagaaacattaaaattattaatgaaaaaactaaaagaactaggcgaaaaaccaaaactgtctgaaaaagatataaatatttcagagcaattatttccaaaagttaaaattttatcagaacagctcaataaagcaaaaattaaatttattcttaatgatgccaaacagaatagaattaaagatattaaagtcaaaaattttattttacgttatcaagtattggatggattaaacaccaaagaacttagaaatgttatagatgcaggtaaaaaagaaataaaaaaaggaatagttttagcttttaaattattgaaaaaaagtaggagtagcagtaggcgtaacccaagatttaactga

SEQ ID NO: 306551 - DNA, 781 bp, Unknown
  Bacterial polypeptide expressing nucleotide sequence isolated from the Sargasso Sea
aattataatattaaatcaaacacctttttatggagaaagtggtggtcaggtgggagataagggttttttagaaaatgatagctttaagtttgaagttatgaatactacaaaaatatttggaagctattttcttcacaaaggtaaagtaattagcggtgaatgcgaaattgaagatactattaaagcaagcattaatacagtgaatagagattttattaaatataatcattcttcaactcatttattacatgctgctctaagaaaaatactgggcaagcatgtcacgcagaagggttcacttgtaaattcagaaaaacttagatttgattttagtcacaataatccaattgaaaaagatcaactcatgaatattgaggaaattgtaaatgctcaaattcaaaaaaatggaattgttgaaatcaaaattgtggatcaaaaaaaagctattgaagaaggtgcgatggcattgtttggagaaaaatatagcgatgaagtaagagtagtaacaatgagtcaagaaaatgaatcattcttttcaaaagaattatgtggaggaactcatgttgttaaattaggggaaataagtaaatttaaaataactaatcaatctagtgttgcgtctggaataagaagaatagaggctgtatctaatgttgcagtagataaatatataaaagaaatagaaataaatttattagaaaaaaataaaaaccaagataatcaaattgaagatttaaagaataaaattaaaaagattaacgctgattataatttaaaaatc

SEQ ID NO: 306552 - DNA, 928 bp, Unknown
  Bacterial polypeptide expressing nucleotide sequence isolated from the Sargasso Sea
ctttcaattgtatgatacttatggttttcctgtagatttaacttctgacatcttaagaacaaaaaacattcaagttgataatgttgcttttgaaaaagaaatggaaaaaagcaaaacattagccagagctaattggaaaggttctggagataagtcagtcgaagaaaaatggtttaaaattagagaagaactaaaaccaacagaatttttaggttatgagtttgataaagcagagggaattattataaaaatttctaaagataataaatttgtagatagtgctggtccaggaagtgaggttgaaattattacaaaccaaacacctttttacgctgagtccggaggtcaagttggagatcaaggaataatttttaactcagattgtaaaataaatatcactgatactcaaaaaaaaatgggagatctttttgttcataccggaaaaattgagtctggtacaataaaaattaatcaaagcgttaatcttgaaatcaatgttgaaaatagaaataattctaaagctaatcattctgcaacacatttactacatgagtctctaagaaggactttaggtaaacatgtgacccaaaaaggatcattggtttctccagaaagattaagattcgattttagtcataacaaaccgattgaaacagaagagatgattaaaattaataaagttgtaaatgaaatagttgatgaatcaactgatgtacaaacaagaataatgacacctaaagaagcagttaaaatgggtgctttagctctttttggagaaaagtacggtgaagaagttcgagtagtatttatgggcaaagaatctaatggttttttttcaacagagctttgcggaggaacacatgtaaaaaatacaaaagaagttggaaagttaaaagtcattagtcagtcatcgattgcttccggggta

SEQ ID NO: 306553 - DNA, 760 bp, Unknown
  Bacterial polypeptide expressing nucleotide sequence isolated from the Sargasso Sea
tttgacaaagctgaaggtgtaataattaaaatttcaaaagaaggtaaatttgtagactccgctagtactgaagatgaaatagaagtcataacaaatcaaactccattttatggagagtcaggcggtcaagtaggtgatcagggttatattttcaattccgattgtaaaattaaagtgaatgatactcaaaaaaaaatgggagatttatttgttcattatggaaaagttgaaaagggttcaatttctattgggcaaagtgttaatttagaaattgatgttataaaaagaaataattcaaaagcttatcattcagcaactcatttattgcacgagtcattaagaagaaccttaggaaagcatgtgacacaaaaaggatcattagtctctcctgaaaggttaagatttgattttagtcataataaaccaattgaaaaagaggaaatgaccaaaataaataatatagttaatgaaatagtagagggttcttctgatgtgcaaacaagaataatgaccccaaaggaggcagttggcatgggtgctcttgcattatttggtgaaaagtatggcgaggaagtaagagtggtgtttatgggaaaagaaaataatggtttcttctcaacagaattatgtgggggaactcatgttaaaaacactaaagaagttggtaagtttaaagtaataagtcaatcatctattgcatcaggagttagaagggttgaggcattaagggacaagcaattagaagaatacgaaaaaacgc

SEQ ID NO: 306554 - DNA, 607 bp, Unknown
  Bacterial polypeptide expressing nucleotide sequence isolated from the Sargasso Sea
tatgcaggatttttcaactaatcatatacgtaaaatatttttagagttctttcaagaaaaaggacatgagctagttgaaagttcttctttaatacctagtaacgacccttcgttactatttactaatgcaggaatggttccgttcaaagatatgcttttgggggttgaaaaaagagattattccagagcagtgagctcacaaagatgccttagagtaggtggaaagcatgatgatttagataacgtaggctatacagcaaggcaccatactttctttgagatgttaggaaattttagctttggagattattttaagaaggaagctatagaatttgcgtgggagcttttaactgaaagatacaacatccctgaagaaaagctttggataactgttcataaagacgatcaggaatcagaaataatttggattgaacagataggaattgatcccaataggttgtccaggttagatgacaatgaaaatttttggacgatgggtgacacaggtccatgtggtccttgtagtgagatttactatgatcatggagaacatattaaaggtgaaccaccaaaaattggatcagatcctggggatagatttatagaa

SEQ ID NO: 306555 - DNA, 532 bp, Unknown
  Bacterial polypeptide expressing nucleotide sequence isolated from the Sargasso Sea
gatgcttttaaaagatataagagaaacatttgtaaattttttcaaaaaaaatgatcatcaaatagttaaaagttcttctcttattccagataacgacccaacccttatgtttacaaattcagggatggtacagtttaaaaatttttttaccggtgttgaaaacccaaaagtaaaagcagcggttacatcgcagaaatgtgtgcgcgctgggggtaagcataacgatctcgacaacgtgggctataccgcaaggcaccatacgttttttgaaatgcttggtaatttttctttcggagattattttaaagaaagagctataaagttagcgtgggagcttttaactaatgaattcaatctacctaaagataaactcttagtaacagttttccatgaagattctgaagctataaagctttggaaaaaatgcgctaaccttcctgacgataggataataaaaatatctaccagcgataacttttggagtatggggcccggttggaccttgtggtccttgctcagagattttttatga

SEQ ID NO: 306556 - DNA, 286 bp, Unknown
  Bacterial polypeptide expressing nucleotide sequence isolated from the Sargasso Sea
atgaattcaaatcagataaggtcgacatttctcaattattttaaaaaaaatgggcatgaaattattcattctagctctctagtaccagataatgatcctagtctaatgtttgctaactcgggaatggtacaatttaaaaatatttttacaggtaaagaaacaagagattataatagagcgactactgctcaaaaatgtgtaagagcaggtggcaagcacaatgatttagaaaatgtaggatacacaacaagacatcatactttttttgaaatgttaggtaattttt

SEQ ID NO: 306557 - DNA, 907 bp, Unknown
  Bacterial polypeptide expressing nucleotide sequence isolated from the Sargasso Sea
tcaaaaacttatccaagcttcttcagcagaaacaaaaactcacataaatgaaaaaacaatcacttctcataaagttatagcggatcatattaggtcttctgcattcttaattgctgaaggagttttacctagtaacgaagggagaggttatgtattaagaagaatattacgtagagcgattagacactcaaatattcttggtagaaaagaaccttttatgcataatttagttaattgtttagtgactgaaatgggtgatgcttatccaatacttaaggatggcgaaagtaatattaaaaacactatagaagaagaagagattaaattcaaagaaactttagatagaggtttgaatttattaaatgatgaaataaatttaaataaaaaaaatacaattttttcaggtaaaaaagcttttgaattatatgacacgtttggattccctcttgatttaactcaagatgttttgaaaagctatgggtggacagtaaatatcaaagaatttgaaaaagaaatggaaaatcaaaaaattaaatcgagagaatcctggtcaggttcgggtgataaaattttagataaaaaaataataaagtttttagataaagaaatttcaactgagtttattggttataataaaactgaagctgaaggtgaagtaatattaattttaaaagagggcaaattaatagaaaaactagacaaaaatgatgtaggtgacgtaatttttgataaaacagtattttatgctgagtcaggtggtcaaatagctgataatggagaaattttgtcggataaacttcaaggcaaagttatagattgtaaaaaattaattattggtaacgataaggttttttttctacataaaatacagattaatgaaggtactttatataaacatgtaaaatgt

SEQ ID NO: 306558 - DNA, 739 bp, Unknown
  Bacterial polypeptide expressing nucleotide sequence isolated from the Sargasso Sea
gacttcaagcccgagctgggggatgacgaaatcgatctcgaggacgacgaccgtttcatcgagttctacaacctggtgttcatgcagtacaaccgcgacgccgagggcaacctcacgccgctggccaaccgcaacatcgacaccggcatgggcctcgagcggatggcccagatcctgcagaaggttcccaacaactacgaaaccgatctgatctttccgttgattcaggcggcggcggatctggcgggtgtcgactaccaccagctcgacgacaagggcaaaacgtcgttgaaagtgatcggtgaccacagccgtgcggtcactcagttgatctgcgatggcgtcaccgccagcaacctgggccgcggctacatcctgcggcgtctgctgcggcgggtggtgcgccatggccgtctcctgggcatcgacaagcccttcctggtgaccatgggcgaagcggcgattgccctgctgaagggggctcacccgagcgtgatcgaacgccaggaggtgatcctggccgaactccaacgggaggaggcgcgtttcctcgagaccctggagcggggcgagaagctgctggcggaagtgctggccagcaagccaaagcagatctccggcgctcaggcctttgagctttacgacacctacggctttcctctggagctcacccaggaaatcgcagaagagcagggcctcacggtggcccttgatggctttgaggtggcgatggaggaac

SEQ ID NO: 306559 - DNA, 655 bp, Unknown
  Bacterial polypeptide expressing nucleotide sequence isolated from the Sargasso Sea
atgacatcatctgaagttagacaaaaattcattgatttttttaagtcaaaagatcataaacaaatatcttcagcatcgatattaaataattatgatgacaatcttatgtttacaaacgctggtatgaatcagtttaaaaatatttttataggaactcaacaacctaatgacttaagaattgttaattctcaaaaatgtctaagagtttcaggtaaacacaatgaccttgaagaggttggaatagacacatatcatcatactttttttgaaatgcttggaaactggagttttggagactatttcaaagaagagattatcaattggtcatttgaattattgactgatcattataaaattgataaagaagatttatatgtaactgtttttaaaggttccgaagaagataatactccagctgatgaagaatcatttgattattggaagaagtttttcccagatgaaaaaataatctattgtgataaaaaggaaaatttctgggagatgggagagtatgggccatgtgggccatgttctgaaatccatattgatattagatcgaaagatgacaaaaataaaattaatgccagagatctaataaataaagatcatcctcatataattgaaatatggaatcttgtatttattctaatataat

SEQ ID NO: 306560 - DNA, 561 bp, Unknown
  Bacterial polypeptide expressing nucleotide sequence isolated from the Sargasso Sea
catgaagaactctaaagaaattcgacaggattttatctcattttttaaagatcgtgaacataagtttgtaagaagtgcaccagtagtaccaatcgatgatcccactttgctttttacaaattctggtatggcgcaatttaaagaagtttttctaggaactggattaagggaatataatagggctgtaaactcccaaaaatgtataagagcaagtggtaaacataacgatcttgaagatgtagggcatgataattatcaccacacattttttgaaatgcttggtaattggtcttttggagattattttaaagaagaagccattatgtgggcatgggaacttatgacaaatgtatggggtttagaaaaagaaaaattttgggtaacagtttttgaaggtggagaaggagttgaaccggacgaagaagctgaagaactatggtctaataatacggatataaatcgcaaccaaattctgagattcgacaaaaaagacaatttttgggaaatgggtgatgtaggtccatgcggaccttgctcagaattgcatatagatttaggaaa

SEQ ID NO: 306561 - DNA, 943 bp, Unknown
  Bacterial polypeptide expressing nucleotide sequence isolated from the Sargasso Sea
ggtacaattgtttctggtaattctgttttggaagtagaagatacgcaaaaaaaacttggagacttatttgttcattatggatctttgaaaactggtgaaatgaaaatcaatgatgtagtggaaatgaaaatagatgtagagcgaagagataatctaaaagcttatcattctgctacacacttacttcatgagtcattaagaagaactctaggtaaacatgttatgcaaaaaggatcattagttgctccagatagattaagatttgactttagtcatatgaaaccaattactgatgaagagctagtaattattgataatctagttaatgaatatgtttcaaatagttctgaagtaactacaagaattatgacaccaaaggctgcaatcgaaaaaggagcgctagctttttttggtgaaaaatatggagaagaagtccgtgttgtatctatgggaaaggaaaaagaagcatacttttcaacagagttatgtggaggaacacatgtcaaaaataccggtgatattggaaaatttaaaactgtaagccaatcgtctattgctgcgggtgttagaagagttgaagctctaagagataaacaacttgaagattttattaagaacaaagaaaaattatcaactttatctactcaaaaagatgaagaaatgattaaagatttgtcatcgcaaattattaaacttggaggcaaaccaaatgttaataataaagatttaaaagaaatcattaaaaatctttcacgacaacttgaacaactaaatgttagttcagttcttcaagacaaaaccaaaaacattattaaagatgataaaataaataatataaaagttagatttcaaaaagtgcaagatttaccgcctaaagatttaagaaaattagttgacaatggtaaaaaagaattaggagatggtattgtaattgtttttgcaa

SEQ ID NO: 306562 - DNA, 864 bp, Unknown
  Bacterial polypeptide expressing nucleotide sequence isolated from the Sargasso Sea
aattctgggatggtccagtttaaaaatgtatttactggtttagaaaaaagagactatcaaagagcaactacctcacaaaaatgtgttagagcaggggggaagcacaatgatttagaaaatgttggttataccccaaggcaccatactttttttgaaatgttaggaaatttttcttttggagattattttaaagaaagaggaattgaacttgcgtggaatttaatcaccaaagatttcggtttagataaaaataggctttacgttaccgtttttcatgaggatgatgaagcttttaatttctggaagaaaattgcgggttttagcgatgataaaattataagaattgcaacatcagataacttttggtcgatgggtgaaactggtccctgtggtccttgctcagaaatattttatgatcatggtgatcatttaaaaggtggattgccaggaacgaaagatcaagatggagatcgttttattgaaatttggaacttagtttttatgcagtatgaacaaatttcaaaagataaaagaatagatttacctaaaccatctgttgatacaggcatgggattagagagaattgcagctcttttacagggtactcatgataattatcaaactgatcattttaagaaattaataagttcaatatctgaagtaacaaaagttaaacaatcagataacaatatatcgagttttagagtaatcgctgatcatttgagagcgagctcatttcttttagcagaaggcgttctaccttcaaatgaaggtcgtgggtatgtcttaagaagaattatgagaaggggaatgagacattctcatctgttaggatctaaggaaccaattttttataaaatcttt

SEQ ID NO: 306563 - DNA, 913 bp, Unknown
  Bacterial polypeptide expressing nucleotide sequence isolated from the Sargasso Sea
gaggatgtacaaaaaaaactcggagatttatttgttcattatggaaaagtaaaaaaaggatcaataaaaataaatgacaatgtagagatgaaaatagacgttgaaaggcgagacaatgtaagggcatatcattctgcaacacatttactacatgaatcactaagaagagtattggggactcacgttactcaaaaaggttcattagttgagccagatagacttaggtttgactttagccacatgaaaccaatttctattgaagaaatagaaaaaatcgaaacatatgtaaattcaatggtaagcaatagttctgatgtaaaaacaaggattatgacaccaaaagaagcagtaagtaatggtgctcttgcattatttggggaaaaatatggagatgaggtaagagttttatcaatgggcagtgaaaaagataagtatttttcaacagaattatgcggtggaacacatgtcagaaatactagtgatattggaaagtttaagattattagccaatcatcaattgcggcaggagtaagaagagttgaagctttaagagataaacaattaaatgaatatttaaaaaataaagagacacaatctgatctaattttacaaaaagatgaaaaaattattaaagagctctcagaaaaaatcataaaagctggaggtaaaccagacttatgtaataaagatcaaaaaggtttaattaaggatctttcaaagcagcttgaaagtttaagtctcagatcaatcttgaaagataaaaataaaaatataattaatgatcagacaataaatggagtaaaaataagattacaaaaagttgaaggattgtcaccaaaagatttaagaaaattagtagataatggaaaaaaagaattaatagagggaatcgtaatcgtgttgccaacaaaga

SEQ ID NO: 306564 - DNA, 787 bp, Unknown
  Bacterial polypeptide expressing nucleotide sequence isolated from the Sargasso Sea
aatattttatgatcatggtgataaatatgaaggaggccctccaggctctccaaacgaagatggtgatagatttatagaaatatggaatttagtatttatgcaatatgagcagatatctaaatctgagaggataaatctaccaaaaccatcaattgatactggaatgggattagagagaatgacagctcttctagatggttctaacgacaattattcaacagatttatttcaaccaataataaatgaatcaacaaaactatgtagaaatgaaagttcaattacaaatcctagtcatagagtaattgcagatcacttaaaatcttcctcttttttaattgctgatggggtaatgccttcaaatgaaggtaggggttatgtcttacgaagaataatgagaaggggaatgcggcacgctcattctttaggaaacaaagaacctatattttataaactttttcctatttttttagatggaattaaaaattcttatcctgaattagatagggcaaaagatcttattacgaatacattgatgaatgaagaaactaaattcaaggaaactgttgaaaaaggaataaaaattttagatgaggagatttctaactcaacaaatatatttaatggagaagtagcatttaaattatacgatacttatggatttcccttagatttaactcaggattatttgaaaagtaaaaatattgaagtcgatataaaaacttttgaacaaaaaatgttagatcaaaaggaaagagctttcctaggccttcgctggtccctagacaac

SEQ ID NO: 306565 - DNA, 730 bp, Unknown
  Bacterial polypeptide expressing nucleotide sequence isolated from the Sargasso Sea
tttttcacagaatcaaaattacggcgcttttcacaaaatgcatccggacaatggcagtttattttggaaaaaactcctttctacccagaatcaggaggtcaggttggagaccatggatttcttaagcagaatgataatacttggaaggtgatagatgttcaaaaaatgggtgatgcaattattcatatttgtgaagctacagataaaaacttaaaaaaaacctcacctgacaattcaaaaattactgcatcagtagatgaaatatttcgattatcaacaaccaacaatcatacctccgcacatcttatgcatgaagcactgcgtcagatattaggagagcacgttaatcaagccggttcccttgttaattcggaaatgttaaggtttgattttacacattttgaaaaattaacagaaacgcaattggaagaaattgaaaacctggtcaattttgtaattcgccaaaacattaaaacacacatttatgagacaccttttgaagaggcaattagctctgggataattgcgctttttggtgaaaaatatggagatattgttagagtggtaaaaatctctgatttttcagaagaactttgtggaggttgccatgtaaaagctacgggacaaattggacagtttcgcatcgtttctgaagaagggatttccgccggaataaggagggttgtagctgtaactgggaaaaacgcagaattaatgacccaagaacaag

SEQ ID NO: 306566 - DNA, 301 bp, Unknown
  Bacterial polypeptide expressing nucleotide sequence isolated from the Sargasso Sea
aatgcattcttcagaagttagaaaaaaattcattgattttttttcttctaaaggacatcaaatagtcgaaagctctagcgttttaccgttagatgaccaaaccttgttattcactaactctggaatgaaccagtttaaagatgtctttctaggcgcagaaaaaagagactacttaactgcgacttcggctcaaagatgcattagagccggtggtaaacataacgatctagaaaatgttgggtataccttaaggcaccatactttttttgaaatgttaggaaactttagttttggagattat

SEQ ID NO: 306567 - DNA, 920 bp, Unknown
  Bacterial polypeptide expressing nucleotide sequence isolated from the Sargasso Sea
cttagttctattagacagaggaataaaaattttaaatgatgaaatatctaaaatagataaagtgttgccaggtgaagttgcttttaaattatatgatacttatggttttccattagatcttacagaagatattttaagaaataaatcaatgtcaattgatactgaaaagtttcaatctttgatgaaggaaagtagagaacttgctaagaaaaattggaaaggttctggtgatgcagcggttgaagatatctggtttggaattaaagataaaattgagccaactgaatttttaggatacgaaactaatcaagctgaaggtatcgtattatctcttttaaaagagaataaagaagttgatcaattaaaacaaaatgatgagggaatgattatagtaaatcaaacccctttctatggtgagtctggtggacaagttggtgatactggtgaaatagtatcaaatgattttaaatttgaggtaacggatgttcaaaaaaaacttggtgatttatttgttcattatggaaaggttaagagcggatctataaaattgcaggaaaatgtagagctaaaaattgatgtggaaagaagagataatactcgtgcttatcactcagcaacccatctgctacacgagtcattgagaagagttctgggtactcatgtaactcaaaaaggatctttggtagagccaagtaggttaaggtttgattttagtcacatgaaacctattttgaatgaggaaattgataaaatagaggaatttgtaaacaaaatggtatctaaaaaatctgtggttaaaactagattaatgacacctgatgaggcagttgaaaatggtgctttagcattatttggtgaaaaatatggagatgaagtaagagttctttctatgggagatgaggatggtaagtatttttcta

SEQ ID NO: 306568 - DNA, 769 bp, Unknown
  Bacterial polypeptide expressing nucleotide sequence isolated from the Sargasso Sea
gaggtgtccacacgcatcatgacgcctgatgccgctatcgaaatcggtgcgttggcgctgttcggcgagaaatacggcgacgaggtccgagttgtgcagatgggcggcccgagcgatgccaaggggcgcggtgcctggtcggtcgaactgtgcggcggcacacatgtttgccgcaccggcgatgtcagcctgttgcggattgtatcggaatctgccgttgccggcggcgtgcgccggattgaggcggtgaccgaagccggtgctctggaatggatcgatgggcgcgagcgcgccctaaccaaggccgcggaccttctgaaggtctcgccagagcagcttgcggatcgtgttgcgcggcttgtcgaggacaaccgcaaggcagagcgcgatatcacatcgcttcgtcggaaactagcggccggcagcaccggcggcgatgcgccgagcgtcgtcaacggggtgaattttgttggccgtcttctcgaagacacgccggcacgcgagctgaaatccatggcggacgagatcaaggcgaacatgaccaatgccgtcatctgcctggtggccacagaaaacggcaaggcgtccatcgtcgtggcggtcacgcctgaactggtggagagctgcaacgcggttgaactggtaaaggcggggtctgccgcgcttggcggtggcggcggaggcggccgacctgacatggcgcaggctggtggtccgaatgccgatgctgcatcggaggctatcgaagcggtgtcggccgcgctatagc

SEQ ID NO: 306569 - DNA, 736 bp, Unknown
  Bacterial polypeptide expressing nucleotide sequence isolated from the Sargasso Sea
gggccatgtggtccttgttctgaaattttttatgatcacggtgaaaaattaaaaggtggtccacctggaagcccaaatgaagatggtgatagatttattgaaatttggaatcttgtattcatgcaatacgaacaaattacaaaagaaaaaagagttgatttaccaaaaccttcagtcgatacaggtatggggcttgaacgaatgacagcagttcttcaagggactcatgataattacaaaattgatcacttccaaaaaattatggctgcttcatctgatattacaaaaacttcaattaatagcaaaacaatagctagccacagagtaatagctgatcaccttagagcaagtagttttttaatcgccgaaggaatactaccctctaacgaaggccgaggatacgttttaaggagaattatgagaagggggatgcgacatgcacattctttaggtagtaaagaccctgttttttataaactttttgaagttttgttaaacgagatgaaaaatagttatcctgaattaataaacggtaaagaattgataattgaaactcttaaaaatgaagaagaaaaattttcatctcttttagaacgtggaatgaaaatactagatgaaaatttaaacaaagttcaaaataaaacttttccaggcgccgaggcatttaaattatatgatacttatggctttcctttagatttaactgctgacattttaagaagcaaagatatcaaag

SEQ ID NO: 306570 - DNA, 901 bp, Unknown
  Bacterial polypeptide expressing nucleotide sequence isolated from the Sargasso Sea
gattatttaaaagagcaggcaattattcatgcctggaacttattaactaaagatttcaaattacctaaagaaaaactttctgtaacagtttaccatgaagatgaagagtcatttaaactttggaaaaaaatagcaggtttaagtgataataagataataaagattgcaacttcagataacttttggtcaatgggagacacaggtccatgcggtccatgctcagaaattttttatgatcacggtgaaaaactaaaaggaggacctccaggaagcccagatgaagatggagataggtttattgagatatggaatttagtattcatgcagtacgagcaaataaccaaagataaaagaataaatttaccaaaaccatcagtagatactggaatgggtctagaaagaatgacagctgtccttcaagggactcatgataattacaagatcgatcactttaaaaaaatcatgagcgcatcttctgatttattgaagtcacctatgaatgagtcaactattgcaagtcacagagttattgcggaccatttaagagctagcagttttttaattgctgaaggaatcttaccttctaacgaaggccgtggatatgttttaagaagaatcatgagacgtgggatgagacatgctcactctttaggaagcaaagatcctgttttttataaattatataatattttattaagtgaaatgaaaagcagttatcctgaattaattactggtaaagaattaataattgagactttaaaaaatgaggaagaaaaattttcttctcttttagaaagaggaatgaaaatacttgacgaaaatttaattaaagtttcaaataaaacttttccaggattaatagcatttaaattatatgatacttatggcttccctttagatc

SEQ ID NO: 306571 - DNA, 811 bp, Unknown
  Bacterial polypeptide expressing nucleotide sequence isolated from the Sargasso Sea
ggtttagacaaaaataggctttatttcacagtttttaatgaggatgaagaagctctaaaattatggaaaaaaataacaggttttggagaagacaggataataaaaattccaacttctgataatttttggtcaatgggtgaaactggaccttgcggaccatgttctgaaattttctttgatcatgggaatcatctaaaaggaggtttgccaggtgcaaaagaccaggatggagataggtacatagaaatttggaatttagtatttatgcaatttgaacaaatttcaaaagataaaagaataaatttaccaaaaccttccgttgatacaggaatgggtcttgaaagaattactgctttattacaaggcactcatgataattataaaactgatcattttgaaaaattaattaaatctatttcagatgctgtcaaaataaaacctgatgaaaaaaatatttctagttttagagttatagcagatcatctaagagcaagttcatttttaattgccgaaggtgttttaccatcaaacgaaggtagaggctatgttcttagaagaataatgagacgaggaatgcggcactctcatttattaggctcaaaggaaccaatattttttaacatatttaaaacattgatggaagaaatggttggaaattatcctgaattaaaaagagctgaagcgttaattaaagaaactttaaaaatggaagaagaaaaatttttagttctattagatagaggaatgaaaatactaaacgaagaaataacaaaaattgataaaattttaccaggagaggtgcttcaaactt

SEQ ID NO: 306572 - DNA, 886 bp, Unknown
  Bacterial polypeptide expressing nucleotide sequence isolated from the Sargasso Sea
cattatgacgccatcggccaacgccaagattacattgccgaactggttaaggctgaagaacagcagtttttacgcacggtttcatccggattaacactttttaattccatggtcaccgatttaaaaacggccaatcaaacagttgtgtcgggtgacgctgcatttaaactgtatgatacctatggctttccctttgatttaacacaagtgatggctgaagaacaggccctgagtgttgatactgcagggtttgatgcggccatgctcgctgccaaagaacggtcgcgccaagcgcgttcagaaaccctaagcgatggaaaagatgagaccataacggcattaagtgattttattggtgatgttcaatatggggtgtatgtggatgccccgggtggtggtgaagcacggattccagcaaacgatgatcagcgctttggcattgctcaacatcataccgcaacccatttattgcatgaaagtttacgaaaagtccttggcgattcggtgcatcaagccgggtctttagtggatgtcaatcgcttgcgatttgattttagttatcatcaagccatcaccgctgatgaacttgcaaaaatagaagatcatgtgaatggttggattactgaaaatcacaccgtgaccattaccgaagaggccattgaggctgccaaagcacgcggtgcacaggccatgtttggtgaaaagtatggtgatgttgttcgtgtggtggatattcccaatatttcaatcgagttatgtggtggaaaccatgtggtttcgactgctgatttacaacaatttaaaattgtcgctgaatcggccgttgccgctggtacccgacggattgaggcattggtgggtgagcaaccgcgtcggacaatacaac

SEQ ID NO: 306573 - DNA, 769 bp, Unknown
  Bacterial polypeptide expressing nucleotide sequence isolated from the Sargasso Sea
aatgaaagaaagcaaagaacttgcgaaaaaaaattggagaggatcaggagatagttcagtcgatgaaatttggtttggtattaaagaaaaattaggcacaacagaatttttaggatatgaaactaatgcagctgaaggtgttgttctttcattactaaaagataataaggaagtaaaaaatttaaaatcaggtgatgaaggaattttgattaccaaccagactccattttatggagaatcaggaggtcaaattggagatacgggaaaaattgtttctggtgagttcgaatttaaggtaacagatgttcaaaaaaaacttggtgacttatttgtgcactacggaaaagttttaaaaggcaatataaatcttaacgataacgttgaaatgaaagttgatttcgaaagaagagataatatcagagcttatcattcagctacacatttgcttcatgagtctttaaggagagttttgggaaaacatgtaatacaaaaaggatctttggtagagccagacagattaagatttgattttagccacatgaagcccatttcttccgaagaaataaaaaaaattgaaaatcatgtaaacttaatgattgataataaaacagaagttaaaactaggataatgacacctaaagaagcagtagataatggcgcattagctttatttggtgaaaaatatggagatgaagtaagagttttatctatgggtagtgaaaaagataaatatttttctaccgaattatgtggaggaaacgcatgttag

SEQ ID NO: 306574 - DNA, 925 bp, Unknown
  Bacterial polypeptide expressing nucleotide sequence isolated from the Sargasso Sea
cttaaaaatgaaatgtctggaaattatccagaacttgtaagagcggagtctttaattaaagaaactttaaaaatggaagaagaaaaattcttagttctattagatagaggaataaaaattttaaatgatgaaatatctaaaatagataaagttttaccaggtgaggtggcttttaaattatatgatacttacggttttccgttagatctaacagaagatattttaagaaataaatcaatgtccattgatacagaaaagtttcaatctttgatgaaggaaagcagagaacttgctaaaaaaaattggaaaggttctggtgatgcagcagttgaagatatttggtttggaataaaagataaaattgagccaactgaattcttaggatatgaaaccaatcaagctgaaggtgtcgtgttatctcttttaaaagataataacgaagttgatcaattaaaagaaaatgatgagggaatgattatagtaaatcaaactcctttttatggtgagtctggaggtcaggtcggtgacactggtgaaatagtatcaagtgattttagttttgaagtaatagatgttcaaaaaaaacttggagatttattcgtccattatggaaaggttaagagtggatcaataaaattaaagcaaaatgtagagttaaaaattgatgtagaaagaagagataatactcgcgcttatcactcagcaactcatttgttgcatgaatctttgcgaagagttttaggtacccatgtaactcaaaaaggttctttggtagagccaagtagattaagatttgatttcagtcatatgaagccaattttgaatgaagaaattgataaaatagaagagtttgtaaacacaatggtctctaaaaaatctgatgtaaaaactagactaatgacacctgatgaagcggttgaaaatg

SEQ ID NO: 306575 - DNA, 894 bp, Unknown
  Bacterial polypeptide expressing nucleotide sequence isolated from the Sargasso Sea
agacttagatttgattttagtcacaacaagccaattgaaaaagaggaaatgacaaaaataaacaaggttgttaacgaaatagtccaagggtcaagtgatgtacaaacgagaattatgaccccaaaggaagcagtaagcatgggagctctagctttattcggtgaaaaatatggcgaagaggtcagggtagtatttatgggaaaagaaaacaatggtttcttttctaccgaactgtgtggtggaacacatgttaaaaatacaaaagaagttggaaaatttaaagtggtcagtcaatcttcgattgcttcaggcataagaagggtagaagctttaagagataagcagttacaagattatgaaaagtctctcaaacagaatgaatctttaaaagaaaaaaatataaaagaccagattgaggcaattaaaaaagagctattaggctataaaattaatcctgattataaagatgatttagaattacctgaaaatttaaaaaatcttagcaaacagttagaaaaaattaaaatccaaaatgttattaaagacaaaagtaaaaatgttattaaagataaaaaaatgggatcatttactttaagacagcaagttcttacagattttcctcctaaagaactaagaagcataatagatcaaggcaaaaaagatattaaacaaggcattgtagtcggcatctcaacctttgaaggaaaagttggagttgcagttggtgtaactaaagaattaacaacgaaatatgatgctgtaaagcttgtaaaaatggcttccgaagttcttggggggaaaggcggaggaggaagaaaagattttgcacaagcaggtgggtcaaataaagacagtatcgaaaaagcttttaaagtattaaatgaaaaaattagt

SEQ ID NO: 306576 - DNA, 541 bp, Unknown
  Bacterial polypeptide expressing nucleotide sequence isolated from the Sargasso Sea
catgaattctaatcagattagatcgacatttctcaattattttaaaaaaaatggacatgaggttattcactctagttctctagtgccagataatgatcctaccctaatgtttgctaattctggaatggtgcaatttaaaaatatttttacaggtaaagagactagagattacaacagagcgactacagctcaaaaatgtgtaagagcaggtggtaagcacaatgatttagaaaatgtaggatatacgacaagacaccatactttttttgaaatgttaggtaacttctcttttggagattattttaaagagttggccatagaactagcttggaatctgattaccaaagaatattcaataaataaagaaagacttttagtaactgtttattctgatgatcaggaagcttttgatttatggaaaaaaatagctggattatctgaaaacaaaattattaaaattagtacatctgataatttttggtcaatgggtgaaactggtccttgcggcccatgttctgaaatattttatgatcatggtgat

SEQ ID NO: 306577 - DNA, 890 bp, Unknown
  Bacterial polypeptide expressing nucleotide sequence isolated from the Sargasso Sea
gatgttaggaaatttttcttttggtgattattttaaagagcaagcaattcattatgcctgggacttaataaccaaagattttggtattgataaaaataggctttatgtaactgtatttcatgaggatgatgaggccttcaatttttggaggaaaatagggggttttagcgatgatagaattataagaatagcaacttcagataatttttggtcaatgggagagacaggaccttgtggtccttgttcagaaatcttttttgaccacggagattatttaccaggaggtttgcctggttctaaagatgaggatggagatagatttatagaaatttggaatttagtctttatgcagtttgaacaagttactaaagataaaagaattaatcttccaaaaccttctgttgatactggaatgggattagagagaattgccgctttattacaaggttcacatgacaactatgaaacagatcattttaaaaaaataattggttctgcatctgaaattataaaagttaaatctaacaaatctaatttagcaagttttagagtaattgctgatcatttaagagcaagttcgtttttaatagccgagggagttttaccttcaaatgaaggaagaggatatgttcttagaagaattatgagaagagggatgagacattctcatttacttggatctaaagaaccggttttttataatttatttgatactcttaaaaaagaaatgtctggaaactatccagaattagttagagcagaatctttaattaaagaaactttaaaaatggaagaagaaaaatttttagttctattagatagaggaataaaaattttaaatgatgaaatatctaaaatagataaagttttgccaggcgaagttgctttta

SEQ ID NO: 306578 - DNA, 881 bp, Unknown
  Bacterial polypeptide expressing nucleotide sequence isolated from the Sargasso Sea
tcgggtaagcacaacgatttagaagaggtgggtatggacacctaccaccataccatgtttgagatgctgggcaactggtcttttggcgattattttaaagaggaggcaattgactgggcctgggagctattgacagataagtttaaccttccaaaagaccgattatatgctacaatatttgagggggatgcttccgaaaatcttgacagggatattgaagctacagctggttggaaaaaatacctgagtgctgataagattcttgacggatccaaaaaggacaatttctgggaaatgggtgacacagggccatgtggaccttgttcggagctgcatattgatttaagaccacaggaggaagtggaaaaagttccagggaaagaccttgtaaatatggatcaccctcaggtggtggaaatatggaatctggttttcattcagtacaatcgcctgtcaaatgggacacttgaaaatttacctgaaaaacacgtcgatacgggaatgggatttgagcggctggccatggcgattcagcaaaaacaatccaactatgatacggatgtttttcagccacttatccaatgggttgcgaataaagcatctaaaacgtatggcagtgatgaaaagatcgatattgccattcgggtcatatcggatcatatcagggccatcgcttttaccattgctgatggtcagctcccaagcaacaataaggcaggttacgtaattaggagaattctgagaagagccgttagatacggatacacatttcttgatttcaaagaaccgttcctacacaagatggtgccattactcacagatcaattcgaagaagtttttccagaaataaacaccaacagaactttattgcaaaagttatc

SEQ ID NO: 306579 - DNA, 551 bp, Unknown
  Bacterial polypeptide expressing nucleotide sequence isolated from the Sargasso Sea
aatgaataccaatgagataagagaagcatttctagaattctttaaaagcaaggatcataatgttgtttcttcaagttctctagtacccaacaatgatgacactttgcttttcactaatgcaggcatggttcagtttaaagatgtctttttaggccaagaaaaacttaaatattccagagccactacttcccaaaaatgtattcgtgctgggggtaagcataatgatcttgaaaatgtaggctatacacttcgccatcatacgttttttgaaatgctagggaactttagctttggtgactattttaaagaggaggctatagtttttgcatgggagtttttaactgatgttctcaaactagataaagataagttatggattacagtttataaagatgatgacgaggcaaaagaaatttggataaataagattggcattgatccggatagaattgcaaagcttggagataaagataatttttggtcgatggctgatactggaccttgtggcccttgctcagaaatcttttttgatcatggagataaatatgaag

SEQ ID NO: 306580 - DNA, 790 bp, Unknown
  Bacterial polypeptide expressing nucleotide sequence isolated from the Sargasso Sea
gggagtaattttaaaaatatcaaaaggtaataaatttgttgatagtgcaaaaactggagaggaaatagagattataactaaccaaacccccttttatggagagtccggaggacaaattggtgatcaaggtgttatttataactctgaatgtaaaataaatattagagatacacaaaaaaaaatgagtgatctttatgttcatgtaggcaatgttgaaaaaggatcaattaaaattggtcaaaatgtaaacttggagatcgatataaataaaagaaataattcaagagcttatcactcagcaacacacttattacatgaagctctaagaagaacattgggcaaacatgttacacaaaaaggttcgctagtaagtccagagagacttagatttgattttagccacaacaaaccaatcgaaaaaggtgaaataaaaaaaataaatgatgttgttaacgaaattgtcgaagggtcaagcgatgttcaaactagaattatgacgccaaaagaagcagtaagtatgggagctttagctttatttggtgaaaaatatggtgaagaggtgagagtagtgtttatgggaagagaaaacaacggatttttttccaccgaactatgtggtggaacacacgttaaaaatacaaaggaagttgggaaatttaaagtaatcagtcaatcttcgattgcatcaggaataagaagagtagaagctttaagagataagcagttacaagagcatgaaaagtctcataaacagaaacaatctttaagagaaaaaactataaaaaatcag

SEQ ID NO: 306581 - DNA, 873 bp, Unknown
  Bacterial polypeptide expressing nucleotide sequence isolated from the Sargasso Sea
agaaaggttcgttagttagccctgaaaaacttcgatttgattttagtcataataaacctattgaaaaaaaagaaattgaaaaaatagaaaaatatgtaaacgatatggttaatactgcagcagatgtaaaaactaggatcatgacacccaaagaagctgtagaaaaaggtgctttggctatgtttggtgaaaaatatggtgatgaagttagggttttgtctatgggcaaagataacggaggttatttttctaccgagctatgtggaggtacgcacgtaaaaaatacaaaagacattggaaagtttaaaataataagtcaatcatcaattgctgctggcgtaagaagagtagaagctttaagagataagcagttaagtgattatgaaaagactttaagagaagataagtctataaaagaaaaaactttaaaagatcaaatagattttattaaagaagaattattaaaatataaggttacaccagattataaggaagatttgcaactatctgagaatataaaaaatttaaataaacaattagaaagtattaaaattcaaaatattattaaagataaaaataaaaatgttattaaggataaaaaaataggtaattttattctaagacaacaggtgcttacagattttccacctaaagaacttagaaatgtaatagatcaaagtaaaaaagatattaaagaaggtatagtagttggattttcaaccttagaaggaaaggttggtgttgctgttggggtaacaaataaattaaccaaaaaatatgatgcagttagtctcgtaaaagttgcttctaaagtgcttgaaggcaagggtggcggaggtagaaaagattttgctcaagctggggggcactaat

SEQ ID NO: 306582 - DNA, 741 bp, Unknown
  Bacterial polypeptide expressing nucleotide sequence isolated from the Sargasso Sea
tttgagagcaagttcatttcttttagcagagggtgttttgccatcaaatgaaggtcgtggatatgtcttacgaagaattatgagaagaggaatgagacattctcatttactaggttcgaaagaacccattttttataaaatctttgagtctttaaaaaatgaaatgtctggaaattatccagagttagagagatccgagtctttgataacggaaacattaaaaatggaagaggaaaaatttttagttttacttgacagaggaattaagattttaaatgatgaaatttcagaaattgataaagttttatctggtgaagtagcatttaagttatatgatacttatggttttccattagatctcacagaagatattttaaaaaatagattattaaaagttgatcataaaaaatttaatgagttgatgataaaaagtaaagaacttgcaaaaaaaaattggaaaggatctggggacagctcagaagaagaaatttggttttcaataaaagataagactggacctacagaatttttgggttacgaatctaatcaatctgagggagtggtgttaaatatagttaaagataatcaagagacaaaatctttagctactggagaagaaggaatgataataactaatcaaactcctttttatggtgagtctggaggacaacttggagataaaggtataatagtatctggaaattctatttttgaagttgaggatacacaaaaaaaacttgg

SEQ ID NO: 306583 - DNA, 721 bp, Unknown
  Bacterial polypeptide expressing nucleotide sequence isolated from the Sargasso Sea
catgagtattagagacaattttttaaactattttaaaaagaataatcatgaaatagttgaatcaagctcattaattcctgcttcagacaaaacccttttgttcactaattcaggaatggtccagttcaaagatatttttttagggattaaacaatcaaaatctaaccggatcgttacttgtcaaaaatgtgttagagctggcggcaaacataatgatttagataacattggttacacgaatagacatcactcattttttgagatgttaggaaattttagtttcggagactatttcaaagaagaggcaatattatatgcttgggagtttttaacaaaagaacttaatttagataaaaatagattatatgtatccgtacataaaaacgatagtgatgctaaggagatctggttaaataaaatcaaaattaaacaagatcatctttggctactcgatgatgccgataatttttggcaaatgggatctacagggccctgcggtccatgttcagaaatatactatgatctaggtgatgaacttaaaggaatgattccatcaaaaggagacccaggcgatcgatatattgagatatggaatcttgtatttacacaatatgataaagattctaaaggtgttttgaatgatctgccaaaaaaatgcgtagatacaggaatgggtcttgaaaggattcatgctgttgttgaaggtgtctcagataattta

SEQ ID NO: 306584 - DNA, 717 bp, Unknown
  Bacterial polypeptide expressing nucleotide sequence isolated from the Sargasso Sea
gtttaaccaatctgaaggagtggtgttatcaataattaaaaataataaagaagcacaaaatattttaaatggtgaggaagggataattattactaatcaaacccctttttacggagagtctggcggacaagttggagatcaaggaaagatagtatctggtaattcagtatttgaggttacagatactcaaaaaaaacttggagatctttttatacatcatggaattctaaaatctggtgagattaagattaaagacgttgtagaaatgaaaatagatattgaaagacgtaacaatcttaaggcatatcattctgcaactcatttattacatgagtctttgagaagaacattgggaaaacatgttatgcaaaaaggatctttggttgcgcctgatagactaagatttgattttagtcacatgaaaccaattactgaggatgaattaacaattatcgataaattagttaatgaatacgtacaaaacaaaactgatgtaactacaagaattatgacaccaaaagctgcaattgaaaaaggtgctttagctttttttggtgaaaaatatggggaagaagtgagagtagtttctatgggagcagagaataactcatatttttcaacagaattatgtggtggaactcatgtaaaaaatactggagatattggaaaatttaaaactgttagccaatcctcaatagctgccggagttagaagggt

SEQ ID NO: 306585 - DNA, 853 bp, Unknown
  Bacterial polypeptide expressing nucleotide sequence isolated from the Sargasso Sea
tttggtggttattttaaggaagaagcaataaaacttgcatgggatttattaacaaaagaatattcaatagatgaaaaaagattaattattactgtatatgaggaggacgaactctcttttaaaatttggaaaaaaatttcagggtttaatgacaaaaaaataataagaatttcatcaaacgataatttttggtccatgggtgacactggaccctgtggtccttgcagtgaaatattttatgataatggtgaaagtataaaaggaggcttgcctggtaccaaaaatcaggatggagacagatttgttgagatatggaaccttgttttcatggaatatgaaaaaaaaggggatagtttagaaatactgcctggtaaatttgttgatacaggtatgggtttagaaagaatattggcggttctaaatggaaaagttaataattacgatactgacttatttgaatacgtttttaaaagaatagaagaggaaactaaaacaaatttaaataaaaatttattgataccattcagaataatttcagaccatttgaagtctattatttttatgatgtctgagggtattttaccttctaacgagggaagaggttacgtattgagaagaataataagacgagctcttctaaacgttaataaactaaatccagatgtaataattcttaaccgacttgtggacgatgtaataagaaaatataaaaaaacttattctgaattaaccaaggcagatttctttattaaagataatttaaaaaatgaagaggaaaagttttctgaaactttatcaataggacttgaactgttgaacaaagaaatcaaaaaaattaaaactaaagaattta

SEQ ID NO: 306586 - DNA, 1001 bp, Unknown
  Bacterial polypeptide expressing nucleotide sequence isolated from the Sargasso Sea
gttattcttcgacctatactgggagttgtggaacttagtatttatccaatacaatcgccacaaagatggaaaattagaagagcttaattcaaagcatgttgatacgggtgcaggctttgaaagaatcgtttctgttatgcagaaaaaatataataattatgctacagacttattcacacccctaattgaaagaattgaaaaaatttctaataaatcttcaataaaagacccaataccctttcaagtaatttcggatcatatcagaatgctttcttttgcaatagctgatggtgcattgccaagcaatgaaggaagaggttatgtattaaggagaattctgcgaagagcagcgagatttggtagatcaatcaatatcaatgagcccttcatctatgatctagtggagccgttatgtcataaaatgggggaaatctttcctgagataattgaaaagaaatcgcatattgaaaaaataattaaagctgaagaatcatcattcaatgaaactcttgatagaggcattttgcattttagcaaagttattgaagatatgtctagtaaaactattgctggagcagaagcttttaagctgtacgatacatttggatttcctttagacttaactcaggtaatggctcgtgaaaaaggactctctgttgacaccaagggctttgaaaatgaaatggccttacagaaaaaaagggcaaaatcttctgaaaaatttaaatctaaatcctcagaaattaattggacaattattagggatgataacaactcaacattcaagggctacgagtctacttttttatccacagatatcgttaaatattcttcagtaaaaaacgaacactatgttgttttagatcaaacgccattttacgctgaatctggaggacaggtagctgacactggtactattttaggtgatgggattgatttaaagggtcaggatgtacagtttgatggtgaaatgatcattcataaatgcatcggtgaaataa

SEQ ID NO: 306587 - DNA, 467 bp, Unknown
  Bacterial polypeptide expressing nucleotide sequence isolated from the Sargasso Sea
aatgaaaacgaatgaaataagacaagcatttatcaaattctttgagtcggaagggcatcaaagcgtcaagagttcgcctctgattcctgcaaatgatccgacactcttgtttacaaacgctggaatggttcagttcaaggacatttttttaggaaaagaagatcaaggtttcacaaaagcagtcagtgctcagagatgtttaagagcaggtggtaagcacaacgatcttgaaaatgttggctatacatcacgtcatcacactttctttgaaatgcttggtaactttagttttggagactactttaaagaggatgcaatccaattggcatgggacttcattaccaatgagctcaaacttgaaaaggatcgtctttgggtaaccatttttgaagatgatgatgaggctgcaagcatttggcttgaaaagattggagtatcagctgatagacttgttcgactgggcgaaa

SEQ ID NO: 306588 - DNA, 924 bp, Unknown
  Bacterial polypeptide expressing nucleotide sequence isolated from the Sargasso Sea
tgttggatatacattgaggcatcatacattttttgagatgcttggtaattttagtttcggcgattattttaaggaagatgcaattaaatatgcttgggaatttttaacagaagtattaaaactagataaagataaattatggataacagtctataaggatgatgatgaggctgaagaaatttggaaaaatattattggagtagagtccaatagaattgcaaggcttggagatgatgataatttttggtcaatgggagatacaggtccatgtggaccatgttcagaaatattttttgatcatggagatcatattgaaggaactccaccaggaactgatggagatgagggagatagatttgtagaaatatggaatcttgtttttatgcaatttaatagagatgaaagtggaaaaatggaatcattacccaagccatctgttgatacaggaatgggtcttgaaagaatagctgcagttatgcaaggagttaattcaaactataaaactgatgtttttaaagatttaattcttgcttcagaaaaaatacttaaaaataaaaatagtacctcacataaagtaattgcagatcatataagatcttctgtttttttaatttctgatggggtaataccagaaaacgaaggtagaggatacgttttaagaagaattatgcgaagaggtattaggcatggatataaaatcggtgcaaagaaaccatttatgcatttattagttaaagatttagtgaaattaatgagttcagcatatcccgagttaaaaacaaaggaaaaagatatcgctaaattaattaaaaaagaagaagaaaagttttttgaaactttagaaaaaggaatagatatattagaagagtcaatatcaaatatgtctaaatacaaaatatcaggagatattgtatttaagttaca

SEQ ID NO: 306589 - DNA, 928 bp, Unknown
  Bacterial polypeptide expressing nucleotide sequence isolated from the Sargasso Sea
aaacccccaggtgacgacatagccagctaccgagtaatttcagaccatttgagatcgacagcatttttagttgcagatggagtattgccatccaatgagggtcgaggttatgtgttaaggaggatctgcagacgtgccacacggcatgcagatttattaggctataaagagcctattttacatcaactgctaccaacattaatcgtcgagatgggcactgcataccctgagctgaaagcaaacgagatactgatcagtgaaacgttagagtttgaagaaaataaatttcgagaaacattaggtaggggactaaagatcctcaatgatgaaattgaaggggtcggagataaaagaattttctccggagaagtagcatttaaattatatgatacgttcggctttccaattgatttaacagaagacttgttaaaatctaaaaatattgaagttgataagaaaaaattcaatgaatccatggacaagcaaaaaaaacaaacaaagtcatcctggaaggggtctggtgaaaaatcaaataataaattcgattttgagcttgttgcaaaatatccaagcacaaactttattgggtacgatagtttggaaactgaatgtgagttattatctatcgtttgtgacgggaaagaggttaaaagaatagagccaaatgaagaggcaatcttgattacagaccaaagtgttttttatgctgaatccggagggcaagttgcagatacgggagaaatgaccaacattaaaaatgggatcaaattttatgtaaaagatgtgcagaaaattggtggaagtctcttttgtcatagagggttactcgcacgtgattcgaaggccctaagcatcggtcaaaaattggatcaaaatattgatcaagaaagtagaaaaaaatttctaaaaatcactctgcaacacatat

SEQ ID NO: 306590 - DNA, 856 bp, Unknown
  Bacterial polypeptide expressing nucleotide sequence isolated from the Sargasso Sea
aataaatctttgacaattgataatgataaatttcaaattttaatgaaagaaagtaaagaacttgctaagaaaaattggaaaggctcaggcgatagtgcggtagatgatatttggttttcgataaaagatagattaggtccttcagaattcttaggttatgaaactgaccaagcagaaggtattattttatcattattaaaagacaacaaagaagtaaatgaattaaatgaaaacgatgaaggaattattattttaaatcaaactcctttttatggagagtctgggggacaggtaggagatactggtgaaataacatctggaaactttaagttcgaaataacagatgtccaaaaaaaattaggtgatctgtttgtacattacggcaaagttaaatcaggaagtataaagatcaaagacaatgttgagatgaaaattgatattgatagacgtaataatataagagcttatcactctgcaacacaccttttgcatgagtctttaagaagagtattaggtactcatgttacacaaaaaggatcattagtagcaccagatagattaagatttgattttagccatatgaaaccaatttcagaccaggaaatagaaaaaatagaaaatcacgttaattctatggtacaaaaaaaatcggaggttaaaacaaggatcatgactcctaaagaagcagtaaataacggagccttggcactctttggagaaaaatatggagaagaggttagagtgttatctatgggagatgagaaagaaaggtatttttccactgaattatgtggaggtacgcatgtacgaaacactggtgacattggaaaattcaaaattattagtcaatcatcaa

SEQ ID NO: 306591 - DNA, 425 bp, Unknown
  Bacterial polypeptide expressing nucleotide sequence isolated from the Sargasso Sea
aatgacaacgacgaacgaaattaggacagcttttctagaatattttggaaaaaacggacatgaaatcctgacttcttcctctcttgtcccgaacaacgatccaaccctacttttcactaacgccggaatggttcagtttaagaatttattcactggtttggagactcgcgattataagttggctgctacctcgcaaaaatgtgttcgtgctggtggtaagcacaacgaccttgaaaatgtcggctatactgctcgacaccatacttttttcgagatgcttggaaacttttcgtttggagattacttcaaagaaagggcgattgaattagcgtggaagttgataactgaagagttccaaattgatcaaagtcgtcttcttgttactgtttatcacgatgatgaggaggcttttaaattttggaaaa

SEQ ID NO: 306592 - DNA, 883 bp, Unknown
  Bacterial polypeptide expressing nucleotide sequence isolated from the Sargasso Sea
aatggtgcccttcatgccctacttcttgggtgaagaacatccgccatcttctcgactatgcaccatacaaaaatgtgttcgcgctgggggtaagcacaacgacctagacgacatcggtcgaacgaatcgccacttcaccttctttgaaatgatgggtaacttcagttttggtgattacttcaaagcggaagccataccgtgggcttgggagtttgttactgacgtccttcaattagaaaaggaccgcctctgggtcaccgttcatgtcagcgacgacgacgctgaagaaatatggatccagtccgttgggttgccggccgagcgcatacaacgtctcgataaagacaattggtgggcggcgggagatacaggaccttgtgggccctgcagtgaaatcttctacgacctcggacccgaatacggtgacgacggcggaccggcagaaggaggggaagatcgatttattgaagtgtggaacctcgttttcatgcagttttccaatgacggctcgggcgaactgaccccacttccgcaaacaggcattgacacaggggcaggattggaacgattgttggcggttctgcagggagtgccatcagcgtgggatatagacctatttgcacctttgctgtccgaagcagagctaatcactggccttaagtacgggcaggacccagcggtcgatatttccatgcgaatttttgccgatcacgcccgcacgaccgcactactcatcagcgacggcgttttcccctccaacgaagaacggggctatgtgctccgtcgaattattcggcgtgcggtcaggcacgcgtggactctgggtgtagaggatgtcgtgatgccccgcctggttgaggtcgtgtgcgacgtcatgggtgac

SEQ ID NO: 306593 - DNA, 638 bp, Unknown
  Bacterial polypeptide expressing nucleotide sequence isolated from the Sargasso Sea
tatggctgacaaatcactaaatgaaataagaagtgcttttcttaagtattttgaaaagaatgatcataagattgttgaatctagcaatttagttccaaacaatgatccaacattaatgtttgctaattctggaatggtacaatttaaaaatgtattcacaggtttagagaaaagagactatcaaagagcaacaacctcacaaaaatgtgtaagagcaggaggtaaacacaacgatttagagaatgttggctatactccaagacatcacaccttttttgaaatgttaggaaatttttcttttggagattattttaaagatagagcaatagaattatcatggaatctaataacaaaagattttggaatagataaaaacaaactatatttcactgtttttaatgaagatgaggaagcatttaatttgtggaaaaaaattactggatttggggaagatagaataattaaaatatctacctcagataacttctggtctatgggagaaacaggaccttgtggcccttgttcagaaatattttatgaccacggagatcatttaaaaggaggcttaccaggaacaaaaaatcaagatggcgacagatatatagagatttggaacctagttttcatgcaatttgaac

SEQ ID NO: 306594 - DNA, 898 bp, Unknown
  Bacterial polypeptide expressing nucleotide sequence isolated from the Sargasso Sea
atggccagcaaaacattaaatgaaataagaaattcttttcttaaatactttgagaaaaatgatcatagaattgttgagtctagcaatttagttcccaacaatgatcctactttaatgtttgctaattctggaatggtacaatttaaaaatgtatttactggtttagaaaaaagagattaccaaagagcaactacatctcaaaaatgtgtaagagcaggaggaaaacacaatgatttagaaaatgtaggatacactcctagacatcacacattttttgaaatgttaggaaatttttcttttggagattattttaaagatagaggaattgaacttgcttggaatttaataacaaaagattttgggatagataaaaataaactatattttactgtatttaacgaagatgatgaagcctttaatatttggaaaaaaattactggttttggtgaagatagaataattaaaatttcaactgcagataatttctggtctatgggagaaacaggaccatgtgggccttgctctgaaatattttatgatcatggtgatcatttaataggaggattgccaggcacaaaaaatcaggacggagatagatatatagagatttggaacttagtttttatgcaatttgaacaagtttcaaaaagtaaaagaataaatcttcccaaaccatcagtagatactggcatggggctagaaagaatagcagctttactgcaaggtactcatgataattacaaaacagatcacttcataaaactaattaattctacagctgaagttgtaaaaacaaggcctaatgaaaaaaatatatcaagctttagagttatagctgatcacttaagggccagctcatttttaattgctgaagggtgttttaccatcaaacgaaggt

SEQ ID NO: 306595 - DNA, 634 bp, Unknown
  Bacterial polypeptide expressing nucleotide sequence isolated from the Sargasso Sea
aatgacatctcaactaattaaaaaaatagttactggagatgagataagaaatgcttttttaaaattttatagtgaaaaattacataaaatcattccaagtgcatctttgattccagatgaccctacggttatgctcacaattgctggaatgctaccttttaaaccagtttttttaggtttaaaagaaagaccatcaaaaagggctacatctagtcaaaagtgcatcagaacaaacgatatagaaaacgttggagttacagcaagacaccacactttttttgaaatgcttggtaatttttcttttggagattattttaaacgagaagctattcaatgggcttgggaattagttactaatatttatcaactttctgttgaaaatataattgttagtgtttttcatgcagacgaagagtctgcaaaaatttggaaagatgaaattggtattcatccagataggatagtgaaactaggcgaggaagttaatttttggtcatctggcaaaacaggtccatgtggaccttgttcagaactttattatgattttcatcctgaaaaaggtctgcagaatattgatttagaagatggagatcgttttattgaattttataatcttgtttttatgcaaatataa

SEQ ID NO: 306596 - DNA, 1349 bp, Unknown
  Bacterial polypeptide expressing nucleotide sequence isolated from the Sargasso Sea
catggtgcaatttaaaaatgtttttactggattagaaaaaagagactatcaaagagctactacttcgcagaaatgtgtaagagctggaggaaaacataatgatcttgagaatgtaggttatacaccaaggcatcatactttttttgaaatgttgggaaatttttctttcggcgattattttaaagatagagcaatcgaacttgcttggaatttaatcacaaaagattttggtttagacaaaaatagactttacgttaccgtttatcacgaagatgacgaagcatttaaattatggaagaaaatagctggttttaatgatgataaaataataagaatcgcaacttcggataatttttggtcaatgggtgaaactggtccatgcggaccttgctctgaaatattttatgatcatggtgatcatttaaaaggtggtttgcccggctcaaaggatgaggatggagatagatttattgaaatttggaatttagtttttatgcaatttgaacaaatttcaaaagaaaaaagaattaatcttccaaaaccttcggttgatactggaatgggtttagagagaatagcagcattactgcaaggcacacatgataattataaaaccgatcatttcacaaaattaatagattcaatttctgaaaatcttaaagtaaaagcagaagaaaataatattgcgagttttagagtaatagccgatcatcttagagctagctcttttttaattgcagaaggtgttttaccttctaatgaaggcagagggtatgtcctaagaagaattatgagaagaggaatgagacattcccatctcttaggatccaaagagccaattttttttaatatttttaaaactttaatggatgaaatgaaaggaaattatccagaactagaaagagcacaatctcttattaaagaaactttaaaaatggaagaagaaaaatttttagttcttttagatagaggaataaaaattttaaatgatgaaatatctaaaatagataaagttcttccgggagaagtagcttttaaactttatgatacatatggatttccattggatttaacagaagatattttaaaaagtaaatcacttaaaattgataatgaaaaatttaattctttaatgaaacaaagtaaagaattagcaaaaaaaaattggaaaggatcaggagatagcgcaattgatgatatatggtttggtataaaagataaattaagtgctacagaatttctaggttatgagaccaatcaagctgaaggaatagttttatcagtgttaaaaaataataaagaagtaaatgaacttaaagttggtgatgaaggaaatgttgatagtaaac

SEQ ID NO: 306597 - DNA, 1456 bp, Unknown
  Bacterial polypeptide expressing nucleotide sequence isolated from the Sargasso Sea
ccttgcggaccttgctccgaaatattctttgatcatggtgatcatttaccaggtggattacccggaactaaagatgaggatggagatagatttatcgaaatttggaatttagtctttatgcaatttgaacaagttacaaaagataaaagagtaaatcttccaaaaccatctgtcgatactggtatgggtttagagagaattgcagctttattgcagggtacacatgataattatgaaacagatcatttcaaaaaaataattaactcagcctcagaaattgtaaaagttaaatcagataaatctaatctttcaagttttagagttatagccgatcacttgagagctagttcatttttaattgctgaaggtgttttaccttcaaatgagggaagaggatatgttcttcgaagaataatgagaagagggatgagacattctcatttacttggatctaaagaacctgttttctataatttatttgatactcttaaaaatgaaatgtctggaaactatcctgaattagttagagccgagtctttaattaaagaaactttaaaaatggaggaagaaaaattcttagttctactagatagaggaattaaaattttaaatgatgaaatatctaaaatagataaagttttgccaggtgaagtagctttcaaattatatgatacctatggtttcccattagatcttacagaagatattttaagaaataaatcaatgtcgattgatactgaaaagtttcaatctttaatgaaggaaagtagagagcttgctaagaaaaattggaaaggttcaggtgatgcagcggttgaagatatctggtttgaaataaaagataaattagaagcaactgaatttttaggatacgaaactaatcaagccgaaggtgtcgtattatctcttttaaaagacaacaaagaggtagatcacttaaaagaaaatgatgagggaatgattatagtaaatcaaactcctttctatggtgagtctggaggtcaggttagtgatactggtgaaatagtatcaaatgattttaaatttgaagtaactgatgttcaaaaaaaacttggagatttatttgtacattacggaagggttaagagtggatctataaaactacaggaaagtgtagagttaaaaattgatgtggaaagaagagacaatactcgagcttatcactcagcaactcatttattacacgagtctttaaggagagttcttggtacgcatgtcactcagaaaggatctttagtagaaccaagcaggttaaggtttgatttcagccatatgaagccaattttaaatgaagaaattgataaaatagaagagtttgtaaacaaaatggtttcaaaaaaaactgatgtaaaaactagattaatgacacctgatgaagcagttgaaaatggtgctttagcattatttggggaaaaatatggtgatgaagtgaggg

SEQ ID NO: 306598 - DNA, 1557 bp, Unknown
  Bacterial polypeptide expressing nucleotide sequence isolated from the Sargasso Sea
acatgacaattataaaactgatcatttcttaaaattaattaattcaatctctgaaagtgtaaaagtaaaacccgatgaaaataatttatcaagttttagagtgatagctgatcacttaagggcaagttcgtttctacttgcagaaggagttttaccatctaatgaaggaagaggttacgtcctaagaagaattatgagaagaggaatgagacactcacatttattaggatctaaagaaccaattttttttaatattttcaaaactcttttagatgaaatgtctcaaaattatccagagttaaaaagagcagagtcacttatcaaagaaaccttgaaaatggaggaagaaaaatttttggttttattagaaagaggcatgaaaattctggatgatgaaatctcaaaaatagataaggttttgcctggagaagttgctttcaaactttatgatacttacggatttccgttagatttaactgaagatattcttaagaacaaatctctcaaagtagataacacaaaatttgatgagatgatgaaaaaaagtagagaacttgcaaagaaaaattggaaaggttcaggggatagttcagtcagtgaaatttggtttaatctaaaagagaaaatcggtcctactgaatttttaggttatgagactaatcaggcggaaggaagtgttactgcaataattaaagatgataaagaaattcaacaattgaaagaaggcgaagaaggacaaattattttaaatcaaacccctttttatggggagtccggtggtcaggttggtgacaaaggcacgataacttcgggtgaaaatgaatttgaggtaactgatgttcaaaaaaaaataggaaacttatttgtccactttggtaaagtttcaaaaggatcaattaaacttaaagataatgttgaattaaaaataaacacagaaagacgtcaaaacataagagcatatcactcagcaacgcatttattacatgagtctcttagaagaactttaggaacacatgtaatgcaaaaaggatcattagttgcgccagacagattaagatttgattttagtcatatgaaaccaatcacagatgaagaaatgaaaaaaatcgatgaaaatgttaacaagtttataaactcaaaaacggaagttgttacacgactaatgactcctgaagagggaattgaacaaggggcaatggctttattcggtgaaaaatatggagatgaagttagagttgtgtttatgggtgaagaaggtaacaaatatttttcaacagaactttgtggtggaacccatgtaaaaaacactggcgaggttggtaaatttaaagtggttagccaatcgtcaatagctgcgggtgttagaagggttgaagcattaagagataaacaacttgaagaatatcttaagtcaaaagataagatgtctagtttgtcttcccaaaaaaatgaagaaactatcaaatcgttatcaagtgaaatcactaagcttggaggaaaaccaaataaaaaatctgaagatcttaaaattacgattaaggagctgacaaaacaatt

SEQ ID NO: 306599 - DNA, 800 bp, Unknown
  Bacterial polypeptide expressing nucleotide sequence isolated from the Sargasso Sea
atcagaagttaaaacaaggattatgactcctaaagaagcagtaaataatggagctcttgcactctttggagagaaatatggagaggaagttagagtattatctatgggagatgagaaagaaaagtatttttccactgaattatgtggaggtacgcacgtacgaaacactggtgatattgggaaattcaaaattatcagtcaatcatcaattgcagcaggcgtgagaagagtagaggctcttagagagaatcaattaaatagttttttacaaaataaagagaaattatctgatttatctgcacaaaaagatgaagaaatgattaatgacttatcaaaacagataattaaattaggcggcaaaccaaatcttgaaaatgaagataataaaattttaattaaagaattatcaaaacaactagagcaattgaaatttagttcaattttagaaaataattcaaaaaatataattcaagatgttaaaatcaataatacaagtgtaagatttcaaaaagttgatgaccttccacctaaagagctaagaaaattggttgatgctggaaaaaaagagctaaaaacaggaattgtgatagtttttgctagtttagaagacaaagtaggtcttgcagttgggataacagatgagcttattgataagtatgatgcagtcacatttgctaaaacaggatctgaaattattggtggaaaaggtggtggtggtagaaaagattttgcacaagcaggtggccaatttaaagataaaattgatgacgcttttgaaaaaattaagactttaatttagt

SEQ ID NO: 306600 - DNA, 1564 bp, Unknown
  Bacterial polypeptide expressing nucleotide sequence isolated from the Sargasso Sea
atcgataagcccttcctcgtcaccatgggggcggcggcgattgcattgctcaagggggctcaccccagcgtcatcgagcgccaggaagtgatcctggccgaattgcagcgggaggaagcgcgcttcctggagaccctggagcggggcgagaagctgctggcggaggtgctggcctccaagcccacccagatcagcggtgcccaggcctttgagctttacgacacctacggcttcccgcttgagctcacccaggaaatcgcggaggatcagggcttggcagtcgaccttgatgggttcgaggcggcaatggaggagcagcgccagcgcgccaaggcggccgcggtgagcatcgacctcaccctccaggatgcgatcgagcaggtggctggtgagcagagttcgacggcgttcaagggatacgacgccttggaccatgccggcacggtgcaggccctggtggtgaatggtgcaccggcctcatcggcgtcggccggagacgtcgttcaggtggtgctcgacagcactcccttctatggcgaaggcggcggccaggtcggggatcgcggatcgctcagtggtatcgacgtcatcgtggccatcgactccgtgagtcgcagtcgggatgtgttcgtgcattcaggacggatcgaacggggtcaattggccctgggtgacgccgtcaatgcccaggtggatcgcacgtgccgccggcgggcccaggccaatcacaccgccactcacctcctgcaggctgccttgaagcaggtggtggattcgggcatcggtcaggcgggctccctggtggatttcgacaggctgcgcttcgatttccattgcccgacggcggtcacccctgagcaactgactcagatcgaaacgttgatcaacagctggattgctgaggcccacagcctcgaggtgcaggagatggcgatcgagcaggccaaggcggctggtgctgtggcgatgttcggcgagaaatatgccgatgtggtgcgggtggttgatgtgcccggcgtatcgatggagctctgcggcggcacccatgtggctaacaccgctgagatcggtttattcaagatcgtggcggaaagtggcgttgcggccggcatccgccgcatcgaagctgtggctggcccagcggtgctcgcctacctgaatgagcgtgacgcggtggtgaagcagctgggggatcgcttcaaggctcagccgtccgagatcgttgaccgagtggcgatcctccaggaggagctcaaggccaccggcaaggcgctggctgcggctcaggcggagcttgcggtggccaaggccgctgctctggccgccaaggccgaggccgtgggtgacttccagctgttggtggaacgcctcgacggcgtggatggggccggtctgcagggagccgcccagagcctggccgatcagttgggggatggcgcggctgtggtgatcggtggtctgccggatcccgctgaccttggcaaggtggtcctggtggctgcctttggcaagccaggtgatcgccgccaagctccaggccggcaagttcatcggcggcatcgcc

SEQ ID NO: 306601 - DNA, 2074 bp, Unknown
  Bacterial polypeptide expressing nucleotide sequence isolated from the Sargasso Sea
tttctggtgaatatcattgtgagtgtttttcacgaagatgaagagtctgcaaaaatttggagagatgaaattgggattcatccagataggatagtgaaactaggtgaggaagataatttttggtcatctggcaaaacaggtccatgtggtccttgttcagaactttattatgattttcatcctgaaaagggtctgcagaatattgatttagaagatggagatcgttttattgaattttataatcttgtttttatgcaatataatcgtgaccctaatggaaaattgacagatttaaaatttaaaaatattgatacaggaatgggtcttgaaaggatggctcaaatactacaaaaaaagcaaaataattatgagacagatttaatttttcctatcattcaaaaaatttgtgagattgccaatattgattatttttcatcagatgataaaagtaaaatttctttaaaaatcattggtgatcatacaagagctgttattcatttaatttctgatggagtagcagcaagtaatctcggcaggggatatatattaagaaggcttattagaagaatggtcagacatgggagattattaggtataacaaatgaatttttacctcatattgctactgtcgggattaatttaatgcaaaataattatcctgatttaaaaaataataatgatttaattttgaatgaaataaaaattgaagaaataagatttagggaaactcttgaaagaggagagaaattgctagatgagttaatttcttcagggcagaaattaatttctggttttaaagcttttgaactttatgatacttatggatttcctctagaacttactgtagaaattgctgaagaaaatagtatcagtgtagatgtaaagggttttgaagaagaaatgaatgcacaaaaagagagagctaaagctgcttcaagtaatattgatttgacattagagggatcattagagcgagaaattgatctttttaacaaaactgtttttaatggttatgattcacttctttccgaagccgaaataaagggtatattcttggattcaacattagttaagcaagcaagtgaaggtcagaaagttttaattgttcttgatcagacaactttttatggagaatctggcgggcaagttggtgatattggaacgatattttcaaaagatgtagaggtcttggttgataatgttatgcgaaagaaaaatgtttttttacattatggaacgatcaaaaaaggaatattaactattggacaaaaagttaagacaaatgttagctcctctaatagagctaaggctgctgcaaatcatacagctactcatttattacaatctgcacttaaatcagttgttaatgaaagtgttggacaaaaaggttcattagtagcctttaataaattacgatttgactttaattcctctaatcctatttctaaagatcaaatttctaagattgagactttagttaactcttggattatggaaaatcatgccctagaaataaaaaatatgtctaagagtgaggctcttgaaaagggcgcagtcgccatgtttggagaaaaatatgatgatgaagtgcgcgttgttaatgtaccaggagtttcaatggaactttgtggtggtacacatgttaaaactacatctgaattaggttctttcaaaataattagtgaggaagggatctcagcaggtgtaagaagaatcgaagcattatcaggccaatcagcattagactattttagtgatagaaatgctttagtaaaccaactaagtgatttgctaaaagcaaatcctaatcaactttttgaaagggttaataatttgcaatcagagcttattaataagaataaagagatacaaaaaatgaaagatgaaattgcatattttaaatactcttctataaaatcatcctcacaaattgtaaattctttttcaattttaataaatcagattgatggcttagatgggaattctttgcaatctgcagcacttaatttaacttctcatttgggaaataaagcaatagtgattcttgggggaataccaaatccagaaaatagaa

SEQ ID NO: 306602 - DNA, 2668 bp, Unknown
  Bacterial polypeptide expressing nucleotide sequence isolated from the Sargasso Sea
atggccgacaaatcactaaacgagataagaaaaactttcttaaaatattttgagaaaaacggtcatacaatcgttgactcgagtaatttagtgccaaataacgatccaacgttgatgtttgcaaactcaggaatggttcagttcaaaaatgtttttacaggccttgaaaaaagagattataaaagagctacaacttctcaaaaatgtgtacgagctggtggaaaacacaatgatttagaaaatgttggatatacaccaagacatcacacattttttgaaatgctgggaaacttttcatttggggattattttaaagaaagagcaattgaacttgcttggaacttaattacaaaagattttggattagacaaaaataaactttatttcactgtttttaatgaggatgatgaagcctttaatttgtggaagaaaataacaggttttggtgaggacagaataattagaataccaacatcagacaacttctggtcaatgggcgaaacaggaccttgtggaccttgttctgagatattttatgatcatggagatcacttacaaggaggtcttccaggaacaaaagatcaggatggtgatagatatattgaaatctggaatttagttttcatgcaatatgagcaagtaactaaagataaaagaattgatttacccaaaccatctgttgatactggaatgggacttgagagaattgctgcgttacttcaaggtacacatgataactataaaacagatcactttttaaaattaataaattcaatttctgatactgttaaagtaaaacctacagataaaaacctgtctagttttagagtaattgcagaccatttaagagcaagttcatttttattagcagaaggggttttaccttcaaatgaggggcgaggttatgtattgagaagaattatgagacgaggaatgaggcattcacatctacttggagctaaagaaccaattttttataatatatttaaaactttagaaaatgaaatgtctggtaattatcctgagttggaaagagcacaatccttaattaaagaaaccttaaaaatggaagaggaaaaattcttagtacttttagaaagaggtatgaagatattagatgatgagattgaaaagatagataaagttttacctggtgaagtagctttcaaactttatgacacttatggtttccctttagacttaacagaggacattcttaaaaacaaatctctaaggttagaccacgaaaaatttaacaaactaatgaaagacagtaaggaacttgcaaagaaaaattggaaaggatcaggcgatagttcagtagatgaaatatggtttggaattaaagataaaataggctcaacagaatttttaggttatgaatctaatcaggcagaaggagtaattttaagtttaattaagaacaacaaacaatccaatagtttaaaagaaggtgatgagggtatggtaattttaaaccaaaccccattttacggtgagtccggaggacaagttggtgataatggaacaatatctaatggaaataatatttttaaagtttcagatgttcaaaaaaaattaggtaatttatttgtacattacggaaaagttgaaaaaggaaacttcaatttaaaggataacgtagaacttaaaattgatattgaaagacgagaaaatgttaaagcatatcattcagcaacacatttattgcacgagtctttaaggagaatactaggaacacacgtgatgcaaaaaggatcattagttgcacctgataggttgcgttttgattttagtcatatgaagccaatttcttcagatgaaatgacaaaaatagatgaacatgtaaatcaaatggtgaataaaaaatcagaggtaattacaagaataatgactccaaaagaaggtattgctcatggtgcattagcattatttggagaaaagtatggagatgaagttagggttgtttttatgggtgatgaaggaaataaatatttttcaacggaattatgtggtgggacacacgtaaaaaataccagtgatattggtaattttaaagtagttagtcaatcagctatagcagcgggagttagaagagttgaagctcttagagacaaacaattagatgaatttttaaaaaataaagaaaaacaatctaatctttctgaacaaaaggatgaagaaacaataaaaatattatttgaagaaattaaaaaacttggcggaaaaccaaatttaaataaagaaaataaaaaagatttaattaaagaattaaataaagaattagaaaaattatccatcaatgaaataataaataataaatcaaaaaatattattaatgatgaaaaaattaatggtgtaaatgttagaatgcaaaaaattgatggacttcctccaaaagaattaagaagattaattgataatggaaagaaagaaataggggaaggaatagtgattatttttgcaagcaaagacgataaagttggtttagcggtaggtataacagataagcttaaaagcaaatatgatgctgttaaatttgttaaaaatggatcagaaattattggtggaaaaggcggtgggggaagacctgattttgctcaagctggaggagtaaacaaagataaaattgaggatgcttttaacagcttaaaagctttagtttaat

SEQ ID NO: 306603 - DNA, 1091 bp, Unknown
  Bacterial polypeptide expressing nucleotide sequence isolated from the Sargasso Sea
tatggctcaaaaatcattaaatcaaataagagaaactttcttaaaatattttgagaaaaatgatcataaaatagttgagtctagcaatcttgtcccaaacaacgacccaacactgatgtttgctaactctggaatggttcagtttaaaaatgtgttcactggtttagaaaagagagattatcaaagagcaacaacttcacaaaaatgtgtaagagctggtggaaaacataatgatttagaaaatgtaggctatacaccaagacaccatactttttttgagatgttaggaaatttttcttttggtgattatttcaaagaaaaagcaattcattatgcgtgggatttaattactaaagactttggaatagataaaaataaactttatgtaacggtttttcatgaagatgaagaggctttcaatttttggaagaaaatagcaggttttaaagatgatagaataataagaatttcaacttcagataacttctggtcaatgggtgaaacaggcccttgtggcccatgttcggaaattttttatgatcatggtgaccatctaaaaggaggtttgccaggttcaaaagatgaagatggagatcgttttattgaaatttggaacttagtttttatgcaatatgagcaagtttcaaaagataaaaaaattgatctaccaaaaccttctgttgatacaggtatgggcttagaaagaattgctgcattactgcaaggtacttatgataattatgaaacagatcattttaaaaaattaattcaatcgacttctgatattgttaaaaaaaaacctgatcaatctaatatttctagcttcagagttattgcagatcatttgcgtgcaagttcatttttgattgctgagggagttttaccatctaacgagggaaggggctatgtacttagaagaattatgagaagaggaatgagacattctcatttgttagggtctaaagcacctgtatttttatatttatttgaaactcttaaaaatgaaatgtcaggaaattatcctgaacttaaaagagcagagtctttaattaaagaaactttaaaaatggaggaagaaaagtttctgattt

SEQ ID NO: 306604 - DNA, 1126 bp, Unknown
  Bacterial polypeptide expressing nucleotide sequence isolated from the Sargasso Sea
tagttttggagactatttcaaaaaagaagcgatcaaatatgcctgggaactgttaactgaaatttacaaaatttctcctgaaaaattatggataactgttcatatagaagaccaagaatcagaaaagatttggctaaatgaaatcggagtccaaccagatcgcatttcaaagctagatgaggataatttttggtctatgggggatacaggaccctgcggaccttgtagtgaaatattttatgatcatggtgaggcattttcaggaaagtcgccggcagaaggcgttgatactggagatagatttgttgaaatatacaatttggtctttatgcagttcaataggagtcctgatggggaactttctcccttacccaaaccatccgttgataccggcatgggccttgaaagaatcactgcggtgttgcaaggcattaacgacaactatgaaactgatctgttcaaagatttgataaaaaaaatagcatcgaacatgggtgaactaaatcttgaaaatccatctcttagagttatcgcagatcatctaagatctagttcatatttgatagccgatggcctctccgtttctaacgaaggcaggggttacgttctaagaagaatcataagaagagctttaaggcatgcatataaattgaatcctgattatgaaaaacctctttcaggtcttgtgaaggagttagtatcccaaatgggaaaagagcatgctcttttaaataaaaataaaaaaaatatagaaaaaaccatagaaaaagaagaacaacagttctccctgaccctaagaaatggtatgcgaatttttgaggatgagacaccgaaggatgtaaatgaagtatctggtgaactcgctttcaaactttatgatacttttggatttccgctagatatgaccatagatctagcaagggaaaaaaatattgcagtgaacataaaggaatatgaggaactaatggaacaacagagagatcttgcgaaagcttcatctaatttcgattctttgatgccgtcatcaatttccttagataagccaactaactttatcggatatgacaaaagcaaatgtaaatctaaagtgctaaaaatttttgtaaatcaaaaagagcaagaaaca

SEQ ID NO: 306605 - DNA, 895 bp, Unknown
  Bacterial polypeptide expressing nucleotide sequence isolated from the Sargasso Sea
ctgataatttttggtcaatgggagatacgggaccttgtggaccatgcttcagaaatattttatgatcatggcgataagtattttggtggccctcctggttcagtagatgaggatggagatcgatttattgaaatatggaatttagtttttatgcaatatgagcaggttgacaaaaaaaccagattagatttacctaaaccatgtgtagatactggaatgggattagagagaataactgctttattgaatggcagtaatgataattatacgtcagatctatttacaaatattattgatattactcaggaatgtatccaaaaaaaaataactgaagagaacaaatctagttttagagttattgcagatcatttaagggcatcatctttcttaatagccgatggggttttaccctcaaacgaaggcagaggttatgttttaagaagaatattaagaaggggcataagacatgcttactcattaggttctaaggatgcattatttcatgaaatttttgaagaattgaaaaatttaatgggagatttttacaaagaactcaatacaggtgctgatgttattaaggaaactctgtactctgaggaaataaaatttagagaaacattaagtaagggcttggagatacttgggcaagaattacctaagattaaaaataataaactagatggcagaatagcatttaaattgtacgacacctttggatttcctctagatttaacacaagattatttaagatcaaaaaatatcagcgtagatgttgaatcatttgatgctgcaatgaagcttcaaaaagaggaagccagatcctcatggaagggtagtggagatggagataccaaaaaactatggtttgatttagctaaaaaaataaaaccaacaa

SEQ ID NO: 306606 - DNA, 532 bp, Unknown
  Bacterial polypeptide expressing nucleotide sequence isolated from the Sargasso Sea
atgaactctaatcacgtccgtaaagcattcattgattattttaaaaacaatgatcataaacacataaaatcaggttctttagtcccagaaaatgacccttctttaatgtttgcgaactctggaatggtgcaatttaaaaatgttttcactggtatggaggaaaaagatttcaaaagagctactacttcacaaaaatgtgtcagagcaggtggtaaacataacgatttagaaaacgttggatttacaacaaggcatcacactttttttgagatgttgggaaacttctcttttggcgactattttaaagaagaagcaattttatatgcatggaacttaattaccaaagaattcaaaattaatgaaaataagttattggttactatatatcatgatgatgaggtcgcagaaaaattttggaaaaagattggaaatttgcctgacaatcgaataatcaaaatttcaagttctgataatttttggtcaatgggagatacgggaccttgtggaccatgcttcagaaatattttatgat

SEQ ID NO: 306607 - DNA, 904 bp, Unknown
  Bacterial polypeptide expressing nucleotide sequence isolated from the Sargasso Sea
tatggcagacaaaacacttaatgaaataagaagtacttttctcaaatactttgagaagaatggtcataaaattgtggagtctagtaatttagttccaaacaatgatccaacattaatgtttgcaaactctggaatggttcaatttaaaaatgtttttactgggttagaaaagagagattataaaacagcaactacatcccaaaagtgcgtaagagctggaggaaagcataatgaccttgaaaatgttggttatacaccaagacaccatactttttttgagatgcttggaaatttttcatttggagattattttaaagaaagagcaattgaactagcttggaatttagtaaccaaagactttggtttagacaaaaataggctttatttcacagtttttaacgaagatgaagaagcacttaatctttggaaaaaaataacaggactgggagatgataaaattattaagattgcaacatcagataatttttggtcgatgggtgaaacaggaccttgtggcccttgttcagaaatattttatgatcatggtgaccatctaaaaggtggcttgcctggcacaaaagatcaagatggtgatagatacatcgaaatttggaatttggtatttatgcaatttgaacaaatttctaaagaaaaaaggataaatttacctaaaccttccgttgatacaggaatggggctagagagaattgcagccttgcttcagggcacacacgataattatggaacagatcattttaaaaaattaataaattcaatttctgaagcagttaaagttaaacctgatcaaaaaaatgtttctagttttagagtaatcgcagatcatttgagagcaagttcgtttttaattgcagaagggtgtcttaccatcaaacgaaggaagagg

SEQ ID NO: 306608 - DNA, 1872 bp, Unknown
  Bacterial polypeptide expressing nucleotide sequence isolated from the Sargasso Sea
ctatagaattttctgggatagaggcaaataaggaaagtttaatttcacatagggtaatttcagatcatttaagagcctcagcttttttaattgctgatggagtcttaccttccaatgaaggtagaggatatgttttgagaagaattatgagacgagctatgagacatgtccataaattaggtataaaagatcctcatatgtttcgtttagttgatagcttgaataatcaaatgagtgaatcttttactgaattaaatcgtgcaaagttattaatagaaactactcttaaagatgaggaaatgaaatttagagaaactttagaaagaggcttagggttattagatcaatctataaaaaaattaaataatacagaagccttaccaggaagtattgcttttaaattgtatgatacatatggttttccagtagatcttacggcagatatattgagaggtaagggcagagaattagattataaaggttttgaagatagtatgaatttacaaaaagaaactgctagacaagcatggagtggaacaggagataaagaaactgattctacttggataaatatcaaagaaaggcaaggagaagttaaatttcttggttatgaaactagtcaaactaaatctaaagtaaatagtatagtcataaataacaaagaagaaaaagaggttaaaattggagaagaggctaaagttatgacaaatgaatctccattttatggtgaatcaggaggacagcttggcgatataggaaatatgaaatggaaaaacggagaagctttagttttagatactaaaaaattcgaaaacttaattatccattttgtaaaagttattgaaggagttctaaaagttgatgatgaagtaattatggagatagaccttgatagaagaaattctttaaaaatacaccatagtgcaactcacctgcttcatgaatctttaaggagaaatttaggtgaacatataagccaaaaagggagcttagtagcgccagataaactaagattcgatattagtcataataaaccaattactaataaagatatagaaataattgagaaagagattaataataaaataagagaaaatcttgaagtttctacagaaataatggcaatagaagatgctcaaaatgttggtgctttagcattatttggagagaaatatggagatgaagttagagtagtgaaaatgcaaaataatgctaacgataaatattctattgagctatgcggaggtactcatgttagtagaacaggtgatattggaatgtttaaaataatatctgagtctgcactaggctccggcataagaagaatagaagcagtagctggtaaggctgcattagatgtatttcaaaattataataacttaattggtgaaatttcttctgagatgaaagtatcaagtgaaaatttaaaagatagaataacttccttaattgcagataaaaaaatactagaaaaacaaataattaatttaaacaaaaaattaaatacttcagatatttcagacacaggaacacagagctctctaattaatgatgtaaagatagtaagcaaagttttaaatgcgatgcctcctaaagagcttaagggcctagtggatgaaattaaaaaagatattgttactggtatagtaatagttattagtactttagataaaaaagcttctatagtcgttggagtaactgaagatattacaaataagtatgatgcagtggaatttacaaaagctgctgtagagattttagacggaaaaggtggcggaggaaggcctgatatggcacaaggaggggggcctaactatcaaaaaacagaagaagctataactacaattttaaacttaataagatctaagtaaa

SEQ ID NO: 306609 - DNA, 1723 bp, Unknown
  Bacterial polypeptide expressing nucleotide sequence isolated from the Sargasso Sea
gatgaatagtaaccaaataagaacagagtttttaaattattttgaatctaaaaatcatgacgttatcaagtctgcatctttaataccccacgacaatactttgttattcacagctgcaggaatggtacccctaaaagattatttctctggaaataaagtccctgataatccaaatatggcttcttcacagaaatgtataagaacaattgatattgatattattggagatactgacagacatctttcattttttgaaatgttaggaaattttagtgttggaaagtattttaaaaaagaagcaatacgttattcgtatgaatttataacagaagttttatcaattaatccagaaagattatggttcacagtttataaagatgataaagaatctttcgatatttggctcaatgaaataggcgttccggaagaaagaatacagtatggagataaagataatttctggcatatgaatatccctggaccctgtgggccctgttcagagatttttattgacagaggatcaaaatatggaccagatgggggaccaattggagggggagaagaccgatttgttgagatatggaatcttgtatttatggaatctatacaagataaaccttttgaagtagtaggaacattaccaagtaaaaatatagatactggtatgggtttagagagaattgcaatgattatgcaagaaaaagaatctttgtttgaaacagatttatttagttcaatacataaagaactatcaaaaaaaataaaaaactcagatgctaaatacgaaaaaattattttagaccatataaaagcatccacttttatgcttagtgatggtgttgttcctactaacgaaggtagaggttatatcttaagaagactcattagaagagctttaagagcttataataaattaactgatgagccatcatcactcgattttcttatcaaagaagttacaaaattgtacagcgaaccttatcctgaacttgataaaaatattgaaaaaataacaaaattatttaaaactgaagaggatttattcggcaaaacattaaataaaggaatccaagaaattaatacaattcttgaaacaggtgaactatctgcaaaacaagctttctatctatttgaaacatacggttttccttttgaattaacacaagaaattgctgttgagaacaacataactttaaatgaagaagattttcaacaatattttgaaaatcataaaattaaatctaaaggttcctctactaaaatagagcaaaatatgaaattagatatagattccaatgatttttgtggatatgaaacaacagataccgtatctgagatatatcatgtagaacctctagaaaataaatctataatatttactaaaataaatccattctatttcgaagcaggtggacaaatttctgatgaaggaaaaataagcatcgatgaaaaggagtattttgttgagaaagttgttcagagtgaaaatggagctacaggcttagttgtcgacataaataatgtaaacataggtgatgaagttcaattaactgtagatgatacttttagaaatgcagtttctaaaagtcatagtgcagcacatattgtacattctgcattaagaaatattttaggggatcatgttgcacaagccggttctaacgttgcgcctggtagatttagatttgattttagccacactcagaaagtctctgatgaggag

SEQ ID NO: 306610 - DNA, 1135 bp, Unknown
  Bacterial polypeptide expressing nucleotide sequence isolated from the Sargasso Sea
tatggcaaaaacattgaatcaaataagggaaacgtttctcaaatattttgagaagaatgatcataggattgtagagtcaagcaatcttgtgccaaataacgatcccaccttaatgtttgcaaattcaggaatggttcagtttaaaaatgtttttactggattagaaaaaagagattatcaaagggctacaacatcacaaaaatgtgtaagagctggtggaaaacataacgatctagaaaatgttggatacacaccaagacaccatactttttttgaaatgcttgggaatttttcttttggagattattttaaagaaagggctattgaattagcttggaatttaataaccaaagattttggtttagataaaaatagactgtatgtaacagtttttcatgaggatgaagaagcctttaattattggaagaaaattgcaggttttagcgatgataaaatcattagaatagcaacatctgataacttttggtcaatgggagaaacaggtccttgcggtccttgctcagaaattttctatgatcatggtgaacatttaaaaggaggtttgccaggctcaaaagatgaagatggagatcgttttatagaaatttggaatttagtatttatgcaattcgaacagatatcaaaagaaaaaagagttagtttgccaaaaccatctgttgataccggaatgggtttagagagaattgctgcacttcttcagggcacacatgataattaccaaacagatcattttaaaaaactaattagttcaacatcggatattgtaaaagttaaacctaacgaaaaaaatttatcaagctttagagttatagctgatcacttaagagctagctcatttttaattgccgagggagttttgccatcaaatgaaggcagaggttatgttcttagaagaattatgagaagaggaatgagacattcacatttgttaggatctaaagaaccaatcttcttcactatctttaaaactttaatggaagaaatgaaaggtagttatcctgaactacaaagagcggaatctttaattaaagaaactttaaaaatggaagaggaaaaatttttagttcttttagatagaggaattaaaattttaaacgatgagattacaaaaata

SEQ ID NO: 306611 - DNA, 2512 bp, Unknown
  Bacterial polypeptide expressing nucleotide sequence isolated from the Sargasso Sea
atgagaattaatgatcttagaaacgctttcatttcatattttgaaaaccagggccataagcatattcattcgagcccacttgttccacagaatgatccgacacttatgtttgccaattcaggaatggtacaatttaaaaatgtatttactggattagaaagtagagactacaagcgagcagtcactgcccaaaagtgcatcagggctggaggtaagcataatgatttagagaatgttggctatacgttaagacaccacactttttttgaaatgttgggcaacttttcttttggtgattattttaaagaagatgcaattgagtatgcctggaaatttatcacatctgaacttgctataaacaaagataaactatgcgttacaatctaccatgatgatgaacaggcgtatgaatcttggaaaaaggttgctggccttagcgatgatagaataatcagaatatctacaaaagataatttttggtcaatgggtgaaactggtccttgcggaccttgttctgaaatattttatgatcatggtgatcagtataatggaaagcttcctagtgaagctgatgaaacaggggacaggtttgtagagatatggaatttagtatttatgcagttcgaacaattgaattccaatgatagaatagatcttccaaaaccttctattgatacagggatgggcattgagcgaattgcagccgttatgcaaggaactaatgataattatcaagttgacagtataaaagagattattggtaattctatagagcttactaaatctgatgatgataagctaatttcaagtcatagagttattgctgatcatttacgttcttcctgcttcttgattgcagatggggtattgccttctaatgaaggaagaggatatgtgctaagaagaataatgagaagagcaatgcggcatgttcatcttcttgattataatgatacattgatgcaccaattagtgcccacgttaatgcttaatatgaaggaagcatatccagaattattaagagctgaattattaataaaagagacgttgaagtatgaagaggaaaaatttaagaatcttctagataaaggtatttcgcagctagataatataactaaagatttacgatctggtgatacttttccaggagactcagcgtttaaactttatgacacgtacggatttcccattgatcttacgcaggacatacttagaagtaataatatttcgatagatatagatggttttaataaaaaacttgaagagcaaaaagaattagcgagaaagaattgggcaggtgcaggcggttctgtgactgataagatctggtttgagttaaacaaagaattattagctactgaatttcttgggtacaatggtactgaaactcaaggtgaagttctgtcaattattaaagatgataaaagagtcactgaattaaaagaaaaagaagaaggaattattatgcttaaccaaactgtgttttatgctgagtcgggtgggcaaattggagatacgggagtgatacagggagaagattttgagttttcagttatggatactcaaaaaaaggacaaattaattctgcacataggagtcatgattaaaggaacaattaaaaatggatctgatgcagttttatcagtcaaccaaaaacaaagaaatgattgtaaagcttatcattcagccacacatattttacaccaatctcttagagacaggctaggtgagcacgttacgcagaaaggatccttagtttcaaatgataaattaaggtttgattttagtcatcataaatcaatgacaaatctagagattgaagatgttcaaaataaagtaaacgaaattattaaaactggttctaaggtagagacactaattatgtcaccggatgatgcagtaaaggctggtgcccttgccctgtttggagaaaagtattcagatgaagttagggttctcaagataggaaaatttaatgataaaacatacagcacagagttatgtggaggaacccatgtttctaataccaatgaaataggagaattaaaaattgtaagtgaatcctcagcagcttcaggagtaagaagaattgaagctttgagaggcgatgacctattaaaatttaacgaagaaaagaagaaagaagatcttaaatcagaagaaaaaaaactggacattaaaaaagaaaaagaagtttctacagaaaatataagacagcttaaagaagtaatagaattaagtattggcaataactcggatcacaatattattattgaattctgtgagaatgtattaattaatgaactgagaccactgatagataagtacaaaaaactaatatcagatcacggtgttataattctttgtgctaaaaagggtgataagttaagctttctaataggcgtaactgatcaattgactgataaaattggtgcagatgaaattgctaaatttgcatcctctatttcaaatggaaaaggtggtggaggtagaaaagatttgctcaatcagg

SEQ ID NO: 306612 - DNA, 1290 bp, Unknown
  Bacterial polypeptide expressing nucleotide sequence isolated from the Sargasso Sea
ctgacggctgatatgccaagagaaaaggatattgatattgatgaagaaggattcaagaagaatatggaatctcaacaacaaatgtcaaaggcatcaagttcgtttgtgtcaaagattcccacagcagaggatataaaggaaacagattttattggttatgaacatttatcttcagactcaaatgtaatagcaatttggaataaaaatgaaaaagttgagcttgctaaagagccacaagagtactttatagcacttaaccagacttcaatttatgcagagtcaggtggacaggttggtgatagaggtatgtttaaatctaaaaatgctgagggtagtattttagattgcaaaaaatctggaaaagtttttatgcaccttataaagttagacaaaggaagcttaaaaattgatgataaaattgaagttaacgtgaataaagaaaaaagagagaaaaccgaagctcatcattctgctacccatttagtccatgctgcactaaaaagggttttaggagatcatgttaagcaaaagggttcccttgttgatgagcacaaactcagatttgatttctcccatgatgaatctttatcagatgaagagatatccaaaattgaagaattagtaaatcaagaaatactaaagaattcagctgtaagcacaaaaataatggatttagaagatgctaagaattcaggtgcagagtctttatttggcgaaaagtatgaagatcaagtaagagtcttatctattggtgaagatgatttttctcttgagctttgtggtggaacacatatctcaagaacaggggatcttggtattttcataataacaagtcaaagcagtgtagcctctggtatcagaagaattgaggcattgtctggtcctaaagctcaagaatatttatcaaatcttaaaaatcaaactattcaactccaaaaactattaaatgctccagctgaagaaattgaagataaggtgagtaagcttttaaaggaaaataaaagcttaaaaaaaggcggtaaaaccgccaaagcagctacaattaaatcctctaatactcatgatattgataactttaaattagtaattgaagaggcagaatcagaggatatcaaagaattaagaccactactcgatgaaaaaacgaaaaatgcaaataactctatctttattattctaagttccaaaaacgaaacattaactattctctgttccgtatcaaaagaccttcaatcgagaatttcagcaaaagacctcattaatgctttaacatctcctatcgaaggcaaa

SEQ ID NO: 306613 - DNA, 943 bp, Unknown
  Bacterial polypeptide expressing nucleotide sequence isolated from the Sargasso Sea
tatggctaaaacattaaatgaaataagatccgcattcttaaaatattttgaaaaaaatgaccataaaattgtagagtctagcaatttggttccaaataacgacccaacattaatgtttgccaactctgggatggtacaatttaaaaatgtatttactggtctagaaaaaagagattatcaaagagccacaacatctcaaaaatgtgtaagagctggcggaaagcataatgatttagaaaatgttggttatactccaagacaccatacatttttcgaaatgcttggaaacttttcttttggagattactttaaagaaagagctgttgaacttgcttggaatttaataacaaaagaatttggattaaacaaagataggctttatgtaactgtttatcatgatgatgacgaagcctttaattattggaaaaaaattgctggtttaagtgataataaaattatcaggatcgcaacatcagataatttttggtctatgggcgaaactggaccttgtggtccatgttctgaaatattctatgatcacggagatcatcttgatggtgggttgcctggaacgaaaaatgaagatggcaatagatatatagaaatctggaatttagtttttatgcaattcgaacaaatttcaaaagataaaagaataaatctaccaaagccgtcagttgatacaggtatgggtcttgagagaattgctgcattactgcaaggtacccatgacaactatgaaacagatcattttaaaaaaataataaattctacagcggaaattttaaaagttaatcctaataaagaaaatctagcaagttttagagtgatagcagatcatttacgtgctagctcatttttaattgctgagggagttttgccatcaaatgaagggaggggctatgtattaaggagaataatgagaagaggaatgagacactct

SEQ ID NO: 306614 - DNA, 1270 bp, Unknown
  Bacterial polypeptide expressing nucleotide sequence isolated from the Sargasso Sea
aaggtctgagtccttgataaaggaaactttaagaatggaagaagaaaagtttttagttttacttgataggggtataaaaattttaaatgacgaaatttcaaaaatagataaagttttacctggtgatgtcgctttcaaattatatgacacctatggttttccattagatcttacagaagacattttaaagaataaatcattgaaagttgatcataagaaattcgatgaattgatgaaaaaaagtaaagagcttgcaaaaaagaattggaaaggttctggagacagctctgaagagagaatttggttttcaatcaaagacaaaattggtcctacagaatttttaggttacgagactaatcagtctgaaggtgttgtattaaatctagtaaaaaataacaaagaaacaaaatctttatctactggtgaagagggaatgatcattacaaatcaaaccccgttttatggagagtcaggaggacaacttggagacaaaggaacaattgtttctggcaattctgtttttgaagtagaagatacacaaaaaaaacttggagatttatttgttcattacggatccttgaaaactggtgaaataaaaattaaagatgtagtagagatgaaaatagatgtggaaagaagagataacttaaaagcttaccattctgcaacacatttactccatgagtctttgagaagaaccttaggcaaacatgttatgcaaaaaggatcattagttgctccagataggttaaggtttgactttagtcatatgaaaccaattactaatgaagagctagaaactattgataaattagttaatgaatatgtttcaaatagttctgaagtaacaacaagaattatgacgccaaaagctgctatcgaaaaaggcgcattagctttctttggagaaaaatatggtgaagaagttcgtgtagtatctatgggcaaagaaaaagaagcatatttttcaacagaattatgtggaggaactcatgttaaaaatactggagatattggaaaattcaaaactgtgagccaatcgtctattgctgcaggtgttagaagaattgaggctctaagagataaacaacttgaggaatttattaagaataaagaaaaattatcaactttatctactcaaaaagatgaagaaactattaaagatttgtcatctcgaataattaaacttggaggcaagccaaacattgataacaaagatttgaaagaaatcataaaaaatctttcgagacaacttgaacagcttaatgtt

SEQ ID NO: 306615 - DNA, 548 bp, Unknown
  Bacterial polypeptide expressing nucleotide sequence isolated from the Sargasso Sea
tatggcaaaaactcttaacgaaataagaactacttttcttaaatattttgagaaaaatgatcacactattgtagagtctagcaacttggttcccaataatgatccaacactgatgtttgccaattcaggaatggtccaatttaaaaatgtatttaccggtctcgagaaaagagactatgcaagagcaacaacttcacaaaaatgtgtgagagcaggtggtaagcataacgatttagaaaatgtaggttatacacctagacaccatacattttttgagatgcttggcaatttctcatttggagactattttaaagatagagcaatagagcttgcttggaatttagttaccaaagattttggtatagacaaaaaaagactatatgtaacagtttttcaagaggacgatgaagcatttaatttctggaagaaaattgcaggtttaagtgaagatagaataattagaatcccaactttagataatttttggtctatgggggaaacaggtccatgtggcccatgttctgaaatattttttgatcatggcgata

SEQ ID NO: 306616 - DNA, 1026 bp, Unknown
  Bacterial polypeptide expressing nucleotide sequence isolated from the Sargasso Sea
catgctttctactgatgagattaggcaaatctatttagatttctttcaagaaaaaggtcacactttagtcgaaagtgcctctctggtacctttaaatgacccgactctcttgtttactaatgccggaatggtgccatttaaggatttattgttgggtgttgaaaaaaaggactatacaagggcggtaagctctcaaaggtgtattagagccggaggtaaacacaatgatctcgataatgttggttatacagcaagacatcacactttctttgaaatgttaggaaattttagttttggagattactttaaggaggaagcaattgcttttgcatgggaactattaaccgatagatacaagattcctgcagaaaagttgtggataactgttcatgaggatgatgacgaatcagagaagatttggatagagaatatcggtgtggatcctgcaagagtttccagacttgatgatgaagagaatttttggactatgggagatactggaccttgcggaccttgtagtgaaatttacttcgatcatggagaccatttagaaggtgagccaccaaagccaggtatggatccaggagatagattcatagaaatctggaaccttgtctttactcagtttgatagagcgaaggatgggacccttagccctctgccaaacccgtgtgtagatactggaatgggattagagaggatggcagctgtccttcaaaatgaaaacaataattacaacacagatatcttaaaagcgattgttaaagaagtagctgaacttgctggaatagatgacctaaccaacccatctttgagagtaatttctgatcatttaagagcaagttcattcttaattgcagatggaattatcccctccaatgaaggaagagggtatgttctaagaagaattataagaagagcacttagacatgcccataagttagacatacaaggtcctgtgctatctgaattaacttctattctagaaaaagtaatgggtgatgcttacccggttttgattaagga

SEQ ID NO: 306617 - DNA, 1754 bp, Unknown
  Bacterial polypeptide expressing nucleotide sequence isolated from the Sargasso Sea
tatggcagacaaaacactcaatgaaataaggaatacttttttaaagtattttgaaaagaatgatcacaaaattgtggaatctagcaatttagttcccaacaatgatcctactttaatgtttgccaattcagggatggtgcaatttaaaaatgtttttactggattagagaaaagaaattatttaagagccacaacttcacaaaaatgtgtaagagcaggtggaaagcacaacgatttagaaaatgttggttacacgcctcgtcaccatacattttttgaaatgttaggtaacttttcttttggtgattattttaaagagcaagcaattcattatgcttgggatttaattaccaaagatttcggaatagataaaaataaactttatgtaactgtatttcatgaggatgatgaggccttcaatttttggaagaaaatagccggttttagcgatgatagaattattaggatagcaacttccgataatttttggtcaatgggagagacaggtccatgtggtccttgttctgaaatattctttgatcatggtaatcatttaccaggtggtttgcctggctctaaagacgaggatggcgatagatttatcgaaatttggaatttagtctttatgcagtttgaacaagttacaaaagataaaagaataagtcttccaaaaccatctgtcgatactggtatgggtttagagagaattgcagctttactacaaggaactcatgataattatgaaacagatcatttcaaaaaaataattaactcagcatctgaaattgtaaaagttaaatcagataaatctaatctttcaagttttagagtaatagctgatcacttaagagcaagttcatttttaattgctgagggagttttaccttcaaatgaaggaagaggatatgttcttagaagaattatgagaagagggatgagacattctcatttattaggatctaaggaaccagttttttataatttgtttgatactcttaaaaatgaaatgtcaggaaattatccagagttagtaagagctgagtctttaattaaagaaactttaaaaatggaagaagaaaaattcttagttctcttagacagaggaataaaaattttaaatgatgaaatatccaaaatagataaagtgttatcaggcgaagtagctttcaaattatatgatacttatggtttccctttagatcttacagaagatattttaagaaataaatcaatgtcaattgatactgaaaagtttcaatctttaatgaaggaaagtaaagaacttgctaagaaaaattggaaaggttctggtgatgcagctgttgaggatatttggtttggaataaaagataaattagaagcaactgaatttttaggatacgaaactaatcaagctgaaggtgtcgtattatctcttttaaaagaaaataaagaagttgatcaactaaaagaaaatgatgagggaatgattatagtaaatcaaactccattttatggtgagtccggaggtcaagttggtgatactggtgaaatagtatcaaatgattttaaatttgaagtaaccgatgttcaaaaaaaactaggagatttatttgtccattatggaaaggttaagagtggatctataaaactacaggaaagtgtagagctaaaaattgatgtagaaagaagggataatactcgtgcttatcattcagcaactcatctattacacgagtctttaagaagagttcttggcacccatgtaactcaaa

SEQ ID NO: 306618 - DNA, 1275 bp, Unknown
  Bacterial polypeptide expressing nucleotide sequence isolated from the Sargasso Sea
gaatttatctctttttttgaaaaaagaggtcatcattttgtacgtagtgcccctgttgttccaaatgacgaccctacacttctattttcaaattcaggtatggcgcagttcaaagatgtgtttttaggaactggaattcgtgattacaatcgtgcagttaattcgcaaaagtgtataagagccagcggaaagcacaatgaccttgaagatgttgggtatgacaattaccaccacacattttttgagatgctagggaactggtcattcggagactattttaaaaaagaggcgatagaatgggcatgggaattaatgactgaggaatgggcattaccaaaagagaaaatgtgggccacagtttttgctggaggagacggcgtagaagctgacgaagatgctgaaaaaatctggaataactgtaccgatataaactcgaaacaagttctgcgtttcgacaaaaatgacaacttttgggaaatgggtgaagtcggtccctgcggtccttgttctgagttgcatattgatcttggtcaaggcacatgtcctttctcagacaagcatgaatgttcggtaaaccttgaaggatgctggcgatttgtagaactttggaatctggttttcatgcaatatcaacgttttgcagatggccatttggaagagctttcagctcagcatgtagatacaggaatgggactagagagaatttgtcgagttctgcaggaagttgattcaaattacagtacagatttatttgcaccaattttaaataaaataagtgaagtgactggacagaaagattcagatggagaaataggtgttgcgtttcgagttattgctgatcatttgcgttctctcagctttgccgtttcggatggagcgcttccttcaaacgaaggtagaggctatgtactgcgtagaatgttacgacgtgctacaagatttggaagagttttagacatgcatgagccctttatttataaactggttcccactttggcagaagtaatgggtaatgctttcccagaaataaataaacagcaggaacatgttcaaaacgttattcaggcagaagagaccagtttcggttcaaccctggaccgaggtttggaaatttttcagaaaatgatttcaaattctgtaacaaaatcttcaaaaattatctcgggtgaagatgctttcaagctttatgatacttatggtttccctgtcgatctgacacgtctaatgagtaatgagcatggatttgaagtagatgaaaagggttttgaaaaactg

SEQ ID NO: 306619 - DNA, 1158 bp, Unknown
  Bacterial polypeptide expressing nucleotide sequence isolated from the Sargasso Sea
aaagaaacattaaaaatggaagaagaaaaatttttagtattacttgatagaggaattaaaattttgaatgatcaaatttcaaaaataaaaaaagttttaccaggtgaagtagcgtttaaattatatgatacttacggtttcccgttagacttaacagaagatattttaaaaaataaatctttgaccgttgatcaaaataaatttgatgaattaatgaaaaagagcaaagagctcgcaaaacaaaattggaaaggttctggagatgcctctgaagaagaaatctggtttggtataaaagataaaataggacctacagagtttctagggtatgagtttaaccaatcagaaggagtggtgttatctataattaaaaataataaagaagcacataatatttcaaatggtgaggaagggataattattactaatcaaacccctttttatggagagtctggtggacaagttggagatcaaggaacaatagtatctggtaattcagtatttgaggttacagatactcaaaaaaaacttggagatctgtttatacatcatggaattctaaaatctggtgagattaagattaaagacgttgtagaaatgaaaatagatattgaaagacgtaacaatcttaaggcatatcattctgcaactcatttattacatgagtctttgagaagaacattgggaaaacacgttatgcaaaaaggatctttagttgcgcctgatagattaagatttgattttagtcatatgaaaccaattacagaggatgagctaacaattattgataaattagttaatgaatacgtgcaaaacaaaactgatgtaactacaagaattatgacaccaaaagctgccattgaaaaaggtgctttagctttttttggtgaaaaatatggagaagaagtgagagtagtttctatgggagcggaaaataactcttatttttcaacagaattatgtggtggaactcatgtaaaaaatacaggtgatattggaaaatttaaaactgtgagccaatcctcaatagctgctggagtgagaagagttgaagctttaagggacaaacaactcgaaatattcttaaaaaataaggaaaaaatgtcaaatctttctgcacaaaaggatgaagatagtattaaagaggtgtctgctcaa

SEQ ID NO: 306620 - DNA, 1247 bp, Unknown
  Bacterial polypeptide expressing nucleotide sequence isolated from the Sargasso Sea
tgatttagaagatggagagcgttttattgaattttataatcttgtttttatgcaatataatcgtgatcctaatggaaaattgacagatttaaaatttaaaaatattgatacaggaatgggtcttgaaaggatggctcaaatactacaaaaaaagcaaaataattatgagacagatttaatttttcctattattcaaaaaatttgtgagattgcaaatattgattatttttcttcagatgataaaaacaaaatttctttaaaaatcattggtgatcatacaagagctgttattcatttaatttctgatggagtatcagcaagtaatctcggtaggggatatatattaagaaggctcattagaagaatggtcagacatggcagattattaggtataacagatgaatttttacctcatattgctactgtcggaattaacttaatgcaaaataattatcctgatttaaaaaataataatgatttaattttgaatgagataaaaattgaagaaataagatttagggaaactcttgaaagaggagagaaattgctagatgagttaatttcttcagggcagaaattaatttctggttttaaagcttttgaactttatgatacttatggatttcctctggaacttactgtagaaattgctgaagaacatagtatcagtgtagatgtaaagggttttgaagaagaaatgaataaacaaaaagagagagctaaagcggcttcaagtaatattgatttgacattagagggatcattagagcgagaaatagatctttttaacaaaactgtttttaatggttataagtcactcctttcggaagctgaaataaagggtatattcttggattcaacattagttaaggaagcaagtgaaggtcagaaagttttaattgttcttgatcagacaactttttatggagaatctggcgggcaagttggtgatattggaacgatattgtcaaacgatgttgaggtcttggttgataatgtcatgcgaaagaaaaatgtttttttacattatggaacgatcaaaaaaggaaaattaactattggacaaaaagttaagactaatgttagctcctctaatagagctaaggctgctgcaaatcatacagctactcatttattacaatctgcacttaaatcagttattaatgaaagtgttggacaaaaaggttcattagtagcctttaataaattacgatttgactttaattcctctaatcctatttctaaag

SEQ ID NO: 306621 - DNA, 1177 bp, Unknown
  Bacterial polypeptide expressing nucleotide sequence isolated from the Sargasso Sea
ttgttttatgctgaagcagggggtcaggtaggtgatatagggcttattaaatctcgtaatagtatttttgatgtttcagatacacagaaatattttggagatttttatttacattttggaaaagttaaagagggcaaaataatttcaaaccaaactgctgtgctaatagtcgacaaggagcatagaaaaaacgttaaagctaatcattcagcaacacatttgctacacgctgccttgcgagaaacactgggcaagcacgttgctcaaaaaggatcatatgttggtccgaaaagacttagatttgatttcagccataacaaagcaattcaaaaagaagaaataaataaaatcaatttagaagttaatgaaattattaaacaaaatgaaaatgttagtacacgtttaatgtcacctacaaaagctattaaagagggtgccatggcattatttggcgaaaagtatggtgaagaagttcgtgtcgtttcaatgggaagaaaaaaagaaaaggtatactctttggaattgtgtggtggtacccatgttaataaaacaggggaaattggaaaatttgaaattatttcggaaggatctatatcctcgggtgtaagaagaattgaaggtttaagaggtgaggaattacaaaattatattaaacaacaaaaatctaaggatgaaaagcaatcaaaggatttaaaagataaatttgataaaattatcgaaacgattaaagagcaaggcggtaaagcagacaaatttaaaaattatttgactgatatggatatagcagaaaagtatctaagccaagtaattaaagacaatatactaaaagataaaagcaaaaatattgtaaataattttaaaaaaaataatattacttttagattacaaaaaataattgacttacccggaaaagagctaagaagtatagttgatgaaacaaaaaaacaaaaaaatcttatcatttttctttttggaatatctaaaaataaaatttcaatagcagttggtgtgagtgatgatttaattgaaaaatttgatgcttctgaatatgtgaaatatttatcgaaaaatttaggtggatctggaggaggtggaagaaaagattttgctcaagctggtggcacagatgtagataaaatagatcaggtcgtgaaattattaattgaaaaaatttagt

SEQ ID NO: 306622 - DNA, 2668 bp, Unknown
  Bacterial polypeptide expressing nucleotide sequence isolated from the Sargasso Sea
tatggcagacaaaacacttaatgaaataagaagtacttttctcaaatattttgagaagaatggtcataaaattgtggactctagtaacttagttcctaataacgacccaacattaatgtttgcaaattcaggaatggttcaatttaaaaatgtttttactggtttagaaaaaagagattataaaacagcaaccacatcccaaaagtgcgtaagagctggaggaaagcataatgatctcgaaaacgttggttatacaccaagacaccatactttttttgagatgcttggaaatttttcatttggagattattttaaagaaagagcaattgaactagcttggaacttagtaaccaaagactttggtttagacaaaaacaggctttatttcacagtttttaacgaagatgaagaagcatttaatctttggaaaaaaataacaggattaggagaagataaaataataaaaattgctacatcagataatttttggtctatgggtgaaacaggaccttgtggcccttgttcagaaatattttatgatcatggcgaccatctaaaaggtggattacccggaacaaaagatcaagatggcgatagatacatcgaaatttggaatttggtatttatgcagtttgaacaaatttctaaagaaaaaagaataaatttaccaaaaccttcagttgatacaggaatggggctagagagaattgcagctttgcttcagggaacacatgataattatgaaacagatcattttaaaaaattaataaattcaatttctgaagcagttaaagttaaacctgatcaaaaaaatgtttctagttttagagtaatcgcagatcatttgagagcaagttcgtttttaattgcagaaggtgtcttaccatcaaacgaaggaagaggttatgtattaagaagaattatgagaagagggatgagacattcccatttactaggatcgaaacatccaattttttataatatttttaaaactttaatggatgagatgtcaggaaattatcctgaacttgtaagagcagagtctttaattaaagaaactttaaagacagaagaagaaaaatttttagttttattagaaagagggatgaaaattctaaatgatgaaatttcaaaaatcgataaagttttacctggtgaagtagcttttaaattatatgatacgtacggatttcctctagacttaaccgaagatattttaaaaaataagtcattaaaaatagacaataaaaaatttgaaactttaatgaatgaaagtagagaacttgctaagaaaaattggaaaggatcaggcgatagttcagtcaataagatatggtttgaaattaaagatagattaggcccatcagaatttttgggttatgaaactgatcatgctgaaggaaagattttgtcattattaaaagataacaaagaagtaaaaagtttatctgctaatgatgaaggcatgataatcacaaatcaaacacctttttatggagaatctggaggacaagttggagatactggagaaattacctctggagattttaaatttgaagtacatgatgttcaaaagcagctaggagacttatttgttcattatggcaaagtaactaaaggttctattaaagtgaatgataatgttgaaatgaaaattgatataaatagaagaaacgatgttagagcttatcattccgcaactcacttattacatgagtcattgagaagagtgcttggtactcacgtaacccaaaaaggttccctagttgaacctaatcgtttgagatttgattttagtcatatgaagcctatctctaatgaagaaataaaaaaaatagaaacttatgtaaattccatggttgataaaaaatctgaggtaaaaacaagacttatgaccccaaaagaagctgttgataatggtgcattggctctttttggagaaaaatatggagatgaagttagagttttatcaatgggcagtgaaaaagaacgttatttttcaacagaattgtgtggtggaactcatgtaagaaatactggcgatataggaaaatttaagattattagccaatcttcaatagcagcgggggtgagaagagtagaagctttaagagagaaacaattaaaagaatatttaaataaaaaagaaaaactcagtgaccttgaaaatgagaaaagtgaagaaacaattaaaaatttatctcaaaaaataatcaaattaggtggaaaacctaatatcactaaagaaaatcagcaaactttaattaaagatttaacaaggcattatgaacaacttttagtccaatcaactttaagtgataaatcaaaaaatattattaatgataaaactataaataatgtcaaagttagatttcaaaaaataattgatttacctcctaaagatttaagaaaactagttgataatggaaaaaaagaattaactgaaggtgttatagttatttttgcaattaaagatgaaaaaattggattagcaattggtgttacagaaaatctaacaaaaaaatataatgctgttaaattagtcaaaattggatcagaaattattggaggaaaaggaggaggtggcagacctgattttgctcaagctggaggaattgatagttcaaaaatagataatgctatcgatcaaattaaatctttaatttag

SEQ ID NO: 306623 - DNA, 1399 bp, Unknown
  Bacterial polypeptide expressing nucleotide sequence isolated from the Sargasso Sea
ttaaatgatgaaatttcaaaaattgaaaaaatattgcctggggatgttgcttttaaattatatgatacatatggttttccactagatcttactgaagatattttaagaaataaatcactatctattgatacaaaaaaatttcaatcacttatgaaagaaagtagagaattagcaaaaaaaaattggaaaggatcaggagatgctgctgttgagaatatttggtttggcataagagatagattaggtgctacagaatttttgggttatgaaacaaatcaagctgaaggagtaattttatcattattaaaagataataaagaagttaaagaattaaagttgaatgatgagggaatgatcattaccaatcagacaccattttatggagagtctggtggacaggttggcgatacgggagaactttcttctggagaatttagatttgaagttactgatgttcaaaaaaaattaggagatttatttgtacattatggaaaagtggtaagtggttcaattgaaattaagaaaaatgttgaaatgaaaataaatgttgagagaagaaataatacaagagcatatcattcagcaacgcatttattacatgagtcattaagaagaactctaggaactcatgtaactcaaaaaggctctttagtagaacctagcagattaagatttgattttagtcatatgaaaccgatttctgatgaagaaataaataaaattgaaaattttgtgaataacatggttgcaaaaaaaacagatgtaaaaacaagattaatgacacctgatgaggctgttaataatggagcattagcactttttggagaaaaatatggagaagaagtaagagttctttcgatgggtgatgataatggaaaatatttctctacagaactttgtggcggaactcatgtaaagaatactggtgatattggtaaatttaaaattattagtcaatcatctattgcagcagggataagaagagtagaggctttaagagataaacaattaaaagattatttagaaaataaagaaaaattatctaatttatctttagaaaaaaatgatgaagttatcaaaaatttgataaaacaaattaaagatttgggcggtaaaccaaaccaagatgagcctgatcaacaaatattaataaagaatttatcgagacaattagaaacattaagcgttaaatcaatattgaacgataataaaaagaataagataattgatgaagaaattaagaatattaaagtaagatttcaaaacgttgaaggtttaccaccaaaagaacttagaaagctagttgaccaaggaaaaaaggatttaggagaaggtattataatagtatttgccaatcagcaggataaagttggtgttgcagttggtattacccaatgaa

SEQ ID NO: 306624 - DNA, 1033 bp, Unknown
  Bacterial polypeptide expressing nucleotide sequence isolated from the Sargasso Sea
ttggtaaaattaacagtagatataaataaacgacgatcaataactgcaaaccattctgcaactcatttgatgcaccaagcactgaaggacgtggtaggggttcatgttaatcaaaggggctctttaaatgattctgagcgcttaaggtttgacttttcaagtaataaaccaatgactaaacaagaaattgaaaaagtagagaaaattgtaaatcagcacattattgaagatacaatagtagatacaaggttaatggatattgatgaagctaagaaattaggagctctggctctttttggtgagaaatatgatactgaagttagagtagtaatgatgggttttaattcaactttaataccacaatcttcttctaaaagtaaaagatattcaatggaattatgcggtggtacacatgttcagagaactggaatgataggttcttttataattaaatcagaaattgcatctagttcaggtgttcgacgtattgaagccttaacaggtttgaatgcaataaaatatctacagctaagtcgttcatatattgatcaaattataactactttaaaaattccaattgaggcagttaatgaaagactaacaggactcataaatgataaaaaatcattgttacaaaaaattgaccactttcaaaaaaataagtcttcagtttctcatactcaggatgaaattagtgatattagatcaataaatgggatttcatttgttgttaataaacttgaaaatattgaaataaaagaaatgagatcattaacagatgaatacaaacaaaaatttgatcaaagtataatattaaatttatctaaacatgatcataaaatcatatatactgttggtgttactagcaacttaactaacaaatattcagcttccgaaattgttaaaattttaaatcaattatctgacggaaaaggtggaggtagatcagattttgcacagggcggtggaaataataaaattaatcaagcagagatagtaaataaaattgaattatttttaaaagctatttaat

SEQ ID NO: 306625 - DNA, 1286 bp, Unknown
  Bacterial polypeptide expressing nucleotide sequence isolated from the Sargasso Sea
tcagtccgcagagggggtaaatttacttgctgaatatcgtgagatctggaacctagtttttattcagtataatagagataagaatggtgaactgaaccctttgcctaaaaagcatgttgatactggtgcaggatttgaacgattggtagctatattaaatggtaaatcctcaaattatgagaccgatctatttatacctattttagatgaaattgttaaaataacagctaaggatatattgtttgaaggtggggtcccgcatagggtgattgctgaccatttaaggatgctatctttttctattgctgatggtgcgatgccgggaaatgaaggccgtggatatgttttaaggcgggttcttagaagggccgctagatttggacgtaagcttgaaatgaaagagccttttctgtataagcttgtgaatattttatgtcaagttatgggtgaggcttttccagaaattattgataagaaaagtcatatagaaaaagtaattgaagctgaagagaaatcatttaatgatactttggaccggggccttgaaatgtttgacagggtcctaaataaaataccaaaaaatggcaccatccctggcgaagatgtttttaagctttatgatacttatggcttccctgtggatctaacagagctattagctagagaaaataaaatacaggtagatgttgagggatttgataggtgcatggttaagcaaaaagaacgtgctcgtacttcaggtaaatttcaaactgatatcgaagactctgaatggatcattatcgatgatgggatctctacaaattttttaggctatgaaaaattagagtctaatgcaaaaatagttaagtatattaagagtgaaaactcgtataaaatagttttagataaaactcctttctatgctgagtcaggtggccaggttggagataagggaactattaaatcggatgagtttaatttaattgtggaagatgtgcagaaaagtggagatgaatttattcatttatgtacgattgaaagaggtgctttagctgataattatgatgtagaagcagttgtagatagtgaaaatcgacaaaaaataagactgaaccatacttctacacatttattgcatcaagctctaaaagaagttattggtgaccatgttcagcaagcaggctctttagtttctgctgagatacttcgttttgatctaactcattatgcacaaataacaaaaagtcaattgcttgagattgaaaatcgtgttaattcagttattcttaataatattgctttag

SEQ ID NO: 306626 - DNA, 541 bp, Unknown
  Bacterial polypeptide expressing nucleotide sequence isolated from the Sargasso Sea
tatgagtaaaacaagtaatgatattagaaggtcttttattgattattttgtaagtaatgatcatgatcatctcccaccaagctcaataattccaagtaatgatcccacattgttatttacaaatgctggcatggttcaattcaaaaatatttttattggtaacgaaaacgcgaattttaaaaatgttgtcacatgccaaaagtgtcttagagcgggtggaaaacataatgacctcgaaaatgtagggtacacatcaagacatcataccttttttgagatgttgggtaattttagttttggtggttattttaaagaggaagcaattctttatgcatggaattttttaaccaaggaattaatgattgataaagaaaaattatgggtaactgttcatataactgacaaagactcaaaaaatatatggttaaataagattggtctaaaagaaaacagaattaatgatgttgacagtgatgataatttttggagcatgggtgagactgggccttgcggtccatgtactgaaatattttatgactat

SEQ ID NO: 306627 - DNA, 823 bp, Unknown
  Bacterial polypeptide expressing nucleotide sequence isolated from the Sargasso Sea
gatatagtagaaggtgaaagtaatgttcagacaagaattatgacacctaaagaagcagttagcctaggagctttagctctatttggtgaaaaatatggtgatgaagttagagttgtttttatgggtaaagaaaataatggttttttttcaacagagttatgtggtggaacacacgtaaaaaacacaatagaagtcggggaatttaaagtaatcagccaatcatccattgcttcaggagttagaagggtggaggcattaagaggtaaacagcttaaagattacgaaaaatctttaaaaaaagataagtctttaaaagaaaaaaaacttaaagaacaagttgatttagtcaaaaatgagctattaaaatttaaattaaaaccagattataaagatgatcttgatttgccagaaaacttaaaaaatcttaacagacaattagaaaaaatgaaaattaaaaatattattaaagataaaaataaaaatactataaaagataaaaaaattggtaattttatatttagacaacaagttttaactgattttccacccaaggaattaagaagtgtaatagatcaggggaaaaaagatataaaagaaggaattataattagtatttctacttttgaggacaaggttggagttgcagtcggtttaactaaagagttgaccaataaatatgatgctgtcgaacttgttaaaattgtctctgaagtacttggaggaaaaggtggaggaggaagaaaagattttgcacaagctggtggttctcataaagataagattgaggaagccttaaatactataaaaaggaaaattaattaag

SEQ ID NO: 306628 - DNA, 2458 bp, Unknown
  Bacterial polypeptide expressing nucleotide sequence isolated from the Sargasso Sea
attgatacctatagacgaaaccttactatttactgccgctggaatggttccatttaaagattattttctaggtaacaataaaccaccacatacaaatcttgtttcatcacaaaaatgcataagaacagttgatattgatattatcggtgacacagatcgtcatcttactttttttgaaatgcttggaaattttagtattggagaatattttaaagaacaagctataaaacatgcatatgaatttataaccaaaaatctaggaattaatccagatgatctatggtttacagtctataaagatgacgacgaatcattcaatatttggaaagacgtaataggtgttcctgaagaaagaatacagagaggtgataaagacaatttttggcaaatgaatatccctggaccttgtggaccgtgctctgaaatatttatagacagaggaccagactatggagaagaaggcggtccaatcggtggtggggaagatagattcatagaaatttggaatttagtttttatggaatcaatacaagacgaaccttataatgtcgtaggtgaattacctgcaaagaatattgatacaggtatgggacttgaacgtattgctatggttcttcaagataaagagtcaccatttgaaatagatacttttgaatcaatttatgaaaaattaaagccaaaaattaaaaatccgaataaaaaatacgaaagaatcatattggatcatatgaaagcatcaacgtttatgatttcagatggtgttgtaccaacaaacgagggtagaggatatattttaagaaggctaattagaagagcaatcagagcatattatggtttaacaaatgaaattgattctattgaatttctaatatctccaattgttgaaatttataaagatcactatccagacctttataagaatattgataaaattaagaaactttatactactgaagaaaatctttttcacaagacactagaaaaaggcacagttgaaataaatagacttatacaagataaggaaacatttgatgaggaaaatgcattttatctttttgaaactttcggttttccatatgaacttacaaaagagattgcatttgaaaataatattcaattaaatgatgataagtatatgaaaaagtttaaagaacatcaggctaaatctagtgcatttaagaaagagatatcaaatataagtgaatttgatgtagattgcaacgtttttacgggttatgaaaatacaaataccataagtgaagtaacactagtcctgaatgaaaatagtacaacaacgatatttacagaagctacgccattttattatgaagctggaggtcaaatatctgaccaaggctcaataatatttgaagataaagaatatacggtagctgatgtcgttcaatctagctctggtgctactggcttagtaataaatgaagatatagaaattcaatcaggagaaaaaattgaatctaaagtaaacgaatcatttagaagatctgtatctaaaagtcatacatctgcacatatagttcactcatctttaagaaatattcttggtgatcatgttgctcaagcagggtcatatgttgctcctggaagatttagatttgactttagtcattcagaaaaagtcacacaggaagaacttaatgaaatcttcacattaagtaataaaaatgtcttttcagatttaaatgtagatacaaaaataatgaatattgacgaagcaaaaaaagaaggtgcattggcattttttggtgataaatatgatgacgatgtaagagtagtaaatattgggaatttctctaaagaactttgtggtggtactcatgtatctaattcaaatgaaataggattaatagttttattaaatgagtcttcaattggctcaaatctaagaagagtagagatgctttcaggatttgaagcttatgattttatgactaatgcttacaattcatataaaagtgtaagcaatcttttaaatacaaatatagaaaatgtacctacaaaactcgaatctttatttaattcatatgaggaacttaaatcacaggttgatcaatttaaacaaattagaaacaacgaaatggtagatcagatatcaaataaatttgaaaatgttggtgcttataaagtattcataaatcaagtttcaatggatacagttgatgatataagaaatgtagctattaattcgatcaataatggagttgttgattacatatatttaatttcacaaatagagtcaaaatttgtcatagttgctatgaaaaatgagaaagttattaaagatatgaatgtatctgaacttgtgatagaaacttctaaaaattttggtgggggagcatcaaaagatcaggttttatcagttggtgggggtcctaatgattactcaatagatgaaaccctaaaatatgttaaagaatctattgttaacaatatcaagtga

SEQ ID NO: 306629 - DNA, 1119 bp, Unknown
  Bacterial polypeptide expressing nucleotide sequence isolated from the Sargasso Sea
gtttcacaaatatttttaaaagttctattagatgaaatgtcaaatagttatcctgaattagatagagctcaatcattaattaaagaaactttaaaaatggaagaagaaaaatttttagttttactcgaaagaggcatgaaaattttagatgaggagatctccaagatagataaagtcttaccgggtgaagtagcatttaaattatacgatacctatggttttccattagatttaactgaagatattcttaaaaataaatctttaaaaattgataacgataagtttcaaagtcttatgcaagaaagtaaggaacttgcaaaaaaaaattggaaaggttctggtgacgctgctgttgatgagatttggtttgatataaaagataaagtcggagcaactgaatttctaggctatgaaaaaattcaatcagagggagttattttaaaacttatcaaaaataataaagaagttgaaagtttaaaaaccggtgagaaaggaatgattgttgtaaaccaaacacctttctacggtgaatctggcggtcaattaggagatattggaaaaataaattcaggtaataattcatttacagtcaatgatgttcaaaaaaaattaggaaatctatttgtgcattatggagtaatagatggaggaagcttgaaagttggggaaagtgtggaattaaaaatagatagcgcgagaagagaaaatattaaagcttatcattctgcaactcaccttttacatgagtctttaagaagaactcttggaaaacacgttatgcagaaaggttccctagttgctccggacagattacgtttcgattttagccatatgaaaccgatatccaacgacgaaatgctgaaaattgaggaaatagcaaacgagatagttaataaaaaatcagacgtaataactagaattatgactcctgaagagggcatagaacatggagcattagccttatttggagagaaatatggtgacgaagtaagagtggtttttatgggagatgaaggtaataaatatttttcaactgaattatgtggcggaactcacgttaaaaatactggagatgttggaaaattgaggttattagccagtcatccattgctgcaggag

SEQ ID NO: 306630 - DNA, 1115 bp, Unknown
  Bacterial polypeptide expressing nucleotide sequence isolated from the Sargasso Sea
tttgatagcggaaggagttttgccttctaatgagggaagaggctatgttcttagaaggataatgagaagaggaatgaggcactcacacttacttggttccaaagagccaattttttataatatttttaaaactttaatggaagaaatgaaaggaaactatccagagctacaaatagcagagtctttaattaaagaaactttaaagatggaagaagaaaaatttttagttcttttggacagaggaataaaaattttaaataatgaaattgccaaaatagataaagttttacctggagaggtagcatttaaactttatgatacttatggttttccattagatttaactgaagacatattaaaaaataaatctttaaaaatagataataaaaaattccatgctcttatgaaagagagtaaagagcttgctaaaaagaattggaaaggttcaggagatagtgcaatagatgatatttggtttggtattaaggataaattaggttctacagaatttttaggatacgaaaccaatcaagccgaaggagttgttatttctttactgaaagataataaagaagttaaaattttaaattctggagatgaaggaatgattataacaaatcaaaccccattttacggagagtccggaggtcaaattggcgataaaggaaaaattatctcaggagagtttaaatttgaagtatcagatgtccaaaaaaaattaggtgatttatttgtgcattatggaaatgttaaaaatggatcagtaaaattaaatcagaacgtagaaatgaaaattgacgtgcaaagacgagacaatattagagcctatcattcagctactcatttactacacgagtcgctgagaagagttttgggctctcatgttacacaaaaaggatctttggtagaaccagagagacttaggtttgatttcagtcatatgaagccaatttcttccgacgaaattgaaaaaattgagacccatgttaattctatggtagagaaaaaatcagatgttaagactagattgatgacacctaaagaagctgtagaaaacggagctcttgctttgtttggcgaaaaatatggagatgaagttagagttttatcaatgg

SEQ ID NO: 306631 - DNA, 930 bp, Unknown
  Bacterial polypeptide expressing nucleotide sequence isolated from the Sargasso Sea
aatgattatagttaatcaaactcctttctatggtgagtcaggtggacaagttggtgataacggtgaaatagtttcgaatgattttaaatttaaagtaactgatgtacaaaaaaaattaggtgatttatttgttcattacggaaaggtaaagagtggatctataaaattacaggaaagtgtagaattaaaaattgatgttgaaagaagagataatacacgtgcttatcactcagcaacccatttattgcatgagtctttaagaagagttctcggtactcatgtaacccaaaaaggatctttagtagagccaagcagattaagatttgatttcagccatatgaaaccaattttgaatgaagaaattgataaaatagaagactttgtaaacacaatggtttctaaaaaatctgatgtaaaaactagattaatgacacctgatgaagctgttgaaaatggtgctttagcattatttggtgaaaaatatggagatgaagttagggttctttcgatgggagatgaggatggcaactatttttctaccgaattatgtggtggaacacatgtaaaaaatactggcgatattggtaaatttaagattgtcagtcagtcctctatcgccgcaggagtaaggagaattgaggcattaagacacaagcaattagaggaatacttaaaaaataaagagaaattatcaaatctatctgcagaaaaagacgaggaagcaattaaagatttaagtcaacaaattattaaattgggaggaaaaccaagtcttgatgaaactgatcaaaaaactttgattaaaaatttaactaaacaactagagactatttcggttaatgcaattttagaagataaatcaaaaaatattattaaagatgaggaaattaatggaattaaattaagattacaaaaaataaatggataccg

SEQ ID NO: 306632 - DNA, 1662 bp, Unknown
  Bacterial polypeptide expressing nucleotide sequence isolated from the Sargasso Sea
tatgagtcaaaaaacattaaatgaaataagaagtaccttcctcaaatactttgagaaaaatggtcataagattgttgagtctagcaatttagtaccaaacaatgatccaacattaatgtttgccaactctggaatggttcaatttaaaaatgtttttactggacttgaaaaaagagattataaaacagcaaccacctcacagaaatgcgtaagagcaggtggcaaacataacgatcttgaaaacgttggttataccccaagacaccatacattttttgaaatgctaggaaacttttcctttggagactattttaaagatagagctatagaactcgcatggaatttagttaccaaagattttgggatcgataaaaataggttgtatgtaacagtctttcacgaagacgatgaagcatttaatttttggaaaaaaatcgcaggtttaagtgaagatagaataattagaataccaacttctgataatttttggtccatgggagaaacaggtccatgtggtccatgctcagaaatattttttgatcatggagataaattacaaggaggactgcctggaacaaaagatcaggatggagatcgatatattgaaatatggaacctcgtttttatgcaatttgagcaagttacaaaagaaaaaagaattaatttaccaaaaccatctgttgacacaggtatgggacttgaaagaatagctgctcttcttcagggaacacatgataattatgaaacagatcatttcaaaaaaataataaattcaacatctgaagtggtaaaaaagaaaccagatcaaaataatctatctagttttagagttatagctgaccatttaagagctagctcctttttaattgctgaaggtgtactcccttctaatgaaggtagaggctatgttcttagaagaataatgagaagaggtatgagacattctcatttgttaggatctaaagagccgattttttataatatatttaaaactctaatggatgaaatgtcaggaaactatccagaattaaaaagagctgaagctttaataaaagagactttaaaaatggaagaagaaaaatttttaattcttcttgaaaggggaatgaaaattctagacgaagaaatttcaaaaatagataaagtgctaccaggtgaagttgcttttaaactttatgatacttacggttttccattagatttaactcaagatattttaaaaaataaatcactaaatatagataataaaaagtttgaagacttaatgaaacaaagtagagaacttgctaaaaaaaattggaaaggttctggagatagtgcaattgatgatatttggtttgctataagagataagttaggatcaacagaatttcttggatatgaaactgatcaagcagagggagttgttcaatctcttctaaaaaataatgaacaagtcgagtctttaaaatcaggcgacgaaggtatgattattttaaatcaaacacctttttatggagaatccggaggtcaagtcggtgatactggagaaataacaacgaataattttaaatttcaagtatcagatgttcaaaaaaaattaggagacctttttgttcattatgggaaagtaacctcaggtgagattaaaattaacgaaagcgttgagcttaaaatagatat

SEQ ID NO: 306633 - DNA, 1672 bp, Unknown
  Bacterial polypeptide expressing nucleotide sequence isolated from the Sargasso Sea
tatgaaaattaacgatattcgatcaaaatttcttgattattttaatagtaatgaacatgagattgttcagtcaagtccactagtacctttgaatgacccaacgctaatgttcgcgaactctggaatggttcagtttaagaatgtttttactgggcttgaaaatcgagattataaaagggctgtaacagctcaaaaatgcattagggctggaggtaagcataatgatttggaaaacgttgggtataccctaaggcatcatactttttttgaaatgctaggaaatttttcatttggtgattattttaaagatgaagcaattgactacgcttggaattttataactaaagaattgagtatttctaaagataaactttacgtaaccatatttcataatgatgagcaggcttacacggcatggaaaaaagtttcaggttttgatgatagtaagattattagaataaatacaaatgataatttctggtctatgggtgaaacgggtccctgtggtccttgttcagaaattttttttgatcatggtgatggtttcaaaggaaaacctccgagtgaggcagatgaaactgaagatcgatttgttgaaatatggaatcttgttttcatgcaatatgaacaggttgatacaaagacgcgaatagatttacctaagccctctattgatactggaatgggcattgagagaattgctgcagtgatgcaaggaacaaataataattataaaattgatagtattcaaaaactaattgatcattccatagatgttaccaaacaaaacaaggaatcttttatttcaagccaccgagtaattgctgatcatctaagatcttcatgtttcttagtagctgatggggtactcccttctaatgagggaagaggatatgtgttgagaagaattatgcgtagagcaatgaggcatgtccatttacttggatataaagatgagttaatgcatcttttagctccaactttaattactgaaatgaaaggtgcttaccctgaattacaaagagcagaaaaattaatattagaaacgcttaaatatgaggagcaaaaatttaaagaattattggacaggggaattaagcatcttgacaatgaagctctaaacatgaaatcaggggatatatttccaggcaattcagcgtttaaactttacgatacttatgggtttccaatagatttaacacaagacatacttaaggctaagcaaatagatgttgatatatctggatttgaaaaaagattagatgaacaaaaagaatttgctagaaaaaattggtcaggctctggatcaaatctattagataaaatttggtttaaaataagtgaaaaaattcctgcaactgaatttattggttactctagtgaagaatctgaagctcaaattcttggaatagttattgacggtaaagaagttgatagcatttcaggtaaaaatgactgttcgttaattctcaatcaaactgttttttatgctgaatctggtggtcaaataggagatataggcatcattagctctgacgagggagaatttgaagttacagatactcagaaaagacaaaatttaataatacatagcggtaatcttaaaagtggaaatatgagtgttaacttgaatgttaatttaaagattaatcaggaaagaagaagttcatgt

SEQ ID NO: 306634 - DNA, 415 bp, Unknown
  Bacterial polypeptide expressing nucleotide sequence isolated from the Sargasso Sea
tatggccaaaacattaaatgaaattaggtcagcatttttggattattttgaaaaaaatgatcataaaatagttgagtctagcaatttagtcccaaataatgacccaacattgatgtttgccaattcaggaatggtccaatttaaaaatgtgtttactggattagaaaagagagactatcaaagagctacaacatctcaaaaatgtgtaagagcaggtggtaagcataacgatcttgaaaatgttggctatactccaagacaccatacgttttttgaaatgttgggaaacttttcttttggtgattattttaaagaaagagctattgaacttgcgtggaatttaataacaaaagaatttggtttagataagaacaggctttatgtaacagtctaccacgacgatgacgaagccttt

SEQ ID NO: 306635 - DNA, 1495 bp, Unknown
  Bacterial polypeptide expressing nucleotide sequence isolated from the Sargasso Sea
aatgggtttagagagaattgccgcattacttcaaggaactcacgacaactatgaaacagatcattttaaaaaaataataaactctgctgcagaaattttaaaagttgagcctaataaagataatttagcaagttttagagtaatagcagatcacttaagagcgagttcgtttttaatcgctgaaggggtattgccatcaaatgaaggaagaggttatgtactaagaagaattatgagaagaggaatgaggcattcacacctgcttggctctaaagaaccaattttttataatatttttaaaactttaaaagatgagatgaaaggtaattactcagaaatagaaagagctgaatctttaataaaagaaacattaagaatggaagaagaaaaatttttaattcttttagatagaggtattaaaatattaaatgaggaaataactaaaatagacaagatattacctggagaagtagcttttaaactctatgatacctacggctttccattggatcttacccaagatattttaaaaaataaatctttgacaattgataatgataaatttcaaagtttaatgaaagaaagtaaagaacttgctaagaaaaattggaaaggatcaggtgatagtacggtagatgatatttggtttgcgataaaagatagattaggtccttcagaattcctaggatatgaaaccgatcaagcagaaggtattattttatcattattaaaagacaacaaagaagtaaatgagctgaatgtaaatgatgaaggaattattattttaaatcaaactcctttttatggagagtctgggggtcaggttggagatactggtgaaataatatctggggactttaagttcgagataacagatgtccaaaaaaaattaggtgatctatttgttcattacggtaaagtcaaatcaggaagtataaagatcaaagacaatgttgagatgaaaattgatattgatagacgaaataatataagagcttatcactcagcaacgcaccttttgcatgagtctctaagaagagtattaggtactcatgttacacaaaaaggatcattagtagcaccagatagactaagatttgattttagccatatgaaaccaatttcagaccaggaaatagaaaaaatagaaaatcacgttaatttaatggttcaaaaaaaatcagaagttaaaacaaggattatgactcccaaagaagcagtaaataacggagctctagcactctttggagaaaaatatggagaagaagttagagtattatctatgggagatgagaaagaaaagtatttttccactgaattatgtggaggtactcatgtgcgaaacactggtgacattgggaaattcaaaattattagtcaatcatcaattgcagcaggtgtgagaagagtagaagctcttagagaaaatcaattaaatagttttttgcaaaataaagagaaattatctgacttatctgcgcaaaaagagaagaaa

SEQ ID NO: 306636 - DNA, 1150 bp, Unknown
  Bacterial polypeptide expressing nucleotide sequence isolated from the Sargasso Sea
catgaaaactagtgaaatcaaacaatcttttttagatttctttgaatctaaaaatcatgagattgttccttcaagtgcattggtgccaagtaatgatgaaaccctactgtttactaatgctggcatggttcagttcaaagatgtttttctcggaactgataaaaaaagttataaaagagcatcgacatcacaaagatgtataagagctggcggaaaacataatgatttagagaatgttggttatacgctccgtcatcatacattttttgaaatgctgggtaattttagttttggtgattattttaaagaagaggccattgagtttgcttgggagtttttaactgaagttcttaagcttgatagaaataagttatggataactgtttacaaagacgatgatgaagcagaagaaatttggaaaaataacattggaatagaccctaaaagaattgccagacttggtgatgaagataatttttggtcaatgggtgatacagggccatgcgggccttgctctgaaatattttatgaccatggcgatcatatcgaaggaacacctccaggagccgatggtgatgaaggagatagatttgttgaaatatggaatcttgtctttatgcaattcaatagagatgaaagtggagatatggaacctcttccaaagccttcagttgatacaggaatgggtctcgaaagaattgctgcagtgatgcaaggtgttaattcaaactatgaaacagatatttttaaagatttaattattgcttcagaaaaaatacttggtaataaggatagcacttcacataaagttattgccgaccatataagatcaagtgtatttttaatttcggatggcgtaattcctgaaaaagagggaagaggatatgtcttgagaagaataatgcgaagaggtatcaggcatggatataaaataggcgcaacagagccttttttgcacttgttggtcaaagaccttattagtttaatgaaacaggcataccccgagcttgaggataactatgaaaatatagtaaagattattaaaaatgaagagacaaaattttttgaaaccttacaaaatggcattgagattttagaagagaccatttcaacaatgcagaataatactatttcaggcgagattgtattt

SEQ ID NO: 306637 - DNA, 1390 bp, Unknown
  Bacterial polypeptide expressing nucleotide sequence isolated from the Sargasso Sea
atggtggataaatcattaaatcaaataaggaatacattcctaaaatattttgagaaaaatgatcataagattgttgagtctagcaatttagttccaaacaatgacccaaccttaatgtttgccaattcaggaatggttcaattcaaaaatgtatttactggtttagaaaaaagagattatcaaagagctaccacctcacaaaaatgtgttagagcaggtggaaaacataatgatttagaaaatgttggatacacacctagacaccacactttctttgaaatgttgggaaacttctcatttggagattattttaaagagagaggaattgaacttgcatggaatttaatcactaaagattttggtttagataaaaataggctttatgtaactgtttttcatgaagatgatgaggcttttaatttctggaagaaaatagcaggttttagcgatgatagaataattagaattgcaacatcagataacttttggtcaatgggtgaaactggtccctgcggcccttgctcagaaatattttttgatcatggtgatcatttgaaaggtggattgccaggaacgaaagatcaagatggagatcgttttatcgaaatatggaacttagtttttatgcagtatgaacaagtttcaaaagataaaagaatagatttaccaaaaccatctgttgatacaggaatggggttagagagaattgcagctcttttacaaggcacacatgataactatcaaactgatcattttaagaaattaattagctcaatatctgatgcaacaaaagtcaaacaagaagataaaaatatatcaagttttagagtaattgctgatcacttaagagcaagctcatttcttttagctgaaggtgttctaccttcaaatgagggtcgtggatatgttcttagaagaattatgagaagaggaatgagacattctcatttattaggatctaaagaaccaattttttataaaattttcgatactctaaagaaagagatgttaggaaattatccagagcttgaaaggtctcaatctctaattaaggaaacgttaaggatggaagaagaaaaatttttagttttacttgatagaggtattaaaattttaaatgatgaaattgcgaaaatagataaagttttacctggtgatgtagcattcaaattatatgacacctacggttttcctctagatcttacagaagacatcctaaagaataaatcattgaaagttgatcataataaatttgatgaattgatgaaaaaaagcaaagaacttgcaaaaaagaactggaaaggttctggagatagttctgaggaagcaatatggttttcaattaaagataaagctggtccgacagaatttttaggtacgagtctaatca

SEQ ID NO: 306638 - DNA, 2575 bp, Unknown
  Bacterial polypeptide expressing nucleotide sequence isolated from the Sargasso Sea
atgaattcaaaagacatacgcaattcttttatcaaatactttgaaagaaaagatcataagttctttcgtagttcacctgttgtacctattgatgatccaacgctattattcacaaatgcaggaatgaaccaattcaaacctatcttcttagggcagaccgatccaaaacatcctagagctgttaatagtcaaaaatgtattagggtctcagggaagcataatgaccttgaagaagtgggtgtagatacattccatcatactttctttgaaatgttgggtaattggtcgtttggagactattacaaaaaagaagcaatagaatgggcatgggacctttttactaatgaatggaagctagataaagatcgattatgggcaacagtatatgaagatgatgacgaagcatttgatctttggacaaaggttactgatatagctccagaaagggttgtcaggtgtggaaaaaaagataatttttgggaaatgggtgagacaggaccttgtggcccttgttctgaaatacattattatgttggtgaagacataagcaaccaagaccctagtggtgttaatagttctgatcaatactgggaactatggaatttagtatttattcaaagcaatcgtttgcaagatgggtctctagaggagctacctgcaaaacatgttgatacaggagctggtcttgaaaggatagcgacggttcttcaaggaaagaacagtaattacgacactgatcttttccttcccattatagactcacttcaaatccttgcaaactcatcctacaaagatgaccctatacctcacagggtcatagcggatcatataagaatgctctgtttctcaatagctgatggtgctttgccttcaaatgatggtcgtggctatgtattaaggcgtattctaagacgagcagcacgatttggtagaaagcttggattagaagacccatttctatacaaattggttgagaaagttgcagatattatgggtgagctatttccagaggtcattgacaaacgcgctcatatagaaaaggtcattcgctctgaagaagaatctttcaataaaacactagatcgcggcctaagtcattttgaaaagatcgtgtctggtatagaaggctctgagatcagtggagaggattcttttaaactatatgacacctatggttttccactcgacctaacacaacttatggctagagaacgtaagatgaccgtagatgaaaaaggattcaatgaatctatggaaaaacaaaaactcaaggcaaaggaagccggaagattcaatcaagggaaagaccagtttgagtggattactgtttctgatggtgatgattctaaattcgttggttatgaggtgatggattgtagtgctaatattcgacgttatgctaaagacaaagataggttattaattatcttggataagacgcctttctatgctgagtcagggggtcagatcggcgatattggtagtattcaaggcaatgacatagacctatcagtacttgatgtaaaaaaagataatgatagttttgtgcatatttgtgaaggcacattaaataatacagattctctagttgaatgtagtgtcaatgatgatcatcgaaattctgtaaaaaagaaccatacagcaacccatcttatgcataaagcgctcaagtcagttctgggagatcatgtaaatcaagcgggttcattagtgcatcctgattatttaagatttgatcttacccattttgagaagatctcattacaagagatcaaggatatagaagaaatggtaaatgaacagatcttattaaataaagcactagacgtaagtattcaaaaatttgatgatgcaaagaaagcaggagccgaagcactttttggtgaaaaatatggtgatgaggtaagggtggtacaggttggtgatttttcaatggagctttgtggagggacgcatgttgaaagaacaggtgatattggttcattcaagataacagaagagtcatctctatcctcaggagttcgacggatcgtagctgttacagggaaaaaagcggtttctgaaatgcagagtaatgcgtcggtacttcatgatcttcaatcattgttaaatacaccacctatgggaatggttgaaagaatagaaggcctttttaaagaaaaaaaagatctggagaaaaaattaaagaatcgtacgtctcaaccctctcatggtaacctgataaatgaagctaagaaaattggtgaccattatggtcttgtgaaagaggtccaagtctccagcatggatgatctcaagatattaggtgatgatgtttttaataagctctccagtggtattgctgttttgttctcaaaaggacaggagaaaccaatggcagttattgtggtctcaaaaaatttaaatgaagatggaatactcgcaggtaaactagcaaaagaaatcggagggtatatggaaggcggaggtggtggtaaacctcatcttgcaactgcaggcggtaagaataacgcttctattaagcctgcaattgattctacacaaagcttaataaatgaattactaaatggataaa

SEQ ID NO: 306639 - DNA, 679 bp, Unknown
  Bacterial polypeptide expressing nucleotide sequence isolated from the Sargasso Sea
atgaattctagtgatattagatctacttttttgaactattttaaaaaaaatggtcatgaaatagtccattcaagtcccttagttccacataatgatccaacgctaatgtttgcgaattcaggaatggttcaatttaaaaatatttttactggaaaagaaaaaagagattataatcgtgcagttacttcacaaaaatgtgtgagggcaggaggtaaacacaacgatttagaaaatgtaggttacacagcaagacaccatactttttttgaaatgttaggtaatttttcttttggtgattacttcaaggatcaagcaatagaatttgcatggaatttaattactaaggaatttaaaatagaaaaagaaaagttattagtcactgtatttagcgaagatgaagatgcttataatttttggaagaaaattgcaggtctaagcgatgacaaaataattaaaataagcacatctgataatttttggtcgatgggagatacgggaccctgtggaccatgttcagaaatcttttttgatcacggtgataaatatccaggtggacctccaggaagtccagatgaagatggagatagatttattgaaatttggaacctagtatttatgcagtttgagcaaatttcatcttctgaaagaatcaacctcccgaaaccttctattgatactg

SEQ ID NO: 306640 - DNA, 2626 bp, Unknown
  Bacterial polypeptide expressing nucleotide sequence isolated from the Sargasso Sea
atgtatcaaacgacagcagcgcttagaagtgctttcctcgaatttttccgcagcaatggtcaccaagttgtggacagtagttctcttgtaccaggcaacgatcccacgcttttattcaccaacgccggtatgaaccagttcaaggacgtgtttcttggcatggacaaacgtagctatacacgtgcgaccactgcccaacgctgcgtccgtgcgggtggtaaacacaacgatttagataacgttggttacaccgcgcgtcaccatactttcttcgaaatgctgggtaacttcagctttggtgattacttcaaagaagatgcgattcactttggttggaccttcctgaccgaagtattgaagttaccaaaggaacgtctgtgtgtgactgtgtaccaaacagacgatgaagcctttgaaatttggaataaaaagattggtgttgccgctgaaaacatcattcgcatcggcgataacaagggcgcgccatacgcttcagataacttctggcaaatgggtgacacaggtccttgtggtccatgtaccgaaattttctacgatcacggcgatcatatctggggcggacgtcctggtagcccagaagaagatggcgaccgtttcatcgaaatctggaacatcgtattcatgcaatacaatcgccaagcctctggcgagatgttgccgttgccaaaaccttcagtcgataccggtatggggattgagcgtatcgctgcgattatgcaaggtgtgcattcaaactacgaaatcgatattttccgcgccttgattgccaaagcggccgaaatcatcggtgtgactgacttatctaacaagtcgctgcgcgttattgccgaccatatccgttcatgcgccttcttagttgccgatggtgtgatgccatcaaacgaaggtcgtggctatgtactgcgtcgtattattcgccgtgccgtgcgtcatggtaacaagttaggcgccaccgaagccttcttctacaagttagttccgacgctaattgaagtgatgggtgatgctgctaaaggtcttgccgatacccaagtgattgttgaaaaagcccttaaagcggaagaagagcagtttgcccgtacgcttgagcgtggtttaggtattctggatagcgcgttaaacgaattgcagggcgacaccttagacggtgaaactgtcttcaaactgtatgatacctatggcttcccagtggatttaaccgctgacgtatgccgtgagcgcaacattatcgtcgatgaagcgggcttcgaagcggcgatggccgaacaacgtagccgcgctcaagccgcgggtaacttcggcgccgattacaacgcagctctcaagattgatgaagaaacgtccttctgcggttacaccgaattagcgggcgaaggcaaggtaactgcactgtatgttaacggtgaatcagtagattcaatctctgccggcactgaagcggttgtagtgttagatgtgacgccattctacgcagaatcaggtggtcaggttggcgataaaggtgttctggtagccgaaggtgttgagttcgttgtaaacgacacccaaaaattcggtcaagcctctggtcataagggcacattaacagctggcactatcagtgttggtcaagccattgaagccaaagtggataagaaactgcgtcaccgcactcagttaaaccactcagtgactcacttattacatgctgcactgcgtcaagtattaggcactcacgttactcaaaaaggttcgttagttgatcctgagcgtttacgtttcgacttctctcatttcgaagccgtcaagcctgctgaattgaaacaggttgaagagttggtcaacacccaaattcgccgtaaccatgagctgaaagtcgctgaaatggcgattgatgaagccaaagaaaaaggcgcgatggcactctttggtgagaaatatgatgccgaggtgcgagttgtcactatgggcgatttctctatcgagctgtgtggtggtactcacgttggccgtaccggtgatattggtctgttcaaaattacctctgaaggcggtatcgctgcgggcgttcgccgtatcgaagcggtaactggcgctgcggcgatggcctatgtggcacagcaacaagcgcaacttgaagaagcagcagctctgctgaaaggcgatactcagtcggttgtggccaagctgaaagcacaacttgataaaatgaagcagcttgaaaaagacatgcagcaactgaaggataagttagctgcagcagcgagtgcggatttagcgggtgatgccgttgtggttaatggcgtaaatgtgctgattaagaagcttgaaggtgttgaagcaggtgcactgcgtggcctgcaagatgagttaaagcaaaagctgaaatccgctgttatcctgctcggtgtggctcaagaaggcaaagtgaacctaattgcgggtgtaagcaacgacttagtcggtaaagtgaaggccggtgaactggttgctatggttgctgcgcaggtgggcggtaaaggcggtggtcgccctgatatggcccaagcgggtggtagccaaccagaaaatctggatgcggcactgtctcaagtattaccttggattactgagcgtttagcttaag

SEQ ID NO: 306641 - DNA, 1866 bp, Unknown
  Bacterial polypeptide expressing nucleotide sequence isolated from the Sargasso Sea
catggcgatcatatcgatgggggtcctcctggatcagatgatgaagatggtgatcgtttcgtagaaatttggaatcttgttttcatgcaatttgatagacaagcaaatggggagcttgttaacttgccaaaaccatcagttgatacaggtatgggattagagcgaattgcagcagtgatgcaaggtgtaagcagtaactatgatattgatttatttcaaaaaataattgctgcaataaaaaaccaatcacaaaaaggggaggagagtcactatagagtcatcgctgaccatattcgatcctcttcttttctcattatggatggagttacccctgataatgagggcaggggttatgttctaagaagaataatcagaagagcattgaggcatggtcatgatctgggaattgaatctccattttttttcaagcttgtagatgttttagcaggagaaatggggcaaacatatccagagcttctcaataagaaagattacatagagcgaatcatcttgatggaagaagaaagattcgctgcaacgctttcacagggaatgagtttattacagaaagaatttgaccgatcaaatgatgaaatgatatcgggtgaattcgcattcaagttatatgacacatatggctttccgttggatatgactgtcgatattgcgagaagtgtatcacgagctgttgatcttgaaggttttgaaaaggctatggaaaggcagagagaattggcaaggagagcgagtaaattccagtcagacgattcttttagccttaatcatgatttgaaaagtgaatttcatggatacaaagttttagagactgacagcaagatcattgggattttcggagaagatggctctgatgtccttcgtcaaggagaattcgggcaagtcattttagataagacaccattttatgctgaaagcggaggacaggtgggcgatcaaggatcttttagttctgatgccagtgtctttgaggtcatcgatacccagttctcaggcaatgcatattcccattttgggactgtgtctaatggccaaatttcggttggagacaagattacggcatctgtaaatcctgtcagaagaaaatcaattacattgaatcatactggcacccatatgttgcatagagctttgatgatggttttaggcgagcatgtgcaacaaagggggtctttagttgatgatgaaaagatcagatttgatttttctcatcatcaatcactcacagcaagcgaaattagagaaatagaaacaattgtgaatgaaaaaattgatgagaatattgatgttcaaacaagtatcatgaagcatgatgaggcgattgagtcaggagcgatggctctttttggtgaaaaatatggagatgatgtaagagtattggatgttggagatttttcaaaagagctatgcggtggaacacatgtcgaaaacacaaatgaaattggaatatttaaagttgtttctgaatcaagcatatcttcaggaacaagaagaattgaggcaataacaggagataaagctttgaagtgggcaaaagagacagagcatctggttgaatcactgacggatctacttcaaaccagaagagaggacgtcaccactaaagttgaatccttgttagattcaaataaaaaactgcaagctgaaataaaacaactgaagtcaaagatcgcatcaggacaatctgttgcagacatagatagctcagaaaatatcaatggaatcaattacttatataaagaactcgagaatgatattgagccaagtgtaatgcgtggcgctattgatcagtttaaagataagttgaaatcaggagtgatcattctttcttctataaaccagaaaggaaag

SEQ ID NO: 306642 - DNA, 1291 bp, Unknown
  Bacterial polypeptide expressing nucleotide sequence isolated from the Sargasso Sea
aacgatttggaaaatgtgggttacacggcgcgtcaccatactttttttgaaatgctcgggaacttctcctttggtgactactttaaggatttagcaattgaactggcgtggctatttgtgactagggaattagggttaccaaaagacaaactaatagttacagtttttgctgaggatcaagaagcccacgatttatggaggaaaattgctggcttatctgaaaatagaataattaaaataaattctagcgataatttttggtctatgggggaaacaggtccctgtggcccttgctcagaaatattttatgatcatggcgacaaatttcctggaggtccaccagggagccctgaagaagatggcgatcgtttcattgagatttggaatctagtgtttatgcaatatgagcaaaccacacccgatgttagggtggatttaccaaaacctagcattgatactggtatggggttagagaggattaccgccgttcttcaaggaacaaatgataattatagtaccgatttatttactagtttgataaacacctccgtagaattagcctctgttcctaataataagcaatttggtgtatcacatcgggttatagctgatcatttaagggcttctagtttccttattgctgacggtgtaatgccatccaatgagggaagaggttatgtcttgagaaggattatgagacgagcaatgaggcatgttcacctaatgggttgcaaagatcctttgatgtataggttagttccaagtttaattgatgagatgggtaaagcatttccagaattatcaagagcagaacttcttatttctgaaactttggaaatggaggaaaaacgttttagacggacccttgatcgcggcctcaagcttttaaaggaagaggtgggtcaacttggtaaggatagtgagttgcccggtaatgtggcatttaagctttatgatacatacggatttcccatagacttaactcaggatgctctacgccgagacggatataaagtagatattgctggttttgaaaaagaaatggaaaaacagaaggaagaagcccgttctagctggaagggcagtggggaactagaggctgatgagatatggtttgagttatatgagttacatggcccaacagagtttttgggatataacactgaggaagccgaggggcaaattatcgcgataataaaagacggcgagttattagaagaagcgggaaaaggtgaagaggttttgattttgtctaatcagacaccattttatgctgaatctggcggacaag

SEQ ID NO: 306643 - DNA, 637 bp, Unknown
  Bacterial polypeptide expressing nucleotide sequence isolated from the Sargasso Sea
aatgacattatcaactgctgacttacgtaacaagtttatcgattattttaaaagccatggccaccaagcggtggcgagctcgtcactggttccggcagatgatcccacacttctttttactaacgcgggcatgaaccagtttaaagactgttttttaggtgcggaaaaacgcagctatacccgtgcggtatcgtcacagcgctgcgttcgcgcaggtggtaagcataacgaccttgagaacgtaggttacactgcgcgtcaccataccttttttgaaatgctgggtaacttcagctttggcgattatttcaaaaaagaagcgatagagtttgcgtggaatttccttaccaaagaaattggtttgccaaaagaaaagctcttagtcaccgtttattctgaagatgacgaagctttcgacaactgggaaaaccatattggtgttccaaaagaaaagattattcgcattagcacgtcagataacttctggtctatgggcgataccggtccatgtggtccttgttctgaaattttctacgatcacggtgcgcacatttggggtggtcctccgggaacaccagaagaagacggcgaccgctttatcaaaatttggaacctggtattcatgcagtttaacaaa

SEQ ID NO: 306644 - DNA, 2665 bp, Unknown
  Bacterial polypeptide expressing nucleotide sequence isolated from the Sargasso Sea
atggctaaaacattaaatgaaatcaggtcagcattcttagattattttgaaaaaaatgatcataaaatagttgagtctagcaatttagtcccgaataacgacccaacattgatgtttgccaattcaggaatggtccaatttaaaaatgtatttactggactggaaaagagagactatcaaagagctacaacatctcaaaaatgtgtaagagcaggtggtaagcataacgatcttgaaaatgttggctatactccaagacaccatacgttttttgaaatgttgggaaacttttcttttggtgattattttaaagaaagagctattgaacttgcgtggaatttaataacaaaagaatttggtttagataagaataggctttatgtaacagtctaccacgacgatgaagaagcctttaattactggaaaaaaattgctgggttaagtgaagataaaatcataaggatagcaacatctgataatttttggtctatgggtgaaactggaccttgtggtccttgttcagaaatattttatgatcatggagaccacttagaaggcggattaccaggatcaaaaaatgaggatggggatagatttatagaaatttggaatttagtctttatgcagtatgagcaaatttcaaaagataagcgtattaatctgccaaaaccatcagttgatactggaatgggtttagagagaattgctgcattacttcaaggaactcacgacaactacgaaacagatcattttaaaaaaataataaactctgctgcagaaattttaaaagtccagccgaataataataatttagcaagttttagagtaatagctgatcacctacgagcaagctcatttttaattgctgagggagttttgccatcaaatgaaggaagaggttatgtcctaagaagaattatgagaagaggaatgaggcattctcatcttcttggttctaaagaaccagttttttataatatttttaaaaccttaaaagatgagatgaaaggtaattattcagaaatagaaagagctgaatctttaataaaagaaacattaagaatggaagaagaaaaatttttaattcttttagacagaggtattaaaatattaaatgaggaaataactaaaatagacaagatactacctggagaagtagcctttaaactctacgatacctatggttttccattagacctgacacaagacatcttaaaaaataaatcattaacaatagacaacgataaatttcaaagtttaatgaaagaaagcaaagaacttgctaagaaaaattggaaaggctcaggtgacagtgcggtagatgatatttggttttcgataaaagatagattaggtccttcagaattcctaggatatgagactgatcaagcagaaggtattattttatcattattaaaagacaacaaagaagtaaatgaattgaataaaaacgatgaaggaattattattttaaatcaaacacctttttatggagagtctgggggtcaggtaggagataccggtgaaataatatctggagactttaagtttgagatcacagatgtccaaaaaaaattaggcgatctatttgtacactacggcaaagtcaaatcaggaagtataaaaattaaagacaatgttgagatgaaaattgatattgatagacgtaataatataagagcatatcattcagcaacacaccttttgcatgagtctttaagaagagtattaggtactcatgttacacaaaaaggatcattagtagcaccagatagactaagatttgattttagccatatgaaaccaatttcagatcaggaaatagaaaaaatagaaaatcacgttaatttaatggttcaaaaaaaatcagaagttaaaacaaggattatgactcctaaagaagcagtaaataatggagctcttgcactctttggagagaaatatggagaggaagttagagtattatctatgggagatgagaaagaaaagtatttttccactgaattatgcggaggtacgcacgtacgaaacactggtgatattgggaaattcaaaattattagtcagtcatcaattgcagcaggtgttagaagagtagaagctcttagagaaaatcaattaaatagttttttacaaaataaagagaaattatctgacttatctgcacaaaaagatgaagaaatgattaatgacttatcaaaacagataattaaattaggtgttaaaccaaatcttgaaaatgaagataataaaattttaattaaagaattatcaaaacaattagagcaattaaaatttagctcaattttagaaaataattccaaaaatataattcaagatcttaaaattaataatataagtgtaagatttcaaaaagttgatgatcttccacctaaagagctaagaaaattggttgatactggaaaaaaagaactaaaaacaggaattgtgatagtttttgctagtttagaagacaaagtaggtcttgcagttgggataacagatgaacttattgataagtatgatgcagtcacatttgctaaaacaggatctgcaattattggtggaaaaggtggtggtggcagaaaagattttgcacaagcaggaggccaatttaaaaataaaataaatgaggcttttgaaaaaattaaaactttaatttagt

SEQ ID NO: 306645 - DNA, 310 bp, Unknown
  Bacterial polypeptide expressing nucleotide sequence isolated from the Sargasso Sea
atgaaaacgaatgaaataagacaagcatttatcaaattctttgagtcggaagggcatcaaagcgtcaagagttcgcctctgattcctgcaaatgatccgacactcttgtttacaaacgctggaatggttcagttcaaggacatttttttaggaaaagaagatcaaggtttcacaaaagcagtcagtgctcagagatgtttaagagcaggtggtaagcacaatgatcttgaaaatgttggctatacatcacgtcatcacactttctttgaaatgcttggcaactttagttttggagactactttaaagagg

SEQ ID NO: 306646 - DNA, 820 bp, Unknown
  Bacterial polypeptide expressing nucleotide sequence isolated from the Sargasso Sea
aatgccatgggtatctaaaaaatctgatgtaaaaacaagattaatgactccagatgaagcagttgaaaatggcgctctagctttatttggagaaaaatatggtgatgaggtcagagttctttcaatgggtgatgaagagggaaagtatttttcaactgaattatgtggaggaacacatgtaaaaaatactggtgatattggtaaatttaaaattattagccaatcttcaatagctgcgggagtaagaagagttgaagctttaagagacaaacaactagaggaataccttaaaaataaggaaaaactatctaatttgtcctctgaaaaaaatgaagaaactataaaagaattaagccaagaaatagttaacttgggtggaaaacctaatttagatcaaacggatcaaaaaatattaattaaaaatttaacaaaacaattagaaaccatttcaattaattctatattagaagataaatcaaaaaatattattaaagatgaagaaattaatggagtaagattaagacttcaaaaaattgatggattacctcctaaagaattaagaaaacttgttgataaaggaaaaaaagatttaagcaaaggtattgtgattgtatttgcaagtaaagacgacaaagttggactagcagttggagtaactgatgatttaacaaataagtttgatgcagttgaatttgttaaagtaggatctgaaattattggtggtaaaggtggtggaggcagaaaagattttgcgcaagctggtggtcaagatcaatctaaaatagaagacgcatttaaaaaacttaagagtttaatttaa

SEQ ID NO: 306647 - DNA, 1281 bp, Unknown
  Bacterial polypeptide expressing nucleotide sequence isolated from the Sargasso Sea
tatggctgataaaaccttaaatgaaataaggaatacttttttaaagtattttgaaaagaatgagcacaagattgttgagtctagcaatttagttcccaataatgatcctacattgatgtttgccaattctggcatggttcagtttaaaaatgtattcacaggtttagaaaaaagagattatgtaagagctaccacttctcaaaaatgtgttcgagcaggaggaaaacataacgaccttgaaaatgttggttatacacctagacatcatactttttttgaaatgttgggaaatttctcttttggagattattttaaagagcaagcaatccattatgcatgggatttaattacaaaagactttggtatagataaaaataaactttatgtaacagtatttcatgaagacgatgaggcattcaatttttggaagaaaattgcgggttttagtgatgatagaattttgagaattgcaacatcagataatttttggtcgatgggtgaaacaggtccgtgtggcccatgttctgagatattttttgatcatggcgatcatttacctggaggactaccaggatcaaagaatgaagatggagatagatttatagaaatttggaatttagtctttatgcaatttgaacaagttacaaaagataaaagaataaatcttccaaaaccttcagtggatactggtatgggtttagagagaattgctgcattgttacaaggaacacatgacaattatgaaacagatcactttaaaaaaataattaattctgcatcagaaattgttaaagttaaatcagatgaatctaatctgtccagttttagagttatagcagatcacttaagagcaagctcatttttaattgcagaaggtgtattaccatcaaatgaaggaagaggttatgttttaagaagaattatgagaagaggaatgagacattctcatttgcttggttctaaggaaccagttttttataatttgtttgatactctaaaaaatgaaatgtcaggaaattatcctgagctagtaagagcagagtctttaattaaggaaactctaaaaatggaagaagaaaaatttttagttttgttagatagaggaattaaaattttaaacgaagaaatttctaaaataaataaagtcttacctggagaggtagcttttaagttatacgatacgtatggctttccattagatttaacagaagatattttaagaaataaatcaatgtcaattgataaagaaaaatttcaatcattgatgaaagagagcagaga

SEQ ID NO: 306648 - DNA, 1945 bp, Unknown
  Bacterial polypeptide expressing nucleotide sequence isolated from the Sargasso Sea
gatgaaaagttcacaaattagagaatcatttattagcttttttgaaagcaaaagtcatgctcgtgtaccaagtgcgccggttcttccaattggagataagtccttgctatttacaaatgctggaatgaatcagttcaaagcaattttcttgaatacagaagaacctaaagatttacgagtagcaaatagtcaaaaatgcattagagttagcggaaagcacaatgatttggaagaagttggaagagacggattccaccacactttttttgaaatgcttggtaactggtcattcggtgattattataaaaaagaagcaattgaatggtcatgggaattgtttacaaaagtttggaaactagataaatccagattatgggttactgtttatgaagaagacgacgaagctttcgacttatggaaaaatcaaacagatatagattcaaatcgaataattcgttctggtgcaaaggataatttttgggaaatggctgaaactggaccatgtggtccatgttctgaaattcattactatgttgggaataatccaggagatcaacaagctgagctggttaataattcttcagagtattgggaattatggaatcttgtatttattcaatttaatcgcctcaaagatggaactatggaggatttgccaaaaaaacatgtagacactggtgcaggacttgaaagaatttgttcagtattgcaaaacaaagattcaaattataaaactgatttgttttcaaaaacaattgaagatttagaaaatttttcgaacacaaaatatcaagattttgaggtttcatataatgttatttgtgatcatataagaatgctgtcatttgcaattgctgatggagttgttccatcaaatgatggtagaggttatgtagttagaagagttttgagaagaggttcaaaatttgctatgaatttagaaattaaagaaccgattctatacaaattggttgattcggtggtttcgactatgtcttcacattatccagagctaaaagaaaaacaagaatatattgagcaaactattctttcagaagaacagtcattcttgcgaacacttgaaaatggagttattcaatttgaaaaaattgtaagcagtacatctggatcagaaatacatggtaaagatgcatttaagctatatgatacttatggatttccacttgatttaactcagcttatggctgaagaaagaaagatgactgttgatatagatggttttgatgttgaaatgaaaaatcaaaaagagttagctaaatctggtcaaaaatttgaaatggataatcttgatttaaaatggaacttagaaactaaaagcagccattcgatttttgttggttatgaaaatgaaagtatttcttcaaaaattataaatcacgctgaaagcggagaagacataataatcattctagaaaatacacctttttattccgaatctggaggtcaaattggcgacacaggtataattaggaatgatgacttttcagctagagtcaatgatacccaaaaaaatggagattatgttttacatatatgcacactaacaaatggcaatattggtgacaatctttctgtagattgcatgatagacgttgatagaagaaataatattaaagtgaatcatacagcaacccacttacttcatcaatcgttaaaagatgttttaggtaaccatgtaaatcaggcaggatctttagttcatccagaatatttaaggtttgatattacccatccaaataaaatttcttcaaaggaattagaatctattgagttaattgtaaaccagaaaatagacgaagatatcacagtcgaaacaagtattaaaagtttggaagaggctaaaaaagagggtgctactgcattgtttggtgaaaagtatggagaccaagttagggtagttacaatgggtgagtttctaaagaat

SEQ ID NO: 306649 - DNA, 1437 bp, Unknown
  Bacterial polypeptide expressing nucleotide sequence isolated from the Sargasso Sea
gatgaaaacaagtgatattagaaaagcctttttagatttttttaattcaaagaatcatgaagttgttgcttcaagctctctagttccatcaaatgatgaaactctattatttacaaatgcaggaatggtgcagtttaaggatgttttcttaggtactgagactaaaaattttaaacgagctgcaacttcacaaagatgtattagagctggaggcaagcataatgatttagaaaatgttggttataccttaagacaccatacattttttgaaatgttgggtaattttagttttggagactatttcaaagaagatgctattaaatttgcgtgggaatttttatcagaagaacttaagctagataaagaaaaattatggatcactgtttataaagacgatgatgaggctgaagaaatttggaaaaatattattggaattgatccgggcagaatagctagattaggtgatgatgataatttttggtctatgggtgatacaggaccatgcgggccatgctctgaaatattttatgatcatggagaacacattgatggaacacctccaggggccgaaggtgatgaaggtgatagatttattgaaatatggaatcttgtctttatgcaatttaatagagatgaaagtggaaaaatggaaccacttcccaaaccatctgttgatactggaatgggattagagagaatcgcagctgtccttcagggtgtaaattcaaattatgaaacagatgtatttaaagacttaatcaatgcttcagaaaaaattctaggcagccaaggaagtacatctcataaagttattgctgatcatattcgatcaagtgtttttttaatatctgacggagtaattcctgaaaaagaaggaagaggctatgtcttgagaagaataatgagaagaggtattagacatggatataaaattggtgccaaaaaaccatttatgcatctacttgtaaaagatttaataaaactcatgaattctgcttacccagaattaaagaaaaaacaaaaagatattattgaattaattaagaatgaagagattaaattttttgaaacgcttgaaacaggaatagaaatacttgaagaaactatttccaacatgaaaaataaaactctttctggagatgtagtttttaagttacatgacacttatggttttccgtttgatttgactgcagatattgcaagagaaaagcagttagatatagatgaagaaagattcaatgagtgcatgaatcaacaaaaacaaacctcgaaagcatcaagcagttttgtatcttcgctcccagcagcatctggaattgaagagactaaatttttaggttacgaaaatttagagtctgattcaaaagttttggttatttggaaagatcaggaaagaatagatgcagctaagaacaatgaggaaatattttttgcatg

SEQ ID NO: 306650 - DNA, 1108 bp, Unknown
  Bacterial polypeptide expressing nucleotide sequence isolated from the Sargasso Sea
atgcaagatttctcatctagccatatacgtaaaatcttcttggagttctttcaagaaaaaggtcatgaacttgtagaaagttcttctttaatacctaataacgatccttcgctgttatttactaatgcaggaatggtcccctttaaggatatgctattgggagttgaaataagagattacacaagagcagttagttctcaaagatgccttagagttggaggaaagcatgacgatctggacaatgtgggttatacagcaagacatcacactttctttgaaatgttgggaaattttagttttggagattattttaagaaagaagctatagagtttgcatgggaacttttaactgataggtacaacattccacctgaaaaactctggataacagtacacaaggatgataaagagtctgaaaaaatttggattgaaagcattggagttgatcccaatagattatccaggttagatgatgatgagaatttttggactatgggtgatacaggtccatgtggtccttgtagcgaaatttattatgatcatggagatcatattcaaggtgagccaccagaaattggatcagatccaggggacagattcatagaaatttggaacctagtatttactcaatttgaccgttctaaagatggaactcttagccctctgcccaatccttgtgtagatactggaatgggtttagaaagaatagctgcagtattacaagataagcacaataacttcaatacagacggatttactcctctaatagaagaagcaaataaaattacaaaactaaatgatctaggtaattcatccttaaaagtcatagctgatcatttaagatcaagttcttttttaatagccgaaggcatagttcctagcaatgagggaagaggttatgttttaagaaggattattcgaagggcattaaggcatgctaataagatagggcatgagggcccaattttatctacattatcctctacattagttaaagaaatgggaaattatcattctttattaaagaagaatgaagaaattattaaatctaatcttcttccagaagaagagcaattctctccaactctctctcaaggaatgttattgc

SEQ ID NO: 306651 - DNA, 1564 bp, Unknown
  Bacterial polypeptide expressing nucleotide sequence isolated from the Sargasso Sea
catgtggagattattaggcataacaaatgaatttttaacgcatatcgctactgtgggtattaaattaatgcaaaataattatcctgatttaaaaaataataatgatttaattttgaatgagataaaaattgaagaagaaaggtttagggaaactcttgaaaggggagagaaattgctggatgagttaatttcttcgggccagaaattaatttctggttttaaagcttttgaactttatgatacttatggatttcctctagaacttactgtagaaattgctgaagaaaatagtatcagtgtagatgtaaagggttttgaggaagaaatgaatgcacaaaaagagagagcaaaagctgcttcaagtaatattgatttgacattagagggatcattagagcgagaaattgatctatttaacaaaactgtttttaatggttatgattcacttctttcggaagctgaaataaaggggatattcatcgattcaacattagttaagcaagcaagtgtagggcagcaagttttaattattcttgatcagacaactttttatggagaatctggcggtcaagttggtgatattggaacgatattttcaaaagatgtagaggtcttagttgataatgtcattcgaaagaaaaatgtttttttacattatggaactatcaaaaaaggaatattaactattggacaaaaagttaagactaatgttgcttcctccaaaagggctaaggctgcggcaaatcatacagctacccatttattgcaatctgctctcaaatcagttgttaatgaaagtgttggacaaaaaggttcattagtagcctttaataaattacggtttgactttaattcttctaatcctatttctaaagagcaaatttctaagattgagactctcgttaactcttggattatggaaaatcatcccctagagataaaaaacatgtccaagagtgaggctcttaaaaaaggagcagtggccatgtttggagaaaaatatgaagaagaagtgcgtgtagttaatgtcccaggagtttcaatggaactatgtggtggaacacatgttagaaatacatcggaattgggttctttcaaaataatcagtgaggaaggaatctcagctggcgtaagacgaatagaagcattatcaggtcaatcagcctttgactatttcagtgagaggaatgctttagtaaatcaactaagtgatttattaaaagcaaatcccaatcaactctttgatagggttaataatttgcaagcagaactcataaataagaataaagagatacaaaaaatgaaagatgaaattgcatattttaaatattcttctctacaatcatcagcagaaatagtaaattctttttcaatattagtaaatcagattgatggcttagatggaaattctttgcaatctgcagcgctagatttaacttctaatttaggaaataaagcaatagttattcttgggggaataccaaatccagaaaacaaaaagttgttatttgtagtttcttttggtgatgatgcagttaaaataggattgcatgccggtaaatta

SEQ ID NO: 306652 - DNA, 1599 bp, Unknown
  Bacterial polypeptide expressing nucleotide sequence isolated from the Sargasso Sea
gctgacggtgttttgccttcaaatgagggacggggttatgtattaaggcgaatattaagaaggggaataagacatgcatatacattaggctcctcagaaccattatttcacaaaatttttgatgaattgaaaaatttaatgggcgatttcttccaagaacttaacactggagctgaggcaattaaggaaacactctacaatgaggaaataaaatttagagaaactttaagtaaaggcctagagatactcggacaagaaatacctaatattaaaaataataaattagatggcaaaatcgcatttaaattatacgacacctttggatttccccttgatttaacacaagattatttaagatcaaaggatattgatgttgatatagagtcctttgatgcattaatgaagctacaaaaagaggaagctagatcttcatggaaaggtagcggtgatggaaatactgaaaagctttggtttgatattgcaagaaagaataaaccaacagtatttaagggatacgatgaatccactttaaaggcaaatgtaactgcattaatcatagattcagaagctgttgatgaattaagtaataaaacaaaaaaatcagcaattatcacagatgagtcatgtttttatgcagagtctggtgggcaagttggagataaaggcattatttcctcagaaaatgccgaatttagagtgacagatactagaaaaactcctcaaggcatttttattcattttggtaatgtaatttcaggtaattttaaaataggacatgaggttaaacttaaagttgatacgattttaagggatcttattaaaaaaaatcattctgctacacacttacttcatgccgctttgagaaataatttaggacctcatgtagctcagcgcggatctttagttaatgagaataaattacgttttgactttagtcataataaacaaatttcatcaaatcaaatagatactattcaaaaagaggtaacaaatataatttctaatgcttgtgaaacacaaattgatattaaatctcaagaagaagcaattaaacaaggggctatggctttgtttggagaaaaatatggtgaagaggtcagagtagtcactctaggagaaaataataataaaccttactcaattgagctatgtggtggaacgcacgtaacaaacgttatggatatcgaaaaatttcatattataagtgaagagtctgtctcatcaggagtgagaagaatagaagcttgcactggtaataaggttgatgaatttattagtaataaactaaaagaggatcaactatttgaaaaaaaacttgatgataaaatcactaatttaatctcacaaataaacaaattaaatggaaaaataagttttagcgaagataataaaaacctttatgtaaagaaattagaaaattatttagataatttaaaaaataaatcaatactctcaaatgaagagaataataaaatagaggaatcagatataaatggaattaattttgtgtcacaattaatagaaaatctacctcccaaagaacttagatcagtttttgataaatttaaatcagaaaaatctaaatctattttggcttgt

SEQ ID NO: 306653 - DNA, 2434 bp, Unknown
  Bacterial polypeptide expressing nucleotide sequence isolated from the Sargasso Sea
aatggttggatttacaactcgacatcatactttcttcgagatgttaggaaatttttcttttggcgattactttaaagagcaagcaattctatacgcttggaacttaattactaaagaatttaaaattgatgaaaataaactattagttacgatatatcatgacgatgaggtcgcagaaaaattttggaaaaaaatagctaatttacctgacaataagataattaaaatttcaagctctgataatttttggtcaatgggtgacacaggaccttgcggaccatgctcggagatattttatgatcatggtgataaatactttggtggcccccctggttcagttgacgaagatggtgatcgtttcattgaaatatggaatttagtttttatgcaatatgaacaggtagataaaaataccagattagatttaccaaaaccatgtgtagacactggtatgggtcttgagagaataacagcattattaaatggtagtaatgacaattatagttctgatttgttttcaaatattattgatattactcaagagttcatacaaaaaaaaatatctgaagaaaataaatctagttttagagtcatagcagatcacttacgagcttcctcttttttaatagctgacggggttttgccttcaaatgagggacgaggttatgtactaagacgaatattaagaagaggaatcagacatgcatatacattaggttcctcagaaccattatttcacaaaatttttgatgaattgaaaaatttaatgggcgatttcttccaagaacttaactcgggagctgaaactattaaggaaacactctacaatgaggaaataaaatttagagaaactttaagtaaaggcctagagatacttggacaagaaatacctaatattaaaaataataaattagatggcaaaatcgcatttaaattatacgacacctttggatttccccttgatctaacacaagactatctaagatcaaaggatattgatgttgatttagagtcttttgatgaagcaatgaagctacaaaaagaggaagctagatcttcatggaagggtagcggtgatggaaatactgaaaagctatggtttgatattgcaagaaaaacgaaaccaacagtgtttaaaggatacgatgaaactactttaaaggcaaatgtaactgctttagtcttagactcagaagcagttaatgaattaagtgataaaataaaaaaatcagcaattatcacagatgagtcatgtttttatgcagagtctggtgggcaagttggagataaaggcataatttcctcagaaaatgcagaatttagagtgacagatactagaaaaactcctcaaggcatttttatccattttggtaatgtaatttcaggcaatttcaaaataggaaatgaagttgaacttaaaatagatagtagtttaagggaattaattaaaaaaaatcattctgctacacatttgcttcatgcagcattaaggaataacttaggactacatgtagctcagcgcggatctttagttaatgagaataaattacgttttgacttcagtcataataaacaaatatcatcaaagcaaatagatactattcaaaaagaagtattaaatataatttctaataattgtaaaacacaaattgatattaagtctcaagaagaagcaattaaacaaggggctatggccttgtttggagaaaaatatggcgaggaagttagagtagtcaccctaggagaaaataataataaaccttattcaattgagctatgtggcggaacgcacgttacaaatgttaaagatattgaaaaatttcatattataagtgaagagtctgtttcatcaggagtaaggagaatagaggcttgcactggtaataaggtagatgaatttattagtaataaactcaaagaggatcaactacatgaaaaaaaacttgatgataaaatcactaatttaatctcacaaataaacaaattaaatggaaaaataagttttagtgaggaaaataaaaacctttatataaagaagctagaaaactatttagataatttaaaaaataaatcaatactctcaaatgaggagaataataaaatagaagaaacaaatataaatggaattaattttgtgtctcaattaatagaaaacttacctcccaaagaactcagatcaatttttgataaatttaaattagaaaaatctaaatctattttggcttgcattaccacaaatgaagataaggtatccattatggttgggttaactaatgatttaatagatatttatgatgccagagtactaataaaaagtacttttgatatactcggttcaaaaggtggtgggggaagaattgacttcgctcaagctggtggcaacaaaaaagatcaattaaatcaagcttttttaagtattaaaaatcagatttaa

SEQ ID NO: 306654 - DNA, 2449 bp, Unknown
  Bacterial polypeptide expressing nucleotide sequence isolated from the Sargasso Sea
tttaaagatgctttcttaggcataaaaaaaccaagctcatcaaggattgtttcttgtcaaaaatgtgtaagagccggaggaaaacataatgatttagaaaatattgggtatactaatagacaccattcattttttgagatgcttggaaattttagctttggtaactattttaaagaagaagcaataaatctagcttggaactttcttactaaagagctacagctagatgtcaataaactttatatatctgttcacaaagatgatatcgattcatcagacatatggctgaaacaaattaagatagcaaaagataagttatggtatcttggggacaaagacaatttttggcaaatgggagatacgggaccatgtggcccttgtaccgaaatatactacgatctgggtgataagctaaaaggatcaccagcaagctctggagatccaggagatagatttattgagatatggaatttggtatttacacaatatgatagagactcaaataacaaactgaatgatcttccaaaaaaatgtgttgatacaggcatgggtcttgagagaattcatgcagtagtagagggtaaattagacaatttcaaaacaagtattttttcagatcttgagaattatttagaccatagtcttaataatgaaaatataaattatactatcaaaaaaatcattatggatcacagcagatcatcatgttttctgatatctgatggagttatacctaataatgagggtagaggctatgttttgaggcgtatacttagacgtgcaacacgctttttgtataacgcaggtattaaagagccttttatttataagtgtacggatatactcgaaaaatctatgggagatatttattcctccctaaaaaccaagaaaaaaacaattaaagaaataatatatgctgaagaggagaactatctttctacgttagagaaaggcttaaatcttattagtaaattaacaaagaatacagataaaatttcgggagtagagatttttaaactatatgatacttatggtttccctacagaaataattcaagaaattgctagcgaaaaaaatatatctttagatatgatctcgttcgagaaacttatgtcaaaacagaaaaatttaagcaaaaaaaatactacattttctaccgatacgcttagttttgtcgataaaaatcttgcatcatcgtttgagggttatactcaagattctctttctgcagaagttttggcgatatataaagacaactcacttgtggacttggttgaagaaaaaaatacagagcttattattatttttgataaaacaccattttatcctgaaggtggaggtcaaatttctgacataggtgtattacggaataatgaatgtagtttaaccattgcagatgttcaaaagattgggaattcaattgcacataaggcagttttaaaaaatggaaaaattaagaaaaatgataaattttatcttagtattgatacagagagaagaaaatctattgccattcatcattctagtacacatcttctgcatcaggcattaagagatattgtagggaatcatgtagagcaaaaaggttcgctggttactgatgaaggtttaagatttgatttttcacataacaaagcattaagtaaagatgaaataagccgtatagaaaaatttatagcattagaaattgataatgctagaccaacctcaataaaccaaatgagttataaagatgcaattaaggctggtgcattagctttttttgacgaaaaatatgaagatgatgtaagagtgcttaatattggaactaaatcaatggaattatgtgggggaacccatgtcgataataccaatgaaataaaaatgtttaagattttaaatgaacaaagtatatcgaatggcattagaagaattgaagctgttgcaggtaatgaagcgtataatgaatttcaaaaagcatttaatatgaatagggatatagcaagttcgttaggagtaagtcctgataaaattgctaataaaattgattcttttaaacataatgaatcaatgcaacaaaaatctatcaaaaaacttaataaacaacttgtatccttattttcaaaaactattaattcatttgtatctaataagacgaatatttttctgcaggattgctctaacttgaatcgtgaccaaattaaagatcttattgatgaaataaaatcaattcactctaattcaatttctgttttttatttatctaatgaaaataaaattgattgctttattggagtttcaaaaaaatgtactcacgaatacaatgctaaaaaattacttgaaatattaagtaaaaaatatacactcaaaggcggcggaagcgatacgttcgcaactcttattatagatgttcaagacaagtctgcattccataaaatactagaacaaatctttaatgttacaaaatgaa

SEQ ID NO: 306655 - DNA, 1467 bp, Unknown
  Bacterial polypeptide expressing nucleotide sequence isolated from the Sargasso Sea
atatgaaaaataaaactctgtctggcgatgtagtttttaaattacatgacacttatggttttccatttgatttgactgcagatattgcaagagaaaaacagttagatatagacgaagaaagattcaatgagtgcatgaatcaacaaaaacaaacctcgaaagcatcaagcagttttgtatcttcgctcccagcagcatctggaattgaagagactaaatttttaggttacgaaaatttagagtctgattcaaaagttttagttatttggaaagatcaggaaagaatagatgcagctaagaataatgaagaaatattttttgcatgcaatcaaacacctttttatgctgaagctggtggacaaattggagataaaggaaaatttgcatctcaatcgtcaactggtagtattttagattgtaagaaacaaggtaaagtatatattcataaggcaattgttgacaaaggaagcattaaaaccggtgacgttattaaaatgagtgttgaaaaagaaaaaaggtctgcaattgctatacatcattcatcaactcatttagttcatgcagcattaagagcggttttgggtgatcatgttcaacaaaaggggtccttggttgacgaaaataaacttagatttgatttttctcacactaaaccacttacgaaagaagaaattactgagattgaggatattgtaaataaagaggctctaaaaaatctcgaagtaaaaactgaattaatgaaattagatgatgctcttaagtctggagctatggcattgtttggagaaaaatatgatgatgatgtaagagttcttactatgggagaaaactcatattcggtagaactatgtggtggaactcatgtcaatcgaacaggagatataggattttttgtaattacaaaccaatcaagtgttgcttcaggaattagaagaattgaagcattggcagggtcaaagtctattgagcatgttaaaaaattaagggacgttaatttatctttacaaaattctcttaacgtatcagctgatgaacttcaagaaaaggtaaattctttgattgaagaaaataagaaattaaagaaatcttcaaagagcaaaagtgcgaagaaatcagtaatttcatcagaaatgcatgaatttggcgattggaaattaattgttgagcaagtagatgttgaggatactaaagatttaagatctcttgctgatgaacagaaaaatacaaatgaaaaattatgcgtagttatttttacagagtcatcaaataaaattgctttagtctgtggagttacaaaaaatctaactgaatctttatcagcaaaagaagttgtatctgagttatctaatcaaattaatggtaaaggtggaggtagatctgattttgcccaaggtgctggcgaaacagataatattaaagatttcgtgacttctattccaaattcagtaaaatccctcgcaaaataga

SEQ ID NO: 306656 - DNA, 2599 bp, Unknown
  Bacterial polypeptide expressing nucleotide sequence isolated from the Sargasso Sea
atgaatgcaaaaaaaataagaagtgactttataaaattttttcaagataaagatcatcgctttataaggagttcacctgtagtaccattcgatgatcagactcttttatttactaatgcaggaatgaatcaatttaaacctattttccttggatctaataaagcggattatcatcgtgcagtaaatacgcagaaatgtattcgagtgagcggaaagcataatgacctcgaagaagttggcgtagatgttttccatcataccttttttgaaatgcttggtaattggtcttttggagactattacaagaaagaggcaataaaatggtcttgggaattatttactgaagtttggggtttagataagtcaagactctgggtaacagtttataaagatgatgatgaagctcatgacatttggttgcaagaaacagatattaaaaaagatagggtattacgttttggagaaaaagataatttttgggagatgggagatactggtccttgtggaccatgttcagaaatacactactatgtaggagaagaaattgaagatcaagatcccaatggcgtaaataatactgatgaatattgggaattatggaatttagtatttatccaatatgatcgccaaggagatggagaattaattgatttgccagaaaagcatattgacacaggtgctggccttgaaagaattgttacagtattgcaggataaaaaatcaaattatgaaacagatttatttcagccgattattaaaggaattgaaactattacgggatcaaaatacttaaatgataaagtacctcatcatgttatttctgatcatatacgtatgttaagttttgctattgctgatggagctatgccttcaaatgaaggaagaggttatgtcttaagacgcattcttcgtcgtgcttctaggtttggtcggatgttgggaacaaaggagccatttttatttaaacttgttgattatctaattgatgtaatgggtgaaagttttccagaattagttgagaaaaaaatacatattgaaaaagtaattgaatcagaggaaagctccttcaatagtaccttagagagaggtctatctcatttcgaaaaatatataagcaagcacaaaggcaatgctattccaggaaaagaagcatttaaactttatgatacttatggatttccattagacttaacacagcttatggctagagagaaaggactagaagttgatgagataggatttcatgaaaatatgaaaaaacaaagagatcgcgctaaagcttctggaaattttaaacaagtttcgagtgatttatcatgggtagtcatctctgatagtaaggattctatttttcttggctatgagcaaatagaatctcaatcacaaatatgtaagtatgcgacaacagatgattataatgttttagttctagataagactcctttttatgcagaatcaggtgggcagattggagacactggagttataaaaattggtgatgatactttaactgttatggattgtcaaaaaaatggggatgaaattcatcatatatgctcagggtcatttaataatgaaaaattactagagccagttctatgtataatagatttaaaccgtagacaaagaataaggaaaaatcataccgcaacacatcttttgcatgcagcattgaaaaaaactttaggagatcatattcaacaagctggttcattagtgcatccagattatttgcgttttgatttaacccattcagaaaaaatatctaatgatgaggtatcagaaatagaaaatttagtgaatgacgaaattcagaaaaatgtaaggttagatatttcaattaaaaattttgatatagccaagtctgaaggtgctgaagcattgtttggtgaaaaatatggagataaagtacgtgttatatctattggtgatttttctatggagctttgtggaggtactcatgtaaatagaactggggatattggcttacttaaaattactgaagagtctagccttgctgcaggagtgagaaggatggtagccgttaccggacctgaagcaataaactattttcagaacaaagtaagtattgttcaagaattgcaaggtattttaggtgcaaagtctgatgagattagttctagagtaagccatttaattgatgaaagaaaagtattagagaagaaattaaagcagaaaagaagtagctctgcttttaatgcgaaggtaattatggaagatgcattaaaagtaaatgaacatatcataatagtgtcagaggttgattctgaatcattagatgaattaaaaaggtttggagatcaaactttaaatgtattagaaagtggtattgcagtccttggtagtaataaaggagcgaagcctgctgcagttattgtagtgactgatgatattataaaaaaaggtcttaatgctggtagtttagctaagcttgtagggaatgaaatgggcggaggtggtggaggtaaacctagtttagcaactgcaggtggaaaagatcttaaatcatatactactgcaatgaaaaaaagcattgatttaattaaatcggaattaaagaaagttgagggtgattagt

SEQ ID NO: 306657 - DNA, 1357 bp, Unknown
  Bacterial polypeptide expressing nucleotide sequence isolated from the Sargasso Sea
gatgcctctgaggaagaaatttggttttggtataaaagataaaataggacctacagagtttcttggatatgagtttaaccaatcagaaggagtggtgttatcaataattaaaaataataaagaagcacaaaatatttcaaatggtgaggaagggataattattactaatcaaacccctttttatggagagtctggtggacaagttggagatcaaggaacaatagtatctggtaattcagtatttgaggttacagatactcaaaaaaaacttggagatctgtttatacatcatggaattctaaaatctggtgagattaagattaaagacgttgtagaaatgaaaatagatattgaaagacgtaacaatcttaaggcatatcattctgcaactcatttattacatgagtctttgagaagaacattgggaaaacacgttatgcaaaaaggatctttagttgcgcctgatagactaagatttgattttagtcatatgaaaccaattacagaggatgaattaaaaattatcgataaattagttaatgaatacgtacaaaacaaaactgatgtaactacaagaattatgacaccaaaagctgccattgaaaaaggtgctttagctttttttggtgaaaaatatggagaagaagtgagagtagtttctatgggagcggaaaataactcttatttttcaacagaattatgtggtggaacacatgtaaaaaatacaggtgatattggaaaatttaaaactgttagccaatcctcaatagctgctggagttagaagggttgaagctttaagggacaaacaactcgaaatattcttaaaaaataaggaaaaaatgtcaaacctttctgcacaaaaggatgaagacagtattaaagaggtgtctgctcaaattattaaattaggtggaaaaccaaatctagaaaataaagatacgaaaggattaattaaagaccttaataaacaattagaacaattaaatgttcaatcagttttagctgataaaacaaaaaacataattaaagatgaaaatataaatggcactcaagttagattacaaaaagttcaagatttatctccaaaagacctaagaaaacttgttgatgcaggtaaaaaagaattgggtgaaggaatagtagtagtatttgcaaataaggatgagaaagttggtcttgctgtaggtgtaacagaaaatttaacaaataaatacgatgcagttaaatttgcaaaactaggatctgaaattattggtggaaagggcggtggaggtcgtaaagattttgcacaagctgggggtcaagactcaaataaaatcgatgaagctttagaaaaactaaaaaccttaatttaa

SEQ ID NO: 306658 - DNA, 1656 bp, Unknown
  Bacterial polypeptide expressing nucleotide sequence isolated from the Sargasso Sea
tatggcagataaaacactcaatgaaataagaaatacctttttaaaatattttgaaaagaacgatcataagattgtggagtctagtaatttggttccaaataacgatcctacattgatgtttgcaaattctgggatggttcagtttaaaaacgtttttacaggattagagaaaagagattacgttagagccacaacttcacaaaaatgtgtaagagcaggtggtaaacataatgatttagaaaatgttggttacacaccaaggcatcacactttctttgaaatgttaggaaatttttcttttggtgattattttaaagagcaagcaattcattatgcctgggatttaataacaaaagattttggaatagataaaaacaggctttatgtaactgtatttcatgaggatgatgaggccttcaatttttggaagaaaatagcgggttttagcgatgataggattataaggatagcaacttctgataatttttggtcaatgggagagacaggtccatgtggtccatgttctgaaatattttttgaccatggagatcatttaccaggaggtttacctggttctaaagatgaggatggagatagatttatagaaatttggaacttggtctttatgcagtttgaacaagttactaaagataaaagaattaatcttccaaaaccgtcagttgatactggaatgggattagagagaattgcagctttattgcaaggatcacatgataactatgaaacagatcatttcaaaaaaataattggctctgcatctgaaattacaaaagttaaatcagataaatctaatcttgcaagttttagagtaatagctgatcacttaagagcaagttcgtttttaattgctgaaggagttttaccttcaaacgaaggaagaggatatgttcttcgaagaattatgagaagagggatgagacattctcatttacttggatcaaaggaaccagttttttataatttgtttgacactcttaaaaatgaaatgtcaggaaactatccagagttagttagagcagagtctttaattaaagaaactttaaaaatggaggaagaaaaattcttagttctacttgatagaggaattaaaattttaaatgacgaaatatctaaaatagataaagtgttaccaggtgaagtagcttttaaattatacgatacctatggtttcccgttagatcttacagaagatattttaagaaacaaatcaatgtcaattgataccgaaatgtttcaatctttaatgaaggaaagtagagagcttgctaagaaaaattggaaaggttcaggtgatgcagctgttgaagatatctggtttggaataaaagataaaattgagccaactgaatttttaggatacgaaactaatcaagctgaaggtgtcgtgttatctcttttaaaagacaacaaagaggtagatcacttaaaagaaaatgatgagggaatgattatagtaaatcaaactcctttttatggtgagtctggaggtcaggttggtgatactggtgaaatagtatcaaatgattttaaatttgaagtaactgatgttcaaaaaaaacttggagatttatttgtacactacggaagggttaagactgggtctataaaactacaggaaagcgtagagttaaaaat

SEQ ID NO: 306659 - DNA, 883 bp, Unknown
  Bacterial polypeptide expressing nucleotide sequence isolated from the Sargasso Sea
ttgcatgagtcactaagaaggactttaggaacacatgtaatgcaaaaaggatcattagttgcaccggatagattaagatttgattttagtcatatgaaaccaattacagacgaagaaatgaaaaaaatcgatgaaaatgtaaacaagtttgtaaactcaaaaacggaagttgttacacgactaatgactcctgaagagggaattgaacaaggggcaatggctttattcggagaaaaatatggagatgaagttagagttgtgtttatgggtgaagaaggtaacaaatatttttcaacagaactttgtggtggaacacacgtaaaaaacacaggtgatgttggtaaattcaaagtagtcagtcagtcatcaatagctgcgggtgttagacgggttgaagcattaagagataaacaacttgaagaatatctaaagtcaaaagataagatgtctagtttgtcttctcaaaaaaatgaagaaactatcaaatcgttatcaagtgaaatcaccaagcttggaggaaaaccaattaaaaaatcagatgaccttaagattacaattaaggagctgacaaaacaattagaagaaataacggtaaagagtattttatcagataagaaaaagaatactataaaagaccaaaatattaaaaagataaatataagatttcaaaaagtagatgacttaccttttaaagaattaagaagacttgttgatcaagctaaaaaagacatcaaagagggaattgtagttatatatgcaattaaagatgagaaaataggtttagcagttggagttacagatgctttaactaaaaagtacgatgcaataaaatttgtaaaatctggttcagaaattcttggtggaaaaggtggtggaggtagat

SEQ ID NO: 306660 - DNA, 1957 bp, Unknown
  Bacterial polypeptide expressing nucleotide sequence isolated from the Sargasso Sea
atggcaaaaaccttaaacgagatcagaactacattcttagattattttgagaaaaatgatcacaagatagttgagtcttcaaacttagtaccaaacaacgatcccaccttgatgtttgcaaactcaggaatggttcagtttaaaaacgttttcacaggtttagaaaaaagagattatcaaagagcaaccacctcccaaaaatgtgttagagcaggcggtaaacataatgatttagaaaatgttggttacacgccaagacaccatacattttttgaaatgcttggtaatttttcttttggagactattttaaagaaaaagcaattgaacttgcatggaacttaatcactaaagattttggattagataaagatagactttatgtaactgtttttcatgaagatgatgaggcctttaatttttggaagaaaatcgcgggttttagcgacgataaaataataaggattgcaacatcagataacttttggtcgatgggagaaactggcccatgcggcccttgctcagaaattttttatgatcatggagatcatttatatggtggccttcccggaactaaagaagaggatggggatagatttattgaaatttggaacttagtctttatgcagtttgaacaagtttcaaaagataaacgaattaatttaccaaaaccatctgttgatacaggaatgggattagagaggatagcagctttacttcaaggtacacatgataattatgaaacagatcattttaaaaaattaataaattcaacctcagaggctgtaaaagtaaaaccgaatgaaaataatttatcaagttttagagttattgcagatcacctaagagcaagttcttttttaattgcagaaggtgttctcccatcaaacgaaggaagaggatatgtcttaagaagaattttgagaagaggtatgagacattctcatttactcggatcaaaagaaccaattttttacaatatttttaaaaccttgatggatgagatgaaaggaaattatcctgaagttcaaagagcagaatctttaattcgtgaaacattaaagatggaggaagaaaaatttttagtacttcttgataggggaataaaaattttaaatgaggaaatttcaaaaattgacaaagttttacctggtgaagttgcttttaaattatatgacacttatggtttcccattagatttaactcaagatattttaaaaagtaaatctttaacaattgataacgataaatttaattttttaatgcaggaaagtagagagcttgctaaaaaaaattggaaaggttctggagatagtgctgttgatgatatttggtttggaataagagaaaagttaggtgcaacagaatttttaggttatgaaacaaatcaagctgaaggagtagtgctttctttattaaaagataataaagaagtagatcagattaactctggtgatgaggcaatgattattatcaatcaaactcctttttatggagagtcgggtggacaagttggtgacaaaggagaaattatttcaggtgaatttatttttgaagttgaagatgtacaaaaaaaacttggagatttatttgttcactatggaaaagttaaaaaaggatcaattaaaaataatgaaaatgtggagatgaaaatagatattgaaaggcgagataatgtaagagcgtatcattcggcaacacatttattgcatgaatctttaagaagagttttaggtacacatgttactcaaaaaggctcattagttgagcctgatagattaaggtttgattttagccatatgaaaccaatttccagcgatgaaatagagaagatagaaacatacgtaaattcaatggttagtaataaatctgaggttaaaacacggataatgacacccaaagaggcggtaaataatggagcattagctttgtttggtgaaaatatggagatgaagtgag

SEQ ID NO: 306661 - DNA, 475 bp, Unknown
  Bacterial polypeptide expressing nucleotide sequence isolated from the Sargasso Sea
atgaaattagctgagataaggaaaaaatttctgaattattttgaatcaaaaaatcatgaaattatcaattcaagtgacttagtaccaaaaggggacgacagcatactctttacgaatgctggtatggttcagttcaaagatacgtttttgggattagatagaagaaataaaagtgctacttcctcgcaaaaatgcttaagagtaggtggaaaacacaatgaccttgaaaacgtgggcttcacaacaagacaccaaactttttttgagatgttgggcaattttagttttggtgagtactttaaagaaggtgctatagatcatgcttgggagtttctgactaaggaacttgggattccagaagaaaaactttttataacggtccatgaaaatgatcatgagtcagaaaaatattggcttgatcatattggtataaaaaaagaaaaaatttcccgtcttggcgatgaggataatttgt

SEQ ID NO: 306662 - DNA, 1128 bp, Unknown
  Bacterial polypeptide expressing nucleotide sequence isolated from the Sargasso Sea
tttcagctttatgacacctatggctttcccgtggatttgacccgtttgatgtgtgatgaacgcggattgagtgtggatgagaccggttttgaagaactcatggaagaacaacggactcgggcccgggaagcagggaagttcaaaatgaccctggatgactggactgaattcaaagaaggagaatctgaattcgtcggatattttcaattcgaagccgattcagaagttctacgttacagcagttctggatatgatgaatggcagatcgttttggagcaaacaccgttttatgccgaatcaggaggtcagattgccgatcaggggtcgctgatacaggacggaaagacttggcaagtgtctgatgtgcagaaacagggtggttcgattgtccattactgcaaagggacagataaacctgaatccgggaaaatcaaagcggtcgtcgatgcttccaaacgcctgcaggcaaccaacaaccattctgcaacccacctgatgcttgccgcaatgcgtgaaatcctcggaacccatgtcacccaggcgggatcgatcgttaatccggaataccttcgttttgatttcacccatcctgaaaaaccaacccagggagaaatggatcagatcgaatccagggtgaatgataaaatcagggaaaacatcccaactgagatatatcagaccgaataccagaaagcgattgattcaggaattgtcgccatgttcggagaaaaatacggggatgtggtcagggtgatcaagctcggagatttttctgaagaactctgcggcgggtgccatgttcaatccaccggacagatcggacatttccgcctggtttcggaggagggaattgcctccggaatcaggcgatttgtcggagtcaccgggattcaggctgagtccatcaaccgccaggagaaccgtgtggcccaaaatctaagacaacttctaaatgtaccggtagagaaagtcaccgagactgttgaaaaactgcttgatgagaagcgagggctggaaagagaaattcaggagatgcggaaacagaatgcaggagctaacgcaggaagtctccttgaagaagcagagttgatcggagatgtccatgtccttgcgaggcaagttgaagtt

SEQ ID NO: 306663 - DNA, 1370 bp, Unknown
  Bacterial polypeptide expressing nucleotide sequence isolated from the Sargasso Sea
catggttgccgccgcatcgtcgtcttctgcagcgtctgcaccgcgcagtggggaggagatccgtgaggcctttctcaacttctatgccgagcgcggccacaagcggatggccagcgcctcattaattcccgaagacccaacggtgctgctcaccattgcgggaatgctcccgttcaagcctgtttttttgggccagcaggagcgacccgcgccccgggccaccagttcgcagaagtgcatccgcaccaacgacatcgagaacgtggggcgcacggcccggcatcacacctttttcgagatgctcggcaacttctcgtttggggattacttcaagcagcaggcgattgagtgggcctgggagctcagcaccggcgtttatggcatcgctcccaagaacctggtggtcagcgtcttccgggaagacgacgaagccgagcagatctggcgtgatgtggtgggggtgaaccacaagcggatcatccgcatggatgaggccgacaacttctgggcgtccggccccaccggcccctgtggcccctgctcggagatctattacgacttcaagcctgagctcggtgatgagggcatcgatctcgaggacgacgaccgtttcatcgagttctacaacttggtgttcatgcagtacaaccgcgacgcggagggcaccctcacgccgctggccaaccgcaacatcgacaccggcatgggcctcgagcggatggcccagatcctgcagaaggttcccaacaactacgaaaccgatctgatctttccgctgatccaagcggccgccgatctggcgggggtcgactaccaccagctcaacgacaagggcaagacgtcgttgaaagtgatcggcgaccacagtcgtgcggtgacgcagctgatctgcgatggcgtcaccgccagcaacctgggccgtggctacatcctgcggcgcctgctccgccgggtggtgcgccatggccgcctgctgggcatcgacaaaccctttctcgtcaccatgggcgaggcggcgattgccctgctgaagggggcccaccccagcgtgatcgagcgccaggaggtgatcctttccgagctccagcgggaggaagcccgcttcctcgagaccctcgagcgcggtgagaagttgctggcggaggtgctggcctccaagcccacccagatcagcggtgcccaggcctttgagctgtacgacacctatggcttcccgctggagctcacccaggagatcgccgaggagcagggcctggccgtcgacctcgatggcttcgaggcggcgatggaggagcagcgtcagcgggccaaggcggccgcggtgagcatcgatctcaccctgcaggatgcgatcgaccaggtggtggcgg

SEQ ID NO: 306664 - DNA, 556 bp, Unknown
  Bacterial polypeptide expressing nucleotide sequence isolated from the Sargasso Sea
atggctgataaaacattaaatgaaataagaagttcttttcttaaatattttgagaaaaatgatcataagattattgaatcaagtaatctagttccaagcaacgaccctacattaatgtttgccaactcaggaatggttcagtttaaaaatgtttttacaggattagaaaaaagaaactataaaagagcaactacctcgcaaaaatgtgtaagagcagggggaaaacataatgatctagagaatgttggctatacacctcgacaccatacattttttgaaatgctaggaaatttttcttttggagattattttaaagaaagaggaattgaactagcctggaatctaataacaaaagattttggtttagacaaaaataggctttatttcactgtttttaatgaagatgatgaggctttaagtttatggaaaaaaattagtggattaaatgaagatagaataattaaaattcctacatcagataacttttggtcgatgggagaaactgggccttgcggtccatgttcagaaattttttatgatcatggagatcattaaa

SEQ ID NO: 306665 - DNA, 2578 bp, Unknown
  Bacterial polypeptide expressing nucleotide sequence isolated from the Sargasso Sea
atgaaaactagtgaaatcagacaatcttttctagactttttttattctaaagaccatgaggtaatttcttcgagctcattagttccaaataatgatgaaaccttactatttactaatgcaggaatggttcaatttaaagatgtatttcttggaacagaaaaaagaaattttaatagggctgctacttcgcaaagatgtattcgagccggaggaaaacataatgatttagaaaatgttggatatactttgagacatcatacattctttgaaatgcttggtaattttagttttggtgattattttaaagaagatgcaattaaatatgcttgggaatttttaacagaagtattaaaactagataaaaataaattatggataacagtctataaggatgatgatgaggctgaagatatatggagaaatattattggtatagatccaaaaagaattgcaaggcttggggatgacgataatttttggtcaatgggtgatacaggtccatgtggaccatgttcagaaatattttttgatcatggagatcatattgaaggaacaccacctggagccgatggagatgagggggatagatttgtagaaatatggaatcttgtttttatgcaatttaataaagatgagaatggaaaaatggaattattacccaaaccttcagttgacacaggaatgggtctagaaagaatagctgcagtcatgcaaggagttaattcaaactacaaaactgatgtttttaaaggtttgattcttgcttcagaaaaaatacttaaaaataaaaatagcacttctcataaagtaattgctgaccatataagatcatctgtttttttaatttctgatggagtaataccagaaaatgaaggtaggggatatgttttaagaagaattatgcgaagaggtattaggcatggatataaaatcggtgcaaagaaaccgtttatgcatttattagttaaagatttagttaaattaatgagttcagcatatccagacttaaaaacaaaagaaaaagatattgctaaattaataaaaaaagaagaagaaaagttttttgaaactttagaaaaaggaatagatatattagaagagtcaatatcaaatatgtctaataataaattatcaggagatattgtatttaagttgcatgatacttatggattcccatttgatttaactgctgatatagctagagaaaaagatctcttaattgatgaaaaaagatttaatattcgaatgaatcaacaaaaagaaacatcaaaagcatctagcagctttgtttcatcattacctgcagctgctggcatagaacaaacaattttcttaggttatgaaggcttagaatctgattcagaggtattggttatttggaaggatcaagcgaaaattaaagaagctaaaagtaaagaggaaatattcatagcttgtaatcaaactcccttttatgctgaggctggaggacaaattggagataaaggaatatttgcatctaaatcagctactggtaatatcttagattgtaaaaaacaaggtaaagtatatatacataaagcaattattgaaaaaggaaatcttaaaacaggcgatattattaaaatgagcgttgaaaaagaaaaaaggtctgctattgcaatccatcattcatccacacatcttgttcatgctgctcttagagaggttctgggagatcatgtaaatcaaaaaggttctttagttgatgaaaataaattacgttttgatttttcacatgataaacctttatctcaggaagaaatttctaagattgaggaaatagtaaataaagaagctctaaataatttagaagttaaaactgagcttatgaaactagatgatgctttaaaaacaggcgctatggcattatttggagagaaatatgatgatgatgttagggttctttcaatgggagaaaattcttattcagttgaattatgtggtggaacgcatgtaaaaagaactggagacataggattctttatggtaataaaccaatctagtgtgccttcaggcattagaagaattgaagcagttgctggaatgaagtcaatcgaatatataaataagattaggaaaataaatacatcacttcaatctgaattaaatgtccctaatgaagatatccaagaaaagatcaaatctttaatagaagaaaataaaaaactcaagaagcagtcaggaacaagtaaatcaaaggcatctataattttttctgaaacttatgaaatagacgattggaaattaatagttgaacaagttgaaattgaagacacaaaagaacttagaggcctagtagataatcaaaaaaatacaaatgaaaaagtttgtgttgtaatttttaatgcagataaaaacaagatagctttagtatgcggagttactaaaaatctaatagatttaatatctgcaaaggatgttattttagctttatcagatcaaattggtggtaaaggtggaggtaggcctgactttgctcaaggtgcaggtgagacagaaaatctaaaagatttcgtgacttctattgtaaattcagtaaaatccctcgcaaaataag

SEQ ID NO: 306666 - DNA, 1735 bp, Unknown
  Bacterial polypeptide expressing nucleotide sequence isolated from the Sargasso Sea
aatgattaaacaaaaaaattcagttaatgaaataagaaaaacttttattaattattttaaaaaaaacaatcatcaagttatatcttctagtaatttagtaccagaaaatgacccaacacttctgttcacaaatgctggtatggttcaatttaaaaatatttttactggtctagaacacagagaatatgataaagctgtatcatctcaaaaatgcttgagagcaggcggaaagcataatgatcttgagaatgttggcaggacagctaggcatcatacattttttgaaatgttaggtaatttttcttttggagattattttaaagaaaaagctatctatcaagcgtgggaattattaacaaaagaatacgcaattccaaaagaaagattgttggtaactatatatcacaatgataaagaagctgatttactatggaaaaaaatttccggttttaaagatgataagataattaaaattgaaactagtgataatttttggagtatgggagatacaggcccatgtggtccttgttctgaaatattttatgatcacggtgatacagttgaaggtggacctcctggttctaaaaatgaggacggggataggtttattgaaatatggaatttggtatttatgcaatatgaacaaatttctaataataaaagaattagtttgccaaaaccaagtattgacacaggtatggggttggaacgtatatctgcactattacaaaatactcataataattatgaaacagatatgatgaaaaatcttgtaaacgcttcagcatttctaactagcacagatcaaaacacagataatattatatctcatagagttgttgcagatcacttaaggtcaatgtcatttttaattgctgagggtgtattacctagtaatgaaggaagaggttatgttttaagaagaataatgagaagagctatgcgtcacacacatcttcttggtgcattagatccggtcatatataaattagtagaatatttaattaaagaaatgggtgaagcatttcctgagttagttactcaaaaattaatcattgaaaaaacaattcgtgaagaagagatcaagtttaaagataccttggatagaggcatgagcttattattaaacgaaatagatgagaaagtgtcttcaggtgttctgtctggtgaaaaagcttttgaattatatgatacttatggttttccaatagatttaactgaagatgtattaaggtcccatggatggacagtagatcattcaggatttgaaagttcaatgaataaccaaaaaaataaagccagacaagcatggtcaggatcgggtgataagcaatataatcaagaaattttaaaggttttattaaaacttccaagcacagattttcaaggatatgataataatttcttagaaactcaaattaatttaattattaaaaataatgagatagtaaaaaatatttcatgcggtgataaggttgatatcatttttaacaaaactattttctatgcagaatctggaggacaaattgcagataaaggaagcttggaaggagtggaatttaaggcaaatgttcttaaaaccaaaaaaattaatattggaaataataaaaatatatttatttcaactatagaggttttatcaggaaacttacaaagcggtgatattgttaaacaattaattgaattagatcacagaaaacaattatgctcacatcattcagcaacacatttacta

SEQ ID NO: 306667 - DNA, 2610 bp, Unknown
  Bacterial polypeptide expressing nucleotide sequence isolated from the Sargasso Sea
atgagcataaaattgtcgagtctagtaatttagtacccaataacgacccaaccttaatgtttgccaactctggcatggttcagtttaaaaatgtattcacaggtttagaaaaaagagattatgtaagagccactacttctcaaaaatgtgtcagggcaggaggcaaacacaatgatcttgaaaatgttggctatacacctcgtcaccacaccttctttgaaatgctagggaacttctcttttggagattattttaaagaacaggcaattcattatgcttgggatttaattactaaagattttggcattgataaagaccggctttatgtaacggtatttcatgaggatgacgaagccttcaatttttggaagaaaatagcgggttttagcgatgatcgaataattagaattgctacctcagataacttttggtcaatgggtgagaccggcccttgtggaccgtgttctgaaatattttttgaccatggagatcatttagctggaggattacctggctcaaaagacgaggacggggatcgatttattgagatttggaatttagtctttatgcaatatgagcaagtttcaaaagataaaagaataaatctaccaaagccatctgtagatactggaatgggtttagagagaattgcagcattgcttcaaggaacgcatgacaactatgaaacagatcattttgaaaaaattataaatgcagcttcagatattgttaaagttaaatcaaataaaactaatctctcaagttttagagttatagctgaccacttaagagcaagctcttttttaattgcagaaggtgttttaccttctaatgaaggaagaggttatgtacttagaagaattatgagaagagggatgagacattctcacttattaggatctaaggaaccagttttttataatttgtttgatacccttaaaaatgaaatgtcaggaaattatccagagcttgtaagagctgagtcattgattaaagaaactttaagaatggaagaagaaaaattcttagttcttcttgatagaggaattaaaattttaaatgatgaaatttctaagattgataaagttttaccaggtgaagtggcatttaaattatatgacacatatggatttccactagatcttaccgaagatattttaagaaataaatcaatgtccattgatacagaaaaatttaaaagcttaatgaaagaaagtagagaacttgctaaaaaaaattggaaaggttcaggagatgctgctgttgaagatatttggtttgggattaaagatcggttagagccaacagaatttttaggttacgaaacaaatcaagcagaaggtgttgttttgtctttgttaaaagaaaataaagaagttgatcaattgaaagaaaatgatgagggagtgattatagtaaaccaaaccccattttatggagagtctggaggtcaagtgggggacactggtcagatcgtatcaaatgaatttaaatttgaagtgacagatgttcagaaaaaacttggagatttatttgtacattacgggaaagtggttagtggttctataaagatcaaagatagcgttgaaatgaggataaatgttgatagaagagatgatactagagcgtatcactctgcaacccatcttttacatgagtctttaagaagagtattaggaaatcacgtaacccaaaaaggctctcttgtagagcctagcagattgagatttgattttagtcatatgaaaccaatccaaaatgatgaaattgataagatagagaactttgtgaatgatatggtttcaaaaaagtcagatgtaaaaactaggttaatgacacctgatgaagctgtagaaaatggagctttggctttatttggtgaaaaatatggagatgaagtgagagtgctttctatgggagatgaggatggaaaatatttttccacagaattatgtggtgggacccatgttaaaaatactggagatattggaaaatttaaaatagtcagccaatcttcaatcgctgctggggtcagacgaattgaggctttaagagacaaacaattagagaattatttaaaaaataaagaaaaactctcagccctatcttctgaaaaggatgatgaaaccattaaagacttaagtcagcaaattacaaagcttggaggaaaaccaagcttggatcaatctgatcaaaaaaacttgattaaaaacttaacaaaacaattagaaattctttcagtaaattcaattttgaatgataaatctaaaaatattatcaaagatcaagatataaatggaataaaattgagacttcaaaaagttgatgatcttcctccaaaagagttaagaaaattagttgatcaaggtaaaaaagatttatcggagggtattgtcatagtttttgcaagcaaagatgataaagtaggtatagcagtaggagttacagaaagcttaacaggcaaatatgatgctgttgaatttgttaaaattggatcagagattattggtggcaagggtggtggcggaagaaaggattttgctcaagctggaggtcaggatcggtcaaaaatagaagatgcttttgaaaaacttaaggctctaatttaat

SEQ ID NO: 306668 - DNA, 1853 bp, Unknown
  Bacterial polypeptide expressing nucleotide sequence isolated from the Sargasso Sea
gcaattagataatcaaaaaagaattaatttgcctagaccttcaattgatacaggcatgggactagagagattagcagcaatacttcagggaaagcacgataattacgacatagaccttatggacaaattaattacatcaagtgctgaaaagtcatcaacacataaagatggaaaatataaaatttcacatagagttattattgaccatttaaggtcatcgagttttttaattgctgatggaatcttgccttctaacgagggaaggggttatgtcttaagaaggattatgagaaggggtatgcggcatgcgcatattttaggttgtaaggatccactattatgtaaattagtaccagatctaattgaagagatgggagatgcctttcctgaattaatcgaggcaaaagaacttatctataattcacttgaaactgaagagaataaattcaaagaaactttagaacgtgggataaaaattcttgatgatgaaaccaaagggctaacatctggtcaaatgcttgatggaaaggttgcttttaaactttatgatacatatggatttccgtttgacttaactcaggatattttaaagtcaaaaaaaattaatataaatgaagttgaatttaaaaaagaaatgaataaacaaaaaaaattagcccgctcttcctggaaaggttcaggagatatttcatatgataaattatttttagaaattgaaaacaaatgccaacctactaactttgttggttatgataatgaattttgcaccgcaaaggttttaagtataattattaattctagttttgttaatgttgctgaacagggtactgaagctttagtagtttttgatcaaactccattttatgcaacttctggaggtcaacttgctgataaaggaaaattaaataataataataatgatttttctgcaacagtattggattgcgataaaactaaaaatggcgtttatcttcataaaatttttattgaaaaaggaaacctacaaattaatgataatatacaactttttatagatgcaaatgaaagaaaatcatcagcaactaatcatacttcaactcatatcttacatcagtcattaaaagatattttaggtatgcatatatcacaaaagggatcattggtttcttccgagagattaagatttgattttagtcataataattcactgacaaaaaaagatttgtataaaattgaacactatattaatcgtaaaattagagaaaattctgaagttttaattcgtgaaatggagatttctcagtcaaaaagcgaaggtgcaaccgctttgtttggagaaaaatacggagatattgttagagttgtttcatttggtaaaagttttgacgcgaacaaatcttgttggtcaattgagctttgtgggggaacacatgtcaaaagaacaggtgaaataggtttgctaaaaattattagtgaaggctccgtatcttctggcataagaagaattgaagcaattagcggcacaaaagcattagaatgggtaaacgaaaaatatgatattttaaaaaatattagtgaattaatgaagtctcctgatgaaaacttggttgataaaatcatttctcttaacgaagataaaaggaaaattgaaaaagaatttaataattataaaaataacaattcgcatctttctaatagtaatgaaaaagtagttcaaatcggtgatgtaaaatttattagtaaagtttttaatgatgtatctcctaaaaatctcaaaggaatagctgataaaattctttataatcaaagtgattgtgttgtggcagtaattacaattgaaagtaataaaatatctttagttgtaggtgtaacaa

SEQ ID NO: 306669 - DNA, 1561 bp, Unknown
  Bacterial polypeptide expressing nucleotide sequence isolated from the Sargasso Sea
aatgaaatagaaaatacttttctcaaatattttgagaaaaatgatcataaaatagttgagtctagtaacttagttcctaataacgatccgacattaatgttgccaaattctggaatggttcaattcaaaaatgtttttaccggattagagaaaagagattacaaaagagctacaacttcacaaaaatgtgttagagcaggtggaaaacataatgatttagaaaatgttggatacaccccgagacaccacacattttttgaaatgcttgggaacttttcttttggagattattttaaagaaagagcaatagagcttgcatggaatctaataactaaagattttgggttagataaaaatagactttattttactgtttttaatgaagatgaagaggcatttaaactttggaaaaaaatatcgggcttaaatgaaaatagaataatcaaaatttctacctcagataatttttggtcaatgggtgaaacaggtccatgtggaccttgttctgaaattttttatgatcatggagatcatttaaaaggcggtcttcctggaagcaaagaccaagatggtgatagatatattgagatttggaacctcgtcttcatgcaatatgaacaagtttcaaaagataaaagaattgatttaccgaaaccttcagtagatacaggtatgggtcttgagagaatggcagcacttcttcaaggtacacatgacaattataaaactgatcatttcttaaaattaattaattcaatttctgaaactgtaaaagttaaaccaaacgaaaataatttatcaagttttagagtgatagctgatcacttaagggcaagttcttttctacttgctgaaggagttttaccatctaatgaaggaagaggttatgtccttagaagaattatgagaagaggaatgaggcactcacatttactaggatctaaagaaccaattttttacaatatttttaaaactcttttagatgaaatgtctaaaaattatccagagttaaaaagggcagagtcacttatcaaagaaactttgaaaatggaggaagaaaaatttttggttttattagaaagaggtatgaaaattttagatgatgaaatctcaaaaatagacaaggttcttcctggcgaagttgctttcaaactttatgatacttacggttttccgctagatttaactgaagatattcttaagaacaaatctcttcaagtagataataaaaaatttgacgatatgatgaaaaaaagtcgagagcttgcaaagaaaaattggaaaggctcaggagatagctcagtcagtgaaatttggtttaatcttaaagataaaattggtccaactgaatttttaggttatgagactaatcaggctgaaggtagtgttacagcaataattaaagatgataaagaaactcaacaattaaaagaaggagaagaagggcaaattattttaaatcaaactcctttttatggtgaatctggtggtcaggttggtgataaaggtacaataatttcaggtgaaaatgaatttgaggtgaccgacgttcaaaaaaaga

SEQ ID NO: 306670 - DNA, 1270 bp, Unknown
  Bacterial polypeptide expressing nucleotide sequence isolated from the Sargasso Sea
tctggtgatagtgctatagatgacatttggtttggtattaaagataaacttggtgtaactgaatttctaggatatgaaacaaatcaagctgaaggtgtagttttatcattattaaaaaataataaagaagtaaaatctttaaataacggtgatgagggtatgataattagcaatcaaacaccgttctatggagaatctggaggtcaagtgggagacacgggagaaatcacttctggtgaatttaaattcaaagttaacgatgttcaaaaaaagttaggagatctttttgttcattatggaaaagttgaaaacggcaatattaatttaaatgataatatagaaatgagaattgaccaagaaagaagagacaatatcagagcataccattctgcaactcatttactacacgagtctcttagaagagttttgggaactcatgtaacacaaaaaggatctttagttgaagcggatagattgagatttgattttagccatatgaaaccaatatctgaggatgaagtagaaaaaattgagacaattgttaacgaaatggtgcaaacacaatcaaatgtgaggacaagattgatgacaccgaaagaagcagtaaacaatggtgcattagcactttttggagaaaagtatggagacgaggttagagttttatccatgggcgatgagaagaataagtatttttcaaccgaactatgtgggggaactcatgttaaaaatacaggagatattggaaagtttaaaattataagccagtcatcaatagctgcgggtgtaagaagagttgaagcgctaagagataaacaattagaaaaatatttatctgaaaaagagcatttatctgacatttcaagtaaaaaagatgaagaattagtaaaagatttgattaaaaaaattgaggcacttgggggtaaagcaaaactaaataatataaatcaaaaaattttaataaaggacttatcaaagcaattagaagatctttcactaaaatttacgttgaaagacaaaagcaaaaatattgtaaatgatgaagttctaaatggtgttaaagtgagatttcaaaaaattattgatttgccacccaaagatttgagaaaaatagtagatgaaggaaaaaaacaattagaggagggtattataattgttagtgctacaaaagatgaaaaaattggtttagcaattggtgttactgaaaaattaactgaaaaatataatgctgttgaactagttaaaacagcatcaagtgttataggtgaaaagg

SEQ ID NO: 306671 - DNA, 1960 bp, Unknown
  Bacterial polypeptide expressing nucleotide sequence isolated from the Sargasso Sea
tatgaagattaatagtttaagggactcattcatatcttactttgttaaaaatggacataaacatgttcattcaagtccccttgtgcctcaaaatgatcctactctgatgttcgctaattcaggaatggttcaatttaaaaatgtattcacaggattagagaaaacagatttcaaccgtgccgtaacggctcagaaatgcattagggcagggggaaaacacaatgatttagaaaatgtaggctatactttaaggcatcacactttttttgaaatgttgggtaatttctcatttggagattattttaaagatgatgcgatagattacgcatggagatttatcacttctgaactaggaataaataaagataagctttgtgtaactatttatcacgatgatgagcaggcttacaatgcttggaagaagattaccggtttcagtgatgataaaataataagaatttctacaaaagataatttctggtcaatgggagaaacagggccatgcggaccttgctcggaaatattttatgatcatggtgaaaattatattggcaaacctcctagtgaagctgatgaaacgggcgatcgatttgtggaaatatggaatctcgtttttatgcagtatgagcaagtcgattcagaaaatcgtattgatttaccacgaccctcaatagatacaggtatgggcattgagagaatagccgcagttatgcaaggcactaatgataattatcaagttgatagtatattagaaattattaatcattctaaagaattaactaaaaatgataacgaaaatttaatatcaagccatagagttatagctgatcatctcagatcttcatgttttttaattgctgacggcgtccttccatccaatgaaggcagaggttatgtcttaaggagaattatgagaagagcaatgaggcacgtacacattctaaattacaatgatttactgatgcacaaactggcaccaactctgatttcaaatatgaaaatgtcctatcctgagcttgaaagagcagagtctctaataaatgaaacattgaaatatgaagaacaaaggttcagagatttattgtccagaggaattaagcaacttgatacaatgatcgataatttgaatggaaaaactattctaaatgggcagtcagcttttaagctgtatgacacatatggcttcccaattgatttaacacaagatattttgagaaataagaaaattgaggtggatattgatgattttaagaaatgtttggaggatcaaaaagaaaaagcaagaagcaattggactggatctggtggcacagctacagataaaatttggtttgagttaaataaaagtttatcccctacagagtttttaggctacacatctgaaaaaacagaaggaagtattatttctataataaaagaaggtgtattagttgatagtttacatagcggtgataacggatccctaatactcaatcaaacggtattttatgctgagtctggcggtcaaattggtgatacaggaacaatacaagctgataattttgaatttgaagtttcagacacacaaaaaaaaggaaacctatatgtgcatcacggaaaagtaattaaaggagatatcaagaaaggtacaggtgcacatttgtcaattaattctgctagaagaagctcatgtaagacttatcattctgcaacacatattttacatcaagcattaagagaagttttgggggatcatgtgacccagaaaggctctttagtttcgtttgataaattaagattcgattttagtcaccataaatctctttcagaaagtgagatatctaaaatagagcagatttcgaatacagttattgaggaaggatcagatgttgaaactcaaattatgacaccagatgacgctgtaaatgctggagcacttgctctattcggagagaaatattctgatgaggtaagagtgtta

SEQ ID NO: 306672 - DNA, 1235 bp, Unknown
  Bacterial polypeptide expressing nucleotide sequence isolated from the Sargasso Sea
aatgaaactaactgagataagaaaaaaattcctaaaatattttgaatcaaaaaaacataaagttatagattcaagtgatcttgtccctcatggagatgatagtttgttatttacaaatgcaggaatggttcaatttaaggatactttcttaggcctagaaaaaagagaatatagcgctgtttcatcgcaaaagtgtcttagggttgggggcaagcataatgatcttgagaatgttggttttactaccagacaccagacattttttgaaatgcttggaaatttcagttttggagaatactttaaagaagaagcaataggttttgcctgggaattcctaacagaagaactgaaattgcaaaaagaaaaactatggataaccgttcatcatacagataaagattctgaaaaaatttggctagataaaataggaattgagaagagtaaattatctagacttggagatgaagataacttttggtccatgggggatacaggtccttgcggtccttgctcagaaattttctatgattacggttcagactatgatggatctcctccaggagaaggagataccggagacaggtttgtagaaatatggaatctggttttcatggaatttaatagagattcaaatggagatttaaaaccactacctaacaaatgtgttgataccggaatggggttagaaagagtctgttctgtattacaaaatgtaggttctaattttgaaatagatttatttaaatcttttaaagatgatatcagggatttatttgatagccctaatgagcaatcacttaatgttatagcagatcatcttagggcttcattctttctgctttctgaacaagtgtatccatcaaatgaaggaagaggttatgttttaagaagattaataagaagagcaattagacacggctataaaatgggaaaagaaaccccatttttatatgaattattagaaaatcttaacagtttattaaagaaagattttccaaaagaattcaaagactacaagtcaataaaaaagatcttaatggaggaagaagaattattcttcaagacattatcctcaggaattaagatttttgaagataatctgcctaagaaaaaatcagaaatgatgagtggcgatattgccttcaaattacatgatacttatggatttcctattgatttaacaattgctatggcttctgagagagaaatagaagttgatgagaaaattttagaga

SEQ ID NO: 306673 - DNA, 1780 bp, Unknown
  Bacterial polypeptide expressing nucleotide sequence isolated from the Sargasso Sea
atggctaaaacattaaatgaaataaggtcagcttacctaaattattttgaaaaaaatgatcataaaatagttgagtctagcaatttagttacaaataatgacccaacattgatgtttgccaattctggaatggttcaatttaaaaatgtgtttactggacttgaaaagagagactatcaaagagctacaacatcccaaaaatgtgtaagagcaggtggtaagcataacgatcttgaaaatgttggctatacaccaagacatcacacattttttgagatgcttggaaacttttcctttggcgattatttcaaagaaagagctattgaacttgcgtggaatttaataacaaaggaatttggtttagataagaacagactttatgtaactgtctaccatgatgatgatgaagcctttaattactggaaaaaaattgctgggttaaatgaagataaaatcattaggatagcaacatctgataatttttggtccatgggtgaaacagggccttgcggtccttgttcagaaatattttatgatcatggagaccatcttgaaggtggattgcctggaacaaaaaatgaggatggagatagatttatagaaatttggaatttagtttttatgcaatatgagcaaatttcaaaagataaacgaattaatctgccaaaaccatcagttgatactggaatgggcttggagagaattgctgcattacttcaaggaactcacgataactatgaaacagatcattttaaaaaaataattaattctgctgcagaaattttaaaagttaaaccaaataaagaaaatttagcaagttttagagtaatagcagatcacttaagagcaagttcatttttaattgcagaaggagttttgccatcaaacgagggaagaggttatgtattaagaagaataatgagaagaggaatgaggcattctcattttcttgggtctaaagagcctattttttataatatttttaaaactttaaaagatgagatgaaaggtaattactcagaaatagaaagagctgaatctttaataaaagaaacattaagaatggaggaagaaaagtttttagttcttttagacagaggtattaaaatattaaatgaggaaatagctaaaatagacaagatattaccaggagaagtagcttttaaactttatgatacatacggctttccattagacctgacacaagacatcttaaaaaataaatcattaacaatagataacgataaatttcaaagattaatgaaagagagcaaagagcttgctaagaaaaactggaaaggttctggtgatagtgcagtagatgatatttggttttccataaaagataaattaggcccttcagaattcttaggatatgaaactgatcaagcagaaggcattgttttatcattattaaaagacaataaagaggtaaatgcactaagtgaaaatgatgagggtatgattattttaaatcaaactcctttttatggtgagtcaggaggacaggtaggagatactggtcaaataatatctggagattttatatttgagataacagatgtccaaaaaaaattaggtgatctatttgtgcattacggaaaagtcaaatctggaagtataaagatcaaagataacgttgagatgaaaattgatatagatagacgtaataatattagagcatatcattcagcaactcatcttttacatgaatctttaagaagagtattgggaactcatgtaacacaaaaaggttcattagtgcaccggacagattaag

SEQ ID NO: 306674 - DNA, 2626 bp, Unknown
  Bacterial polypeptide expressing nucleotide sequence isolated from the Sargasso Sea
atgtatcaaacgacagcagcgcttagaagtgctttcctcgaatttttccgcagcaatggtcaccaagttgtggacagtagttctcttgtaccaggcaatgatcccacgcttttattcaccaacgccggtatgaaccagttcaaggacgtgtttcttggcatggacaaacgtagctatacacgtgcgaccactgcccaacgctgcgtccgtgcgggcggtaaacacaacgatttagataacgttggttacaccgcgcgtcaccatactttcttcgaaatgctgggtaacttcagctttggtgattacttcaaagaagatgcgattcgttttggttggaccttcctgactgaagtattgaagctaccaaaggagcgtctgtgtgtaactgtttatcaaacagatgatgaagcctttgaaatttggaataaaaagattggtgttgctgctgaaaacatcattcgcatcggcgataacaagggcgcgccatacgcttcagataacttctggcaaatgggcgatactggtccttgtggcccttgtaccgaaattttctatgatcacggcgaccacatttggggtggacgtcctggtagcccagaagaagatggcgaccgtttcatcgaaatttggaacatcgtattcatgcaatacaatcgccaagcctctggtgagatgttgccgctgccaaaaccttcagtcgatactggtatggggattgagcgtatcgctgcgattatgcagggggttcattcaaactacgaaatcgatattttccgcgccttgattgctaaagcagccgaaatcatcggcgtgactgacttatctaacaagtcgctgcgtgttattgccgaccatattcgttcatgcgccttcttagttgcagatggtgtgatgccatcgaacgaaggtcgtggttatgtgctgcgccgtattattcgccgtgcagtgcgtcatggtaacaagttaggggcaactgaagctttcttctacaagttagttccgacgctaatcgaagtgatgggcgatgccgctaaaggtttagccgatactcaagtgattgttgaaaaagcccttaaagctgaagaagaacagtttgcccgtacgcttgagcgtggtttaggcattctggatagcgcgttaaacgaattgcagggcgacaccttagacggtgaaacagtcttcaaactgtacgatacctatggcttcccagtggatttaaccgctgacgtatgccgtgagcgcaacattatcgtcgacgaagcgggctttgaagcggctatggctgaacaacgtagccgtgctcaagccgcgggtaacttcggcgccgattacaacgcagcacttaagatcgatgctgaaaccgcattctgtggttactcagaacttactggcaatgctaaagtcaccgcgctttacctgaacggcgagtctgtttcagcgatcaatgcgggtgatgatgccgtagtggtgctcgatgtaacgcctttttatgctgaatcgggcggccaagtcggtgacaagggcgtattagtggctcaaggtattgagtttgctgttagcgatacgcaaaaatttggtcaagcttcaggccacaaagggaccttaacggctggtagcttaagcgttggccaagtacttgaagcgaaagtggataaaaagctacgtcaccgtactcagttaaaccactctgtaactcacttattacatgctgcgctgcgtcaagtgttaggcactcacgttactcaaaaaggttcgttggttgaccctgagcgtttacgtttcgacttctctcatttcgaagcagtcaaacctgctgagctgaaacaggttgaagagttagttaacacccaaattcgccgcaaccatgagctgaaagttgctgaaatggcgattgatgaagccaaagaaaaaggcgctatggcactcttcggtgagaagtacgatgctcaggtgcgtgttgtcaccatgggcgatttctctatcgaattgtgtggcggcacccatgttggccgtaccggtgacattggtctgttcaaaattacctctgaaggcggtattgctgcgggcgttcgccgtatcgaagcggtaactggtgcagcagcgatggcctatgtggcacagcaacaggcacaacttgaagaagcggcagcactacttaaaggcgatactcaatccgttgtgaccaagcttaaagcccagctggataaaatgaagcagcttgaaaaagacatgcagcaactgaaagataagttagctgcggcagcgagtgcggatttagccggtgatgcagttgtggttaatggcgtcaatgtgctgattaaaaagctagaaggcgttgaagcaggtgcactgcgtggcctgcaagatgagttaaagcaaaagctgaaatctgccgttatcctgctcggtgttgctcaggaaggcaaagtaaaccttatcgcgggtgtgagcaatgacttagttagtaaagtcaaagctggtgaactggttgctatggttgctgcacaagtgggcggtaaaggtggtggtcgcccagatatggctcaagcgggtggtagccaaccagaaaatctggatgcggcgctatctcaagtattaccttggattactgagcgtttagcttaag

SEQ ID NO: 306675 - DNA, 1096 bp, Unknown
  Bacterial polypeptide expressing nucleotide sequence isolated from the Sargasso Sea
tttatcaaattctttgagtcggaagggcatcaaagcgtcaagagttcgcctttgattcctgcaaatgatccgacactcttatttacaaacgctggaatggttcagttcaaggacatttttttaggaaaagaagatcaaggtttcacaaaagcagtcagtgctcagagatgtttaagagcaggtggtaagcacaatgatcttgaaaatgttggctatacatcacgtcatcacactttctttgaaatgcttggcaactttagttttggagactactttaaagaggatgcaatccaattggcatgggatttcattaccaatgaactcaaacttgaaaaagatcgtctttgggtaaccatttttgaagatgatgatgaggctgcaagcatttggcttgaaaagattggagtaccagctaatagacttgttcgactgggtgaaaagtctaacttttggtctatgggtgatactggaccatgcggtccttgtagcgagatattttatgatcatggcgatcatatcgatgggggtcctcctggatcagatgatgaagatggcgatcgtttcgtagaaatttggaatcttgttttcatgcaatttgatagacaagcaaatggggagcttgttaacttgccaaaaccatcagttgatacaggtatgggattagagcgaattgcagcagtgatgcaaggtgtaagcagtaactatgatattgatttatttcaaaaaataattgctgcaataaaaaaccaatcacaaaaaggggaggagagtcactatagagtcatcgctgaccatattcgatcctcttcttttctcattatggatggagttacccctgataatgagggcaggggttatgttctaagaagaataatcagaagagcattgaggcatggtcatgatctggaaattgaatccccattttttttcaagcttgtagatgttttagtaggagaaatggggcaaacatatccagagcttctcaataagaaagattacatagagcgaatcatcttgatggaagaagaaagattcgctgcaacgctttcacagggaatgagtttattacagaaagaatttgaccgatcaaatgatg

SEQ ID NO: 306676 - DNA, 1193 bp, Unknown
  Bacterial polypeptide expressing nucleotide sequence isolated from the Sargasso Sea
aaatgaaataagaagtactttccttaagtattttgaaaaaaacgatcataagattgttgagtctagcaatttagttccaaataatgatccaacattaatgtttgcaaattctgggatggtgcaatttaaaaatgtatttacgggtcttgaaaagagggactatcaaagagctactacctcacaaaaatgtgttagagctggtggaaaacataatgatttagaaaatgtaggttatacaccaaggcaccatactttttttgaaatgttaggaaatttttcttttggagattattttaaagatcgagccattgaattagcatggaacttaataacaaaagattttggtctagacaaaaataggctttatttcactgtttttaatcaagacgaagaggctttaaatctttggaaaaaaataacaggatttggagatgataaaataattaaaatttcaacagcagataatttttggtcaatgggagaaactggaccatgcggtccttgctcagaaatattttatgatcatggaaatcatttaaaaggcggattaccaggaacaaaagaccaagatggagacaggtatattgagatttggaatttggtatttatgcagtttgaacaaatatctaaagataaaagaataaatcttccaaagccatccgttgatactggtatgggacttgaaagagttgcagcattattacaaggaacgcatgataactataaaacagaccactttatcaaattaataaattctattgccgatacagttaaaaaaaatccaaatgaaaaaaatttatctagttttagagttatagcagatcatttaagagcaagctcttttttaattgctgaaggcgttctaccttcaaatgaaggcagaggatatgtgcttaggagaataatgagaagaggaatgagacattctcatctactcggctctaaagatccaatattttttaatattttcaaaacattaatggaagaaatgtctggtaattatcctgaacttaaaagagctcagtcattaataaaagaaactttaaaaactgaagaagaaaagtttttagttttacttgaaagaggaatgaaaattcttgatgatgaaataaataaaatcgaaaaagttttaccaggcgaagttgcttttaaactttatgatacttatggtttttcctttagatttaaccgaa

SEQ ID NO: 306677 - DNA, 1190 bp, Unknown
  Bacterial polypeptide expressing nucleotide sequence isolated from the Sargasso Sea
tctgatttatccgctgatcgaaactgcagctggtctggctggagtcgactaccgccagctcgatgacaaaggtcagacgtcgctgaaggtgattggtgaccacagccgtgcggtcacgcagctgatctgtgatggcgtaacagcttccaacctcggccgtggctacatcctgcggcgcttactgcgccgagttgtgcgccatgggcgtttgttgggcatcgataagccttttttggtcgccatgggagaagcggccattgccctgatgcaggtcgcctacccgcagctagatgaacgcagggaggtgatcctggcggagctgcaacgggaggaagcccgcttcttggaaacgctggagcgcggggagaagttgttggctgatgtgttggccgctaagcccaagcagatcagtggtgagcaggcctttgagctctatgacacctatggcttcccgctcgagctcaccgaagaaatcgccgaagagcatggcttgaaggtggatttagctggctttgaggcggcgatggaagcgcagcgtcagcgcgccaaggctgctgcagtcagcatcgatctcaccctgcaaggggccattgagcagatggcggctgaactcgaggccaccgccttccggggctatgaagccctcgagcaccccagctgcgtggtggcgttggtcgtcaatggtgagccggcgcagcaggccaacgcaggtgatgcggtgcagctggtgctggattccacgccgttctatggcgaaggcggcggtcaggtgggtgatcgcggcagcctgagcggccaggacttgatcgtctcgattgaagccgtgaaccgtcagcgcgatgtgttcgtgcatgcgggcaccattgagcgcggtcagctgtctgttggtggtctggtcaccgcgcaggtggatggtgtttgccgccgccgcgcccaggctcaccacaccgcaacgcatttgctgcaggcagctctcaagcaggtggtggactccagcatcagccaagccggctccttagtggatttcgatcgcctgcgctttgattttcactgcccccgtgctgtgacagccgctgagcttgagcagatcgaggccttgatcaatggctggatcgccgaagcccacagcctcgaggtgcaggagatggcgatcgaagcagccaaggccgctggggccgtagcgatgttcg

SEQ ID NO: 306678 - DNA, 793 bp, Unknown
  Bacterial polypeptide expressing nucleotide sequence isolated from the Sargasso Sea
aatgaaaactagcgagataagacaatcttttttagatttttttaattctaaagatcatgaagttgtgtcctcaagttccctcgtgcctaacaacgacgaaacacttttattcacaaatgcaggaatggttcaatttaaagatgtatttcttggaactgaaaaaagaaatttttctagagctgtaacatctcaaagatgcattcgagctggcggtaaacacaatgacctagaaaatgtcgggtatacactccgccatcatacattttttgaaatgttaggtaattttagttttggtgactattttaaagaggatgcaataaagtatgcatgggaattcttaacagaggtactcaaattagacaaagataaattgtggataacagtctataaggatgatgatgaggcagaggaaatttggaaaaacataattggagttgctccagatcgaattgccagattaggagacgatgataatttttggtcaatgggcgacactggcccatgcggaccatgttctgaaatattttttgaccatggagagcatatcgatggaactccgcctggtcatgacggagatgaaggtgatagatttgttgaaatctggaatcttgttttcatgcaatttaatagagatgaaaatggaaaaacctcaaacttacccaaaccatctgtagatacaggaatgggattagagagaatcgctgctgtaatgcaaggcgtaaattcaaactatgaaactgatttatttttggatctaattgcagcctcagaaaaagttttaggaaataaaaat

SEQ ID NO: 306679 - DNA, 2435 bp, Unknown
  Bacterial polypeptide expressing nucleotide sequence isolated from the Sargasso Sea
cttgaaaatggttggctatacaccaaggcaccatacattttttgagatgcttggaaatttttcatttggagattattttaaagaaagagcaattgaactagcttggaatttagtaaccaaagactttggtttagacaaaaataggctttatttcacagtttttaatgaagatgaagaagcacttaatctttggaaaaaaataacagggttgggagaagataaaattattaagattgcaacatcagataatttttggtccatgggtgaaacaggaccttgtggtccttgctcagaaatattttatgatcatggtgatcacctaaaaggtggattgcctggtacaaaagatcaagatggcgatagatacatcgaaatttggaatttagtatttatgcagtttgagcaaatttcaaaagataaaaggataaacttaccaaaaccatctgtggatacaggaatgggactagagagaatagcagctttgcttcagggtacacatgataattatgaaacagatcattttaaaaaattaataaattcaatttctgaagcagttaaagttaaacctgatcaaaaaaatgtttctagttttagagtaatcgcagatcatttgagagcaagttcgtttttaattgcagaaggcgttttaccatcaaacgaaggaagaggttatgtattaagaagaattatgagaagagggatgagacattctcatttactaggatcgaaacaaccaattttttacaatatttttaaaactttaatggatgagatgtcaggaaattatcctgaacttgtaagagcagagtcattaatcaaagaaactttaaagacagaagaagaaaaatttttagttttattagaaagaggaatgaaaattttaaatgatgaaatttcaaaaatcgataaagttttaccaggtgaagtagcttttaaattatatgacacatatggatttcctctagacttaactgaagatattttaaaaaataagtcattaaaaattgataataaaaaatttcaaactttaatgaatgaaagtagagaacttgctaaaaaaaactggaaaggatctggggatagttcagttaataaaatatggtttgaaattaaagatagattaggtccatcagagtttttaggttacgaaactgaccatgccgaaggaaaaattttatcattattaaaagataataaagaggtaaaaagcttatctgataatgatgaaggtatgataattacaaatcaaacacctttttatggagagtctggtggtcaagttggagacactggagaaatttcttctggagaatttaaatttgaagtacacgatgtgcaaaagcaactaggagacttatttgttcattatggcaaagtagttaaaggttccattaaattgaatgataatgttgaaatgaaaattgatgtaaatagaagaaacgacgttagagcatatcattctgcaactcatttattacatgaatcactaagaagagtgctaggtactcatgtaacccaaaaaggatccttagttgagcctaatagattaagatttgattttagtcacatgaagcctatttccaatgacgaaataaaaaaaatagaaaattttgtaaattctatggttgaaaaaaaatctgaagtaaaaacgagaattatgacaccaaaagaagctgttgataatggcgcattagctctttttggtgaaaaatatggtgatgaagttagggttttatcaatgggtaatgaaaaagaacgttatttctcaacagaattgtgtggcgggacacatgtaagaaatactggcgatataggaaaatttaagattgtcagccaatcttcaatagcagcgggggtgagaagagtagaagctttaagagataaacaattacaagaatatttaaataaaaaagaaaaactcagtgaccttgaaaatgaaaaaagtgaagaaacaattaaagatttatctcaaaaaataatcaaattaggtggaaaacctaatatcactaacgaaaatcagcaaactttaattaaagatttaacaagacattatgaacaacttttagtccaatcaactttaagtgataaatcaaaaaatattattagtgataaaactataaataatgtcaaagtaagatttcaaaaagtaattgatttacctcctaaagatttaagaaaactagttgataatggaaaaaaagaactaacagaaggtgttatagttatttttgcaattaaagatgaaaaaattggattagcaattggtgttactgaaaatctaacaaaaaaatatgatgctgttaaattagtaaaaattggatcagaaattattggaggaaaagggggtggagggagacctgatttcgctcaagcaggcggaattgatagctcaaaaatagataatgctatcgaacaaattaaatctttaatttagt

SEQ ID NO: 306680 - DNA, 322 bp, Unknown
  Bacterial polypeptide expressing nucleotide sequence isolated from the Sargasso Sea
atggcagacaaaacactcaatgaaattagaaatacttttctaaaatattttgaaaagaacgatcacaagattgtggaatctagtaatctagttcccaataatgatcctacattgatgtttgctaactctggaatggttcagttcaagaatgtatttactggattagaaaaaagagattacgtaagagctacaacttcacaaaaatgtgtaagggcaggtggtaaacataatgatttagaaaatgttggttacacaccaaggcaccacactttctttgagatgttaggaaatttttcttttggtgattattttaaagagcagg

SEQ ID NO: 306681 - DNA, 2671 bp, Unknown
  Bacterial polypeptide expressing nucleotide sequence isolated from the Sargasso Sea
atggccgccgccgcatcgtcgtcttctgcagcgtctgcgccccgcagcggggaggacatccgcgaggcgtttctcaacttttatgccgagcgcggccatcagcggatggccagcgcctcgttgattccagaggatccgacggtgttgctcaccatcgccggcatgttgcccttcaagccggtgtttctcgggcagcagcagcgacccgcgcctcgagccaccagttcgcagaagtgcatccgcaccaatgacatcgagaacgtgggccgcacggcgcggcatcacacgttttttgagatgctcggcaacttctcgttcggggattacttcaagcagcaggcgattgagtgggcctgggaactcagcaccggtgtgtatggcatcgaccccgagaacctggtggtgagtgtgttccgggaggacgacgaagccgaacagatctggcgggatgtggtgggggtgaaccccaagcggatcatccgaatggatgaagccgacaacttctgggcctctggccccactggcccctgtggcccttgctcggagatctactacgacttcaagcccgagctgggggatgacggtatcgatctcgaggacgacgaccgtttcatcgagttctacaacctggtgttcatgcagtacaaccgcgacgccgagggcaacctcatgccgctggccaaccgcaacatcgacaccggcatgggcctcgagcggatggcccagatcctgcagaaggttcccaacaattacgaaaccgatctgatctttccgttgattcaggcggcggcggatctggcaggtgtcgactaccaccagctcgacgacaagggcaaaacgtcgttgaaagtgattggtgaccacagccgtgcggtcactcagttgatctgcgatggcgtgacctccagcaacctgggccgcggctacatcctgcggcggcttctgcggcgggtggtgcgccatggccgtctccttggcatcgacaagcccttcctggtgaccatgggcgaagcggcgattgccctgctgaagggggctcacccgagcgtgatcgaacgccaggaggtgatcctggccgaactccaacgtgaggaggcgcgtttccttgagaccctcgagcgtggcgagaagttgctggcggaggtgctggccagcaagccgacccagatctccggcacccaggcctttgagctctacgacacctacggcttccctcttgagctcacccaggaaattgcagatgagcagggcctcatggtggaccttgatggctttgaggtggccatggaggaacagcgtcagcgggccaaggctgcggctgtgagcatcgacctcaccctgcaggatgcgattgagcaggtggctgctgagcagcacgccacggcgttcaagggttacgacgccctggatcagcccagcacggtgcaggcgttggtggtgaatggggcgccggcctcaacggcgtcggccggagatgccgtgcaagtggtgctcgacagcacacccttctatggcgaaggcggcggtcaggtcggcgatcgcggatcgctcagtggtgtcgacgtgatcgtggccatcgactccgtgagtcgcagccgcgatgtgttcgtgcattccgggcgtgtggaacggggtgagctcgccttgggcgacaccgtcaatgcccaggtggatcgaagctgccgccgcagggcccaggccaatcacaccgccacgcatctcctgcaggctgcgctcaagcatgtggtggatccgggaattggccaggcgggctccctggtcgacttcgaccggctgcgcttcgacttccattgcccgacggcggtcaccgctgagcaattggcgcagatcgaaacgttgatcaacggctggatcgccgacgcccacagcctcgaggttcaggaaatggctattgagcaggccaaggcggcgggtgccgtcgccatgttcggcgagaagtacgccgatgtggtgcgagtggtcgatgtacccggtgtgtcgatggagctttgcggtggcacccacgtggccaacaccgctgagatcggcctgttcaagatcgtggcggaaagtggcgtcgctgccggcattcgccggattgaagctgtcgccggcccggccgttcttgcttatttgaacgagcgcgatgcggtggtgaaacagctgggggatcgcttcaaggctcagccgggcgagatcgtcgaacgggtgacagcgctgcaggacgagctcaaggccaccggcaaggcgctggccgcggctcaggctgagctggcggtggccaaggcgggcgctctggccgccaaggtcgaggccgcgggtgagttccagctgctggtggaacgccttgacggcgtggatggcgccggtttgcagggggcagcccagagcctggcggatcagctgggggatggtgcggccgtggtgatcggtggtctgccggatcccggcgacatgggcaaggtgatcctggtggcggccttcggcaagcaggtgatcgccgccaagctccaggccggcaagttcatcggcggcattgccaagctctgcggcggcggcggcggcggccgcccgaacctggcgcaggctggcggtcgcgatggtgctggtcttcagacggccttggacgctgcgggtgatcagctcaggtcagtcttggtcaaggcttgac

SEQ ID NO: 306682 - DNA, 1315 bp, Unknown
  Bacterial polypeptide expressing nucleotide sequence isolated from the Sargasso Sea
gatgcttggtaattttagtttcggtgattattttaaagaggatgcaatcaaatatgcttgggaattcttaacagaggttttaaagctagataaggataaactctggataacagtttataaagatgatgatgaggctgaagaaatttggaaaaacaccattggagtagatgcaagcagaattgcaagacttggtgatgatgaaaatttttggtcgatgggtgatacaggaccatgtggaccatgttctgaaatcttttttgatcatggagaacatattgaaggatctccaccaggtgccgatggagacgagggagatagatttgtagaaatttggaatcttgtattcatgcaatttaatagagatgaagacggaaacatggaaccactacctaaaccctctgttgatactggaatgggtcttgaaagaatatctgctgtaatgcagggcgtgaattcaaattatgaaacagatgtatttaaagatttaattcttgcttcagaaaaaatactagctaataaaaatagcacatcacataaagtgatagccgatcatataagatcaactgtttttctaatttctgatggagttattcctgaaaatgaagggagaggttacgttttaagaagaatcatgcgtagagggattaggcatggatataagattggtgccaagcaaccatttatgcatcttctggttaaagatttagttaaattaatgcattcggcatacccagagctaaaaaagaaagaaaaagatattactaaattaattaaagaagaagaaataaagttttttgaaactttagagaaaggaatagatatattagaagaaacaatatcaaacatgtctaataagacaatatctggtgatgttgtatttaaattgcatgatacatatggattcccatttgatttaaccgcagacatagcaagagaaaaagatttactgattgatgaaaaaagatttaaagaacgaatggaccagcaaaaagaaacatctaaagcatctagcagttttgtttcatcattaccagcagctgcaggagtaaaagaaaccatattcttgggttatgaaagcttagaatctgattcaaagattttggctatttggaaggatcaagaaaggattaaaaaagctaaaagtaaagaagaaatatttatagcatgtaatcaaacaccattttatgctgaagctggtggacaaattggagataaaggaatatttgcttctaggtcagctactggtaccattgtagattgtaagaaacaaggaaaagtatatatacataaagtaattgtgaaaaaggaaatataa

SEQ ID NO: 306683 - DNA, 886 bp, Unknown
  Bacterial polypeptide expressing nucleotide sequence isolated from the Sargasso Sea
atggcaaaaaccttaaatgatataagaactgcatttcttaaatattttgagaaaaatgatcataagattgttgagtctagcaatctagttcccaacaacgatccaacattaatgtttgccaattcaggcatggttcagtttaaaaatgtattcactggattagaaaaaagaaattatcaaacagcaacaacttctcaaaaatgtgtaagagccggaggcaaacataatgatttagaaaatgttggttatacacctagacatcacactttttttgaaatgctaggtaatttttcatttggagattattttaaagaaagagcaatcgaacttgcttggaatttaataaccaaagattttggtttaaataaagaaaaactttatgtcacagtttttcatgaagatgacgaagccttcaatttttggaagaaaattgcgggttttagcgatgataaaattattagaatttccacatcagataatttttggtcaatgggagaaacaggtccatgtggtccttgttctgaaatcttttatgatcatggagagcacctaaaaggaggtttgccaggtagtaaggatgaagatggcgatcgttttattgaaatttggaatttagttttcatgcaatttgaacaagtatcaaaagaaaaaagaattaatttaccaaaaccatcagttgatactggtatgggattagaaaggatctcagctttattgcaaggcactcatgacaattatcaaacagatcactttaaaaaattaattgagtctatatctgaaactttaaaagttaaacaagatcaaaataatatttctagctttagagttatagctgaccacttaagggctagttcatttttgatagcagaaggaagttttaccttct

SEQ ID NO: 306684 - DNA, 2569 bp, Unknown
  Bacterial polypeptide expressing nucleotide sequence isolated from the Sargasso Sea
atgaaaagtactgctcacataagaaaaacatttcttaattattttgaaaaaaatgatcacaaaattgttcattctagccctctagttccaatcaatgatccaacattgatgtttgttaatgcagggatggtaccatttaagaattattttgaaggtaaagaagaacctgattttttaaaagctacaagttctcaaaaatgtgtaagagcgggcggtaagcataatgatcttgataatgtaggtcatacaactcgacatttgactttttttgaaatgttaggaaacttttcttttggcgattattttaaagaagaagcaataaaactagcctgggatttattggtgaatgagtttgaaattccatctaatagattgcttctaactgtatttaaagaagatactgaagctgaagaaatatggaaaaaagtttcaggattttctgataataaaattattaagatctcaactgatgataatttttggtcaatgggtgatgaaggtccttgtgggccatgctctgaaatcttttttgaccatggagactccgttgatggtggtcccccaggttcaaaaaatgaagatggagatagatttgttgaaatatggaatcttgtttttatgcaatatttacaactttcaaataaaaatagagaatctcttccaaagccgtcaattgatactggaatgggcctagagagaatatcaacagttctacaaggtaaaacaagtaattttgatacagatttattcattacaattataaatcacattgaagaaataattaaaattaataagacggatgaaaatattgctagttttagagtaatagctgatcatttaagatccatagcttttttaatttctgatggagtattgccttcaaatgaagggagagggtatgttttaagaaggattatgcgaagagctatgcggcatgcatatttgttaaacataaaagaacctgttctctatagtcttattaagaaaatagtcacactaatgagtgatgcttatccagaattatcacgagctgaaaaattaattgaggttacggtatttgaagaggaagaaagatttatatctactttatctaaagggataaaaatatttaatgatgagtctaaatcattaaatcctggagatgtttttagtggatcaacagcatttaaactttatgatacttatggctttccactagatttaactgaagatttaatcagggataaaaatcttaaacttgataaagactcttttgattcagaaatgagaaaacaaaaagaagaagccaaaaaatcatggcttggatcaggagatagtaaaacagatgaaatatggtttgaagttgcaaacgaatgtgaagctacagaatttttaggttatcaaaacaataaatcagctgctgaaatttctaggataatatacaaaaataaaatatctaataaaattaagcatggtgatgaggctattttagtctttaatcaatccccattttatgcagaaagtggaggacaaatgggtgatgttggaattgcgaagaatgataattttatttttagaatctctgatacacaaaaaaagacaaataatattcatgcacattatggggtagttgaaaaaggatctgtgtctgtaggagatacagttaatttacaaatagaaagcgatcataggagaatgattatgtgtaatcactctgctacccatctattgcatgaatcccttagaagagttttgggtgatcatgtaacgcagaagggctctcaggtatcggctgaaaaacttcgatttgattttagccatcaaaaatctttagattctgatgaaattactaggattgaggaaactataaataatcttataagggatgactcagaagtaatggtagaggttttaacttatgaaaaagctgttgagtccggggctttagcattatttggagaaaaatattctagtgaggttagagttctgacaatgggccatgactcattttcaaaagaattatgtggtggaacccatgtaaaaagtttaggtgagattgagaattttaaaataatatctcaaagttctgttgcctctggtattagaagagtcgaagctgtaactggatcaattgctttaaattctttatctttaattgataaaataaatgaaaaagagagaaaactagaagaaaaaaaacaaactaaagccaaagaaaaaataatttcaaaagatatccttaatggaaagattgaggaatttaataaatcgaaatttttctttgatcaaataagtggagtaaatactaaaaaccttagacatctagttgatgaatgcaaaaaagatataggaacaggtattgtttgtttaatttcaactaatgaaggtaaatcatcaattgccattggcgttactaatgatcttttagatgattatgatgcggttgaattggttaaaattggttctgaaattatgggcggaaaaggtggtggaggtcgaaaagacatggcattagctggagctaaagatatctcaaagtcggatcatgtatttgaacaattaataaaaaaacttaaagaaaatatttaag

SEQ ID NO: 306685 - DNA, 1007 bp, Unknown
  Bacterial polypeptide expressing nucleotide sequence isolated from the Sargasso Sea
ttttaatgatgagattgcaaaaatagataaagttcttccaggcgatgttgcttttaaactttatgatacatatggatttccattagatttaactgaagatattttaaaaaataaatccttaaaaattgatcatgaaaaatttcaaagtttgatgaaagaaagcagagagcttgctaagaaaaattggaagggatcaggagacagtgccatagatgatatttggtttggtgttagagaaaaacttggtgcaacagaatttttaggttacgaaactaatcaagcagaaggtgttgtattgtcattatttaaagacaataaagaggttgatcaattaaaatcaggtgaagaaggtatgataattgttaatcaaacgcctttttatggagaatctgggggacaagttggagatgaaggagaaataatttcaggagattttaaatttgaagttaaagatgtacaaaaaaaattaggagatttatttgttcattatggaaatgtgaaaagtggatcaataaaattaaatagtagtgtagaaatgaaaataaatgtttcaagaagagataatattagagcataccattcagctacacatttattgcacgaatctttaagaagagtcttgggagagcatgtaactcaaaagggatcattagttgaaccagagagacttagatttgattttagccatatgaagccaataagtgcagatgaaatcacgaaaatagaaacatatgtgaacacaatggtagaaaaaaaatctgatgtaaaaaccagactaatgactccaaaagaagctgtagaaaatggagctttagcattatttggagaaaaatatggagaagaagtaagagttttatcaatgggagacgaagaaagtagttatttttcacctgaattatgtgggggaactcatgtcagaaataccggtgatattggtaaatttaaagatagtaagccaatcatcaatagcagcaggagtaagaagagtggaggctttaagagataaa

SEQ ID NO: 306686 - DNA, 1042 bp, Unknown
  Bacterial polypeptide expressing nucleotide sequence isolated from the Sargasso Sea
atgagcgaaataaggggtaaatttcttgattattattcaagaaacaaacaccaaaaagtagaatcaagcaatattgttccaaataacgatccaactttaatgttcacaaactctggaatggtccaattcaagaatgtttttacaggactagaaaaaaaaccatttaagacagctgcaacttctcaaaaatgtataagggcaggtggaaaacataatgatcttgaaaacgtcggttatacaccaagacaccatacattctttgaaatgcttggaaatttttcttttggagattattttaaagaaaaagccatatattatgcatgggaattattaacgaaagactttggtattcccaaaaataaattatcggcaactgtatattccaaggatgaagaagcttatcaactatggaaaaaaatagctggattaccagaaagcaaaattgtaaagatttctacttctgataatttttggtcgatgggagaaacaggtccatgtggcccttgttctgagatattttatgatcatggtgaaaaacttaaagggggaccaccaggaagtccagaccaggatggtgatagatttattgaaatttggaatttggtattcatgcaatttgaacaaatttcaaaagataaaagggtagaattaccaaaaccttcagttgatacaggcatgggcttagaaagaataacagcagttctccaaggaactcacgataattacaacattgatcattttaaaaaattgatgacagcatcatcagaaattacaaaaactaaaataaatgataaaaatattgcaagccatagagtaattgctgaccatctcagagctagtagttttttaattgcggaaggggttttgccttcaaatgagggtcgtggttatgttttaagacggattatgagacgaggcatgcgtcatgcacacactctcggaagtaaaaatccaattttttataaactatttgaagttctattaaaagaaatgtcagaaagttatcctgagctcaaaagaggtaaagatttaattgttgaaa

SEQ ID NO: 306687 - DNA, 1531 bp, Unknown
  Bacterial polypeptide expressing nucleotide sequence isolated from the Sargasso Sea
aagatacaaaaaggtgataaagataatttttggcatatgaatataccaggaccatgtggtccgtgttctgaaatatttatagatagaggtccagattacggtcaagatggaggacctattggtggtggagaagatagatttatagagatatggaatttagtttttatgcaatcaattcaagatgaaccatacaatgtcgttggtgacctacctgcaaaaaatatagatacaggtatgggattagagagaatggctatggttttacaagataaagattctcctttcgaaattgacacatttcaaaatctttataatgaattaaatacgtatattgttaataaagataaaaaatatgaaagaatagttttagatcatataaaatccgcagttttcatgatatctgatggtgttgttcctacaaatgagggcaggggttatatattaagaagaattataagaagagctgtaagagcaatttatagacttacagatgaactaatgtcacttgatttcttaataaacattgtaatcaatgattatcaagattcatatccagaattattaagtaataaagacaagattttaagtttatacaaaaatgaagaagaattatttcaaaatacgttagtaaaaggtaatcaagagatacaatctattcttaaaaagaaatctagtatagatgaaaaagatgccttctatctatttgaaacgtttggttttccctttgagcttactcaagagacagcaaaagaacacgatatcgtaattgattatgataaatttaatgatctatttaatgaacataggaaaaaatcaaattccggtaagaaagagaaaataagtaataatattagtgatgtggataacaatacttttgttggttacgataaattatcagttacttcggatatataccatgttgagaatcaagagaatgattctgtaatatttactacacaaactcctttttattttgaagctgggggtcaaatctcagatattggaaatatagtaattaatggtaaagatattactgtaaaagatgttgttcaatcagataatggtgctaccggtattgttgttgaatctaatattttaaaagtaggggataagattgaattaaatgttgacccaagttttagaagctctgtttcaaaaagccataccgctgcacacattgttcatgcatctttaagaaatattcttggtgatcatgtagcacaagctggttcacatgttgcgcctggtaagtttagatttgattttagccatacggaaaaagttaaaaacgaagagcttaatgaaatatttaaaatgagtaatgacagtatatataaagatattgaagttaaaacaaatgtaatgaatattgatcaagcaaaaaaagaaggagcgttagcattttttggtgataaatatgaggacgatgtaagggttgttaatattggagagttttctaaagagttatgtggaggcacacatgttcataatttctacgaggttggattatttgttttattaatgaatccct

SEQ ID NO: 306688 - DNA, 919 bp, Unknown
  Bacterial polypeptide expressing nucleotide sequence isolated from the Sargasso Sea
gacacatatggcttcccatctgagattgttgaagagattgctgtagaaaaaaatattaaattagatcttaagggtttcaataaacttatgaataatcagagatctaagagtagaaaaaatagtaattttgaaattaaagacacatctttcattaacaaggaaacgcatagtctttttgttggttatgagaacctttcgctatcttcaaatgtgttagaaatttatgtatctgataaaagcataaaaacgctgaatcaacttaatactccatttatgctagtgacagataatacacctttttatccagagggtggaggacaaatatcagacataggcgtaatatcttctaaaaatactaaaatcaaagttttaaatgttcaaaaaattaataatcttattttacatcatacaattttagaatcaggagaaataactgttggtgatcgtgttcaaatggaaattgacgctcctagaagaaaaaaaattaccattaaccattcctcgactcatctattaaatcaggcattgcgagaagttcttgggtcgcatgttgaacaaaaaggctctttagttactgataagtatcttcgtttcgacttttcacataataaacctttgacatcagatgaaattcaatcaatagaaaaaataatctcaaatgagatatctgcttgtgtttctacaaaacaaaaagttacctcttataaaaaagctatagagagcggcgcccttgcattttttgatgaaaaatatgatgatgaggttagagttgtgaatattgggtcaaactctgttgagctatgtggcggaacacatattactgatacgtcatcaattagattatttaaaatattaaatgagtctgctgtttcaactggaattagaagaattgaggctattactggtgatgaagcatatc

SEQ ID NO: 306689 - DNA, 2449 bp, Unknown
  Bacterial polypeptide expressing nucleotide sequence isolated from the Sargasso Sea
tatggttcagtttaaagatgtctttttaggccaagaaaaacttaaatattccagagccactacttcccaaaaatgtattcgtgctgggggtaagcataatgatcttgaaaatgtgggctatacgcttcgccaccatactttttttgaaatgcttgggaactttagctttggtgactattttaaagaggaggctatagtttttgcatgggagtttttaactgatgttctcaaactagataaagataggttatggattacagtttataaagatgatgacgaggcaaaagaaatttggataaataagattggcattgatccggataaaattgcgaagcttggagataaagataatttttggtcgatggctgatactggaccttgtggcccatgctcagaaatcttttttgatcacggagataaatatgaaggaacaccgccaggtgaagatggagatgagggcgaaagatttgtagagatatggaacttagtctttatgcaattcaaccgagatacagatggcgtgctgcatgatttaccaaaaccatcagttgatactggaatgggactagaaagaattgctgcagtaatgcagggagtaggatcaaactatgaaactgatatcttttcaaatctaattgaagaatctgagaaagtgcttggaagtgctggagatgtctctcacaaagtaattgctgaccatctcagatcttcatgcttcttaatttcagatgatgtttttccatctaatgaaggaagaggctatgttctcagaagaatcttgcgaagagctattagacatggctacaagataggagcagataagccttttatgtaccagttagttaaaactttcgtcaacgctatgggtaatgcctatccacaattaaaaaatgacgaagaaagaattaaaaaactcatcaaaaatgaagagactcagtttttacaaactctcgataaaggtattcaaattttggactctactcttgcagaagggaataaagaaattatttcaggagatttggcctttaagcttcacgatacttttggttttccatttgatctgacggctgatattgcaagagaaaagggtattgatattgatgaaaaaggattcaagaagaatatggaatctcaacaacaaatgtcaaaggcatcaagttcgtttgtgtcaaagattcctactgcagaggatttgaaggaaacagattttattggttatgaacatatgtcttcagactcaaatgtaatagcaatttggaataaaaatgaaaaaattgagcttgctaatgagccacaagagtactttatagcacttaatcagacttcaatttatgcagagtcaggtgggcaggttggtgatagaggttggtttaaatctaaaaatgccgagggcagcattttagattgtaaaaaatctggaaaagtttttatgcaccttataaagttagacaaaggaagcttaaaaattgatgataaaattgaagttaatgtgaataaagaaaaaagagagaaaaccgaagctcatcattctgctacccatttagtccatgctgcactaaaaagggtgcttggagatcatgtcaagcaaaagggttcactagttgatgagcataaacttagatttgatttctcgcatgatgaatctttatcagatgaagagatatccaagattgaagatttagtaaatgaagaaatacttaagaattcagctgtaagcaccaaaataatggatttagaagatgctaagaattcaggtgcagaatctttatttggcgaaaagtatgaagatcaagtaagagtgttatctattggtgaagatgatttttctcttgagctttgtggtggaacacatatctcaagaacaggggatcttggtatttttataataacaagtcaaagcagtgtagcctctggtatcagaagaattgaggcattatctggtcccagagctcaagaatatttatcaaatcttaaaaatcaaactattcaactccaaaaactattaaatactcctgctgaagaaattgaagataaggtgagtaagcttttaaaggaaaataaaagcttaaaaaaagggggtaaaactgccaaagcagccacaattaaatcctctaatacacatgatattgataactttaaattagtaattgaggaagcagaatcagaggatatcaaagaattaagaccactacttgatgaaaaaacgaaaaatgtaaataactctatctttattcttctaagctctaaaaacgaaacattaactattctctgttccgtatcaaaagacctacaatcaagaatctcagcaaaagatctcattaatgctttaacgttacctattgaaggtaaaggtggtggaagagtagaatttgctcaaggcgcaggcaagccctccgatagagaaaaatttgtttctgatatccctaatatcgtacaatcgctcgcataa

SEQ ID NO: 306690 - DNA, 1444 bp, Unknown
  Bacterial polypeptide expressing nucleotide sequence isolated from the Sargasso Sea
aatgttaacaagtgaacttagatctaagtttttggactatttcaaaaaaaatagtcatgaagtagttgactcaagtcctctaattcccgcaaatgatgaaacattgttatttacaaatgctggcatggttcaattcaaagacgtttttctaggctctgataagcgcccctataaacgagctaccaccacacagcgatgcattagagcaggtggaaaacataatgatttagaaaatgttggctacacgctgaggcaccatacattttttgaaatgttaggtaattttagttttggtgattattttaaagaagaagcaattcaacttgcctggaattttttaactaatgagttgggcataaaaaaagagaaattatggatttctgtatttagagatgatgatgaggcagctgaaatatggtcagcaaatattggcattgatcccgaaaggattgtgcgaatggatgaagaagataatttttggtccatgggtgatacaggtccttgtggcccttgttcagaaatttactatgatcatggcgatcaatatgaaggcactccacccggaacaccaggagatgaaggagatagatttgtagaaatatggaatcttgttttcatgcagtttaatagaggggctgacggtaaacttactcccttgccaaaaccctctgtggatacaggcatgggtttagagagagtggctgcagtaatgcaaggtgtaaattcaaactatgaaacagatttatttcaaaatttaataaaagcctccgaaaaagctatcaaatcacctggcgatccatcacataaggtgatagcagatcacataaggagtattagtttcttaatttctgatggtattttgccatcaaacgagggtcgtggttatgtgctgcgaagaataatgcgacgggctattaggcatggatataaaattggagctaagaaacccttcttgcataaattggtaaaagctttagttaaggagatgggtgctgcttttcctatgttagtagacagtcaaaaatccatagagaagattgttcatgaagaagaaaagaaatttcttgaaactttagaaaaaggcattgagatcttagataaggagattaattctattgattcaaagattattccaggagaaattatctttaaattacatgatacatatggttttccattcgatttgacagcggacattgctcgagagcaagatttagatttagatgaggagggctttaataattgcatggatgaacaaataaaaaattcaaaatcagcaagtaaatttaaaggattgaaattagatttgtcctcgattaaagaaacaaagtttttaggttatgaagagttatgcgggaaggggaaggttttaggaatatggaatgaatccaatgcaatagataatgcatcagatcaaaatgagtgcttcattgcagttgataaa

SEQ ID NO: 306691 - DNA, 1924 bp, Unknown
  Bacterial polypeptide expressing nucleotide sequence isolated from the Sargasso Sea
gaacttgatattcaatctattgatacaggtatgggcttagaacgtataggtgctttacttcaaggtagtcatgataattacgatacggatactatgagaaatctgatgcttgcttcagctgaagctacctcgtcggatcttgatggaaagcataacgttcaccatagagttattgccgaccatttgcgctcaacagcatttttaattgctgatggtgtgctgccagcaaatgatggtagaggatatgtgttgaggcgcatcatgcgaagagcaatgcgtcatatccatttgcttggttcaaaaaaacccgtaatgcataatcttgtcgtatcgctagtccaacaaatgggtagcgcttatcctgaattaggacttgcgcaatcgttgatcgaggaaactctacttcaagaagaaacacgttttagacagacccttgatcgcggattgaaattacttgatgatgaactggcgaaggttccaaaaggcgagcagttttctggagaaactgctttcaaattatatgatacgtatgggtttcctctagaccttacgcaagacgctttaagagagaagggccacgttgttaacactgctgcgtttgataccgcgatggcggatcagaaagctaaagcgcgtgcggcttgggttggtaccgggcaacttaccgatgatgcgatttggtttgagcttgcagataatatcgcgccaactgattttttaggttacgaaactgacacggctgaggcccaattacaaaaattagttaacgatggagttgaagtttcatcggctaaagcaggcgataaagttcaactaattttcaatcaaacacctttttatgcagaaagtggtggccaagtgggtgatcagggttatgcccaggcctctgattgtatgatacaaataaatgatacaaaaaagtttgatggtttgtttatacattcaggcacggtttcaaaaggttcggtcagagaaggggatagcctctcactgtttgttgacgctgctagaagaaatagaattaaagccaaccattctgctacgcatttattacatgaagcgctgagacagttactgggtgatcatgttgcccagcgtggatctttaaatgctgaagataggctgcgctttgattttagccactcttcacttttaactaatgaagaaattcagtcgattgaaaagtcagttaataagtacataagacaaaattcatttgtgcaaacgcgaataatgacgcctgatgatgctagaggaataggagctcaagctctttttggagaaaaatatggggacgaagtccgtgttgtatctctggggcaccaaaaggactcaggcaaaggtcttggaggtgagacttattcgttggaactctgcggcggcactcatgttaaacaaacgggagaaattggtgcctttacaattttgtcagatagcgcctctagttccggggtccgtcgaatagaagctcttactggtgaaagcgctataacacatttggctaaaaagtctcagcaagtaaatgaattaagctctttcctaaaggtttcagctgacgaacttactcaaagagtaaatgctttgatgaaagaaaggaaaaattttacgagtgaagttgcagaacttaagagaaaacttgcactttctggtaaaggaaatagtgaggcagagagtgctgagcagataaatggggtttctttttttactcaaatctattctggaatttctggaaaagacttaccttcactggttgatgaacacaaagaccgtttaaaaaatggcgttatactattgattacagaaagtgacaatagagttgctgtcgctgccggtgtttcctccgatctcactgatgaaatttcagctgttgacattgtgcggactgctgttccggaactgggaggaaaaggtggaggagggcgcc

SEQ ID NO: 306692 - DNA, 763 bp, Unknown
  Bacterial polypeptide expressing nucleotide sequence isolated from the Sargasso Sea
tatggtaaacgttaaagaaatacgtaataattttctggaatattttaaaaaaaatggtcatgaagtggttaattcaagcccacttgttccagaaaatgacccatctttgttatttactaattctgggatggtgcaatttaaaaatgtatttactggttcagagaataggccatacaaaagagctgtaactacgcaaaaatgtgtaagagctgggggaaagcataacgatttagataatgttggttatactgcaagacatcatactttttttgagatgcttggtaatttttcttttggtgattattttaaagatactgcaatcgaattagcgtggaatttaattacaaaagaattttctttacctaaagaaaaattattaattactattttcaacgaggatatagaatcagaggttatttggaaaaaaatatctggttttacagattcaaaaattattaagattagtacagaagataatttttggagaatgggcgaatttggaccatgtggtccatgctctgaaattttttatgatcatggagataaaattaatggtggtccgccaggttccaaaaatgaggatggagataggtttgtagagatttggaatctagttttcatgcaatttgaagaaaggaaagatggaagaattctacttccaaagccatcaattgatacaggaatggggcttgagagagtctcagctattttgcaaggtaaaacagataattacgaaattgatttaattaagaaaatattttaa

SEQ ID NO: 306693 - DNA, 1723 bp, Unknown
  Bacterial polypeptide expressing nucleotide sequence isolated from the Sargasso Sea
atgacaaaattaaatgaaatcaggtcaaaattcatagattattttattaagaataatcatgaggaagttcaaagttcacccttggttcccatgaatgatcctaccctgatgtttacaaattcagggatggttcaatttaaaaatgtgtttacaggcgacgagactagagatattccgcgagcggtaacttcgcaaaaatgtgtgagggctggcgggaaacacaatgatctcgataatgtaggatatacagcaagacatcatacattttttgagatgctaggaaatttttcctttggggattattttaaagaaagggcaattccattggcgtgggatttagttaccaaggaattcggacttccaaaagaaaaactcctagttactgtatatcatgatgatgatgaagcagttaatttgtggaagagttatgctgggttaagtgagaataagattattcgaataaatacctcggacaatttttggtctatgggggctactggaccttgtggcccttgttctgaaattttttatgatcatggtgataaaattgagggtgggcctccagggtccaaaaatgaggatggagatagatttattgaaatatggaatttggtttttatgcaattctatcaaatggaaggaggggggcgagaaaatcttcctaaaccttcaattgatacgggcatgggcttggaaagaatggctgccatacttcagggaaagcacgataactacgatactgacttaatgagatctttaatagaagaatctgcaaaaattagctcaacagacccagatggaagttcgaaaaatcaccatagagttatttcagatcacttgcgttcagcggcgtttttgatagctgatggggttatgccttcgagtgaaggcagaggttatgttttaaggcgtattttaaggcgggctatgcgacatggcaatttaatgaatattagtgaaccatttatttataagttggttggaaaattggttgatttaatgggaggagcttttcctgaacttaacagcaatcagtctttaatagagaaggccttgcatgctgaggaaagcaaatttatcacaactttagataagggtcttagtttgttagaaagtgagattagggatctagggaatgggcaagtccttgatgggaaaattgcttttaaattatatgatacatttggatttcctcttgacttaactcaagatgctttaagagaaaagaatatgactgttgacttgaatggttatgaagctgaaatgaaggcacaaaaggaacgggcaagaaatgcttggtctggaagtggaagtatttctgaagacaaggcatggttaaagataattgagaataatgaaaaaactgaatttcttgggtatgatcaattgcaatgtgagggattggtcatgtcattcaatgttagcggatctgaagtcagtaaagttaagggaggcgaaactgctcaaatgctttgcaatcaaacttccttttttggagaatctggtggtcaggttggagacaaaggggtcattgaatcttcaacagggacgggaaaagttgagaatgtttttaatattagaggttttgttattcatgaagtggcagtgacagaaggtgaaatttcagttggacagactcttaaattatcagtggaagaatccaatagatttaaaatcagagcaaatcactccgcaacgcattcttacacgaagcacttcggaa

SEQ ID NO: 306694 - DNA, 1147 bp, Unknown
  Bacterial polypeptide expressing nucleotide sequence isolated from the Sargasso Sea
attaccaaaaccgtctgttgatacgagaatgggccttgaaaggatagcagctgtaatgcaaggtgtaaattcaaattatgaaacggatatatttcaagatttaattttattttcagaaaaaattcttggtcataaagatagtgaatctcacaaagtcatagctgatcacattcgatcatctgtatttttaattttagatggagtaatccctgaaaaagaaggacgaggatatattttacgaagaataataagacgaggcataagacatggctataaaattggagcaacgaaagctttcatgcatttgcttgtttctgatcttgttaatctaatgagctcagcatttccagaattaaaaaacaagcaaaaagaaattacaaaagttattcaaaaagaagaaattagattttttgagactttagaaaatggtattgaaatgcttgaagatagtatttctaaaatgactaataatataatctcaggcgatattgcttttaaacttcatgatacatttggatttccatatgatttgacagcagacattgcaagagaaaaaaatatgactgtcgatgaaactcgtttcaacgaatgtatggatattcaaaaaacaacttcaaaagcatcaagtacctttgtatcctcacttccagaagcatcaggtgttgaagaaactaatttcttaggatatgaaaagttagagtcgcaatctgaagtattagaaatatggaaagatcaaaaaagaacaagaactgcaaacataagcgacgaggtttttattgcctttgaccaaacacccttttatgctgaggcaggtggtcaagttggagacaaaggaaaatttgcatctgagtcagctgctggtaatattttagattgtaagaagcaaggcaaagtttttcttcataaagcaattataaaaaaaggtaagattaataccggcgatgtaataaaaatgagtgtagaaaaagaaaaaagaaaagctacagcaattcatcattcctcgacacatttagttcacgctgcactaagaaaagttttaggtgatcatgttcagcaaaagggttcgttagttgacgagaataaactcagattcgatttttctcatgataaaccgcttacacaagacgaaattgtaaatatagaggga

SEQ ID NO: 306695 - DNA, 838 bp, Unknown
  Bacterial polypeptide expressing nucleotide sequence isolated from the Sargasso Sea
aatgatcacaagaatagttgagtcttcaaatttagtaccaaacaatgatcctactttgatgtttgcgaactcaggaatggttcagtttaaaaacgttttcacaggtttagaaaaaagagattatcaaagagctaccacctctcaaaaatgtgttagagcaggtggtaaacataacgatttagaaaacgttggttacacaccaagacaccacacatttttcgaaatgcttggtaatttttcttttggagactattttaaagaaaaagcaattgaacttgcatggaacttaatcactaaagattttggattagataaagatagactttatgtaactgtttttcatgaagatgatgaagcctttaatttttggaagaaaatcgcgggttttagggacgataaaatattaaggattgcaacatcagataacttttggtcgatgggagaaacaggtccatgcggcccttgctctgaaattttttatgaccatggagatcatttatatggtggccttcctggaactaaagaagaggatggggatagatttattgaaatttggaacttagtctttatgcagtttgaacaagtttcaaaagataaacgaattattttaccgaaaccatctgttgatacaggaatgggattagagaggatagcagctttacttcaaggcacacatgataattatgaaacagatcattttaaaaaattaataaattcaacctctgaagctgtaaaagtaaaaccgaacgaaaaaaatttatcaagctttagagttattgcagatcatttaagagctagttcttttttaattgcagaaaggtgttctaccatcaaatga

SEQ ID NO: 306696 - DNA, 726 bp, Unknown
  Bacterial polypeptide expressing nucleotide sequence isolated from the Sargasso Sea
aatgaaaaccagtgaaatcagacaatcttttcttaacttttttgattcaaaagatcataaagtgatgccttctagctctctagttccaaacaatgacgaaacgttattatttacaaatgctggtatggttcaatttaaagacgtatttcttggaacagaaacaaaaaactatagtagagctactacttcgcaaagatgtattagagctggtggcaagcacaatgatttagagaatgttggttatacgttgagacaccatacattttttgaaatgcttggtaattttagtttcggtgattattttaaagaggatgcaatcaaatatgcttgggaattcttaacagaggttttaaagctagataaggataaactctggataacagtttataaagatgatgatgaggctgaagaaatttggaaaaacaccattggagtagatgcaagcagaattgcaagacttggtgatgatgaaaatttttggtcgatgggtgacacaggaccatgtggaccatgttcggaaatcttttttgatcatggagaacatattgaaggatctccaccaggagccgatggagacgagggagatagatttgtagaaatttggaatcttgtattcatgcaatttaatagagatgaagacggaaatatggaaccactacctaaaccctctgttgatactggaatgggtcttgaaagaatatctgctgtaatgcagggcgtgaatca

SEQ ID NO: 306697 - DNA, 1256 bp, Unknown
  Bacterial polypeptide expressing nucleotide sequence isolated from the Sargasso Sea
aaccacatttttaggatatgaggaattagaatcagattctaaaatattagtaatttggaaggaccaagaaagagttgataatgcaaagaacaaagatgaaatctttatagcatgtaatcaaactccattttatgcagaatctggaggacaaataggggataaaggaaagtttgcatctaaatcagctactggtaatattttagattgtaagaagcaaggtaaagtgtttattcataaagccgttgttgaaaaaggaaaaattaaaactggtgaagtaattaaaatgagcgttgaaaaggaaaaaagggcggcaattgctatccatcactcatctactcatttagttcatgctgctttaagagaggtgttgggagaccatgttcaacaaaaaggatctttagttgatgagaataaactaagatttgatttttctcactcaaaaccactcactcaagatgagatttctaaaatagaatcgattgttaataaagaagctttgaataatttagaggtcaaaactgagttaatgaaactagatgatgctatgaaatcaggtgcgatggcattgtttggtgaaaaatatgatgatgatgtcagagttctaacaatgggtgaaaattcttactctgtagaattatgtggtggaacgcatgttcaaagaactggagatattggattctttattattatcaatcaatcaagtgttgcttctggaataagaagaatagaagctgttgcaggaatgaaatctttagagcatatcaagcaaataagagatataaatttatcgcttcaaaatacattaaatgttcctgctgatgttgttcacgaaaaaattaaattgttaatagaagaaaataaaaaacttaagaaaggttcaaataataaaacctcaaaaaaatctgttgttgcatcagaaactcatgaaattaatgattggaagttaataatagaacaggtagagattgataatacaaaagatttgaggaacctggttgatgaacaaaaaaatactaatgaaaaactatgtgtagtgatcttatctacaacaggtaataaagttgctctggtatgtggtgtaacttcaaatttagctgattctttatcagctaaagatgtcatttcgaaactctcaggtgatattggtggctctggtggtggaaggtctgattttgctcaaggagctggtgaaactgaaaatttaaaagaattcgtgacttctatcccaaattcagtaaaatccctcgaaaaataaa

SEQ ID NO: 306698 - DNA, 1181 bp, Unknown
  Bacterial polypeptide expressing nucleotide sequence isolated from the Sargasso Sea
ttttatgctgagtccggtgggcaagttgcgagacaaaggcactattacttcggatactgctgaatttaaagtaacagatacaagaaaaacccctcaaggtttatttattcattttggtaatgtgacttcaggaaattttaaaataggtcaagaagtaaaacttaaaattgatactagtttaagagatcttataaaaaaaaatcactcagctacacatttacttcacgcagcgttaagaaataatttagggacacatgtagcacagcgtggatctttggttaatgaggataaactacgttttgactttagtcataataaacaaatatctaccgaacaaatagaaattattcaaaaagaagtaacaagcataatttctaattcttgtgaaacacaaattgatattaaatctcaagatgaagccattaaacaaggtgctatggctttatttggtgaaaaatatggcgatgaagtcagagttgttactcttggagaaaataataataaaccctattcaattgaattatgtgggggaacacatgtaacaaatgttcaaaatatcaaaaaatttcatatcattagtgaagagtctgtttcttcaggtgtgagaagaatagaagcttgtactggaaataaggtcgatgaatttattagcaataaattaaaagaaagtaaattacttgaaaaaaaacttgatgataaaattaaaaatttaatatcacaaataaaaaaattagatggaaagattagttttagcgaagacaataaaaatatttttattaagaaattagaaaattatttagaaagtttaaaaaataaatcaatcctttctaataatgataataataaaatcgatgaaataaatataaatgggattaattttgtttctcaagtaatagataacttaccccccaaagaactaagatcaatttttgacaaatttaaatcagagaaatctaaatcaatattagcttgcatcacaatcaatgatgataaagtctctatagttgtgggattaaccaatgacttaatcgatctttatgatgcaagagagttaataaaaagcacctttgaaatacttggttcaaaaggagggggtggaagagtcgatttcgctcaagctggtggcaacaaaaaagatcaagtaaatcaggcttttttaagtattaaaaaccaaatttaat

SEQ ID NO: 306699 - DNA, 1651 bp, Unknown
  Bacterial polypeptide expressing nucleotide sequence isolated from the Sargasso Sea
atggcaaaaacattaaacgagatcagatcaacttttttagattatttcgaaaaaaatgatcacaagatagttgagtctagcaatttggttccaaataatgatccaacattaatgtttgcaaattctggaatggtccagtttaaaaatgtttttaccggattagaaaaaagggattatcaaagagcaaccacttctcaaaaatgtgtaagagcaggaggtaaacataacgatctagaaaatgttggctacactccaagacaccatacattttttgaaatgcttgggaatttttcttttggagattatttcaaggaaagaggaattgaacttgcttggaatttgattactaaagactttggattaaataaagatagattatatgtaacagtttttcatgaagacgatgaagcctttaatttttggaagaaaatagcgggttttagcgacgatagaattattaggatagcaacttcagataacttttggtcaatgggcgaaacgggcccttgcggaccttgttcagagatattttatgatcatggagatcatttaaaaggtggtttacccggaaccaaagatgaggatggcgatagatatattgagatatggaatttagtcttcatgcaatttgagcaagtttcaaaagataaaagaattaatcttccaaaaccttctgtagatactggaatgggtttagagagaattgcagcattacttcagggcacacatgataattacgaaacagatcattttaaaaaattaattagttcgatttctgaatttacaaaagtaaaacaagatgaaaataatttatcaagctttagagtaattgcagatcacttaagagctagctcatttcttcttgcagaaggagtattaccttcaaatgaaggtagaggttatgttcttagaagaataatgagaagaggaatgagacattctcatttgttaggttctaaagaaccagtcttcaataaaatctttgatacattgaaagatgaaatgaaaggaaattatcctgaattagaaagatcagagactttaattaaagaaacattaaaaatggaagaagaaaaatttttagtattacttgataggggaattaaaattttgaatgatgaaatttcaaaaataaaaaaagttttaccaggtgaagtagcgtttaaattatatgatacttatggtttcccgttagacttaacagaagatattttaaaaaataaatctttgaccgttgatcaaaataaatttgatgaattaatgaaaaagagcaaagagcttgcaaaacaaaattggaaaggttctggagatgcctctgaagaagaaatctggtttggtataaaagataaaataggacctacagagtttcttgggtatgagtttaaccaatcagaaggagtggtgttatcaataattaaaaataataaagaagcacaaaatatttcaaatggtgaggaagggataattattactaatcaaacccctttttatggagagtctggtggacaagttggagatcaaggaacaatagtatctggtaattcagtatttgaggttacagatactcaaaaaaaacttggagatctgtttatacatcatggaattctaaaatctggtgagattaagattaaaagcattgtagaaatgaaaa

SEQ ID NO: 306700 - DNA, 1441 bp, Unknown
  Bacterial polypeptide expressing nucleotide sequence isolated from the Sargasso Sea
atgaaaactaatgaaatcagacaatcttttttagatttctttgaatctaaacatcatgaggttgttccttcaagcgcattagtgccaaacaatgatgaaactttattgtttacaaatgctggtatggttcagttcaaagatgtttttcttgggactgacaaaaaaagttataaaagagcatcaacatcacaaagatgcataagagctggcggaaaacataatgatttagaaaatgtcggatatacacttcgtcatcataccttttttgaaatgctcggtaattttagttttggtgattattttaaagaggaggccattgaatttgcttgggagtttttaactgaagttttaaaacttgataaagataaattatggatcacagtctacaaagacgatgatgaagcagaagaaatttggaaaaataaaattggaatagaccctaaaagaattgccagacttggtgatgaggataatttttggtcaatgggtgacactggaccatgtggaccttgctctgaaattttttatgatcatggtgatcatattgagggaacgccaccaggagcggatggcgatgaaggagatagatttattgaaatatggaatcttgtctttatgcaattcaatagagacgagagtggagatatggaacctcttcctaagccttcagtagatacaggaatgggtcttgaaagaattaccgcagtaatgcaaggcgttaattcaaattatgaaacagatatttttaaagatttaatcattgcttcagaaaaaatacttggtgataagggcagcacttcacataaagttatcgctgaccatataagatctagtgtatttttaatttcagatggcgtaattcctgaaaaagaaggaagaggatatgtcttaagaagaataatgagaagaggcatcaggcatggatataaaataggagcaacaaagccttttttgcacttattggtcaaagatcttattagcttaatgaaacaggcatacccggaacttgaggataactatgaaaatatagttaagattattaaaaacgaagagacaaaattttttgaaaccttacaaaatggcattgagattttagaggagaccatctcaacaatgcagaacaatactatttcaggcgagattgtattcaaattgcatgacacatatggatttccttttgatttgactgctgatattgctcgagaaaaacagttattaattgacgaagatggctttaataaatgtatgaaacaacaacaagaagcttctaagtcatctagtcatttcgtttcatctcttcctgctgcatctggtgttgaggagactaaattcttaggttatgaccagcttcagtctgagtctgaaattcttgtaatctgggatggacaagagaggattgagaacgcccttaaagggacaagaaatatttatagcatgtaat

SEQ ID NO: 306701 - DNA, 1180 bp, Unknown
  Bacterial polypeptide expressing nucleotide sequence isolated from the Sargasso Sea
ttgagaacgcccttaaagggacaagaaatatttatagcatgtaatcaaacaccattttatgcagaatctggtggtcaaattggagataagggaaggtttgcatctgacagtgctactggtaatattttagattgtagaaaacaaggtaaggtatttattcacaaagctattatagaaagtggagaaattaaaaaaggtgatttaattgaaatgagcgtagaaaaagaaaaaagaatagctatagcaattcatcactctagcacacatctacttcatgctgccttacgagaagttttaggagatcatgttcaacaaaaaggatcactagtcgatgaaagcaagttgcgttttgatttttctcatgacaaacctttaacacagaatgaaattgcaacaatagaaaaaattgttaataaagaagctcttaataatcttgaagtaaaaactgaattaatgaaactcgatgatgcaataaaatcaggggcaatggcgctatttggtgaaaaatatgatgatgatgttagagttcttacaatgggagagaactcttattcagtagagttatgtggtggcactcatgttgccagaactggcgatattggattctttgctatcacaacacaatccagtgtagcttctggtataagaagagttgaagctgttgccggcatgcaggctttaaactatataaaaaaattaaaagaagttaattcctcaattcaaaaccttttaaatgtttctgcagatgatatgcacgataaaataaaatcattgattgatgaaaataaggatttaaaaagcaaaggaaataaaaactcaaaaagagaaatagttttttcagaaagtcttcaaataaatgattggaaattggttattcaacaagttcaattagatgataccaaagatttaagattgctagctgacgagcaaaaaaatacaaatgaaaaagtgtgtgttgttattttttcagaacaaaataataagattgcccttgtttgtggagttactaaaaatcttacagatatcttgtctgcaaaagagatagtttctgttatatctgaagcaattggtggaaaaggagggggcaggcctgactttgctcaaggagcaggcgagtctaaaaatattaaagatttcgtgacatctattaaagattcagtaaaatccctcgcaaaataaa

SEQ ID NO: 306702 - DNA, 1060 bp, Unknown
  Bacterial polypeptide expressing nucleotide sequence isolated from the Sargasso Sea
tctcaaaaatgtgtaagagcaggtggtaagcataacgatcttgaaaatgttggctatactccaagacaccacacattttttgaaatgctgggaaacttttcttttggcgattattttaaagaaagagctattgaacttgcgtggaatttaataacaaaagaatttggtttagataagaacagactttatgtaactgtctaccatgacgatgatgaagcctttaattactggaaaaagattgatgggttaagtgaaaataaaatcataaggatagcaacatctgataatttttggtctatgggtgaaactgggccttgtggcccttgttcagaaatattttatgatcatggagaccacttagaaggaggattgccaggaacaaaaaatgaggatggggacagatttattgaaatttggaatttagtcttcatgcagtttgagcaaatttcaaaagataagagaattaatctaccaaaaccatcagttgatactggaatgggtttagagagaattgctgcattacttcaaggaactcacgacaactatgaaaccgatcattttaaaaaaataataaactctactgcagaaattttaaaagttgcgcctaataacgacaatttggcaagttttagagtaatagctgatcacttacgagcaagctcatttttaattgccgagggggttttaccatcaaatgaaggaagaggttatgtcctaagaagaattatgagaagaggaatgagacattcacatcttctaggttctaaagaaccaattttttataatatttttaaaactttaaaagatgagatgaaaggtaattattcagaaatagaaagagctgagtctttaataaaagaaacattaagaatggaagaagaaaaatttttaattcttttagacagaggtattaaaatattaaatgaggaaataactaaaatagacaagatactacctggagaagtagcctttaaactctatgatacctacggttttccattagatcttacacaagatattttgaaaaataaatctttgacaattgataatgataaatttc

SEQ ID NO: 306703 - DNA, 2030 bp, Unknown
  Bacterial polypeptide expressing nucleotide sequence isolated from the Sargasso Sea
tgattattttaaagaacaggcaatacattatgcatgggatttaataacaaaagattttggaatagataaaaatagactttatgtaactgtatatcatgaagatgatgaagcatataatttctggaagaaaatagcgggttttagcgatgataggattataaggatagcaacttctgataatttttggtcaatgggagagacaggtccttgtggaccgtgctcagaaatattttttgatcatggtgatcatttaccaggcggattgcctggtactaaagatgaagatggtgataggtttatagaaatttggaatttggtctttatgcaatttgaacaagttacaaaaaataaaagaataaatcttccaaaaccatctgttgatacaggaatgggacttgagagaatagcagctttacttcaaggtactcatgataattatgaaacagatcattttaaaaaaataattaactctgcatctgaaattgtaaaagttaaatcagaaaaatctaatctttcaagttttagagttatcgctgatcacttaagagcaagttcatttttaattgctgaaggtgttttaccttcaaatgaaggaagaggatatgttcttagaagaattatgagaagagggatgagacattctcatttacttggatcaaaggaaccagttttttataatttgtttgacactcttaaaaatgaaatgtcaggaaactatccagagttagttagagcagagtctttaattaaagaaactttaaaaatggaagaagaaaaattcttagttttattagacagaggaataaaaattttaaatgatgaaatatctaaaatagataaagtgttgccaggtgaagtagcttttaagctgtatgacacctatggtttcccattagatcttactgaagatattttaagaaacaaatcgatgttaattgatactgaaaagtttcaatctttgatgaaggaaagtagagagcttgctaagaaaaattggaaaggttctggagatgctgcagttgaggatatttggtttggaataaaagataaattagaagcaactgaattcttaggatacgaaaccaatcaagctgaaggagtcgtattatctcttttaaaagataataaagaagttgatcaattaaaagaaaatgatgaaggaatgattatagtaaatcaaactcctttctatggtgagtctggaggtcaggtcggtgatactggcgaaatagtgtcaaacgattttaaatttgaagtaaccgatgttcaaaaaaaactaggagatttatttgtccattatggaaaggttaagagtggatctataaaactacaagaaagtgtagagttaaaaattgatgtggaaagaagggataatactcgtgcttatcactcagcaacccatcttttacacgagtctttaaggagagttcttggtacgcatgttactcaaaaaggatctttagtagagccaagcagattaagatttgatttcagccacatgaagccaattttgaatgaagaaatcgataaaatagaagagtttgtaaatacaatggtttcaaaaaaatctgatgtaaaaactagattaatgacacctgatgaggcagttgaaaatggtgctctggcattatttggtgaaaaatacggagatgaagtacgggttctttcaatgggagacgaggatggaaagtatttttcaacagagttgtgtggtggaacacacgtcaaaaacactggagatattggtaaatttaagattgtcagtcagtcttcaattgctgcaggggttagaagaattgaggctttgagagataagcaattagaggaatatttaaaaaataaagaaaaattatcaaacctatctgcagaaaaagatgaggaaacaattaaagaattaagtcagcaaattattaaattgggaggaaaaccaagtttggaagaaactgatcagaaaactttaataaaaaatttaactaaacaattagagactatctcagtaaatgcaattttagaggacaaatcaaaaaata

SEQ ID NO: 306704 - DNA, 1516 bp, Unknown
  Bacterial polypeptide expressing nucleotide sequence isolated from the Sargasso Sea
attatacgatacctatggatttcccttagatttaactcaagattatttgaaaagtaaaaatattgaagtcgatataaaaacatttaaacaaaaaatgttagatcaaaaggaaagagcgagacaaagctggagaggtacaggagacatcgaggatgaaggtatttggtttgaaataacttctaaaatagagcaaacagaatttttaggatattctgatatggaagctgattgtaaaataatttcaatcatatcagatggtaagtcagtagatctaattaaaaaagatcaagaagcaactataatattaaatcaaacacctttttatggagaaagtggtggtcaggtgggtgatcaagggttttttgaaaatgataattttaagtttgaagttatcaatacaacaaaaatatttggaaactattttcttcacaaaggtaaagtaactagaggcgggtgcaaagtagaagataccattaaagcaagtattaatacagtgaatagagattttattaaatataatcattcatcaactcatttattacatgctgctctaagaaaaatactgggtaagcatgttacgcagaagggttcacttgtaaattcagaaaaactcagatttgattttagtcacaataatccaattgaaaaagatcaactcataaatgttgaagaaattgtaaatgatcaaattcaaaaaaatggaattgttgaaattaaaattattgatcaaaaaaaagctattgaagaaggtgcgatggcattatttggagaaaaatatagcgatgaagtaagagtagtaacaatgggtcaagaaaatgaatcattcttttcaaaagaattatgtggaggaactcatgttgttaaattaggggaaataagtaaatttaaaataactaatcaatctagtgttgcgtctggaataagaagaatagaggctgtatctaatgttgcagtagataaatatattaaagaaatagaaagaaatttattagaaaaaaataaaaaccaagataatcaaattgaagatttaaagaataaaattaaaaagattaatgctgattataattttaaaaatcaatctgaagacaaaggtttattaattaaagaattaattcagatacacgaaaaattaaaacaaaatatgtctatatcaaaaaatattgataatattgttgtaaaaaaaatcaaagaattaaattttatatacttgattgctgaagattaccctaataaatctttgaaaacatttattgatgagcaaaaaaaacaatataataaaaatagtgtttcgttaataatttcaaataatgaaaacaaactatctatagtgctaggagttacagaagatattacagatctttttgatgcttcaaaagaaataagagaaatttcgattattctaggtggaaagggtgggggtggtagaaaagatcttgctcaaggaggaggatcagatgttagtcaaattaatgaaagtataaaatacgtagaagataaattaaattctattagttaa

SEQ ID NO: 306705 - DNA, 298 bp, Unknown
  Bacterial polypeptide expressing nucleotide sequence isolated from the Sargasso Sea
atggcaacttctcctcttacaacgaatgaagtaagaaagatttatttagacttttttgaagagaaaggtcacacactagtcgagagtgcttcattggttccattgaatgaccccaccttgttattcatcaatgctggaatggcaccttttaaagatcttttattaggagttgaaaaaagaaattatacaagagcggtcagttcacaaaggtgtatgcgggcaggtggaaagcacaatgatcttgataatgtcggttataccgccagacaccataccttttttgaaatgctcggcaatt

SEQ ID NO: 306706 - DNA, 1495 bp, Unknown
  Bacterial polypeptide expressing nucleotide sequence isolated from the Sargasso Sea
ccattcatttttgatctggtttcatcagttggtgatgttatgggtgacacgtttccagaactaatagataaaaaactccatattgaaaagataatcaaatccgaagaattatcgtttaatgatacgcttgacagggggctatcacattttaagaaggttatcaaaaatgtgtctggaaagaaagtgtctggcgccgatgcgtttaaattatacgacacctttggatttccattagatctcactgaattgatggccagagaaaaagggttggtagttgatgtgaaaggctttgacagggaaatgaatcatcagaagaaaagagctaagggctcggataagtttgttgccgatgttacaaacaagaagtggaaagaattatctaaagatcccgactcgatatttgttggatatgaaacaactactctcacttcaaaaattgtgcgttatgtaaaatctgatgattcctttttgttagttttaaatcaaacacctttttatgctgaagctggaggtcaggttggcgataagggaacaattaagggatccaatgttgacctggaagtttatgatgtgcaactggaaggggagacttacattcattattgcagaggtacaatgaacccaaagacaaagaatgtagaatgcaaagttgatgattcaagaagacagagaacgcgtaaaaaccatacagctactcatttaatgcataaagcccttaaagtagttttgggcggtcatgttcagcaagcaggatctttagttcatccagattatttacgttttgatttaacgcattttgaaaagatttcatctgatcaaattgaaaggatcgaaaagattgtcaacgatgaaattacaaaaaataccgagctggatgtttctgttaagccatatgatgatgcaaaaaatgaaggggcagttgcgatgtttggagaaaaatacggagatgaggtccgcgtaattactgtaggggactactcaaaagaattgtgtggtggaactcatgttgaaagaactggagacattggtttttttaaaataattgaagagtcttcgcttgcttctggggtgcgtagagttgttgccgtgaccggaccagagtcggtatcctttgtccagaaccagtcgcttactttgagcgatattaaatcgcaacttaattgcagccttgattctatttcagagcgaattagtcaattgatatcagataaaaaactattagaaaaaaaattaaagaataacaggaaattaagttcaaattttaatgtagactcaattttaaaagaatcgcagctcattaaagaggtaactgtattcactaagttgattaatgctgattcaattgaagacctaaaagacataggcaaccttttgattcaaaaggtggataaaggaataggagttcttggcgcagatttggaaaaacctagtatagtcgtagtggtctcaaatgctttggtagatattggtgttcatgcaggtacaatcgcaaaag

SEQ ID NO: 306707 - DNA, 1115 bp, Unknown
  Bacterial polypeptide expressing nucleotide sequence isolated from the Sargasso Sea
taccaaggattttggtatcgataaaaaacgactatatgtgacggtttttagcgaagatgatgaggcattcaatttttggaaaaaaattgcaggtctaagcgaagatagaataattagaatagcaacgtcagataacttttggtcaatgggagaaactggtccttgtggaccatgttcagaaatattttttgatcatggtgataagctacaaggtggattgccaggaacgaaagaacaggatggtgatagatatattgaaatatggaaccttgtatttatgcagtttgaacagatttcaaaagataagagaattaatttgccaaaaccatctgtagatactggaatgggactcgagagagtagcagctttgttacaaggtacttatgataattatgagacagatcatttcaaaaagattatttcttcaacatcggaagcagctaaagtaaaaccgaatgaaaataatttatctagtttcagagttatagcagatcacttgagggctagttcatttttaattgccgaaggagtattaccttcaaatgaaggaagaggatatgttttaagaagaataatgagaagaggaatgagacattctcatttacttggatcaaaagaaccaattttttataatatctttaaaacattaatggaagaaatgtctggaaactacccagaattaaaaagagctgaagctttaattaaagaaacacttaagatggaagaggaaaaattcttagttctacttgaacgaggtatgaaaattttagatgaagaaataactaagatagacaaagttcttccaggagaagttgcttttaaactatatgatacttatggctttccgttagatttaactcaagacattcttaaaaataaatctcttcaaatagatagcaaaaaatttgatgatcttatgaagaaaagtagagagcttgcaaaaaaaaattggaaaggttcaggagacagtgctgtagatgatatatggtttgcaataagagacaaattaggtgcaactgaatttcttggatatgaaactgatcaggcagaaggaattattaaatctcttttaaaaaataatcagcaagtagattctttaaaaacccggagatgag

SEQ ID NO: 306708 - DNA, 1462 bp, Unknown
  Bacterial polypeptide expressing nucleotide sequence isolated from the Sargasso Sea
cctgcccggagaaatagctttcaagttatatgatacatatgggtttccattagaccttactgcagatattttaaaaaataaaaatataaaaattgactcttccgcctttaataaagcaatgaaaaaaagcaaagagttagctagagcaagctggaaaggatcaggtgataagtcagtagaggaaaaatggtttaaagtaagagaacaattaaacccaactgaatttttaggttatgaatttgataaagcagaaggtattgttttaaaaatatcaaagggaaataagtttgttgaaaacgcaaaagaaggtgatgaagttgaagtcattacaaatcaaacacctttttttggtgagtcaggcggacaagtcggagatcaaggaattatttcaaattctaaatgtaaaattaatattcaagacacacaaaaaaaaataggtgacctatttgttcattatggaacagttcagaaaggatcattcgcagttggagataatgtaaatctggaaataaacattcaaaaaagaaacaatgcaagagcaaatcactctgcaacacatttacttcacgagtctttaagaaggacacttggtaaacacgtcactcaaaagggatcattagtaagtccagatagactaagatttgattttagtcacaataagcccattgaaaaagacgaaatgataaaaattaataaaattgttaacgaaatagtaaatggtgcaagtgatgtacaaacaagaattatgacacctaaagaagccgttaatttaggagcattagctttatttggcgaaaagtatggtgatgaagtcagagtagtttttatgggaaaagaaaagaatggtttcttttccacggaactatgtggtggaacacatgttaaaaacacaaaagaagttggggagtttaaagtaattagccagtcttcaatagcttctggaattagaagagtagaagcgttaagaaaaattcaacttcaagattatgaaaaatcactcaaagaagacaagtctttaaaagaaaaaaatcttaaaaaccaaattaatttaataaaaaaagatttattaaaacttaaagtgcaaccagattttaaggataatgtcgatttgtcagaaaacttaaaaaatcttaataaacaattagaaaaaatcaaaattaaaaagataattgaagataaaagtaaaaatattataaaagataaaaaagttggtagtttcatattcagacaacaggttttgatagattttcctccaaaggaattaagaagtgtaatcgatcaaggaaaaaaagatattaaaaatggtattgtagttagtatttcgacttttgaaggcaaagttggagtggctgtcggtttgactaaagacctaactaaaaaatttgatgctgttgaacttgtaaaaatagcctccaatgtcctcggaggaaaaggtggaggtggtagaggagattttgcacaa

SEQ ID NO: 306709 - DNA, 1258 bp, Unknown
  Bacterial polypeptide expressing nucleotide sequence isolated from the Sargasso Sea
catgaattctaataagataagatctacctttctcgactattttaaaaaaaatggtcatgaaatcattcattctagttcattagttcctgataatgatcctacactaatgtttgcaaactcaggaatggttcaatttaagaatatatttactggaaaagaaaaaagggaatacagtagagcaactacagcacaaaaatgcgttagagcaggcggcaagcataatgatttagaaaatgtaggttatacaactaggcaccacacattttttgaaatgctaggtaatttttcattcggtgattattttaaggatttagcaatagaactcgcatggaatttaattactaaagaatattcaataaacaaagatagacttttagttactgtttattcagaggaccaggaagcttttgatttatggaaaaaaatagctggattgtcagaaaataaaattattaaaattagtacatctgataatttttggtcaatgggtgaaactggcccttgcggtccatgttctgaaatattttatgatcatggtgataaataccaaggaggtcccccaggttctccaaatgaagatggtgataggtttatagaaatttggaatttagtttttatgcaatttgagcaaatatcaaaatctgagagaataaatctgcctaagccttcaattgatactggtatgggattagagagaatgacagcactcttagaaggttctaatgataattattcgacagatttatttcaaccaattataaatgaatcaacaaaactttgtggaaatgaaagttctattgacaatcctagtcatagagtaattgcagatcacttaaaatcatcctcttttttaattgctgatggagtaatgccttcaaacgaaggtagagggtatgttttaaggagaataatgagaagaggaatgcgacatgcacattctttagggaataaagagcctatatttcataaactattccctatttttctggatggaattaaaaactcatatccagaattagacagggcaaaagatctgatcatcaattcattgattaatgaagaaactaaattcaaagaaactgttgaaaaaggaataaaaattttagatgaggaaatttctaactcaactaatatatttaatggcgaagtagcatttaaattatatgacacatatggatttcccttagatttaacacaggattatttgaaaagtaaaaatattgaagtcgatataaaaacattgaacaaaaaatgttag

SEQ ID NO: 306710 - DNA, 925 bp, Unknown
  Bacterial polypeptide expressing nucleotide sequence isolated from the Sargasso Sea
ttatgtattaaggagaataatgagaagaggaatgaggcactctcatttacttggttctaaagagccaattttttttaatatctttaaaactcttaaagatgaaatgaaaggcaattactcagaaattgagagagcagagtctttaattaaagagacattaagaatggaagaggaaaaatttttagttttattagatagaggtataaaaattttaaatgatgaaataacaaaaatagataaagtattacccggagaagtagcgtttaagctttatgatacctatggtttccctttagatttaacacaagacattctaaaaaataaatctttaaaaatagatagtgagaaatttcaaagtttaatggaggaaagcaaagaacttgcaaagaaaaactggaagggctcaggagatagtgctgttgatgatatttggttttcaatcaaggataaattaggtgcctcagaattcttaggatatgagactgatcgagcagaaggtattgttctggtattattaaaggataataaagaagtagaccaacttaatgaaaatgatgaaggaataattattgtaaaccaaactcctttttatggagagtcaggtggacaagttggagatactggacaaataattgcaggaaactttaagtttgaaatatcagatgtacaaaagaaattaggagatctgtttgtacactatggaaaagttaaatcaggcaaaatcaagattaaagatcatgtggaaatgaaaattgacgttgaaagacggaataatattagagcatatcactccgcaactcatcttttacacgagtctttaagaagagtgttaggtactcatgtcactcaaaaaggatctttagtagctcctgatagactacgatttgattttagccacatgaagccattacagaacaagaaatag

SEQ ID NO: 306711 - DNA, 1282 bp, Unknown
  Bacterial polypeptide expressing nucleotide sequence isolated from the Sargasso Sea
acttatttaaatattaaagatcccttcatatataagttagtatccaaagtttcaaaagatctacaaaatgtatatccaaacattaaagatgataataaaattatagagacagtcataaaagatgaagaatcagctttcttaaaaactctagatcaaggaattgtattattaaataagttaataaaaagctctgagaataaaattatacatggtcaagatgcattcaaattatacgatacctatggattccctgttgatttaacatcattaattgctgctgagagtggctttaaagttaatataaaagggtttgatgaaaatatgcaaaaacaaaaagaaagatcttcatcaaaatctaaattaagatactctgattggaatattatagatgaaaatgctaaatctaattttattggatatgataaattaaaaagtaaaatgaatctaataagatttagggaagttgatacagaaaatggaatgaatattcatttagtatttgatactacaccattctatgctgaatcaggagggcagattggagatactggttcaattgagtcttcatcaaaagaggttatcgaaataacagatacaataaaggataatgactatataatccatgttactaataaaatgccaaataatcaagactctccttttacaggtacagtagattcaaaaaggagacaacaaattacatcaaatcatacttcaacacatcttctaaatttggcattgaaaaaaatattaggaactaatgttgaacaaagagggtctatgatatcggaagaatcatttagatttgacttctcatataaaatgaagctgtctaaagaggaacttaataaagttgaagaatatgtaaacaacctaattaaagaaagtattgatttgatagaagaaagatctgcagattataaagaagttataaagaaaggtgcggtaggacttttttcagaaaaatatggagaaaaagtaagaactattaaatttaatgactcatatgaattatgtggaggtacccatgtaacaaatacaaaagatataggtagtttcaagattatctcagaagggtcccaagcatttggaattagaagaattgttgctacaagttctgagaaaaagatcttagaagaaaatcttaagcaaaagtctataaaagagaaggcagcaactgatcaggcgaatagattactcaaaaaagagaatgagtcaattaataaaattaaagttgagtctattaaagaagatataattaaaaatatccgattatctaata

SEQ ID NO: 306712 - DNA, 1371 bp, Unknown
  Bacterial polypeptide expressing nucleotide sequence isolated from the Sargasso Sea
acctggagaagttgctttcaaactttacgacacttatgtttttcctctggatttaacagaagatattttaaaaaacaaatctctcactattgaccacaataaatttaaatcattaatgaacaaaagtagagaactagctaaaaaaaattggaaaggttctggagatacatcggttgatgaaatttggtttagcataaaagataagttagaacctacagaatttttaggatatgaaactaatcaagcagaaggcgtagtgctcgcgctaatcaaaaataataaagaagttaaaaatttaaataaagacgatgaagcaatgataattgttaatcaaacacctttttatggagagtcaggtggacaagtgggcgatacaggaatttttgtttcaggagattttaagttcaaagtaaatgatgttcaaaaaaaatttggagatcttttggttcattttggaaaagtagaaagtggttcaattaaattaaaagataatgtggaaatgaaaatagatgttcaaagaagagagaatgtaagagcttatcattctgcgacccatcttcttcatgagtctttaagaagagttttaggtacccatgtaattcaaaaaggatccttagttgctccagatagattaagatttgattttagccatatgaagccaatttctaatgatgagataaataaaattgaaaaatttgttaatgatatggtcaaaacaaaatccgaggtaaaaaccagattaatgacaccaaaagaagcagtagaaaatggtgctttggcattatttggtgaaaaatatggagatgaagttagagttctctcaatgggtggtgaaaaaggtagatatttttcaactgaactttgtggaggaactcacgtaaaaaacaccaacgatattggtaaatttaaaataataagccagtcatctattgcggcaggtatcagaagagtcgaagctcttagggatagacagttggaagaatatctaacaaaaaaagagaaaatgcttgatctatcagctcaaaaaaatgaagagattgttaaaaatatttctgagaaaataattaagcttggaggtaaaccaaaactagatagtgatgatcaaaaaaatcttataaaaaatttaacaaaacaacttgatcaaattttagttaaaaatactttaggtgataaatcaaaaaatattattaaagatgaaaaaataaataacattaaagttagatttcaaaaagtaaatggtcttccttcaaaagatctaaggaaattagtagatattggaaaaaaagaaattggagaaggaatagtgattatatttgcaactgtagatgaaaaaataggattagcaattgggataactgataaattaacaaa

SEQ ID NO: 306713 - DNA, 985 bp, Unknown
  Bacterial polypeptide expressing nucleotide sequence isolated from the Sargasso Sea
gcttatcattcagcaacacatttacttcatgagtctcttagaagaactttaggaaaacatgttatgcaaaagggttcattagttgcacctgatagacttagatttgattttagtcatatgaaacccattaccagtgaagagttacagaaaattgataaacttgttaacgaatatgttgaagcaaataccgaggttacaactagaattatgactccaaaagctgcaattgataagggtgccttagcattctttggggaaaaatatggagaagaagtcagggtagtttcaatgggtaaagaaaaagaaacttacttttcaacagaattgtgtggtggaacacatgtccaaaatacaggaaatattggtaaatttagaacaattagtcaggcttctattgctgcaggcgtcagaagagttgaagcattaagagataagcagttagaggattatattaaaaacaaagagaaattatcaaatttatcaactcaaaaagatgaagaaaatataaaagaattgtcatctcaaataataaaattaggtggcaagccaaacattgataataatgatcttaaagagcttataaaaaatctcacaaaacaacttgaacaattaaatgttagttctgtgctgaaagataaaaccaaaaacattatcagtgatgaaaaaataaatggtgtaaaagttagatttcaaaaagttcaagatctaccacctaaagatttaagaaaattagtcgatagtggaaaaaaagaactaggagaggggattgttgttgttttcgcaagtagtgataataaagttggtcttgcagttggtataacagaaaaattaattagtaaatatgatgcagttaaatttgctaaattaggatcagagataattggtggcaagggcgggggtggaaggaaagattttgctcaagctggaggtcaagaccaaaataaaattgatgaagcttttgaaaaaataaaggctttaatttaat

SEQ ID NO: 306714 - DNA, 256 bp, Unknown
  Bacterial polypeptide expressing nucleotide sequence isolated from the Sargasso Sea
atgagcaaaattttgcttacagatgtaagaaaaaaattcttaaactattttaaaaaaaacaatcataaaattgttgagtcaagcaatttagtaccaaataatgatcctacactaatgtttaccaattcgggaatggttcaatttaaaaatgtttttacagggctagaaaaacgaccgtataaaacagcaactacgtcacaaaaatgtgtgagagcaggtggtaaacataatgatttagaaaatagtaggttatact

SEQ ID NO: 306715 - DNA, 1137 bp, Unknown
  Bacterial polypeptide expressing nucleotide sequence isolated from the Sargasso Sea
ctcaaattgtaaaattaaaattaatgatacacaaaaaaaaatggggagatttatttgttcattatggaaaagttgaaaagggttcaatttctaatgggcaaaacgttaatttagaaattgatgttttaaaaagaaataattcaaaagcttatcattcagcaactcatttattgcatgagtctttaagaagaaccttgggaaagcatgtgacacaaaaaggatcattagtctctcctgaaaggttaagatttgattttagtcataataaacctattgaaaaagaggaaatgactaaaataaataatatagttaatgaaatagtagagggttcttctgatgtgcaaacaagaataatgaccccaaaggaggcagttggcatgggtgctcttgcattatttggtgaaaagtatggcgaggaagtaagagtggtgtttatgggaaaagaaaataatggtttcttctcaacagaattatgtgggggaactcatgttaaaaacaccagagaagttggtaagtttaaagtaataagtcaatcatctattgcatcaggagttagaagagttgaggcattaagggacaagcaattagaagaatacgaaaaaacacaaaaagaagataaatccctgaaagaatctaatctaaaaaaagatataaaattaattgaaaatgaattgcaaaaattgaaaattgaacctgtttttaatgaaaatttagatttgactgaaaatttgaaaaatttaaataaacagcttaataaagtaaaaattgaaggtatcaagaaagataaaagtaaaaatattatcaaggataaaaaaattgggaatatattaattcgagaacaaattttaaaagattttcctccaaaagaactaagaagtattattgatcaaggaaaaaaagatattaaatctggaataataattagtatttcgacgtttgaagataaggtcggtttagctgtgggaatttctcaagacttaacatcaaaatatgatgctgtcgatttagtaaaagctgcatctactattttaggtggcaaaggcggaggtggtagaaaagattttgctcaagccggtggtgtagatcaaaacaaaattgcggaagcttttaaagaaatatctaaaaaaattagttaag

SEQ ID NO: 306716 - DNA, 1150 bp, Unknown
  Bacterial polypeptide expressing nucleotide sequence isolated from the Sargasso Sea
tttagtttcggtggatacttcaaggatgaggctatatcatttgcatgggattttcttacaaatgtattaaagctagatgaaaaaagattatacatatctgttcataattccgattctgaatccaaacaaatatgggctgataaaattaagattgaccctgatagaattttagttttaggtgatgaggataacttctggcagatgggtgaaactggcccatgtggaccatgcactgaaatatattatgatcaaggagatggatttgatggagtacttcctactgtaggcgaccccaaagacagatacatagaaatatggaatttagtttttacacaatacaataaaatatctactggagaattggaggagctaccacaaaaatgtgtagatacaggaatgggcttggagagggttcaggcaattgtggagggatttactgataattatgattctacattatttcaaaatctcagccaatatattgattctaaaatctcattaactaacgataatttatacgtaaaaaaaatattacttgatcatataagggcttgttgtcatctaattagcgacaacgtaattcctgatcgcgagggtagaggctatgttcttcgtcgaatactaagacgttcttcacgttttgtgtataaaaataatataaaagatccattcttatacaaatgtgccgaagtaatctgtacttcaagtaaggattttccagaactcaaaaaatacttagccaaaatcgttgatacaattaaatctgaagagcaaaaatatttaaaaacattgggtaagggcatagatctgattgatgattttttaaaaaataaatctagcctagatgctgaaacaatattcatgttgtatgacacttatggtttcccctttgagattactcaagagatagcggcagaaaagaacataacaatagataaagatggttatgaaaaacttatgatgaatcaaaaagagagtgctagaaataaaaaagcatttgctgataaagtttcatcaaaccttgatatgactcattctatagaatttattggctacgataaaaacaatatcgaaacatcagtagtagatatttatcagaatgataaaaaagtcaaaaatatatcagatactaatataaattatcttgttg

SEQ ID NO: 306717 - DNA, 1170 bp, Unknown
  Bacterial polypeptide expressing nucleotide sequence isolated from the Sargasso Sea
tagttcattagttcctgacaatgatccaactctaatgtttgcaaactctggtatggtacaatttaaaaatatctttactggaaaagaaaaaagagaatacaatagagcaactacagcgcaaaaatgtgttagagcaggcggcaaacataatgatttagaaaatgtaggatatacaactagacatcacacattttttgaaatgttaggtaatttttcatttggtgattattttaaagatttggcaatagagcttgcatggaatttaattacgaaagagtattcaataagtaaagatagattattagtaactgtttactctgaagatgatgaagcatttaatttgtggaaaaaaattgcaggattatctgatgataaaataattaaaattaatacttcagataatttttggtcaatgggtgaaactggaccttgtggaccatgttcagagatattttatgatcatggcgataaatacgaaggaggtcctccaggatccccaaatgaagatggtgatagatttatagaaatatggaatttagtttttatgcaatatgaacaaatatctaagtcaaagagaataaatctgccaaaaccttctattgatactggaatgggattagagagaatggcggctcttttagaaggttctaatgataattattcaacagatttatttcaaccaattataaatgaatcaacaaaactttgtggaaatgaaagctcaataaaaaatcccagccatagagtaattgcagatcacttaaaatcttcctcgtttttaattgctgatggagtaatgccttctaacgaaggtagagggtatgttttaaggagaataatgagaagaggaatgagacatgcccattctttgggaaataaagagcctgtgtttgataaactatttcctatttttctggatggaattaaaaactcatatcctgaattagacagggcaaaagatctgatcatcaatacattgattaatgaagaaactaaattcaaagaaactgttgaaaaaggaataaaaattttagatgaggaaatttctaactcaactaatatatttaatggagaagtagcatttaaattatatgacacatatggatttcccttagatttaacacaggattatttgaaaagtaaaaatattgaagttgatataaaaacatt

SEQ ID NO: 306718 - DNA, 2569 bp, Unknown
  Bacterial polypeptide expressing nucleotide sequence isolated from the Sargasso Sea
atgaaaaacacagccaacataagacaaacatttctaaattattttgaaaagaatgaccacgaaattgttcactcaagcccgcttgtgccaataaatgatccaacattaatgtttgtgaacgctggaatggtgccatttaaaaattattttgagggtaatgaggtaccagattttttaaaagctacaagttcacaaaaatgcgtgagggcaggtggtaaacataatgaccttgataatgtaggtcatacaacgcgacatttgactttttttgagatgctaggaaatttttcttttggagaatattttaaagaagaagcaataaagcttgcttgggacttgctaactaaagaatttgatatttcacctgatagattattagtaaccgtatttaatgaagataatgaagctgaggaaatatggaaaaaaatttcaggcttttctaacaataagataataaaaatttctacagaggataacttttggtctatgggagatgttggtccatgcgggccatgctcagaaatcttttttgatcatggggattctgttgatggtggtcctccaggttcaaaaaacgaggatggagatagatttgttgagatatggaatcttgtttttatgcaatatttgcaacacgctaattcgaacaaaacaccactaccgaaaccatctattgatactggaatgggattagagaggatttcaacagttttacagggcaaaactagtaattttgatactgacttatttatttcaattattaagtatattgaagataaaactaaaattatcaaaaatgaagaaaatgtatcaagttttagagttatagctgatcacttaagatctattgcgttcttgatttcagatggagtgttaccttcaaacgaaggaagagggtatgtattaagaagaataatgcgaagagctatgagacatgtttactttttaaatatacgagaacctattctttataatcttgtaaaaaaagttatagaattaatgaaagatgcttacccagaattatcacgtgcagaaaagttaattgaagttactgtttttcatgaggaggaacgatttctatctactttatctaaaggcataaagatttttaatgaagagtcaaaaacattaaaatctggagatatttttagtggatctactgcttttaaactttatgatacttacggctttccccttgatttaactgaagatcttattagagataaaaatctcaatcttgataaagatggctttgatctagagatgaaaaagcagaaagaagaagctaagaaatcttggttaggttctggagacaataaaactaatgaaatatggtttgaggtatctaataaatgcaacgctacagaatttttaggctatcaaaatatagaatcggctgctgaagttgttaacattatatgcgacaacaaaacatctaaaaaagttgaagatggagatgaagcaattttggtttttaaccaatcccctttttacgctgagagtggcggacaaataggtgatattggcttcgcaagtaatagtagttttatgtttcgcatatctgacactcaaaaaaaattgaataatatttatgcacactatggtgttgtagaaaaaggctctatttctattggtgataaagttaatctaaaaatagagaatgaccacaggcagatggtaaaatgtaatcattctgcaacacacttacttcatgaggctttaagaagagttctcggtgatcatgtaactcaaaaaggatccctagtctcagctgaaaagttaagatttgattttagccatcagaaatctctaacttcagaagaaattgtagaaattcaacaaattataaataaccaaataaaaaataattcttcagtaaaagttgaaattttatcttttgataaagcagttgattctggcgccttggcattatttggagaaaagtatgatgaagaagtaagagtattgacaatgggtgaagattctttttctaaggaattatgtggtggaacacatgttgataaccttggagatattggtgagtttaaaatcatttcacaaagctctgttgcatcaggaattaggagggtagaagctgtcacaggaataaccgctgataattcattatctttgattgataaaatgaaagaaattgaaaaaagaaaagacaacaaaaaaaaatcaaaagttaaaaaacaaaaagtttcaaaaagtattcttgatgggagaacagaagaatttaacaatataaaattattttttgataaattagatgatgttgacgctaaaaacctaagacagcttgttgacgaatgtaaaaaagatattaaatctggaatagtttgtctaatagctacttatgaaggtaagtcatcaattgctattggtgtgacaaatgatcttttaaataattatgacgctgtcaacttagttaagactagttcagaaattttaggaggtaaaggaggaggcggtagaaaggatatggctttagccggtgcaaaagatgtaacaaaatcagaggatgtttttgagcaattgttaaaagagatcaaaaaagattcttaag

SEQ ID NO: 306719 - DNA, 1522 bp, Unknown
  Bacterial polypeptide expressing nucleotide sequence isolated from the Sargasso Sea
aatgacaggcttagcagaaattagatcaacttttatcaattattttaaaagacacggacacgaggaagtaaaaagctctacacttgttcctagtaacgacccaactttgatgtttactaactctggtatggttcaatttaaaaatgtttttacagggcttgaaagtcgttcatataataaagctgtaacaagtcaaaaatgtctgagggcaggtggaaagcataatgacttagacaatgtagggtatacatccagacatcatactttttttgaaatgttaggtaatttttcctttggaaattatttcaaagaaacagccatacccctagcttgggatttaataacaaaagaattttctttacccaaaaatagattattggttactgtttttcatacagataatgaagcaatggatatttggaaaaaatatgctggtctttctgattctcaaattatcaaaattaaatcaagtgataatttttggtcgatgggagcaactggtccttgtggaccatgctcagagatattttttgaccatggttcaaatattgctggaggtcctcctggttccccaaatgaagatggtgatcgatttgttgaaatttggaacctagtttttatgcagtatgatcagttagataataataaaagagaagatcttcctagaccctccattgatactggaatgggattagaaagaatgggcgcagttcttcaaaacacccacgataactataatactgacttaatgaaggcacttattgatgaatctgcaaatctctcaagccaaaaagtaaatggaaagtataatattcatcatagagttattgcagatcatattaggtcaatatcatttttaatagcagaaggtatttttcccactaatgatggaagaggatatgttttaagaagaataatgagaagggctatgaggcatattcactttttgggagttaaagagcctatgctgtataaaatggttgcatctttaacacgagaaatgggagcggcattcccagaattgattgaagcaaaacaattaattgaagagagtttactaaatgaagaaatcaaatttagatctactttggatagaggcttaaaactattggataaggaaataaataggttaaataagggagaaaaattttctggtgaggtagcttttaaattatatgacacatatggtttcccaattgatctaacccaagacgcaatcagagatattgatatagaagttgatattgaaagttttaatttatcaatggataaacaaaaacgactagcaagaaatgcatggataggttcaggagaaaaaataattgaacaagtatggattgatttagccaataacttagatccaactgaatttcttggttactattctttgaattcgcaagctaagatacttgcaattgttatagatggaaatgttgcagataaaattgaaaatgataagtctgcagagttaattttcaatcaatcacctttttatgcagaaagtgggaggtcaagttcagat

SEQ ID NO: 306720 - DNA, 1169 bp, Unknown
  Bacterial polypeptide expressing nucleotide sequence isolated from the Sargasso Sea
aaattcaagagcagtttcctgtcaaaaatcattaagagctgggggaaagcataatgatttagaaaatgtggggcgtacaagtaggcaccatacattttttgaaatgttaggaaatttttcttttggtgattattttaaagaagatgcaatattttttgcatgggaattcttaactaaagaacttaatatagataagaaaagattgtatgtaacagttcatactgaagatgaagaagccgaaggaatttggctagataaagtaaaagttagtaaaaataaaatatataaattaggtgataaagataatttttggtctatgggtgatacaggcccatgtggcccatgctcggaaattatgtatgatttaggaaaagatggtgtaaattgccctaatttaaaaaaatgcactgttgaatgtgattgcggaagatttttagaaatatggaatttagtctttatgcaatttaacagagatgaaagtggtactttgtcgtctttacctaaacctagcatagatactgggatgggtttggaaagactagcctcagttcttcaaaatgttgaaagtaattatgatactgatttgttcggatatttaacaagttatgtagcaaatttcataaatattaagtatggaaaaaattcagaaatcgatatatcaatcagagtattgtcagatcatgcaagagctgtaacttttctaatatctgatggtgtaataccctcaagtgaaggtagaggttatgttgctagaaggatattgagaagagctgtaaggcattataaaaagttagatatctctgaaccctttcttcacaatcttgtagggctggtaattaatgagatggagtctatatacccagagctgttaagtcaaaaagaaaacattttatctattgttctcaatgaggaaaagaaatttttatctaccattgatagaggttttgatcaactcaaagatgccatggattcatcttcagagagtaaagttctttcaggaaaagatgttttcaaactctatgatacctatgggtttcctgtagatttaattgaagatataatcagtgaaacagattatgtcttagatatgaatgcttacgaagaagaaatgcttaatcaaaaaaattcttctaagaaagcttcaaaatttaaaagcccacatcggtgaa

SEQ ID NO: 306721 - DNA, 805 bp, Unknown
  Bacterial polypeptide expressing nucleotide sequence isolated from the Sargasso Sea
aaaaaatctgaggttaaaacaaggatcatgactcctaaagaagcagtaaataatggagctctcgcactctttggagagaagtatggagaagaagtgagagtattatctatgggggatgagaaagaaaagtatttttccacagaattatgcggaggtacacatgtacgaaacactggtgacattggaaaatttaaaattattagtcaatcatcaattgcagcaggtgttagaagagtagaagctcttagagaaaatcaattaaatagttttttacaaaataaagagaaattatctgacttatcagcgcaaaaagatgaagaaatgattaatgacttatcaaaacatataattaaattgggaggcaaaccaaatctagaaaatgaagataataaaattttaattaaagaattatcaaaacaactagagcaattaaaatttagttcaattttagaaaataattccaaaaatataattcaagatcttaaaattaataatataagtgtaagatttcaaaaagttgatgatcttccacctaaagagctaagaaaattggttgatgctggaaaaaaagatttaaaaacaggaattgtgatagtttttgctagtttagaagacaaagtaggtcttgcagttgggataacagataagcttattgacaagtatgatgcagtcacatttgctaaaacaggatctgaaattataggtggaaaaggtggtggcggaagaaaagattttgcacaagcaggaggtcaatttaaagataaaattgatgaggcttttgaaaaaattaagactttaatttagt

SEQ ID NO: 306722 - DNA, 739 bp, Unknown
  Bacterial polypeptide expressing nucleotide sequence isolated from the Sargasso Sea
atggctcaaaaaaccttaaatgaaataagaaatacttttctcaaatattttgagaaaaatgatcataaaatagttgagtctagcaaccttgttccaaacaacgacccatcattgatgtttgccaattctggaatggtacaatttaaaaatgtttttactggattagaaaaaaaagattacaaaagagctaccacttctcaaaaatgcgttagggcaggtggaaaacataacgatttagaaaacgttggatatacaccaagacaccatacttttttcgaaatgcttggaaatttttcttttggagattattttaaagaaagagcaatagagcttgcatggaatttgataactaaagattttggattagataaaaatagactttattttactgtttttaatgaagatgaagaagcatttaaactttggaaaaaaatatcaggcttaaatgaaaataaaataataaaaatttctacttcagataatttttggtcaatgggtgaaacaggtccatgtggaccctgttctgaaattttttatgatcatggagatcatttaaaaggagggctccctggaagcaaagatcaagatggtgatagatatattgagatatggaacttagtcttcatgcaatatgaacaggtttcaaaagataaaagaatagatttacctaaaccttcagtagatacaggtatgggtcttgagagaatggcagctctacttcagggtacacacgacaatt

SEQ ID NO: 306723 - DNA, 952 bp, Unknown
  Bacterial polypeptide expressing nucleotide sequence isolated from the Sargasso Sea
aatgtcctatcctgagctgaaaagagcagagtctctaataaatgaaacattgaaatatgaagagcaaaggttcagagatttattatccagaggaattaagcaacttgatacaatgatcgataatttgaatggaaaaaccattctaaatgggcagtcagcttttaagctttatgatacatatggcttcccgattgatttaactcaagatattttgagaaataagaaaattgaagtcgatattgatgattttaggaaatgtttggaggatcaaaaagaaaaagcaagaagcaattggactggatctggtggcacagctacagatagaatttggtttgagttaaataaaagtttatcccctacagagtttttaggttacacatctgaaaaaacagaaggaagtattatttctatcttaaaagaaggtgtattagttgatagtttacatagcggtgacaatggatcgctaatactcaatcaaacggtattttatgctgagtctggtggacaaattggtgatacaggtacaatacaagctgataattttgaatttgaagtttcagacacacaaaaaaaaggaaacctatttgtgcaccacggtaaagtaattaaaggagatatcaataaaggtacaggcgcacatttgtcaattaattctgctagaagaagctcatgtaagacttatcattctgcgacacatattttacatcaagcattaagagaagttttgggagatcatgtgacccagaaaggttctttagtttcgtttgacaaattaagatttgattttagtcaccataaatctctttcagaaagtgagatatctaaaatagaacagattgcgaatacggttattgaggaaggatcagatgttgaaactcaaattatgacagcagatgatgcagtaaatgctggagcacttgctctatttggagagaatattctgatgaggtaa

SEQ ID NO: 306724 - DNA, 685 bp, Unknown
  Bacterial polypeptide expressing nucleotide sequence isolated from the Sargasso Sea
ggtagctatcgggcaccaataaagaggaatcataccgctacgcatttgctgcatgcggcattaaaagtcgttttgggcgatcaagtgcagcaagctggatctcttgtacacccggattatcttagatttgattttacctattttgaaaagatctcaaagaatcagattcgtaatattgaagatattgtaaatatgcaaatcctaataaatagtaatttagaagttttaactcaatcatacgatgaagcaatggcagatggtgttgtagctctatttggtgagaaatacggagaccaggtgagggttgtatcaactggtgaattttccagtgaattatgtggggggactcatgtaaataggacgggagacataggattatttaaaattactgaggagtcttctttggcctctggtgtgagacgtatagtggctgtgactgggcaaagatcggtacaggtatttcaagataaatcagaaatattatctgaattacagcagcaattaaactgcaaagagagtgaacttttccatagaataacacagttgtacaatgataaaaaagaattagagaaaaaaataaaggagctttcacagtccagtgaatctgatattgaatcatggatcaacaaaggcaaaaaaatagggtcatatagtttagttgttaagcatctagacatatcctgat

SEQ ID NO: 306725 - DNA, 649 bp, Unknown
  Bacterial polypeptide expressing nucleotide sequence isolated from the Sargasso Sea
catggttaattcgaatgaagttagaaataaattccttggctattttcaggataatgggcactcaataaacaaatctagcccacttgtaccacttaatgatccaacgttattattcacgaatgctggaatggttcaatttaaaaactgttttacaggtattgagtccccagacacaaagagggttgtaacctcacaaaaatgtgttcgagcgggtggaaagcacaatgatttagacaatgtagggtatactcataggcatcacactttttttgaaatgcttggtaatttttcctttggtgattacttcaaggaatatgcaataagtttcgcatgggaattaattacaaaagaatttgcaatcccaaaagataaattattagttacagtatttcatgaagacgaggaagcgtataaactttggaaaaaaattgcaggcctgagtgaaagtaaaataataaaaatagataccagcgataatttctggtcaatgggcgatacggggccatgcggtccatgttctgagatattttatgaccatggagatcatgttgagggtggtccgccaggaagcgcaaatgaagatggagatagatttgttgagatatggaatttagtattcatgcaatatgaacagctcaggaaaaagagc

SEQ ID NO: 306726 - DNA, 2560 bp, Unknown
  Bacterial polypeptide expressing nucleotide sequence isolated from the Sargasso Sea
aatgaagctaactgagataaggaaaaagtttctaaaatattttgaatcaaaaaaacatagagtcatagattcaagtgatcttgtgccccatggagatgacagtttgttgtttacaaatgctggtatggttcaatttaaagacacttttttaggtttagaaaagagaggatacagcgctgtttcatcccaaaaatgccttagagttggaggcaagcataatgatttagaaaatgttggttttactacacgtcatcaaacattttttgaaatgcttggaaactttagcttcggtgaatactttaaagaagaagcaatagtattagcgtgggaatttctgactgaagaacttaaattacaaaaagaaaaattatgggtgactgtccatcatacagataaagactccgaaaaaatttggctagacaagataggaattgaaaaaaataaattatcaaaacttggtgatgaagataatttttggtctatgggagatacaggtccatgtggtccttgttcagaaattttctatgattacggttcaagttatgaaggacttcctccaggagaaggggatactggagacagatttgttgaaatatggaatttagttttcatggaattcaatagagattcagctggagaattaagaccattacctaacaaatgtgtcgatacaggaatggggctagaaagactttgttcggtattacaaaatgtaggctctaattttgagatagatttattcaaatcttttaaaaatgacattagaaatttatttgataaccctaatgaacaatcacttaatgtcatagcagatcatcttcgagctgcattctttttaatttctgaacaagttaatccatcaaacgaagggaggggctatgttctaagaagattaataagaagagctattaggcatggctataaaatgggaaaggaaggaccatttttatatgaactgctagacaacctcaagacttcattagagaaggatttccctaaagaattcacaagttacaaatcaatacaaggaatactaaaggaagaagaggaattattttttaagacactatcctcaggaattaagatttttgaagaaaatttaccaaagaaaaaatcagaaatgatgagcggtgagattgcttttaaattacatgatacatatggatttcctatcgatctgacaattactatggcttctgaaagaggcatagcagtcaacgaaaaaacttttgaagatctaatgaaaaaacagaaagaaggatctaaaaaaagctctatgtttaatgttaaagatattgttatagagccaagcatgagttctgaatttgttggttatgaacaaaatagaattgatggagactgtgtcgctttatttgatgaaaaaggtaatgaagcaaaaacgcttaatgattcaggatatgcttttttcagtaaaactccattttatgcagagtcaggcggacaaattggagatcaagggtcaatttcgaatgatgctttagaaatttttgtatcagattgtaaaaaagttggcgacttcaatatgcatgaaataaaaattcagaaaggggagataaagttaggcgataaggtatctctttcaataaatgaagaaagaagaaaaaagattgtaagcaatcactcggcgacacatctattacattctgcattaagagaggttcttggagagggagtgcaacaaaaaggatcattagttaatgatgaaaaactaagatttgatttttctcatggccaaaagctaactcctgaacagattgaacaagtcgaagatctcgtgaacatgcaaatagaagattcaattgatacaaaaatagaagtgaaatcttttgatgacgcaattaaggatggcgcactagccttttttggagataaatatggagataaagtaagagtattaactattgcaggcgatttttcagtagaattatgtggaggaacccatgtaaataacacatctgagattgaagggtttatcatatctaatgagacatcagtgtctgcaggtgtaagaagggttgaagctatgacaggttcaaatttagttaaaaaatctaaagaagcaattcaaactttaaaagaattatcagaaattctaaatgtcccctctgatagtcttgttggaagaatctcagaagtaataaaagaaaataaatctttaaagtcaaaaaagaaaactgagaaaagtttaagtgcagagataatccatgaagctaagctaggctctaagggtggagaaggtatagtcgttttttataaaaatgcttcaattgaaatgttaagaagattttcagatcaagctaaagaccaagttggagctttttcaatctttatgactgatgatggagagaaagtctcttatatagtcacatcaaaagcagatgataattttagctctaaagacttaattgaattagtaaattctgcgtttgacggtagtggtggcggtcgtaatgattttgcgcaaggtggaagccaagataattccaatatttcagacaaatttgaaaatttaaaatcaaaactggaagatttaatttaa

SEQ ID NO: 306727 - DNA, 400 bp, Unknown
  Bacterial polypeptide expressing nucleotide sequence isolated from the Sargasso Sea
atgaaaaccagtgaaatcagacaatcttttcttaacttttttgattcaaaagatcataaagtggtaccttctagctctctagttccaaacaatgacgaaacgttattatttacaaatgctggcatggttcaatttaaagacatatttcttggaacagaaacaaaaaactatagtagagcgactacttcgcaaagatgtattagagctggtggcaagcacaatgatttagagaatgttggttacacgttgagacaccatacattttttgagatgcttggtaattttagtttcggtgattattttaaagaggatgcaatcaaatatgcttgggaattcttaacagaggttttaaagctagataaggataaactctggataacagtttataaagatgatgatg

SEQ ID NO: 306728 - DNA, 844 bp, Unknown
  Bacterial polypeptide expressing nucleotide sequence isolated from the Sargasso Sea
catgactaccgcacaaattaggcaacagtttttagacttttttgccagcaagcaacaccaagttgttccttcaagctcgcttattccgggtaacgatgccacgttattgtttaacaatgccggtatggtgcaattcaaagatgtatttttaggcgcagaatctcgcccatatacacgtgcaacaagctcgcagcgttgtgttcgtgcaggtggtaaacataacgatttagaaaacgtgggttacacggcgcgccaccacacattttttgaaatgttaggtaacttcagttttggtgactactttaagcaagaagcaattaagtttgcgtgggagtttttaactgaggttgttaaattacctcaggaaaaactgcttgttactatttaccacgatgatgaagaagcgtttgagtactggtcaaaagatattggcttaagtgaagatcgcattattcgtattgctacctctgataacttttggtctatgggtgatacaggcccgtgtggtccatgttctgaaatattttatgatcacggtgagcatatttggggtgggcctccaggctctccagaggaagacggcgaccgttttatcgaaatttggaacctcgtatttatgcagtacaaccgtcaaagcgacggtactatgctgccattacctaagcaatctgttgatacgggcatgggccttgagcgtatttctgctattttgcagggcgtgcattcaaactacgaaatcgatttattccaaggcttaattgcagcggcggcgagtgtcactaacgcgcaagatatggacgataagtcgcttcgcgtagtagcggatcatattcgctcatgtgcg

SEQ ID NO: 306729 - DNA, 1213 bp, Unknown
  Bacterial polypeptide expressing nucleotide sequence isolated from the Sargasso Sea
aaagaaattattaacaattcaatagatctaactaaggctgatgacaataagttaatttcaagtcacagagtgatagctgaccatctacgttcttcatgtttcttaatagctgatggcgtattaccttctaatgagggaagaggctatgtgctgagaagaatcatgagaagagcgatgcggcatgttcatctgcttcaatacaaagatactttaatgcatcaattggtcccaaccttaatgctcaacatgaaggacgcttatccagaactgttaagggcagaagtattaatcaaagagacattaaagtatgaagaggaaaaatttaaaaatcttttagaaaaaggtattacgcaattagactctatatctcaaaatcttggacctaatgaaacttttccaggagagtctgcttttaagctctatgatacttatgggtttccaattgatctaacccaggacatattaaaaagtaaaaatatttctatagatattgaaagttttaatgaaaaacttgaggagcaaagagaattagcaagaaaaaattggtcaggtgcaggaggagctacaacagataggatttggtttgaattaaataacgaattatcagcaacagaatttcttggatataccaatacagaaacgcaaggagaagttttgtcaataatcaaaaatgatcaaaaggtgaataagttagaagacaacgaaacgggagcactcatattaaatcaaaccgttttttatgcagaatcaggtgggcaaatcggggatacaggaatagtaaaaggagaaaattttgagttcaaagttgaagatactcaaaaaagaggacaagtaattattcatataggcgtcatgattagaggaaaaatagaaattggtcacaatgcattgttatcagttgatcaaaaacaaagaaataattgccgggcatatcattcagctacgcatattttgcaccaatctctgagagataggttgggggagcatgttacgcagaaaggatctttagtttcaaatgacaaattaaggtttgattttagccatcataaatcaatgacaaatctagaaattgaagatgttcaaaataaagtaaatgaaattatcaagaatggttctgaggtagaaatacaaataatgtccccggatgatgctgtaaaggctggtgctctcgccctctttggagaaaagtattctgatgaagtaagggttctca

SEQ ID NO: 306730 - DNA, 1054 bp, Unknown
  Bacterial polypeptide expressing nucleotide sequence isolated from the Sargasso Sea
aagcggctctattaagcttaaagataatgtcgaaatgaaaataaatgaaggtagaagaaatgatacaagagcttatcattctgccactcatttacttcatgaatcattaagaagagttttaggcacccatgtaacacaaaaaggttctttagtagaacctagcagactaaggtttgattttagtcacatgaagccaatttctaatgaagaaattgaaaaaattgaagtatttgtaaattcaatggtcacaaaaaaaacagatgtaagaacaagactaatgacaccggatgaggcagtcgaaaaaggagctttggctctttttggtgaaaaatatggagaagaagtgagagttctctcaatgggagatgacgatggaaagtatttttctactgaattatgtggaggaacacatgttaaaaacactggagatattggtaaatttaaaattgtaagtcaatcctcaattgcagcaggtgttagaagagtagaagctttaagagataagcaattagaggattttttgaaaaataaagaaaaattatcaaatttgtcctcagaaaaaaatgatgaaacaattaatgatttaactaaaaaaattatgaatttaggcggcaaaccttctttggaccaatcagatcaaaaattattgattaaaaacttaactaaacaattggatactttatctgttaaatcaatattaaaagataaaacaaaaaatagaattaaagatgaggaaataaaaggaattaaagtaagatttcaaaatgttgaagatcttcctcctaaagaattaagaaaacttgttgatgatggaaaaaaagaattagttgaaggaattgttgtagtctttgcaagtaaagatgataaagtaggtgttgctgtaggaataacaaataaattaactgaaaaatttgatgctgttgaatttgtaaaattaagctcggaaattattggtggtcaaggaggaggaggaagaaaagattttgctcaagctggaggccaagataaaaataagattaatgaagcttttgaaaaaattaaatctttaatttaa

SEQ ID NO: 306731 - DNA, 1458 bp, Unknown
  Bacterial polypeptide expressing nucleotide sequence isolated from the Sargasso Sea
attgaaaagagctgaagatttaataattaatacatttgtaaatgaagaaacaaaatttaaagaaactgtagaaaagggcttaaagcttttagaggaagttatttcattatcacctaaaaaaattgatggagaaattgcatttaaattatatgatacttatggttttcctttagatttaactcaagactacctaaaatcaaaaaaaattgaagttgatattgaatctttcaataagaaaatgaaagaacaaaaagatagagctagaaaaaattggaagggtacaggtgatcaagaagatcaaaaaaaatggtttcaaattactgaacatttaaattctactgaatttttaggttatgatcaaatagagtctgaaagtgaaattatttctttaattaaaaaagatagtgaaattgagaatctattagaagaagaagagggaattattattttaaatcaaactcctttttatgctgaaagtggtgggcaaataggggatagtggaaaaattatttttaataataatatttttgaagtatctgatacaacaaaattattcggatctttctatttacatcacggcaaggttaaaattggtaattttaataaaggcgataatgtaaatgctattattgatataaaaaaacgtgaattaataaaatgtaatcattcatctactcatttattacattcttctttgagacaaatattaggcaatcatgtttctcaaaaaggttcattagttaataacgaaaaacttagatttgattttagtcataatgaaccaataagcatagaagatattgttaaaattgaaaattatgtaaaaaaagaaattaaagcaaatacattagtagatacaaaaaccatagatcatcaaaaagcaattgatgaaggagcgatggctttatttggtgaaaaatatggtgatgaggttcgagtcatttcaatgggcactaaagaaaataataagatattttcaaaagaactttgtggtggtactcatgttaataaaacaggagatataattgattttaaaataattaatcaatcaagtgtagcttctggcataagaaggatagaagccttaagtaatattactgtagatcaatataaagaagaacaaataaagctaataaaacaaaaaaaagaagaaaatcaagtaaagataaaagaaattatagaagaaataaaaagatttgataaaaatttttcttataattatgataataatgaagacctatctgtttctataagagaattaagaaaagatttagatttaaaaaaacaaaatcaaaataaagaaaaaatatcacaaaatattgttaatgaaaaagttaatgatattgaatttatttatttgatagcagatgattatccacctaaattattaaaacaatttgttgatgatcaaaaaaataaatataaacaaaagtgtgtttctcttataatatctaaaaa

SEQ ID NO: 306732 - DNA, 1538 bp, Unknown
  Bacterial polypeptide expressing nucleotide sequence isolated from the Sargasso Sea
catgcacattcacttgggaagtaaatcgcctatttttcataaactttttaacgttttgttagaagaaatgaaaaaaagttatcctgaattaacttctgctaaagatttaattaccgaaactttaaaaaacgaggaggaaaaattttcttctcttcttgaaagaggaataaaaattcttgatgaaaatttatccaaagttaaaaacaatattctgcctggctcaatagcttttaaactttatgatacttatggttttcctgttgatttaactgctgatattttaaaaacaaaaaatataaaagtcgataatttatcatttgaaaaagaaatggaaaaaagtaaagctttagctagagctaattggaaaggttcaggagacaagtccgttgatgagagatggtttaagataagagaagaattggaatcaacagaatttttgggatatgagtttgataaagctgagggtgttgttttaaaattgtttaaaaataacaaatttgttgagagcgctagcgccggtgataaaattgatattattacaaatcaaacacccttttacggcgagtctggaggacaggttggagatcaaggtgtaatttatacatctgaatgcgaaataaatattaaagatacgcagaaaaaaatgggagatctttttgttcactctggagaaattagaaaaggaaaaattaaagtaggacaaagcgttaatttagaaatcgatgttgaaaaaagaaataattcaagagcaaatcactctgccactcacttactacatgagtcccttagaagaacactcggaaaacatgttacccaaaaaggttctttagtttcacccgatagattgagatttgatttcagtcacaacaaaccgatcgaagatcaagaaatgtcaaaaataaatgaagcagttaataatatagtaaaaggcagcagtgaggttcaaacaagaataatgacacctaaagaagcagtaaaaatgggggctttagctttatttggcgaaaaatatggagaagaagtaagagtcgtatttatggggaaagaaaataataattttttctcaacagaattatgtggcggcactcatgtcaaaaacacaaaggaaataggaaagtttaaagttgtaagacaatcctctattgcttcaggagttagaagagtggaggctttaagggataaacaacttgaagaatttgaaaattataaatatggagaaaaaaaagaaaaatcaaaggaagcttttgaaacaataaaattaataatgggtaaactaaaagacctgggtgagaaaccaaaactttctgaaaaagatataaatcttgaggaaaatttaacaccaaaaataaaaattttaacagaacaacttaataatgcacaagttaagtttattttgaatgacgcaaaaatgaataaaattaaagatattaagattaaagattttattttacgctaccaagtattggatggattagataccaaggaattgagaaatgtaatagatttaggaaaaaaggaaataaaaaaaggaattgttt

SEQ ID NO: 306733 - DNA, 708 bp, Unknown
  Bacterial polypeptide expressing nucleotide sequence isolated from the Sargasso Sea
catggcccctgccaccgctcgtccccgccgtggtgctgacatccgcgcagcgtttctggatttctacgaatcgcggggccataagcctgtcgccagtgcctcgctgattcctgaggaccccacggtgctgctcaccatcgctgggatgttgccgttcaaaccagtttttctcggtcagcaggagcgtccagcgccacgggcgaccagcagccaaaaatgcattcgcaccaatgacatcgagaacgtcggccgcaccgctcggcatcacacgtttttcgagatgcttggcaatttctcgtttggtgattacttcaaacagcaggccattgagtgggcttgggagctgagcaccggcgtctttgggctagatcccaagaacttggtggtgagtgtcttccgcgaagacgacgaagccgaggtgatttggcgtgatgtggtgggtgtgaatccgaagcgcatcatccgcatggatgaggccgataacttctgggcttcaggtcctactggtccctgcggtccctgctcagagatctattacgacttcaagcctgaactgggtgatgacggcatcgatcttgaggacgacagccgattcatcgagttctacaacttggtgttcatgcaatacagccgtgatgcggaaggcacgctcacgccactggccaacaagaacatcgacaccggtttgggcctgagcgaatggctcag

SEQ ID NO: 306734 - DNA, 313 bp, Unknown
  Bacterial polypeptide expressing nucleotide sequence isolated from the Sargasso Sea
atgagtatcagagacaattatttaaactattttaaaaagaataatcatgaaatagttaaatcaagctcattaattccagcttcagacaaaacccttttgttcactaattcaggaatggtccaattcaaagatatttttttaggaattaaacaatctaaatctaacagaatcgttacttgtcaaaaatgtgttagagctggcggcaaacataatgatttagataatattggttatacaaacaggcatcactcattttttgagatgttaggtaattttagttttggagattatttcaaagaagaagcaatattat

SEQ ID NO: 306735 - DNA, 1069 bp, Unknown
  Bacterial polypeptide expressing nucleotide sequence isolated from the Sargasso Sea
tacggtaaagttatatcaggtagaattaaggtcaaagacaatgtagagatgaaaattgatgttgaaagacgtaataatattagagcatatcattcagcaacccatcttttacacgagtctttaagaagagtattaggaacacatgttactcaaaaagggtctttagtagctcctgatagattaaggtttgatttcagtcatatgaagccaatttctgaacaagaaatagaaaaaattgagagtcatgtaaattctatggttgaaaaaaagtctgatgtaaaaacaaggatcatgactcctaaagaagcagttgataatggggctcttgcactttttggagaaaaatatggagaagaggtaagagttttatctatgggagatgagaaagaaaattatttttccacagaactttgcggaggcacacatgtaagaaatactggtgatataggaaaatttaaaattattagccaatcttcaattgcagcaggtgtaagaagagttgaggctctgagagaaaatcaattaaatgagtttttaaaaaatagagaaaaattatctgatttatcagcacaaaaagatgaagaaatgattaatgatttatcaaaacaaataattaatttgggtggtaagccaaatttagaaaatgaagacaataaaagtttgattaaagagttatcaaaacaacttgagcttttaaaatttcaatcaattttaaaggataattctaaaaataaaactcatgaagataaaattaataatataaacttgagatttcaaaaagttgaggatcttcctccaaaagaacttagaaaattagttgatgcaggaaaaaaagacctaaaaagtggtatagttatagtttttaccagttttgaaaataaagtgggactagcagttggagttactgaagagcttattgaaaaatacgatgcagttaaatttgcaaaaataggttctgagattattggtggcaaaggtggtggtggaagaaaagattttgctcaagctggcggacaatttaaagataaaattgatgaagcttttgaaaaaattaaatctttaatttagt

SEQ ID NO: 306736 - DNA, 1600 bp, Unknown
  Bacterial polypeptide expressing nucleotide sequence isolated from the Sargasso Sea
tttttgcacttattggtcaaagatcttattagcttaatgaaacaggcataccctgaacttgaggataactatgaaaatatagttaagattattaaaaacgaagagacaaaattttttgaaaccttacacaatggtattgagattttagaggagaccatctcaacaatgcagaacaatactattgcaggcgagattgtattcaaattacatgatacatatggatttccttttgatttaactgctgatattgctcgagaaaaacaattattaattgatgaagatggctttaataaatgtatgaaacaacaacaagaatcttctaagtcatctagtcatttcgtttcatctcttcctgctgcatctggtgttgaggagactaaattcttaggttatgaccagcttgagtctgagtctgaaattcttgcaatatgggatggacaagagagggttgagaatgctctgaaaggacaggaaatattcttagcatgcaatcaaacaccattttatgcagaatctggtggtcaaatcggagataagggaaagtttgcatctgacaatgctactggtaatattttagattgtagaaaacaaggtaaagtatttatccacaaagttgtcatagacagtggagaaattaaaaaaggcgatctaattgaaatgagcgtagaaaaagaaaaaagaatagctatagcaattcatcattctagtacacatttgttacatgctgccttacgagaagttttaggtgatcatgttcaacaaaaaggatctttagtcgatgagactaagttacgttttgatttttctcatgacaagcctttaactcaggatgaaattgcaacaatagaaaaaattgttaaccaagaggctttaaacaatcttgaagtaaaaactgaattaatgaagctcgatgatgcaatgaaatcaggggcaatggcactttttggtgaaaaatatgacgatgatgtaagagttcttacaatgggagagaactcgtattcagttgagttatgtggaggtacccatgtttccagaactggcgatataggattctttactatcacatcccaatccagtgtagcttctggtataagaagagttgaagctattgctggtatgcaggcattaaactatataaaaaaattaaaagaagttaattcctcaattcaaaaccttttgaatgtttctacagacgatatacacgataaaataaaatcattaattgatgaaaacaaggctttaaaaagcaagggaactcaaagctcaaaaagagaaatagtcttttcagaaagcattgaaatcaatgattggaaactggttattcagcaagtgcaattagatgacaccaaagatttaaggttgctagcagatgagcaaaaaaatacaaacgaaaaagtatgtgttgttattttttcagaacaaaataataaggttgcgcttgtttgtggagttactaaaaatcttacagataccttatctgcaaaagatgtagtttctgttatatctaaaaaaattggtggaaagggaggaggtaggcctgactttgctcaaggagcaggcgagtctaaaaatataaaagatttcgtgacatctatacgag

SEQ ID NO: 306737 - DNA, 1674 bp, Unknown
  Bacterial polypeptide expressing nucleotide sequence isolated from the Sargasso Sea
tcactctctacctgcgccctgtgttgacacgggggccggactcgagcggattgccgcggtacttcagggtgcagattctaactatcacacggatgcctttattccgctcctggaccgtgtagcccaactggtcggtgaggcgtatgacccaacttccgaagctggtgttagctatcgcgtattagctgatcatgctcgcgcggtcgctttcctactctcagatggtgtacatccttccaatgagggtcggggatatgtactaaggcggattttgcgtagaggagtccgtcatgcttggcttctgggccgccgggaacctacgctctctggggtggtggaggtagttatagagacaatgagtgatgcctatcccgctctagccgagaggagagagcatattttggaggcagcgcgggccgaggaagaacgctttctctcgactatagaaggtgggctagcccgatttgacgagctagctgcctccgaaggtggagtgatctcaggtgatgaggcattcaaactctatgacacgttcgggtttccactagacctcacacagctcctggccgaagagagagaggttgatgttgacgtggcggggtttgaggcggcgcttgaaacacagcgtgcccgttcaagggcagatcgtgttgcaagtgggatcgagattggaggacttaacgactcggagggatggataccggtcaaggatggatcccagaattttgtggggtacacatcgcttgaagtcgagaccacagtgctgaaatggaagacgatggagtgtggtgtcggggtgatccttgaggagaatccattttacgtcgaaagtggagggcaggtttcagacacgggggttgtccgcggcaacaactggagtgtaacggttgatcgggtcgcgaagaccccccttggtactgctctatttggacaagtcgatgggatatttccagaggaggcagacgacctccgggtaacggctttcgtggcgactgatgtgagatttgacacgacccggaatcacactgcgactcatctattgcacgcggcgcttcggtctcttctgggtggacatgtggtccagaagggctctctcgttgctccggatcggctacgttttgactttgctcataccgcgccgatgacagagagagaaaaaggagaagtggagcgcttcgtaaacgaggccgtctggaaaaatcaccctgtcgagattgcagagcggcgatacgatgatgctgtcagggatggcgccatggccttgttcggagaaaagtatgcagacgaggtacgagtcgtggatgtgccaggcataagcatggagctatgcggcggtgcgcatgtctcccacacgggtgatataggacttttcaggattattagtgaatccggggttgcttctggcgtgaggcggatcgaagcactaacgggtaggggtgctttttcctacttccaggagcgtgaggctactctgggagagaccgcgtcagtgcttaaaacgcggccagataatgtggtgaagcgagtagagcagctacttgccgacaaggctgcggtggaaggtcttctggatgaagcccgagctcatggtagcagtggagaggatgtaattgctgaagaggtgatagaaactcctgacggcggcaatgtggtgtatagagggatccgattgcg

SEQ ID NO: 306738 - DNA, 2665 bp, Unknown
  Bacterial polypeptide expressing nucleotide sequence isolated from the Sargasso Sea
tatggctaaaacattaaatgaaataaggtcagcatttttggattattttgaaaaaaatgatcacaaaatagttgaatctagcaatttagtcccgaataatgacccaactctgatgtttgctaattcaggaatggtccaatttaaaaatgtgtttactggacttgaaaagagagactatcaaagagctacaacatctcaaaaatgtgtaagagcaggtggtaagcataacgatcttgaaaatgttggctatacaccaagacaccatacattttttgaaatgctgggaaacttttcctttggtgattattttaaagaaagagcaattgaacttgcatggaatttaataacaaaagaatttggtttagacaagaacagactttatgtaactgtctaccatgacgatgatgaagcttttaattattggaaaaaaattgctgggttaagtgaagataaaatcatcaggatagcaacatctgataatttttggtctatgggtgaaacgggaccttgtggaccttgttcagagatattttatgatcatggagaccatcttgaaggtggattgcctggaacaaaaaatgaagacggagatagatttattgaaatttggaatttagtatttatgcagtatgagcaaatttcaaaagataaacgaattaatctgccgaaaccatcagttgatactggaatgggattagaaagaattgctgcattacttcaaggaacacacgataactatgaaacagatcattttaaaaaaataattaatgctgctgcagaaattttaaaagttaaaccaaataaagaaaatttagcaagttttagagtaatagcagatcacctaagagcaagttcatttctaattgcagaaggagttttgccatcaaacgagggaagaggttatgtcttaagaagaataatgagaagaggaatgaggcattctcatttgcttggttctaaagaaccaattttttataatattttcaaaacactcaaagatgaaatgaagggaaattactctgaaatagaaagagctgaatctctaataaaagaaacattaagaatggaggaagaaaaatttttagttcttttagatagaggtattaaaatattaaatgatgaaataactaaaatagataaaatattaccaggagaagtagcctttaaactctatgatacttacggctttccattagacctgacacaagacatattaaaaaataaatcattaacaatagataacgacaaatttcaaagattaatgaaagaaagcaaagagcttgctaagaaaaactggaaaggctctggtgatagtgctgtagatgatatctggttttcgataaaagatagattgggcccttcagaatttctaggctatgagacagatcaagcagaaggcattgttttatcattattaaaagataataaagaggtaaatgcactaagtgaaaatgatgagggtatgattattttaaatcaaactcctttttatggtgagtcaggaggacaggtaggagatacaggtcaaataatatctggagattttatatttgagataacagatgtacaaaaaaaattaggtgatctatttgtgcattatggaaaagtcaaatcaggaggtataaaaattaaagataacgttgagatgaaaattgatatagatagacgtaataatattagagcatatcattctgcaactcatcttttacatgaatctttaagaagagtattgggaactcatgtaacacaaaaaggttcattagttgcaccggacagattaagatttgattttagtcatatgaagccgatttcagatcaagaaattgaaaaaatagaaagtcatgtaaattctatggttcaaaaaaaatcagaagttaaaacgaggatcatgacacctaaagaggcagttgataatggagcgcttgcactcttcggagaaaaatatggagaagaagttagagtattatctatgggagatgagaaagaaaagtatttttctactgaattatgtggtggtacacacgtaagaaatacaggagacattggaaaatttaaaattattagccaatcttcaattgcagctggtgttagaagagttgaagctcttagagaaaatcaattaaatatttttttacaaaaaaaagaaaaattatctgatttatcaaatcagaaagatgaagaaatgattaatgatttatcaaaacaaataattaaattgggtggtaagccaaatttagataatgaagataataagattttaatcaaagagttatcaaaacaattagagcaactaaaatttagttcaattttggataataattcaaaaaacataattcatgatgataaaattaataatataaatgtaagatttcaaaaagttgaagatcttccgcctaaagaactaagaaaactagttgataccggcaaaagagatctaaaaagtggaataataatagtttttgctagtttagatgacaaagtaggtattgcagtcggaattacagatgaactttcagataagtatgatgctgttaaatttgcaaaaacaggctctgaagttattggtggcaaaggtggtggtggtagaaaagattttgcacaagcgggtggtcaattcaaagataaaattgatgaggctttcgaagaaattaagtctttaatttaa

SEQ ID NO: 306739 - DNA, 2557 bp, Unknown
  Bacterial polypeptide expressing nucleotide sequence isolated from the Sargasso Sea
gatgaaaagttcacaaattagagaatcgtttattagcttttttgaaagcaaaagtcactctcgagtccagagtgctccagttcttccaattggagataagtctttgctttttacaaatgctggtatgaatcagtttaaagctatttttttaaactcggaaaaacctaaaaacctgagagtcgtaaatagtcaaaaatgtattagggttagtggaaagcacaatgacttggaagaggttggtagagatggatttcaccatacattttttgagatgcttggtaattggtctttcggtgattattataaaaaagaagctattaaatggtcttgggagttatttacagaagtttggaatcttgacaaatctagattatgggtaactgtttttgaagaagacgatgaagcttttgatttatggaaaaatcaaacagatatagatccaaatcgaatcattcgttctggcgctaaagataatttttgggaaatggctgaaacaggaccttgtggaccatgctctgaaattcattactatgttggggatactccagaggatcaaaaatccgaaatggtcaataattcttcagaatattgggaattatggaatcttgtattcattcaatttaatcgtctcaaagatggaacaatggaagatttaccaaaaaaacatgtagatactggtgcaggacttgaaagaatttgttcagtattacaaaacaaagattcaaattataagaccgatttgtttgcaaaaacgattgaagatttagaaaatttttcgaacacaaaatatcaagattttgaggttccatataatgttatttgtgatcacataagaatgctgtcatttgcaattgctgatggagttattccgtcaaatgatggtagaggttatgtagttagaagagttttgagaagaggatcaaaatttgctatgaatttagaaattaaagaacctattttattcaagttagttgattcagtagtttcaacaatgtcttctcattatccagaacttaaagagaaacaaaaatacattgagcaaactatactttccgaagagcaatcatttttaagaaccctagaaaatggagttgttcaatttgaaaaaattgtgggcagcacatctggatctcaaataaatgggaaagatgcatttaagctttatgatacttttggttttccacttgatttaactcagctcatggctgaagaaagagagatgacagttgatgttgatggctttgatattgaaatgaaaaagcaaaaagagttagctaaaactggtcaaaaatttgaaatggataatgttgatttaaaatggaatttagaaactaatagtagtcattcgatttttgtaggatatgaaaatgaaagcatttcttcaaagataataaatcatgccgatagagaagatggattaattattgtattagaaaatactccattttattcagagtctggaggtcaaataggtgacacaggtataattaagaataatgatttttcagctaaggtaaatgatactcaaaaaaatggggattatattttacacatatgcaaattaacgagaggatctataggcaataatctttcagtagattgtattgtagactctgatagaagaaatagtataatggtgaatcatacagctacacacttacttcatcaatcattaaaagatgttttaggtagccatgttaatcaagcaggatctttagttcatcctgaatatttaaggtttgatattactcatccaaataaaatttcctcaacagaattagatgatatagaaataattgtaaatcagaaaattggtgaagatattacagttaaaacaagcattaaaagcttggaggaggctaaaaaagagggtgctactgctttatttggagagaaatatggcgataaagtcagagttgttacaatgggtgaatactctaaagaattatgtggtggaacccatgtttcaagtacaggtaaaataagtaaatttaaaattaagcacgataaagcaatttcttctggaattcgaagaattcatgctattactagcaatcatgttgatttgtatttgaaggaaaaattagatgaaataggattgctaaaagaagctgaacagaaaaaagaagaagaaaagcaaagtcaatcaattttacttaatagcgtggatattgattcaataattaaatatccaataatggattttgatggaattgagttactgtttagcaaagttgagcttggagttgcttcagatttaaagattctaagcaaaaaaattaaaaataaaacagattcagcaataatatttttgtttactgaaattgacaaaaaaataacaatttcagttgcaattactgatgatctcattgccaaatctttccatgcaggagaattagttaaatttcttgcttctgaactcaaaggtcgaggtgggggaaaagaagatttcgcaatggctgggataccttacatccatccagaagaaattaatcttgttgcttggcaacttgttaaaagatttttagaaaaaaagcatgaggattcgtttaaatga

SEQ ID NO: 306740 - DNA, 2662 bp, Unknown
  Bacterial polypeptide expressing nucleotide sequence isolated from the Sargasso Sea
atgaaatttcaaactaaaaacactccaattacaggtgatgaaataagaaaagaatttttaaatttttaccatgaaaaattacataaaattattccaagtgcatctttaattcctgatgatcctacagttatgctcactatcgctggaatgctgccttttaagccagtttttttaggattgcaagaaaggccatcaaaaagagccacatctagtcaaaagtgtataagaacaaacgatattgaaaatgttggagttacggctagacatcataccttctttgagatgcttggtaatttttcttttggagattattttaagaaagaggctattgagtgggcttgggaattagttactgatatttacggactttctgctgagaatataatagtgagcgtgtttcatgaagatgatgaatcggtaaagatttggaaagaagatatcgggattcatccacaaaggataattaagcttggagaaaaagataatttctggtcttcagggaaaacaggtccttgcggaccatgttcagaattatattttgactttaaaccagaaaaaggtcttcagaatattgatttagaagatggtgatcgttttatagaattttataatcttgtatttatgcaatataaccgtgaccctgatggtcaattgacagatttgaaatacaaaaatattgatactggaatggggcttgaaagaatggctcaaatattgcaaaagaagaagaataattacgaaacagatttgatttttccaattattcaaaaagcttctgagatatccaaaattgattattattcttcagatgaaagaaccaaaatctctttaaaaattattggagatcatataagagcagttatacatttaatttctgatggggtagtagcaagtaatcttggaaggggatacatattaagaagactgattcgaagaatggttagacatggaaggttgttaggcttaaaaaatgaatttttatcgaaacttgcaagtgtaggtattaaattaatgcaagagaattatccagatttaaaaaataattatgactatatattgagtgagataaaaattgaagaaataagatttagagaaactcttgatagaggtgagaaattattagatgaattgatttcatcgggtcagaaaatgattactgggtttaaagcatttgaactttatgatacttatggctttccactagaacttacagaagaaattgctcaagaaaacaatattggtgttgatgttaagggttttgaaaaagaaatgtctgcacaaaaagaaagagccaaagctgcttctcagatcattgatttgacattggagggttcattagaacgcgaaatagacttatttgataagactttttttaatggttatgattcacttgattcagatgcagaaattaagggtatattttttgaatcaaccttggttaagcaagcaagtgaaggacagaaagttttaattgtccttgatcagacttctttctatggagaatctggaggtcaagttggtgatattggaaagatattctcgaatgatctagaagttttagttgataacgtcatacgcaagaaaaacgtttttctgcattatggaatagttaaaaaaggaattttaagtctgggacaaaaagttaaaactaaagtaaatgatttggctagagctaaggctgcggcaaatcatactgctactcatttactacaatctgctctcaaagtagttgttaatgaaagcgttggacaaaaaggctcattagtcgcatttaataaattacgatttgatttcaattcttctcaacctattacaaaagatcaaatttttaaagttgagactttagttaattcttggattttggaaaatcattctcttgatattaaaaacatggccaagagtgaggctctagagagaggtgcagtggctatgtctggagagaaatatgatgatgaagtaagagttgttgatgtgccaagtgtttcgatggaactatgcggtggtactcatgtaaaaacaacatctgaattaggttgttttaaaataattagtgaagaaggaatttcagcgggcgtaagaagaatcgaagcattgtcagggcaatcagcctttgaatactttagtgataaaaattctctcgtatgtcaactaagtgatttgttaaaagcaaatcctaatcaactcctggatagggttaattctttgcaatcagagttggttaataaaaataaagaaatacaaaaaatgaaggatgaaattgcttattttaaatactcttcgctaagttcttctgcaaataaaattggattattttcgctgattattagtcaacttgatggactagatggaaattctctacaatctgcagcattagatttaacttctaaattgggagataagtcggttgtgattcttggaggaataccaaataaggaaaatagaaaattgttatttgttgtctcttttggggaagacttagttaaaagaggtatgcatgcagggaaattaattaatgatatttcacgtatttgctctgggggagggggaggtaaacctaattttgcacaggcgggtgctaaagatattgataaattaaatgatgctttggaatatgcaagaaaagatttgagggcaaaactccttagttattctgacaagtaac

SEQ ID NO: 306741 - DNA, 1469 bp, Unknown
  Bacterial polypeptide expressing nucleotide sequence isolated from the Sargasso Sea
gaactacaagttttctaaaattctagatcgaggatatgactatctcatgcaactgatcgaacaaggtataaacaacggtattatacctggagaagaaatattcaaactacatgacacatatggatttccaattgaagtcaccaaagaagttgctgaagaaaatggtgttaatcttgataccgataattttgaacaattaatggaaggtcaaaaaacaaaggctaggtcaagtgctgattttactggagatattgaagcaaataagatatatagctctataaattctgaatcttcatttatcggttacgagaaaattgagggtaattccaaaataatcgcaattatctctaatggtaaacaaattgagaaacttgaatctaaagaaaatggagaaataattctttcttctacacccttctatgccgaagctggaggtcaactcggcgataaaggatatatacaaactaaaacaggtacatttgttgttgaagatacacaatcaccaatacccggaataatttcgcacaaaggctacgttgctaatggaacaatatttacaactgaagatagttcagcaaatgtagatagtatttatcgacaaggaacttcaagaaatcacacagcaactcacatattacatagcagccttagagaaatattaggtacacatgtgagacaggcaggatccagtgtaggtaatgatcgcttaagatttgattttactcacattggtagcatgtcattagaagaaataaaggctgtagaaaaccttgcaaatacacaagtaagaaataatcattctatttcaacaaatataacaacatatagagaagcagtcactaacggagctctagctttttttggggatcgttatggaagcgaagttagaatggttacaatagcaacaggagaaccatttagtgtagaggtttgtggaggaacgcatttagacaacaccggacaaatcggttatataaaaataatcaatgaaactaatattggttctggtatgcgaagaattgaagcgatatctggagaaacagcttctgaatactctataaatgatcaatttacacttgcacgtatagctcagattcttgaaacaaatataactacaattgaatccaggcttgattccttattacaggaaaataaaaaccttaaatcaagtttgaattcttatcaacaaacacaatttgtaaatcaagccaaagaattatcttcaaaaatgaaaattatcgataatatcgaaattattactagtatggtaaatgcttttaccccacaagatataaaaaatattgcagatctacttagggataatattaaatctggaattattaatttaggagctataattgataataaacctcataccttacttataataacggatgacttggtagaaaaaggagccattgcagttgcagcaattaaagaatcttcaaaattcttacaaggaggaggcg

SEQ ID NO: 306742 - DNA, 1418 bp, Unknown
  Bacterial polypeptide expressing nucleotide sequence isolated from the Sargasso Sea
aatgaaaacaagtgaaattagaaaagcttttttagagttttttaataaaaaaaatcatcaagttgttccatcgagctcactcattccaagtaatgatgaaacattacttttcacaaatgctggtatggtccaattcaaagatattttcttggggactgaaactaagagttataaacgagcaactacttctcagcgttgtattagagcaggaggaaagcataacgatttagaaaatgtaggttatacgcttagacaccatacattctttgaaatgcttggtaattttagttttggtgattattttaaagaagatgctattaaatttgcttgggaatttttaaccgatgttcttaaattagataaagataagctctggataactgtatataaggatgatgatgaagctgaagaaatttggaaaaatgttattggaattgagtcaagcagaattgcaagacttggtgatgaagaaaacttttggtctatgggagatacaggaccatgtggaccatgctcagaaattttttatgatcatggtgatcatattgagggaacgcctcctgggacagatggtgacgaaggagacagatttattgagatatggaatcttgttttcatgcaatttaacagagatgaaaatggaaaaatggaggaacttccaaagccatcagttgatactggaatgggattagaaagaattgctgcagttcttcaaggagtaaattcaaattatgaaatagatgtttttaaagatttaatttcttcatctgaaaaattactaggaagccatgaaagtacgtctcataaagtaatagctgatcatattcgatcaagtgtttttttaattagcgatggaattattcctgaaaaagagggaagaggttatgttttaagaagaatcatgagaaggggcatcagacatgggtataagataggagcaagaaagccatttatgcatttgcttgtaaaggatttagtcaatttaatggattctgcgtatcccgaactaaataaaaaacaaaaagaaattattgaattgataaaaaatgaagaaattaaattctttgaaacccttgaaaccggcatagctattcttgatgaagccattttagagatgaacaataaagtcttatctggtgatcttgtttttaaacttcatgatacctatggattcccatttgatttaacagcagatattgcgagagaaaaaaatttagaaatagatgagaaaagatttaatgaatgtatggatcaacaaaaacaaagttcaaaagcatcaagtagttttgtttcatcacttccagcagcagccggagtcatggaaacaaatttcttaggatatgaagaacttgaatcggattcagaaattttagtaatttggaaagatcaaaatagaatagatatagcaaaaaacaatg

SEQ ID NO: 306743 - DNA, 1190 bp, Unknown
  Bacterial polypeptide expressing nucleotide sequence isolated from the Sargasso Sea
catgaattcaaatcagattaggtctacatttcttaattattttaaaaaaaatggacacgagattattcattcaagctctctagtaccagataatgatcctactctaatgtttgctaactctggaatggttcaatttaaaaatatttttacaggtaaagagacaagagattacaacagagcgactactgctcagaaatgtgtaagagcaggtggtaagcataatgatttagaaaatgtaggatatacgacaagacaccatactttttttgaaatgttaggtaatttctcttttggagattattttaaagagttggccatagaactagcttggaatctaattactaaagaatatgcaataaataaagatagactattagtaactgtttattctgatgatcaggaagcttttgatttatggaaaaaaatagctggattgtctgaaaataaaattattaaaataagtacttctgataatttttggtcaatgggtgaaactggtccttgcggtccatgttctgaaatattttatgatcatggtgataaatacgaaggaggccctccaggttctccaaacgaagatggtgatagatttatagaaatatggaatttagtatttatgcaatatgagcaaatatctaaatctgagagaataaatctaccaaaaccctccattgatactggaatgggattagagagaatgacagctcttctagatggttctaacgataattattcaacagatttatttcaaccgattataaatgaatcaacaaaactatgtggtgatgaaagttcaataacaaatcctagtcacagagtaattgcagatcacttaaaatcatcctcttttttaattgccgatggagtaatgccttcaaatgaaggtagaggatacgtcttacgaagaataatgagaaggggaatgcgacacgctcattctttaggtaataaagagcctatatttcataagctatttcctatttttttagatggaattaaaaattcatatcctgaattagatagagcaaaagatctcattactaatacattaatgaatgaagaaactaaattcaaggaaactgttgaaaaaggaattaaaattttagatgaggaaatttctaactcaacaaatatatttaatggagaagtagcatttaaattatacgacacctatggatttcccttagatt

SEQ ID NO: 306744 - DNA, 2359 bp, Unknown
  Bacterial polypeptide expressing nucleotide sequence isolated from the Sargasso Sea
aagcacaatgatttagagaatgttggttacacgttgagacaccatacattttttgaaatgcttggtaattttagtttcggtgattattttaaagaggatgcaatcaaatatgcttgggaattcttaacagaggttttaaaactagataaagataaactctggataacagtttataaagatgatgataaggctgaagaaatttggaaaagcaccattggggtggatgcaagcagaattgcaagacttggtgatgatgaaaatttttggtcgatgggtgatacagggccatgcggaccatgttcggaaatcttttttgatcatggagaccatattgaaggatctccaccaggagccgatggagacgagggagatagatttgtagaaatttggaatcttgtattcatgcagttcaataaggatgaagatgggaatatgacaccactacctaaaccttctgttgataccggaatgggtcttgaaagaatagccgctgtaatgcaaggcgtgaattcaaactatgaaaccgatgtgtttaaagacctaattcttgcttcagaaaaaattcttgctaacaaaaatagcacatcacataaagtaatagctgaccatataagatcaactgtttttctaatttctgatggagtcatccctgaaaatgatggaagaggctatgttttaagaagaattatgcgaagaggaattagacatggatataaaattggtgcaaaaaaaccgtttatgcatctgctagttaaagatttagttaaattaatgcgttcagcgtatccagaactaaaaacaaaagaaaaagatgttgctaaattaattaaagaagaagaaataaagttttttgaaactttagagaaaggaatagacatattagaagaaacaatatcaaacatgtccaacgagacaatatctggcgatgttgtatttaaactgcatgacacatacggattcccatttgatttaactgcagatattgcaagagaaagagacttattgattgatgaaaaaagatttaaagaacgaatgaatcagcaaaaagaaacatccaaagcatctagcagttttgtttcaacattacctgcagctgcaggagtaaaagaaactatattcttaggttatgaagacttagaatctgattcagaggttttggttatttggaaggatcaagaaagaattaaaaaagctaaaagtaaagaagaaatatttatagcatgtgaccagacaccattttatgctgaggctggaggacagattggagataaaggaatatttgcatctaagtcagctactggtactattttagattgtaagaaacaaggaaaagtatatatacataaagcaattgttgaaaaaggaaatattaaaacgggcgatgttataaaaatgagtgttgagaaagaaaaaaggtctgctattgctatccatcattcatcgacacaccttgtgcatgctgcacttagggaagttttaggtgatcatgtaaatcaaaaaggttctttggttgatgaaaataagttaaggttcgatttttcacataaaaaacctttgtctcaagaagaaatcacaaaaatagaagctattgtaaataaagaagctttaaataatttagaagttaagactgagcttatgaagcttgatgatgccctaaagtcgggagcaatggcactgtttggtgaaaaatatgatgatgatgtaagggttctatcaatgggtaataattcttattcagtagaattatgcggcggcactcatgttaagagaacaggagatataggattttttattattacgagtcaatcaagtgtagcttctggaataagaagaattgaagcggttgctggaatgaaatcaatagaacatataaataaaattcgagatatcaattcatctcttcagtctgtattaaacgtctcttcggaagatattcaagagaaaattaaatctttgatagaagaaaataaagaacttaaaaaaaaatcaggaaataaaaaatcaaaaaaatcagtagttttttctgagacttatgaaataaaagattggaagttgatagtagaacaggtagaggttgatgatacaaaggatcttagagccttggttgatgatcaaaaaaatacgaatgaaaaagtatgtatcgtaattttaaatatagttaaaaataaggttgcattagtgtgcggcgtcacaaaaaatttaaccgattcattatcagcaaaggatgttgtttcaactttgtcagatcaaattggtggcaaaggcgggggcagatctgattttgctcagggagcaggtgaaacagaaaatcttaaagttttcgtgacttctattgtagattcagtaaaatccctcgcaa

SEQ ID NO: 306745 - DNA, 310 bp, Unknown
  Bacterial polypeptide expressing nucleotide sequence isolated from the Sargasso Sea
tatggcaaaaaccttaaacgaaataagaactgcatttcttaaatattttgagaaaaatgatcataagattgttgagtctagcaatttagttcctaacaatgatccaacattgatgtttgctaattcaggcatggttcaatttaaaaatgtatttaccggattagaaaaaagagaataccaaagagcaacaacatctcaaaaatgtgtaagagctggaggtaaacataacgacttagaaaacgttggttacacacctagacatcatactttctttgaaatgctaggaaatttttcatttggtgattactta

SEQ ID NO: 306746 - DNA, 1324 bp, Unknown
  Bacterial polypeptide expressing nucleotide sequence isolated from the Sargasso Sea
atggctgacaaaacattaaatgaaataagaagtacttttctcaagtattttgagaaaaatgaccacaagattgttgagtcaagcaacctagttcccaataatgacccaacattaatgtttgcgaattcaggaatggttcaatttaaaaatgtttttaccgggttagaaaaaagagattataaaacagcaacaacatctcaaaaatgtgtaagagctggaggtaaacacaacgatcttgaaaacgttggttatacacctaggcaccatacattttttgaaatgcttgggaatttttcatttggagattattttaaagaaagagcgattgaattagcatggaacttaataacaaaagattttggattagataaaaataggctctatttcacagtttttaatgaagatgaagaagctcttaagttatggaaaaaaataactggttttggagaagatagaataattaaaatcccaacttctgataacttttggtctatgggcgaaactggaccttgtggtccatgctctgaaattttctttgatcacggagatcatttaaaaggaggtttgccaggtacaaaagatcaggatggagacagatatatagaaatctggaatttagtattcatgcaatttgaacaaatctcaaaagataaaagaataaatttaccaaagccatctgtagatacaggaatgggtcttgagaggattactgctttattgcaagggactcatgataattataaaactgatcattttgaaaaattaattaaatctatttcggatgctgtcaaaacaaaacccaatgataaaaatatttctagtttccgagttatagcagatcatcttagagcaagttcatttttgattgccgaaggtgttctgccatctaatgaaggcagaggttatgttcttagaagaataatgagaagaggaatgaggcactctcacttattaggctcaaagaaaccaatttttttcaatatatttaaaacattgatggaagaaatgacaggaaattatcctgaacttaaaagagctgaagcattaatcaaagaaacattaaaaatggaagaagaaaagtttttagttcttctagaccggggaatgaaaatattaaatgaacaaataacaaaaattgataaaattttgccaggcgatgttgctttcaaactttacgatacatatggttttcctttagatcttactgaggatattttaaaaaataaatcattgaaaattgataataaaaaattcaatgaacttatgaaacaaagtcgagagcttgctaagaaaattggaaaggctcaggagacagtgcagtaga

SEQ ID NO: 306747 - DNA, 1162 bp, Unknown
  Bacterial polypeptide expressing nucleotide sequence isolated from the Sargasso Sea
atgaaaactaatgaaataagacaagcttttctagatttttttgagggaaatgatcatcaaatgtttccatctagttcactggttccagttaatgataagaccttactttttaccaatgccggtatggttcaatttaaggacatttttcttggacaagaaccaaagaagtttgatagggcaacaagctcacaaaaatgtattcgagcaggtggcaaacataatgatcttgaaaatgttggttacacattaaggcatcatactttctttgaaatgcttggaaattttagttttggagattatttcaaaaaggatgcaataaaattagcttggcagtttttaactgaaaaacttaatcttgaaccggatcgattgtggattacggtttatgaggatgatgatgaagcacgtgatatttggattcatgaaatagggattgaacccgagagaattgctaaacttggggaaaaagataatttttggtctatggctgaaacaggtccatgcggaccttgctcagaaatcttttatgatcacggtgaccacattgaggggactcctccgggtcatgatggtgatgagggagatcgcttcgtagaaatatggaatctagtctttatgcaatttaacagggattcggaaggcaagcttcacaaactacccgaaccatctgttgatactggaatgggtttggaaagaatagcagctgtgcttcaaggggttaattccaattacgaaatagattcttttaaaaatttaatagcagcttcagagagtcttttggaatcttccggaaatacatctcataaagtaattgccgatcatattagatctacttgtttcttaattgccgatggaatttctccaagtaatgagggaagaggttatgtgttgcgaaggattatgcgaagagctatccgtcacggttataagattggagcaagaaaaccatttttatataaattagcttcggtattggtagaggaaatggaaggagcctatccagaaataaagaaacttgagagtaatttagaagaaataataaaatttgaagaaaaacagtttctaactactttagaaaagggtataaaaattcttgatgaggcaattgctaatcatccaaatcagataaaaaatggaaatttagtttttaagctcccatgat

SEQ ID NO: 306748 - DNA, 1398 bp, Unknown
  Bacterial polypeptide expressing nucleotide sequence isolated from the Sargasso Sea
aatggcgtcttcatccgggacatcggaacggggaggactttcaggcgaagatgctttcaagctgtatgacacctatggctttcccgtggatttgacccgtttgatgtgtgatgaacgcggattgagtgtggatgagacggtctttgaaaagcttatggaagaacaacggacccgggcacgggaagcagggaagttcaaaatgaccctggatgactggactgaaatcaaagaaggagaatctgaattcgtcggatattttcaattcgaagccgaatcagaagttctccgttacagcagttctggaaatgatgaatggcagatcgttttggagcaaacaccgttttatgccgaatcaggaggtcaagttgccgatcaggggtctttgatgcaggacgaaaagacttggcaggtgtccgatgtgcagaaacagggtggttcgattgtccattactgcaaagggactgataaacctgaatccgggaaaatcaaagcggtcgtcgatgcttccaaacgcctgcaggcaaccaataaccattctgcaacccacctgatgcttgccgcaatgcgtgaaatcctcggaacccatgtgacccaggcgggatcaatcgttcatccggaataccttcgttttgatttcacccatcctgaaaaaccaacccaggaagaaatggatcagatcgaatccagggtgaatgacaaaatcagggaaaacatcccaaccgagatctatcagaccaaataccagaaagcgattgattcaggaattgtcgccatgttcggagaaaaatacggggatgtggtcagggtgatcaagctcggagatttttctgaagaactctgcggcgggtgccatgttcaatccaccggacagatcgggcatttccgactggtttcggaggagggaattgcatccggaatcaggcggtttgtcggagtcaccggggtacaggctgagtccatcagtcgccaggagaaccgtgtagcccaaaatctaagacaactgctcaatgtgccggtggagaaagtcaccgagacggtggaaaaactgcttgatgaaaagcgggggctggaaaaagaaatacaggagatgcggaaacagaatgcgggagccaacgcaggaagcctcctcgaagaagcagagttgatcggagatgtccatgtgctcgcaaggcaggttgaagttcaatccatggacgaattcagaagtatggcggattctctgagaaaacagctgaataatggcgttgcctggctttcagcagaaattgatggaaagagttctctgctgtgtgttgtctcggatcctttgctcgagcgcgggctgaaagccggtgaactcgtcaatgcggtagcttctctggcagaaggcaaagggggcggtaaaccccatatggccca

SEQ ID NO: 306749 - DNA, 1297 bp, Unknown
  Bacterial polypeptide expressing nucleotide sequence isolated from the Sargasso Sea
tatggcagacaaaacacttaatgaaataagaagtacttttctcaaatattttgagaagaatggtcataaaattgtggagtctagtaatttagttccaaacaatgatccaaccctaatgtttgcaaactcaggaatggttcaatttaaaaatgtttttactgggttagaaaaaagagattataaaacagcaaccacatcccaaaagtgcgtaagggctggaggaaaacataatgaccttgaaaatgttggttatacaccaaggcaccatacattttttgagatgcttggaaatttttcatttggagattattttaaagaaagagcaattgaactagcttggaatttagtaaccaaagactttggtttagacaaaaataggctttatttcactgtttttaacgaagatgaagaggcacttaatctttggaaaaaaataacaggactgggagaagataaaattataaagattgcaacatcagataatttttggtccatgggtgaaacaggaccttgtggcccttgttcagaaatattttatgatcatggtgaccatctaaaaggtggattgcctggaacaaaagatcaagatggagatagatatattgaaatttggaaccttgtatttatgcaatttgaacaaatttccaaagaaaaaagaataaatttaccaaaaccatctgtagatacaggaatggggctagagagaattgcagctttgcttcagggcacacacgataattatgaaacagatcattttaaaaaattaataaattcaatttctgaagcagttaaagttaaacctgatgaaaaaaatgtttctagttttagagtaatcgcagatcatttgagagcaagttcatttttaattgcagaaggtgttttaccatcaaacgaaggaagaggttatgtattaagaagaattatgagaagaggaatgagacattctcatttactaggatcgaaacaaccaattttttacaatatttttaaaactttaatggatgagatgtcaggaaattatcctgaacttataagagcagagtctttaattaaagaaactttaaagacagaagaagaaaaatttttagttttattagaaagagggatgaaaattttaaatgatgaaatttcaaaaattgataaagttttacctggtgaagtagcttttaaattatatgacacatacggatttcctctagacttaactgaagatattttaaaaaataagtcattaaaaatagataataaaaaatttaaaactttaatgaacgaaagcagagaacttgctaagaaaaat

SEQ ID NO: 306750 - DNA, 740 bp, Unknown
  Bacterial polypeptide expressing nucleotide sequence isolated from the Sargasso Sea
tttgtttggcgaaaaatatggagatgaagtcagagttttatcaatgggcaatgaagataataagtatttttcaactgaattatgtggaggaactcacgttagaaatacaggagatattggaaaatttaaaataatcagccaatcttcaatagccgcaggagttagaagagtagaagctttaagagataaacagctagaagattatttaaagaataaagaaaaaatatcagatctttcagctcaaaaagatgaagaaacaactaaaaatttatcagaaaaaataatcaaacttggtggaaaaccaaatttagacattcaagatcaaaaagaattaatcaaagaactatcaaaacaacttgaacaattaaatataaaatcaattttagaagataagtctaaaaatataattaaagatgaaataattaatggtgtaaaagtaagatttcaaaagatagaagaccttcctcctaaagatttaagaaagttagtcgacaacggaaaaaaagaattaaaggaaggaatagtagttgtgtttgctaataaagatgaaaaagtaggattagcagtaggtgtaactgaaaaattaattaacaagtatgacgctgttaaatttgctaaacttggatcagaaataattggtggcaaaggcggcgggggtagaaaagattttgctcaagctggaggacaagacaaatctaaaatagatgaagccttagaaaaaattaaatctttagtttaaa

SEQ ID NO: 306751 - DNA, 1267 bp, Unknown
  Bacterial polypeptide expressing nucleotide sequence isolated from the Sargasso Sea
gttgttttgtctttattaaaagacaataaggaagttgatcaaatgaaagaaaatgatgagggagtgattatagtaaaccaaaccccattttatggagagtctggaggtcaagtaggggacactggtgagatcgtatcaaatgaatttaaatttgaagtaacagatgttcagaaaaaacttggagatttatttgtacattatgggaaagtagttagtggttctataaagatcaaagacagcgttgaaatgaggataaatgttgaaagaagagatgatactagagcttatcactctgcaacccatcttttacatgagtctctgagaagagtattaggaaatcacgtaacccaaaaaggctctcttgtagagcctagcagattgagatttgattttagtcacatgaaaccaatccaaaatgatgaaattgataagatagagaactttgtgaacgatatggtttcaaaaaagtcagatgttaaaactaggttaatgaccccagacgaagctgtagaaaacggagctttagcattgtttggcgaaaaatatggagatgaagtgagagtactttctatgggagatgaggatggaaagtatttttccacagaattatgtggcggaactcatgtaaaaaacacaggagatattggaaaatttaaaataatcagccaatcctcaatagctgcaggagtaagaagagtagaagctttaagagacaaacaattagaagattatttgaaaaataaagaaaaactctcagccctatcttctgaaaaggatgatgaaaccattaaagatttgagtgagcaaatcataaagcttggagggaaacctagcttggaccaatctgatcaaaaaaacttaattaaaaacttaacaaaacaattagaaacactttctgtaaattcaattctaaatgacaaatcaaaaaatattattaaagaccaagatatggatggaattaaattaagacttcaaaaagtcgatgatcttcctcctaaagagttaagaaaattagttgatcaaggtaaaaaagatttatcagaaggtattgtagtagtttttgcaagcaaagatgacaaagtagggatagcagttggagttacagaaagcttaacaaataaatatgatgctgttgaatttgttaaaattggatctgagataattggtggtaaaggtggtggaggaagaaaagattttgctcaagcaggtggcttagatcagtcaaaaatagaagatgcttttgaaaaacttaaggctttaatttaat

SEQ ID NO: 306752 - DNA, 1615 bp, Unknown
  Bacterial polypeptide expressing nucleotide sequence isolated from the Sargasso Sea
atgaagactagtaatgacatccgccaatcctttttggattttttcaaatcaaaagatcatgaaattgtcccaagcagttctttggtccctgcaaatgacccaacactgttatttacaaatgcgggcatggtccagtttaaagatgtgttccttggaagagagagtcgtccatacaaacgagctgcatcatcgcagcgttgtgtacgtgccggcggtaaacacaatgatctagaaaatgtcggatacacagcacgacaccacacgttttttgagatgctggggaatttcagtttcggtgattatttcaagcaagatgcgatcacttatgcctgggagtatttgacaggcgtattaaaaattccagaatctaaactttggataaccgtttttgaagatgatgaagaggcggctaatatttggttaaaagaaattggtgtttcaacaaaacaatttagccgttgtggtgaaaaagataatttttggtcagcaggagatactggcccgtgtgggccatgcagcgaaattttctatgatcacggtgaagatatacctggtgggcctccggggtctaaagacgctgatttagatcgttatgttgaaatatggaatttagtgtttacacaatttaaccgtggtagtgacggctcattaacacctatcccacatccttcagtcgacacgggaatgggactcgaaagagttactgccgtcatgcagggagttaataataattttgaaattgagtcattcgaaaagattatcaaaaaaataaaaactctttgtggcaataaaaaaattgatttaacttctagccgtgtcgttgctgaccatattcgatcttgttcatttttattggcagacggtgtaattccttctaatgagggtagaggttatgtgttgcgacgaattattcgccgtgcaattcgacatggtaataagttaggcttcaaaaaacctttttttcatcaattggttgaggttcttgaagaagaaatgggcgatgcttatcctgaattatcaaaaacaagatcaaatatcgagagcatgttgcttagtgaggaagagcgttttgctgaaactttggatcaaggattaaaaattttagatgaagttattacaaaaacaaaaggtgacgttattcatggcgaagatgtttttcgtctgtatgatacctatggatttccagtagatttaacagctgatattgcccgtgaaaaaaatatgaaagttgatatgaagggttttaacaaagctatggccggacaacgaaaacgagctcgggctgcaagtaagtttgatattgatgtttctattaatactgatagtaacttagtgagtgcatttactggatatgaaagattagagcaaaagacgacaataattgggctttaccaagacggaaggaacgtaaaagaattaaatgaaggtgatgtcggcggcgtaattttgttagagactcccttttatgcgcaatccggggggcaagttggtgataagggtgaattatttgctggcgatgttttctttgaagttgaagatactaaaaagcaaggacagtcacatattcatttaggtattctacgcacagggacttttaaagtgggtgatgttgttc

SEQ ID NO: 306753 - DNA, 1459 bp, Unknown
  Bacterial polypeptide expressing nucleotide sequence isolated from the Sargasso Sea
tttgaaaaataagaatataaaaattgacacttctgcatttgataaagcaatgcagaaaagcaaagagttagctagagcaagctggaaaggatcaggtgataagtcagtagaggaaaaatggtttaaagtaagagaacaattgaacccaacagaatttttaggttatgaatttgataaagcagaaggtattgttttaaaaatatcaaaagaaaataagtttgttgaaaacgcaaaagaaggcgatgaagttgaagtcataacaaatcaaacacctttttatggtgagtcaggcggtcaagttggagaccaaggaattatttcaaattctaaatgtaaaattaatattcaagacacacaaaaaaaaatgggcgacctatttgttcattatggaatagttcaaaaaggaatattcgcagttggagatagtgtaaatcttgaaataaacactcaaaaaagaaacaatgcaagagcaaatcactctgcaacacatttacttcacgaggctttaagaagaacacttggtaaacacgtgactcaaaaaggatcattagtaagtccagatagactaagatttgattttagtcacaataagcctatagaaaaagatgaagtggtagaaattaataaaattgttaacaaaatagtaaatggtgcaagtgatgtacaaacaagaattatgtctcctaaagaagctgttactttaggagccctagctttattcggcgaaaagtacggtgatgaagtcagagtagtttttatgggcaaagaaaagaatggtttcttttctactgaattatgtggtggaacacatgttagaaatacaaaagaagttggagaatttaaagtaattagtcagtcatcaatagcttctggaattagaagagtagaagcattaagaaaaaaacaacttcaagattatgaaaaatcactcaaagaagacaaaaatttaaaagaaaaaaatctaaaagaccaagtgaatttaataaaaaaagatttattaaaacttaaagtaaaaccggattttaaggacaatgttgatttatcagaaaacttaaaaaatcttaacaaacaattagaaaaaatcaaaattaaaagaatcattgaagataaaaataaaaatattataaaagacaaaaaagttggtaattttttattcagacaacaagttttgaaagacttcccaccaaaggaattgagaagtgtaatcgatcaaggaaaaaaagatattaaaaatggtatcgtagtaagtatttcaattcacgaagataaagttggcgtagctgttggtataactaaaaacctcactcaaaaattcgacgctgttgaactagtgaaagtagcttccaaagttcttggaggaagcggaggtggagggagaggagattttgcacaagcaggaggatcttataaagataagatcgaagaagcctttaaaactttaaataataaaattagttaa

SEQ ID NO: 306754 - DNA, 2626 bp, Unknown
  Bacterial polypeptide expressing nucleotide sequence isolated from the Sargasso Sea
atgaaagctgccgaaatccgcgagaaattcctcaaattcttcgaatcgaagggccacacgatcgtccgctcgtcgagcctcgtgcccggtaacgaccccacgctgatgttcacgaactcgggcatggtccagttcaaggacgtgttcctcggcacggatccgcgtccgtactcgcgcgccacgacggcgcagcgcagcgtgcgcgcgggcggcaagcacaacgacctcgagaacgtcggctacacggcgcgccaccacacgttcttcgagatgctcggcaacttctcgttcggcgactacttcaagcacgacgcgatcaagttcgcgtgggagctgctgaccacggtctaccagctgccgaaggacaagctgtgggtcacggtctaccaggaagacgacgaagcttacgacatctgggcgaaggaagtcggcgtgccgaccgagcgcatcatccgcatcggcgacaacaagggcgcgcgctacgcgtcggacaacttctggacgatgggcgacaccggcccgtgcggcccgtgtaccgaaatcttctacgaccacggcccggacgtgtggggcgggccgccggggtcgcccgaggaagacggcgatcgctacatcgagatctggaacctcgtgttcatgcagttcaaccgcgacgcgcagggcaacatgacgcgcctgccgaagcagtcggtcgacaccggcatgggcctcgagcgtctcgccgcggtgctgcagcacgtgcacagcaactacgagatcgacctgttccagaacctgatcaaggccgccgcgcgcgtgaccgaaatcagcgacctcacgaacaactcgctgaaggtgatcgccgatcacatccgcgcatgctcgttcctgatcgtcgacggcgtgattcccggcaacgaaggccgcggctacgtgctgcgccggatcgtgcgccgcgcgatccgccacggctacaagctcggccgcaagggcgcgttcttccacaagctggtggccgacctcgtcgccgagatgggcacggcctacccggagctgaaggaagccgaacagcgcgtgaccgacgtgctgcgccaggaagaagagcgcttcttcgagacgatcgagcacggcatgtcgatcctcgaagccgcgctggccgatgtcgaggcgaagggcggcaaggtgctcgacggcgaactcgcgttcaagctgcacgacacctacggcttcccgctcgacctcacggccgacgtgtgccgcgagcgcgggatgacggtcgacgagccggcattcgacgacgcgatggcgcgccagcgcgagcaggcccgtgcggccggcaagttcaaggccgcgcagggcctcgaatacacgggcgcgaagaccacgttccacggctatgaggaaatcgcgttcgacgacgcgaaggtcgtcgcgctgtacgtcgacggttcgtcggtcaacgaagtgaagacgggccaggacgcggtcgtcgtgctcgaccacacgccgttctatgcggaatcgggcggccaggtcggcgaccagggcgtgctcgcgaacgccgcgacgcgcttcgcggtggccgacacgctgaaggtgcaggccgacgtgatcggccatcacggcacgctggagcagggcacgctgaaggtgggcgacgtgctgcgcgcggaaatcgacgcgcatcgccgcgcccgcacgcagcgcaaccactcggccacccacctgatgcacaaggcgctgcgcgaagtgctcggcgcgcacgtgcagcagaagggttcgctggtcgacgcggaaaagacccgtttcgacttcgcgcacaacgcaccgatgaccgacgacgaaatccgtcgcgtcgagcagatcgtcaacgacgaaatccttgcgaacgcgccgggcatcgtgcgcgtgatgccgtacgacgaagcggtgaagggcggcgcgatggcgctgttcggcgagaagtacggcgatgaagtgcgcgtgctcgacctcggcttctcgcgcgaactgtgcggcggcacgcacgtgcaccgcaccggcgacatcggcttgttcaagatcgtcgtcgaaggcggcgtcgcggccggcatccgccgcgtcgaggcgatcactggcgacaacgcggtgcgctacgtgcaggaactcgacgcacgcgtgaacgaagccgcggccgcgctgaaggcgcagccgtcggagctcacgcagcgtatcgcgcaggtgcaggaccaggtgaagtcgctcgagaaggagctgggcgcgctgaagtcgaagctcgcatcgagccagggcgacgagctcgcgcagcaggcggtcgaaatcggcggcgtgttcgtgctggccgcgacactcgacggcgccgacgcgaagacgttgcgcgaaacggtcgacaagctgaaggacaagctgaagagcgcggcgatcgtgctggcggccgtcgaaggcggcaaggtcagcctgatcgcaggcgtcacgcccgacgcgagcaagaaggtcaaggccggcgagctcgtgaacttcgtcgcgcagcaggtcggcggcaagggtggcggccgtccggacatggcgcaggcaggcggcaccgagccggcgaacctgccgggcgcgctggctggcgtgaagggctgggtcgaagagcggctctgat

SEQ ID NO: 306755 - DNA, 1225 bp, Unknown
  Bacterial polypeptide expressing nucleotide sequence isolated from the Sargasso Sea
gcaattataatattaaatcaaacacctttttatggagaaagtggtggtcaggtgggagataagggttttttagaaaatgatagctttaagtttgaagttatgaatactacaaaaatatttggaagctattttcttcacaaaggtaaagtaattagcggtgaatgcgaaattgaagatactattaaagcaagcattaatacagtgaatagagattttattaaatataatcattcttcaactcatttattacatgctgctctaagaaaaatactgggcaagcatgtcacgcagaagggttcacttgtaaattcagaaaaacttagatttgattttagtcacaataatccaattgaaaaagatcaactcatgaatattgaggaaattgtaaatgctcaaattcaaaaaaatggaattgttgaaatcaaaattgtggatcaaaaaaaagctattgaagaaggtgcgatggcattgtttggagaaaaatatagcgatgaagtaagagtagtaacaatgagtcaagaaaatgaatcattcttttcaaaagaattatgtggaggaactcatgttgttaaattaggggaaataagtaaatttaaaataactaatcaatctagtgttgcgtctggaataagaagaatagaggctgtatctaatgttgcagtggataaatatataaaagaaatagaaataaatttattagaaaaaaataaaaaccaagataatcaaattgaagatttaaagaataaaattaaaaagattaacgctgattataattttaaaaatcaatctgaagacaaaggtttgttaattaaagaattaattcagatacacgaaagattaaaacaaaatatgtctatatcaaaaaatattaataatattattataaaaaaaatcaaagaattaaatttcatatacttgattgctgaagactaccctaataaatctttgaaaacatttattgatgagcaaaaaaaacaatataacaaaaatagtgtttcgttaataatttcaaataataataacaaactatctatagtgctaggagttacagaagatattacagatctttttgatgcttcaaaagaaataagagaaatttctattattctaggtggcaagggtgggggtggtagaaaagatcttgctcaaggaggaggatcagatgttagtcaaattaatgaaagtataaaatacgtagaagataaattaaattctattagttaat

SEQ ID NO: 306756 - DNA, 985 bp, Unknown
  Bacterial polypeptide expressing nucleotide sequence isolated from the Sargasso Sea
cttccgaagagccggtgctgttttttatgctaaagtgaatgcagctgaaagaaaaaattctcaggcaaaccattcagtgacgcatttattgcacgaagctttaagagaagttttgggaacgcacgtggagcagaaaggttcatttgtgggtccggattatcttcgtttcgatttttcacatttcagcaaaatgacggaggaagaattgaagctggttgaagataaagtgaatgcgaaaataaaggaaagcattgcgttgcaggaattcaggaatattccgattcaggaagctttggacagaggtgcaatggctttgtttggcgaaaaatatggcgacaacgtaagaatgatccagttcggaacttcaatggaactttgtggcggaacgcacgtaaaaaacaccagcgaaatcggtcatttcaaaattgtttccgaaagttctgcagcagccggaatccgaagaattgaagccatttcaggagacaaatccgctgaatatttcaaaaacttagaaaaacagatgactgaactttctcagttattaaaatctaaagatattattaaatctatcgagaaattgatcgaagaaaacacttcattaaaatctgaagtagaagcgttcaaaaaagagaaagcaaaaggtgaaatcggcgactggaaaaatgcttacgaacaaaaaggcgacaagcagcttttggtgaagaaaacgtcgttggatgccgcttcggtaaaagatattgtcttccagctgaaaagagagatcccgacttcggttaccgtgattctttctgatgcagacggaaaaccgatgattacggtgggcgtttccgatgatttggctgcgaattaccaagccggaacgattgtaaaagatctggcaaaagaaatccagggcggtggcggcggaaatccgggcttcgcaacggcaggcggaaaaaatcttgacggtcttgaaaatgcgtatcagaaagcgttgaatgtttaa

SEQ ID NO: 306757 - DNA, 2104 bp, Unknown
  Bacterial polypeptide expressing nucleotide sequence isolated from the Sargasso Sea
ggtccgtgcggtccctgcaccgagatcttctatgaccacggcgatcatatctggggtggccgtcccggctcaccggaagaggatggcgaccgtttcatcgagatctggaacgtggtgttcatgcagttcaaccgtcaggctgacggcaccatggagccgctgccgcgtccgtccgtggataccggcatgggtctggagcgtatctccgccatcatgcagggcgtgcactccaactacgaaatcgacatcttccaggcgctgatcaagaaagcggccgagattgtcggcaccaccgatctgagcaaccagtctctgcgcgtcatcgccgaccacatccgctcctgcgccttcctggtggcagatggcgtgatgccgtccaacgaaggtcgtggctatgtgctgcgtcgcatcatccgccgcgccgtgcgtcacggtcgcaagctgggtgccaccgaagtgttcttctacaaactggctgccgagctggcggcacagatgaaggatgtcgctgccgagctgattgctcagctgccgctggtcgagcgcgtgctgcgcatcgaggaagagcaatttgtgcgtactctggatcgcggtctgctgctgctggaagacgtgctggccaacctgggcgatgccaaggtcattccgggcgaggtggtattcaagctgtatgacacttacggcttcccggccgacctgactgccgacgtggtgcgcgagcgcgagatcggcatcgacgaagagggcttcaaggccgagatggagaagcagcgtgctcgcgccaaagaggcttccagcttcggcgtgaactacaacgagatgctcaagctcgacttcgagacccccttcaccggttacaagaccctgaccgagcgcacccgtgtggtcggcatctacaagggcgtggacgaggtgagcggtctcatcgccggtgacgaagctgtcatcgtgctggagcagacccccttctacgccgaatccggcggccagattggcgatagcggcaccctgaaagtggacgacggcatctttgccgtgaccgataccgtcaaagcgggcaaggcgatcatccacaagggctacatggagctgggcaccctggagaaaggggccgaggtcgaagccgtggtcgatggcgagcgccgccaggccatcgctctgaaccactccgtgactcacctgctgcacgcagccctgcgtcaggcgctgggtgagcacgtgacccagaaaggttctctggttggggccgagcgcatgcgtttcgacttctcccacttcgaggggatgaccatggcgaccattcgccgggtcgaggagctggtcaacaaccagatccgcgccaaccacgaaatcaccacccagctgatggatctggaagcggccaagtcggccggcgccatggcgctgtttggtgagaaatacgaagacgacgtgcgcgtggtgcgcatgggtgactactccaccgagctgtgcggcggtacccacgccaagcgcaccggtgacatcggcttcttcaagatcatcgcagagagcggcatcgccgccggcgttcgtcgtatcgaagcggtgactggcaaggccgccatcgacttcatgcatcaggtcggcgagcagatcgaagaggctgccgcactggtgaaaggtgaccaattctgcatcgccgacaaggtacgtcaggtgctggacaaggccaagatgatggaacgcgagctggagcagctcaaggccaagctggccgctcaggccggtaatgacctgctgggtcaggtcatcgagatcaagggtcagaaggtgctggttgcagcgctggaaggggccgatccgaaatccctgcgtggcatgctggacgagctgaagaaccagatgaagtctggtgtcgtgctgctggccaccagtggcgagggcaaggtcaacctgatcgcgggcgtcaccaacgacctgaccggcaaggtcaaggccggtgagctggtcaatctggtcgcccagcaggtgggtggcaagggcggcggtcgtcccgacatggcccaggcgggtggtacccagcccgaggcggtgccggcagccctgcaatccgtacactcctggctggaagagcgcctgtaat

SEQ ID NO: 306758 - DNA, 1222 bp, Unknown
  Bacterial polypeptide expressing nucleotide sequence isolated from the Sargasso Sea
aatgtatttacccggttagaaaaaagagattatgtaagagcaacaacttctcaaaagtgtgttagagctggtggcaagcataatgatttagaaaatgttggttatactccaagacatcatactttttttgaaatgttgggcaatttttcatttggagattattttaaagaaagagcaatccaacttgcgtggaacttaataactaaagattttggattagataaaaacaggctttatttcactgtttttaacgaggatgatgaagcttttaatctttggaaaaaaatcagtggattaggagaagataaaataattaaaatttccacatcagataatttttggtctatgggtgagactggaccatgtggaccatgttctgaaatattttatgaccatggtgatcatttgcaaggaggtttacctggtaccaaaaatcaggatggagatagatatatagaaatttggaatttagttttcatgcaatatgagcaactgagcaaagataaaagaattaatttacctaaaccatcagttgatactggtatgggattagaaagaatagcagcactactccaagggactcacgataattataaaacagatcattttttaaaattaatagaatcaacatctgagtctctcaaaataaaacctaatcaaaaaaatatgtcgagctttagagttatagcagatcatttaagggcaagttcatttttaatagcagagggggttttaccatctaatgaaggtcgcggttatgttttaagaagaataatgagacgaggtatgagacattctcattttttaggagcaaaggaaccaatattttttaacatttttaaaactttaatgaatgaaatgtcagaaaattattctgagttaaaacaggctgagtcattaattaaagaaaccttaaggtcggaagaagaaaaatttttagtacttcttgaaagaggtatgaagattttaaatgacgaaattacaaaagttaaaaaagttttaccaggagaagtagcttttaaactttatgatacatatggttttccattagatttaacagaggatattttaaaaaataaatctttaactgttgatcataataaatttaaatcattaatgcagcaaagtagagaacttgctaaaaaaaattggaaaggttctggagacaattctgtagataaaatctggtttaaaattaaggataggttacagcctacagaaa

SEQ ID NO: 306759 - DNA, 1197 bp, Unknown
  Bacterial polypeptide expressing nucleotide sequence isolated from the Sargasso Sea
tactggagatgagataagaaatgcttttttaaaattttacagtgaaaaattacataaaatcattccaagtgcatctttgattccagatgaccctacggttatgctcacaattgctggaatgctaccttttaaaccagtttttttaggtttaaaagaaagaccatcaaaaagggctacatctagccaaaagtgcatcagaacaaacgatatagaaaacgttggagttacagctagacaccacactttttttgaaatgcttggtaatttttcttttggggattattttaaacgagaggctattcaatgggcttgggaattagttactaatatttataaactttctgttgaaaatataattgtaagtgtttttcacgaagacgaagagtctgcaaaaatttggagagatgaaattggtattcatccagataggatagtgaaactaggtgaggaagataatttttggtcatctggcaaaacaggtccatgtggaccttgttcagaactttattatgattttcatcctgaaaagggtctgcagaatattgatttagaagatggagatcgttttattgaattttataatcttgtttttatgcaatataatcgtgatcctaatggaaaattgacggatttaaaatttaaaaatattgatacaggaatgggtcttgaaagaatggctcaaatcctacaaaaaaagcaaaataattatgagacagatttaatttttcctattattcaaaaaatttgtgagattgcaaatattgattatttttcttcagatgataaaaacaaaatttctttaaaaatcattggtgaccatacaagagctgttattcatttaatttctgatggagtagcagcaagtaatctcggcaggggatatatattaagaaggcttattagaagaatggtcagacatgggagattattaggtataacaaatgaatttttaccccatattgctactgtcgggattaatttaatgcaaaataattatcctgatttaaaaaacaataatgatttaattttgaatgaaataaaacttgaagaaataagatttagggaaactcttgaaagaggagagagattgctagatgagttaatttcttcagggcagaaattaatttctggttttaaagcttttgaactttatgatacttatggatttcctctagaacttactatagaaattgctga

SEQ ID NO: 306760 - DNA, 1363 bp, Unknown
  Bacterial polypeptide expressing nucleotide sequence isolated from the Sargasso Sea
atcgaaatttggaacctggtatttatgcagtttaacaaacaagctgacggtaccatggagccactccctaagccttcaatcgataccggtatgggcctagaacgtatttccgctatcttgcagaacgtgcacagcaactacgagatcgaccttttccaaaacttgatcaaatcagcagcatcaattgttggaagcgaagatttagaaaataaatcgctacgggtcatcgccgatcacattcgttcgtgcagcttcttaatttgcgatggcgttatgccatcaaatgaagggcgcggatacgtattacgtcgcattattcgtcgcgctgtccgccacggctatcagcttggcgcaaacgatattttcttctataagcttgtagcatcacttgccaaagaaatgggtgaagcgtatccagaacttgtagaccagctaccggtaattgaaaaagtactacgtgttgaagaagagcagtttagcaaaacgttagcccgtggtatggctatcctaaacgatacattagaaactctagaaggcgacacagtgccgggtgacgtagtgttcaagctttacgacacctatggtttccctactgacttaaccaatgatgtagcacgtgagcacgaccttaagattgacgaagaaggttttgaagctgctatgcaagcacagcgtgcccgtgcacagcaggctagcaactttggtgcagactacaatagtaaactcgccattgaccacacaacctcatttactgggtacaccgatgtagaaggtcaggcgaatgtggttgaacttatcgccgacaatgcgtttgtagagaagcttgaagacggtcaagaaggcgttgtggtattagatagcacgccgttctacgctgaaagcggtggtcaggcaggtgacaaaggcgtgcttcgcgtggcaaacggtgaattcattgttaccgacacccaaaaaatgggtaatgcgttcgcacacaaaggtattgctaaaggttcagtatctaaaggtgatacggcaaccgcagcgattgatgcagcaaatcgtgaagctattaaaaagaaccacagcgcaacgcatttacttcatgcagcactacgtgaaattttaggtgagcacgtaactcagaaaggttcattggttgaagcgccgcgcatgcgttttgacttctcgcattttgaggcagtaacggctgagcaacttgctgagattgaaagacgagttaaccaagaaatacgtgcaaaccacacgttagcaactgaactaatggatttggatgaagccaaagcatcaggcgcaatggcgctatttggtgaaaagtacgacgaaaaagttcgcgtggtaaccatggggccattctctgttg

SEQ ID NO: 306761 - DNA, 1703 bp, Unknown
  Bacterial polypeptide expressing nucleotide sequence isolated from the Sargasso Sea
agatgaagacggcgatagatttattgaaatttggaatcttgtatttatgcaatacgaacaaatatcaaaagaaaaaagaattaatttaccaaaaccttctgttgatacaggtatggggcttgaacgtatgacagcagttctacaaggaactcatgataattataaaatcgatcactttcaaaaaattatggctgcttcatcagatctcactaaaaatcaaatcaacagtaacacaatagctagtcatagagtaattgctgatcaccttagagctagtagttttttaattgcagaaggaatattgccttcaaacgaaggccgaggatacgttttaagaagaattatgagaaggggaatgagacatgctcattctttaggcagcaaagatcctgttttttttaaactttttgaagttttgttaaatgaaatgaagagtagttatcctgaattgatcaatggtaaagaattgatagtagaaactctaaaaaatgaagaggaaaaattttctactctacttgaacgaggaatgaaaatacttgatgaaaatttaagcaaagtccaaaacaaaaccctccccggtgcatcagcatttaaattgtatgatacttacggatttcctttagatcttacagctgacattctaagaggaaaaaatatcaaagtagatcatgttggatttgagaaagagatggaaaaaagcaaagcactagcaagagcaaattggaaaggatcaggagataaatctgttgaggaaagatggtttaaagtcagggaggaaattaatcctactgaatttttaggatatgaatttgataaagctgagggtgtaataattagaatttcaaaaaatggcaaatttattgataaggctgatacaggagatgaaatagaggtaattacaaatcaaacaccattttatggggagtctggcggtcaagttggtgatcagggttatatttttagttcagatagtaaaataaaagtaaatgatacacaaaaaaaaatgggagatttatttgtccattatggaaaaatagaaaaaggatcaatatcaattggacaacatgttaatttagaaatagatattttaaaaagaaataactcaagagccaatcactctgctacacatttgttgcatgagtctctaagaaggaccttaggaaaacatgttacacaaaaaggatccctagtctctcctgaaagattaagatttgattttagtcataataaacctattgaaaaagaggaaatgaataaaataaataatatagtaaataaaatagtagcagcatcttctgatgttcaaacaagaataatgaccccaaaagaagcagtaagtatgggtgcccttgcattatttggagaaaaatatggagaagaagtaagggtggtttttatgggaaaagaaaataatggttttttttcaacagaattatgtggtggtactcatgttaaaaacactaaagaagtcggaaagtttaaagttataagccaatcctcaattgcatcaggagttagaagagttgaggcattaagagacaagcaattagaggtatatgaaaaaatgcaaaaaaaagataagtctcaaaatgaaattaatattaaaaataaaatcgaattcgctaaaaaagaacttcaaaaattaaaaattaatcctgattttaaagaaaatctagatttatctgaaaatttaaaaaatttaa

SEQ ID NO: 306762 - DNA, 2515 bp, Unknown
  Bacterial polypeptide expressing nucleotide sequence isolated from the Sargasso Sea
atgctaccatttaaaccagtttttttaggtttaaaagaaagaccttcaaagagggctacatctagccaaaagtgcatcagaacaaacgatatagaaaacgttggaattacagccagacaccatactttttttgaaatgcttggtaatttttcttttggagattatttcaaacgagaggctattcaatgggcttgggaattagttactaatatttatcaactttctgttgaaaatataattgtgagtgtttttcacgaagacgaagagtctgcaaaaatttggagagatgaaattggtattcattcagataggatagtgaaactaggggaggaagataatttttggtcatctggcaaaactggtccatgtggaccttgttcagaactttattatgattttcatcctgaaaagggtctgcaaaatattgatttagaagatggagatcgttttattgaattttataatcttgtttttatgcaatataatcgtgatcctaatgggaaattgacagatttaaaatttaaaaatattgatacaggaatgggtctagaaaggatggctcaaatactacaaaaaaagcaaaataattatgagactgatttaatttttcctatcattcaaaaaatttgtgatattgcaaatattgattattcttcttcagatgataaaaacaaaatttctctaaaaataattggagatcatacaagagctgttgttcatttaatttctgatggggtagcagcaagtaatctcggcagggggtatatattaagaaggcttattagaagaatggtcagacatgggagattattaggcataacaaatgaatttttacctcatattgctactgtcgggatcaaattaatgcaaaataattatcctgatttaaaaaataataatgatttaattttgaatgagataaagattgaagaaaaaagatttagggaaactcttgaaagaggagagaaattgctagatgagttaattttttcagggcagaaattaatttctggttttaaagcttttgaactttatgatacttatggatttcctctagaacttactgtagaaattgctgaagaaaatagtatcagtgtagatgtaaagggttttgaagaagaaatgaatgcacaaaaagagagagctaaagctgcttcaagtaatattgatttgacattagagggatcattagagcgagaaatagatctatttaagaaaactgtttttaatggttataattcacttctttcggaagctgaaataaagggtattttcttggattcaacattagttaagcaagcaagtgaaggtcagaaagttgtaattgttcttgataagacaactttttatggagaatctggcgggcaagttggtgatattgggacgatattttcaaaagatgtagaggtcttggttgataatgttatgcgaaagaaaaatgtttttttacattatggaacgatcaaaaaaggaatattaactattggacaaaaagttaagactaatgttaactcctctaatagagctaaggctgctgcaaatcatacagctactcatttattacaatcagcacttaaatcagttgttaatgaaagtgttggacaaaaaggttcattagttgcctttaataaattacgatttgactttaattcctctaatcctatttctaaagatcaaatttctgagattgagaatttagttaactcttggattattgaaaatcatgccctagaaataaaaaatatgtctaagagtgaggcatttgaaaagggcgcagtcgctatgtttggagaaaaatatgatgatgaagtgcgcgttgttaatgtaccaggagtttcaatggaactttgtggtggcacacatgttaaaaccacatctgaattgggttcttttaaaataattagtgaggaaggaatctcagctggagtcagaagaatcgaagcattatcaggccaatcagcattagactatttcagtgatagaaatactttagtaaatcaactaagtgatttgttaaaagcaaatcctaatcaactttttgaaagggtaaataatttgcaagcagagctttttaataagaataaagagatacaaaaaatgaaagatgaaatcgcatattttaaatactcttctataaaatcatccgcagaaatagtaaattctttttcaattttagtaaatcagattgatggcttagatgggaattctttgcaatctgcagcacttaatttaacttctcatttgggaaataaagcaatagtgattcttgggggaataccaaatccagaaaatagaaagttgttatttgtagtttctttaggtgatgatgcagtaaaaataggattgcatgcaggtaaattaattaatgagattgcaagaatttgttcaggaggtggaggaggaaagcctaactttgctcaagcaggtgctaaagatattgataagttaagtgatgctctacattatgctaaaaatcatttgcaaaaaacattagaaagtcattctgataaataac

SEQ ID NO: 306763 - DNA, 151 bp, Unknown
  Bacterial polypeptide expressing nucleotide sequence isolated from the Sargasso Sea
atgtccacgtcagagattcgcaccgcgtttctcgagtatttccgttcccaggggcaccaggttgtctcctccagctcgctggtaccgcataacgacccgaccctgttgtttaccaacgcgggtatgaaccagttcaaggacgtgttccttg

SEQ ID NO: 306764 - DNA, 920 bp, Unknown
  Bacterial polypeptide expressing nucleotide sequence isolated from the Sargasso Sea
agttttaggtgaccatgtgcagcaagcaggctctctagtgcatccagattatctaagatttgatcttactcactttgaaaaaatatcaaaaaaagaaattcgtgaaatagaaaatattgttaatagtgaaatactaataaataataagttagatgtatcaattaaagcttttgatgaagcaaaaaaagaaggcgcagttgccatgtttggcgagaaatatggagatcaagtccgcgttattaccgtggctgatttttcaaaagaattatgtggcggaacacatgtcgatcgaacaggtgatattggattatttaaaattaccgaagaaacatctttagcatctggagtacgtcgaatcgttgccgttacagggcccaaagcggttgaatttgttcaagatcaggtagcagctttagatgaggttaaatcgcaattaaaatgcaatcttaattcaattccagatcgtttaggtcaattaatcaaagataacaaaactttggaaaaagaattaaagaaacaaaaaaaatctaactcatcatttgatactaaaatcttattgaaagaagcattaattattgaaaataaaactatagttattaaaatgacagatgctgaagatatggatagcctaaaagattttggaaatagtcttcttttaaaattaaagaatggaattggagtccttggcgctgtagctgacaaaccgatgttggttgttgttgtcacagatactttaattgaagcgggaattaaggctggggacctcgcaaagcagattggatctatcatgggcggtggcggtggtggtcgcccgaacctcgcaacggctggcggtaaagatcaaaaatctcttgaaaccgctatggaaaaagcgaaagatattattttaaaaaatattgaggaaaaaaatgcagtataaa

SEQ ID NO: 306765 - DNA, 901 bp, Unknown
  Bacterial polypeptide expressing nucleotide sequence isolated from the Sargasso Sea
tgctccagatcgattaagatttgactttagtcatatgaaaccaattaccaatgaagagttggagactattgataagttggttaatgaatatgtctcaaatagttctgaagtaactacaagaattatgacaccaaaggctgctatcgaaaaaggcgcactagctttctttggagaaaaatatggagacgaagttcgagtggtatctatgggtaaggaaaaagaggcatatttttcaacggagttgtgtggaggaacacatgttaaaaatactggtgatattggaaaatttaaaactgtaagccaatcatctattgctgcaggtgttagaagagttgaagcgttaagagataaacaacttgaggattttattaggaataaagaaaagttatcaactttatctactcaaaaagatgaagaaactattaaagacctctcatctcaaattataaaacttggaggcaaaccaaatgttgataacgatgatttaaaagaaatcataaaaaatctttcaagacaacttgaacaactcaatgttagttcagttcttcaggataaaacaaaaaacattataaaagatgataatataaaaaatataaaagtaagatttcaaaaagtacaagatttacctccaaaagatttaagaaaattagttgataatggtaaaaaagaattaggtgatggtattgtaattgttttcgcaagcagtgaagataaagttgggcttgcagtgggtattactgataacctggtcgataaatatgatgcagtaaaatttgcaaaattaggatcagaaacaattggtggaaaaggtggtggtggtagaaaagattttgctcaagcaggtggtcaagataagaacaaaattgatgaagctttcgaaaaaattaagtccttaatttaa

SEQ ID NO: 306766 - DNA, 767 bp, Unknown
  Bacterial polypeptide expressing nucleotide sequence isolated from the Sargasso Sea
agaagccgtagataacggagcactagctttgtttggggaaaaatatggtgatgaagtaagagttttatcaatggggaatgaaaaaactagttatttttcaacagaattatgtggaggaactcatgtgagaaatacaagtgatattggaaaatttaaaattattagtcaatcctctattgctgctggaattagaagagttgaggccttaagagataaacaattacaagaatattttaataaaaaagaaaaacaaactggaatagatactcagaaaaatgaagaaataatcaaggatctatccacaaaaattatcaaacttggtggaaagccaaatattgaaaatgataatcataaatcattaattaaagatttaacaaaacattatgaacaactattagtaaaatctacgttgagtgacaaatctaaaaatatagttgatgatcaaataattaataaaattaaaataagatttcaaaaagtaattgatcttcctcctaaagatttaagaaaattagttgatgatggaaaaaaagaattaggggagggaatagttatagtttttgcaataaaagacgaaaaaataggtttaggagttggtgttacagataatttaaaaaaaaaatatgatgcagttaaatttgtaaaaaaaggatcagaaattattggaggaaaaggtggtggaggaagagcagatttcgctcaagcaggtggaactgatatttcaaaaatacaagaagcttttgaccaaattaaatctttaatttaat

SEQ ID NO: 306767 - DNA, 790 bp, Unknown
  Bacterial polypeptide expressing nucleotide sequence isolated from the Sargasso Sea
gacttgctcagaatatttttcgatcatggagataaatatgaaggaactccgccaggagaagatggagatgagggcgatagatttgtagagatatggaacttagtatttatgcaattcaatcgagattcaggtggcgtacttcatgatttaccaaaaccatcagttgatacgggaatgggactggaaagaattgctgcagttatgcaaggagtggggtcaaactatgatactgatatcttttcaaatctaattatagaatctgagaaagtgcttggaaatgtcggagatgtctctcataaagtgattgcagatcatttaagatcttcatgctttttaatttcagatgatatttttccatccaatgaaggaagaggctatgttctcagaagaatcttaaggagagctatcagacacggctacaagattggggcagatgtaccttttatgcataagttagttaaaacctttgttgacggaatggggaatgcgtatccgcaattaaaaaatgatgaaggaagaattgaaaaacttatcaaaaatgaagagactcagtttttacaaactcttgataaaggtattcaaattttggactctactctagcagcagggaatgaagaaactatttcaggagacttagcctttaagcttcatgatacttatggttttccatttgatctgactgccgatattgcaagagaaaagggtattgatatagatgaaaaaggattcaagaagaatatggaatctcaacaacaaatgtcaaaggcatcaagttcatttgtgtcaaaaa

SEQ ID NO: 306768 - DNA, 1964 bp, Unknown
  Bacterial polypeptide expressing nucleotide sequence isolated from the Sargasso Sea
gattgctgcattgttacaaggtacacatgacaattataaaacagatcattttattaagttaattaattcaacagccgatgttgttaaaacaaaacctaatgaaaaaaacatttcgagttttagggtcatagctgaccatttaagagcaagctcttttttgattgctgaaggtgttctcccatcaaatgaaggacgaggatatgtccttagaagaataatgagaagaggaatgagacattcccattttcttggagcaaaagaaccaatattttttaacattttcaaaacattgatgagcgaaatgtcaagcaactatcccgagcttaaaagagctgagtctttaataaaagaaacattaagaacagaagaggaaaaatttttagttcttcttgaaaggggtatgaaaattttaaacgaagaagttaataaagttaataaaattttaccaggtgaagtagcttttaaactctacgatacctatggttttcctttagatttaactgaagatattttaaaaagcaaatccctaactgttgatcataataaatttaaatcattaatgcaggaaagcagagaacttgctaaaaaaaactggaaaggttcaggcgatagttcagttgaagaaatatggtttgacattaaagatagattagaaccaacagaatttttaggttatgaaactaatcaagcagaaggaatagtgctttctttgattaaaaataataaagaagtacaaaatttaaataaaggcgatgaagcgataatgattttaaatcaaacacctttttatggagagtcgggaggtcaaataggtgatactggaattatagtatctggtgattttaaatttaaagtaagcgatgtacaaaaaaaacttggagatctatttgttcattatggaaaagttgaaaatggatcaattaaattaaacgataccgtagaaatgaaaatagatattgaaagaagagaaaatataagagcatatcattcagctacacaccttcttcatgagtctctaagaagagtcctgggaacccatgtaattcagaaaggttctttagtagccccagatagattaagatttgattttagccatatgaagccaatttcaaatgaagaaatagataaaattgaaaaatttgttaatggaatggtcgataccaaatcggaagtaaaaacaagattaatgacccccaaagaagcggtagataatggtgctttagctctatttggtgaaaaatatggagaagaagttcgagttctctcgatgggtgatgaaaaaaataaatatttttctacagaactttgtggaggaactcacgttagaaatactgccgatataggtaaattcaaaattattagtcaatcttctatagcagcaggaattaggagagttgaagctcttagagataaacagttggaagagtatttaacacagaaagaaaaattatcggatttatcaattcaaaaagatgaagaaattatcaaaaaactttctgaacaaattattaagttaggaggcaaacccaatttagataacgataaccaaaaaaatttaataaaagatctgaataaacaatttgatcaactttctgttaaaaaaatcttaagtgataagtctaaaaatattgttaaagatgaaacagtaaaagatgttaaagtaagatttcagaaagtaattgatcttcccacaaaagatttaagaaatttagtagataaaggaaaaaaggaaatattagatggaatagttgttatatttgcaattcaagatgaaaaaattggattagctgttggtattactgaaaagctaacaagcaaatatgatgcagtaaaatttgtcaaaattggttctgatataataggtggaaagggcggtggtggaagacaagattttgcccaggctggcggtatattaaaagataagattgatgaagcttttgataaaatcaaatctttaatttaat

SEQ ID NO: 306769 - DNA, 757 bp, Unknown
  Bacterial polypeptide expressing nucleotide sequence isolated from the Sargasso Sea
aatgaataccaatgagataagagaagcatttctagaattctttaaaagcaaggatcataatgttgtttcttcaagttctctcatacccaacaatgatgaaactttgcttttcactaatgcaggcatggttcagtttaaagatgtctttttaggccaagaaaaacttaaatattccagagccaccacttcccaaaaatgtattcgtgctgggggtaagcataatgatcttgaaaatgtaggctatacacttcgccaccatactttttttgaaatgcttgggaactttagctttggtgactattttaaagaggaggctatagtttttgcatgggagtttttaactgatgttctcaaactagataaagataggttatggattacagtttataaagatgatgacgaggcaaaagaaatttggataaataagattggcattgatccggatagaattgcgaagcttggagataaagataatttttggtcgatggctgatactggaccttgtggcccttgctcagaaatcttttttgatcatggagataaatatgaaggaacaccgccaggtgaagatggagacgagggcgatagatttgtagagatatggaacttagtatttatgcaatttaaccgagattcagatggtgtgctgcatgatttaccaaagccatcagttgatactggaatgggactggaaagaattgctgcagtaatgcagggagtgggatcaaactatgaaactgatatctttcaaacctaa

SEQ ID NO: 306770 - DNA, 1459 bp, Unknown
  Bacterial polypeptide expressing nucleotide sequence isolated from the Sargasso Sea
cagcataatgatttagaaaatgttggctttacttcaagacacctaacattttctgaaatgcttggaaattttagttttggtcaatatttcaaaaaagaggcgattcaatttgcttgggagtttttaactaaagaactaaagctgccaaaggagaaactatggataacaattcacaattcagacgacgagtcattgaacttgtgggttaataatattggtgttgacccaaataaagtatctaaacttggtgatgctgataacttttggtctatgggggagactggcccatgtggaccatgttcagaaattttttatgactatggtccaagttttgaaggatccccgcccggccaaggtgatggaggtgacagatacgtagaaatctggaacttagtttttatggaattcaatcgtgacctttcgggagagcttcatccgcttccaaacaaatgtgttgatactgggagtggcttagagagactttgtgccgtgctacaaggtgttggctctaactttgaaatagattttttttcagacttcaaaaagtcaattagtaacctttttcctaaccccaatgaccaatcactcaatgttgttgttgatcatataaggtcggtcttctttctgatgtctgagactatttatccatcaaatgagggacgtggatatgttgtaagaaggttgattagaagggcaataagacatggttataagatggggataacagaaccatttctgtataaatgtatggatgtgctaaaggatttgctgcaagaggatttctacgaagatttcaaaaatgtcgccgaaattatgtcggccctcaaagatgaagaagaattattcttcagaacattatctgtgggtatgaaaatttttgaagacagcttaaaaaaccagaatataaagattttaagtggagaagtcgcatttaagttgcatgatacttttggttttccaattgatctaacacaaagtatggctgaagagcatggtatttctgttgatttaaaagtttttgaaagcttgatgcaaaaacaaaaggcgggctctaaaaagagctccatgtttaatgcaaaggattttgttatcaagcctggagtaacctcagaatttgtggggtatgaaactctaaaaactgaaggtcatgctgaactcctttttagcaaggagggaaaggaggttaacgagattgttgatcatggatttattatttttaatcaaacaccgttttatgcagaatctggtggacaggtaggagatacaggcattttaaaatctgagagttgttatggtgaaattattgactgtaagaaatcgggcgacgtccatatacatgaaataaaaattatcgatgggatggtgcgtacatcagaaaaatatgatttatgtgtagatggcgatcgaagggaaaggattataaggaatcattctgctgctcatctgcttcattctgctt

SEQ ID NO: 306771 - DNA, 1103 bp, Unknown
  Bacterial polypeptide expressing nucleotide sequence isolated from the Sargasso Sea
tatgcaatttgaacaaatttctaaagaaaaaagaattgatctacctaaaccatcagttgatacagggatgggccttgaaagaatcgctgcattattgcagggaactcatgataattatgaaacagatcattttaaaaagataataaattcagcctctgaaatactaaaagttaaatctgataattctaatctttcaagctttagagttattgcagaccatttaagagcgagttcatttttaattgcagaaggcgtgttaccttctaatgaaggtagagggtatgtgcttagaagaattatgagaagaggaatgagacactcccatttattaggatcaaatgaaccagttttttttaatttatttgaaactcttagggatgagatgaaaggaaactatccagaattagtaagagctgaatctttaatcaaagaaacattaaaaatggaagaagaaaaatttttagttcttttagatagaggaattaaaattttaaatgaagagatttctaaaatagataaagttttacctggagaagtagcttttaaattatatgatacttatggatttccattggatttaactgaagatattctaagaaacaaatccatgtcaattgactcagaaaaatttcaatcattaatgaaagaaagtagagaacttgctaagaaaaattggaaaggttcaggtgatgcagctgtagaggatgtttggtttggtattaaagataaattaggagcaaccgaatttcttggttatgagactaatcaagctgaaggtgctgtactttctttattaaaagacaataaagaagtagatgaattaaataatggtgacgagggaatgattatagttaatcaaacccctttttatggtgagtctggaggtcaagtaggagacactggagaaattgcaggaaatgattttaaatttgaagtaactgatgttcaaaaaaaattaggtgatttatttgttcattatggaaaagtaattaatggttcaattaaaataaaggataacgttgaattaaagatcaatgtagaaagaagggatgatactagagcgtaccattctgcgacgcacttattgcacgagtcattaagaa

SEQ ID NO: 306772 - DNA, 1264 bp, Unknown
  Bacterial polypeptide expressing nucleotide sequence isolated from the Sargasso Sea
acgctcttcgatggaattcattcatcgggtggcggtctggtaggtggtgaggacgctgccgaactctacaccacgtatggttttcctccggaacttctcgaaacgctggccgctgaaagaaattgtgcttttgactgggatggattccgagaagccatggaagcccatggaaaaaaatccggggctggaactcggggtgaagtattcacttctgggccacttgatgcgctaaagaaggccatgcatggctcagaattcgtcggctacgaatcggccacaacaacgggcactattgttggcattatcgcacaagatcggctctgcgaatcgattactgaagcagacgctgtaccaccaactattgaacacaagccaaatcaaatcgttactgtcattctcgacaaaaccagtttctatggtgaatcagcaggacaggttggagacactggatggatcgaaggaccgaatggtaaattcgaagttatcaacacccaaaaagaaggtgatttttttcttcactgtggtgtcctgcgcgaaggttcagttgaactcggacaagaggtccgcgctcacgttgacgaaggtcgacgaaaggcaattcgtcgggcccatacagcaacccaccttgtccatgctgctctacagcactttctcggctcacacgccgtgcagcaaggctctaaagttgacgctgacatactccgattcgatttcagtcatgctgcacctgttggtcatgaaatgcttcgagatatcgaagcgatggcgaatgaaagcacgctggtagcggcaccggtatcagcaaacctcttgccgctggaagaggctcggcacgctggtgcaatgatgctgtttggtgaaaaataccctgacgttgtccgaatggtttctattgacgggattagtagggaactctgcggaggaacgcatgtcgacaatactggcgaaatcggtcttgtaaaaatcattcatgaagaaagtgtttcagctggcacacgacgagtcgttgcaataactggccaccgtgccctcgaacgctttcggcaggcggaagccacccttatagagtcagcaaatacccttaaggtccccgtgcctgacctaccaacgcgactcaactccctaaccaaagagttaaagactctcaaacgacaggcagaaacgaatcaggctgacatttccatcgacgaactgctgaattcagcggaagaagtggctggtgtccgaatagtcgtagcagacgcaaagggatgtaatgcagcag

SEQ ID NO: 306773 - DNA, 2593 bp, Unknown
  Bacterial polypeptide expressing nucleotide sequence isolated from the Sargasso Sea
aatgaaaacaaatgaaataagacaggcttttattgcattctttgagtcaaggaagcatcagagaattacaagttctcctttgattcctgccaatgatccaacgctcttgtttaccaatgctggaatggtccaatttaaggacatatttttaggaaaagaagatcaaggcttcacaaaagcagtcagcgctcagagatgtttaagggcaggcggtaaacacaatgatcttgaaaatgttggctatacttcacgtcatcatactttctttgagatgctaggaaactttagttttggagattatttcaaagaggaggcaatccttttggcatggagctttattaccgatcagctaaatcttgaaaaagatcgtctctggataaccatttttcaagacgacgatgaggcagcaacaatttggcttgataaagttggaatatctgaggacagacttgttcgattgggagaagagtctaatttttggtccatgggtgataccggaccatgcgggccttgcagtgaaatcttttatgatcatggagatcacattgacgggggacctcctggaacttccaatgaggatggtgaccgctttgtagaaatttggaatcttgtttttatgcaatacgaccgacaagcaagtggtgagctggtggatttgcccaaaccatccgttgataccggcatgggtttagaaaggatagcagctgtgatgcagggggtaagcagcaactatgacatagatctatttaagaagctcatcaatgcgataaagagtcaatctgaaaaaggtgaggagagccactatcgagttattgcagatcatattcgatcatctgctttccttatcatggatggtgttacgcccgataatgagggaagaggctatgttctaaggaggattatcagaagggcattgagacatggatatgatctgaaaataaactccccattcttttataagctcgtcgaagttttgacagaagaaatggggcaaacctaccccgagttgcttaataaaaaagattacatagagcgaatcattttgatggaagaagagagattcgctgcaacactctcgcaaggaatgactttattgcagaaagaatttgatcgcacaaatgccgaattgatttccggcgaatttgcattcaagttatatgacacatacggttttccattggacatgactattgatatagcaagaagtgtctcaagaactatagatattgagggctttgagaaagcgatggaaaaacaaagggaaatggctagaaaggccagcaaatttaagattgatgagtctttcagccttgatcatggcttgaaaagtgatttttatggataccaagatttggataccgagagtgaagttataggtgtctttggcaaagacggatctgataagcttcaagaaggcgaaattggacaggtcattctcgataaaacgccattttatgcggaaagcgggggacaagtaggcgatcaaggttcatttagttcagagagtattaatttcgaagtcttggatactcagttttccggcgatgcctattctcatattggaaccgtctccacgggtcaaatcaaggttggagataaaattaaagcttccgtaaatccagtaagaagaaaatcaatcacattgaatcataccggtacgcatatgcttcacagagctctaatgatggttttgggcgagcacgttcaacagaggggttcattggtggacgatgaaaaaattagattcgacttctcacatcaccagtcattgacatcaaatgaaattagagaaatagaaacaattgtgaatgagaaaattgaagagaatattgatgttcaaaccagtatcatgaaacatgacgaggctattagctcaggagcaatggcactcttcggagagaaatatggcgaggatgtaagggttcttgatgtcggagatttctcaaaagagttgtgtggagggactcatgtcagcaacacaaatgaaattggaatatttaaagtcgtttctgagtcaagcatatcctcaggaacaagaagaatagaggccatcactggagacaaagctttgaaatgggcaaaagaaacagagtatttgattgaatcgctgacggatttattgcaaaccagaagagaggatgttgcgagcaaagtagagaatttagttgatacgaataaaaaactacaagctgaaataaaacagctcaagtcacggattgcttcagggcagacatccgatgaagatagcagttccgaggacatcaatggaattgcctacttatataaagaactggaaaatgaaaccgagccaagtgtgatgcgaggagccatagatcagtttaaaaataagctcgaatcaggagtaattgttctttcatccatcaataaaaaaggaaaggtgacatttagcatcggtgttacagatgatttgacatctaaagtcgaagccagctcaatcgcagacataattgctaaagcactgagcggcaatggcggcgggaaagcaaattttgctcaagccggaggttctgatgctaaaaaagtacctgctgctctagaatccgttaaagaatttttgaaaaaaaactcttag

SEQ ID NO: 306774 - DNA, 1189 bp, Unknown
  Bacterial polypeptide expressing nucleotide sequence isolated from the Sargasso Sea
tatggctgacaaatcactaaacgagataagaagtgcttttctcaaatattttgagaaaaatgaccataagattgtcgactcaagcaatttagtaccaaataacgatcccacattaatgtttgctaattctggaatggtacaatttaaaaacgtatttacaggtttagaaaaaagagactacaaacgagctactacttctcaaaaatgtgttagggcaggcggaaaacacaatgatttagaaaatgttggctacacgccaaggcaccacactttttttgaaatgttaggcaatttctcttttggagattactttaaagataggggaatagagttagcatggaatttaataacaaaagattttggactagataaaaataagctttattttactgtctttaatgaagatgaagaggcttttaatctttggaaaaaaattactggatttggtgaagataaaataattaaaatttctacatcagataatttttggtctatgggtgaaactggaccatgcggaccatgttctgaaatattttatgatcatggtgatcatttaaaaggtggattaccaggcacaaaagatcaagacggagatagatatatagaaatttggaacttggtttttatgcaatttgaacaggtttcaaaagataaaagaataaatctacccaaaccttcagttgatactggtatgggtttagaaagaatagctgcattattacaaggtactcatgataactataaaacagatcacttcattaagttgattaattcaactgctgatgctattaacacaaaaattaatgacaaaaatatttcaagttttagagttatagctgatcacttaagagcaagctctttcttaattgcagaaggagttcttccttctaatgaaggtcgaggatatgtacttagaagaataatgagaagaggaatgagacattctcactttttaggtgctaaagagcccatattttttaatatttttaaaacactaatggatgaaatgtcagaaaattatcctgagctcaaaagagcagagtctttaataaaagaaacactaagagcagaagaagaaaaatttttagtacttcttgaaagaggtatgaaaattttaaatgaagaagttactaaagtagataaagttttaccaggagaagtagcttttaaactctatgatacttatggt

SEQ ID NO: 306775 - DNA, 1255 bp, Unknown
  Bacterial polypeptide expressing nucleotide sequence isolated from the Sargasso Sea
tatgaatagcaaagaaatacgtaaggcatttattgattttttcaaggataaagatcataagtttatccgtagttcacccgtggtgcctattgatgaccccaccttattgtttacaaacgctggaatgaatcagtttaaatcaatctttcttgatcagaaaatatctgaatttcctagagtggtaaatagtcaaaaatgtatcagagtgagtggaaagcataatgatcttgaagaagttgggatagatacttttcaccatacatttttcgaaatgcttggaaattggtctttcggtgactattataaagctgaagcaattaattgggcttgggaattatttaccgaagtttggggattagataaaaatcggctttgggttaccgtatatcacgaagataatgaagcattcgatctttggccaaaagtcaccgatatttctcctgaccgtgtattaaaatttgataaaaaagataatttttgggaaatgggtgaaaccggtccatgtggcccctgctctgagatccattattttattggtgacgatattaaatctcaatcaccagataaagttaatagctcagatcaatactgggaactttggaatttagtttttattcagcacaatcgtctttctaatggaaagcttgaagatttaagtgctatgcatgttgacactggcgcaggttttgagagaattgtatcagttatgcagggcaagttaagtaactattctaccgatctgtttttaccaattattggcaaaattgaaagtattacaggtaaatccttcaatgatgatccagtgccttttcaggttatttcagatcacattcgcatgctctcctttgccattgcagatggtgctttgccaagcaatgaagggagagggtatgttttaaggcgaattcttcgcagagcagctcgatttggaagatcgctagatatgaatcaaccttttatttttaatttagttgggactgttgagaaaatcatgggagatacttttcctgaaattgtagataaaaaaagccatattgaaaaaattatcaaagctgaggaggcttcatttaatgatacactagatcgcggtttatcgcatttcaataaagtcatcagcaatatgtctggcaaaacaattcccggtagtgatgcattcaagctctatgatacttttggattcccattggatctaacccatcttatggcacgtgaaaaaggtctttccattgatgaggatggttttaaaaaagagatg

SEQ ID NO: 306776 - DNA, 1612 bp, Unknown
  Bacterial polypeptide expressing nucleotide sequence isolated from the Sargasso Sea
tatgggtgaaactgggccatgcggaccatgttctgaaatattttatgaccatggagatcatttaaaaggaggacttccaggcacaaaagatcaagatggaaatagatatatagaaatttggaacttagtttttatgcaatttgagcaggtttcaaaagataaaagaataaatctgccaaaaccttcagttgatactggtatgggtctagaaagaataactgctttgttacaaggcactcatgataactataaaacagatcattttattaagttaataaactcaactgctgattctataaagacaaaaccttctgacaaaaatatatcaagctttagagttatagctgatcatttaagagcaagttctttcttgatagcagagggcgttcttccatctaatgaagggcgaggatatgttcttagaagaataatgagaagaggaatgagacattctcattttttaggtgctaaagaaccaattttttttaatatttttaaaacattaattgatgaaatgtcgggaaattatcctgagctcaaaagagcagagtctttaattaaagaaacgttaagagctgaagaagaaaaatttttggttcttcttgaaagaggtatgaaaattttaaatgaagaaattaacaaagtagataaagttctgccaggagaaatagcttttaaactctatgacacatatggctttcctttagatctaactgaagatattttaaaaagcaaatcactaacagttgaccataataaatttaaatcattaatggagcaaagtagagagcttgcaaaaaaaaattggaaaggttcaggagatagttcagttgatgaaatctggtttgaaattaaagacaagttagaaccaactgaatttttaggatatgaaactaatcaagctgagggaaaagtagtttctttaattaaagataataaagaagtaagaagtttaaataaaggtgatgaagctatgatggttttaaatcaaacacctttttatggagaatctggaggccaaataggtgatactggactaatcatttctggtgattttaaatttaaagttaaagatgttcaaaaaaaacttggggatctttttgttcattatggaaaagttgaaaatggatcgattaaactcaacgataatgttgaaatgaaaatagatgtggagagaagagagaacataagagcttatcattctgctacccatctacttcatgaatctttaagaagagttttgggaaaacatgtaattcaaaaaggatctctggttgcaccagatagattaagatttgattttagccatatgaaacctatctcaaatgaggagatagttaaaattgaaacatttgtgaatgaaatggttgaaacaaaatcagaagtaaaaacaagattaatgacaccaaaagaggcagtagacaatggtgctctagccttatttggagaaaaatacggagacgaagtaagagttctttcaatgggcaatgaaaaggatagatacttttcaacagaactttgtggagggacacacgttagaaatactggagatattggtaaatttaaaattgttagtcagtcctcgattgccgctggaattagaagggtagaa

SEQ ID NO: 306777 - DNA, 2572 bp, Unknown
  Bacterial polypeptide expressing nucleotide sequence isolated from the Sargasso Sea
atgttaacaagtgaactgagagctaagtttttagactactttaaaaaaaatgaccatgaattggttgattctagccctttaatcccagctaatgacgatacacttctatttactaatgctggtatggttcaatttaaagatgtatttttaggatctgataaacgtccctacaaaagagccactacaactcaaagatgtatccgcgccggcggaaaacacaatgatttagaaaatgtaggctatacacttagacatcacactttctttgaaatgttgggtaattttagttttggagactattttaaggaagaagcaattcaactggcctggcattttttaactcatgagctaaatttggacaaagaaagattatggatttctgttttcagagaagatgatgaagctgcagaaatttggtcatcaacaattggtgttgatccgaagagaatcgttcgattagatgaggaagataatttctggtcaatgggtgatacgggcccctgcggaccctgctcagaaatttactatgatcatggtgatcaatatgaaggcactccccctggatcaccaggtgatgatggagatagatttgtagaaatttggaacctagttttcatgcagtttaatagagatgctaaaggtgaattaacacctctaccaaagccttctgtcgatactggcatgggattagagagggttgcggctgtgatgcagggtgtgaattcaaactacgaaacggatctttttcttaatcttattaaggcctctgaggatgccattcagtctcctggagaagcatcgcataaagtaattgcagaccatattcgaagtgttagctttttaattgctgatggcataactccgtcgaatgaaggcaggggatatgtccttagaagaattatgcgaagggctattcgtcatggctataagcttggtgccaaaaaaccatttttgtattccttggtgaagtcattagtaagagagatggagtctgcattcccaatgcttgcttccaaccaaaaacaaattgaggaaattattcacaatgaagagaataagtttcttgaaactttagataaaggaattgaaattttagagaaagaaattgctaacgtggattcaaaggttattcctggagatgttgtgttcaaacttcatgatacatttgggttcccttttgatctaactgcggatattgcccgtgaacaagatttaaagttggatgaagcaggttttaatcaatgtatggaagagcaagtaaaaaattcgaaatcagccagtaagttcaaaggcactcaattagacttgtcctcaattgatgaaaccaaatttcttggctatgacaggttaaatgctgaaggcaagatcttaggtttatggaatgatgatctgcaagtagattctgcaacttctgataaagaatattttcttgcattagatcaaactcctttttatgcagaatcaggaggccaggttggagatcagggagaattttctagctctagtggaagtggacagatattagattgtattaaacagggaaaaatctttcttcatacaattaaacttgatgatggcacagttaactcaggtgagacattaaagcttgcagtcgcatctgacaagagggcttcagcagcttctaatcattctgcaactcacttaatgcatgctgccttgaaacatgttcttggaagtcatgttgagcaaaagggatcactggtagatgcttcaaaactacgttttgatttttctcatcctaaagcagtaacaaaagatgagataaaacaaatagaattattggttaatcaacataccctaaacaatgctgaagtaaaaactgaattaatgaaactggatgatgccattgcatctggtgctgaggcgatgtttggcgaaaaatatgatgatgaggttagagttttatcaatgagtgatggtttctcggtagagctttgcggcggaacccatgttacaaggaccggtgatattggtatgtttgttatcctaagcgaatccagcgtttcatcaggagttcgaagaattgaagctgtaactggtgctaaggcagtagaactagcactcgagatacgatctcaacttcaagatgttcaaggaatattaaatgttggagcttctcaggttagttccaaagttgaagacttagttaaagaaaataaatccttaaaaaaagggaatacaagtaaagcgaaatcttctgtagatctcaaagaagtgatacataaaattaagaactttgatttggttttgatagaggcagatacccaaaatatccaagatttaaggcagctggttgatagttctaaaaaagaccaatcgcaaagatgcgttttaatcttgagccaccaagattctaaagttgtgatggtttgcggagtgactaatgatattcaagaatcattgagcgccaatgatgttattcaagcagtcgccaaggcctctgatggaaaaggcggtggtcgcaaggattttgctcaaggagcaggtgtagctgataattttgaagaatttgttaattctattcctgatatcgtacaatccatcgcttaat

SEQ ID NO: 306778 - DNA, 868 bp, Unknown
  Bacterial polypeptide expressing nucleotide sequence isolated from the Sargasso Sea
aaaggctctttagttactgataagtatcttcgcttcgacttttcacataataagccattgtcatcagatgaaatagcttcaatagaaaaaataatatcaaatgagatatctgcatgtgtttctacaaaacaaaaggtaacttcttataagaaagctatagagagtggcgctctagcattctttgatgaaaaatatgatgatgaagtcagagttgtgaatattggatcgaactctatagagttgtgtggtggaacacatattactgatacgtcatcaattagattatttaaaatattaaatgagtctgctgtctcgactggtattagaaggattgaggctattactggagatgaagcatatcaatcttatcaaaatttatatcgtgatgtaaaagaattatcagtcaatctaaatataaatcccaatgaattaaagagtaaaattgattcgattaaggttactgatgaagtaaataataatctcattaacgatttaaataaaaaagtttcgactctttattattataagcttgttccaatggagagtgacaaatcaaagacttcattttttatccaggactgctcagacttatctcttgatcagataaaactgttaagtgacaatatcaaaagtaaaaataagaactccatatcaattttaataagtggagattctgacaaaataaattgttatgttggtgtttcaaaagattgtaaacatcgatataatgcgaaacaaattatcagtgaactcaatctaaagttctctgcaaaaggaggaggtagtcccacatttgggacctcggttataacaggccaaaagccctctgttgtaatcaaatatattaaggagctggtaaaagcctaga

SEQ ID NO: 306779 - DNA, 2011 bp, Unknown
  Bacterial polypeptide expressing nucleotide sequence isolated from the Sargasso Sea
attggctgacaaaaccttaaatgaaataagaaatacttttctaaaatattttgaaaagaatgagcataaaattgtcgagtctagtaatttagtacccaataacgacccaacgttaatgtttgctaattctggtatggttcagtttaaaaatgtattcacaggtttagaaaaaagagattatgtaagagctactacttctcaaaaatgtgtcagggctggaggaaaacataacgaccttgaaaatgttggttatacacctcgtcaccacactttctttgagatgctaggaaacttttcttttggagattattttaaagaacaggcaattcactatgcttgggatttaattactaaagattttggcattgataaagaccggctttatgtaactgtatttcacgaagatgatgaagccttcaatttttggaagaaaatagggggttttagcgatgatcgaataattagaattgctacatctgataatttttggtcaatgggtgagaccggcccttgtggaccgtgttctgaaatattttttgaccatggagatcatttagctggaggattacctggctcaaaagacgaggacggggatcgatttattgagatttggaatttagtctttatgcaatatgagcaagtttcaaaagataaaagaataaatctaccaaagccatctgtagatactggtatgggtttagagagaattgcagcattacttcaaggaacgcatgacaactatgaaacagatcattttgaaaaaattatcaactcagcttcagacattgtaaaagttaaatcaaataaaactaatctctcaagttttagagttatagctgaccacttaagagcaagttcttttttaattgcagaaggtgttttaccttctaacgaaggaagaggatatgtgcttagaagaattatgagaagaggaatgagacattctcatttgttaggatccaaggaaccagttttttataatttgtttgatacccttaaaaatgaaatgtcaggaaattatccagagcttgtaagagctgagtcattgattaaagaaactttaagaatggaagaagaaaaattcttagttcttcttgatagaggaattaaaattttaaatgatgaaatttctaagattgataaagttttacccggtgaagtagcatttaaattatacgacacatatggatttccactagatctaactgaagatattttaagaaataaatcaatgtccattgatacagaaaaatttaaaaccttaatgaaagaaagtagagaacttgctaaaaaaaattggaaaggttcaggagatgctgctgttgaagatttttggtttggaattaaagataggttagagccaactgaatttttaggttacgaaaccaatcaagccgaaggtgttgttttgtctttattaaaagacaataaggaagttgatcaaatgaaagaaaatgatgagggagtgattatagtaaaccaaaccccattttatggagagtctggaggtcaagtaggggacactggtgagatcgtatcaaatgaatttaaatttgaagtaacagatgttcagaaaaaacttggagatttatttgtacattatgggaaagtggttagtggttctataaagatcaaagatagcgttgaaatgaggataaatgttgaaagaagagatgatactagagcttatcactctgcaacccatcttttacatgagtctctgagaagagtattaggaaatcacgtaacccaaaaaggctctcttgtagagcctagcagattgagatttgattttagtcacatgaaaccaatccaaaatgatgaaattgataagatagagaactttgtgaatgatatggtttcaaaaaagtcagatgttaaaactaggttaatgacacctgatgaagctgtagaaaacggagctttagcgttgtttggcgaaaaatatggagatgaagtgagagtactttctatgggagatgaggatggaaagtatttttccacagaatta

SEQ ID NO: 306780 - DNA, 1147 bp, Unknown
  Bacterial polypeptide expressing nucleotide sequence isolated from the Sargasso Sea
atgacatctcaaataattaacaaaataattactggagatgaaattagaaaagcatttttagatttctatcatgaaaaatctcataaaattattccaagtgcatccttaattcctgatgaccccacagttttgcttacaatcgcaggaatgcttccttttaagcctgtatttttaggcttaaaagaaaggccatcgaaaagagctgcatcaagtcaaaagtgcataagaacaaatgatattgaaaatgttggagttaccgctcggcaccatactttttttgagatgcttggtaatttttcctttggagattattttaagcaagaggcaattgagtgggcttgggaattagttaccaaagtttatgggctttctgtagaaaatataatagtgagtgtttttcacgatgataatgaatcggaaaagatttggcaggaagaaattgggattcttccagaaaggataattaaacttgatgaaaaagataatttttggtcttcagggaaaactggaccgtgtggcccatgttcagaactttattatgattttaatcctgaaaaaggccttcaaaatattgatttagatgatggcaatcgttttattgaattttataatcttgtatttatgcaatataatcgtgattctgatggtagattatcagatttaaaatataaaaatattgatactggaatgggtcttgagagaatggctcaaatattgcaaaaaaagaaaaataattacgagacagatttgatttttccaattattcaaagggcttctgagatttcaaatatagattatttttctgcagatgaaagaaccaaaatttctttaaaaattattggagatcatacaagagcagttatacatttaatttctgatggagtaattgcaagcaatcttggaaggggatacgtactgagaagactaattagaagaatggttagacatggaagattactaggtatcaaaaatcagtttttgtctgaaattgcgattataggtattaaattaatgcaagaaaattatcaagatttaaaagataacattgattcaatattgactgagataaaaattgaagaggaaagatttagagaaactcttgatagaggagagaaattattagatgaattaattcttcaggtcagaa

SEQ ID NO: 306781 - DNA, 1105 bp, Unknown
  Bacterial polypeptide expressing nucleotide sequence isolated from the Sargasso Sea
tatgggccaaattttacttaccgatgtcaggaaaaaattcttagattattttaaaaaaaacaatcataagatcgtagactctagcaacttagttccaaacaatgatcctaccttgatgtttaccaactcaggaatggttcaatttaaaaatgttttcacaggattagaaaaaagagattataaaacagctacaacatctcaaaaatgtgtgagggcaggaggaaaacataatgatttagaaaatgttggttacactcctagacaccatactttttttgaaatgctgggaaatttctccttcggagattattttaaagaacaagctattcatcatgcttggaatctattaactaaagactttaatttacctaaagaaaaattattagttactgtttttcatgaagataaagatgcatttaatctttggaaaaaaattgctggattaaatgaaagtaaaataataaaaatttcaacatctgataacttttggtcaatgggagacacaggaccctgtggtccttgttctgaaattttttatgatcatggcgacaagttgaaaggtggtccacctggaagtcttgacgaagacggtgacagatttatagaaatttggaaccttgtatttatgcagtacgaacaaatatcaaaagaaaaaagaattgaactgccaaaaccttcagtggatacaggtatgggactagaaaggatgacagcagttttacaaggtactcacgataactatcaaattgatcactttcaaaaaataatggctgcttcatctgatttaacaaagacttcaatcgacagcaaaacaatagcaagccatagagttatcgctgatcatttaagagcaagtagttttttaattgctgaaggaatattaccttctaatgaaggtcgaggatatgttttaagaagaattatgagaagagggatgagacacgctcattctttaggtagcaaaaatcctattttttacaaactttttgaagttttactaaatgagatgcagaacagttatccagaattaataaatggcagagagttgatagttgaaactcttaaaaacgaggaggagaaattttcctctctattagtgcgcggt

SEQ ID NO: 306782 - DNA, 1138 bp, Unknown
  Bacterial polypeptide expressing nucleotide sequence isolated from the Sargasso Sea
caattgtttctggtattctgtttttgaagtagaagatacacaaaaaaaacttggagacttatttgttcattacggatctttgaaaactggagaaatgaaaatcaatgatgtagttgaaatgaaaatagatgtagagagaagagataatctaaaagcttatcattctgctacacacttactccacgagtcattaagaagaactctaggtaaacatgttatgcaaaaaggatcattagttgctccagatagattaagatttgactttagtcatatgaaaccaattaccgataaagagctagtaactattgataagctagttaatgaatatgtttcaaatagttctgaggtaacaacaagaattatgacaccaaaggttgcaatcgaaaaaggagcgctagctttttttggagaaaaatatggagaagaagttcgtgtcgtgtctatgggaaaggaaaaagaagcttacttttcaacagagttatgtggaggaacacatgttaaaaatactggtgatattggaaaatttaaaactgtaagccaatcatctattgctgcgggagttagaagagttgaagctctaagagataaacaacttgagaattttattaagaataaagaaaaattatcaactttatcaactcaaaaagatgaagaagcgattaaagatttgtcatcgcaaattattaaacttggaggcaaaccaaatgttgataataaagatttaaaagaaattataaaaaatctttcacgacaacttgaacaactaaatgttagttcagttcttcaagacaaaaccaaaaacattattaaagatgataagataaatgatataaaggttagatttcaaaaagtacaagatttacctcctaaagatttaagaaaattagttgataatggtaaaaaagaattaggtgatggtatcgtaattgtttttgcaagtagtgaagataaggttggcttagcagttggtattactgataaattagttgataaatatgatgctgtaaaatttgcaaaattaggatcagagataattggaggaaaaggcgggggtggtagaaaagattttgctcaagcagggggtcaagataagagcaaaattgatgaagcttttgaaaaaattaagtctttaatttaa

SEQ ID NO: 306783 - DNA, 2662 bp, Unknown
  Bacterial polypeptide expressing nucleotide sequence isolated from the Sargasso Sea
atggcagacaaatcactaaatgaaataagatctacatttctaaaatattttgaaaaaaatgatcacaaaatagtagagtcaagcaacttagttccaaataatgatcctacattaatgtttgccaactcaggcatggtgcagtttaaaaacgtatttactggattagaaaaaagggattacaaaagagcaactacttctcaaaaatgtgtaagggctggaggtaagcataatgatctagaaaatgttggttatactccaagacaccacactttttttgaaatgttaggtaatttttcatttggtgattactttaaagaaaaagcaatattttacgcttgggatttaatcacaaaagattttggactagataaaaaccggctttattttactgtctttagtgaagatgatgaggcctttaatttgtggaaaaaaatcacaggttttaatgacgatagaataattagaattccaacctcagacaatttttggtcaatgggagaaacagggccttgtggaccttgctcagaaatattttatgatcatggtgaccatttaaaaggaggtttacctggaaccaaagatcaggatggcgacagatacattgaaatttggaatttagttttcatgcaatatgaacaggtttcaaaagaaaaaagaattgatttaccgaaaccttctgttgatactggtatgggacttgaaaggattgctgcacttctccaaggtacacatgataattataaaacagatcattttataaaacttataaactcaatttctgaaacgattaagattaaaccaagtgaaacaaatttatctagttttagagtaatagcagatcatttaagagcaagctcttttttattagctgagggggttttaccatctaacgagggtagaggttatgttttaagaagaataatgagaagaggtatgagacattgccatttacttggatccaaagagccagttttttttaatatttttaaaacgctaatgaatgaaatgtctggaaattatccagaattaatgagagctgagtcacttattaaagagactttaagaatggaggaggaaaaatttttagtgcttttagatcgaggaatgaaaatattaaatgatgaaattaacaacgttgataaaaaattatctggggaagttgcattcaagctttatgatacatatggatttcctctagaccttaccgaagatattttaaaaaataaatctttaactttagatcacaagaaatttgatgatttgatgataaaaagtaaggagcttgcaaaaaagaattggaaaggttctggagatagctcggtagatgaaatctggtttggaataaaagacaaagtaggaccgactgaatttttaggttatgaatacgaacatgctgaagcagttattcagaaaattgtgaaaaataataaagaagtagaaaagttaaacgatggtgatgaaggtataattattttaaatcaaactccattttatggtgagtcaggaggacaagtaggcgatagtggaacaattaaatcaggtgaaaatatttttgaagtgaatgatgtacaaaaaaaattaggaaatctttttgttcattatggaaaaatgagaaatggaaatttaaaaataaatgaaaatgttgaacttaaaattgatgtcgagaaaagaaataatgttagagcataccactcagcaacacatttactacacgagtctttaagaagaattcttggaacacatgttactcaaaaaggttcattagtagcaccagatagactgagatttgatttcagccatatgaagccaatatcctcagatgaacttgaaaaaattgataattctgtaaatgaagtggttcagaaaaaatctgaggttataacaagaataatgactccaaaagaaggtattgagcatggtgctttagctctttttggtgagaaatatggtgatgaagttagagtagtatttatgggtgatgaggggaataagtacttttctactgaattatgtggtgggacacatgtaagaaatactggtgatgtaggcaaatttaaaattataagtcagtcagcgattgcttctggtgtaagaagggtagaggctttgagagataaacaattagaggaatttcttacaaataaagaaaagcaaataggtatatcagaacaaaaaaacgatcagataattgatgaaatatctaaagaaattatttcattaggtggaaaaccaataaaaaatgtagacgacaaaaaacagttaattaaagatttgtcaaagcaattagatcagctaagtgttaaatcaattttatctgataagaataagaacataattaaagatgaaaaaataaataacattaaagtaagatttcaaaaaatttttgatttatcacccaaagaattaagaaaattagtagataacggaaagaaagaacttaaagaaggaattataattgtttttgccagcaaagatgaaaaagttggtcttgcggtaggtattactgaaaaacttacagaaaactttgatgcagttaaatttgcaaaagttggttctgaaattttaggaggaaaaggaggaggaggtcgtaaagactttgctcaggcaggtggacagcatatagacaaaattgaggatgctatagaaagtcttaaaaattaat

SEQ ID NO: 306784 - DNA, 826 bp, Unknown
  Bacterial polypeptide expressing nucleotide sequence isolated from the Sargasso Sea
atgccagataagacacttaatgaaataagaagtacttttctcaagtactttgagaataatggtcacagaattgtagactcgagtaatttggtcccaaataatgatcctactctaatgtttgctaattcggggatggtacagtttaaaaatgtttttacaggtttagaaaagcgggactataaaacagcaaccacttctcaaaagtgtgtgagagctggtggtaagcataatgatttagaaaatgtaggctataccccaagacatcatacattctttgaaatgttggggaacttttcatttggagattactttaaagaaagagctattgagcttgcatggaatttaattactaaagattttggattagataaaaataagctttatttcacagtatttaatgaagatgaggaagcctttaagctttggaagaaaataacaggttttggtgaagataggataataaaaatttctacatctgataacttttggtcaatgggcgagactggaccttgtggaccatgttctgaaatattctttgatcatggtgatcatttaaaaggtggtttaccaggaactaaagatcaagatggagatagatatattgagatttggaatttagtttttatgcaatttgaacaactgtccaaagataaaagaataaatcttccaaaaccctcagttgatactggtatgggtttagaaagaatcacagcgcttttacaaggaacccatgataattatgaaacagatcattttaaaaaacttatcggatctatttctgaaggtactaaaaagaacctgacgaaagtatatttccagttttaga

SEQ ID NO: 306785 - DNA, 1533 bp, Unknown
  Bacterial polypeptide expressing nucleotide sequence isolated from the Sargasso Sea
tttgataactaaagattttggattagataaaaatagactttattttactgtttttaatgaagatgaagaagcatttaaactttggaaaaaaatatcaggcttaaatgaaaataaaataatcaaaatttctacttcagataatttttggtcgatgggtgaaacaggtccatgcggaccatgttctgaaattttttatgatcacggagatcatttaaaaggtgggcttccaggaagcaaagaccaagatggcgatcgatatattgagatttggaacttagttttcatgcaatatgaacaggtttcaaaagataaaagaatagatttacctaaaccttcagtagacacaggtatgggtcttgagagaatggcagcacttcttcaaggtacccatgataattataaaacagatcattttttaaaattaataaattcaatttcagaaactgtaaaagttaaaccaaacgaaaacaatttatcaagttttagagtaatagctgatcacttaagggcaagttcgtttctacttgcagaaggagttttaccatctaatgaaggaagaggttatgttcttagaagaattatgagaagaggaatgagacattcgcatttacttggatctaaagaaccaattttttacaatatttttaaaactcttttagatgaaatgtctaaaaattatccagaattaaaaagagcagagtcgcttattaaagaaactttgaaaatggaggaagaaaaatttctggttttattagaaagaggtatgaaaattttagatgatgaaatctcaaaaatagacaaggttcttcctggtgaagttgcttttaaactttatgatacttacggatttccgttagatttaacagaagatattcttaagaacaaatctctcgaagtagataacaaaaaatttgatgagatgatgaaaaaaagtagagagcttgcgaaaaaaaattggaaaggttcaggagatagttcagtcagtgaaatttggtttaatttaaaagagaaaattggtccaactgaatttttaggctatgagaccaatcaggctgaaggaagcgttgctgcgataattaaagataataaagaaattcaacaattaaaacaaggtgaagaaggacaaattattttaaatcaaactcctttttatggtgagtctggtggtcaggttggcgacaaaggcataataacttcaggcgaaaatgaatttgaggtaactgacgttcaaaaaaagattggaaacttatttgttcactttggcaaagtttcaaaaggaacaattaaaaaaaaaaataatgttgaattaaaaataaactcagaaagacgtcaagatataagagcctatcactcagcaacacatttattacatgaatctctcagaagaactttaggaacacatgtaatgcaaaaaggatcattagttacaccagatagattaagatttgattttagtcatatgaagccaataacagatgaagaaatgaaaaaaattgatgaaaatgtaaataaatttgtaaatcaaagacagaa

SEQ ID NO: 306786 - DNA, 1606 bp, Unknown
  Bacterial polypeptide expressing nucleotide sequence isolated from the Sargasso Sea
atgggccaagcttatccagaattaatagaacaaaaaaatcacatagaggatgtcatcaaacaagaggagattcgtttttcagtgactctcgaccaagggatggaaatcctagaggaggccattctctctatggaaaatgacgtacttcctggtgaagtggtatttaagttatatgatacctatggttttcccgtggacctaaccaatgatattgcaagagagcgaaatttttccatcgacctaaaaggttttgatgagcacatgaattctcagaaaataagagcaagaaaagcaaataagttctccggtgcagaagaaaaaaattatgaattaacggtaaattctgaatttttcggatacgaattcacagaaaaaaccgcaaagataaaagagatcttcgtagatggaaatgcattaaaatcaattgaagttggccaagaaggtttcatcgtcactgatgcaacacccttttatgctgaatcaggaggtcaagttggtgacacagggataatacattcaaaagatggtgtctttaaagtgacagatacacaaaaacagaataattctatccttcatcatggtatcttagaaaaaggtaagattgatattaacaagaaggtaaccttgactgtagacgataagaaacgcctgaagatcgcagcgaatcactctgccactcacttgatgcatgcggcactgaggaatactctaggaaagcatgtaaaacagaaagggtcgttagttgatgcaactcgtctccgttttgatttttctcataaccaaccacttactgagacagagttatctgaaatagaagctcaggttaacgcagagataagaaaaaataatgccgccaagattgacataatggcatatcaggatgccattgattctggagctatggcactgtttggtgagaaatatgaagaccaggttagggtattaaactttggggaatactctattgagctgtgtggaggaactcatgtcaatcgaacaggtgatatcggtttatttaaaattgtttctgaaactggagttgcatctggaatcaggcgaattgaagctttgactggagaagcagcgcaagaatggttgacaagctataagacaaggttggatcgggttgctgccatactaaagagctctgaagatcaagttgattcaaaagtagagcagttattattaaaaaataaagaactagaaaaagagctttcgagatcaaagcaaagaatgtttagtggaaatcatgatgatattttaaataacgtaacagagaaaaatggcaaaagtattcttgtgcaaagattagatggttttaatgcagatgatctcagaacgtcaatagacagatacaaagataagctaaaaagtgccatcgtagtactgggtgcctcagaaaaaggtaaagcaaaaattgccgtaggggtgacaaacgacaatacagaactagttcatgcaggtgagttaattaagaaaatcgcagaagttgttggaggcaaaggtggtggaagacccgattttgctcaggctggaggaccggaagcaaaaaaacttgacgaagcgctcaaactagcaaaagaactgattaacagtaagatttaac

SEQ ID NO: 306787 - DNA, 1092 bp, Unknown
  Bacterial polypeptide expressing nucleotide sequence isolated from the Sargasso Sea
gatgggctcagcatatccagatttagaatcgaaagaaaaagacattactaaaatgattcacgatgaagaagtcaagttctttgaaacattggaaaaaggaatcaatattttagatgaaacaattaattcaatgaaaggcaaaactatttctggtgatgttgcatttaaattacatgatacttttggatttccttatgatctcactgctgatattgcaagagagaaggagctaaaagtagatgaaaaaagatttaatgaatgcatggatatgcaaaagcaaacatcaaaagcatccagtagttttgtttcatcactcccagctgcagctggaatagatcaaacggttttccttggctatgagcaactagaaacaaattcaaaagttttggttatatggaaagaacaaagtagggttgatgaagctaagaaggatgaagaaatttttattgcatgtgatcagacaccattctatgcagaagctggtggacaaataggtgataaaggaatatttgcatctgaatcttctactggtactattttagattgtaaaaagcagggaaaagtttatatccataaagcggtcgtaaaaaaagggaaaattaataaaggcgatgtaataaaaatgagtgttgagaaagaaaaaagagctgccattgcaatacatcattctgcaacacatttagttcatgcagcactaagagaaatcttgggtgatcatgttcaacaaaaaggctcattagttgatgagaataaattacgttttgatttctctcattcaaaaccattatcttctgaagaaattttcgcaattgaaacgatcgttaataaagaagcattaaaaaatttagaagttaagactgaattaatgaagcttgatgatgctcttaaatctggtgccatggcattgtttggagaaaagtatgatgatgatgttagggtcctaactatgggagagaactcatactcagtagagttatgtggtggcactcatgttgaaagaactggcgatgttggattttttgcaattaccagtcaatcaagcgttgcatcaggcattaggagaattgaagcagttgctggcataaaagctca

SEQ ID NO: 306788 - DNA, 1619 bp, Unknown
  Bacterial polypeptide expressing nucleotide sequence isolated from the Sargasso Sea
aatgggtgacactggaccttgtggcccttgtagtgaaattttttatgatcatggcgatcacatttggggtgggcgtcctggcactcctgaagaagatggtgaccgttttattgaaatttggaacattgtttttatgcaatataaccgtcaagccgacggtgaaatgttaccactgcctaagccttcagtggacacaggtatgggtatcgagcgtattgcagctattatgcaaggtgttcattcaaactacgaaatcgacatctttaagcaattaattgccaaagctgctgaaattattggcgtttcagatttagagaataaatctctgcgtgtaattgctgaccatattcgttcgtgtgcgtttttagttgctgatggtgtgatgccatctaacgaaggtcgcggttatgtattacgccgtattattcgccgtgctgttcgccacggtaacaagttaggcgccaatgaagcgtttttctataagttagtacccactttaattagtgtgatgggcgatgcagctaatgggttaaaagccatgcaagcaatcgttgaaaaagcattaaaagcagaagaagagcagtttgctcgcacattagaacgtggattagtgattttagatggtgcgttaaattcacttaacggtgacactctagatggtgaaactgtctttaaactttacgacacctacggtttccctgtcgatttaacggcagacgtttgtcgtgagcgtgatattaacgtagacgaagctggttttgaagcggctatggccgaacaaagaagccgtgctcaagctgcaggtaattttggtgccgactacaacagtcacttaattattgatgctgaaacggctttttgtggttatacagagctcacgggtgaatctaccgtgacaggtttgtatgttgatggcaaagcggttgagcaggtagttgctggccaaaatgccattgtggtactagccaatacgccattttatgctgaatcaggcgggcaggttggtgataaaggtctacttacggcacaaggtgttgagtttacggtaaacgatacgcagaagtttggtcaagcgacaggtcatcaaggccaattagctcaaggtcagttagtgctagggcaaaccttaacagcacaagtggataaaaaattacgtcatcgcacgcaattaaaccactcagtgacgcatttactgcatgctgcattgcgtcaagtattaggcacacacgtaactcagaaagggtcgttagtgaatcctgagcgtttgcgttttgacttttcgcattttgaagcggttaaaccgtcagagctaaaagcggtcgaagaactcgtgaacacccaaattcgccgtaatcatcaattgaaaaccgctgaaatggccattgatgaagccaaagaaaaaggcgccatggcgctgtttggtgaaaaatacgatgatcaagtacgtgttgttaccatgggtgatttctctatcgagttatgtggtggtacccatgtgggtcgtacaggtgatattggcctattcaaaattacgacagaaggtggtatcgctgcgggtgtacgtcgtattgaagcggtaacaggtgctgctgcgatgagctatgttgctgaacaacaag

SEQ ID NO: 306789 - DNA, 1513 bp, Unknown
  Bacterial polypeptide expressing nucleotide sequence isolated from the Sargasso Sea
tatggttttcccattagatttaactgccgatattttgaaaaataaaaaaatcaaaatagacacaaatgcttttaaaaaagaaatggaaaaaagcaaagaagtggcccgagctagttggaaaggttcaggagataaatctgttgaaaaaaaatggttcaaagtaagagaagagctcagcccaacggaatttctaggttatgaatttgataaagctgagggggtaattttaaaaatatcaaaaggagataaatttgttgatagcgcaaaagcaggagaggaaatagagatcataactaatcaaacgcctttttatggagagtctggaggacaagttggggaccaaggtattatttatacttctgactgtaaaataagaattaaagacactcaaaaaaaaatgggcgatctttatgttcatacaggaaatgttgaaaaaggatcaattaaaactggtcaaagcgcaaacttggagattgatataaataaaagaaataattcaagagctaatcactcagcaacacatttgttacatgaatctcttagaaggacattgggcaaacatgtaacacaaaaagggtcactggtaagcccagagaggttaagatttgattttagtcacaataaaccaattgaaaaagatgaaatgataaaaataaacaatgttgttaatgaaatagtccaaggatcaagtgatgtccaaactagaattatgacaccgaaggaagcggtaagtatgggagcgttagctttatttggtgaaaaatatggggaagaggtgagagtagtatttatgggaaaagaaaataatggtttcttttctactgagttgtgtggtggtacacatgttaaaaatacaaaagaagttggaaaatttaaagtgattagtcaatcctcgattgcatctggaattagaagaatagaagctttgagggataagcagctagaagattatgaaaaatctcttaaacaggacaaatcctcaaaagaagaaactctaaaagatcaaataaatgaaattaaaaatcaacttttaaaacttaaaatagaacctagctatattgatggatttttgaaatccaaagaaaataaggatttgtctgaaaaatttagatctttaaacaaagtccttgaaaaagttaaaatagaaaacattcttaaagataaaaataaaaatattatcaaagataaaaaagcgggggcatttactttaagacaacaagttctcacagattttccacctaaagaacttaggagcataattgataaaggtaaaaaggatattaaagaaggtattgtagtcggaatatcaacttttgaaggaaaagttggtgtagcagttggtatcaccaaggaattaacaaaaaaatatgatgctgtaacgctagtaaaaactgcttcagagattcttggaggtaagggtggcggtggtagaaaagattttgcccaggcaggtggatcaaataaagataatatcgaaaaagcctttgaagccttaaataaaaaaattagttaa

SEQ ID NO: 306790 - DNA, 865 bp, Unknown
  Bacterial polypeptide expressing nucleotide sequence isolated from the Sargasso Sea
tccaaaagataaactatctgccactgtatactctgaagacgaagaagctcttaaattgtggaagaaggtagctggattacccgaaagtaaaattgtaaagatttcgacctcagataatttctggtctatgggtgaaacaggaccatgtggtccttgctcagagatattctatgatcatggtgacaagcttaaaggtgggcctccaggaagtttagatcaagatggagatagatttattgaaatttggaatctagtatttatgcaatttgagcaagtttcaaaaggtagaagattagatttacccaaaccatcagttgatacgggaatggggttagaaagaatagcagcagttcttcaaggaacacacgacaattatagtattgatcattttaaaaaattaatgaatgcatcatcagaaattaccaaaactaaaatagataaagaaactatagcaagtcatagagtgattgcggatcaccttagagctagcagcttcttaatagccgaaggtgttttgccatcaaacgaaggtcgtggatatgtcctaagacgaattatgagaagaggcatgcggcacgcacatacacttgggagtaaaaatccgatattctttaaattatttgatgttctattaaatgaaatgtcacaaagttaccctgaacttgaaagaggaaaagatttaattattgaaacattaaaaaacgaagaagaaaaattttcatcacttttagataggggaatgagaatattaaaccaaaatttagaaaaagttaaaactaatatcttgccaggagaaatagcttttaaactttatgatacttatggttttcccattagatttaactgccgatattttgaaaaataa

SEQ ID NO: 306791 - DNA, 2191 bp, Unknown
  Bacterial polypeptide expressing nucleotide sequence isolated from the Sargasso Sea
gatgaggcatttaatctgtggaaaagtcagacagaatatatcaaaggagcgaattcttcgatttggcgataaagagaatttttgggagatgggggaaacgggtccatgtggtccttgctctgaaattcattattttattggagatgatattagcttacaatctccggagggcgttaacagagatgacatttattgggagctttggaacttagtatttattcagaatgagcgtttatctgacggcactatttcaaaccttcctcaaagtcacgtagacacgggggctggattagagcgtattacaaccatccttcaagggaaaaaaagcaactacgagacagacctttttcagccaataattaaacaattagaaatattttcaggaataaagtacaacgatgatcaggtgccctttcaggtaattgcagatcacattcgaatgctttgtttttctattgcagatggcgcgataccctcaaatgaagggagggggtatgtactgagaagaattttgcgtcgagctgcgcgctttggaagaatgttaaagctagaagaaccatttttacataaacttgttcctgtagtttctgagctcatgtctgagtcataccctgagctaagtgataaagatacacatattgaattggttataggaacagaagagactttatttaatcagacattggatcgtggaattaatcactttgataaactattaagtgatttaaaaggtaatacaatatctggttctgatgcttttaggctttatgatacctatgggtttcctcttgacctcacgcagcttattgctagagagaaaggtatagctgttgatgaggatggttttgataaagaaatggcaaagcaaaaagataaagcaaggcaagccgggaaattcaaaattgagacaaaagacgtggcatggaacaatctaagaaatggagatcattctgagtttattggttatgaattgcttgattcaaagtcaaaggtgatgaaatacgcagagatcgatggtagttatctgattgtgttggataaaactcctttctatgcggaagcgggtggtcaagttgctgacaagggtaccattaagtctgacaatcttgatctcaaagttgtagatgttcagaaagagaatgatctaattattcatttttgcgaaggaaaggtttcctccatggattcagaagatatcgttgaatgcaaagctgatggtagctatcgtgcaccgataaggcgaaatcataccgctacgcatctattgcatgctgcattaaaagtagttttgggcgatcaagtgcagcaagcaggatctcttgtgcacccggattatcttagatttgattttacctattttgaaaaaatttcaaaagatcagattcgtgagattgaagatattgtaaatatgcaaattcttataaataacaatttagacgtatcaactaaatcatacgatgaagcaatggcgggtggtgttgtagctctatttggtgagaaatacggagatcaggtgagggttgtatcaactggtgaattttccagtgaattatgtggggggactcatgtaaataggacgggagatattggattatttaaaattactgaggagtcttctttggcctctggtgtgagacgtatagtggctgtgactgggcaaaggtccgtacaggtatttcaagataaatcagaaacattatctgatatacaacagcatttaaactgcaaagagagcgaaattttccatagaataacacagttatacaatgataaaaaagaattagagaaaaaaataaaggagcttgcacagtccagtgaatctgatattgattcatggattaacgaaggtaaaaaaataggttcatataatttagttgttaagcatctagacgtttctgatgtagatgatttaaagcgatctggtgataaactattatcccaaattgggagcggtgctggagtattattcagctctggaagtgataagccatttgctgtgattgtgataactgatgatttgataaaacagggcttagatgcgggaagtttggctaaggaaattggctcatttatggaaggcggtggaggtggaaaaccccatctcgcaacagctggggggcgtgactcctcattgataccggctgctattgatcgaacgcaagatcttatttcaaataaattaaatgtataa

SEQ ID NO: 306792 - DNA, 469 bp, Unknown
  Bacterial polypeptide expressing nucleotide sequence isolated from the Sargasso Sea
tatgaaatcatcagatattagaaaatcctttatcgaatattttaaaaataaagaacaccaattcgtacgcagttcacccgtagtgccaattgatgatcccacattattattcacaaatgctggcatgaaccagtttaagcccatatttttgggcgaagcccaacaggattataatagggcggtaaacagccagaagtgtattagagtcagtggcaagcataatgatctggaggaagttggtctagatactttccaccatactttttttgaaatgctcggtaattggtctttcggggattattataaaaaagaggctatcgagtgggcatgggatctactaaccaatgtatggaaattggaaaaggaaagactctgggtaaccgtttacaaagatgatgatgaggcatttaatctgtggaaaagtcagacagaatatatcaaaggagcgaattcttcgatttggcgataa

SEQ ID NO: 306793 - DNA, 1147 bp, Unknown
  Bacterial polypeptide expressing nucleotide sequence isolated from the Sargasso Sea
gatgaaaacaagtgaaataagaaaagcttttttagatttttttaattcaaagaatcatgaagttgttgcttcaagctctctagttccatcaaatgatgaaaccttattatttacaaacgcaggcatggtgcagtttaaagatgtcttcttagggactgagactaaaaattttaaacgagctgcaacctcacaaagatgtatcagagctggaggcaaacacaatgatttagaaaatgttggttataccttaagacaccacacattttttgaaatgttgggtaattttagttttggagactattttaaagaagatgctattaaatttgcatgggaatttttaacagagatacttaagttagataaagaaaaattatggatcactatttataaagacgatgatgaggctgaagaaatttggaaaaatattattggaattgatccgggcaaaatagctagattaggtgatgatgataatttttggtctatgggtgacacaggaccatgcggtccatgctctgaaatattttatgatcatggtgaacaaatagatggaacacctccaggagccgacggtgatgaaggcgatagatttattgaaatatggaatcttgtcttcatgcaatttaatagagatgagagtggaaaaatggaaccgcttcccaaaccatctgttgatactggaatgggcttagagagaattgcagcggttcttcagtgcgttaattcaaattatgaaacagatgtttttaaagatttaatcaatgcttcagaaaaaatacttggcagcgatggaagtacatctcataaagttattgctgaccatattcgatcaagtgtttttttaatatctgacggagtaattcctgaaaaagaaggaagaggctatgtcttgagaagaataatgagaagaggcattagacatggatataaaattggtgccaaaaaaccatttatgcatttacttgtaaaagatttaataaaactcatgaattctgcttacccagaattaaagaaaaaacaaaaagatattattgaattaattaagaatgaagagattaaattttttgaaacgcttgaaacaggaatagaaatacttgaagaaactatttccaaaatgaaaaataaaactctctctggagatgtagtt

SEQ ID NO: 306794 - DNA, 1180 bp, Unknown
  Bacterial polypeptide expressing nucleotide sequence isolated from the Sargasso Sea
ttttacggtgagtctggaggacaagtagcagacaaaggagaaataatttcaggaaaatttaaatttgaagttacagatgtacaaaaaaaattaggagatttgtttgttcattatggtgaagtaaaaagtggatcaataaaattaaataataatgtagagatgaaaataaatgtttcaagaagagataatataagagcgtatcattcagccacacatttattgcacgaatctttaagaagagtattaggaactcatgtgacccaaaaaggttctttagtagaatctgaaaggcttagatttgattttagtcacatgaaaccaataagtttagaagaaataaaaaaaattgagactttcgtaaattcaatgatagaaaagcaatctgaagtaaaaacaaggctaatgacacctaaagaagcagttgataatggagctttggcactttttggtgaaaaatatggtgaagaagtaagagttttatctatgggagatgaagataaaaattatttttctacagaattatgtggtggcacacatgtaagaaacacaggtgatattggaaaatttaaaattgtgagccaatcttcaattgcagctggggttaggagagttgaggcattaagagataaacaattagatgactacctaaaaaataaggaaaaaataagcaatctttcagaaaaaagagatgaagaaataattagagatataacaaaaaaaatcgttaatttaggaggcaaagtcaatgcagaaaataaaaataagaaagaattaattaaaattttatcaaaagatcttgaacaacttgaattaaatttaattttagaagatgaaacaaaaaatattatatgtgatgacaatataaataatattaaagtaagatttcagagggttgaagatttaccttttaaagaattaagaaaacttgttgataaagggaaaaaggatcttgaaaaaggaattgtaatagtattttcaagcaaagatgaaaaagttggtttggcagtaggaataactaagcaattggtagataaatatgatgctgttgaatttgtaaggcaaggttctgaaattgtaggtggaaaaggtggcggcggtaggcgtgacttcgcacaagcaggaggagttgaaaaaaaaaatattaatattgcctttggagtattaaaaaatttaatttaat

SEQ ID NO: 306795 - DNA, 2548 bp, Unknown
  Bacterial polypeptide expressing nucleotide sequence isolated from the Sargasso Sea
gttgaaacttaatcaagttaggcaatcatttttaaattattttaagaataagaaccataaaattttgccgtccagtggtttagttccaaaaggtgacgatagcttattgttcacaaatgctggaatggttcagtttaaagatacttttcttggtttagataatagagattattctgccactacctcacaaaagtgtttacgagttggtggtaaacataatgatcttgaaaatgtcggcttcacaacgagacatcaaactttctttgaaatgcttggaaactttagttttggagaatattttaaggagaaggctattgaatatgcatgggaattcttaactgaagaactaaaactacctgaggatcgactttgggttactgtccataaggatgataaagagtctgaagaaatctggcttgaaaaaattggggtgtcttcaacaagacttgcaaaacttggtgatgatgacaatttctggtcaatgggagatacaggtccgtgtggaccatgctctgaaatattttttgacaacggaaaaaacttcgatggaaaagcaccaggagaaggagatacaggagaaagatacatcgaaatctggaatttagtttttatggaattcaatagagattcaaacggtaagctttcttcattacctgttaaatgtgttgataccggcatggggctagagcgaatgtgttcagtcatgcaggaagttggatctaatttcgacatagatatttttaaatctctgaaaaatttaatgtctaaacatttcacagaacctaacgatcaatctttaaatgttttagccgatcatcttagagcaatttttttcttaatggcagaaaacataataccttcaaatgagggaaggggttatgttttaagaaggttaataaggagaggtgtcaggcatggttataagatgggttcaagagaaccatttttatctcattttctaactcatcttgaaaatgattttaaagaagatttcgaagatgaatttttaaagtttgaaaaaatacaaaaagatttactaactgaagagcaattattttttaagactctaaaaacaggcattgaaatttttgaagcaagcatcaatgaaacagatggcaagcaactagacggagcaattgcattcaaacttcatgatacttatggatttccagtcgacttgactatggcaatggctcaagaaagaggcttaaaagttgatcaaaagggctttgataaacttatgaaaaaacaaagagagggctcaaagtcttcttcgatgtttaaagttttagatattactattgatccaaaaattaatagtgagtttgttggctatcaagaacaaactgccaaaggaagttgcgttgctttatttgatgaggagggaaattcagtcacctctctatctggagagggttttgcaatcttttctaaaacaccgttttatgccgaatcaggagggcaagtcgcagatattggtatttttaagggtacaaacttcaatggagaaattctgaactgtaagaaagtaggagatttccatcttcatgaagtaacaattgcagaaggatcactggaattaaatgctaatgttgaactaataattgattctgagcgaagagaaaaaattgtttcaaatcattcggcaactcatcttttgcattctgctcttagaaaagttttgggcgaaagtgttgagcaaagaggctcattagtcaatgaagaaaaacttcgatttgatttttcacactctaataaagttacagatgatcaaataatggaaattgaagatattgtaaatttaaaaattgaggaagccattgataccaaaacagaagtattgccatatgaagatgcccttaaaactggagctttagccttttttggagataaatatggcgaaaaagtaagagttgtatacataaatggagatttttctgtagaattttgtggaggaacacatgttaaaaatacctcggaaattggtggctttgctgttacaaatgaaacatcggtttcgtctggggtcaggaggatagaggcaataagcggagacaaatattacaaagaatcacaaaatgctttgaaaatccttgaactattgagtgttaagttaaacgttcctcaagaaaaaattgcagatagagttgatgagttgttagagagcttaaaaaattcaaaaaaaaataatccagttattcaggcaaaagaattaagagatgagaagtgtagtttttcaggttcttctggagtaattaaaatttttgaaaatgcctctcttgaaattcttaggaaagaatcagacaaattaaaatctgataaaaaaattgtttttgctatttgtctaagcactactgaggataaattaatttatatagtctcttctagtaattctgatgaagcaccagcatctgaaattattaaagcagtaaatgatgcttttgatggcagtggtggtggccgagcagattttgctcaaggcggaagcccacaaaaagaaagtgttgatgaaatggtcacaaaacttaagggactttttaaaggttaa

SEQ ID NO: 306796 - DNA, 1510 bp, Unknown
  Bacterial polypeptide expressing nucleotide sequence isolated from the Sargasso Sea
agaagatactacctcggagaagtagcctttaaactctatgatacctacttttttccattggatcttacgcaagatattttaaaaaataaatctttgacaattgataatgataaatttcaaagtttaatgaaagaaagtaaagagcttgctaagaaaaattggaaaggctctggtgatagcgcagtagatgatatttggttttccataaaagatcgattaggtccttcagaattcttaggttatgaaactaaccaagcagaaggcattgttctaacattattaaaagataataaagaggttaatgaattaaatgaaaatgatgaaggtatgattattttaaaccaaactcctttttatggagagtctgggggacaggtaggagataccggtgaaataatatctggaaactttaagttcgagatcacagatgtccaaaaaaaattaggtgatttatttgtacattatggcaaagttaaatcaggaagtataaaaatcaaagacaacgttgagatgaaaattgatattgatagacgtaataatataagagcttatcactctgcaacacaccttttgcatgagtcgttaagaagagtattaggcactcatgttacacaaaaaggatcattagtagcgccagacagattaagatttgattttagccacatgaaaccaatttcagaccaggaaatagaaaaaatagaaaatcacgtaaattcaatggtacaaaaaaaatcagaagttaaaacaaggattatgactcctaaagaagcagtaaataatggagccctggcactatttggagaaaaatatggagaagaggttagagtattatctatgggagaagagaaagaaaagtatttttccactgaattatgtggaggtacgcatgtaagaaacactggtgacattggaaaattcaaaattattagtcaatcatcaattgcagcaggtgtgagaagagtagaagcactcagagaaaatcaattaaatagtttcttacaaaataaagaaaaattatctgacttatccgcacaaaaagacgaagaaatgattaatgacttatcaaaacagataattaaattaggtggcaaaccaaatatagaaaatgaagaaaataagattttaattaaagaattatcaaaacaactagagcaattaaaatttagttcaattttagaaaataattcaaaaaatataattcaagatattaaaattaataatataagcataagatttcaaaaagttgatgatcttccacccaaagagctaagaaaattggttgatgctggaaaaaaagatcttaaaacaggaattgttatagtttttgctagtttagaagacaaagtaggtcttgcagttgggataactgataagcttactgacaagtatgatgcagtaacatttgctaaaacaggatctgaaattattggtggtaaaggtggtggtggtagaaaagattttgcacaagcaggtggccaatttaaagataaaattgatgaggcttttgaaa

SEQ ID NO: 306797 - DNA, 577 bp, Unknown
  Bacterial polypeptide expressing nucleotide sequence isolated from the Sargasso Sea
catgaattcaaatcagattaggtcaacatttctaaattactttaaaaaaaatggacatgagattattcattctagctctctagttccagataatgatcctactttaatgtttgctaactctggaatggtacaatttaaaaatatttttacaggtaaagagacaagagattacaacagagcgactactgctcagaaatgtgtaagagcaggaggtaaacacaatgatttagaaaatgtaggatatacgacaagacaccatactttttttgaaatgttaggtaatttctcttttggagattattttaaagagttggccatagaacttgcttggaatctaattactaaagaatattcaataaataaagatagactattagtaactgtttattctgatgatcaggaagcttttgatttatggaaaaaaatagctggtttgtctgaaaataaaattattaaaattagtacatctgataatttttggtcaatgggtgaaactggtccttgcggtccatgttctgaaatattttatgatcatggtgataaatacgaaggaggccctccaggctctccaaacgaa

SEQ ID NO: 306798 - DNA, 391 bp, Unknown
  Bacterial polypeptide expressing nucleotide sequence isolated from the Sargasso Sea
atgccaaataataccttaaacgatataagaaaaacatttctcgaatattttaaaaaaaatggtcacgaaatagtaggatcgagtaatttagtaccgaacaatgatcctacattaatgtttgctaattcaggaatggttcaatttaaaaatgtgtttacaggactagaaaaaagaaattatcaaagagctactacctcacaaaaatgcgtaagagcagggggtaaacataatgacttagaaaatgtaggttatactccaagacaccatactttttttgaaatgttaggcaatttttctttcggagactacttcaaagagcgtgcgattgaacttgcttggaatttaattactaaagattttggtattgataagaataagctttattttacag

SEQ ID NO: 306799 - DNA, 1101 bp, Unknown
  Bacterial polypeptide expressing nucleotide sequence isolated from the Sargasso Sea
tgcaaaaaaaattaggagatctttttgttcattatggaaaagtaattagcggatcaataaaattgaatgacagcgttgagatgaaaataaacgaaacaagaagaaatgatacaagggcttatcattcagcaacacatttattgcatgagtccttgagaagagttttgggtacacacgttactcaaaagggatctttagttgagccaagtagattaagatttgattttagccacatgaaacctatttcagaagatgaaatcaataaaattgaaaaatttgtaaattcaatggtatctaaaaaaacagacgttaaaacacgattaatgactccagatgaagcagttgaaaatggtgctttagctttatttggtgaaaaatatggagaagaagtaagagttctctcaatgggcgatgatgatggaaaatatttttctactgaactttgtggtggtactcatgtcaaaaatacaggtgatattggtcaatttaaaattaccagtcagtcttccattgcagcagggataagaaggattgaagctttaagagacaaacaattagaagattttttaaagaataaagaaaaattactcaatcaatcgtctgaaaaaaatgaagagttaattaaggaccttactaaacaaataattggattgggaggtaaaccaaacctagatcaatcagatcaaaaattgttaactaaaaatttaaccaaacaattagaaactttgtctgttaaagttatattaaatgataagacaaaaaatcaaattaaggatgaggaaattaaaggtacaaaaattagatttcaaaaagtagatggtcttcctcctaaagaattaagaaaacttgtagatgatggtaaaaaacaattaggtgagggaattgttgtagtttttgctaataaagatgaaaaagtgggtgttgcggttggtgtaacaaataaattgattgataagtttgatgctgtcaaatttgttaaattaagttctgaaattattggtggccaaggagggggtggtagaaaagattttgctcaagctggtggacaagatccaaacaagatcaacgaggcttttgaaaaaattaaatccttaatttaat

SEQ ID NO: 306800 - DNA, 1924 bp, Unknown
  Bacterial polypeptide expressing nucleotide sequence isolated from the Sargasso Sea
atgacatttcataaattgttaattgccaaccgaggagaaattgcctgtagggttataaaaactgctcacgaaatgggtatagcttgtgtagcagtctatacagaggcagattctaatgctccctttgtcaaaatggctgatcaggcagttaagttatcagatacttatttaaatggaaaagaaatcattgcagctgctgaacgaactggagctcaagctattcatcctggatatggttttctatctgaaaatgcaaaattttctcgtgatgttctaaaggctggtctgatttgggtagggccaagttcaaaagtaataacctccatgggagataagcttaaagcgaaagatattgctgaaaaagcaggtgtgcccactttaccaatgacaacagatcctaaaaaagccaatgctattggctaccctattctcataaaggcagctgctggtggtggtggaaaagggatgagaattgttgaatcaaaaaaagatttaaaagaatctataactggagctcaaagagaagctaaaacaggatttggagatgatagagtctttatagaaaggtatgttgcgtcttctagacatatagaaatacaaatccttggagattcgcatggaaatattgttcaccttggagaaagagaatgctctattcaaagacgacatcaaaaaataattgaagaatcgccttctcccagagttgattctgagatgagaaaagaaatgggggaagctgctataaagttagcaaaaaaactaaagtatgaatccgcaggaactgttgaattcttggtggatgataaaactggagagttttggttcctagaagttaatacaagactgcaagtagagcaccctgtaactgaagaagtcactggtaaagatcttgtttatgaacaacttagaatagcccgaggagaggaactaggatactctcaagaagatataacctggaaaggctcgtcaattgaagcaagattatatgctgaagatccttcaaatgatttcttgcctgcaacagggacccttattgcctacgaaaatgatgtaaatatcgatgctagatgggacactggtattgagcaaggttctgttgtaggaacagactttgatcctatgttggctaaagttataactaagggaaaaacgaggactgacgcagcaaataaacttgcattagctcttgaaaacttacatattggtggagttactactaatagagattttttagtttcttctttgagatctaaatactttctgaaaggtaaaacaacatcagactttatagaaaaagctaagccacaaagagctgttatcttaaaaggcgataatctagaactggcaacaactgcagctgctctatggattcaaggacaaaatagaaataatgcgcagcttttgaaagatattccttcgggctggagaaactctagactacctagacaaaaaataagctttaattatttggatgatgaagtaactgtgcattacaaacacaatagagatggcacttttagtgtcaatgaaaatacaaatgcgaagataattaattggtcagataaagatattgatatcgagattaataattcaagatttaattcaaaggtaacaaggcacaaagataacctagtcgttcatgggccttggggtgatattcttttaaagcttgtacctaggttcaacttacctggttctgaacttcaagctggtagcttagttgctcctatgccaggcaaggtgatcgacttgaaagtaaaagtaggaactaaagttaaaaaaggagacacgctagtcattttggaagctatgaaaatggaacatcaagtcaaagcttctgcagatggaaaagtcactaagatcttaattaggaaagatgatcagctagaaaacggtgctttgttaatggttctagatacttaaa

SEQ ID NO: 306801 - DNA, 1091 bp, Unknown
  Bacterial polypeptide expressing nucleotide sequence isolated from the Sargasso Sea
tagaggcatgtttaaatctaaaaatgccgaaggcagcattttagattgtaaaaaatctggaaaagtttttatgcaccttataaagttagacaaaggaagcttaaaaattgatgataaaattgaagttaatgtgaataaagaaaaaagagaaaaaactgaagctcaccattctgctacccatttagttcatgctgcactaaaaagggtgcttggagatcatgttaagcaaaagggttcacttgttgatgagcataaacttagatttgatttttctcacgatgaatctttatcagacgaagagatatccaaaattgaagatttagtaaaccaagaaatactaaagaattcagctgtaagcaccaaaataatggatttagaagatgctaagaattcaggtgcagaatctttatttggcgaaaagtatgaagatcaggtaagagtgttgtctattggtgaagatgatttttctcttgagctttgcggaggaacacatatctctagaactggagatcttggtatttttataataacaagtcaaagcagtgtagcctctggtatcagaagaattgaggcattatctggtcctagagctcaagaatatttatcaaatcttaaaaatcaaactattcaactccaaaaactattaaatgctcctgctgaagaaattgaaaataaagtaagtaagcttttaaaggaaaataaaagcttaaaaaaaggcggtaaaaccgccaatgcaaccataattaaatcctctaatactcatgatattgataactttaaattagtaattgaagaggcagaatcagaggatatcaaagaattaagaccactacttgatgaaaaaacgaaaaatgcaaataactctatctttattcttctaagctctaaaaacgaaacattaactattctctgttccgtatcaaaagacctccaatcaagaatttcagcaaaagatctcattaatgctctaacgtcacctattgaaggtaaaggcggtggaagagtagaatttgcccaaggcgcaggcaagccttccgatagagaaaaatttgtttctgatatccctaatatcgtacaatcgctcgcataaa

SEQ ID NO: 306802 - DNA, 2362 bp, Unknown
  Bacterial polypeptide expressing nucleotide sequence isolated from the Sargasso Sea
atgaaactaactgagataagaaaaaaattcctaaaatattttgaatcaaaaaaacataaagttatagattcaagtgatcttgtccctcatggagatgatagtttgttatttacaaatgcgggaatggttcaatttaaggatgctttcttaggtctagagaaaagaaagcatagcgctgtttcatcgcaaaagtgtcttagggttgggggtaagcataatgatcttgagaatgttggttttactaccagacatcagacattttttgaaatgcttggaaatttcagttttggagaatactttaaagaagaagcaatagattttgcctgggaatttttgacagaagaactgaaattgcaaaaagaaaaactatggataactgttcatcatacagataaagattctgaaaaaatttggctagataaaataggaattaagaaaagtaaattatctagacttggagatgaagataacttttggtccatgggagatacaggtccttgtggcccttgctcagaaattttctatgattacggttcaggctatgaaggatctcctccaggagaaggagataccggagacaggtttgtagaaatatggaatctggttttcatggaatttaatagagattcaagtggagatttaaaaccattacctaacaaatgtgttgacaccggaatggggctagaaagagtctgttctgtattacaaaatgtaggttctaattttgaaatagatttattcaaatcttttaaagatgatatcaggggtttatttgatagccctaatgagcaatcacttaatgtcatagcagatcatcttagggcttcattctttctactttctgaacaagtttatccatcaaatgaaggaagagggtatgttttaagaagattaataagaagagcaattagacacggctataaaatgggaaaagaaaccccatttttatatgaattattagaaaatcttaagagtttactagagaaagattttccaaaagaattcaaaggccacaaatcaataaaaaagatcttaatggaagaagaagaattattcttcaagacattatcctcaggaattaagatttttgaagataatctgcctaagaaaaaatcagaaatgatgagtggtgagattgctttcaaattacatgatacttatggatttcctattgatttaacaattgctatggcttctgaaagaggaatagaggttgacgagaaaatttttaaagatttaatgaaaaaacaaaaagaaggatctaaaaaaagctccatgttcaacgcaaaagatatagtcatagatccaagtatgaattctgaatttgtagggtatgaaaaaaatataattaatggggattgtatagctctatttgatttggaaggcaatgaagcaaaaacacttagtgattcagggtatgctttctttagtaaaacaccattctatgcagaatcaggtgggcaagttggagatcagggctcaatttcaaatgacaatttagaaatttttgtatcagattgtaaaaaagttggtaatttcaatatgcataaagtagaaattcagaaaggggaaataaatgtaggagataaagtctctctttcaattaatgaagaaagaagaattaagattgttaacaatcattcagcaacgcatctactacattctgcgcttagagaggttctgggagataaagttcagcaaaaaggatcattagttaatgatgaaaaacttagatttgatttttctcatggcaaaaagcttacttctgagcagattgagcaagttgaagatcttgttaatatgcgaatagaagatgcaattgatactaaaatagaagtgaaatcttttgatgacgcaattaaggatggtgctcttgccttttttggagataaatacggagataaagttagagtattaactattggaggcgatttttcagtagaattatgtggaggaacccatgtaaagaatacatctgagattgaagggtttatcatatctaatgagacatcagtgtcggcaggtgtaagaagggttgaagctatgacaggttcaaatttagttaaaaaatcaaaagaggcaattcaaactctgaaagaattatcagagattcttaatgttccttctgaagatctggtaggaagagtatcagaagtcataaaagaaaataaaactttaaaatcaaaaaagaagactgagaaaagtttaagcgcagagataattcatgaagctaaattagattctaaggaagggaaaggcttagtcgttttttatgaaaatgcttcaattgaaatgttaagaagattctcagataaagctaaggatcaagatgaagatcttttcaatttttatgacagatgat

SEQ ID NO: 306803 - DNA, 1779 bp, Unknown
  Bacterial polypeptide expressing nucleotide sequence isolated from the Sargasso Sea
atgaaggaagaggttatgtactaagaagaattatgagaagaggaatgaggcattcccacttgcttggttctaaagaaccaattttttataatatttttaaaactttaaaagatgagatgaaaggtaattactcagaaatagaaagagctgagtctctaataaaagaaacgttaagaatggaagaagaaaaatttttaattcttttagacagaggtattaaaatattaaatgaggaaatgactaaaatagacaagatattacccggagaagtagcttttaaactctatgacacttatggttttccattagacctgacacaagacatcttaaaaaataaatcattaacaatagacaaccataaatttcaaagtttaatgaaagaaagcaaagaacttgctaagaaaaattggaaaggctcaggtgacagtgcggtagatgatatatggttttcgataaaagatagattaggtccttcagaattcctaggatatgagactgatcaagcagaaggtattattttatcattactaaaagacaacaaagaagtaaatgaattgaataaaaacgatgaaggaattattattttaaatcaaactcctttttatggagagtctggaggacaggtaggagatactggtgaaataatatctggagactttaagttcgagatcacagatgtccaaaaaaaattaggtgatctatttgtacattacggcaaagttaaatcaggaagtataaaaatcaaagacaatgttgagatgaaaattgatattgatagacgtaataatataagagcttatcactcagcaacacaccttttgcatgagtctttaagaagagtattaggtactcatgttacacaaaaaggatcattagtagcaccagatagattaagatttgattttagccatatgaaaccaatttcagaccaggaaatagaaaaaatagaaaatcacgttaattcaatggtacaaaaaaaatcagaagttaaaacaaggatcatgactcctaaagaagcagtagataatggagccctggcactctttggagaaaaatatggagaagaggttagagtattatctatgggagatgagaaagaaaggtatttttccactgaattgtgtggaggtacgcatgtacgaaacactggtgacataggaaaattcaaaattattagccaatcatcaattgcagcaggtgtgagaagagtagaagcacttagagaaaatcaattaaatagtttcttacaaaataaagaaaaattatctgacttatccgcgcaaaaagatgaagaaatgattaatgacttatcaaaacagataattaaattaggtggcaaaccaaatatagaaaatgaagataataagattttaattaaagatttatcaaaacaactagagcaattaaaatttagttcaattttagaaaataatttaaaaaatataattcaagatgttaaaattaataatataagtgtaagatttcaaaaagttgatgatcttccacctaaagagctgagaaaattggttgatgccggaaaaaaagagctaaacacaggaattgtaatagtttttgctagtctagaagacaaagtaggtcttgcagttgggataacaaatgagcttcttgataagtatgatgcagtcacattcgctaaaacaggatctgaaattattggtggaaaaggtggtggtggtagaaaagattttgcacaagcaggaggccaatttaaagataaaattgatgaggcttttgaaaaaattaagactttaatttagt

SEQ ID NO: 306804 - DNA, 931 bp, Unknown
  Bacterial polypeptide expressing nucleotide sequence isolated from the Sargasso Sea
attgggtacacatgtcactcaaaaaggatctctagttgaagctgatagattaagatttgatttcagccatatgaaaccaataactccagatgaaatagacaaaatcgagaaatttgttaactcaatgatagataataaatctgatgtaaaaacaagacttatgacgccaaaagaggctgtagataatggagcgctagctttatttggggaaaaatatggtgaagaagtaagagttttatctatgggagatgaaaagaatagatatttttctacagaattatgtggaggaacgcatgtcagaaatacgggagatattggtaaatttaaaattgtaagtcaagcatctattgcagcaggagtcagaagagtcgaagctttaagagacaaacaactagaagattattttaaaaataaagaaaaattattagatctttctgcacagaaaaacgaagagattataaatgatctttctggaaaaatagttgggttaggaggaaaaccaaacatagataaaaaaaatccaactgaaacaattaaagagttaacgaaacaactagatgttttaactgttgggtcaattctccaagataaaacaaaaaatattatttccgatattgaagtaaaaggtattaaagttagacttcaaaaaatattaggactacctccaaaagaattaagaaaattagtagataaaggcaaaaaggatttgggcgaaggaattgtaataatttttgccatcaaagatgataagattggtttagctgttggtgtcacagacaaattaattaaaaaatataatgctgttgattttgctaaaatagggtcagagacaattggaggaaagggtggaggaggaagaccagatttcgctcaagctggcggtattgaaagttcaaaaattgatgaagctttggaaaagtttaagtcttta

SEQ ID NO: 306805 - DNA, 2530 bp, Unknown
  Bacterial polypeptide expressing nucleotide sequence isolated from the Sargasso Sea
aatgaagagtgatcaaataagagaaagttttttaaaatattttaaagacaatgaccataaaatattaaattcttcatctctaattcctcatgatgagaccttactattcactgctgcaggaatggttcctctaaaagattattttatgggtttaaaagaacctccacatataaatcttgcttcatctcaaaaatgtattcgaacagttgatattgatatagttggtgaaacagacagacatttaactttttttgaaatgttaggtaattttagtatcgacaattattttaaagaagaagcaataaagctctcttataaatttattactgaggaacttaaagttccatctgaagatctttggttcactgtttataaagatgacgatgaatcatataaaatttggaaagacgttattggcgtacctgaacacaagatacaaaaaggtgataaggataatttttggcatatgaatatacctggaccatgtggtccatgttctgaaattttcattgatagaggtccagagtacggtgaagatggcggacctattggcggtggtgaagatagatttatagaaatatggaatctagtttttatgcaatctatccaagacgaaccatacaatgttgtagacgacttacctgctaaaaatattgatactggtatgggattagagagaatggctatggttttgcaggaaaaagattcaccattcgaaattgatacatttcaaaatctttacaatgaactaaataaatatattgttaataaagataaaaaatatgaaagaattgttttagatcatataaagtcagcagtttttatgatatctgatggtgttgtccctacaaatgaaggtagaggttatgtattaagaagaatcataagaagagctgtaagagctatttatagactgacagatgaattaatgtcacttgaattcttaataaatatagtaattcgtgattatcaagattcatatccggaattattagaaaataaagataagattttaaatttatataaaaatgaagaagaaatttttcaaaatacattagtaaaaggtaatcaagaaattcaaactattcttaaaaagaaatctaatttagatgagaaagatgcattttatttatttgaaacttttggctttccatttgagcttactcaagaaactgcaaaagagcatgatattaaaatcgattatgacaagtttaatgttttatttgatgaacatagaaaaaaatcaaatactggtaagaaagaaaaaataagtaatacaattattggtgtggagcaaaatacttttgtcggatatgacaatataactgtaacttcggatatctatcatattgaaaaagatgaaaataaatccattatttttactacagaaaccccattttattacgaagctggtggacaaatctcagataagggaaatatagaagttgatggtaaagagattcaagttaatgatgtcgttcaatctgataatggcgctactggacttattgttgaatctaatagcttaaaaataggggataagattaatttaaatgtcgatccgagctttagaagttctgtttcaaaaagtcattccgcagcacacattgttcatgcctctttaagaaatattcttggagaacatgttgcacaagcaggttcacatgttgcacctggtaagtttagatttgattttagccatacggaaaaagttaataaggaagaacttaatgaaatttttaaaatgagtaacgacctgatttataaagatattgatgttgaaacaaatgtaatgaacattgatgatgccaaaaaagagggcgctttagcattttttggagataaatatgatgatgatgtaagggttgtaaatataggagaattctcaaaagagttatgtggaggaacacacgtacataactcaaatgtagttggattaatcgtattaattaacgaatcttctatcggttcaaatttaagaagagtcgaaatgttatctggttaccaagcttattcatttatggatacagcttataagtcatacaacactgttagcgatatattgcaaacaagtgttgatcaagtacctgaaaaattaaagaccttcttagaatcatatgaagatatgaaagaaaaacttgataagcaaaataaggcagaaagtgataatgaattaaaaagaataatatccgaaattaatgagattaataaattgaaaacttatattggtaagataaatgttaatagttcaaacgaagcaaagaatgttgctactaaagcaataaaagatcacaatttagattttgtctttttactagcaaatattgagaccaaaactgtacttataggatcaagaaatgataaaacacttaataaaattgatgtttcaaacattgtaggagaagcttcaaaactatatggtgggggtgcatcaaaagacccaagtttatcaattggtggtggaccgtctcaatatgatgaatcaaaatgtattgagtttgtaatagaagtttttactaaacaaatttaa

SEQ ID NO: 306806 - DNA, 1099 bp, Unknown
  Bacterial polypeptide expressing nucleotide sequence isolated from the Sargasso Sea
gtaatctcgaggaacttccctcaaaaatgcgtggatacaggaatgggtttagagagagttcaatcaattgttgagggtttatccgacaattacgattcttcaatttttttagatttaaataattttatagattcaaagcttcaacttgaaggtacagaaaactatataaaaaaaattcttttggatcatattcgcgcatgttgtcatcttatcagtgataatgtaatacctgatcgtgagggaagaggatatgttctgagacgcattctgagaagatcttcacgctttatatttaaacacaacattaaagacccattcttatatcaatgtgcggaagttatatgtaaaaaaagcaaagactttcctagcttgaaaaaagaaattaataaaattgtagatatcattaaaactgaagaaattaagtatcttaaaactttaggaaaaggaatagatattatcgataatcatctaaaaaagcataaatctcttgatgctgaaatgatttttactctatatgatacttatggttttccctatgaaataacagaagaaatagcctcagagaataacataatacttgataaaaaaggctatgatgctcttatgctagagcaaaaaaacaaagcaagaaaaagtaaatccttttctgataaatcaattagtaatttaacaacaagttatactacagaatttttaggttatactaaaaataataatgaaggtattttactagatctatatcttaataatgaaaaagtttcaaaagcatccacagtagacgaagaatatttattagttctatcgcatactactttttaccctgagggaggaggccaaatatctgatataggaactatttcctctgatgaatgtttatttaaagttgtcgatgtacaaaaaattaatgacacaatcattcatgtatgtaatttactttcaggtgaagctaacattaaagataaacttataactagttttgatactaatcatagaaacaaggtcacctccaatcattcagctactcatttgttgcatcattatctcagaaaaacattaggaatacatgtgcaacagagaggctcatctgtaacagataaag

SEQ ID NO: 306807 - DNA, 370 bp, Unknown
  Bacterial polypeptide expressing nucleotide sequence isolated from the Sargasso Sea
atgacaagtgtttcagatattagaaaaactttcattagttatttcaacaaaaatgatcatgaaattgtacgatctagtagtttagtacctgacaacgatccatccctgatgtttgttaactcaggtatggttcaatttaagaatatatttactggtcaagaaaatagtgagtataaaagggcagtgacaagtcaaaaatgtgttagggctggcggtaagcataatgacctagaaaatgttggtcatacagcaaggcaccatactttttttgaaatgctaggtaatttttcgtttggtgattactttaaggaaaaagcaatttattttgcttgggatctattaactaaagaatttggtttttcaaaagata

SEQ ID NO: 306808 - DNA, 2431 bp, Unknown
  Bacterial polypeptide expressing nucleotide sequence isolated from the Sargasso Sea
agaaaatgttggttacactccaagacatcatactttttttgaaatgttgggaaatttttcttttggggactattttaaagaaagaggaattgaacttgcatggaatttaatcactaaagattttggtttagataaaaatagactttacgtaacagtttttcatgaagatgatgaagccttcaatttctggaagaaaatagcgggttttagcgatgataaaattatcagaatttcgacatcagataatttctggtcaatgggcgaaacaggtccttgtggaccttgctcagaaatattctacgatcatggtgatcatttaaaaggtggtttaccaggaacaaaggatcaagatggagatcgttttattgaaatttggaacttggtatttatgcaatatgaacaagtttcaaaagataaaagaatagatttacctaaaccatctgtagatacaggaatgggattggaaagaatagctgctcttttacaaggcacacacgacaattatcaaactgatcattttaagaaattaataagttcgatatcagatgttactaaagttaaacaagctgataacaatatatcaagttttagagtaattgctgatcatttaagagcaagttcttttcttttagctgaaggtgttctgccatccaatgaaggtcgtggatatgtcttaagaagaattatgagaaggggtatgaggcattctcatttattaggatcaaaagaacctattttttacaaaatttttgaatctttaaaaaatgaaatgtctggaaattatccagagttagagcgatccgaatctttgataacagaaacattaaaaatggaagaagaaaaatttttagttttacttgatcgaggaattaaaattctgaatgatgaaatttcaaaaattgataaagtgttatcaggtgaagtagcttttaaattatatgacacttatggttttccattagatctcacagaagatattttaaaaaataaatcattaaaagttgaccatcaaaaatttgatgagttgatgaaaaaaagcaaagaacttgcaaaaaagaattggaaaggatctggggacagctcagaggaagcaatttggttttcaattaaagataaaactggccctacagaatttttgggttacgagtctaatcaatctgagggagtagtgttaaatttaattaaaaacaatcaggaatcaaaatcattagctactggagaagaaggaatgattataaccaatcaaactcctttttatggtgagtcaggaggacaacttggagataaaggcacaatagtttctggcaattcagtttttgaagttgaggatacacaaaaaaaacttggagatttatttgttcattatggatcagttaaaactggagaaattaagattaacgatgttgttgaaatgaaaattgatgttgagagaagaaacaatttaaaagcttatcattctgcaactcacttgcttcatgagtctttaagaagaactttaggtaagcacgtgatgcaaaaaggatcattagttgcaccagatcgtttgaggtttgactttagtcacatgaaaccgattactaatgaggaattagagacaatagataaattagttaacgaatacgttcaaaatggttctgaagtgaccacaagaattatgacacctaaagctgcaatagaaaaaggagcactagctttttttggtgaaaaatatggtgaagaagttcgtgtcgtttcaatgggtaaggaaaaagatgcttatttttcaacagaattatgcggtggaacacatgtaaaaaacaccggagatattggaaaatttaaaacagtcagtcaatcatctattgctgcaggggtaagaagagttgaggctttaagagacaaacagcttgaggattttattaagaataaagaaaagctttcaactttatcattacaaaaagatgaggagactatcaaagacttgtcatcacaaataatcaaacttggaggtaaaccgaaagttgataataaagatttaaaagaaattataaaaaatctttcaaaacaacttgaacaattaaatgttaattcagttcttcaagataaaacaaaaaatattattaatgatcaaaaaataaaggatataaaagttcgatttcaaaaagttcaagatttaccgcctaaagatttgagaaaattagttgatagtggaaaaaaagaacttggcgatggaattgtaattgtttttgcaagtagtgaagataaagttggtttaggagttggtgtcactgaaaagctagttgataaatatgatgctgtaaaatttgcaaaattaggttcagaaattatcggtggcaaaggtggtggaggccgaaaagattttgcccaagcaggaggacaggataaaaacaaaattgatgaggcttttgaaaaactaaaggctttaatttag

SEQ ID NO: 306809 - DNA, 961 bp, Unknown
  Bacterial polypeptide expressing nucleotide sequence isolated from the Sargasso Sea
atttgtagaaaaagttttaaaagaagaagagcagcaatttgctcgaactttagataacggaatggctatcttagaacgagagattaaaactataaatggtgacaccctgtcgggtgaaacagtctttcagctttatgatacctatggcttcccagtcgatttaactgccgatgttgcccgagaacgaaacttgaaaattgatatgaagggttttcaagtctatatggaggagcaaaagaattcagcgagggctgcgagcaattttggggttgctgaaaaattgagcctagacgctgctattaacacagaatttattggctatgattcgctaaatggcaaaggcaaagttacaggaatattttcaattaacggcgagaaattagataaagtttcggctaatgaagaggtctatctgcttttagatcagagtccgttttatgctgaatcggggggtcaaattggggatcaagggtttttgcgtaaagatgaagggcaatttaatgtattagatacccaaaagcagggaaatatccatattcatcgcggtattctggatcgaggcgcttggaaggtaaacgatgttgtcgatgctgaggttacacaaaaagaaagacatgcaattacattaaatcactctgctacccatttaatgcacgcagccttgcgagctgttctaggcaagcacgtagctcagaaaggatcattggtcgatgcagaacgactacggtttgatttttcccactcccaggcattatcggaggatgagctagaggcagttgagatccaagttaacagtcaaatcttagctaattctcaagtcaacaaagaagagatgccattacagttagcaaaggagcgaggtgctgttgctctttttggtgaaaagtatggtgaagaagtaagagttgtatcaatgggtggagagttctctgtcgaatttctgtgggggttgtcatgttaa

SEQ ID NO: 306810 - DNA, 1261 bp, Unknown
  Bacterial polypeptide expressing nucleotide sequence isolated from the Sargasso Sea
aataacttagtatcatctcaaaaatgtatcagaactgttgatattgacataattggagatacagataggcatttaacctttttcgaaatgttaggaaactttagtattggtgaatattttaaagaagatgcaataaaacatgcatacaaatttattacagaagatttgaaaataaatccagaagatttatggtttacggtatataaagatgatgatgagtcattcaatatatggaaggacgttataggtgttcctgagaaaaaaattcagaggggagataaagataatttctggcagatgaatatacctggtccctgcggtccctgttctgaaatatttattgatagaggtgaagaatatggtgatgacggtggacctattggtggtggagaagatagatttatagagatttggaatttagtctttatggagtcaatacaagatgaaccatataatgtaataggcgaactaccagcaaaaaatattgatacgggaatgggtcttgaaagaattgctatggttctacaagataaaaattctccatttgaaattgatacatttttaccaatatataaccttttgaaaccgaaaattaaaaatgaaaattctaaatttgaaagaattgtattagatcatatgaaggcagctacatttatgatatctgatggggtcgttcctacaaatgaaggaagaggttacattttacgacgcttaatcaggagagctattagggctttttatggcttaacaaccagcattgaaagcttagattttttaattaacccgataattgatatttacgttgatcaatatcctgatttattaaagaataaagacaagatattaaaactttatttaactgaggaaaaattattccataaaacattagaaaaagggacaatcgaaattcaaaagttaattaaagataaaaaatcttttaacgaagataaagcttttttcttatttgaaacatttgggtttccatatgaattaacaaaagaaatagcacttgagaatggtattacactagaagatagtaaatatatgaaaaaatttgaagaacatcagactaaatctagttcatttaagaaggaatctactgaaagttcgaattttgacgttgattgcaatatttttacaggatatgaagaaacaaagactcttagtaatgtattgatggttagtgtggatgaattatctacaactatttttatggaaaaaaatccattctattacgaagctggaggtcaaatatctgata

SEQ ID NO: 306811 - DNA, 1141 bp, Unknown
  Bacterial polypeptide expressing nucleotide sequence isolated from the Sargasso Sea
tggagattatttcaaagagagagcaattgagctagcttggaatttaataacaaaagattttggtttagacaaaaataaactttattttacagtttttcatgaggatgaagaggctctaaaattgtggaaaaaaattactggttttggtgacgatagaattttaaaaatacctacatctgacaatttttggtctatgggcgaaactggaccttgtgggccttgttctgagatattctatgatcatggagagcacctccaaggagggttacctggaacaaaaaaccaagatggagatagatatattgaaatttggaatttagttttcatgcaatttgaacaaatttcaaaagataaaagaatagatttacccaaaccttcagttgatactggtatgggcctagaaagaattacagccctaatgcaaggtactcatgataattataaaacagaccattttgaaaaattaattcaatctatttctgatgaagttaaagttaaatccaataaaacaaatatttcaagctttagagtaatagctgaccatttaagagctagttcatttttaattgcagaaggtgttttgccctcaaatgagggaagaggttatgtgctcagaagaataatgagaagagggatgagacattctcatttattaggatctaaaaaaccaattttttataatatttttaaaactttaatggaagaaatgtcaggtaactatcctgaacttataagagctgaagcattaattaaagaaactttaaaaatggaagaagaaaaatttttagttcttttagatagaggaatgaaaatattaaatgatgagataaaaaaaatagataaggttttacctggggatgtagcttttaaactttatgatacatatggtttcccattagatcttacccaagatattttaaaaaacaaatcaatggaagttgacaatttaaaatttgatcaactcatgaaagatagcaaagaacttgctaagaaaaactggaaaggttcaggcgattccgctgttgatgatatatggtttgagattaaagataaattaggagcatcagaatttcttggatatgaaactaatcaagcagaagcaattgttcaatcgttactaaaagataataaagaagtcaaa

SEQ ID NO: 306812 - DNA, 1273 bp, Unknown
  Bacterial polypeptide expressing nucleotide sequence isolated from the Sargasso Sea
tgaaggagttattttaactttattaaaaaacaataaagaagttaaagatttaaaaaccaatgaagaaggaatgattataaccaatcaaacacctttttatggtgagtcaggtggtcaagttggtgacacaggagaaattatatctggggaatttaaatttgaagtaacagatgttcaaaaaaagttgggagatctttttgttcattatggaaaagtaattagtggttcaacaaagttaaatgagaatgttgaaatgaaaataaatgaagaaagaagaaacaataccagagcataccattcagcaacacatttattacatgagtcattaagaagagttttagggacccatgtaactcaaaaaggttctttagtagaacctagtaggttgagatttgattttaaccacatgaaaccaatttctaatgaagaaattgaaaaaattgaaacatttgtaaattctatggttacaaaaaaaactgatgtaagaacaagattaatgacaccagatgaagctgtagaaaatggtgcattagctttgtttggtgaaaagtatggagatgaagtgagagtgctttcaatgggagaagatgatggagaatatttttctactgaactttgtggtggtacacacgtgaaaaatactagagatattggtaaatttaaaattattagtcaatcttcgatagccgcaggtattagaagaatagaagctttaagagacaaacaattagaagattatttgaaaaataaagaaaaattaacaagtttatcatcagaaaaaaatgatgagctgattaaagacttaacaaaacaaataaaaactttaggaggaaaacctactttagaagaatctgaccaaaaaatattaattaaaaatttaaccaaacaattggaaactttatctgtcaaatcaattttaaataacaaatcaaaaaataaaattaaagatgaagaaataaaaggaattaaaataagatttcaaaatgttgaaggtcttccaacaaaagaattaagaaaacttgtagatgatggtaaaaaagcattaggccagggaatagttgtagtttttgcaagcaaagatgagaaagtaggagttgctgttggtgtaactaatgaattaacagaaaaatatgatgcggttaattttgtaaaacaaagttctaagattattggtggccaaggtggaggaggaaggaaagattttgcacaagcaggaggtcaatatgcaaataaaattaatgaagcttttaataaaattaggaatttaatttaa

SEQ ID NO: 306813 - DNA, 1045 bp, Unknown
  Bacterial polypeptide expressing nucleotide sequence isolated from the Sargasso Sea
attttaaaaaataaatcattaggagttgataatttaaaatttgatcaacttatgaaacaaagtaaagagttagcaaaaaaaaattggaaaggttcaggcgatagtgccgtagatgatatttggtttggaataaaagataaattaggtcctacagagtttcttggatatgaaactaatcaagcagaagcagttgttcaatctttgctaaaagataataaagaaactgatgcgttaaaattaggtgaggaaggaatgataatagtcaaccaaacacctttttatggtgagtcaggaggacaggtaggggatactggagaaattgtttcaggtgattttaaatttaaagttttggatgtacaaaaaaaacttggtgatttatttgttcattatggaaaagttatttcaggtgaaattaaattaaatcagaatgttgaattgaaaattaatactagtagaagagaaaatatcagagcataccattcagcaactcacttattacacgagtctcttagaagagttttgggtactcatgtaacccaaaaaggttcattagttgaagcagatagacttagatttgactttagtcatatgaagccaatatcaaatgatgaaataaataaaattgagcaatatgttaattcaatggtggaaacaaaatctgatgtaaaaactagactaatgacaccaaaagaggctgttgaaaatggtgctttagcattatttggtgagaaatatggagatgaagttagagtgttatctatgggagacgaaaagagtaaatatttttcaacagagctttgcggaggtacacatgttaaaaatactgcagatattggaaaatttaagatagttagccaaagttccattgcagcaggagttagaagagttgaagcattaagagataaacagcttcaggaatacctaaacaataaagaaaaactatcagatctttcagctcaaaaagaggaaaagactataaatgatctttcttctcaaatcataaagttaggtggaaaaccaaaatttagaaaaccagagatcaaaa

SEQ ID NO: 306814 - DNA, 1669 bp, Unknown
  Bacterial polypeptide expressing nucleotide sequence isolated from the Sargasso Sea
taccgcacggcaccataccttttttgagatgatgggtaattttagtttcggtgattactttaaggaagaaaccatattgtgggcgtgggagtttatacaaaaagagatggggcttcctgaggaaaagttatggattacagttcacccggatgatgatgagtcaaggaagatttggcggaataagattggaatcaaagccgaacgaatcatagatataaaagaaaatttttggacgatgggcgacaccggtccttgtgggccaaacaccgagatcttttttgaccatggagacgaaatatttggaggaccaccgggaagtccagatgaggatggagaccgttttgttgaattctggaatttggtttttcctcaatacgaccttgccgccgacggctcgttgaccgatttgccacaattcggagtggatactggtatgggacttgagcgaagcgcggcgattctccagggcgtaaagagtaattacgaaatagacctttttgctcgtctaatggaagcggccggtcaatttgcaggtatcagcgattccgctcaaattctatcgactgcttccttgagagtaatagccgaccacattcgatctggtgtgtttttaatagctgatggagtcagacctggcaacgacggggcatcctatgtattgcggcgaattatacggcgaggtttaaggcacgcttataaattggatatcaaagagccattcttccacgagctcggaaaggtagtaattgatgaaatgggcggcgcttatccaactattgcagaaagagaaaaagaagttaccgagatcttggcgcttgaagaggaacgttttagcgaaacactcaggcaggggatggaacttctagtccaagcagtagacaaactaaatgataagcaactcccaggagaggtagcgtttaagttgtacgatacctatgggtttcctgtagatctgaccgcagacgtgatcagagagcaaggattggaaatagatatggacgggttcgacgcgttcatggaagagcagagagaaagaggaagatcggcagcgactttctcttctacattgggacagaaaataacagtaaaagaggctgtcgagtttacgggctacgaaaactcatctgaaaaaactagcattgtttctttgtatgatttggaaggtaacgaaaaggattttcttgaattgggtcaagaaggaattatttgcttaaacaagacccctttttacgcggaatctggtggtcaggtcggagacgctggagttatagagagcagagataaacagtttagcgtatcggatacccagttgagtggagaccagcacctgcatataggggaagtgagcgccggtatttttaaatcaggggagactgttactgctgaaataaatgttccaaaacgtgataaagcacgaaaaaatcattctgcaactcacctaatgcatgctgcgttgagaaaagtgttaggctctcacgttgagcagaagggatctttagtgaatgacgaaaaacttcgctttgatttctctcacgatggaaacattaccaatgatgagcttgcccaaattgaaaatatggttaatgcggaaattgtcaaaaactcgttggtttccactgaattgatgtcgccggaacaggcgattgaaaagggcgcaatggcactgttc

SEQ ID NO: 306815 - DNA, 794 bp, Unknown
  Bacterial polypeptide expressing nucleotide sequence isolated from the Sargasso Sea
aacacatttactacatgaagcattaagacaaaaattaggtggtcatgtcgctcaaaaaggttctttggttacacaagaaaaattaaggtttgattttagtcatcccaatcctatttctaaacaagaaataatggatattgaagatgaagttaattttagaatattttgtaatgatgatgttacaactaaaattatgaaaccaagcgatgctattgaaagaggcgcgattgctctttttggagaaaagtatggggaaaaagtgagagtggtgtcaattggaaaaagtgttgatgcaaatagagacgcttggtcagtcgaactgtgtggtggtactcatgttaaaagaacttcagagatcttatcttttaaaattatttctgaaacaggtgtttcttctggagtacgtcgaatagaagctgtaacaaatgtttcagcagtaaagttttataatgataagattgataaagtaactaacatatcaaatctattgaaaactaataataatcaagtggaaaaaaaagttgaacaattaattgaagaaaatcaaaggattaataaggagttaaaacgtttaaaaaagaacccagtcacaactgaaaaacataattctgtcaaagaaacaataaaaggaattatttttgagtatgtaatatttgatgatttagcaattaaagaattaaaatcaaatgctgaaaagttaattaaaaacaacaaatctgatatagtttgccttatcagtaaaattgatggcaaagcatccttagttattgcagtagaaaagaaacttagctgag

SEQ ID NO: 306816 - DNA, 2145 bp, Unknown
  Bacterial polypeptide expressing nucleotide sequence isolated from the Sargasso Sea
taagtcctcttccgaatccttgtgttgatacaggaatgggcttggaaagaatggcagctgtcttacaaaatgaagacaataattatgaaaccgatattctgaagtctatagtccaagaagcggcaaaacttagtggagagaatgacttaacaaacccttcacttagagtaatatcagatcatttaagagcctcttcgttcctgattgcagatggcgttgtgccttctaatgaaggaagaggatatgtcttgcgtagaattataagacgtggccttagacatgctcacaaacttggaatgaaagatgggattctctctaagcttgcacatattttggaagaaaaaatgggtattgcttaccccttacttgtaaaaaactcagatattattaaagctaatttacttaaagaggaagaacagttttccactactttagaacagggtatgcaattacttgaatctgcagttgaggacctagaaaacaacgaaattccaggtgatatcgtcttcaaactttacgatacttatggatttccagtagatatgactgctgactttgcacgcgagagggatctaatagttgatttagaccaatacgaagccttaatgttggaacaaaaagaaagaggtagatcatcgagcaacttcaacacactcatcccagaatctttaaacatcgaaggcgaaactgccttcttaggatacgatacccattcaacatcctcgaagatagtagagattatttctagctccgaagaaggtaataaggatgaattaagagaaggggaagaaggacttatacttctggatgaaaccccattttatgctgagtctggaggtcaagtaggagataaaggatttattcagtccaataattcgctttttgaagttcatgatacccagaaaaaaggggatcaatttcttcatctaggccatgttaaatctggagtttttaataaaaatgattctgtaacagctgaaattaacataacccacagaaatagaataaaaagtaatcacagtgcaactcacttattgcatgctgctcttagaagtgtgctgggtgatcatgtagagcaaaagggttctctggttgaagaatctagattgagatttgattttgctcacaataattctattcaatctgatgacctcgaagctatagaagatctgattaatttagaaataacaaaagatctagagtcgataaccgaagtgcttccaataaatgaagctatggagagaggtgccattgcattttttggagataagtatggagatgaagttagggttctcaatataggaaacggtttttctattgagctttgcggcggtactcacgtagacaaaacaggtgaaataggtgtgatgaagatcatatctgaatctggaatttctgctggagtcagaaggattgaagccgtaacaggtgatggtgcttatttcttattagatgagttggagcaagaatactcggccattagcaacgaacttctagttgacgatttcgactccagggatggtgttgaggttttaaattatattcgctttttagaagacgaaatctccgcttattcaaaaattcttaattgctctaatgatcaggttttaaaaaaaatcactcaaattaaagaagaaaatattgagttaaataaagtcttaggaaatcagacttctgaatttaagacattcgaaaattgtattgatgccttggagggtttagtagatttgaataagtcattgcaaagagactcaaaagaaatccaatcacaggatattggatcatcagtagaaagtctcatcagtgattcacttgcagttgaaggttatgaattaataacaaatatatttgaaggaatcgatgcaaaagaactcagagaaattgccgacagattaagaaataaaagccccaataccataatagctctgatttcaatcactgatgacaaagcaccgacaatcgtagcatgttcaaaggatgtcgatattgacgccagagaaataatgaaacatttaattaatcaattaggtggaagtggaggaggaagaccagactttgctcaaggtggggttgataataccgatgacttagatatggctttagcttcagtagctgacttaattgtttctttaactaatcaataat

SEQ ID NO: 306817 - DNA, 1186 bp, Unknown
  Bacterial polypeptide expressing nucleotide sequence isolated from the Sargasso Sea
agtgggggtcaagttggtgatataggtactatagtgtttgagcacaatacttttgaagtaattgatacgactaaattatttggctcattttatctgcaccatggtaaagtaaaaaaaggaaaatttaaaattggagatagtgtaacagctacaattgattcatataaacggcaattaataaaatgtaatcattcttcaactcatctactacacgcttcacttagaaaaattcttggaaatcatgtttcacaaaaaggttcattggttaatagtgaaaaattaaggtttgattttagtcataatgaaccaataacatcagataatattataaaaattgaaaattttgtgaagaaagaaataacagctaattcgcaaatagaaattaagactattgatcatcaaaaagcattagatgagggagcaactgcactttttggagaaaaatatggtgatgaggttcgtgtagtgtcaatgggcacacttgaaggtaataaaataatttccaaagaactgtgtgggggtacacatgttgctcaaactggtgatattttgaattttaaaataattaatcaaactagtgtagcatcaggaataagaagaatagaggcactaacaaatattgcagttgacgaatataataagcaaaaaattcaacttgataataaaacattaaaagaaaacctagataaaatttcaatacttataagtgagataaaagagtatgataataattttgattatagctatgatcaaaatagtgatttaacaaataatttaaaggaattaaaaaaattattggatcaaaaaaaacaaaataaaaataaagaaaactctttacaaaatatcgttattgaaaaaattaatgatattaatttcgtgtatttactaactgaaaattatccatcgaaaatactaaaacagtttgtagatgatcaaaaaaacaaatatcaaaataaatgtgcgtctctaataatttcaaaaaatggtgataaattatctattgttttaggtgttacagaagatttaacatctaattttgactctgcgaaagttattcaagatgtatctaagattttaggtggtaaaggaggagggggtcgtaaagatatggcacaagcaggtggtattagtctagaaaatattgatcaagctatggataggattaaaactaatttaagatcctaat

SEQ ID NO: 306818 - DNA, 1421 bp, Unknown
  Bacterial polypeptide expressing nucleotide sequence isolated from the Sargasso Sea
taaggtagttgaattaataaatacctcaaaagagtcaaagagtgacaaattagcagaagacgaggagggtgtagttatattagagcaaacacccttttatgccgaatcaggaggccaaataggtgataaaggcaccttgagtggaaagggttttagatttgatgttctggatactcaaaagattggagatcatcatggacatttcggcgtcgtcaaggaaggcgaattaaaaataaattcaaaagtactagctcatatagatgaagactttagaaataaggtagtaccaaatcattcagccactcatttacttcaagctgctttgaaaaaaattctcggggatcatattgagcagaaaggttctttggttgaggaaagcagattacgttttgattttgcacattccaagccagttagtacggaagaaatcacaaaaattgaagatttaattaatttacagatagaaaagaatactaaatctgtaaccaaagtaatgacaattgaagaagcaacaaagaaaggtgcgatagctttttttggtgaaaaatatggagagaaagttagagtgctggatttaggtgaaggtttttctgtagagctatgtggaggaactcatgttacgaaaacaggagaaataggtttaatgaaaataattaatgaatcaggtatttctgctggcgttagaagaattgaagctgtaaccggagtaggcgcaacattactcttacaagaactcgaacaacgtattacatctatttgtgatgaattattggttgatgtcgaacttattgatcaagataagagtaatcttgatttaataagagaccttcaatctaagttaaatatggtagcgagagaacttagttgctctgaagatcagattcttaaaaaaatcgttcaggtcaaagaagagattactgccttagaaaagggattaggaaaagatatatctttaataagtcctgcttcaaactctttaatggatgctataaaagaactaaagaacttaaacacttctcttaacaatgaaaataaaaagaaaaaatctgaaggaataagttcttcggcttctgatctaaaagccaattcagttactgttgctggttataatttaataacaaaaagttttgaaaacatagatgcaaaaagtttaagggatttagcggatcaactaaggaataatgaaccaaatactatcgtaactttagtatctattactggggataaaatacctttaattgttgcctgttcaaaaaaggttgaaatagacgcgcgagaaattatgaaacatcttgttaatcaacttggtggaagcggaggaggtaggcctgattttgctcaaggaggggctgataattctgaggatttagaagttgctcttgattccgttgctgatttagttgtttcattaagcaattagt

SEQ ID NO: 306819 - DNA, 1349 bp, Unknown
  Bacterial polypeptide expressing nucleotide sequence isolated from the Sargasso Sea
tgaaaagctatggtttgagcttgcaagaaaaacgaaaccaacagtatttaaaggatatgatgaaactactttaaaggcaaatgtaactgctttagccttagactcagaagtagttgacgaattaagtgatcaaataaaaaaatcagcaattatcacagatgagtcatgtttttatgcagagtctggtgggcaagttggagataaaggcataatttccacagaaaatgcagaatttaaagtgacagatactagaaaaactcctcaaggcatttttatccattttggtaatgtaatttcaggcaattttaaaataggaaatgaagttaaacttaaaatagatagtagtttaagggaattaattaaaaaaaatcattctgctacacatttgcttcatgcagcattaaggaataacttaggactacatgtagctcagcgcggatctttagttaatgaaaataaattacgttttgatttcagtcataataaacaaatatcatcaaagcaaatagatactattcaaaaagaggtaacaaatataatttctaatacttgtgaaacacaaattgatattaagtctcaagaagaggcaataaaactaggggctatggctttgtttggagaaaaatatggtgaagaggtaagagttgttacactgggagaagataataataaaccttattcaattgagctatgtgggggaacgcatgtatcaaatgttaaggatatagagaaattttatattataagtgaagagtctgtctcatcaggagtaaggagaatagaggcttgcactggtaataaggtagatgaatttattagtaataaactaaaagaggatcaattacttgaaaaaaaacttgatgataaaatcattagcttaatctcacaaataaacaaattaaatggaaaaatatgttttagtgacgaaaataaaaacctttatataaagaagttagaaaattatttagataatttaaaaaataaatcaatactctcaaatgaggagaataataaaatagaagaaacaaatataaatggaattaattttgtgtctcaattaatagaaaacttgcctcccaaagaactcagatcaatttttgataaatttaaattagaaaaatctaaatctattttggcttgcattactacaaatgaagataaggtatccattatggttgggttaactaacgatttaatagatacttatgatgccagagtactaataaaaagtacttttgatatactcggttcaaaaggtggtgggggaagaattgacttcgctcaagctggtggcaacaaaaaagatcaattaaatcaggcttttttaagtattaaaaatcagatttaat

SEQ ID NO: 306820 - DNA, 955 bp, Unknown
  Bacterial polypeptide expressing nucleotide sequence isolated from the Sargasso Sea
cagattattttttacagtatataaagatgatgatgaaactaaagaaatatgggaaaaattaggtatccctgaaaaatatatatataaatttggggatgaagataattggtgggggcctgctggtgatgaaggaccttgtggaccatgctctgaacttcattactacactggagatttagataatatgaaattttcagatgataaatgggggccaaacattcatgaagattttgtagaactttacaatctagtttttacgcaatattaccgagatcttgatggtaaagatacaagtttacccttcaataatattgatactggaatgggattagagagaacagtttcaattttaaatagcgtgaaaagttcttatgaaactgatatttttagtgaacacttaactcacctaaacactctaataaaagaaaaaggcttagatgtagaaaaatctaaaagaataattgcagaacatggaagatctgcttcattcttaataggtgatggagttctgccagagaatacaggaagaggttatgtactaagaagacttattagaagagctatggttactgcaaaaaagttggatctagaatttccgattctatcacctatggcaaaaatcacttctaataaactcagccacatttatccagaactagatgaaaaattagacttcatagtatctgttttaaataaagaagaagaaaatttcaataaaacgctaaattttggaactcaagtcttatatgaacttataagtaaaagagacattaatattgatcatgaaattatttccaatgatgcaaaagaggtttccaaagagatatttaacaagataaatgataaaaaaaataaaaaagttttaagtggaatagaagcttttattctatatgatacatatggctttccaattgaaatcacttccgaaatatgcagcgaatttggattagaaatc

SEQ ID NO: 306821 - DNA, 1177 bp, Unknown
  Bacterial polypeptide expressing nucleotide sequence isolated from the Sargasso Sea
ctatggcgaatctggaggacaagtaggcgatactggtgaaatagtatcgaatgattttaaatttgaagtaattgatgttcaaaaaaaacttggagatttatttgtccattatggaatggttaagagtggatctataaaacttcaagaaagtgtagaattaaaaattgatgtggaaagaagagataatactcgtgcttatcattcagcaacccatctgctacatgaatcattacgaagagttctaggtactcatgtaactcaaaaaggatctttggtagagccaagtagattaagatttgatttcagtcatatgaagccaattttgaatgaggaaatcgataaaatagaggagtttgtaaatacaatggtctctaaaaaatctgatgtaaaaactagattaatgacacctgatgaggcagttgaaaatggcgctttagcattatttggggaaaaatatggagatgaagtaagggttctttcaatgggagacgaggatggcaagtatttttcaactgaattatgtggtggaacgcacgtcaaaaacactggtgatattggtaaatttaagattgtgagccaatcatctattgctgcaggggttagaagaatagaagcattaagagataaacaattagaggaatatttaaaaaataaagaaaaattatcaaacttatctgcagaaaaagatgaagaaacaattaaagatttaagtcagcaaattataaaacttggtggaaagccaagtttagaagaagctgatcaaaaaactttaataaaaaatttgactaaacaattagaaactatctcggtaaatacaattttagaggataaatcaaaaaatactattaaagatgtagaaattaatggagttaaattaagacttcaaagaatagatggattgcctccaaaagaattgagaaaacttgtggataaaggcaaaaaagatttaggtgaaggtattgtggtagtgtttgctaataaagatgacaaggttgggttagcagttggagtaacagataatttaaccagcaagtttgatgcagtaaaatttgttaaagttggatctgaaataattggtggtaaaggtggtggaggaagaaaagactttgctcaagctggtggacaggatcaatcaaaaattgaagaagcttttgaaaagcttaagagtttagtttaa

SEQ ID NO: 306822 - DNA, 1598 bp, Unknown
  Bacterial polypeptide expressing nucleotide sequence isolated from the Sargasso Sea
aacatatccagagcttctcaataagaaagattacatagagcgaatcatcttgatggaagaagagagatttgctgcaacgctttcacagggaatgagtttattacagaaagaatttgaccgatcaaatgatgaaatgatatcgggtgaattcgcattcaagttatatgacacatatggttttccgttggatatgacagtcgatattgcgagaagcctatcgagagttgttgatcttgaaggttttgagaaggctatggataggcagagagaattggcaagaagggcaagcaaattcaagtcagatgagtcatttagtcttaatcatgatttgaagagtgaatttcatggatacaaagtcttagagactgacagcaaaatcatcggagtctttggtcaagatggttccgattttctacgtcaaggtgaattcgggcaaatcatcttagataaaacaccattttatgctgaaagcggagggcaggtaggcgaccaaggatcttttgaatcagatacaggtgtctttgaagtcatggatactcagctctcaggcaatgcatactctcattttgggactgtgtctaatggtcaaatttcggttggagatatgattatggcctctgtaaatcctgtcagaagaaaatcaattactctgaatcatactggcacacatatgttgcatagagctttgatgatggttttaggtgagcatgtgcaacaaagaggttctttagtggatgatgaaaagatcagatttgatttttcacatcatcaatcactcacagcaagtgaaataagagaaatagaaacaattgtgaatgaaaaaattgaagagaatattgatgttcaaaccagtatcatgaaacatgatgaggcgattgactctggagcgatggctctttttggcgaaaaatatggtgaagatgtaagagtattggatgttggagatttttcaaaagagctttgcggagggacgcatgttaaaaacacgaatgaaattggaatatttaaagttgtttctgaatcgagtatctcctcaggaacaagaagaattgaggcaataacgggagacaaagctttgaagtgggcaaaagagacagagcatttggttgaatcactgacggatttacttcaaatcagaagagaggacgtcaccagcaaagtggaatccttgttggattcaaataaaaaacttcaggctgaaataaagcaactcaagtctaggattgcttcaggacaatctagctttgatatagatagtacagaaaatatcaatggaatcaattacttatataaagaattagagaacgaaactgagtcaagcgttatgcgaggagccattgatcagttcaaaaataagctgaaatcaggagtaatcattctttcctccgtcaatcagaaaggtaaagtgacacttacaataggtgtaactgatgatttgatagcaaaagtagaggccaaatcaattgccgaagttatttctactgcccttgatggaagtggaggcgggaaagctaattttgcccaagcaggtggatctgacactaaaaaagtccccgctgctttggattctgtaagagaattcttatctaagatttagt

SEQ ID NO: 306823 - DNA, 2111 bp, Unknown
  Bacterial polypeptide expressing nucleotide sequence isolated from the Sargasso Sea
cggtccctgcggcccgtgctcggaaatcttctatgaccacggcccggacgtgtggggcggccccccggggtctcctgaggaagacggcgaccgctacatcgagatctggaatctcgtgttcatgcaattcagccgcgacgcgcaaggcaacatgacgccgctgcccaagcagtgcgtcgacaccggcatgggtctcgagcgtatcgccgcggttttgcagcacgttcacagcaactatgagatcgacctgttccaggcgctcatcaaggctgcgggccgcgaaaccggcgtgaccgatctgaccaacaattcgctgaaggtgattgccgatcacatccgcgcctgctcgttcctgatcgtcgacggcgtgattccgggcaacgaaggccgcggctacgtgctgcgccgtatcgtgcgccgcgcgatccgtcacggctacaagctgggcaagaagggttcgttcttccaccgtatggtgccggacctcgtcgcgcaaatgggcgccgcctatccggagctgaaggacgcggagcaacgcgtgatcgacgtgctgcgccaggaggaagaacgcttcttcgagaccatcgagcacggcatgtcgattctcgaaagcgcgctggccgatctggaagcgaagggcggcaagacgctcgacggcgaactcgcattcaagctgcacgacacctacggtttcccgctcgatctgacggcggacgtctgccgcgaacgtgaagtgacagtagacgaggctgcattcgacgaagccatggcgcgtcagcgcgaacaggcccgcgcggccggcaagttcaagatggcgcagggcctcgaatactcgggcgcgaagaccacgttccacggctacgaagaaatcgtcttcgacgacgccaaggtgatcgcgctatatgtcgacggcgcctcggtgaaggaagtgaatcacggccagcaagccgtcgtcgtgctggaccataccccgttctacgcggagtcgggcggccaggtcggcgaccagggcgtgctggcgaacgcgagcgtgcgtttcgcggtaaccgacacgttgaaggtgcaagccgacgtggtcggtcaccacggcacgctggagcagggcacgctgaaagtcggcgacgtcgtgaaggcggaaatcgacgcggtgcgtcgtgcccgcaccgaacgcaatcactcggccacccacctgatgcacaaggcgctgcgtgaagtgctcggctcgcacgtgcagcagaagggttcgctggtcgatgccgacaagacccgtttcgacttcgcgcacaacgcgccgatgaccgacgagcagatccgtcaggtcgaggcgatcgtcaatgcggaagtgctggcgaacgcgccgggcatcgtgcgggtcatgccgttcgacgaagccgtaaagggcggcgcgatggcactgttcggcgaaaagtacggcgacgaagtgcgcgtgctcgacctcggtttttcgcgcgaattgtgcggcggtacgcatgtgcatcgcacgggcgacattggcctcttcaagatcgtgatggaaggcggcgtggccgccggtattcgtcgcgtggaggcgatcaccggcgataacgccgtgcgtttcgtgcaggatctcgatgcgcggatcaatgcggctgccgccgtgttgaaggcgcagccgtcggagctgacgcagcggatcatgcaggtccaggatcaggtcaagtcgctggagaaagagctgagcgcgttgaagtcgaagatggcttcgagccagggcgacgagcttgccggtcaggcaatcgaagtggccggcgtgcatgtgctggctgccacgctcgaaggcgcggatgtgaaaaccctgcgcgagaccgtcgacaagttgaaggacaagctgaagagcgcggcgatcgtgctggcctcggtcgagggcggcaaggttagcctgatcgccggggtgacggcggacgccagcaagaaggtcaaggccggtgaactcgtcaacttcgttgcccagcaagttggcggcaagggtggcggccggccggacatggcgcaagccggcggtaccgagccggcgaatctgcctgcggcgttggcaggcgtgaaggcctgggtcgaaacccagctttgat

SEQ ID NO: 306824 - DNA, 1439 bp, Unknown
  Bacterial polypeptide expressing nucleotide sequence isolated from the Sargasso Sea
aggagagtctgcatttaagctatatgatacttatgggtttccaattgatctaactcaggacatattaaaaagtaaaaatatcactatagatatcgaaagttttaataaaaaacttgaggcacaaaaagaattagcaagaaaaaattggtcaggtgcggggggagctgcgacagataggatttggtttgaattaaataacgaattatctgcaacagaatttcttggatataacggtacggagacgacaggagaagttttgtcaataatcaaaaatgatcaaagggtgaataaattagaagatggcgataaaggagtgctaatattaaatcaaaccgttttttatgcagagtcaggtgggcaaatcggggatacaggaacaataaaaggagaagattttgagttcaaagttgaagatactcaaagaaaaggacaagtaattattcatacaggcgtcatggttagtggtattatagaaattggtctaaatgcatccttatcagttaatcaaaagcaaagaaatgattgtcgggcatatcattcagctacacatattttacatcaatctctaagagatagactaggggagcatgttacacagaaaggatctttagtttcaaatgacaaattaaggttcgattttagccatcatagatcaatgacaaatatagaaattgaagatgttcaaaataaagtaaatgaaattatcatgagtggttctgaggtagagacacaaataatgtccccagatgatgccgtaaaggccggtgctcttgccttgtttggagaaaagtattcagatgaagtaagagttctcaaaataggcaaattaaatgacaaaatatatagtactgagttatgtggaggaacacatgtctcaaatacaagagaaattggggaattgaagattattagtgaatcttctgctgcctcaggcgtaagaagaattgaggctttaagaggagatgacctattaaaatttaatgaagagaagaaaaatgaaaatcttaggtcagaagaaaaaaaattagatctaaaaaaagaaaaagaaatttctgctgtaaacataaagcttcttaaagaagcgatacaaatgagcattagtaatgactctgatcaaaaaataattattgaattctgtgaaaatgtacccattaatgagttaaggccactgatagataaatataaaaaactaatttctggagacggtgttataattatctgtgttaaaaaggatgataagctaagtttcctaattggcgttactgatctattagctaacaaaattggagctgatgaaatagctaaatttgcatcctctatttcaaatgggaaagggggtggaggcagaaaagactttgctcaatcaggaggtatgctaattaatgaaaatgatcaaaaaaagaaactgagagagtttattattgataagttacagtaag

SEQ ID NO: 306825 - DNA, 1158 bp, Unknown
  Bacterial polypeptide expressing nucleotide sequence isolated from the Sargasso Sea
aaatatgtcaattagttttagaaaatacaccattttatcctgagggaggtggtcagtctggcgataaaggaaagttagtttttgaaaataataatgaattactaattattgatactaagaaggaaaatggaaagattttacacttttcaaaaaaaccagattttgatatttcatgtgatgttaaagcctccgttgattcttttgaaagaaatgaatgctcatcaaaccattcatccacacacttacttcatcaagcactcaggaatgttttaggaaatcatgttgaacaaaaaggttcatctgttacacctgaaggattgagatttgatttttcacacttcaaaaagatagacgatgatcaaataaaagaaatcgaaacttatgtaaacaatagaattgatgactcaattgaacttaaagagaatagaaatgagaattataatactgctattgataatggtgcaattggattattcggtgaaaaatacggaaaaacagttaggaccattaagttcggagattcctatgaattatgtggaggaacccatgttagaaatactatgaatatcagaaattttttaattatttctgagagctcaattgcttcaggtattagacgtattgaggcaatttctggaaaaaaatctataaattatttatctgacagaaataatgaaattaatcagcttaaatcaattctatcttctaacaaaggaactgtagattccgtaagaaatttgaaaaatgagaattctgaattatctaaaacactaaagaaaagtcaaaaaaaattgactcagttttactctgaacactttttacaaaagtttaaaaaagttgaagcaactaatctattgattgaaaaagttgaaatggataatgatctaatgagatccttgtcctttgatttaattaataagattagagattcaataattattttttattcaaaggactctaacaacttgaatattatttgtaatgtttcaaaaacattgaatgacaatattaaaattgatgcagctaaaataatttcctctctatgctcagctgtcggtggcgctggaggaggtcaaaaacactatgctagtggatctgctcctttcaaaagtgatattgaagaaacaattaaaaatattttaaaagaaatattataag

SEQ ID NO: 306826 - DNA, 1618 bp, Unknown
  Bacterial polypeptide expressing nucleotide sequence isolated from the Sargasso Sea
atgagcaaaattctaatgagtgagattagaaagaagtttcttggctatttttcaagaaaccaacataaaattatagaatcaagcaacatagttccaaataacgatccaacattaatgtttacgaattcaggcatggttcaatttaaaaatgtatttacaggtatagaaaataagtcttacaaaactgctgctacttcacaaaaatgtatcagggcaggcggaaaacacaatgatttagaaaatgttggttatacccccagacatcatacattttttgaaatgctcggaaacttttctttcggtgattatttcaaggaaaaagcaatttattatgcatgggaactgcttactaaagattttgacatatctaaggatagactatcagtcactgtttattctgaggatgaagaggcctttaaactatggaaaaagattgcgggattacccgaaagtaaaatagttaaaatttcaacctcagataatttttggtcaatgggtgaaactggaccttgcggaccttgttctgaaatattttttgatcacggagataaattaaaaggaggacctcccggaagccctgatcaagacggagatagatttatagaaatttggaacctcgttttcatgcaatttgaacaaatttctaatgataaaagaattgatttgcctaagccatcagttgatacaggaatgggcctagagagaataacggctgttctgcagggaactcacgacaattatggaatagatcattttaaaaaacttataacagcgtcatccgaaattacgaatactaaaatcaacaatgacactattgcaagtcatagagtaatcgctgatcatctcagagcaagtagttttcttatagccgaaggagttttaccttctaacgagggaagaggttatgttcttagaagaattatgagaagaggcatgagacatgctcacacacttggaagtaaacaaccaatcttttttaaattatttgatgttctcttaaacgaaatgtcaaaaagttatcccgaattaaatactggaaaagatctaattatagaaacattaaaaaacgaggaagaaaaattctcatctcttttggatagaggaatgaaaattttagatcagaatttagaaaaagttaaaaacaacatccttcctggggaaatagctttcaagttatatgacacatatggattcccattagaccttactgctgatattttaaaaaataaaaatataaaaatagattcttctgcctttgataaagcaatgcagaaaagcaaagagttagctagagcaagctggaaaggatcaggtgataagtcagtagatgaaaaatggtttaaagttagagaacaattgaacccaacagaatttttaggttatgaatttgataaagcggaaggtattgttttaaaaatatcaaaaggaaataagtttgttgaaaacgcaaaagaaggcgatgaagttgaaatcattacaaatcaaacacctttttatggtgagtcaggtggacaagttggagatcaaggaatcatttcaagttctaaatgtaaaattaatattcaagacacacaaaaaaaaattggagacctgtttgttcattatgaacagtcaaaaa

SEQ ID NO: 306827 - DNA, 586 bp, Unknown
  Bacterial polypeptide expressing nucleotide sequence isolated from the Sargasso Sea
tatgggcaatattctaatgagtgatattagaaagaaatttctaagttatttcaaaggaaataatcatgaaatagtagagtcgagcaatattgttccgaataacgatcctaccttaatgttcacaaactcaggtatggttcaattcaaaaatgtgtttactggaattgaaaataaatcatttaaaaccgcgactacttcacaaaaatgtattagagctggtggtaaacataacgatttagaaaacgttggttatacaccaagacaccatactttttttgagatgttgggaaatttttcttttggcgattattttaaggaaaaagcaatttattacgcttgggagttgttaactaaagatcttggtattcctaaagatagactatctgcaacagtattttcagaagatgaggaagcatttaaattatggaaaaaagtagcaggattgccagaaagcaaaataattaaaatatcaactgcagataatttttggtctatgggtgaaacagggccatgtggtccttgctctgaaatattctttgatcacggagataagctaaaaggaggcccacccggaagtcccgatcaa

SEQ ID NO: 306828 - DNA, 530 bp, Unknown
  Bacterial polypeptide expressing nucleotide sequence isolated from the Sargasso Sea
tatgagcaatattctaatgagtgatattagaaataaatttctaagttatttcaaagtaaataatcatgaaatagtagagtcgagcaatattgttccgaataacgatcctaccttaatgttcacaaactcaggcatggttcaatttaaaaatgtgtttactggaattgagaacaaatcatttaaaaccgcaactacttcacaaaaatgtataagagctggaggtaaacacaatgacttagaaaacgttggttatacaccaagacaccacactttttttgaaatgttaggaaatttttcttttggtgactattttaaggaaaaagcaatttattatgcttgggagttgttaaccaaagaccttggtattcctaaagacagactatctgcaacggtattttcagaagatgaggaagcatttaaattatggaaaaaagtagcaggattaccagaaagtaaaattattaaaatatcaactgcagataatttttggtctatgggtgaaacagggccatgtggaccttgctctgaaa

SEQ ID NO: 306829 - DNA, 814 bp, Unknown
  Bacterial polypeptide expressing nucleotide sequence isolated from the Sargasso Sea
actgttatctagacataaaataaaaaagctgtattttaaaaatatggctgacaaatcattaaatgaaataagaaatacattcttaaaatattttgaaaagaatgatcataagatagtcgagtctagtaatttagttcctaataatgatcctacactgatgtttgctaattctggaatggtgcagtttaaaaatgtatttactggtttagaaaagagagattatcaaagagccactacatcacaaaaatgtgtaagagctggtggaaaacacaacgatttagaaaatgttggctatacacctagacaccatacattttttgaaatgttgggaaatttttcttttggggattattttaaagagcaagcaatacattatgcttgggatttaataaccaaagatttcggtatagataaaaatagactttatgtgactgtttttaatgaagatgatgaagcttttaatttttggaagaaaatagcaggttttagcgatgatagaataattagaattgcaacatctgataatttttggtcaatgggtgagaccggaccttgcggaccctgttcagagatattttttgatcatggagaacatttaaaaggaggtctccctggatcaaaagatggggatggagatagatttattgaaatttggaatttagtttttatgcaatttgaacaagtcactaaagataaaagaataaatcttccaaaaccatcagtagataccggaatgggtctagagagaattgcagctttgcttcaaggaacacatgataattatgaaacagatcattttaataaaattattaat

SEQ ID NO: 306830 - DNA, 871 bp, Unknown
  Bacterial polypeptide expressing nucleotide sequence isolated from the Sargasso Sea
catggccgatattttaatgagtgaaataaggagaaagtttctcgattattttgccaaaaataatcatgaaatagtggattcaagtaatattgttccaaataacgatccaacgttgatgtttactaattctggaatggttcaatttaagaacgtttttacaggtatagagaataaatcttttaaaacagctactacttcacagaaatgtatcagagcaggtggaaaacataacgatcttgaaaatgttggttatacaccaaggcaccatacatttttcgaaatgttgggaaatttttcttttggcgactattttaaggaaaaagcaatttattatgcttgggaattgctaacaaaagaacttggtattccaaaagaaaaactttcggcaacggtatattctgaagataaagaagcttttaatttatggaagaaagttgctggattgccggaaagcaaaattgttaagatttcaacttctgataatttctggtctatgggtgaaacaggtccatgcggtccttgttctgagatattttacgaccatggagataagttgaagggtggacctccaggcagcccaaaccaggatggtgatagatttatagaaatttggaatcttgtatttatgcaatttgagcaagtttcaaagataaaaagaatagatttacctaaaccttcagttgatacaggaatgggattagaaaggataacagcagttcttcaaggaacccacgataattacagcattgatcattttaaaaaattgatgtcagcatcttctgatatcaccaaaacaaaaatagacaacaaaactatagcaagccacagagttattgcagaccatcttagagctagtagtttcttaatagcc

SEQ ID NO: 306831 - DNA, 2515 bp, Unknown
  Bacterial polypeptide expressing nucleotide sequence isolated from the Sargasso Sea
ctgatatctagacataaaataaaaaagctgtattttaaaaatatggccgacaaatcattaaatgaaataagaaatacgttcttaaaatattttgaaaaaaatgatcataagatagtcgagtctagtaatttagttcctaataatgatccgacacttatgtttgctaactctgggatggtacaatttaaaaatgtatttactggtttagaaaagagagactataaaagggctaccacatctcaaaaatgcgttagagctggaggaaaacataatgatttagaaaatgttggttatacacctcgacatcatactttctttgaaatgctgggaaatttttcttttggagactattttaaagaacaggcaatccattatgcatgggatttaattactaaagattttggtatagataaaaatcgactttatgtaacagtatttcatgaagacgatgaggcattcaatttttggaagaaaattgcgggttttagtgatgatagaattttaaggatagctacatcagacaatttttggtcgatgggagaaacaggaccttgcgggccatgttctgagatattttttgatcatggcgatcatttacctggaggattaccgggatcaaaagatgaagatggagataggtttatagaaatttggaatctagtctttatgcaatttgaacaaatttcaaaagataaaagaataaatcttccaaaaccttcagttgatactggaatgggtttggagagaattgcagcattgcttcaaggaacacatgacaattatgaaacagatcactttaaaaaaataattaattcggcatcagaaattgttaaagttaaatctgatgaatctaatttatcgagttttagagttatagcagaccatttaagagcaagctcatttttaattgccgaaggtgttttaccctctaacgaaggaagaggttatgtattaagaagaattatgagaagaggaatgaggcattgccacttgcttggatctcaagagccagttttttacaatttgtttgatacgctaaagaatgaaatgtcaggtaattatcctgagttagtaagagcagagtcattaattaaagaaactttaaaaatggaagaagaaaaatttttagtattgttagatagaggtattaaaattttaaacgatgaaatttctaaaatagataaagtattgcctggagaagtagcatttaagttatacgatacgtatggttttccattagacttaactgaagatattttaagaaataaatcactgtcaatagataaagaaaaatttcagtcactgatgaaagaaagtagagaacttgccaagaaaaattggaaaggttctggggatgctgcagtagaagatgtttggtttggaataaaagataaattagaaccaactgaatttttagggtatgaaaccaatcaagctgaaggtgttgtattgtctttgttaagggaaaataaagaagttgatcagttgaaagaaaatgatgaaggaatgattattctaaatcaaacaccattttatggagagtctggaggtcaggtcggtgataccggagagataatatcaaatgactttaaatttgaagttatagatgttcaaaaaaaacttggcgatttatttgttcattatggaaaagtgataaaaggatcaattcaattaaaacaaaatgtagaattaaaaattgatattgagaggagagataatactcgtgcttatcattcagcaactcatcttttacacgagtctttaagaagagtgcttggtactcatgtaactcaaaaaggatctttagtggaacctagtagattaagatttgattttagtcacatgaaacctattttaaatgaagaaattgataaaatagaaaactttgttaactcaatggtttcaaaaaaatctgatgttaagacgcgtttaatgacacctgatgaagcagttgaaaatggtgctttagcattgtttggggaaaaatatggtgaagaggtcagagttctttcaatgggtgatgaagatggtaaatatttttcaacagagttatgtggtggaacgcatgtaaaaaacactggcgatattggtaaatttaaaattatcagtcaatcttcgatagccgcaggagtaagaagagtcgaagctttaagagataaacaattagaggaatttcttaaaaataaagagaaattatcaaatttatcttcagaaaaaaatgaagaaacaattaaagatttaagtcatcaaataatcaaattaggcggaaaaccaaatttagatcaaacagatcaaaaaactttaataaaaaatttaacaaaacaattagagactatttcagtaaattctattttagaaaataaatcaaaaaatattatcaaagatgaagaaattaatggaataaaattgagacttcaaaaaattgatggattacctccaaaagagttaagaaaacttgttgataaaggaaaaaaagatttaagcccaaggtattgtggttgtatttgcaagtaaa

SEQ ID NO: 306832 - DNA, 542 bp, Unknown
  Bacterial polypeptide expressing nucleotide sequence isolated from the Sargasso Sea
actgttatctagacataaaataaaaaagctgtattttaaaaatatggcagacaaatcattaaatgaaataagaaacacattcttaaaatattttgaaaagaatgatcataagattgtagagtctagtaatttagttcctaataatgatccaactttaatgtttgctaactcaggaatggttcagtttaaaaatgtatttactggtcttgagaaaagagattatcaaagagcaaccacttcacaaaagtgtgtaagagcaggtggaaaacataacgatttagaaaatgttggctacactccaagacatcatactttctttgaaatgttgggaaatttttcatttggagattattttaaagagcaagcaatccattatgcatgggatttaattactaaagaatttggactagataaaaatcgtttatatgtaacagtatatcatgaggatgatgaagctttcaatttttggaagaaaatagcgggttttagcgatgatagaataattagaatagctacttcagataatttttggtcaatgggtg

SEQ ID NO: 306833 - DNA, 242 bp, Unknown
  Bacterial polypeptide expressing nucleotide sequence isolated from the Sargasso Sea
tatgggtcgtattttaatgagtgaaatcaggaaggagtttcttgattatttttcaagaaacgggcaccaaatagtagaatccagcaatattgttccaaataacgatccaacccttatgtttacaaactcaggaatggttcaatttaaaaatgtttttactggtattgaaaagaaagacttttcaacagcaactacttcacagaaatgtattagagcaggcggaaagcataatgatttagaaa

SEQ ID NO: 306834 - DNA, 895 bp, Unknown
  Bacterial polypeptide expressing nucleotide sequence isolated from the Sargasso Sea
atgagcaaaattctaatgagcgagattagaaagaagtttcttggctatttttcaagaaaccaacatgaaattatagaatcaagcaatatagttccaaataacgatccaacattaatgtttacgaattcaggtatggttcaatttaaaaatgtatttacgggtatagaaaacaagtcttataaaactgccactacttcacaaaaatgtataagagcaggtgggaaacataacgatctagaaaatgttggttatacccctagacaccatacattttttgaaatgctaggaaacttttcttttggagattattttaaggaaaaagcaatttattacgcatgggaactgcttactaaagattttggtatttcaaaggatagactatcagctactgtttattccgaggatgaagaggcctataaactatggaaaaagattgctggattaccagaaagtaaaataattaaaatttcgacatcagataatttttggtcaatgggtgaaactggaccttgtggaccttgttctgaaatattttttgatcatggtgataaattaaaaggaggtcctcctggaagcgccaatcaagatggagatagatttattgaaatatggaaccttgtttttatgcaatttgaacaaatttctaaagataaaagaattgatttgcctaagccatcagttgatacaggaatgggcttagagagaataacggctgttcttcaaggtactcacgataattatggaatagatcattttaaaaaacttataactgcgtcatccgaaattactaatactaaaattaataatgatacaattgcaagtcatagagttattgctgatcatcttagggcaagtagctttctcatagctgaaggagttttaccttctaacgagg

SEQ ID NO: 306835 - DNA, 319 bp, Unknown
  Bacterial polypeptide expressing nucleotide sequence isolated from the Sargasso Sea
gttgcaactacaagacctgaaacgatcctaggcgattcaggtattgcagttaatccatctgattatcgctataaggatcttattggtagtatggttcgagctccattgtcaaatcgacttattccgattgttgctgaccaatatgcagatcctgaaaagggtactggagcggtcaaaataacgcccgctcacgactttaatgattgggaggttggtaagaggtcttccttgagaataataaatatctttgatttaaaagctagagtcagattgaacgaaaatgaagaattcttaaaagactgtgagcctgatgaagttg

SEQ ID NO: 306836 - DNA, 802 bp, Unknown
  Bacterial polypeptide expressing nucleotide sequence isolated from the Sargasso Sea
acaggcattagtagaaaaaaaactaaaatctgaaggtatcgataaaaatgatttgggtagagaaaaattcatcgaaaaagtttgggaatggaaaggtcagtatggcgatattattattaatcaattaaaaaaattaggttgttcatgtgattggtctagaaatgcattcaccatggacgataatctatcaaaatctgtattaaaagtttttgttgaaatgtacaaaaatggtttaatttacaaatcaaaaaaattagtcaattgggacactgtattaaaaacggcaatatccgatttagaggtagatcaaagagaagttaattcaaaactataccacatcaattatccaatagaagggacagataaatttataactattgcaactactagaccagaaaccatgttaggagatacagcggttgcagttaatccatcagatgaaagatttaaatcattagtaaataaaaatgtaatagttccaatagttgatagaaaaataaaaattatagaagatgattatgcagatcctgaacaaggtactggagctgttaaaattactccagcacatgatttcaatgattatgaagtaggggagagaaacaatttagaaatcataaatgtttttacaccagatggtaaaattaatgaaaatgcacctgataattatgttggacttgatagatttgaagctagaaaaagaattttaaaagaactttctgataaagaattatttgttaaagaagaaaaaattaaaaataaagttccttatggtgatagatctaattctataattgaaccttat

SEQ ID NO: 306837 - DNA, 886 bp, Unknown
  Bacterial polypeptide expressing nucleotide sequence isolated from the Sargasso Sea
cctatccagagaaaatattgataaaaatgatttaggtagagaagatttcgttaaaaaagtttgggagtggaaagaattttcagaaaataaaattactggacaaattaaaaggttaggtaactcagttgattggagtaattacagatttactttggatgaaggttttaatgaggctgttcttaaagcttttgttgagctttataggaaagagaaaatctatcgtggctacagattagtaaactgggatccatctttaaaaactgcagtatcagatctagaggttgtaagacaagataaaaaaggtcttatttggtacataaagtatccaattataggttcagatgattttgtaacagttgcaacaacacgtccggaaactatgtttggagatatggcaattgcagttaatcctaaagataaaagatacaaaaatattattggaaaaaaagttgaactcccatttgtaaagagaaaaatcccgataattggcgatgactatgtggataaagagttcggaacaggctgccttaagattactcctggacatgactttaatgactatgaaattggtaaaaaatactgccttcactgtgtagataatgaagttcatatatctgatgatattgaagatttcgaaccacttaatatttttactgatgaagcgcatagtaatgataatgtcccttctcctttcaaaaatttagacagattcaaagtaagaaagcttgttcttgaagaaattaaaaagctacatttatttgtaaaagaggaggagcatgaaatcagtgttcctcgcggagagcgctcgaatatagttatagagcccaaactgagttatcagtggtatgtaacaacaaagggcacggcagctaaggcaaataaagct

SEQ ID NO: 306838 - DNA, 196 bp, Unknown
  Bacterial polypeptide expressing nucleotide sequence isolated from the Sargasso Sea
atgagtagcgataaatatatacattctgatgtagaaaatagaatttattcttattgggaaaaaaatggtctttttaaacctaaagaaaattcaaaaaaattttcaattgtaatacctcctccaaatgtgaccggcagtttacatatggggcatgcgcttaacaattctattcaagatttattagttcgttaccata

SEQ ID NO: 306839 - DNA, 376 bp, Unknown
  Bacterial polypeptide expressing nucleotide sequence isolated from the Sargasso Sea
aatgttggaaaagtattacaagcatgaacttgtagaaaaagaaatttacgaaggctgggaaaaagataaagacttcgtatctaaagttactgataaaaattcaaaacctttttgcattgttattcctcctccaaatgtaacaggaacactacatatgggccatgcattgaataatactttgcaagacatattaattcgttatcaaagaatgcaaggtaaggatgtcttgtggcaacctggaatggatcatgctggtatcgctactgaaatggttgttgaaagagaattaaaaaaagaaggcataaaaaaatcggaattatcaagagaagaatttgtgaaaaagtatgggagtggaaagatctttcaggaggtctaa

SEQ ID NO: 306840 - DNA, 781 bp, Unknown
  Bacterial polypeptide expressing nucleotide sequence isolated from the Sargasso Sea
agcttgttgggtacctggaactgatcatgcttcaatagcaaccgaagcgaaagtagttgaaatgctaaaagaaaaaggaattgataagagttctcttacaagagatgagtttcttaaatacgcatgggaatggaaagaaaaatatggtggaataatattagagcaactaaaaaaacttggagcatcttgtgattggtcaagaactaaatttactatggatgaagacctatcaaaatctgtaataaaagtttttattgacctatatgataaaggccatatttatagaggtataagaatggtcaattgggaccctcaaggaaaaacagctttagcagatgatgaagtgatatataaagaagttgactctcatttatattatattaattataaaataaaagattcaaaagatcatataacaattgccactacaagacccgaaactcttctaggagatactgcggtatgcataaatcctaaagataaaagatttaaacatctaagaaataagtcagctatagtaccactagttgaaagagaggttccaatcatatttgatgaatatgtagatatggaatttggaactggatgcctgaaagtaacaccttctcatgatgaaaatgattataaacttggtgaaaagcataatttatcatccattgatatatttgatgacgaagggaaaataaataaaaatggaatactatatataggaaaagataggttcagagtaagaaaacagattataaaagatctaaaaaaaattggacaactttcaaaaatt

SEQ ID NO: 306841 - DNA, 203 bp, Unknown
  Bacterial polypeptide expressing nucleotide sequence isolated from the Sargasso Sea
aatgagttttgataaatatgagcataataatgttgagaataaaatctatgattattgggaaaaaaatgaattatttaaacccaaagaaaattcaaaaaaattctcaattgtaattcctccaccaaatgtaactggaagccttcatatggggcatgctttgaataactctattcaagatgttttaacgagatttcatagaatga

SEQ ID NO: 306842 - DNA, 244 bp, Unknown
  Bacterial polypeptide expressing nucleotide sequence isolated from the Sargasso Sea
atgagttcagataaatatatccattcagaagttgaaaataagatttattcttattgggaaaaaaataatttatttaaacctaaaaaaaacaaaaaatcattttcaatagttattccacctccaaatgtaactggaagtcttcatatggggcatgctctaaataattccattcaagatttattaacaagatttcatagaatgaataattatgagactttatggcagcccaggtacagatcatgca

SEQ ID NO: 306843 - DNA, 482 bp, Unknown
  Bacterial polypeptide expressing nucleotide sequence isolated from the Sargasso Sea
aatgggaattgataaagtttacaatcctaatgagattgaaattaagtggttaaaaaaatgggataaagaaaatttattcaaatcagttcctgacgaaagagaagtatatacaattgtaatacctcccccaaatgttactggaattctccatatgggtcatatgcttaacaataccatacaagatattctcattagaagggcaaggttaaaaggacttaatgcatgttgggtcccaggaactgatcatgcctcaattgcaaccgaggcaaaggttgtaaaaatgttaaaggaaaagggaatcaagaaaagtgatatcagtagggatgaatttttgacttatgcatgggattggaccgaaaagcacggaggtttaatattgaaccaattaaaaaggataggttgctcatgtgattgggacagaactaaattcacacttgatagtgatttatctgagtcagtaattgatacatttattaaattat

SEQ ID NO: 306844 - DNA, 981 bp, Unknown
  Bacterial polypeptide expressing nucleotide sequence isolated from the Sargasso Sea
tgaatcacctacaatggtgggatatagattttcaactgctgttgctcaagctgaaatcgaggacagagatattgatggagcttatcatgatataagatttaatattcaagactctaaagaaaatttaataatttctacaacgagacctgaattactagcatcttgcgtaggaattacagctcacccagatgatgaaagatataagcatctttttaataaaactgctatttctcctgttttttttgctccagtacctattttccccagcaaacttgttgatatgcagaaggggactggtattttgatggtttgtacttttggagatcaaacggacgtagtttggtggagagaaaacaaacttcctcttagacaactttttggatctgacggtaaagttttagaaataaattttgaccataaaaaagaaaaaaatgaatggataagtgtaaatgctgaaaaagctaataaaaatatttataaattttataataagactctaaagcagtctaaaaacttaataattgaaatgctcaaagaatctcaaaattctttagataatatagtcccattggtatctgatccaaagaaaattttacatcctgtaagattttacgaaaagggagattctccaatagagtatatatcctcaaggcaatggtttgttaagattactgataagaaagatgatcttttagaaataggtaaaaatattaattggcatcctaattatatgtccaaaagatttgagaattggacgcaaaatttagcaatagattggtgtataagcagacaaagattttttggggttccaatacctgtttggtacaagatagatgaaaaaggtaaagttgactataatgacgtaatcctaccaaatatttctaatttaccaattgatccagagatagatatccctgataatttatcagaaaaagatagaggaaagcctaacggatttattggcgagaaagatgtttttga

SEQ ID NO: 306845 - DNA, 897 bp, Unknown
  Bacterial polypeptide expressing nucleotide sequence isolated from the Sargasso Sea
cgttattagtaacaggttttgacataatctttttctgggtagccagaatgataatgatgggtctgaattttaatgacgatgtcccgttcaaggatatattgattcatgggctggtaagagactctaaaggtagaaaaatgtcaaagagtttaaaaaatacaattgatccattggagctatctgaaaaacatggtgcagatgcattgcgcttctcattaatagagaaagcagctccaggacaagatgttccttttgatgaagagtggacaattgctgcaaagaaatttggaaataaactatggaatgctgcaaagtttgtccacttgtactccccggaagaaaaaagaactgatgaaattaaagaaataacttgtcccgaaaatgtatggattgcctgtaggtttgatgaagtcctagctgaatttaatgaattatttgaaaaatataaaatatcagatgcatataagctaatttacaattttgtctggtcagatttgtttgattggtattttgagttttccaaaaacctaatagatgatgagaaaacaaaagatgagactatgtttgttcttaggactacatttttaaaaagcataaaaatattgaatcctgcaatgcctcacataactgaagaaatttggtcaacctttgaagatgatcttttaataaacaacacttggcctgaagttgaaggcaaagagttgaacccagaggctaacgacgttgaaaatttgaaagaagttatttctcaaataagaaatttcaaagctacctatcaattaaaaaataaagaaatattaaaactcaattcaagtaaagatgttagcccttggtttacaaaacagctggaaaacattggcaataaagaattaaatcttaattcacccagaggataaa

SEQ ID NO: 306846 - DNA, 249 bp, Unknown
  Bacterial polypeptide expressing nucleotide sequence isolated from the Sargasso Sea
aatggaatttaaaaaatataatcacttaaaagaagaaaaaaaaatctcagatttttggattaaaaaaggtttgtttaaacctaaaaaaactaaaataaaaaaaagtttctctatcgtaattccgcccccaaatgttacaggaagattgcatatgggtcatgctcttaataacagtctgcaagatgttcttgtgagatttaatcgcatgaagggccttgaaacgttatggcaaccaggaacagatcatgc

SEQ ID NO: 306847 - DNA, 853 bp, Unknown
  Bacterial polypeptide expressing nucleotide sequence isolated from the Sargasso Sea
gaatatggtgacattatcataaaccaacttaaaaaactcggatgttcatgtgattggtcaaggaatgccttcacgatggataaaaatttatctgaatcagttattaaagtttttgtagatctctataacaaaggtctaatttataaatctaaaaaattagttaattgggatactgttttaaaaacggctatatctgatcttgaggtcgatcaaagagaagtaaattcaaaactttattatatcaattatcaaattgaaaatagttcagaatttataactattgcaacaacaagaccagaaacaatgctaggagacactgctgttgccgttaaccctaaagatgaaaggtacactaatttaataggtaaaaatgtaattttacctataacaggtagaaaaataaaaattatccaagatgattatgctgatcctgagcaaggtactggtgtagtcaaaattacacctgcacatgattttaatgactatgatgtcggaaaaagaaataagttagaaataataaatatttttacagaggatggaaagataaacgaaaatgcacctagtgattatgtaggtttagatagatttgaagcaagaaaaaaaatcttaaatgaccttggtgacaagcttattaaagaagaaaacattaaaaataaagttccttacggtgatagatctaactctataattgaaccatatcttacagaacaatggtttgcagatgcaaaaaaattatcagtaaaagcaaagaagattgtaaagaataaaaaaacaaaattttttcctcctaattggtcaaagacttatttccaatggatgaataatattgaacccctggtgtatatcaagacaa

SEQ ID NO: 306848 - DNA, 235 bp, Unknown
  Bacterial polypeptide expressing nucleotide sequence isolated from the Sargasso Sea
atgagttcagaaaaatatacacattctaaagtagaaaataagatttactcttattgggaaaaaaaaggtctctttaaacccaaaaaaaataaaaaaaaatattctattgtaattccacctccaaatgtcactggaagtcttcatatgggtcatgcattaaacaatacaattcaggatttactaataagatttcatagaatgaacaactttgaaaccttatggcaacccaggaact

SEQ ID NO: 306849 - DNA, 221 bp, Unknown
  Bacterial polypeptide expressing nucleotide sequence isolated from the Sargasso Sea
aatggataacaattttaactcgtctcaaatagaacaagagctctacaaaatgtgggaagaagaaaacttcttcgcccccgcaaatagagacaatcaaaaaaacttctgcatcttgatccctccacctaacataacgggaaccctgcacatgggtcatgcctttaatcacacgcttatcgatatcttgattagacatagccggatgacaggtaaacgcaccc

SEQ ID NO: 306850 - DNA, 865 bp, Unknown
  Bacterial polypeptide expressing nucleotide sequence isolated from the Sargasso Sea
cttaattagacgagctagaatgaaaggatataacgcctgttgggttccaggaactgatcatgcctctattgcaaccgaggctaaagttgtggaaaaattaaaaaaagatggaattaagaaaagtgatttatcaagagaagaatttcttaaatatgcttggaaatggactgctgaatatggaggtattattttagaccaactaaaaatgttgggctgttcatgtgattggaaaagaactaaatttacattagacgataaaatgtctgattcagtaattaaggtttttattgatttgtataataagggtcttatttacagaggttacagaatgcttaattgggatccaaaagcacaaacaactatttctgaagaggaagtattgtatgaagaaagagattctaaaatatatcacatagcatataaaatatctgactcagaagaaaaaatcgtagtcgctactaccagaccagaaacacttttaggcgatacggctatttgtattaatcccaaagataaaagatactcacatttaacaggaaagagtgttttagttccaattgttaagagaaaggttcctattattaaagatgattatgttgatattgatttcggaacaggatgtctgaaagttactcctgctcatgatttcaatgataatattttaggtaaaaaatataatcttgaaatcatagacatttttaatcctgatggtactttgaatcaaaatggtctacattacgttgggcaggacagatttgtcgttaggaagaaaattgtcaatgaattaaaagaaaaaggtcttttaataaaagaagaaaatataaacataacgttgctatttcagagagacaaaagtagttattga

SEQ ID NO: 306851 - DNA, 202 bp, Unknown
  Bacterial polypeptide expressing nucleotide sequence isolated from the Sargasso Sea
gatgacacttgaaaaaaaatttaattttatcgaagaagaaaatataatttacgataaatggtataaatctaactgctttaaaccaacaaaaaattcagagccttattgcattatgatgccacccccaaatgtaactggtagtttacatatgggacatgcacttacttttacaattcaagatatacttattcgttataataga

SEQ ID NO: 306852 - DNA, 690 bp, Unknown
  Bacterial polypeptide expressing nucleotide sequence isolated from the Sargasso Sea
aatgaactttggaagagaaaaatttcttgatgaagtttggtcttggaaagattattcagaagaaaaaattacatcccagattaaaagactgggatgttctgtagattggaataaatatagatttactttagatgatggatgcaatgaagcggttataaaagccttcgttgaattacacagaaaaaataaaatatatagaggttacagattggttaattgggatccatccctaaaaactgctgtttcagatcttgaggtagtaagacaggaaaaagatggtctactttggcacatcaaatatccaattgaggattcagaagaccatgtaatagtagcaacaacaaggcctgaaactatgtttggagacatggcagttgctgtcaatccaaatgatgataggtataaaaatcttattggtaaaaatatcgttctaccctttgttggcagaaagatacctatattagccgatgagtatgttgatatggaatttgggactggttgccttaaaataacaccaggtcatgactttaatgattacgaaataggtaaaaaatattcattgcatgaagtaaacggccaagtagagacctcagatactgcaagcgactttaaacctataaatatatttaatgaagatgcgtggtcaaataaaaatgtacctgaaccattttcaaatcttgatcgttttaa

SEQ ID NO: 306853 - DNA, 832 bp, Unknown
  Bacterial polypeptide expressing nucleotide sequence isolated from the Sargasso Sea
ggcgataaaatgtcaaagtcgaggggcaacgtgcttgaccccatcgatttgattgacggtattgatattgaatcgcttgtgactaaacgcactgctggcatgatgcagcctcagcttgctgagaagattgccaagcgtactcgcaagcaattcccagacggcattcaggcctacggtacagacgcattgcgctttacctttgccgctatggcgtcaaccagccgcgatatcaactttgatatggcccgtgttgaaggctaccgcaacttctgtaacaaaatttggaatgcatcgcgtttcgtattgatgaacacagaagagcacgatacaggtcgcgacggtggtgaaatggtgcttagcatggccgatcgctggatttgggctaagttccaacaaacgctggttgagtttgaaaaagcgcttgaagactaccgtttcgatattgcagcacaaaccgtttacgagttcacctggaaccagttctgtgactggtatctagagcttactaagccagtgcttaacaatgacgccagcaccgaagctgaaaagcgcggtacacgtcatacgcttattaacgtacttgaaagcctgcttcgcttgttgcacccactaatgccatttatcaccgacactatctggcagcgcgttgtgccactaagtgcacttaaggtggaagagggcgcaagcattatggttcaggcattccctgaagttgatgcagcgaaacaagacgacaaagtactagctgatatcgagtgggtgaagaagtttatcgtgggtattcgtaatatccgtggtgaaatggatatctcgccaaacaaaccacttaatg

SEQ ID NO: 306854 - DNA, 797 bp, Unknown
  Bacterial polypeptide expressing nucleotide sequence isolated from the Sargasso Sea
tggaagagaaaaatttattgaaaaagtttgggaatggaaagatcaatatggtgacataataataaaccagttaaaaaaacttggttgttcatgtgattggtcaagaaatgctttcactatggatgaaaatttatcaaagtctgtaatcaaggtttttgtggatctatataataaaggacttatttataaagataagaaattagtcaattgggacacagttttaaaaacagctatttcagatctagaagtagatcaaagagaggtaaattctaaaatttatttcatcagatatccaatagatgggactgaagaatttattacaattgcaacgacaagacctgaaacgatgttaggtgatacagcaattgctgttaatccaaaagatgaaagatttaaatcttttgttggtaaaacagttactatcccaattgttggaagaaaaattaaaattattgaagatgattatgcagatcctgaacaaggaactggagcattaaaaataactccagctcatgattttaatgactatgaagttgggcaaagaaacaatcttgaaattataaatatttttactgaagcaggcaaaataaataaaaatgctccacaaacttacgtaggtcttgataggtctgaagcaagaaaaaaaattttaaaagaacttaaagaaaaagaattttttgtaaaagaggagaatataaaaaataaagttccttatggagatagatctaattcaataattgaacctttcttaacagaacaatggtttgctgatgcaagtaaattatctgttaaagcta

SEQ ID NO: 306855 - DNA, 241 bp, Unknown
  Bacterial polypeptide expressing nucleotide sequence isolated from the Sargasso Sea
atgcagcttgataaattttttgattttttaaaagatgaaaaaaatctttatgcacaatgggagcaatcaaattcttttaaaccaaaaaaaggaggtaaaccttattctataatgatgccaccacctaatgttacaggtagcttacatatgggacatgcactaaccttcacaattcaagatatattaattagataccatagaatgaagggtatggaagtattgtggcaagcagggacagatc

SEQ ID NO: 306856 - DNA, 174 bp, Unknown
  Bacterial polypeptide expressing nucleotide sequence isolated from the Sargasso Sea
aatggagctagaaaaattttttgattttttaaaggatgaaaaacatctttactcgcagtgggaaaaattaaattgttttaaaccaaaaaaaggtggcgaaccctattctataatgatgcctccacccaatgtaactggaagtttacatatgggtcatgctttaacattcacaat

SEQ ID NO: 306857 - DNA, 1006 bp, Unknown
  Bacterial polypeptide expressing nucleotide sequence isolated from the Sargasso Sea
aaaaaccacaaaatattttccaaccaacgcactagtaactggcccagatatcattttcttttgggtagcaagaatgattatgtccggatatgaatttatgggtgatttgccatttaaagatgtttatttcacgagcattttaagagacgaaaaaggcagaaaattaagtaagtccttaggaaattctcctgatccaataacattatttgaaaaatatggtactgatgcaactagattttccataatgctgatgtcaccacagggttctgatgtatatttttcagagcatggaattgaagtcggaagaaactttatgactaagatttggaatgcaagtagatttattatgctcaatcacgaagattcatttgcagatgagattgatattgaagcattagataattttgataaatggattcttgattcactagatgaaacagtcgatgaagtcaataaatacttcgataaatatcagtttaatgaagcaataaaaaaaatctatgattttacatggaatgagttttgtaattggtatatagaaattgtaaaacacagatttagagaaggtgatattacttcaaagagtaattcgtttaatatttctaaaaaaataattaagaaagttctattattattacacccaattgcaccatttgcatcggaagagatttggaatcacctgaaagatactaatgaagaagatattattatatcatcttggcctaaagctaaaaatagcaacgttagtcacaacaaagatgaaattttagattttaaagaaatagttacttcgattagaactattcgctcagaattaaatgttccgccatctaaaaaaattgacgttatagctcatgtaaaaaatgaatcaattgagagcaggttaaatcctttaattgatcttattaaatctttatcaaattctgaaaatttgcatttgagttcaaaaaaaagaaaagccagaaaactctgcagtagcagtatgcaagtcagtggagctatatat

SEQ ID NO: 306858 - DNA, 673 bp, Unknown
  Bacterial polypeptide expressing nucleotide sequence isolated from the Sargasso Sea
aacagcaatatctgatttagaagttgatcaacgtgaagtaaattctcaactttattatataaattatcctatagaaaattctgataaatttataacaattgcaacaactagacctgaaactatgttgggagatactgcaatagcagtaaaccctaaagatgatagatttaaagatttaatagggaagttagttacaatccctttagcaaacagaaaaataaaagtaataacagatgactatgctgatcctgaacaaggaacaggagcagtaaaaattacccctgcacatgattttaatgattatgatgtaggtataagaaacaagttagaagtaattaatatatttacgcctgatggaaaaataaatgacaatgcacctgacccatataaaggtttagatagatttgctgcaagaaagttaattttagaacatcttgaagaaggtaaatttttagaaaaaatagaaaagttagtaaataaagttccttatggtgatagatctaattctattattgagccttatttaacagaacaatggtttgttgatgctaaaactttagccattaaagcaaaagaggtagtcaataatggaaagactaaattttttcctgaaaattggtcaaaaacatattttcaatggatggataacattgaaccttggtgtatttctcgt

SEQ ID NO: 306859 - DNA, 758 bp, Unknown
  Bacterial polypeptide expressing nucleotide sequence isolated from the Sargasso Sea
atgtctaaatcaaaaggtaatgtaattgatcctttagaattaattaataagtatagtgcagatgccttaagatttactcttctttctatggcttcaccaggtagagatgtaaagttatctgaagacagagttaaaggatacagaaatcttttaaataagttatggaacgcaaataattttttaattcaaaataaatgtaatttttctgaaaaaaaaccaaaaaaaattaacataaatattaataattggatttttaatgaattagtaaaagtaaaaaaagatgtagaggcaaaaataaaagaatatagatttgatgaagcatctagacttatttatcagtttgtatggaattcttattgtgattggtatttagagctttcgaaaactatactttactcgaatgataagaaaaaaattaaagaaacacaggatgtttctggtttcattttcacccaaatattgattttaatgcacccattcataccgtttgtaactgaggaaatatggctaaaaaataagctagataaatcaggtaaaaattaccttatgttttctaattggattaatgaaaaaccaataaaaaataaagaaataaaaaatgttgaaaatattatcaattttacctcttctattagatcatttaagaacgagcttaatataagtcctggctcatttgttgatgtatcattaggcagtataaagaataaaaagtccaatttttatgcaaaaaatgaaaatacttttaaaaaaatagccag

SEQ ID NO: 306860 - DNA, 223 bp, Unknown
  Bacterial polypeptide expressing nucleotide sequence isolated from the Sargasso Sea
aatgaaggcagataaatatacacattctgaagttgagaataaaatttattcttactggcagaaaaataatttatttaaacctaaaaaaaataagaaaaaattttcaatagtaattccaccaccaaatgtaactggaagtcttcatatgggacatgctttaaataattcaatacaagatcttttaattaggtatcatcgaatgaacaattttgagaccttgtgg

SEQ ID NO: 306861 - DNA, 725 bp, Unknown
  Bacterial polypeptide expressing nucleotide sequence isolated from the Sargasso Sea
gcttagtaactgggaccctagattaaaaacaacaatttctgacttagaggttattcaaaaagaggtagtaggcactctttggtatattgattacgaaattgaaagtggaaatgggcacataactattgcaacgacgagaccagaaacaatgcttggcgatactgcaatagctgttcatccagaggataaaagatttacagatatggttggaaagtttgccataattccaatagtcgaaaaaagaattccaattgttgctgatgaatatgtaaaaatggatcaagggtctggtgcggtaaaaattacacctgctcatgattttaatgattatgaattaggaaaaaggcataaactagaaataataaatatatttaatgaaaatgctgaacttaatgaaaactgccctatagaatatcaaggacttgatcgttattcagcaagagaaaaaataattagtgaacttaaagaaaaggaagtcttaagtaaagaagaagaaaatttacatacagtgccatacggcgataggtcgggagaagtaatagagcctctactaactaatcaatggtttgttaacgcgaaaagattgtcaatcgaagcgattaataatgtaaaaaatggcaacacaaaatttataccaaacaattgggataaagtttattttgattggatggagaatattcaaccttggtgcgtctcaagacaacttatatggggccatcaaattc

SEQ ID NO: 306862 - DNA, 248 bp, Unknown
  Bacterial polypeptide expressing nucleotide sequence isolated from the Sargasso Sea
aatggagcttgataaattttttgattttgtaaaagatgaaaagaatctttattctcagtgggaaaatctaggttgttttaaaccaaaaaaaggaggaaaggcatattctattatgatgcccccaccaaatgtaacaggtagtttgcatatgggtcacgcactaacttttacgattcaagatattttgattagatattatagaatgaaaggtatggaagtattatggcaggccggtactgatcatgcag

SEQ ID NO: 306863 - DNA, 808 bp, Unknown
  Bacterial polypeptide expressing nucleotide sequence isolated from the Sargasso Sea
tggcttgaaaatgcacgtgattgggccatcagtcgcaacagattctgggggaccccaatacctgtctggaagagcgaagacagtaaagttttgtgtgttggaagtgttgaggaactggaaaaattaactggggaaaaaatcaatgatcttcacaagcactttgttgactcgttggtcattgaacataatggggaaacttataggcgtgtctcagaggttctggattgctggtttgaatcgggttcaatgccttatgcacaggaacattatccatttgaaaacaaagaacgctttgaagaaaactttccagctgattttatttgcgagggactcgaccaaactcgaggctggttttacactcttgcggttttgggtacggcattgtttgacactcctgctttcaacaactgtgtggtaaatggttttgttctggccgaagacggaaagaaaatgagcaagagacttaagaactatccggatccaaatgacatgatgaacaaatatggagcggatactgtaagactttacatgctgaacagtcccgctgtaagaggcgaagatctacgtttttctgaaaaaggcctgattgaaacaacaagacaactgctactacctctttggaactccctaatatttctaaccacctatgccaaaattgacggatgggaaccaaaccctgaaaacttaaaggtaaaaaataataacccgttggatcgctggattctatcacgattaaataaattatttggggaagtacaaaaagagatggatcgctacgatttaaaccgttcagttgcaccgtttgttg

SEQ ID NO: 306864 - DNA, 946 bp, Unknown
  Bacterial polypeptide expressing nucleotide sequence isolated from the Sargasso Sea
aatgtctaaatcaaaaggaaacatccttgatccaattgatcttatagatggggtttccctagaggaactgctggaaaaaagaactgaaggcatgatgcaacctcaactcaaagaaaaaattattaaacagacaaaaaaacagttccctgaaggtatcgaaagttatggtactgatgctttgcgatacaccttctactctcttgcttctccgggtagagacattaattttgatataggcagaatcaagggctacagaaacttctgcaataaaatttggaatgctttcaggtttattgaaatgcaagttgctaatcacggctatcaaactagtgaaagctcagaagatattttatctgactggatgggatcaaaaattcaccaaactgctcaaaattgccaaacgcatataaaacaatatcggtttgatttagcgtcggcggagatatatgaattaatatggtcaaatttctgtgactggtacatagaattcagtaaagtcgccatccaaaaatctgatgaaactagccaaataaataatcttattgggaatttaattgctaacttttatagcattcttgaattgttgcatcccttcatgccctttattactgaggaactttcttctaaattagcggatttggcaaaggtagaaaaatcaggattcttagttgagggtggctttgaacatgcaagagtatccaagaaaaaaactgaacaacaattagatgagatcattaacattatttcttcacttagggttctaagagcagaaaaccaaaatataaaaaatgagacctttaatctcattgtttctaatgatcttaactctgagatgcaatctgtcatcagtgagaatgaagaaatcattgcgggtattgcaaaattagatggaatcgaattttccgacaagatcccggaagaatcaattgaaaaaaccatggatgga

SEQ ID NO: 306865 - DNA, 473 bp, Unknown
  Bacterial polypeptide expressing nucleotide sequence isolated from the Sargasso Sea
atctggtgatcaaatattaaatcaacttaagaaactcgggtgttcatgtgattggtctagaaatagatttacaatggatgaagatttatcaaaagctgttataaaaacttttgttaaattatataataaaaatattatttacaaagatactagattagttaattgggatacaaaattggagacagccatatctgatttggaagttgagcaaaaagaagttcaatcaaatctctattatataaaatataaaattattaatgatgataaatacattactattgctactacccgtcctgaaactatgcttggcgatactgctgtggcagtgaatcctaaagattcaagatataaaaaatatattggaaaaaagataattattcccattgtagaaagaaaggtaaaaataattggagataaatatgtttcaattgaacaaggatcaggagcgcttaaagttacaccagcccatgatt

SEQ ID NO: 306866 - DNA, 439 bp, Unknown
  Bacterial polypeptide expressing nucleotide sequence isolated from the Sargasso Sea
tatggagctgatgctttgcgatttactctaacagctatggcagcgatggggcgagacataaagctttcagagcagagggttgctggttatcgaaattttggaacgaagctttggaacgcatcgaggtttcgtgaaattaatggctgcgttctctcaaatgaaagttttgatcccctatcctgtgatttaacaatcaataaatggattattgcagaagtttctaaaactgcacaactaactacaaactctcttgaagcttataagtttgatcaagccgcgaacagcttgtaccattttgtttggcatactttctgtgattggtatcttgagtttgctaaatcagttcttcaaggggatactgaacaagacaaacttgaaacacgaactactacagcctgggttttgaatataattctcagacttcttcatccaataatgc

SEQ ID NO: 306867 - DNA, 926 bp, Unknown
  Bacterial polypeptide expressing nucleotide sequence isolated from the Sargasso Sea
cttacacaccattcaagatgttctagttaggcgtgcaagaatgctgggaaaaaatgcttgttgggtccctggtactgatcatgcttctattgcaactgaggcaaaagtagttcaaaagcttagggaagaggggattaagaaaagtgatttatctagagatgagtttcttcagcatgcatgggattggacacataaacatggaggtattattttagatcaattgaaaaaaattggcgcatcatgtgattgggatagaaccagtttcaccatggatgaaggctattataagagtgtcattaaagtattttgtgatttacatgataaaggatttatttatcgtggagaaaggatgattaactgggatccagaagctaaaacggcacttagcgatgaagaagtttttcataaagaagttaattcgaaactatattatgtaagatacaaaattgcagatagtgatgacgaatggataactatagcaactactaggcctgaaaccattttaggtgatactgccatctgtataaatcctgtagatgaaaggtatcagcaccttaaagggaaaaaggttatcgtgcctttaataaatagagaaattccagtaatttttgatgattatgttgatgttgattttggaacaggatgcttgaaaattacacctgctcatgataccaacgattataacattggtaaaaaacacaatcttgaagtaattaatattttaaacccgaacggaacacttaatgaaaatgcaattttacatgtaggtgaagataggtttgaagtaagaaaattaatcgttcatgaacttcattcatctggatatcttgttaaagaagaagatcacatcaataagattggtttttcagaaagaacagatgctataattgaaccaagattatccttacagtggttttgttctatga

SEQ ID NO: 306868 - DNA, 280 bp, Unknown
  Bacterial polypeptide expressing nucleotide sequence isolated from the Sargasso Sea
atgcaacttaataaattttttgattttttaaatgatgaaaaacatctttattctcaatgggagaagtcaaattgttttaaaccaaaaaaaggaggtcagccttattctataatgatgccgccacctaatgttacaggtagcttgcacatgggtcatgctttaaccttcacaattcaagatatattaatcagataccacagaatgaaaggtatggaagtattgtggcaagacaggtacagatcatgcaggaatagctactcagatggtggtagaaagaaaa

SEQ ID NO: 306869 - DNA, 845 bp, Unknown
  Bacterial polypeptide expressing nucleotide sequence isolated from the Sargasso Sea
agataaatttattaaaaaagtatgggaatggaaaaaagagtctggtggaataattttagatcaacttaaaaaacttgggtgttcttgtgactggtctagaacaagatttactatggataaagatttatctaaagcagtcataaaagttttcgtagatctttataagaataaattaatctataaagacagaaagttagtaaattgggatactaaacttcaaacagctatttctgatcttgaggtaatacaaaaagatgttcagtcacaattatattttattgattaccagattaaaaattcagataaaaagatcacaattgccacgacaaggccagagaccatgatgggagatactgccgtagcagttaatcctaaggacaaaagatataccaatttgattggtaaagatgttcagatacctattgttaataggacgataaaaataataggcgaccattacgcagatccagaacaaggatcaggagcggtaaaaattacaccagcgcatgattttaatgattatgaagttggcaaacggaataaattagagacaattaacatttttgaaaaaaatggaagaataaataaaaatggaattaaagactttattgggatggacaggtttgaagccagaaaacttttaattcaaaaacttaaagaaaatggaaatcttgtaaaaattgaaaatattaaaaataaagtaccatatggagatagatcaaatactataattgaaccccttctaacagatcagtggtttgtagatgcaaaaagattatccaaaaaaccaattcaaatagttaataaaggtagaacttctttttttcctaataattggtctaaga

SEQ ID NO: 306870 - DNA, 238 bp, Unknown
  Bacterial polypeptide expressing nucleotide sequence isolated from the Sargasso Sea
atgggttcaggtaaatataatcacaaaaaagttgaaaataggatttattcttattgggaaaaaaacaagttattcaagcctaaaaaaaacaaaaaaatattttccatagtaataccaccaccaaatgtaacaggaagccttcacatgggtcatgctttaaataattcactgcaagatgttctggtcagatatcatagaatgaataaatttgaaactttgtggcaacccaggaactgat

SEQ ID NO: 306871 - DNA, 901 bp, Unknown
  Bacterial polypeptide expressing nucleotide sequence isolated from the Sargasso Sea
ggatagatcagcatctcgtgatacgacgttttcagtagatacgccgccaccaacagtttctggatcgttacatattggacatgtatttagttatacacacacagatgcattggcacgttatcagcgtatgaaaggtaaagatgtgttttatcctatgggctgggatgataatgggcttccgacagaacgacgtgttcaaaatgtgtttggaataaaatgtcaaccggatttagcgtatcaagagggggtggtgctggatcgccatcataaacgaaaacctcatgagtttattgaggtatcgcgtcgcaactttattgaagcgtgcgaaatattaacagctgaagatgaaaaagcatttgaaacattgtggcgaaaactaggattatcggttgattggacgttacaatattctactattgatgatcattgtagaaaaatgtcgcaggtatcgtttttagattgtgtgaaaaaagatctggtgaaacatgttgaggctccgggtatgtgggatgtagattttcagactgctgttgctcaagctgaaattgaagaccgagaaaaacctggtgcataccatcatattcgttttgcaatagaatctggtggcgaatttgttattgcaacaacacgtccagagttattacctgcgtgtatagctgttgttgcgcatcctgaagatgatcgttttaagccattttttggtcaatatgcggtgaccccgttgtttcatgctcgtgttccaatattaccgtcaactcatgctgaccctgaaaaaggtacaggaatattaatggtatgtacctttggtgatggggaagatgttacttggtggaagcaatcgggcttacctgttaagcaggttattggaaggaatggatgtttattacctgtagaatttgga

SEQ ID NO: 306872 - DNA, 202 bp, Unknown
  Bacterial polypeptide expressing nucleotide sequence isolated from the Sargasso Sea
aatgttggaaaaatattatcaacccagtcttgttgaagataaaatttataaatcatgggaaaatgatggagattttaaacctttaaagtcttcaagtgacgcttacagcatagtgatccctcctccaaatgttacaggaacactacatatgggccatgctttaaataatactcttcaggatatcttagttaggttttatcga

SEQ ID NO: 306873 - DNA, 205 bp, Unknown
  Bacterial polypeptide expressing nucleotide sequence isolated from the Sargasso Sea
atgagttcagacaaatatatacatacagaagtagaaaataagatttattcgtattgggaaaaaaataatttattcaaaccaaaaaaaaacaaaaaacaattttcaatagttatacccccacctaatgtaacaggaagcttacatatgggtcatgcattaaataattcaatacaagatctgttaactagatttcatagaatgaata

SEQ ID NO: 306874 - DNA, 238 bp, Unknown
  Bacterial polypeptide expressing nucleotide sequence isolated from the Sargasso Sea
atgagttcagaaaaatatatacatacaaaggtagaaaataagatttattcctattgggaaaaaaaacaactttttaaaccaaaaaaaaataaaaaaaaatattcaattgtaataccgccccctaatgtgaccggaagtttacatatgggacatgctttaaacaacacgatccaagatttattaataagatatcatagaatgaataattacgagaccttgtggcagcctggaactgatc

SEQ ID NO: 306875 - DNA, 191 bp, Unknown
  Bacterial polypeptide expressing nucleotide sequence isolated from the Sargasso Sea
atgaataattatgaaacattatggcaaccaggtacagaccatgccggtatagccactcaagctttagtagagaaaaaattaacctctgaaaaaattgataaaaatgaaattggaagagaaaaatttattgaaaaagtttgggaatggaaagatcaatatggcgacataataataaaccagttaaaaaaact

SEQ ID NO: 306876 - DNA, 238 bp, Unknown
  Bacterial polypeptide expressing nucleotide sequence isolated from the Sargasso Sea
atgataagcgataaatatatacattctaaagttgaggataaaatttacgcttattgggagaaaaataaattatttaaaccacagaaaaattctaaaaagttttctattgtaattccgccacctaacgtaactggtagtttgcatatgggtcatgcactaaacaattctattcaagatttgttagttcgatattatcgaatgaataattatgaaacactatggcaacccaggaactgat

SEQ ID NO: 306877 - DNA, 854 bp, Unknown
  Bacterial polypeptide expressing nucleotide sequence isolated from the Sargasso Sea
agtatgggaatggaaaaatgcatctggggataagatagttaatcagattaaaagacttggagcatctcctgattggaaaagattaaagtttacattagatgaagatttaagtaatgcagttaatcatgtgtttataaatttatataaagatggactaatatataaagacagaagattagttaactgggatactaaattacaaacagcaatatcagatctagaggttgaacaaaaagagcagagtgggaacttcttttatattagatattttttagaaaattcaaaacaatatattactgttgcaactactagacctgaaactttatttggtgattgttgtatagctgttaatcctaaagataaaaaatataaaaactatattggaaagaaagtttacattccacttacaaaaaaacttatcccaattattgcagatagttatgtagatattgaaaaaggtacaggagctttaaaagtaactcctgcgcatgactttaatgattttaaaattggaaaaagactaaaaatatcttttcatgaaatttttgataaatttggaaagttcaatgataatgttcctgctaagtataagggattagatagattaaaagccagaactgttattattagtgatttaaaaaaaaatgcaaatttagaaaaaatagaaaaaataatacattctgttccatatggtgataggtctggggcaatagtagaaccttacctaacagaacaatggtttttggatgttaagagtttagcaaaagaagcgatattaaaagtaaaaaaaaatgaaactgagtttattccaaaaagctggactaaggttttttattcttggatgaatcagatag

SEQ ID NO: 306878 - DNA, 195 bp, Unknown
  Bacterial polypeptide expressing nucleotide sequence isolated from the Sargasso Sea
aatggaatttaaaaaatataatcatagtaaagaagaaaaaaaaatctcgaatttttggattaaaaaaggcttatttaaaccaaaaaagaacaaatcgaataaaaaattttctatagtaattcctccacctaatgtaactggcagattacatatgggacatgctctaaacaatagtctgcaagatgttttagttag

SEQ ID NO: 306879 - DNA, 580 bp, Unknown
  Bacterial polypeptide expressing nucleotide sequence isolated from the Sargasso Sea
aatgattagacaaaaattagaaaagacctatagccctctttccgtagaagaaaagtggtatgatcattggttgtcgaatgattatttctccgcagattcaaaatcaaaaaaggatccctatacaattgttatccctcctccgaatgtaacagggatgctaacagttggacatgttttgaataatacaatccaagatattctgattcgaaaagcaagaatggaagggaaagaagcatgctggattccgggtaccgatcatgcttcgatcgcaaccgaaaccaaagttgtagaaatgcttcaaaaaaaagggatcaacaaaaaagatttatctagagaagaatttttaaaatatgcctgggattggaaggaaaaatacggtggcataattattaaacaactcaagagattaggctgctcttgtgattgggatagagaaagatttacaatggatgaaggctatactaaagcagttcttacggcttttgtaaaactatatgaaaaaggactcatatataagggacacaggctagttaattggtgccctgtttctaaatctgcaattagtgatgaagaagttatt

SEQ ID NO: 306880 - DNA, 793 bp, Unknown
  Bacterial polypeptide expressing nucleotide sequence isolated from the Sargasso Sea
atggaaatggaaaaatgaatatggtggaaaaattactaatcaattgaaaaaattaggctgttcatgcgactggtctagagatgctttcactatggataaaaatctatctaaatctgtaataaaagtatttgtagaattatataaaaagaagctaatttataaatcaaagaagttagtcaattgggatactgttctaaaaactgctatttcagatctagaagttgatcaaaaagaagttaactcaaagctatattatataaaatatcaaatagaaaactcatcagaatttataacaatcgccactaccaggcctgagactatgctaggcgatactggagttgcagttaatccaaaagatacaagatatactaatttagttggcaaatttgcagttttgccaattgtaggaagaaaaattaaaatagttcaagacaagtatgcggatccagaacaaggaacaggcgcagttaaaattacccccgctcacgattttaatgattttgaagttggcgaaagacaaaaattacaaaaaataaatatttttacagatagtggaaaaattaataaaaatgccccgaaagaatatgttggtttagataggtttgatgcaagaaaaaaaattttacaaaagttatccgaattaggaattttggtcaaagaggaaaatataaaaaataagattccatttggagatagatcaaattcaataatagaaccatatttaacagaacaatggtttgttgatgcaaaaaaactttcaataaaagcaaaaaaaatgtcaaaaataaaaaaa

SEQ ID NO: 306881 - DNA, 238 bp, Unknown
  Bacterial polypeptide expressing nucleotide sequence isolated from the Sargasso Sea
atgagtagcgataaatatatacattctgatgtagaaaatagaatttattcttattgggaaaaaaatggtctttttaaaccaaaggaaaataaaaaaaaattctcaattgtaataccaccacctaatgtaactggcagtttacatatgggtcatgcccttaataattcaattcaagatttattagttcgttaccatagaatgaataattttgaaactttgtggcaaccaggtacagacc

SEQ ID NO: 306882 - DNA, 354 bp, Unknown
  Bacterial polypeptide expressing nucleotide sequence isolated from the Sargasso Sea
actttatggcaaccaggtacagatcatgctggaatagcaacccaagcattagtcgaaaaaaaattagaaaatgaaggtattaaaaaaaatgaacttggaagagaaaaattcattaaaaaggtatgggaatggaaaagtcaatatggagacattattattaaccaacttaaaaaacttggttgttcttgcgattggtcaagaaatgcattcacgatggatgagaacctttcgcaaagtgttttaaaagtatttgaagaattatataaaaaaaaacttatctataagtcaaaaaaattggttaattgggacacggttttaaaaacagctatttcagaccttgaagtagatcaaaga

SEQ ID NO: 306883 - DNA, 156 bp, Unknown
  Bacterial polypeptide expressing nucleotide sequence isolated from the Sargasso Sea
aatgagttctgataaatatattcataaagatgttgagaataagatttattcttattgggaagaaaataatttatttaaaccaaaagaaaattcaaagaaattttcaatagtaataccaccacccaatgttaccggtagtttacacatgggtcatgc

SEQ ID NO: 306884 - DNA, 658 bp, Unknown
  Bacterial polypeptide expressing nucleotide sequence isolated from the Sargasso Sea
tttctgggtggcgcggatgacgatgatggccggcgcctttaccggtgagatgcccttccaggacgtgtacatccacggcctggtgcgggacgagcagaaccgcaaaatgagcaaaagcgccggaaacggcatcgatccgctgctgctgattgagcgttacggcaccgatgccctgcgcttcgccctagtgcgggaggtggccggtgcggggcaggacatccgcctggactacgaccgcaagaccgacacctccgccacggtggaggcctcgcgcaacttcgccaacaagctctggaacgccacccgcttcgctctgatgaacctgggcggggaaacgccggcccagctgggggatcctgaccccgcggccctgcagctggcggatcgttggatcctctcccgcctggcccgggtgaaccgggagacggccgagcgctacagcagctatggcctgggtgaagcggccaaggggctttacgagttcgcctggaacgacgtctgcgactggtatctggagctgagcaagcgccgtctcaaccccggtgagaatccttcagcggaggctctcgccgatcagcgggtggccaagcaggtgctggccaaggtgatcagtcagatgcatatgatgttgcatccactgatgccccacctcaccgag

SEQ ID NO: 306885 - DNA, 238 bp, Unknown
  Bacterial polypeptide expressing nucleotide sequence isolated from the Sargasso Sea
atgagttctgagaaatatattcataccgaagtagaaaataagatttactcttattgggaaaaaaacaatttatttaaacctagaaaaaatagtaaaaaattttctatagtaatacccccacctaatgtaacaggaagcttgcatatgggtcatgctttaaataactcaatacaagatttgcttactagatattatagaatgaataattacgaaactttgtggcaaccaggcactgatc

SEQ ID NO: 306886 - DNA, 236 bp, Unknown
  Bacterial polypeptide expressing nucleotide sequence isolated from the Sargasso Sea
aatggatatatttaatcataaagattatgaaaaattttggtatgatcgctgggaaaaaaaaggttgttttaagtctcaagtaaatactaaaaaagaatcgtatactataatgatgcctccacctaatgtcacaggttcattacatattgggcatgcattaacttttactcttcaagatattttaattaggtattttcgtatgaaaggtcgtgatgttctttggcaaccaggaactg

SEQ ID NO: 306887 - DNA, 748 bp, Unknown
  Bacterial polypeptide expressing nucleotide sequence isolated from the Sargasso Sea
taccggcagggacatcaaatttgatattggccgcatggaggggtaccgaaatttctgcaacaaaatctggaacgcctcccgctacgtcctcagccatacagaagggcatgagctttaccccggagaggcgtcactttcattggcagaccgttggattctaagccgactggaggccacgctgtctgaggtagaggcggcctatgacagttatcgattcgacctggcgtctcagtcactttacgactttgtgtggaatgaattctgcgactggtacctggagctgtccaaaccactcctttgggacaaggaatcagccgccgccgagcaattggccgcccgcagaacgcttgtcgaggtgctcgagcaatcattgcggatgcttcatccatttatgccctttttgaccgaggaggtttggcaaacaatcgctcctctggtaggcatgcagggagatagcattatgctcgccccttggccggagcagttgcctgagaaacttgaccgagaatccgaggaggagatcgactggctgaagcaaattatcgttgctatccgcaccatacgggccgaatcaaacattcccccgggtaccgagcttcccgtgttcatagtcaatacaacgccagccgatgaggcccggctaagtcgcaacgaagcttatctgggtaaactcgccaaggtcagtgaaatcactgtctgcgctcaaggcgaagaggtgccgaccagtctaatgacactctgtggcgat

SEQ ID NO: 306888 - DNA, 259 bp, Unknown
  Bacterial polypeptide expressing nucleotide sequence isolated from the Sargasso Sea
atggaatttaaaaaatataatcatattaaagaagagaaaaaaatctcagatttttggattaaaaaaggtttattcaaaccaaaaaaaagtaaatcaaataaaaaattttccatagtaattcccccacctaatgtaaccggcagactacatatgggacatgctttaaataatagccttcaagatgttttagtaagatttaatgggatgaaaggactcgaaactctatggcagccaggaactgaccacgctgggatgcaac

SEQ ID NO: 306889 - DNA, 877 bp, Unknown
  Bacterial polypeptide expressing nucleotide sequence isolated from the Sargasso Sea
tcatgccggaattgcaacacaagcagttgttgaaaacaaccctttaaaagaaggaattaaaaaaaatgatttaggaagagaaaaatttattaaaaaaatatgggactggaaagaagagtctggaggaataattttagatcaacttaagaaattaggttgttcgtgtgattggtcaagaaccaggtttaccatggataaggatctttctaaagctgtaattaaagtttttgttgatctttataaaaacaaactaatttataaggacaaaaaattagtcaactgggatactaaacttcaaactgctatttctgacttagaagtaaaccaaaaagatgttcaatctcaattatattacattgattatattatagagaactcagatcaaaaaattactatcgccactaccagaccagaaacaatgatgggtgataccgcggtcgctgtaaatccaaatgatgaaagatatgttaatttagttggaaaaaaagtctttattcctattgttaatagaactgtcaaaataatttctgacaattacgctgatcctgaacaaggttcaggagctgtaaaaattacaccagcgcatgatttcaatgattacgaggtaggtaagagaaataaattagaaataataaatatttttgaaaaaaatggtaaaataaacaaaaatgggattaaagagtttcatggtttagataggtttgaagcaagaaagcttataattaaaaaattaaaagatatgggttctcttgtaaaaactgaaaatattaaaaataaaattccatatggagatagatcaaacactataattgaacctctttttactgagcaatggtttgttgatgcaaaaaattatccaaaaaaccaattaatatag

SEQ ID NO: 306890 - DNA, 178 bp, Unknown
  Bacterial polypeptide expressing nucleotide sequence isolated from the Sargasso Sea
atggataacaattttaactcgtctcaaatagaacaagagctctacaaaatatgggaagaagaaaacttcttcgcccccgcagatagaaacaatcaaaaaaacttctgcgtcttgatccctccacctaacataacggggaccctgcacatgggtcatgcctttaatcacacgcttatcg

SEQ ID NO: 306891 - DNA, 739 bp, Unknown
  Bacterial polypeptide expressing nucleotide sequence isolated from the Sargasso Sea
ggtgccaggcacagatcatgcatcaattgccacagaagcaaaagttgtaaaaatgctaagagatcaaggaattactaagagtgatattagcagagaaaaatttttagatcatgcttgggaatggacaaataaacacggaggcttaatactaaatcagttgaaaagaattgggtgctcctgtgactggactagaactaaatttactttagacgaagatttatcagattctgtcattgatacatttattagactatttgatgagggatatctttatcgtgacaaaaaaattgttaactgggatccagaggcaaaaacaactctatcaaatgaagaggtaatttacaaggaggaagagactgaactttattatttaaaatacaaaatagtaggttcaaatgattatttgtcaattgcaacaactaggcccgagactatttttggggatacagctgtagctgtaaatcctaatgataaaagatataaaaagttaaaaaataagaaactaatagttccgatagtaaatcgtgaaattccaattgtttttgatgattcagttgaaattgattttggaacaggatgtttaaaagttacaccggcccatagtgaaaaggattttttaattggaaaaaaacacaatctagaaataattgatgtttttaatgatgatgctagcttaaatgaacatgccatggacttcgcagggaaagacagatttaaagttaaaaaggaaattattgag

SEQ ID NO: 306892 - DNA, 171 bp, Unknown
  Bacterial polypeptide expressing nucleotide sequence isolated from the Sargasso Sea
aatgagttttgataaatatgagcatgaaaatgtagaaaataaaatctacgattattgggaaaaaaatgaattatttaaacccaaagaaaactcaaaaaaattctcaattgtaattcctccaccaaatgtaactggtagccttcatatggggcatgctttaaataactcaat

SEQ ID NO: 306893 - DNA, 724 bp, Unknown
  Bacterial polypeptide expressing nucleotide sequence isolated from the Sargasso Sea
agcagttgttgaaaataacctgttaaaagaaggaattaaaaaaaatgatttaggaagagaaaaatttattaaaaaaatatgggattggaaagaggagtctggtggaataattttagatcaacttaagaaattaggttgttcgtgtgattggtcaagaacgaggttcaccatggacaaggatctttctaaagccgtaattaaagtttttgttgatctttataaaaaaaagctaatttacaaggacaaaaaattagtcaactgggatactaaacttcaaactgctatttctgacttggaagtaaaccaaaaagatgttcaatctcaattatattacattgattataggatagagaactcagatcaaacaatcactatcgccactaccagaccagaaacaatgatgggagataccgctgttgctgtaaatccaaaggataaaagatatataaatttagttggaaaaaatgttgttattccaattgttaataggactgtcaaaattatttctgacaattatgctgacccagaacaaggttcaggagctgtaaaaattactccagcacatgatttcaatgactatgaggttggcaagagaaataaattagaaataataaacatttttgaagagaatgggaaaataaacaaaagtgggataaaagagtttcatggtttagacagatttgaagcaagaaaacttataatcaaaaaattaaaggatataggt

SEQ ID NO: 306894 - DNA, 214 bp, Unknown
  Bacterial polypeptide expressing nucleotide sequence isolated from the Sargasso Sea
atgagttcagataaatatatccattcagaagttgaaaataagatttattcttattgggaaaaaaataatttatttaaacctaaaaaaaacaaaaaatcattttcaatagttatcccacctcctaatgtaactggaagtcttcatatgggtcatgccctaaataattctattcaagatttgttaacaagatttcatagaatgaataattatgaaa

SEQ ID NO: 306895 - DNA, 208 bp, Unknown
  Bacterial polypeptide expressing nucleotide sequence isolated from the Sargasso Sea
aatgataagtgataaatatatacattcaaaagttgaagataaaatttattcttattgggaaaaaaataaattattcaaacctaaaaaaaattcaaaaaaattttcaatagtcattccgccgcctaatgtaacaggaagtttacatatgggtcatgctttgaataattcgatacaagatttgttggtacgttattatcgtatgaataat

SEQ ID NO: 306896 - DNA, 382 bp, Unknown
  Bacterial polypeptide expressing nucleotide sequence isolated from the Sargasso Sea
tatgcttgaagattcatatgagccattaagtattgaacaaaaatggcaatcagagtgggaattaaaaaatcaattcaaaccagttgagtctgacaaacaattttcgattgtaataccacctccaaatgtaactggctcattgcatatgggtcatgcgttagaacattcaataattgatgtaattgtacgtataaaaagacttcagggatttgaaacattgtgggttccaggaactgatcatgcagggattattacacaactacttgtcgaaaatgaattatctgaaaaaggtctttcaaaagaagatgttggtcgtgagaatttcatttcaaaagtatgggagtggaaagaaaaatcaggtgaaaacatatcaggacaatga

SEQ ID NO: 306897 - DNA, 967 bp, Unknown
  Bacterial polypeptide expressing nucleotide sequence isolated from the Sargasso Sea
gaaaagaatactgggaaaaaaatgaaaacatatgatagagcagaattcctagaattatgtaaagaaacgatgaaagaatttacacaatcgatgcgagatactgcaaagcgtgttggactttcaatggattttgcaaatgaatatctaacagatgctccaaattaccgaatggttacacaggcgatttttactgaattattcaagaagggagaaatcgttgaggatttgcgtccaaatatttacgacccagtcgaaggtacaacaatcgcagatgctgaagttgaaagactacaaagaaaaactcgcttagtagatgtcaaatggaaaaccgaaagtggtgatgaagtagtaatttcaaccacaaggcctgaattgatttgtgcttgtggaattgttgtagtccatccagatgatgagagatacaaacatcttatcggtcaaaaaataaatttgccacttccagtatctgaaagagaaaactttgttgaaattgcaacccatccatcggtgaaatcagaattcggttctggcgtactaatggtctgttctttcggtgaccaaaatgacgtttcaatctttagagaacttggattgaatcccttccaagccatagaccttgaaggttgtatgaccgaggtagcaggtccttttgctggtatgaaggtcaaagatgcaagagacgctgtaatcgcacatctagaatctgaaaacctaatcgcacaaattgttgagaaagaacaagaagttcctgtttctgagagaggaaaaaatcccgtagagattattttgctcaaagaatggtatgttcgtcaaacccatatccaagaccgtatgaaggaattgatcgaagaggtagacttccatcctgtaagaaataagcagttcctaatcgactggatggataatatcagcatcgattggcccattagtagaagaagatggtaccatactgagataccgatttggt

SEQ ID NO: 306898 - DNA, 238 bp, Unknown
  Bacterial polypeptide expressing nucleotide sequence isolated from the Sargasso Sea
atgagtttagataaatatatacattcagacgttgaggataaaatatatacatattgggaaaagaataatttatttaaacccaaaaaaaataagaagaaattctcaatagttataccaccacccaatgtcactggaagtttacatatgggccacgccttaaacaactcaatacaagatttgttaaccagatattatagaatgaataattatgaaactttgtggcaactctggaactgat

SEQ ID NO: 306899 - DNA, 859 bp, Unknown
  Bacterial polypeptide expressing nucleotide sequence isolated from the Sargasso Sea
gattattcagaagaaaaaataacatcacaaattaaaagacttggatgctcggttgattggaataaatatagatttactctagatgatggatgtaatgaagcagttataaaagcatttgttgaattacatagaaaaaataaaatatatagagggtataggcttgtcaattgggatccatcactaaaaattgctgtttcagatcttgaggttataagacaagaaaaagatggcctactctggcatataaaatatccaattgaagattcaaaaaactttgtcatagtagctacaacaaggcctgaaactatgtttggtgacatggcaattgctgtaaatccagatgatgataggtataaaaatcttattggtaagaacgttgttctgccatttgtaggcagaaaaattcctattttagctgatgaatatgttgacatggaatttggaacaggttgcctgaaaattactccaggtcatgactttaatgattatgagataggcaaaaaatactcactgcatgaagtagatggtcaagtaaaaacttctgatgcagcaagtgattttgaacctataaatatatttaatgaggatgcatggtctaatgagaatgtacctgaaccattttcaaatcttgatcgtttcaaggtaagaaaggccgtattagagaaactcaaagaattgaatcttctagaaaaagaagaaaaataccatataagcgtgcctagaggtgagagatctaatattgttatcgagcccagattaagtcatcagtggtatgttaaaactgaggaaatggcagcaagagctaacgacgctgttaacaagaggagatataagattccatcctggaaattgggttaaa

SEQ ID NO: 306900 - DNA, 262 bp, Unknown
  Bacterial polypeptide expressing nucleotide sequence isolated from the Sargasso Sea
atgttggaaaaatattatcaacccagtcttgttgaagataaaatttataaaacatgggaaaatgatggagattttaaacctttagaatcttcaagtgacgcttacagcatagtgattcctcctccaaatgttacaggaacacttcatatgggccatgctctaaataatactctccaggatatcttggttaggttttatagaatgcagggcaaaagtgttttgtggcagccttggtacagacccatgctggtatcgcgacaga

SEQ ID NO: 306901 - DNA, 836 bp, Unknown
  Bacterial polypeptide expressing nucleotide sequence isolated from the Sargasso Sea
gctctcagctcttgttgagaaaaaactagaaaaagaaaatttgaataaaaacgctcttggaagaaaaagatttattgaaaaagtatggcagtggaaaaaagagtacggagatatcataattaaccaattaaaaaaacttggctgttcttgtgattggtcacgtaatgcatttactatggatgagaatttatctaaatccgtaattaaagtttttgttgaattgcataaaaaaaaattaatctacaaagctgaaaaattagttaattgggacactgtacttaaaacagccatttcagatttagaggttgatcaaagagaaatgaactctaaaatttactatattagatatccgatcgaaaattcatcagaatttattactatagcgacaacaaggcctgaaacaatgctcggtgatacggcaatcgctgtaaatccaaaagataaaagatataagacatttgttggcaaaacagtaactatcccaatagtaggtagaaaaattaagattattaaagataattatgcagatcctgaacaaggaacaggtgcattaaagattacaccggcacacgattttaatgattatgaagtaggtcaaagaaataagttggatatcatcaatgtatttactgaagagggaaaaataaacgataatgctcctcaggattatgtgggattagatcgatttgatgcgcgtaaaaagttattagaagaacttaaagaaaaagatttttttgttaaagaagaaaatattaaaaacaaagttccttatggtgatagatctaattcagtgattgaaccttttttaacagaacagtggtttgttaatgcaaaaa

SEQ ID NO: 306902 - DNA, 928 bp, Unknown
  Bacterial polypeptide expressing nucleotide sequence isolated from the Sargasso Sea
aaagaaaatcaaaataaaaatacattaggaagagaaaaatttattgaaaaggtttgggattggaaaaatcagtatggtgatataattatcaatcaattaaaaaaactaggttgttcatgtgattggtccagaaatgctttcactatggatgaaaatttatccaaatctgtaattaaggtattcgttgaattacataaaaagaaactaatctataaagcagaaaaattagtaaattgggatacagtattaaaaactgcaatttcagatttagaggtagatcaaagagaaatgaactctaagatttactatattaggtatccaatagataaatcatcggaatttatcacaatagctaccacaagacctgagactatgcttggagatacagcgattgcagttaatccaaaagataaaagatataaaagttttgtcggcaaaacagtcactatacctattgtaggtagaaaaattaaaataataaaagacaattatgcagatccagaacaaggaacaggagcattaaaaattacaccagcacatgattttaacgattatgacgtaggacagagaaataaacttgaaataattaatgtgtttacagaggagggtaaaataaatgaaaatgcacctaaagagtatgtaggcttggatagatttgatgctcgtaaaaaaatattaaatgagcttaaagaaaaagattattttgttaaagaggaaaatataaaaaataaagttccttatggagatagatctaattctgttatcgaaccttttttaactgagcaatggtttgttgatgcaaaaaaattagcaattaaagctaaaaagattgttaaaacaaaaaaaacaaatttttttccaaataactggtctaaaacttattttcaatggatgaataatattgagccttggtgtgtttctagacagt

SEQ ID NO: 306903 - DNA, 916 bp, Unknown
  Bacterial polypeptide expressing nucleotide sequence isolated from the Sargasso Sea
taacccggagattaattattattatcccacgcaagacttgattactggaccggatattttatttttttgggttgcgcgcatgataatatcaggatatgagcttagagaacagcatcctttttccaatgtttacttaacaggtctagtacgtgacaaactaggtagaaaaatgtccaagcagttgggtaattctcccgatgcattaagtttaattgataattacggtgccgatgctgtaagggttggattgatgctcagctctgctgcaggaaatgatctcttatttgatgaaagcctttgtcaacagggaaagaatttttccaataaaatttggaatgctttccgattgatagatgggttcgaagtagttgaaacccaaacaatcccaacattgaatgcttcagcaattaaatggtatcagtcaatgtttgcccaaactctgctaaaagttgaagatcatttcaataaatatcgtatttctgatgccttgatggcactttacaaattgatttgggatgatttttgctcttggtttttagaaatgattaaacccagttatggtcaaccgattgacaggggaacactgattgctgtcaagttcctgctcgaggataacttaaagttattgcatccctttatgccttttatcactgaggagctatggcattttataagaacaagaaaaaagaaggattctttgattatttccccctggccaaaggtgcaagaagtagatgaacagttaattaaagattttgatatggtcaagcagataatagctgggattagaaaatttaggaaagaaaaaaatattggacaaaaggaacaacttatactaattactgagggagcagtcccctatgttgaggtcattcaaaaattgggtcaaatccaaaaggtgaaaggctgctcctgc

SEQ ID NO: 306904 - DNA, 846 bp, Unknown
  Bacterial polypeptide expressing nucleotide sequence isolated from the Sargasso Sea
aatgtcaaaatcaaaaggtaatgttattgaccctttagaattgatagaaagttatagtgctgatgctttaaggttcactttattgtctatggcctcaccgggtagagatgtaaaattatctgagcaacgagttaaaggttacagaaacttcctcacaaaaatatggaatgctaataattttttgaaagtcaataaatgtgaatttaatagtaaaatcaatcacaaaaaactttccttaaatctcaataaatggatatattcagaattaattagaacaaagaattctgcagaaaagcacatcaaagactacaggtttgatgaagcaacaaggatcatttatagatttgtttggaatagttattgtgattggtatctagagctatctaaaacaatattattttctaaaaacaaaaaacacattaaagaagttaaagttacttcaggctttgtattcaaagaaatattaattcttctacacccgttcatcccgtttattactgaagaattatggttaaaaaacaagctaggtaacaaaaaagaaaaatatttaatgtattctaattggattaaagatagtaaagctcaaaaagacaaagacattgtagatgtaaatcaagtaatagacgttatttctaaaattagatcattcaagaacgaactaaacataagtccgggatcttttattgatgtctctatccaaagtgttagcaagaaaaaacagaatctcttcttaaataacgaaattatgttaaaaaaacttggaagaattaactcaatttttgccaaagattcggcaaatcagtctgccactcttgttatttctggagaggtatttaagatatattt

SEQ ID NO: 306905 - DNA, 814 bp, Unknown
  Bacterial polypeptide expressing nucleotide sequence isolated from the Sargasso Sea
gacaggtggattttatcaagacttgcacgagtcaatcatgagactgctaatcgatatgaaaattatgctctaggagaggccgctaagggactatatgaatttgcgtggaatgatttttgtgattggtatttagaattaattaaacgtcgattgaataattcagaaaatctttcttccgatgaattatttgatcgaaaaatagcgaaaagtgttttatacaaagttctaagtgatcttttgattatgcttcatcctctaatgcctcatttgacagaggagctttggcatggattaacaggtttagaggaggatcaatttttagctttgcagccttggcccaaatcaaatgaacaagacttgaatctagatttagaaagttctttctctgatttatttgcatctatcagattgattcgcaatctaagagcagttgctgggttgaaaccctctcaaaaagttcctgtcatgttggtttctggcaaggaggtcttacaaaaaacactaacaacatcaatcaatgatattgctgttttgaccaaggctaaggaagtacagatattatctccagagcaagcaaagtcattgccttcaatgaaagctctagcaggcgtaagtggagagcttgaggtagtgttgcctattgaaggattaatagatatagcttcattaagatctaggctagaaaaagatttaaataaagcacaaaaagaaattgaaagtctttctggacgtttagcgaataagaattttgttgataaagctcccaaagaggttgttgaagaatgcaggacaaacttaacggagtcagaagctc

SEQ ID NO: 306906 - DNA, 786 bp, Unknown
  Bacterial polypeptide expressing nucleotide sequence isolated from the Sargasso Sea
tggtttagttcatggttgtggccttttgcagttcatggatggccagatataaaaaccacaaaatattttccaaccaacgcactagtaactggcccagatatcattttcttttgggtagcaagaatgattatgtccggatatgaatttatgggtgatttgccatttaaagatgtttatttcacgagcattttaagagacgaaaaaggcagaaaattaagtaagtccttaggaaattctcctgatccaataacattatttgaaaaatatggtactgatgcaactagattttccataatgctgatgtcacctcagggttctgatgtatatttttcagagcatggaattgaagtcggaagaaactttatgaccaagatgtggaatgcaagtagatttattattctcaatcatgaagattcatttgcagatgagattgatattgaagcattagataattttgataaatggattcttgattcactagatgaaacagtcaatgaagtcaataaatacttcgataaatatcagtttaatgaagcaataaaaaaaatctatgattttacatggaatgagttttgtaattggtatatagaaattgtaaaacacagatttagagaaggtgatattacttcaaaaagtaattcgtttaatatttctaaaaaaataattaagaaagttctattattattacacccaattgcaccatttgtatctgaagagatttggaatcacctgaaagatactaatgaagaagatattattatatcatcttggcctaaagctaaaaat

SEQ ID NO: 306907 - DNA, 244 bp, Unknown
  Bacterial polypeptide expressing nucleotide sequence isolated from the Sargasso Sea
atgagtttagataaatataaccatttagaggttgaaaatagaatttactcatattgggaaaaaaataatctttttaagccaaaaaaaaataaaaagaaattctctatagtaataccaccaccaaatgttaccggaagtttacatatgggccatgctttaaataattcaatacaagatcttttaactcgtttttataggatgaataattatgaaactttatggcaaccgggtaccgatcatgcag

SEQ ID NO: 306908 - DNA, 207 bp, Unknown
  Bacterial polypeptide expressing nucleotide sequence isolated from the Sargasso Sea
aatgttagataaaagatttaatttttcagaaattgaagctaagtgtttagatcattggtctgaaaatcaaatattttcttttaacaacgacgaaaacaaaaaaccattttgtattatgatgccaccaccaaacgttactggtagtttgcatatggggcatgctttaactttcactcttcaagacatcttaattagatttcataaaaa

SEQ ID NO: 306909 - DNA, 199 bp, Unknown
  Bacterial polypeptide expressing nucleotide sequence isolated from the Sargasso Sea
aatgagtagcgagaaatatatacattctgatgtagaaaatagaatttattcttattgggaaaaaaatggtctttttaaacctagagaaaattcaaaaaaattctcaattgtaattcctccaccaaatgtaactggcagtttgcatatgggtcatgctctccataattctattcaagatttattaattcgttatcacaga

SEQ ID NO: 306910 - DNA, 548 bp, Unknown
  Bacterial polypeptide expressing nucleotide sequence isolated from the Sargasso Sea
catgtcaaaagaaataaataaaatatataaccctaccgatgttgaagaaaaatggtattccaaatgggaagaaagtagtgcattcgaaccttctggagattctgagaatccatttacagttatgattcctcctcccaatgtaaccggaattttacatattgggcatatgctaaataatactattcaagatgttctagttaggcgtgcgcgtatgatgggtaaaaatacactatggctaccaggtacagaccatgcatcaattgcgactgagtctaaagtaacaaaaatgctgtccgacaagggaattgacaaatatgacattggaagagatgaatttttaaagcactccatggaatggaaagaaaaatatggaggaacaatattaaaacagcttaaaaaaatgggagcttcttgtgattggtcaaaaacagccttcacaatggatcctaactatagcaaagccgtattagaggcattcgttaaactatataatgatggtttaatctatagagggaaacgaatggtaaattgggatccttcagggctta

SEQ ID NO: 306911 - DNA, 190 bp, Unknown
  Bacterial polypeptide expressing nucleotide sequence isolated from the Sargasso Sea
atggataaaagatttgattctaaatctatagaggataaatggtataaaatatggttggatagtggagctttttcatctaatagctcttcaactaaaaaaccttatgtcataatgatgccaccgcctaatgtaactggctcattacacattggtcatgcgctaacttttactattcaagaatatattaata

SEQ ID NO: 306912 - DNA, 334 bp, Unknown
  Bacterial polypeptide expressing nucleotide sequence isolated from the Sargasso Sea
atgaagctattagataaaaaacataatccttcagatattgagaataagtggtataagcattggcttgaaaaacaatacttttcaagtcaagagtctgataatcattatacaattgtaattccaccacctaatgttactggaaagcttcatatggggcatgttctaaacaatactattcaagatattttaattagaaaagctagaatgcaaggcaaaaatgcatgttggattcctggtacagatcatgcgtcaattgctactgaatcaaaagtaactaagatgcttcaagagaagggaattaataaaaaagatttaaccagagaagaattttaaa

SEQ ID NO: 306913 - DNA, 322 bp, Unknown
  Bacterial polypeptide expressing nucleotide sequence isolated from the Sargasso Sea
atgcttgaaaatcagttcgatcataaaactaaagaaaaagagtggtataatatttgggaaagctctggcgccttctctgcaattccagatagtgcaaaaaaaccttatactataatgatgccacctcctaatgttactggaaatcttcatattggacacgctcttaccttcactcttcaagatattttgatacgttttaaaaggaagttaggttttgatgttctatgggcaaccaggaatggaccatgcaggaatagcaacacaaatggtagtagaaagaaatttattgaaagaaggaatattaagaacagatttaggtaga

SEQ ID NO: 306914 - DNA, 310 bp, Unknown
  Bacterial polypeptide expressing nucleotide sequence isolated from the Sargasso Sea
tatgcttgaagattcatatgagccattaagtattgaacaaaaatggcaatcagagtgggaattaaaaaatcaattcaaaccagttgaatctgataaacaattttcaattgtaataccacctccaaatgtaactggctcattacatatgggtcatgcgttagaacattcaataattgatgtaattgtacgtataaaaagacttcagggatttgaaacattgtgggttccaggaactgatcatgcaggaattattacacaactacttgtagaaaatgaattatctgaaaaaaggtctttcaaaagaagatgt

SEQ ID NO: 306915 - DNA, 219 bp, Unknown
  Bacterial polypeptide expressing nucleotide sequence isolated from the Sargasso Sea
aatgagtttagataaatatatccattcagaagttgaaaataagatctattcttattgggaaaaaaataatttatttaaacctaaaaaaaacaaaaaatcattttcaatagttattccacctcctaatgtaactggaagtcttcacatgggtcatgccctaaataattctattcaagatttgttaacaaggtttcatagaatgaataattatgaaacttt

SEQ ID NO: 306916 - DNA, 214 bp, Unknown
  Bacterial polypeptide expressing nucleotide sequence isolated from the Sargasso Sea
aatggatgaatttcaaaataaaaaagaatatgaaaatgaaatttatcagctttggttagataaagaatgttttaaacctaaatacaattttgataaaaacttttctatttgtatacctcccccaaatgtaacagggtcactgcatatgggacatgctcttaataacactattcaagatattttaactaagatatcaccgtatgaatggctttaa

SEQ ID NO: 306917 - DNA, 1274 bp, Unknown
  Bacterial polypeptide expressing nucleotide sequence isolated from the Sargasso Sea
tctggccctaggggtgcactcatggccagatgaagatgaaaacctaaagaaattctatccgactgatactcttgttaccgggcctgatattattttcttttgggttgcaaggatgattattacaggttttgaattcaaggccgaggtgccctttaaagatgtctatttcacatctatcctgagggatgaaacaggaaaaaaattaagtaaatccttaggtaattctccggacccttttgacttgtttgatgagtttggtactgatgcggtgaggttcgggaccatgctgatggctccccaaggtcttgatgtccttttttcaaaagaaaggcttgaagtcggcaggaatttcatgaacaaactttggaatgcatgccgttttatacagctaaatcttggagagcaatgggattcagaggttcacttagactatgaaaacactgacctagaattaccagagagatggatcattagcagattatcaaatatgatccaggactataacaatcagttagaccgctttcattttaatgaggctgcaaaggacctatatgaattcacttggaatgatctatgtgattggtatctagagatcgcaaagaatcgattttatggtgaagataaatcaaaagcagacatagctagagttgttgccatagaatgtattaggactgtcctcactctcttacatccttattcaccatttataactgaagagctctggtcacatttcaagcctgatggctcatcagatcttatcattatgccttggataaaaaatggttcaattcaggataaggacgctgaggataatatggatattttaaaagaagtgataacatctatacggtccatacgaagccgtatgaatgtagccccttctacacgctgtgatctggttgtgaggtgtaacgacgaccaaaaactatttatcgatgaacacacaaacttaattcaagccttagcaggcgttaacaatatatcgaccgggaaaggccttgataagcctagccagtctgctacagcagtatcagctgggatggaattgtacattccactcaaaggattagtagatttagaaggggaaaaaaccagaatggagaaacgtatcttagaaatagatcgtttacttacctcgatcaatgcaaagctatccaatcaaaattttctccaacgcgcacctgaaccagtcattgaaaaagaacggtctaatttgaaaaaactaaatcaagagttagaaaaagtaacggccaatttggaagtgcttaaatgaa

SEQ ID NO: 306918 - DNA, 997 bp, Unknown
  Bacterial polypeptide expressing nucleotide sequence isolated from the Sargasso Sea
tcaaacccgctccaaaactgtacttgcacgcctcgaattgcttgcacagatggctcaggatggtcggcatgttgaattacctctcttggggcgagccattccgctgattaccgacgaatgggcgaaaccagaaatgggctcaggctgtgtgaaaatcaccccagctcatgacccaaacgattacgacgtcggcattcgacaccagttgccgatgattaacatccttcactcggatggcacattaaacactgcggctggaccgtacgaaggcctgccaatgaacaaagcgcgtacgcgtgttgtcaatgatcttgaaacagctggccttcttttagaggtcgaagatcgggtcattgagctggcccactcagatagatcgaaaacgccaatcgaaccctttctggcggatcaatggtttatcagtatggccgaccttgccgaaccagccctgaaggtcgttcgcgaaaaaagaatccagatacaccccgaacgatatgcaaaaagttatcttgactggcttggagaaaaaagagattggccagtcagtcgtcaactctggtggggccaccagattccaatatggcatgtttccaacataacacgtgaagagttggaaaatacattttctaacgatccggcggtagcatggactcctgaccaggaggaatctgacgacccacatccgaacggatggtttgtatgttcagccaatgaaagtcttggagtcgacgcaatcaatggaaaccctcttgttcgtgatcccgacgttctcgacacctggttttcatcggcactctggccgcactcgactcttggctggccaacagaaaccgaattactgaagcatttttatcccactagcacattggttaccagccgggatatcatcaccctctgggtggcccgaatggtcattcttggaattttcaatactggtgaaatacaatttcatcatgtttcgattcatccaaagattctcgaccgttatggcgagaca

SEQ ID NO: 306919 - DNA, 810 bp, Unknown
  Bacterial polypeptide expressing nucleotide sequence isolated from the Sargasso Sea
gactctgatgatcatcatccaagaggatggtttgtatgttcggctaatgaaaatcttggggtcgatgcaatcaatgggaagcctcttgtgcgtgatcccgatgtccttgacacctggttctcatccgcactctggccgcactctacgctcggttggccagaagaaaccgacttgctcaagcggtgttatcccacaagcacactagtcaccagtcgagatatcatcacgctctgggttgctcgaatggtcatcctcggaatatttaatactggtgaaataccattccataatgtttcaattcatccaaagatactcgaccgatacggcgagacgatgagcaaaagtaaaggaaatggcgttgatccgcttgacgttatttcactccttggggctgatgcactccgctttggtatggcaacgatggccactgagacacaggatgtccgtatgccagttgaattccaatgcccaacgtgcacagcgaggattgatcagacaactcaaaaccgcacaaaaccgagaattacgtgcccaaaatgcaatcaggccttccggacacagtgggcaactaatgaggcggacctggcactgccccgtggtgccgcagtaagtgaacgctttgaggcagggcggaatttttcgaataagctctggaatgcaacacggtttgtcctcatgcatcttcaggacagcggcctctcagcaggtctgcctaaactcgacaccatcacagagtttccactcgaagatcgctggttattaagtcgtctttccaccgtgttcagcccgcggtttctagcaacatcgaac

SEQ ID NO: 306920 - DNA, 978 bp, Unknown
  Bacterial polypeptide expressing nucleotide sequence isolated from the Sargasso Sea
ggtttgtggcctttttcaaccctttggttggccaaatataaatgatcctgattttaaaaaatggtatccaaatagtgttcttgttactggtttcgatattattttcttctgggtggcaagaatgacaatgatggggaatacttttacaaagaatattccttttagggatgtttatattcatggtctagtgcgagatgaaaacaataaaaaaatgagtaaaagttcaggtaatggtattgatccaatactattaattgataaatatggttctgatgctctacgatttgctttaattcgagaagttgcaggcgctggacaagatatccggcttgattttgataggaaaaaagatacatcttcaactgttgaagcttcaagaaattttgcgaataaattatggaatgcaactaaatttgtgttaattaataaaacttctaataataattattcgcttaatgagagtgatgaaacttctttagagttatgtgataagtggattttatcgaaattgaatcaggtaaatataaaagtcgctgctttgttgacagaatataaattgggagaatctgcgaaacttctatatgaatttacgtggaatgatttttgtgactggtatgtagaatttgctaaacaaaggtttaataataaagagactaaaaatagacaaatatctgaaaaagttttaataaaagtgctcaatgatattttggtaatgattcatccttttatgccgcacattactgaggaactttggcatgtgctgcaactaaaaccagataatgcattattatctcttcaaaaatggccaattcacgaaaataaatttgttgataataagcttgataattcctttcagcaactctttgaaattattaggctgattagaaatttgagagctgaattaggtcttaagccatcagaaaaaagtcctgtatatttaatttcagacaatgatgaattgattgattttttaaaaac

SEQ ID NO: 306921 - DNA, 380 bp, Unknown
  Bacterial polypeptide expressing nucleotide sequence isolated from the Sargasso Sea
tatggataaaaattttaatcccagaaagagggaacacggtatttttgaaaaatgggaggagaatagtgcgttcagggctggtgctaacgcaaaaccgaacgctgaaagctattgtattatgattcctcctcctaatgtcacggggagccttcatatggggcatgcattcaacaatactatccaagatatattggttcggtggcacagaatgcggggtttcgacaccttgtggcagccaggccaagaccatgctggtatagcgactcaaatggtggtcgaacgtaagttagctgataattcagaacccagccgcgaagagttaggacgggaggctttcttaaggaaagtttgggaatggaaggaacaatctggtgatacta

SEQ ID NO: 306922 - DNA, 856 bp, Unknown
  Bacterial polypeptide expressing nucleotide sequence isolated from the Sargasso Sea
aaaaaattattatctgaaggaattgataaaaatgaaataggtagagaaaaatttattgaaaaagtttgggaatggaaaaatcaatatggagatataataattaatcaattaaagaaacttggatgttcatgtgattggtcaagaaacgctttcactatggatgaaaatttgtctaaatcagtaatcaaggttttcgtcgagttgtataaaaaaaaattaatttacaaagccgaaaaattagtaaattgggatacagttttaaaaacagctatatcagatcttgaagttgatcaaagagaagttaattctataatgtatcacattaaatatccgatagatggaaccaatgattttatcacaatagcaacaacacgacctgaaaccatgctaggcgatacagcaatagctgttaattcaaaggatgatagatataaaaatttgataggcaaagttgcaataattcctatagttgatagaaaaattaaaattatcgctgatgattatgctgatcctgaacaaggaactggagctttaaaaataactcctgcacatgattttaatgattatgaggttggaaaaagaaacaatctagaaattattaatatatttacagaaaatggtaaaattaacaataatgctccaagtcactatattggacttgatagatttgaagctagaaaaaaacttctaaaggaacttaaagaaaaagatttttttgttaaagaagaaaatattaaaaataatgttccttatggagatagatcaaattcaattattgaaccttttttaaccgaacaatggtttgttgatgctgaaaaattgtcaattaaagcaaaggatgtagtaaatacaaaaa

SEQ ID NO: 306923 - DNA, 743 bp, Unknown
  Bacterial polypeptide expressing nucleotide sequence isolated from the Sargasso Sea
catgtctacatctaaactagataaagtatataatccagtaaatatcgaagaaaaatggtaccaatattggttagagaataattatttcaaatctaagccagatcctaataaagaaccttatacaattgtaatccctcctccaaatgttaccggtatgcttactatgggtcatgttttaaacaatactatacaggatattttaattagaaaagcaagaatggaaggtaaagaggcttgttggattcccgggactgatcatgcatctattgcaacagaagctaaagtagtacaaatgttacaagataaagggattaaaaaagaatctttatcaagagatgaatttttaaagtactcatgggaatggaaagaaaaatatggaggtataataatacaacaacttaaaagactgggttgctcttgtgattgggacagggaaagatttactatggatgatgattatactaattctgtgctagaagcttttgtagttttatataataaaggtctgatttacaaaggctttcgtttagtgaattggtgtccagtttcaaagtcagcaattagtgatgaagaagtaattcatcaagaagtaaacggccatttatggcattttagatacccaataaaaaactctgatgaagtattaattgttgcaacaacccgcccagaaacaatgttaggagatacagctgttgcggtgcatccaaaagataaaagatttaaacatttgattggtaagacag

SEQ ID NO: 306924 - DNA, 463 bp, Unknown
  Bacterial polypeptide expressing nucleotide sequence isolated from the Sargasso Sea
aatggatgccaagtattttccaatagagatagaagagaagtggtcaaaagtttgggctgaacgtgaattgaataagcctgaatcagaacaaaatttctctcaaattattccaccaccaaatgtaaccggaaccttgcatatgggccatagttttcaatatgcaattatggatttttatactagataccatcatatgaacggcgcaaattcatattggcaagtaggaactgatcatgctggtattgctacacagatggtcgtagaaaataatcttgtaaacgaaggtaaagacaagaatgatcttggtagagaaaaatttctgaaagaagtttggaaatggaaagattactcagaagagaaaattacatctcaaattaaacgtcttggttgcacagttgaatgggataaatatcgcttcacttttgatgatgatttttgtgaagctgtaaataaggcttttgtt

SEQ ID NO: 306925 - DNA, 976 bp, Unknown
  Bacterial polypeptide expressing nucleotide sequence isolated from the Sargasso Sea
cgcacttgttagagatgaaaaagggcaaaaaatgtctaaatcaaaaggaaatgtaattgatcccttagaacttattgaaaaatatagtgctgatgctttgagatttactcttttatcaatggcatctccaggtcgagatgtaaaattgtcggaagatagggttaaaggttatagaaatttcttaaacaaagtttggaatgctaacaattttttaagacaaaatgagtgtgattttagtgacattaaaaaacctgaaaatcttaaattaacaattaataagtggatactatctgaacttgtaaaagtcaaaaacgacacggaaaatagtttaaaaaactatagatttgatgaagcagcaaagaatatttatcagtttgtatggcattctttttgtgactggtatttagagctatctaaaactgtatttaattctaataatgaggaggagactaaagaactaagacaaacatcttcatatgtctttagagaaatcttaataatactgcatcctttcatcccattcgttacagaagagatttggttgaataataagttagataaaaatggcaatgaattcttaatgcatgctaattggttggaaaatgattatcatgaaaaaaaatcttatgatgaaattaataatatcattaattttattacatctattagatcatttaaaaatgaattaaacattagccctggatcatttattgaaatttcaacagaaaacaccaataaagaatataaaaactttttatcagctaatgaaaatattttaaaaaaaaatggaagaattaaaagctttcatgataatgatttaaaaaaatcatcagcaagcatcgttatcaatggtgagctatttaaattatattttgatgaagatgttgatttaaatatgatcaaatcaacactagagaagaaaattaaaaaaattagtgaagagatgaaaaaaattgatgttaggttatcaaataaa

SEQ ID NO: 306926 - DNA, 487 bp, Unknown
  Bacterial polypeptide expressing nucleotide sequence isolated from the Sargasso Sea
aatggataaaagatataagccacttattattgaagaaaagtggtcagaactttgggcaaaaaataatttaggtaaaaataactcttcacaaactttttcgcaggttattccacctccaaatgtgactggaactcttcatatggggcatagcttccagtattcgataatggatttctatgccagatacaatcacttaaatgatttaaatactcattggcagataggtaccgatcatgcaggaattgcaacgcaaatggtcgttgaaaataacctatccagagaaaatattgataaaaatgatttgggtagagaagattttgttaaaaaagtttgggagtggaaagaattttcagaaaataaaattacaggacaaattaaaaggttaggtaactcagttgattggagtaattacagatttactttagatgaaggttttaatgaagctgttcttaaagcttttgttgagctttataggaaagagaaaatc

SEQ ID NO: 306927 - DNA, 355 bp, Unknown
  Bacterial polypeptide expressing nucleotide sequence isolated from the Sargasso Sea
catgagtaatgataaatataaccatctagtagtagaagataaaatttacaaatattgggaaaatcataaattatttaaaccaaaaaaaaataaaaaaaaattctctatagtaataccccctccaaacgtaaccggctctcttcacatgggtcatgcattaaataattctattcaagaccttttaactcgatatcacaggatgaataattatgaaacattatggcaacctggaacagatcatgcaggaattgctactcaggcacttgttgaaaaaaaattagaaaaggaaggtatcaataaaaatgatatcggaagagaagaatttatcaaaaaagtatgggaatggaagggctga

SEQ ID NO: 306928 - DNA, 430 bp, Unknown
  Bacterial polypeptide expressing nucleotide sequence isolated from the Sargasso Sea
atgttggaaaaatattatcaacccagtcttgttgaagataaaatttataaaacatgggaaaatgatggagattttaaacctttagagtcttcaagtgacgcttacagcatagtgatccctcctccaaacgttacaggaacacttcatatgggccatgctctaaataatactctccaggatatcttggttaggttttttagaatgcagggcaaaagtgttttgtggcagcctggtacagaccatgctggtatcgcgacagaaatggttgttgaaagagaactaaaaaaaagagacataaataaaaaagatttatctcgtgaacagtttatagaatatgtatgggaatggaaaaatcaatctggtaatgaaattattaatcaattaaaaagattaggttgttcatgtgattggtctagagaaaaggtttact

SEQ ID NO: 306929 - DNA, 365 bp, Unknown
  Bacterial polypeptide expressing nucleotide sequence isolated from the Sargasso Sea
aatgcagcttgataaattttttgattttttaaaagatgaaaaagatctttattctcagtgggagcaatcaaattgttttaaaccaaaaaaaggaggtgagccatattctataatgatgccaccacctaatgttacaggtagcttacatatgggtcatgctttaacattcacaattcaagatatattaatcagataccatagaatgaagggcatggaagtattgtggcaagcagggacagatcatgcaggaatagctactcagatggtggttgaaagaaaattaagtgattcaaacctagatcgacgatctctaggtagagaaaagtttattgaaaaagtatgggaatggaaaaaagagtcgggtg

SEQ ID NO: 306930 - DNA, 892 bp, Unknown
  Bacterial polypeptide expressing nucleotide sequence isolated from the Sargasso Sea
acattaggttggccaaataaaactaaatatttaaaaaaattttatccaacaacagtgcttgttacaggttttgatataattttcttttgggtagctcgaatgattatgtttggaatggagtttatgaagaaagaaccttttaaagatatttatgttcatgctttagttagagatgaaaagggacaaaaaatgtctaagtcaaaaggtaatgttattgacccacttgaattaatagaaaagtacagcgctgatgctttaagatttactcttttatcaatggcatctcctggaagagatgtaaaactttctgaagatagagttaaaggatatagaaattttttaaataaattatggaacgctaataattttttaattatgaataaatgcaattttaataaaagctcaaaactgccaaaacttactcttaatattaataaatggatatatgctgaattactagaagtaaaaaataaagttgaaaaacacataaaagattacagatttgatgaagcttcacgtaatgcttatcaatttgtttggcattcatattgcgattggtatgtcgagttatccaaaacaatacttaactcaaataatcaaaaagatattaaagaagtaaaaacagtttcaagctatatatttaaacaaatcttgatattaatgcacccatttatcccttttataactgaagaaatttggcttaaaaataaattagatgataaaaaaaagaattatcttatgcttgcaaattggccaaaagataagtcaaaaaaagatgaaagctacaaagaagtgaaaaaaataattaatatgatttctgaaattaggtcctttaaaaatgaattaaatgtaaatcctggctcatttattgatgtttctattgaaaaaatta

SEQ ID NO: 306931 - DNA, 861 bp, Unknown
  Bacterial polypeptide expressing nucleotide sequence isolated from the Sargasso Sea
gatatcatttttttcttgggttgcaagaatgatcatgtttggaatggaatttcttaataaagaacctttcaaagatatttatgttcacgctttagtaagagatgaaaaaggccaaaaaatgtctaaatctaaaggtaatgttattgatccattagatctaattgaaaaatatagtgcagatgctttacgatttactttactttcaatggcttcacctggaaccgatgtaaaactttctgaagatagagtgaaaggatataggaactttttaaataaattatggaatgcaaataattttttgatcacaaataattgtgattttaataagactgataaagttcctaaaactagcttaaatatcaataaatggatttattctgaaatgatagaaataaaagataaaatccaaaagaatataaaagactatcgatttgatgaggcagctaaaaatgcctaccaatttgcttggcattcatattgtgattggtatatcgaattgtctaaaacaatcctttattcagatgataaaaaatcaaaaaatgaggtaaaagaggtatcagcttatgtttttaaacaaatacttattatgcttcatccatttattccgtttgttactgaggaaatatggttaaaaaataagtttgataaatctaataagaattttcttatgtacaaaaactggccgtcaggaaaaataaaaaaagataaatcccaaaaggatgtagagaaaatcataaatattatctcagaacttagatcgtttaaaaatgagctaaacgtcagcccaggttcatttgtagatctttctatgaataagatagctaaaaaaaatcgttctttgatggacaataacgaaataat

SEQ ID NO: 306932 - DNA, 666 bp, Unknown
  Bacterial polypeptide expressing nucleotide sequence isolated from the Sargasso Sea
aagagggatttaggacgtaaggattttttagaaaaggtttgggaatggaaaaaagaatcagggggtaatatttcacgtcaattaagacggcttggagcttctgctgattggaaacgagagagatttacaatggacagcggtctcagcgaagctgttcgtaaagtttttgtacagctccataaagaaggtattatctatagagataagcgcttagtaaattgggatcctatgcttcaaaccgcaatctcggacctagaagtagagcagagagaggaaacaaagggctctttatggtattttcgctatcaatgtgcatctgatgttaataactacattgtagttgcaactactcggccagagacaatgttcggtgatgcagctgtggctgttcatccaaatgataaacgttgggtcaatttaataggtaaaaaggttattttaccattaactggtaggcaaattccagttatcgccgatgaatatgctgatcctgatcaggggtctggagctgtaaagataactcctgcgcatgactttaatgattttgaggtaggaaaaagacactcacttgagatgttaaatatttttgattctaaagctaatcttaatgacgctgttccggaagagtatagaggattagagagatttgctgcgcgtaaaaaagtt

SEQ ID NO: 306933 - DNA, 865 bp, Unknown
  Bacterial polypeptide expressing nucleotide sequence isolated from the Sargasso Sea
tcggccgctgttatatctacctttataaagctattcaacaaaggattgatttactggggttttcggatggtcaattgggatccagaggccaaatcgaccttatcagatgaggaggtgatataccaggagcgtgaaggacaattatatcacattgcatatcgagttgtgaatagcgaggaaaaagttatcattgcaaccacaaggccagaaactctttttggagacacagctgtttgtgttaacccccatgatgagcgtttttcacatttaaaaggtaaaaaactaattgttccaatatccaacaggaagattcccatcatcatggatgaatatgtggatatggaatttggttcaggatgccttaaagttacgcctgctcatgacattaatgataaagttttaggggaaaaacatgacttggccataattaatatttttaatgaagatgcaacattaaatcattattgcctgtcttttgaaggtttggacagatttatagcacgtaaaaaaatagccaaagtactagaagaatctggggaactggtaaaaaaagaaaattacagtcataaaatagggacttcagagcgtaccaaagccattatagaacctaggttgtcagatcaatggtttttaaaaatggaagatttggctaaacctgccatcgatgcagttttgaaaagtgataatattcgattggttcctgaaaaatttaaaaacacttaccgtaactggatggagaatattcgcgattggaatatttctcgacagttgtggtggggtcaacaaataccagcctactattttagtaatgataagtcggagtttgttgtcgctaaagatattgagagtgctctttataaggcta

SEQ ID NO: 306934 - DNA, 262 bp, Unknown
  Bacterial polypeptide expressing nucleotide sequence isolated from the Sargasso Sea
atggaatttaaaaaatataatcatagcaaagaagaaaaaaaaatctcagatttttggattaaaaatgacttattcaaaccaaaaaaaaacaaatcaaataaaaaattttctatagtaattcctccacctaatgtaactggcagattacatatgggacatgccctaaacaacagtctacaagatgttttagttagatttaatagaatgaaaggcctcgaaactctgtggcaaccaggaacagatcatgctggaattgcaactc

SEQ ID NO: 306935 - DNA, 556 bp, Unknown
  Bacterial polypeptide expressing nucleotide sequence isolated from the Sargasso Sea
tatgaaaaaaaattacgaacctaaaggtatagagaagaaaatctatgataaatgggagtcttcaggttactttaccgccatacctgatgaaaaaaaggaaccattttgcatcatgattcctcctccaaatgtgacaggaactttgcacatgggtcatggctttcaaaacactcttatggattccctgattagacgcaaaagaatgtcaggtttcgatgttttatggcaagttggtgtagaccatgcgggtatagcaactcaaatggtagtagaacgacaactagagtctgaaggaaaaactaaagaatccattggaagagatgcttttgagaaaagagtatgggaatggaaggaaaaatcaggcggaaaaataacacaacaactaaggcgattaggtgcatcggtagattggtctagagaagctttcactatgagcgaagaccttagtttagctgtcaaagaggtctttgtttctttatttgatgaagggttaatttatagaggagaaaggctagttaattgggatgttgtcttgcagacagcgctatctgatctt

SEQ ID NO: 306936 - DNA, 950 bp, Unknown
  Bacterial polypeptide expressing nucleotide sequence isolated from the Sargasso Sea
gtttggtcttggaaaaatcattcagaaaaaaaaataatatcacaaattaaaagacttggatgctctgtagattggagtaaatataggtttaccttagacgatggatgcaatgaagcggttataaaagcattcgttgaattacatagaaaaaataaaatttatagagggtataggcttgtaaattgggacccatcactaaagactgcggtttcagatcttgaggttataagacaagaaaaggatggtctactctggtatataaaatatccaattgaagattcaaaagactttgtgatagtagccacaacaagacctgaaactatgtttggtgacatggcagttgctgtaaatccaaatgatgatagatataaaaatcttattggtaaaaatgttaatttaccctttgtagatagaaaaattcccattttagctgatgaatatgttgacatggaatttggaacaggttgtcttaaaattactccaggccatgattttaacgattatgaaataggtaaaaaatattcactacatgaagaagatggtcaggtaagaacttctaatttagcaagtgattttgaacctataaatatatttaacgaagatgcatggtctaatgaaaatgtacctgaaccattttcaaatctcgatcgtttcaaggttagaaaggtcgtattagagaaactcaaagaactaaatcttctagaaaaagaagaaaaacatcatataagtgtgcctagaggtgaaaggtctaatatagttattgagcctagattaagtcatcagtggtatgtcaaaactgatgaaatggcagcaagagctaacgatgctgttaacaaaggagaaataagatttcatcctggcaattggggtaaaacatattttaattggatgaataatattgaggactggtgtataagtagacaaatatgggtggggtcacagaaataccc

SEQ ID NO: 306937 - DNA, 475 bp, Unknown
  Bacterial polypeptide expressing nucleotide sequence isolated from the Sargasso Sea
aatgagttcagaaaaatatacacattctaaagtagaaaataagatttactcttattgggaaaaaaaaggtctctttaaacccaaaaaaaataaaaaaaagtattctattgtaattccacctccaaatgtcactggaagtcttcatatgggtcatgcattaaacaatacaattcaggatttacttataagatttcatagaatgaataattttgaaactttatggcagccgggaactgaccatgcaggtatagcaacgcaagctttagtcgaaagaaagcttgaaagtgaaaatattgataaacaatcaattggcagagaggcttttattaaaaaagtttgggattggaaaaaggagtatggagatattattattaatcagctcaaaaaacttggatgttcatgtgattggtcaaggaatgccttcacgatggataaaaatttgtctgcatcagttattaaagttttcatagatctt

SEQ ID NO: 306938 - DNA, 460 bp, Unknown
  Bacterial polypeptide expressing nucleotide sequence isolated from the Sargasso Sea
atgacagagatgaatgatcaattatctttagagaattattcaccttttgaagtagagaaaaagtggcaagaaaaatgggaaagtctaaaggcgtttagtcctaaccctcaggatgatggggagcctttttgtgttgttattccgccaccaaatgtaactggatctttgcatatggggcatgcatttaatacggctttgatagatgttgtagtacgttttcaaagacttttaggtaagaatgtattgtgtttaccgggaactgatcatgcttcaatagctgttcaaactattctcgaaaaacaattaaaaagtgaaggcaaaacaagcgaggatattggaagagatgaatttcttaaaagagcatggaactggaaagaacaaagtggtggaagaatagtttctcaattaaaaaggataggatattcagttgactggactagagaaagatttactcttgatc

SEQ ID NO: 306939 - DNA, 895 bp, Unknown
  Bacterial polypeptide expressing nucleotide sequence isolated from the Sargasso Sea
aagaatgttttgtgtttaccgggaactgatcatgcgtcaatagctgttcaaactattctcgaaaaacaattaaaaagtgaaggcaaaacaagcgtagatattggaagagatgaatttcttaaaagagcatggaactggaaagaacaaagtggtggaagaatagtttctcaattaaaaaggataggatattcagttgactggactagagaaagatttactcttgatcaaaaattaaatgaagctgttattgaggcttttaatattctttataaaaagaatttaatttatagaggcgaatatttggttaattggtgccctgaatctcaatctgccgtaagtgatcttgaagttgaaatgcaagaagtaaatggtcatttatggcatttcaaataccctttaatttctgaaagtggtgaatacttagataagtacttagaaattgcaacaacaagaccagaaactcttttgggtgatacagctgtggcagttaatcctgatgatgatagatataaagaatttattggtcacaaagtaaaagttcctttcgttgatagagaaatacctattatcgctgattcacatgttgataaagattttggtacgggttgtgtgaaggttactccagctcatgatccaaatgattttgcaataggaaaaaggcataatttaaaacagattaatgtaatgaacaaagatggaactttaaatattaatgccggtatttttcaaaatttagatagatatgacgctagaaagaaaattatcaaagaattggataacttaggcctgcttacaaagatagaggattataaacatactgttcctttttctgatagaggtaaggtgccaattgaacctttattgtcaacaccagtggtttttgaaaatggatgat

SEQ ID NO: 306940 - DNA, 220 bp, Unknown
  Bacterial polypeptide expressing nucleotide sequence isolated from the Sargasso Sea
aatgacagagatgaatgatcaattatctttagagaattattcaccttttgaagtagagaaaaagtggcaagaaaaatgggaaagtctaaaggcgtttagtcctaaccctgaggatgatggcgagcctttttgtgttgtcatcccgccaccaaatgtaactggatctttgcatatggggcatgcatttaatacggctttgatagatgttgtagtacgtttt

SEQ ID NO: 306941 - DNA, 377 bp, Unknown
  Bacterial polypeptide expressing nucleotide sequence isolated from the Sargasso Sea
aatgaaaaagaattttgaccctagtgaaatagaaactaaatggtataagttctgggaagaatctaacttttttaaggcccaacccgaatcaaaaaaagaacctttctgcataatgatccctcctcctaatgtgacaggaactcttcatatgggtcatgggttccagaatgcattaattgataccttgattagatataagagaatgaatggctatgatgctctttggcaagtaggcactgatcatgcaggaattgcaactcaaatggttgttgaaaggcagctagaattagaaggaacaactaaagaagatttaggaagagaagaatttataaagagagtatgggattggaaagagtcatcaggaaatacaataaccg

SEQ ID NO: 306942 - DNA, 457 bp, Unknown
  Bacterial polypeptide expressing nucleotide sequence isolated from the Sargasso Sea
aatgagcactgataaatatattcattctgatgtagaaaataagatctattcttattgggaaaataataaactttttcaacctaaagaaaacaccaacaaattttcaatagttattcctccacctaatgtcactggaagtttacatatgggccatgccttaaataattctattcaagatttattagtaagatttcatagaatgaataattatgaaactttgtggcaaccaggtactgatcatgcaggaatagcaacacaagctcttgttgaaagaaagttagaaaaagacggtataaaaaaaaatgatttaggtcgagataaatttattaaaaaggtttgggagtggaaaaatgaatatggagatataattattaatcaattaaaaaaattaggatgttcatgtgattggtcaagaaatgcttttactatggatgaaaatctatctaaatctgtttta

SEQ ID NO: 306943 - DNA, 764 bp, Unknown
  Bacterial polypeptide expressing nucleotide sequence isolated from the Sargasso Sea
tatggggcatgctttaaataactcaattcaagatgttttaactagatttcatagaatgaataattatgaaactttatggcaaccaggaacagatcacgccggaattgcaacccaagcattagttgaaaaaaaacttacaaaagaaggggttaaaaaaaatgatttgggtagggaaaaattcatagaaaaagtgtgggaatggaaaaacgaatatggagatattataataaaccaacttaaaaaacttggatgttcttgtgattggtctcgtaatgcattcacaatggacgagaatttatccaaatcagtcataaaagtatttgttgatctttataataaaaaattaatctataaagcaaaaaaacttgtaaattgggatgttgttttaaaaacagcaatatctgatttagaagttgatcaacgtgaagtaaattctcaactttattatataaattatccaatagaaaattctgataaatttgtaacaattgcaacaactagacctgaaactatgttgggagatactgcaatagcagttaatcctaaagacgatcgatttaaagatattgttggaaagctagtgaccattcctttagcaaacagaaaaataaaagtaataacagatgactatgctgatcctgaacaaggaacaggagcagtaaaaattactccagctcatgatttcaatgactatgatgtaggtataagaaacaagttagaagtaattaatatatttacgcctgatggaaaaataaatgacaatg

SEQ ID NO: 306944 - DNA, 805 bp, Unknown
  Bacterial polypeptide expressing nucleotide sequence isolated from the Sargasso Sea
tggtcaagaaatgcttttaccatggatgccaatttatcaaaatcagtgataaaagtatttgttgatttacataaaaaaaaattaatttataaatcaacaaaacttgttaattgggatacagtattaaaaacagctatttcagatttagaagttgatcagagagaagttaattcaaaactttactatataaaatatcaaatagaaaattcatctgattacattactattgcaacaaccagacctgaaactatgcttggagatactgcaatagcggtaaacccaaaggatgagagatacactagtattgtaggaaagtttgcaatattaccaatagtgggaagaaaattaaaaatagtttacgataattatgctgatccagaacaaggcactggtgctgtaaaaattacaccagctcatgattttaatgattttgaagttggaaaaagacatagattaaaaacaattaatatttttacagatgacggaaagattaataagaattctccagctgaatatataggtctagatagatttgaagcgaggaaaaaaattttacaggaattaacaaatttagaacttctaattaaagaagaaaatataaaaaataaaattccatacggtgatagatctaattctattatagaaccctacttaaccgaacaatggtttgttgatgcaaagaaactttctgtaaaagcaaaaaatatcgtaaaaaataaaaaaacaaatttttttccagaaaattggtcaaaaacctattttcaatggatgaataatattgagccctggtgtatttctagacaat

SEQ ID NO: 306945 - DNA, 481 bp, Unknown
  Bacterial polypeptide expressing nucleotide sequence isolated from the Sargasso Sea
atgaaatttaaaaaatacaatcatttaaaagaagaaaaaaaagtctctgatttttggattaaaaaaggctcttttaaacctaaaaaaggtaagtcaaaaaaaacattttcaattgtaattccacctccaaacataactggaaaattacatatggggcacgctttaaacaatagtcttcaagatgttttagttagatttaatcgaatgaaaggtctcgaaacattatggcaacccggaacagatcatgccggaatagccacccaagcaattgtagaaaaaaatttagaaaataagggtattaaaaagaatgatttgggaagagagaaatttattaaaaaagtttggaaatggaaagaacaatctggtggaataattttagagcaacttaaaaaattgggttgttcatgcgattggtctagaactagatttactatggacgaggatttatctaatgcagtaattaaagtatttgttgaacttt

SEQ ID NO: 306946 - DNA, 382 bp, Unknown
  Bacterial polypeptide expressing nucleotide sequence isolated from the Sargasso Sea
aatgagtagcgataaatatatacattctgatgtagaaaatagaatttattcctattgggaaaaaaatggtctttttaaacctaaagaaaattcaaaaaaattctcaattgtaattcctcctccaaatgtaactggtagtttacatatgggacatgcactgaataattcaattcaagatttattagttcgttatcataggatgaataattttgagactttatggcaaccaggtacagatcatgctggtatagctacacaggctttagtagaaaaaaaattatcttctgaaaaaattgataaaaataaaattggtagagaaaaatttattgaaaaagtatgggaatggaaagagcaatatggagacataattataaatcaatta

SEQ ID NO: 306947 - DNA, 312 bp, Unknown
  Bacterial polypeptide expressing nucleotide sequence isolated from the Sargasso Sea
tatgagttcagataaatataatcataatgaagtagaaaatcgtatttattcatattgggtgaaaaatgagttgtttaaacccaaaaaaaataagaaaaaattttcaatcgtaataccaccaccaaatgtaactggtagtttgcatatgggtcatgctttaaataattcaattcaagatcttttaactagatatcatcgaatgaatagttatgaaactttatggcaacccggaactgatcatgcaggaattgccactcaggcattagtggaaaaaaaattagagaacgaaggaatagcgaaaaatgatctagg

SEQ ID NO: 306948 - DNA, 356 bp, Unknown
  Bacterial polypeptide expressing nucleotide sequence isolated from the Sargasso Sea
aatgagtgctgataaatatatccataccgatgtagaaaataagatttattcttactgggaaaaaaataaactttttgaacctaaacaaaataccagtaaattttcaatagttattccaccaccaaatgtaactggaagtttacatatgggccatgccttaaacaattccattcaggatttattagtaagatttcatagaatgaataattttgaaactttatggcaacccggcactgatcatgctggtatagcaacgcaagctcttgttgaaaaaaagttagaaaaagacggtataaaaaaaaatgatttaggtagagataaatttattgaaaaggtctggcagtggaaaaaagaat

SEQ ID NO: 306949 - DNA, 310 bp, Unknown
  Bacterial polypeptide expressing nucleotide sequence isolated from the Sargasso Sea
aatgagttttgataaatatgagcataataatgttgagaataaaatctacgattattgggaaaaaaatgaattatttaaacccaaaaaaaatacaaaaaaattctcaatagtaattcctccacctaatgtaactggtagccttcacatggggcatgctttaaataactcaattcaagatgttttaattagatttcatagaatgaataattatgaaactttatggcaaccaggcacagatcatgctggtattgcaacccaagcattagttgaaaaaaaacttgcaaaagatggtattaaaaaaaatgattta

SEQ ID NO: 306950 - DNA, 685 bp, Unknown
  Bacterial polypeptide expressing nucleotide sequence isolated from the Sargasso Sea
aactggttttgacattatctttttttgggtagcaagaatgatgatgtttggaatggagtttttaaacaaacaaccatttaaagaaatttatgttcatgcattggttagagatgaaaaaggacaaaaaatgtctaagtcaaaaggtaacgtaattgatcccttaatattaatagataaatatagcgcagatgcattaagatttacattgttatcaatggcatcaccaggaagagatgtaaaactatctgaagatagggttaaaggttatagaaattttctcaataaactttggaatgcaaacaactttttggccatgaataagtgtgatttttcaaagtctaaaaaggagccgagagtaaagttaaatattaataaatggattatttcagagttaaatacagtaagtaaacaagtcgagaagaatataaataattatagatttgatgaagcggcaagaaacgtttatcaatttgtttggcattcatattgtgattggtatgtagagctatctaaaactattttaaattctaaagaaaagtcgtcaattttagaggtaaaacaaacactaagttatgtctttaagcaaattttaattcttctacatccatttattccttttattacagaagagttatggttaaaaaataagctagataaacctaaaaataattacttaatgtttgct

SEQ ID NO: 306951 - DNA, 287 bp, Unknown
  Bacterial polypeptide expressing nucleotide sequence isolated from the Sargasso Sea
catgacccaactcgcctccagctacgaccccgccacctttgagaccgacctgtacgacgggtgggagaaggccggtcatttcaagccgtccggcaagggcaagccgtacaccatcctgctgccgccgccgaacgtgaccggcacgctgcacatgggccatgccttccagcagaccctgatggatgcgctggtgcgctatcaccgcatgcgcggctacgacaccctctggcaggtggggaccgaccacgccggcatcgccaccgaaatggtggtgtcgcgcaacctgg

SEQ ID NO: 306952 - DNA, 280 bp, Unknown
  Bacterial polypeptide expressing nucleotide sequence isolated from the Sargasso Sea
tatgagttcagataaatataatcataatgaagttgaaaatcgtatttattcatattgggttaaaaacgagttattcaaaccaaaaaaaaataagaaaaaattctcaattgtaatacctcccccaaatgtaactggaagtttacatatgggacatgctttgaataattctattcaagaccttttaaccagatttcatagaatgaacaattatgaaactttatggcaaccaggaaccgatcatgcaggaattgccactcaagccttggtagaaaaaaattag

SEQ ID NO: 306953 - DNA, 425 bp, Unknown
  Bacterial polypeptide expressing nucleotide sequence isolated from the Sargasso Sea
catgataagcgataaatatatacattcaaaagttgaagatcggatttatacttattgggaaaaaaataaattatttaaacctaaaaaaaattccaagaagtattcaattgtaattccaccacctaatgtaactggaagtttgcatatggggcatgctttgaataattcaattcaagactttttagtaagatattatcgtatgaataattatgaaactttatggcaaccaggaacagatcatgcaggtatagctactcaagcgcttgttgaaaaaaaattagaaaaagaaagtcttactaaagccactcttggaagagaaaaatttattgaaaaagtatgggaatggaaaaatgagtatggtgatataataatcaaccaattaaagaaactaggttgttcatgtgattggtcaagaaatgctttta

SEQ ID NO: 306954 - DNA, 429 bp, Unknown
  Bacterial polypeptide expressing nucleotide sequence isolated from the Sargasso Sea
gtcgcagaaaggtttacgatggatgaaggcctttcaaaggctgttctaaaagtatttgttgacctatataaaaaaggattaatctataaggatcaacgattagtaaactgggatcctaaattacatactgctgtttcagacttacaggtagtacagaaatcaatcgatgggaatttgtggtattttcgttacccaatagaagatcaacctgatagatttgtaactgttgcaacaactcgtcctgagacaatgttgggtgatacaggtgttgcagtgcatccagatgataaacgatattttgatctagttggtaaaaatgttgttttacctttagtcggtcgcacaattaaaatagtggcagatgagtatgcagatccagagcaaggatctggtgcagttaaaataactcccgctcatgattttaatgat

SEQ ID NO: 306955 - DNA, 689 bp, Unknown
  Bacterial polypeptide expressing nucleotide sequence isolated from the Sargasso Sea
aatgaaaaaaactttcagtcctaaaagtattgagcagaagtggtatgaggaatgggaaacttctggctatttcaatgcgaaccctaaaagcaagaaaccttctttctgcatcatgatccctcctcccaatgtaactggttcactgcatatgggtcatggttttcaaaacactttaatggatgctcttataaggcataaaaggatgtcaggttacgacgctttgtggcaggtgggaactgatcatgctggtatcgttacgcaaatagtagttgaaagagagatcgagaaggaaggccttactcgtgaaggtttaggtagagaaaaatttatagataaagtttggaaatggaaaaataagtctggaaataatataaccaaccaattaagaaggcttggtgcttccgttgattggtcaagagaagctttcacaatgagccctgaaatgagcatagcagtccaagaagtttttatccgcctttatgatcaaggattgatctacagaggtaaaagaatggttaactgggacatagttctccaaacagctctttcagatttagaagtgtcaaatgaagaaggaaatggaaatctttggttctttaaatacccactgacagacaaaggtcatataaccatagctacaaccagaccagaaactatgcttggggatacagctgtagctgtaaacccaa

SEQ ID NO: 306956 - DNA, 269 bp, Unknown
  Bacterial polypeptide expressing nucleotide sequence isolated from the Sargasso Sea
catgagttcagacaaatatattcacgaaaatgttgaaaataagatttattcttattgggaagaaaaaaatttatttaaaccaaaatctaataaaaaacaattttctatagtcatcccaccaccaaatgtaactggtagtcttcatatgggtcatgcattaaataattcgatacaagacttgttaacgcgtttccatcgaatgaataattttgaaactttatggcaacctggaacagaccatgcgggtattgctacacaagcattagtag

SEQ ID NO: 306957 - DNA, 856 bp, Unknown
  Bacterial polypeptide expressing nucleotide sequence isolated from the Sargasso Sea
aacacagtggtttgtgaaaatgaaagatttgtctaaaccagcgcttgaatctgttttaaacaatgaaataaaatttcacccaaaaaaatatgtaaatacatataaatattggatggataacgtaagagattggaatatatctcgacaactctattggggacacagaatacctgtatattatctaaaaaatgattcttcaaaatatgttgttgcgaagaatattgaagaagcagttttaaattttaaaaataaaggaataaacattacaattgataacatcgttcaagataatgatgtattagatacttggttttcatcatggttgtggccaataactgttttcgatggtgttagaaaccctaataatgaagaaattaattactattatcctacatcaactgtagttaccggtccagatatcatatttttctggatagctaggatggtggttagtggttacatgttaaaagatcagaaaccttttgagaatgtttattttactggaattgtcagagataatcagagaagaaaaatgtctaagcaattaggaaatagtcccgatcctatagaattaataaataagtatggtgctgatagtgtgagaattggtttgcttttttcagctcctgcaggaaatgatttgctttttgatgataacctctgtgtacagggaagaaatttttccaataaaatatggaatgcatacaggctaattgaaggttttaatatttctgagagtaactcaatttctgatcactgcgaaaaagctttattgtggtttgagaataggcttcagtccactttaaaagagattaacttttgcttcgaaaaatttagaatatcagatgctttaatg

SEQ ID NO: 306958 - DNA, 285 bp, Unknown
  Bacterial polypeptide expressing nucleotide sequence isolated from the Sargasso Sea
tatgaaaaaatataatcataaaaaagtagaaaatcaaatttataaattatgggagaaaaaaaattgttttaaaccaataaagaatacaaaaaagaaaaaatttataatagttattccaccgccaaatgttacaggaaaattacatatgggtcatgctttaaataattcaattcaagatcttttagtaagatttaatagaaatagaggagtagaaactttatggcaacccgggacagatcatgcaggaattgcaactcaattagttgtggaaaaaaaattattaga

SEQ ID NO: 306959 - DNA, 295 bp, Unknown
  Bacterial polypeptide expressing nucleotide sequence isolated from the Sargasso Sea
aatgagtagcgagaaatatatacattctgatgtagaaaatagaatttattcttattgggaaaaaaatggtctttttaaacctagagaaaattcaaaaaaattctccattgtaattcctccgccaaatgtaactggcagtttacatatgggtcatgctctcaataattctattcaagatttattaattcgttatcacagaatgaataattatgaaacattatggcaaccaggtacagatcatgctggtatagccactcaagctttagtcgagaaaaattatcttcagaaaaaatga

SEQ ID NO: 306960 - DNA, 403 bp, Unknown
  Bacterial polypeptide expressing nucleotide sequence isolated from the Sargasso Sea
atgagtaacgataaatatatccattctgaagttgaaaataagatttactcttattgggaaaaaaatggattatttaaaccaaaagaaaattctaaaaaattttcaatagtaattccaccgccaaatgtaactggaagtcttcatatgggtcatgcattaaataattctattcaagatttattagtgcgttatcatcgaatgaataattttgaaactttgtggcaaccaggaactgatcatgctggtattgcaacacaagctttagtagagaaaaaactcacttctgaaaaaatagataaaaataaaataggtagagataaatttattgaaaaagtttgggagtggaaagagcaatatggtgacataataataaatcaattaaaaaaactaggatgttcttgtg

SEQ ID NO: 306961 - DNA, 734 bp, Unknown
  Bacterial polypeptide expressing nucleotide sequence isolated from the Sargasso Sea
catgggtcacgttttgaataatacgattcaggatattttaattagaaaagctcgcatggagggaaaaaatacttgctggatacctggaacggatcatgcctctattgcgacagaagctaaagttgtatcaatgttgaaagaaaaaggaatcgataaaaatgatcttacccgggaagagtttcttaatcatgcatgggaatggaaagataagtatggcggaataatcataaagcagcttaaaactcttggctgttcttgcgattgggaccgagagcgttttacaatggatgaagagtattctaaagcagtaatgcatgcttttgttgagctttaccgcaaagaattaatttataaaggcaagagattggttaattggtgccctgtttcaaaatccgcaataagcgatgaagaagtcattcaccaagaaaaaaatggaaagctctggtatttaaagtatcccttggttggccatgaagaatatctagtggtagcaacgactaggcctgaaactatgcttggtgacactgcagttgccgtaaatcctaaagatgaacgttttaaagattacattggtaaaaaaattaaactgcctttaactgagcgtgaaattccaataatatctgatgaatttgtgaatattgaatttggtaccggttgtgtaaaagtcacacccgcacatgatccaaatgattttgaaatgggacaacgtcataatcttaagtttataaatatta

SEQ ID NO: 306962 - DNA, 856 bp, Unknown
  Bacterial polypeptide expressing nucleotide sequence isolated from the Sargasso Sea
aactatgaaactttgtggcaaccaggtactgatcatgcaggtatagctactcaagctttagtagaaaaaaagttaaattcagaaaatattaaaaaaaacgatttgggaagagaaaaatttattcaaaaagtatgggattggaaaaatcaatatggagatataattattaatcagcttaaaaaattgggttgctcatgtgattggtctagaaatgcattcacaatggatgataatttatcaaaagctgtaattaaagtttttgtagatctttataataaaaaaataatttacaaatctgaaaaattagtaaattgggacactgtattaaaaacagcaatatcagatttagaggttgatcaaagagaagttaattctaaaatttattatattagatacccaattgatggtttagatgaacatattactatagctacaactagacccgaaacaatgcttggagatactgcagtagctgtaaatccaaaagatatgagatataaaaaatatgttaataaatacgtaacaattccaatcgttggtagaaaagtcaaaataattgaagatgattatgctgatccagaacagggaacaggggcattaaaaattacacctgctcatgattttaatgattatgaagtcggtaaaagaaataaattagaaattataaatatttttacagaagatggaaaaattaataaaaatgcaatttcaaactacgtaggattagataggtttatagctagaaaaaaaatattagatgaacttaaagaaaaaaattattttgttaaggaagaaaatattaaaaacaaagttccatacggagatagatcaaattctattattgaaccttttttaa

SEQ ID NO: 306963 - DNA, 532 bp, Unknown
  Bacterial polypeptide expressing nucleotide sequence isolated from the Sargasso Sea
atgacagagatgaatgatcaattatctttagagaattattcaccttttgaagtagagaaaaagtggcaagaaaaatgggaaagtctaaaggcgtttagtcctaaccctgaggatgatggggagcctttttgtgttgttattccgccaccaaatgtaactggatctttgcatatggggcatgcatttaatactgctttgatagatgttgtagtacgttttcaaagacttttaggtaagaatgttttgtgtttaccgggaactgatcatgcttcaatagctgttcaaactattctcgaaaaacaattaaaaagtgaaggcaaaacaagcgaggatattggaagagatgaatttcttaaaagagcatggaactggaaagaacaaagtggtggaagaatagtttctcaattaaaaaggataggatattcagttgactggactagagaaagatttactcttgatcaaaaattaaatgaagcagttattgaggcttttaatattctctataaaaagaatttaatttatagaggcgaat

SEQ ID NO: 306964 - DNA, 699 bp, Unknown
  Bacterial polypeptide expressing nucleotide sequence isolated from the Sargasso Sea
aatgttggaaaaatattatcaacccagtcttgttgaagataaaatttataaaacatgggaaaatgacggagactttaaacctttaaagtcttcaagcgatgcttattgcattgtgatccctccaccaaatgttacaggaacacttcatatgggccacgctctaaataatactctacaggatatcttggttaggttttatagaatgcagggcaaaagtgttttgtggcagcctggtacagaccatgcaggtatcgcgacagaaatggttgttgaaagagaattaaaaaaaagagatataaataaaaaagatttatcccgtgaacagtttatagaacatgtgtgggaatggaaaaatcaatctggaaatgaaattattaatcaattaaaaagattaggctgttcatgtgattggtctagagaaaggtttactctagatgaaggtttatcaaaagcagtaagatttgtatttgtcaaattatataatgataaactaatttataaggataaaagattaagtaactgggacccaaaattaaaaacgactatctctgatttagaagtcattcaaaaagaagtaaaaggttctctctggtatatagactacaaattagaaaatgaagataaggtaattacaattttgcacactcgacccgagacaatgcttggagatacggctattgctgttcaccctgaagacga

SEQ ID NO: 306965 - DNA, 364 bp, Unknown
  Bacterial polypeptide expressing nucleotide sequence isolated from the Sargasso Sea
catgacagagatgaatgatcaattatctttagagaattattcaccttttgaagtagagaaaaagtggcaagaaaaatgggcaagtctcaaggcgtttagtcctaaccctgaggaggatggggagcctttttgtgttgttattccgccaccaaatgtaactggatctttgcatatggggcatgcatttaatacggctttgatagatgttgtggtacgttttcaaaggcttttaggtaagaatgttttgtgcttaccaggaactgaccatgcttcaatagctgtccaaactattcttgaaaaacaattaaaaagtgaaggcaaaacaagcgaggatatggaagagatgaatttcttaaaagagcag

SEQ ID NO: 306966 - DNA, 919 bp, Unknown
  Bacterial polypeptide expressing nucleotide sequence isolated from the Sargasso Sea
cccttcaaaaccgtttacctgcatggactggttcgaacacgtgacggcaaaaaaatgtccaaatcagatcccctcacctgcattgatcctctcgaaagcatccgagattatggaaccgatgctctgaggctggcattgattcaagggacaggaccagggcaagatctcaggctttatcctgaaaagctggagagctgcaggaggtttgcaaacaaagtctggaatgcagggcgttacatccttatgaatattccatctggaacgtcgttggatcctccgcggaatgttcaaaatgatgcagcacggtggcttcttcatgaactggatctgctcattggaaaaactcggcaaggcttggaagcttttcgactttcagaggtgattgataatcttagaagctttttctggggcactttctgtgattggtacctagaaatggataaaagacgtgactggaatgaggaagataatcgagtcttggcctatgctttgagcactcagcttaaacttcttcatccctatgtcccctttgtcacagaagccctttggggaaatcttgggcaagataagatgttggcaaaagctccatggcctgaatctcagggatatgattttggagaaagtcaccaaaaaattcagttggtctgtgaatcggtttcacagttacgaactctccgtgaaaaagcgcgcttgggattgaaccaaaaagttgatgccggcatcgattccgagccccatgcagaagtttttgaaatccattcagggttaataaaaaagttggcgcgcatcagcgaattaaaaatcaggaaagtccctgcgattccaagcggagaagccctttcttcttattttcaggactctcttgtgagcatcaacgcgaatgctttggacttcagtcaggagattcaaacctccagaa

SEQ ID NO: 306967 - DNA, 851 bp, Unknown
  Bacterial polypeptide expressing nucleotide sequence isolated from the Sargasso Sea
aggaatcaaaatgtcaaaatctaaaggaaatacattagatcctctagatattattgatggaattaatttatctgatctctctgcaaagcgaacagagggacttatgcaacctcaaatgaaagagagaattgaaaaacaaactaaaaaagattttccggagggcattagtgcttatggtacggatgccttaaggctaaccttttgttctcttgcaactggtggaagagatattaattttgatatgaagcgtgtagaaggttatagaaacttctgtaataaactttggaatgcttcaagatttatagagatgcaaatagagtcctatggagtatctgaagagtcagatgaaggcttaattgagaaatggatcaattatagatttaacttaacagcaaagaaggtgaatgatgcattcgagaattttagatttgatttagctaccaaagctatctacgaatttatctggtatgagttttgtgattggtatatagaattatcgaaaataaaactttcaaacgaaggtgaagaaaattctaaaatagttaaatctatggtgactatattggaagaaaccttaagactcgctcaccctattatgccctttataactgaagaaatttggatgcactttaagccttaccatcaaaattcagagaaaagcatcatgatcgcagagacgccaaaacataaagaaaacctttctgatgatggatatcaatctattgaatggctgaaggaaattgtttctggaataagaaacataagaggcgaaatgttaattaaaccttccatgacgataaaagctttttatgaaggcggtgataaaatagatagaaatagatcaaaagatt

SEQ ID NO: 306968 - DNA, 349 bp, Unknown
  Bacterial polypeptide expressing nucleotide sequence isolated from the Sargasso Sea
atgaaatctgataaatatattcattcacaggttgaagataagatatactcttattgggaaaacaacaaattattcaaaccaaaacctaataaaaaaaaattttcaattattattccacctccaaatgtgaccggaagtttacatatgggtcatgctttaaataattcattacaagatttattaatccgttattatcgaatgaataactatgaaacattgtggcaaccaggtactgaccatgcgggtatagcaacacaagcacttgtagaaaaaaaactcaaaaaagaaaatttagataaaaataaattaggtagagaaaaatttgtcaaaaaagtttgggattggaaaa

SEQ ID NO: 306969 - DNA, 448 bp, Unknown
  Bacterial polypeptide expressing nucleotide sequence isolated from the Sargasso Sea
atgcaaaattcaaattacaatcattccgatatagaaaacgaaatatatgaatattgggaaaaaaataatttttttaagccaaaaaagaacaagaataaacatttttctatagttataccacctccgaacgttactggaagtttgcacatggggcatgctttgaataattcattgcaggatttgcttatacgtttttatcgtatgaatggatatgaaacattgtggcaaccaggaactgaccatgcggggattgctacgcaggcagttgttgaaaaaaaattatcagatcaaggatccaaaaaggaagatttaggtagagagaaatttatagaagaagtttggaaatggaaaaaagaatctggtgatttaattcttaatcaattaaaaaaattaggttgttcatgtaaatggtcacgaaacagatttactatggatgaagatttatcaa

SEQ ID NO: 306970 - DNA, 370 bp, Unknown
  Bacterial polypeptide expressing nucleotide sequence isolated from the Sargasso Sea
catgagtttagataaatatatacattctgaagtagaagataaaatatactcatattggataaagaataatttatttaaacctaaaaaaaataagaaaaaattctcaatagttatacctccaccaaatgtaactggaagtttacatatggggcatgctcttaataattcaattcaagatcttttaattagatattatagaatgaataattatgaaactttatggcaaccaggaactgatcatgcaggaatagccactcaagctttagtcgaaaaaaaattaagctcagaaaatataaaaaaaagtgatttaggaagagataagtttattgaaaaagtatgggattggaaaggtgaatatggagatataatc

SEQ ID NO: 306971 - DNA, 703 bp, Unknown
  Bacterial polypeptide expressing nucleotide sequence isolated from the Sargasso Sea
atgacgctttcaaaaacctacgatccccattcatttgaatcagagatttacaaaagatgggaagaaaaaggtgtgttcagggcagacaacacctgcgaggcacctgctttcaccatctccatgcctcctccgaatgccaccgggcaactgcatgtgggacatgccgttatgttggctttggaagacattctcattcgttggcatcgaatgaagggggatgaggcactttggcttccggggaccgatcacgcagcgattgccacagaaaatgtggttttgaatcaaatccgaaacgaggaaggcattcaggatccgagggaaactttggggagggaggaagtgctccgaagaattgctgcatatgttgagaattcaagggggactatcaggaaccaagtgaaggcgatggggtccagttgcgactggtctcgggaacgttacaccatggatccgcagcttaatcgttgtgtcaatgaatcgtttgtccgaatgtacgaagaaggcctgatataccgtgggccgaggatcgtgaattgggatccgaaattgaaaaccaacgtttcagatgatgaagtcgaaagaaaggaaacacggtctcccttctatacttttcaatatggtccttttcagatcgggacagttcgtccggagacgaagtttggggataagtatgtggtcatgcaccctgaagatgaacgatacc

SEQ ID NO: 306972 - DNA, 667 bp, Unknown
  Bacterial polypeptide expressing nucleotide sequence isolated from the Sargasso Sea
aattattaatcaattaaaaagattaggttgttcatgtgattggtctagagaaagatttactctggatgaaggtttgtcaaaagcagtaagatttgtattcgtcaaattatataatgataaacttatttataaagataaaagactaagtaactgggatccaaaattaaaaaccactatttcagatttagaagtgatccaaaaagaagtaaaaggttcgctctggtatatagactacaaattagaaaatgaagataaggtaattacaattgcaacaactcgacccgagacaatgcttggagatacggcaattgctgttcatcctgaagacgaaaggttcaaagattttgtaggtaagtatgcatatattcccatcattaataaaaaaattattattattgctgatgagtatgtaaaagtgggtcaaggctctggtgctgttaaaataactccagctcatgattttaatgattatgaaataggaaaaagacataatcttgaagtaataaatatttttaatgagaatgctgagcttaatgaaagctgcccaatcgaatatcaaaatcttgatcgctttaaagcaagggagaaaattgttaatgaattagaaactattggggcactaaataaagttgaagaaaatattcataccgtgccatatggagataga

SEQ ID NO: 306973 - DNA, 516 bp, Unknown
  Bacterial polypeptide expressing nucleotide sequence isolated from the Sargasso Sea
aatgagttttgataaatatgagcataaaaatgtagaaaataaaatctacgattattgggaaaaaaatgaattatttaaacccaaagaaaaatcaaaaaaattctcaattgtaattcctccaccaaatgtaactggtagccttcatatgggacatgctttaaataactctattcaagatgttttaaccagatttcatagaatgaataattatgaaactttatggcaacctggtacagatcacgcaggtattgcaacccaagcattagttgaaaaaaaacttgcaaaagatggtgttaaaaaaaatgatttaggtagagaaaaatttattgaaaaagtatgggaatggaaaaatcagtatggtgatataataatcaatcaacttaaaaaacttggatgttcttgtgattggtcccgtaatgctttcacaatggatgaaaatttatctaaatcagtgataaaagtatttgttgatctttataataagaaattaatctacaaagcaaaaaaacttgtaaa

SEQ ID NO: 306974 - DNA, 797 bp, Unknown
  Bacterial polypeptide expressing nucleotide sequence isolated from the Sargasso Sea
gaaactctatggcaaccaggaacagaccacgctggtattgcaacacaagctgttgttgaaaacaaacttttaaaagaaggagttaaaaagaatgatctaagtagagaaaaatttatagaaaacgtttggaaatggaaggaagagtctggtagcataattttagatcaacttaaaaaactaggttgttcgtgtgattggtcaagaacaagatttacaatggatgaagatttgtccagagcggtaataaaagtctttgttgatctttataataataagttaatttacaaagataaaaaattagttaattgggatactaaactacaaacagctatttctgacttagaagttgttcaaaaagatgttcaatctcaattatattacattgactatccaattgaaaattctgatcaaaaaatcactatagctactactagaccagaaactatgatgggagactccgcagttgctgtaaatcctaatgacaaaagatattttaatttaattggaaaaaatgttcttatcccaattgttgatagaacaataaagattatctctgatcgttatgctgatcctgaacaaggttcaggagctgtgaaaataaccccagcacatgattttaacgactatgaagtcggtaagagaaataaattaaaaataattaatatttttgaaaaaaatggaaaaataaatcaatttggagttaaagagtttcatggtctagacagatttgaagcaagaaaacttttaatcaaaagattaaaagaaaagggatatctagtaaaaattgaaaatattaa

SEQ ID NO: 306975 - DNA, 388 bp, Unknown
  Bacterial polypeptide expressing nucleotide sequence isolated from the Sargasso Sea
aatgagttcagacaaatatatacataaagaagtagaaaatcgtatttattcatattgggaagaaaataatttatttaaaccaaaaaaaaatactaaacaattttctatagttattcctccaccgaatgttaccggaagtcttcatatgggccatgctttaaataattcaattcaagatttgttaattagatttcataggatgaataatttcgaaactttgtggcaaccaggtactgaccatgcaggaatcgcgactcaagctttagtagaaaataaacttaaaaaagacggtgttaataaaaatgatttgggtagagaaaattttataaaaaaagtatgggaatggaaacagcagtatggtgacataataataaatcaattaaaaaaa

SEQ ID NO: 306976 - DNA, 903 bp, Unknown
  Bacterial polypeptide expressing nucleotide sequence isolated from the Sargasso Sea
ttggtggagaaaaaactaaattctgaaaatattaaaaaaaaagatttaggaagagaaaaatttattgaaaaagtttgggattggaaaaaacaatacggagacataattattaatcaactcaaaaaattagggtgctcctgtgattggtcgagaaatgcttttacaatggataaaaatttgtcaaaagctgttatcaaagtttttgtagatcttcataaaaaaaaattaatttataaagctgaaaaattagtaaattgggacacagtattgaaaactgctatatctgatttagaggttgatcagagagaagttaattctaaaatttattatattagatatccaatagatggtacaactgaatatataactatagcaactactagacctgaaacaatgcttggtgatacagctgttgctgtaaaccctaaagacaagagatataaaaagtatgtgaataaaactgtaacaatcccaattgttggaagaaaaattaaaattatagaagatgattatgctgatccggaacaaggaactggagcactaaaaattacacctgcccatgattttaatgattatgaagttggtaaaagaaataaattagaaataattaatatttttacagaagaaggaaaaattaataataatgcaatttcatcatatattggtttagacaggtttgaagcaagaaagaaaatactaaatgatcttaaagaaaaagattattttgtaaaagaagaaaatattaaaaataaagttccatatggagatagatcaaactctataattgaaccttttttaacagaacaatggtttgcagatgcgaagaagttatcaattaaagcaaaaaaaatagttaaaaataaaaagacaaacttttttcctgagaactggtcaaaaacttat

SEQ ID NO: 306977 - DNA, 451 bp, Unknown
  Bacterial polypeptide expressing nucleotide sequence isolated from the Sargasso Sea
gatggacaaaaggtttgattctaattacatagaaaaaaaatggtataaaagatggttagaaagtggtgcttttgcgtctaacagtcaatcatcaaaagaaccgtacgttataatgatgccacctccaaacgtaactggttcgttacatattggtcatgctttaacatttactattcaagatatattaataagatttcatagaatgcaaggactagatgttctttggcaaccaggaactgatcacgctggaatagctactcaaatggttgttgaaagagaattagcaaaatctaatttaacacgacatggtttaggtagagaaaagtttgttgaaaaagtttgggagtggaaagaaaagtcaggcggtgaaattacaaatcaattaagagctttaggagcttcacctgatggaaaaaagagcgatttacaatggatgagggattatcaaaag

SEQ ID NO: 306978 - DNA, 257 bp, Unknown
  Bacterial polypeptide expressing nucleotide sequence isolated from the Sargasso Sea
catgacagagatgaatgatcaattctctttagagaattattcaccttttgaagtagagaaaaagtggcaagaaaaatgggaaagtctaaaggcgtttagtcctaaccctaaggatgatggtgagcctttttgtgttgtcattccgccaccaaatgtaactggatctttgcatatggggcatgcatttaatacggctttgatagatgttgtagtacgttttcaaagactgttaggtaagaatgttttgtgtttaccgg

SEQ ID NO: 306979 - DNA, 295 bp, Unknown
  Bacterial polypeptide expressing nucleotide sequence isolated from the Sargasso Sea
tatgagttctgaaaaatacaatcattcaatagttgaaaacaagatatattcatattgggaaaaaaataacctttttaaacccaaaaaaaataaaaaaaaattctcaatagtaatacctcctccaaatgttactggaagtttacatatgggtcatgctttaaataattcaattcaagatttattaactcgatatcatagaatgaataattacgaaactttatggcaaccaggaactgatcatgctggaattgcaacacaggcacttgtagagaaaaaacttgcaagtgaaaatatt

SEQ ID NO: 306980 - DNA, 643 bp, Unknown
  Bacterial polypeptide expressing nucleotide sequence isolated from the Sargasso Sea
atgagtagcgataaatatatacattctgatgtagaaaatagaatttattcttattgggaaaaaaatggtctatttaaacctaaggaaaattcaaaaaaattctcaattgtaattcctccaccaaatgtaactggcagtttgcatatgggtcatgctctcaataattctattcaagatttattaattcgttatcatagaatgaataattatgaaactttatggcaacctggtacagaccacgcaggaattgctacacaggctttagtagaaaaaaaattatcttctgaacaaattgataaaaatgaaattggcagagaaaaatttattgaaaaggtatgggaatggaaagatcaatatggagacataattattaatcaattaaaaaaacttggttgttcctgtgactggtcaagaaatgcctttactatggatgaaaatttatctaaatcagttattaaggtttttgtagatctttataacaaaggtctaatttataaggataagaaattagttaactgggatacagttttaagaactgccatttcagacctagaagtagatcaaagagaggtaaattctaaaatttatttcatcagatatccaatagacgggactgaagaatttattacaattgcaacgacaa

SEQ ID NO: 306981 - DNA, 883 bp, Unknown
  Bacterial polypeptide expressing nucleotide sequence isolated from the Sargasso Sea
aaatctggcgataaaattattgagcaactcaaaagacttggggcgtcttgtgattgggaccgaaatagatttacaatggaccctgggtttcatgatgctgtaattaaagtatttgttgcactatatcagaaagggttggtttaccgagggaagagacttgtaaattgggatccgcttttagagacagcaatatcggatttagaagttgaacaaattgaggtagatgggttcacctggcatttgcggtacaaattattcgataacatagtttataatcatcctttaaaatttgataataataataatccagtagagtttgaggaacgggactatattgttgtggctacaacaaggcctgaaacgatgttaggtgactcaggtatagccgttaatcctttggataagcgctacgaggccctcattgggaaaaaagctatagttccgttctcaaatagattaattccaatagttgctgatgattatgcagatagcaagaagggaactggcgcagtcaaaataacaccagcgcatgattttaacgattgggaggttggaaaaaaatgtggcttgaatgtaattaatgtatttgacacaaagggaagaattaaggttgaagcaaataaagagttcttaaatgattgtatacctgacgaaaaagttttctcgtttgacggtttagacagatatgaagtacgtaacagaatcgtacaaatagccaaaaacgagggttggcttcatgatatccaaaaagaaaaacatgtagtcccacatggcgatagatcaaacgtagcgatcgaacctctgctgacaagtcagtggttcgtagataccaaaaaaattgttcagcccgctatagacgcagtcaaagatggacggacgaaga

SEQ ID NO: 306982 - DNA, 895 bp, Unknown
  Bacterial polypeptide expressing nucleotide sequence isolated from the Sargasso Sea
ttcctgccgtcgtcggtgctcgtcacgggcttcgacatcatcttcttctgggtcgcccggatggtgatgatgaccacgcacttcacgggcaaggtgccgttccacaccgtctacgtgcacggcctcgtgcgcgacgcggaaggccagaagatgtcgaagagcaagggcaacacgctcgacccgatcgacatcgtcgacggcatcgacctcgacacgctggtcgcgaagcgcacgacgggcctgatgaacccgaagcaggccgcgacgatcgagaagaagacgcgcaaggaattcccggacggcatcgccgcgttcggcaccgacgcgctgcgcttcacgatggcgtcgatggcaacgctcggccgcaacgtgaacttcgacctcgcacgctgcgaaggctatcgcaacttctgcaacaagctgtggaacgccacgcgcttcgtgctgatgaactgcgaaggccacgactgcggcagcgacaagccggaagtctgcggcgcgggcgattgcggcccgggcggctacctcgacttctcggcggccgaccgctggatcgtgtcgctgctgcagcgcacggaggccgacatcgcgaagggcttcgccgattaccgcttcgacaacatcgccagcagcatctacaagttcgtgtgggacgagtactgcgactggtatctcgaactcgcgaaggtgcagatccagaacggcacgccggaacagcagcgcgcgacgcgccgcacgctgctgcgcgtgctcgagacggtgctgcgcctcgcgcacccgatcatcccgttcatcaccgaagcgctctggcagaaagtcgcgccgctggccggccgttatccgcaaggcaaggccgagggcgaagcgtcgctgataacggccggcccttgccttg

SEQ ID NO: 306983 - DNA, 484 bp, Unknown
  Bacterial polypeptide expressing nucleotide sequence isolated from the Sargasso Sea
aatggataaaaggtataaccccactgaagttgaggaaaagtgggttgatatttggtcaaaaaacgttttttttaataaagatgctaagaatactttttcacaggttatacctcctccaaatgtaacaggcactttgcatatgggccatagttttcaatatgcgattatggatttttatactagatataatcatatgtccggaaaaaagtctcattggcaggtaggcacagatcatgctggaattgcgacacagcttgtcgttgaaaacaatttatctaaaaaaaatattagtagactccagttaggaagagatgagtttttaaatgaagtttggaaatggaaagatttctctgaagagaaaatccaatctcaaattaaaagacttggctcatcagtagattggaataaatatagattcacattagatgaaagattttctaagactgtaaataaagcatttattgatctttatcgcagcaacaaa

SEQ ID NO: 306984 - DNA, 437 bp, Unknown
  Bacterial polypeptide expressing nucleotide sequence isolated from the Sargasso Sea
gatgaaacctaatcagagtattaaagcttataatccaaaagagattgaaagaaaatgggttgattctatatctattagcagagattttgactcttctaaaaaagttttctctctggctattcctccacctaatgtcacgggtagcttacacttaggccatgcactaaattctacagttcaggacgtattagttaaatattattatcttaaaggatttaatgtccaatggactcctggtacggatcatgcaggtatagccactcaattgcttgtagaaaaatcattatcaaaaaaaggtttaaatttaaaagaactatcgaatgatgaattaattgaagaaatttggaagtggaaagaaattaatggtgatcaaatcattaaccaattaaggactttaggattgagctgcgattgggatgataaaaagtttactctcg

SEQ ID NO: 306985 - DNA, 322 bp, Unknown
  Bacterial polypeptide expressing nucleotide sequence isolated from the Sargasso Sea
aatgagtttagacaaatatgtacattctaaagtagaaaatgaaatttatgcctattgggaaaaaaataaactatttaaaccaacaaaaaataaaaaaaaattttctatagttatacctccacctaatgtaactggaagtttacatatgggtcatgctcttaacaattccatacaagattttttaataagattttatagaatgaatggctatgaaacattatggcagccaggaactgatcatgctggaatagcaacccaagctttagttgaaaaaaaattatcctctgaaaatatcgataaaaatgatttaggtagagaaaat

SEQ ID NO: 306986 - DNA, 780 bp, Unknown
  Bacterial polypeptide expressing nucleotide sequence isolated from the Sargasso Sea
gtttgggaatggaaaggtcagtatggtgatattattattaatcaattaaaaaaattaggctgttcatgtgattggtctagaaatgcctttaccatggacgataatctatcaaaatctgtattaaaagtttttgttgaaatgtacaaaaatggattaatttacaaatcaaaaaaattagtaaattgggacactgtattaaaaacagcaatatcagatttagaagtagaccaaagagaggttaattcaaaattataccacatcaattatccaatagaagggacagataaatttataacaattgcaactactagaccagaaaccatgttaggagatacagcggttgcagttaatccatcagatgaaagatttaaatcattagtaaataaaaatgtaatagttccaatagttgatagaaaaataaaaattattgaagatgattatgcagatcctgaacaaggtactggagctgttaaaattacgccagcacatgatttcaatgattatgaagtgggggagagaaataatttagaagtcataaatgtttttactcctgatggaaaaattaatgaaaatgcacctgataattatattgggcttgatagatttgaagctagaaaaagaattttaaaagagctaactgataaaaacttatttgttaaagaagagaaaattaaaaataaagttccttatggcgatagatctaattctataattgaaccctatttaacggagcaatggtttgcagatgctaagaaactttcaataaaagcaaaagaaata

SEQ ID NO: 306987 - DNA, 795 bp, Unknown
  Bacterial polypeptide expressing nucleotide sequence isolated from the Sargasso Sea
aaagttgagctcccatttgtaaagagaataatcccaataattggtgatgaatatgtggataaagagttcggaacaggttgccttaagattactcctggacatgactttaatgactatgaaattggtaaaaaatactgccttcattgcgtagataatgaagttcatatatctgatgatattgaaaattttgaaccacttaatatttttactgatgaagcacatagtaatgataatgtcccttctcctttcaaaaatttagacagattcaaagtaagaaagcttgttcttgaagaaattaaaaaactagatttatttgtaaaagaggagccgcatgaaatcagtgttcctcgcggagagcgctcaaatatagttatagagcccaaactcagttatcaatggtatgtaaaaacaaaggacatggctgataaggcaaataaagctgtagaaaatggagaaattaaatttcatcccgaaaactggattaaaacttattttaactggatgaataatattgaagattggtgtattagcagacaaatctggtggggccatagaattcctgcttggtatgacgatcatggaaatgtttatgtagggtattctgaaaatgaagtgcgaactcattattcgcttgataacagatcgctaaggcaagatgatgatgttttagatacatggttttcctctagcctttggccttttgcatcaatgggatggccaaatgaatcaaaaaatctgaaaactttttttccaacaaaccttttagttactggttttgacattattttcttctgg

SEQ ID NO: 306988 - DNA, 862 bp, Unknown
  Bacterial polypeptide expressing nucleotide sequence isolated from the Sargasso Sea
ggtttatggcctttctcaacccttggctggccaaatacaaatgatccagattttaaaaaatggtatccaaatagtgttcttgttactggtttcgatattattttcttctgggtggcaagaatgacaatgatgggaaatacttttacaaataatattccttttaaggatgtttatattcatggtctagttcgagatgaaaacaataaaaaaatgagtaaaagttcaggtaatggtattgatccaatactattaattgataaatatggttctgatgctctacgatttgctttaattcgagaagttgcaggcgctggacaagatatcaggcttgattttgataggaaaaaagatacgtcttcaactgttgaagcttcaagaaattttgcgaataaattatggaatgcaactaaatttgtgttaattaataaaacttctaataataattattcgcttaatgagagtgatgaaacttctttagagttatgtgataagtggattttatcgaaattgaatcaggtaaatataaaagtcgctgctttgttgaaagagtataaattgggagaatctgcgaaacttctatatgaatttacgtggaatgatttttgtgactggtatgtagaatttgctaaacaacggtttaataataaagagactaaaaatagacgaatatctgaaaaagttttaataaaagtgctcaatgatattttggtaatgattcatccttttatgcctcatattactgaggaactttggcatgtgctgcaactgaaaccagataatgtattattatctcttcaaaaatggccaattcacgaaaataaatttgttgataataagcttgataattcctttcagcaactct

SEQ ID NO: 306989 - DNA, 289 bp, Unknown
  Bacterial polypeptide expressing nucleotide sequence isolated from the Sargasso Sea
atgattagtgataaatatatacattctgatgttgaaaatagaatttattcttattgggaaaaaaatggactttttaaacctaaagaaaattcaaaaaaattctcaattgtaatcccaccaccaaatgtaacaggtagtttgcatatgggtcatgcactcaataattcaattcaagatttattagttagataccacagaatgaataattttgaaactttatggcaaccaggtacagaccatgcaggaatagctacacaggctttagtagaaaaaaaagttatcttctgaa

SEQ ID NO: 306990 - DNA, 622 bp, Unknown
  Bacterial polypeptide expressing nucleotide sequence isolated from the Sargasso Sea
ggttggccaaacaaaaatgaatatttaaaaaagttttatccaacaacagtccttgtaacaggatttgatataattttcttttgggtagctagaatgatgatgtttggtatggaatttttaaataaagaaccatttaaagatatttatgttcatgcgttagttcgtgatgaaaaaggacagaagatgtccaagtcaaaaggtaatgtaatagatccacttgatttaattcaaaaatatagtgcggacgctttaagatttaccttattatctatggcatcacctggtactgatgttaaactttctgaagatagggttaaaggatatagaaattttttaaacaaactatggaatgcaaataattttttaatacaaaacaaatgtaatttaaaaaatgcaaaaaaacttccaaaattaaaaattaatatcaataaatggatatattttgagcttttagaaacatctaatttaataaagaaaaatatagaggattatagatttgatgaagcagctaagaatgcttatcattttgcatggcataaatattgcgattggtacctagaattatcaaaaacaattcttttttcagataatttaaaagctaaaaatgaagttaaagaagttt

SEQ ID NO: 306991 - DNA, 580 bp, Unknown
  Bacterial polypeptide expressing nucleotide sequence isolated from the Sargasso Sea
aatgtcgaattttaagtcatataatcacagaaatatagaagataaaatttataaatattgggaaaaaaataattgttttaaacctagaaaaagtaaaaacaaaaaatatttttctatagttatacctccgccaaatgttacgggaagtttacatatgggtcacgctttaaataattccattcaggatctattaattagacataacagaaacaagggtttggaaacactgtggcaaccaggaactgaccatgctggcatagctacccaattaattgttgagaaacagttaaataaaaaaggtatatctagaaaagatcttggaagagaaaaatttcttaaagaagtatggaaatggaaagaaaaatctggcggtataataacaggtcaattaaagaaacttggatcatcttgtgactggtcaagagatagatttacaatggatgaaggtttgtcgaaagctgttttaaaggtatttgtaaaattatataataaaaaattaatttataaagattttaaattaactaattgggatacgaaattacagacagctatttcagatttagaggtgcgcaaagagaaa

SEQ ID NO: 306992 - DNA, 880 bp, Unknown
  Bacterial polypeptide expressing nucleotide sequence isolated from the Sargasso Sea
aattgggacccaatttcttaagactgcagtttccgatcttgaagttgtaaggcaagaaaaagagggtgtaatttggcatattgattatcctcttgtcgactcatctgaaaaggtaaccgttgccacaacaagaccagaaacaatgtttggggatatggctgttgctgtaaaccctaaagataaacgctatcaaaagctcattgggaaatatgtagagcttccttttgttggcagaaaaattccaattcttggtgatgattatgttgatatggagtttggaaccggttgtttaaaaattacaccaggacatgattttaatgattatgaaattggaaaaaaatatgctctccaccaagtaaaagatactgttgagacttctaaagagactgaaaaatttcaaccaatcaatatattcactgaggaggcttttacaaataacgaagtaccgaaagactttgcaaatctagacagattcaaggtacgaaaagttgtcatagagaagcttaaggaaaagaatcttttagcgaaagaagaaaagcacattataagtgtgccacgtggtgaaagatcaaatatggtgattgaacctaggttgagctttcaatggtacgtaaaaacaaaagagatggctgctaaagcaaatgaggctgttaataaaaaagaagtagtttttcatcctgaaaattggatcaaaacatactttaactggatggataatattcaagattggtgtataagtagacaaatttggtggggacacaggatacctgcatggtacgacgatgaaggtaatgtttatgttggttatgatgagaaagagcttagagaattttacaagctcgatgacaggaagcttactcaggatgaagatgtcttagat

SEQ ID NO: 306993 - DNA, 628 bp, Unknown
  Bacterial polypeptide expressing nucleotide sequence isolated from the Sargasso Sea
atggatagtgataaatatatacattctgaagtagaagatgatatttattcgtattgggaaaaaaacgaattatttaaacctaaaaaaaattcaaaaaaatactcaatcgttatcccaccacccaatgtaacaggaagtttacatatgggacatgctttgaataattctatccaagatctcttggtaagatattatagaatgaataattatgaaactttatggcaaccaggcacagaccatgccggaattgcaacccaagctcttgttgaaaaaaaacttgaaaaagaaaatctaaataaaaatgatttaggtagagaaaagtttatagaaaaagtatgggaatggaaaaatcagtacggtgacattattattaaccagcttaaaaaactcgggtgctcatgtgattggtctagaaatgcttttactatggatgagaatttatcaaaatctgttgtcaaagtttttgtagaattacataaaaaaaaattaatttataaagcagaaaaattggttaattgggacacagttttaaaaacagcaatatctgatttagaggtagatcaaagagaaatgaattcaaagatttactatattagatacccaatagacaattctaatgattttataa

SEQ ID NO: 306994 - DNA, 558 bp, Unknown
  Bacterial polypeptide expressing nucleotide sequence isolated from the Sargasso Sea
tgtagcgggtaacaaaatgtcaaaatctaagggcaacgtgcttgacccattggatatgatcgacggtatcgatcttgaagccctcgttgaaaaacgtaccggcaacatgatgcagcctcagctagccgccaagatcgaaaagagcacccgtaaagaatttgaaaacggcatcgaagcccatggtaccgatgccctgcgctttaccctagcggcaatggcctcaacgggccgtgatatcaactgggacatgaagcgtttagacggttaccgcagcttctgtaacaaactttggaacgcatcacgctatgtgctgatgaataccgaaggccaagattgcggcccgaactcaccggattaccaaggcggtgagatggaactgtcattggcggatcgctggattatcggtttattcaaccaaaccgtaaaaacctacgacgaccacatggcaaactaccgcttcgacctcgcagccaacaccttgtacgagttcacttggaaccagttctgcgattggtacttagagttaactaagccagtactgcaaaacggcaatgaagc

SEQ ID NO: 306995 - DNA, 875 bp, Unknown
  Bacterial polypeptide expressing nucleotide sequence isolated from the Sargasso Sea
tgcttcatgcgattttgatagaacacgattcacgatggatgagatgtgtgccactgcagtgagacatgcgttcttcattctctttcaagatggtttgatctatagaggtaaacgattggttaactgggatccagttactagaacagcgttagctgatgacgaagttgaaatggaagaaattgaaggacatatgtggtacttgaggtacccactcgaagacgggtcaggtcatgttgttgtcgccacaacccgacctgagacgatgttgggagataccgcagttgcaatcaacccgaaggaccctagagctgatgcattagttgggaaaaaagtcatactcccaattgctgatcgagtcatacccataattgctgacgactacgtaattatggaggatgaagaaagcgacgatcccaaagctaagttcgcgtcagggttcttaaaggtcactcctgctcatgatccaaatgactgggatatagggcttcgacatggcctgaatgtaattaatgttcttgggcccgatggcagtatctctgaagaatacggttgggatgatgcctctcctacagctaaacagtttgttggactgtcgagagacgaagccagagtggcaatagttgattggtttgatgaacatgatcttttagccgaagtcagagagtacacccactcggtagggcattcttatcgaagtcatgctccgatagagccatggttgagcgatcaatggtatgttgctgttacagatgacagattgagagggtctgcattaagagctcaacggcctgatcaagtacctgacttaccggacggtgtctccgaacgtagctcatcatcaggcgatggagaacttactttctatccccaataga

SEQ ID NO: 306996 - DNA, 301 bp, Unknown
  Bacterial polypeptide expressing nucleotide sequence isolated from the Sargasso Sea
atggaaaaaaagtttaatccgcaggatgttgagagtcgcttaattaaagcttggcagcaatcaaatacctttaaggttggttcaaacgccaagcctggtaaaggggcgttttccatagttattcctccacccaatgtcactggtaatttgcatatggggcatgcatttaacaacaccattcaggatattttggttcgctggaatagaatgaggggctttgatactttatggcaaccaggtcaggatcatgctggcattgctacgcagatggtggttgagagagaactggagaagactgata

SEQ ID NO: 306997 - DNA, 850 bp, Unknown
  Bacterial polypeptide expressing nucleotide sequence isolated from the Sargasso Sea
ttgattagatatcatagaatgaacaatttcgagactttatggcaaccaggaactgatcatgccggtatagccacccaagctttagtggaaaaaaatcttaaagcaaaaaatatagataaaaataaaattggaagacaaaaattcattaaaaaagtttgggaatggaaagagaactatggaggaaaaattatcaagcaacttaaaaaattaggttgttcctgtgattggtctagaaatgcttttacgatggatgaaaatttatcaaaatctgtaataaaagtatttgtagatttgtataaaaaaaaattaatttacaaatcaaaaaaacttgttaattgggatacggtattaaaaactgcaatttctgatctcgaggttgatcaaagagaagttaactcaaaactttattatataaagtatcaaatagaaaattcttctgattttattacaatagctacaacaagaccggaaaccatgcttggcgacacaggtattgcagtaaatcctaaagacgatagatatactaatctgataggcaagtttgctatattaccaattgttggaagaaaattaaaaatttttcaagatgaatatgcagatcctgaacaaggaacgggagcagttaaaataaccccggctcatgattttaatgattttgatgttggcgaaagacaaaaattaaagaaaataaatattttcactgaagaggggaaaataaataaaaatgctccaaaagaatatattggaatagatagatttgaagcaagaaaaaaaattatagaaaaattatcagagttacaaattcttataaaagaagaaaaaattaaaaataaggttccctacggagata

SEQ ID NO: 306998 - DNA, 676 bp, Unknown
  Bacterial polypeptide expressing nucleotide sequence isolated from the Sargasso Sea
atggaatttaaaaaatataatcatttattagaggaaaaaagaatctcagattattggattaaaagaggttgttttaaaccaaaaaaaggcaaatttaaaaatactttttcaatagtcattcctccaccaaatatcactggaagacttcatatgggtcatgctctgaataatagtttacaagatgtattaattcgatttaatagaatgaaaggtgttgagactctttggcaaccaggaactgatcatgcgggtatagccacacaagctgttgtggaaaaaaatctagaaaaaaaaggtataaaaaaaagagatttaggaagagataaatttattaaaaaagtctggagctggaaagaagagtcaggtggaataattttagatcagctcaaaaaattaggttgctcttgtgactggtcaagaactaggttcacaatggataatgatttatccaaagcagtgatgaaagtttttgtggatctttataaagataaattgatttataaagataagaaattagttaattgggacatgcatcttcagacagctatatcagatttagaagtagttcaaaaagacgtacaatcaaatttatattatattaactatcaaattgaaaattcagaaaagaaaataactattgccaccactagacctgaaacaatgatgggagatacgg

SEQ ID NO: 306999 - DNA, 264 bp, Unknown
  Bacterial polypeptide expressing nucleotide sequence isolated from the Sargasso Sea
aatgagtaacgataaatatatccattctgaagttgaaaataagatttattcatattgggaaaaaaacgaattatttaaaccaaaaaaaaattctaaaaaattttcaatagtaattcctccaccaaatgtgactggaagtcttcatatggggcatgcattaaataattcaattcaagatttattagtgcgttatcatcgaatgaataattttgaaactttatggcaaccaggaactgaccatgctggtattgcaacgcaagcttt

SEQ ID NO: 307000 - DNA, 895 bp, Unknown
  Bacterial polypeptide expressing nucleotide sequence isolated from the Sargasso Sea
ggcagagaaaaatttattgaaaaagtatgggaatggaaaaaaaaatctggtggacaaattagtaatcaactcagaagactgggggcatcagctgattggtctagagaaagatttacaatggatgatggtttatctaatgctgtaaagaaagtttttgttaaattatacaatgatggaataatttataaagataaaagacttgtaaattgggatccaaaacttttaacagcaatatcagaccttgaagttgagcaaagagaatgtgaaggaagtttgtggcatattaaatatcctattaataatgatgaatatattattgttgctacaactaggccagaaactatgttaggagatactgcagttgcagttaatcctgatgatttgaaatataaaaatttaattggtaaactttgtaatcttcctctttcaaatagaaaaataccaattattgctgatcaatacgctgatcctgataaaggatctggtgcagttaaaattactcctgctcatgattttaatgactttgatataggtaagaagcataatttagaatttataaatatttttaatgaatttgctaaactaaacaataacgttcctaaatattttcaaaatttagatcgttttgaagccagaaagttggttttaaaaaaattagaagaaatgtcacttttagtaaaagaagagaaacaacaaatggttattccatatggtgatagatctgggattattattgaaccttggttaactgatcagtggttttgtgatgcaaaaaaattatctattgatccaattaaatcaataaataaaaaacaatctaattttattcctaaacaatgggagaacacttttttcaattggatggaaaatatacaacccatggtgtatctctaga

SEQ ID NO: 307001 - DNA, 344 bp, Unknown
  Bacterial polypeptide expressing nucleotide sequence isolated from the Sargasso Sea
aatgacagagatgaatgatcaattatctttagagaattattcaccttttgaagtagagaaaaagtggcaagaaaaatgggaaagtctaaaggcgtttagtcctaaccctgaggatgatggcgagcctttttgtgttgtcatcccgccaccaaatgtaactggatctttgcatatggggcatgcatttaatacggctttgatagatgttgtagtacgttttcaaagactgttaggtaagaatgttttgtgtttaccgggaactgatcatgcttcaatagctgttcaaactattctcgaaaaacaattaaaaagtgaaggcaaaacaagcgaggatattggaagag

SEQ ID NO: 307002 - DNA, 922 bp, Unknown
  Bacterial polypeptide expressing nucleotide sequence isolated from the Sargasso Sea
gatgaacaactttgaaactttatggcaaccagggacagatcatgctggaattgcaacgcaagctttagtcgaaagaaaacttgaaagtgaaaatattgataaacaatctattggtagagaggcttttattaaaaaagtctgggattggaaaaaggagtatggcgatatcatcatcaatcagcttaaaaaactaggatgttcatgtgattggtccaggaatgcattcacaatggataaaaatttgtctgcatcagttattaaagtttttatagatctctataacaaaggtcttatttataaatctaaaaaattagttaactgggatacagtattaaaaacagctatatctgatcttgaggtagatcaaagagaagtaaattcaaaactttattatatcaattatcaaatcgaaaatagttcagaatttataactattgcaacaacaagaccagaaacaatgctaggagacactgcagttgctgttaatcctaaagatgaaaggtacactaatttagtaggtaaaaatgtagttttaccaataacagggagaaaaataaaaattattcaagatgattacgctgatccagagcaaggttctggtgcagtgaaaattactccagcacatgattttaatgactatgatgtgggtaaaagaaataaattagagataataaatatatttacagaggacggcaaaataaacgaaaatgcacctagtgattatgtagggttagatcggtttgaagctaggaaaaaaatattaaatgaacttggtgataagcttattaaagaagaaaacattaaaaataaagttccttacggtgatagatctaactctgttattgaaccatatcttacagagcaatggtttgcagatgcaaaaaaattgtcagtaaaagcaaagaagattgtaaagaataaa

SEQ ID NO: 307003 - DNA, 841 bp, Unknown
  Bacterial polypeptide expressing nucleotide sequence isolated from the Sargasso Sea
ataaaagtctttgtggatctctacaaaaaaggcttgatttatagaggaaaaagacttgttaattgggaccctcattttgaaacggcaatttcagatttagaagttgaaaatattgaagtggccggacatatgtggcactttaaatatcccttaaaaagtggagaaacttacacgtatatagaaaaagatgaagaagggaatatcactttacaggaagaacgagattacatttcgatagcaacaacccgacccgaaacaatgctgggagatggagctgttgcagttcatccatcggatcaaagatataaacctctcataggaaagttttgtgaaatacccgtggggccaaggcaatatcgtcgccttataccaataatcacagatgagtaccctgatcctaattttggttctggggccgtaaaaatcactggcgcccatgattttaacgattatcaagtagcaaaaagatctaatattccgatgtattctctgatggataaaaaaggggtaatgcgcgttgatggttcaccttataaagatgaagtggtaaaagcccaagccattctaaatgaggaaattacttgggatgagaacctaattgcttctatgaatttagttccagacgagtatcgaggactggatcgatttgaagctcgaaaaaaggttgttgctgaaattactgctgaaggattggcggtaatgacagactctacagataatgatggtaacttttctaccaagccatttgtagaaagtaaggctattatgcaaccttttggtgatagatctaaggttgttattgaaccaatgttgacagatcagtggttcgttgagacttcaa

SEQ ID NO: 307004 - DNA, 889 bp, Unknown
  Bacterial polypeptide expressing nucleotide sequence isolated from the Sargasso Sea
tacggatcatgctggaattgcaactcaaatggttgttgagcggcagctagctgaacggggaaaaaagcgcactgatttttcccgagatgagtttcttgaaaaaatctggaattggaaaaaaaagtctggtggaacaataataaatcagttgcaaagattaggtgcttcttgtgattgggatcgcgaggcttttactatgtctggcgctccaaatgcgccaaaagatgaagacggaaattttcatgatgcggtaataaaagtctttgtggatctctataaaaaaggcttgatatacagggggaaaagacttgttaattgggacccccattttgaaacggcaatttcagatttagaagttgaaaatattgaagtagccggacatatgtggcactttaaataccccttaaaaggcggagaaacgtacacttacatagaaaaagatgaaaatggaaatatcactttacaggaagaacgagattacatttcgatagcaacaacacgtcctgaaacaatgcttggagatggagctgttgcagttcatccatcggaccaaagatataaacctctactaggaaagttttgtgaaatacccttggggccaaaacaatatcgtcgccttataccaataatcacagatgaataccctgatcctaattttggttccggggccgtaaaaatcactggtgcccatgattttaacgattatcaagtagcaaaaagatcaaatattcctatgtattctctaatggataaaaaaggggtaatgcgcgttgatggtttgccttatcaagatgaggtggcaaaagcacaggctattttaaatgaggaaattagttgggatgagaacctaattgcctctatgaatttagttccagacgaatatcgagga

SEQ ID NO: 307005 - DNA, 820 bp, Unknown
  Bacterial polypeptide expressing nucleotide sequence isolated from the Sargasso Sea
taggatgaaaggcctcgaaactttatggcagccaggtactgatcacgccgggatcgcaacccaagcagttgtagaaaataatcttttaaaagaaggaattaaaaagaatgatctaggaagagaaaaatttattcaaaaaatttggaaatggaaagaacagtcaggtgggattattttagatcaacttaagaaattaggctgctcttgcgattggtcaagaactaggttcactatggataaagatctgtcaaaagctgtaatcaaagtttttgttgatctttataacaataagctaatttacaaggataaaaaattggttaattgggacactaaacttcaaactgccatttctgacttagaagttgtccaaaaagatgttcaatcacaattatattatattgattattcaattgagagctctgatcaaaaaatcacaatcgcgactaccaggccagaaactatgatgggagatactgcggtagcagtaaatcccagggataaaagatatattaatttaattggaaaaaatgttctaattccaatagttaatagaactgtaaaaattatttctgatcattatgcagatccagatcaaggttcaggagctgtaaaaattacaccagcccatgattttaatgactacgaagtcggtaagagaaataaattagaaataataaatatttttgaaaaaaatgggaaaataaataaaaatggagttaaagagtttcaaggtttagatagattcgaagcaagaaagcttttaattaaaaaattgaaagaaataggttccctagtaaaaattgaaaatattaaaaataaa

SEQ ID NO: 307006 - DNA, 649 bp, Unknown
  Bacterial polypeptide expressing nucleotide sequence isolated from the Sargasso Sea
aatgggaattgaaaaaatttatgatccattattaattgaaaataaatggttagtaaaatgggaaaaagaagatttttttaaatctgatccaaacgatgataaaccctacacaattctcattcctccacctaatgttactggtatcttgcatatgggtcatatgttgaataattcaattcaagatattttaattagaaaagctagattaagtggatacaatgcatgctgggttcctggaacagatcatgcttctatcgcgactgaggctaaagtagttaataagcttaaagaaatgggcataaaaaaacatgaattaagtagggatgagtttatacagcatgcgtgggattggacgaataaacatggaggaatcattttaaaccagctcaaaaaaataggttgttcatgtgattggtcaaaaacaaagtttaccctagatccggatatgtatgaatctgttcagaatatgtttattaaactttatgatgatggttatttatatagagacaaaaaaattgttaattgggatcctgaggcaaaaactaccctatcaaatgaagaagttgtttataaagaaaaaaaagcaaaacttttttacttaaaatacaaactagaaagttcagaagaatttttattggttgctacaact

SEQ ID NO: 307007 - DNA, 352 bp, Unknown
  Bacterial polypeptide expressing nucleotide sequence isolated from the Sargasso Sea
atggaatttccaaaattttttgactttattcaagaagaagaaaaaatttattcaaagtgggaaaaagaaggttgtttcaaacctgttaaaagcaagtctccttattcaattatgatgccaccacctaatgtaacaggtagtttacatatgggtcatgctttaacttttactattcaagatattttaatcagatatcatagaatgaaaggaatggaagtattatggcaggctggaacagatcatgcaggaatagctactcaaatggtagttgagagacaattatctgaaaaaaatatagataggaaaaatttaggcagagaaaaatttattgataaaatttgggaatggaaaa

SEQ ID NO: 307008 - DNA, 615 bp, Unknown
  Bacterial polypeptide expressing nucleotide sequence isolated from the Sargasso Sea
aaatatttttgaaaaaaacgggaaaataaataaaaatggaattaaagaatttcatggcttagatagatttgaagcaagaaaacttttaatcaaaaaattaaaagaaaaaggatacctgtcaaaaattgaaaatatcaaaaataaagttccatacggagatagatcaaacactataatagaacctcttttaacagagcaatggtttgtagatgcaaaaaaattatcaaaaaaaccaattaagaaagttaaggagggaaaaacttctttttttccgaacaactggtcaaaaacattttttcaatggatgaatgagattgaaccttggtgtatatcacgacaaatttggtggggtcatagaataccagcatggtacgatgatcatggtaatatttttgtagctgaaaatgaaaaagaagctgtagcactagctaagaaaaaaaataataataaacaatttagattaagacaagaaactgatgttttggatacttggttttcatcggctttatggccttttgcaacacttggttggccaaacaaaactaaagagcttgataaattttaccctacttcagttcttgttacaggtttcgatataatttttttctgggtagc

SEQ ID NO: 307009 - DNA, 748 bp, Unknown
  Bacterial polypeptide expressing nucleotide sequence isolated from the Sargasso Sea
gtgttggtaacaggctttgacattattttcttctgggtagccagaatgatcatgatgacgaaaaagtttaccggcaaaattccgttcaaagacatctatatcacaggtctcattcgcgatgaaagcggtgataaaatgtcgaagtcaaaaggtaatgtacttgaccctatcgacctgattgacggcatcgatcttgagtcgcttgttgaaaagcgcaccgccggaatgatgcagcctcagctagcagaaaaaattgtgaagcgcacccgcaaacagtttcctgacggcattcatgcctacggtacagatgcacttcgtttcacgtttgctgcaatggcatccaccagccgtgacatcaactttgatatgtcccgcgttgaaggctaccgcaacttctgtaataaaatttggaacgcgtcgcgcttcgtattaatgaatacagaagagcacgatacgggggctaacggcggcgagatggtactgagtctggccgatcgttggatttgggcaaagttccagcaaacactcgttgaggttgaaaaggcattgtctgactaccgttttgatattgcagcacaaacaatttacgagtttacgtggaatcagttctgcgactggtatttagagttgactaagccggtactaagcaacgacgcgagtagcgaggctgaaaagcgtggaacccgtcatacgctcatcaacgtgctagaaagtcttttgcgtttaatgcacccaataatgccattta

SEQ ID NO: 307010 - DNA, 832 bp, Unknown
  Bacterial polypeptide expressing nucleotide sequence isolated from the Sargasso Sea
aacccctatgtaattgtgattcctccaccgaatgtcactgcggcccttcacatgggccacgggctcaacaacaccgtccaggacgtactcattcgctggcggcgaatgcagggcagagccgcactttgggtcccaggtactgaccacgcgggaattgcgacacagaatgtggtagagcgtttgttagcaagtcagggcttcacgcgagaagatttcggtcgtgagaagtttgtcgctgctgtttgggatttcgtcgatgaaactggcgatcggatcttgggacagctcaaatccattggtgcttcgtgcgattgggaacggacacgtttcactctggatgatgacctggcgaaggcagtcagagaggtgttcgtcacgctttatgaaaaggacttgctctatcgaggggagtacataatcaactggtgccctcgctgcctgactgccttatcaaatgaagaagcggagggtgaggagactgaaggtagtttgtggcatcttcgataccctctaagtgggggtgttggggaaatcgcagaggctgccgtagaggctggagcggatgcaataggtcagttggaagatggtcgttggtacctgactgtttctacaacgcgacccgaaactatgctcggtgacatgggcgtggctgtcagtcctgatgacgagcgttaccgcggattagtgggctccgaggtcctgctaccgctgacaggacggactatcccaatcgtaagtgacgacttcgttgatccagaattcggatctgggatggtaaaagtgactcccgctcatgatccgaatgatttcgatattgctgggcgtgcgggtc

SEQ ID NO: 307011 - DNA, 952 bp, Unknown
  Bacterial polypeptide expressing nucleotide sequence isolated from the Sargasso Sea
aagagtcaagacattttatcctacaagtgttctcataactggttttgatattatattcttttgggttgcaagaatgataatgatggggaaaaagtttgtaggggaagttccttttaaagaaatatatgttcatggtttagttaaagattcgtctggaaataagatgtctaaatctaagggtaatattattgacccgatagatttaatagacggaattgatttaaatagcttaatagacaaaagagcatcggacctaatgcagccagagatggctcaaaaaattattaaaaataccaaaaaagattatccagatggtattggagcctacggcactgatgctttgagatttacatttgcttcactggccagcacgggaagagatataaattttgatcttaaaagagttgagggttataggaacttttgtaacaagttatggaatgctgcaagatatgtaaaaatgcaaggtgatgtaaaaatagagaatttagataataagaattttaaaaatgaagatatttggataagaaataagctggctaacttaattacagaaataaaaaataattataagaactacaggtttgattatgcagctaagagtttatatagctttgtttggcaagattattgtagctggtacatagaaatttcaaaatctaatctaaatataaaaaatattacagaaaatgaaaaaaatttaattattttaaatttaagagatgttttaaaaagtatattattacttttgcatccaataatgccatttataacagaagagatttataaagatatatttaatgaagataaattcattcaagataatagctatccaaattcaagtgactttgaaagtagtagaaacacagataatattagttggatggttgaattatttcagctatcagaaagacaagatcagaaattggggttcagccaaataaagaaatag

SEQ ID NO: 307012 - DNA, 406 bp, Unknown
  Bacterial polypeptide expressing nucleotide sequence isolated from the Sargasso Sea
ttgcgagcatggccgctcggatcctgcccttgtttcgtgcctgatctcccaaagacctacgacccggttggcacggaagcccgctggcagcaggcctgggaggaccagggagcgtttcatcccactccgaaagcaccgggagaagcgttttcggtggtgatcccgccaccgaacgtgaccggcagcctgcacatgggccatgccttcaacacagctctgatcgacacgatcgtccgctaccaacgtctggcgggaaagaacgtgttgtgcctgcccggcaccgaccacgcctcgattgcggtgcagacgatcctcgagaagcagctcaagcaggagggcaagacccgtcacgacctcggccgtgaggcatttctggagcgggcctggcagtggaaggccgaaagcg

SEQ ID NO: 307013 - DNA, 793 bp, Unknown
  Bacterial polypeptide expressing nucleotide sequence isolated from the Sargasso Sea
ggccgccggatcgtgaactggtgcccgcaatgcgagtccgtgatctcggatctcgaggtggacgagatcgagacagacagccacctttggcatatccgctaccctggtgtcgatggtggacctgatgtggtcgtggcgacgacccgaccggaaacgatgctaggcgacacaggtgtggccgtgcacccggatgacgaccggttcaaggatgcgatcggaaagaaggtgatgcttcctctcgtggaacgagagatcccaatcgtggcagacgaagccgcggatcccgagatggggagtggagcggtcaaggtgacgccgtcacacgacccgagcgactatgaaatcgggcagcgccatgacctgccggagatccaggtgatcggtctggacgggacgatgacggaggaagcgggtgactacgccgggcaggaccggtatgcgtgcaggaaagcggtgatcgccgctctggaagctggtggatacatggtcaagatcgacgatcactcacacgcggtcccgcaccacgatcggtgtggcactgtggtcgagccacttgcgatggagcagtggtttgtgagcatgcggaatctcgcagaccaggccttgccgttcctgcgcgacaatgcgatttgctacgtcccagaccgtttcagaggctacaccgtcgactggcttgagaacattcgagactggtgcatttctagacagatctggtggggccatcggattccggcttggacacacaagcagacgggcgaggtgatcgtttctaaggatccgcctgctaatgcgg

SEQ ID NO: 307014 - DNA, 235 bp, Unknown
  Bacterial polypeptide expressing nucleotide sequence isolated from the Sargasso Sea
atggatagtaatttcgatccgcacgaaattgaaaaagctctttactcagaatgggaggagctaggatatttttcacccaaccctgccgatgaatcctattgcattgtaattcctcccccaaacgttacgggcagtctccacatgggacatgctttccaacacaccctgatggatgcactgatccggtatcatcgtatgaaaggccatgaaactctctggcagatgggaaaagatc

SEQ ID NO: 307015 - DNA, 501 bp, Unknown
  Bacterial polypeptide expressing nucleotide sequence isolated from the Sargasso Sea
catgacagagatgaatgatcaattatctttagagaattattcaccttttgaagtagagaaaaagtggcaagaaaaatgggaaagtctaaaggcgtttagtcctaaccctgaggatgatggggagcccttttgtgttgttattccaccaccaaatgtaactggatctttgcatatggggcatgcatttaatacggctttgatagatgttgtagtacgttttcaaagacttttaggtaagaatgttttgtgtttaccgggaactgatcatgcttcaatagctgttcaaactattctcgaaaaacaattaaaaagtgaaggcaaaacaagcgaggatattggaagagatgaatttcttaaaagagcatggaactggaaagaacaaagtggtggcagaatagtttctcaattaaaaaggataggatattcagttgactggactagagaaagatttactcttgatcaaaaattaaatgatgcagttattgaggcttttaatattct

SEQ ID NO: 307016 - DNA, 370 bp, Unknown
  Bacterial polypeptide expressing nucleotide sequence isolated from the Sargasso Sea
atgagttcagaaaaatatatacataaaaaagtagaaaatagaatttattcttattgggagaaaaaaaaattatttaaaccaaaaaaaaataaaagaaaatattcaattgtaataccgccccctaatgtgactggaagtttacatatgggacatgcattaaataatacgatccaagatttattaatcaggtatcatagaatgaataattttgaaactttgtggcaacctggaactgaccatgcaggtattgcaacacaagcattagtagagaaaaaattagaaagtcaaaatattaataaaaaaactattggtagagataaatttattaaaaaagtttgggagtggaaaaaagaatatgggggaataatta

SEQ ID NO: 307017 - DNA, 858 bp, Unknown
  Bacterial polypeptide expressing nucleotide sequence isolated from the Sargasso Sea
attgaagaaatctggtgcaatcaatggagaaaaaaacggaatctatagttttgaccgcaataaaactagagaagaaattttttctatagatacgccgccccccacagtttcaggttctttacacgtgggacatgttttttcttacacacatactgatgcaatagcgcgctatcaacgaatggctgggaaagaagtcttttaccccatgggttgggatgataatggccttccaactgaaagaagagtccaaaatttttttggagtgagatgcgacccttcactcccttatgatccagactttgaaacaccagccgacgctggcaacccaaaaaaaattaaagaacgcggcgaattcgacataagtagacgcaattttattgacctctgccatattcttactgcagaagatgaaaaggcatttgaggctctatggcgacgtcttggattatcagttgattggagtcttacctacgcaactattgatgaaaaatgtcagcgtgtggctcaacgcgctttccttcgaaatctgaatagaggcgaggcatatcaaacagaggctccgtcactctgggatgtaactttccgaactgctgtagctcaagctgagcttgaagacagggaaaggccaggggcttaccatacgcttaccttccacacagaaagtgatgaagacttacatattgcaacaactagaccggagttattacctgcttgtgtagctttggtcgcccatccagatgactcaagatataaaaatctttttgggacaactgtaactacacccgtttttggtgtcgaagtccccgtttgtaaacatcaacttgcggatcctgaaaaaggaactggaatcgctatgat

SEQ ID NO: 307018 - DNA, 407 bp, Unknown
  Bacterial polypeptide expressing nucleotide sequence isolated from the Sargasso Sea
gtcactctggtgaccggatttgatatcatattcttttgggtggctagaatgatgatgatgggtttatatttcacagataaagttccttttaatgaagtgtatgtccatgctttagttagagatgagaagggacaaaaaatgtcaaagtcgaaaggaaatgttattgatccattagttatgatggatgaatttggagctgacgctttgagaatgactttatgttcaatggcagctcaaggaagagatattaaattgtcaaaacaaagagttgaaggatacagaaattttattactaaaatatggaatgcagttaaattatgcgaaatcaacggctgtaatttcaatgattataatatcagcaatactcaaaatatttttaacttatggatattgtcagaattagaata

SEQ ID NO: 307019 - DNA, 601 bp, Unknown
  Bacterial polypeptide expressing nucleotide sequence isolated from the Sargasso Sea
atgagttcagaaaaatatatacattctaaagtagaaaataagatttactcttattgggaaaaaaaaggtcttttcaaacccaaaaaaaataaaaaaaagtattctattgtaattccacctccaaacgtaaccggcagtcttcatatgggtcacgctttaaacaacactatccaagatttactcataagatttcatagaatgaataattttgaaaccttatggcaacccggaacggaccacgctggtatagcaacacaagctttagtcgaaaagaagttacaaaaagaaaatattgataaacaatctattggtagagatgcctttattaaagaagtttggaattggaaggatgaatacggcgacattataataaaccaattaaaaaaattaggatgttcatgtgactggtcaaggaatgctttcacaatggataaaaacttatctacttctgttattaaagtttttatagatctttataataaaggtcttatatataaatctaaaaaattagttaactgggatactgttttaaaaacagctatatccgatttagaggttgatcaaagagaggtaaattcaaagctttattatatcaattatc

SEQ ID NO: 307020 - DNA, 274 bp, Unknown
  Bacterial polypeptide expressing nucleotide sequence isolated from the Sargasso Sea
tatgagttctgataaatatgagcacttaaatgttgaagctaaaatttacgattattggcaaaagaataatttattcaaacctaagaaaaattcaaaaaaattttcaatagtaataccacccccaaatgtaactggcagtcttcatatgggtcatgcattaaataattccattcaagatgttttagtaagatttcacagaatgaataattatgaaactttatggcaacccggcactgatcatgctggaatagccactcaagctctagtagaaaaa

SEQ ID NO: 307021 - DNA, 906 bp, Unknown
  Bacterial polypeptide expressing nucleotide sequence isolated from the Sargasso Sea
tcaagaaaaagatgtcttagatacttgggctagttcttggctttggcctcttggcgtccatgattggccagatagaagtaaagatttagacaagttttttccaactaatacattagtaacaggtcctgatattatctttttttgggtagcaagaatgattatgactgggtatgagtttttaggcaaaaaaccgttctcagatgtttacttcacatcgattttgagagatgatacaggtaaaaaattaagtaagtcacttggaaattctccagacccgctagatctttttgaggagtatggcacagatgcggttcgatttggtattatgttgatggcgccacaaggattggatgttcttttttcaaaagatagacttgaaattggtagaaactttatgaataagttgtggaatgcatgccgattcattgaaatgaatactccagaaagttggaatgatgaccttgatgtagaacaaggtggcctagaattagcagataagtggattcttaatcaattatttaattcaattgaaaaatataataaacagcttgatcggcttcactttaatgaggctgcaaaggtcctttatgactttgtatggaatgatttttgcgattggtacattgaaatcgctaagacaagattttattctgaaaatgttgaaagtaaaatgatcacctacagcacatgtttgaagtgtattagaataattttgccattaatgcacccttttactccttttattactgaggagctgtggtccttttttaaggataaaaaccaacctgatttaattgtttcaatgtggccaaatggggattatgattttgatgatgatgtagatggtgcaatgacagtactacaagatttaattacatcgattagagcaataagaagtagaatgat

SEQ ID NO: 307022 - DNA, 742 bp, Unknown
  Bacterial polypeptide expressing nucleotide sequence isolated from the Sargasso Sea
tccttatgttgatgttgaatttggaacaggatgccttaaggtgacccctgcgcatgatataaatgattacaacctaggaaaaaaacatagccttgatactatagatatttttgacaccaatgctaatcttaacaaacatggtcttcattatgaaggtaaaaatagatttgttgtcagaaaagagatggaagatgagcttattaaaaataaattattaataaaaaaggaaaattatgtccataatgttggtagatcagaaagaacaaattctgtgattgagcccaaagtttcaaaacaatggtttttaaagatggatgaaataactaagccagctattataaatgtattagaaaacgaaaacataaagttctttcctaataaattcaaatcaacatataagtactggcttgaaaatataaaagactggaacatatcaagacagctatcttggggtcatcaaatccctgttttttattatggtaacgatgatgagtatatagttgctacttcaaaagaagaagctcttaaaaaagcaaacgaggacttaaaattaaatttaaaagattcagatctgagtcaggatcaagatgtactcgatacttggttctcttcttggttatggccaatctctgtatttgatggagttagaaatcctgataatgatgaaatcaaatattattatcctacacaagatttagttacaggtcctgatataatattttttttgggtttgcagaaatga

SEQ ID NO: 307023 - DNA, 496 bp, Unknown
  Bacterial polypeptide expressing nucleotide sequence isolated from the Sargasso Sea
atgagtttagacaaatatatacattcggacgttgaggataaaatatatacatattgggaaaaaaataatttatttaaacccaaaaaaaataagaagaaattctcaatagttatacctccaccaaatgttactggaagtttgcatatgggtcatgccttaaataattcaatacaagatttgcttacacgatattataggatgaataattatgaaaccctatggcaaccaggaactgatcatgccggtattgccacccaagcattagtagagaaaaagttaaattctgagaatattaaaaaaaatgatttaggaagagaaaagtttattgaaaaagtatgggaatggaaaaaccaatatggcgacataattatcaatcagcttaaaaaattaggttgttcatgtgattggtcgagaaatgcttttacaatggatgaaaatttgtcaaaagctgttattaaagtttttgtagatcttcataaaaaaaaattaatttata

SEQ ID NO: 307024 - DNA, 298 bp, Unknown
  Bacterial polypeptide expressing nucleotide sequence isolated from the Sargasso Sea
aatgacactttcgaagttttttaattttttagaagaagaaaaaaatatttatcataattgggaaaaaacagatagctttaaatctaaaaaaaacaaagaatcttattctattatgatgcctccaccaaatgttacaggaagccttcatatgggtcatgctctaactttcaccattcaagatatattaattcgttatcacagaatgcaaggtaaggaggtattatggcaagctggaactgatcacgcaggtattgcaacacaaatggttgtggagagacattatcagaaacaggattag

SEQ ID NO: 307025 - DNA, 421 bp, Unknown
  Bacterial polypeptide expressing nucleotide sequence isolated from the Sargasso Sea
catgagtttagataaatatatacattctgaagtagaagatgaaatatattcatattggataaaaaataaattatttaaacctaagaaaaataagaaaaaattttcaatagttataccccctcccaatgtgactggaagtttacacatgggtcatgctcttaataattcaattcaagatcttttaattagatattttagaatgaataattatgaaactttatggcaaccagggactgatcatgcaggaatagccactcaagctttagtagaaaaaaaattaagttcagaaaatataaaaaaaagtgatttaggaagagataagtttattgaaaaagtatgggattggaaaagtgaatatggagatataatcattaatcaactcaaaaaattaggatgttcatgtgactggtcaagaaatgct

SEQ ID NO: 307026 - DNA, 488 bp, Unknown
  Bacterial polypeptide expressing nucleotide sequence isolated from the Sargasso Sea
tatgagttctaataaatacaaccattccgaagttgaaaatcgtatatatttatactgggagaaaaataaattatttaaaccaaaaaagaataaaaaaaaattctctattgttatacctccacctaatgtaacaggcagccttcatatgggtcatgctcttaataattcaatacaagatttattaactcgttaccacaggatgaacaactatgaaactttatggcaaccaggaactgatcatgctggaattgcaacccaggcattagtagaaaaaaaattagaaaatgaaggtattaaaaaaaatgatcttggaagggaaaaatttattaaaaaggtttgggaatggaaaggacaatatggtgatattattattaatcagcttaaaaaacttggttgttcttgtgactggtcaagaaatgcatttacgatggatgagaatctttcgcaaagtgttttaaaagtatttgaagtattatataaaaaaaaac

SEQ ID NO: 307027 - DNA, 358 bp, Unknown
  Bacterial polypeptide expressing nucleotide sequence isolated from the Sargasso Sea
atgagtagcgataaatatatacattctgatgtagaaaatagaatttattcttattgggaaaaaaagggtctttttaaacctaaggaaaattcaaaaaaattctcaattgtaattccaccaccaaatgtgactggtagtttacatatgggtcatgcacttaacaattctattcaagatttattagtccgatatcataggatgaataattttgaaactttatggcaaccaggtacagaccatgcaggtattgctactcaagctttagttgagaaaaaattaacttcggaaaaaatagataaaaatgaaattggcagagaaaaatttattgaaaaagtatgggaatggaaagagcaatagg

SEQ ID NO: 307028 - DNA, 907 bp, Unknown
  Bacterial polypeptide expressing nucleotide sequence isolated from the Sargasso Sea
atcactttacaggaaaaacgagattacattttcgatagcaacaacacgtcccgaaacaatgctgggagatggagctgttgcagttcatccatcggatcaaagatataaacctcttgtaggaaagttttgtgaaatacccttggggccaaggcaatatcgtcgccttataccaataatcacagatgagtaccctgatcctaattttggttctggggccgtaaaaatcactggtgcccatgattttaacgattatcaagtagcaaaaagatctaatattccgatgtattctctgatggataaaaaaggggtaatgcgggttgatggttcaccttataaagatgaagtggcaaaagcccaagccattttaaatgaggaaattacttgggatgaggatctaattgcttctatgaatttagttccagaagagtatcgaggactggaccgatttgaagctcgaaaaaaagttgttgctgaaattactgccgaaggattagcggtaatgacagactctacagataatgatgataatttttctacaaagccatttgtagaaagtaaggctattatgcaaccttttggtgatagatctaaggttgttattgaaccaatgttgacagatcagtggttcgttgagacttcaaaaattgttaagccggctttggatgcagtcaaaaatggtgagattaaaattataccaacgagtggtgaaaaaacttattatcactggttaaataacattgagccttggtgtatttctcgtcagctatggtggggtcatcaggttccagtgtggtttgataaagatggaaaacaatattgtgctgtgacagagagtgaagctcaagaacaggcgggttcagatgttcagcttacgagagatcctgatgtcttagatacatggttttca

SEQ ID NO: 307029 - DNA, 544 bp, Unknown
  Bacterial polypeptide expressing nucleotide sequence isolated from the Sargasso Sea
aatggaatttaaaaaatataatcataaaaaagtagaaacaaagatatattcatattgggaaaaaaataacttattcaaaccaaagaaaaacaaacatactttttcaattgtaatccctcctccaaacgtaactggtagcttacacatggggcatgcattaaacaattcattacaagatgttttgattagatttcatagaatgaatagctatgagacgttgtggcaaccgggcactgatcatgccgggatagcaacccaagccttagttgaaaaaaatttaaaaagtcaggggattgataaaaataaaattggaagagaaaaatttgtaaaaaaagtttgggaatggaaagacgaatatggtgggaaaataatcaatcaacttaaaaaactaggctgttcatgcgactggtcaagaaacgcatttacaatggataaaaacttatcaaatgcagtaatcaaagtatttattgatctttataaaaaaaaattaatttacaaagctaaaaaattagttaattgggatacggtattaaaaacagcaatt

SEQ ID NO: 307030 - DNA, 151 bp, Unknown
  Bacterial polypeptide expressing nucleotide sequence isolated from the Sargasso Sea
aataattagagatccagatgttttggatacatggttttcatctggtttatggccttttgcaacattaggttggcctgataaaaaagattttgttaagaaattttatcctacttcagttttagttacaggttttgatattatctttttttgg

SEQ ID NO: 307031 - DNA, 340 bp, Unknown
  Bacterial polypeptide expressing nucleotide sequence isolated from the Sargasso Sea
atggacaaaaggtataaccctaccgaagtagaagaaaaatgggttgatatatggtcaaagaaagtctttataaataaagatgcaactgaaactttttcacaagtaatacctcccccaaatgtaacaggtacattacatatggggcatagctttcaatatgcaattatggatttctatactagatataaccatatgacaggtaaaaaagtacactggcaggtcggatctgatcatgctggaattgcaactcaacttgttgtagaaaataatttagcacaagaaaatattgataaaaaagaaataggtagagaaaaatttttaaatgaagtttgggattgga

SEQ ID NO: 307032 - DNA, 260 bp, Unknown
  Bacterial polypeptide expressing nucleotide sequence isolated from the Sargasso Sea
aatgagtagcgataaatatatacattctgatgtagaaaatagaatttattcttattgggaaaaaaatggtctttttaaacctaaagaaaattcaaaaaaattctcaattgtaatacctcctccaaatgtgaccggcagtttacatatggggcatgcgcttaacaattctattcaagatttattagttcgttaccatagaatgaataattttgaaactttatggcaaccaggtacagaccatgctggaattgccactcaag

SEQ ID NO: 307033 - DNA, 793 bp, Unknown
  Bacterial polypeptide expressing nucleotide sequence isolated from the Sargasso Sea
ttcactatgagtgaagaccttagtttagcggttaaggaggtctttatttctttatttgatgaaggtttaatttatagaggagaaaggttagttaattgggatgtagtcttgcaaacagctttatctgacctcgaagtaacttctgaagaagaaacaggatctctatggtattttgactaccctgttgagaatggtagctctataacagtagcaacaacaaggcctgaaacgatgttgggtgactcagctgtagcggttaaccctgaagatgaaagatttaaagaattaataggacaattcgtaataatgcctatcacagaaaggaaaattcctatcattgaagattcttatgtggattcagattttggaacgggttgtgtaaaaataactccagcacatgacttcaatgactttgaaataggaaaaagacatggcttggaagttattaatattttaaatctagacggcaccctgaatgaatttgttccaaagaagtatagaggcttaacaactactgaagccagaaaagaagtattaattgaaatggagtcattaggccatctaaataaagtagagccacacaaaatacaaatacctaaaagtcaaaggagtgattctgtactagaaccacttataactaatcaatggttcgtagatgttaaaaaaatgtctaaagaagcaattagggtagttcgggaaaatgaaacgggatttattccgaaaaattgggaaaatacttattttgactggatgaacaaaattcaagactggtgtataagtagacaactgtggt

SEQ ID NO: 307034 - DNA, 412 bp, Unknown
  Bacterial polypeptide expressing nucleotide sequence isolated from the Sargasso Sea
aatggaaaagaaatattcacatcaagatatagaaaagagaatttactcacaatgggaagagtcgaattgtttttctgcgtcgactgatataaataatcaaaaggaaacctactgtattgtgatacctccgccaaatgttactggtaacctacatatgggtcacgccctgaataatacacttcaagatatacttatcagatacaaccgtatgcaaggaaaagacgtgttatggcaagcgggcactgatcatgcgggtatcgctacacaaatggttgtcgaacgaaagcttgatactgaaaagaatttaagaaaagaagaccttgggcgagaagaatttgtaaatgagatttggaagtggaaagaggaatcaggtggtcaaatcatcaatcaattaaagcggctgggctcatcc

SEQ ID NO: 307035 - DNA, 796 bp, Unknown
  Bacterial polypeptide expressing nucleotide sequence isolated from the Sargasso Sea
caattaaaaaaacttggttgttcttgtgactggtcaagaaatgctttcacaatggatgagaatttatcaaaatcagtgattaaggtatttgtagatctttataaaaagggtttaatttataaagataagaaattagttaattgggatacagttttaaaaacagcaatttctgatcttgaggtagatcagagagaagtaaattccaaaatttattatataaaatatccaatcgacggaacagatgaatttataacaattgcaacaacaagacctgaaacaatgcttggtgacactgcgatagcagtaaatccaaaagatgaaagatttaaatcctctgttggaaaaacagttaccattccaattgttggaagaaaaataaaaataattgaagacgattacgctgatcctgaacaaggaacaggagcattaaaaataactccagcacatgacttcaatgattatgatgttggtcaaagaaataatcttgaaataataaatatttttactgaagcgggcaaaataaatgacaatgctccaaaagagtatgttggtcttgataggtttgaagctagaaaaagaattttaaaagaactcaaagataaagaattttttgtaaaagaggaaaatattaaaaacaaagttccttatggagatagatcaaattcaataattgaaccctttttaacagaacaatggtttgctgacgctggtaaattatcagtcaaagctaaagaagttgttaattcaaagaaaacaaatttttttcctgaaaattggtcaaaaacttattttcaat

SEQ ID NO: 307036 - DNA, 853 bp, Unknown
  Bacterial polypeptide expressing nucleotide sequence isolated from the Sargasso Sea
cttcataaaaacaagttaatttacaaggataaaaaattagtcaactgggacactaaacttcaaactgctatttctgacttggaagtaaaccaaaaagatgttcaatctcaattatattacattgattatacgatagagaacttagataaaaaaatcactatcgctactaccagaccagaaacaatgatgggagataccgcggttgctgtaaatccaaaggatgaaagatatgttaatttagttggaaaaaatgttcttattccaattgttaataggactgtcaaaattatttctgacaattacgctgatccagaacagggttcaggagcagtaaaaattacaccagcacatgactttaatgactatgaggtaggcaagagaaataaattagaaataataaatatttttgaagagaacggtaaaataaacaaaaatgggattaaagagtttcatggtttagacagatttgaagcaagaaaacttataattaagaaattaaaggacaatggttctcttgtaaaaatcgaaaatattaaaaataaagttccatatggagatagatcaaacacaataatcgaacctctcttaacagagcaatggtttgttgatgccaaaaaattatcaaaaaaaccaattaagatagttaaagagggcaaaactactttttttccaagtaactggtcaaaaacattttttcaatggatgaatgatattgagccttggtgtatatctcggcagatttggtggggtcatagaatacctgcttggtatgatgaaaatggaaatatttttgtagctgagagtgaaaaagatgcattaaaactagcaaagaaaaaaaataaaaaaaaacaat

SEQ ID NO: 307037 - DNA, 862 bp, Unknown
  Bacterial polypeptide expressing nucleotide sequence isolated from the Sargasso Sea
gatgccagttccttccaaatatgaacatattgaaattgaaaagaaatggtattcatattggataaaaaacaatctttttaaatctattccaaatgataaagaaccatttacaattgttataccccctccaaacgttactggacttctacatatgggtcacatgcttaacaatactatccaagatatattagttaggagagctagaatgttaggtaaaaatgcatgttgggttcctggtactgatcatgcatcgattgcaactgaagcaaaagttgttgagaatctaaaggagaaaggaatagataagttagatatttctagggatgaatttttaaaatatgcatgggattggacggaaaaatatggtggcggaatacttgaacaattaaaaatgttgggatgttcatgtgattgggacagaactaagtttacattggatgatgagatgtatgaatctgttttaactgcttttaaaatacttcatgataaaggattaatttataggggatacagaatgattaactgggatccagaggctaaaactactgtttctgatgaggaagtaaattatgttgaagaaaaatcaaatttatattatctaaaatataaaattgttgactcagatcaagatatgattattgcaacgacaagacctgaaactatatttggtgatactgcagtatgtgttaatcctaaagataaaagatataaatccttgatcggtaaacaagctattgttccaatttgtgacagaaaagtaccagtaattgctgatccttatgttgatgttgagtttggaacaggatgtcttaaggtaacccctgcacatgatataaatgattataatctaggaaaaaaacat

SEQ ID NO: 307038 - DNA, 388 bp, Unknown
  Bacterial polypeptide expressing nucleotide sequence isolated from the Sargasso Sea
gaatcagaaatgtatataagagataaatataatatttcagattcaattaatctaactcaggataatgatgttttagatacatggttttcatcatcactgtggccattttcaacattaggatggcctgatcatacaaaagaactagaggatttctatcctacaagcgttcttgttacaggatttgacattattttcttctgggctgcaagaatgataatgatgggaatgaaatttatggataaagtgccttttaaaacaatatatatacatggcttagtaagagatagtgacggtaaaaagatgtctaaatctataggcaatgtaattgatccaatagatgtaatagatggtatcaggcaaagtgatttaattgagaaaagaataagta

SEQ ID NO: 307039 - DNA, 910 bp, Unknown
  Bacterial polypeptide expressing nucleotide sequence isolated from the Sargasso Sea
aggaattctagacccccgcaatgaactgggtagagatgaaattttgaagaggattgcaaattatgtcaaaaattctcaaggaactatacgcagccaggtaaaagcaatgggctcaagctgtgattggagccgtgaacgttacacaatggatcatcaacttaaccgatgcgtcaatgaaacatttttgaggatgtacaatgatgatttaatttatcgagggcaacgtattgtaaattgggatcctcatctaaaaacaaatgtttcagatgatgaagttgaaagaagaagcactaactctcctttttatacatttcaatatggtcccttccagataggcacagtacgacctgaaacaaaatttggagataagtatgttgtcatgcatccagatgacaatcgttacagcaagcataagcacggtgatacttttgaatgtgaatggataaatgggatggtcactgcaactattttaaaagatgacgtggttgatcctgaatttggtacaggagtgatgacaatcacgccttggcatgatcatgtggatttcggtatcgcggaaagacacgatttagaaaaggagccggttattgattttgaaggcaacctgcttccaatagcaaaggaatttgccggaatggggattgaagaagcacgcccaaaaattgtagctaaacttcagaaaaaaggattgctagtaaacactgattcagaatatatccacagtaaagcctttaacacccggggaggaggtcccattgagcctcaaattagggagcaatggtttatagacgttaacaagcctgcagttcagtggaaaggagaagcacatagcctgaaaaaagtcctgattgatgtggtgcgttcaggagaaataagacttgttccagaacgttttaattcaacatatttt

SEQ ID NO: 307040 - DNA, 856 bp, Unknown
  Bacterial polypeptide expressing nucleotide sequence isolated from the Sargasso Sea
tggtctttggccatttgcaacattagggtggcctgaaaataatgattatgtaaaaaaattttatcctacttctgttttagttactggttttgatattatatttttctgggttgctagaatgataatgtttggaatagaatttttaaacaaagaaccatttaaagatatttacgttcatgctttagtaagagatgagaagggacaaaaaatgtcaaaatctaaaggcaatgttattgatcctttagatttaattgaaaaatatagtgctgatgcattaagatttactcttttatcaatggcatcccctggtacagatgtaaaactctctgaagatagagtcaagggatatagaaattttttaaataaactttggaatgcaaataattttttaatcacaaatgaatgtgatttttctgaaattgataaagttccaaaattatctcttaatattaataagtggatatatgctaaattaattgaggtaaaatcacaaattgaaaaaaacttagaagactatagatttgatgaagccgcaaaaaatgcttaccaatttgtttggcattcttattgtgactggtatgtagaattatcaaagacaatactattttctgatgatgaagaggcaaaatctgaagttaaaaaagtttcaagttatgtttttaaacaaattttgattttattacatccttttataccttttgttactgaagaaatttggcttaaaaacaaatttgataagtcaggtaaagattttttgatgctcactaattggccagcaggtgaaattaacaaagatgctaccactcaacaggttgaaaatataataagcataatatctgaaattagatctttttaa

SEQ ID NO: 307041 - DNA, 796 bp, Unknown
  Bacterial polypeptide expressing nucleotide sequence isolated from the Sargasso Sea
tttattgagctttatagacaaaagaaaatatatagaggttatagactggttaactgggacccttccctaaaaactgctgtttcagatcttgaagttgttcgacaagaaaaaaaaggtcttatatggcatttgaattatcctattgatggatctgataaatttatatcagtggcaactactaggccagaaacattatttggtgatatggcgatcgcagttaaccccaaagatacaagatataaatctctaataggtaagcatgccattcttccttttgtgaatagaaagttaccaattatcggagatgaatatgttgatatggaatttggtacaggatgtgtaaaaattacaccaggtcatgattttaatgattatgaaattgggaaaaagtattcattacatgaaataaatggaactgtttttacatcaaaaaacattgatgattttaaacctataaatattttcaatgatgatgcctggacaagcgaggatgttccagaaccatttaataatcttgatagatttaaagtacgaaaattagtaatcaaagaattaaatgagctaaagcttctggtgaaagaagaagagtatgatattagcgttccaagaggagaaaggtcgaatgttgtaatagagccaaagctaagtaatcaatggtatgtaaaaacatctgagatggctaaaaaagctaatgctgaggttaaaaaaggaaacattaaatttcatccacaaaattggattaaaacttactttaactggatggataatattgaagactggtgtataagtagacaaa

SEQ ID NO: 307042 - DNA, 853 bp, Unknown
  Bacterial polypeptide expressing nucleotide sequence isolated from the Sargasso Sea
cataggttttcaagtggtttatggcctttctcaacccttggttggccaaatacaaatgatccggattttaaaaaatggtatccaaataatgttcttgttaccggtttcgatattattttcttctgggtggccagaatgacaatgatggggaatacttttacaaataatattccttttaaggatgtttatattcatggtctagttcgagatgaaaacaataaaaaaatgagtaaaagttcaggtaatggaattgatccaatactattaattgataaatatggttctgatgctctaagatttgctttaattcgtgaagttgcaggcgctggacaagatatacggcttgattttgatagaaaaaaagatacatcttcaactgttgaagcttcaagaaattttgcgaataaactatggaatgcaactaaatttgtgttaattaataaaacttctaacaatacttattcgcttaatgagagtgatgaaacttctttagagttatgtgataagtggattttatcgaaattgaatcaggtaaatataagagtcgctgctttgttgaaagaatataaattgggagaatctgcgaaactactatacgaatttgcatggaacgatttttgtgattggtatgtagaatttgccaaacaaaggtttaataataaagagactaaaaatagacaaatatctgagaaggttttaataaaagtgcttaatgatattttggtgatgattcatccttttatgccgcatattactgaagaactttggcatgtaatgcaacttagaccagataaagaattattatctcttcaaaaatggccaatccaagaaaataaatttgttgataataagc

SEQ ID NO: 307043 - DNA, 821 bp, Unknown
  Bacterial polypeptide expressing nucleotide sequence isolated from the Sargasso Sea
cttgtttgagaaaaaacttgcttcagaaaaaattgataaaaatgaaattggcagagaaaaatttattgaaaaggtttgggaatggaaagaacaatatggtgatataattattaatcagttaaaaaaattaggatgttcttgtgactggtcaagaaatgccttcacaatggatgaaaatttatctaaatcagtaataaaagtctttgtagatctttataataaaaaattgatctataaggataaaaaactagtaaactgggatacagttttaaaaacagcaatttctgatcttgaagttgatcaaagagaagttaattcgaaaatttattatattagatatccaattgatggaactgatgaatttataactattgcaaccacaagacctgaaacgatgttaggggacactgcaatagctgttaacccaaatgatgatcgatttaaatctttagttggtaaaacgaccacaattccaattgttggtagaaaaattaaaattatagaagatgattatgcagatcctgaacaaggaacaggagcattaaaaattactcctgcgcatgattttaatgactacaatgtaggtcaaagaaataatttagaaataattaatatatttacggaagctggtaaaattaacgacaatgcacctaaagaatatattggacttgatagatttgaagctagaaaaaagattttaaaagatcttaaagataaagaattttttgtaaaagaagacaatattaaaaacaaagttccttatggtgatcgatctaattcaatcattgaaccttttctaacagagcaatggtttgcggatg

SEQ ID NO: 307044 - DNA, 891 bp, Unknown
  Bacterial polypeptide expressing nucleotide sequence isolated from the Sargasso Sea
tgattggtctagggctagatttacaatggatgcagatcttactaatgcagtaatcaaagtattcgtaaaactttataatgataaacttatatacaaagataagaaattagttaattgggatactcaattaaaaacagctatttctgatttagaggttactcaaaaagatgtaaattcaaaattatattacatagagtataaattagagaattcagataaaaaaattactatagccacgactcgtcctgagacaatgatgggcgatactgcaatagcagtaaatcccaaagatgataggtatgttgaccttataaataagatagtagaaatcccaatagttggccgaaccatcaaaataatatcagacaattatgctgatccagatcaaggctcgggagcagtaaaaataactcctgctcatgatttcaatgattatcaagtaggcaaaagaaataaattagaaattatcaatatttttgaaaaagatgggacaataaatgaaaacggaataaaagaatttaagggtttagataggtttgaagcaaggaaattattggtacaaaaactaaaagaaaaaggaaatttaataaaaattgaaactataaaaaacaaagtaccatacggcgacagatcaaattcaattattgagccgcttttaacagagcaatggtttgtgaatgcaaaaaaattatcaaagaaacctattaaagttgttaatgaaggcaaaacatctttctttccaaaaaattggactaaaacattttatcaatggatgaaagatattgagccttggtgtatatctagacaaatttggtggggccacagaatacctgcgtggtatgacgagaagaataatatttttgttgctgaaaatgaaagagatgcaaaaat

SEQ ID NO: 307045 - DNA, 898 bp, Unknown
  Bacterial polypeptide expressing nucleotide sequence isolated from the Sargasso Sea
aaaaaaattaggttgttcatgtgattggtctagaaatgcgtttactatggatgataatttgtcaaaatctgtaattaaagtatttgtagatctttataacagagggctcatttataagtctaagaaattagtaaattgggacactgttcttaaaacagctatatctgatttagaggtagatcaacgagaggttaattcgaagttatattatataaaatatcctatcgaaaacagtgaagattttataactatagcaacaacaagacctgaaaccatgttaggagatacagctgttgcagtaaatccaaaagataaaagatacaaaaatttagtctcaaaaaacgtaattttaccaattgtcgaaaaaaaaataaaaattatagctgatgattacgctgatccagaacaaggaagtggagcagttaaaataaccccagcgcacgactttaatgattatgatgtaggaatcagaaacaagctagaaataattaatatctttactgaggatgggaaaattaatgaaaacgcaccaagcgaatatattggattagatcgcttcgaagctcgaaaaaaaatattactagaattaaaaaacaaaaatttatttgttagagaagaagatataaaaaataaagttccatatggagatagatcaaactctataatagaaccttttttgactgaacaatggtttgctgatgcaaaaaaattatcagtaaaagcaaaaaaaatagttagatcaaaaaaaactaacttctttccaactaattggtctaaaacatattttcaatggatggataatattgaaccttggtgcgtatcgagacaactatggtggggccatcaaatacctgcatggtatggaccagataaaaaaatatttgtagcagaaaatgaa

SEQ ID NO: 307046 - DNA, 589 bp, Unknown
  Bacterial polypeptide expressing nucleotide sequence isolated from the Sargasso Sea
atgagttctgaaaaatatacacattctaaagtagaaaataagatttactcttattgggaaaaaaaaggtctttttaaacctaaaaaaaataaaaaaaagtattcaattgttattccaccgccaaatgttactggaagtcttcatatgggtcatgcattaaacaatacaattcaagatttacttataagatttcatagaatgaacaactttgaaaccttatggcaaccgggaactgatcatgctggaattgcaacgcaagcattagtcgaaaggaaacttgaaagtgaaaatattgacaaacaatctattggaagagaggtttttattaaaaaagtttgggattggaaaaaggaatacggcgacatcatcattaatcagcttaaaaaacttggatgttcatgtgattggtcaaggaacgccttcacaatggataaaaatttatctgcatcagttattaaagttttcgtagatctctataacaaaggtcttatttataaatctaaaaaattagttaattgggatactgttttaaaaacagctatatctgatcttgaagtcgatcaaagagaggtaaattcaaaactttatt

SEQ ID NO: 307047 - DNA, 970 bp, Unknown
  Bacterial polypeptide expressing nucleotide sequence isolated from the Sargasso Sea
tttgatattattttcttttgggttgctcgaatggatgatgatgggttcatacttaattaaaaaagagccattttcaaaaatatatgtacatgcgctagttagggatgaaaaaggccaaaagatgtctaaatcaaaaggaaacgtaattgatcctcttgaaataataaataagtatggtgctgactctttaagattcactctaatctcaatggctgccccaggcagagatgttaaactttctgaggaaagagttaaaggatacagaaactttttgaacaaaatttggaacgcaaataaattttctaaaataaacgaatttaaaattacaaataattttaatattaagaaagcaaagcttgatgttaataaatggatttattttgagttgactaaggttaataaaattgtaatagaacatattgaaaattttagatttgatgaagctgcgagaataatatatcagtttgtttggcattcttattgtgattggtatattgagtttttaaaaccaatttttgattctaaagacaagaaaaaccatgaagaatcacgaaatattgccgcttttattcaagctaatatattaattttattacatccatttatacctttttttacggaaaagatttggcaagattttaaatttatcaatacctttaaaaaacctctaatgttcaaagaatggaagattaaatcacatgcaagttttaataatagtcataccaaaatttcttggttaatagatctagtaacaaatatacgctctacaaaggttactttaaatgtatcacccggatcttttattgaagtttcaactgttgaattgggtaaagaaaaaaaacttgttataaaagataatttaaatgtatttaaaggattaggaagagtatcaaatgtccatcatgaaaaactggatagagatggggtaaaaaatattgctggtggggaaactttaatactttattttgat

SEQ ID NO: 307048 - DNA, 618 bp, Unknown
  Bacterial polypeptide expressing nucleotide sequence isolated from the Sargasso Sea
aatgagtagcgataaatatatacattctgatgtagaaaatagaatttattcttattgggaaaaaaatggtctttttaaacctaaagaaaattcaaaaaaattctcaattgtaattccaccaccaaatgtgactggtagtttacatatgggtcatgcgcttaacaattctattcaagatttgctagttcgttatcatagaatgaataattttgaaactttatggcaaccaggtacagaccatgctggaattgctacacaagcattagtagagaaaaaattaacctctgaaaaaattgataaaaatgaaattggcagagataaatttattgaaaaagtttgggaatggaaagagcaatatggagacatcataattaaccaattaaaaaaacttggttgttcttgtgattggtcaagaaatgccttcacaatggatgagaatttatccaaatcagtaattaaggtttttgtagatctttataacaaaggtctaatctataaagataagaaattagttaactgggatacagttttaaaaacagctatttcagacctagaggtagatcaaagagaggtaaattctaaaatttattacatcagatatccaatagatgggactga

SEQ ID NO: 307049 - DNA, 490 bp, Unknown
  Bacterial polypeptide expressing nucleotide sequence isolated from the Sargasso Sea
taagtggcaagaaaaatgggaaagtctaaaggcatttagtcctaaccctgaggatgatggggagcctttttgtgttgttattccgccacctaatgtaactggatctttgcatatggggcacgcatttaatacggctttgatagatgttttagtacgttttcaaagacttttaggtaagaatgttttgtgtttgccggggactgatcatgcttcaatagctgttcaaactattcttgaaaaacaattaaaaagtgaaggcaaaacaagtgaggatattggtagagatgaatttcttaaaagagcatggaactggaaagaacaaagtggtggaagaatagtttctcaattaaaaaggataggatattcagttgactggactagagaaagatttactcttgatcaaaaattaaatgaagcagttattgaggcttttaatattctccataaaaagaatttaatttatagaggcgaatatttggttaattggtgc

SEQ ID NO: 307050 - DNA, 966 bp, Unknown
  Bacterial polypeptide expressing nucleotide sequence isolated from the Sargasso Sea
ttctctaccctgggctggccggaaaaaactaaacgccttcagaaattttatccaactaatgtattggttaccggttttgatattatttttttctgggtagctcgtatgatcatgatgggattaaaatttactggaaaaccgcccttcaaagaagtctatatccatggcctggtgcgtgactctgatggacaaaaaatgtctaaatcaaaaggcaatgtgcttgacccactagacttaattgatggtataaagcttgaagatttggttacaaaacgcacaatggggctgatgcaacctcagctaacggaaaaaattgaaaagtcgactcgtaaacattttcctaatggtattgctgcatacggcacagactcattaaggttcacatttgcatcacttgcaacacaaggaagggatataagatttgatattggccgcattgatggctataggaatttttgtaataagatttggaatgccacaagatttgtattaatgaatattgaatcgcaaaagatcgatatcaataatgacaagaaaaaattcggcttaactgaacgttggattataagtcaactgtcaaaaactctgaatgcaacacatgaaggtatcaaaacatatcgctttgatctcgcatcacaagctttatatgaatttgtctggaacgaatattgcgattggtatctcgaattttcaaaatcaactctaaatgataaagaaaaaagtgatgaagaaaaacgaggaacgctctatacattagtacacatactcgagacatcacttcgtggattacatcctttcattccttttatcacagaagagctgtggcagcgtgttgcatctattttaaataaaaatagtgaaactattatgttggaatcctatcctagtgaaagtgaatttgaaaaagataaaaaagctgatgaagaaatcgagtggataaaatcattcattatgggtgtaagaaag

SEQ ID NO: 307051 - DNA, 942 bp, Unknown
  Bacterial polypeptide expressing nucleotide sequence isolated from the Sargasso Sea
aaaaagattacataaagaaattttatccaacaacagttttggtaacaggttttgatattatttttttctgggtagctagaatgattatgtttggtatggaatttttgaacaaagaaccattcaaagatatttatgtccacgcgttagttagagatgaaaaaggacaaaaaatgtctaagtcaaaagggaatgttattgatccattagatctcattgaaaaatacagcgctgatgcattacgttttactttgctttctatggcatccccaggaactgatgttaaactttcagaagatagagttaaaggatatagaaactttttaaataaattatggaatgctaacaattttttaatcaccaataaatgtgattttaaaaaaaccaataaagttccaaaaatctcattaaatatcaataaatggatttattctgagttaatagaaactaaaaataaaattcaaaaaaatattgaagattatcgatttgatgaagcagcaaaaattgcctatcaatttgcatggcactcatattgtgactggtatattgagctgtctaaaacaattctttactctgaggataaaaaggtaaaaaaagaggtaaaagaagtttctgcttatgtttttaagcaaatattggttatgcttcatcctttcataccatttgtaactgaggaaatatggttaaagaacaaatttgatgagtctaataaaaatttccttatgtataaaaattggcctactggaaaaattaaaaaagaccaatctcttaaagaagttgaaaaaattatcaaaattatctctgaattaagatcatttaaaaatgaattaaatgtcagccctggttcatttgttgatgttgcgattaataaaattgccaaaaaaaacaaactattagttaataataatgatgttattttgaaaaaactggggtcgtatcaataat

SEQ ID NO: 307052 - DNA, 805 bp, Unknown
  Bacterial polypeptide expressing nucleotide sequence isolated from the Sargasso Sea
aaatcaggtgaaaacatatcaggacagatgaagaaactaggtatgagttgtgattggtcaagggagagattcacaatggatgaagggttatcagcagctgttagacaagtttttgtaaccctctatgactctggatttatctataaaggttcaagaatggttaattgggatacaaaactaatgtctgcagtctcagaccttgaggtcaatcttgaggaacaaacaggcaaactctggagtgttaaatataaatgtggagatgaatttatcacaatcgctactactagaccagagactattcttgctgatacagccgttgcagttgaccctgatgatgaaagatataagagctttataggaaaaacagcaattatcccaatcgtaaatagagaggttccgattatcgccgatgagtatgtagataaagaatttggttctggatgtgtaaagataacacctgcacatgattttaatgactatgagatcggcttgaaacatgatctagaagtcatatcttgcatgaagttagatggaacaatgtctgacgatgattttatgccagataattataaaaatttagatcgattcgaagcaagagaccagatagtgaatgagttatctgaattaggcttccttgtctccgccgatgaacacgtaatccaattaccaaaaggagataggtcaaaaagcatacttgaaccaatgatcactgaccaatggtttgtaaagacaaaagaattggctgatagaggtatcgcagaagttgagaatgaaaatatgaagtttattccaaaaaattgggaga

SEQ ID NO: 307053 - DNA, 581 bp, Unknown
  Bacterial polypeptide expressing nucleotide sequence isolated from the Sargasso Sea
catgaataccgataaatatatacattctgaagtagaaaatattatttactcttactgggaaaaaaatagattatttaaaccaaaaaagaattcaaaaaaattttcaatagttattccaccacctaatgtaactggaagtcttcatatgggacatgcattaaacaattcgattcaagatatgcttgttcgatattatagaatgaataattatgaaacactatggcaacctggaacagaccatgcaggtatagcaacccaagcacttgttgaaaaaaaacttgaaaaagaaaacttaaacaaaaaagatttaggaagagaggaatttattaaaaaggtttgggaatggaaagatcagtatggagacataataattaatcaactaaaaaaactaggttgttcatgtgattggtcaagaaatgcattcacaatggatgataatctctcaaaatcagtaattaaggtatttgttgaacttcataaaaaaaagttaatttataaggcaaaaaaattagttaattgggatacggttttaaaaactgctatttcagatttagaagttgatcaaagagaaatgaactcaa

SEQ ID NO: 307054 - DNA, 304 bp, Unknown
  Bacterial polypeptide expressing nucleotide sequence isolated from the Sargasso Sea
catgagtttagataaatatgtacattttgaagctgaaaagcaaatctatagatattgggaaaaaaataaattatttaaacctaaaataaataaaaaaaagtattcaattgtaataccaccaccaaatgtaacaggaagtttgcatatgggtcatgctcttaacaattctattcaggacttgttggttagatatcatagaatgaatgggtatgaaacattatggcaacctggtacagatcacgctggaatagctacccaagctttagttgaaaaaaaactttcatctgaaaatataaataaaaca

SEQ ID NO: 307055 - DNA, 550 bp, Unknown
  Bacterial polypeptide expressing nucleotide sequence isolated from the Sargasso Sea
atgagtttagataaatatatacattcagacgttgaggataatatatatacatattgggagaagaataatttattcaaacccaaaaaaaataagaaaaaattctcaatagttataccgccacccaatgttactggaagcttgcatatgggtcatgccttaaataactcaatacaagatttgcttacacggtattataggatgaataattatgaaactttgtggcaacctggaactgatcatgctggtattgccactcaggcattagtagagaaaaagttgaactctgagaacattaaaaagaacgatttaggaagagaaaagtttattgaaaaagtatgggattggaaaaatcagtatggtgacataattattaatcagcttaaaaaattaggatgctcatgtgattggtcaagaaatgcttttacaatggacgaaaatctatcaaaagcagtaattaaagttttcgtggatcttcataaaaaaaaattaatttataaagctgaaaaattagtaaattggaacactgttttaaaaaccgcaatattctgat

SEQ ID NO: 307056 - DNA, 890 bp, Unknown
  Bacterial polypeptide expressing nucleotide sequence isolated from the Sargasso Sea
aatgaacaattacgaaacattgtggcaacctggcactgatcatgcgggaatagctactcaagcgctagtagagaaaaaattaaattccgaaaatataaaaaaaaatgttttaggaagagaaaaatttatcaaaagagtgtgggattggaaaaatcagtatggtgatataattattaatcaactaaaaaaattaggatgctcatgtgactggtcaagaaatgctttcacaatggataaaaatctatctaaagctgtagctaaagtttttgtagatctttacaaaaagaaaataatttataaagatgaaaaattagtaaattgggatactgtattaaaaacagccatatcagatttagaagttgatcaaagagaagttaattctaaaatttattacattaggtatccaatagatggatcaaatgattatattactatagcaactactagaccagaaacaatgctcggagatactgctgtagctgtaaacccaaaagacaaaagatataaaaagtatgttaataaaactgtaacaattccaattgttggtagaaaagttaaaatcatcgaagatgattacgcagatcctgagcaaggcacaggtgcattaaaaattacacctggtcatgatttcaatgattatgaagttggtaaaagaaataaattagaaattattaatatttttacagaagatggaaaaattaataaaaatggaattttagaatatgtcggcctagatagatttgaagctaggaagaaaatattaaacgatcttaaagaaaaaaattactttgttaaggaagaaaatattaaaaataaagttccatatggagacagatcaaattctattattgaaccttttttaacagaacaatggtttgctgacgcaaaaa

SEQ ID NO: 307057 - DNA, 574 bp, Unknown
  Bacterial polypeptide expressing nucleotide sequence isolated from the Sargasso Sea
atggaatttaaaaaatataatcatagtaaagaagaaaaaaaaatctcggatttttggatcaaaaaaggcttatttaaaccaaaaaaaaataaatcgaataaaaaattttctatagtaattcctccacctaatgtaactggcagattacatatgggacatgctctaaacaatagtctccaagatgttttagttagatttaatagaatgaaaggccttgaaactctgtggcagccaggaacagaccatgctggaattgcgacacaagcagttgttgaaaacaaccttttaaaagaaggaattaaaaaaaatgatttaggtagagaaaaatttattaaaaaaatatgggattggaaagaggaatctggtggaataattttagatcaacttaagaaattaggttgttcgtgtgattggtcaagaacgaggttcaccatggatgaagatctttctaaagctgtaattaaagtttttgtggatcttcataaaaataagcttatttacaaggataaaaaattagtcaactgggatactaaacttcaaactgctatttctgacctggaagtaaaccaaaaag

SEQ ID NO: 307058 - DNA, 778 bp, Unknown
  Bacterial polypeptide expressing nucleotide sequence isolated from the Sargasso Sea
acttggggttggccaaacaaaaatgaatatttaaaaaagttttatcctacaacagttcttgtaacaggatttgatataattttcttttgggtagctagaatgatgatgtttggtatggaatttttaaataaagaaccatttaaagatatttatgttcatgctttagttcgtgatgaaaaaggacagaaaatgtccaagtcaaaaggtaatgtaatagatccacttgatttaattcaaaaatatagtgcggacgctttaagatttactttattatccatggcttcacctggtacggacgttaaactttctgaagatagagttaagggatataggaattttttaaacaaactatggaatgctaataattttttaatacaaaacaaatgtaatttaaaaaatgctaaaaaacttccaaaattaaaagttaatatcaataaatggatatattttgagcttttacaaacatctaatttaataaagaaaaatatagaagattatagatttgatgaagcagctaagaacgcctatcattttgcatggcataaatattgcgattggtacctagaattatcaaaaacaattcttttttcagataatttaaaagctaaaaatgaagttaaagaggtttctgcttttgtatttagacaaatacttattatgctacatccatttataccttttgttactgagaaaatatggctaacaaataaatttgataacaaaaataagaattttttaatgttatctaactggatctcaggtaaatctaaaaaagata

SEQ ID NO: 307059 - DNA, 886 bp, Unknown
  Bacterial polypeptide expressing nucleotide sequence isolated from the Sargasso Sea
gaataattatgaaactttatggcaaccaggcacagatcatgctggtattgcaactcaggcacttgttgaaagaaaacttgaaaaagaaaatcaaaataaaaatacattaggaagagaaaaatttattgaaaaggtttgggattggaaaaatcagtatggtgatataattatcaatcaattaaaaaaactaggttgttcatgtgattggtccagaaatgctttcactatggatgaaaatttatctaaatctgtaattaaggtatttgttgaattacataaaaaaaaactaatttataaagcagaaaaattagtaaattgggacacagtattaaaaactgcaatttcagatttagaggtagatcaaagagaaatgaactctaagatttactatattaggtatccaatagataaattatcagaatttatcacaatagctaccacaagacctgagactatgcttggagacacagcgattgcagttaatccaaaagataaaagatataaaagttttgtcggcaaaacagtcactatacctattgtaggaagaaaaattaaaataataaaagacaattatgcggatccagaacaaggaactggagcactaaaaattactccagcacatgattttaatgattatgatgtaggacagagaaataaacttgaaataattaatgtgtttacagaagagggtaaaataaatgaaaatgcaccaaaagattatgtaggtttggatagatttgatgctcgtaaaaaaatattaaatgagcttaaagaaaaagattattttgttaaggaggaaaatataaaaaataaagttccttatggagatagatctaactctgttattgaaccttttttgactgaacaatggtttgttgatgcaaaa

SEQ ID NO: 307060 - DNA, 487 bp, Unknown
  Bacterial polypeptide expressing nucleotide sequence isolated from the Sargasso Sea
aatgagttcagaaaaatatacacattctaaagtagaaaataagatttactcttattgggaaaaaaaaggtctctttaaacccaaaaaaaacaaaaaaaaatattctattgtaattccaccgccaaatgtcactggaagtcttcatatgggtcacgcattaaataatacaattcaggatttgctcataagatttcacagaatgaataactttgaaactttatggcaaccgggaacagatcatgctggtattgcaacgcaagctttagtcgaaaggaaacttgaaagtgaaaatgttgataaacaatcaattggcagagaggcttttattaaaaaagtttgggattggaaaaaggagtatggagatattattattaatcagcttaaaaaactaggatgttcatgtgattggtcaaggaacgccttcacaatggataaaaacctatctgcatcagttattaaagtttttatagatctttataacaaaggt

SEQ ID NO: 307061 - DNA, 463 bp, Unknown
  Bacterial polypeptide expressing nucleotide sequence isolated from the Sargasso Sea
gaaaggctcgctgtggaacctgcgctacccgctggccgacggcaagaaaaccgccgaaggcaatgactacctgatcgtcgccaccacccgcccggaaaccatgctcggcgacagcgccgtggccgtgcacccggaagacgagcgctacaaggcgctgatcggcagcttcgtcgaactgccgctgctgggccgtcgcatcccgatcatcgccgatgattactgcgaccccgagttcggcaccggctgcgtgaagatcaccccggcgcacgacttcaatgactacgaagtgggcaaacgccacaacctgccgctgatcaacatcttcgacaagaacgccgccgtgctgaccaccgctcaggtgttcaacctcgacggtagcgtcaacgaacagatcgaagcgaacattccggcgcagttcgccggtctggaccgcttccaggcgcgcaagcagatcgtcgccgcc

SEQ ID NO: 307062 - DNA, 589 bp, Unknown
  Bacterial polypeptide expressing nucleotide sequence isolated from the Sargasso Sea
atggaaaattcaaattacaaccacactagcatagaaaatgagatatacaactattgggaaaagaacaatttttttaaaccaaaaaagaataagaaaaaacatttttccatagtaatacctcctcctaatgtaactggcagtttacacatgggccatgcattaaataattcattacaagatttgttaatccgtttttatagaatgaacggttatgaaacattatggcaacctggcacagatcatgcaggcatagcaacgcaggctgtcgtagaaaaaaaactattagaaaaaggaattaaaaagaatgaaattggaagagaaaaatttattgatgaggtatggaattggaaaaaagaatctggtgataaaattttaaaccaacttaaaaaattaggttgttcctgtgattggtcaagaaatagatttacaatggataaagatctatccgatgctgttacaaaaacttttgttcaactttataaaaaaaaactgatttataaagatacaaaattagttaattgggatacaaaattagaaacagcaatttcagacctagaagtgaacaaagagaaagtcaatctaatttgta

SEQ ID NO: 307063 - DNA, 659 bp, Unknown
  Bacterial polypeptide expressing nucleotide sequence isolated from the Sargasso Sea
acaggggctcatgattttaacgattatcaggtagctagaagaaataatattccactttatcggcttatggatacaaaaggacgaatgagaagcgatggagctccatataaagaagccgcatcactggcagtgaatttttccagaggtggcgaattcagtgaagcagtaatagacagtttaaaccttgtaccagaagagtttcgtggcttggatcgttttgaagcgcgaaagctaattgttgatcacattacagatcaaggcttggccgtatatactgataaggaacaaccaaatggggagcacagtgaaaaaatcccatttgttgaagaaaaaccaattatgcaaccctttggcgatcgatccaaagtcgtaatagagcccatgcttaccgaccaatggttcgttgatacagcaaaaatagttggaccagctttggacgccgtaaagtcggggagagtagagataataccaaatagtgataagaaaacatattatcattggctagaaaatatagaaccatggtgtatttctcgccaattgtggtggggacatcaaatcccagtttggtttgaccaagatggaaaccagtactgtgccattaacaaagaagacgctcagcgactggcaggtaacggagctaagttaacaagagaccccga

SEQ ID NO: 307064 - DNA, 910 bp, Unknown
  Bacterial polypeptide expressing nucleotide sequence isolated from the Sargasso Sea
gacatcatctttttctgggtcgcccggatgatcatgttcgggctcaagtttacagatcaggtcccctttcatgaggtgtatgtccatggccttgttcgcgatgccgatggcgaaaagatgtccaaatccaaaggcaacgttcttgaccctctcgatttgattgacgggattgaattggaggcgctggtggagaaacgcaccaccggactcatgcagccccagatggctgagcggatcgcgaagaccacacgccggcaattccctgatggcattccatcgttcggcactgatgccctgcgatttacttttgcgagccttgctacccagggacgtgatatccgctttgatctgggacgcatcgaaggctttcgcaacttctgcaacaaattatggaatgcgtcacggttcgtcatgatgaacaccgaatctctgtctggccatcctctccgtgactttgaaaccggtcccgctgagcgctggattacctcacgactgcagcaggtcgcgggcgagatcagcaaatcgatggaggcgtatcgttttgaccaggtggtacagacactgcatgcttttacctgggatgaatactgcagctggtaccttgagatcgccaaaatccaactttctgatgctgagctctcggactcgcgcaaagagggcgttcgacaaacgctggtcaataccctggacagcgcattgcgcctgacccatcccgttatgccgttcattacagaagcgttgtggcagcaactgcaatcgcgcacaaccggcgagggggaatccatcatgcatcagccctacccgcaacgggacgagcagctcattgacgggtcagcggtcgaagatctcgaatgggtgcaggccgtagtcgggggcatccgcaacattcgcggtgaaatgaatatcgagc

SEQ ID NO: 307065 - DNA, 868 bp, Unknown
  Bacterial polypeptide expressing nucleotide sequence isolated from the Sargasso Sea
agaggaaattggtagagaaaaatttctagaaaaaatttgggaatggaaagctcaaagtggtggaatgataattgaacaattaaaaagattaggggcctcttgtgattgggaaagaaatcgttttacaatggatacagattttcaaaattccgtccttactgcctttgtgaaaatgtacgaaatgggatatatctacaaaggtgaaaggttagttaattgggatccacactttaaaacagctatctctgatttagaagttgagaatattgaggttgatggatatttttggcacataaaatatcctctaaaaaatggagagaattatgattatcgtgaacttgatgaaaatggcaaaataagttttaaagataataggaattacatttcgattgctacaactagaccagaaaccatgcttggtgatggtgcaattgctgtaaatcctgatgacgaaagatataaaaatattgtaggtaaagaggtaattattccaattgccaatagatctattccaataatagctgatgaatttgctgatccaaattttggatcaggagctgttaaaataactggggcacatgattttaatgattataaagtagcaaaaaaacataaattggaattttttaaattaatggatgaatcagcttgcctactaaacgaggattttattcctaataaatataggggacttgaaagatttaaagctagggaaatgcttttagaggaattagataaagccaattttttactaaaaactgaacaaaagaaaattattcaaccttttggtgatagatcaaaagtagtagttgaaccttttttaacaaaacaatggttcgtggatacaaaaaaaattgttcaaccagct

SEQ ID NO: 307066 - DNA, 830 bp, Unknown
  Bacterial polypeptide expressing nucleotide sequence isolated from the Sargasso Sea
aatgaaattataaatcaattaaaaagattaggttgctcatgcgattggtctagagaaagatttactttagatgatggtttgtcaaaagcagtaagatttgtattcgttaaattatacaatgataaacttatttataaagataaaagattaagtaattgggacccaaaattaaaaacgactatttcagatttagaagtcatccaaaaagaagtaaaaggttctctatggtatatagattacaaattagaaaatgaagataaggtaataacaattgcaacaactcgacccgagacaatgcttggtgatacagcaatcgctgttcaccctgatgacgaaaggtttagagattttgttggcaagtatgcatatattcccatccttaataaaaaaattattattattgctgatgaatatgtaaaagtagatcaaggctctggtgcagttaaaataactcctgctcatgattttaacgattatgaaataggaaaaagacataatcttgaagtaataaatatttttaatgaaaatgctgagcttaatgaaaactgccccattgaatatcaaaatcttgatcgttttaaagcaagagaaaaaatcgttaatgaattagaaactattggagcactgaataaaattgaagagaatatccatactgtaccatatggagatagatcaggtgaagtggtagagccatggcttacagatcaatggtttgttaatgcaaaaaaattatctttaaatgcaatcgataaagtaaaaacaaaagagacagtatttgttcctcaaaattgggagaaaacatattttgattggatggaaaatattcagcc

SEQ ID NO: 307067 - DNA, 388 bp, Unknown
  Bacterial polypeptide expressing nucleotide sequence isolated from the Sargasso Sea
atggaatttaaaaaatacaaccacactaaagaagagaaaaagatctcagatttttggattaaaaaaggtttatttaaaccaaaaaaaagtaaatcaaataaaaaattttccatagtaattccaccacctaatgtaactggtagactacatatgggacacgctttaaacaatagtctccaagatgttttagtaagatttaataggatgaaaggactcgaaaccctatggcagccaggaactgatcatgccgggattgcaacccaagcagttgttgaaaacaatcttttaaaagaaggaattaaaaaaaatgatttaggaagagaaaaatttattcaaaaaattggaaatgaaagagcagtcaggtggaattatttagatcaactcaaaa

SEQ ID NO: 307068 - DNA, 211 bp, Unknown
  Bacterial polypeptide expressing nucleotide sequence isolated from the Sargasso Sea
ggacaatattgaggattggtgtataagtagacaaatttggtggggtcacagaattccagcttggtatgatgataatggaaatatttacgttggtgaaaatgaacaagatgtaagaaattattacaaacttgatgcaatagatcttaagcaagatgaggatgttttagatacatggttctcatcaagtctttggccattcggatctcttggt

SEQ ID NO: 307069 - DNA, 649 bp, Unknown
  Bacterial polypeptide expressing nucleotide sequence isolated from the Sargasso Sea
atggaatttaaaaaatataatcatagtaaagaagaaaaaaaaatctcagatttttggataaaaaaaggcttattcaaaccaaaaaaaaacaaatcaaataaaaaattttctatagtaattcctccacctaatgtgactggcagattacatatgggacatgccctaaataatagtcttcaagatgttttagttagatttaatagaatgaaaggcctcgaaactctgtggcaaccaggaacagatcatgctggaattgcaactcaagcagttgttgaaaataaccttttaaaaaaaggaataaaaaaaaatgatttaggaagagaaaaatttattaaaaaaatatgggattggaaagaggaatctggtggaataatcttagatcaacttaagaaattaggttgttcgtgtgattggtcaagaacgaggttcaccatggataaggatctttctaaagctgtaattaaagtttttgttgatcttcataaaaacaatctaatttataaggataaaaaattagtcaactgggatactaaacttcaaactgctatttctgacttggaagtaaaccaaaaagatgttcaatctcaattatattacattgattatgcgatagagaactcagatcaaaaaatcactatgccaccaccag

SEQ ID NO: 307070 - DNA, 812 bp, Unknown
  Bacterial polypeptide expressing nucleotide sequence isolated from the Sargasso Sea
tgccgtttcagatcttgaagtagtccgacaagaaaaagatggtgtgctttggcatatttcctatccactagcagattcagatgaggttcttattgtcgcaacgacaagaccagaaaccatgtttggtgatatggccgtagctgtgaatcccaaagatgatagatttaaacaacacattggtaagtacgttgaattgccatttgtaggcagaaaaattccagtgataggggatgaatacgtagatatggaatttggaaccggttgtttgaagattacaccaggtcatgacttcaacgattacgatattggtaagaaatatgcgttgcatgaagtagatggcatagtacaaacctcagataagcttgaggattttgccccaataaatatttttactgacgaagccttctcaaatgatatggttccagcaccattcaataaccttgatcgtttcaaggtgagaaaagctgttttagaagaactaaaaaataaaggattacttgttaaagaagaaaaacatcacataagtgttcctagaggagaaagatctaacatagtcattgagccaaaacttagttatcagtggtacgtaaaaacagaagaaatggcccaaaaagctaatgatgctgtaaataaaggtgaagtagttttccatccaggcaattgggataaaacctacttcaattggatggataacattcaagattggtgtatcagtagacaaatttggtggggacaccgcattcctgcctggcatgatagcgaaggtaatacttatgttggatacgacgaagatgaagtacgtgaattttatc

SEQ ID NO: 307071 - DNA, 759 bp, Unknown
  Bacterial polypeptide expressing nucleotide sequence isolated from the Sargasso Sea
gtacgttgaattgccctttgtcggcagaaaaattccagtgataggtgatgaatacgtagatatggaatttggaaccggttgtttgaagattacaccaggtcatgacttcaacgattacgatattggtaagaaatatgcgttgcatgaagtagatggcatagtaaaaacctcagataagcttgaggattttgctccaataaatatttttactgacgaagccttctcaaatgatatggttccagcaccatttaataaccttgatcgtttcaaggtgagaaaagctgttctagaagaactaaaaaataaagaattacttgttaaagaagaaaaacatcacataagtgttcctagaggagaaagatctaacatagtcattgagccaaaacttagttatcagtggtacgtaaaaacagaagaaatggcccaaaaagctaatgatgctgtaaatagaggtgaggtagttttccatccaggcaattgggataaaacctacttcaattggatggataatattcaagattggtgtatcagtagacaaatttggtggggacaccgcattcctgcctggcatgatagcgaaggtaatacttatgttggatacgacgaagatgaagtacgtgaattttatcaacttgatacacgtgaactaacgcaagaagaggatgttttggatacttggttctcagcctcactatggccttttggttcattaggttggccagaagatactgcggactttaaaaagttttttcccactac

SEQ ID NO: 307072 - DNA, 739 bp, Unknown
  Bacterial polypeptide expressing nucleotide sequence isolated from the Sargasso Sea
tatggttgaaaaattttatccaacttcagttttggttacaggttttgatattatatttttttgggttgctagaatgattatgtttgggacagaatttttaaacaaagagccttttaaagatatttatgttcatgctttagtaagagatgaaaaaggtcagaaaatgtctaaatctaaaggaaatgttattgatcctttagatctaatagaaaaatatagcgctgatgcattaagatttactcttctttcaatggcatcacctggtactgatgtaaaactttctgaagatagagttaaaggatatagaaattttctaaacaaattatggaatgctaataattttttaatcacaaatgaatgtgattttactaatattgataaaatttcaaatttatcaattaatattaataaatggatttatgcagaattaattgatgcaaaatcaaagattgaaaaaaatttagaagattacagatttgatgaagctgctaaaaatgcttatcagtttgcatggcattcttattgtgattggtatttagaattatcaaaaactatacttttttcagataatgaagaggctaaatcagaggtaaaaaaggtttcaagttatatattcaagcaaattttaattctactacacccatttattccttttgttactgaagaaatttggctcaaaaacaaatttgataattcaagtaaagattttttaatgttcgctaattgggccgacaggtga

SEQ ID NO: 307073 - DNA, 709 bp, Unknown
  Bacterial polypeptide expressing nucleotide sequence isolated from the Sargasso Sea
tgtggtgatgaatttatcacaatcgctactactagaccagagactattcttgctgatacagccgttgcagttaaccctgatgatgaaagatataagaactttataggaaaaacagcaattatcccaatcgtaaatagagaggttccgattatcgccgatgagtatgtagataaagaatttggttctggatgtgtaaagataacacctgcacatgattttaatgattatgagatcggcttgaaacatgatctagaagtcatatcttgcatgaagttagatggaacaatgtctgacgatgattttatgccagaaaattataaaaatttagatagatttgaagcaagagaccagatagtgaatgagttatctgaattaggcttccttgtctccgctgatgatcacataatccaattaccaaaaggagatagatcaaaaagcatacttgaaccaatgatcaccgaccaatggtttgtaaagacaaaagagttggctgatagaggtatcgctgaagttgagaatgaaaatatgaagtttattccaaaaaattgggagaaaacttattttgagtggatgtacaacatacaagattggtgtatttctagacaaatttggtggggtcatcagattccggcatggtatgacgaggatggaaacatctatgtagctacgactgaatcagaggttagagcaaaatataaactctcagatg

SEQ ID NO: 307074 - DNA, 958 bp, Unknown
  Bacterial polypeptide expressing nucleotide sequence isolated from the Sargasso Sea
aatgatgatgcttggtatggaatttttaaataaggaaccattcaaagaaatttatgttcatgcacttgtaagagatgagaaagggcaaaaaatgtcgaaatcaaaaggaaatgtaattgatcctttggcattaatagaaagttatagtgctgatgcgttaagattcacattgttgtctatggcctcgcccggaagagatgttaaattatctgaacagcgggttaagggttatagaaattttcttacaaaaatatggaatgcaaacaattttttaaaagtaaataaatgcaattttaacggccaaataaattcaaaaaaacttaaattaaatataaataaatggatatattctgaactagttaatactataaattcagctgaaaattgtatcaaaagttatagatttgatgaggcgtctaaaattatttataaatttgtttggaatagttactgtgattggtatcttgagctttcgaagacaatattgttctcgaaaaataagaaattcatacaggaagttagaaatacatctgggctagtttttaaggagatacttgttattttacatccatttattccttttatcaccgaagaattgtggctgaaaaataaattaggatctaaaaagaataaatatttaatgcttacaccttggatcaaacaaggtagagttaagcaagataaggaaatttttaacgtaaatcaagttatagaagttatctcacttttaagatctttcaagaatgaattaaatgttaatccaggctcatttgttgatatatcaatcaaaagtgtaagtaaaagtaagcaaaatctttttttaaacaatgaagttatattaaaaaaactaggaagaattaactcaattcacacacatgatttaaatacagagtttgctagtttggttgttgccggcgaaatacttaagatttattttgataaatctgttgatctcagc

SEQ ID NO: 307075 - DNA, 634 bp, Unknown
  Bacterial polypeptide expressing nucleotide sequence isolated from the Sargasso Sea
gctcatactaatgataatgtgccgaagcagtttcaagatttagatcgtttcaaagtcaggaaggttgtactggaagaattaaaaaataaaggccttttagtcaaagaggaaaaacatcctataagtgttcctagaggtgaacgctcgaatattgttattgaaccaagattgagctatcagtggtatgttaaaactgctgacatggcaaaaaaagctaacgcagcagttaacaaaggagaagtaaaatttcatccaaataattggattaagacctatttcaattggatggataacattcaggactggtgtatcagtcgccaaatctggtggggtcatcgaattccagcatggcaagatgccgagggcaatacttacgtcggcttcgatgaagaagaagtaagaagcttttataaactagacaatagaaaactaaatcaagtggaagatgttttggatacttggttctcgtcctccctatggtcttttggctccttaggctggcctaataatactgaaggcggagaaaggtacttcccaacatctctattagttacaggttttgacatcatatttttttgggttgccctgaatgatgatgatgagcctggagttcaccgggcaaattccatttaaa

SEQ ID NO: 307076 - DNA, 839 bp, Unknown
  Bacterial polypeptide expressing nucleotide sequence isolated from the Sargasso Sea
gcaggtatcgctacagaaatggttgttgaaagggagctaaaaaaaatgaatataaataaaaaagatttatcccgtgaacagtttatagaacatgtgtgggagtggaaaaaacaatctggtaatgaaattattaatcaattaaaaagattaggctgttcatgtgattggtctagagaaaggtttactctagatgaaggtttatcaaaagcagtaagatttgtatttgtcaaactatataatgataaacttatttacaaagataaaagattaagcaactgggatccaaaactaaaaacgaccatttcagatttagaagtaatccaaaaagaagtaaaaggttccctctggtatattgactacaaattagaaaatgaagataaggtaataacaattgcaacaactcgacctgagacaatgcttggtgatacagcaattgcagttcatcctgatgacgaaaggttcaaagattttgtgggtaagtatgcatatattcccatacttaacaaaaaaattactattattgctgatgagtatgtaaaagtggatcaaggctctggtgctgtaaaaataactccagctcacgattttaatgattatgaaataggaaaaagacataatcttgatgtaataaatatttttaatgaaaatgcagagctcaatgaaaattgtccaatcgaatatcaaaatcttgatcgctttgaagcaagagagaaaatcattaatgaattagaaactattggagcactgaataaggtagaagagaatattcataccgtgccatatggagatagatcaggagaagtggtagagccatggcttacagatcaatggtttgtaaa

SEQ ID NO: 307077 - DNA, 388 bp, Unknown
  Bacterial polypeptide expressing nucleotide sequence isolated from the Sargasso Sea
catgagtaatgataaatataaccatttagaagtagaagataaaatttacaaatattgggaaaatcataaattatttaaaccaaaaaaaaataaaaagaaattctctatagtaataccccctccaaacgtaaccggctcacttcacatgggtcatgcattaaataattctattcaagaccttttaactcgatatcacaggatgaataattatgaaacgttatggcaacctggaacagatcatgcaggaattgctactcaggcacttgttgaaaaaaaattagaaaatgaaggtattaataaaaatgatatcggaagagaagaatttattaaaaaagtatgggaatggaagggcgagtatggcgacattataatcaaccaactaaaaagc

SEQ ID NO: 307078 - DNA, 825 bp, Unknown
  Bacterial polypeptide expressing nucleotide sequence isolated from the Sargasso Sea
cagaccatgcaggaattattactcagcttttagtagaaaaagatcttgaggaatctggagttacaaaacatgatttaggtagggataattttttatcaaaagtatgggaatggaaagaaaagtcaggtgacaatatcacaaatcaaatgaaatcattaggaatgagttgtgattggtcaagagaaagattcaccatggatgaaggcttatctaaagctgttttaaaagtttttgtttctttatacgataatgatttaatctacaaaggaaccagaatggttaattgggacacaaagttaaagtctgcagtatcagatcttgaagtatcctcagagacgcaattaggaaaattatggacaattaagtacaaagttggtgaagagtttttgtcaattgcaacaacaagacctgaaactttgttaggggatacagcagtagcagttaatccaactgacgaaagatataaacatttaattggtaaaaatattcaaattcctattgtgaatagagatgtaaaaattattgctgatgaatatgttgatacaaattttggatcaggatgtgtaaaaataactccagcacatgattttaacgattatgaaattggccaaacccatgatcttgaattgatacaatgcattgatttcgatggaaaaattgtaaatgatgattttgttcctgagcaccttagaggtctggaaaggtttgaagcaagagaaaaaataatccaaattttggaaaaagaaggtcttcttgagaaagttgaagaccatgaaatacaaattccaaaagaagatagatcaaaaactatttggaaccaatgat

SEQ ID NO: 307079 - DNA, 301 bp, Unknown
  Bacterial polypeptide expressing nucleotide sequence isolated from the Sargasso Sea
atggataaaagatatgagccgcttattattgaagaaaagtggtcagagctttgggcaaaaaataatttaggtaaaaataactcttcacaaactttttcgcaggttattccaccaccaaatgtaactggaactcttcatatggggcatagcttccaatattcgataatggatttctatgctagatacaatcatttaaatgatgtaaatactcattggcagaagggtaccgatcatgcaggaattgcaacgcaaatggtcgttgaaaacaacctatccagagaaaaaattgataaaaatgatt

SEQ ID NO: 307080 - DNA, 895 bp, Unknown
  Bacterial polypeptide expressing nucleotide sequence isolated from the Sargasso Sea
tgatattattttcttttgggttgctagaatgatgatgtttggaatggaatttttaaataaagaaccatttaaaaatatttatgtccatgctttagttagagatgaaaaagggcaaaaaatgtctaagtcaaaaggaaatgtaattgatccattagatttaattgaaaaatatagtgcagatgctttaagatttacccttctttcaatggcctcaccgggtacagatgtaaaactttctgaggatagagttaaaggatatagaaattttttgaataaattatggaatgctaataattttttaattaccaataaatgtgattttaaaaaaattgataaagttccaaaaaccacagtaaacatcaataaatggatttactcagaactaatccaaaccaaagataaaattgaaaggaatttaaaagattatcgatttgatgaagcagctaaaaatgtctaccagtttgcttggcattcttattgcgactggtacattgaactttcaaaaactattttattttcagatgataaaaaatctaaaaaagaggtaaaagaggtatcagcttatatatttaaacaaatacttgttattcttcatccatttattccatttgttactgagaaaatctggttaaaaaataaatttgataaatcagataagaatttcctaatgcacgctaattggccatcaggaaaaaccaaaaaagatcaatctatgaaagatgtagaaagcatcatcaatgttatttctgaacttagatcatttaaaaatgagttaaatgtaagcccaggttcatttatcgatatttctattaataaaattgctaaaaaaaataaaaaattaatgaccaataatgaaattattctcaaaaagcttggtcgtatcaataatttctat

SEQ ID NO: 307081 - DNA, 693 bp, Unknown
  Bacterial polypeptide expressing nucleotide sequence isolated from the Sargasso Sea
aatgaaattattagataaaaaatattctccttctgagttagaggatagatggtataaccattggttagaaaaagactatttttctagcaaaccttctgataatcattatactattgttatacctccacctaatgtaactggtaaattgacaatggggcatgtattaaataacacaattcaagatattttaatacgcaaagcaaggatggaagggaaaaatgcttgttgggtccctgggactgatcatgcatctattgcaactgaatcaaaagttgcaaaaatgcttcaagaaaaaggaattgataaaaaagatatttccagagaagaatttttagaacatgcatgggaatggaaagaaaaatatggcggaatcattatcaatcaactacagaaattaggatgttcttgcgattgggataaacttagttttacaatggatgaaaaatattctgatgcagtattagagtcttttgtacgattatttaataaaggattaatttataaaggtaacagattagtaaactggtgtccaaaatcacaaactgcattaagtgatgaagaagttatcttcaatgaagttaatggcaaactatggtatatcaagtatgcgatagaaaactctgatacatttattgaaattgcaacgacaagacctgaaaccatgcttggagatgttgcaatagctgttaatcc

SEQ ID NO: 307082 - DNA, 649 bp, Unknown
  Bacterial polypeptide expressing nucleotide sequence isolated from the Sargasso Sea
atgagtttagataaatatatacattcagacgttgaggataaaatatatacatattgggagaagaataatttatttaaacccaaaaaaaataagaagaaattctcaatagttataccaccaccaaatgttactggaagtttacatatgggtcatgccctaaataactcaatacaagatttgctcacacgttattatagaatgaataattatgaaactttgtggcaaccaggaactgatcatgctggaatagccacccaagctctagtagagaaaaagttaaattctgagaatattaaaaaaaatgatttaggaagagaagcgtttattgaaaaagtatgggattggaaaaatcaatatggcgacataattattaatcagcttaaaaaattgggatgttcgtgtgattggtcgagaaatgcttttacaatggatgaaaatttatcaaaagcagttattaaagtttttgtagatcttcataagaaaaaattaatttataaagctgaaaaattagtaaattgggacacagttttaaaaactgcaatatctgatttagaagttgatcaaagagaggttaactctaaaatttattatattagatatccaatagatggaacaagtgaatatataactatagcaactactagacccg

SEQ ID NO: 307083 - DNA, 415 bp, Unknown
  Bacterial polypeptide expressing nucleotide sequence isolated from the Sargasso Sea
atgagtagcgataaatatatacattctgatgtagaaaatagaatttattcttattgggaaaaaaacggtctttttaaacctaaagaaaattcaaaaaaattctcaattgtaattccaccaccaaatgtaacgggtagtttgcatatgggacatgctcttaacaattctattcaagatttattagttcgataccatagaatgaataattttgaaactttatggcaaccgggtacagaccacgctggtatagctacacaagcattagtagagaaaaaattgacctctgaaaaaattgataaaaacgaaattggtagagaaaaatttattgaaaaagtttgggaatggaaagagcaatacggagacataattattaatcaattaaaaaaacttggttgctcttgtgattggtcaagaa

SEQ ID NO: 307084 - DNA, 925 bp, Unknown
  Bacterial polypeptide expressing nucleotide sequence isolated from the Sargasso Sea
tgccctttggcctttttcagtcttgggtggcctgatgagacatatgatctaaaaacattttatccaacaaatgtgctggtcacaggttttgatatcattttcttttgggtcgcaagaatggtgatgatgggtcttaaattcatgaatgagatccctttcaaagaaatatatatccatggtctgatcaaagataaaaatggtcagaaaatgtcgaaatcaaaaggcaatatcctagacccaattgatctaattgatggcatcagtctcgatgaacttctcgataaacgagtgcaaggtcttatgcagcctgaaatggaaaaaagaatcatcaacgatacaaaaaaagaattccctaatggaattcctgattttggaacagatgcactgagattcaattttgcaatccaggcatccactgggagagatattcggctcgatcttaagcgagttgaaggttatagaaacttttgcaataagatttggaatgcatctcgattcatcaaaatgaacaccaatgattttgaattattggaaataaaggacaccaaaggacatcccattgatcaatggatccaatcaaaatttgtagaaacaattgatgaggtagaaaagcaattcagtcaatatcgttttgatcttgcagcaactgcaatgtatgaatttgtttggaatgacttttgtgattggtatatcgaattatcaaaagcattgatcaatgaacctgggataaaacagtcacaaaaagactatacaaaaaataatttgataaagatgctggatgcaattctaagaatgctgcatccaacgatcccttttattacagaagaaatatggcaatcgctcagtgaagagaataataagaaaagcattatgaaagctgacttccccagctctaaaaattggaaagcagacactgaaattgctg

SEQ ID NO: 307085 - DNA, 367 bp, Unknown
  Bacterial polypeptide expressing nucleotide sequence isolated from the Sargasso Sea
atgataagcgataaatatatacattctaaagttgaagataaaatttatgcttattgggagagaaataaattatttaaaccacaaaaaaattcaaaaaaattttcaatcgtaatacccccaccaaatgtaactggaagtttacatatggggcatgccttaaataattcaattcaagatttcttagttcgatattacagaatgaataactatgaaactttatggcaacctggaactgatcacgcaggtattgctacccaagcacttgttgaaagaaaattagaaaaagaggatttaaataagatcagtctaggaagagaaaaatttatagaaaaagtgtgggaatggaaaaatgaatatggagatatta

SEQ ID NO: 307086 - DNA, 504 bp, Unknown
  Bacterial polypeptide expressing nucleotide sequence isolated from the Sargasso Sea
aatgagttttgataaatacgagcataaaaatgtagaaaataaaatctacgattattgggaaaaaaatgaattatttaaacctaaagaaaattcaaaaaaattctcaattgtaattccaccaccaaatgtaactggaagccttcatatggggcatgctttgaataactcaattcaagatgttttaacgagatttcatagaatgaataattatgaaactttatggcaaccaggtacagaccacgctggtattgcaacccaagcattagttgaaaaaaaacttgctaaagaaggtgttaaaaaaaatgatttaggtagagaaaaatttatagaaaaagtatgggaatggaaaaatgagtatggagatattataataaaccaacttaaaaaacttggatgttcatgtgattggtctcgtaatgcattcacaatggacgagaatttatccaaatcagttataaaagtatttgttgatctttataataaaaaattaatctacaaagcaaa

SEQ ID NO: 307087 - DNA, 673 bp, Unknown
  Bacterial polypeptide expressing nucleotide sequence isolated from the Sargasso Sea
gatcaaattccttttaaagacgtctatgttactggcctcattagagacgagaatggacaaaaaatgtcaaaatctaaaggtaacgttattgatccgttggatttgatttatggcatctcccaagatgatttagttgaaaaaagaactacaaatcttatgcaggaaggtaaagcaaaaaaaattgagaataaaacaaggaatcaatttccaaaaggtattgattcatacggaacagatgctttaagaatgacattttattcacttgcaacgcataccaaagacataagctttgaaatgggtagacttaaagggtatagaaatttttgtactaaagtctggaatgcagcaagatttattaacggatatccagctggaaatgacaaattccaatcaacaaataaaactgatgagtggatatatgaggaatttgaaaattcaaaaaagcaaatcgaaaaaaatatcaaagactatagattggattatgctattaatgaagtttatgagtttttctggaacaagttttgtgacgtctatatcgaagaatgtaaaaaaagtggagagactgataatctaaggcctcttttaaaggaaatactaattatgatgcacccttttgctccattcattactgaagaaattcatagtttattgtttgatagtccaattatttaat

SEQ ID NO: 307088 - DNA, 688 bp, Unknown
  Bacterial polypeptide expressing nucleotide sequence isolated from the Sargasso Sea
gatgataattcctcccaagtataaccatattgaaattgagaaaaaatggtattcgtattggatgaaaaataatctttttaaatcaattccaaatgacaaagagcctttcactatagtcatcccacctcctaatgttacaggacttcttcatatgggccatatgctcaataacactcttcaagatattttagtaagaagagctcgtatgttgggtaaaaatgcatgttgggttcctggaactgatcatgcttctattgcaacagaagcaaaggttgttgaaaatcttaaaaaaaagggaattaataaaacagatatttctagagatgagtttttaaaacatgcttgggactggactgataaatatggaggaggtattttagatcaattaaaaaagttgggttgttcatgtgattgggacagaacaaaatttactcttgatgatgatatgtatgaatctgtaattaaagcctttgaaattcttcataaaaaaggattaatatacagaggtaatagaatgataaactgggatcctgaagcaaaaactactgtttcagatgaagaagtaaattacgttgaggaggattcaagcttgtattacataagatacttaatagaggattcaaatattgatttagaaatggcaaccacaagacctgaaacaatatttggtgatacagcaatttgtgtt

SEQ ID NO: 307089 - DNA, 520 bp, Unknown
  Bacterial polypeptide expressing nucleotide sequence isolated from the Sargasso Sea
atgagtcaagataggtacaatcacaaaaaagttgagaatagagtctattcttattgggaaaaaaacaagttattcaaaccaaaaaaaaacaaaaaaagtttttctatagttataccacctccaaatataaccggtagcttgcatatgggtcatgcacttaataactctctccaagacgttttagcaagatattatagaatgaataatcacgagaccttgtggcaacctggaactgaccacgcaggtatagcaactcaggctctagttgaaaaaaaactaaaatccataaatatagataaaaaccaaattgggagagaaaaatttattaaaaaagtatgggaatggaaaaatgaatatggaggtaaaattattaatcaattaaaaaaattggggtgctcttgtgattggtcaaggaatacttttactatggataaaaatctttcaaaatctgttttaaaagtttttgttgaattacaccaaaaaaagttgatttataaatcaaaaaaactcgtaaattggg

SEQ ID NO: 307090 - DNA, 460 bp, Unknown
  Bacterial polypeptide expressing nucleotide sequence isolated from the Sargasso Sea
catgagttcagacaaatatattcacgaaaatgttgaaaataagatttattcttattgggaagaaaaaaatttatttaaaccaaaatctaataaaaaacaattttcaatagtcatcccaccacccaatgtaactggtagtcttcatatgggtcatgcactaaataattctattcaagacttattaactcgatatcatcgaatgaataattttgaaactttatggcaacccggaactgaccatgcaggtattgctacacaggcattagtagaaaaaaaacttaaatctgaaggtatagataaaaatgatttaggtagagataaattcatagaaaaagtttgggaatggaaaggtcagtatggtgatattattattaatcaattaaaaaaattaggttgttcgtgtgattggtctagaaatgccttcaccatggacgaaaatctatcaaaatctgtattaaaa

SEQ ID NO: 307091 - DNA, 652 bp, Unknown
  Bacterial polypeptide expressing nucleotide sequence isolated from the Sargasso Sea
aatgagttttgataaatatgagcataaaaatgttgagaataaaatatatgattattgggaaaaacatgaattatttaaacccaaagaaaattcaaaaaaattctcaatagtaattccaccaccaaatgtaactggaagtctccacatgggacatgctttaaataactcaattcaagatgttttaacaagatttcatagaatgaataattatgaaactttatggcagccaggtacagaccacgctggtattgcaacccaagcattagttgaaaaaaaacttgcaaaagaaggtgtaaaaaaaaacgatttaggtagagaaaaatttatagaaaaagtatgggaatggaaaaatgagtatggcgatattattataaaccaacttaaaaaacttggatgttcttgtgattggtctcgtaatgcattcacaatggatgagaatttatccaaatcagtcctaaaagtatttgttgatctttataataagaaattaatctacaaagcaaaaaaacttgtaaattgggatgttgttttaaaaacagcaatatctgatttagaagttgatcaacgtgaagtaaattctcaactttattatataaattatcctatagaaaattctgataaatttataacaattgcaacaaccaagacctga

SEQ ID NO: 307092 - DNA, 559 bp, Unknown
  Bacterial polypeptide expressing nucleotide sequence isolated from the Sargasso Sea
atggaatttaaaaaatacaaccataccaaagaagaaaaaaaaatctcagatttctggattaaaaaaggattgtttaaaccaagaaaaaataactcaaacaaaaaattttctgttgtaattccaccccctaatgttactgggagattacatatgggacatgcattaaataatagcctgcaagatgttctagtgagatttaatagaatgaaaggcttggaaactctatggcagccaggaactgatcatgctggaatcgcaacccaagctgtagttgaaaataatttacataaagaaggattaaaaaaaaatgacttgggtagagaaaaatttataaaaaaagtttgggattggaaagaagagtctggtggtataattttagatcaacttaaaaaactaggttgctcatgtgattggtcgagaaccaggtttactatggataaagatttgtccgaagcagtaattaaagtttttgttgatctttataataataatttaatttacaaagataaaaaattagttaattgggatactaaacttcaaaccgctattctgacttaga

SEQ ID NO: 307093 - DNA, 879 bp, Unknown
  Bacterial polypeptide expressing nucleotide sequence isolated from the Sargasso Sea
aatgtcaattccttcaaagttcatttcaaaaaaaattgagaaaaaatggtattcacattggattgaaaacaatttttttgattctattcctgattctagagatccatatactatagttattcctcctccaaatgtgactggagttcttcacatgggtcatatgctaaataatactcttcaagatattttaataaggcgtgcaagaatgatggggtataatgcttgttgggttccggggactgatcatgcttctattgctactgaggctaaagttgttgaaaaattaaaaaaggatggaattaaaaaaagtgatttatcaagagaagattttcttgaatatgcttgggaatggaaaggtaaatatggcgatatcattttgaaccaattaaaaaaactaggttgttcatgtgattggaaaagaactaaattcactttagatgataaaatgtctgattctgtaattaaggtttttattgatctatataataaaggtctaatatacaggggttatagaatgctgaattgggatccaaaagctcaaacaactctctctgaagaagaagtgttgttcgaagaaagagaagctaaactatatcatatagcatatgaattatatggttcagaagaaaaaattataatcgccacaactaggccagaaacactcataggtgacacagctgtttgcattaaccctaaagatgaaagatattcacatttaactgagcaaagtgttttgattccgattgttaacagaaaggttccaatcattaaagatgattatgttgacattgattttggtacaggttgcctaaaagttacccccgctcatgattttaatgacaatgttttaggtgaaaagcataatcttgaagtaataga

SEQ ID NO: 307094 - DNA, 601 bp, Unknown
  Bacterial polypeptide expressing nucleotide sequence isolated from the Sargasso Sea
atgagttcagaaaaatatatacatacaaaagtagaaaataagatttattcctattgggaaaaaaaacaactttttaaaccaaaaaaaaataagaaaaaatattcaattgtaataccaccacctaatgtaacaggaagcttacatatggggcacgctttaaacaatacgatccaagatttattaattagatatcatagaatgaataattatgagaccttgtggcaacctggaactgaccatgcgggtattgcaactcaagctttggtagagaaaaagttagaaagccaaaatataaataaaaaatccatcggaagagacaaatttgtaaaaaaagtttgggagtggaaaaatgaatatggtggaataattatcaatcaattaaaaaaacttggatgttcttgtgattggtcgagaaatgcatttactatggataaaaatttatcctcatctgtaatcaaagtttttatagatttgtacaacaaaggattaatttataagtcaaaaaaattggtaaattgggatacggttctaaaaaccgctatatcggatatagaggttgatcaaagagaagtcaattcaaagctatactatataaattacc

SEQ ID NO: 307095 - DNA, 1141 bp, Unknown
  Bacterial polypeptide expressing nucleotide sequence isolated from the Sargasso Sea
attatgtttggtacagagtttttgaacaaggaaccatttaaagatatttatgttcacgctttagttagagatgaaaagggacagaagatgtctaaatcgaaaggaaatgtaattgatcctttagatttaattgaaaaatatagtgcagatgcactaaggtttactttgttgtcaatggcatcaccaggtactgatgttaagctttctgaagatagagtaaaaggttatagaaattttttaaataaattatggaatgcaaataattttttaatcactaatgaatgtgaatttaaagatatagataaagttcctagtttaaatgtaaatattaacaaatggatttattcagaacttgttgaaactaaaaataagatagaaaaaaatcttgaagattatagatttgatgaagctgctaaaaatgcttatcaatttgcatggcattcatattgtgattggtatttagagctatctaaaacaatactattttcagaagatgaaaaagccaaagcagaggttaaaaaggtatcatcctttgtattcaaacaaattttgattttgctacatccttttattccttttgttactgaagaaatttggcttaagaacaaatttgataatgacggcagtgattatttgatgcttaaaaattggttgtcgggtgagataaataaggacactagtactgaacaggtagaaaatatcattaacattatttcagagattagatcatttaaaaatgagcttaatgtaagcccaggctcatttattgatgtatcaataagtaatattaacaaaaatcaaaaagattttattaatacaaatgaaattatcctaaaaaaacttgggagaattaacagcatcctagataaagatttagataaaccagctgcgacaatggttgtttctggtgatttgtttaagatttattttgataaagatgttgatttaaaattaattaaagaaaatttaacaaataaacaaagtagattagagcaagagatgaataaaatatcccaaagattagagaataaaagttttgtagatcgagctccaaaagagattgttgaacaagaaaaaaataattataataatttaaagaatgatattgagaaaatatcagtaacaataaagggtatataat

SEQ ID NO: 307096 - DNA, 632 bp, Unknown
  Bacterial polypeptide expressing nucleotide sequence isolated from the Sargasso Sea
aatggataagaagccatatgatccatctgatatagagcaaaaactctataaagcatgggaagattcaggcctctttgcaccaggagataatcctgaagcttattcacttgctataccccctccaaatgtgactggaacattgcatatgggccatggatttcagaatgccatcatggattgtttaattcgatactatcgaatgtccggcaaaaatactttatggcaagttggaacagaccatgctggtattgcaactgagatggttgtagaaaggcgactcaatgctgaaggtaaaacaaaaagtgatatcggcagagaagcttttgaagaagaagtttggaattggaagaaagtctcaggtaataaaattacatctcaacttagacgattaggatcgagtctagattggagttctgaacgattcactttagatgaggaatatcagcatgctgttttaagtgcatttattcaattgtttgaagaaggtcttatttaccaaggtcaaaggcttgtgaattgggatcctgtcttagaaacatctctctctgaccttgaggtagtaaataaagatctcaaaattaaaatttgggaaataaaatatcaacttgaagcaactgatgagtttgtgactg

SEQ ID NO: 307097 - DNA, 396 bp, Unknown
  Bacterial polypeptide expressing nucleotide sequence isolated from the Sargasso Sea
aatgcttgaaaaacattacaagcctagttttcttgaagaaaagttttataaaatttgggaaaagtcaggcgtattttctgcaaatccagaatcttgtaaacagccgtacgctatcatgatgcctcctccaaatgtaactggtagtttacatatgggacacgggttaacattttcccttcaagacatcttaatccgatactatagaaaaactggtcgggatactctttggcaaccaggaactgaccatgcgggtattgcaactcaaatggtggtggagaggcagcttgcagtagagggtgtatcacgacaagagttgggtcgaactaaatttcttgagaaagtttggcaatggaaacgagagtctggcggaaagataacggagcaattgcgttcatt

SEQ ID NO: 307098 - DNA, 662 bp, Unknown
  Bacterial polypeptide expressing nucleotide sequence isolated from the Sargasso Sea
aatgccgtccaatcaattagataaaacatatagatccaacttagttgaagataaatggtatgagcattggatagaacaggattatttcaccgctgattcaagttcagagaaagaaccttacactattgtcataccgcctccaaatgtgacaggtatgctaacagttggacatgttttgaataatacgatacaagatattctgattcgaaaagcacgtatggaaggaaaagaagcatgctggattcctggcacagaccatgcatctattgctacggaatcaaaggttgtggccatgctacatgagaaaggcataaataaaaatgatctatctcgcgaagaattcttagagcatgcatgggaatggaaagaaaagtatggtgggattattattcggcagctcaaaaaattaggttgttcttgcgactggtcgagagaacggtttacaatggatgaaggttatacaaatgctgtcctaactgcttttgtggagttgtataataaaggcctgatatataaaggccaccgtcttgttaactggtgccccatttcaagatccgctatcagcgatgaagaagtgattcataaggaaaagcagggtttcctttggcattttcgttatccgatcacaaactctgatcaatacattgttgtgcaacaacgcg

SEQ ID NO: 307099 - DNA, 787 bp, Unknown
  Bacterial polypeptide expressing nucleotide sequence isolated from the Sargasso Sea
atgaaaaacacacctttagataaaagatataaaccttccaagatagaagacaaatggtaccagcactggatgggaaagaaatattttaaggcagatgaacactcaaaaaaagaaccttttactattgtaatacctccgcctaatgtgacggggattttacatttaggccatgttttaaataatacaattcaagatgttttaattcgtaaagctcgaatggaaggtaaagaagcatgctggattcctggtaccgaccatgcttctatttcaaccgaatctaaagtagtggaaatgctaaaaagtaaaggtattaataaaaaagatttagatcgagatgaatttttaaaatatgcgatggattggaaggatgaatatggtggcattatcatcaagcaattaaaaaagttaggttgctcatgcgattgggatcgtgaaacgtttacaatggatgaaggctattcaaaagcagttctaacggctttcgttaatctatataaaaaaggaataatttatagaggaaatcgactagttaactggtgccctatatctcaatctgccattagcgatgaggaagttatttatcgcgaaatcaaggggaaactctggtactttaaatatcctatcaaaggcttaaaagaatttatagttgtcgctactactaggccagaaacaatgcttggagattccgcagtcgcaattaatccaggggataaacgatttaaacatttaattggggaatctgttattctaccattagtagataaagagattccaattatatctgata

SEQ ID NO: 307100 - DNA, 1040 bp, Unknown
  Bacterial polypeptide expressing nucleotide sequence isolated from the Sargasso Sea
gatgggaaattcttttatgggaaaagaaccattttctgaggtttatattcatgctttagttagagatgaaaaaggacaaaaaatgtcaaaatctaagggtaatgttgttgatcctttagacctcgtagacaaatatggcgctgactcactgcgtttcactctcacagcaatggcagctcagggaagagatgttaaaatgtctgagtctagagttcagggttatagaaacttcggaactaaaatttggaatgcatcaaaattttgtgaaataaataaaattaatgaatttaatagtttcgatagtaagtctttgagttatccactaaacatatgggttttaaatgagttttctaaaatgcaaactcaacttgaaaataatttgaaagaatacagatttaatgaggctgcaaacaacatatatcagtttgtttggggtacattttgtgattggtacattgaattaattaaacctcatctttctgaaaaagatgatgaatatgctgatgaaattaaggaaacatgttcatatatcttagattcaatattaatcactttacatccatttatgccgttcattacggaagaaatatggcaaaacataaaaagaagggataatccattaattattgaaaaatggagaaagatttctttattagatgatgaaaataattttgagcaagaagtaaatgacttaatagaaataatatcaaacataagatcaattagagttgaattaaatattaaaccaaaagaagacctggctatcgaaattatgaataattcagatgtgcttaaaatcaaaaatttaaaattttatttattaaaaattgctaacatcacaaatataattgaagtatctaaattttcagagaaatcagcaaattttaatgtaaataattctcagctctctttaattattccagaaagtattgatctttctgacgagcttcaaagagtagtaaaagaagaagaaaagcttgaaaatgatatacactcaataacaaatcgacttaataacgaagattttgtagctaaagcac

SEQ ID NO: 307101 - DNA, 493 bp, Unknown
  Bacterial polypeptide expressing nucleotide sequence isolated from the Sargasso Sea
catgggttttggtaaatataatcataaaaaagtagaaagcaggatatattcttattgggagaaaaataagttatttaaacctaaaaaaaacaaaaaaaccttttcaatagtaataccacctccaaatattacaggtaccttacatatgggacatgcactaaataactcactgcaggacgttcttgtaaggttttacagaatgaataattatgaaaccttatggcaaccaggaacagaccatgccggaatagctacacaggctttagttgaaaagaatcttaaatcaaaaaatattgataaaaatataattgggagagaaaaattcattaaaaaagtttggcaatggaaagatgaatatggtgaaaaaattattaatcaattaaaaaaattagggtgttcatgtgactggtctagaaatgcatttacaatggataagaatttatccaaatctgtaataaaagtatttgttgagttacatgaaaaaaaattaatt

SEQ ID NO: 307102 - DNA, 1168 bp, Unknown
  Bacterial polypeptide expressing nucleotide sequence isolated from the Sargasso Sea
attatctttttttgggttgctagaatgatgatgtttggaatggagtttttaaacaaagaaccttttaaagatatctatgtgcatgctttggttagagatgaaaaaggacaaaaaatgtcgaagtcaaaagggaatgttattgacccactagatttaatagaaaaatatagcgcagatgcactaagattcactttactttcaatggcctctccaggaacagatgtgaagctctctgaggaaagagttaaaggatatagaaattttttaaataaattatggaatgctaataatttcttaattacaaataaatgtgattttaaaaaaacagataaggttccaaaagtaacgttaaatataaataaatggatatactctgaattaatggatattaagaataaaattcaaaaaaatattgaagattatagatttgatgaggctgctaagaatgcctaccaatttgcttggcactcatattgtgattggtatatcgagctttctaaaacaattctttattctgatgataaaaaagctcaaaaagaagtaaaagaagtatctgcttacattttcaaacaaatattaattatgcttcacccatttattccattcgttactgaggaaatttggcttaagaataagtttgataaatctaacaagaattttttaatgtataaaaattggcctaaaggcaaagtcaaaaaagatcagtctcaaaaagatgtagaaaaaataataaatattatttcagaattaaggtcatttaaaaatgaattaaatgtaagtccaggctcatttgttgatgtatccattaataaaatagcaaaaaaaaataaatctttgatgaataacaacgagatagttctaaaaaagcttggtcgtatcaacaacttttatgacaaagatcaaaataaaccttctgctacattggtcatttcaggtgatattttcaaagtatattttgatgaaaatgttgatctaaatctaattaaacaaaatttacttaaaagacaaaataaatatcaagaagaaatggataagatttcacaacgattatctaataaaggatttgtagatagggcaccaaaaaatattgttgaacaggaaaaaactaactatagtaacttaaaagatgatatcaaaaaaatatctttaacaattgaaagtttataat

SEQ ID NO: 307103 - DNA, 526 bp, Unknown
  Bacterial polypeptide expressing nucleotide sequence isolated from the Sargasso Sea
aatgagtagcgataaatatatacattctgatgtagaaaatagaatttattcttattgggaaaaaaatggtctttttaaaccaaaggaaaataaaaaaaaattctcaattgtaataccaccacctaatgtaactggcagtttacatatgggtcatgcccttaataattcaattcaagatttattagttcgttaccatagaatgaataattttgaaactttgtggcaaccaggtacagaccacgctggtatagccactcaagctttagtagaaaaaaaattaacttctgaaaaaattgataaaaatgaaattggtagagaaaaatttattgaaaaggtatgggaatggaaagagcaatatggagacataatcattaatcaattaaaaaaacttggttgttcttgtgattggtcaagaaatgctttcactatggatgaaaatttatcaaagtcagtaatcaaagtttttgtagatctatataataaaggactaatttataaagataagaaattagtaaattgggacaca

SEQ ID NO: 307104 - DNA, 1075 bp, Unknown
  Bacterial polypeptide expressing nucleotide sequence isolated from the Sargasso Sea
atgattggcctagagacagtgaaggatctaagtaaattttacccgacaaatgccttggtgactggtccagacattattttcttttgggttgctaggatgataattaccggttatgagtttataggtcaaaaaccatttactgatgtttattttacctctattctgagggatgaaactggtaaaaagctgagtaaatcacttggaaattctccagacccgtttgatctatttgatgaatacggtaccgatgctgtaagatttggtatcatgctaatggcacctcaaggcattgacgtcttattttcaaaagaaaggcttgaaatcggcagaaattttatgaacaaactttggaatgcctgtcgatttatatctatgaataaaccagatgattggtttgaagaatattccccggatcctgaagagctaaagctcccggataaatggattctaagtcgacttaatcaggcaatagaaaagtacaatcatcaattggagagattccatttcaatgaagcagctaaggtattatatgattatatatggaacgacttttgtgattggtatatagagattgcaaaaacaagattttactcagaagatattgatagtaagatgatgacatattacgtctgtatctcatcaattagaaaaactgtggcccttctacacccatatacaccatttatcacagaagagttgtggtcttttttcaaggatgagaattcaaacgatttgataatttctaaatggcctaaagaaagcaaagacctgattgatgaaaaagtgactcaggccatggagatactaaaagatattatttcttcggtacgtgcaatacgtagcaggatgaatatacctccgtcaaaaaagatcaatctctatataaaatgcaaagaagcccaagtagattttatctatcaaaataataatttaattatgagtctagctaagttggaatcttactctgctggttcttcgattcaaaaaccgtctcaatcagcagctgcagtagttcatggaatggagctttatattccactcgaagggttagtagatttaggtaaggaaagattgc

SEQ ID NO: 307105 - DNA, 573 bp, Unknown
  Bacterial polypeptide expressing nucleotide sequence isolated from the Sargasso Sea
atgattttgagattgggaagcgtcatgaacttgactctataaatataatgaatgatgatgcttcaataaatgataacgcccccaaaaagtatattggtcaaagtagatttgatgctcgaaagcaaattgttaatgatattgaaaaagcgggtttattagaaaaaacagagaaatatttacacacagttggttattctgaaagaggagatgtcccgatagaattttatatgtcagatcagtggtttatgaaaatgagcgagttggttcaacctgcaattgaagcagtagacgctggtgagattcgatttcatcctgcacattgggtaaagacatataatcactggatgaaaaatatcaaagactggtgtataagcaggcaattattatggggtcatcaaatccctgtttggtatcataaaaacgatagtgccaaaattcatgtatctgtagatggacctaaagataaagaaaactggtatcaagacagtgacgtcttagatacctgggcaagttcatggatatggcccatgggggtacatgattggcctagagacagtgaaggatctaagtaaa

SEQ ID NO: 307106 - DNA, 805 bp, Unknown
  Bacterial polypeptide expressing nucleotide sequence isolated from the Sargasso Sea
ttgggttggcctaaagaaaatgaattagaaaagtactttcctacaagcttattagtgactggcttcgatattattttcttttgggtcgcacgtatgatgatgatgagtctagaatttacaggcaaagtaccttttaaagatgtttatgtcacaggtttaattagagatgaaaatggacaaaaaatgtcaaagtccaaaggcaatatcattgacccaattgatctaatctatggcattgatcttgaagatctagtgaccaagagaacagcaaacctaatgcaggaaggtctagctgaaaaaatagaacgtaaaactcgtaaacagtttcccaatggaatcgaatcatatggaaccgatgcattacgtatgacattcttttctttagctacacatactagagatattagttttgaacttggaagactcaaaggctataggaatttttgtaataaaatctggaacgcagcacgatttattaataactatccacatgaatcaacagaatttgttgcaaaaaatgatcatgataaatggatagaaaaagaatttgagcaagtatcacagcaaattaagaaaaacatcgatgaatatcgcttagattttgcagtaaatgaagtctatgaattcttttggggtaaattttgcgataaatacatagaagattgcaaaaaatctggagagacttcaaatcttcacccaatgctaaaaaagattttagtactcatgcacccttttgcaccttttattacagaagaggtaaatgaacttgtctttaaagatggttcattaatggatagcaaataaa

SEQ ID NO: 307107 - DNA, 1231 bp, Unknown
  Bacterial polypeptide expressing nucleotide sequence isolated from the Sargasso Sea
aaaaagtattacccaggttctgttttagttactggctttgatattatctttttttgggtcgcaaggatgatgatgatgggcatgcattttatggatcaaaaagttccatttaaagatatatacattcacggtttagtcagagatgaaaaaggtcaaaaaatgtctaagtccaaagggaatgttatggacccgttagatttatctgaaaaatatggtgctgatgctttaaggtttacattagctgcgttagcaactcaaggcagtgatattaaattatctgaaactaggattgcaggatacagaaatttttctactaaaatttggaatgctactaaatttttagagaataataaatgtacatttaataaagactatagaccaaaaaaattaaaaaataatattaatatttggattgtaaatgaattcaattcaactttaaaaaaattatatgaaaatttgaactcttataaatttaatgaggcagctgataatatatataaatttttttggaatagttattgtgattggtacatagaacttataaagccttcattgtcagaaaaatctgtttcagaggatatatctgaatttaggaatgtatctagttggattttattcaatagtttatcaattataaatccatttatgccttatgttacagaaactttgtcaaaagaatactttggttccaaagaattattaattgtttctaaatggccagaaccatgcttaattgaagacaataacatcgctaagaatgagattaattttttaatatctttattaaccgaaattaggataattagatctgaattaaatattccttataaacaaaaactagaattgttaattagaaataatgaaagtctgaaactttcgataattacaaaatatgaagatattatttgtgatattagtaaactttcttcaattaaaataattagtcacgaatttccaaatggttctgcaacgggagttgtaggagagttgtcaattggtataccattatcaggcacgataaacttagatgatgaaattataagattaaaaaaagaaattaataaagtagatgaggaaatattaaaatttgatcaaaatcttagtaataaaaattttattaatcgcgctcctgaaaaagttgtaaatgaactaaaaaataaaagaaatgcttcaattgataaaaaaaataaattgaatgaggccttaaatagagtagattttaaaaagtagc

SEQ ID NO: 307108 - DNA, 1318 bp, Unknown
  Bacterial polypeptide expressing nucleotide sequence isolated from the Sargasso Sea
tgtcttagtgacgggatttgatatcattttcttttgggtagcaagaatgataatgatgactactcatttcatcaatgaggtacccttcaagaaaatattaattcatggtcttataaaagattcagaaggccaaaagatgtctaaatctaagggtaataccttggatcctttggatatcatagatggaattaacctagataacttgatcaagaagagaactgaagggttgatgcaaccaaaaatgagagatcggatcataaaacaaaccaaaaaagaatttcccaacggtatcgaagcttatggaactgacgcattgagactaactttctgctcgctagcgacgggtgggagggatatcaatttcgatgttaaaagagtagaaggttatagaaacttttgtaacaagctttggaatgcggccagatttatagatttaaatattgataactatggtatttccacaaagagaagtgaaagttcaattgattcctggattgactataaattcaatcaaacggtaaagaaagtagaccagtcaatgaatgaatttagatttgatttgaccactaaagcaatctatgaatttatatggtacgaattttgtgattggttcatagagcttcagaaaataagtcttagaaaaaatgacatgaataaagcagagattgttaggtctttggtcgatattcttgaaaaaactctaagacttgcacatccaatcatgcctttcataacggaagaaatttggaaacaatttaaggtgcatcataattcaactcatgagagcataatggtatctgaatacccgttaggttcagaaaatacttctgaacgagactaccaatcagtagaatggcttaaagatattgtatctggaataagaaatatacgtggcgagcttcttatcaaaccttcaattaaaatttcttcaatctttaagggaggagatcaattagataagggaaacttaaatgaaattggtagttatatagaaaagctatgtggtctcaaagagattatttgggctgaagagagttctcaagacattccctcatcaatatttactcgagacaatctaaaagtaatgataccccttgaaggactcatagacgcaaaggaagaaatgcaaaggctcaataaaaaaatatctaaacttattcaagaaaaggaaatgttaggtagtaaactttctaatcagaactttgttgaaaatgctccaaaagatttagtggaggctcaaaaagatagattttctcttttatctaaagaactagaaaatcttgacttgcaaataaaagaaattaaaaaaatgatttag

SEQ ID NO: 307109 - DNA, 337 bp, Unknown
  Bacterial polypeptide expressing nucleotide sequence isolated from the Sargasso Sea
aatgagttttgataaatatgagcataaaaatgtagaaaataaaatctacgattattgggaaaaaaatgatttatttaaacccaaagaaaattcaaaaaaattctcaattgtaattccaccaccgaatgtaactggaagtctccacatggggcatgctttaaataactcaattcaagatgttttaacaagatttcatagaatgaataattatgaaactttatggcagccaggtacagaccacgctggtattgcaacccaagcattagttgaaaaaaaacttacaaaagaaggggttaaaaaaaatgatttgggtagagaaaaatttatagaaaaagta

SEQ ID NO: 307110 - DNA, 154 bp, Unknown
  Bacterial polypeptide expressing nucleotide sequence isolated from the Sargasso Sea
cctggtatgggccagatggagaaatttttgttgccgaaaattcagatggcgctcacaagatagccaaggaacattacaaaaagatgtaaaacttgttcaggatgaagatgttcttgatacatggttttcttcagctttatggcctttttctact

SEQ ID NO: 307111 - DNA, 604 bp, Unknown
  Bacterial polypeptide expressing nucleotide sequence isolated from the Sargasso Sea
catgagttcagacaaatatattcacgaaaatgttgaaaataagatttattcttattgggaagaaaaaaatttatttaaaccaaaatctaacaaaaaacaattttctatagttatcccaccaccaaatgtaactggtagtcttcatatgggtcatgcattaaataattctattcaagatctattaactcgctatcatcgaatgaataattttgaaactttatggcaaccaggaactgaccatgcaggtattgctacacaagcattagtggaaaaaaaacttaaatctgagggtatcgataaaaatgatttagggagagaaaaattcatagaaaaagtttgggagtggaaaggtcaatatggggacataataattaatcaattaaaaaaattaggctgttcatgtgactggtctagaaatgcttttaccatggacgataacctatcaaaatctgtattaaaagtttttgttgaaatgtacaaaaatggattaatttacaaatcaaaaaaattagtaaattgggacactgtattaaaaacagcaatatcagacttagaagtagaccaaagagaagttaattcaaagttatactacatcaatttatcc

SEQ ID NO: 307112 - DNA, 1825 bp, Unknown
  Bacterial polypeptide expressing nucleotide sequence isolated from the Sargasso Sea
tatggaaccaaagattacagaaaaagcatgggaaccaaaacttgaagaagcaattttaaaaaaatgggaagatgaaaaactttatgatttcaaactagaagataacaattacacaatagatacaccaccaccttatccatcaggtagaccatggcacattggtgcagcatcacattacgcacaaattgatatgattgcaagaacagcaagaatgaatggaaagaatgtttactttccaataggcatagatcgaaatggattacctgtagaattgtatacagaaaaaaaacacggtattcgaatgcgtgaaactgaaagaggtgagtttttgaaattatgtcaaaatgcactagatgatttagaagctgaaatgatagagataatgaaaagtctcggtttgagcggcgattttaagaattattacagaacagattcagaagaatacagaaagtttactcaggaaacatttattgatctttggaagaaaggcgtcatttatcttgcaactagaccaaataactatgattgggtttcaggtacaactattgcagatgcagaaatagtatatgatgatcttccaacaaaacttgtttacatgaaattcatcgttaaagatgaaaataaggagataatcattgcaagtacaagaccagagctactttgtgcatgcaagacggtaattgtaaatccagaagacgagagatattcagacttgattgggaaaaaattggtagttcctttaacgaataaagaagttacaattacaccacatcattctgctaaaattgaatttggttctggtgcagtaatggtttgtagttatggtgatcaaaatgatgttgcattgtttagagaattacagttagaagaagtaattgcaattggtttggatggtagaatgacagaatctgcaggagattaccaaggactaaaaccaaaacaagcaagaacaaagattatcgaagatttagaaaattcaaatttggtagaaaaaattgaagagatttctcatagaacacccttgtcagagcgaagtaagactccaattgaaattgtcccaatggaggagtactatctgaaacaaaaagattctattgataaaatgaaaaaattaggttcagaaattgaattctatcctaatatgcataaacaaattttgatgaattggctagaatcaatatcaattgattggccaatctcaagaagaagattctatggaacagagataccaatttggtattgtaaagagtgttcagaaccatttgtgccagaaccaggaaagtattatcgaccatggaaggattcctgtcctgcagaaaaatgtgaaaaatgtggcaatacagaattcataggtgaagacagaacatttgatacatggatggattctagtgtttcaccactatttgttactaaattcaacagagatgatgaatttttcaaaaagacatatcctacaggaataagaccacaggcaaaagatattgttcgaacttggttgtattacacattactacgatgtgaaaaattaactgaacaaaagccatggtctgaagcatggattatgggttatggtttagatgaaaagggaatgaaaatgagtaagagtaaaggaaatgcaattgatccattgccagtaattcaaaaatcaggtgcagacacatttaggttttggagtgcaagtgaaatcaatcaaggatatgactttagatgttcagaacaaaaaatcgaatcaacaaaaaaattcttgagtaaattatggaatgtttcaagatttctttctagttttccaataatcgaatcaggtaaactaacagactcagataaa

SEQ ID NO: 307113 - DNA, 316 bp, Unknown
  Bacterial polypeptide expressing nucleotide sequence isolated from the Sargasso Sea
aatggatgaagaaaaagaaaatctttttagtaattacaatccaaaaaggattgaagaagagtggcttgatactataatttctgagaataatacagatggcactgatttctactctattgcaattcccccaccaaatgtaactggaaatcttcacttaggacatgctttaaattcaacaattcaggatgttttaatcaaatataattcattgattggattgaatgtacgttggacacctggaactgatcatgctggaatcgccacacaactattagttgaaaaagctttaaatagtgaaggtgttgattcgtcataa

SEQ ID NO: 307114 - DNA, 448 bp, Unknown
  Bacterial polypeptide expressing nucleotide sequence isolated from the Sargasso Sea
aatggagcttgataaattttttgattttttaaaagatgaaagacatctttattctcagtgggaagaatcaaattgttttaaaccaaaaaaaggaggtgagccttattctataatgatgccaccaccgaatgtaacaggaagcttacatatgggtcatgctttaacattcacagttcaagacatattgattagatatcatagaatgaaaggcatggaagtattgtggcaagcaggtacagatcatgcgggaattgctactcaaatggtagttgagagaaaattaagtgaatcaaatttagatcgacgatcaattggtagagaaaaatttattaataaagtttgggaatggaaaaaagagtcaggtggtcagataagcaatcaattaagaagattaggcgcttcacgcagattggtcaagagaaagatttacgatggacgatggtctttc

SEQ ID NO: 307115 - DNA, 277 bp, Unknown
  Bacterial polypeptide expressing nucleotide sequence isolated from the Sargasso Sea
aatggataaaagatatgagccacttattattgaagaaaagtggtcagagctttgggcaaaaaataatttaggtaaaaataactcttcacaaactttttcgcaggttattccacctccaaatgtaactggaactcttcatatggggcatagcttccagtattcgataatggatttctatgccagatacaatcacttaaatgatgtaaatactcattggcagatgggtacagatcatgcaggaattgcaacgcaaatggtcgttgaaacaatctatcca

SEQ ID NO: 307116 - DNA, 573 bp, Unknown
  Bacterial polypeptide expressing nucleotide sequence isolated from the Sargasso Sea
tatgcttgaagattcatatgagccattaagtattgaacaaaaatggcaatcagagtgggaattaaaaaatcaattcaaaccagttgagtctgataaacaattttcgattgtaataccacctccaaatgtaactggctcattgcatatgggtcatgctttagaacattcaataattgatgtaattgtacgtataaaaagacttcagggatttgaaacattgtgggttccaggaacagatcatgcaggaattattacacaactacttgtcgaaaatgaattatctgaaaaaggtctttcaaaagaagatgttggtcgtgagaatttcatttcaaaagtatgggagtggaaagaaaaatcaggtgaaaacatatcaggacagatgaagaaactaggtatgagttgtgattggtcaagggagagattcacaatggatgaagggctatcagcagctgttagacaagtttttgtaacgctatatgactctggatttatttataaaggttcaagaatggttaattgggatacaaaactaatgtctgcagtctcagacctagaggtcaatcttgaggaaca

SEQ ID NO: 307117 - DNA, 1069 bp, Unknown
  Bacterial polypeptide expressing nucleotide sequence isolated from the Sargasso Sea
tgaaaagggacagaaaatgtctaagtcaaaaggtaatgtaatagatccacttgatttaattcaaaaatatagtgcggacgctttaagatttactttattatccatggcatcacccggtactgacgttaaactttctgaagatagggttaaaggttataggaattttttaaataaactatggaatgcaaataattttttaatacaaaacaaatgtaattcaaaaaatgcaaaaaaacttccaaaattaaaagttaatatcaataaatggatatattttgagcttttacaaacatccaatttaataaagaaaaatatagaggattatagatttgatgaagcagctaagaatgcttatcattttgcatggcataaatattgcgattggtacttagaattatcaaaaacaattcttttttcagataatttaaaagctaaaaatgaagttaaagaggtttctgcttttgtatttagacaaatacttattatgcttcatccatttataccattcgttactgagaaaatatggctaacaaataaatttgataacaaaaataagaattttttaatgttatctaactggatctcaggtaaatctaaaaaagacagtgatcacaaacaagttcaacagataattgatattatttctgagataaggtcttttaaaaatgagcttaacgtaagccctggatcatttattgatatatctataaattctattaaaaaaaataatcaaaatttcatgattaataatgaaattattattaaaaaattaggcagaattaataatttctttaaaaaggatcaaaataaacctgccgcatcattaattatatctggtgacctatttaaaatttattttgatgaaaatgttgatttaaacgctattaaagaaaacttattgaaaagacaaaacaaatatcaagaagaaatggataaaatatcacaaagactaagcaataaaggctttgttcaaagagcaccaaaagatattgttcagcaagaaaaaactaattatagtaatttaaagaatgatattaaaaaaatttctttaactattgaaagcctttaa

SEQ ID NO: 307118 - DNA, 379 bp, Unknown
  Bacterial polypeptide expressing nucleotide sequence isolated from the Sargasso Sea
aatgagttttgataaatatgagcacataaatgtagaaaataaaatctacgattattgggaaaaaaaccggctatttaaacctaaagaaaattcaaaaaaattctcaattgttattcctccaccaaatgtaactggaagtcttcacatgggccatgctttaaacaattcaattcaagatgttttaacaagatttcatagaatgaataattatgaaactttatggcaaccaggaacagatcacgccggtattgcaacccaggcattagttgaaaaaaaacttgcaaaagaaggtgttaaaaaaaacgatttaggtagagaaaagtttatagataaagtgtgggaatggaagaatgaatatggtgatataataattaatcaa

SEQ ID NO: 307119 - DNA, 427 bp, Unknown
  Bacterial polypeptide expressing nucleotide sequence isolated from the Sargasso Sea
tattttgcgcctgatatggattctggtaaagaaccatttacaattactttgccgcctccaaacgttacgggtgaattgcatttaggacatgctttagagaaagctattgaagatgctttggttagatggaaacgcatgactggtcataaggtattgtggcaaccaggtagcgatcacgcaggtattgcaactcaatgggcagtagaattacagttggctaaagaagggattagtcgtcatgatttaggaagagacaaatttttggaaaaggtttgggagcacgtagataaatttggcggaatcattcatgaacaatctagacggttaggcatatcagcagactgggataggcatttgttcacactagacccaggacctagtttggccgtacgtacaacatttgtaaactgtacgagaaggggctaat

SEQ ID NO: 307120 - DNA, 181 bp, Unknown
  Bacterial polypeptide expressing nucleotide sequence isolated from the Sargasso Sea
tatggataagaaatatcaaccccataaattcgaagaaaagcattacaaatgctgggaagagaatggttatttcaagcctcaagggaaaggcgacccatactgcattgtaataccgcctccaaatgtgacgggaacgctccatatgggccatgctttccagatacaattatggatagtctga

SEQ ID NO: 307121 - DNA, 385 bp, Unknown
  Bacterial polypeptide expressing nucleotide sequence isolated from the Sargasso Sea
atggaatttaaaaaatataatcatagtaaagaagaaaaaaaaatctcagatttttggattaaaaaaggcttattcaaaccaaaaaaaaataaattaaataaaaaattttctatagtaattcctccacctaatgtaactggcagattacatatgggacatgccctaaacaatagtctacaagatgttttagttagatttaatagaatgaaaggcttcgaaactctgtggcaaccaggaacagatcatgctggaattgcaactcaagcagttgttgaaaataacctcttaaaagaaggaattaaaaaaaatgatttgggaagagaaaaatttattaaaaaaatatgggattggaaagaagagtctggtggaataattttagatcaac

SEQ ID NO: 307122 - DNA, 911 bp, Unknown
  Bacterial polypeptide expressing nucleotide sequence isolated from the Sargasso Sea
aatgtcaatttctgcaaaatttgatcccaagtcttttgaagataaatggtataaatattggttagataataacatatttaaatcaactcctgataaaagaaaaccatatacaatagttattcctccccctaatgtaaccggagttcttcatatggggcatatgttaaataacacaattcaagatattcttattagaagagcaagaatgaaaggttataatgcttgttgggttccaggaactgatcatgcatctattgctacagaggctaaagtggttgaaaaattgaaaaacgaaggtataatgaagaattcattgtcaagggatcaatttttagattatgcatggaaatggactaacgaatatggagatgtaatattagatcaattaaaaaaaattggatgctcatgtgattgggataggacaaaatttacattggatcctatgatgtcaaaatctgtgatcaatgtatttattgatttatataacaagggacacatttataagggttacagaatggttaattgggatccaaaagcccaaactacattatctgacgaggaagtaatcttcaaagaacaaaaagggaaattattttatgtttcttatatgatttatggagaaaaaaataaatcaattacaattgcaacaacaagaccagaaacaatcctaggagatactgcaatttgtattaatcctaatgataagaggtacataaatctccatggaaagaaagtagttgttcctatagttggaagagttattccaattattttagatgaatatgttgacccagattttggaacaggctgtcttaaagttactccctctcatgatcctaatgataagattcttggtgaaaaatttgatttggaattaatagatgttttaaatttagacggaactgttaatg

SEQ ID NO: 307123 - DNA, 1222 bp, Unknown
  Bacterial polypeptide expressing nucleotide sequence isolated from the Sargasso Sea
ttatggtgaagaaaaagatgattttgtagttgcttcaaattttgatgaagccttaattaaagcaaatgaaaagtcaggtagaactataaaagcagaagatttacatcaggatgaggatgttatggacacttggttttcctcctggatttggcctatagcagtttttgatggttttaatgaagacaatactaaagaactagattattactacccaacaaatgatttagtgactgcacctgaaataatgtttttctgggtagctagaatgattatttctgggtatgagtataaaaataacccaccttttaaaaacgtttattacactgggatagttagagataagttgggtagaaaaatgtctaaatctttaggaaatagtcctgaccctcttgaattaataaagaagtttggtgcagatggtgtacgtgtaggtatgttgttgtcatctccagcaggaaatgatttgttatttgatagtaatttatgtgagcaaggcaggaactttactaataaagtttggaatgcatttaggctaatcaactcttggacagttaatgatgatttggaacaattagaatcctctaaagttgcggtcaaatggatgagtgaaaaattttattcaaaccttgagtctatcaatcaatcttacgataagtttagaatatctgaagccttaatgggtacatacaaaacggtatgggatgatttttgttctttatttcttgaaatggttaagcctgcctatgaacatcccattgatagtacaacctttaatgatgttaaagtattgtttgatcttgttttaagattaattcacccatttacaccttttattgctgaagaaatttggcaacaattagacaacagaaaaccagaagaatttattgtaaatgcatcgtggccaaaaaaaccatcaactttaaaaattgattatttagaagactttaatgagtttcagcaagtgattacagaattaagaaacttaagaaatcaaaaaaacatagcaaataaagtttctattgatcttaaaataaagaacaatgaatctcgttctaaaaagtttgatagcgtgttgattaagcttggtaatatttcaacattagaatacataactgattctgttaagggagcttattcttttgttgttaatgcaaaagaattttttattccatttaacgatgaaattgacgttgatgctgaattggataaaattcaacatgaa

SEQ ID NO: 307124 - DNA, 1075 bp, Unknown
  Bacterial polypeptide expressing nucleotide sequence isolated from the Sargasso Sea
cgggatgaaaagggtcaaaaaatgtctaaatcaaaaggtaatataattgatccattagttttacttgataaatatggagctgatacgcttcgatttactcttacagccttgttaaatcctggtagggacgtaaagttagcagaggatagagtcaaaggttataaatcatttacaaataaaatttggaatgcagcaaactttcttaatattaatcaggttttatttattgatagtttagataatgaaaacattagtcttgatactagtaaatggattttgaaagaatatcaaaacgttcaagctcagtattttaaaaatattgaaaaatatcaatttcatgaaattgcaagtttgatataccattttacatggcatacattttgtgattggtacattgaatttataaaatcagattttgctaatgatgagaaatcagaagaaactaaaaaagtatcaggctggatctttatacaaattttaaaattacttcatccgattatgcctttcattacagaaaaattatggctatcacttgtagactctcaatcatttttaatgagtcaaaattttacaaaaattacatttgatgactcatttattaaaagcaacaagtacacaaaaaaagtaatcgaagttatgacagcattaagaaatcttagagctgatttaaatatatcatataaaaatgagatagaaatttttgtggagacaaaaaacgaagatttaaaaaaatttataaataatttccaaaatgagtttaaaagacttataaaaactaaatctataaaatttgaaaaagtttcttctcaaaaaaaatcagcttttattgttttaaatgagattacaatactagttcctttagaaggtattgtagatactgaaaaagaaaagtctaaacttaatgataaaaaaaatatttattcaaaaaaattagaagctgttttagataaattaaataataaagcttttattgataaagctccgaataatgttatcgaaaattttaaaattcaagaaaaagaaattaattcttctattgaaaaaattaatgaaataatgaatactattaattaat

SEQ ID NO: 307125 - DNA, 294 bp, Unknown
  Bacterial polypeptide expressing nucleotide sequence isolated from the Sargasso Sea
tatgggcacaggtaaatataatcataaaaaagtcgaaggtaagatttattcatattgggagaaaaataagttatttaaacctaaaaaaaacaaaaaaacctattctgtagtaataccgcctcctaatgtaaccggaagtcttcatatgggtcatgctttaaacaactcattacaagatgttttaatcagatttcacagaatgaatgaatttgaaactctgtggcaaccaggaacagaccatgcaggaatagctacccaagcactggttgaaaaatatctaaaatctaaaaacat

SEQ ID NO: 307126 - DNA, 337 bp, Unknown
  Bacterial polypeptide expressing nucleotide sequence isolated from the Sargasso Sea
tatgtctttaactaagttttttaattttatcgaagatgaaaagaaaatttatgtgaattgggaaaattcagatagctttaagtcaaaaaaaaatgaagaatcatattcaattatgatgccaccaccaaatgttacgggtagtcttcatatgggtcatgcacttacttttacaattcaagatattttaattcgttatcatcgcatgcagggaaaagaagttttatggcaagctggaacggaccatgctggaattgccacacaaatggtggttgaaagaaaattattagacgaagggttagatcgacgaacattaggaagagaaaaatttatgaaaaag

SEQ ID NO: 307127 - DNA, 799 bp, Unknown
  Bacterial polypeptide expressing nucleotide sequence isolated from the Sargasso Sea
cttggttggccagagaaaacagacgattttaaaagtttctttccaacttctcttttagtgactggttttgacattatatttttctgggtagcaagaatgataatgatgagtattgaatttactggaaaaatacctttcaaggatgtttatgttactggtcttatcagagatgaaaatggtcaaaaaatgtcaaaatctaagggaaatattattgacccaattgacttaatatatggtatttcaattgaagatcttgttgaaaaaagaacatcaaatttgatgcaggaaggtatcgctgaaaaaattgaaaggaagacaagaaaacaatttcctaacggaatagaatcatatggcactgatgcactaaggatgacattttattctttggccactcatacaaaagatattagttttgaatttggaagactaaaaggatttagaaatttttgtaccaaaatgtggaatgctgcaagatttattgatggatatgcaaatgaaaaagataaatttaaagcagaaaatgttcatgataaatggatatatgacgagtttagtaaaaccaaaaaacaaataaataaaaatatttctgattacaggctggattttgctgttaatgaaatatacgaattcttttggaataagttttgtgatgtttatatcgaacaatgtaagaaaagtggggaaacatcaaatttaagaccactcctaaaagaaattcttcagttagtgcatccatttgctccatttattactgaggaaattaatactatattatttgatgaaaggataattacttaaa

SEQ ID NO: 307128 - DNA, 529 bp, Unknown
  Bacterial polypeptide expressing nucleotide sequence isolated from the Sargasso Sea
gctttatggacattttcaacattagattggccaaataaaacatatgaattagagaagttttatcctagtaatgttttagttacaggttttgatattatatttttttgggtagcacgcatgatgatgatgggttcttactttatgaaagaaactccattcaaagatatttatatccatcctttaataagagatgaaaaaggacaaaagatgtctaaatcaaaaggcaatataattgatccattagaactattggataaatatggtgctgatacattaagatttaccttaactgcacttttaaatcctggaagagatgtaaaactatctgaagctagagttaaaggttataaatcattcacaaataaaatttggaatgcaggaaaatttttacaaatgaataattcagtatttaaagatgatatatcgattaatgagatatcttttgaagcaaataaatggatcataaaagaattaaatgatttgatctctcaacttgatcagttgactaaaaaagtatttgtttcatgaa

SEQ ID NO: 307129 - DNA, 955 bp, Unknown
  Bacterial polypeptide expressing nucleotide sequence isolated from the Sargasso Sea
aaaacctcatatgctttctcttccctatggagatagaagtaatgtcgtaattgaacctatgttaacaaatcagtggtatgttgatgcaaaagctttagctcagcctgctattaatgcagtcaaaactggaaaaataaaatttgtacctaaacaatacgaaaatatgtatttttcatggatgagagaaatagaagattggtgtatttctcgacaactatggtggggacatagaattcctgcatggtatgattctgatgaaaatgtttatgttggtgtcgatgagcaagatgttcgtgagagttataaacttgataaggaaatcaatctttttcaagatgaagatgtacttgatacatggtttagttcagccctttggacttttacaacattaggttggccaaaaaaaacaaaacaacttgatctatttcatcctacaaatgtattagtaactggctttgatatcatctttttctgggttgcaagaatgataatgatgactatgcattttatgaaggatcaaaataatgaaccacaaattccttttaaaacagtctatataactggcctaattagagatgagcaagggcaaaaaatgtcaaaatcaaaaggtaatgttttagaccctttggatatgatcgatggaattggtttaagtgaacttttaaaaaaacgcactattaatatgatgcaacctcaattaaaagataaaattgagaaacaaacaaaaaatgagtatccgagtggaataccctctcatggtacagatgcacttcgctttactctcacctctctagcatcaactggtcgtgatattaattgggatatgagtcgcctcgagggctatcgtaatttttgtaataaaatttggaatgccgcacgatatgtcttactaaatgttggtgatcaaaatttcacaaaagataatataatcaatctctctacaatagactcatgg

SEQ ID NO: 307130 - DNA, 1095 bp, Unknown
  Bacterial polypeptide expressing nucleotide sequence isolated from the Sargasso Sea
aaaaaccatcttttattcctccacgctgggagaaagtttataaggatggtttagagaatattaatgattggtgtattagtcggcaatgtgggtgggggcaccaaataccagcctggtatgttttagatgaatctcaagactcaatagaacaaaatactccatatatcgttgcaagaaatgaagaggatgccttaatcgaagctaataaaaaatttggatttaatattaaattggttcgtgataaagatgttttggatacatggttttcaagtggtttgtggcctttctcaacccttggctggccaaatacaaatgatccggattttaaaaaatggtatccaaatagtcttctagttactggtttcgatattattttcttttgggtggcgagaatgacaatgatggggaatacttttacaaataatattccttttaaggatgtctatattcatggtctagttcgagatgaaaacaataaaaaaatgagtaaaagttcaggtaatggtattgatccaatactattaattgagaaatatggttctgatgctctacgatttgctttaattcgagaagttgcaggtgctggacaagatatccggcttgattttgataggaaaaaagatacatcttcaactgttgaagcttcaagaaattttgcgaataaattatggaatgcaacaaaatttgtcttaattaataaaacttttaataataattattcgcttaatgagagcgatgaaaattctttagagttatgtgataagtggattttatcgaaattgaatcaagtaaatataaaagtcgctgctttgttgaaagaatataaattgggagaatctgcgaaacttctttatgaatttacgtggaatgatttttgtgactggtatgtagaatttgctaaacaaaggtttaataataaagagactaataatagacaaatatctgaaaaagttttaataaaagtgctcaatgatattttggtgatgattcatccttttatgccgcacattactgaagaactttggcatgtacttcaacttaaatcagataaagaattattatctcttcaaaaatgggcaacccaaagaaaataaa

SEQ ID NO: 307131 - DNA, 805 bp, Unknown
  Bacterial polypeptide expressing nucleotide sequence isolated from the Sargasso Sea
tctgctaataaatattatggtaaagatgtaaaacttattcaagaaaatgatgtattggacacctggttttcatcagcactttggccattttcaacgctaggttggcctaagaaaacagccgaattagaaaaattctacccaacctcagctcttgttactggttttgatattatatttttttgggtagccagaatgatgatgatgggtctttatttcacaaaaaaagttccattttatgaggtttatgtgcatgcactagtaagagacgagaagggtcagaaaatgtcaaaatcaaaaggcaatgtaattgatccacttgtcttgatggatgaatttggtgcagatgctttacgcatggcattgtgttcaatggctgcccaaggtagagatattaaattatcaaaacaaagaattgaaggttataaaaattttattaacaaaatttggaatgcagtaaaactatgcgagttaaataattgcttctatcaagaaatagactctaaaaagacaaaaaatatttttaataaatggatattgtttgaatatgaaaattgtcgaagcaaaactcaactcgctttagaaaattataaatttaatgaggcagcaaatgaactttataaatttacttggaatattttttgtgattggtatctagaattttcaaaagttatttacttatctaaaaatgatacagacattaaggaaacgagaaatataacttcatatgtattatcaaatatcataataatgtttcacccccattatgccattcttcacagaacatttatggcatcaggcatcaaaa

SEQ ID NO: 307132 - DNA, 981 bp, Unknown
  Bacterial polypeptide expressing nucleotide sequence isolated from the Sargasso Sea
tatgagcatttgatagaacaggattatttcaccgctgattcaagctcagagaaagaaccttacactattgtcataccgcctcccaatgtgacaggtatgcttacagttggacatgttttgaataatacgatacaagatattctgattcgaaaagcacgtatggaaggaaaagaagcgtgctggattcctggcacagaccatgcatctattgctacggaatcaaaggttgtggccatgctccatgagaaaggtataaataaaaatgatctatctcgcgaagaatttttagaccatgcatgggaatggaaagaaaagtatggtgggattattattcggcagctcaaaaaattgggttgttcttgcgactggtctagagaacggttcacaatggatgaaggttatacaagtgcggtcctaactgcttttgtggagttgtataataaaggtctgatatataaaggccaccgtcttgttaactggtgccccatttcaagatctgctatcagcgatgaagaagtgatccataaggaaaagcagggcttcctctggcattttcgttatccgatcacaaactccaatcaatacattattgttgcaacaacgcgccctgaaacaatgcttggtgatacagctgttgccatacatccagatgatgaaagatataaagacctagttggtaaaacggtagccctcccattgacggggagagagatccctattattacagacacatttgtcgaccctgactttggtacgggctgtgtaaaagtaacccctgcccatgaccctaatgattttgctatgggagaacggcatgatcttgaattcataaatataatgaatgatgatgcctcgcttaattcgagtgtcccagaaaaatacattggtctatctcgtgaaaatgctcgtaaatcagttgtagctgaccttgagtcattgggattgcttgataaaaaagaagatcatataaacaacataggg

SEQ ID NO: 307133 - DNA, 889 bp, Unknown
  Bacterial polypeptide expressing nucleotide sequence isolated from the Sargasso Sea
aaaagattagttaactgggatcctaaattattaactgccatttctgatttagaagtcgagcaaaaagaacaagaaggaagtctctggcacattaaatatcctattgatagagataactttattattgttgcaacaacaaggcctgagacaatgcttggagactcagctgtagctgtgcatcctaaagatttaaaatataaagatttaattggaaaaacttgcacactaccaattgttgaaaagcaaattcctattattgccgatgaatatgcagatcctgaaaaaggctcaggtgcagttaaaataactcctgcacatgattttaatgattttgaagtaggcaaaagacataatttagaatttgttaatatttttgatgaatttgctaaagtgaatcaaaatgcgccaactaaatttcaaggtctggataggtatgaagctagaaatttaatattagaagaattaattaaattagatcttctcataaaagaagaaaagcaagaaatggttatcccttatggtgacagatctggagtagtaattgaaccttggttaacagatcagtggttttgtaatgcaaaaaaattatcaattgatcccattaattctgtaaaacaaaataatacaaattttgttccaaaaatttgggaaaaaactttttttaattggatggaaaatattcagccatggtgtatttcaagacaattatggtgggggcaccaaatacctgcttggtatggcccagataataaattttttgtagcattatcaatagaagatgcaaaattaattgcaaataaatattatggtaaagatgttgagttaaaacaagatgaagatgttttagatacttggttttcttcagcactttggacattctcaacattag

SEQ ID NO: 307134 - DNA, 961 bp, Unknown
  Bacterial polypeptide expressing nucleotide sequence isolated from the Sargasso Sea
aagcttacatatgggtcatgctttaaccttcacagttcaagacatattaattagatatcatagaatgaaaggtatggaagtattgtggcaagcaggtacagatcatgcaggaatagctactcaaatggtcgttgagagaaaattaagtgagtcaaatttagatcgcagatcaattggtagagaaaaatttattgataaagtctgggaatggaaaaaagagtcaggcggccatataagcaatcaattaagaagattaggtgcttctgcagattggtcaagagaaagatttacaatggatgatggtctttcgaaagcagttaagaaagtttttgtaaatttatataatgatggaattatttataaagataagagattagttaattgggatccaaaacttttaactgctatttctgatttagaagtagaacaaagagatactgaaggaagtttatggcatataaaatatcctatagatgaaaataatcatatcatagttgcaactactagacctgagacgatgttgggtgattctgcagttgctgttcatccagatgatgaaaaatataaaaatttggtaggcaaattttgtaacttaccaatttcaaataaaaagattccaatcatagcagatgaatatgctgatcctgaaaaaggatcaggagctgtaaaaattactcctgcccatgactttaatgattttgaggtaggtaaaaggcatgatttagaatttattaatatctttgatgaaaatgctaagcttaattcaaatgtacctgtggagtttcaaaatttagatcgatttgttgtaagaaaactaattttaaaaaaattagatgaaatggatttattagttaaagaagagaaacaacaaatggttatcccatatggagatagatccggtgtgataattgaaccatggcttacagatcaatggttttgtgatgcaaaaaactatccatag

SEQ ID NO: 307135 - DNA, 931 bp, Unknown
  Bacterial polypeptide expressing nucleotide sequence isolated from the Sargasso Sea
gctgggaacggatccggacaccttggatacctggttttcctctgcactttggacatggagtaccctgattgatcaggatttggctcaagatgaaagcatctcttttgaggaattgctcaggaaaagtcctgatttccaaaaatttcatccgactcacgtgatggaaaccgggtatgacattctgtttttttgggttgccagaatgattttgatgacgaccttcatgatccgggaagtccccttcaaaactgtttacctgcatggtctggttcgaacacgtgacggcaagaaaatgtccaaatcagatcccctcacctgcatcgatcctctcgaaagcatccgtgattatggaaccgatgctctgaggctggcattgattcaaggcacaggaccagggcaagatctcaggctttatcctgaaaagctggagagctgcaggaggtttgcaaacaaagtctggaatgcagggcgttacatccttatgaatatcccatctggaacatcgctggatcctctgcaaaatgttcaaaacgaagccgcacggtggcttcttcatgaactggatttgctcattggaaaaactctacacggcttgcaagcttttcgactttcagaggtgattgataatcttagaagctttttctggggtacattctgtgattggtacctagaaatggataaaagacctgaccggaatgaggaagataatcgagtcttggcctatgctttgagcactcagctcaaacttcttcatccctatgtcccctttgtcacagaagcactttgggaaaatcttgggcaagataagatgttggcaaaagctccatggcctgaatctcagggatatgattttggagaaagtcaccaaaaaattcagttggtctgtgaatcggtttcacaattaagaactctccgtgaaaaagcgcgcttg

SEQ ID NO: 307136 - DNA, 961 bp, Unknown
  Bacterial polypeptide expressing nucleotide sequence isolated from the Sargasso Sea
tttttctgatagaggtaaggtgccaattgaacctttattgtcaacacaatggtttttgaaaatggatgatatatcacaaggatgtcttaatgaaattgattctaaaaaaccatcgtttatccctccacgctgggagaaagtttataaggattggttagagaatattaatgattggtgtatcagtcggcaattgtggtgggggcaccaaataccggcctggtatgttttagatgaatctcaagactcaatagaacaaaatactccatatatcgttgcaataaatgaagaggatgccttaatcgaagctaataaaaaatttggattaaatattaaattggttcgtgataaagatgttttggatacatggttttcaagtggtttgtggcctttttcaacccttggttggccaaatataaatgatcctgattttaaaaaatggtatccaaatagtgttcttgttactggtttcgatattattttcttctgggtggcaagaatgacaatgatggggaatacttttacaaagaatattccttttagggatgtttatattcatggtctagtgcgagatgaaaacaataaaaaaatgagtaaaagttcaggtaatggtattgatccaatactattaattgataaatatggttctgatgctctacgatttgctttaattcgagaagttgcaggcgctggacaagatatccggcttgattttgataggaaaaaagatacatcttcaaccgttgaagcttcaagaaattttgcgaataaattatggaatgcaactaaatttgtgttaattaataaaacttctaataataattattcgcttaatgagagtgatgaaacttctttagagttatgtgataagtggattttatcgaaattgaatcaggtaaatataaaagtcgctgctttgttgacagaatataaatttgggagaatctgcgaaacttctatatga

SEQ ID NO: 307137 - DNA, 988 bp, Unknown
  Bacterial polypeptide expressing nucleotide sequence isolated from the Sargasso Sea
catgacagagatgaatgatcaattatctatagagaattattcaccttttgaagtagagaaaaagtggcaagaaaaatgggaaagtctaaaggcgtttagtcctaaccctgaggatgatggggagcctttttgtgttgttattccgccaccaaatgtaactggatctttgcatatggggcatgcatttaatacggctttgatagatgttgtagtacgttttcaaagacttttaggtaagaatgttttgtgtttaccaggaactgatcatgcttcaatagctgttcaaactattctcgaaaaacaattaaaaagtgaaggcaaaacaagcgaggatattggaagagatgaatttcttaaaagagcatggaactggaaagaacaaagtggtggaagaatagtttctcaattaaaaaggataggatattcagttgactggactagagaaagatttactcttgatcaaaaattaaatgaagcagttattgaggcttttaatattctctataaaaagaatttaatttatagaggcgaatatttggttaattggtgccctgaatctcaatctgccgtaagtgatcttgaagttgaaatgcaagaagtaaatggtcatttatggcattttaaataccctttaatttctgaaagtggtgaacagttagataagtacttagaagttgcaacaacaagaccagaaactcttttgggtgatactgctgtggcagttaatcctgatgatgatagatataaagaatttattggtgtcaaagtaaaagttccttttgttgatagagaaatacctattatcgctgattcacatgttgataaagattttggtacaggttgtgtgaaggttactccagcccatgatccaaatgattttgcaataggaaaaaggcataatttaaaacagattaatgtaatgaataaagatggaactttaaatattaatgcaggtatttttcaaaatttagatagatatgaggctaga

SEQ ID NO: 307138 - DNA, 781 bp, Unknown
  Bacterial polypeptide expressing nucleotide sequence isolated from the Sargasso Sea
atggataaaaggtataacccaaccgaagttgaggagaaatgggttgaaatttggtcaaagaaagttttcttcaataaagatagtgaggaatctttttcacaggtaatacctccaccaaatgttacaggaactttgcatatgggacacagttttcaatatgcaattatggatttttatactagatatcatcatatgagtggtaaaaaatctcactggcaagttggagcagatcatgcaggaatagctactcagcttgttgtagagaataatctcgaaaaagaaaatcttgatagaaaagaaatgggtagggataaatttctcagtgaagtatggaaatggaaagatttttcggaagaaagaatacaatcacaaataaaaagattaggatcttctgtagattggaataaatatagattcactctagacgatgggtttacaaaagctgtaaacaaggcttttattgagttatatcgtaaagataaaatttatagaggttatagactagttaattgggatccttcattgaaaactgctgtttcagatcttgaggttgtaagacaagaaaaaaagggccttatttggcatattaaatatcatataaatgattcagataaatttattacagtagcaacaacaagacctgaaactatgtttggcgacatggcaattgctgttaatcccaaagaccctcggtataaatctctgattggtaaacatgcgcttcttccgtttgtggatagaaaattgccgattattggtgatgagtatgtagatatggaat

SEQ ID NO: 307139 - DNA, 929 bp, Unknown
  Bacterial polypeptide expressing nucleotide sequence isolated from the Sargasso Sea
ttctagacaattatggtggggacatcaaatcccggcttggtatggtcctgataaaaaaatttttgttgctgaaaatataaataaagccgaacttgatgcaaaaagattttataaaaaaaaagtcaaaataactagagatcccgatgttttagatacttggttttcatcaggcttatgggctttcgctacattaggatggcctaaaaaaaattattatctaaaaagattttaccctacttcagttttagttaccggatttgatattatatttttttgggttgcacgaatgatgatgttaggaatggaatttttaaaaaaagaaccttttaaacaaatttatgttcatgcactagttagggatgaaaagggtcaaaaaatgtcaaaatcaaaaggtaatgttattgatcctttagagttgatagaaagttatagcgcggatgctctgagatttactttactttccatggcttctcctggaagagacgtaaagctttctgagcaacgagttaagggttatagaaattttctaacaaaaatatggaatgcaaataattttctgaaggtaaataagtgtgaatttaataataaaataaatcccaaaaaactatcattaaatattaataaatggatatattcagaattaattattactaaaaatttagcagaaaaaaatgttaaaaattataggtttgatgaggcaacgaaagttatttataaatttgtttggaacagcttttgtgattggtacttagagctctcaaaaactatattgttttccaaaaataaaaaaaatattagtgaagttaaaaagacttctggttatatatttaaagaaatattgatacttctgcatccttttattccatttataacagaagaattatggcaaataaacaaacttggagataaaaaaaataagtatttgatgt

SEQ ID NO: 307140 - DNA, 442 bp, Unknown
  Bacterial polypeptide expressing nucleotide sequence isolated from the Sargasso Sea
atgagcaaaacaagtagttataatcataaaatagtcgaaaaaaaaatatattctttatgggaaaaaaagaagtgttttaaacccatcaaaaataaaaagaataaaaaatttgttatagtaatacctccaccaaacgttacaggcagtcttcacatggggcatgctttgaataattctatccaagatttattaataagatatcaccgtaacaaaggtattgaaacactctggcaacctggaactgatcacgctggtatagcgacgcagctggtagtggaaaaacaattaaatgaaaaaaatattaaaaagcaagatttgggacgtaataaatttgtaaatgaaatctggaagtggaaacgtaaatctggaaatgcaataacacttcaattaaaaaaattaggttcaagttgtgattggtcaagagaaagatttacaatggata

SEQ ID NO: 307141 - DNA, 919 bp, Unknown
  Bacterial polypeptide expressing nucleotide sequence isolated from the Sargasso Sea
gatgagttcagataaatatatccattcagaagttgaaaataagatttattcttattgggaaaaaaataatttatttaaacctaaaaaaaacaaaaaatcattttcaatagttatccctccacctaatgtaactggaagtcttcatatgggtcatgctttaaataattctattcaagatttgttaacaagattccacagaatgaataattatgaaactttgtggcaacctggaacagaccatgctggaattgctacccaggcattagttgaaaaaaaactagctaacgatggaattaaaaagaatgatttaggtagagacaaatttatagaaaaagtctgggaatggaaaaatcagtatggcgatataattatcaatcaattaaaaaaattaggttgttcatgtgattggtcaagaaatgcttttacgatggatgataatttgtcaaaatcagtaataaaagtctttgttgatctttataaaaaagacttaatttataaatcaaaaaaattagtcaattgggatgtcgttcttaaaaccgctatttctgatttagaagtagatcaaagagaagttaattcaaaattatatcatataaaatatcctatagaaaattcagatgattttataactatagcaacaactagacctgaaactatgctgggtgatacggctatagccgtaaactctaaagacgataggtataaatcactagtaaataaatttgttacaattccattagttgagagaaaaataaaaatcattgaagatgattatgctgatcctgagcaaggtacgggtgctgttaaaattacaccagctcatgactttaatgactatgaagtaggtcaaagaaataatttagaaattttaaatatatttacctcagatggtaaaattaatgaaaatgcacctaaagaa

SEQ ID NO: 307142 - DNA, 825 bp, Unknown
  Bacterial polypeptide expressing nucleotide sequence isolated from the Sargasso Sea
gccgcaacaccctctggcaggtgggcaccgaccacgccggcatcgccacccaaatggtggtagaacgcaaattggccggcgaaggcaccaaccgtcacgagctaggccgtgagaaatttctggacaaggtctgggaatggaaaagggaatccggcggcactattacccgccagctgcgtcgcatgggcgccagcgtagactggactcgtgaacgcttcaccatggacgacggtctgtctaacgccgtgcgcgaagtgtttgtccgtctgcacaaggaaggcttgatctaccgcggcaagcggctggtcaattgggatccagccctgcacaccgccatctccgacctagaagtggagaacgtggaagagcaaggccacatgtggcacttccgctatccgctgtctgatggctccgggcacctggtggtcgccactacacgcccggaaaccatgctcggtgataccgccgtagccgttcatccgcaagacccacgctacaaggacatgatcggtaagagcattcgcctgccgctagctgaccgcaatatccctattattgccgatgactacgtagacccggacttcggctccggctgcgtgaaaatcaccccggcccacgacttcaacgattacgaagtgggtaagcgccacgacctgccgatgatcaatatcctgaccatcgatgccgcgctgaatgacgaagtgccggaaggctatcgcggcttggaccgtgtagaggcccgcaaaaaagtagtagacgatctagatgccttagggctgctggaaaacagtggacgaccacaccctacaggtgccccgtggtgat

SEQ ID NO: 307143 - DNA, 925 bp, Unknown
  Bacterial polypeptide expressing nucleotide sequence isolated from the Sargasso Sea
caccggtgcgttgcacatgggccacgcgatgttcgtcacgcttcaagacgtgatgacgcgcagcgcgcgcatgcgcggacggaaaacgttgtggttgcccgggacggaccacgccggcatcgccacgcagctggtggtcgaacgtaagttagaaagcgaaggcgtcaagcgcacggacatgtctcgcgaagaattcgtcgagaaggtgtgggagtggaaggcggagtacggaggccgcattcagcaacaaatcaaaagactcggagcttcatgtgattggtctcgagaacgctttactctcgacgacgggctctcggagagcgtgctcgaggcgttcatcacgctccacgacagaggattgatttacaagggtacgtacatggtgaactgggcgccgaagctgcaaactgcggtgagtgatttggaggtggagtactccgaggaaccggggacgttgtactttttcaagtaccccgtcgagggcggcggcccggatgattaccttccggtggcgacgacgcggccggagacgattttgggcgataccgctgtcgccgtgaatccggaggacgatcgttttaagcacatgatcgggaaaaagtgcgtcgtgccttttacgggcggacgcaccgttcccatcatcggcgactcttacgtcgacatggagttcggtactggcgcgttgaagatcacgcccggtcacgatccaaacgattacgagatcggcaagcgagtcggtttggacatcatcaacatcatgaacaaggacgggaccatgaactcgaactgcggcaagtacaacggcgtcgatcgcgcggattgccgaacgcaactgtgggcggacatggaagccgaaggcttggccatcaaagccgaaccttacaccaatcgcgtaccgagatcgcaaagaggcggtgaagtcatc

SEQ ID NO: 307144 - DNA, 881 bp, Unknown
  Bacterial polypeptide expressing nucleotide sequence isolated from the Sargasso Sea
ttttaattggatggataatattgaagattggtgcattagtcgccaaatatggtggggtcacagaatacctgcttggtatgataaagatggtaatgtttttgttggtgaaaatgaagctgacgtgaggaatttttataatcttcaaaatgaagatctttctcaagacgaggatgtcttagatacctggttctcatcaagcctgtggccgtttgcatctttgggatggcctaaagatacggaagattttaaagatttttttcctacctcacttttagttaccggttttgatatcatctttttttgggtagcaagaatgatgatgatgagtctagagtttaccggaaaaatacccttcaaaaatgtttacgtaaccggtcttataagagacgaaaatgggcagaagatgtcaaaatcaaaaggcaacatcatagatccacttgatctaatctatggaatttctcttaaagatttagtcaaaaaaagaactgcgaatctaatgcaagaaggcactgcagaaaaaattgaaaaaaagactaggaaacaatttccaaatggaattgaatcatacggaacagatgctttaagaatgactttcttttccttagctacccataccaaagacattagttttgaatttggaagacttaaaggatatagaaatttttgtacaaaaatatggaatgcagctcgtttcatagagggctattctgaatcaaatgaaacatataaatcccaaaataaaaatgacgactggatttatgaagagtttactaagacaaaaaaacaaattaacaaaaatataagtgactatcgactagactttgcaattaatgagttgtacgaatttttttggaataagttctgtgacgtatatatgagga

SEQ ID NO: 307145 - DNA, 928 bp, Unknown
  Bacterial polypeptide expressing nucleotide sequence isolated from the Sargasso Sea
aatggagtcaaaatattttcctatagaaattgaagagaagtggtctaaggtatggtcagatagaacattagataagccaaattcagatcatcacttctcccagattataccacccccaaatgtaacagggacattgcatatggggcatagttttcagtatgccattatggatttttacactcgctatcaccatatgtcgggtactgatgctttttggcaagtaggcactgatcatgctggaattgcaacccaaatggtggttgaaaataatctggctaatcaaggtaagtcaaaggatgacttgggaagagatggttttttaaaagaagtttggaaatggaaagacttttccgaaaaaaaaattacctctcaaatgaagagacttggcattacagttgactgggacaaatatcgttttacttttgacgataaattttgtacagcagtaaataaggcttttgttgaactttaccgcaaagataaaatttatcgtggctatagattggtgaattgggatccggtattgaaaacagcagtatctgatttagaagttgtgcgccaagaaaaagacggtttgctttgggagatagcttatcctcttattgattcagatgagcatcttgttgttgcaacaacaagaccagagaccatgtttggtgacatggcggtggcggtaaatccaaaagatgagaggtataagaaatttattgggcaatatgtcttgctgccttttacacatagaaaagtacctgtgcttggtgacgaatatgtggatatggagtttggaaccggttgcttaaagattacaccaggacatgatttcaatgattatgagattggcaagaagcacgcattacatcaaatcgatgatattgtttatacatctaagaatcttgaagattttgctccaaataaatatttttactga

SEQ ID NO: 307146 - DNA, 1054 bp, Unknown
  Bacterial polypeptide expressing nucleotide sequence isolated from the Sargasso Sea
ggcacgatcactcaacaattaagaagattaggtgcatcggtagactggtctagagaagcatttacaatgaatgaagatttaagtgaagccgtaaaagaggtcttcgtttctctttatgatgaaggtttaatctatagaggggaaaggctagtaaattgggacgttgtgttacaaactgctttatctgaccttgaggtatctactgaagaagagtcagggtccttatggtactttgattaccctattgagaatggaaataccataacagtagctacaacaagacctgaaactatgttaggcgatgcagctgtagcagtgaacccagatgatgagagatttaaaggattaataggtaaatttgtaaaattaccaattactaacagaaaaatcccaataataaaggattcttatgtagacgctgaatttggaacaggatgcgtcaaaataacaccagctcatgactttaatgattttgaaataggaaaaaggcatgatttagaattcataaatattttaaatcttgatggaacattgaatcaatcagttccagaaaattttagaggcttaacaacagcaaaggccagagaaaaagtattaaaagaaatggattcactgggtctattgaataaagtagaaccacataaaattcaaattccaaagagtcaaagaagtgattcgatattagaacctctgatgacaaaacaatggtttgtagatgtcgaaatgatatctaaagaagcaataagagttgttaaagaaaatgaaactgagtttattcctaaaaattgggaaaatacttatttttcgtggatggacaacattcaagactggtgtataagcaggcaactgtggtgggggcataggatacctgcctggttcgataatgaagataatgtctatgtaggtaaagcagaagatgaagtaagaaagaaatatgatctagtggatatcgaactccatcaggatgtagatgttttggatacttggttttcctcagcattatggactttttcaactttaggctggcctagaaaggagaacttattatctagat

SEQ ID NO: 307147 - DNA, 854 bp, Unknown
  Bacterial polypeptide expressing nucleotide sequence isolated from the Sargasso Sea
tggaaaaattaacaaaaatgggattaaagagtttcatggtttagacaggtttgaagcaagaaaacttataattaaaaaattaaaggaaataggctctctagtaaaaattgaaaatattaaaaataaagttccatatggagatagatcaaacactataattgaacccctcttaacagaacaatggttcgttgatgcaaaaaaattatccaaaaaaccgattaagatagttaaagagggcaaaactactttttttccaaacaattggtcaaaaacattttttcaatggatgaataatattgagccttggtgtatatctcgacagatttggtggggtcatagaatacctgcttggtatgatgaaaatggaaatattttcgttgctgaaaataaaaaaggtgcagcaaagctagcaaagaaaaaaaatagaaataaacaatttaatttaagacaggaaacggatgttttagatacctggttttcatcagcattatggcctttcgcaactcttggatggccaaacaaaactacggaacttaataaattttatccaacttcagttcttgttaccggttttgatataattttcttttgggtagcaagaatgttgatgatgggaaattatttcagaaaaaatacaccttttcacaaagtatatgttcatgcattagtaagagatgaaaaggggcagaaaatgtcaaagtcaaaaggcaatgtaattgatccactagatttaataaatgaatatggagcagatagtttaaggtttactttaatttcgatggcctctccaggacgagatgtaaaattatcaaaagatagagttattggaaacagaaactttattacaaaaattt

SEQ ID NO: 307148 - DNA, 900 bp, Unknown
  Bacterial polypeptide expressing nucleotide sequence isolated from the Sargasso Sea
attgaataagcctgaatcagaacaaaatttctctcaaattattccaccaccaaatgtaaccggaaccttgcatatgggccatagttttcaatatgcaattatggatttttatactagataccatcatatgaacggtgcaaattcatattggcaagtaggaactgatcatgctggtattgctacacagatggtcgtagaaaataatcttgtaaacgaaggtaaagacaaaaatgatcttggtagagaaaaatttctgaaagaagtttggaaatggaaagattactcagaagagaaaattacatctcaaattaaacgtcttggttgcacagttgaatgggataaatatcgcttcacttttgatgatgatttttgtgaagctgtaaataaagcttttgttgaattatatagaaacaaaaaaatctatcgtggataccgtttagttaattgggatccatcacttaaaacagctgtttctgatctagaggtggtaagacaagaaaaagaaggcatactttggcatattgcctaccctatttctgattctaatgaaacattaactgtagcaacaacaagaccagaaacaatgtttggtgatatggctattgcagttaatccaaaagatgatcgtttcaaaaaatttataggtcaatacgttgagttaccttttgtgggcagaaaaataccagttataggtgatgaatacgttgatatggaatttggtacaggttgtttaaaaattacacctggccatgactttaatgactatgagattggcaaaaaatatgccttacatgagaaagatggtgtagttcatacttcagatgagctgaatgactttatgcccatcaatatttttactgatgaagctcacactaatgatagtgttcctgaactttttgc

SEQ ID NO: 307149 - DNA, 898 bp, Unknown
  Bacterial polypeptide expressing nucleotide sequence isolated from the Sargasso Sea
ctaatagtagcaaccactagacctgagacgatgttaggagatacagcagtggcggtaaatcctaaagatgatagatataaaaaatttataggtaaaacagtcattcttcctttagtcggtcgagaaataccagtcattgcggatgatttcgtagatcctgattttggaacaggttgtgtgaaagttacaccggcccatgatcccaatgatttttcgataggtgagcgtcatgatcttgagtttattaatattatgaataaagatgcttcaatgaattcacaagtaccaaaaaaatatcaagacttatctcgagaatctgccaggaaagcagtgttgatggatatggattctgataagaaacttcataaagttgaagattatattcataacgttggttattctgagagaggcaatgtccctattgagttttatttatctgagcaatggtacttaaaaatggaggagttggcaaagccagctttaaaggctgtcaattcaggcgagataaaattttacccggatcattggaaaaagacatacaatcattggattgaaaacataagagattggtgtataagtcgtcagttatggtggggtcatcaaattccggtatggtatcataaagaggatattaataaaatacatgtttctattgatggtcccaaagatccagaaaactgggttcaggatgaagatgtacttgatacatgggcatcttcctggctttggccatttgctgtgcatgattggccggattcaaacaaaagtataaaatctttttatcccacaaatgatttggtaaccggacctgatataattttcttttgggttgcgcgaatgattatggcaggaaatttatttatgggagaaagtccatttaaaaatgtgtatttcacat

SEQ ID NO: 307150 - DNA, 739 bp, Unknown
  Bacterial polypeptide expressing nucleotide sequence isolated from the Sargasso Sea
gccgctctacgagcattgggaaaagcagggctatttcaaaccgaatggtgatgaaagccaggagagcttctgcatcatgatcccgccgccgaacgtcaccggcagtttgcatatgggtcatgccttccagcaaaccatcatggataccatgattcgctaccagcgcatgcagggtaaaaatactctgtggcaggccggtaccgaccacgcgggtatcacgacccagatggtggttgagcgtaagattgccgcagaagaagggaaaactcgccacgactacggtcgcgatgcctttatcgataaaatctggcagtggaaagcggaatccggcggtaccattacccgtcagatgcgtcgcctgggcaactccgtggactgggagcgcgagcgcttcaccatggatgaaggcctctccaacgccgtaaaagaagtctttgttcgtctgtacaaagaagacctgatttaccgcggcaagcgcctggttaactgggacccgaaactgcgtaccgctatctccgatctggaagtggaaaaccgcgagtctaaaggctccatgtggcacatccgctacccgctggccgacggcgcaaaaaccgccgacgggaaagattacctggttgtagcgaccacacgtccggaaaccctgctgggcgacaccggcgtggccgttaacccggaagacccgcgttacatagacctgatcggcaaattcatgattctgccgctggttgaccgccgc

SEQ ID NO: 307151 - DNA, 793 bp, Unknown
  Bacterial polypeptide expressing nucleotide sequence isolated from the Sargasso Sea
tttgctattttaccaattgtgggaagaaaaattaaaattattcaagatgattatgccgatccagagcaaggtacgggagcagttaaaattactccagcacacgattttaatgatttcgaagttggaaaaagacataacctggaaatgataaatatttttacaaaagaaggtaagttaaataaaaatgtaccatcaaattacataggattagacagatttgaagctagaaaaataatcttagaagaattgtcaaaattagaacttctgacaaaagaagagagcataaaaaataaagttccttatggagatagatcaaactctattatagaaccatatttaactgaacaatggtttgttgatgcaaaaaaactttctataaatgctaaaaaaattgttaaaaataaaaaaacaaatttttttccagaaaattggtctaagacttatttccaatggatgaataatattgaaccctggtgtatttctagacaattatggtggggacatcaaattcctgcttggtatggcccagacaaaaaaatcttcgttgctgaaaatataaaaaaagcagaatttgatgcaagaaaattttacaaaaagaaagttaagttaattagagatccagatgttttagatacttggttttcatcaggtctttggccattcgctactcttggatggccctcttcaaattatttcattaagaaattctatcctacatctgtgttggttacaggctttgatataatatttttttgggtagcaagaatgatgatgctaggtatggaatttttaa

SEQ ID NO: 307152 - DNA, 940 bp, Unknown
  Bacterial polypeptide expressing nucleotide sequence isolated from the Sargasso Sea
aaaaaaagttattattcctatagtgggcagaaaagttaaaattatttcagacaagtatgtttcattagatcagggctccggagcgcttaaagttaccccggcccatgatttcaatgattttgaaataggaaaaagacataaacttgaattcataaatatttttgaaaaaaatggaaaattaaataatttagcacccaaaaatcttgtaggtatagatcgctttgaggccagaaaaattatcattaaagaactgaagaatctaaatttgatggaaaaaattgaaaacatcaaaaattccattccatatggagatagatcaaattccattatagaaccattgctaacagaacaatggtttgctgatgcaaagtttttagcaaaaaaagctatacaagaagttaaaagaaaaaaaacaaatttttttcccaacaactggacaaaaacttattttcagtggatgaataatattcagccctggtgtatatccagacaattgtggtgggggcatagaattccagcttggtattcaaaagataaaaaaatctttgttgcagaaaatgaagaggatgcaaataaacttgcaaaaaaatattataaacaaaatgttaaattaattagggacgaagacgttttagatacttggttttcatccgcattatggccctttgctactttaggttggccagaaaaaacttatgaactaaaaagattctatcctacatcattacttgttactggattcgatataatatttttttgggtagcaagaatgatgatgatgggtaatcatcttttaaaaaaagttccattttctaaagtatatgttcatgcattagttagagatgaaaaaggtcaaaaaatgtctaagtcaaaaggaaatgtaattgatcctcttgatataataaaaaaatatggagctgattcattaaggtttacatta

SEQ ID NO: 307153 - DNA, 850 bp, Unknown
  Bacterial polypeptide expressing nucleotide sequence isolated from the Sargasso Sea
gctaccacaagacctgaaactatgtgttggtgatacagccattgctgttcaccctgatgataagagatacaaaaatatgataggtcaaaaggttttaattccaattgttaatagagaaattcctattattgaagatgaatatgccgatccagaacaaggtagtggagctgttaagataactcctgcacatgacttcaatgattttgaggttggtaaaagaaatgatctagagatgatttctatatttgattcagatgggaatttaaatgaaaatactcctaatggatggaaaggcatagaaagatttgaggctagaaaaagacttttagacaaactcaaaaatgaaaattttttagtaaaagttgaagatcatactcatgtcgttccatatggagatagatcatacgaggtaattgagccctatttaactgatcaatggtatgttgatgcaaagaaattatcagtttctgctatcaagcatgttgaagagggcaaaacaaggtttatcccgagtaattggtcaaaaacatattatgaatggatgaataatattcaaccatggtgtatttcaaggcagctatggtggggtcatagaatccctgcatggtatacaaatgagggagaaataattgttgcttcatcagaggatgaggctcgtgaaattgctataaggaaatacaatactgaagcgatttttcaagatgaagatgttcttgatacatggttttcttcagcattgtggccttttactactttaggctggccaaataaagaaaacgatctttccaaattttatcctacaaatcttttagtaactggttttgatataatttttttctgggttgcaaga

SEQ ID NO: 307154 - DNA, 961 bp, Unknown
  Bacterial polypeptide expressing nucleotide sequence isolated from the Sargasso Sea
ttgattttggattgcggaagacatggattagataaagaacaaattattgattttgaagggaaattacttcctattgcaaaagaatttgaaggtatgtcgattgaccaagcaagaccaaaaattgtggaaaaattaaaaaacaaaggcttattagtaaatattgattcaaattattcccatagtaaagcgtttaatagtcgaggaggtggagcgatcgaaccacaaattagggagcagtggtttatagatgttaaaaaaagatccataaagtggaaaggtaaaagtcttagccttaaagaaattatgttagacgtaataagttctggagacattaaattagttcctgaaagatttaaatcaacctatttttattggatcgaaaatttgcaagactggtgtatttcacgacaaatttggtggggacatagaattccagtatattatcgcaatggtgaggttaaagttagccttattccgctagaagctagtgaaggctgggaacaggatcctgatacacttgatacttggttttcctcagctctttggacttggagtactcttattgatcctgaattagctaaaaactattctctgcctatgcaagatctcctaaaaaaaagtaaagatttccaaaaatttcatcctacaaacataatggaaacaggttatgacattttatttttttgggtagctagaatgattttaatgacaacatatatgattaatgatatcccctttaaaacagtttatttgcacggattgattagaacacgtgatgggaaaaaaatgtcaaaatctgaaccaaaaactatcattgatcccttagaaagtatagaaaaatttggtgcagatagcctgagaatttctttaattttggggactggacctggccaagaccttagattatatccggaaaaaatggaaagtagttggcgttttgtaaatagatttggaatgctgg

SEQ ID NO: 307155 - DNA, 754 bp, Unknown
  Bacterial polypeptide expressing nucleotide sequence isolated from the Sargasso Sea
tatgaaaaaaaactatgaaccaaaatctactgaagtagatatctacaaaagatgggaagattcaggtttcttcgaggcgaagcctgacgaatccaaagaacctttctgcataatgatccctcctccaaacgtgaccggcacgcttcatatggggcatggttttcaaaatacattaatggatgctcttataaggtttaagaggatgtccggatacgatactctttggcaagttggtgttgatcatgcaggaatagccactcaaatggttgttgaacgacaactagagattgaaggcacatctagagaagaaattggaagagagcaatttgaaaagaaagtatgggattggaaagaaaaatccggtaataaaataacacaacaacttaggcgtttaggagcttcagttgattggtcaagagaagctttcactatgagcgatgatttaagcttggccgtaaaagaagtatttataaaactttatgatgaaggtttaatttacagaggagaaagactggtcaattgggatactgttctaggaactgccctctctgatttggaagtttcctctgaagaagagaatgggttcttgtggtatatagattatttgactgaaaacaacaacaaaataacagttgcgactacaaggcctgagacattactgggagatacagcaattgcagtaaatccggatgaccataaatttaaaaaactgataggtaaaaaggcaatagtaccgatagttaatcgagaaata

SEQ ID NO: 307156 - DNA, 933 bp, Unknown
  Bacterial polypeptide expressing nucleotide sequence isolated from the Sargasso Sea
taagaaagatgtagaattagtaagagatgaagatgttttagacacatggttctcatcaggattatgggctttcgcaactcttgggtggcctaaaaaaaacgaatacctaaaaaagttttatccaacttcagttttggtaactggttttgacattatctttttttgggttgctagaatgatgatgtttggtatggagtttttaaacaaacaaccatttaaagaaatttatgtacacgctttggttagagatgagaaaggacaaaaaatgtctaagtcaaaaggcaatgtaattgatcctttaatattgatagataaatatagtgcagatgcattaagatttactttgctatcaatggcatcaccaggaagagacgtaaaactatctgaagatagagttaaaggttatagaaattttcttaataaattgtggaatgcaaacaactttttggcaatgaataagtgtgatttttcaaagtctaaaaaggagccaaaagtaaaactaaatattaataaatggattatttctgagttaaacacagtgagcaagcttattgaaaagaatattaatgactatagatttgatgaagcagcaagaaacatttaccaatttgtttggcactcatactgtgattggtacgtagaactatctaaaactatattaaactcgaaagaaaaatcatcaatttcagaggtaaaacagacattgagctatgtctttaaacaaattctaattcttctacatccatttattccgtttattacagaggaattatggttaaaaaataatctagataaaccaaaaaattatctaatgtttgcaaattggtcgagtaaaaaagcaaataaagataaacaaattaaagaagtagaaaatataattaatttaattagccaacttagagcatttaaaaatgaatttaatgtgagcccagg

SEQ ID NO: 307157 - DNA, 862 bp, Unknown
  Bacterial polypeptide expressing nucleotide sequence isolated from the Sargasso Sea
atgacagagatgaatgatcaattatctttagagaattattcaccttttgaagtagagaaaaagtggcaagaaaaatgggaaagtctaaaggcgtttagtcctaaccctcaggatgatggggagcctttttgtgttgttattccgccaccaaatgtaactggatctttgcatatggggcatgcatttaatacggctttgatagatgttgtagtacgttttcaaagacttttaggtaagaatgttttgtgtttaccgggaactgatcatgcttcaatagctgttcaaactattcttgaaaaacaattaaaaagtgaaggcaaaacaagcgaggatattggaagagatgaatttcttaaaagagcatggaactggaaagaacaaagtggtggaagaatcgtttctcaattaaaaaggataggatattcagttgactggactagagaaagatttactcttgatcaaaaattaaatcaagcagttattgaggcttttaatattctctataaaaagaatttaatttatagaggcgaatatttggttaattggtgccctgaatctcaatctgccgtaagtgatcttgaagttgaaatgcaagaagtaaatggtcatttatggcattttaaataccctttaatttctgaaagtggtgaacagttagataagtacttagaagttgcaacaacaagacctgaaactctcttgggtgatactgctctggcagttaatcctgatgatgatagatataaagaatttattggtgtcaaagtaaaagtcccttttgttgatagagaaatacctattatcgctgattcaaatgttgataaagattttggtacgggttgtgtgaaggtgactccagccc

SEQ ID NO: 307158 - DNA, 567 bp, Unknown
  Bacterial polypeptide expressing nucleotide sequence isolated from the Sargasso Sea
tatggataagcggtattcaccattagatatcgaagaaaaatgggctaacatttggaaggataatccattaccaaatataaaatctgatagtaaattttcacaagtaataccccctccaaacgtcactggaacattgcatatgggacatagttttcaatacgcaattatggatttctatacaagatataatcatatgagatctgtgaaatcatactggcaaattgggactgatcatgcaggtatagctacacaacttgttgttgaaaataatctagttgcagatggaatcaaaaaagaagatcttggtagagaaaagtttcttgaacaagtttgggaatggaaagatttttctgagaaacaaattacaaatcagattaaaagactaggctgttcagtgaattgggataaatatcgatttacacttgatgaaaaattttcaaaggcagtcacaaaagcatttgttgatttatttaataaagacaaaatttatcgcggatacagactttgtaattgggatccatccttacaaactgcagtatctgatcttgaagttaaaaggcaagaaaa

SEQ ID NO: 307159 - DNA, 781 bp, Unknown
  Bacterial polypeptide expressing nucleotide sequence isolated from the Sargasso Sea
catggacaagaacttctcacccgcagacatcgaagcgcgctggtacgaccagtgggaaactcgaggctatttttcaccgtccgggcaaggccctgcttattgcatccctatcccgccgcccaacgtcaccggaaccttgcacatggggcacggctttcagcaggccatcatggacgcgctgattcgctaccaccgtatgcgcggtcacaacaccctctggcaggtgggcacggaccacgccggcatcgccacacagatggttgtcgagcgccaacttgtggccgagggcacgacgcgggaggcccttggcagagaggcctttatcgatcgtgtgtgggattggaaagcggagtccggtggcgccatcactcagcagctcaggcggctgggtgcctctccggattggacccgggagcgcttcaccatggacccgggattgtcagaggccgttcgaagcgtctttatcgcgctgcatgaacagggtttgatttatcgcggctaccggctggtcaactgggatccgcaatttctgactgcgatctctgatctcgaggtggtgcaggaagaggaaactggctcgctgtggcatctccgctacccgctgagtagcggcaagggtcatttgatcgtcgcgacgacccgtcccgaaaccatgctgggcgatacagccgttgcggtccaccccgatgatgagcgctaccgcgatttggtaggagagaccatcgacctgcccctcgctgggcggagcatcccgatcattgccgatgattacgtggatccc

SEQ ID NO: 307160 - DNA, 814 bp, Unknown
  Bacterial polypeptide expressing nucleotide sequence isolated from the Sargasso Sea
aattgggaacaaggaaataaatttcaacctaaagattctgacgaaaatttttctatagtaatcccacctccaaatgtaactggctcactacatatgggtcatgctttagaacattcgataattgacgttattacaagaataaaaagattacaaggatttcaaactctttggcttcctggaactgaccatgctggaattattacccaacttcttgttgaaaaagaattagaggaaaatggaatttctaagcatgatttaggaagagaaaactttttagcaaaagtatgggagtggaaggataaatcaggtgacaatattactaatcaaatgaaaactttaggcatgagttgtgattggtcaagggagagattcacaatggatgaaggactctcagaagcagtagtaaatgtatttgtttcattatacgaaaatgatttaatttataagggtactcgaatggttaattgggatacaaaattaaagtcagcagtttcagatttggaagtaacatcatcaaatgaactagggaagttatggaccattaactataaagttggagattcatttatagaaatagcaacaacaagaccagaaactttactaggggatactgccgttgctgtaaatccttcagatgatcgatataaggatttaataggtcaaagagcaactataccaatcgtaaatagagaagtagaaattattgctgatgactatgttgatgttgagtttggctctggttgtgtaaaaattacgcctgcccatgacttcaatgattacgaaatcggtaaaaggaacaatctagaaatgataa

SEQ ID NO: 307161 - DNA, 919 bp, Unknown
  Bacterial polypeptide expressing nucleotide sequence isolated from the Sargasso Sea
catgcttggtgacacagctattgcggttaatcctaaagatgaaagatatttcaatttagttaataagtttgcaatactgcctatagttggaagaaaacttaaaatagttcaggatgattatgctgatccagagcaaggcagtggcgcagttaaaattacacccgcacatgattttaatgactttgaagttggtaaaagacagaagcttaaatctataaatatttttactgaagatggaaaaattaataataatgctccaaatgaatatataggtttagacagatttgaggccagaaaaaaaataattcacaaactaaaagaattacaactctttgaaaaagaagagactataaaaaacaaagtaccttatggagacagatctaattctataattgaaccttttttaactgaacagtggttctgcgatgcaaaaaaattatctaccaaagcaaaaaaaatagtagaaaataaaaaaacaaatttcttcccatcaaattggtcaaagacatattttcaatggatgaataatattgaaccctggtgtatttcaagacaactttggtggggacatcaaattccagcttggtatggaccagatagaaaaatatttgttgcagaaaatcaaaaaaaagcagaacagcaggcaaaaaaattttataaaaaaaaagttaatttaaaaagggatccggatgtacttgatacatggttttcttcaggtctatggcctttcgcaacattagggtggccttcaaaaaattattttttaaaaaaattttatccaacatcagttttagtaaccggttttgatataattttcttttgggtagctagaatgatgatgcttggtatgcattttttaaacaaagaaccatttaaagaaatttatgtccatgcacttgtgagagagagaaaggccaaa

SEQ ID NO: 307162 - DNA, 928 bp, Unknown
  Bacterial polypeptide expressing nucleotide sequence isolated from the Sargasso Sea
tgaattagatgcaaaaaaacaagctaaaaaattttataaaaaagatgtaaaaattgtcagggatcctgatgttttggatacatggttttcatctggattatggccatttgcaacattaggttggcctgataaaaaagattttgttaaaaaattttatccgacaacggttttagttacaggttttgatattattttcttttgggtagcgagaatgatgatgtttggaatggaatttttaaacaaagaaccttttaaagatatttatgttcatgctttagttagagatgaaaaaggacaaaaaatgtcaaagtcaaaaggaaacgtaattgatccattagatttaatcgaaaagtacagcgcggatgctttaagatttactcttctttcaatggcctcacctggaacagatgttaaactttcagaagatagagttaaaggatatagaaattttttaaataaactatggaatgccaataatttcttaattaccaataaatgtgattttaataaaacagataaaattcctaaaacttcactaaatattaataaatggatttattcagaactaattcaaacaaaagataaaattgaaaaaaatcttaaagattatcgatttgatgaagcagctaaaaatgcctatcagtttgcttggcactcttattgtgactggtacattgagctttcaaaaactattctgttttcagacgatgaaagatctaaaaatgaggtaaaagaagtatcagcttatatatttaaacaaatacttgttattcttcatccatttattccatttgttacagagaaaatctggttaaaaaataaatttgataaatcagataagaattttctcatgtatgctaattggccatcaggaaaatctaagaaagatcaatctatgaaagacgtagaaagtatcatcaatgttatt

SEQ ID NO: 307163 - DNA, 772 bp, Unknown
  Bacterial polypeptide expressing nucleotide sequence isolated from the Sargasso Sea
atgagcagcgataaatatatacattctgatgttgaaaatagaatttattcttattgggaaaaaaatggactttttaaacctaaggaaaattcaaaaaaattttcaattgtaattccacctccaaatgtaacaggtagtttacacatgggccatgctcttaataattctattcaagatttgttagttcgttatcatagaatgaataattttgaaactttatggcaaccaggtacagatcacgctggtatagccactcaagctttagtggagaaaaaattaagttctgaaaaaattgataaaaatgaaattggtcgagaaaagtttgttgaaaaagtttgggagtggaaagaccagtacggagacataattataaatcaattaaaaaaacttggttgttcttgtgactggtcaagaaacgcattcacaatggatgaaaatttatcaaaatcagtaattaaggtttttgtcgacctttataacaaaggattaatttataaagataagaaactagtaaactgggacacagtactaaaaacggcaatttcagatttagaagtagatcaaagagaagtaaattctaaaatttattacattaaatatcctatagacggaattgaggaatttataacaattgccacaacaagacccgaaacaatgcttggagatacagctatagcagtaaaccctaatgatgagagatttaaatctattgttgggaaaacagttacaattcctattgttggtagaaaaataaaaattattgaagatgatt

SEQ ID NO: 307164 - DNA, 902 bp, Unknown
  Bacterial polypeptide expressing nucleotide sequence isolated from the Sargasso Sea
aaaattttagaaaaattatcagaattacaaatacttactaaagaggaaaacattaaaaacaaagtaccttatggagatagatccaattcaattatagaaccttttttaaccgagcaatggtttgtagacgcaaaaaaactatcggttaaagcaaaaaaaattgttaaaaacaaaacaacaaatttttttcctttaaattggtcaaagacttactttcaatggatgaacaatattgagccatggtgtatttctagacagttatggtggggacatcaaatccctgcgtggtatggtccagataaaaaaatctttgtagctgaaaatgaaaaagaggcgcaattaattgcaaaaaaattttacaaaaaaaaagtaaaaattactagggaccaagatgttctagacacatggttttcatcaggactttggccttttgctacattgggttggccaagctctaattattatttaaagaggttttatccaacatctgttttagttacaggttttgatatcatatttttttgggtagctcgaatgatgatgctaggaatggaatttttaaaaaaagaaccttttaaacaaatttacgtacatgcacttgtaagggatgagaagggacaaaaaatgtcaaaatctaaaggcaatgttattgatcccttagaattgatcgaaagctacagcgcagatgctttaagatttacattattatctatggcatcacctggtagagatgtaaaattatctgagcaacgcgttaaaggttacaggaattttcttacaaaaatatggaatgctaataatttcttaaaagtaaacaaatgtcaatttaatagacaaataaatccaaaaacactttcattgaatattaataaatggggtatattcagaattaataaagacaa

SEQ ID NO: 307165 - DNA, 1027 bp, Unknown
  Bacterial polypeptide expressing nucleotide sequence isolated from the Sargasso Sea
tttgtaacattatatgactctggatttatttataaaggttcaagaatggttaattgggatacaaaacttatgtctgcagtctcagaccttgaggtcaatcttgaggagcaaacaggcaaactctggagtgttaaatataaatgtggtgatgaatttattacaatcgctactaccagaccagagactattcttgctgatacagccgttgcagttaaccctgatgatgaaagatatgagagctttataggaaaaacagcaattatcccaatcgtaaatagagaggttccgattatcgctgatgaatatgtagataaagaatttggttctggatgtgtaaagataacacctgcacatgattttaatgattatgagatcggcttgaaacatgatctagaagtcatatcttgcatgaagttagatggaacaatgtctgacgatgattttatgccagaaaattataaaaatttagacagatttgaagcaagagaccagatagtgaatgagttatctgaattaggcttccttgtctctgctgatgatcacgtaatccaattaccaaaaggagataggtcaaaaagcatacttgaaccaatgatcacagaccaatggtttgtaaagacaaaagaattggctgatagaggtatcgctgaagttgagaatgaaaatatgaagtttattccaaaaaattgggagaaaacttattttgagtggatgtacaacatacaagattggtgcatttctagacaaatttggtggggtcatcagattccggcatggtatgacgaggatggaaacatctatgtagctacgactgaatcagaggttagagaaaaatataaactctcagatgacttgaaactatcgcaagataaagatgttttggatacttggttttcatcagcattatggccattctccactctaggttggcctgaggaaagtacggatttaaagaaatactatccaacctcattattagtaacaggttttgacataatctttttttgggtagcccagaatgataatg

SEQ ID NO: 307166 - DNA, 487 bp, Unknown
  Bacterial polypeptide expressing nucleotide sequence isolated from the Sargasso Sea
atggagcttgataaattttttgatttcttaaaggatgaaaaagatctttatgcacagtgggaacattcagattgctttaagcttaaaaaaggtggtgaaccttattctataatgatgccaccacctaatgtaacaggtagtttgcatatgggtcatgctttaactttcacaattcaagatatcttaattagatatcatagaatgaaaggtatggaagttttgtggcaagcgggaactgatcatgcaggtatagctactcaaatggtggttgaaagaaaattaagtgattcaaatttagacagacgatcattaggtagagaaaaatttattgaaaaagtttgggaatggaaaaaagaatcaggcggccagataagcaatcagctaagacgccttggtgcctctgcagattggtcaagagaaagatttacaatggatgtaggtctttcaaatgcagttaagaaagtttttgtaaatttatacaatgaag

SEQ ID NO: 307167 - DNA, 775 bp, Unknown
  Bacterial polypeptide expressing nucleotide sequence isolated from the Sargasso Sea
agacagctatggtggggacatcaaataccagcatggtatggtcctgataaaaaaatatttgtagcttataatgaagatgaagctcataagctttctttaaaacattataaaaaaaaagtagatttaataagagatcctgatgttttagatacatggttttcttcaggtttgtggccttttgctactttaggatggccaaaaaaaaatgattatctaaaaaaattttatccaacatcagtattagttacaggttttgatattatcttcttttgggtagctcgtatgattatgtttggaatggagttcatgaaaaatgaaccatttaaaaacatatatgttcacgcattagttagagatgaaaaaggtcagaaaatgtctaaatcaaaaggcaatgttattgatccactaaacttaattgaaaagtatagtgctgacgctttaagatttacacttttgtcaatggcctcaccaggaagagatgtaaaactttctgaagatagggttaaaggttacagaaatcttttaaataaactttggaatgcgaataattttttaatacagaataaatgtaaatttgatggtgtaaagcaagaaaaaataaaactgaatattaataagtggatatactcaaatttactccaaaccaaatcaaaggttgaaaaaaatataaaagaatatcgttttgatgaggcttctagagtgatttatcagtttgtttggcacaattattgcgattggtatttagaattatctaaaaccaatattatattctgat

SEQ ID NO: 307168 - DNA, 901 bp, Unknown
  Bacterial polypeptide expressing nucleotide sequence isolated from the Sargasso Sea
gggagatacagctctagctgtccacccagaagatgagcgctataaagatttaatcggagaaaatgttctcattcctctaattaatcgagccattcctattattgctgacagccatgttgaaaaagactttggaacaggttgtctaaaaataacaccagctcatgacataaatgactttgaaattggaaaaagacatgatcttaaaagtatcaatatttttgatgagtcagcttgcttaaatgaaaattgcccacaagacttacaaggattaagtcgtgagaaagcaagagctgaagtgatcaaacgcttaaaagatcaagctcttcttataaaaaaagaaacgataaaaaactctgttccctactctgagagaagtaaagtcccccttgagccaagactctcaaagcagtggtttgttaagatgaaagacttagcaaaacctgcaattcttgctgcaaaagaaggaaagcttaatttttttccagatagctggaagaaaacttacctacactggcttgaaaatgttgaagactggtgtatttcaagacaactttggtggggacaccaaatccctgtttggacctgtcaaaactgtaagactgttcacgcttctcttagcgctccaaaagagtgttcaaactgtcacaaagaagagctcattcaagaccctgatgtccttgacacttggttttctagctggctttggcctcttagcccctttggctggcctgaagaaagcaaagatttaaagctttttttcccatctgctgtgctcataacaggagctgatatcatctatctttgggtagctcgcatggtgatggcttcctactatcttaaaggagagctgccctttaaagatctttattttaatgccattatctgtgacagtcagggaaga

SEQ ID NO: 307169 - DNA, 877 bp, Unknown
  Bacterial polypeptide expressing nucleotide sequence isolated from the Sargasso Sea
aaacatactgttcctttttctgatagaggaaaggtgccaattgaacctttattgtcaacacaatggtttttgaaaatggatgatatatcacaaggatgtcttaatgaaattgattctaaaaaaccatcgtttattcctccacgctgggagaaagtttataaggattggttagagaatattaatgattggtgtatcagtcggcaattgtggtgggggcaccaaataccagcctggtatgttttagatgaatctcaagactcaatagaacaaaatactccatatatcgttgcaagaaatgaagaggatgccttaatcgaagctaataaaaaatttggattaaatattaaattggttcgtgataaagatgttttggatacatggttttcgagtggtttatggcctttttcaacccttggttggccaaatacaaatgatccggattttaaaaaatggtatccaaatagtgttcttgttactggtttcgatattattttcttctgggtggcaagaatgacaatgatggggaatacttttacaaataatattccttttaaggatgtttatattcatggtctagttcgagatgaaaacaataaaaaaatgagtaaaagttcaggtaatggtattgatccaatactattaattgataaatatggttctgatgctctacgatttgctttaattcgagaagttgcaggcgctggacaagatatccgtcttgattttgataggaaaaaagatacgtcttcaactgttgaagcttcaagaaattttgcgaataaattatggaatgcaactaaatttgtgttaattaataaaagttctaataataattattcgcttaatgagagtgatgaaacttctttagagttatgtg

SEQ ID NO: 307170 - DNA, 840 bp, Unknown
  Bacterial polypeptide expressing nucleotide sequence isolated from the Sargasso Sea
aaaatttttgttgcagaaaatgaagatgatgcaaaacaacaagcaaaaaaacattacggtaaagatgttgaattaaatcgtgatccagatgttttagacacttggttctcgtctggcttatggccttttgctacacttggttggccagatgataataaatatgtagataaattttatccaacatcagtattagttacaggttttgatattatatttttttgggtagctaggatgattatgtttggaactgaatttttaaacaaagaaccgtttaaggatatttatgttcatgcgttagtaagagatgaaaagggtcaaaaaatgtctaaatcaaaaggaaatgtaattgatcctttagatttaattgaaaaatatagcgcagacgcacttagatttactttgttgtcaatggcttcaccaggaacagatgttaagctttctgaggatagagtaaaaggttatagaaattttttaaataaattatggaatgcaaataattttttaattactaatgaatgtgattttaaagatatagataaagtccccaatttaaatataaatataaacaaatggatttattcagaacttgttgaaaccaaaaataaagtagaaaaaaaccttgaagattatagatttgatgaagctgctaaaaacgcttatcaatttgcatggcattcgtattgtgattggtacttagaattatctaaaacaatactattttcagaagatgagaaagctaaagcagaggttaaaaaagtatcatcttttgtatttaaacaaattttaattttgctacatccttttattccttttgttactgaagaaatctggctaaaaaca

SEQ ID NO: 307171 - DNA, 834 bp, Unknown
  Bacterial polypeptide expressing nucleotide sequence isolated from the Sargasso Sea
tttatcaaaatcagtcattaaagtttttgtagaattgcataaaaaaatattgatttataaggctgaaaaacttgtaaattgggacactgttttaaaaaccgcgatttcagatttggaagtagatcaaagagagatgaattctaagatttactatatcagttacccaatagacaattcgtcagaatttatcactattgccacaacgaggccagagacaatgctaggggatactgcgattgcggtaaatccgaaggacaaaagatataaagatcatgttggcaaaactgtcacaataccaatcgtaggtagaaaaataaaaattattaaagataattatgctgatccggagcagggaactggagcacttaagatcacaccagcacatgattttaatgactatgatgttggtcaaagaaataaattagaaataattaatgtttttactgaagaaggaaaaataaatgataatgctccaaaagattatattggcttagataggtttgatgcacgtaaaaaaatattaaatgaattaaaagaaaaagatttctttgtaaaagaggaaaacatcaaaaataaagttccattcggcgatagatcaaattcagtaattgaaccttttttaacagaacaatggtttgttgatgccaagaaattagcgatcaaagctaaaaaaattgttaagacaaaaaaaacaaatttctttccaactaactggtctaaaacttattttcagtggatgaataatattgagccatggtgtatttcacgacaattgtggtggggacatcaaataccagcttggtatggacctgatcaaaaaatctttgttgcgat

SEQ ID NO: 307172 - DNA, 896 bp, Unknown
  Bacterial polypeptide expressing nucleotide sequence isolated from the Sargasso Sea
attatctgttaaagctaaagaagttgtaaataataaaaaaacaaacttctttcctgaaaattggtctaaaacttattttcaatggatggataatattgagccatggtgtatttcaagacaattatggtgggggcatcaaattcctgcttggtatggaccagacaaaaaaatttttgtagcaataaatgaagatgaagcaaaaaccgatgcaaaaaaacattataataaagatgttgaattaattcgcgatccagatgttcttgatacatggttttcttctggtctatggccttttgcaaccttgggatggccagatgaaaaggaatttgtagaaaaattttatcctacatcagttttagttaccggttttgatatcatatttttttgggttgctagaatgattatgtttggaacagaatttttacataaagaaccgtttaaagatatttatgttcatgctttagttagagatgaaaaaggacaaaaaatgtctaagtcaaaaggcaatgtaattgatcctttagatttaatagaaaaatatagtgctgatgctttaagatttactttactttcaatggcatcacctggtcgagatgttaaattatccgaggatagagttaagggatataggaattttttaaataaaatatggaatgcaaacaattttttaattcaaaatgaatgcagttttaataatgtagaaaaacctaatgatttaaaagttaatattaataaatggatttattcagaatttttaaccaaaaaggatgaaatacaaaaaaatatcaaaggttatcgttttgatgaagccgcaaaaaatgcatatccatttgtatggcattcattttgtgattggtatttagaactttcaaagacaatattattttcagataatc

SEQ ID NO: 307173 - DNA, 862 bp, Unknown
  Bacterial polypeptide expressing nucleotide sequence isolated from the Sargasso Sea
aaatcaagcaaaagaattttatgaaaaggatgttgagcttaggcaagatgaagatgttctggatacttggttctcttctgctctatggacattttctactttagattggccaaataaaacatacgaattagataaattttatcctagcaatgtcttggttactggttttgatataatatttttttgggttgctcgcatgatgatgatgggttcatattttataaaggaaactccatttaaagatatttatattcatcctttaattcgtgatgaaaaaggacaaaagatgtctaaatcaaaagggaacataattgatccattagatcttttagataaatatggtgctgacacattaagatttacattaactgcactcttaaatcctgggcgagatgtaaaattatctgaagctagagttaaaggatataaatcatttacaaataaaatttggaatgcaggaaaatttttacaaataaataattcagtttttaaggatgatatttcaatagatgaaatattttttgatgcaaacagatggataataaaagaattgaatgatttaaattctcaacttgatcaattaactaaaaagtatttgtttcatgaaatagccaataagatttatcattttgtatggcattcttattgtgattggtacattgaaattattaaacaaaattttgataatgaaaaatatgccgatgaaattaaaaaagtatctggatggacatttattcaagttttaaagattatacatcctattatgccattcattagtgaaaaattatggagatctttagttgataacaagtcttatttaatgaatcaagtttataaaaattatacaactaataattctttt

SEQ ID NO: 307174 - DNA, 871 bp, Unknown
  Bacterial polypeptide expressing nucleotide sequence isolated from the Sargasso Sea
ttcacaattcaagatatattaatcagatatcatagaatgaagggtatggaagtattgtggcaagcagggacagatcatgcaggaatagctactcagatggtggttgaaagaaaattaagtgagtcaaaccttgatcgacgatctctaggtagagaaaagtttattgaaaaagtatgggaatggaaaaaagagtcgggtggtcagataagtaatcaattaagaagacttggtgcttctgcagattggtcaagagaaagatttactatggatgaaggactttctaatgcagttaagaaagtttttgttaatttatttaatgatggaattatttataaagataagagattggtgaattgggacccaaaacttttaacagctatttctgatctagaagtagaacaaagagataccgaaggaagtttatggcatattaaatatcctatagatgaaaataattatatcattgttgcaacaacaagacctgagacaatgttaggcgatactgccgttgccgtacacccagatgatgtaaaatatagaaatttagttggcaaattctgtaatttaccaatttcaaataagaaaataccaatcattgctgatgaatatgcagatcctgaaaaaggttctggagctgtaaaaattacacctgcacatgactttaatgattttgaggtaggaaaaagacatgatttagaatttattaatatttttgatgaaaatgctaaactgaactcaaatgtgcctgaagaatttcaaaatttagatcgatttgaagcaagaaaactgattttaaaaaaattagatgaaatgaatttattaattaaagaagaaaaacagcaaatggtcataccatatggtgatagatcag

SEQ ID NO: 307175 - DNA, 857 bp, Unknown
  Bacterial polypeptide expressing nucleotide sequence isolated from the Sargasso Sea
actatacgaaaagggactaatttatagaggaaagagactggtaaattgggatccaattcttcagacagcagtttccgatctggaagtggaaagtcaagaagagagtggaaaaatttgggagataaaataccaaataaacaattcgtctaaaactctgacagtagcgacaacacgtccagagactttgctaggtgataccgctgtagcggtctcaccgaccgatgaccgttacgctcaacttgtaggaaaagaggttgtaataccaattaccaatagattagtcccaataatagctgatgaacatgtagaccctgagtttggaactggatgcgttaagatcacaccagcacatgactttaatgactatgaaatggggcttcgtcatgatttggaaatgataaatatatttacctttgacggaaaattaaatgataactgcccaaaaatactgcgcggccttcctagagaaaaagctagaaaaaaagttcttgagttacttaccgaaagagaattgcttgtatctgaaaaaaaacatcttttaaaaattccacgctctggccgaacgagcactatcatagaaccaatgcttacagaccaatggttcataaaaatggaatccatggctacccaagccaaaaaagcagtgcaagatggtaaaattagatttgtcccgaacaattgggaaaacacctactttcactggttagacaacataaaggactggtgcatatctaggcaactttggtggggtcaccaaattcctgcttggcgcgataaggagggaaatatttttgttgctcgagatgaaacagaagcttatgaaaaagcgaaagcgaaaggtcacaaggagagctaaa

SEQ ID NO: 307176 - DNA, 929 bp, Unknown
  Bacterial polypeptide expressing nucleotide sequence isolated from the Sargasso Sea
cacaacacgtcctgaaacaatgctcggagacaccgcagtggcagtgaatcccgaggatactgatcttgcaaagttgaagggaaaacaagtcaggctgccgcttaccgatagaactattccgatcattactgatcacgcagttgaacttgactttggcacaggggccttgaaggtgactccagcccatgatcaagtggactttgaaataggagaaaggcataaacttgatgttataaatgtcattagcccgtcagggtatatgaatcatcttgctggaaaatatgaaggattgaaccgaacagactgtaggaatgcggtagtaaaggatctggaagccgagggccttctagttgactcagaaaattacaatcactccgtcggccattgcgatagatgtgatgatatcgttgaacccagcatcacaaagcaatggtatgtccgcatggaagggctcgctaagccagcaatagatgccgttcgtaagggtgagatagccatagtaccagaacgcttcaaaagcgtttattacaattggatggaaaatataagagactggccagtcagcaggcagctatggtggggtcatcaattacccgtatggtattgtcaagaatgtagttcggtaacagtggaatacgatgacccggactcatgtcctaactgcaaatctaaaaacctggaaagggatcccgacgttttagatacctggtttagttctggtttgtggacccattcgactctaggctggccagagacaaaggaagatgtggattatttttatccgggcagtgtgatggaaacagggtacgatattttgttcttctgggtcgcacgtatgatcatgcttggcatagagaatatgggaagaccaccgtttaaaacggtatatcttcatgggctggtactggacccggaagggggaagatgag

SEQ ID NO: 307177 - DNA, 965 bp, Unknown
  Bacterial polypeptide expressing nucleotide sequence isolated from the Sargasso Sea
tttagaagttgatcaaagagagatgaattctaaaatatactatatcagatatccaatcgaaaattcttcagaattcattactattgctacaacaagacctgaaactatgcttggagatacagcgatagcagtaaatccaaaagataaaagatataaagattttgttagtaaaacagtgacaattcctattgttggaagaaaaattaaaattattactgacaattatgcagatcctgaacaaggaactggtgcattaaaaattacaccagcacacgactttaatgactatgaagtaggtcaaagaaacaagttagatataatcaatgtattaactgaagaaggaaagattaacgacaatgctcctcaagattacgtagggctcgatagatttgaggctcgtaaaaagttattagaggaactcaaagaaaaagatttttttgttaaggaagaaaatattaagaataaagttccttacggtgatagatctaattcagttatagaaccttttttaactgaacaatggtttgttgatgcaaaaaaattagctgtaaaagcaaaaaaaatagttaaatcaaaaaaaacaaatttcattccagcaaattggtctaaaacttattttcagtggatgaataatattgaaccatggtgtgtttctagacaactttggtggggtcatcaaataccagcatggtatggacctgataaaaaaatatttgttgctgtaaatgaaaaagaagcaattaaacaagctaaaaaattttataaaaaagatgttgaaataactagagatccagatgttttagacacatggttttcatctggtttatggccctttgcaacattaggttggcctgataaaaaagattatttgaagaagttttatcctacttcagttttagttacaggttttgatattatctttttttgggttgctagaatgatgatgtttggaatggaattttaaa

SEQ ID NO: 307178 - DNA, 646 bp, Unknown
  Bacterial polypeptide expressing nucleotide sequence isolated from the Sargasso Sea
ttaggatggccagataaaaaagattttgtaaataaattttatccaaccacagttttagtaactggctttgatataatttttttctgggttgcacgaatgatcatgtttggaatggaatttcttaataaagaacctttcaaagacatctatgttcacgctttagtaagagatgaaaaaggacaaaaaatgtctaaatctaaaggtaatgtaattgatccattagacttaattgaaaaatatagtgcagatgctctaagatttactttgctttcaatggcctcacctggaactgatgtaaaactttctgaagatagagttaaaggttatagaaattttttaaataaattgtggaatgcaaataattttttgatcacaaataattgtgattttaaaaagactgataaagttcccaaaactactttaaatatcaataaatggatttattctgaattgatagaaataaaagacaaaatccaaaagaatataaaagactatcgatttgatgaggcagccaaaaatgcttatcaatttgcttggcattcatattgtgattggtatatcgaactttcaaaaacaatcttatattcagatgatgagaagtcaaaaagagaggtaaaagaggtatcagcttatgtttttaaacaaa

SEQ ID NO: 307179 - DNA, 664 bp, Unknown
  Bacterial polypeptide expressing nucleotide sequence isolated from the Sargasso Sea
aaagaataacttattcaaaccacaaaaaaattctaagaaattttctgttgtaataccaccacctaacgtaacaggaagtttgcatatgggtcatgcattgaataattcaattcaagatttattagtccgttattatcgtatgaacaattatgaaacattatggcaaccaggaactgatcacgcaggtattgcaactcaagcacttgttgaaagaaaactagaaaaacaaaatttaaataaaagcagtcttggaagagaaaaatttattgaaaaagtatgggaatggaagaatgagtatggagatatcataattaatcaattaaagaaacttggatgttcttgtgattggtcacgtaatgcatttactatggatgaaaatttgtcgaaatctgtaattaaagtttttgttgaattgcataaaaaaaaattaatctacaaggctgaaaaactagttaattgggacactgtacttaaaacggccatttcagatttagaggttgatcaaagagaaatgaactctaaaatatattatattagatatccaatcgaaaattcctcagaatttattactattgctacgacaaggcccgaaacaatgcttggtgatacagcgattgcagtaaatccaaaggacaaaagatataaggattatgttggtaaaatg

SEQ ID NO: 307180 - DNA, 742 bp, Unknown
  Bacterial polypeptide expressing nucleotide sequence isolated from the Sargasso Sea
tttggttgcaaaaagcataagttgaactttataaatatttttgacaagcaggcaagattatactcttcagcaccaaaaaagtttgttgggatggatagatatgatgcaagaaaatcaataatcaaagctttaaaagaaaatggacagttaactaaaatagaaaataacaaaatgtttgttcctattggagagagaaccggtgaggttattgaaccgttgttaacaaaacaatggtttttagattcaaaaaaactttctaatgaagttttgagatcaattaaaaaaaaagaaattaaatttcatcctgaatcatggatgaatacatttaaacattggataaataatattgagccatggtgtatctctagacaaatttggtggggtcaccgcattcctatttggtacacagatggtggtcacaaaattgcagctaaggatttaaatcatgcaagaagcattttaaggaaaaaacgaatcaaaggtgatataattcaccaagaatctgatgttttagatacatggttttcttcagctctttggcctttttcaactctaaattggccacaaaaaaataaaatattatctaaatattatccgtctgatgtactggtaactggatttgatataattttcttctgggttgcaagaatgataatgatgggattattttttataaaaaaagtgccattcaaaaacatatatattcatccacttgttaaggacgaaaaaggagaaaagatgt

SEQ ID NO: 307181 - DNA, 889 bp, Unknown
  Bacterial polypeptide expressing nucleotide sequence isolated from the Sargasso Sea
caaagataaaagattagttaatggatccccaaaattattaactgcattttcagatttagaagtgaaacaaagagatcaagaaggtagccttgggcacataaaatatccaattaataaagataattatatcgttgtagctactacaaggccagagacattattaggtgattccgctgtcgcagttcatcctgaagatacaagatataaaaatttaattggtcaattttgtaagttgccattggttaataaaaatataccaattattgcagatgaatatgctgatccagaaaaaggctctggagctgtgaaaattacaccagctcatgattttaatgattttgaagttggtaaaagacatgagctagaatttattaatatttttgatgaatttgcaaaaataaatgaaaatgcaccagaaagatttcaaggtttaaatagatttgaggctagaaaatcaatattagaagagctttcacaattaggcttacttattaaggaagaaaaacaagagatggttattccttatggagatagatcaggagttgtaattgagccatggttaacagatcaatggttttgcaatgctaaaaaattagcaatagatcctataaagtcagttaaagaaaataagacaacttttgttccaaaaaattgggaaaatactttttttaattggatggaaaatattcagccttggtgtatctcaagacagttatggtggggccaccaaatacctgcatggtatggtcctgatgataaaagttttgttgctttatcactagaggatgcaaaattaatggcaaaaaatcattatgggaaagaagttgaattaaaacaagacgaagatgtattagatacttggttctcttcagctctttggactttctct

SEQ ID NO: 307182 - DNA, 847 bp, Unknown
  Bacterial polypeptide expressing nucleotide sequence isolated from the Sargasso Sea
aaattcaaaactttactatattaaatatcaaattgaaaatacaaaaaagtttatcactattgcgaccacgagacctgaaacaatgttaggtgatactgcaatagctgttaatccaacggataagagatataaaaagatagttggtaaaaatgcgataataccaattgtagagagaaaaattaaaattattgaggatgaatacgcagaccctgagcaaggtactggagcggttaaaattacacctgcacatgattttaatgattatgaagtaggtcaaagaaataaattagagatattaaatgtattcaccgaagatggtaaaattaacgataaagctcctaaacaattttttggattagatagatttgaggcacgaaaaaaattaatcaaattattaatagaaaaagattattttgtaaaagaagagaatataaaaaataaagttccatatggcgatagatccaattcaattattgaaccgtatttaacagaacaatggtttgctgatgctaaaaaattatcaattaaagctaaagaaatagttgaaaataaaaaaacaaaattctttccagagaattggtcaaaaacatattttcaatggatggacaatattgaaccatggtgtgtttctagacaattatggtggggacatcagatacctgcttggtatggacctgatggtaaagtttttgttgaagagaatgaggatacagcaaaacaaaaagcaaaagatttttataaaaaagatgttgaattaaaaagagatgaagatgttctagacacatggttctcatctggtttatggccatttgctacattaggttggcccaaaaaaaatgattattta

SEQ ID NO: 307183 - DNA, 912 bp, Unknown
  Bacterial polypeptide expressing nucleotide sequence isolated from the Sargasso Sea
actacaagacctgaaacaatgatgggtgatactgcagttgcagtaaaccccaaagataagaggtattctaacttaattggaaaaaaagtaaaaattccaatagttaacagaataatcaaaataatagctgatcattatgctgatccagagcaaggatctggagctgtaaaaataactcccgcgcatgattttaatgattatgaggttggaaaaagaaataaattggaaataattaacatttttgaaaagaacggaaaaataaacaaaaatggaattaaagaatacattggcttagatagatttgaagctagaaaacttttaataaaaaaactaaaagaaaacggtagtctagtaaaaattgaaactattaaaaataaagttccttatggtgataggtcaaatagtattattgaaccacttttaactgaacaatggtttgttgatgcaaaaaaattatctaaaaaaccaataaaaatagttaaacagggaaagacttctttttttcctaataattggaccaagatattttttcagtggatgaaaaatattgaaccttggtgtgtatctcgtcaaatttggtggggtcatagaattcctgcttggtatgatgaatataataatatgtttgttgctgagaacgaaaaacaagcacatattttagcaaagaagaaaaataaaaataaagactttaaattgaaacaagaaacagatgttttggatacttggttctcgtctgcattatggccatttgccacattaggttggccaactaaaacaaaagaattttcaaaattttatcccacttcagtacttgtaactggttttgatataatttttttctgggtagctagaatgttaatgatgggtaattactttaataaacatacaccgtttcataaagtttacgttcat

SEQ ID NO: 307184 - DNA, 964 bp, Unknown
  Bacterial polypeptide expressing nucleotide sequence isolated from the Sargasso Sea
ggctgttcatgtgattggtctagaaatgcctttaccatggacgataatctatcaaaatctgtattaaaagtttttgttgaaatgtataaaaatggattaatttacaaatcaaaaaaattagtaaattgggacactgttttaaaaacagctatatcggatttagaagtagatcaaagagaagttaactcaaaactataccacatcaattatccaatagaaggatctgataaatttataactattgcaacaactagaccagaaaccatgttaggagatacagcgattgcagttaatccatcagatgaaagatttaaatcattagtaaataagaatgtaatagttccaatagttgatagaaaaataaaaattattgaagatgattatgcagatcctgaacaaggaactggagctgttaaaattacgccagcacatgatttcaatgattatgaagtgggggagagaaataatttagaagttataaatgtttttactcctgatggaaaaattaatgaaaatgcacctgataattatattgggcttgatagatttgaagctagaaaaagaattttaaaagaactaactgataaaaacttatttgttaaagaagagaaaattaaaaataaagttccttatggagatagatctaattctataattgaaccctatttaacggagcaatggtttgcagatgctaagaagctttcaataaaagcaaaagaaatagtaaataataaaacaactaatttttttcctgttaattggacaaaaacatattttcaatggatggataatatagagccttggtgtatttcaagacaactttggtggggacatcaaatacctgcatggtatggacctgatggagaaatatttgtagatgaaacagaagaaggtgcaaaaaaattagataaagaacactataaaaaagatgttgaattaattagagatccagaatgtacttgat

SEQ ID NO: 307185 - DNA, 778 bp, Unknown
  Bacterial polypeptide expressing nucleotide sequence isolated from the Sargasso Sea
catgagcaataattatgatcatataaaagttgaagataaaatatattcttattgggaaaaacacgaactttttaaaccaaagaaaaatagaaaaaagtattcaattgtcattccaccaccaaatgttactggcaatttacatatgggtcatgctctaaataattcaattcaagatttattgactagatatcatagaatgaacaatttcgaaactttatggcaacctggcacagatcatgctgggatagcaacccaagcgttggttgagaaaaaattagctaatgaaggtaaaaacaaaaattcgattggtagagaaaattttattaaagaagtctggaaatggaaaaatcaatatggagatataataataaaccaattaaagaaactaggttgctcttgtgactggtccagaaatgcatttacaatggacgaaaacctatcaaaatccgtgataaaggttttcgtagaattatataaaaaagggctaatttataaatctaaaaaattagtaaattgggatacaaaattaaaaacagctatatctgatttagaagttgatcaacgtgaagttaattcaaaactttattatatcaattatccaattgaggatagtgataattttataactattgcaacaacaaggccagaaactatgttaggtgatactgctgttgccgtaaatccaaaagataaaagatataaaaaattagtttcaaaaaatgtaattttaccaattgtagaaaaaaaaattaaaattatagcagacgattatgctgat

SEQ ID NO: 307186 - DNA, 724 bp, Unknown
  Bacterial polypeptide expressing nucleotide sequence isolated from the Sargasso Sea
aaagttaataataatgcaattccacaatacgttggccttgatagatttgaagccagaaagaaaatacttaatgaacttaaggaaaaaaattattttgttaaagaagaaaatattaaaaataaggttccttatggcgataggtcaaattctataattgaaccttttttaacagaacaatggtttgctgatgctaaaaaattatctattaaagcaaaaaaaatagttaaaaataaaaagacaaatttcttcccaagtaactggtcaaaaacttattttcaatggatgaataatattgagccatggtgcatttcaagacaattatggtggggccatcaaatacctgcttggtatggacctgataaaaaaatatttgttgaattaaatgaaagtgatgcaaggaagtcagcaaagaaattttataaaaaagatgtaaaacttttaagagatcctgatgttcttgatacatggttttcatctggactttggccctttgcaacacttggttggccgaacaaaaatgaatatttaaaaaagttctatccaacaacagttcttgtaacaggatttgatataattttcttctgggtagcaagaatgatgatgtttggtatggaatttttaaacaaagaaccttttaaagatatttatgttcatgcactagttcgagatgaaaaaggacaaaaaatgtcaaagtcaaaaggaaatgtaatagatccacttgatc

SEQ ID NO: 307187 - DNA, 829 bp, Unknown
  Bacterial polypeptide expressing nucleotide sequence isolated from the Sargasso Sea
tatcaatgattggtgtatcagtcgtcaattgtggtgggggcaccaaataccagcctggtatgttttagatgaatctcaagactcaatagaacaaaatactccatatatcgttgcaagaaatgaagaggatgccttaatcgaagctaataaaaaatttggattagatattaaattggttcgtgataaagatgttttggatacatggttttcaagtggtttatggcctttctcaacccttggttggccaaatacaaatgatctggattttaaaaaatggtatccaaatagtgttcttgttactggtttcgatattattttcttctgggtggcaagaatgacaatgatggggaatacttttacaaataatattccttttaaggatgtttatattcatggtctagttcgagatgaaaacaataaaaaaatgagtaaaagttcaggtaatggtattgatccaatactattaattgataaatatggttctgatgctctacgatttgctttaattcgagaagttgcaggcgctggacaagatatcaggcttgattttgataggaaaaaagatacgtcttcaactgttgatgcttcaagaaattttgcgaataaattatggaatgcaactaaatttgtgttaattaataaaacttctaaaaataattattcgcttaatgagagtgatgaaacttctttagagttatgtgataagtggattttatcgaaattgaatcaggtaaatataaaagtcgctgctttgttgaaagaatataaattgggagaatctgcgaaacttctatatgaatttacgtggaatgatttttgtgactggtat

SEQ ID NO: 307188 - DNA, 925 bp, Unknown
  Bacterial polypeptide expressing nucleotide sequence isolated from the Sargasso Sea
gcattaaaaattactccagcccatgactttaacgattatgatgttggtcaaagaaataaattagaaatcataaatgtgttcactgaagatggtaaaataaacaataacgctccagatgactatgttggattagatagatttgaagcacgtaaaaaaattttaaatgaattaaaagaaaaagatttttttgttaaagaagaaaatattaaaaataaagtgccctatggcgataggtcaaattcagttattgaaccttttttaacagagcaatggtttgtaaatgcaaaaaaattatctattaaagctaagcaaatagtaaaaacaaaaaaaacaaatttctttccagaaaattggtcaaaaacttattttcaatggatgaataatattgaaccgtggtgtatttcaagacagctttggtggggtcaccaaatacctgcatggtatggtccagataaaaaaatctttgttgcaacaaacgaaacagatgcaaaaaaacaagctaaaaatttttataaaaaagatgttaaaattaccagggatccagatgttttagatacatggttttcatctggtttatggccttttgcaacattaggttggcctgataaaaaagattttgttaaaagattttatccaacaactgttttagttacgggctttgatattatttttttttgggtagcaagaatgatgatgtttggtatggagtttttaaataaagaaccatttaaagatatttatgttcatgcgttagtaagagacgaaaaaggacaaaaaatgtctaagtccaaaggaaacgtaattgatccattagatttaatcgaaaagtatagcgctgatgctttaagatttactcttctttcaatggcctcacctggaactgatgttaaactttctgaagatagagttaagggatataggaatt

SEQ ID NO: 307189 - DNA, 517 bp, Unknown
  Bacterial polypeptide expressing nucleotide sequence isolated from the Sargasso Sea
aatggaactagataaattttttaattttataaatgatgagaaagaattgtattctttatgggaaaattctgattgttttaaacctaataaaggtggtgaaccatactctattatgatgcctccacctaatgttactggaagtttacatatgggacatgctttaacttttacaattcaagatattttaattagatatcatagaatgaaaggtatggaagttctctggcaggcaggtactgatcatgcaggaatagcaactcaaatggttgttgaaagacaattagctcattcaaacatagatagaagatcaattggacgagaaaaatttattaaaaaagtttgggaatggaaaaaagaatctggtggaaagataagtaatcaacttagacgtcttggtgcttctgcagattggtctagagaacggtttactatggatgaaggtttgtctaatgcggtaaaaaaagtttttgtaaacttatataatgatggaataatatataaagataagagattagta

SEQ ID NO: 307190 - DNA, 834 bp, Unknown
  Bacterial polypeptide expressing nucleotide sequence isolated from the Sargasso Sea
aattattgaacctttgctaaccgaacaatggtttgcagatgcaaaatttttatctaagaaagcgatacaagttgttaaaaaaaagaagactactttttttccaatcaattggtcaaaaacatattttcaatggatgaataatattcaaccttggtgtatatccagacagctctggtggggacatagaattcccgcgtggtactctgaggataaaaaaatttttgttgctgaaaatgaaaaagaagcaataaaaattgctaaaaaatattataaaagaaatgtgaagttaaaaagagatgatgacgttttagatacatggttttcatcagctctttggccttttgctactttaggatggccaaaaaaaacttacgaattaaaaagattttatcctacatcagttcttgttactggatttgatatcatttttttctgggttgctagaatgatgatgatgggaaattattttttaaaaaaagaacctttttcaaaagtttatgtacatgctttagttagagatgaaaaaggtcaaaaaatgtcaaaatcaaaaggtaatgttatcgaccctcttgatataatcaaaaagtacggtgctgactctttaagatttactttaatttcaatggcctcacctggtagggacgtaaaattatccgaagatagagttaaaggttatagaaattttataaataagatatggaatgcaaatcaattctctttaaaaaataagtgtaaactaaaaggtaactttaatataaaaaaaataaatcttgatattaataaatggatttattttgaactggttaaaactaataataaagcaatagagcatat

SEQ ID NO: 307191 - DNA, 862 bp, Unknown
  Bacterial polypeptide expressing nucleotide sequence isolated from the Sargasso Sea
gatgttttgtgggcaagttggggtagaccatgcaggcatagccactcaaatggtagtagaacgtcaactagaatctgaaggaaaaagtaaagaatccattggcagagaagcgtttgaagaaagagtatgggaatggaaagaaaaatcaggcggcacaataactcaacaactaagaagattaggtgcatcggttgattggtcaagagaagctttcacaatgaatgaagaccttagcctggctgtaagggaggtctttgtttcattatttgaagaaggtttaatttatagaggagaaaggttagttaattgggacgttgtcttacaaacagccttgtctgatctcgaagtaacttctgaagaagaaacaggatctttatggcatttcgactaccctgttgagaatggtggctctataacagtagcaactacaaggcctgaaaccatgttgggtgattcagcagtagccgttaatcctgaagatgagagatttaaagaattaataggtcaattcgtaatactgcctatcgcggagaggaaaatccctatcatagaagattcctatgtggatcaagattttggaactggatgtgtaaaaataactccagcacatgactttaatgattttgaaattggcaaaaggcatgacttagaaattattaatattctaaatttagatggaacattgaatgaatcagtcccagaaaggtttagaggtttaacaactactgaagcaagaaaagaagttttaaatgcaatggagtcgttaggttatctaaataaagtagaaccacataaaatacaaatccctaaaagtcaaaggagtgattctgtattagaaccgcttataactaatcaatggttc

SEQ ID NO: 307192 - DNA, 919 bp, Unknown
  Bacterial polypeptide expressing nucleotide sequence isolated from the Sargasso Sea
tatgggtcatgctttaaccttcacaattcaagatattttaatcagataccatagaatgaagggtatggaagtattgtggcaagcagggacagatcatgcaggaatagctactcagatggtggttgaaagaaaattgagtgagtcaaaactagatcgacgttctctaggtagagaaaagtttattgaaaaagtatgggaatggaaaaaagagtcgggcggtcagataagtaatcaattaagaagacttggtgcttctgcagattggtcaagagaaagattcactatggataaaggtctttctaatgcagttaagaaagtttttgttaatttatttaatgatggaattatttataaagataagagattggttaattgggatccaaaacttttaactgctatttctgatttagaagtagagcaaagagatactgaaggaagtttatggcatattaaatatcctatagatgaaaataatcatatcatagttgcaacaacaagaccagagacgatgttaggagatactgcagttgccgttcatccagatgatgaaaaatataaaaatttaattggcaaattttgtaacttaccaatttcaaataaaaaaataccagtcattgctgataaatatgcagatcctgaaaaaggttctggagctgtaaaaattactccagcacatgactttaatgattttgaggtaggaaagagacatgatttagaatttattaatattttcgatgagaatgcaaaacttaattcaaatgtacccaaagaatttcaaaatttagatcgatttgaagcaagaagactaattttaaaaaaattagatgaagtaaatttattaattaaagaagaaaaacagcaaatggtcataccatatggtgatagatcaggtgtagttattgaaccatggctaacagat

SEQ ID NO: 307193 - DNA, 826 bp, Unknown
  Bacterial polypeptide expressing nucleotide sequence isolated from the Sargasso Sea
cacgttgttgttgccaccacccgacccgagaccatgctcggcgacaccgcggtggccgttcacccggaggacgaacgctactgtcatctggtcggcaaacaaatcgggttgccgctgacagatcgatcgatcccgatcatcgctgacgactatgttgatccggagttcggcaccggctgtctcaagattacccctgctcatgactttaatgatcacgaagtgggtcttcgccacaagatgcagccgatcaatgtccttgatcccagcgctgcgattgatctgccggattcgccttatcacggccttgatcgatatgccgcccgtgagcggatcgttgccgatctacaggcacttggcctggtcgagcgaatcgatgaccacaccctgatggtgcctcgtggggaccgctctggggccgtggtcgaaccgtatttgaccgaccagtggtttgtgcgggcaggtccattggcggcacccgccatcaaagcggtggaagacggacgcatccgctttgttccggaaaactggagccgcacctactttgaatggatgcggaacatccaggactggtgtatctcccggcagatctggtggggtcatcggattcctgcctggtatgacgacgagggaaatatatttgtcgggcgggatgccgacgaagcgcggaaaaaagcgttccagcatcacggcaaagatgtctcgctgcatcaggacgacgatgtgctggatacctggttttcttccgcgttatggccgttttcaaccctgggctggcccaagtccaccgaggatctggccactttttatccctacctcatgtgcatgg

SEQ ID NO: 307194 - DNA, 895 bp, Unknown
  Bacterial polypeptide expressing nucleotide sequence isolated from the Sargasso Sea
gatcaagatgttctggatacgtggttttcttcctctttgtggacttttgctacccttggttggccccaacaaacaaaaagactagataagtatcatcctacctcattattagtgactggttttgacatcatctttttttgggttgcccggatgataatgatgacaaagcatttcacaaaggcaataccgtttaaagaaatctacattactgggctcatcagagatagtgaaggccaaaaaatgtctaagtcaaaaggaaatgttcttgatcctttggatattattgatggaataaatttagaagctcttatttcaaaaagaatttctggtctgttaaatccagacgacgagcaaaagataatcaaacagacaaagaaagattatcctcaaggaataaaagctcacggtactgatgctttgagatttacttttttgtctcttgcctctggaagtagagatattaattttgatatgaagcgcgtagaaggttatagaaatttttgtaacaaactatggaatgcctctagattcattgaattaaataagccagctagtttcaaaaagactaatcaatttataaaaactcccgaagataaatggatcgtggagaaattaaatcgcacgatagtttctatgaatacgcatatggataattatagatttgatttagccactcaaagtgtttacgaattcgtatggaatgatttttgtgattggtacatcgagttttcaaaaaatcgacttgattcagataacattaagaaaagcgaagtagataggatcatatctggtttgctgcacattcttgagtcaatcttaaaactttgccatccttttatgccttttattacagaagaaatctggaatcagattgcttccagaaaaaaacaatcat

SEQ ID NO: 307195 - DNA, 844 bp, Unknown
  Bacterial polypeptide expressing nucleotide sequence isolated from the Sargasso Sea
catagaaaaactggacgagacactttatggcagcccggcacggatcatgctggtattgcaacgcagatggttgttgagaggcaactggctgaagatggtgtatcccgacaagatttaggtcggagtaaatttctagaaaaggtttgggagtggaaaaatgaatctgggggaacaattactgaacaattacggtcgttaggtagttcccctgattggagccgcgagaagtttaccatggacccagacctatctatagctgttacgagagttttcgttgaattatacaaacaagggttaatttatcgagataagcggcttgttaattgggacccaaaattgttaacggctatttcagaccttgaggttcaacaagtggagacccagggcaaactatggcactttaaatacccactagaagcgggccaggatgagtttattacagttgcgacgacgcgacctgagacaatgttaggtgacacgggtattgccgtccatccggatgatcctaggtacacaaaatttgtaggcaagaaagctgtccttccattggtagatcgtttgatacctatagtagcagacgaatatagtgatatggaaaaaggttcgggtgcagtgaaaatcactcccgctcatgacttcaatgattttgaggtgggcagacgtcatgagcttgagttaataaatatctttgatgaaaaagctaaattaaataaaaacgtcccggaaaagtttgttggacttgatagatatgaagctagaaagataattgttgctcagatggaggagctcggtcttctatccttagtagaggatacaactcatgtagtaccttcatggggataga

SEQ ID NO: 307196 - DNA, 943 bp, Unknown
  Bacterial polypeptide expressing nucleotide sequence isolated from the Sargasso Sea
aactctttttggtgatatggccattgcagtaaatccaaatgatgaaagatataaagatcttattggcaaatatgccgtcctaccttttgttgagagaaaattaccaattattggtgatgattatgttgacatggaatttggtactggttgtttaaaaataacaccagctcatgactttaatgattatgaaataggcaaaaaatattgtttacatgaaaaagataacaaggttgagacatccaaaaatattgacgacttcgagccaattaatatttttaatgaagatgcatggacaaataataatgtaccgaaattatttgaaaatttagatagatttaaagttagaaaattagtaataaaagaattaactgagttaaaactccttgaaaaggaagaggaatatggcgtgagcataccaagaggtgagcgttcaaatattgtaatagagcccagattgagtcatcaatggtatgtaaaaacttctgaaatggcagagaaagcaaatatggaagttaaaaaaggaaacgttaaatttcatcctaataactggataaagacttattttaattggatggataatattgaagattggtgtataagtagacaaatttggtggggtcacagaattccagcttggtacgatgatgatggaaatatttacgttggtgaaaatgaacaagacgtaagaaattattacaaacttgatgaagtaaaacttaagcaagatgaggatgtcttagatacttggttctcatcaagtctctggccattcggatctcttggttggccagaaaaaacagatgattttaaaaatttctttccaacctctcttttagtaacaggttttgacattatatttttctgggtagcaagaatgataatgatgagtattgaatttactggaaaaatacctttcaaggatgtgtatgttactggtcttatc

SEQ ID NO: 307197 - DNA, 856 bp, Unknown
  Bacterial polypeptide expressing nucleotide sequence isolated from the Sargasso Sea
aattctgtaaaacaaaataatacaaattttgttccaaaaatttgggaaaaaactttttttaattggatggaaaatattcagccatggtgtatatcaagacaattatggtgggggcaccaaatacctgcttggtatggtccagataataaattttttgtagcattatcaatagaagatgcaaaattaattgcaaataaatattatggtaaagatgttgaattaaaacaagatgaagatgttttagatacttggttttcttcagcactttggacattctcaacattagattggcctaataaaacatatgaacttgatcgattttatcctgggaatgtcttggtaacgggatttgatattatattcttctgggtagctagaatgatgatgatgggctcatattttatgaaagagacaccttttaaggatgtttatatacacccattaattagagatgaaaaaggtcagaaaatgtctaaatcaaagggcaatattatagatccattagttttactagataaatatggagctgatactctccgctttaccctgactgcattattaaaccccggaagagatgttaaattagctgaagagagagtgaaaggttataaatcttttaccaacaagatttggaatgcagcaaattttttaaacttaaataatgtttcttttatagatactattgatattgaaaatattaaattagatactagcaaatggatattaaaagagtttgaagaaattcaaaaaagatattttgataatattgaaaaatatcaatttcatgaaatagctagtttgttgtatcattttacatggcacacatattgtgactggtatattgaattcattaaat

SEQ ID NO: 307198 - DNA, 874 bp, Unknown
  Bacterial polypeptide expressing nucleotide sequence isolated from the Sargasso Sea
ttttttcctgagactggtcaaaacttattttcagtggatgaacaatattgaaccatggtgcatttctagacagctgtggtggggccatcaaataccagcatggtatgggccagataaaaaaatttttgttgaactaaatgaaagtgatgcaaaaaaatcagcaaaaaaatattataaaaaagatgttcaacttacaagagatccggatgttcttgacacatggttttcatccggtctttggcctttcgcaacattaggctggccaaataaaaaagaatatttaaaaaagttttatccaacaacagttcttgtaacaggatttgatataattttcttttgggttgctaggatgatgatgtttggtatggaatttttaaataaagaaccatttaaagatatttatgtacatgcattagtacgagatgaaaaaggacagaaaatgtcaaagtctaaaggaaatgtaatagatccattagatctaattcaaaaatacagcgcagatgcattaagatttactttattatctatggcttcacctggtactgatgttaaactttctgaagatagggttaaagggtataggaactttttaaacaaactatggaatgcaaacaattttttaatccaaaataaatgcaatttaaaaaatgcaaaaaaacttccaaaattaaaagttaatatcaataaatggatatactttgagcttttagaaacatctaatttaataaagaaaaatatagaagattatagatttgatgaagcggctaagaatgcctatcattttgcatggcataaatattgtgactggtacttagaattatcaaaaacaattcttttttcggacaatttaaaagctaaaaatgaagttaaagag

SEQ ID NO: 307199 - DNA, 1015 bp, Unknown
  Bacterial polypeptide expressing nucleotide sequence isolated from the Sargasso Sea
tggcaaccaggaactgaccatgctggtattgcaacgcaagctttagtagaaaaaaaactcacctctgaaaagatagataagaatgacattggtagggatagatttattgaaaaagtttgggaatggaaagagcaatatggtgacataataattaatcaattaaaaaaactaggttgttcttgtgactggtcaagaaatgcatttactatggatgaaaatttatccaaatcagtcattaaagtatttgttgaactttacaataaaggtttaatttacaaagataagaaattggtaaactgggatactgttcttaagacagctatttcagatttagaagtagatcaaagagaagtaaattcaaaaatttattacattaaatatcctatagatggaactagtgaatttataactatagcaaccacaagacctgaaacaatgctaggtgataccgctatagctgttaatcctaaagatgatagatttaaatcatttgttggcaaaacagtaactataccaattgttggtagaaaaattataattatagaagatgattatgctgatcctgaacagggaacaggagcattaaaaattactcctgcacatgactttaatgattatgatgttggtcaaagaaacaatcttgaaatcattaatatttttactgaagaaggtaaaataaatgaaaacgcacctgaacactataaaggtcttgatagatttgaagctagaaaaataattttaaaagaacttaaagaaaaagaattttttgtaaaagaagaaaatattaaaaataaagtcccttatggggatagatctaattctataattgaaccttttcttactgagcaatggtttgctgatgctggcaaattatcagttaaagcaaaagaagttgttaattcaaaaaaaacaaatttttttcctgaaaattggtcaaagacatattttcaatggatgaataatattgaaccctggtgtatttctagacaattgtggtggggacatcaaatacctg

SEQ ID NO: 307200 - DNA, 886 bp, Unknown
  Bacterial polypeptide expressing nucleotide sequence isolated from the Sargasso Sea
tctaagaaaccaatagatatagttaaaaaaaataaaacttctttttttccaagcaattggactaaaactttttttcagtggatgaatgaaattgaaccttggtgtatatctcgacaaatttggtgggggcatagaattccagcttggtatgatggaaacaataatatctttgtggcagaaaataagaaagatgcactaattttagcaaaaaaaaaaaataagaataaaaaatttttgttaaatcaagaaacagacgttttagacacctggttttcatcagccttatggccgtttgcaacactaggttggcctagcaaaacaaaagagcttaaaaaattttatccaacttcagttttagtgactggctttgatataatttttttctgggtagcaagaatgcttatgatgggaaattattttaataagaatactccatttcacaaagtatatgtccatgctttagtgagggatgaaaaaggtcaaaaaatgtctaaatctaaaggaaacgtaattgatccactagaattaattgataaatatggtgcggacagtttaaggtttactttaatttcaatggcatctcctggaagagatgtaaaattatcaaaagatagagtaacgggaaataggaattttatcacaaaaatttggagtgcaaacaattttttaaaattaaataattgtaaattagataaaaagatagatataaattcaattaaacttcctattaatctttggatatttaatgagtttgttaaagttcaaaatttagtaacaaaaaatattgaaattttcagatttgatgaagcaacaaagcacgtttaccaatttgtatggcactcttactgtgattggtacctagagtttttaaagcccagtttttaac

SEQ ID NO: 307201 - DNA, 910 bp, Unknown
  Bacterial polypeptide expressing nucleotide sequence isolated from the Sargasso Sea
atttataaagctaaaaaattagttaactgggatactgttttaaaaacagcaatttcagatcttgaggttgatcaaagagaagttaattcaaaaatttattatattaaatacccaatagatggaactgatgagtttattacaattgcaacgactagacctgaaacaatgttaggagacacgggaatagctgttaatccaaaagatgatcgttttaaatcctttgttggtaaaacagcaacgatacctatagttggtaaaaaaattaatattgtagaagatgactatgcagatcctgaacaaggtactggtgcgttaaaaattacacctgctcatgattttaatgattatgatgttgggcaaagaaataatttagaaattataaatgtttttactgaagcaggtaaaataaatgaaaatgctccaaaagagtatgtgggtcttgatagatttgaagcaagaaaaaagattttaaaggaacttaaagataaagaattttttgtaaaagaagaaaatattaagaataaagttccatatggcgatagatctaattctattatagagccttttttaacagagcaatggtttatagatgctgaaaagctatccattaaggcaaaggaggttgttaattctaaaaaaacaaatttttttcctgaaaattggtcaaaaacttattttcaatggatgaataatattgagccctggtgtatttcaagacaactatggtggggccatcaaattcctgcttggtatggtcctgataaaaaaatttttgtagctacaaatgaagatgaagctaaagcagatgccaaaaaacactataataaagatgttgatttaattcgagacccagatgttctcgatacatggttttcatcaggtctatgggcatttgctacactgggtggcc

SEQ ID NO: 307202 - DNA, 998 bp, Unknown
  Bacterial polypeptide expressing nucleotide sequence isolated from the Sargasso Sea
tataaaagcaaaaaaaatagttaagttaaaaaaaacaaatttctttcctgaaaattggtcaaaaacttattttcaatggatgaacaatattgaaccctggtgtatttcaagacaactttggtggggtcatcaaataccagcatggtatggtcctgataaaaaaatctttgttgcacttaatgaaaaggaagcaaagcataatgcaaagaaattttataaaaaaaatgttgaattaaaaagagatcctgatgttttagatacatggttttcttctggtttatggccatttgctacattaggctggaatactaaagatccatatcttaagaaattttatccaacatctgtattagttactggttttgatattattttcttttgggtagctagaatgattatgtttggaatggaatttattaaaaaagaaccttttaaagatatttatgttcatgctttagttagggatgaaaagggtcaaaaaatgtcaaaatcaaaaggtaatgtaatagacccgttagacctaatcgataaatacagcgctgatgcattaagatttacacttttatcaatggcgtcaccgggaagagatgttaaactttctgaagatagagtaaaaggtaatagaaattttcttaacaaattatggaatgtaaacaattttttaattcataataaatgtgaaattaaaaatactaaaaaagcacccaaagctaaaattaatattaataaatggatatattctgaattagttcaaacaaagttcattgttgaaaagaatataaaagaatatcgatttgatgaagcagctcgaaatgtataccagtttgtatggcattcttattgtgattggtacttagagctaagtaaaacaattttaaattccaaaaacaaaaaccaaatcaaagaaaccaaagaaattgctagttatatatttaaagaaatttttattttatttacaccattcatacctttttatacggaggaagtatggcttaaaa

SEQ ID NO: 307203 - DNA, 781 bp, Unknown
  Bacterial polypeptide expressing nucleotide sequence isolated from the Sargasso Sea
aatgagtagcgataaatatatacattctgatgtagaaaatagaatttattcctattgggaaaaaaatggtctttttaaacctaaggaaaattcaaaaaaattctcaattgtaattcctccaccaaatgtgacgggtagtttacatatgggacatgcgctaaacaattctattcaagatttattagttcgttatcataggatgaataattttgagactttatggcaaccaggtacagatcatgctggtatagccacacaggctttagtagagaaaaagttatcttctgaaaaaatagataaaaatgaaattggtagagaaaaatttattgaaaaagtatgggagtggaaagaacagtatggagatataataataaaccaattaaaaaagcttggttgttcgtgtgactggtcgagaaatgctttcacaatggatgagaatttgtcaaaatcagttattaaggtatttgttgatctttataacaaaggattaatttataaagataagaaattagttaactgggatacagttttaaaaacagctatttctgatcttgaagtagatcaaagagaggtaaattctaaaatttattacatcagatatccaatagatggaactaaagaatttattacaattgcaaccacaagacctgaaacaatgcttggagacactgcaatagcagttaacccaaaagatgaacgatttaaatcctttgttggaaaagtagtgtctattccaattgttggaagaaaaataaaaaatattgaagacgattacgcagat

SEQ ID NO: 307204 - DNA, 849 bp, Unknown
  Bacterial polypeptide expressing nucleotide sequence isolated from the Sargasso Sea
tatgggccttttcagatcgggacagtttcgtccggagaccaagtttggggataagtatgtagtcatgcaccctgaagatgaacgataccttgattatcaacatggacagacctttgagtgcgaatggatcaacgggagaatccaggccacgatcattaaagacgatgccgtggatcctgaattcggaacaggagtgatgaccatcactccatggcatgatcatgcagattttgagattgccgaaagacatcaactggataaggaaccgattattgatttcgacggtagacttcttccaattgcccaagagttttcgggaatgggcattgaagaagtccgaagtttgattgtcgaaaaacttaaaacaaagggactgttggttgaagtggatgaaaagtatacccacagcaagtcatttaacagtcgaggaggaggggccatagagcctcaaatccgggaacagtggttcattgatgtcaataaacaggccatcgattggaaaggggcaaaatctagcttgagagaaattcttatcgatgtgtttcgtgccggagacatcaggttggttcctgatcgatttgaaagtacgtactttcactgggttgaaaatcttcgtgactggtgcatcagcagacaaatctggtgggggcacaggattccagctttttaccgtgagaatgaattacaaatcgccatgaaaactccggaaggtgtgggctgggaacaggatcctgacaccttggacacctggttttcatctgcactttggacatggagtaccctgattgatccggatttggctcaggatgaaagcatctcttttgaggaattgctcaggagaagtcccga

SEQ ID NO: 307205 - DNA, 742 bp, Unknown
  Bacterial polypeptide expressing nucleotide sequence isolated from the Sargasso Sea
aggagcagtaaaaattactccagctcatgatttcaatgactataatgtaggcataagaaacaagttagaagtaattaatatatttacgcctgatggaaaaataaatgacaatgcacctgacccatataaaggtttagatagatttgctgcaagaaaattaatcttagaacatcttgaagaaagtaaatttttacaaaaaatagaaaagttagtaaataaggttccttatggggatagatctaattctattattgaaccttacttaacggaacaatggtttgttgatgctaaaactttagccattaaagcaaaagaagtggtaaataatggtaagattaaattttttccagaaaattggtcaaaaacttattttcaatggatggataatattgaaccttggtgtatttctcgtcaattatggtggggacatcaaattccagcatggtacggacctgatggaaaaatatttgtagctgaaaacgaacatgaatgtaaaaaacaggcaaaagaattctattcaaaagatgtagaattaaaaagagatgaagatgttttagacacctggttttcatcaggtctatggccatttgctactttaggttggccagaaaaaacttcagaagttgaaaaattttatccaactagcgttctagttactggttttgatatcatatttttctgggttgctagaatgataatgatgggaactgagtttttaaaggaagaaccctttaaaaatata

SEQ ID NO: 307206 - DNA, 862 bp, Unknown
  Bacterial polypeptide expressing nucleotide sequence isolated from the Sargasso Sea
atgcaagacgaaacctatgagccattagctattgagaaaaaatggcaagagagctgggagtcagctaacaaatttgtaccagtaggttcggataaaaagttttcaattgttattccaccaccaaatgtaactggatctttacatatgggacatgcattagagcattcaataattgatgtaattactcgtataaaaaggcttcaaggatatgaaactttatgggtgccaggcacagaccatgcaggaatcattactcagttattagttgaaaatgaactatctgaaaagggtgtacagaaagaagacattggaagagaaaactttatatcaaaagtttgggaatggaaagaaaaatctggtgaaaatatatcaactcaaatgaggaaacttggtatgagctgtgactggtctcgtgagaggtttactatggatgaaggtctttccacagccgtaagagaagtatttataaaactttatgaagatggattaatttataaaggtacacgaatggttaactgggacacggagcttatgtctgcagtttctgatcttgaagtaactttaaatccagaaaaaggaaaattgtggagtattaaatataaaacagaagattcgtttttaactatttctactacgcgtccagaaactcttttaggagatacagcagttgctgtaaatcctgatgatgaaagatataaaaatctaattggtaaaacagctattgtgcctttagtaaatcgtgaagttccaataattgcagatgaatatgttgatccagaatttggttcaggatgtgtaaagattacgccgtcacatgatttcaatgattatgaaattggagaaaaacataaattagagttta

SEQ ID NO: 307207 - DNA, 834 bp, Unknown
  Bacterial polypeptide expressing nucleotide sequence isolated from the Sargasso Sea
ggtgaggatgtcttatggcaaactggtactgaccatgcaggaattgcaactcagatggttgttgaaagaaagcttgattctgaaaataaaccttcaaggattaaacttggtagaaaaaaatttgttgatgaagtctggaaatggaaagaagaatctggaaatacaattactagtcaactacgaaggctaggcgcttcatgtgattggagtagagagcgctttactatggatgaaggtctcagtcttgcagtaaataaggtatttgtagatttatataatgaaggcttaatatataaagacaaaaggcttgttaattgggatccccaattaagaacagctatatctgacttagaagttattcaaaaagaagttgatggttatctatggtatataaattacccaatcaaagactctaaggaaacaattacaattgcaaccacaagaccagaaacaatgtttggcgatacagctatagccgttcatccaagcgataatagatatgcagatcttattggaaaagaagttattattcctattatcggtagatctataaaaattataactgatgaatatgctgatcccgaacaaggcagcggggctgtaaaaattactcctgcacatgattttaatgatttcgaagttggaaaaagaaataatttagaaatgctatctatcttgaatatagaaggtaaattaaatgaaaatgtagataaagaatggcaaggtcttgatagatttgaagcccgatcaaaattattgaaaatgctctctaaagaaggttatttagaaaaagaagagaaatataataattctgttccccatggcgatagatct

SEQ ID NO: 307208 - DNA, 922 bp, Unknown
  Bacterial polypeptide expressing nucleotide sequence isolated from the Sargasso Sea
gattgtcaactccagacagctgtcagtgatctgaaaatcgaatcaaaagaaatggatgggcacctatggaccatcgcatatcccatccaggggtctgatgagtcggtcattgtcgccaccacacgccctgagacactgttcggagatcaggctattgccattcacccaaatgatcaacgctatcgacatttgcatggcaaatctgccacgatcccattaacgacacgcactatcccaattattctagatgagcatgtggatcctgaatttggctcaggttgtgtgaaagtgacgcctgcacatgactttaatgattatgccattggtcaacgtcatcaactcccctaccttactgtgcttacacctgatggccgcatgaataaagaagttcccgatgcttaccaaggactcacagtcaaagaagcacgcaaacaaatcgttgatgaccttagcgaaaccggacaattactggcaacaaagccacaccgacaccaagtccccaccggtgatcgatcagggactgtgatagaaccacgcctcacttatcaatggttcatggcgatggaaaaacttgccaagcctgccatcgacgccgtcaaaaagggtgagattacttttaccccaaaaaactgggaaaacacctacttccactggctagaaaatattcaagattggtgcttaagccgtcagttatggtggggacaccaaatcccggcctggtatgatcaggatggcaatgtgtatgttggtcaatcagaaacacacgtcagagataaatatcaactcagccaagaaatcacactgaaacaagatgaagatgttttagacacctggttctcctcagcactttggccttttgtcaccctaggctggcctgaaaaaaccgatcgctttgacacgttctacccaaacaagcacctta

SEQ ID NO: 307209 - DNA, 477 bp, Unknown
  Bacterial polypeptide expressing nucleotide sequence isolated from the Sargasso Sea
aatgcagcttgataaattttttgattttttaaaagatgaaaaaaatctttatgcacaatgggagcaatcaaattgttttaaaccaaaaaaaggaggtaaaccttattctattatgatgccaccacctaatgttacaggtagcttacatatggggcatgctttaaccttcacaattcaagatatattaatcagataccatagaatgaagggtatggaagtattgtggcaagcaggaacagatcatgcaggaatagctactcagatggtggttgaaagacaattaagtgagtcaaatctagatcgacgatctctaggtagagaaaagtttattgaaaaagtatgggaatggaaaaaagagtcgggaggtcagataagtaatcaattaagaagacttggtgcttctgcagattggtcaagagaaagatttactatggatgaaggtctttctaatgcagttaagaaagtttttgttaattt

SEQ ID NO: 307210 - DNA, 718 bp, Unknown
  Bacterial polypeptide expressing nucleotide sequence isolated from the Sargasso Sea
aaaagaaaatttctgatttttggatcaaaaatggattgctttaagccaaaaaaaaataaatcgaaaaaaaattttagtatagtaattccaccacctaatgttactggcagacttcatatgggtcacgctttaaataatagtctccaagatgttttaattagatttaaacgaatgcagggtcatgaaaccttatggcaacctggtactgatcatgcaggtatagctactcaagctgtcgtagaaaaaaatcttgaaaaaaataatattaataaaaataatttaggtagaacaaattttataaaaaaagtttgggaatggaaagaagagtcaggtggaataattttagatcaacttaaaaaattaggttgttcttgtgattggtcaagaacaaggtttacaatggataaagaattttcaattgcagtaataaaagtattcgtagatctatataataataaacttatttataaagataaaaaactagtaaattgggatacccagcttcaaacagctatttcagatttagaggtaatacaaaaagaagttcaatctcaactttattacattgactatcagttagaaaattctccagagaaaataactatagcgacaactagacccgaaacaatgatgggcgataccgctgtagcagtaaatcctaaagacgaaaggtatgttaaccttgtagggaaggaagttagaattccgatagttaata

SEQ ID NO: 307211 - DNA, 748 bp, Unknown
  Bacterial polypeptide expressing nucleotide sequence isolated from the Sargasso Sea
ctatggttttttcgttatccaataaaagactcaactgaacatgtggttgtggcaacaaccagaccagagaccatgcttggagatactgcggtggcagttaatcctgatgatcatagatatcaacatttgatagggaaacaaattgttcttcctcttgttggaagagagattcctattattgctgataaatacgtagatcctgaattcgggacaggttgtgtgaagattacgcctgctcatgatccaaatgactttttaatgggtgaaaggcatgatcttaaattcataaatattatgaatgatgatgcttctatgaattccaatgtgccagaaaattacattgggctatcacgtgagcaggctcgtaaagaaattgtgaaagatttaggagaagaaggttttttagtaaaaaaagaagactataaaacaaaaatagggtattcagaacgaggtcaagtcccaattgaattttacatgtctgagcagtggtttatgaaaatggatgaacttatcaagcccgctatggatgcagtaaaaaatggtgacattaatttttatcctaaacattggtcgaaaacctatgatcattggttatcaaatatcaaagattggtgcatcagtcgtcagttgctgtgggggcaccaaatacctgtttggtaccataaagatgataaaacaaaaatacatgtttcagttgatggccccagcgataataaaaattggatacgtgatgcggatgtccttgata

SEQ ID NO: 307212 - DNA, 841 bp, Unknown
  Bacterial polypeptide expressing nucleotide sequence isolated from the Sargasso Sea
tggtgcgtcggttgccattcagctatctctgacatcgaagtcgagtatgaggacgaagatacgtccttctggcacattaggtatgaaatagtagacacgagtgatgcgatcatcatcgcaaccacgcgacccgaaactatcccggctgacatcgcagtagcagtcaattcgaaagatgagaggtactcacacctgattgggaaactctgtcgggtacctactacggacagagtagttccgataattgccgatgatgctgtatctattgaatcggggtccggggctttaaaggtcacacctgctcatgatcaagtggattttgaaatcggagaacggcacggattagaaatcataaatatcctagaaaaagatgggaccttaaatcagcgtgccggtgcatacaacgggctgagtcttttggaagcacgttcccaaatcgtacaagatatggctaacttgggattagtagaacgcatagatccatacaaccactctgtgggccattgccagcgatgcgccaccgtaatcgaaccactactgtcagagcagtggtgggttgatgctaaaactctgtcaggaccggccatagatgccgtcaaagaaaagaagattaattttgttcctccaagatttgaacgaacctaccttcattggatggaaaacatcagggattggtgtatttctcgacagatatggtggggccatcgaattccagtttggtattgtgatgagtgcgattatctgacggtggcaatcacagatcctgacgaatgtgattcctgtggttgcaaagatattcgacaagatgaagacacattggacacttggttttcatccggtc

SEQ ID NO: 307213 - DNA, 922 bp, Unknown
  Bacterial polypeptide expressing nucleotide sequence isolated from the Sargasso Sea
aaagaaaattcaaaaaaattctcaattgtaatccctccacctaatgtaacaggaagccttcacatggggcatgctttaaataattctattcaagatgttttaacaagatttcatagaatgaataattatgaaactttatggcaaccaggaacagatcacgctggtatagcaacccaagcattagttgaaaaaaaacttgcaaaagaaggagtaaaaaaaaacgatttaggtagagaaaaatttatagataaagtctgggaatggaagaatgaatatggagatataataattaatcaacttaaaaaacttggatgttcatgtgattggtctcgtaatgcttttacaatggatgagaatttatctaagtcagtcataaaagtatttgtcgatctttataataaaaaattaatctacaaagcaaaaaaacttgtaaattgggatgttgttttaaaaacagcaatatctgatttagaagttgatcaacgtgaagtaaattctcaactttattatataaattatcctatagaaaattctgataaatttataacaattgcaacaacaagacctgaaactatgttgggagatactgcaattgcagtaaaccctaaagatgatcgttttaaagatattgttgggaagttagttacaatacctttggcaaacagaaaaataaaagtaataacagatgactatgctgatcctgaacaaggaactggtgcagttaaaattactccagcccatgactttaatgattatgatgtgggtataagaaataaattagaagaaataaacatatttactcccgatggaaaaataaatgacaatgcacctgacccatataaaggtttagatagatttgctgccagaaaattaatactagaacatcttgaagaaggaaaatttttagaaaaaatagaaaagt

SEQ ID NO: 307214 - DNA, 610 bp, Unknown
  Bacterial polypeptide expressing nucleotide sequence isolated from the Sargasso Sea
atggataacaattttaactcgtctcaaatagaacaagagctctacaaaatgtgggaagaagaaaacttcttcgcacccacagatagagacaatcaaaaaaacttctgcgtcttgattcctccacctaacatcacggggaccctgcacatgggtcatgcctttaatcacacgcttatagatatcttgattagacatagccggatgaagggtaaacgcaccctatggcagggagggactgaccacgccgggattgcgactcaaatgctagtcgaaagaaagctcgctgaagagaatctaagcaagatagaactgggaagagagaaatttctcgagcgagtctgggattggcgccgtaactctggaaacacaataagccaacagatcagacggatgggctcgagtattgattggtccagagaacggttcaccatggatgaggattacgcagacgctgtcctggaggtctttgtgaggctttatgacgagggattgatttatcggggcaaaagactagtcaattgggacccagaattaaataccgcaatctccgaccttgaggttgaaaacacagaagaaaacggccacttgtggcacattcgctatccatgac

SEQ ID NO: 307215 - DNA, 814 bp, Unknown
  Bacterial polypeptide expressing nucleotide sequence isolated from the Sargasso Sea
gatgcaaataattatatcatagttgcaacaactagaccagagactatgttgggagatactgcagttgccgttcatccagatgatgaaaaatataaaaatttaattggtaaattttgtaacttaccaatttcaaataaaaaaataccaatcattgctgatgaatatgcagatcctgaaaaaggttctggtgctgttaaaattactcctgcacatgactttaatgattttgaggtaggaaagagacatgatttagaatttattaatatttttgatgaaaatgcaaaactgaactcaaatgctcctgaagaatttcaaaatttagatcgatttgatgcaagaaaactaattttaaaaaaattagatgaaatgaatttattaattaaagaagaaaaacagcaaatggtcataccatatggtgatagatctggtgttgttattgagccatggctgacagaccaatggttttgtgatgcaaaaaaattatcatttgatccaatatcagctgtgagagataatagttctaaatttattccaaaacaatgggaaaatacattttataattggatggaaaacattcaaccttggtgtatttcaagacagttatggtgggggcatcaaattcctgcatggtatggtccagataacaaatattttgttagtgaaactttaaaaggagcacaaaatcaagcaaaagaattttatggaaaggatgttgagcttaggcaagatgaagatgttctagatacttggttttcttctgctctatggacattctctactttagattggccaaataaaacttatgaattagata

SEQ ID NO: 307216 - DNA, 934 bp, Unknown
  Bacterial polypeptide expressing nucleotide sequence isolated from the Sargasso Sea
aattattgctgatcactatgctgaccctgaacaaggttcgggtgcagttaaaataacgccagctcacgatttcaacgattatgaagtaggtaaaagaaatagattagaaatcataaacatttttgaaaaaaacggaaaaataaacaaaaatgggattaaggaatttattaatttggacaggtttcaagcgagacaactcttagtaaaacaacttaaggaaaaaggcaatttgattaaaattgaaactattaaaaataaagttccttacggcgatagatcaaacacaataattgaacctcttttaacagagcagtggtttgttgatgcaaaaaaactatctaagaaaccaataagtatagttaaaaagggaaaaacttccttttttcctagtagctggactaagacattttttctatggatgaaaaatattgaaccttggtgtatatctcgtcagatttggtggggtcatagaattcctgcatggtatgatgaaaagaataatatctttgtagctgaaaatgaaaaagatgcattaattttggctaagaaaaaaaataaaaataaaaaatttaaacttaaacaagaaacagatgttctagatacttggttttcatcagcattatggcctttcgctacattaggttggccagccaaaacaaaagaactttcaaaattttacccaacatcagtactagtaacagggtttgatataatttttttttgggtggcaagaatgttgatgatgggtaattattttaataaacatacacccttttataaaatttatgtccacgcattagtacgagatgaaaaaggacaaaaaatgtctaaatctaaaggaaacgtaattgatcctctggagctaattaatgaatttggcgcagatagtttaaggtttactctaatttcgatggcctctccaggaagagatgta

SEQ ID NO: 307217 - DNA, 653 bp, Unknown
  Bacterial polypeptide expressing nucleotide sequence isolated from the Sargasso Sea
attgaagaaaagtggtcagagctttggggcaaaaaataatttaggtaaaaataactcctcacatactttttcgcaggttattccacctccaaatgtaactggaactcttcatatggggcatagcttccagtattcgataatggatttctatgccagatacaatcacttaaatgatgtaaatactcattggcagatgggtaccgatcatgcaggaattgcaacgcaaatggtcgttgaaaacaacctatctagagaaaatattgataaaaatgatttgggtagagaagattttgttaaaaaagtttgggagtggaaagaactttcagaaaataaaattactggacaaattaaaaggttaggtaactcagttgattggagtaattacagatttactttggatgaaggttttaatgaagctgttcttaaagcttttgttgagctttacaggaaagagaaaatctatcgtggttacaggttagtaaactgggatccatctttaaaaactgcggtttcagatctggaggttgtaagacaagaaaaaaaaggtcttatttggtatataaagtatccaattataggttcagatgattttgtaacagttgcaacaacacgtccggaaactatgtttggagatatggcaattgcagttaatc

SEQ ID NO: 307218 - DNA, 790 bp, Unknown
  Bacterial polypeptide expressing nucleotide sequence isolated from the Sargasso Sea
tattatattagatacccaatagatggaactgatgaatatataacaattgcaaccacaagacctgaaacaatgcttggtgattctgctatagctgttaacccaaaagatgaaagatttaaatcatctgttggaaaaacagttaccattccaattgttggtagaaaaataaaaattattgaagacgattatgcagatcctgaacaaggtacaggggcattaaaaataactccagcacatgattttaatgactatgatgtgggtcaaagaaataatcttgaaataataaatatttttacagaatctggtaaaataaatgaaaatgcgcctgaacattatataggtctcgatagatttgaagctcggaaaagaattttaaaagaacttaaagaaaagaatttttttgtaaaagaagaaaatattaaaaataaagttccttatggagatagatctaattcaataattgaacctttcttaacagaacagtggtttgcagacgctggtaaattatcagttaaagcgaaagaagttgttaaatcaaaaaaaacaaatttttttcctgagaattggtctaaaacttattttcaatggatggataatattgagccatggtgtatctcgaggcagctttggtgggggcatcaaatacctgcgtggtatggtcctgatgaaaaaatttttgttgctgaaaatgaagatgatgcaaaacaacaatctaaaaaacattatggtaaagatgttgaattaaatcgtgatccagatgttttagatacttggttttcatctggtttgt

SEQ ID NO: 307219 - DNA, 892 bp, Unknown
  Bacterial polypeptide expressing nucleotide sequence isolated from the Sargasso Sea
acaggagcattaaaaataaccccagctcatgattttaatgactatgatgtcggtcaaagaaacaatcttgaaataattaatatttttaccgaaacaggtaagataaatgaaaatgctccagaacattatgtgggcctcgataggtttgaagccagaaaaagaattttaaaagaacttaaagaaaaagatttttttgtaaaagaagagaatattaaaaataaagttccttatggagacagatctaattctataattgagcctttcttaacggaacaatggtttgctgatgctggtaaattatcaattaaagctaaagaagttgttaactccaaaaaaacaaatttctttcctgagaattggtcaaaaacttattttcaatggatgaacaatattgagccatggtgtatctcaagacaactttggtggggacatcaaatacccgcttggtatggtccagacgaaaaaatttttgttgcagaaaatgaagatgatgcaaaaaaacaagctaagaaacattatggtaaagatgttgaattaaatcgcgatccagatgttctagatacttggttctcatctggcttatggccttttgctacacttggttggccggatgataataaatttgttgataaattttacccaacgtcagttttagttacaggttttgatattatatttttttgggtagctagaatgattatgtttgggacagaatttttaaacaaagaaccatttaaagatatatatgttcatgcattggttagagatgagaagggacaaaagatgtctaagtctaaaggtaatgtaattgatcctttagatttaattgaaaaatatagtgcagatgcacttagatttactttgttatctatggcctcacccaggtacagat

SEQ ID NO: 307220 - DNA, 654 bp, Unknown
  Bacterial polypeptide expressing nucleotide sequence isolated from the Sargasso Sea
aatgagttttgataaatatgagcataaaaatgtagagaataaaatctatgactattgggaaaaaaaagagctttttaaaccaaaagaaaatagtaaaaaattctcaattgtaattccaccacctaatgtaactggaagccttcatatgggtcatgccttaaataattctattcaagacgtattaactagatttcatagaatgaataattttgaaacattatggcaaccaggaacagatcatgctggtattgccactcaggcattagttgaaaaaaaacttgcaaaagaaggtgttaaaaaaaacgatttaggtagagaaaagtttatagataaagtctgggaatggaaaaatgagtatggagatattataataaaccaactgaaaaaacttggatgttcttgtgattggtctcgtaatgcattcacaatggatgagaatttatctaaatcagtaataaaagtatttgttgatctttataataagaaattaatctacaaagcaaaaaaacttgtcaattgggatgttgttttaaaaacagcaatatctgatttagaggttgatcaacgagaagtaaattctcaactttattatataaattaccctatagaaaactctgataaatttataacaattgcaacaacaagacctgaaac

SEQ ID NO: 307221 - DNA, 837 bp, Unknown
  Bacterial polypeptide expressing nucleotide sequence isolated from the Sargasso Sea
tctatagtaattcctccaccaaatgtaactggtagattacatatgggacatgccctaaacaatagtctacaagatgttttagttagatttaatagaatgaaaggcctcgaaactctttggcaaccaggaacagaccatgctggaattgcaactcaagcagttgttgaaaataaccttttaaaagaaggaattaagaaaaatgatttaggaagagaaaaatttattaaaaaaatatgggattggaaagaggagtctggtgaaataattttagatcaacttaaaaaattaggttgttcgtgtgattggtcaagaacgagattcaccatggataaggatctttctaaagccgtaattaaagtttttgttgatctccataaaaataagctaatttacaaggataaaaaattagtcaactgggataccaaacttcaaactgctatttctgacttagaagtaaaccaaaaagatgttcaatctcaattgtattatatcgattatacgatagtggactcagatcaaaaaatcactattgccaccaccagaccagaaacaatgatgggagataccgcggttgctgtaaatccaaaggatgaaagatacgtcaatttagtcggaaaaaatgttcatattccaattgttaataggactgtcaaaattatttctgataattacgctgatccggaacaaggttcaggagcagtaaaaattacgccagcacatgatttcaatgactatgaggtaggcaagagaaataaattagaaataataaatatttttgaagaaaatggtaaaataaacaaaaatgggattaaagagtttcatggtttagacagattg

SEQ ID NO: 307222 - DNA, 841 bp, Unknown
  Bacterial polypeptide expressing nucleotide sequence isolated from the Sargasso Sea
gtaggtttttctgaaagaacaaatgcgattattgaaccaaggttatccttgcagtggtatgttaatatgcaagaattatccaaaccagctttggacaatgtaatgaatggaaatgttcaattttatcccgaaaaattcaaaaacacctatagacactggatggaaaacataaaagactggtgtatttcaaggcaattatggtggggacatcgaatcccagcatggtattatggcgagggaaaggatgaatttgtcgtttgtaaaactttagaagaggccgtagaacttgcaagtgctaaatccggaaagaacattagtgaaaatgaacttaagcaagacgaagatgttttagacacctggttttcgagttggttatggcctatttctgtttttaatggactaaccgacaaggaaaatgacgaaataaactattattatccaagcaacgatttggtaactgctcccgagattatgtttttttgggtagctagaatgatcatcgctggatatgaatatatgggggacattccttttaaaaatgtttattacacagggattgtgcgagacaaattaggaagaaagatgtctaaatccctagggaattctccagacccaatcgaattaatagaaaattatggcgccgatggggttcgtgttggtatattaatttcttctcctgcaggaaacgaccttccttttgatagttctcaatgcgaacaaggaagaaactttaccaataaggtatggaatgcataccgattaatttcttcttgggaatccaaaaatatagaacaaccaaactcttctgttaaagcgatcgaatggtttgaatccaaaatac

SEQ ID NO: 307223 - DNA, 849 bp, Unknown
  Bacterial polypeptide expressing nucleotide sequence isolated from the Sargasso Sea
tacagcaatagctgtaaatccaaaagataaaagatacaaaaattataaaaaaaagtttgcaattttacctttggttaatagaaaaattaaaattatttttgataattacgctgatcctgagcaaggaacaggtgccgtaaaaatcacaccagctcatgattttaatgactatgaagttggaaaaagaaataaactagagataataaatatacttacagaagatggtaaagttaataaaaatggaccagagaaatatcgtggtttagacagatttgatgcaagaaagaaaattttagaagatctttcaaatttaaatcttttagtaaaagaagaaaatataaaaaataaagtgccatatggagatagatcaaattctataattgagccatttctaactgaacagtggtttgttgatgcaaaaaaattatcaataaaagcaaaaaaaattgttaagtcaaaaaagacaaatttttttcctaataattggtcaaaaacatatttccaatggatgaacaatattgaaccctggtgtgtatcaagacaactttggtggggtcatcaaattcctgcatggtatggtcctgataaaaaaatatttgtagcttcaaatgagtctgatgctaaaaaaaatgctagcaaattttataaaaaaaacgtcacattatttagagatccagatgtacttgacacatggttttcttctggactatgggcatttgcaacacttggttggccatcaaaaaatgaatatttaaaaaagttctaccctacatcagttttggtaacaggttttgacattatttttttctgggtagcaaggatgatgatgtttggtatggaatttcttaa

SEQ ID NO: 307224 - DNA, 793 bp, Unknown
  Bacterial polypeptide expressing nucleotide sequence isolated from the Sargasso Sea
atgataagcgataaatatatacattcaaaagttgaagataaaatttatagttactgggaaaagaataaattatttaaacctcaaaaaaattcaaaaaaattttcaattgtaataccaccaccaaatgtaactggaagtttacatatgggccatgctttaaataattcaattcaagatttattagtccggtattatcgtatgaataattatgaaacattatggcagccgggaaccgatcatgctgggatagccacccaagcacttgttgagaaaaaacttgaaaaagagaatttaagtaaaattgaccttggtagagaaaaatttatcgaaaaagtatgggagtggaaaaatgagtatggagatataattatcaatcagcttaaaaaattaggctgctcatgtgattggtcaagaaatgcattcaccatggatgcaaacttatcaaaatcagtaattaaggtttttgtagaattgcataaaaaaaaattaatttataaagctgaaaaacttgtaaattgggatactgttttaaaaactgcgatttcagacttagaagtagatcaaagagaaatgaactctaagatttactatataagatatccaattgataaatcctcagaatttatcactattgctacaactagacctgagacaatgttaggagatactgcgattgcagtaaatccaatggataaaagatataaaaaatatgttggtaaaactgtcacaataccaatcgtaggtagaaaaataaaaattattaaggataattatgctgatccagaacaaggaa

SEQ ID NO: 307225 - DNA, 745 bp, Unknown
  Bacterial polypeptide expressing nucleotide sequence isolated from the Sargasso Sea
aaataaattagaaataataaatatttttgaagagaatggtaaaataaacaaaaatgggattaaagagtttcatggtttagacagatttgaagcgagaaaacttataattaaaaaattaaaggataaaggttctcttgtaaaaatcgaaaatattaaaaataaagttccatatggagatagatcaaacactataatcgaacctctcttaacagagcaatggtttgttgatgccaaaaaattatccaaaaaaccaattaagatagttaaagagggcaaaactactttttttccaagcaactggtcaaaaacattttttcaatggatgaataatatcgagccttggtgtatatctcggcagatttggtggggtcatagaatacctgcttggtatgatgaaaatggaaatatttttgtagctgaaagtgaaaaagatgcagtaaaactagcaaagaaaaaaaataaaaataaagaatttaaattaagacaggaaacagatgttttagatacttggttttcatcagctctatggccttttgcgactcttggatggccaaacaaaaccgaagaacttaataaattttatccaacttcagttcttgttactggttttgatataattttcttttgggtagcaaggatgttgatgatgggaaattattttagaaaaaatacgccttttcataaagtatatgttcatgccttggtaagagacgaaaaggggcagaaaatgtcaaagtcaaaaggt

SEQ ID NO: 307226 - DNA, 871 bp, Unknown
  Bacterial polypeptide expressing nucleotide sequence isolated from the Sargasso Sea
catgagcacgccccaaccacaacccggcctcgaaagcctgtccaagtcgtttgaacccgctgcactggaagcccactggggccccgaatgggaaaagcgcgggtatggcactgcaggccaccgtggcacgggccagccccaggcgggcgagcccgccttctccatccagctgccgccccccaacgtgacgggcacgctgcacatgggccatgcgttcaaccagacgatcatggacagcctcacgcgctaccaccgcatgaagggcttcaataccgtctgggtgcccggcaccgaccacgcaggcatcgccacacagatcgtggtggagcgccagctgcaggagcaaggcataagccgctatgacatgggccctaccccgcccgaggcgcgcaagaactttgtgagcaaggtgtgggagtggaaggaaaagtccggcaacaccatcaccacgcagatgcgtcgcatgggcgacagcgtggactggagccgcgagtacttcaccatggacgacaagctcagcgccgtggtcaccgacaccttcgtgaagctgtacgaacaaggcctgatctaccgcggcaagcgcctggtgaactgggaccccaagctgcagtccgccgtgtccgacctggaagtcgagagcgaagaaaaagacggctcgctgtggcacatcgcctacccgctggccgatggatcgggcagcctgacggtggccaccacccgccccgagaccatgctgggcgacgtggcactgatggtgcaccccgaggatgcacgctacacgcacctgatcggcaagatggtcaacctgccgctgtgcgaccgccagatcccggtgatcgccgacgagtacgtggataaggagttcggcacg

SEQ ID NO: 307227 - DNA, 544 bp, Unknown
  Bacterial polypeptide expressing nucleotide sequence isolated from the Sargasso Sea
ctggccaagacctacgacccccaggccactgaggagcgctggcagcaggcctgggaagagtcaggggcgtttcacccagatcctgaggcccctggcgaaccgttttcgctggtgacgccgccaccgaacgtgaccggcagcctgcacatgggccatgccttcaacacggcgctgatcgacacgattgttcggtttcagcggatgcagggcaaaaacgtgctctgtctgccgggcacggaccacgcctcgattgcggttcagacaattctggaaaaacagctcaaggctgagggcagcagcaaagaggagctgggccgcgaaggatttttagagcgctgctgggcctggaagggagaaagcggcgggcgcatcgttagccagctgcgccgccttggtttctcggtggattggcagcgggagcgcttcaccctcgatgccggttgcagccaggcggtgatcgaagccttcgtcagcctgcatgagcaaggcctgatttaccggggcgaatacctggtgaattggtgcccggcttccggctcggccg

SEQ ID NO: 307228 - DNA, 828 bp, Unknown
  Bacterial polypeptide expressing nucleotide sequence isolated from the Sargasso Sea
caattgtattacattgattatatgatagagaactcagatcaaaaaatcactattgccaccacaagaccagaaacaatgatgggagatactgcggtagctgtaaatccaaaagatgaaagatatgttaatttagttggaaaaaatgttcttattccaattgttaataggactgtcaaaatcatttctgacaattacgctgatccggaacagggctcaggagcagtaaaaattacaccagcacatgatttcaatgactatgaggtaggcaagagaaataaattagaaataataaatatttttgaagaaaatggtaaaattaacaaaaatgggattaaagagtttcatggtttagatagatttgaagcaagaaaacttataattaaaaaattaaaggacaaaggttctcttgtaaaaatcgaaaatattagaaataaagttccatatggagacagatcaaacactataatcgaacctctcttaacagagcaatggtttgttgatgctaaaaaattatccaaaaaaccaattaagatagttaaagagggtaaaaccactttttttccaaacaactggtcaaaaacattttttcagtggatgaatgatattgagccttggtgtatatctcggcagatttggtggggtcatagaatacctgcttggtatgatgaaaatggaaatatttttgtagctgaaagtgaaaaagatgcagtaaatctagcaaagaaaaaaaataaaaataaactatttaaattaagacaggaaacagatgttttagatacttggttttcatcagctctatggccatttgcgactcttggatggccgaac

SEQ ID NO: 307229 - DNA, 934 bp, Unknown
  Bacterial polypeptide expressing nucleotide sequence isolated from the Sargasso Sea
aaaaggctatatctatagagggtatcgaatggtaaattgggatcctgaatctcagacaacagtatctgatgaggaagttaattatgttgaggaagaatccaaattatactatttaaattattctatagatggatcaaaagataaactaattattgcaacaactagacctgaaacaatttttggcgatactgcagtatgtgttaatcctaaggataaaagatattcaaagtttgtgggcaaaaaagcaatagttcctatatgcgatagaaagattccaattattgcagattcttatgtagatatagaatttggaacagggtgcttaaaagtgactccagctcatgatttaaatgattataacctcggtaataaacataaacttgaaataattgatatttttgatccaaaaggaagacttaatgaacatggacttcattataaaaataaggataggtttgatgctagaaatgaaatagtcgaggaacttaaaaataagaagatacttgacaaatctgaagtatataagcacaatgttggccgttcagagaggacaaatgccataatcgagcctaagatttcaagacaatggtttttaaagatggataaaatctcaaaaccagctataacaaatgtattgaagaatgaaaacataaagttctttcctaaaaaatttaaatcaacatataagtactggctagagaacataaaagattggaatatatctagacaactttcttggggtcatcaaattccagctttttactatggagagaatggtgacgaatatgttatagcgcaaaacaaaaatgaagcaaaaaagatcttagagaatcaaaaaggattaaaacttaaagatgatgagctaacccaagatgaggatgttcttgatacttggttttcatcttggctatggccaatatcagtttttgatgga

SEQ ID NO: 307230 - DNA, 775 bp, Unknown
  Bacterial polypeptide expressing nucleotide sequence isolated from the Sargasso Sea
aaaaaatattacaaaaaaaatatcaaattatatcgagacccagatgtgctagatacatggttttcatctggcttatgggcatttgcaacattgggttggccgttaaaaaaagattatgttaaaaaattttatcctacatcagttttagtaacaggttttgatattatttttttctgggtagctcgtatgattatgtttggaatggagtttttaaataaagaaccatttaaagatatttatgtgcatgcattggttagggatgaaaaaggacaaaaaatgtcaaagtctaaaggaaatgtaattgatccgttagaacttatagaaaaatatagcgctgatgctttaaggtttaccttactatcaatggcttctccaggtagagatgttaaattatctgaagatagagttaaaggttatagaaattttttgaataaattatggaatgctaataattttttaattcaaaacaaatgttcatttaaaaatgtttcaaaaaaaccaaaaatttcaatcaatataaacaaatggatatataacgagttattagaaacaaaaaaaaatgttgaaagaaacataaaagaataccgatttgatgaagcagctcgaaattcttatagatttgtttggcattcatactgtgattggtacttagaactttcaaaaactatcttatattcaaacaacagtaactctgttaaggaaatgagaaaagtatcaagttatatatttagagaaattctcatattaatgcatccatttattccttttgttactg

SEQ ID NO: 307231 - DNA, 772 bp, Unknown
  Bacterial polypeptide expressing nucleotide sequence isolated from the Sargasso Sea
gaatgtaaaaaacaggcaaaagaattctattcaaaagatgtggaattaaaaagagatgaagatgttttggatacttggttttcttcaggtctatggccatttgctactttaggatggcctgaaaaaactccagaagttgaaaaattttatccaacaagtgttttagttaccggttttgatatcatatttttctgggttgcaagaatgattatgatgggaactcagtttttagataaggaaccttttaaaaatatatatgttcatgctttagttagagatgaaaagggtcaaaaaatgtctaaatcaaagggcaatgtaattgatccattagaacttatcgaaaaatatagtgcagacgccttaagatttacgcttttgtcaatggcatcgccaggccgtgatgtaaaattgtctgaagacagggttaaaggttatagaaatttcttgaataaagtttggaatgccaacaattttttaagacaaaatgagtgtgattttagcgacataagaaaacctgaaaatcttaaattaacaattaataagtggatattatctgaacttgttaaaactaaaaacgagacagaaaacagtttaaaaaactataggtttgatgaagcagcaaagaatatttatcagtttgtgtggcattcattttgtgactggtatttagagctatctaaaactgtattcaattctaacaatgaggaggagattaaagaattaaggcaaacatcatcttacgtttttagagaaattttgataattcttcatc

SEQ ID NO: 307232 - DNA, 838 bp, Unknown
  Bacterial polypeptide expressing nucleotide sequence isolated from the Sargasso Sea
ggataacttaggacttttgacaaagatagaggattataaacataccgttcctttctctgatagaggtaaggtgccaattgaacctttattgtcaacacaatggtttttgaaaatggatgatatatctcaaggatgtcttaatgaaattgattctaaaaaaccatcgtttatgcctccacgctgggagaaagtttataaggattggttagagaatattaatgattggtgtatcagcaggcaattatggtggggccaccaaataccagcatggtacgttttagattactctcaagattcaatagaacaaaatactccttatgtcgttgcgagaaataaagaggatgccttaattgaagctaataaaaaatttggattaaatattaaattggttagagataaagatgttttagatacttggttttcaagtggtttatggcctttctcaactcttggttggccaaatacaaatgatcctgattttaaaaaatggtatccaaatagtgttctcgttactggcttcgatattattttcttctgggtggcgagaatgacaatgatgggaaatactttcacgaataatattccttttaaggatgtgtatattcatggtctagttagagatgaaaataataaaaaaatgagtaaaagttctggaaatggtattgatccaatactattaattgataaatatggttctgatgctttgcggtttgctttgattcgagaagttgcaggggctggacaagatattcggcttgattttgatcgaaaaaaagatacatcttcaactgttgaagcttcaagaaattttgccaataaattatggaatgcaactaaa

SEQ ID NO: 307233 - DNA, 829 bp, Unknown
  Bacterial polypeptide expressing nucleotide sequence isolated from the Sargasso Sea
gcaatcaatgaagaagaagcaaaagcagatgcaaaaaaacattataataaagatgttgaattaattcgtgatctagatgtacttgatacctggttttcttctggtctatggccttttgcaactttaggatggcctgatgaaaaagaatttgttgaaaaattttatcctacttcagttttagttactggttttgacatcatatttttttgggttgccagaatgattatgtttggaacagaatttttacataaagaaccatttaaagatatttatgttcatgcattagttagagatgaaaaaggtcaaaaaatgtctaagtcaaaaggcaatgttattgatcctttagacttaatagaaaaatatagcgcagatgctttaagatttacattactttcaatggcatcaccaggtcgagatgtgaaattatctgaagacagggttaaaggatatagaaattttttaaataaaatatggaatgcaaacaattttttaattcaaaatgaatgcagctttaataatgtagaaaaacctaataatttaaaagttaatatcaataaatggatttattcagaatttttaaccaaaaaggatgaaatacaaaaaaatatcaaaggttatcgttttgatgaagccgcaaaaaatgcatatcaatttgtatggcattcattttgtgattggtatttagaactttcaaaaacaatactattttcagataatcaggattctattaaggaagtaagaaatgtttctagttttatatttagagaaatactaataatccttcacccttttattccttttataactgaagaaattggcttaaaaataa

SEQ ID NO: 307234 - DNA, 468 bp, Unknown
  Bacterial polypeptide expressing nucleotide sequence isolated from the Sargasso Sea
gatggacaaaaggtttgattctaattacatagaaaaaaaatggtataaaagatggttgaaaagtggtgcttttgcttcaaataatcaatcatccaaagaaccatatgttataatgatgccgcctccaaacgtaactggttcgttacatattggtcatgcattaacattcactattcaagatatcttaataagatttcatagaatgcaaggactggatgttctctggcaaccagggactgatcacgctggaatagctactcagatggttgttgaaagagaaatagcaaaatctaatttaacaagacatgacttaggtagagaaaagtttgttgaaaaagtttgggagtggaaagaaaagtcaggtggtgaaattacaaaccaattaagagctttaggagcgtcagctgattgggaaaaagaacgatttacaatggatgagggattatcaaaagccgtaatttctgtatt

SEQ ID NO: 307235 - DNA, 769 bp, Unknown
  Bacterial polypeptide expressing nucleotide sequence isolated from the Sargasso Sea
aaaaaaaataaatgatcgttgggtagaggcacacgcttttaggtcaggtaaagatagcgaaaaaggcaaaccaccattttctataatgatccctccacccaatgttactggcagcttacatattggccatgcctttaataacacaatccaggatgttttggtgaggtatcatagaatgaacggctatgatgttttatggcaacctggtcaggatcatgctggaatcgcaactcaaatggtagttgaaagagagttagagaaaaagaataaaagccgacagcaaatgggtcgtgaaaaatttcttgaagaggtttggaattggaaggaaaaatctggaaatactataattgatcagttgaagaggttaggagcatcctgcgattggagccgaaatagatttaccatggatcctgagttccataaagctgtcataaaagtttttgtagatttttacaacaaagggttgatttataagggtaaaaaattggtaaattgggaccctaaatttcaaagtgccatttcggatctagaagttgagcaaatagaggttcgaggaaaaatctgggaattaaagtattttttagaggaaggtacatttaattttggagtagaaaccgatgagaatggagtagttttaaaaaggatacctatggatcatgtagttattgcaactacgagaccagagacacttcttggagatactgctgtgattgttaaccctagtgatgagcgatacagggatttgattgggaaatcagtaatattacca

SEQ ID NO: 307236 - DNA, 880 bp, Unknown
  Bacterial polypeptide expressing nucleotide sequence isolated from the Sargasso Sea
ttggaaaccggctgcctgaaagtaacccctgctcacgatcccaacgattatgagattggtcttaggcataatttggaaattgttgataccatcgacctggacggcaagctgaatgccaaatgtgagattgaaaagtatacgggtgaagatcgcttcaaggttagaaagatgattgttaaagaccttagagaatccggaattcttataaaagaagaagagtttattaccaaaatcggaagatcggaaagaaccaactcggtagtagagccaaagctttcacttcagtggtttatcaaaatgaaggaaatatccaagcaggctcacaacgctgtgatggatgacgaaatcaggctttttccctccaaattcaaaaacacgtacaaccattggatggaaaacgtgagggactggaacatttctcgtcagctttggtggggacagcaaattcctgcctactattatggtgaaggggaaaatgattttgtggtggcagaaaacctggaactggcccttgaagaagctataaaagcaaccggaaatagtgagctttcagcaaaagacctcagacaggatgaagatgttttagacacctgggcttcttcaaacctctggcccattgcggttttcgatggttttaatgaaaaatgtttcgatcctaaaacaggtaaaattgataagcgtaagaataaagatctgaacttcttctaccctactcaggccctggtaactgcccctgaaatactattcttttgggtggccaggatggtcattgccggatatgaatatctggatgaaaggccattcgaaaatgtctacctaactggaattgtccgcgacaagcaacgaagaaaaatgtcaaagtctttgggtaattctccag

SEQ ID NO: 307237 - DNA, 712 bp, Unknown
  Bacterial polypeptide expressing nucleotide sequence isolated from the Sargasso Sea
actgccgccatggagtcgattgatgaaatcccagaaaaatactggggtcttgatcgctatgatgcaaggcgtcagattttaggggatcttgaggctaaagggctggttgaacgagaagaagttttgaccaatgttgtaccgcatggcgaccggtcaggtgttgttattgaaccatggttaatggatcaatggtatgttgatgctgaaaaacttgccgcaccagcgatcaaagctgttgaagacggtcgtacaaaatttgtaccggaacgctggggcaaaacctatttcgaatggatgcataatatccagccttggtgtatttccagacaattatggtggggacataggattccggcctggtatggaccagatgataccgcctttgtagaggaatctgaggagtctgctattgccgttgcaaccgcccattatggcaaaactgttgaattgcgacgtgatgaagatgtattagatacatggttttcatccggactatggccgttttcaacacttggctggccaaagagcaatactgagctaaagcgctattacccaggtgaggttttggtcaccggttttgatatcatctttttctgggttgctcgcatgatgatgatgagcatgcatttcatgaatggcaaggtgccattcaaagaggtctatatccacgctttggtcagggatgaaaaaggccagaaaatgtctaaatcaa

SEQ ID NO: 307238 - DNA, 841 bp, Unknown
  Bacterial polypeptide expressing nucleotide sequence isolated from the Sargasso Sea
tcagaaacattattagcaaataaatataattcgtccaaggttgaggataagtggtataagtactggattgaaaagaaatattttcatgctgattctgcttcagaaaaggagccctatacgattgttatcccacctccaaatgttacaggtatgttaacagtaggtcatgttctgaataatactatccaagatattttgataagaaaggccaggatggagggtaaggaggcttgttggattccagggactgaccacgcatcaatcgcgactgaaacaaaagtcattaaaatgttggaagaaaaagggataaataaaaatgatctatcaagagaagaatttttggagcatgcttgggagtggaaggagaaatacggtggaattataatcaatcagcttaaaaaacttggttgttcttgtgattgggagagagagcggtttaccatggacgagggatactctagagctgtattagagagttttgttaggctttatgaaaaaggcttcatttataaaggccatagattagtgaattggtgtccagtctcaaagtcagcaattagcgatgaggaggtcattcataaagaaatagatggacatctttggtattttagatacccaatccatggtgaggataattacctggttgttgcaacgactagaccagagaccatgttgggtgatacagcagttgctgtaaatcccaatgataaaagatataaaaaacatatcgggaaaaatgttgaactcccacttgtagggagaaaagtaccgataatatcagatgactatgttgaccctgaatttggtactgggtgtgttaaaattactcctgcacatgacc

SEQ ID NO: 307239 - DNA, 946 bp, Unknown
  Bacterial polypeptide expressing nucleotide sequence isolated from the Sargasso Sea
attcatgactggtgtatctcaagacagctttggtggggtcacagactgccaatgtatacttgtaaagcgtgttcccatgtgcactgtgaagaggacatgccagaacaatgcgaaaaatgctcttctagagatcttcttcaagatgatgatgttcttgatacttgggcaagctcttggctctggccatttgcgattctaaattggtcagaaaaggcttcaaaaggtaatgaagaacttaactacttctttccgactgacattgttgtcactggacctgatatcattttcttttgggttgccagaatggtcatggcgtcaaagtactttttaaaaaagactccttttaaggttgcgtattttactcccataataagagacgcaaaaggtcaaaaaatgagtaagtctcttggcaactctccagatgtctatagcctcattgacacgttcggagctgatgcattgcgttttgcggttatcaatcaaatcgtgactggccaggacatgctttggcaagacaattcgtgtgatctcgggaaacactttacgcataaaatttggaacctgactaaatttcttacaatgaatgcaacaaaacttaaattatctttttgtgattgttcttatgaaaaactagaaagttcagacacaactctttctctatggataaaaagtgaatttttagcaactgttaaaaaactagaagacgctattaaaaactatgaattttctgcatatacttcatctttgtatgattttatatggtttgttttttgtgattggtttgtggagttgttaaagccaagtttaaaggaaaacaatgaaaagaccattgaaacgtttaaaaccgccatgtgcctttttgatggtgtccttcgattgtgtcaccctattatgccttatttaacagaagagatttggcagtcattagcagacggtagaaaggata

SEQ ID NO: 307240 - DNA, 798 bp, Unknown
  Bacterial polypeptide expressing nucleotide sequence isolated from the Sargasso Sea
actatagcaacaactagacctgaaactatgttaggtgatacggctatagccgtaaaccctaaagataatagatataaatcactagtaaataaatttgttattattccattagttgagagaaaaataaaaatcatcgaggatgattatgctgatcctgagcaaggtactggtgcagttaaaattacaccagcacatgactttaatgattatgaagtaggtcaaagaaataatttagaaattttaaatatatttacctctgatggtaaaattaatgaaaatgctcctaaagaatttattggtttagatagatttgaagctagaaaaagattactaaaaaaacttaaagaaggtgattttttagttaaagaagaaaatattaagaacaaaattccttatggcgatagatcaaattctatcattgaaccatttctaactgaacaatggtttgctgatgctaaaaaattatctgttaaagctaaagaagttgtaaataataaaaaaacaaacttctttcctgaaaattggtctaaaacttattttcaatggatggataatattgagccgtggtgtatttcaagacaattatggtggggtcatcaaataccagcttggtacggtccagataaaaaaatttttgtagcaataaatgaagatgaagcaaaagccgatgcaaaaaaacattataacaaagatgttgaattaattcgagatccagatgtacttgatacatggttttcttcaggtctatggccatttgcaactttaggatggccagatgaaaaagaatttgtagaaaaa

SEQ ID NO: 307241 - DNA, 736 bp, Unknown
  Bacterial polypeptide expressing nucleotide sequence isolated from the Sargasso Sea
atggataaaagatatgagccacttattattgaagaaaagtggtcagaactttgggcaaaaaataatttaggtaaaaataactcttcacaaactttttcgcaggttattccacctccaaatgtgactggaactcttcatatggggcatagcttccagtattcgataatggatttctatgccagatacaatcacttaaatgatgcaaatactcattggcagataggtaccgatcatgcaggaattgcaacgcaaatggtcgttgaaaataacctatccagagaaaatattgataaaaatgatttgggtagagaagattttgttaaaaaagtttgggagtggaaagaattttcagaaaataaaattactggacaaattaaaaggttgggtaactcagttgattggagtaattacagatttactttagatgagggttttaatgaagctgttcttaaagcttttgttgagctttataggaaagagaaaatctatcgtggttataggttagtaaactgggatccatctttaaaaactgcggtttcagatttggaggttgtaagacaagaaaaaaaaggtcttatttggtatataaagtatccaattataggttcagatgattttgttacggttgcaacaacacgaccggaaactatgtttggagatatggcaattgcagttaatcctaaagataaaagatataaagacattatggaaaaaaagttgagctcccatttgtaaa

SEQ ID NO: 307242 - DNA, 726 bp, Unknown
  Bacterial polypeptide expressing nucleotide sequence isolated from the Sargasso Sea
gcacacgattttaatgactacgatgtaggtcaaagaaataagttagatattattaatgtatttacaaaagaaggaaaaataaatactaatgctcctcaagattatattggactagatagatttgatgctcgtaaaaagttattagaagaacttaaggaaaaagatttttttgttaaggaagaaaatattaagaataaagttccttacggtgatagatcaaattcagttatagaaccttttttaactgaacaatggtttgtagatgcaaaaaaattagctataaaagcaaaaaaaatagttaaatcaaaaaaaacaaatttctttccaactaattggtctaaaacttattttcaatggatgaataatattgaaccgtggtgtgtttctagacaactttggtggggtcatcaaataccagcgtggtatggtcctgataaaaaaatatttgttgcaacaaatgagattgatgcaaaaaaacaagcaaaaagattttataaaaaagatgttgaaataataagagatccagatgttttagatacatggttttcatctggtttatggccttttgcaacattaggttggcctgataaaaaagattttgttaagaaattttaccctacctcagttttagttacaggttttgatattatctttttttgggttgctagaatgatgatgtttggaatggagtttttaaacaaagaacctttcaaagatatttatgtt

SEQ ID NO: 307243 - DNA, 832 bp, Unknown
  Bacterial polypeptide expressing nucleotide sequence isolated from the Sargasso Sea
gaaaaaattaaaaataaagttccttatggcgatagatctaattctataattgacccctatttaacggagcaatggtttgcagatgctaagaaactttcaataaaagcaaaagaaatagtaaataataaaacaactaatttttttcctgttaattggacaaaaacatattttcaatggatggataatatagaaccctggtgtatctctaggcagctttggtggggtcatcaaatacctgcatggtatggacctgatggagaaatatttgtagatgaaacagaagaaggtgcaaataaattagctaaagaacattataaaaaagatgttgaattaattagagatccagatgttcttgacacatggttttcatctggtttatggccttttgcaactctaggatggccagaaaacaatgaatatttagaaaaattttatccaacttcagtattggtaacaggatttgatatcattttcttttgggttgcaagaatgattatgtttggaatggaatttcaaaacaaagaaccttttaaaaatatttatgttcatgcattagttagagatgaaaaaggtcaaaaaatgtcaaagtctaaaggcaatgtaattgatccattagaattaatagaaaaatatagtgctgatgcattaagatttacacttttatcaatggcatctcctggacgtgatgtaaaattatcagaggatagagttaaaggttatagaaattttttaaacaaaatatggaacgctaataactttcttattcaaaatgattgtaaatttaaaaacattaaaacgcctaatgatttaaaactaaatattaataaatgga

SEQ ID NO: 307244 - DNA, 842 bp, Unknown
  Bacterial polypeptide expressing nucleotide sequence isolated from the Sargasso Sea
taaaacttattttcaatggatgaataatattgaaccgtggtgtgtttctagacaactttggtggggtcatcaaataccagcgtggtacggacctgataaaaaaatatttgttggaacaaatgaaacagatgcaaaaaagcaagccaaaaaattttataaaaaagatgttgaaataactagagatccagatgttttagatacatggttttcatctggtttatggccttttgctacattaggttggcctgataaaaaagattatgtgaagaagttttatcctacttcagttttagttacaggttttgatattatctttttttgggttgctagaatgatgatgtttggaatggaatttttaaacaaagaaccttttaaagatatttatgttcatgcacttgtaagagacgaaaaaggacaaaaaatgtctaagtcaaaaggcaatgttattgatccattagatttaattgaaaagtatagtgctgatgccttaagatttactttattatcaatggcatcaccaggaactgatgttaaactttctgaggatagagttaaaggatataggaattttttaaataaattatggaatgctaataattttttaatcacaaataaatgcgatttcaagaaaactgataaagctccaaaaactacattaaatataaacaaatggatctattcagagttaattgaaattaaaaacaaaattcaaaaaaatatcgaagattaccgttttgatgaggctgctaaaaatgcttatcagtttgcttggcactcatattgtgattggtacatcgaactttcaaaaacaatactttattcagatgataaaaaagcccaaa

SEQ ID NO: 307245 - DNA, 813 bp, Unknown
  Bacterial polypeptide expressing nucleotide sequence isolated from the Sargasso Sea
tgggatactgtccttaaaacagcaatatctgatctcgaagttgatcaaagagaagttaattctaaactttactatataaattatccaatagaaggaactagtgaatttataacaattgcaactaccagaccagaaacaatgcttggcgatacagctgttgcagttaatcctaaagataaaagatacaaaaagtttgttagtaaaaatgttgtattacctttagtgggaagaaaaattaaaattataacagataattatgctgatccagaacagggaactggagctgttaaaattacaccagctcatgattttaatgattataatgtaggtgttagaaataaacttgaaattttaaatatatttacagatgatggtaaaattaataataatgcgccaagtgaatttattggtttagatagatttgaagctagaaaaaaaatactaactagtttggctgaaaaacagttattggttaaagaagaaaatatcaaaaataaggtaccttatggtgacaggtcaaattcaattatagaaccttatttgactgagcaatggtttgttgatgcaaaaaaactttctgtaaaagcaaaaaaaattgttaaatcaaacaagacaaaattttaccctggaaattggtcaaaaacttattttcagtggatgaataatattgaaccttggtgtatttcaagacaactttggtggggccatcaaatccctgcttggtatggacctgataagaaaatatttgttggtaaaaatgaaagtgaagtaaaaaaaattgcaaaaaaatattataaaaaagatactaaatta

SEQ ID NO: 307246 - DNA, 706 bp, Unknown
  Bacterial polypeptide expressing nucleotide sequence isolated from the Sargasso Sea
tatgcaagacgaaacctatgagccattagctattgagaaaaaatggcaagagagctgggaatcagctaacaaatttgtaccagtaggttcggataaaaaattttcaattgttattccaccaccaaatgtaactggatctttacatatgggacatgcattagagcattcaataattgatgtaattactcgtataaaaaggcttcaaggatatgaaactttatgggtgccaggcacagaccatgcaggaatcattactcagttattagttgaaaatgaactatctgaaaagggcgtacagaaagaagacattggaagagaaaactttatatcaaaagtttgggaatggaaagaaaaatctggtgaaaacatatcaacccaaatgaggaaacttggtatgagctgtgactggtctcgtgagaggtttactatggacgaaggtctttccacagccgtaagagaagtatttataaaactttatgaagatggattaatttataaaggtacacgaatggttaactgggacacggaacttatgtctgcagtttctgatcttgaagtaactttaaatccagaaaaaggaaaattgtggagtattaaatataaaacagaagattcgtttttaactatttctactacgcgtccagaaactcttttaggagatacagcagttgctgtaaatcctgatgatgaaagatataaaaatcta

SEQ ID NO: 307247 - DNA, 799 bp, Unknown
  Bacterial polypeptide expressing nucleotide sequence isolated from the Sargasso Sea
ccaggccttcttgaagaaaaattttataagcgttgggaaaaatcgggcggattcgccgccgatccgggatcatcgaagaagccctacactataatgatgcctcctccaaatgtaactggaagtttacatatggggcatggtctaacattttccctccaggatattttaatcagatatcatagaaaaactggacgagacaccttgtggcagccaggcactgatcatgcaggtattgcaacgcagatggttgtagagaggcaactggctgaagatggtgtatcccgacaagacttaggtcggagcaaatttctagagaaggtttgggactggaaaaatgaatctggcggaacaattactgaacaattacgttccttaggtgcttcccccgactgggagcgcgaaaagtttactatggatccagaactgtctatagctgtttcgcaagttttcgttaaattatataaacaggggttaatttaccgagataaacggctcgttaattgggatccaaagttgttaacggctatttcagacctggaggttcaacaagtggagaccaagggtaaactgtggcactttaaatacccaatagaagcgtgccaggatgagttcatcacagttgctacgacgcgaccggagactatgttaggtgataccggtattgcggtccatccggatgaccctagatacaaaaagtttgtaggcaagaaagctgttcttccattggtaggtcgtttaattcccgtagtagctgacgaatatagtgatatggaaaaaggttcgggtgcagtgaaaatta

SEQ ID NO: 307248 - DNA, 860 bp, Unknown
  Bacterial polypeptide expressing nucleotide sequence isolated from the Sargasso Sea
gaatgataacataaaatttcatcccaaaaaattaaaaaatatgtatagagcatggatggaaaatattaatgactggtgtatttcaaggcaattatggtggggtcatcaaatacctgcttattatttaccatctggtgaatttgttgtggcagaaacaaaagaaaaagcatacattaaagcaaaagaaattgatggtaagatcaaaatggatgaattgatccaagatgaagatgtcctagacacatggttttcaagttggctgtggccaatatctgtatttgatggaataaacaatcctagaaacaaagaaattaactattactatcctacaactgatttagtaactgcaccagaaattatttttttctgggtagcaagaatgataatatcaggatatgaatatagaaatgaaatgccttttaaaaatgtctatttcactggaattgttagagataaaaaaagaagaaaaatgtcaaaatctcttggaaattcacctgatccaattgagcttatgaaaaaatatggtgccgacggtgtaagagctggaatgctatttagcgccccagcaggaaatgatttactttttgatgagaagctctgtgagcaaggaagaaatttttcaaataagttatggaatgcttttagacttattaaaagttttgagatttcaagtgatggaagtgaccaatctctagcaataagttggataaactctaggtttaatgaggtattagatcaagttgaagatcatttttctaaatatagaatatcggatgcccttctttctctatatacatttatatgggatgacttttgcagctggtacttggaaataattaaagaaaagagtatctcaaaaa

SEQ ID NO: 307249 - DNA, 898 bp, Unknown
  Bacterial polypeptide expressing nucleotide sequence isolated from the Sargasso Sea
ctttcaataaaagcaaaagaaatagtaaataataaaacaactaatttttttcctgttaattggacaaaaacttattttcaatggatggataatatagaaccctggtgtatttcaagacagctttggtggggacatcaaatacctgcttggtatgggcctgatggagaaatatttgtagatgaaacagaagaaggtgctaataaattagctaaagaacactataaaaaagatgttgaattaattagagatccagacgttcttgatacatggttttcatcaggtctatggccttttgcaacattaggatggccagaaaaaaatgaatatttagaaaaattttatccaacttcagtattggtaacaggttttgatatcattttcttttgggttgcaaggatgatgatgtttggaatggaatttcaaaataaagaaccttttaaaaatatttatgttcatgcattagtaagagatgaaaaaggtcaaaaaatgtcaaagtctaagggaaatgtaattgacccgttagagttaatagaaaaatatagtgctgatgctctacgatttacacttttatcaatggcatctcctggaagagatgtaaagttatcagaagatagagttaaaggttatagaaattttttaaataaaatatggaatgctaataactttcttattcaaaatgattgtaaatttgaaaatataaaaacgcctaatgatttaaaactaaatattaataaatggatttttgttgaattcactaacactaatgaaaagattaaaaaatcaatagatagttatcgatttgatgaggctgcaagaattgcatatcaatttgtatggcattcattctgcgattggtacttagaattatctaaaactgttttttattcagaaaataatg

SEQ ID NO: 307250 - DNA, 896 bp, Unknown
  Bacterial polypeptide expressing nucleotide sequence isolated from the Sargasso Sea
gattatgctgatccagagcaaggcagtggtgcagttaaaattacacccgcacatgattttaatgattttgaagttggtagaagacaaaagcttaaatctataaatatttttactgaagatggaaaaattaataataatgctccaaaagaatatattggtttagacagatttgaagctagaaaaaaaataattgataaattaaaagaattacaagtctttgaaaaagaagagactataaaaaacaaagtaccttatggagatagatctaattccattattgaaccttttttgactgaacagtggttctgtgatgccaaaaaattatctatcaaagctaaacaaatagtaaaacacaaaaaaacgaatttcttcccatcaagttggtcaaaaacatattttcagtggatgaacaacatagaaccgtggtgtatttcacgacaactttggtgggggcatcaaatcccagcatggtatggaccagatagaaaaatatttgttgcagaaaatcaaaaaaaagcagaaacacaagcaaaaaaattttataggaaaaaagttaatttaaaaagagatcctgatgttcttgatacatggttttcttcaggtctttggccttttgcaacacttggatggccttctaaaaattattttttaaaaaaattttatccaacatcagttcttgtaactggttttgatattattttcttttgggtagctagaatgatgatgttaggtatgcaatttctaaacaaagaaccatttaaagaagtttatgtccatgcacttgttagagatgagaaaggccaaaaaatgtcaaaatcaaaaggaaatgtaatcgaccctttagttctaatagatagttacagcgcagatgctttaagatttactttgttatcaat

SEQ ID NO: 307251 - DNA, 878 bp, Unknown
  Bacterial polypeptide expressing nucleotide sequence isolated from the Sargasso Sea
accgcctaatgtaacgggaatgcttacggtagggcatgttttgaataacaccattcaagatattttaatcagaaaagcgagaatggaggggagagaagcttgttggattcctgggacagatcatgcttctattgcaactgaaacaaaagttgttggaatgcttcaggaaaaaggaataaataaaaaagatttatctagagaagaatttttgaagcatgcctgggattggaaagaaaaatatggtggcataattatcagtcaattgaaaaagcttggatgctcatgtgattgggaaaaagaacgatttacgatggatgaagagtacactaagtcggtgttatctgcttttgtaaaactatacgaaaaagggttgatttacaaaggttacaggctagttaattggtgtccaatctctaaatcagctatcagtgatgaagaggtaatccacaaagaaaagaatggttatctatggtatttccgctatccaataaaaaattcaaatgaatttgtaattgtagcaacaaccaggccagagacaatgttgggagatactgctgtcgcaatcaatcctgaggataataggtatcagcacctaataggacagaatattattctcccaattgttggtcgagaaataccaattatagctgatgagtatgttgatccagaattcggaacagggtgtgtaaaaattactcctgctcatgatccaaatgattttttgataggcgagaagcataatcttgagttcatcaatattatgaatgaagatgcatcattgaattcaaatgtgcccattaagtatgttggcatgacccgtgaggatgctcgaaaggaagttgtaaaagatattgatgctgaaggccttttggataaaa

SEQ ID NO: 307252 - DNA, 931 bp, Unknown
  Bacterial polypeptide expressing nucleotide sequence isolated from the Sargasso Sea
tactaataaagtaggtttttctgagagaggggatgtgccaatcgaattttatatgtctagacaatggtttatgaaaatgtctgagttggctaaaccggcgatcaacgctgtcaatgaaggtaagattaattttcatccaaatcattggagtaaaacgtacaatcattggatgaataatataaaggattggtgtataagccgacaattatggtggggtcatcaactaccggtttggtataataaaactaataatgcagaaatacatgtttctgttaaagaaccagatgatattgaaaattgggttcaggatccggatgttttagatacttgggcaagttcttggttatggccaataggagttcatgggtggccggatgaaaatgataatctcaaaaagttttatccaacagatacattggtaactgggccggatattatatttttttgggtagcaaggatggttatgtcaggttatgaattcaggggcgagattccatttagggatgtttatttcacatctatcctgagagatgcaaaaggtaaaaagttaagtaagtctttgggaaactcgcctgatccatttgatttatttgaagaatatggtactgatgctgttcgttttggtactatgttaatggcacctcaaggtttagatgttcttttcgcaaaagaaagattagaagttggtcgaaattttatgaacaagctttggaatgcttgtcggtttattcagcttaatatacctgagcaatggaacgatgatattgaattagattttaagaatttagacttacctgaaaagtggattttagagcaattatctgaaaccataaataattttaataaccaaatagaccgcttttatttcaatgaagcggctaaaataatatatgattatacttggaatgatttttgtgattggtatatagaa

SEQ ID NO: 307253 - DNA, 724 bp, Unknown
  Bacterial polypeptide expressing nucleotide sequence isolated from the Sargasso Sea
gaaacaatgatgggagataccgcggttgctgtaaatccaaaggatgaaagatatgttaatttagtcggaaaaaatattcttattccaattgttaataggactgtcaaaattatttctgacaattacgctgatccggaacaaggttcaggagcagtaaaaattacaccagcacatgatttcaatgactatgaggttggcaagagaaataaattagaaacaataaatatttttgaagagaatggtaaaattaacaaaaatgggattaaagaatttcacggtttagacagatttgaagcaagaaaacttattattaaaaaattaaaggacaaaggttctcttgtaaaaatcgaaaatattaaaaataaagttccatatggagatagatcaaacactataatcgaacctctgttaacagagcaatggtttgttgatgccaaaaaattatccaaaaaaccaattaagatagttaaagatggcaaaactactttttttccaagcaactggtcaaaaacattttttcaatggatgaataatattgagccttggtgtatatctcggcagatttggtggggtcatagaatacctgcttggtatgatgaaaatggaaatatttttgtagctgaaagcgaaaaagatgcagtaaaactagcaaagaaaaaaaataaaaataaacaatttaaattaagacaggaaacagatgttttagatacttggttttcatcag

SEQ ID NO: 307254 - DNA, 852 bp, Unknown
  Bacterial polypeptide expressing nucleotide sequence isolated from the Sargasso Sea
atatgtcttacaaacagccttatctgacctcgaagtaacttctgaagaagaaacaggatctctatggtattttgactaccctattgagaacggaagctttataactgtagcaacaacaagacctgaaactatgttgggtgattcagctgtagccgttaaccctgaagatgaaagatttaaagaattaataggacaattcgtgatactgcctatcacagatagaaaaattcctattatagaagactcttatgtagattcagatttcggcacgggttgcgtaaaaataactccagcacatgacttcaatgattttgaaataggaaaaagacatggcttggaagttattaatattctaaatctagacggcaccctgaatgaatttgttccagagaagtatagaggcttaacaactactgaagctagaaaagaagtattaaatgaaatggagtcattaggccgtcttaataaagaagagccacacaaaatacaaatccctaaaagtcaaaggagtgattccgtattagaaccacttataactaatcaatggtttgtagatgttaaaaaaatgtctaaagaagcaattagggtagttcaagaaaatgaaacggggtttattccaaaaaattgggaaaatacttattttgattggatgaacaaaattcaagactggtgcataagtagacaactgtggtggggacatagaatacctgcttggtatgacaaagaagaaaatgtgtatgtaggaaaatcagaagatgaagtaagacagaaatatgatcttaaagacatcgaactccatcaggatgaagatgttctagatacttggttttcttcggcgctatggacattttc

SEQ ID NO: 307255 - DNA, 858 bp, Unknown
  Bacterial polypeptide expressing nucleotide sequence isolated from the Sargasso Sea
gttgcagtaaacgaaaatgaagcaatcaaacaagctaaaaaacattataaaaaaattgtaaaattaaccagagatcctgatgttttagatacctggttttcttcaggtttgtggccatttgcaactttaggatggccagataaaaaagattatgtaaaaaagttttatccaacaactgttttagttactggttttgatattatatttttctgggttgcaagaatgatcatgtttggaatggaatttttaaataaagaaccttttaaagatatttacgtacatgctttggtaagagacgaaaaaggacaaaagatgtctaagtcaaaaggtaatgttattgatccattagatttgatagaaaaatatagtgctgatgctttaagatttactttactttcaatggcctcaccaggaacagatgttaagctttctgaagaaagagtaaaaggttatagaaattttttaaataagctatggaacgctaacaattttttaataacaaataaatgtgattttaataaaactgataaggctcctaaaacaacattaaatattaataaatggatctattctgagttaataagtattaagaataaaattcaaaaaaatattgaagattatagatttgatgaggctgctaagaatgcctatcaatttgcatggcattcatattgtgattggtacatcgaactttctaaaacaattctttattctgaggataaaaaggcaaaaaaggaggtaaaagaagtatcagcttacatttttaaacaaatattagtgatgcttcatccgtttatcccttttgtaactgaagagatatggctgaaaaataagtttgataaatctaataagaatttt

SEQ ID NO: 307256 - DNA, 796 bp, Unknown
  Bacterial polypeptide expressing nucleotide sequence isolated from the Sargasso Sea
agaaataaaccttccgataacccacagaaaaattcaaataattgcagatcaatatgtagaccctaatttcggttcaggatgcgttaagataaccccagcccatgactttaatgactatgatgttgggaaaagacatggcttagagcttataaatatatttaccgaaaacgccacacttaacgaccagacaccaaaaagatatgaaggactagatcgctttgatgcgagaaaaaaaatagttgaggaactaagcaatttaggcttgattgagaaaattgaagaacacacctctgcaattcccagaggcgagcgcactggagaaattgttgaaccttacctctccgatcaatggtttgtctcggcgggtcttcttgctgaaaatgctataaaggttgtagagaatggagaaattgatttcgttccaaaaaatacggagaacatttatttttcctggatgagaagcattcaagactggtgcataagcagacaactctggtggggacatcaaattcctgcctggcacgaccaggagaagaatatctttgttgggcgatctgaagaggaagtaagagcgaagtattctcttgcagaaaatgtaaaacttagtcgggataaagatgtcttagatacctggttttcttccgcactgtggactttttctacactcggctggccagaaaaaactaaagagttggaaacgtttcaccctaccagtgttatggtgaccggtcacgatattataagtctttgggtatcaagaatgatcatgatgtctttatactttcttgagaaggtg

SEQ ID NO: 307257 - DNA, 592 bp, Unknown
  Bacterial polypeptide expressing nucleotide sequence isolated from the Sargasso Sea
ctggccaagacctacgacccggctggcacggaggcccgctggcagcaggcctgggaggaccagggagcgtttcatcctgacccgaaggcccccggtgaaccgttctctgtggtgatcccgccgccgaacgtcaccggcagcctgcacatgggccatgccttcaacacggccttgatcgacacgatcgtgcgctaccagcgcctggcggggaagaacgttctttgcttgcccggcaccgatcacgcctcgatcgcggtgcagacgatcctcgagaagcagctcaagcaagagggcaagacccgccacgatctcggccgtgatgccttcctggagcgggcttgggaatggaaggctgaaagcggtggccgcatcgtgggccagctgcagcggttggggtattccgttgattggaagcgccagcgcttcacccttgatgagggcctgagtgaggcggtgaaggaggccttcgtgcggctgcacgagcaggggctgatttaccgcggtgagtacctggtgaactggtgccccgcctccggttcggcggtgagcgatctggaggtggagatgaaggaggtggacggtcacctctggc

SEQ ID NO: 307258 - DNA, 652 bp, Unknown
  Bacterial polypeptide expressing nucleotide sequence isolated from the Sargasso Sea
gatggataatatagaaccttggtgtatttctcgtcaattatggtggggacatcaaattccagcatggtacgggcctgatggaaaaatatttgtagcggaaaatgaagacgaatgtaaaaaacacgcaaaagaattatattcaaaagatgttgaattaaaaagagatgaagatgttttggatacttggttttcttcaggtctatggccatttgctactttaggatggccagaaaaaactccagaagttaaaaaattttatccaacaagtgttttagttaccggttttgatatcatatttttctgggttgcaagaatgattatgatgggaactgagtttttaaaagaagaaccttttaaaaatatatatgttcatgctttagttcgagatgaaaagggtcaaaaaatgtctaaatcaaagggaaatgtaattgatcctttagaacttatcgaaaaatatagtgctgatgctttaagatttactctcttatcaatggcatcacctggtcgtgatgtaaaactatctgaagatagggttaaaggttatagaaatttcttgaataaagtttggaatgctaacaattttttaagacaaaatgagtgtgattttagcgatataagaaagcctgaaaatcttaaaattaacaatcaataa

SEQ ID NO: 307259 - DNA, 865 bp, Unknown
  Bacterial polypeptide expressing nucleotide sequence isolated from the Sargasso Sea
taaaaaaatcttcgttgaactaaatgaaagtgatgcaaaaaaatcagcaaaaaaatattataaaaaagatgtaaaacttgtaagagataatgatgtacttgatacatggttttcatctggtctttggcctttcgcaacgcttggttggccaaacaaaaatgaatatttaaaaaagttttatccaacaacagttcttgtaacaggatttgatataattttcttttgggtagctagaatgatgatgtttggtatggaatttttaaataaagaaccatttaaagatatttatgttcatgctttagttcgtgatgaaaaaggacagaaaatgtctaagtcaaaaggaaatgttatagatccacttgatttaattcaaaaatatagcgctgatgcattaagatttactttattatctatggcatcacctggtactgatgttaaactttctgaagatagggttaaaggatataggaattttttaaataaattgtggaatgcaaataattttttaatacaaaacaaatgtaatttaaaaaatgcaaaaaaacttcccaaattaaaagttaatatcaataaatggatatattttgagcttttagaaacatctaatttaataaagaaaaatatagaagattatagatttgatgaagcagctaagaatgcttatcattttgcatggcataaatattgtgactggtacttagaattgtcaaaaacaatttttttttcagataatttaaaagctaaaaatgaagttaaagaagtttccgcttttgtatttaaagaaatacttattatgctacatccatttataccatttgttactgagaaaatatggctaacaaataaatttgataacaaaaataag

SEQ ID NO: 307260 - DNA, 805 bp, Unknown
  Bacterial polypeptide expressing nucleotide sequence isolated from the Sargasso Sea
gtaggcagaaaaattcctattttagctgatgaatatgttgacatggaatttggaacaggttgcctgaaaattactccaggtcatgactttaatgattatgagataggcaaaaaatactcactgcatgaagtagatggtcaagtaaaaacttctgatgcagcaagtgattttgaacctataaatatatttaatgaggatgcatggtctaatgagaatgtacctgaaccattttcaaatctagatcgtttcaaggtaagaaaggccgtattagagaaactcaaagaattgaatcttctagaaaaagaagaaaaataccatataagcgtgcctagaggtgagagatctaatattgttatcgagcccagattaagtcatcagtggtatgttaaaactgaggaaatggcagcaagagctaacgaagctgttaacaaaggagatataagattccatcctggaaattgggttaaaacatattttaattggatgaataatattgaggactggtgcatcagtagacaaatatggtggggtcatagaatacccgcatggtatgactcagacaataatgtttacgttggttatagtgagaaagaagttagacaattctataagcttgatgataggaaactttctcaagatgaagatgttcttgacacttggttttcatcaagtttgtggccttttacatctttgggatggccagaaaaaacagaggattttaaaaagtattttccaacctctcttttagttactggttatgatattatttttttctgggttgcaagaatgatgatgatgagtttag

SEQ ID NO: 307261 - DNA, 658 bp, Unknown
  Bacterial polypeptide expressing nucleotide sequence isolated from the Sargasso Sea
atgcagcttgataaattttttgattttttaaaagatgaaaaaaatctttattcgcaatgggagcaatcaaattgctttaaaccacaaaaaggaggtgcaccttattctataatgatgccaccacctaatgttacaggtagcttacatatgggtcatgctttaaccttcacaattcaagatatattaatcagataccatagaatgaagggcatggaagtattgtggcaagcagggacagatcatgcaggaatagctactcagatggtggttgaaagaaaattaagtgagtcaaacctagatcgacgatctctaggtagagaaaagtttattgaaaaagtatgggaatggaaaaaagagtcgggtggtcagataagcaatcaattaagaagacttggtgcttctgcagattggtctagagaaagatttactatggatgaaggactttctaatgcagttaagaaagtttttgttaacttatttaatgatggaattatttataaagataagagattggtgaattgggaccctaaacttttaacagctatttctgatctggaagtagagcaaagagatactgaaggaagtttatggcatattaaatatcctattgatgaaaataatcatatcattgtagcaacaacaagacctgaaacaatgt

SEQ ID NO: 307262 - DNA, 823 bp, Unknown
  Bacterial polypeptide expressing nucleotide sequence isolated from the Sargasso Sea
cttggtgtatatctcgtcaatttggtggggccacagaattcccgcatggtatgatgagaataataatgtctttgttgcagaaaataaaaaagatgcattaactttagcaaagaaaaaaaataaaaataagaaagttaaacttagacaagaaacagatgttctcgatacttggttctcatcagctctatggccatttgctacattaggttggccaactaaaacaaaagaatttttaaaattctatcctacatctgttctagttacagggttcgatataatctttttttgggtagctagaatgttaatgatggggaattattttaataaagatacaccatttcataaaatttatgtccatgcgttagttagagatgaaaaaggacaaaaaatgtctaaatcaaaaggaaacgtaattgatcctcttgaacttataaaagagtatggagctgatagtttaaggtttacattaatctcaatggcttcgcctggaagagatgtaaaattatcaaaagacagagtgacaggtaatagaaattttattacaaaaatttggagtgctaataattttctaaatatgaataattgtaaattgaataaaaaagtaaatataaaatctattaaacttccaattaatcagtggatatttaatgaatatattaagacacaaaatattgtatcaaaaaatattgaaatttttagatttgatgaagcagcaaaacatgtttatcaatttgtatggcattcttattgcgactggtatttagagtttttaaaaccaatttttaactcaaagaatcaggctgaaatcaaagaagcaaaatta

SEQ ID NO: 307263 - DNA, 871 bp, Unknown
  Bacterial polypeptide expressing nucleotide sequence isolated from the Sargasso Sea
gcagtaaatcccaaagacgagagatatattaatcttgtaggtaagtttgctatattaccaatcgtgggaagaaaattaaaaatttttcaagacgaatatgcagatcccgaacaaggatcgggagcagttaaaattactcctgctcatgactttaacgacttcaatattggggaaagacataatttagagaaaataaatatttttactgaagacggaaaaataaataaaaatgccccaaaagattttgtgggtatggatagatttgaagcaagaaaaaaaattatagaaaaattattagagttagaaattcttataaaagaagaaaatattaaaaacaaagttccttatggtgacagatcaaactctattatagagccatacctaacggagcaatggtttgtagatgcaaaaaaattatcagttaatgcaaaaaaaattgtaaaaaacaaaacaacaactttttttcctgaaaattggtcaaagacttattttcaatggatgaataatattgagccttggtgcatttcaagacagctgtggtggggacaccaaattccagcttggtatggtcctgataaaaaaatctttgtagctgaaagtgaaaaaaaggctcaatcagatgcaaaaagattttataaaaaaaaagttaaaatcattagagacccagatgttttagatacatggttttcatctggtctttggccgtttgctacattaggatggccaacttcaaattataatttaaaaagattttatcccacatctgttttagtaacaggttttgatattatatttttttgggttgcaagaatgatgatgttgggaatggaatttttaaaaaaagaaccgtttaaggaaatttatgtacatg

SEQ ID NO: 307264 - DNA, 791 bp, Unknown
  Bacterial polypeptide expressing nucleotide sequence isolated from the Sargasso Sea
gatggataaaaggtttgattctaaatctatagaggataaatggtataaaatatggctagatagtggagctttcagatcagacagctcttcaacaaaaaaaccttatgttatcatgatgcctcctcctaatgtaactggctcattacacattggtcatgcactaacttttactattcaagatatattaataagatttcatagaatgcaagggtttgatgttttatggcaacctggtactgaccatgcaggaatagctactcaaatggttgttgaaagagagttggccaaattaaatcttactcgtcatagtttaggtagagaaaagtttgttgaaaaagtatgggaatggaaggaaaaatcaggaggggagataacaaaccagttgagagcacttggggcatcacctgattgggaaaaagaacgttttacaatggatgatggattatccaaagctgttaatcttgtttttgtaaaattatataaagaaggtttgatttatagagataaacgacttgttaactgggatccaaaattattcacagcaatttctgaccttgaagtagatcaaaaagaaatgcaaggtaagttctggtatttcaaatatcctattgaagatagtgatgaatttttaactatagctactaccagaccagaaactatgttgggtgacacagctgttgccgtaaacccagaagatgacagatataaatatttaaagggtaagaatgttattttacccattataaatcgacctattcctataatttttgataactattcagatcctgaaa

SEQ ID NO: 307265 - DNA, 784 bp, Unknown
  Bacterial polypeptide expressing nucleotide sequence isolated from the Sargasso Sea
tataatgattatgatgtaggaaaaagaaataatttagaattaattaatattatgaacaaagacggcactctaaataaaaatgttccaaaaaattatcaaaatttagatcgttttgaagcaagagaaaaattaattaaagaattaaatgatttagaacaaatagaaaaaatagaagatataaaacacacagttcctttcggtgatagatctggagttgttgtagagccattattaactaagcaatggtttgtagatgcaaaaaaaatagcaaaaaatgcgattgttaaagttaaaaataaagaaacagttttttatccagaaaattggagcaagacctattttcaatggatggaaaatattgagccatggtgtatctccagacaattatggtggggacaccaaataccagcatggtatacaaaaaataatgaaattatagttgcggaaaataaaaaacaggcagaaaaaattgcgaaaaaaaaatataaacaaaaaaaagtattattagaacaagataaagatgtgctagatacgtggttctcatcagcactatggcctttcgctacaatggattggccgaaaaaaaattatgaattaaaaaaatattatccttcaagtgttttagtaacaggttttgatatcatatttttttgggttgcaagaatgatgatgatgggattattttttatgaaaaaagttccctttaaaaaagtttatgtacatgcgttggtaagagatgaaaaaggtcaaaaaatgtcaaaatccaaaggcaatgttatcgacc

SEQ ID NO: 307266 - DNA, 898 bp, Unknown
  Bacterial polypeptide expressing nucleotide sequence isolated from the Sargasso Sea
gatgcttcgcttaattcaatgttccaaaaaatatattggtctatctcgtgaagatgctcgtgaagctgttgtctctgaccttcaattattggggttacttgataaaaaagaagaacatgtaaacaatataggtttttctgagagaggtgatgtgcctattgagttttatatgtctgaacaatggtatatgaagatgtctgaacttgcgaagcccgctcttgatgcagtaaaaaatggtcacataaaatttcacccagaccactggactaaaacatatgaccactggatggaaaacatcagggattggtgtataagtcgacaattattatggggacatcaaatacctgtgtggtatcataaatcggacaaacaaaagatccatgtatccgtaggaggcccaagtgaccctgaaaactggatccaggataatgatgtattggatacatgggccagttcttggctctggcccctaggggtgcactcatggccagatgaagatgaaaacctaaagaaattctatccgactgatactcttgttaccgggcctgatattattttcttttgggttgcaagaatgatcattacaggttttgaattcaaggccgaagtgccctttaaagatgtctatttcacatctatccttagggatgaaacaggaaaaaaattaagtaaatccttaggtaattctccggacccttttgacttgtttgatgagtttggtactgatgcggtgaggttcgggaccatgctgatggctccccaaggccttgatgtccttttttcaaaagaaaggcttgaagtcggcaggaatttcatgaacaaactttggaatgcatgccgttttatacagctaaatcttggagagaaatgggattcagaggttcacttggattattga

SEQ ID NO: 307267 - DNA, 562 bp, Unknown
  Bacterial polypeptide expressing nucleotide sequence isolated from the Sargasso Sea
aatggataaaagatatgagccacttattattgaagaaaagtggtcagagctttgggcaaaaaataatttaggtaaaaataactcttcacaaactttttcccaggttattccacctccaaatgtgactggtactcttcatatggggcatagcttccaatattcgataatggatttctatgccagatacaatcacttaaatgatgtaaatactcattggcagataggtaccgatcatgcaggaattgcaacgcaaatggtcgttgaaaacaacctatccagagaaaatattgataaaaatgatttgggtagagaagattttgttaaaaaagtttgggagtggaaagaattttcagaaaataaaattactgaacaaattaaaaggttaggtaactcagttgattggagtaattacagatttactttagatgaaggttttaatgaagctgttcttaaagcttttgttgagctttataggaaagagaaaatctatcgtggttacaggttagtaaactgggatccatctttaaaaactgcggtttcagatctggaggttgtaagacaa

SEQ ID NO: 307268 - DNA, 916 bp, Unknown
  Bacterial polypeptide expressing nucleotide sequence isolated from the Sargasso Sea
tgaagcaagaaaacttataattaaaaaattaaaggacaaaggttctcttgtaaaaatcgaaaatattaaaaataaagttccatatggagatagatcaaacactataatcgaacctctcttaacagagcaatggtttgttgatgcaaaaaaattatccaaaaaaccaattaagatagttaaagagggcaaaactactttttttccaagcaactggtcaaaaacattttttcagtggatgaatgatattgagccttggtgtatatctcggcagatttggtggggtcatagaatacctgcttggtatgatggaaatggaaatatttttgtagctgaaagtgaaaaagaagcagtgaaactagcaaagaaaaaaaataaaaataaacaattcaaattaagacaggaaacagatgttttagatacttggttttcatcagctctatggccttttgcgactcttggatggccaaagaaaactgaagaacttaataaattttatccgacatcagttcttgttactggttttgatataattttcttttgggtagcgaggatgttgatgatgggaaattattttagaaaaaatacaccttttcataaagtatatgttcatgccttagtaagggatgaaaaggggcagaaaatgtcaaagtcaaaaggtaatgtgatcgatccattagatttaattaatgaatatggagcagatagtttaaggtttactttaatttcgatggcctctccaggacgagatgtaaaattatcaaaagatagagttactggaaatagaaactttataacaaaaatttggagcgcaaataattttttaaaacttaataattgtaaattagataaaaagataaatttgaccttaattaaacttccaaataaacccattggatttataacgagatttataaaa

SEQ ID NO: 307269 - DNA, 962 bp, Unknown
  Bacterial polypeptide expressing nucleotide sequence isolated from the Sargasso Sea
tgaactagataaatattttcctacaagtgttctagtcactggatttgatattttgtttttttgggtagctagaatgatgatgatgcaactggttttagttgataacgttccatttaaaaaagtttatgtacacgctttagtaagggatgaaaaaggaaaaaaaatgtctaaatctcttggtaacgttttagatccactagagttaattgatcaatatggagctgatgctgttcgttttactttgtcttcaatggctgcaatgggtagagatctaagattatcaactgatcgggttataggttataggaattttggtacaaaaatttggaatgctgcaagatatgcacaattaaataattgtgagtcttcaactaattttaacccagatactgtaacaaatagcataaataaatggattatttttcaaactactgatctaaaaaaagaagttgatagtgctttagaaacgttccgttttaatgatgcagcaaatcatttatatagtcatgtttggtcaaagttttgtgattggtatattgaattttcaaagtcgcttttttctggagatgatgtcaaattaaaaaatgaaactcaactaacatttgcatgggtattggatcaatgtttaattatgttacatccattcatgccttttattactgaagaaatttggcagcagaataaaaatcgcaaaaatatgattgtgcatgaaacttggcctgatttccaaaatgtacttcataatgatgatgaatctcaaaaagaaataaattggctgattgatttaatacaagaaattcgatctgctagatctgaagtaaatatacctgctagcctaaaaattaaacttaaaattgtaagtttaaataagcagtttcttcagtgtttgaagaataatgaaattattattaaacgacttgcaagatttggaagtattgagcatgaaattttaataaaaagtg

SEQ ID NO: 307270 - DNA, 913 bp, Unknown
  Bacterial polypeptide expressing nucleotide sequence isolated from the Sargasso Sea
aacgtctacgttggccgcgacgaagcggaagtccgcgccaagcacaacctcggcgatgccaacctgcgccaagacgaagacgtgctcgacacctggttcagctccggcctgtggaccttctccaccctcggctggccgcagcagaccgattacctcaagaccttccaccccaccgacgtgctggtcactggcttcgacatcatcttcttctgggtcgcccggatgatcatgctgtcgacccacctgaccgggcagattccgttcaagaccgtctacgttcacggtctggtacgcgacggtcaaggccagaagatgtccaagtccaagggcaacgtgctcgacccgctggacatcgtcgacggcatcgacctcgaatccctggtggccaagcgcaccagcggcatgatgcagcccaagctggccgagaagatcgccaagcagacccgcgccgaattccccgacggcatcgccgcctacggcaccgacgccctgcgcttcaccaacctggcgctggcctccactggccgcgacatcaagttcgacatgggccgcgtcgagggttaccgcaacttctgcaacaagctgtggaacgccgccaacttcgtcatcgagaacaccgatgacaaggacaccggcatcaatggtgaaccagtcgagctttcgccggtggatcgctggatcatctccgccctgcagcgcaccgaggctgacgtgacccgccacctcgacgccttccgcttcgacctggccgcgcaaaccctgtacgagttcatctgggacgagtactgcgcctggtatctggagctggtcaagccggtgctgtgggacgagaacgcccccatcgagcgccagcgcggcacccgccgcaccctggtgcgcgtgctggaagtgatcctgcgcctggctcacccat

SEQ ID NO: 307271 - DNA, 642 bp, Unknown
  Bacterial polypeptide expressing nucleotide sequence isolated from the Sargasso Sea
actggccaagacctacgacccccaggccactgaggcgcgctggcaacaagcctgggaatcttcaggggcgtttcacccggatcctgaggcgcctggcgaaccgttttcgctggtgacgccgccaccgaacgtgaccggcagcctgcacatgggccatgcgttcaacacggcgctgatcgacacgatcgttcgttttcagcggatgcagggcaaaaacgtgctctgcctgcctggtaccgaccacgcctcgattgcggttcagacaatcctggaaaaacagctcaaggctgagggcagcagcaaagaggagctgggccgcgagggatttttagagcgctgctgggcctggaagggtgaaagcggcggacgcatcgtcagccagttgcggcgtcttggtttctcggtggattggcagcgggagcgcttcacccttgatgccggctgcagccaggccgtgatcgaagccttcgtcagcctgcatgagcagggcctgatctaccgaggcgaatacctcgtcaattggtgcccggcctccggttcggcggtgagtgatctggaagtggagatgaaagaggttgatggtcacctctggcatttccgctatccgctcagcgatggcagcggccacttggaagtcgccac

SEQ ID NO: 307272 - DNA, 919 bp, Unknown
  Bacterial polypeptide expressing nucleotide sequence isolated from the Sargasso Sea
aatattaaaaataaagttccatatggagacagatcaaacactattatagaacctcttttaactgaacaatggtttgtagacgcaaaaaaattatcaaaaaaacctataaaaatagtaaaagagggtaagacatcttttttcccaagcaactggtcaaaaactttttttcaatggatgaatgaaatagaaccatggtgtatttcacggcaaatttggtggggtcacagaatacctgcttggtatgataacaatggaaatatatttgtagctgaaaatgagaaagatgcagtcacattagccaaaaaaaaaaatgggaataatcaatttaaattaagacaagaaactgatgtattggatacatggttttcatcagcattatggccattcgcaactcttggttggcctaacaaaacaaaagaacttaataaattttatcccacttcggttcttgtaacaggtttcgatatcatttttttctgggttgcaagaatgttaatgatgggaaattattttagaaataaaaccccgttcaataaagtatacgttcatgcactagttagagatgaaaagggtcaaaaaatgtcaaagtctaagggaaatgtaattgatccgcttgaactaataaatgaatatggagctgatagtttaagatttacacttatttcaatggcttcaccaggaagagatgtgaagctatcaaaggatagagttactggaaatagaaactttataacaaaaatttggagcgctaataatttcttaaaattaaataattgtaattataataaaaagataaatttaaattcaattaaacttccaattaatcaatggatatataatgaatttataaaaacacaaaatttagtaacgaaaaatattgaaatattcagatttgatgaggctgctaaatatgcatatc

SEQ ID NO: 307273 - DNA, 676 bp, Unknown
  Bacterial polypeptide expressing nucleotide sequence isolated from the Sargasso Sea
aaaaaatgtaatactaactagagatccagatgttttggatacatggttttcctcaggtttatggccgtttgctactttaggatggcctaataaaaaagaatttgttaaaaaattttatccaacaaccgttttagttacaggatttgatatcattttcttttgggttgcaagaatgattatgtttggaatggaatttttaaaaaaagagccatttaaagacatatatgtacatgcattagtaaaagatgaaaaaggacaaaaaatgtctaaatctaaaggtaatgtaattgatccattggatttaatcgaaaaatatagtgcagatgctctaagatttactcttttatcgatggcctctccaggaacagatgtaaaactttctgaagatagggtaaaagggtatagaaattttttaaataagttatggaatgcaaataattttttaataacaaataagtgtaattttaataagtcccatactccaaaaatcaaattaaatataaataaatggatatattctgaattaattgaaatagaaaataaaattcaaaaaaatattgaagattaccgatttgatgaggctgcaaaaaatgcttaccaatttgcttggcactcatattgtgattggtatatcgaactttccaaaacaattctttattctagtgataaaaaagcc

SEQ ID NO: 307274 - DNA, 706 bp, Unknown
  Bacterial polypeptide expressing nucleotide sequence isolated from the Sargasso Sea
gctgttaatccaaaagacgaaagatttaaatccgttgttggaaaaacagttaccattccaattgttggaagaaaaataaaaattattgaggatgactatgcagatcctgaacagggaacaggggcattaaaaataactcctgcacatgattttaatgactatgatgttggtcaaagaaataatcttgaaataataaatatttttactgaagctggtaaaataaatgaaaacgccccagaaaattatgtaggtcttgataggtcagaagcaagaaaaaaaattttaaaagaacttaaagaaaaagaattttttgtaaaagaggagaatataaaaaataaagttccatatggagataggtctaattcaataattgaaccttttttaacggaacaatggtttgctgatgctggcaaattatcggttaaagcaaaagaagttgttaatacaaaaaaaacaaatttctttcctgagaattggtcaaaaacttatttccaatggatgaacaatatagaaccttggtgcatttctagacagctttggtggggacatcaaattcctgcttggtatggtcctgatgaaaaaatttttgttgctgaaaatgaagatgatgcaaaacaacaagctaaaaaacattatggtaaagatgttgaattaaatcgtgatccagatgttttagatacatggttctcatcaggtttatggcctt

SEQ ID NO: 307275 - DNA, 907 bp, Unknown
  Bacterial polypeptide expressing nucleotide sequence isolated from the Sargasso Sea
tggtggggacatcaaataccagcatggtatggcccagataaaaaaatttttgtagcaattaatgaagacgtagcaaaaactgaagcaaaaaaacattataacaaggaagttgaattaattagagatccagatgttttagacacatggttttcttcaggtctttggccttttgcaacactaggatggcctgatcaaaaagaatttgttgaaaaattttatcctacgtcagtattggtaacaggatttgatataatatttttttgggttgcaagaatgattatgtttggaacagaatttttacacaaggaaccatttaaagatatttacgttcatgctttagttagagatgaaaaaggacaaaaaatgtctaagtcaaaaggtaatgtcattgatcctttagacttaatagaaaaatatagtgctgatgctttaagatttactttgctttcaatggcatcacctggtcgagatgttaaattgtctgaagatagagttaaaggatataggaattttttaaataaaatatggaatgcaaacaattttttaattcaaaatgaatgtagctttaataaagtagaaaaacctaatgatttaaaagttaatatcaataaatggatttattcagaatttttaaccaaaaaagatgaaatacaaaaaaatattaaagattatcgttttgatgaagcggcaaaaaatgcatatcaattcgtatggcattcattttgtgattggtatttagaactttcaaagacaatattattttcagacaatcaaaaagctattaaggaagtaagaaatgtttctagttttatatttagagaaatactaataatccttcacccttttattccttttataactgaagaaatttggcttaaaaacaaattagacaaaaataacagtgatt

SEQ ID NO: 307276 - DNA, 681 bp, Unknown
  Bacterial polypeptide expressing nucleotide sequence isolated from the Sargasso Sea
aatgttaggtgatacagctgttgctgtgcatcctgcagataatagatataaacatttaattggaaaatttattctattaccattaactgatcgtgaaattccaattattggagacgagtttgttgatatggaatttggaactggttgtgtaaaagtaactcctgcacatgatccaaatgattttgatgttgcaaaacgacataatcttaagtttataaatattatgaatgaagatgcgtcccttaattctgaggtaccaaaaaaatatataaatatgacccgcgaaatagccagagaacaaattgttcaagatttacaatctataggacgtctggagaaaattgaagattatattcacaaagttggtttttctgaaagaggtaacgttcccattgaatattatatgtctagtcagtggttcctaaaaatgaaagaattatcaaaacctgcattacaagctgttaatgatggtaaaataaattttcatcctaaacattgggttaagacctataaccattggatggaaaatattaatgactggtgtattagtcgtcagttatggtggggtcatcgtataccagtgtggtatcataatcaagataaagataaaatgcatgtttctattgatgggccatctgacccagaaaattggaaacaagatgaagatgttcttgatacttg

SEQ ID NO: 307277 - DNA, 910 bp, Unknown
  Bacterial polypeptide expressing nucleotide sequence isolated from the Sargasso Sea
ggggacacagcaatcgctgtaaatccaaacgacaaaagatatactaatcttgtaggcaaatttgcaatactgccaatcgttggaagaaaattaaaaattgttcaagatgaatatgctgatccaaaacaaggaacaggggcagtaaaaattactccagctcatgatttcaatgacttcaatgttggaaaaagacaaaaattaaaaataataaatatttttactaaagaaggaaaaattaatgaaaatgctccaaacaaatatgtcggtttggatagatttgaagctagaaaaaaaattttggaagaattattagatttacaacagttaattaaagaagaaaatattaaaaataagattccttatggagacagatctaactctattatagaaccatacttaactgaacaatggtttgtagatgcaaagaaactttcagttaatgcaaaaaaaattgttagaaataaaaaaacaaacttttttcctgaaaattggactaaaacatattttcagtggatgaataatattgaaccatggtgtatctcacgacaattgtggtggggccatcaaattccagcgtggtacggtccagacaaaaaaatatttgtagctgaaaatgaaaaaaaagcatacttagattcaaaaaaattttataaaaagaaagtaaagctaactcgagatcaagatgttctagacacatggttttcttccggtctttggccatttgctactttaggatggccaactcaaaattattatttaaagaaattttacccaacatcagttttagttaccggttttgatattatatttttttgggtagctagaatgatgatgctaggtatggaatttctaaaaaaagaaccgtttaaagaaatttatgtacatgctttggttagagatgaaaaaggac

SEQ ID NO: 307278 - DNA, 842 bp, Unknown
  Bacterial polypeptide expressing nucleotide sequence isolated from the Sargasso Sea
tgaaaatgcacctagtgattatgttggtttagatcggtttgaagcaaggaaaaaaatattaaatgatcttggcgataagcttattaaagaagaaaatattaagaataaagttccttatggggatagatctaattctgtaattgaaccttatcttacagagcaatggtttgcagatgcaaaaaaactatcagtaaaagcaaagaagattgtaaagaataaaaaaacaaaattttttccccctaattggtcaaagacttattttcaatggatgaataatattgaaccttggtgtatatcaagacaactttggtggggccatcaaataccagcttggtatggacctgataaaaaaatcttcgtagcatcaaactatagcgaagcaaaaaaactagccaaaaaaaaatataagaaagatgtagaattagtaagagatgaagatgttttagacacatggttctcatcaggattatgggcttttgcaactcttgggtggcctaataaaaatgaatatctaaaaaaattttacccaacatcagttttagtaacaggttttgacattatctttttttgggtagccagaatgatgatgtttggaatggagtttttaaataaacaaccatttaaagaaatttatgttcatgcattggtaagagatgaaaaaggacaaaaaatgtctaagtcaaaaggtaacgtaattgatcctttgatattaatagataaatatagtgcagatgcattaagatttactttgctatcaatggcatcacctggaagagacgtaaaattgtctgaagatagagttaaaggttatagaaattttcttaataaattgtggaatgcaa

SEQ ID NO: 307279 - DNA, 667 bp, Unknown
  Bacterial polypeptide expressing nucleotide sequence isolated from the Sargasso Sea
aatgacaaaaagtaataatcaaaataccttttgtcatttaaaaacagaagataagctttataaaagttggatgagaaaaaaacttttttcttgtaatcccagttcaaaaaacaataaattttctatgataatgcctccaccaaacgttacaggtacacttcatataggacacgctctaaatatgacattgcaagatattctttccaggtactggagaatgaataataaggatgtcttatggcagcctggtactgatcatgctggtatagcaacgcaaaatattgtagaaaaaaaattattcaaagaaaaaaatgtctccaaaaatgatataggaaaggaaaaatttattgcagaagtctggaaatggaaaaaagactcaggagaaaaaataatcaatcaaattaagaagctaggagcttcaccagattgggatagattaaaatttaccctagataaagatatgtcacatgcagtgaattatgcttttgtagaactatacaaaaaaaaattaatttataaagataagcgtttaataaattgggatattaaattacaaacagctatatccgatttagaagtagagctaaaagaagtggagggtgtttttgtttttgtcaaatattttttagaaaactctaaggactttttagtagtagctactacccgt

SEQ ID NO: 307280 - DNA, 481 bp, Unknown
  Bacterial polypeptide expressing nucleotide sequence isolated from the Sargasso Sea
tatgactaccgacaaccgttttagtaagcgctattcccctcaagatgttgaatctgaattatacgaaggatgggaatctggtggtgacttttcaccctgtggtacagggcctagtttttctatggttattccaccacctaatgtaactggagaactgcatatggggcattccctaaatgtaactattcaagatattatggctcgatataaacgacttcaagggtttcgcgtactatggataccagggactgatcatgctggtattgcaacacaaaatgtagttgaaaaacaacttaatcaggatggcaagtctgccgcatcaatgggtagagagtcttttttaaatcatgtttgggaatggaaaactacatacggtaaccgaatcagccatcaaattcgacgcctaggggcaagtgttgattggaactatgaacgctttacaatggatgatgggtgtaaacaagcggttagtaaacacttt

SEQ ID NO: 307281 - DNA, 799 bp, Unknown
  Bacterial polypeptide expressing nucleotide sequence isolated from the Sargasso Sea
tattgagccatggtgtatctctagacaattatggtggggacaccaaataccagcatggtatggacctgataaaaaaatctttgttgaactaaatgaaagtgatgcaaaaaaatcagcaaaaaaatattacaaaaaagatgttaaactaataagagataatgatgtacttgatacatggttttcatctggtctttggccctttgcaacacttggctggccaaacaaaaatgaatatttaaaaaagttttatccaacaacagttcttgtaacaggatttgatataattttcttttgggtagctagaatgatgatgtttggtatggaatttttaaataaagaaccatttaaagatatttatgttcatgctttagttcgtgatgaaaaaggacagaagatgtccaagtcaaaaggtaatgtaatagatccacttgatttaattcaaaaatatagtgcggacgctttaagatttactttattatccatggcttcacctggtactgatgttaaactttctgaagatagggttaaaggttataggaatttcttaaataaactatggaatgcaaataattttttaatacaaaacaaatgtaatttaaaaaatgctaaaaaacttccaaaattaaaagttaatatcaataaatggatatattatgagcttttagaaacatctaatttaataaagaaaaatatagaggattatagatttgatgaagcagctaagaatgcttatcattttgcatggcataaatattgcgaatggtacttagaattgtcaaaaacaattcttttttcggat

SEQ ID NO: 307282 - DNA, 890 bp, Unknown
  Bacterial polypeptide expressing nucleotide sequence isolated from the Sargasso Sea
cgctctacataaagtagaagaaaatattcattctgttccttatggcgataggtcaggtgagatcattgagccgttacttaccgatcagtggtttgtaaacgctaagcagctatctatgagtgcaattgcaaaagtaaaagaaaaagaaactaaatttattccaaaaagttgggagaaaacttattttgaatggatggaaaatatacagccatggtgtatctcaagacagcttctttggggtcatcggatacctgcttggtatgggcctgatggaaaaatatttgtagctcaaagtgaagcggaagcttatcaagatgcacaaaaacattttggcaaaactgttgaacttgttcaagacgaagatgtgcttgatacatggttttcttcagctttatggccattctcaacacttggctggccagagcaaacgtctgaattaaaaaaattctaccctacatcaacactagttactggtttcgatattatatttttttgggtagcccgaatgatgatgatggctttatattttacagataaagttccatttagtgaggtctatgttcatgcattagtgagagatgaaaaaggccaaaaaatgtctaaatcaaaaggtaatgtaattgaccctctattattgatggatgaatttggcgcggactcattaagaatgactctttgttccatggctgctcaaggtagggatattaaactctcaaaacaaagagtagagggatatagaaattttattactaaaatttggaacgcagtcaagctttgtgaaataaataaatgtaactatgatgactatagtatagaaaacacaaaaaatattttcaatttatggatattaaatgagcttgaaaaatgcagggacaaagttgagaattcaa

SEQ ID NO: 307283 - DNA, 808 bp, Unknown
  Bacterial polypeptide expressing nucleotide sequence isolated from the Sargasso Sea
atgtcagagatatcaaaagcctataatcccaaaacagttgaagcccattggtctaagcaatggattgagcaaaagtcgtttaaggcgactttggatcaagagaaagagccgtatgctattatgattcctcctccaaatgtgacggggatgttgcacatggggcatgtcttggacaatacgttacaagatatattgattcgaagggcacgcttggaaggcaagtcagttttatggcaaccaggaacggatcatgcggggattgctacacagactaaagttgaaaagcaattaagagctagcactggagaatctaaatatgatttaggtcgtgaagcctttgttaagaaaatttgggattttcgagatgagtcaggtgggattatattaaatcaactgcaaaaattaggagcttcgtgcgactgggagcgcactcgatttactttggacgaggattattcgaaagcggttcttaatgcgtttgttttactctacaaaagaggctttgtttatcgtggaaagcgaatggtgaattggtgtcctgctacccaaacagctatttctgatgaagaggttaatatgaagccacagaatggtattttgtataagatgcgttatgagttagttgaggcagatggtgaaagaacccatttagagatttcaaccactcgacccgaaacgattatgggcgatagtgcagttgcagttcatcctgaggatgagcgttataagcatttgattggtcagtttgtctggcgaccgtatcccaaggggaagatccccattatcggagatagttatgtggaccgag

SEQ ID NO: 307284 - DNA, 850 bp, Unknown
  Bacterial polypeptide expressing nucleotide sequence isolated from the Sargasso Sea
gtaggtagaaaaataaaaattattaaggacaattatgcagatcccgatcaaggaactggagctttaaagataacaccagctcacgactttaatgactatgacgtaggtcaaagaaataaacttgatataataaatatttttactgaagaaggtaaaattaatgataatgctccatcagattatatcggtttagatagatttgatgctcgaaaaaaattacttaacgagcttaaagaaaaagatttttttgtaaaagaagagaatattaaaaacaaagttccatatggggatagatcaaattctataatagaaccttttctaacagagcagtggtttgttgatgcaaaaaaattatctatcaaagcaaaaaaaattgttaaaacaaaaaaaacaaatttctttcctggtaattggtctaaaacttattttcaatggatgaataatatagagccatggtgtatttctcgacagctttggtggggacatcaaatcccggcatggtatggacccgataaaaaaatttttgtagctataaatgagaaagaagcaaataagttagcaaaaaaacattataaaaaagatgttgaattaatcagagatcctgatgttttagatacatggttttcttcaggtttatggccttttgctactttaggatggccagatgaaaaagagtttgttaaaaaattttatccaaccactgttttagtcactggttttgacattatttttttctgggtagctagaatgattatgttcggcatggaatttttaaacaaagagccttttaaagatatctatgttcatgctttagttagagatgagaaaggacaaaaaatgtctaaatcaa

SEQ ID NO: 307285 - DNA, 892 bp, Unknown
  Bacterial polypeptide expressing nucleotide sequence isolated from the Sargasso Sea
gaaactctttttggagacacagccgtagcagtcaatccatttgatgaacgttattctcacttactgaaaagtaaaatagtaattccactaattaataaagaggttagtattattgctgatgaagccgtagagctaggatttggtactggtgcccttaaagttactcctgctcatgatattaacgattttgagataggtataagacatgaattagatacagttaacataatgaatcctgatgggacattaaatgaattttctggcaaatatgaaggtaaagaccgaatggtagtaagagaagaagctactatcgaactcgaaacacttaatctacttgaaaaaattgaaccaataatacattccataggacgctgtgatagatgtgacacaattgttgaacctttagtcagtaagcaatggtttcttgaaatgaaaccattagctgaacctgcaatacaggcagtaaataatggagatataaaaataatacccgaacgtttttcgaaaatatatcttaactggatgaataacataagagattggtgtataagtagacagttatggtgggggcataggattccagtttggtattgtaatctttgtgatggtatgactgtgtcaataactgatccccaatcttgtagtagttgtaaatcaaaagatatttatcaagattctgatgttttagacacatggtttagctctggtttatggactcattcgactttaggatggcctaattctactaaagatttaaataaattttatcccacaagcgttatggaaacaggatatgatattttgtttttctgggttgctcgaatgattatgtttggtatagaaaatatgggtgtatctcctttccatactatttatttacatggattattga

SEQ ID NO: 307286 - DNA, 874 bp, Unknown
  Bacterial polypeptide expressing nucleotide sequence isolated from the Sargasso Sea
ggtctatggccatttgcgactttaggttggccagaaaaaactgcagaagtagaaaaattttatccaacgagcgttttagttactggttttgatatcatatttttctgggttgcaagaatgattatgatgggaaccgagtttttaaaagaagagccttttaaaaatatatacgttcacgcacttgttagagatgaaaagggtcaaaaaatgtctaaatcaaagggcaatgtaattgatcccttagaacttattgaaaaatatagtgctgatgctttaagatttacgcttttgtcaatggcatcgccaggtcgtgatgtaaaattgtctgaagacagggttaaaggttatagaaatttcttgaataaagtttggaatgccaacaattttttaagacaaaatgagtgtgattttagtgatattaaaaaacctgaaaatcttaaattaacaattaataagtggatattatctgaacttgttaaaactaaaaacgagactgaaaacagtttaaaaaactatagatttgatgaagcagcaaagaatatttatcagtttgtgtggcattcattttgtgactggtatttagagctttctaaaactgtatttaattctaataatgaggaagatattaaggagttaagacaaacttcatcttatatatttagagaaattttaataatacttcatccatttattccatttgttacagaggagatttggttgaataacaagttagataaaaatggaggtgaatttttaatgcatgctaattggttaaaaggtgattatcatgaaaaaaaatcttatgatgaaattaataatattattaattttattacatccataagatcatttaaaaatgaattaaatatcagtc

SEQ ID NO: 307287 - DNA, 635 bp, Unknown
  Bacterial polypeptide expressing nucleotide sequence isolated from the Sargasso Sea
cgaccctacgaaaggaacgggtgctgtaaaaattacccccgcacatgactttaatgactgggaggttggtgagagacacgacctaagagtaattaatatttttgacaatagtgctaatattgcaattgaagctaatgaagattttttaaatggaatagatccttctgtagatattttccaattaaatggacttgaaaggtttgaagcaagaaaaaaaattttacagattttgaatgaacaaggttttgttaaaggagagaaaagagacttacatttcgttcctcacggtgatagatcaaaagttgtagtagagccttttttaaccactcagtggtttgtagattcaaaaaaaattgttaaggaagctatagacgttgttaagaaaaatgaggtcgaaattattccagaaagagataaaaaggtttatttcaattggcttgaaaatattgaaccctggtgtatttccagacaattatggtggggacaccagattccagtttggtacgatgatgaaggaaatgaatattgcgctgaaaatttaaaagaagctcaaaaattagcaggacacgataatatctatcaagaccctgatgtgcttgacacctggttctcgtccggtatatggccgattggga

SEQ ID NO: 307288 - DNA, 751 bp, Unknown
  Bacterial polypeptide expressing nucleotide sequence isolated from the Sargasso Sea
gagggaagtttatggcatattaaatatccaatagataataataatttcattgttgttgcaacaactagacctgaaactatgttaggagactcagctgtagctgtgcatcctgatgattcaaggtataaagatttaattggtaattattgtaatcttccacttgtgggaagagaattgcctattattgctgatgaatatgctgatcctgaaaaaggatcaggtgcagttaaaattactcctgcacatgattttaatgattttgaagtaggcaaaagacatcagcttgaatttattaatgtttttgatcagtttgcaaaaataaatgacaatgcccctaaaaaatatcaaggattagataggtttgaggctcgtaaattaattttaggagaacttaaagatttaggtcttctcataaaagaagaaaaacaagatatggttgtgccatacggtgatagatcaggtgtaataattgaaccttggctcactgatcaatggttttgcaatgccaagaaattatctattgatcctattaaatctgtaaaggaagccaaaacaaattttgttcctaaaaattgggaaaatactttttttaattggatggaaaatatccaaccttggtgcatttccagacagttatggtgggggcatcaaataccagcttggtacggccctgataaaaaatgcttcgtggctctatcagttgatgatgcaaatatgatggcaaataaacattacggcaaagaagtaaaat

SEQ ID NO: 307289 - DNA, 709 bp, Unknown
  Bacterial polypeptide expressing nucleotide sequence isolated from the Sargasso Sea
cctattattgctgatgaatatgcagatcctgataagggatcaggcgcagtgaaaattactcctgcacatgattttaatgatttcgaagtaggaaaaagacacaatttagaatttattaatatttttgatcagtttgctaaagtgaatcaaaatgcgccaactaaatttcaaggcctagatagatatgaagcgagaaatttaatattagaggagttagataaattaagccttctcataaaagaagaaaaacaacaaatggttataccttatggtgatagatctggagtggtgattgaaccttggttaacagatcaatggttttgtaacgcaaaaaaattatcaattgatccaattaattcagtaaaactaaataaaacgaattttgttcctcaaatttgggaaaaaactttttttaattggatggaaaatattcaaccatggtgtatttcgaggcaactgtggtggggtcaccaaatacctgcatggtatggtccagataataaaatttttgtatctttatcaatagaagatgcaaaattaatggcaaacaaacattatggtaaaaatgttgatttaaaacaagatgaagatgttttagatacttggttttcttcagcactttggacattctcaacattagactggccaaatcaaacgtatgaactagatcgattttatccaggaaatgtcttggtgacaggatttgata

SEQ ID NO: 307290 - DNA, 942 bp, Unknown
  Bacterial polypeptide expressing nucleotide sequence isolated from the Sargasso Sea
ttagaaaattggtcaaaaacatattttcaatggatgaacaatatagaaccttggtgtatctcaagacaactttggtggggtcatcaaatcccagcatggtatggaccagatagaaaaatatttgttgcagaaaatcaaaaaaaagcagaacaacaggcaaagaaattttataaaaagaatgttaatttaaaaagagatccagatgttcttgatacttggttttcctcgggtctttggccttttgctacactaggttggccttcaaaaaattattttttaaaaaaattttaccccacatcagttctagtaactggttttgacataattttcttttgggtcgctagaatgatgatgttgggtatgcaatttttaaacaaagaaccatttaaagaagtttatgtccatgctcttgtgagagatgagaaaggccaaaaaatgtcaaaatcaaaaggaaatgtaattgatcctttagttcttatagatagttacagcgctgatgctttaagatttacattgttatctatggcatcacctggaagagatgtaaaactttccgaacaaagagttaaaggatatagaaattttttaacaaaaatatggaatgttaataattttcttaaagtaaataagtgcagttttgatggggcaattaagcctaaaagtttaaaacttaatataaataagtggatctatagtgagcttattgaaacgaaaaatttaacagaaaaattcattaaaaattatcgttttgacgaagctgcaaaaaccgtttataaattcgtttggaacagctactgtgattggtacttagaactttctaaaactattttattttcaaaaaaaaacaaagatattgatgaagtgaagaatacatctggtcaaatttttcaggaaatattaatattattgcatccctttataccctttattactgaagagctg

SEQ ID NO: 307291 - DNA, 724 bp, Unknown
  Bacterial polypeptide expressing nucleotide sequence isolated from the Sargasso Sea
atgaagaaaaactatgaaccaaaatctactgaagtaggtatctacaaaagatgggaagattcaggttttttcgaggcaaagcctgatgaatccaaagagcctttctgcataatgatccctcctccaaacgtgactggtacgcttcatatgggacatggttttcaaaatacattaatggatgctcttataaggtttaagaggatgtccggatacgatactctttggcaagttggtgttgatcatgcaggaatagccactcaaatggttgttgaacgacaactagaagttgaaggcacatctagagaagaaattggaagagagcaatttgaaaaaagagtttggggttggaaagaaaaatccggtaataaaataacccaacaacttaggcgtttaggagcttcagttgattggtcaagagaagctttcaccatgagcgatgattttagctcggccgtaaaagaagtatttataaaactctatgatgaaggtttaatttacagaggtgaaagactggtcaactgggatactgttctaggaactgccctctctgatttggaagtttcctctgaagaagagaatggattcttgtggtacatagattatttgactgaaaacaacaacaaaataacagttgctactacaagacctgagacattgcttggagatacagcaattgcagtaaatccggatgaccataaatttaaaaaactgataggaaaaaggc

SEQ ID NO: 307292 - DNA, 922 bp, Unknown
  Bacterial polypeptide expressing nucleotide sequence isolated from the Sargasso Sea
agtatttgtcgatttatttaatgaaggaataatttatagagataaaagattagtaaactgggacccaaaattactgactgcaatttcagatttagaagttgagcaaaaagaacaagagggaagtttatggcatattaaatatccaatagataataataatttcattgttgttgcaacaactagacctgaaactatgttaggagactcagctgtagctgtgcatcctgatgattcaaggtataaagatttaataggtaattattgtaatcttccaattgtaggaagagaattgcctataattgccgatgaatatgctgatcctgaaaaaggatcaggcgcagttaaaattactcctgcgcatgattttaatgattttgaagtaggcaaaagacatcagctggaatttattaatgtttttgatcagtttgcaaaaataaatgacaatgcccctaaaaaatatcaaggattagataggtttgaggctcgtaaattaattttaggagaacttaaagatttaggtcttctcataaaagaagaaaaacaagatatggttgtaccatacggtgatagatcaggtgtaataatcgaaccttggctcactgatcaatggttttgcaatgccaagaaattatctattgatcctattaaatctgtaaaggaagccaaaacaaattttgttcctaaaaattgggaaaatactttttttaattggatggaaaatatccaaccttggtgcatttccagacagttatggtgggggcatcaaataccagcttggtacggtcctgataaaaaatgctttgtagcactatcagttgatgatgcaaatatgatggcaaataaacattacggcaaagaagtaaaattaattcaagatgaggatgttttagatacttggtttcttcagcacttggacctttct

SEQ ID NO: 307293 - DNA, 271 bp, Unknown
  Bacterial polypeptide expressing nucleotide sequence isolated from the Sargasso Sea
atggacaagacttatcaacccgatcgcatcgaacaggcctggtatgaaaactgggaaaaagccggttatttcaagccgtccggccagggtgattccttttgcatcatgattccgccccccaatgtgaccggcagcctgcacatgggccacgcctttcaggacaccatcatggataccctggtgcgttaccgacgcatgcagggtcgcaacaccctgtggcaggtaggtaccgaccatgccggtatcgccacccagatggtggtggagcgca

SEQ ID NO: 307294 - DNA, 711 bp, Unknown
  Bacterial polypeptide expressing nucleotide sequence isolated from the Sargasso Sea
aatgagttttgataaatatgagcataataatgttgagaataaaatctatgattattgggaaaaaaatgaattatttaaaccaaaagaaaattcaaaaaaattctcaattgtaatccctccaccaaatgtaactggaagcctgcacatggggcatgctttaaataattcaattcaagatgttttaacaagatttcatagaatgaataattatgaaactttatggcaaccagggacagatcatgctggtattgcaacccaagcattagttgaaaaaaaacttgcaaaagacggtgttaaaaaaaatgatttaggtagagaaaaatttatagaaaaagtatgggaatggaaaaatgagtatggagatataatcataaaccaacttaaaaaactcggatgttcatgtgattggtctcgtaatgcattcacaatggatgagaatttatccaaatcagtcctaaaagtatttgttgatctttataataagaaattaatctacaaagcaaaaaaacttgtaaattgggatgttgttttaaaaacagcaatatctgatttagaagttgatcaacgtgaagtaaattctcaactttattatataaattatcctatagaaaattctgataaatttataacaattgcaacaaccagacctgaaactatgttgggagatactgcaatagcagttaatccaaaagacgataggttaaaagatat

SEQ ID NO: 307295 - DNA, 868 bp, Unknown
  Bacterial polypeptide expressing nucleotide sequence isolated from the Sargasso Sea
taatgcacctagtgattatgttggattagatttatttgaggcacgtaaaaaaatcttaaacgaattaaaagaaaaagaattttttgtaaaagaggaaaatattaaaaacaaagttccttacggtgatagatctaattctgttatagaaccctttctaactgaacaatggttcgttaatgcaaaaaaattatctattaaagctaaacaaatagttaagtctaaaaaaacaaatttctttccagaaaattggtccaaaacttattttcaatggatgaacaatatcgagccttggtgtatttctaggcaactttggtggggtcatcgaataccagcttggtatgggccagataaaaaaatatttgttgcaacaaatgaagcagatgcaaaaaaacaagctaaaaagttttataaaaaagatgttaaaattaccagagatcctgatgttttagatacatggttttcatctggtttatggccatttgcaacattaggttggcctgataaaaaagattttgttaaaaaattttatccaacaactgttttagttactggctttgatattatatttttctgggtagctagaatgatgatgtttggaatggaatttttaaacaaagaaccatttaaagatatttacgttcatgctttagtaagagatgaaaaaggacaaaaaatgtctaagtcaaaaggaaatgtaattgatccattagatttaattgaaaagtatagtgcagatgctttaagatttactcttctttcaatggcatcgcctggaacagatgttaaactttcggaagatagagttaaaggatataggaactttttaaataagctatggaatgctaataattttttaattacccaataa

SEQ ID NO: 307296 - DNA, 774 bp, Unknown
  Bacterial polypeptide expressing nucleotide sequence isolated from the Sargasso Sea
gtggcaacctggaacagatcacgctggaattgccactcaggcattagttgaaaaaaaactagctaacgatggaattaaaaagaatgatttaggtagagacaaatttatagaaaaagtttgggaatggaaaaatcagtatggtgatataataattaatcaattaaaaaaattaggttgttcatgtgattggtcaagaaatgcatttacgatggacgataatttgtcaaaatccgttataaaagtctttgttgatctttataaaaaagatttaatttataaatcaaaaaaattagtcaattgggatgtggttcttaaaactgctatttctgacttagaggttgatcaaagagaagtaaattcaaaattatatcatataagatatccaatagaaaattcagatgaatttataactatagcaacaactagacctgaaactatgctgggtgatacggctatagccgtaaaccctaaagacgatagatataaatcactagtaaataaatttgttacaattccattagttgagagaaaaataaaaatcattgaagatgattatgccgatcctgagcaaggtacgggtgcagttaaaattacaccagctcatgactttaatgattatgaagtaggtcaaagaaataatttagaaattttaaatatatttacctctgatggtaaaattaatgaaaatgcacctaaagaatttattggtttagatagatttgaagctagaaaaagattactgaaaaaactaaaagaaaaagattttttagttaa

SEQ ID NO: 307297 - DNA, 852 bp, Unknown
  Bacterial polypeptide expressing nucleotide sequence isolated from the Sargasso Sea
agttatcaaagtttttgtagatttacacaataaaaaattaatttataaagcaaaaaaattagtaaattgggatatagttttaaaaactgcaatttctgatttagaagttgatcaaagggaagttacttcaaaactttattatattaagtataaaatagaaaattcatctgattttattactatcgcaacaacgagacctgaaactatgcttggtgatacagcaatagctgtaaacccgaatgatgttagatataaaaaatttattaatagattcgcaatattaccaattgtaggaagaaagttaaaaattattcaggatgaatatgctgatcctgatcaaggtacaggagccgtaaaaatcacaccagcacatgattttaatgatttcaaagttggagaaagacaaaaactcgaaataataaatattttaagtaaagatggtaaaattaatgctaatgcaccggtgaaatatcaaaaccttgataggttcgaagctagaaaaaaaatattggaagaattaaaaacattacaaatctttgttaaagaagaaacaataaaaaacaaagttccttatggagatagatcaaactctataatagaacctctgcttacagaacagtggttctgtgatgcaaaaaaattatctattaaagcaatgaaaattgttaaaaataaaaaaacaaatttttatccgtctaattggtccaaaacttattttcaatggatgaataatattgaaccatggtgtatatcaagacaactttggtggggacatcagattcccgcgtggtatggcccagataaaaaaatttttgttgctgaaaatcaaagagacgctgagataaaagctaa

SEQ ID NO: 307298 - DNA, 566 bp, Unknown
  Bacterial polypeptide expressing nucleotide sequence isolated from the Sargasso Sea
aatgaacaaacaatataagccgagagaaattgaagaaaagatttataattcttgggagaagacgaaatcttttttagcaaaagaatctacatcaaaattttcaatagtgttgcctccacctaatgtaacaggaacattacatatgggccatgcattccaacatactatcattgatattcttgttagatatcatcgtatgcttggtaagagcgttttatggcaacccggtactgaccatgctggtattgctacacaactagtggtagaaaatagacttaaaagcttgggcaaagatatcaaaggccttagtcgtgatgaatttattgatgaggtttggaaatggaaagagatttctggaaacacaattatcaatcagacgaaaaggctaggttcctctgcggattggtcaagaaatagattcacaatggatgatgacttatcagaaaatgttagagatatctttatagaactttatgatagtgaattaatttatagaggtaatagacttgtaaactgggacattaagcttccaacagctgtatctgatttagaagttataaatgaag

SEQ ID NO: 307299 - DNA, 924 bp, Unknown
  Bacterial polypeptide expressing nucleotide sequence isolated from the Sargasso Sea
cgctttggcattttcaacactaggttggcctgaggaaactgctgaattagaaaaatactatccaacgtcagctcttgttaccggttttgatattatatttttttgggttgctagaatgatgatgatgggcctttattttacaaaaaaagttccatttaatgaggtttatgtgcacgcattggtaagagacgagaagggtcaaaaaatgtcaaaatcaaaaggcaacgtaatcgacccgctagttttgatggatgagtttggcgcagatgctttacgcatggcattgtgctctatggctgcacaaggcagagatattaaattatcaaaacaaagaattgaaggttataaaaattttattaacaaaatttggaatgcagtaaaactatgcgagttaaataattgcttctatcaagaaatagactctaaaaagacaaaaaatatttttaataaatggatattgtttgaatatgaaaattgtcgaagcaaaactcaactcgctttagaaaattatcgatttaatgaggcagcaaatgaactttataaatttacttggaatgttttttgtgactggtatctagaattctcaaaagttatttacttatctaaaaatgatacagacattaaggaaacgagaaacataacttcatatgtattatcaaatatcataataatgtttcaccccattatgccattcttcacagaacatttatggcatcaggcatcaaatattttaaagaacgacatagtaaaaataaataaatcggaatggccaaaaactataagcgtagataaaaaggataataataaaatcaacttattacttgagtttatttcgtcaataaggtctaccagatctgaaatgaatgtaccagcaaacgcagagatagatataaattactcttcgattagcaatgaattaggtac

SEQ ID NO: 307300 - DNA, 789 bp, Unknown
  Bacterial polypeptide expressing nucleotide sequence isolated from the Sargasso Sea
ggttgtgtgaagattacacctgcacatgatttcaatgattttgagatgggcaaaagacatggacttgaagtgatcaatatcttaaattttgatggcactctaaatgacaaagttccagataaatatcaaaacttaaatattgaagacgcaagaaaacttatcctagaagaccttaatacaattggtcaactgaataaaactgagtcttataaagtccagatcccaaggagtgaaagaagtaattctatccttcaacctttgttgactaatcagtggttcgttaatgttgaaaaactttcccaagaagctatcagagttgttaaggaaaatgagacagagtttatacctaagaattgggaaaatacctattttgcttggatgaaagatatacaggattggtgtatcagtaggcagttgtggtggggacatagaataccagcctggtttgataaggatgataatttgtatgttggggaatctgagaaagccgtaagagaaaaatataatctcgataatatagaattgaaacaagacgaggatgttctggatacttggttttcttctgctttgtggacgttttcaactcttggatggccaaaaaaagagaacttactttcaagatatcatcctacaagtgtcttagtgacggggtttgatatcattttcttttgggtagcaagaatgataatgatgactactcatttcatcaatgaggtacccttcaagaaaatattaattcatggtcttataaaagattcagaaggccaaaagatgtctagatctaagggt

SEQ ID NO: 307301 - DNA, 853 bp, Unknown
  Bacterial polypeptide expressing nucleotide sequence isolated from the Sargasso Sea
ttttacagaagctggtaaaaataaagaaaacgctccaaaacattacataggtcttgatcgctctgaagcaagaaaacaaattttaaaagagcttaaagaaaaagaattttttgtaaaagaagaaaatattaaaaataaagttccttacggagatagatctaattcgattattgaaccttttttaacagaacaatggtttgcggatgcaggtaaattatcagttaaggctaaagaagttgtaaattcaaagaaaacaaatttctttcctgagaattggtcaaaaacttattttcagtggatgaataatattgagccatggtgtatttcaagacaactttggtggggacatcaaatacctgcttggtatggtcctgataataaaatttttgttgcttacaatgaagatgaagcaaaacaattagctaacaaacattatggtaaagatgtcgagttaaacagagatcctgatgttttagatacatggttttcttctggtctttggccatttgcaacacttggatggcctgatgataaaaaatttgttgagaagttttatccaacctcagttttagtaactggttttgatattattttcttttgggttgcaagaatgattatgtttggaactgaattcttaaacaaagaaccttttaaagatatttatgttcatgctttagttagagatgaaaaaggacaaaaaatgtctaaatcaaaagggaatgttattgatcctttagatttgattgaaaaatatagtgcagatgctttaagatttaccttactttctatggcttcacctggaactgatgttaaactttctgaagatagagttaaaggttatagaaacttttta

SEQ ID NO: 307302 - DNA, 860 bp, Unknown
  Bacterial polypeptide expressing nucleotide sequence isolated from the Sargasso Sea
cgaccctatctgacagatcagtggtatgtcaaagtaaaaccattagcggagccagcaataaaagccgtagaagatggatcgattaaattcgtcccaaagaactgggagaagacgtattttgaatggatgcgaaatatagaagactggtgcataagtcgccagctatggtggggtcatcgcattcctgcttggtatgatgatgatggcaacatttttgttgggtatagcgaaaaagaggtcagagaaaaaaataatctgggcgagagaaaattaaaacaggatgaggatgtcttagatacctggttctcatcctcactttggcctttttccacactaggttggccagagaaaaccgaacgtcttcaaaaattttatccaaccaatgtgttagtaacaggctttgatattattttcttttgggtagcacgtatgatcatgatgggattaaaatttaccggagaacctcccttcaaagaagtctatatacatggattagttcgcgactctgatggacaaaagatgtctaaatcaaaaggaaatgtgcttgatccgcttgatttgattaatggtattacacttgaagatttagtcacaaaacgcacagtgggattaatgcaacctcagctagcggaaaaaattgaaaaatcgactcgtcaacatttcccagatggcattaatgcatatggtacagattcactaagatttacatttgcatcgcttgcaacacagggaagggatatacgatttgatattggacgcatcgatggctacagaaatttttgtaataaaatatggaatgcaacaagatttgtactaatgaatattgaatcgcaaaaaatcgatatcaataacaataagaa

SEQ ID NO: 307303 - DNA, 838 bp, Unknown
  Bacterial polypeptide expressing nucleotide sequence isolated from the Sargasso Sea
gcgtggcaaacgggcattgtggcaagtgggcaccgaccatgcgggcattgccacgcagatggttgtggaacgccagttgacccaacaaggtcaaaaccgacatgatttgggccgcgatgcattcctcgaacaagtttgggattggaaacacaccagcggcggtcgcatcaccgaacaaattcgacgcttgggcgccaccatcgattggtcacgcgaacgcttcaccctcgatgaagggctttccaaagcggtacaggccgcctttattcaactgcaccgtgaaggcctgatctaccgaggcaaacgcctggtcaactgggataccaaactgcaaaccgccatctcggatctagaagtggtcaaccgagaagtgcaaggccacttatggaccctggcctactcggttgagggacatgaaaacgcggtgatccccattgccaccacccgtcctgaaacactctttggcgacaccgccctggcggttcatccagaagacccccgctatcagcaatggattggccaccaagtaatcgtgcccatctgccaacgacgcatcccggtgattgccgatgacagcgtggacactgcattcggcacaggcgccgtgaaaatcacccctgcccacgatttcaatgaccatgccatgggccaacggcacggcttgcccaccgtgagcattttgcatctagatggcacactgaatactgaagtacctccagcctttcagggattgtcggttcaggcggcacgcacccaagtcattcataccctggaagcacagggcatgctgcttgagacacaaacacaccaccataccgtaccttttgagatcgctctg

SEQ ID NO: 307304 - DNA, 535 bp, Unknown
  Bacterial polypeptide expressing nucleotide sequence isolated from the Sargasso Sea
aatggaaaaaatatatcaacctgatcagattgaaacaaagcattaccaagattgggaagcacaaaattattttgctcctggtggcggacctgagtcttactgcattgttattccccctccaaatgtaacaggaacattacatatggggcatgcgtttcaacacaccattatggatgccctgattcgctacaatcgaatgcaagggaaaaacaccctctggcaaccaggaactgatcacgcgggcattgcaacacaaatggttgtagaacgcctcctaaatcaagaaggaaaaacacgacatgatctaggaagagaagcctttgtcaaaaaaatctgggaatggaaagaatattctggcggccatatttgtaaacaaatgcgtcgcttaggtgactcccccgattggagtagagagcgattcacaatggatgagggcctatctgaggctgttcaagatgttttcattcagctttatgaagaggacttaatttatcgtggaaagcgcctcgtaaattgggatcccgtattgcaaaca

SEQ ID NO: 307305 - DNA, 595 bp, Unknown
  Bacterial polypeptide expressing nucleotide sequence isolated from the Sargasso Sea
tctggccaagacctacgacccggttggtacggaagctcgttggcagcaggcctgggaggaccagggggcgtttcatcccgatcccaaagcgcctggtgaaccgttttcggtggtgatcccgccgccgaacgtgaccggcagcctgcatatgggccatgccttcaacacagccctgatcgacacgatcgtgcgctaccagcgcctggcggggaagaacgtgctctgcctgcccggcaccgaccacgcctcgatcgcggtgcagacgatcctcgagaagcagttgaaagatgagggcaagacccgccacgacctgggccgggatgccttcctggagagggcctggcagtggaaggccgaaagcggtggccgcatcgtgggtcagctgcggcggttgggttattcggtggattggaagcgccagcgcttcacccttgatgagggtctcagtgaggcggtgaaggaggccttcgtgcggctgcacgagcaggggctgatctaccgcggtgaatacctggtgaactggtgccccgcctcgggctcggcggtgagcgatctggaggttgagatgaaggaagtggacggccacctctggcat

SEQ ID NO: 307306 - DNA, 973 bp, Unknown
  Bacterial polypeptide expressing nucleotide sequence isolated from the Sargasso Sea
aggatgttcttgtgattggtctcgtaatgcgtttacaatggatgaaaacatctcaaaatctgtaataaaagtatttgtagatctatataataaaaatctaatttacaaagataaaaaactagtcaactgggatactgttttaaaaactgcaatttctgatcttgaagtagatcaaagagaagtaaactcaaaaatttattatatcaactacccaattgatggaactgatgaatttataacaattgcaaccacaagacctgaaacaatgcttggtgatactgcgattgcagtaaatcctaaagatgatagatttaaatcatttgttgggaaaactgtttcaataccaatagttggaagaaaaattaatattatagaagatgattatgctgatcctgatcaaggaactggagcgctaaaaattaccccggctcatgattttaatgactatgatgttggacaaagaaataatcttgagattattaacatatttactgagtctggaaaaattaatgaaaatgcaccaaaaaaatacattggtctagatagatttgaagcaagaaagaaaattttaaaagaacttaaggataaagaattttttgttaaagaagagaacattaaaaataaagttccatatggagatagatctaattctataattgaaccatttttaacagagcaatggtttgctgacgcagaaaaactgtcaattaaagcgaaagaagttgttaattcaaaaaaaacaaatttttttcctgaaaattggtcaaaaacttattttcaatggatgaataatattgaaccatggtgtatttcaagacaactttggtgggggcatcagataccagcatggtatggacctgataaaaaaatctttgtagcaaacaatgaagaagaggcaaaaaaattagccaaaaaacactatggtcaagatgaaaatttaattcgtgattctaatgtatggatacatggtctc

SEQ ID NO: 307307 - DNA, 769 bp, Unknown
  Bacterial polypeptide expressing nucleotide sequence isolated from the Sargasso Sea
atgagttttgataaatacgagcataaaaatgtagaaaagaacatctacgattattgggaaaaaaataaattatttaaaccaaaagaaaattcaaaaaaattctcaattgtaatacctccaccaaatgtaactggaagcctacacatgggacatgctttaaataattcaatccaagacgttttaacaagatttcatagaatgaataattatgagactttatggcaaccaggaacagatcatgcaggtattgcaacccaagcattagttgaaaaaaaacttgcaaaagaaggagttaaaaaaaatgatttaggaagagataaatttatagaaaaagtatgggaatggaaaaatgagtatggtgatataataattaatcaacttaaaaaacttggatgttcttgtgattggtctcgtaatgcttttacgatggatgaaaatttatctaagtcagtaataaaagtatttgttgatctttataataaaaaattaatctacaaagcaaaaaaacttgtaaattgggatgttgttttaaagacagcaatatctgatttagaggttgatcaaagagaagttaattctcaactttattatataaattatcctatagaaaattctgataaatttataacaattgcaacaacaaggcctgaaacaatgttgggagatactgcaatagcagttaatcctaaagacgatcgatttaaaaatattgttggaaagttagttaaaatacctttagcaaatagaaaaataaaaataataacagatg

SEQ ID NO: 307308 - DNA, 880 bp, Unknown
  Bacterial polypeptide expressing nucleotide sequence isolated from the Sargasso Sea
gcagttatcaaagttttcgtagatcttcataaaaaaaagttaatttataaggctgaaaaattagttaattgggacacagttttaaaaactgctatatccgatttagaagttgatcaaagagaagttaattctaaaatttattatattagatatccaatagatggaacaagtgaatatataactatagcaactactagacccgaaactatgcttggagatacagctgttgccgtaaacccaaaagacaagagatataaaaaatatgttggcaaaactgtaacaatcccgattgttggtagaaaaatcaaaattatagaagataattatgcagatccagaacaaggaactggagcactaaaaattacacccgcacatgacttcaatgattatgatgttggtaaaagaaataaattagaaattattaatatttttactgaagatggaaaagttaataataatgcaatttcatcatacgttggtttagatagatttgaggctagaaaaaaaatacttaatgaacttaaagaaaaagattattttgttaaggaagaaaatattaaaaataaagttccatatggagatagatcaaattctataattgaaccttttttaacagaacaatggtttgcagatgcaaagaaattatcaattaaagcaaaaaaaatagttaaaaataaaaagacaaacttttttcctgagaattggtcaaaaacttattttcaatggatgaacaatattgagccatggtgcatttcaagacaattatggtggggccatcaaatacctgcttggtatggacctgataaaaaaatatttgttgaattaaatgaaagtgatgcaaggaaggcagcaaagaaattttataaaaaagatgtaaaac

SEQ ID NO: 307309 - DNA, 732 bp, Unknown
  Bacterial polypeptide expressing nucleotide sequence isolated from the Sargasso Sea
tatgagtttagataaatattcacatttagaaactgaggatcaaatctactcgtattgggaaaaaaataatctctttaaaccagtcaaaaataaaaagaaattctctgttgtaattccacctcctaacgtaacaggaagtttacatatggggcatgcattaaataattcaatacaagatttgttaattagatatcatcgaatgaacaattttgagactttatggcaacctggaactgatcatgcaggtattgcaactcaggcattggtagaaaaaaaattaagtagcgaaaatattaaaaaagatgatttaggcagagaaaaatttattgaaaaagtatgggattggaaaggtcagtatggagacataattattaatcaattaaaaaaactaggatgttcttgtgattggtcaagaaatgcctttactatggatgaaaatttatcaaaggctgtcattaaagtatttgtagatttgtacaaaaaaaaactaatttataaagctgaaaaacttgtaaattgggataccgttttaaaaacagcaatttctgatttagaagtagatcaaagagaagttaactcaaaaatatattatattaaatatccaattgatggatctaatgaatttataacaatagctactaccagacctgaaaccatgttaggagatactgcaattgcagtaaacccaaaagataaaagatataaaaagtatgttaaaaagtttgctgttat

SEQ ID NO: 307310 - DNA, 857 bp, Unknown
  Bacterial polypeptide expressing nucleotide sequence isolated from the Sargasso Sea
atggtggggtcatcaaatcccggcttggtatgacaaggatggaaaagtatatgttggtagttctgaagaagaaataagaaaagaaaataacctagatgagcaagttaagttaaaacgtgatgaggatgtattagacacttggttttcgtctgcattatggacattttctaccctaggatggccaaaaagtaggaaactgcttgatcgctatcatcccactgatgttttagtgactggatatgacattatctccttatgggtctcaagaatgcttatgatgacaactcacttcattaatgaagtgcccttcaaaaagatctttgtccacggtctaataaatgactctagtggacaaaaaatgtctaaatctaaaggaaatataatcgaccctctcgatatcatagatggaattgacttaaagagtcttattgagaagagaatatcgggtttgatgcagccaaaaatggaggaaaaaataaagaaccagacaattaaagaatttcctgaaggaattaaaccttatggaacagatgcattgagattgacattctgttccttagcttctggaagcagagaagttcggttcgattttaagagagttgaaggatatagaaatttctgtaataaactttggaatgcatcaaggtttatccaaatgcaattagataattttgaaaactttgaaaggacaaagccttctggaattttagacgattggattaatgcaagaatggatattgctatagaaaaaacaaatgatgctttgagtgactatagatttgatctagcgactcaatcaatttatgaatttatttggtatgaactttgtgattggtatatagaattttgtaagatca

SEQ ID NO: 307311 - DNA, 883 bp, Unknown
  Bacterial polypeptide expressing nucleotide sequence isolated from the Sargasso Sea
aaggccgtgcaagaagtgtttgtgcgtctgtacgaagacgaattgatttatcgcggcaagcgtttggtcaactgggatccaaagctgcacacagctatctctgatttagaagtggaaagcaaagaaaaacagggccatatgtggcacctgcgttatccactggccgacggtgagctaaccgccgatggtaaagactacttagaagtcgctaccacacgtccagaaactatgctcggcgacagtgcggttgcagtccatcccgatgacgaacgttatcaagcgttgataggcaaatatattctgctgccaatagtaaatcgccgcattcctatcgtggccgacgattacgtcgatatggcctttggtacaggttgtgtgaagatcaccccagcccatgactttaacgactatgaagtcggtaaacgtcacaacctgcccatgttcaacgtgctgaccttagatgccgccattcgcgcaagtgccgaagtggtgaactctgacggtacctttaacaaaacgctcgatggcagcctgcctgtacgctttgctggacttgaccgttttaaggcgcgtgacgctatcgtcgccgaatttgaaaccttagggttgctcgaaaaaatcgcgcctcacgccttaaaagtcccttatggtgatcgttcaggtgtagttatcgaacctatgctgaccgaccaatggtatgtggctgttgcgccaatggcgaaaaccgctatcgaagccgttgaaaatggcagcatcaagtttgtgccgcagcaatatgagaacatgtacttctcttggatgcgtgatattcaagactggtgtatttcgcgtcaattatggtggggtcaccgcatccctgcatggtacgacgaaaatggcaaag

SEQ ID NO: 307312 - DNA, 853 bp, Unknown
  Bacterial polypeptide expressing nucleotide sequence isolated from the Sargasso Sea
cgtcaaggtgacgcccgcccatgaccccaacgacttcgccattggccagcgccatggattgccgttgatcacggtgatggcaaaggacggcagcatgaacaacgaagctggccgctttgccggcttggatcgctttgaagcgcgcaaagccgtggtggcggcgatggaggcgcagggcttgctggtgaaggtggagccccatcgccacagcgttccctattccgatcgcggcaaggtgccggtggagccgttgctctccacccagtggtttgtcaaagctgaacccttagcggcccgctgccgtgaggccctcgatcaagccaagccgcagttcgtgccggagcgttggagcaaggtctaccgcgattggctcaccgacattcgcgattggtgcatcagccgccagctgtggtggggccatcgcatcccggcctggtttgtgatcagcgaaagcggtggccgctacaccgacaccacgccctatgtggtggcgcgcaatgaagccgaggcgctggagaaagcgcgcacccagttcggcgctgaggcccagattgagcaggacgaagacgctctcgacacctggttttccagtggcctgtggcccttctcgaccctgggttggcccgatcagaacgcggctgacctgcagcgttggtatcccaccagcctgctggtgacgggcttcgacatcatctttttctgggtggcccggatgacgatgatggccggcgcgttcaccggccaaacgccgtttgctgacgtctacatccacggcttggtgcgcgatgagaacaaccgcaagatgagcaaatcagccggcaatggcatcgatccattgctgctgattgatcgc

SEQ ID NO: 307313 - DNA, 847 bp, Unknown
  Bacterial polypeptide expressing nucleotide sequence isolated from the Sargasso Sea
agaccagtccggcggcaatatcagccgtcagatccgtcgcctgggttcgtccgtagactggagccgcgagcgcttcaccatggacgacggcctgtccgaagccgtaaaggaagccttcgtgcgcttgcatgaagacggcctgatctaccgcggcaagcgcctggtcaactgggacaccaagttgcacacggccatttccgaccttgaagtggaaaaccacgacgagaaaggcttcctgtggaacctaaagtacccgctggccgacggcgccaagaccgctgaaggtaatgattacctgatcgtcgccactacccgtccggaaaccatgctcggcgatgccgccgtggccgttaacccgaacgacgagcgctatcaggcgctgatcggcaaattcgtcgaactgccactggttggccgccgtatcccgatcatcgcggatgactactgcgaccctgagttcggcaccggctgcgtgaaaatcaccccggcccacgatttcaacgactacgaagtcggcaagcgccataacctgccgcttctgaacatcttcgacaaaaatgccgccgtattgccagcctgccaggtgttcaacctggacggcacgctcaacgacagcatcgacggcaagatcccggccgaatacgcaggcctcgaccgttttgaagcgcgcaagcagatcgtagctgccttcgacgctgccggtttgctggtcagcgttgacgaccacggcctgaaagtgccgaagggcgaccgctccggcaccgtgatcgaaccgtggctgaccgaccagtggtacgtgtccaccaagccgctggcagaacctgcgattgccgccgtggaagatggc

SEQ ID NO: 307314 - DNA, 934 bp, Unknown
  Bacterial polypeptide expressing nucleotide sequence isolated from the Sargasso Sea
aatgattaggaagagaagatttataaaaaaagtatgggattggaaaaatgaatttggtgacattataataaatcagcttaaaaaattaggttgctcatgcgattggtctagaaatgcatttacaatggacgaaaatctttccaaatcggttatcaaagtatttgttgaactttataataaaaaattaatttataagtctaaaaaacttgtaaattgggacgttgtattaaaaactgctatttcagatttagaagtagatcaaagagaagttaattctcaactttattatattaattatccaattgaaaattcggataaatttataacaatagcaactactagacctgaaacaatgttaggagatactgcaatcgcagtaaaccctaaagacgatcgtttcacaaatttaattggtaagcatgccattattcctttagctgatagaaagataaaaattatttctgatgattatgcggatcctgaacaaggtacaggtgcagtaaaaattactccagctcatgattttaatgattacgaagtaggtttaagaaacaaacttgaagtaattaatatttttactcctgatggaaagataaataataactctccagataaatataaaggattagatagatttgctgctagaaaattaattattaaagatcttgaggaaggtaattttttaaaaaaaatagaaaaattagtaaacaaagttccttatggagacagatctaattcaattattgaaccttatttgactgagcaatggtttgtagatgctgaaactttatcaattaaagctaaagaagttgttaataatggaaaaactaaattttttcctgaaaattggtctaaaacatattttcaatggatggataatattgagccgtggtgcatctcaagacaattatggtggggacaccaaatccccctg

SEQ ID NO: 307315 - DNA, 776 bp, Unknown
  Bacterial polypeptide expressing nucleotide sequence isolated from the Sargasso Sea
tatggatagatttgaggccagaaaggtaattgtgaaagatctggaagaacaggatttactgttaaaagtagagaaaaagaaaatagtgcagccttttggggatcggtcaaaagtagtagtagaaccttatttaacaaaacaatggtttgttgatactaaagctatagttgagccagcaatagaagcagtaaaagacgggaaaactaaaattttcccagaaagggataccaaaacctatttcaactggctagagaatattgaaccatggtgtgttagccggcagctttggtgggggcaccaaattcctgtttggtacgatgaggatggaaaccagtattgtgctgtttcagaggacgaagctaagaagatggctaaagggaaaaagcttattagagaccctgatgttttagatacatggttttcctctgggttatggccaataggaacactcggttggccagaagatactactgacctgaaaaaatattttcccactagtgttttggttactggttttgatattctatttttttgggttgcaagaatgatgatgatgcaattggttcttgtaaaacaaataccatttgaaaaggtttacgtacatgccctagtgagagacgaaaagggaaaaaagatgtctaagtcaataggtaatgtcttggatcccattgatcttataaatgaatacggggctgatgcagtaaggtttactcttacatcaatggctgtaatgggtagagatataaagttgtcaaccgaaaggatagtgggatatc

SEQ ID NO: 307316 - DNA, 895 bp, Unknown
  Bacterial polypeptide expressing nucleotide sequence isolated from the Sargasso Sea
tttggaactggttgtgtaaaaattacaccagctcatgatcctaatgactttttaattggggagaggcataatttagaatttattaatgttatgaatgaggacgcttccatgaatgagaatgttcctcccaaatatcaaaataaagacagatttatcgctcgagcagacatagtaaaagacctaaatgatttaaatcttttgcataaaacagaaaattataaaaataaaattgggttttccgagcgaggtgaagtcccaatagaattttttatgtctaagcaatggtttatgaaaatggaagatattgctaagccggccattaatgctgtcgattctggagaaattagatttcatcctgaacattgggttaaaacatataatcattggatgaaaaacataaaagactggtgcataagtaggcagctaatatggggacaccaaattccagtatggtatcacaaagaagataattcaaaattacatgtctctgttgaggggcctgacgatattgcaaattgggtccaagaaaaagatgtcctagatacgtgggctagctcatggctttggcctattggtgttcataactggccagataaaagtaaagatttagataaattttttccaactaatacattagtaacaggtcctgatattatctttttctgggtagctagaatgattatgactggttatgagtttttaggtaaaaaaccgttctcagatgtttatttcacatcgattttgagagatgatacaggtaaaaagttaagtaagtcgcttggaaattccccagacccgcttgatctttttgatgagtacggcacagatgctgttcgatttggtattatgttaatggcgccacaaggattgggatgttctttttttcaaagataga

SEQ ID NO: 307317 - DNA, 861 bp, Unknown
  Bacterial polypeptide expressing nucleotide sequence isolated from the Sargasso Sea
tatggcaccaggaactgatcatgcaggtattgcaactcaagcacttgttgaaagaaaacttgaaaaagaaaatttaaataaaaatagtcttggaagagaaaaattcattaaaaaagtatgggaatggaaaaatcagtatggagatataattatcaatcaacttaaaaagcttgggtgttcatgcgattggtcgcgtaatgcatttacgatggacgataatctatctaaatcagtgattaaggtttttgttgaacttcataaaaaaaaattaatttacaaagcagaaaaattagttaattgggacacagtattaaaaacagctatctcagatttagaggttgatcaaagagaaatgaactctaagatctattatataagatacccaattgaaaattcttctaattttataactattgctacaacaaggcccgaaacaatgcttggagatactgcaattgcagttaatccaaaagatgaaagatataaagagtatgtaggcaaaactgtcacaatacctattgtaggtagaaaaattaaaatcattaaggataattatgcagatcccgaacaaggaacaggtgcattaaagattacaccagcacacgactttaatgactatgaagtaggtcaaagaaacaagttggatatgatcaatatatttactgaagagggaaaaataaacgataatgcgcctcaggattatattggacttgatagatttgatgctcgtaaaaagttattagaagaacttaaagaaaaagaattttttgttaaagaagaaaatattaagaataaagttccttacggtgatagatctaattcagttatagaaccttttttgacggaacagtggtttgttga

SEQ ID NO: 307318 - DNA, 883 bp, Unknown
  Bacterial polypeptide expressing nucleotide sequence isolated from the Sargasso Sea
ctgcccccccaatgtgactggtagcttgcatatgggccacgcatttcaacaaacattaatggatatattaattcgctaccatcgtatgagtggtaatgatgcgctatggcagtgcggaactgatcatgctggtattgcaacgcagatggtggttgagcgtcaacttcaacaaaaaaatatttcacgttatgaacttggcagagaaaaatttattgatgaagtctggaactggaaggaaagctcaggtaatacaattaataatcaatctcgtcgtctcggtacatcaatggattgggcaaatgaacgttttacaatggatgatggattatcagatgcagtaaaagaagtatttatacagctctatgagaaagggcttatttatcgaggtaaaagattagttaattgggacccagtattgcataccgctatttctgatttagaagttatttcagcagaagaaaatggccatctttggcacatgcgttacccgcttaccgaatctataaaaggcatcgaatatcttgttgttgccacaacgcgacctgagacaatgttgggtgatagcgcagtggctgtccaccctgatgatgatcgctataaagcactcgttggcaaaaaagtatcactaccattaaccgatagaacaattccgattattgctgatgactatgttgatccagaatttggtagtggttgtgtgaaaataacaccggcacatgattttaatgactatgaagttggtgcaagacacaatcttgaaaaactgaatattttcactattgatgcggttattaatgatgaggcgccgaaaaaatatcaaggcctagatcgattcgatgccagaaaacaaattattgcagattttaaaaatgaaaactattag

SEQ ID NO: 307319 - DNA, 901 bp, Unknown
  Bacterial polypeptide expressing nucleotide sequence isolated from the Sargasso Sea
gacctcgaagtcgagaaccatgacgagaaaggtcatctctggcacctgcgttatccgctggccgacggctgcaagactgcagacggcctggattacctggtggtcgccactacccgtccggaaaccatgctcggtgacgccgccatcgccgtgcacccggaggacgagcgctacaagagcctgatcggccgtcacgtcatgctgccgctggtcaaccgcctgatcccgatcgtcgccgacgactatgtcgacctcgagttcggtaccggctgcgtgaagatcaccccggcgcatgacttcaacgactacgaggtcggcaagcgtcatcacctgccgctgatcaatatcttcgaccgcaacgccgcggtgctcgccaaggcccaggtgttcaacatcgacgggacgccgaacgacaagatcgatgcgaacctgccggacggctacgcgcacatggaccgcttcgatgcgcgcaaggccattgtcgccgagttcgatgccatgagcctgctggaaaagatcgacgaccacgcgctgaaagtcccccgcggtgatcgctccggcaccatcatcgagccgtggctgaccgaccagtggtacgtttccaccaaaccgctggcggagaaggccatcgccgccgtcgaaagcggcgagatccagttcgtgcccaagcagtacgagaacatgtacttcagctggatgcgcgacatccaggactggtgcatcagccgccagctctggtggggccatcgcattcctgcgtggtacgacgaagccggcaacgtctacgttggccgcgatgaagtggaggtacgcagcaagtacaacctctgcaacaacgtcgaactgcgtcaggacgaggacgtgctggacacctggttcagctccggcctgtggacctttt

SEQ ID NO: 307320 - DNA, 1012 bp, Unknown
  Bacterial polypeptide expressing nucleotide sequence isolated from the Sargasso Sea
aaccattgggtaaaaacatataatcattggatgagaaatattaacgattggtgtattagtcgtcaattatcatggggtcatcaaattcctgtttggtatcataaagacaatgtatccaaattacatgtctcagaaaagggtcctgatgataaagaaaattgggttcgagataaagatgttttggatacatgggcgtcttcatggctttggccatttgcagttcacaactggatagaaaaagacacttctataaagaaatattatcctacaaataccttggttacggggccagatattatttttttctgggtagctagaatgatcatgtcaggctatgaatttttgggagaagagcctttcaaaaatgtatattttacatctatcttaagagatgctaatggtaaaaaattcagcaaatcattaggcaattcacccgatccaataacattatttaaagagtttggtacagacgcagttcgttttggaactttattgatggctccacaaggattggatgttcttttttccaaagatagacttgaagttggaaagaatttcatgaacaagctatggaatgctgcgagatttacttttatgaatttgatagatggcattcctcctgacattgatctaagtcatgagaatttagatatatcagataaatggatcataagtaggtttgaagaaactgcttttaatgtaaataaagaattaaacaattatcgttttaatgaggcagctaaagctatttatgaatttacatggaatgacttttgtgattggtacgttgaaatagccaagattcgtctatatggagatgatccaaaaaaagcagatatcgctagaaccgttttgatacatgtcttgaaaggaattttaaccttgctacatccatactcgccatttatcactgaagagttgtggtcatattttaaaactaagaatgagaaggatctgattatatccccatggataaatggtaaagttttaaaaaatgagcaagtttttgatt

SEQ ID NO: 307321 - DNA, 787 bp, Unknown
  Bacterial polypeptide expressing nucleotide sequence isolated from the Sargasso Sea
atgagcctaagtaaatataatcataaaaaagttgaaaacaagatctattcttattgggaaaaaaataagctttttaaaccaaaaaaaaacaaaaaaacgttttcaattgttattcctccaccaaatgtaacaggcagtttgcatatgggacatgcattaaataattctcttcaagatgttttagtaagatatcacagaatgaataactttgagactctgtggcaacctggaacagatcatgctggtattgcaactcaggctttagttgaaaaaagtcttaaattaaaaaatataaacaaggatgaattaggtagagaaaagtttattaaaaaggtttgggaatggaaaaatgaatatggcgaaattattatcaatcaattaaagaaattaggttgctcatgtgattggtcaagaaatgcttttactatggataagaatctttcaaattcagtaataaaagtatttgtagatttacataaaaaaaaattaatttataaatcaaaaaaacttgttaattgggataccgtattaagaacagctatttctgatctcgaagttgatcaacgagaagtaaactcgaaactttattacataaaatatcaaatagaaaacacatcagattttataacaatcgccaccacaagaccagaaactatgcttggggatacagctattgctgtaaaccctgatgataaaagatatagtaatcttagaggtaaatttgcaatcttaccaatcgttggtagaaaattaaaaatcatacatgataaatatgctgatccagaac

SEQ ID NO: 307322 - DNA, 844 bp, Unknown
  Bacterial polypeptide expressing nucleotide sequence isolated from the Sargasso Sea
aatgagtagcgataaatatatacattctgatgtagaaaatagaatttattcttattgggaaaaaaatggtctttttaaaccaaaggaaaattctaaaaaattctcgattgtgatcccgcctccaaatgtaactggtagtttgcatatgggtcatgctctaaataattctattcaagatttattagtccgttatcataggatgaacaattttgaaactttatggcaaccaggtacagaccatgctggaatcgctacgcaagcattagtagagaaaaaattgacctctgaaaaaattgataaaaatgaaatcggtagagaaaaatttattgaaaaagtttgggaatggaaagaacaatatggagacataattattaaccaattaaaaaaacttggttgctcttgtgattggtcaagaaatgcttttacgatggatgataatttatccaaatcagtaattaaggtttttgtagatctttacaacaaaggtctaatctataaagataagaaactagttaattgggatacagttttaaaaacagctatttcggacctagaagtagatcaaagagaggtaaattctaaaatttattacattagatatccaatagataggactgaagaatttattacaattgcaacaacaagacctgaaactatgcttggtgatacagctatagctgtaaatccaaaagatgaacgatttaaatcctttgttggaaaaacagttaccattccaattgttggaagaaaaataaaaattattgaggatgactatgcagatcctgaacaaggaacaggggcattaaaaataactccagcacatgattttaatgattatgaagtt

SEQ ID NO: 307323 - DNA, 856 bp, Unknown
  Bacterial polypeptide expressing nucleotide sequence isolated from the Sargasso Sea
aatggctattttttaccaattggtaggaaaaaaaattagaattatagccgatgagtatgcagatcctgaacaaggaacgggagcagtaaaaataacccctgcacatgactttaatgactatgaagttggaataaggaataaactcgaaatcataaacatctttactaaagatggaaaaattaacgagaatgctccaagagaattcgttgggcttgataggtttgacgcaaggaaaaaaatactctcaatgttaaaagataaaaaactatttattaaggaagataatataaaaaataaagttccatatggtgatagatcaaattctataattgaaccttatttaactgagcaatggtttgctgacgcaaagaaattatcaatcaaagcaaaaaaaatagtcaaatcaaaaaaaactaaattcttcccaacaaattggtctaaaacatattttcaatggatggataatattgagccttggtgtgtgtctagacaaatatggtggggtcaccaaatacctgcttggtatggaccagataaaaaaatttttgttgcaaaaaatgaaaatgatgcaaaaaaaatggcaaaaaaattttataaaaaagatgtaaaaattacaagagatcctgatgtattagatacatggttttcctcaggtctttggccttttgctacacttggctggccaaaaaaaaataattatctttcaaaattttatcctacaacagttttggtaacaggttttgacataatctttttttgggtagcaagaatgatgatgtttggtatggagttcttaaacaaggaaccatttaaagatatttatgttcacgctttagtaagagatgaaaaaggacaa

SEQ ID NO: 307324 - DNA, 921 bp, Unknown
  Bacterial polypeptide expressing nucleotide sequence isolated from the Sargasso Sea
aatgaaaaagatgcacaaaaaagagctaataaattttataaaaaaaatgttactttgattagagatccagatgtacttgatacttggttttcatctggactttgggcatttgctacgcttggatggccatctaaaaatgaatatataaaaaaattttatccaacatcagttttagttacaggtttcgatattattttcttttgggttgcaagaatgattatgtttggaatggaatttttaaataaagaaccttttaaagatatctatgtccatgccttagtaagagatgaaaaagggcaaaaaatgtctaaatcaaaaggaaatgttattgatcctttagatttaattaataaatatagtgcagatgcattaagatttactttactatcaatggcttctccaggtcgtgacgttaaattgtctgaggaaagagtaaaagggtatagaaattttttaaataagctttggaatgcgaataattttttaatccataacaaatgtagttttaaaaagattaaaaaagcaccaaaaaccaaagttaacattaataaatggatacattttgaattaatagagactaaaaaaatagtagaaaaaaacattaaagattatcgtttcgacgaagcatctagaaacatttaccaattcgtatggcattcttattgtgactggtatttagaactatcaaaaacaattttattttctgataataaaaaaaatattatagaaacaaaagaaatggcaagttatgtttttaaagaaatattagtattattacatccatttataccattcataactgaagaaatttggctaaaaaacaatcttgatagttcaaataaaaatttttttaatgatggcaaaattggccagatgaaaaaattagtaaagataagagtagtaaagatgttgaatatttaa

SEQ ID NO: 307325 - DNA, 904 bp, Unknown
  Bacterial polypeptide expressing nucleotide sequence isolated from the Sargasso Sea
atgagttttgataaatatgagcataaaaatgtggagaataaaatctatgactattgggaaaaaaaagaactttttaaaccaaaagaaaatagtaaaaaattctcaattgtaattccaccacctaatgtaactggaagccttcatatgggtcatgccttaaataattctattcaagacgtattaactagatttcatagaatgaataattttgaaacattatggcaaccaggaacagatcacgccggtattgcaacccaggcattagttgaaaaaaaacttgctaaagacggtgttaaaaaaaatgatttaggtagagaaaaatttattgagaaagtatgggaatggaaaaatgagtatggtgatattataataaaccaactgaaaaaacttggatgttcttgtgattggtctcgtaatgcctttacaatggatgaaaatttatctaagtcagtgataaaagtatttgttgatctttataataaaaaattaatctacaaagcaaaaaaacttgtaaattgggatgttgttttaaaaacagcaatatctgatttagaagttgatcaacgtgaagtaaattctcaactttattatataaattatcctatagaaaattctgataaatttataacaattgcaacaacaagacctgaaaccatgttgggggatactgcaatagctgtaaatcctaaagatgatagatttaaagatttagcagggaagtttgtaattattcctttagcaaatagaaaaataaaaataataacagatgattatgctgatcctgaacaaggaacaggagcagtaaaaattactccagctcatgattttaatgactatgatgtaggtataagaaacaagttagaagtaattaatatatttacgcctgatgggaaaaataaatgac

SEQ ID NO: 307326 - DNA, 442 bp, Unknown
  Bacterial polypeptide expressing nucleotide sequence isolated from the Sargasso Sea
gctgaagacgccgaagggtgagaagaaagatctcgtcgatacacccatggcgaagtcgtataacccggtggcggtggaggctgcgtggtacgagtggtgggaaaagtgcgggatgtttacgccagagatgggaacgaataaacccaagtttgtcatcgtgattccaccgccgaacgtcaccggcgcgttacacattggacacgcgctcacgaactcgattcaagacaccgtcgtgcgttggagaagaatgagcgggtacgaggcgttgtgggttccgggcactgaccacgccggcatcgccacgcaaaccgtggtggagaagaagttggcgcgcgaggagggcgtcacgagacacgatctcggccgtgaaaagttcctcgaacgtgttttcgaatggaagaacgagtacggcggcaagattttcaatcagcttcgcagaatc

SEQ ID NO: 307327 - DNA, 949 bp, Unknown
  Bacterial polypeptide expressing nucleotide sequence isolated from the Sargasso Sea
ttagttggaaaaaatgttatattaccaattgttggcagaaaaattaaaataattaaagataattatgccgatccagaacaagggtctggagctgttaaaataactcctgcacacgactttaacgattatgaagtaggcattagaaacaaacttgaattgttaaatatttttactgaagaaggaaaagttaataaaaatgcaccggatgaatatattggactagatagatttgaagctagaaaaaaaattttaagtcaattatctaatcaaaatttattagtaaaagaagagaaaataaaaaataaagtcccatatggcgatcgttcaaattcaataatagaaccttttttaactgagcaatggtttgctgatgcaaaaaaattatcaatcaaagcaaaacaaattgttaaatcaaagaagacaaaattttttccagaaaattggtctaaaacttattttcaatggatgaataatattgagccatggtgtatttcaagacagttatggtggggtcatcaaatacctgcttggtatggacctgacaaaaaaatatttgtggctgaaaatgaaaaggaagctcaaaaactttctaaaaaattttacaaaaaaaacgttgagttaataagagatcctgatgttcttgatacatggttttcatctggattatggccttttgcaacattaggttggccaataaaaaatgattatttaaaaaaattttatccaacaacagttcttatcacaggttttgatataattttcttctgggttgcaagaatgatgatgtttggaatggaatttttaaataaagaaccatttaaagatgtttatgttcatgcactagttagagatgaaaaaggacaaaaaatgtcaaagtcaaaaggaaatgttatagatcccttagaactaattgaaaagtatagcgcagatgcattaaggtttactcttt

SEQ ID NO: 307328 - DNA, 829 bp, Unknown
  Bacterial polypeptide expressing nucleotide sequence isolated from the Sargasso Sea
catgctctaaataattcaattcaagatttattagttcgttattatcgaatgaataattatgaaactttatggcaacccggaactgatcatgcaggtatagccacccaagcactcgtagagagaaaattagaaaaagaaaatttaagtaaaattgaccttggtagagaaaaatttatagaaaaagtatgggaatggaaaaatgaatatggggacataatcattaatcaactaaagaaattaggatgttcatgtgattggtcaagaaatgcattcactatggatgaaaatttatcaaaatcagtcattaaggtttttgtagaattacataaaaaaaaattgatttataaagctgaaaaacttgtaaattgggacactgttttaaaaaccgcaatttcagatttggaagtagatcaaagagagatgaattctaagatctactatattagatacccaatagataattcctctgaatttatcactattgccacaacaaggcctgagacaatgctaggggatactgcaattgcggtaaatccgaaggataaaagatataaaaatcatgttggcaaaactgtcacaatacctatcgtaggtagaaaaataaaaattattaaagataattatgctgatccagagcaaggaacaggagcacttaagatcacgccagcacatgattttaatgactatgatgttggtcaaagaaataaattagaaataattaatgtttttactgaagaaggaaaaataaatgataatgctccaaaagattatattggcttagataggtttgatgcccgtaaaaaaatattaaatgaattaaaagaaaaag

SEQ ID NO: 307329 - DNA, 461 bp, Unknown
  Bacterial polypeptide expressing nucleotide sequence isolated from the Sargasso Sea
gatgagcacagaagccctcagcaaaacctacgatccgcacacgatagaacgcaccctgtacgagacatgggaagcacagggtgcattccagcccgctggggacgggcctgccttttgcatatcgattcccccgccgaacgtaacgggcagcctgcacatgggacatgcctttcaggacacgatcatggatgccctgatccgctatcaccggatgagaggccacagaaccctgtggcaggccgggaccgaccatgccggaattgccacccaaatggtggtcgagcgccaactcgaccagatcggcaaaacgcgccatgatctgggtcgcgacgccttcatcgagcgggtttggaaatggaagcaggaatcaggcggcgcaattactcagcagttgcgccgcatgggtgcctcgctggattggagccgcgaacgcttcaccatggacgacgacctctcactcg

SEQ ID NO: 307330 - DNA, 529 bp, Unknown
  Bacterial polypeptide expressing nucleotide sequence isolated from the Sargasso Sea
tttgaagccagaaaaaaaataattgataaattaaaagaattacaactctttgaaaaagatgagactataaaaaacaaagtaccttatggagatagatctaattctataattgaaccttttttaacagagcagtggttgtgcgatgcaaaaaaattatctatcaaagcaaaaaaaatagtaaaaaataaaaaaacaaatttcttcccgtcaaattggtcaaagacgtattttcaatggatgaataatattgagccctggtgtatttcacgacaactttggtggggacatcaaatcccagcatggtatggaccagatagaaaaatatttgttgcagaaaatcaaaaaaaagcagaacagcaggcaaaaaaattttataaaaaaaaagttaatttaaaaagagatccggatgtacttgatacatggttttcttcaggtatttggccttttgcaacattagggtggccttcaaaaaattattttttaaaaaaattttatccaacatcagttttagtaactggttttgatataa

SEQ ID NO: 307331 - DNA, 841 bp, Unknown
  Bacterial polypeptide expressing nucleotide sequence isolated from the Sargasso Sea
aatgcatttacaatgggatgaaaatttattaaactcagtaataaaagtatttattgatctttataaaaaaaaattaatttacaaatccaaaaaattagtaaattgggatacagtattaaaaacggctatttctgaccttgaagttgatcaaagagaagttagttcaaaactttattatataaagtataaaatagaaaattcatctgaaacaattactattgctactaccagaccagagactatgcttggtgacacagctattgcggttaatcctaaagacagaagatattttaatttagttaataagtttgcaatacttcctattattggacgaaaactaaaaatagttcaggatgattatgctgatccagagcagggtagtggtgctgttaaaattacaccagcacatgattttaatgattttgaagttggtagaagacaaaagcttaaatccataaatatttttaccgaagatggaaaaattaataataatgctcctaatgaatatataggtttagacagatttgaagctagaaaaaaaataattgataaattaaaagaattaaaaatcttagaaaaagaagagactataaagaataaagtaccttatggtgatagatcaaattctgtgattgaaccctttttaactgaacaatggttttgtgatgcaaaaaaattatctatcaaggcaaaaaaaattgttaaaaaaaaatacacaaatttctttccatcaaattggtctaaaacatactttcaatggatgaataatattgagccctggtgtatatctcgacaactttggtggggtcatcaaattccagcttggtacggaccagataaa

SEQ ID NO: 307332 - DNA, 769 bp, Unknown
  Bacterial polypeptide expressing nucleotide sequence isolated from the Sargasso Sea
agaattttaaaagaacttaaagaaaaagatttttttgtaaaagaagaaaatattaaaaacaaagtcccttatggagatagatctaattctataattgaaccttttttgacagaacaatggtttgctgatgctcgtaaattatcagttaaagctaaagaagttgtaaattcaaagaagacaaatttctttcctgaaaattggtcaaaaacttatttccagtggatgaacaatatagagccttggtgtatttcaagacagctttggtggggacatcaaatacctgcttggtatggtcctgatgaaaaaatttttgttgctgaaaatgaagatgatgcaaaacaaaaagcaaaaaaacattatggtaaagatgttgaattaaatcgtgatctagatgttttagatacatggttttcatctggtttatggccttttgctacacttggttggcctgatgataaaaaatatgtagataaattttatccaacatcagtattagttacaggttttgacattatatttttctgggtagctagaatgataatgtttggtacagaatttttaaacaaagaaccttttaaagatatttatgttcatgcattggttagagatgagaagggacaaaagatgtctaaatcgaaaggtaatgtaattgatcctttagatttaattgaaaaatatagtgcagatgcacttagatttactttgttatctatggcctcaccaggtacagacgttaagctttctgaagatagagttaaaggttatagaa

SEQ ID NO: 307333 - DNA, 980 bp, Unknown
  Bacterial polypeptide expressing nucleotide sequence isolated from the Sargasso Sea
aatggatgccaagtattttccaatagaaatagaagagaagtggtcaaagatttgggctgaacgtgaactaaataagccagaatcagagcaaaatttttctcaaattattccaccaccaaatgtcactggaactttgcatatggggcatagttttcagtatgccatcatggatttttacactagatatcatcatatgaatggcaaaaattcatattggcaagtaggaactgatcatgctggtattgccacacaaatggttgtagagaacaaccttattaacgaaggtaaaaataaaaatgatctcggcagagaaaaattcctggaagaagtctggaaatggaaagattactctgaagaaaagatcacatctcaaataaaacgtcttgggtgcacagttgaatgggataagtatcgttttacttttgacgatgatttttgtgaagcagtaaataaagcttttgttgaactttatagaaacaataaaatctatcgtggttatcgtttggttaactgggatccatcacttaaaacagctgtttctgatctagaggtggtaaggcaagaaaaagaaggaatactttggcatattgcctaccctatttctgattcagatgaagtgttaactgtagcgacaactaggccagagacaatgtttggtgatatggctgttgcagttaacccaaaagatgagcgtttcaaaaaattcataggtcaatacgttgagttgccttttgtagggcgaaaaataccagttataggtgatgaatacgtagatatggagtttggtacaggttgtttaaaaatcacacctggccatgactttaatgactatgagattggcaaaaaatatgccttacatgagaaagatggcgtagttcatatttcagatgaactaaatgattttatgcctatcaatatttttactgatgaagctcacaccaatgatagcgttcctgaacccttttgctaccttgatagat

SEQ ID NO: 307334 - DNA, 781 bp, Unknown
  Bacterial polypeptide expressing nucleotide sequence isolated from the Sargasso Sea
aagaaatattttcatgctgatgctagttcagaaaaggagccctatacgattgttatcccacctccaaatgttacaggtatgttaacagtaggtcatgttctgaataatactatccaagatattttgataaggaaggcccggatggagggtaaggaggcttgttggattccagggactgaccacgcatcaatcgcgactgaaacaaaagtcattaaaatgttagaagaaaaaggtataaataaaaatgacctatcaagagaagaatttttggagcatgcttgggaatggaaggagaaatacggtggaattataatcaatcagcttaaaaaacttggttgttcctgtgattgggagaaagagcggtttaccatggatgaggggtactctagagctgtattagagagttttgttaagctttatgaaaaaggtcttatatacaaaggccatagattagtgaattggtgtccagtatcaaaatcagcaattagcgatgaggaggtcattcataaagaaatagatggtcatctttggcactttagatacccaatccatggtgaggataattacctggttgttgcaactactagaccagaaactatgcttggtgatacagcagttgctgtaaatcctaatgataagagatataaaaaatatatcggaaaaaatgttgaactcccacttgtaggaagaaaaataccaatagtatcagatgactatgttgaccctgagtttggtaccgggtgtgttaaaattactcctgcacatgacccaaatgattttg

SEQ ID NO: 307335 - DNA, 926 bp, Unknown
  Bacterial polypeptide expressing nucleotide sequence isolated from the Sargasso Sea
aacagctgtttctgatctagaagtggtaagacaagaaaaagaaggcatactttggcatattgcctaccctatttctgattctgatgaaacattaactgtagcgacaacaagaccagagacaatgtttggtgatatggctgttgcagttaatccaaaagatgatcgtttcaaaaaatttataggtcaatatgttgagctgccttttgtgggcagaaaaataccagttataggtgatgaatacgttgatatggaatttggtacaggttgtttaaaaattacacctggtcatgactttaatgactatgagattggcaaaaaatatgcacttcatgagatagatggcgtagttcatagttcagatgagctgaatgactttatgcctatcaatatttttactgatgaagcgtacactaatgatagtgttcctgaactctttgctaacctcgatagatttaaagtaaggaaggttgttctagaagaactcaaaaataagaatttgctcttaaaagaagagaagcatcaaataagtgttccgagaggagagcgctccaatattgtgatcgaacctaagcttagtcatcagtggtatgtaaaaactcaagagatggctaaaaaagcaaatgaagccgttaataaaggtgaggtagtttttcatcctggaaattggatcaagacttactttaactggatggataatattcaagattggtgtatcagtagacaaatttggtgggggcacagaattcctgcttggtatgacaaagacgggaatatgtatgttggttacgatgaagatgaactaagaaaacattacaaacttgatgatagaaaactaactcaagaagaagatgttctcgatacctggttctcatcatctctatggccttttggatctttaggctggcccaaagaaaccgaactaaata

SEQ ID NO: 307336 - DNA, 890 bp, Unknown
  Bacterial polypeptide expressing nucleotide sequence isolated from the Sargasso Sea
cattataaaggtctggagcgttccgctgcgcgagaacaagtggtctcagaaatggagacccttggcctcctggaaaaaatagaggataacgagatgacggttccatatggtgaccgttctggcgtcgtaattgaaccctggttgatggatcaatggttcgtggatgcgcaacgtctggctggaccagcgatcacggctgtggaacaaggtcaaacgacttttgtgcctgaacagtggaaaaacacctattatgattggatgcggaatattcagccctggtgcatttctcgccagatctggtgggggcatcaaattccagcctggtttactccatctggcgagatttttgttgaaatgacggaggagcaagcctacgccgctgcccgcgagtcttgcggtaacgatgtagaattgacccaagatcccgacgtcctagacacttggttttcgtctgcactttggccgttttcaacgcttgggtggccagaaaaaaccccagaattggctcattattatccgactaatgtattggtaactggcttcgatattatattcttttgggtcgctaggatgatgatgatgggcatccattttatgggagaggtgccgtttcacaccgtttatatccacgcgctagttcgagacgagcaaggccagaagatgtcaaaatccaaaggtaatgtaatcgacccactgcagttgatcgataagtatggggctgactcgctccgtttcactctaacagcatcggcagctcaagggcgtgatgtgaagttgtcagagcaaagggttgagggttatagaaacttttgcacaaaaatttggaatgcagctcggttttgtgagttgaatgagtgcaagcgactgaaaattatgactctggccaagtg

SEQ ID NO: 307337 - DNA, 652 bp, Unknown
  Bacterial polypeptide expressing nucleotide sequence isolated from the Sargasso Sea
atgagtttagataaatacaatcatttagaatcagaaaatagaatatattcttattgggaaagtaataatctatttaaaccaaagaagaataaaaagaaattttctatagttattccgcctcctaatgtaactggcagcttacatatgggccatgctttaaataattcaattcaagatttattgactagatttcatagaatgaataattatgaaactttatggcaacctggcactgaccatgctggaatagcaacgcaagctctagtcgagaaaaaattggaaaaagaaggtattgaaaaaaattctttaggaagagataaattcatcaagagagtatgggagtggaaaaatcaatacggagatataataatcaatcaattgaaaaagctaggatgttcatgtgattggtcaagaaatgcttttacgatggatgagaatctttctcaaagtgttttaaaggtattcttagatctttataaaaagaaaattatttataaatcaaaaaagcttgttaattgggacaccgtattaataactgctatatctgatttagaggttgatcaaagagaagtaaactctaaattgtattatataaaatatcccatcaatcaaactagtgattatataactatagctacaaccaggccagaaa

SEQ ID NO: 307338 - DNA, 679 bp, Unknown
  Bacterial polypeptide expressing nucleotide sequence isolated from the Sargasso Sea
aaaatttacaaatattgggaaaatcataaattatttgaacctaaaaaaaataaaaaaaaattctctatagttataccccctccaaacgtaaccggctcacttcacatgggtcatgcattaaataattctattcaagaccttttaactcgatatcacaggatgaataattatgagacgttatggcaacctggaacagatcatgccggaattgctactcaggcacttgttgaaaaaaaattaaaaaatgaaggtattaataaaaatgatattggaagagaagaatttattaaaaaagtatgggaatggaagggtgagtatggtgacattataatcaaccaacttaaaaagcttggttgctcatgtgactggtcaagaaatgccttcactatggacgaaaacttatctaaatcagttattaaggtttttgttgatctacataaaaaaaaattaatttacaaatcaaaaaaattagttaattgggatactgttttaaaaacagctatatctgatcttgaagttgatcaaagagaagtgaattcttcattatattatattaattatcctttagatgggtcaaatgaaaaaataactatagcaactacaagaccagaaactatgttaggtgatactgctgttgccgttaatccgaaagataaaagatataaaaacttagtaggta

SEQ ID NO: 307339 - DNA, 892 bp, Unknown
  Bacterial polypeptide expressing nucleotide sequence isolated from the Sargasso Sea
aaatggtcaaaaatttgggctgatcgtgaattagaaaaaccaggttctgaagaccacttttctcagattattcctccgccaaatgtgacaggcacattacacatgggccatagctttcaatatgccatcatggatttttacaccagataccaccatatgaatggcatcgattcatattggcaagttgggacagaccatgctgggatagcaacgcaaatggttgtggaaaataatttactaaatgaaggcaaatccaaagatgacttaggccgtgaaaaattcctagaagaagtatggaaatggaaagattactcagaaggtgaaatttcagctcagatgaaacgattaggtatcaccgtagagtgggataaatacagatttacttacgatgatgatttttgcaaaggcgttaataaagcatttgttgaactctaccgcaaagataaaatttatcgcggctatcgtttggttaactgggatccatctttgaaaaccgccgtttcagatctagaagtagtccgacaagaaaaagatggagtactttggcatatttcctatccactagcagattcagatgaggttcttattgtcgcaacgacaagaccagaaaccatgtttggtgatatggccgtagctgtgaatcctaaagatgatagatttaaacaacacattggtaagtacgttgaattgccctttgtcggcagaaaaattccagtgattggtgatgaatacgttgatatggaatttggaaccggttgtttaaagattacaccaggtcatgacttcaacgattacgatattggtaagaaatatgctttgcatgaagtggacggtgtagtacaaacctcagataagcttgaggattttgcccccaataaatattttactgacg

SEQ ID NO: 307340 - DNA, 805 bp, Unknown
  Bacterial polypeptide expressing nucleotide sequence isolated from the Sargasso Sea
tatggagatcgttccaatactgttatcgaaccattactaacagaacaatggttcgccgacgcaaaacttttatcgaaaaaggctattcaagttgtaaaaaataaaaaaacaaatttttttccaactaattggaccaaaacttattttcaatggatgtacaacattcaaccatggtgtatctcaagacagctttggtggggacatagaataccagcttggtattcagatgaaaaaaaaatatttgttgctgaaactgaggaggaagcaaaaaaaattgctaaaaaatattataaaaaaaatgtagttttaaaaagagacgaagatgttttagacacatggttttcgtctgccttatggccttttgcaactttaggatggccaaaaaagacttacgaattaaaaagattttatccaacatcagtactagtaacaggatttgatattattttcttttgggtagcacgaatgatgatgatgggaaattatttaattaaaaaagaacctttttcaaaagtttatgtgcacgcattagtcagagatgaaaaaggacaaaagatgtcaaaatcaaaaggaaatgtaatcgatccacttgaaattataaataaatatggagccgactctttaagatttactttaatttcaatggcagctcctggtcgtgatgttaaactttctgaagacagggttaaaggctatagaaattttcttaataaaatatggaatgcaaataaattttctaaaataaataactgcaaattaacaaaaaaatttaatattaaaaaaactaaactcgatcttaataagt

SEQ ID NO: 307341 - DNA, 921 bp, Unknown
  Bacterial polypeptide expressing nucleotide sequence isolated from the Sargasso Sea
ggttttcatctggactgtggccattgggacacttggctggcctgataaaactccagagttaagtaagtattatcccaccagtgtcttggttactggttttgacataattttcttttgggtagctagaatgatgatgatgcagttggtggtgactaaggaggtgccctttcacacggtttatgtccatgccctggtgcgtgacgagaagggtaaaaaaatgtccaagtcaaaaggcaacgttttggacccgatagaattaattgatgaatttggagctgatgcggttcgttttacgttgactgccatggcagtgatgggtagagatcttaggctttcaaccagtaggatagcggggtacagaaattttggtacaaagctctggaatgcggcgcgctatgctgagcttaacggttgtaaagttgatgcaaggtatcggcctgagttagtagaaacaacagttaataaatggattgttggagaaacagcaagatttaaagaggcgtttgacaatgccttgcattcttaccgatttaatgacgctgcacagttagcctataatcatatttggaaaaaattctgcgattggtacgttgaattttcaaaacccttattaaatggggaagatttgtatataaaatcagaaacaaagcatacaatggcatgggcgcttgatcagtgcttgataattttgcatccaataatgccttttataacggaagagctttggggtattctttcagaaagaaaaaatatgttggttcaccaaaactggcccgaatatactgctaaaaatctcgagaataaatctgcagacaaggaaatagagtggattattaatttaatcgaacaaattaggtcgttaagagcggatcttggggttgtaccaagcgctaagatagtattgtacaaagttaccttaaa

SEQ ID NO: 307342 - DNA, 880 bp, Unknown
  Bacterial polypeptide expressing nucleotide sequence isolated from the Sargasso Sea
ccccgtatacattatgatgccgccaccaaatgtcactggcaatttgcatatgggacatgcgcttacattcaccttgcaagatttgctgatccgttatcaccgtatggttgggcgtgacacactatggcaaccaggtacagaccatgctggcatagcgacacaaatggttgtagaacgccagcttgcggcgcaaaatatttcgcgccgtgaccttggtcgaaacagatttctagaaaaagtctgggaatggaaagccgaatctggtggcatgatccacaagcagttgcaacgccttggcgcgtcaccagattgggaacgagaacgatttaccatggacccaggtctgtcagaggcagtgatcaaagtatttgtttcattgcatcgtgacggtctaatttaccgtgacaaacggctggtcaattgggatccaaaactgatgaccgccatttcagatttagaggtcgaacaacgcgaacaaacaagttctatgtggcacctcaaatatcggctcgttggcacggaaaatgaatttatttctattgcgacgacccgacctgaaaccatgctcggtgacggggcagtcgcggtaaatccagaagatgagcggtatcagcatctgattggcaaaatggtgatcttgccgctgtcaaaccggcatattccgataatcgccgatgattatgcaaaaattgacaaaggatctggtgcggtaaaaattacaccagcacacgattttaacgattttgaggttgggcgccgtcacaacctgccattaataaatttaatgacagcaacagccaccatggagtcgattgatgaaatcccagaaaaataccgggggcttgatcgctatgatgcgcgacggcagattttacgtgat

SEQ ID NO: 307343 - DNA, 938 bp, Unknown
  Bacterial polypeptide expressing nucleotide sequence isolated from the Sargasso Sea
accttttttaacagaacagtggtttgcagatgctggtaaattatctgttaaagccaaagaagttgttaattcaaagaaaacaaatttttttcctgaaaattggtcgaaaacctattttcaatggatgaacaatattgaaccttggtgcatatcaagacaattatggtggggacatcaaataccagcttggtatggtccagatgaaaaaatatttgtttccgaaaatgaagatgatgcaaagcaacaagctaaaaaacattatggtaaagatgttgaacttattcgtgattcagatgttttagatacctggttttcatccggcttatggccttttgcaacacttggatggcctgatgataataagtatgtagataaattttatccaacctcagttctagttacaggttttgatattatatttttctgggttgctagaatgattatgtttggtactgaatttttaaataaagaaccgtttaaagatatatatgttcacgcgttagtaagagacgagaaaggacaaaagatgtctaaatcaaaaggaaacgtaattgatcctttagatttaattgaaaaatatagcgcagatgcacttagatttactttgttatcaatggcatcaccaggtactgatgttaagctttctgaagatagagttaaaggatacagaaattttttaaacaaattatggaatgcaaataactttttaataacaaatgaatgtgattttaaagatattgatgatctacctaatttaaatgtaaatattaataagtggatatactcagagctaatagagacaaagaacaaaattcaaaaaaaccttgaagattatagatttgatgaggctgctaaaaatgcttatcaatttgcttggcattcatattgtgattggtacttagaattatctaaaactattctattttcagacgataatg

SEQ ID NO: 307344 - DNA, 883 bp, Unknown
  Bacterial polypeptide expressing nucleotide sequence isolated from the Sargasso Sea
cctttttctactttaggttggccaaataaaactcaagaattggaaaaattttacccaacatcttcgctggtaacaggatttgacattatatttttttgggttgctagaatgatgatgatgggtttgtattttactaagaaagtaccctttcatgaggtctatgttcacgcattggtacgcgacgaaaaaggccaaaaaatgtcaaaatctaaaggaaatgttattgacccacttgatctgatgaatgaatttggagcagattctctacgcatgactttatgctcaatggcagctcaaggaagagatattaaactctccaagcagagagtagaaggctatagaaactttataactaaaatttggaatgctttgaagttatgtgagattaataattgttattatggcgaagctaagatttcagatacaaaaaatatatttaatatttggatacttaacgaattagaaaactgccgaaaggttgcagaaacttccatacaaaattataaattcaatgaagcagcaaatggactttataaattcacttggagtatattttgtgattggtacttagaatttacaaaaatcatttttatctccgaggataaaaagttaataaatgagacaaaacatatcacgtcttatgttctttcaaacatcttaattatgcttcatcctataatgcctttttttactgagcacgtatgggataaggctgcaggaatattaaaaaaagatactagtcaaatttccagagccaaatggcctgagcagataaaattagaggactcagataaaagtgaagtaaactttttaattgatttaatatcatccataagatctaccagggcagaaatgaatgtaccagcaaaatcaaatataaaaa

SEQ ID NO: 307345 - DNA, 847 bp, Unknown
  Bacterial polypeptide expressing nucleotide sequence isolated from the Sargasso Sea
gtgtcaagtaaagtccctttcgttgatagagaaatacctattatcgctgattcacatgttgataaagattttggtacgggttgtgtgaaggttactccagcccatgatccaaatgattttgcaataggaaaaaggcataatttaaaacagattaatgtaatgaacaaagatggaactttaaatattaatgcaggtatttttcaaaatttagatagatatgaggctagaaagaaaattatcaaagaattggataacttaggccttttgacaaagatagaggattataaacatactgttcctttttctgatagaggcaaggtgccaattgaacctttattgtcaacacaatggtttttgaaaatggatgatatatcacaaggatgtcttaatgaaattgattcaaaaaaaccatcgtttattcctccacgctgggagaaagtttataaggattggttagagaatattaatgattggtgtatcagtcggcaattgtggtgggggcaccaaataccagcatggtatgttttagatgactctcaagactcaatagaacaaaatactccatatatcgttgcaagaaatgaagaagatgccttaatcgaagctaataaaaaatttggatcaaatattaaattggttcgtgataaagatgttttggatacatggttttcaagtggtttatggcctttctcaactcttggttggccaaatacaaatgatcctgattttaaaaaatggtatccaaataatgttcttgttactggttttgatattattttcttctgggtggccagaatgacaatgatggggaatacttttacgaattatattccttttaaagatgttt

SEQ ID NO: 307346 - DNA, 816 bp, Unknown
  Bacterial polypeptide expressing nucleotide sequence isolated from the Sargasso Sea
agctttagtaaaaactgaaatccacatgaataaagtcggaacttttgaaagaaccaaagcagttatagaaccaagattatcggatcaatggtttttgaaaatggaagaattggtaaaacctgccatcaaagccgttttagaggatgaggaaataaaattatatccaagtaaattcaataatacctatcgtcattggttagaaaatattagagattggaatatttcgcgtcaactttggtggggacaacaaattccggcttactattatggtgatggtaaagaagactttgtagttgcagaaaatattgaagaagctttaattttagcaaaagagaaaaccaacaaccaacaactaacaaccgacaacttaacacaagatgaagatgctttagatacttggttttcatcatggttatggccaatggctgtttttggaggaattttagatccagaaagtgaagattttaaatactattatccaacaaatgatttagtgactggtccagatattttattcttttgggtagctcgtatgattattgcaggatatgaatacacagacaaaaagccttttagcaacgtatatttaacaggattggttcgtgataaacaacgtcgtaagatgtcaaaatcattaggaaattctcctgatccattagaattgattgaaaaatttggagctgatggagttcgtgttggattattgttgagtgcttcagcaggaaatgatatcatgtttgatgaagagttatgcaataatggtaaagctttcgctaataaaatttggaatgcctttagattaatcaaaggttggga

SEQ ID NO: 307347 - DNA, 643 bp, Unknown
  Bacterial polypeptide expressing nucleotide sequence isolated from the Sargasso Sea
aggcaattatggtgggggcatcggattccggcttggtatgggccagatgataccgcctttgtcgaggaaactgcggaagccgccatcgccgcggccaccacccactatggaaaagctgttgaattatggcaagatgaagatgttttggatacatggttttcatctggattatggccgttttccacacttggctggccagaaagtaatgctgagatagagcgctattaccctggtgacgttttggtcaccggctttgatattatctttttctgggtggcgcgcatgatgatgatgagcatgcatttcatggatggtgaggttccattcaaggtggtctatatccacgctttggtgcgggatgaaaaaggccagaaaatgtctaaatcaaagggcaatgttctagacccgttggaattgattgataaatatggggctgactcacttcgctttacattggcggcgatggccgcgcaggggcgtgacatcaaaatgtcgaccaaccggctcgagggctatcggaattttaccacaaaaatttggaatgcctgtcgatttttgcaaatgaatgagtgtaccaatggagatagtattgatctttctatagtcgaggccccggtcaataaatgggttgtgtccgaatata

SEQ ID NO: 307348 - DNA, 877 bp, Unknown
  Bacterial polypeptide expressing nucleotide sequence isolated from the Sargasso Sea
gatattgttggaaagctagtgaccattcctttagcaaacagaaaaataaaagtaataacagatgactatgctgatcctgaacaaggaacaggagcagtaaaaattactccagctcatgatttcaatgactatgatgtaggtataagaaacaagttagaagtaattaatatatttacgcctgatggaaaaataaatgacaatgcacctgacccatataaaggtttagatagatttgctgcaagaaaattaattttagaacatcttgaagaaggtaagtttttagaaaaaatagaaaagttagtaaacaaagttccttatggagatagatctaattctattattgagccttatttaacagaacaatggtttgttgatgcaaaaactttagccattaaagcaaaagaggtagtaaataatggaaagactaaattttttcctgaaaattggtcaaaaacatattttcaatggatggataacattgaaccttggtgtatttctcgtcaattatggtggggacatcaaatacctgcttggtacggacctgatggaaaaatatttgtagctgaaaatgaagatgaatgcaaaaaacaggcaaaagaattctattcaaaagaagtggaattaaaaagagatgaagatgttttggatacttggttttcttcaggtctatggccatttgctaccttaggatggcctgaaaaaactccagaagttgaaaaattttatccaacaagtgttctcgtaacaggttttgatattatatttttctgggttgctagaatgattatgatgggaactgagtttttaaaagaagaaccttttaaaaatatatacgttcacgcacttgttagagatgaaaagggtcaaaaaatgtcta

SEQ ID NO: 307349 - DNA, 883 bp, Unknown
  Bacterial polypeptide expressing nucleotide sequence isolated from the Sargasso Sea
caacttcaaaaactcggatgttcatgtgattgggataaaactagttttaccatggatgaagattattctaaagctgttttagagtcttttgttcaactatataataaaggattgatttataaaggtagtaagctagtaaactggtgtccaaagtcacagactgctttaagcgatgaagaagttatgtttaaagaggtcaatggaagtctttggtatattaaatatgctattaatgattctgatacatttatagaaattgcaacaaccagaccagaaactatgttaggtgatacagcaatagcagtaaatcctaatgataaaagatataaagaattgataggcaagacagcattattaccactagtaggtagaagtattcctattatagcggatgacatggtagatcctgaatttggaacgggctgtgttaaaattacacctgcgcacgatttgaatgattatgaagtaggaataaagcataatctcgaaatgattaacattatgaatgcagacagttctattagcgataaagctccagaaaagtatagagggatgtcaagggaggctgctagaaagcaaattgttcttgatttaaaagatataaatcatctaataaaagaagaggattactttcataaggttggatattcagaacgaggaaatgtaccaattgaatattatttgtcagagcaatggtttttaaaaatggaagatttagctaagccagctagcaaagcagttaaagataatgaaattaatttttacccaaatcattgggttaaaacctacaatcattggatggataatattcaagattggtgcataagcagacaactttattggggccatcaaatacctgtgtggtataaaaaaaggtgctgat

SEQ ID NO: 307350 - DNA, 852 bp, Unknown
  Bacterial polypeptide expressing nucleotide sequence isolated from the Sargasso Sea
ggattggcgccgcaactctggaaacacaataagccaacagatcagacggatgggatccagtattgattggtccagagaacagttcaccatggatgaggattacgcagacgcagtcctggaggtctttgtaaggctttatgacgagggattgatttatcggggccaaagactggtcaattgggacccagaattaaaaaccgcaatttccgaccttgaagttgaaaacacagaagaaaatggccacctgtggcacattcgctatccattgacaaaccatgctcgaacaaaagcaggccatccttacctagttgttgcaaccacaagaccagagactatgctcggagatactgcggtggccgtccaccccgatgatgagcgctacaccaacctaattgggacttctgtagagctcccgctttgctcaagaacaataccgattatctcagacgaatacgtagatccggaatttggaactggttgcgtcaagataactccaggacacgatttcaatgactacgaagtaggcgcacgacatgatctccctttgatcaacatccttacagagaccgcagaaattaatgaggaggcgccacaagcataccaaagactcgatcgattcgaggccagagataaaatcgtagatgatctcgaaaaaaccggtttgttggaatcagttgacgaccactcattgatggtgccgagaggcgaccgctccggatctattattgaacccctattgactgaccagtggtttgttaaaattcagccgctcgccgcaccagcaatcgatgctgttaaaaacggagaagtgcgttttgtaccaaaacaatatgaaaacgtttacttttcctg

SEQ ID NO: 307351 - DNA, 826 bp, Unknown
  Bacterial polypeptide expressing nucleotide sequence isolated from the Sargasso Sea
aaaaatcactattgccaccaccagaccagaaacaatgatgggagataccgcggttgctgtaaatccaaaggatgaaagatatgttaatttagtcggaaaaaatgttcttattccaattgttaataggactgtcaaaattatttctgacaattacgctgatccggaacaaggttcaggagcagtaaaaattacaccagcacatgatttcaatgactatgaggtaggcaagagaaataaattagaaataattaatatttttgaagaaaatggtaaaataaacaaaaatgggattaaagagtttcatggtttagacagatttgaagcaagaaaacttataattaagaaattaaaggaaaaaggttcccttgtaaaaatcgaaaatattaaaaataaagttccgtatggagacagatcaaacactataatcgaacctctattaacagagcaatggtttgttgatgccaaaaaattatccaaaaaaccaattaagatagttaaagagggcaaaactactttttttccaagcaactggtcaaaaacattttttcagtggatgaatgatattgaaccttggtgtatatctcggcagatttggtggggtcatagaatacctgcttggtatgatgataatggaaatatttttgtagctgaaagtgaaaaagatgctgcaaaactagcaaagaaaaaaaataaaaataaacaatttaaattaagacaggaaacagatgttttagacacttggttttcatcagctctatggccttttgcgactcttggatggccaaagaaaactggagaacttaataaattttatccaacttcagtt

SEQ ID NO: 307352 - DNA, 907 bp, Unknown
  Bacterial polypeptide expressing nucleotide sequence isolated from the Sargasso Sea
cgcgaccgatttacgatggatccaggctacgccgaggctgtcaaaacctcattcatcagactatttgatcagggtttgatatatcgaggcaaacgacttgtgaattgggatccacatttggaatctgcgatctccgatctggaggtggaaaatgtggaggaaaaaggacacctatggcatttaagatacccacttcccaaaggagtgaaaacgaatagcggtgagagccacttgaccgtagcaacaactcgcccggagaccttgctcggtgatagcgcagtagctgttcatcctaatgatgaacgttatgctgatctgattggtcaaagcgtaattctgcccttatgtgatcgaaaaattccgatcatcggtgatgaatatgttgaccgagatttcggttccggttgcgtaaaaataacgccagcacatgatttcaacgactacgaagttggagagagacataatttggaacagattaatatatttgaagcggatgcttcgcttaacgatcaagttccagggacataccgagggctaagccgagaagaagcgcgagagagagttcttatcgatctcgaaaaaggtaacttcttagagaaagtggaggaccacaaactaatggtgcctcgaggagatcgatcaaattcgatcatagagccttatttgaccgaccaatggtttgttaagatcggcccactcgccgagccggcaatcgctgctgttaaggacggccaaataaactttgtcccaaagcaatatgaaaacctctatttctcattcatgaatgacatcagagactggtgtatcagtcggcaacagtggtggggacatcaaatccccgccttctatgacgaatcaggcgaagtctttgttgcagaaaatgaggaggcagcaagacggaaataca

SEQ ID NO: 307353 - DNA, 826 bp, Unknown
  Bacterial polypeptide expressing nucleotide sequence isolated from the Sargasso Sea
cgacatcatcttcttctgggttgcccgcatgatgatggccgggctccatttcatgaaggatgaggacggcaatcgcgtcgaacccttccacaccgtctacgttcacgccctggtgcgcgacaagaacggtcagaagatgtcgaagtcgaagggcaacgtcatcgatccgctcaacctgatcgaggagtacggcgccgacgcgctgcggttcacgctcgcgatcatggccgcgcagggcagggacgtgaagctcgacgagagccgcatcgccggctaccgcaatttcggcaccaagctctggaacgccacgcgctttgccgagatgaacggcatgaagctcgacggttcgttccgcccctccggcgcgacccagaccatcaatcgctggatcctgaccgagctttcgaagaccaccgaggacgtcaccacggcgatcgagaacttccgcttcaacgaggcggccgatgcgctctaccgtttcgtctggcacgagctctgcgactggtatctggaactcctgaagccggtgttcatgggcgaggacgaggccgcgaagaccgaggcccagcattgcgtcgcctatgttctggccgaaacctacaagctcttgcacccgttcatgccgttcatgaccgaggagttgtggaaccatatcggcggcgaggggctatgctgccacgccgactggcacgagccgggcttccgggatgaagaggcggcggacgagatcaactggcttgtcgacctgatctccggcatccgttcggcccgcgcggaagtgaatgtgccgccggcggcgaaggcgccgctgatcctcgtcggcgcc

SEQ ID NO: 307354 - DNA, 667 bp, Unknown
  Bacterial polypeptide expressing nucleotide sequence isolated from the Sargasso Sea
atgagcgataaatatatacattccaatgttgaagataaaatttattcatattgggaaaaaaacaaactattcaaacctcaaaaaaactccaaaaaattttcagttgtaattccgccaccaaatgtaacaggaagtttacatatgggtcacgctttaaataattcaattcaagacatgttagttcgatattatcgtatgaataattatgaaaccttgtggcaaccaggcactgatcatgctggtattgctacccaggcactagtcgaaagaaaacttgaaaatgaaaatcttaacaaaaatagtctagggagagaaaaatttattgaaaaggtttgggaatggaaaaatcaatatggtgatataattatcaatcaattaaaaaaactaggttgttcatgtgactggtccagaaatgcattcactatggatgaaaatttatctaaatctgtaattaaagtatttgtagaattacataaaaagaaattaatttataaagcagaaaaattagtaaattgggatacagttttaaaaactgcaatttcagatttagaagtagatcaaagagaaatgaattctaagatttattatatcaggtatccaatcgataaatcatctgaatttataactatagccaccacaagacctgaaactatgcttggggatacag

SEQ ID NO: 307355 - DNA, 911 bp, Unknown
  Bacterial polypeptide expressing nucleotide sequence isolated from the Sargasso Sea
taatactgaaaaaaatggtcacctttattatataaaatataaaatagaagatagtaatgaaaatcttatagtggcaaccacaagacctgaaacacttttcggtgatagcgcaatctgtgttaacccgaaagatagtcgctatgaaagttttattggaagaaaagcaataatacccatattgaataaagcaatacctgtaatttccgatgatacaatagatcaagattttggaacaggatgtgtcaaaatcacaccagcacatgattttaatgattacaaattaggtaagaaacataatttagactttattaatatattaaataaaaatggcacatttaataataatgtttcaggtatttttaaagataaaaatattcataagtcaagatccgaagttgtaggtcaattaaaagaactcggtagtcttgataaaattgaagattataaaactacagtacctatgggtgaaagatctggagaaattattgagccactcctaaccgatcaatggtttatgagaatggatgatttagctcaactaggaatagatgctgtcaaaaaatcaaatattaagtttgtaccaaagaactgggagaaaatatattttaattggttaaataatattgaagattggtgcataagtagacaaatttggtggggacatagaatacctgcttggtatgatgacaaaggaaatgtttatgttggagacaatgaacaagagataagaaataaaaataatattagtgaaggtattaatttaatacaagatcaagatgttttagatacatggttttcatcttcattgtggccatttacaacaatgggttggcctaagaatacaaaagaaatagaaaaatattatccaacaagcgttttagttactggctttgatattatattttttctgg

SEQ ID NO: 307356 - DNA, 920 bp, Unknown
  Bacterial polypeptide expressing nucleotide sequence isolated from the Sargasso Sea
ttgagtaggaagagacatgatttagaatttattaatatttttgatgaaaatgctaaactaaactcaaatgtgcctgaagaatttcaaaatttagatcgatttgaagcaagaaaactaattctaaaaaaattagatgaaatgaatttattaattaaagaagaaaaacagcaaatggtcataccatatggtgatagatcaggtgttgttattgagccatggctgacagaccaatggttttgtgatgcaaaaaaattatcagttgatccaatatcagctgttaaagataataattctaaatttattcccaaacaatgggaaaatacgttttataattggatggaaaatattcaaccgtggtgtatttcaagacagttatggtggggacatcaaattcctgcatggtatggtcctgataataaatattttgttagtgaaactcaagaaggggcacaaaatcaagcaaaagaattttatggaaaggatgttgagcttagacaagatgaagatgttttagatacttggttttcttctgctctatggacattctctactttagattggccaaaaaaaacttatgaattagacaagttttatcccggcaatgttttagttacaggttttgatatcatatttttttgggttgcgcggatgatgatgatgggttcttattttatgaaggaaactccatttaaagatatttatattcatcctttaatacgtgatgaaaaaggacaaaaaatgtctaaatcaaaagggaacataattgatcctttagagctattagataaatatggtgctgatacattaagatttacattaacagcactattaaatcctggacgagatgtaaaattatctgaagctagagttaaaggatataaatcatttcacaataaaatttggaatgctggaaaattttt

SEQ ID NO: 307357 - DNA, 894 bp, Unknown
  Bacterial polypeptide expressing nucleotide sequence isolated from the Sargasso Sea
catgggtgtatttcaaggcaaatcctggtggggtcatcaaataccaatttggacttgtaaaaatggtaatttaatagcagcttataatgaagaggatgcaaaagagaaatattttaataaatttaataagaatcctgaaggacctcttaaaagagagaccgatgttttagatacttggttttcatcaggattatggccattctcaacactgggatggccaggaaagagcaatgaactgaacaacttttttcctactacaatattagttactggttttgacataatctttttttgggtttcaaggatgattatgatgtccttagagctaacaaatcaaattccttttaaaactatttatattcataatttaatacgggattccaaaggtcaaaaaatgtctaagactaaaggaaatgttatagatccattagatcttatcaagcaattcggaactgattcattaagattttttcttacatctaacatttctcctcatagcgatatcaagcttgcaaagaattcattagaaccagctagaaattttatgaataaaatttggaatgctaataagtttgtaaagtttcacaccaaagaaaagcccaataacgatttaaagctaaataaattttatgatacttggattgttaacagtttttctgaattaattgaatcctatcaaatagctataaataattgtgaaattgaaaaagcttctagtctattatataagtttttttgggatgatttttgtgactggtatattgagatagtaaaagttgaatttgaatctaatccaaaatctgaggatagtaaaaatgtaatttgtactattttaaatgattttttaatcctactttatccattttgcccgtttatttcatctgaaatattaag

SEQ ID NO: 307358 - DNA, 673 bp, Unknown
  Bacterial polypeptide expressing nucleotide sequence isolated from the Sargasso Sea
gatataatatttttctgggttgcaagaatgatgatgtttggtatggaatttttagaaaaagaaccctttaaagatatttatgtgcacgctttggttagagatgagaagggtcaaaaaatgtctaaatcaaaaggtaatgttattgacccacttgaattaattgaaaaatatagcgctgacgcacttagatttactcttttatcgatggcatctcctggtcgtgatgtaaaactttcagaggatagagtaaaaggttatagaaattttcttaataaaatatggaatgcaaataattttttaatacaaaataattgtgattttactgatatagctaaaccgaaaaatattaatgaaaatattaataaatggataattacagaatttttatttgtcaaagaaaatattaaaaaaaatattagtgattatagatttgatgaagccgcaaaaaatgcatatcaatttgtatggcattcattttgcgactggtatcttgagctttctaaaactatttattattctgataatcaatcatctaaagaagaaactagaggcgtttcagcttacttatttagagaaatattaattttactacatccatttaccccatttattactgaagaagtatggcttaaaaataagctggataaaaacaacaaagattatttaatgtttg

SEQ ID NO: 307359 - DNA, 718 bp, Unknown
  Bacterial polypeptide expressing nucleotide sequence isolated from the Sargasso Sea
atgagttcagataaatatatccattcagatgttgaaaataagatttattcttattgggaaaaaaataatttatttaaacctaaaaaaaacaaaaaatcattttcaatagttatccctccacctaatgtaactggaagtcttcatatgggtcatgccctaaataattctattcaagatttgttaacaagatttcatagaatgaataattatgaaaccttatggcaaccaggaacagatcatgctggtattgctacgcaggcgctagttgaaaagaaacttcaagatgacggaattaaaaaaattgatttaggtagagataaatttatagaaaaagtctgggaatggaaaaatcagtatggcgatataataattaatcaattaaaaaaactcggttgttcatgtgattggtcaagaaatgcttttactatggatgataatttgtcaaaatctgtaataaaagtttttgtcgatctttataaaaaaggcttaatttacaaatcaacaaaattagtaaattgggatgtggttcttaaaactgctatttctgatttagaagttgatcaaagagaggtaaattcaaaattatatcatataaagtatcaaatagaaaattcagatgattttataactatagcaacaactagacctgaaactatgctgggcgatacagcaatagctgtaaaccccaaagatgatagatacaaatcactagtaaata

SEQ ID NO: 307360 - DNA, 670 bp, Unknown
  Bacterial polypeptide expressing nucleotide sequence isolated from the Sargasso Sea
aatcaatggtttatgaatatgaacgatctagcaaaagatggtattagggtggtcaaagaaaaaaaagtaaattttgtacctgaacattgggaaaaaatatatttcaactggcttgaaaacattgaagattggtgcgttagcagacaaattgtatgggggcataggattccagcttggtatgatattgagggaaatgtttatgttggtaatgatgaggaagatattcgtattcgacataacttatcagatgcaataagtttatctcaggatactgatgttttagatacatggttctcctcagcactatggcctttttctacgctagattggaaaaaagatgatgctgtttttcaaagatattttcctactaatttacttgttactggttttgatatcatttttttttgggttgcacgaatgatcatgatgagtttgaaatttacaaaggatataccattcaaaaaaatctatatacatggcctagtccgggattctgaaggtaagaaaatgtcaaaatctattggtaatgttattgacccattggatgttatagaaggcatatctcttgataagctgttggaaaaaaggacgtctagcttaataaatgataaacataaatcaagcgtcatcaaaaagacaaaacgagattttccagacggcataaaagaat

SEQ ID NO: 307361 - DNA, 952 bp, Unknown
  Bacterial polypeptide expressing nucleotide sequence isolated from the Sargasso Sea
ttggacagatttgatgcaagaaaacttataattaaaaaattaaaggacaatggttctcttgtaaaaatcgaaaatattaaaaataaagttccatatggagatagatcaaacacaataatcgaacctctcttaacagagcaatggttcgttaatgctaaaaaattatccaaaaaaccaatcaagatagttaaagagggcaaaactactttttttccacgcaactggtcaaaaacattttttcaatggatgaatgatattgagccttggtgtatatctcgtcagatttggtggggccatagaatacctgcttggtatgatgaaaatggaaacatttttgtagctgagagtgaaaaagatgcattaaaactagcaaagaaaaaaaataaaaataaacaatttaaattaagacaagaaacagatgttttagatacttggttttcatcagccctatggccttttgcgactcttggatggccaaacaaaactacagaacttaataaattttatccaacttcagttcttgttactggttttgatataattttcttttgggtagcaaggatgttaatgatgggaaattattttagaaaaaatacaccttttcataaagtgtatgttcatgccttagtaagagatgaaaaagggcagaaaatgtcaaagtcaaaaggtaatgtgattgatccattagatttaataaatgaatatggagcagatagtttaaggtttactttaatttcgatggcctctccgggacgagatgtaaaattatcaagagatagagttactggaaatagaaactttattacaaaaatttggagtgcaaataattttttaaaacttaataattgtaaattagacaaaaagataaatttgacctcaattaaacttccaataaaccattggatttacaacgaatttactaaaacacaaaatttatcacaaaaaacatgaa

SEQ ID NO: 307362 - DNA, 917 bp, Unknown
  Bacterial polypeptide expressing nucleotide sequence isolated from the Sargasso Sea
tttgttgatgcaaaaaaactttccattaacgcaaaaaaaattgttaaaaataaaaaaacaaacttttttcccaaaaattggtcaaagacatattttcagtggatgaataatattgagccctggtgtatctcaagacaattgtggtgggggcatcaaattccagcatggtatggtcctgataaaaaaatatttgttgctgaaaatgaaaaaaaagcacagctagaatcaaaaaaattttataaaaaaaaagttaaattaaccagagatccagatgtacttgatacttggttttcttctgctctttggccctttgctacatttggatggccacattcaaattattttttgaagagattttaccccacatcagttttagttactggttttgatattatatttttttgggttgcccgaatgatgatgttaggcgttgaatttttaaaaaaagaaccttttaaagaaatttatgttcacgctcttgttagagatgaaaagggtcaaaaaatgtcaaaatcgaaaggcaatgttattgatccattagaattgattgataaatatagtgctgatgctttaagatttactttgttatcgatggcttctcctggaagggatgtaaagttatccgagcaacgggttaaaggatacagaaactttcttactaaaatatggaatgcaaataatttcttaaatatgaataaatgtaattttaaaagtaaaattataactaaaaaactttcactcaatattaataaatggatttattcagagttaattaatacaaaaaatttatcagaaaaatatattaaagattatagatttgatgaagcatcaaaagttatttataaatttgtttggaacagttattgcgactggtatctagaactatctaaaacaatactttcttctaacaaaaaaaa

SEQ ID NO: 307363 - DNA, 985 bp, Unknown
  Bacterial polypeptide expressing nucleotide sequence isolated from the Sargasso Sea
actgatgaagcacacactaatgatagtgttcccgaaccttttgctaaccttgatcgattaaaagtaagaaaggcagttctagaagagctgaaaaacaaaaatttacttttaaaagaagagaagcatcaaataagtgttccaagaggagaacgctccaatattgtgattgaacctaagcttagtcatcagtggtatgtgaaaacgcaagagatggcaaaaaaagctaatgaagctgttaataagggtgaggtagttttccatcctggtaattggattaaaacctactttaactggatggataatattcaagattggtgtattagtagacaaatatggtggggtcatagaattcctgcatggtatgacgaagatgggaatatatacgttggctatgatgaagatgaattaaggaaccattacaaattagatgatagaaagctaactcaagatgaagatgtactagatacatggttttcatcctctttatggccttttggatctttgggttggcctaaagaaaatgaattagaaaagtactttcctacaagcttattagtgactggcttcgatattattttcttttgggtcgcacgtatgatgatgatgagtctagaatttacaggcaaagtaccttttaaagatgtttatgtcacaggtttaattagagatgaaaatggacaaaaaatgtcaaagtccaaaggcaatatcattgacccaattgatctaatctatggcattgatcttgaagatctagtgaccaagagaacagcaaacctaatgcaggaaggtctagctgaaaaaatagaacgtaaaactcgtaaacagtttcccaatggaatcgaatcatatggaaccgatgcattacgtatgacattcttttctttagctacacatactagagatattagttttgaacttggaagactcaaaggctataggaatttttgtaataaaatctggaatgcagctcggttcattaataata

SEQ ID NO: 307364 - DNA, 799 bp, Unknown
  Bacterial polypeptide expressing nucleotide sequence isolated from the Sargasso Sea
atggataaaagatatgagccacttattattgaagaaaagtggtcagagctttgggcaaaaaacaatttaggtaaaaataactcctcacaaactttttcgcaggttattccacctccaaatgtaactggaactcttcatatggggcatagcttccagtattcgataatggatttctatgccagatacaatcacttaaatgatgtaaatactcattggcagatgggtaccgatcatgcaggaattgcaacgcaaatggtcgttgaaaacaacctatccagagagaatattgataaaaatgatttgggtagagaagattttgttaaaaaagtttgggagtggaaagaattttcagaaaataaaattactggacaaattaaaaggctaggtaactcagttgattggagtaattacagatttactttggatgaaggttttaatgaagctgttcttaaagcttttgttgagctttataggaaagagaaaatctatcgtggttacaggttagtaaactgggatccatctttaaaaactgcggtttcagatctggaggttgtaagacaagaaaaaaaaggtcttatttggtatataaagtatccaattataggttcagatgattttgtaacagttgcaacaactcgtccggaaactatgtttggagatatggcaattgcagttaatcctaaagatgaaagatacaaagatatcattggaaaaaaagttgagctcccatttgtaaagagaaaaatcccaataattggtgatgactatgtggataaagagttcggaacgggttgcctta

SEQ ID NO: 307365 - DNA, 890 bp, Unknown
  Bacterial polypeptide expressing nucleotide sequence isolated from the Sargasso Sea
aacagctatttcagacttagaagtagatcaaagagaggttaattctaaaatatattacatcagatatttaatagacggcactgaagaatttattaccattgcaacaacaagacccgaaacaatgcttggtgatacagctatagctgttaatccaaaagacgaaagatttaaatcctttgttggaaaaacagttaccattccaattgttggaagaaaaataaaaattattgaggatgactatgcagatcctgaacaaggaacaggagcattaaaaattacaccagcgcatgattttaatgactatgatgttggtcaaagaaataaacttgaaataataaatatttttaccgaagctggtaaaataaataaaaatgcacctgaacattatgttggccttgataggtttgaagctagaaaaagaattttaaaagaacttaaagaaaaagatttttttgtaaaagaagagagtattaaaaataaagttccttatggagatagatctaattctataattgaaccttttttaacggaacaatggtttgcagatgctggtaaattatcagttaaagctaaagaagtagttaattcaaaaaaaacaaatttctttcctgagaattggtcaaaaacttatttccaatggatggataatattgaaccatggtgtatctctagacaactttggtgggggcaccaaatacctgcatggtatggtcctgatgaaaaaatttttgttgctgaaaatgaagataatgcaaaacaacaagccaaaaaacattatggtaaagatgttgaattaaatcgtgatccagatgttttagatacctggttctcatctggcttatggccttttgccactcttggttggccggatgataataaattttgtgata

SEQ ID NO: 307366 - DNA, 826 bp, Unknown
  Bacterial polypeptide expressing nucleotide sequence isolated from the Sargasso Sea
gactggtttcgatatcatttttttctgggttgcacgaatgataatgatgcaacttgcaacagtaaaagaaatccctttcaaaaaggtctacgtgcatgctttagtaagagatgaaaacggaaaaaaaatgtcaaaatcacttggtaatgtgcttgatccactagacctaattgataaatatggagctgatccccttagatttactttaacggcaatggcggttacaggacgagatttaaaattatctgaatcaaggattgagggttacagaaattttatgaccaagatttggaatgcagcaaaatacctagaaatgaatgaatgtcattttgacagtgagtttgatatttctggcattaaatcaccaccaaataaatggataattggcaaaactttaggcactttggaagcggtaaaccaaagttatagtaagtttcggtttaacgatactgccaatacgctttataaccatacatggagggttttctgtgattggtatatcgagttttcaaaatcattattaaataacgaaagcgaagaaacttctcgggaaactagaaaaactctagcttgggcttttgaagtgtgcttaaagatgcttcatccaatcatgccatttgttaccgaggagctttgggggcattttaaaaaaggagaaggccttttatctactagtgattggcctaaatttagtaacatttctatggatgtagacgagattaagaacatagaaagcgttatatcctttatcgaagatattaggtctactaaagccgatttcaatttagtttctggggaaaaaacagcgttgtacgtggtcgatttg

SEQ ID NO: 307367 - DNA, 901 bp, Unknown
  Bacterial polypeptide expressing nucleotide sequence isolated from the Sargasso Sea
caagatgttctggatacgtggttttcttcctctttgtggacttttgctacccttggttggccccaacaaacaaaaagattagataaatatcaccctacctcattattagtgactggtttcgacattatctttttttgggttgcccggatgataatgatgacaaagcatttcacaaaggcgataccgtttaaagaaatctacattactgggcttatcagagatagtgaaggccaaaaaatgtccaagtcaaaaggaaatgttcttgaccctttggatattattgatggaataaatttagaagctcttatttcaaaaagaatttctggtctgttaaatccagacgacgagcagaagataatcaagcagacaaagaaagattatcctcaaggaataaaagctcacggtactgatgctttgagatttacttttttgtctcttgcttctggaagtagagatattaattttgatatgaaacgcgtagaaggttatagaaacttttgtaacaaactgtggaatgcctctagattcattgaattaaataagccagctagtttcaaaaagactaatcaatttataaaaactccagaagataaatggatcgtggagaaattaaatcgcacgatagtttctatgaatacgcatatggataattatagatttgatttagccactcaaagtgtttacgaattcgtatggaatgatttttgtgattggtacatagaattttcaaaaaatcgacttgattcagataacattaagaaaagcgaagtagatagaaccatatctggtttgctacatattcttgagtcaatcttaaaactttgtcatccttttatgccttttattacagaagaaatctggaatcagattacttccgggaaaaaagaatcattcttgttaa

SEQ ID NO: 307368 - DNA, 322 bp, Unknown
  Bacterial polypeptide expressing nucleotide sequence isolated from the Sargasso Sea
aatgggacttgataagcattttcaatcagcaccggtagaaaaacgtatatccgagaaatggattagccaaaaagcgtttcgagctggtataaatgccaaaaatggccaacccagttacacaataatgatacctccgcccaatgttactggggtgttacatatggggcatgcatttaataatactctacaggatattttaatccgctggaaacgtatgcaaggctataagactttgtggcaaccgggcactgatcacgcgggaattgctacacagatggttgttgaacgacagttggcagaagagggtaaaaaacgcactgat

SEQ ID NO: 307369 - DNA, 720 bp, Unknown
  Bacterial polypeptide expressing nucleotide sequence isolated from the Sargasso Sea
catgcttgagaagacatatgacgcgaaaagcgtcgaacccaggattgccacccggtgggaacaggccgatgccttccgcgccggagccaacgcaaagccgggcagggagagcttctcgatcgtgatcccgccgccgaacgtgaccggctcgctgcatatgggtcacgcgctcaacaacacgctgcaggacatcatgatccgcttcgagcgcatgcgcggcaaggacacgctgtggcagcccggcatggaccatgccggcatcgccacccagatggtggtcgagcgccagttgatggaacgccagcttcccggccggcgcgagatgggccgcgacgctttcgtcgacaaggtctgggagtggaaggaagagtccggcgggcagattatcaaccagctcaagcgccttggcgcctcctgcgactggtcgcgcgagcgcttcaccatggatgaggggctttccgaggccgtgcgcgaggtcttcgtctcgctctacaagcacggcctgatctatcgcggcaagcggctggtcaactgggatccggaattcgaaaccgcgatttccgatctcgaggtcgagaaccgcgaagtcgacggccatatgtggcatttcaaatacccgctggccggcggcgagacttacacctatgtcgagaaggacgcggacggcaatgtcaccctcgaggaggagcgcgattacatctcgatcgcgaccacccgtcc

SEQ ID NO: 307370 - DNA, 928 bp, Unknown
  Bacterial polypeptide expressing nucleotide sequence isolated from the Sargasso Sea
ggtagtttgcatatgggacatgctttaaataattcattacaagacgttctagtcagatatcacagaatgaataactatgaaactctatggcaaccaggtactgaccacgctggtatagctacccaagcattagttgaaaaaaatcttaaatctaaaggagtcgacaaaaatagtattggaagagaaaaattcatagaaaatgtttgggaatggaaagatgaatatggaggaaagattattaaccaattaaaaaaacttggctgttcctgtgattggtctagaaacgcttttactatggataaaaatttatctaaatctgtaataaaagtgtttatagatctatataacaaaaaattaatttttaaagctaaaaagttagttaattgggatacagttttaaaaactgctatatcagatcttgaggttgatcaaagagaagtaagttcaaaattatactatattaaatacaaagtagagaatagagacgaagcaatcactatagcaactactagaccagagactatgcttggtgacactgctattgcagttaacccgaaagataaaagatattctaatttagtaaataagtttgcaattttacctatagttggaagaaaacttaaaatagtccaggatgattatgctgaccctgagcaaggtagtggagcagtcaaaattacaccggcacatgatttcaatgactttgaagtcggtcgaagacatcggataaaatcaataaatatttttaccgaagatggaaaaattaatactaatgctccaaaagagtatgtaggtctagacagatttgaagcaagaaaaaaaataattgaaaaattaaaagaattagatgcctttgaaaaagaagagactataaaaaataaagttccttatggcgatagatctaattctataatcgaacctttttaac

SEQ ID NO: 307371 - DNA, 876 bp, Unknown
  Bacterial polypeptide expressing nucleotide sequence isolated from the Sargasso Sea
attcaaaactatatcacatcaaatatccaatcgagggatctgataaatttataactattgcaactactagaccagaaaccatgttaggagatacagcagttgcagttaatccatcagatgaaagatataaatctttaataaataaaaatgtaatagttccaatagttgatagaaaaataaaaattatagaagatgattatgctgatcctgaacaagggactggagctgttaaaattacaccagcacatgatttcaatgattatgaagtaggagagagaaataatttagaagtcataaatgtttttacaccggatggtaaaattaatgaaaatgctcctgataattatattggacttgatcgatttgaagcgagaaaaagaattttaaaagaactttccgataaaaacttatttgttaaagaagaaaaaattaaaaataaagttccatatggtgacagatctaattcaataatcgaaccttatttaactgaacagtggtttgtagatgctaaaaaactttcaattaaagctaaagaaatagtaaataataaaacaactaatttttttcccgttaattggacaaaaacttattttcaatggatggacaatatagaaccatggtgtatctcaagacagctttggtggggacatcaaatacctgcatggtatggacctgatggagaaatatttgtagatgaaacagaagaaggtgcaaataaattagctaaagaacactataaaaaagatgtcgaattaataagagatccagatgttcttgatacatggttttcatcaggcctatggccttttgcaacattaggatggccagaaaaaaatgaatatttagaaaaattttatccaacttcagtatggtaac

SEQ ID NO: 307372 - DNA, 856 bp, Unknown
  Bacterial polypeptide expressing nucleotide sequence isolated from the Sargasso Sea
atagtaacatctaaacaaacaaaattttttcctaaaaattgggaaaaaacttattttcagtggatgaacaatattgagccatggtgcatatccagacagttatggtggggtcatcagatacctgcttggtacggaccagataaaaagatttttgttgctttaaatgaaaaagaagcatcgaaacttgctaaaaaattttataaaaaaaaagtaaatttaattagagatccagatgttttagatacatggttttcctctggactttggccttttgctacacttggatggccaaaaaaaaattattatttaaaaaaattttacccaacttcagttttggttacaggttttgatattattttcttttgggtagctcgaatgatgatgtttggtatggaaatgattaataaaaaaccttttgaagatatttatgttcatgcactagttagagatgaaaaaggtcaaaaaatgtcaaaatcgaaaggtaatgttatagatccattagagttgattgaaaaatttagtgctgatgctcttagatttactttgttatcaatggcttcaccgggaagagatgttaaattatctgaggatagagttaaaggatatagaaatttattaaataaactttggaatgctaataattttttaatacaaaataaatgtaatttttcaaagataaaaaaaacatcaaaaattaaaattaacataaataaatggatttatgcaaaactattagaaaccaaaaaagaagttgaaaataatattaaaagctatcgatttgatgaagcagcaaggagcgtttatcaatttgtctggcattcatattgtgattggtacttagaattatcaaaaacaa

SEQ ID NO: 307373 - DNA, 860 bp, Unknown
  Bacterial polypeptide expressing nucleotide sequence isolated from the Sargasso Sea
cgttgatagagaaatacctattatcgctgattcacatgttgataaagatttttgtacgggttgtgtgaaggttactccagcccatgatccaaatgattttgcaataggaaaaaggcataatttaaaacagattaatgtaatgaacaaagatggaactttaaatattaatgcaggtatttttcaaaatttagatagatatgaggctagaaagaaaattatcaaagaattggataacttaggccttttgacaaagatagaggattataaacatactgttcctttttctgatagaggtaaggtgccaattgaacctttattgtcaacacaatggtttttgaaaatggatgatatatcacaaggatgtcttaatgaaattgattctaaaaaaccatcgtttattcctccacgctgggagaaagtttataaggattggttagagaatattaatgattggtgtatcagtcggcaattgtggtgggggcaccaaataccagcatggtatgttttagatgactctcaagactcaatagaacaaaatactccatatatcgttgcaagaaatgaagaagatgccttaatcgaagctaataaaaaatttggattaaatattaaattggttcgtgataaagatgttttagatacatggttttcaagtggtttatggcctttctcaacccttggttggccaaatacaaatgatcctgattttaaaaaatggtatccaaataatgttcttgttactggtttcgatattattttcttctgggtggccagaatgacaatgatggggaatacttttacgaataatattccttttaaggatgtttatattcatggtctagttcgagatgaaaacaata

SEQ ID NO: 307374 - DNA, 931 bp, Unknown
  Bacterial polypeptide expressing nucleotide sequence isolated from the Sargasso Sea
tataattgaaccttatttaactgagcaatggtttgcagatgctaagaagctttcaataaaagcaaaagaaatagtaaataataaaacaactaatttttttccagttaattggacaaaaacatattttcaatggatggataatatagaaccatggtgtatttcaagacagctttggtggggtcatcaaatacctgcatggtatggacctgatggagaaatatttgtagatgaaacagaagaaggtgcaaataaattagctaaagaacattataaaaaagatgttgaattaattagagatccagatgttcttgatacatggttttcatctggtttatggccttttgcaactttaggatggccagaaaaaaatgaatatttagaaaaattttatccaacctcagtattagtaacaggatttgatattattttcttttgggttgcaagaatgattatgtttggaatggaatttcaaaataaagaaccatttaaaaatatttatgttcatgcattagttagagatgaaaaaggtcaaaaaatgtcaaagtctaaaggcaatgtaattgatccattagaattaatagaaaaatatagtgctgatgctttaagatttacacttttgtcaatggcatctcctggacgagatgtaaagttatcagaggatagagttaaaggttatagaaattttttgaataaaatatggaacgctaataattttctaattcaaaacgattgtaaatttgaaaatatagaaactcctaatgatttaaaactaaatattaataaatggatttttgttgaattcactaacactaatgataagattaaaaaatcaatagatagttatcgatttgatgaggctgcaagaattgcatatcaatttgtatggcattcgttctgcgattggtacttagaattatctaaaactgttttt

SEQ ID NO: 307375 - DNA, 863 bp, Unknown
  Bacterial polypeptide expressing nucleotide sequence isolated from the Sargasso Sea
taaaaaatactgccttcattgtgtagataatgaagttcatatatctgatgatattgaagattttgaaccacttaatatttttactgatgaagcacatagtaatgataacgtcccttctcctttcaaaaatttagacagattcaaagtaagaaagcttgttcttgaagaaattaaaaagctagatttatttgtaaaagaggagccgcatgaaatcagtgttcctcgaggagagcgttcaaatatagttatagagcccaaactaagttatcagtggtatgtaaaaacaaaggacatggctgataaggcaaataaagctgtaaaaaatggagaaattaaatttcatcccgaaaactggattaaaacatattttaactggatgaataatattgaagattggtgtattagcagacaaatctggtgggggcatagaattcctgcttggtatgacgatcatggaaatgtttatgtggggtattctgagaacgaagtccgaacttattattcactcgataatagatcgctgaggcaagatgatgatgttttagatacatggttttcctctagcctttggccttttgcatcaatggggtggccaaatgaatcaaagaatttaaaaacttttttcccaacaaacctattagttactggttttgacattattttcttctgggttgcaagaatgatcatgatgagtatcgaatttacaggaaagattccatttaaagatatctatgttactggcctgataagagatgaaaatggacaaaaaatgtcaaagtctaaaggcaacattattgatcctattgacttaatatatggtatttctcttgaagatcttctcgaaaaaagaacatcatatctta

SEQ ID NO: 307376 - DNA, 724 bp, Unknown
  Bacterial polypeptide expressing nucleotide sequence isolated from the Sargasso Sea
atggataaaagatatgagccacttattattgaagaaaagtggtcagaactttgggcaaaaaataatttaggtaaaaataactcttcacaaactttttcgcaggttattccacctccaaatgtgactggaactcttcatatggggcatagcttccagtattcgataatggatttctatgccagatacaatcacttaaatgatgtaaatactcattggcagataggtaccgatcatgcaggaattgcaacgcaaatggtcgttgaaaataatctatctagagaaaatattgataaaaatgatttgggtagagaagattttgttaaaaaagtttgggagtggaaagaattttcagaaaataaaattacaggacaaattaaaaggttaggtaactcagttgattggagtaattacagatttactttagatgaaggttttaatgaagctgttcttaaagcttttgttgagctttataggaaagaaaaaatctatcgtggttacaggttagtaaactgggatccatctttaaaaactgcagtttcagatctggaggttgttagacaagaaaaaaaaggtcttatttggtatataaagtatccaattataggttcagatgattttgtaacagttgcaacaacacgtccggaaactatgtttggagatatggcaattgcagttaatcctaaagataaaagatacaaagatatcattggaaaaaaaagttgag

SEQ ID NO: 307377 - DNA, 763 bp, Unknown
  Bacterial polypeptide expressing nucleotide sequence isolated from the Sargasso Sea
ataatgatgccaccacctaatgttacaggtagcttacatatgggccatgctttaacctttacaattcaagatatattaatcagatatcatagaatgaagggtatggaagtgttgtggcaagcagggacagatcatgcaggaatagctactcagatggtggttgaaagaaaattaagtgagtcaaatctagatcgacgatctctgggtagagaaaagtttattgaaaaagtatgggaatggaaaaaagagtcgggtggtcagataagtaaccaattaagaagacttggtgcttctgcagattggtcaagagagagatttactatggatgaaggtctttctaatgcagttaagaaagtttttgttagtttatttaatgataagattatttataaagataagagattggttaattgggatcctaaacttttaactgctatttctgatctagaagtagagcaaagagatactgaaggaagtttatggcatattaaatatcctatagatgaaaataatcatatcattgttgcaacaacaagacccgagacaatgttaggtgatactgcagttgccgttcatccagatgatgaaaaatataaaaatctaactggcaaattttgtaacttaccaatttcaaataagaaaataccaatcattgctgatgaatatgcagatcctgaaaaaggttctggagctgtaaaaattacacctgcacatgactttaatgattttgaggtaggaaagagacatgatttagaatttatta

SEQ ID NO: 307378 - DNA, 581 bp, Unknown
  Bacterial polypeptide expressing nucleotide sequence isolated from the Sargasso Sea
actggccaagacctatgacccggttggcacggaggcccgttggcagcaggcctgggaggaccagggagcctttcatcccgacccgaaggcccccggtgagccgttctctgtggtgatcccgccgccgaacgtcaccggcagcctgcacatgggccatgccttcaacacggccctgatcgacacgatcgttcgctatcagcgcctggcggggaagaacgtgctctgcctgcctggcaccgaccacgcctcgatcgcggtgcagacgatcctcgagaagcagctgaaggaggagggcaagacccgccacgacctcggccgtgaggcgtttctggagcgggcctggcagtggaaggccgaaagcggtggccggatcgtgggccagctgcggcgcttgggttattccgtggattggaagcgccagcgcttcaccctggatgaaggcctgagtgaggcggtgaaggaggccttcgtgcgcctgcatgagcaggggctgattgtccgcggtgagtacctggtgaactggtgccccgcctccggttcggcggtgagcgatctggaggtggagatgaaggaggtggatg

SEQ ID NO: 307379 - DNA, 977 bp, Unknown
  Bacterial polypeptide expressing nucleotide sequence isolated from the Sargasso Sea
tggattaaatattaaattggttcgtgataaagatgttttggatacatggttttcaagtggtttatggcctttctcaacccttggttggccaaatacaaatgatccggattttaaaaaatggtatccaaatagtgttcttgttactggtttcgatattattttcttctgggtggcaagaatgacaatgatggggaatacttttacaaataatattccttttaaggatgtttatattcatggtctagttcgagatgaaaataataaaaaaatgagtaaaagttcaggtaatggtattgatccaatactattaattgataaatatggttcagatgctctacgatttgctttaattcgagaagttgcaggcgctggacaagatatccggcttgattttgataggaaaaaagatacgtcttcaactgttgaagcttcaagaaattttgcaaataaattatggaatgcaactaaatttgtgttaattaataaaacttctaataataataattatttgcttaatgagagtgatgaaacttctttagagttatgcgataagtggattttatcgaaattgaatcaagtaaatacaaaagtcgttgctttgttgaaagaatataaattgggagaatctgcgaaacttttatatgaatttacatggaatgatttttgtgactggtatgtagaatttgctaaacaaaggtttaataataaagagactaaaaatagacaaatatctgaaaaagttttaataaaagtgctcaatgacattttggtaatgattcatccttttatgccgcacattactgaggaactttggcatgcgctgcaactaaaaccagataattcattattatctcttcaaaaatggccaattcacgaaaataaatttgttgataataagcttgataactcctttcagcaactctttgaaattattaggctgattagaaatttgagagctgaattaggtcttaagccat

SEQ ID NO: 307380 - DNA, 745 bp, Unknown
  Bacterial polypeptide expressing nucleotide sequence isolated from the Sargasso Sea
catggttggaaaatttgccatacttcccatcgttaaaaaaagaattccaattgttgctgatgaatacgttaaaatggaccaaggttctggcgcggtaaaaattactcctgctcatgattttaatgattatgaattaggaaaaaggcataaactagaaataataaatatctttaatgaaaatgctgaacttaatgaaaactgtcctgaagaatatcaagggcttgatcgttatacagcacgagaaaaaataattagtgaacttaaagaaaaggaactcttaagcaaagaagaagaaaatttacatagtgttccgtatggcgatagatctggagaagtaatagagcctctcctaactgatcaatggtttgttgatgcaaaaaaattatctatagaagctattagtaatgtaaaaaatggcaatacaaaatttatacccaataattgggataaagtttattttgattggatggagaatattcaaccttggtgtgtatcaagacaacttatctggggccatcaaattccagcttggtatggacctgatgggaatatttttgtggaagaaacagtagaagaagcaattatttctgcaaatagatactatgggaaagatgttaagcttattcaagaagatgatgtattggatacctggttttcttctgcactctggccattttcaacactgggttggccggagaaaacatctgaattagaaaaatactatccaacttcaactcttgttact

SEQ ID NO: 307381 - DNA, 695 bp, Unknown
  Bacterial polypeptide expressing nucleotide sequence isolated from the Sargasso Sea
aatggaatttaaaaaatacaatcatttggaagaagagaaaaaaatctcagatttttggatcaaaaaaggttgttttaaaccccagaaaggaagagttaaaaatacattctcgattgtaattccacccccaaatgtgactggaagacttcatatgggacatgccttaaataatagtcttcaagatgtgctaattcgatttaatagaatgaagggacatgaaactttgtggcaacctggaacagaccatgcaggtattgctactcaagcagttgtagaaaaaaatttgcaacaaaaaggtattaaaaaagatgatttaggaagagatagatttattcaaaaagtttgggaatggaaagaacagtcaggtggtattattttagatcaactaaaaaaattgggttgttcgtgtgattggtcaagaacaagattcactatggataaagatctatctcatgccgtaattaaggtatttgtagatctctataagaaaaagttaatttataaagataaaaaactagtaaattgggacactcaacttcaaacagctatttcagatttagaagtaatacaaaaggatgtgcaatctcaattatattatatagattatcaaattgaaaactcagataaaaaaataacaattgctactacaaggcctgagactatgatgggagatacagcagttgctgtaaatccta

SEQ ID NO: 307382 - DNA, 442 bp, Unknown
  Bacterial polypeptide expressing nucleotide sequence isolated from the Sargasso Sea
aatgcagcttgataaattttttgattttttaaaagatgaaaaaaatctttattcacaatgggagcaatcaaattgttttaaaccaaaaaaaggaggtgagccttattctataatgatgccaccacctaatgttacaggtagcttacatatgggtcatgctttaaccttcacaattcaagatatattaatcagataccatagaatgaagggtatggaagtattgtggcaagcaggaacagatcatgcaggaattgctactcagatggtggttgaaagaaaattaagtgagtcaaaactagatcgacgatctttaggtagagaaaagtttattgaaaaagtatgggaatggaaaaaagagtcgggtggtcagataagtaatcaattaagaagacttggtgcttctgcagattggtcaagagaaagatttactatggatgaaggt

SEQ ID NO: 307383 - DNA, 772 bp, Unknown
  Bacterial polypeptide expressing nucleotide sequence isolated from the Sargasso Sea
cgtcgcagaaatgagtgcacttggacttttggaaaaggtcgaagacaatgatatgacggttccctatggcgaccgctccggcgtcgtcatcgagccctggctcatggaccaatggttcgtggacgcgcaacggctggcaggtccggccatcaccgcagtggagcagggtaggaccaaattcgttccccagcaatgggaaaacacctattacgaatggatgcggaacattcagccttggtgcatttcgcgccagatctggtggggtcatcaaattcccgcgtggtttacgtcatctggtgagatttttgtggcaatgaccgaagaagaagcgtacgccgcggctgtcgctgcttgcggtgatgacgttgttctgacccgggaccctgacgttctggacacttggttctcgtcagcgctctggccattctcgacgctcggttggccagacacaacgcccgaggttgagcggtattatcaaactgacgttctgattactggatttgatattatctttttctgggtcgctcggatgatgatgatgggtattcacttcatggatgacgtaccgtttcatacggtctatatccatgctctggttcgtgatgagcagggccagaaaatgtcgaagtctaagggtaacgttattgatcccatagagttgattaacaaatttggcgctgacgctctgcgatttacccttaccgccttcgccgcccaggggcgcgacgttcgcctctcagagcagcgcgtcgaagggtatcgaaacttctgc

SEQ ID NO: 307384 - DNA, 984 bp, Unknown
  Bacterial polypeptide expressing nucleotide sequence isolated from the Sargasso Sea
tggtgaacacttagataagtacttagaagttgcaacaacaagaccagaaactcttttgggtgatactgctgtggcagttaatcctgatgatgatagatataaagaatttattggtgtcaaagtaaaagttcctttcgttgatagagaaatacctattatcgctgattcacatgttgataaagattttggtacgggttgtgtgaaggttactccagcccatgatccaaatgattttgcaataggaaaaaggcataatttaaaacagattaatgtaatgaacaaagatggaactttaaatattaatgcaggtatttttcaaaatttagatagatatgaagctagaaagaaaattatcaaagaattggataacttaggtcttttgacaaagatagaggcttataaacatactgttcctttttctgatagaggtaaggtgccaattgaacctttattgtcaacacaatggtttttgaaaatggatgatatatcacaaggatgtcttaatgaaattgattctaaaaaaccatcttttattcctccacgctgggagaaggtctataaggattggttagagaatattaatgattggtgtatcagtcggcaactgtggtgggggcaccaaataccagcctggtatgttttagatgaatctcaagactcaatagaacaaaatactccatatatcgttgcaagaaatgaagaggatgccttaatcgaagctaataaaaaatttggattaaatattaaattggttcgtgataaagatgttttggatacgtggttttcaagtggtttatggcctttttcaacccttggttggccaaatacaaatgatccggattttaaaaaatggtatccaaatagtgttcttgttactggtttcgatattattttcttctgggtggcaagaatgacaatgatgggggatacatttacaaataatattccctttcaggatgtttatattcatggtctagttcgaga

SEQ ID NO: 307385 - DNA, 946 bp, Unknown
  Bacterial polypeptide expressing nucleotide sequence isolated from the Sargasso Sea
aaaactatcagtaaaagcaaagaagattgtaaagaacaaaaaaacaaaattttttcctcctaattggtcaaagacttatttccaatggatgaataatattgaaccttggtgtatatcaaggcaactttggtgggggcatcaaataccagcttggtacggacctgataaaaaaatatttgtagcatcaaattataatgaagcaaaaaaactagccaaaaaaaaatacaagaaagatgtagaattagtaagagatgaagatgtcttagatacgtggttctcatcaggattatgggcttttgcaactcttggatggccaaaaaaaaatgaatacttaaaaaagttttatccaacatcagttttagtaaccggttttgacattatctttttttgggtagctagaatgatgatgtttggaatggagtttttaaataaacaaccatttaaagaaatttatgttcatgcattggtaagagatgaaaaaggacaaaaaatgtctaagtcaaaaggtaacgtaattgatcctttgatattgatagataaatatagtgcagatgcattaagatttactttgttatcaatggcatcaccaggaagagatgtaaaattgtctgaagacagagttaaaggttatagaaattttcttaataaactgtggaatgcaaacaactttctatccatgaataagtgtgatttttcaaagtctaaaaaggagccaaaagtaaaattaaatataaataaatggattatttcagagttaaatacggtaagtaagcttattgaaaagaatattaatgattataggtttgatgaagcagcaagaaacatttaccaatttgtttggcattcatattgtgattggtacgtagaactatctaaaactatattaaattctaaagaaaagtcgtcaatttcagaggtaaaacagacattaagttatgtttttaaa

SEQ ID NO: 307386 - DNA, 643 bp, Unknown
  Bacterial polypeptide expressing nucleotide sequence isolated from the Sargasso Sea
atgtctttatctaagttttttaactttctagaagaagaaaataaaatttatttaaactgggaaaaatcagaaagttttaaatcaaaaaaaaatgaagaagcatattcaattatgatgccgccaccaaatgttacgggaagtcttcatatgggtcatgcacttacttttactatccaggatattttaattcgttatcatcgcatgcaaggaaaagaggttttgtggcaagctggaacagatcatgctggaattgctacacaaatggtagttgagagaaaattatcggaagagggtttagatcgacgcacattaggaagagaaaaatttattgaaaaggtttgggaatggaaagaggagtctggtgatagtataaataatcaattgagaaggttgggagcatctgcagattggtctcgacagagattcacaatggacgatggtctttcagaagctgtaaaaaaagtatttgtggatctgtataacgatggaataatttatagagataagagattagttaattgggaccccaaattactaactgcaatctcagatttagaagttgagcaaaaagaacaagagggcagtttatggcatattaaatatccaatagacaagaaaaattatattgttattgcaacaactc

SEQ ID NO: 307387 - DNA, 789 bp, Unknown
  Bacterial polypeptide expressing nucleotide sequence isolated from the Sargasso Sea
aaaattaaaataataaaagacaattatgcggatcctgaacaaggaactggagcactaaaaattactccagcacatgattttaatgattatgatgtaggacagagaaataaacttgaaataattaatgtgtttacagaagagggtaaaataaatgaaaatgcaccaaaagattatgtaggtttggatagatttgatgctcgtaaaaaaatattaaatgagcttaaagaaaaagattattttgttaaggaggaaaatataaaaaataaagttccttatggagatagatctaactctgttattgaaccttttttgactgaacaatggtttgttgatgcaaaaaaattagcaattaaagctaaaaagattgttaaaacaaaaaaaacaattttttttccaaataactggtctaaaacttattttcaatggatgaataatattgagccttggtgtgtttctagacagttgtggtggggtcatcaaataccagcgtggtatggacctgacaataaaatatttgttgctttaaatgaaaaagaagcaagtaagcaagctaagaaacattacaaaaaagatgtaaaattagttagggatcctgatgtattagatacttggttttcctctggtttatggccgtttgcaactttaggatggccagataaaaaagattttgtaaagaaattttatccaacaacagttttagtaactggctttgatataatttttttttgggttgcacgaatgatcatgtttggaatggaatttcttaataaagaacctttcaaagatatt

SEQ ID NO: 307388 - DNA, 821 bp, Unknown
  Bacterial polypeptide expressing nucleotide sequence isolated from the Sargasso Sea
gatgcaaaacaacaagctaaaaaacattatggtaaagatgttgaattaaatcgcgatccagatgttttagatacttggttctcatctggcctatggccttttgcaacacttggttggcctgatgataataaatatgtcgataaattttatccaacatcagtattagttacaggttttgacattatttttttctgggttgctagaatgattatgtttggtacagaatttttaaacaaagaaccatttaaagatatttatgttcatgctctagttagagatgagaaaggacaaaagatgtctaaatcaaaaggcaatgtaattgatcctttagatttaattgaaaaatatagtgcagatgcacttagatttactttgttatctatggcttcaccaggtacagatgttaagctttctgaggatagagtaaaaggttacagaaattttttaaacaaattatggaatgcaaataactttttaatcactaatgaatgtgattttaaggatatagataaagttccaagtttaaatgtaaacattaataaatggatttattcagaacttgttgaaaccaaaaataaagtagaaaaaaaccttgaggattatagattcgatgaagcagctaaaaatgcttatcaatttgcatggcattcgtattgtgattggtatttagaactatctaaaactattattttttcagatgatgaaaaagctaaagcagaggttaaaaaagtatcatcttttgtgttcaaacaaattttgattttgttacatccttttattccttttgttactgaagaaatttggcttaaaacaaatttgat

SEQ ID NO: 307389 - DNA, 879 bp, Unknown
  Bacterial polypeptide expressing nucleotide sequence isolated from the Sargasso Sea
tatgctgatcctgaacagggaactggggcagttaaaattacaccagctcatgattttaatgattatgaagtaggcgttagaaataaacttgaaattttaaacatatttactgacgatggaaaaattaacaaaaatgctccaagtgaatttgttggtttagatagattccaagctagaaaaaaaatcttaaataatttaactgaaaaacaattattagttaaggaagaaaatattaaaaataaagtaccttatggagataggtcaaactcaattatagaaccttacttgacagaacaatggtttgttgatgcaaaaaaactttcagtaaaagcaaaaaaaattgttaaatcaaacaagacaaaattttaccctaagaactggtcaaaaacttattttcagtggatgaataatattgagccttggtgtatttcaagacaactttggtggggacatcaaatacctgcctggtatgggccagataagaaaatatttgttggcaaaactgaaagtgaagcaaaaaaaattgctaaaaaatattataaaaaagatgttaaattattaagagaccctgatgttttagacacttggttttcatctggtttatgggcatttgcaacattaggttggccagcaaaaaatgattatgttaaaaagttttatcctacatctgttttagttactggttttgacatcatattcttttgggttgcccgtatgattatgtttggtatggaatttttaaacaaagaaccttttaaagatatttatgttcatgctttagttagagatgaaaaaggacaaaaaatgtctaagtccaagggtaatgttatagatcatttagaacttatagaaaaatacagcgcagacgctttaagattt

SEQ ID NO: 307390 - DNA, 840 bp, Unknown
  Bacterial polypeptide expressing nucleotide sequence isolated from the Sargasso Sea
cattatgaccgatgggagaaagccggttacttcaaagcaataggtaacggaaacccctattgcatagtaattcctccccctaatgttactggcactcttcatatgggccatgcatttcaacataccatcatggatgctttgattcgttatcatagaatgaaaggccataacacactatggcaaatgggtacggaccacgctggaatagctacgcaaatggtagttgaacgcttacttaacgcagaaggtcaatccaagcatgatataggccgagaggcttttataaaaaaagtttgggaatggaaacagcattctggaaatataatttcccatcaaatgcggtgcctaggagcgtctgtagactggagccgagaacgcttcactatggacacaggtctttgcaaagcagttaccgaagagtttgttcagctttacgacgagggccttatatataaaggcaaacggttagtaaattgggatcctgtcctacacacagctctttcagatctagaggtcctctcggaagaagaatcaggaaaactatggcgtttccgatatcatattactgacagtaatgattatttggtagttgccacaacccgcccagaaacaatgcttggtgatacagccgttgctgttcatccagaagataaacgctatagctcatatgtgggaaaaacagttcaattaccactgtgtgatagaaagattcctgtgttagccgatgagtatgttgatcctgaatttggcagtggttgcgtaaaaattacgcctgcccatgactttaatgattatgaactaggactgcggcataaccttccaataatcaatatattgatc

SEQ ID NO: 307391 - DNA, 821 bp, Unknown
  Bacterial polypeptide expressing nucleotide sequence isolated from the Sargasso Sea
ggagaacggacacctttggcactttaattatccagtacataacagcaacgagcatttgacaatagctaccacgaggccagagacaatgtttggtgattccgccgtggcagtaaaccccgcagatgatagatattcaaaatttattggggaatttatcgatctgcctctaagcaacagaaaaatacctattattggcgacgattacgtcgataaggaatttggctctggatgtttaaaagtcactccggcacatgatttcaatgattacgaaatcggaaagagacatgacctagaagtaatcaatatcctcgcagaagacggaactcttaattcaacggtccctccagacttttttggtcttgatagatttgaagccagaaagaaaatcatcactgatttaacaaataaaggattattagtaaaaactgaggaccatcagttgatggtacccaggggagacagaagtaagacagtaatagagccatatttaacggaccaatggtttgttaaaatggaaaatttggcttctccagcactagaagcagttaggcagggtaaaacgaaatttatacccgaaaattggactaaaacttattatgattggctggagaatattcaggattggtgtatttctcgtcaattgtggtggggtcatagaatacctgcttggtatgacgactctggtaatgtttttgttggaatgtcagaggagcatgttcgaaaagaaaacagcttatctccaaataagaatttaaagcaagacgaggacgtgctcgatacttggttctcctcaccgctctggcctttttcgaccctgggtt

SEQ ID NO: 307392 - DNA, 831 bp, Unknown
  Bacterial polypeptide expressing nucleotide sequence isolated from the Sargasso Sea
ggccatgctctaacttttaccattcaagatattcttattagatacaatcgtatgaagggaaaagaagtgttatggcaagctggaactgatcatgctggcatagcaactcaaatggtagttgaaagagagttacaagaaaagaaaattaaaagaacagatctcggaagagataaatttatagaagaagtttggaaatggaaaaaagattcaggagataaaattagcaatcaattaaaacgtttgggttcatctgctgattggtcacgagaaaaatttacaatggatgaaggtctttctatagcagttaggaaagtatttgttgaactttttaatgataatattatttataaggataaaagattagttaattgggatccaaaattactaacagctatatccgacttagaagttgagcaaagggagcaagaaggctctttatggcatattaaatatccaattaataatgataaatttattgttgtagctaccacaagaccagaaacaatgcttggagatacagctgttgctgttcatccagaagacaaaagatataatgattatatcggtctatattgtaatcttcctctagttgagagaaaaattaaaataatagcagatgaatatgcggatcctgataaaggttccggcgcagtaaaaattactcctgcacatgattttaatgattttgagataggtaaaaaaaacaatttagaatttataaacatctttgatcaacatgcaaaactcaacgataatgtgcctgatagatttaaagggaaggacaggtatgaggcacgagatgatattttaaaagagttaaaatcacttgat

SEQ ID NO: 307393 - DNA, 950 bp, Unknown
  Bacterial polypeptide expressing nucleotide sequence isolated from the Sargasso Sea
gagaaataaaatctatgattattggaaaaaaaatgaattatttaaacccaaagaaaatacaaaaaaattctcaattgtaattcctccaccaaatgtaactggaagccttcatatggggcatgctttaaataactctattcaagatgttttaaccagatttcatagaatgaataattatgaaactttatggcaaccaggtacagaccatgctggtattgcaacccaagcattagttgaaaaaaaacttgctaaagatggtgttaaaaaaaatgatttaggtagagaaaaatttattgaaaaagtatgggaatggaaaaatcagtatggtgatataataataaaccaacttaaaaaacttggatgttcttgtgattggtctcgtaatgcttttacaatggatgaaaatttatctaagtcagtgataaaagtatttgttgatctttataataaaaaattaatctacaaagcaaaaaaacttgtaaattgggatgttgttttaaaaacagcaatatctgatttagaagttgatcaacgtgaagtaaactctcaactttattatataaattatcctatagaaaattcagataaatttataacaattgcaacaactagacctgaaactatgttgggagatactgcaatagcagtaaaccctaaagatgatcgatttaaagatattgttggaaagttagttacaatccctttagcaaacagaaaaataaaagtaataacagatgactatgctgatcctgaacaaggaaccggtgcagtaaaaattactccagcccatgactttaatgattatgatgtaggcattagaaacaagttagaggtaattaatatatttactcctgatggaaaaataaataacaatgcaccagacccatataaaggtttagatagatttgctgcaagaaaattaattttagaacatcttgaagaaaggtaag

SEQ ID NO: 307394 - DNA, 850 bp, Unknown
  Bacterial polypeptide expressing nucleotide sequence isolated from the Sargasso Sea
ttatggagatagatctaattctattattgagccttatttaacagaacaatggtttgttgatgcaaaaactttagccattaaagcaaaagaggtagtaaataatggaaagactaaattttttcctgaaaattggtcaaaaacatattttcaatggatggataacattgaaccttggtgtatttctcgtcaattatggtggggacatcaaatacctgcttggtacggacctgatggaaaaatatttgtagctgaaaatgaggatgagtgcaaaaatcaagcaaaagaattctattcaaaagatgtagaattaaaaagagatgaagatgttctagacacttggttttcatcaggtctatggccatttgctactttaggttggccagaaaaaactccagaagttgaaaaattttatccaacaagtgttctcgtcactggttttgatatcatatttttctgggttgctagaatgataatgatgggaactcagtttttagataaggaaccttttaaaaatatttatgttcatgctttagttagagatgaaaagggtcaaaaaatgtctaaatcaaagggcaatgttattgatccattagaacttatcgaaaaatatagtgcagacgccttaagatttactctattatcaatggcatcaccaggtcgagacgtaaaattatctgaagacagggttaaaggttatagaaatttcttaaataaaatttggaatgcaaataattttttaacacaaaataaatgtgattttggtgatgtaaaaaaacctgaaaatataaacttaacaattaataagtggataatatctgagcttgtaaaagttaaaacgacaccgaaatag

SEQ ID NO: 307395 - DNA, 892 bp, Unknown
  Bacterial polypeptide expressing nucleotide sequence isolated from the Sargasso Sea
tttcagcctataaatatttttgacaataatgctttcagtaatcaagaggtacctgaacccttttgtaatctagatcggtttaaagtgagaaaacttgttttagaaaagcttgcagagatgggttttttaataaaagaagagagttgtgaaatcagtattccaagaggtgagagatcaaatgtagttattgaaccgatgttaagtaatcagtggtatgttgaaaccaaatcaatggcaactaaagcaaatgaagctgtagagaaaggccaaattaagtttcatcctgaaaactggattaaaacatactataactggatgaataatattgacgattggtgtattagtcgtcagatttggtggggacatagaattccagcatggtacgatcaagaaggcaatgtttatgtgggtcatgatgaagatgatgtcagaaaattttatgaacttgatgcgagaacgttaactcaagataacgatgttcttgatacatggttttcttcaagcctctggccttttgcaaccttaggttggccagaaaaaacaaagaagatagaagatttctttcctacaaacctgttggtaaccggattcgatattatatttttttgggttgcccgtatgatgatgatgagtttggaattcaccggaaaaattccttttagtgatgtttatatcaccggccttattaaagatgaaaatggtcaaaaaatgtcaaaatctaaaggaaatattattgatcccattgatctaatttatggaatcacgcttgaggacttgataacaaagaggaccagcaacttaatgcaagatggagttgctgaaaaaatagaaagaaaaactggaaagcaatttcctgatggcattcctgctcatggtactgatgctttgagaa

SEQ ID NO: 307396 - DNA, 652 bp, Unknown
  Bacterial polypeptide expressing nucleotide sequence isolated from the Sargasso Sea
aaaagaaatagatagcaatatcacaatagataaacttaagcaagatgaggatgttctggacacttggttctctagctggctttggccaatcacagtttttgacggtattaataaaccagataatgaggagataaaatattattaccctacctctgacctagttactgccccagagattattttcttctgggtagcaagaatgattatatctggctatgagtacaggggtgagatgccattcaagaacgtatacttcactggtatagtaagagataagcagaggaggaagatgtcaaaatctctaggaaactctccagatccaatagagctcatgaaaaagtatggggcagacggagtcagggcggggatgctcttcagtgcgcctgcagggaacgacctcctattcgatgagaaactttgcgagcagggaagaaacttctccaataagctttggaatgcgttccgacttattcagactcttgaagtgtcagatgaaggaaaagaccaatctctcgcaatagaatggataaattctagatttaatgaggtgttgagtgaagtcgaagatcatttctcaaagtataggatatcagatgcacttttatcattatatacattcatatgggatgatttctgtagctggtacctagaa

SEQ ID NO: 307397 - DNA, 541 bp, Unknown
  Bacterial polypeptide expressing nucleotide sequence isolated from the Sargasso Sea
catgggtctaggtaaatataatcataaaaaagttgaagataggatttattcctactgggaaaaaaacaaactattcaaaccaaataaaaataaaaaaactttctctattgtaattcctccgccaaatgttaccggaagtctccatatgggccatgctttaaataattctttgcaagatgtgttaattagatactacaggatgaataattatgaaactttatggcaacctggtacagatcatgctggtatagcaactcaggccttagttgaaaaagaattaaaatctaaaaatatagataaaaatcaaattggaagagaaaaatttattaaaaaggtttgggaatggaaaaatgaatatggtggaaaaattataaatcaattaaaaaaattaggctgctcttgtgattggtcaagaaatgcttttacaatggataaaaatctttccaaatctgttataaaagtttttgttgaattatacaaaaaaaaattattatacaaatcgaaaaaactcgtcaattgggaccctgttttaaagacggca

SEQ ID NO: 307398 - DNA, 988 bp, Unknown
  Bacterial polypeptide expressing nucleotide sequence isolated from the Sargasso Sea
tttgccgcgcgtaaagcgatcgtcgctgccattgatgcgatgggcctgctggaagagatcaaacctcacgatctgaccgttccttacggcgaccgtggcggtgtggttatcgaaccgatgctgaccgaccagtggtacgtccgtgccgacgtgctggcaaaaccggcggttgaagcggttgaaaacggcgacatccagttcgtaccgaagcagtacgaaaacatgtacttctcctggatgcgcgatattcaggactggtgtatttcccgtcagttgtggtggggtcaccgtatcccggcatggtatgacaacgacggcaacgtatatgttggccgtaccgaagacgaagtgcgtcaggaaaacaacctcggcgccgacgttcagcttcgtcaggacgaagacgttctcgatacctggttctcctccgcgctgtggaccttctccacgctcggctggccggaaaacaccgacgcgctgcgtcagttccacccaaccagcgtgatggtctccggcttcgacattatcttcttctggattgcccgcatgatcatgatgaccatgcacttcatcaaagatgaaaacggcaagccgcaggttccgtttaagaccgtctacatgaccggtctgatccgtgatgacgaaggccagaagatgtccaaatccaaaggcaacgttatcgacccgctggatatggtcgacggtatctcactgccggagctgctggagaaacgcaccggcaacatgatgcagccgcagctggctgagaagattgccaaacgtaccgagaagcagttcccgaacggcatcgagccgcacggcaccgacgccctgcgtttcaccctggcggcgctggcctctaccggccgcgacatcaactgggatatgaagcgtctggaaggttaccgtaacttctgtaacaagctgtggaacgccagccgcttcgtgctgatgaacactgaaggaaatgattgcggcttcaacggcggcg

SEQ ID NO: 307399 - DNA, 915 bp, Unknown
  Bacterial polypeptide expressing nucleotide sequence isolated from the Sargasso Sea
ccgccgtgctggccaccgcccaggtgttcacctcgacggcagcgtcaacgaacaggtcgacgcgggcattccggcgcagttcgccggcctcgaccgcttcgaggcgcgcaagcagatcgtcgcagccttcgaggcggccggcctgctggagaagatcgaagaccacgcgctgaaagtaccgaagggcgaccgctccggcaccgtcatcgagccgtggctgaccgaccagtggtacgtctccaccaagccgctggcggaaaaagccatcgccgtggtcgagagtggcgagatccagttcgtgcccaagcagtacgagaacatgtacttcagctggatgcgtgacatccaggactggtgcatcagccgtcagctgtggtggggccaccgcatcccggcctggtacgacgaagccggcaacgtctacgtcggtcgcgacgaggcggaagtacgcgccaagtacaagctcgaaggcgccaccctgcgccaggacgaagacgtgctggacacctggttcagctccggcctgtggaccttctccaccctcggctggcccgagcagaccgacttcctcaagaccttccaccccaccgacgtgctggtcaccggcttcgacatcatcttcttctgggtcgcccggatgatcatgctgtcgacccacctgaccgggcagattccgttcaagaccgtctacgtgcacggtctggtgcgcgacggccaggggcagaagatgtccaagtccaagggcaacgtgctcgacccgctggacatcgtcgatggcatcaccctcgacgaactgctggaaaaacgcaccagcggcatgatgcagcccaagctggccgagaagatcgccaagcagaccagggccgagttcccagaaggcatcgccagctacggcaccgacgccctgcgcttcac

SEQ ID NO: 307400 - DNA, 784 bp, Unknown
  Bacterial polypeptide expressing nucleotide sequence isolated from the Sargasso Sea
tgtaaaagtaaaagttcctttcgttgatagagaaatacctattatcgctgattcacatgttgataaagattttggtactggttgtgtgaaggttactccagcccatgatccaaatgatttcgcaataggaaaaaggcataatctaaaacagattaatgtaatgaacaaagatggaactttaaatattaatgcaggtatttttcaaaatttagacagatatgaggctagaaagaaaattatcaaagaattggataacttaggccttttgacaaagatagaggattataaacatactgttcctttttctgatagaggtaaggtgccaattgaacccttattatcaacacaatggtttttgaaaatggatgatatatcacaaggatgtcttcatgaaatttattcaaaaaaaccatcgtttattcctccacgctgggagaaagtttataaggattggttagagaatattaatgattggtgtattagtcggcaattgtggtgggggcaccaaataccagcttggtatgttttagatgaagcccaagactcaatagaacaaaatactccatacatcgttgcaagaaatgaagaggatgccttaatcgaagctaataaaaaatttggatcaaatattaaattggttcgtgataaagatgttttggatacatggttttcaagtggtttatggcctttctcaactcttggttggccaaatataaatgatcctgattttaaaaaatggtatccaaataatgttcttgttactggtttcgatattattttcttc

SEQ ID NO: 307401 - DNA, 946 bp, Unknown
  Bacterial polypeptide expressing nucleotide sequence isolated from the Sargasso Sea
gctactttaggttggccagaaaaaactccagaagttgaaaaattttatccaacaagtgttctcgttactggttttgatatcatatttttctgggttgctagaatgataatgatgggaactgagtttttaaaagaagagccttttaaaaatatatacgttcacgcacttgttagagatgaaaagggtcaaaaaatgtctaaatcaaagggtaatgtaatagaccctttagaacttattgaaaaatatagtgcagacgccttaagatttactctattatcaatggcatcacctggtcgtgatgtaaaattgtcagaagatagggttaaaggttatagaaatttcttaaataaagtttggaatgctaataattttttaagacaaaatgagtgtgattttaatgacattaaaaaacctgaaaatcttaaattaacaattaataagtggatattatctgaacttgttaaaactaaaaacgagacagaaaacagtttaaaaaactatagatttgatgaagcagcgaagaatatttatcaatttgtatggcattcattttgtgactggtatttagagttgtctaaaactgtacttaattctaataatgaggaggagattaaggaaataaggcaaacatcatcctatgtttttagagaaattttgataatactgcatcctttcattccatttgttacagaggagatttggttgaataacaagttagataaaaatgggatagaatttttaatgcatgcaaattggttagaagatgattatcatgaaaaaaaatcttatgatgaaattaataatattattaattttattacatccataagatcatttaaaaatgaattaaatatcagtccggggtcatttattgaaatttcaacagcaaatacaaacaaaagatataaaaactttttatcttctaatgaaaatataatgaaaaaaa

SEQ ID NO: 307402 - DNA, 922 bp, Unknown
  Bacterial polypeptide expressing nucleotide sequence isolated from the Sargasso Sea
atgttaagaactgcaatttcagatcttgaagttgatcaaagagaagttagctctaagctttattatataaaatataagatagaaaattcaaatgatcatattactattgccacaacaagacctgagactatgcttggagacactggtattgcagtaaatcctaaggacactagatatgataaatttataggaaagtttgctattttgccaatagtaggtagaaaattaaagatcgttcaagatgaatatgctgatccagaacaaggaactggagcagttaaaattactccagcccacgattttaatgattttgatgttggaaaaagacaaaattttaaaactataaatatttttactgaaaatggaaaaattaataaaaatgctcctaatcaatatataggtttagatagattcgaggctagaaaaaaaattttagaagaactatctaaattagagattttaattaaggaagagaacataaaaaacaaagtaccttatggagatagatcaaattctattattgaaccttatttaacagagcaatggtttgttgatgcaaaaaaactctccttaaatgcaaaaaaaattgtaaaaaacaaaacaacaaatttttttccatcaaattggtcaaagacttatttccaatggatgaataatattgaaccctggtgtatctcaagacaattatggtgggggcatcaaattccagcttggtacggtcctgataaaaagatttttgtagctgaaagcgaaaagaaagcaaaaattgacgcaaaaagattttacaaaaataaagtaaaaataactagagatccagatgttctagacacttggttttcatctggtctatggccattcgctactttgggttggcctaattcaaattattatttaaaaaaattttatcctacatctgttttag

SEQ ID NO: 307403 - DNA, 901 bp, Unknown
  Bacterial polypeptide expressing nucleotide sequence isolated from the Sargasso Sea
ccgcttcgtggcccgcaaggccgtggtggccgacctggaagccatcggcgcgctggtcgaggtgaagaagcacaagctgatggtgcccatctgcacccgcaccggccaggtgatcgagcccatgctgaccgaccagtggttcgtcgccatgagcaaggtgtccgaccaggaccccaccggcaagagcattgcgcaaaaggccattgatgccgtagccagcggtgatgtgaagttcgtgcccgaaaactgggtgaacacctacaaccagtggatgaacaacatccaggactggtgcatcagccgccagctgtggtggggccaccagatccccgcctggtacgacgaagagggcaacgtgatcgtggcccgcaccgaagccgaggcacaggccaaggccccgggcaagcagctgcgccgcgacgaggacgtgctggacacctggtactcgtccgctctcgtgcccttcagcaccatgggctggccgaaccaaggcgacagcgccaccgacgacttcaacctctacctgcccagcaccgtgctggtcacgggctacgacatcatcttcttctgggtcgcccggatgatcatgatgaccacgcacttcaccggccgcgtgccgttcaagcacgtgtacatccacggcctggtgcgcgacgcgcagggcaagaagatgtccaagtccgaaggcaacgtgctcgacccggtggacctgatcgacggcattgcgctggagcccctgctcgacaagcgcaccaccggcctgcgcaaacccgagactgcacccaccgtgcgcaagaacacgcaaaaggaattccccgacggcattccggcctatggcgccgatgcgttgcgctttacgtttgccgcgctggcatcactgggccgcagcatcaacttcgac

SEQ ID NO: 307404 - DNA, 991 bp, Unknown
  Bacterial polypeptide expressing nucleotide sequence isolated from the Sargasso Sea
gactatgaaattggtaaaaaatactgccttcattgtatagataatgaagttcatttatctgatgatattgaagattttgaaccacttaatatttttaccgatgaagcacatagtaatgataacgtcccttctccttttaaaaatttagacagattcaaagtaagaaagcttgttcttgaagaaattaaaaagctagatttatttgtaaaagaggaacctcatgaaatcagtgttcctcgaggagagcgttcaaatatagttatagagcccaaactaagttatcagtggtatgtaaaaacaaaggacatggctgataaggcaaataaagctgtaaaaaatggagaaattaaatttcatcccgaaaactggattaaaacatattttaactggatgaataatattgaagattggtgtattagcagacaaatctggtggggacatagaattcctgcttggtatgacgatcatggaaatgtttatgttgggtattctgagaacgaagtccgaacttattattcactcgataatagatcgctgaggcaagatgatgatgttttagatacatggttttcctctagcctttggccttttgcatcaatgggatggccaaatgaatcaaagaatctaaaaacttttttcccaacaaacctattagttactggttttgacattattttcttctgggttgcaagaatgatcatgatgagtatcgaatttacaggaaagattccatttaaagatatctatgttactggccttataagagatgaaaatggacaaaaaatgtcaaagtccaaaggcaatattattgatcctattgacttaatatatggtatttctcttgaagatcttctcgaaaaaagaacatcaaatctgatgcaagaaggattagcagaaaagattactagaaaaaccaaaaaacaatttccaaatggcattgagtcatatgggactgatgctttgaggatgacattttattctatgcaactaa

SEQ ID NO: 307405 - DNA, 928 bp, Unknown
  Bacterial polypeptide expressing nucleotide sequence isolated from the Sargasso Sea
ttagatagattccaagctagaaagaaaatactaagtagattaatcgaaaaacaattattggttaaagaagaaaatattaaaaataaagtgccttatggtgacaggtcaaattctgttatagaaccttatttgactgaacaatggtttgttgatgcaaaaaaactatcaataaaagcaaaaaaaattgttaaatcaaataagacaaaattttatccaagaaattggtccaaaacttattttcaatggatgaacaatattgagccttggtgtatttcacgacaactttggtggggacatcaaatacctgcatggtatggacctgataaaaaaatatttgttggcaaaaatgaaaatgaagcaaaaaaaattgctaaaaaatattataaaaaagatgttaaattatttagagaccctgatgttttagacacttggttttcatctggtttgtgggcattcgctacactaggttggccagcaaaaaatgaatatgttaaaaaattttatcccacttccgttctagttacaggttttgatattatattcttttgggtcgctcgtatgattatgtttggtatggagtttttaaataaagaaccttttaaagatatttatgttcatgctttagttagagacgaaaaaggacaaaaaatgtctaagtctaaaggtaatgttatagatccattagaacttatagaaaaatatagcgctgatgccttaaggtttactttgctttctatggcatcacctggaagagatgtaaaactttctgaagatagagttaaaggttatagaaattttttaaacaaattgtggaatgctaataattttttagttcaaaataaatgttcatttaaaaacattcaaaaaaaaccgaaaatttcaatcaatattaataagtggatatatgatgagctgttagaaactaaaa

SEQ ID NO: 307406 - DNA, 816 bp, Unknown
  Bacterial polypeptide expressing nucleotide sequence isolated from the Sargasso Sea
gatgaatgatatagagccttggtgtatatctcggcagatttggtggggtcatagaatacccgcctggtatgatgaaacaggaaatatttttgtagctgaaagtgagagagatgcagtaaaattagcaaagaaaaaaaataaaaataaacaatttaaattaagacaggaaacagatgttttagatacttggttttcatcagctttatggccttttgcgactcttggatggccaaagaaaacggaagaacttaataaattttatccaacttcagttcttgttactggttttgatataattttcttctgggtagcaaggatgttgatgatgggaaattattttagaaaaaatacaccttttcataaagtatatgttcatgccttggtaagagatgaaaaggggcagaaaatgtcaaagtcaaaaggtaatgtgatcgacccattagatttaataaatgaatatggagcagatagtttaaggtttactttaatttcgatggcctctccagggcgagatgtaaaattatcaaaagatagagtcactggaaatagaaactttataacaaaaatttggagcgcaaataattttttaaaacttaataattgtaaattagataaaaagattaatttgacctcaattaaacatccaataaaccattggatttataacgaatttataaaaacgcaaaatttaatcacaaaaaacattgaaatattcaggtttgatgaggctgctaggtatgcatatcaatttgtttggcattcttattgtgattggtatttagagttcttaaaacctgtttttaactcaaaaataaa

SEQ ID NO: 307407 - DNA, 980 bp, Unknown
  Bacterial polypeptide expressing nucleotide sequence isolated from the Sargasso Sea
acgccagcccacgatttcaatgattatgaagtgggccagcgacatgggctgcccctgattaatgtgctggaccacagcgccgcgatcgacctgccaacttcgccctatcatggactcgaccgctatgttgcccgtgaaaaaatagtaagcgacctagaaacacagggtttgatagagaaaatagtcgaacaccaaatgatggtcccccgcggcgaccgctcaaatgctgtgatcgagccttacctaacagatcaatggttcgtccgggccaccccgctcgctgcaccagccattcgggctgtcgaagatggggagattcgtttcgtaccggataactggcaaagcacctacttcgaatggatgcgcaacatacaggattggtgcatctcgcgtcagatctggtgggggcatcgcatccccgcctggtacgatcaggatggacacttctttgttgcccggactgaagaggaggctagggcacaagccagagcacaccatggtcacgacactaccttgcgccaagatgaggacgtcctcgatacctggttctcatctgcactgtggcctttctctacgctcggatggcctgagcagacgccgaccctgaaagctttgtaccctaccaacgtactcgtaacagggttcgatatcatctttttctgggtcgcccgcatgatcatgttcggtatcaagttcacagggcaagtaccctttcatgatgtctatgtccatggcttggtgcgggatgccgatggccagaaaatgtcgaagtccaaaggtaacgtactcgacccgcttgacctgatcgatggcatcgaactcgaagagctagtcaaaacccgcacctcggggttgatgcagccccagatggcgcaacaaattgaaaagagaacccgccggcagtttcccgatggcatcgccgcctacggaaccgatgcgctgcgctttacctttgcatcccctggcacgcaggggcgggg

SEQ ID NO: 307408 - DNA, 856 bp, Unknown
  Bacterial polypeptide expressing nucleotide sequence isolated from the Sargasso Sea
gaagaggttattcataaagagaaaaaaggtagcttgtggtattttagatatcctataaaagatgaaaatgattatttaattgttgctacgacaagaccagaaacaatgctaggagatactggtgttgcagttaatccaaaagacaagagatattcaaaatatataggaaaaaaaataattcttccaattataaataaggaaatcccaattttttctgatagctatgttgataaagattttgggacaggctgtgtaaaagttactccagctcatgatcctaatgattttgagatggcgcaaagaaacaatttaaatataattaatattctaaatgaaaatggaacattgaatgataatgttccaaaggactttgaaggattggatagatttgatgcacgaaagaaggttgttgagtatattgaaaaacttaatctattggaaaagatagaagactatactcacaaggttgggttttcagaaagaacagatgtagttgttgagccaagattgtcaaaacaatggtttttaaaaatgaaagatttagcgcagccagctcttgaggtagttaaagataaaaagatacagttttatccagaacgttgggaaaaaatatacaatcattggcttaataatattaatgattggtgtatatctaggcaactatggtggggtcatagaatacctgtttggtataaagatgaccaaatatattgtggagaggtagcgccagaaggaaaagggtggaaacaagatgaagatgtattagatacatggtttagttcttggatatggccgtttgcaactttagggtggcctgataattcaaaggatttaaaacaattttacccaactcaag

SEQ ID NO: 307409 - DNA, 890 bp, Unknown
  Bacterial polypeptide expressing nucleotide sequence isolated from the Sargasso Sea
ggagtttggaacaggctgtcttaaagttacgccatcacatgatgagaatgattataaacttggtgagaagcataaacttcagtctattgacatctttgatgacgaaggaaaaataaatgagaatggaaagctttatgtaggagaagacaggttcatcgtaaggaaacaaatttctaaggacctggataagattggtctgttagaaaagactgaaaactacagaaataaagttggattttcagagaggacagacgcagttgttgaacctaagatatcaacgcagtggttcttgagcatgaaggatgtaaaggtcccagctctcgacaatgttatgaatgataacatcaaattccacccttctaaactaaaaaatatgtatagggcttggatggaaaatattaatgactggtgtatatcaagacagttgtggtggggacatcagattccagcatattaccttccatcaggagaatttgtagtggcagagacaaaagaggaagcacttaaaaaagctcaagagattgataaaaatataacaatagataatcttactcaggatgaggatgtactagatacttggttctcaagttggctatggccaattactgtatttgatggtatcaatgacccagataatgaagaaatcaattactactaccctacatcagatctagtaactgccccagaaattattttcttctgggttgctaggatgattatagcaggatatgagtacagagatgagatgccatttaagaatgtatacttcactggtatagtaagagataagcagagaagaaagatgtcaaagtctctaggaaactctccggacccaatagagctaatgaaaaaatatggggcagatggagttagagctggtatgctcttta

SEQ ID NO: 307410 - DNA, 940 bp, Unknown
  Bacterial polypeptide expressing nucleotide sequence isolated from the Sargasso Sea
ttgccattatgcaataggcttatacccattgttgcagatagttatgtagacccagaatttggaaccggagtcgtaaaaatcacgcctggtcatgattttaatgattacgatttggggaaaagacatggtctttacatggacgaggatatgcagtgtcatgcaggcactgaagctgattttatgcctatttctatttttaataaaacagttgaagttattggagtggctccgaaaaaattccatggtatggatagattcgaagctcgcaaagtaatacttgaggatttaaaaaaagataagtttcttgtgtctgaaaaagaatatgagagtactttgccctatggagataggtcagatcaaattcttgaacccctcctaacagatcaatggtatgtagatgcaaaaacactagcaaaacctgccattgaagctgtcaagagtggagagatacaatttgtgccaactaattgggaaaaaacttattttcaatggatgaataatatccaagattggtgcgtcagcagacaattatggtggggacatagaattccaatttggtacgatgaatctaataaaccacatgcaggcttttctgagaaagatgtgagagaaaggcataatcttaaaggcaagctgcgccaagaagaggatgtcttagatacttggttctcttctagtctgtggacatttgcaacaatgggatggcctgaaaaaaataaaaaattaagcctatttcatccaacaacaacgctggtaactggttttgatatcatatttttttgggtggcaagaatgatcatgatgaccaagcatttcatgaaagaagttccatttaaagaagtctacataactggtcttattaaagatgaaaacggacagaaaatgtctaaatcaaaaggcaatatccttgatccaattgattcttatagatggagttctt

SEQ ID NO: 307411 - DNA, 922 bp, Unknown
  Bacterial polypeptide expressing nucleotide sequence isolated from the Sargasso Sea
tataattattgggaaaaaaataaattatttaaaccaaaaaaaaattcaaaaaaatattcaattgtaattccaccacctaatgtaacaggtagtttacatatgggtcatgcgttgaataattcaattcaagatcttttggtgaggtattataggatgaataattatgaaaccttatggcaacctggaacagatcacgctggtattgctacccaagctttagttgaaaagaaattagaaagtgaaaatattactaaaaacgatttaggaagagaaaaattcatacaaaaagtatgggaatggaaaaatcagtatggtgatataatcatcaatcaacttaaaaaacttggatgctcatgtgattggtctagaaatgcttttaccatggatgataatttatctaaatcggtagtaaaagtttttgttgaattacataaaaaaaaattaatctataaagctgaaaaattagtaaattgggacacagttcttaaaacagcaatatctgatttagaggtcgatcagagggagatgaactcaaaaatttactacattaaatacccaattgagaattcttcagattttataaccattgctacaactagaccagaaactatgcttggagatacagctattgcagttaatccaaaggacaaaaggtttaaaaaatatgtgggaaaaattgccacaataccagtagttggtagaaaaattaaaattatcacagacaattatgctgatcctgaacaagggacgggtgcattaaaaattactccagcgcatgattttaatgactatgatgttggtcaaagaaaccagttagatatcataaatatatttactgaagagggaaaaattaataacaatgctccagaaaattacgttggattagatagatttgaagcacgtcaaaaaatattgaaatgaa

SEQ ID NO: 307412 - DNA, 890 bp, Unknown
  Bacterial polypeptide expressing nucleotide sequence isolated from the Sargasso Sea
aatcacaattgcaactacaaggccagaaactatgatgggggatacagcagtagctgtaaaccccaaggacgaaagatatattaatttaattggaaaaaatgttctaattccaattgttaatagaactgtaaaaattatttctgaccactatgctgatcctgaacaaggttcaggagctgttaaaattacaccagcgcatgattttaatgactacgaagttggtaagagaaacaatttagaaatattaaatatttttgaaaaaaatggtagaataaataaaaatgggatcaaagaatttcatggtttagacagatttgaagcaagaaagcttttaattaaaaagttgaaggaaataggttccctagtaaaaattgaaaatattaaaaataaagttccatatggagatagatcaaacactataattgaacctcttttaacagaacaatggtttgtagatgcaaaaaaattatcaaaaaaacctattaagattgttaaacagggtaaaacttctttttttccaaaaaactggtccaaaacattttttcaatggatgaatgaaattgagccttggtgtatatctcgacagatttggtggggtcatagaatacctgcttggtatgatgaaaacggaaatatttttgtagctgaaaatgaaaaagatgcagcaaagttagcaaagaaaaaaaatggaaataaacaatttaagctaagacaggaaacggatgttttagatacttggttttcgtcagctctatggcctttcgcaactcttggatggccgaacaaaactaaagaacttgataaattttatccaacttcagttcttgttactggttttgatataattttcttctgggtagccaggatgttgatgatgggaaattatttca

SEQ ID NO: 307413 - DNA, 889 bp, Unknown
  Bacterial polypeptide expressing nucleotide sequence isolated from the Sargasso Sea
gatgcttggagatactgctgtagcagtaaacccaaaagacaacagatataaaaaatatgtaaacaaaactgtcactattccgattgctgaaaggaagataaaaatcattgaagatgattatgcagacccagaacaaggaacaggagcgctaaaaattacaccagctcacgattttaatgattacgaagttggaaaaagaaataaattagaaattattaatatttttacaaaagaaggaaaagttaataataatgtaatttcgtcatacgtcggtttagatagatttgaagctagaagaaaaatattaaatgaacttaaagaaaaagatttttttgttaaagaagaaaatattaaaaataaagttccatatggtgatagatcaaattctataatagagccttttttaactgaacaatggtttgttgatgcaaagaaattatcaattaaagcaaaaaaaatagttaaaaataaaaaaacaaattttttccccaaaaactggtccaaaacatattttcaatggatgaataacattgaaccgtggtgtatttcaagacaactttggtggggtcatcaaataccatcttggtatggacctgataaaaaaatatttgtcgaacttaatgaaaatgatgcaaaaaaatcagcaaaaaaatattataaaagggaagttgaacttataagagatcctgatgtgcttgatacatggttttcatctggtctttggccttttgcaacacttggttggccaaacaaaaatggatatttaaaaaagttttatccaacaacagttcttgtaactggttttgatataattttcttttgggtagcaagaatgatgatgtttggtatggaatttttaaacaaagaacctttcaaagatatttatgtt

SEQ ID NO: 307414 - DNA, 834 bp, Unknown
  Bacterial polypeptide expressing nucleotide sequence isolated from the Sargasso Sea
ttctgatctagaagtagagcaaagagatactgaaggaagtttgtggcatattaaatatcctatagatgaaaataatcatatcattgttgcaacaacaagacctgagacaatgttaggcgatactgcagttgccgttcatccagatgatgaaaaatataaaaatttagttggcaaattttgtaacttaccaatttcaaataagaaaataccaatcattgctgatgaatatgcagatcctgaaaaaggttctggagctgtaaaaattacacctgcacatgactttaatgattttgaggtaggaaagagacatgatttagaatttattaatatttttgatgaaaatgctaaactgaactcaaatgtgcctgaagaatttcaaaatttagatcgatttgaagcaagaaaattaattttgaaaaaattagatgaaatgaatttattaattaaagaagaaaaacagcaaatggtcataccatatggtgatagatcaggtgttgttattgagccatggctgacagaccaatggttttgtgatgcaaaaaaattatcagttgacccaatatcagctgttaaagataaaagttctaaatttattcccaaacaatgggaaaatacattttataattggatggaaaatattcaaccgtggtgtatttcaagacagttatggtggggacatcaaattcctgcatggtatggtcctgataataaatattttgttagtgaaactctagaaggagcacaaaatcaagcaaaagaattttatggaaaggatgttgagcttagacaagatgaagacgttctagatacttggttttcttctgctctatggac

SEQ ID NO: 307415 - DNA, 292 bp, Unknown
  Bacterial polypeptide expressing nucleotide sequence isolated from the Sargasso Sea
catggaaaaaacatacgatcctcagtccattgagcagactctttaccaaaactgggaagagcaaggttactttaagccccacggcgatgcctcacagggcaactattgcatcatgatcccgccacctaacgtgacgggcagcctgcacatgggtcacgctttccaagataccatcatggatactctgatccgctaccaacgtatgaagggcaaaaacaccctgtggcaagtcggtactgaccatgcgggtattgcgactcagatgctagttgagcgtaagcttgaagccgaa

SEQ ID NO: 307416 - DNA, 904 bp, Unknown
  Bacterial polypeptide expressing nucleotide sequence isolated from the Sargasso Sea
tattccaattattggagatgaatatgttgatatggaatttggtacaggctgtctgaagattacgcctggacatgattttaatgattatgaaattggaaagaaatataatttatatctagatggcgaggttgtaaaatcatcaaaaaatcaatctgactttaagccagttaatatcttcgatcgatttgcatatacaaatgattctgtacccgaccctttcaaaaatctagatagatttaaagcccgcaaagaagttttatcagaactagaaaaaatggatcttctagttaaagaagaaactcatcaaattagtgttccaaggggagaaagatcaaatgttgtaatagagccaaggttaagttttcaatggtacgtaaggactgatgaaatggcaaaaaaagcaaatgagatggttgaaaaaaaaataattcgtttccatccaaataattgggtaaaaacatactttaattggatgaacaatattgaagactggtgtataagtaggcaaatttggtggggacataggattccagcttggtatgatgatgaaaataattgttatgtagcagaaactgaagagttagtaagaaaaaaatataacttgggcagtaaagttctaaaacaagatgatgatgtgttagatacttggttttcttcaagtctttggccatttgcatcattagggtggccaaaagataatcaggatttaaaaaatttttttccaactgatttattagtaactggttttgatattatttttttctgggttgctagaatgatgatgatgagtattgaatttaccaatcaaataccttttaaagatgtttatgtcacaggcttgattagagatgaaaatggtcaaaaaatgtcaaaatctaaaggaaatattattgatccgcttgac

SEQ ID NO: 307417 - DNA, 552 bp, Unknown
  Bacterial polypeptide expressing nucleotide sequence isolated from the Sargasso Sea
tgatagatctaattcagtaatagaaccatatttaactgaacaatggtttgttgatgcaaaaaaactttcaataaaagctaaaaaaattgttaaattaaagaaaacaaatttctttcctgagaattggtctaaaacatattttcaatggatgaataatattgaaccatggtgtatttcaagacaactatggtggggccatcaaatcccagcttggtatggacctgacaacaaaatttttgttgcattaaatgaaaaagaagcagaacaaaatgcaaataaattttacaataaaaaagttaaattaaaaagagatcctgatgttttagatacttggttttcttctggactttggccatttgcaacattaggctggaacacaaaagacccatatcttaaaaaattttatccaacttcagttttagttactggttttgatattatatttttttgggttgcaagaatgattatgtttggaatggaatttattaataaagaaccatttaaagatatttacgttcatgctcttgtaagagatgaaaaaggtcaaaaaat

SEQ ID NO: 307418 - DNA, 727 bp, Unknown
  Bacterial polypeptide expressing nucleotide sequence isolated from the Sargasso Sea
atgcttgaaaaacattacaagcctagttttctagaagaaaagttttataaaatttgggaaaagtcaggcgtattctctgcaaatccagaatcttgtaaacagccgtacgctattatgatgccgccaccaaatgtaacaggtagcttgcatatggggcacgggttaacattttcccttcaagacatcttaatccgatactatagaaaaactggtcgggatactctttggcagccgggaaccgaccacgccgggattgccactcaaatggtggtggagagacaacttgcggtcgaaggcttatctcggcaagaattggggcgaagcaaatttctcgagaaagtctggcaatggaaaaaagagtctggcgggacaattacggagcaattgcgttcattaggtgcttctcctgattggaaccgagaaagatttacgatggatgcagatctctctcgtgccgtaacaaaagtgttcgtttcgttatacaaacaaggattaatttaccgtgataagcgcctggtaaattgggacccaaaactgttaacggctatttcggatctcgaagttcagcaaatggaaaccaaagggaaactctggcacttcaaataccctattgaaggtaccctagacgagtttatcacggtcgcaacaacaaggcccgagacaatgttaggggatactggtatcgcggttcatcatgatgaccctcgacataccaaatttgtggaaa

SEQ ID NO: 307419 - DNA, 830 bp, Unknown
  Bacterial polypeptide expressing nucleotide sequence isolated from the Sargasso Sea
aaggaacggtttagacaaggagcaagttatagattttgaaggaaaactgcttccaatagcaaacgaatttaccggaatggcgattgaagaagcacgtccaaaaattgtgggaaaactccagaaaaaaggactactggtagatactgattccgaatacacccacagtaaatcctttaacagccggggaggcggtgctattgagccccagattagagaacagtggtttatagacgttaacaagcccgctgttcagtggaaagggaaaaagcatagtctaaaagaagtcctgattgatgtggtgcggtccggagatatacggcttgttccggaacgttttaattcaacatattttcattgggttgaaaatttaaaagattggtgcatttctcgccaaatatggtggggtcaccgcataccggtttattaccgtgagaatgaaacaagagtaagtctgcaaaaacctaaaccattcaaagggtgggaacaggatcctgacacactggacacctggttttcatcggcgctctggacatggagtacgttaattgatccggaactagcaaaaaactattccctttctcttgaagatgttttagaacgcagtcctgattttcagaagtttcatccaacagacatcatggaaacaggttatgacatactgtttttctgggtagccaggatgattttgatgactacatatatgcttcaggaagttccgtttaaaacagtttacctgcatggacttattcgtaatcgagacgggaaaaaaatgtccaaatccgatccaaaatccgtgattgatcctttggacagtattgaaaaatatgggg

SEQ ID NO: 307420 - DNA, 830 bp, Unknown
  Bacterial polypeptide expressing nucleotide sequence isolated from the Sargasso Sea
aggatcaggtgccgtaaaaataacaccagcgcatgattttaatgactacgatatagcaataaaacataatttaccttttatcaacattctaaatgatgatggaaccttgaatgatgaggtgcctaaaaattttagaaatttaaaaatacttgatgctagagaaaaggttttagcttttatgagtgaaattgatatatttgttaaggaagagaaaattgataataccattcctgttggagatagatctggggaagtggtggaaccattacttaaaaatcaatggtttttagatgtaaaagaaatggctaataaatcttctttagctgttgagaaaggtgaggtagaatttaaaccaaaattctgggaaaacactttttttgaatggatgaataaaattcaaccatggtgtatttccaggcaaattatttgggggcacagaattcctgtttggcattctgacgacaatagatcggtcgcagcccataatttggatgaggcgaacgttaaatttttagaaaaatatcaggaggagaaacagctcaaccaggattctgatgtattagatacatggttttcctcatcactatggccattttcaactttaggttggcccaatgaaaccatagaatataaaagatatttccctacatctctcttagtcacaggatttgatattatatttttctgggtcgccaggatgattatgatgtcattagagttaacaggtcaaataccttttaaattgatctatattcataatttaattagagataaaaaaggggataaaatgagtaagaccaagggtaacgtgataaaccctcttgatttaa

SEQ ID NO: 307421 - DNA, 846 bp, Unknown
  Bacterial polypeptide expressing nucleotide sequence isolated from the Sargasso Sea
ggcggagcttggcgcgggcgtgagcctcacgcaggacgaggacgtgcttgacacgtggttctcgtcgggtctgtggcccttcgccaccgtcggctggccggcgggcgacgaggccgcgctcaaggagtacaaccgcttctacccctcgtcggtgatggagacgggctacgacatcctcttcttctgggtggcgcgcatggtgatgctcgggctcgagttcacgggcaagccgcccttccacaccatctacatgcacggcctcgtgcgcgacgggcaggggcagaagatgtccaagaccaagggcaacgtcgtcgacccgatcgagacgatcgagcagtacggcacggacgcgctgcgcctctcgctcgtgacgggcgtcacgcccggcctcgacgtgccgctcgcgatggagaaggtgcaggccaatcgcaactttgccaacaagctgtggaacaccgcgcgcttcctcgtgatcggcctcaaggacctgcccgcggaggagcggcaggccctcgccgtgagcggcccgatgggcgaggccgagctcgcgagcctcgcgctgcccgaagcggtgggtcgtctcccgctgccacgccctcgtcgacaaggtcaccgcccagctggccgcgtacgacttcggccctgccgggcaggccatctacgccttcctctgggacgagtacgccgactggtacatcgagatctcgaagcggcgcatcgcgggcgacgaccccgacgcggcgcgcgacgcgcgacgcacgctcgtgtacgtgctcgactcgtgcctgcggctgctgcacccgttcatgctcttcatcaccgaggagctctggcagcggctgccgc

SEQ ID NO: 307422 - DNA, 955 bp, Unknown
  Bacterial polypeptide expressing nucleotide sequence isolated from the Sargasso Sea
tgttagcctctatgaagaagaccttatctataagggtgactatataatcaactggtgcccgcgctgtcatacagcactttccgaccttgaagtagagcatcaagacatgcagggatatttatatcatttaaaatattctgttaaagatagtgaggattttttggtcatagctaccacaagaccagaaacaatgttaggtgatacagcggttgctgttaatcctgatgatgagcgttatcaaaaatacaaaggtaaaaaactaattctgcctgttttgaatcgtgaagtcccattaattgaggatgattatgtggacacattatttggtacgggtgcgttgaaagtgactcctgctcacgatccaaatgatttcgaattaggaagaaaacatcaattagaaacaataaatatcatgaatccagatggaaccatgaactccctcgcaggcgctacttacgaaggattggataggtttgagtgccgaaaaaaaatcataaggaatttaaaagactcaggggtccttattaaaattgaagaattaaaccattcggtgggtcattgttaccggtgtcggactgtagtggaaccttatttgtctaaacaatggtttgtgaaagttaagcctctcgctgaacctgcaatgaaagcagtgcgggacggaagtataaaaatagttcccaaattctgggagaatacatatttcgaatggatggaaaatattcgtgattggtgtatctcacgacagatatggtgggggcatcaaattccagcttggaactgtaaggcttgtggtgaagtggtagtcgcaagggagacaccaagctcctgctcggcttgttcttcgaccgacctcgttcaggaaacggatgtgctggatacttggttcagctctgctttatggccattttctactttaggatggcctgaaaaaaccgatagcctgaaatgcttttat

SEQ ID NO: 307423 - DNA, 684 bp, Unknown
  Bacterial polypeptide expressing nucleotide sequence isolated from the Sargasso Sea
gtaaatcatgcccaaaagaaattgttgaatatgacgatcctactacgtgtccatcttgtgactcagaccaactaaatagagaccctgatgtattggatacatggttcagttcaggcttatggcctcactcaacgttaggatggccagaccaaacagatgaacttgattatttttacccaggttctgttatggaaaccggatacgacatactatttttctgggttgccagaatgataatgatgggaatacaaaatatgggtgaagttccctttaaaacaatctacctacacggtctggttcttgaccctgaaggtatcaagatgagtaaaacaaagggaaatgtgcttgatccattggaaataataaacgaatatggcgcagatgctttgcggtttgcactaacgacaggaacagcggccggaaacaatataagaatgagtgaaagcagactagaatctagtcgcaattttgcgaataagatatggaatgcatcccgatttgtactatcgcttaacccaaaatgcaatgagactccatctttaccaaaagattctcacctacatgataaatggatcatttcacggttaaatattgtggcagcaaatgtaaacaaacatatggaatcatatcaatttggagaagctcagcaagaattatatgattttttctggaatgaatattgag

SEQ ID NO: 307424 - DNA, 943 bp, Unknown
  Bacterial polypeptide expressing nucleotide sequence isolated from the Sargasso Sea
aagatgtggaattaaaagagatgaagatgttttggatacttggttttcttcaggtctatggccatttgcgactttaggatggcctgaaaaaacgccagaagttgaaaaattttatccaacaagtgttcttgttactggttttgatattatatttttctgggttgctagaatgattatgatgggaactgagtttttaaaagaagagccttttaaaaatatatacgttcacgcacttgttagagatgaaaagggtcaaaaaatgtctaaatcaaagggaaatgtaattgatcctttagaacttattgaaaaatatagtgctgatgctttaagattcactctcttatcaatggcatctcctggtcgtgatgtaaaattgtctgaagacagggttagaggttatagaaatttcttaaacaaagtttggaatgctaataattttttaagacaaaatgagtgtgattttggtgacattaaaaaacctgaaaatataaacttaacaattaataagtggatattatctgaactagttaaaacaaaaaaagagacagaaaacagtttaaaaaactatagatttgatgaagccgcaaagaatatttatcaatttgtatggcattctttttgtgattggtatttagagttatctaaaactgtatttaattctaataatgaggaggagattaaagaactaagacaaacatcttcatatgtctttagagaaatcttaataatactgcatcctttcatcccattcgttacagaagagatttggttgaacaacaagttagataaaaatggcaatgaattcttaatgcatgctaattggttggaaaatgattatcatgaaaaaaaatcgtatgatgagataaataatatcattaattttattacatctattagatcatttaaaaatgaattaaatataagtcctggatcatttattgaa

SEQ ID NO: 307425 - DNA, 799 bp, Unknown
  Bacterial polypeptide expressing nucleotide sequence isolated from the Sargasso Sea
accaaggcgcacaagctgcaggtgccgcgtggcgaccgtacccagcaggtcatcgagccgtacctgaccgaccagtggttcgtgaaaatggacgtgctggccaagcgcggcctggagttggtggagaacggttcgatccagttcgtgccggccaactggatcaacacctatcgccactggatggagaacatccaggactggtgcatcagccgccagctgtggtggggccaccgcattccggcgtggttcgacgatgccggcacctgctacgtcggccgcgacgaagcggacgcccgcgcgaagaacaacctcggccccgacatcgccctgcaccaggacagcgacgtgctggaaacctggttctcctcgcagctgtggccattctcgaccctgggctggccgaacgagcaggcgatggacgcgcgcggtttcgagcgctatctgccgtcgtcggtgctgatcaccggctttgacatcatcttcttctgggtggcccgcatgatcatggccaccgacagcttcaccggcaggattccgttcaaggacgtgtacatcaccggcctgatccgcgatgcgcagggccagaagatgtccaagtccaagggcaacgtgctcgacccgctggacatcatcgacggcatctcgatcgaggacctggtcgccaagcgcaccaccggcctgatgaagcccaaggacgcgccgaagatcgagaaggccacgcgcagggagttcccggacggcatcattgcccacggtgccgatgcgctgcgcttcaccatcgccgcgctggccacccacg

SEQ ID NO: 307426 - DNA, 862 bp, Unknown
  Bacterial polypeptide expressing nucleotide sequence isolated from the Sargasso Sea
  misc_feature (862)..(862): n is a, c, g, or t
aatggaatttaaaaaatacaatcatagtatagaagaaaaaaaaatctcagatttttggattaaaaaaaacttattcaaaccaaaaaagaataaatcaaataaaaaattttctatagtaattcctccgcctaatgtaactggcagattacatatgggacatgctctaaataatagtctacaagatgttttagttaggtttaatagaatgaaaggcctcgaaactctgtggcagccaggtacagaccatgctggaattgcaacacaagcagttgttgaaaacaatcttttaaaagaaggaattaaaaaaaatgatttaggaagagaaaaattcatcaaaaaaatatgggattggaaagaggagtctggtggaataattttagatcaacttaaaaaattaggttgttcgtgtgattggtcaagaacgagatttactatggataaagatttgtcaaaagctgtaattaaagtttttgttgatctttataataataagctaatttacaaggataaaaaattagtcaactgggatactaaacttcaaactgctatttctgatttggaagtaaaccaaaaagatgttcaatctcaattgtattacattgattatttaattcagaactcagatcaaaaaatcactatcgctactactagaccagaaacaatgatgggagataccgcggttgctgtaaatccaaaggatgcaagatatgtaaatttagttggaaaaaatgttcttattcctattgtgaacagagctgtaaaaattatttctgatgaatatgcagatccagaacaaggttcaggagcagtaaaaattacaccagcacatgatttcaatgactatgaggtaggcaagagaaan

SEQ ID NO: 307427 - DNA, 811 bp, Unknown
  Bacterial polypeptide expressing nucleotide sequence isolated from the Sargasso Sea
actaattggtctaaaacttattttcaatggatgaacaatattgaaccatggtgtgtttctagacaactttggtggggtcatcaaataccagcttggtatggacctgataaaaaaatatttgttgcaacaaatgaagtagatgcaaaaaaacaagctaaaaaattttataaaaaagatgttgaaataactagagatccagatgttttagatacatggttttcgtctggtttatggccttttgcaacattaggttggcctgataaaaaagattttgttaagaaattttatcctacctcagttctagttacaggttttgatattatctttttttgggttgctagaatgatgatgtttggaatggagtttttaaataaagaaccttttaaaaatatttatgttcatgcacttgtaagagacgaaaaaggacaaaaaatgtctaagtcaaaaggcaatgttattgatccattagatttaattgaaaagtatagtgctgatgccttaagatttacattattatcaatggcttcacctggcacagatgtaaaactttctgaggatagagtcaaaggatataggaattttttaaacaaattatggaatgccaataattttttaattacaaataaatgtgatttcaagaaaactgataaaattccaaaaactacattaaatataaacaaatggatatattcagaattaattgaaattaaaaacaaaattcaaaaaaatattgaagattatcgttttgatgaggctgctaaaaatgcctatcaatttgcttggcattcatattgtgatggtacatcgaacc

SEQ ID NO: 307428 - DNA, 766 bp, Unknown
  Bacterial polypeptide expressing nucleotide sequence isolated from the Sargasso Sea
ttttttaattagatattatcgaatgaataattatgaaactttatggcaacctggaactgatcacgcaggtattgctacccaagcacttgttgaaagaaaattagaaaaagaggatttaaataaaaacagtcttggcagagaaaaatttatagaaaaagtgtgggaatggaaaaatgaatatggagatatcataatcaatcaattaaaaaaacttggatgttcttgtgactggtcacgtaatgcatttactatggacgaaaatttatctaagtctgtaatcaaagtttttgtcgaattacataaaaaaaaattaatctacaaagctgaaaaattagttaattgggacactgtgcttaaaacagctatttcagatttagaagttgatcaaagagaaatgaactctaaaatatattatataagatatccaattgaaaattcctctgaatttatcactattgccacaacaagacctgaaacaatgctaggtgatacagcaattgcagtaaatccaaaagataaaagatataaggagtacgttggcaaaactgtcacaatcccaatagtaggtagaaaaataaagattattaaagataactacgcagatcctgaacaaggaactggtgcattaaagattacaccagcacacgacttcaatgactacgatgtaggtcaaagaaacaagttagatatcatcaatgtatttacagaggagggaaaaataaatgataatgcgcctcaggattacatcggacttgatagatttgat

SEQ ID NO: 307429 - DNA, 994 bp, Unknown
  Bacterial polypeptide expressing nucleotide sequence isolated from the Sargasso Sea
aggtatagataaaaatgaattaggtagagaaaaattcatcgaaaaagtttgggaatggaaaggtcagtatggtgatattattataaatcaattaaaaaaattaggctgttcttgtgattggtctagaaatgcattcaccatggacgaaaatttatcaaaatcagtcttaaaagtttttgttgaaatgtacaaaaatggattaatttacaaatcaaaaaaattagtcaattgggacactgttttaaaaacagctatatctgatttagaagtagatcaaagagaagttaattcaaaactatatcacatcaattatccaattgagggaacagataaatttataactattgcaactactagaccagaaaccatgttaggagacacagcagttgcagtcaatccatcagatgagagatataaatcattggtaaataaaaatgtaatagttccaatagttgatagaaaaataaaaattatagaagatgattatgctgatcctgaacaaggaactggagctgttaaaattacaccagcacatgatttcaatgattatgaagtaggggagagaaataatttagaagtaataaatatttttacatcagatggtaaaattaatgaaaatgcgcctgataattatattggacttgatagatttgaagcaagaaaaagaattttaaaagaactttctgataaagaattacttgttaaagaagaaaaaattaaaaataaagttccatatggtgatagatctaattctataattgaaccttatttaacggagcaatggttcgcagatgctaagaaactttcaattaaagcaaaagaaatagtaaataataaaacaacaaatttttttcctgttaattggacaaaaacatattttcaatggatggataatatagaaccttggtgtatttcaagacagctttggtggggacatcaaatacctgcatggtatggacctgatggagaaatatttgtagatgaaacagaagaa

SEQ ID NO: 307430 - DNA, 985 bp, Unknown
  Bacterial polypeptide expressing nucleotide sequence isolated from the Sargasso Sea
tgaatttttaaaacatgcatggcaatggaaggaaaaatatggaaatactatccttacccagctaaaacgattaggtgcatcatgtgactggtctagaactacttttacgatggatcccgaatatagtgaagcagtaactaaagtatttgttgatttatataacgatggaatgatttataagggtgaacgaataataaattgggaccccaaaggacaaactgctctatcagatgaagaggttattcataaagaaattagtggacacctatggcattttaaatatccaataaaagatagcaaagaacatattatcgttgcaaccaccaggcctgaaacaatgcttggtgatacgggtattgctgtaaaccctaatgatgagagatatcaacatttaattgggagaaatgtaattcttccaatagtaaatagagagattccaattttttctgattcgtacgtagataaagagtttggtacaggtgcagtaaaagttactccagctcatgatcctaatgattttgatatgggtcaaagaaataatttagatactataaatattttaaatccagatggtacattaaacaataatgtcccagactcatttattggcaaagacagattgagtgcaagaaagctagtagttgaaactatagagagcttgggtcttattgataaaattgaagactatgttcataaagtaggtcattctgaaagaactgatgctgttgtagagccatatatatcaaaacaatggtttgtaaatatggagaaattagttgggccagccattgattgtgtaaaaaatggtgaagtgaaattttatcctgaacggtggacaaaaacttactatcattggctagataatattaaagattggtgtatttctaggcaactatggtggggtcatcgaatacctgtttggtataaaaatgatgaaatttattgcggtattaaacctccccaaggaagaaggtgggtcaagaag

SEQ ID NO: 307431 - DNA, 860 bp, Unknown
  Bacterial polypeptide expressing nucleotide sequence isolated from the Sargasso Sea
gctaccgattactggccgtttaattccggttatcgccgatgactatgtcgatcaagaattcggtacaggctgcgttaaaattacgcctgctcacgacttcaacgactacgatatgggtaagcgtcataacttgcctatgatcaacattcttaccgacgatgcgaaaattaatgatgatgcgccagaagcatatcgcggtttagatcgcttcgacgcccgtaagcaaattgttgctgatttagacgcacaaggcgcattggttaagattgagccgcacaagcttaaagtgccgcgtggcgacagaacaggtgcggtaattgaaccctacctaactgaccagtggtatgtagccgttgagtctcttgctaaacctgcaattgaagcggttgaaagcggcgaaattcgttttgtgccagagaactggaacaagacttactaccagtggatgcacaacattcaagactggtgtatttcacgtcagctgtggtggggacaccgcattccggcgtggtacgacgaaaacggtaacgtttttgttggccgcaccgaagaagaagtgcgtgaaaaacacggccttggcagtgacgtaaccctttcacaagacgatgatgtactagatacctggttctcaagcgcactatggccgttcgcgaccatgggctggccagaagaaacgccagatctagaaacctttgtaccgtcttcagtgctagtaaccggctttgacatcatcttcttctgggttgccagaatgatcatgatgaccaagaagttcacgggcaaaattccgtttaaagacatctacattactggtcttatccgcgatgagaatggcgataaaatgtcaaagtcgaagggca

SEQ ID NO: 307432 - DNA, 886 bp, Unknown
  Bacterial polypeptide expressing nucleotide sequence isolated from the Sargasso Sea
atctattcttattggggaaaaaaataaattatttaagccaaaagaaaataataaaaaattctcaatagttataccaccaccaaatgttaccggaagtcttcatatgggtcacgctttaaataattctattcaagatttactaacaagatttcatagaatgaataattatgaaactttatggcaacctggaaccgatcatgctggaatagcaacacaggcattagttgagaaaaaattaaaggatgatggaattaaaaaaaatgaaattggtagagataagtttatagaaaaagtgtgggaatggaaaaatcaatatggtgatataataattaaccaactgaaaaaattaggttgttcttgtgactggtctagaaatgcttttactatggacgacaatttgtcaaaatctgtaataaaagtctttgttgatctttataaaaaagatttaatttataaatcaaaaaaattagttaattgggatgttgtactaaaaacagctatttctgatttagaagttgatcaaagagaagttaattcaaaattatatcatataagatatccaattgaaaattcaaaagattttataaccatagccactacaagacctgaaacaatgttgggagatacagctatagctgttaatcctaatgatgatagatacaaatcacttgtaaataaatttgttactattcctttggtagaaagaaaaataaaaattatagaagataattatgccgatccagaacaaggaacaggagcagttaaaattacacctgctcatgattttaatgattatgaagtaggacaaaggaataatttagaaatcttaaatatttttacacctgaaggtaaaattaacgaaaatgcgccaaaagaatttattgga

SEQ ID NO: 307433 - DNA, 1000 bp, Unknown
  Bacterial polypeptide expressing nucleotide sequence isolated from the Sargasso Sea
attacatttcatcccaaaacatggacgaagacatataatcactggatggaaaacatcaaagattggtgtattagtaggcagctgtggtgggggcatcaaataccggtctggtaccataatgatgataaaaacaagatacatgtatctgttgaaggtcctttagacccagaaaactggacgcgtgataaagacgttttagatacttgggcgagctcttggctctggccaatgggggtccattcttggcctaatgatagtgatgaactaaaaaaattctatccaacagataccttagtaacaggaccagatattatctttttttgggttgcaaggatgattattactggttgtgagtttatgggccagatcccctttaaggatgtatacttcacatccatattaagagatgagactgggaaaaaattaagtaaatctcttggaaattctccagaccccatcgaattgtttaatgaatttggcaccgatgcggttaggtttgggatcatgctaatggcacctcaagggcttgatgttctattttcaaaagacagacttgaaatcggaagaaatttcatgaataaattatggaatgcttgccgattcattgaaatgaatctcgacaaagaatataaaagagatttagagtttgataatttagagttggatctttctgataaatggattctaagcaggctaacaaaaatggtgaaagattataaccttcaattagaaaggtttcactttaatgaggctgcaaagataatctatgaattcacttggaatgatttttgtgattggtacgttgaaattgcaaaaataagattctatggagaagatgaatccaaatcaaatattgtaaaatctgtttctcttaaatgcataagtacagtgctcactctcctacatccatttgcaccatttataacggaagaactttggaaacactttagtattcagggagcatctgatttgattgtttcatcctggatttataaagaaa

SEQ ID NO: 307434 - DNA, 716 bp, Unknown
  Bacterial polypeptide expressing nucleotide sequence isolated from the Sargasso Sea
tatgagttcagacaaatataaccataaagaggtagaaaatagaatttatttgtactgggagaaaaacaaactttttaaaccaaaaaaaaataaaaaaaaattttcaattgttataccaccgcctaatgtaacaggaagcctacatatgggtcacgctttaaataattcaattcaagatttattaactagatatcatcgaatgaacaactttgaaactttatggcaacctggtactgatcatgcgggaatagcaacacaagcacttgttgaaaaaaagttaggtaatgaaggtataaaaaaaaatgacattggaagagacgagtttgttaaaaaagtgtgggaatggaaaaatgaatatggtggaataataataaatcaactaaaaaaattaggatgctcatgtgattggtcacgtaatgcttttacaatggattctaatttatctaaatctgttttaaaagtatttgtagacctttacaaaaagaaaataatttacaaatcaaagaaacttgttaattgggatactgttttaaaaactgctatttctgatttagaagttgatcaaagagaagttaattctatactttatcacattaaatatcccatagaaaaaactaaagaatttataactatagcaacaaccaggcctgaaactatgctaggagacactgctgtagctgttaatccgaaagataaaagatataaacatttaatag

SEQ ID NO: 307435 - DNA, 904 bp, Unknown
  Bacterial polypeptide expressing nucleotide sequence isolated from the Sargasso Sea
tttaaaccaagaaaaaataagaaaaaattttccattgtgattccacccccaaatgttactggaagcttacatatgggacatgctttaaataattctatccaagatcttttaacaagatatcacaggatgaataattttgagacattatggcaaccaggaactgaccatgctggaattgccactcaggcattagtagaaaaaaaactggaaaaaaatggtgttaataaaaacgatcttggaagagaaaatttcattaaaaaagtatgggagtggaaaggtcaatacggtgatataattttaaatcagcttaaaaaattaggttgttcatgtgattggtctagaaacgcatttaccatggatgacaatttatctgatagcgttttaagggtatttgtagaactttataaaaaaaagattatttacaaatcaaaaaaattagtaaattgggatactgtattaaaaacagcaatttctgatttagaggttgatcaacgtgaagtaaattcaaaattatactatattaaataccctattaatggcactgatgaatttataactatagccacaacaagacccgaaacgatgcttggcgatactgctgtagctgtaaatccaaaagacaaaaggttcaaaaagtataaaaataaatatgtagacttacctttagtaaaaagaaaaattaaaattatttttgataattatgcagacccagaacaaggaactggtgctgttaaaattacacccgcacatgattttaacgactatgatgttggacaaagaaataaactaaaaataataaatatttttactgaagatggaaaaataaacaataattgtcctgaaaaatataaaggtctagatagatttgaagcaagaaaaataatacttaatgatttaaaaatct

SEQ ID NO: 307436 - DNA, 832 bp, Unknown
  Bacterial polypeptide expressing nucleotide sequence isolated from the Sargasso Sea
tggaccagataaaaaaatatttgtagcagaaaatgaaaatgacgcgaaaaaattagcaaaaaaacattataaaaaagacacaaacatctccagagatcctgatgttttagacacttggttttcatctggactttggccttttgcaacacttggttggccaaaaaaaaatgattatttaaataaattttatcctactaccgttttggttacaggttttgatataatatttttttgggttgcaagaatgatgatgcttggaatggaatttctaaataaagaaccctttaaagatatatacgtccacgctttagtgagagatgagaaaggacaaaaaatgtctaaatctaaaggcaatgtaattgatcctttagaattaattaataagtatagtgcagatgccttaagatttactcttctttctatggcttcaccaggtagagatgtaaagttatctgaagacagagttaaaggatacagaaatcttttaaataagttatggaacgcaaataattttttaattcaaaataaatgtaacttttctgaaaaaaaaccaaaaaaatttaatttaaatattaataattggatttttaatgagcttgtaaaaataaaaaaagaagtagagacaaaaattaaagaatatagattcgatgaagcatccagacttatatatcaatttgtatggaattcttattgtgattggtatttagagctttcaaaaactatactttactcgaatgataagaaaaaaattaaagaaacacaggatgtttctggtttcattttcactcaaatattaattctgatgcacccattcataccgtttgtaaactga

SEQ ID NO: 307437 - DNA, 826 bp, Unknown
  Bacterial polypeptide expressing nucleotide sequence isolated from the Sargasso Sea
aattcaaaactttattatatcaattatcaaattgaaaatagttcagaatttataactattgcaacaacaagaccagaaacaatgctaggagacacagcagttgctgttaatcctaaagatgaaagatatacaaatttagtaggtaaaaatgtagttttaccaataacagggagaaaaataaaaattattcaagatgattatgctgatccagagcaaggctctggtgcagttaaaattactccagcacatgattttaatgactatgatgtgggtaaaagaaataaattagagataataaatatattcacagaggacgggaagattaacgaaaatgcgcctagtgattatgttggtttagatcggtttgaagcaaggaaaaaaatattaaatgaacttggtgacaagcttattaaagaagaaaatattaagaataaagttccttatggagatagatctaactctgttattgaaccttatcttacagagcaatggtttgcagatgcaaaaaaactatcagtaaaagcaaagaagattgtaaagaacaaaaaaacaaaattttttccccctaattggtcaaagacttattttcaatggatgaataatattgaaccttggtgtatatcaagacaactttggtggggccatcaaataccagcttggtatggacctgataaaaaaatctttgtggcatcaaattataaagaggcaaaaaaactagccaaaaaaaaatataagaaagatgtagaattagtaagagatgaagatgttttggatacatggttctcatcaggattatgggcttttgctactcttggctggccaaaca

SEQ ID NO: 307438 - DNA, 774 bp, Unknown
  Bacterial polypeptide expressing nucleotide sequence isolated from the Sargasso Sea
aaaaaattttataaaaagaaagtgaatttaaaaagagatccagatgttcttgatacctggttttcttcgggtctctggccttttgctacattaggatggccttcaaaaaattattttttaaaaaaattttatcctacatcagttttagtaactggttttgatataattttcttttgggtagctagaatgatgatgctaggtatgcaatttttaaataaagaaccgtttaaagaggtttatgtccatgcacttgtgagggatgagaaaggtcaaaaaatgtcaaaatcaaaaggaaatgtgattgatcctttagttctaatagatagatacagcgctgatgctttaagatttactttattatctatggcatcaccaggaagagatgtaaaactttccgaacaaagagttaaaggttatagaaactttttaacaaaaatatggaacgttaataactttctcaaagtaaataaatgtagttttaatggttcaattaatccacataaccttaaacttaatataaacaggtggatttatagtgagcttattgaaacaaaaaatttaacagaaaactttattaaaaattaccgtttcgacgaagctgcaaaaacagtttataaatttgtttggaatagttattgtgattggtacttagaactttctaaaactatcttattttctaaaaaaaacagagatattaacgaagtaaagaatacatctggtcaaattttcaaagaaatattgatattattacatccatttataccttttataact

SEQ ID NO: 307439 - DNA, 838 bp, Unknown
  Bacterial polypeptide expressing nucleotide sequence isolated from the Sargasso Sea
ttgttgttgcccaacaagaccagaaactatgcttggtgatactgctgtagctgttcacccatttgacaaaagatatagtgacttaataggtaaaacattggttttaccattggttaatagagaaataccaatcattgctgatgagtattctgatcctgataaaggttcaggagccgtaaagattacaccaggacatgactttaatgattttgatgttggtaaaaggcatgatttagaagttattaatatatttgatgaaaaagcctgtatcgttgatacagaatttactaaaaaatatgcagggttagatagatttgttgcaagaaagaaagtcattgaagatttagaaaaagaaaattttcttgttaaggtagaagaggttgaaaatgttctgccatatggtgatcgttcaggtgagattattgaaccatggctcatggagcaatggtatgttaacgccaaagttcttgctaaaccaactattgatgctgttaaacagggaaaaatgagatttattccaaaaaattgggaaaatcttttttttgaatggatgaataatatccagccatggtgtatatcaagacaattatggtggggacatagaatccctgtatggtatggtccagataagacaacttttgttgaattagatgaagaaaaagcacttaagaaagctgaagaacactacggacataaagtaagtcttcaacaagagaatgatgttttagacacttggttttcttctgctttatggcctttttcaactttaggttggcctaatcaaactgatgaacttaaaaagtattatccaggttctgttttagttacagggttttga

SEQ ID NO: 307440 - DNA, 750 bp, Unknown
  Bacterial polypeptide expressing nucleotide sequence isolated from the Sargasso Sea
gtatatagactacaaattagaagatgaagataatgtaataacaattgcaacaactcgacccgagacaatgcttggagatacagcaattgctgttcaccctgatgatgaaaggtttaaagattttgtgggtaagcatgcatttattccaatacttaatagaaaaattattattattgctgatgagtatgtaaaagtagaccaaggctctggtgcagtaaaaataactccggctcatgattttaatgattatgaaataggaataagacataatcttgaagttataaatatttttaatgaaaatgctgagcttaatgaaaactgccctatcgaatatcaaaatcttgatcgctttaaggcaagagataaaatcgttaatgaattagaaaccattggagcactgaataaaattgaagagaatattcatactgtaccatatggagatagatcaggcgaagtggtagagccatggcttacagatcaatggtttgtaaatgcaaaaaaattgtcattaaatgcaatcgaaaaagtaaaaacaaaaaaaacaatatttgttcctcaaaattgggagaaaacatattttgattggatggaaaatattcaaccctggtgtatttcaagacaattaatatggggtcatcaaatacctgcttggtatgggccagatggagatatttttgttgccgaaaattcagatgaggcgcataagatagctagggaacggtataataaagatgtaaaacttgttcagga

SEQ ID NO: 307441 - DNA, 961 bp, Unknown
  Bacterial polypeptide expressing nucleotide sequence isolated from the Sargasso Sea
taatccaaaagatgatcgttttaaatcctttgttggtaaaacagcaacgataccaattgtaggaagacaaattaacattatagaagatgattatgcggatcctgaacaaggaacaggtgctttaaaaataacaccagcacatgattttaatgattacgatgttgggcaaagaaataatttagaaattattaatatttttacagaatctggaaaaattaatgataatgctccaagaggctatgttggtcttgatagatttgaagctagaaaaaaaatcttaaaagaacttaaagaaaaagatttttttgtaaaagaagaaaatattaagaataaagttccttatggagatagatcaaattctattatagaaccatttttaaccgagcaatggtttgctgatgctgaaaaattatcagtaaaagcaaaagaagttgttaatttaaaaaaaactaatttctttcctgaaaattggtcaaaaacatattttcaatggatgaataatatagaaccttggtgcatctctagacagctatggtggggtcatcaaattccagcatggtatggtcctgacaaaaaaatattcgtagcaattaatgaagatgaggccaaagaacaagcaaaaaaatattacaataaagaagttgatttagttcgtgatcccgatgttcttgacacatggttttcatcaggcctttgggcttttgctacgctaggatggcctgacaataaaaaatatgtagataaattttaccctacctccgtattggtaactggatttgatattatatttttctgggttgctcgaatgattatgtttggtactgaatttttaaacaaagaaccatttaaagatatttatgttcacgcattagttagagatgaaaaaggacaaaaaatgtctaaatcaaaaggtaatgtaatagatcccatagatttaattgaaaaatatagcgctgatgca

SEQ ID NO: 307442 - DNA, 783 bp, Unknown
  Bacterial polypeptide expressing nucleotide sequence isolated from the Sargasso Sea
aatgagttttgataaatatgagcataataatgtagaaaataaaatctatgattattgggaaaaaaatgaattatttaaacccaaagaaaattcaaaaaaattctcaattgtaattcctccgccaaatgtaactggaagccttcatatgggccatgctttaaataactcaattcaagatgttttaactagatttcatagaatgaataattatgaaaccttatggcaaccaggaacagatcacgccggaattgcaacccaagcattagttgaaaaaaaacttgtaaaagaaggtattaaaaaaaatgatttaggtagagaaaaatttattaaaaaagtatgggaatggaaaaatgagtacggagatataataataaatcaactgaaaaaacttggatgttcttgtgattggtcgcgtaatgcttttacaatggatgaaaatttatctaagtcagttataaaagtatttgttgatctttatgataagaaattaatctacaaagcaaaaaaacttgtaaattgggatgttgttttaaaaacagcaatatctgatttagaagttgatcagcgtgaagtaaattctcaactttattatataaattatcctatagaaaattctgataaatttataacaattgcaacaacaaggcctgaaacaatgttgggagatactgcaatagcagttaatcctaaagacgatcgatttaaggatttagttggaaaactagtgaccattcctttagctaatagaaaaataaaaataataacagatgattatgctgatcc

SEQ ID NO: 307443 - DNA, 892 bp, Unknown
  Bacterial polypeptide expressing nucleotide sequence isolated from the Sargasso Sea
tcttgtgactggtcaaggaatgctttcaccatggatgagaatttatctaaatcagttattaaggtttttgtagatctcttcaacaaaggtctgatctataaagataagaaattagtcaattgggatacagttttaaaaacagctatttcagacctagaagtagatcaaagagaggtaaattctaaaatttattacatcagatatccaatagatgggactgaggaatttattacaattgcaacaacaagacctgaaacaatgcttggtgatacagctatagctgtaaatccaaaagatgaacgatttaaatcctttgttggaaaaacagttaccattccaattgttggaagaaaaataaaaatcatagtggatgattatgcagatcctgaacaaggaacaggagcattaaaaataactcctgcacatgattttaatgactatgatgttggtcaaagaaataatcttgaaataataaatatttttactgaagcaggtaaaataaataacaatgctccaaaagagtatgttggtcttgataggtttgaagctagaaaaagaattttaaaagaactcaaagataaagaattttttgtaaaagaggaaaatatcaaaaacaaagttccctatggagataggtctaattcaataattgaacctttcttaacagagcaatggtttgcagatgctggcaaattatctgttaaagctaaagaagttgttaattcaaagaaaacaaatttttttcctgaaaactggtccaaaacttattttcaatggatgaataatattgagccatggtgtatttcaagacaactatggtggggacatcaaatacccgcctggtatggtcccgatgaaaaaaaatttttgttgcagaaaatgaaggaatgat

SEQ ID NO: 307444 - DNA, 786 bp, Unknown
  Bacterial polypeptide expressing nucleotide sequence isolated from the Sargasso Sea
ttcactgaggatggcaaaattaataataatgcaccaactgagtatgttggattagatagatttgaagctcgaaaaaaaatacttaatgaattaggtgacaaattaataaaagaggaaaaaataaaaaacaaagttccatatggtgatagatcaaattctgttattgaaccttatttaaccgaacaatggtttgcagatgcaaagaagttatctataaaagcaaagaaaatagtaaaaaataaaaaaacaagtttctttccaaaaaattggtctaaaacatatttccaatggatgaacaatatagaaccgtggtgcatatcaagacagttatggtggggccatcaaatacctgcttggtatggtccagataaaaagatatttgttgcacataatttaaacgaagcaaaaaaacttgctaagaaaaaatataaaaaagatgttgaattagttagagatgaagatgtattagatacatggttctcatcaggtttatgggcttttgcaactttaggatggccaaaaaaaaatgaatacttaaaaaagttttatccaacatctgtattagttacaggctttgatattatcttcttttgggttgcaagaatgatgatgtttggaatggaatttttaaataaagaaccttttaaagatatttatgttcatgctttagtgagagacgaaaaaggacaaaaaatgtcaaaatctaaaggcaatgttattgatcccttagtattaatagaaaagtacagtgctgatgcattaagatttactttattatcaatggca

SEQ ID NO: 307445 - DNA, 925 bp, Unknown
  Bacterial polypeptide expressing nucleotide sequence isolated from the Sargasso Sea
ggatgttcatgtgattggtctcgtaatgcttttacaatggatgaaaatttatctaagtcagtcataaaagtatttgttgacctttataataagaaattaatctacaaagcaaaaaaacttgtaaattgggatgttgttttaaaaacagcaatatctgatttagaagttgatcagcgtgaagtaaattctcaactttattatataaattaccctatagaaaattctgataaatttataacaattgcaacaactagacctgaaactatgttgggagatactgcaatagctgtaaatccaaaagacgatagatttaaagatctagtagggaagtttgtaattattcctttagtaaagagaaaaataaaaataataacagatgattatgctgatcctgaacaaggaacaggagcagtaaaaattacaccagctcatgattttaatgattatgatgtaggtataagaaacaagttagaagtaattaatatatttacgcctgatggaaaaataaatgacaatgcacctgacccatataaaggtttagatagatttgctgcaagaaaattaatcttagaacatcttgaagagggtaaatttttagaaaaaatagaaaagttaataaacaaagttccttatggggatagatctaattctattattgaaccttatttaacagaacaatggtttgttgatgctaaaactttagctgtaaaagcaaaagaagtagttaataatggtaaaactaaattctttcctgaaaattggtcaaaaacatattttcaatggatgaataatattgagccttggtgtatttctcgtcaattatggtggggacatcaaattccagcatggtacggacctgatggaaaaatatttgtagctgaaaatgaggatgagtgcaaaaaacaagcaaaagaattctattcaa

SEQ ID NO: 307446 - DNA, 796 bp, Unknown
  Bacterial polypeptide expressing nucleotide sequence isolated from the Sargasso Sea
aaggctgtggtggctggcctggaggagctggggctgctggtgaaggtggaggactaccgccacagcgttccctattccgatcgcggcaaggtgccggtggagccgctgctttccacccagtggtttgtcaaaaccgagccccttgcggctcgctgtcgtgaggccctcgagaagcaggacccccgcttcatccccgagcgctgggagaaggtgtatcgcgactggctcaccgacatccgcgactggtgcatcagccgccagctctggtggggacatcgcattcccgcctggttcgtgatcagcgagaccggcggcaagtacaccgacaccaccccctacgtggtggcccgcaatgaagccgaagccctggagaaggccaaggcggagtacggcgcggcggcggagatcgagcaggacgaagacgtgctcgacacctggttctccagtggcctctggcctttctccaccctgggttggcccgatgcttacagcgccgacctgcagcgctggtaccccaccagcaccctggtgacgggcttcgacatcatctttttctgggtggcccggatgacgatgatggccggcgccttcaccggtgagatgcccttccaggacgtctacatccacggcctggtgcgggatgagcagaatcgcaagatgagcaagagcgctggcaacggcatcgatccgctgctgctgatcgaccgttacggcaccgatgccttgcgttttgccctggtgcgggaggtggccggtgcaggtcaggacatccgcctggactacgaccgcaagaagg

SEQ ID NO: 307447 - DNA, 857 bp, Unknown
  Bacterial polypeptide expressing nucleotide sequence isolated from the Sargasso Sea
agacagaagctcaaaattataaatatttttagtgaagatggaaaaattaataataatgccccaagagaatatattggattagacagatttgaagctagacaaaaaattattaacaaattaaaggaattagaaatttttgaaaaagaagagagtattaaaaataaggtgccatatggtgataggtctaattctataattgaaccttttttgactgaacaatggttttgcgatgcaaaaaaattgtcgattaaagctaaaaaagttgttaaaaataaagctacaagtttctttccaccaaattggtctaaaacatactttcaatggatggataatatagagccttggtgtatatctagacaactttggtggggccatcaaattccagcttggtatggaccagataaaaaaatatttgttgcagaaaatcaaaagaaagctgaaactttagcaaaaaaattttataaaaaaagagtaaatttaaaaagggatccagatgttcttgacacatggttttcttcaggtctttggccctttgctactttaggatggccaaataaaaactactatttaaaaaaattttatcctacttcggttttagtaacgggttttgatataatttttttctgggtagcaagaatgatgatgctgggtatggaatttttaaacaaaaaaccatttaaagatatttatgttcatgctttagttagggatgaaaaaggtcaaaaaatgtccaaatcaaagggaaacgtaattgatcctttagtgcttatagacagttatagtgctgatgcgctgagatttacattgctgtctatggcctctccagggagagatgtaaaactatctgagcaaagagt

SEQ ID NO: 307448 - DNA, 928 bp, Unknown
  Bacterial polypeptide expressing nucleotide sequence isolated from the Sargasso Sea
agatataaacatttaattggtaaaaatgttattctacctattgtgaaaagaaagataaaaataataactgatgattacgcagatcctgaacagggaacaggagcagttaaaatcacaccagcacatgattttaatgactatgaagtaggtttaagaaataaattagaaataataaatatttttactgaagatggaaaaataaatgaaaatgcccctagtgaatttataggattagatagatttgatgctagaaaaaaaatattaaatgaaattgcaagtaaagatctattagtaaaagaagaaaatattaaaaataaagtaccatatggagatagatcaaattcagttattgaaccttttttgactgagcaatggtttacagatgcaaaaaaattatcaataaaagcaaaaaaaatagttaaatcaaaaaaaacaaatttttttcctaaaaactggtccaaaacatacttccagtggatggataatattgagccctggtgtatctcaagacaactgtggtggggacatcaaatacctgcatggtatggacctgataaaaagatttttgtagcaacaagtgaaattgaagcaaaaaaaattgctaaaaaatattataaaaaaaatgtagaacttagaagagatccagatgttcttgacacatggttttcatcgggtctttggcctttcgcaacacttgggtggccaattaaaaacaattacttaaaaaaattttatccaacaacggttttagttacaggttttgatataattttcttttgggttgctagaatgattatgtttggaatggaatttttaaataaagaaccttttaaagatatatatgttcatgctttggttagagatgaaaaaggacaaaaaatgtctaaatctaaaggcaatgttattgatccattagaattaatcgaaa

SEQ ID NO: 307449 - DNA, 854 bp, Unknown
  Bacterial polypeptide expressing nucleotide sequence isolated from the Sargasso Sea
catgacagagatgaatgatcaattatctttagagaattattcaccttttgaagtagagaaaaagtggcaagaaaaatgggaaattctaaaggcgtttagtcctaaccctgaggatgatggggagcctttttgtgttgttattccgccaccaaatgtaactggatctttgcatatggggcatgcatttaatacggctttgatagatgttgtagtacgttttcaaagacttttaggtaagaatgttttgtgtttaccgggaactgatcatgcttcaatagctgttcaaactattctcgaaaaacaattaaaaagtgaaggcaaaacaagcgaggatattggaagagatgaatttcttaaaagagcatggaactggaaagaacaaagtggtggaagaatagtttctcaattaaaaagaataggatattcagttgactggactagagaaagatttaccctcgatcaaaaattaaatgaagcagttattgaggcttttcatattctttatgaaaagaatttaatttatagaggcgaatatttagttaattggtgccctgaatctcaatctgccgtaagtgatcttgaagttgaaatgcaagaagtaaatggccatttatggcattttaaataccctttaatttctgaaagtggtgaacagttagataagtacttagaagttgcaacaacaagaccagaaactcttttgggtgatactgcggtggcagttaatcctgatgatgatagatataaagaatttattggtgtaaaagtaaaagttccttttgttgatagagaaatacctattatcgctgattcacatgttgataaagattttggtacgggttgtgtgaaggtta

SEQ ID NO: 307450 - DNA, 928 bp, Unknown
  Bacterial polypeptide expressing nucleotide sequence isolated from the Sargasso Sea
aatgcattcacaatgggatgagaatttatccaaatcagtcctaaaagtatttgttgatctttataataagaaattaatctacaaagcaaaaaaacttgtaaattgggatgttgttttaaaaacagcaatatctgatttagaagttgatcaacgtgaagtaaattctcaactttattatataaattatcctatagaaaattctgataaatttataacaattgcaacaaccagacctgaaactatgttgggagatactgcaatagcagttaatccaaaagacgatcgatttaaagatattgttggaaagctagtgagcattcctttagcaaacagaaaaataaaagtaataacagatgactatgctgatcctgaacaaggaacaggagcagtaaaaattactccagctcatgattttaatgactatgatgtaggtataagaaacaagttagaagtaattaatatatttactccagatggaaaaataaatgacaatgcacctgacccatataaaggtttagatagatttgctgcaagaaaattaattttagaacatcttaaagaaggtaagtttttagaaaaaatagaaaagttagtaaacaaagttccttatggagatagatctaattctattattgagccttatttaacagaacaatggtttgttgatgcaaaaactttagccattaaagcaaaagaggtagtaaataatggaaagactaaattttttcctgaaaattggtcaaaaacatattttcaatggatggataacattgaaccttggtgtatttctcgtcaattatggtggggacaccaaattccagcatggtacgggcctgatggaaaaatatttgtagctgaaaacgaggatgagtgcaaaaatcaagcaaaagaattctattcaaaagatgtggaattaaaaagagatgaa

SEQ ID NO: 307451 - DNA, 714 bp, Unknown
  Bacterial polypeptide expressing nucleotide sequence isolated from the Sargasso Sea
tccttacggtgatagatctaactctataattgaaccctttttaactgaacaatggttttgtgatgccaaaaaattatctataaaggctaaaaaaattgttaaaaaaaaagacacgaatttctttccatcaaattggtctaaaacatacttccaatggatgaataatattgagccttggtgtatatctagacaactttggtggggccatcaaattccggcttggtacggaccggataaaaaaatatttgttgcagagaatcaaaaaaaagcagaattattagctaaaaaattttataaaaaaaaaacaaatttaaaaagagatccagatgttcttgatacttggttttcttcaggtctttggccttttgctacattaggatggccatcgaaaaactattttttaaaaaaattttatccaacttcagttcttgtaactggttttgatataatcttcttttgggttgctagaatgatgatgttgggtatgcaatttttaaataaagaaccatttaaagaaatttatgttcatgcacttgtcagagatgagaagggtcaaaaaatgtcaaaatcaaaaggaaatgtaattgatcctttggtccttatagacagttacagtgctgatgcattacgatttacattactttctatggcctctccaggcagagatgtaaaactttctgagcatagagttaaaggttatcgaaattttttaac

SEQ ID NO: 307452 - DNA, 822 bp, Unknown
  Bacterial polypeptide expressing nucleotide sequence isolated from the Sargasso Sea
gtagctgtaaatcctgatgatgatcgatataaaaaaataataggaaaaaatgtaattatcccgataattggaagaaaaattaaaattattacagacgaatacgcggatcctgaacaaggaacaggtgcggttaaaattacaccagcacatgattttaatgattatgatgttggtgaaagaaataatttagaaataattaatattttcactgacgatggtaaaattaataaaaatgccccagatgaatatgttggactagatagatttgatgcacgaaaaaaaattataaataaattaaatgaattaggtttttttgttaaggaagaaaatattattaacaaagtcccttacggcgatagatcaaattctataatagagccatacttaaccgaacaatggtttgcagatgcaaaaaaattagctgtcaaagcaaaagatattgttaattccaaggatacaaaattctttcctgaaaattggtctaagacatatttccaatggatggataatattgaaccgtggtgtatttcacgacagttatggtggggtcatcaaataccagcatggtatggacctgatggtaagatatttgttgaagaaacatttgaagaggcaaaaaaagtatctaatgatttttataaaaaagatgttgaacttgtaagagataaggacgtattagatacgtggttctcatcaggtttatggccttttgcaacactaggttggcctgaaaaaacagattatctaaaaagcttttacccaacaagtgttctggttactggttttgatataatttttttctgggtagcaaggatgattatg

SEQ ID NO: 307453 - DNA, 787 bp, Unknown
  Bacterial polypeptide expressing nucleotide sequence isolated from the Sargasso Sea
gaaaaaacttactttgaatggatggaaaatattcagccatggtgcatttcacgtcagctaatgtgggggcatcaaataccagcatggtacggacctgatgggaaattgtttgtcgctgagaacttagaggatgcaaaaagaatagctagagaccactatgataaagacgtcaaattagaacaagataatgatgttcttgatacgtggttttcttcagcgctatggccattttcaacgttaggctggccagaccaaactcctgaattggaaaaattttaccctacatcaactttggtcacaggttttgatattatatttttttgggtcgcacgaatgatgatgatgggcttatattttacagaaaaaattccattcagtgaagtctatgtgcatgctttagtcagggatgataaaggtcaaaaaatgtcaaaatcaaaaggaaatgttattgatcctatagtgctgatggatgaatttggagcagactcactaagaatgactttgtgttcaatggcggcgcaaggaagagatattaaactttcaaaacaaagagttgaaggttaccgaaatttcatcacaaaaatatggaacgctgttaagttttgtgaaattaacaattgttcttatgaggatttcgatattgaacatactcaaaatatttttaatttatggattttaaatgaactagaaaattgtagatacaaaacagaacagtcaataaagaattacaggtttaatgaagctgcaaatgaattatacaaatttacatggggtatattttgtgatt

SEQ ID NO: 307454 - DNA, 898 bp, Unknown
  Bacterial polypeptide expressing nucleotide sequence isolated from the Sargasso Sea
gcggtgaacccaaatgacgaaagatataaaacgtacattgggaaaaaagtaatagtgccaatagttgatagagaagttaaaataatttttgataattatgtttcaatagaacaaggttctggcgcactcaaagtaacacctgctcatgattttaatgattttgaaattggcaaaagacataaacttgagtttataaatatttttgaaaaaaatgggaaattaaataattcagtcccaaaaaatttaattggactagatcgctttgacgctagaaatttaattgttagaaaactaaaagaaataaatttattagaaaaaattgacaatattaaaaattctgttccctatggagatcgatcaaactctataatagaacctttaatgacagagcaatggtttgctgacgcaaaatttttagctaaaaaagctattcaagttgtaaaaaaaaaaaagacaaatttttttccggtgacctgggaaaaaacttattttcagtggatgaacaatattcaaccttggtgtatatcgagacagttatggtggggtcatagaataccagcctggtatacaaaagataaaaaaatttttgttgctgagaatgaaaatgaagctaaaaaaattgctaagaaattttataaaaaaaatgttgaattgaaaagagatgatgatgtactagacacatggttttcatctgcactttggccattcgcaacattaggatggccaaaaaaaacttatgaattaaaaagattttatccaacatctgttcttgtaacaggatttgatattatatttttctgggtagcaagaatgatgatgttaggtaaccatttaattaaaaaagaacctttttctaaaatttacgtacatgcactagttagagatgaaaaaggtcaaa

SEQ ID NO: 307455 - DNA, 847 bp, Unknown
  Bacterial polypeptide expressing nucleotide sequence isolated from the Sargasso Sea
ttggagattgaaaataagttgtacttagattgggaaaaaaaaaaattattttccagcagagtaaataaaaataagcaaaacttttctattattatgcctcctcctaatgttactggaagtcttcatatagggcatgcattaaatatgacaatacaagatgttttatgtaggtattggagaatgaaaaacaaaaatgtattgtggcagcctggtactgatcatgcgggaatagctactcaaaatgttgtagaaaaaaacttaataaaaagcgaaaaaaagagcaaaaatcaaataggaaagcaagcattcattaaaaaaatatgggagtggaaagaaaattctggcaatcaaattattaaccaaataaaaaggttaggagcctctccagattggaaaagattaaagtttacaatggataaagatgttagtgaagcagtaaactttgtttttgttaatttatttaaaaagggtttaatttataaagacaagaggctagtcaattgggatataaaattacaaacagctatttctgatttagaggtagaacaaaaggaacaaaaaggagattttatttatataaaatactttctagaggactctaaaaactttatagtagttgcaaccactagaccagaaactctctttggtgactgttgcctggctgtaaatcctaaggacaaaaaatacaaaaaatttataggtaaaaaagttaaagtgcctttaaccgatagagttattcaaattatttcagattcttatgtcgacattaataaaggaagcggtgcactaaaaattacacctgctcatgactttaatgactttaaaattggcaaaaaattaaaaacat

SEQ ID NO: 307456 - DNA, 889 bp, Unknown
  Bacterial polypeptide expressing nucleotide sequence isolated from the Sargasso Sea
tatgcaagacgaaacctatgagccattagctattgagaaaaaatggcaagagagctgggaatcagctaacaaatttgtaccagtaggttcggataaaaagttttcaattgttattccaccaccaaatgtaaccggatctttacatatgggacatgcattagagcattcaataattgatgtaattactcgtataaaaaggcttcaaggatatgaaactttatgggtgccaggcacagaccatgcaggaatcattactcagttattagttgaaaatgaactatctgaaaagggtgtacagaaagaagacattggaagagaaaactttatatcaaaagtttgggaatggaaagaaaaatctggtgaaaacatatcaacccaaatgaggaaacttggtatgagctgtgactggtctcgtgagaggtttactatggatgaaggtctttcaacagccgtaagagaagtatttataaaactttatgaagatggattaatttataaaggtacacgaatggttaactgggatacggaacttatgtctgcagtttctgatcttgaagtaactttaaatccagaaaaaggaaaattgtggagtattaaatataaaacagaagattcgtttttaactatttctactacgcgtccagaaactcttttaggagatacagcagttgctgtaaatcctgatgatgaaagatataaaaatctaattggtaaaacagctattgtgcctttagtaaatcgtgaagttccaataattgcagatgaatatgttgatccagaatttggttcaggatgtgtaaagattacgccatcacatgatttcaatgattatgaaattggagaaaaacataaattagagtttattcaatgtattgaccttgatggaaaa

SEQ ID NO: 307457 - DNA, 897 bp, Unknown
  Bacterial polypeptide expressing nucleotide sequence isolated from the Sargasso Sea
aaatatttttgataataatgccaaattaaattctgaagtgcctgaccgttatgttggtgtagatcgttttgaagcccgggatatgatagtcaaagatattgagagactgggccttttggaaaaaattgaagataatgagatgacgataccttatggggatcgatctggtgtagtaattgaaccctggttaacagaccagtggtttgtggacgctaaaacgttggctgcgccagccattgcaaaggttaaagagggatatactcgttttgtgccaagtcattgggaaaaaacttattttgactggatggaaaatattcaaccctggtgtgtttcaagacaaatttggtggggtcatcaaataccggcttggtttggccctgacggagaaatatttgtagaagctaccgaagaagaagctctcatttcggctaaaaagcattatggaaaaaatatagatcttaagagagatgaagatgttctggatacttggttttcttcagcactttggccattttctacaatgggttggccagaaaatactgctgatttagcgaagtattacccaacgagcgtcttagtaacaggttttgatattatatttttctgggtagctaggatgatgatgatggggcttcactttcttaaagaggtgccattcaaaacggtttatattcatgctctagtcagagacgaaaagggccagaaaatgtcaaaatcaaagggtaatgttatggatccccttgagcttattgacaagtatggcgctgatgctcttcgaatgactttagtagctttagcagcccagggaagagatattaaattatcagaaaatagggttgaaggtttacagaattttgcaactaagttatggaacgctgctaggttttgtgaatttaa

SEQ ID NO: 307458 - DNA, 821 bp, Unknown
  Bacterial polypeptide expressing nucleotide sequence isolated from the Sargasso Sea
tatgattagtgataaatataaccactcagtagttgaaagcaagatatacagttattgggaaaaaaataatctttttaagcctaaaaaaaataagaaaaaattttctatagtaatacctcctccaaatgtaactggaagtttgcatatgggacatgctttaaataattcaattcaagatttattaactcgatattatagaatgaataactatgaaacactatggcaaccaggaactgatcatgcgggtattgcaacgcaagcacttgtggaaaaaaaacttgcagccgaaaatataaataaaaatgatttaggtaggtctgaatttattaaaaaagtatgggaatggaaaaaccaatatggagacataatcattaaccagttaaaaaaattaggctgttcttgtgattggtctagaaatgcttttaccatggataaaaatttatctgaatctgttattagggtttttgttgatctttataataaaaaattaatttataaatctaaaaaacttgttaattgggacactgtacttaaaacggctatttctgatttagaagtagaccaaagggaagtgaattctatactttattatattaaatatccaattgaacattcaagtgaatttataacaatcgcaaccactagaccagaaactatgctaggtgatactgctgttgcagtaaacccaaaagataaaagatacaaaaaatttgttggtaaaaatgctattttacctttggtaggaagaaaaattcaaattgtagcagacaattatgctgatccagatcaaggaactggagctgttaaattactccagccca

SEQ ID NO: 307459 - DNA, 802 bp, Unknown
  Bacterial polypeptide expressing nucleotide sequence isolated from the Sargasso Sea
gtaataccaccccccaatgttactggtacccttcatatgggtcatagttttcaatatgcgattatggatttctataccagatatcatcatatgtctggaaaagatgctcactggcaagttggagctgatcatgcaggcatagcaactcaaatggttgtagaaaataatcttgcaaaaaaaaatgtaactaggttagagcttgggagagagaaatttgttgatgaagtttggtcttggaaaaattattcagaagaaaaaataacatcacaaattaaaagacttggatgctcggttgattggagtaaatatagatttaccctagatgatggatgcaatgaagcggttataaaagcatttgttgaattacatagaaaaaataaaatttatagaggctataggctagtcaattgggatccatcactaaaaactgctgtttcagatcttgaagttataagacaagaaaaagatggtctactctggcatataaaatatccaattgaagattcaaaagactttgtaatagttgctactacaaggcctgaaactatgtttggtgacatggcaattgctgtaaatccagatgatgataggtataaaaatcttattggtaagaatgttgttctgccatttgtaggcagaaaaattcctattttagctgatgaatatgttgacatggaatttggaacaggttgcctgaaaattactccaggtcatgactttaatgattatgaaataggtaaaaaatactcactgcatgaagtagatggtcaagtaaagacttctgatgcagcaagtgattttg

SEQ ID NO: 307460 - DNA, 833 bp, Unknown
  Bacterial polypeptide expressing nucleotide sequence isolated from the Sargasso Sea
tacagctatagctgtaaatccaaaagacgaaagatttaaatcctttgttggaaaaacagttaccattccaattgttggaagaaaaataaaaatcatagaggatgattatgctgatcccgagcaaggaacgggtgcattaaaaattacaccagcgcatgattttaatgactatgatgtgggtcaaagaaataatcttgaaataataaatatttttactgaagctggtaaaataaatgaaaatgctccagaacattacataggtcttgataggtttgaagctagaaaaagaattttaaaagaacttaaagaaaaagatttttttgtaaaagaagagaatattaaaaacaaagttccttatggagatagatctaattctataattgaaccttttttgacagaacaatggtttgctgatgctggtaaattatcagttaaagctaaagaagttgtaaattcaaagaagacaaatttctttcctgaaaattggtcaaaaacttatttccagtggatgaacaatatagagccttggtgtatttcaagacagctttggtggggacatcaaatacctgcttggtatggccctgatgaaaaaatttttgttgctgaaaacgaagaagatgcaaaacaacaagctaagaaacattatggtaaagatgttgaattaaatcgtgatccagatgttttagatacttggttctcatctggtttatggccttttgctacacttggttggccagatgataataaatttgttgataaattttacccaacgtcagttttagttacaggttttgatattatatttttttgggtagctaggatgattatgtttg

SEQ ID NO: 307461 - DNA, 1906 bp, Unknown
  Bacterial polypeptide expressing nucleotide sequence isolated from the Sargasso Sea
atggagatctcatcgaaatttgatcataccgaaattgaaaagaaatggtattctttctggaataaaaataagttttttaattcagaacctgatgatagagaaccatttactattgtaattcccccgcctaatgttacaggtctattacatatggggcatatgttaaataatactattcaggacatattaatcaggaaagcaaggatgatgggtaaaaatgcatgttgggttccagggacagatcatgcctctattgccactgaagctaaagtggtagaaaatttaaaatcacttggtattaataagtctgatatttctagagaagaatttttaaaatacgcttgggaatggactgaaaaatatggaggagggattctagatcaacttaaaagactaggttgctcatgtgattggaatagaactaaatttactttagatgatgatatgtatgaatctgttatacttgcatttatagatcttcataaaaaaggctatatctatcgagggtatcgaatggtaaattgggatcctgaagctcagacaacagtatctgatgaggaagttaattatgttgaggaagaatccaaattatactatttaaattattctattgatggatcaaaagataaactaattattgcaacaactagacctgaaacaatttttggcgatacagcagtatgtgttaatcctaaggataaaagatattcaaagtttgtaggcaaaaaagcaatagttcctatatgtgatagaaagattccaattattgcagattcttatgtagatatagaatttggaacagggtgcttaaaagtgactccagctcatgatttaaatgattataacctcggtaataaacataaacttgaaataattgatatttttgatccaaaaggaagacttaatgaatatggacttcattataaaaataaggataggtttgatgctagaaatgaaatagtcgaggaacttaaaaataagaagatacttgataaatctgaagtatataagcacaatgttggccgttcagagaggacaaatgccataatcgagcctaagatttcaagacaatggtttttaaagatggataaaatctcaaaaccagctataacaaatgtattgaagaatgaaaacataaagttctttccaaaaaaatttaaatcaacatataggtattggctagagaatataaaagattggaatatatctagacaactttcttggggtcatcaaattccagctttttactatggagagaatagtgacgaatatgttatagcgcaaaacaaagatgaagcaaaaaagatcttagagaatcaaaaaggattaaagcttaaagatgatgagctaactcaagatgaggatgttcttgatacttggttttcatcttggctatggccaatatcagtttttgatggaataagaaatcctgaaaataaagatataaaatattactatcctactcaggatctagttacaggcccagatataatttttttctgggttgcaagaatgattatttcaggttatgaatttagagatgaaaaaccattttctaatgtttattttaccggaatagtaagagataaactaagaagaaaaatgtcaaagcaattggggaattctccagatgcaatagagttaatagataaatatggtgcagattcagttagagttggactaatgttaagctcagcagcaggtaatgatttactatttgatgaatcattatgtcagcaagggaagaattttacgaataaactatggaacgctttaagattgataaatggatggcaagctgatgattcaaaagagatatcagaagtaaatagtttagctcttaaatggtatgaaaacaaattcaatcaagtattagagctaatcaacaataattataataactata

SEQ ID NO: 307462 - DNA, 1264 bp, Unknown
  Bacterial polypeptide expressing nucleotide sequence isolated from the Sargasso Sea
cggttgcgtcaaggtgacgccggcccacgaccccaatgatttcgccatcggccagcgccacggtctgccccagatcacggtgatgcgcaagaacggcacgatgaataaagaggcgggccagttcgaggggctggatcgcttcgaggcccgcaaggccgtggtggccggcctcgacgacctggggctgctggtgaaggtggaggactaccgccacagcgttccctattccgaccgcggcaaggtgccggtggagccgctgctctccacccagtggtttgtcaaaaccgagcccctggcggcccgctgccgcgaggctcttgagaagcaggatccccgcttcatcccggagcgctgggagaaggtctaccgcgactggctcaccgacatccgcgactggtgcatcagccgccagctctggtggggccatcgcatccccgcctggttcgtgatcagcgagaccggcggtaagtacaccgacaccaccccttatgtggtggcccgcaacgaagccgaagccctgaagaaggccaaggtggagtacggcgccgctgcggagatcgagcaggacgaggatgtgctcgacacctggttctccagtggtttgtggcccttctccaccctgggttggcccgatgcgagcagcgctgacctgcagcgctggtaccccaccagcaccctggtgacgggcttcgacatcatctttttctgggtggcccggatgacgatgatggccggcgccttcaccggcgagatgccgttccaggacgtctacatccacggcctggtgcgggacgagcagaaccgcaagatgagcaagagcgccggcaacggcatcgatccgctgctgctgatcgagcgttacggcaccgatgccctgcgcttcgccctggtgcgggaggtggctggtgcggggcaggacatccgcctggactacgaccgcaagacagacacttccgccacggtggaggcctcgcgcaacttcgccaacaagctctggaacgccactcgcttcgccctgatgaacctgggcggcgaaacgccggcccaactcggtgacccggaccccgcggccctgcagctggcagaccgttggatcctctcgcgcctggcccggttgaaccgggaaacggccgagcgctacgacaattacggcctgggtgaagcggccaagggcctctatgagttcgcctggaacgacgtctgcgattggtacctggagctgagcaagcgccggctcaaccccggtgagaacccctcagccgag

SEQ ID NO: 307463 - DNA, 947 bp, Unknown
  Bacterial polypeptide expressing nucleotide sequence isolated from the Sargasso Sea
catggcacttaataagcattttgattctgcaacggttgaaagacgtgtttcagagaagtggattgggaataaagcgtttcgggctggtgcaaatgccaaagacggacaacccagctatacgataatgatcccccctccaaatgttactggcgttttacacatgggacatgcctttaataacactcttcaggatatcctaattcgctggaaacgtatgcaaggttacaaaactttatggcaaccgggtacggatcatgctggaattgcaactcaaatggttgttgagcggcagctagctgaagaggggaaaaagcgtactgacttttcccgcgatgagtttcttgaaaaaatctggaattggaaaaaaaagtctggtgggacaataataagtcaattgcaacgcttgggtgcttcttgtgattgggatcgcgaagcctttactatgtctggcgctccaaatgcgccaaaagatgaaggtggaaattttcatgatgcggtaataaaagtctttgtggatctctataaaaaaggcttgatttatagggggaaaagacttgttaattgggaccctcattttgaaacggcaatttcagatttagaagttgaaaatattgaagtggccggacatatgtggcactttaaatatcccttaaaaagtggagaaacgtacacgtatatagaaaaagatgaagaaggaaatatcactttacaggaagaacgagattacatttcgatagcaacaacccgacccgaaacaatgctgggagatggagctgttgcagttcatccatctgatcaaagatataaatctctcataggaaagttttgtgaaatacccgttgggccaaggcaatatcgtcgccttataccaataatcgcagatgagtaccctgaccctagttttggttctggggccgtaaaaatcactggcgcccatgattttaacg

SEQ ID NO: 307464 - DNA, 1207 bp, Unknown
  Bacterial polypeptide expressing nucleotide sequence isolated from the Sargasso Sea
atggaatttaaaaaatataatcatagtaaagaagaaaaaaaaatctcagatttttggatcaaaaaaggcttatttaaaccaaaaaaaaacaaatcaaataaaaaattttctatagtaattcctccacctaatgtaactggcagattacatatgggacatgctctaaataatagtcttcaagacgttttagttagatttaatagaatgaaaggcctcgaaactttgtggcagccaggaacagaccatgctggcattgcaactcaagcagttgttgaaaataaccttttaaaagagggaattaaaaaaaatgttttaggaagagaaaaatttatcaaaaaaatatgggattggaaagaggagtccggtggaataattttagatcaacttaagaaattaggttgttcatgtgattggtcaagaaccaggttcactatggataaagatttgtcaaaagctgtaattaaagttttcgttgatctttataacaataagctaatttacaaggataaaaaattagttaactgggacactaaacttcaaactgctatttctgacttggaagtaaaccaaaaagatgttcaatctcaattatattacattgattatacgatagagaactcagatcaaaaaatcactatcgcgactaccagaccagaaacaatgatgggagacaccgcagttgctgtgaatccaaaggataaaagatatgtaaatttagttggaaaaaatgttcttattccaattgttaataggactgtcaaaattatttctgacaattatgctgatccagaacaaggttcaggagccgtaaaaattacaccagcacatgatttcaatgactacgaagttggtaagaaacataaattagaagtaataaacatttttgaagagaatgggaaaataaacaaaaatgggattaaagagtttcatgatttagacagatttgaagcaagaaaacttataattaaaaaattaaaggacataggttctcttgtaaaaattgaaaatattaaaaataaagttccatatggagatagatcaaatactataatcgagccttttttgacagagcaatggttcgtagatgcaaaaaagttatccaaaaaaccaattaagatagttaaagagggcaaaactactttttttccaaagaattggtcaaaaacattttttcaatggatgaatgatattgaaccttggtgtatat

SEQ ID NO: 307465 - DNA, 1968 bp, Unknown
  Bacterial polypeptide expressing nucleotide sequence isolated from the Sargasso Sea
tatgcagcttcctaagtttttcaattttttagaagatgaaaaaaaaatatattctgattgggaattatcaaatagttttgcatccaaaaaaaatatagaatcgtatagcattatgatgcctcctccaaatgtcacaggaagtctacatatgggccatgcacttacttttactattcaggatattttaattcgttatcaccgaatgcaaggcaaagaagttttatggcaagctggtacagatcatgctggtattgcaactcaaatggtggttgaaagaaaaattgctgatgaaggtttagaacgaagattattaggaagagaccaatttataaaaaaagtttggaaatggaaagaagagtctggaggactaatcaacaatcaattaagaagattgggtgcatctgctgattggtctcgagagcgatttactatggatgaaggtttatctgaagctgtaaaaaaagttttcgtagacttatataacgatggaataatttatagagataaaagattagttaactgggatcctaaattattaactgcaatttctgatttagaagttgagcaaaaagaacaagaaggaagtctctggcatatcaaatatccaattgataaagataattttattattgtggcaacaactagaccagaaacaatgcttggtgactcagcagtagctgttcatcctgaagatttaaaatataaaaatttaattggcaaaacttgtaccttacctcttgtcggaaaaaaaattcctattatagctgatgaatatgcggatcctgaaaagggatctggtgcagttaaaattacacctgcacatgatttcaatgattttgaagttgggaaaagacacaatttagaatttgttaatatttttgatcaatttgccaaagttaatcaaaacgcaccatctaaattccaaggtttagatagatatgaagttaggaaattaatattagaagatttaagtaaattaaatcttctcataaaagaagaaaaacaagaaatggttatcccttatggtgatagatctggggtagtaattgaaccttggttaacagatcaatggttttgtaacgcaaaaaaattatcaattgatcctattaattctgtaaaaaaaaataacacaaattttgttcccaaaatttgggaaaaaactttttttaattggatggaaaatattcaaccgtggtgtatttcaagacaattgtggtgggggcaccaaatacctgcatggtacggtcctgataacaaaatttttgtagcattaaacatagaagatgcaaagttaatggctagtaaacattatgctaaagatgttgagctaaaacaagatgaagatgttttagatacttggttttcttcagcactttggactttttcaacattagaatggcctaatcaaacatatgaacttgatagattttatcctggaaatgttttggtgactggatttgatattatttttttctgggtagctaggatgatgatgatgggttcatattttatgaaagaaacaccttttaaggatgtttatatacatcccctaataagagatgaaaagggtcagaaaatgtctaaatccaagggcaatattatagatccattagttttattagataaatatggtgctgatactcttcgttttactctgactgcacttctaaatcctggaagagatgttaaattagctgaagagagagttaaagggtataaatcattcacaaataagatttggaatgcagctaattttttgaatttaaataatgtttcttttttagatacgattgatattgaaaatattaaattagatagcagtaagtggatattaaaagaatttgaagaaatacaaaaaaagtattttgaaaacattgaaagatatcaatttcatgaaatagccagtttaatgtatcattttacatggaacacattttgtgactggtacattgaatttattaaatctga

SEQ ID NO: 307466 - DNA, 1444 bp, Unknown
  Bacterial polypeptide expressing nucleotide sequence isolated from the Sargasso Sea
tatggaatttggtactggatgtttaaagattactccaggccatgatttcaatgattatgatattggaaaaaaatattgtttacatgaaaaaggtgggactgttttaatgtcaaaaaatgctgatgattttaaaccaataaatatttttaatgatgacgcatggacaaatgacaatgttccagagcccttcaataatctcgatagatttaaagtaagaaagttagcaattgaagaattaaatagactaaatcttttagttaaagaggaagaatatgagattagtgttccaagaggagaaagatcaaatattgttattgagccaagattaagtaatcaatggtatgtgaaaacatctgatatggctaaaaaagctaataaagaggttaaaaatggaaatattaaatttcatcccgagaactggattaaaacttattttaattggatggataatattgaagattggtgtataagtaggcaaatatggtggggtcatagaattcctgcttggtatgatcaagatggcaacacttatgttggtgaaaatgaagatgatgtacgaaaacattataaattaaatgatatcaagcttactcaagatgaagatgtgctggatacttggttttcttcaagcctatggccgtttggttcattaggatggccagaagaaactgaagattttaaaaatttctttccaacatcattattagtaactggcttcgatataattttcttctgggttgcaagaatgatgatgatgagtcttgaatttactggaaaaattccatttaaagatgtgtatgtaacaggactgataagagatgaaaatgggcaaaaaatgtcaaaatcaaaaggtaatatcattgacccaattgatttaatatatggtatttctcttgatgatttaattaaaaaaaggacttcgaacctaatgcaagagggaattgctgaaaaaattgaaagaaaaacaagaaaagagtttccaaatggaatagagtcttatggtacagatgcacttagaatgacttttttctcacttgcaactcataccaaagatatcagttttgaatttggaagactaaaaggatatagaaatttttgtacaaaaatttggaatgctgcgcgatttattgatggttatccgaaagaaagggactcttttgtatcacaaaatgacaatgatgaatggattcatagcgaattccttaacactaaagatcaaataactaaaaatattgctgactatagactagattttgcaattaatgagatatacgaattcttttggaataaattttgtgatatttatattgaagaatgtaaaaaatctggaaatacagcaaatttaagacctatattaaaagaaattttaaatttgcttcacccctttgccccatttattactgaagaaataagtgacaaaatatttaaagaaaggattatttag

SEQ ID NO: 307467 - DNA, 1804 bp, Unknown
  Bacterial polypeptide expressing nucleotide sequence isolated from the Sargasso Sea
aatttaaataaaaatgatttaggtagagaaaagtttattgaaaaagtgtgggaatggaaaaatcaatatggggacattattattaatcagcttaaaaaacttgggtgctcctgtgattggtctagaaacgcttttacaatggatgaaaatttatcaaagtcagtagtgaaagtttttgttgaattacataaaaaaaaattaatctataaagcagaaaaattggtcaattgggacacagttttaaaaactgccatatctgatctagaggttgatcaaagagaaatgaactcaaagatttaccatatcagatacccaatagataattctgatgattttataactattgcaaccacaagacctgaaacaatgcttggagatacagctattgccgttaatccaaaagataaacgatttaaaaaatatgtgggtaaaactgtcacaattccaattgtaggtagaaaaataaaaattataaaagacaattacgccgatccagaacaaggaactggtgcattaaagattaccccagctcatgactttaatgattatgatgttggacaaagaaataagctagaaattattaatgtgttcactgaggatggaaaaattaataataatgcacctattgattatgttggactagatagatttgaagcacgtaaaaaaattttaaacgaattaaaagaaaaagatttttttgttaaagaagaaaatattaaaaataaagtaccatatggggatagatcaaattcagttattgaaccttttttaacagagcaatggtttgtaaatgcaaaaaaattatctgttaaagctaagcaaatagttaaatcaaaaaaaacaaatttttttccagaaaattggtcaaaaacttattttcaatggatgaataatattgagccttggtgtatttctagacaactttggtggggccatcaaataccagcatggtatggacccgataaaaaaatctttgttgcaacaaatgaaactgatgcaaaaaaacaagctaaaaagttttataaaaaagatgtaataattaccagagatcctgatgttttagatacatggttttcatctggtttatggccttttgcaacattaggttggcctgataaaaaagattttattaaaaaattttatccaacaacagttttagttactggttttgatatcatatttttttgggtagcaagaatgatgatgtttggaatggaatttttaaagaaagaaccatttaaagatatttatgttcatgccttagttagagacgaaaaaggtcaaaaaatgtctaagtcaaaaggaaatgtaattgatccattagatttaattgaaaagtatagtgcagatgctttaagatttactcttctttcaatggcatcaccaggaacagatgttaaactttccgaggacagagttaagggttataggaattttttaaataaattatggaatgctaataattttttaattactaataaatgtgattttaataaaactgataaagttcctaaaactacactaaatattaataaatggatttattcagaactaattcaaacaaaagataaaattgagaaaaatcttaaagattaccgatttgatgaggcagctaaaaatgcctaccagtttgcttggcactcttattgtgactggtacattgagctttcaaagacaattctgttttcagatgatgaaaaatctaaaaaagaggtaaaagaagtatcagcttatatatttaaacaaatacttgttattcttcatcccatttattcccatttgttactgagaaaatctggttaaa

SEQ ID NO: 307468 - DNA, 1390 bp, Unknown
  Bacterial polypeptide expressing nucleotide sequence isolated from the Sargasso Sea
gtatggtccagatggaaaagtttttgtagaagagaacgaagaaacagctaagttaaaagcaaaagatttttatcataaaaaagtagaattaaaaagagatgaagatgttttggatacttggttttcatcagggttgtggccgtttgcaacattaggttggcctaaaaaaaatgaatacctagataatttttatccaacaactgttttagttactggttttgatataatttttttctgggtagcaagaatgattatgcttggaatggaatttttggataaagaacctttcaaggacatatatgtacatgctttagttagagatgagaaaggtcaaaaaatgtctaaatctaaaggcaatgttattgatccacttgagttaatagataaatatagcgctgatgctttaagatttactttgctgtcaatggcatccccaggtcgtgatgttaaactttcagaagacagagttaaaggatatagaaattttttaaataaaatttggaatgctaataactttctcattcaaaatagttgtgattttataaatgtaaataaacctgaaaatattaatgaaaatattaataaatggataattactgaatttttattaattaaagaagtcattcaaagaaatatatacaattatagatttgatgaggctgcaaaaaatgcatatcaatttgtctggaattcattttgtgattggtacatagagctttctaaaacaatatattattcagacaatcaaaattccaaagatgaaacaagaagggtttcgtcttatatatttagggaaatacttatcttattacatccatttattccatttattactgaagaaatttggttgaagaataaattagataaaaatagcaaagatttcttgatgtttgcaaactggtcacaggataaaggaacaactgataaatcatatttggaagttaataaaattatatattttataacatcaattagatcttttaaaaatgagctaggcgtacctcctggttcactcgttgatgtttcaatagaaaaaactaatagtgaaattaaaactttttttaacaataataaaacaattttgatgaaattagggagaattaaaaatataacttctaagaatcttgataaatcttcagcttctttagtattagacggtgaacaatttaaaatttattttgatgaagatattgatcttgatcgagtaaaagatacgcttaaaaaaaaattagataaattaaataaagaaatggataaaataaataaaagactggcaaataaaaatttcgtagaaaaggcaccaacagagcttattgatcaagaaaaaactaactttaataatttagaaaaagatgttaaaaaaatacaactaaccttagaaaatttataa

SEQ ID NO: 307469 - DNA, 1030 bp, Unknown
  Bacterial polypeptide expressing nucleotide sequence isolated from the Sargasso Sea
acgatggatgaaaatctatcaaaatcagtaataaaggtatttgtcgatctatataataaaggtttaatttataaggataaaaaactagtaaattgggacacagttttaaaaacggccatttcagatttagaagttgatcaaagagaggtaaattcaaaaatttattatattaaatatccaattgatggaacggatgaatttataacaattgccaccacaagacctgaaacaatgttgggtgacactgcaatagctgtaaatccaaaagatgatcgttttaaatcttatgttggcaaaactgttaccattccaattgttggtagaaaaatcaaaattatcgaagatgattatgcagatcctgaacaaggaacaggagcattaaaaataactccagcacatgactttaatgattatgatgtaggtcaaaggaataatcttgaaataattaatatttttactgaagcaggaaaaataaatgaaaacgctccaaaacattatgtaggtcttgatcgctctgaagcaagaaaaagaattttaaaagagcttaaagaaaaagagttttttgaaaaagaagaaagtataaaaaataaagttccttatggagataggtctaattccatcattgaaccttttttaacagaacaatggtttgcagatgcaggaaaattatcagtaaaagcaaaagaggtagttaattctaaaaaaactaatttctttccagaaaattggtccaaaacttattttcaatggatgaacaatatagaaccttggtgtatttcaagacagctatggtggggtcatcaaatacctgcttggtatggtcctgatgataaaatttttgttgcttacaatgaagatgaagcaaaacaattagctaacaaacattatggtaaagatgttgaattaaatagagatcctgatgttttagatacatggttttcatctggcctttggccttttgcaacacttggatggcctgatgataaaaaatttattgagaagttttatccaacatcagttttagtaacag

SEQ ID NO: 307470 - DNA, 2133 bp, Unknown
  Bacterial polypeptide expressing nucleotide sequence isolated from the Sargasso Sea
catgagtttagacaaatatatacattcagacgttgaggataaaatatatacatattgggagaagaataatttatttaaacccaaaaaaaataagaaaaaattctcaatagttataccaccacccaatgttactggaagtctacatatgggtcatgccttaaataactcaatacaagatttgcttacacggtattataggatgaataattatgaaaccctgtggcaaccaggaaccgatcatgctggtatagccacccaagctctagtagaaaaaaagttaaattctgagaatattaaaaaaaatgatttaggaagagaaaagtttattgaaaaagtatgggaatggaaaaatcaatatggcgacataattattaatcagcttaaaaaattaggctgttcttgtgattggtccagaaatgcttttacaatggatgaaaatttgtcaaaagctgttattaaagtttttgtagatcttcataaaaaaaaattaatttataaagctgaaaaattagtaaattgggacacagtattaaaaactgctatatctgatttagaggtagatcaaagggaagttaattcaaaaatttattatattagatatccaatagatggaacaagtgaatatataactatagcaactactagacccgaaactatgcttggagatacagctgttgctgtaaaccctaaagacaagagatataaaaagtatgttaataaaattgttacaattccaattgttggtagaaaagttaaaatcatcgaagatgattatgcagatccagaacagggaactggagcattgaaaattacaccagcacatgacttcaatgattatgatgttggtaaaagaaataaattagaaattattaatatttttacagaagatggaaaagttaataataatgcaatttcatcatacgttggtttagatagatttgaggctagaaaaaaaatattaaacgaacttaaggaaaaagattattttgttaaggaagaaaatattaaaaataaagttccatatggagatagatcaaattctataattgaaccttttttaacagaacaatggtttgcagatgcaaagaaattatcaattaaagcaaaaaaaatagttaaaaataaaaaaacaaacttttttcctgaaaattggtcaaaaacttattttcaatggatgaacaatattgagccatggtgtatttctaggcagctatggtggggtcatcaaataccagcatggtatggaccagataataaaatttttgttgaactaaatgaaagtgatgcaaaaaaatcagcaaaaaaatattataaaaaagatgttaaacttgtaagagataatgatgttcttgatacatggttttcatctggtctttggccttttgcaacacttggttggccaaacaaaaatgaatatttaaaaaagttttatccaacaacagttcttgtaacaggatttgatataattttcttttgggtagctagaatgatgatgttcggtatggaatttttaaataaagaaccatttaaagatatttatgttcatgcgttagttcgtgatgaaaaaggacaaaagatgtccaagtcaaaaggtaatgtaatagatccacttgatttaattcaaaaatatagtgcggacgctttaagatttactttattatctatggcttcacctggtacagacgttaaactttctgaagatagggttaaaggatataggaatttcttaaataaactgtggaatgcaaataattttttaatacaaaacaaatgtaatttaaaaaattcaaaaaaacttcccaaattaaaagttaatatcaataaatggatatattttgagcttttacaaacatccaatttaataaagaaaaatatagaggattatagatttgatgaagctgctaagaatgcttatcattttgcatggcataaatattgcgactggtacttagaattatcaaaaacaattcttttttcagacaatttaaaagctaaaaatgaagttaaagaggtttctgcttttgtatttagagaaatacttattatgcttcatccatttataccattcgttactgagaaaatatggttaacaaataaatttgataacaaaaataagaattttttaatgttatc

SEQ ID NO: 307471 - DNA, 1787 bp, Unknown
  Bacterial polypeptide expressing nucleotide sequence isolated from the Sargasso Sea
aggtgaaagaaataatttagaaattataaatgtttttactgaaaatgggaaaataaatgaaaatgcaccaaaagaatttattggattagatagatttgaagcaagaaaacaattattaaaaaaattaaaagaaaataacttctttgttgaagaggaaaatattaaaaataaagtcccttatggagatagatctaactcaattatagaaccttatttaacagagcaatggtttgctgatgcaaaaaaattatccataaaggctaaagaaattgtaagtagtaaatcaacaaatttttttcctaaaaattggtccaaaacatattttcaatggatggacaatattgagccatggtgtgtatcgagacaactttggtggggtcaccaaatacctgcttggtatggtcctgatggaaaagtttttgtagagtatactgaagaggaagcaatcaaagaggctaaaaattattataaaaaagatgttgaattaaaaagagatgaggatgtacttgatacttggttttcatcaggtttgtggccattcgcaactttaggctggcctaatcgaactgaatatttaaaaaaattttatccaaccacagttttagtaactggttttgatattattttcttttgggtagctagaatgatgatgatgggcatggcttttttagaaaaagagccatttaaagatatttatgttcatgctttagttagagatgaaaaaggacagaaaatgtctaagtcaaaaggaaacgtaattgatccattagatttaatagagaaatattcagcggatgcactaagatttaccttactatccatggcatctccaggaagagacgtaaagctctctgaagatcgagtaaaaggatatagaaactttttaaataaaatatggaatgcaaataatttactcaaacaaaatgattgtaattttgatgaaattgaaaagcctaaagaattaaaggtaaatataaataaatggataatttctgaatattattcaattaataatcagattaagcaaaatataaaagattacagatttgatgaagctgctagaaatgcttatcaatttgtttggcattctttttgtgattggtatttggaactatcaaaaacaatattatattcggatgataaatcttctatagaggaagttaaaaaagtctctgcatatatttttagagagatcttgattatcctacatccatttattccatttgttacagaggaaatctggctaaataataaattagataaagatagtagtgattatttaatgttcgctaattggagtgaggaaaaacctctagaaagcaatgaatataatgacgtaagtaatataattgaaattattacatcaattagatcctttaaaaacgagataggagttaacccaggttctttaattgatatctctttagctaatacaaattcaaaaacacaagattttttcaataaaaatgaaattgtgttaaaaaagttaggaagaatatcaaacatattgttagaagatcaaaaaaaatcatccgcaagcctaattataaaaggtgagctttataaaatgtattttgagcaggatgtagatattaaaactatcaaagatacattattaaaaaaacactctaaaattaaagacgaaatggataaaataaataccagactgtcaaataaaagttttatagatagagctccaaaagatattgttgaactagaaaaatctaactttaacaacctagaaaaagatgctaaaaaaatacaactaaccttagaaaatttataat

SEQ ID NO: 307472 - DNA, 2008 bp, Unknown
  Bacterial polypeptide expressing nucleotide sequence isolated from the Sargasso Sea
ctttataactattgcaacaacaagacctgaaacaatgctcggtgatacagctatagctgtaaatccaaaagatgaacgattcaaatcctttgttggtaaaacagttactatcccaattgttggaagaaagataaaaattattgaagatgattatgcagatcctgaacaaggcactggagcattaaaaataactcccgcgcacgatttcaatgactatgatgttggtcaaagaaataatcttgaaataataaatatttttactgaagctggtaaaataaatgaaaatgctccagaaaattatgttggccttgatcgatctgaagcaagaaaacaaattttaaaagagcttaaagaaaaagatttttttgtaaaagaagaaaatattaaaaacaaagttccttatggagatagatctaattcaataattgaaccttttttaacggaacaatggtttgctgatgctggtaaattatcagttaaagcaaaagaagttgttaattcaaagaaaacaaatttctttcctgagaattggtcaaaaacttatttccagtggatgaacaatattgagccatggtgtatttcaagacaactttggtggggtcaccaaatacctgcctggtatggaccagataaaaaaatttttgttgcagaaaatgaagatggtgcaagacaacaagcaaaaaaacattatggtaaagatgttgaattaaatcgtgatccagatgttttagacacttggttctcatctggcttatggccttttgctacacttggttggccagaggataataaatatgtagataaattttatccaacatcagtattagttacaggttttgatattatatttttttgggtagctaggatgattatgtttggaactgaatttttaaacaaagaaccttttaaggatatttatgttcatgcgttagttagagatgaaaaagggcagaaaatgtctaaatcgaaaggaaatgtaattgatcctttagatttaattgagaaatatagtgcagatgcacttagatttactttgctatcaatggcttcaccaggaactgatgttaagctttctgaggatagagtaaaaggttatagaaattttttaaataaattatggaatgcaaataattttttaatcactaatgaatgtgattttaaagatatagaaaaagttccaagtttaaatttaaatattaacaaatggatttattcagaacttattgaaactaaaaacaaaatacaaaaaaaccttgaagattatagatttgatgaagctgctaaaaatgcctatcaatttgcatggcattcgtattgtgattggtatttagaactatctaaaactatactcttttcagatgatgaaaaagctaaagcagaggttaaaaaagtatcatcctttgtattcaaacaaattttaattttgctacatccttttattccttttgttactgaagaaatttggcttaaaaataaatttgataatgatggtagtgattatttgatgcttaaaaattggttatctggagaaataaacaaggatagcagcaccgaacaggttgaaaatatcattaacattatctcagagattagatcatttaaaaatgagctaaatgtaagcccaggctcatttattgatgtatcaataagtaatattaacaaaaatcaaaaagattttattaatacaaatgaaattattctaaaaaaactaggaagaataaacactatattagataaggatttagataaaccagctgcgacaatggttgtttctggagatttgtttaagatttattttgataaagatgttgatttaaaattaataaaagaaaatttaacaaataaacaaagtagattagagcaagagatgaataaaatatctcaaagattggagaataagagttttgttgatcgagctccaaaagagattgttgaacaagaaaaaaataattataataatttaaagaatgatattgagaaaatatcagtaacaataaagggtatataa

SEQ ID NO: 307473 - DNA, 758 bp, Unknown
  Bacterial polypeptide expressing nucleotide sequence isolated from the Sargasso Sea
aatggaatttaaaaaatataatcatttaaaagaagaaaaaaaaatctctgatttttggataaaaaaaggattgtttaaaccaaaaaagggatcattaaaaaaaaatttttcagtcgtgataccccctccgaatgtaacaggtagattgcatatggggcacgctcttaataacagcttacaagatgtattagtaagatattataggatgaaaggttttgaaaccttatggcaaccaggtactgatcacgcaggtatagcgacccaagctattgtagaaaataatttagaaaaaaaaggtttaaaaaaaaatgatttaggaagagaagaatttatcaaaaaggtgtgggaatggaaagaagagtctggcggcataatattagatcaattaaaaaaattaggatgttcttgtgactggtctagaactagatttacaatggataaagatctctctcgtgcagtaataaaagtgtttgtagatttatataatgctaaattgatttttaaagacaaaaaattggtaaattgggacactcatctccaaaccgcaatttcagatttagaagtaattcagaaagatgttcaatcgcaattattttatattgattatcaaattgaaaattcagaagaaaaaataacaattgcaaccacaagaccagaaacaatgatgggtgatacagctattgcggtaaatccaaatgacaagaggtactcaaattttataggaaaaaaagctattattcctatagtaaatagatcag

SEQ ID NO: 307474 - DNA, 2026 bp, Unknown
  Bacterial polypeptide expressing nucleotide sequence isolated from the Sargasso Sea
aatgtcactcggaagtttacatatggggcatgcattaaataattcaattcaagatcttttaattcgttattatcgaatgaataattatgaaactttatggcaaccaggaactgatcatgcaggaattgccactcaagctcttgttgagcaaaaactagaaaaagaaaatcttaataaaaatgatttaggtagagaaaaatttattgaaaaggtatgggaatggaaaaatcaatatggtgatataatcattaatcaacttaaaaaacttggttgttcatgtgattggtctagaaatgcatttacgatggatgaaaatctatcaaaatctgtgattaaggtttttgttgaattacataaaaagaaattaatctataaagctgaaaaattagttaattgggacactgttctaaaaacagcaatatctgatttagaagtagatcagagagagatgaattcaaagatttactatataaggtacccaatagataaatcaggcgaatttatcacaattgccacaacaagacctgaaactatgcttggagatactgcggtcgcagttaacccaaaagataaaagatacaaaaaatatgtgggcaaaactgttactattccaattgttggtagaaaaattaaaattataaaggataattacgctgacccagaacagggaacaggtgcattaaaaattactcctgcacatgattttaatgactatgatgtaggccaaagaaacaaattagaaattataaacgtttttactatagatggtaaaattaataacaatgccccaggttcttatattggtttagatagatttgaggcgcgtaaaaaaatattacaagaattaaaagaaaaagatttttttgttaaagaagaaaatatcaaaaataaagttccatatggtgatagatcaaattcagttattgaacctttcttaacagaacaatggtttgttaatgctaaaaaattatctatcaaagctaagaaaatagttaaatctaagaaaacaaatttctttccagccaattggtctaaaacttattttcaatggatgaataatattgaaccatggtgtgtttctagacaactttggtggggtcatcaaataccagcttggtatggacctgataagaagatttttgtagcaactaacgaagtagatgcaaaaaaagaagctaaaaaattttataaaaaagatgtgagacttattcgagatccagatgttttagatacttggttttcatctggtttatggccttttgcaacattaggttggccagataaaaaagattttgttaagaagttttatcctacaactgttttagttactggttttgatattatttttttctgggttgctagaatgatgatgtttggaatggagtttttaaataaagaaccatttaaagatatttatgttcatgccttagtaagagatgaaaagggacaaaaaatgtctaaatcaaaaggaaatgtaattgatccattggatttaatagaaaaatatagtgcggatgctttaagatttactcttctttctatggcatctcctggaacagatgtaaaactttctgaagatagagttaagggttatagaaactttttaaacaaactatggaatgctaataattttttaatcactaataaatgtgattttaataagactgataaaattcctaaaagcacgctaaacataaataaatggatttattctgaacttattcaaactaaagataaaatagaaaaaaatcttaaagactatcgttttgatgaagcagctaaaaatgcctatcagtttgcttggcattcatattgcgattggtatatcgagctttcaaaaactattttgttttctgatgatgaaaaagccaaaaaagaggtaaaagaggtatctgcttacatatttaagcaaattcttattattctccatccatttattccatttgtaactgaaaaaatttggctaaaaaacaaatttgataaatcaaacaagaatttccttatgcatgcaaattggccatcaggc

SEQ ID NO: 307475 - DNA, 2611 bp, Unknown
  Bacterial polypeptide expressing nucleotide sequence isolated from the Sargasso Sea
attgccaaaaagatttgattatctcttaaaggaagatttttggagaaatgaatgggaaactaacaatatctattctagatccaagaatcaagctagagaaaaatcatttgtgattgactcgcctccacctactgtttcaggatctcttcatgttgggcatatcttctcatacactcatcaagacatcatagccagatataaacgaatgcaaaaatttaatgtagtatacccaatgggttgggatgataatggtcttcctacagaaagaagagttcagaatatttttggtgttcgaatagataacaatgtttcttatatagaaaaattaaatgttgaaaaagaaaagaaaagattgggtttagataaagatactcctcttattataaacagacaaaattttatagaaatgtgtcatattgttactgctcaagatgaaatagtttttaaagatttatttagaaaaatgggctactctatagactggaaagatgaatatgcaactattgataatagatctaggagaatatctcaacaatcattcatagatctttttgaaaaaaaacatatttatcagtatgaatcacctacaatgtgggatatagactttcagactgctgtggcacaagctgaaattgaggatagagagactcctggtgcatatcatgatattagatttacgatagaagattctgaaaaagatttaattatttcaacaactagaccagaacttttaggttcttgtgtaggtataactgctcatccagatgatgaaagatacaaacatcttttcaataaaaaagctatttctccaatattttttgctcctgtaccaatttttcctagcaaacttgtggacatggaaaaggggactggtatattaatggtttgtacatttggagatcaaacagatgtgatttggtggagagaaaattccttgccattaaggcaactttttggatcgaatggtaaagtcttgaatataaattatgaaaatgaagaaagttcttcaaattggataagtattaaccctgataaagctaataaaaatatctctaaattatatgaaaaatctctaaagcaatcaaaagatattattatcgatatgttaagagattctgataattctcttaataataaagaaccgttagtatctgaacctaaaataatatctcatccagtcagatattatgaaaaaggggattcacctattgaatatttatcttcaagacaatggtttgttaagataacagataagaaaaaagatctcttaaggatgggagaaaaaattaagtggcaccctgattatatgtctaaaagatttgaaaattggacggaaaatttagctatagattggtgtataagtagacaaagattttttggagtacctatacctgtttggtatagaactgatgataagggtgaagtaaattataatgatgtaattttaccaaatatttcagatttaccgatagatccagatatagacactcctaatgaattccaagaaattgatagaggcaaacctaatggttttgttggtgaaaaagatgtttttgatacttggtttacatcctctatgactccacaaatcatcgcaaaatggggcctagaagatcaagatgagatgagctctatatttcctatggatataaggcctcaaagtcatgaaattatcagaacatgggcattttatactatagttaaggcttacttacatcacgatactattccatgggaaaatgtagtgatttctggttggattcttgatccagatcgaaaaaaaatgagtaaatcaaaaggtaatgtgatcactcctatagatactatagaacaatatggtgctgacgcagtaagatattgggctgcatccgctcgattaggtactgatactacttatgatgaaaatgtttttttagttggaaataagcttgtaactaaaatgtataatgctgcaaagtttgtactttctcatgattcttaccaaattaataaattaaatgaaattgatgcgtcctttctaaaagatttagaggaaatggttaataatgtaactacttattatgaaaaatttcagtttgctcaagctttacaaatcactgaagaatttttttggaacacatatacagataattatttagaattagtaaaaaaacgagtttttaattctgatggagatgacaaagcttcagctgtaacatgtttgagactcggactttctgtaatcttaagactacttgcacctgttttaccaactattacagaagagatatggtcgtggtgcttcaaggacgagtatgatattaattcaatacaccaatcagattggccatcttcagatgaatttactgaatataataatcctaaatataacaattcattagaaattgctattagggctataagatctgttagacaaactaaaacctcagaaggagtaggattaggtaagcctgtaaggaaaattaaaattcaaacaaatgaatataatttcgaggtgatagaaagtattattgaggattttagtaatgcatcaggttgtagtacttttataaatgaaatttcagataacgatgagattttaacagaaattctggaaaaagaatccgaataa

SEQ ID NO: 307476 - DNA, 1163 bp, Unknown
  Bacterial polypeptide expressing nucleotide sequence isolated from the Sargasso Sea
tgatcttttagatacttggttttcatctggattatgggcttttgctacattgggttggcctgcaaaaaaagattatgttaaaaaattttacccaacatctgttttagttacaggttttgatataattttcttttgggttgctagaatgattatgtttggaatggaatttttaaataaagaacctttcaaagatatatatgttcatgcattagttagagatgaaaaaggacaaaaaatgtctaaatccaaaggaaatgttattgacccattagagcttatagaaaagtatagtgctgatgctttaagatttacattactttcaatggcttctccaggaagagatgtaaaattatctgaagatagagttaaaggttatagaaattttttaaataaactttggaatgctaataattttttaattcaaaataagtgctcatttagaaatattcaaaaaaaaccaaaaatttcaattaatattaataagtggatatatgctgaactattagaaaccaaaagtaatgttgaaaaaaatataaaagattatcgttttgatgaggcagcaagaaattcttatcaatttgtatggcattcttattgcgattggtatttagagcttacaaaaactattctttattctaatgataaaaaatctattaaggaaataagagaagtatctagctatatttttaaagaaattcttatattaatgcatccttttataccatttataactgaagaaatttggctgaaaaatagcatagataacactaaaaaaaattatcttatgttggctaactggatatcgggtacctcaaaaaaagacaaagattttaaagaagttgaaaaaattattactataatttcacaaattagatcttttaaaaatgagttaaatgtaagccctggttcatttgtagatatatctttgagtaaaattaatgcaaatagtaaagctttcttcaaacataatgacactgttcttaaaaaattaggaagaattaataatttttttgataaggatatggaaaaaccttcagcaacaatcgttatttcaggagatatatttaaagtttattttgaagaaaatgtagatttaaagataataaaagaaaacttattaaataaacaaaaaaaaagccaaaatgaaatagataagatcaatt

SEQ ID NO: 307477 - DNA, 598 bp, Unknown
  Bacterial polypeptide expressing nucleotide sequence isolated from the Sargasso Sea
gatgagcaccgaagccctcagcaaaacctacgatccgcacaccatagaacgcgcgctgtacgagtcgtgggaagcgcagggtgctttccaacctgcgggtgacggacctgccttttgtatctcgattcccccgccaaacgtgacgggcagtctgcacatgggccatgcctttcaggacaccatcatggatgccctgatccgctatcaccgaatgcggggccacagaaccttgtggcaggccgggaccgaccacgcaggaattgccacgcaaatggtggtcgagcgtcaactcaaccaactcgggaaaacccgtcacgaccttggccgggacgttttcattgatcgggtttgggaatggaagcaggaatcaggaggagccatcacgcagcagttgcgccgcatgggggcgtctctggattggagccgtgagcgcttcaccatggatgaagacctctcggttgcggtgcgggaagtctttgttcagttgtacgaagagggtctgatttatcgaggcaaacgactcgtcaactgggatccgattctgcatacggccttgtctgacctggaagtgctgtcccaggaagaggcaggctcactc

SEQ ID NO: 307478 - DNA, 1165 bp, Unknown
  Bacterial polypeptide expressing nucleotide sequence isolated from the Sargasso Sea
agaggagagcgctccaatattgtgatcgaacctaagcttagccatcagtggtatgtaaaaactcaagagatggccaaaagagctaatgaagctgttaataaaggtgaggtagtttttcaccctgaaaattggatcaagacctattttaactggatggataatatccaagattggtgtattagcagacaaatttggtggggccacagaattcctgcttggtatgacgaagaaggaaatatatatgttggatacgatgaagatgaactaagaaaatattataaattagatggtagaaagttaactcaagaagaagatgttctcgatacttggttttcatcatctctatggccttttggatctttaggttggccaaaagaaaccgaactaagcaaatactttcctacaagcttactggtaacaggtttcgatattattttcttttgggtcgctcgcatgatgatgatgagtctagaatttactggcaaagtaccttttaaagatgtttatgtaactggattgattagagacgagaatggtcaaaaaatgtcaaagtctaaaggtaatattattgatccaattgatctaatctatggcattggtatcgaagacctagtaactaaaagaacagctaatcttatgcaggaaggcttagctaaaaaaatagaacgtaaaactcgtaaacagtttcctaacggtattgaatcatatggaaccgatgcattgcgcatgacattcttctctttagcaacacatactagagatataagttttgaacttgggcgactcaaaggctataggaacttttgtaataaaatctggaacgcagcacgatttattaataactacccacatgaatcaaaagagtttattgcaaaaaatgatcatgataagtggatagaaaaagaatttaacgaagtatcaaagcaaattaagaaaaacattgatgaatatcgcttagattttgcggtaaatgaagtctatgaattcttttggggtaaattctgcgataaatacatagaagattgcaaaaaatccggagagacttcaaatcttcacccaatgctaaaaaagattttagtactcatgcacccttttgcaccttttattacagaagaggtaaatgaacttgtctttaaagatggttcattaatggatagcaaataaa

SEQ ID NO: 307479 - DNA, 1453 bp, Unknown
  Bacterial polypeptide expressing nucleotide sequence isolated from the Sargasso Sea
gaacaatattgacccatggtgtatttccagacaattatggtggggccatcaaatacctgcatggtatggaccagataaaaaaatatttgttgaaataaatgaagaaactgcatttgctgaagcagaaaaatattataaaaaaaaagtaaatctatctcgtgatcctgatgttttagacacttggttctcttcaggactttggccgttcgcaactttaggttggccagataataaaaaatacacagacaaattttacccaacatcagttttggtaacaggttttgatataatatttttttgggtagcaagaatgataatgttcggtacagaatttttaggcaaagaaccatttaaagatatttatgtgcatgctttggtaagagatgaaaaaggacaaaaaatgtcaaaatccaagggcaatgtaattgatccacttgatctaatttcaaaatatagcgctgatgcactaagatttacattattatcaatggcttctcctggaagagatgtaaagctttctgaagatagagttaaaggctatagaaattttttaaataaaatttggaatgctaataactttctagttcataacaaatgtgacttcaatgatgttaaaacacctaaagatattaagttaaatattaataaatggattaattctgaatttttaataatcaaagaaaaaatacaaaatcatataaaagaatacagatttgacgaagctgctaaaattgcatatcagtttgtgtggcattcattttgtgattggtacctagagctttctaaaactgtttatttttcaaaaaacaaaaatgatattcaagaagtaagatcagtaacaagctatatatatagagaaatcttgattattttgcatccatttataccttttatcacagaagaaatttggttgaaaaataatttagataaaaattctacttactttttaatgcatgcaaattggtcaaaagaaattagtaaaacagacagttcacacaaagaagtaaatcaaatcatagaaatcattacatctttacgttctttcaaaaatgaacttgatattagtcccggatcacaagtagaaatttcattagcaaatacatcaaaagaaacacagtcattttttaataaaaataaaaatgtattcatgaaacttggaagaataaataaaatttcaatttcggattttgataagtcttttgcttcattagttgtaaaaggtgaggtttataaaatttattttaacgaagatgtagatttaaataaagttaaagattcattaatgattaaacgcaaaaaaattatctcagaaatggataaaattaattcaaggctaagtaataaaaattttgctgataaagcgccaaaagaaattgttgatcaggaaaaatcaaactttaataagcttgaaaaagatgctaataaaattaaacttactctagaaagtttataa

SEQ ID NO: 307480 - DNA, 949 bp, Unknown
  Bacterial polypeptide expressing nucleotide sequence isolated from the Sargasso Sea
tgcttggtatgacaatgatgggaatgtctatgtaggatattctgaaaatgatgtaagatctcattactcgcttgataagagatcgctgaaacaagacgatgatgttttagatacatggttttcttctagtctttggccatttgcatcaatgggatggccaaatgaatcaaaaaatttagaaactttttttccaacaaatcttttagttactggttttgacattattttcttttgggttgcaagaatgattatgatgagcatcgaatttactggaaagattccttttaaagatgtctatgtcactggcctaataagggatgaaaatggacaaaaaatgtcaaagtccaagggtaatattattgatcctattgacttaatatatggcatcactctagaagaacttcttgaaaaaagaacatcaaatctaatgcaagaaggtttagcagacaagattgctagaaaaactaaaaaacaattcccaaatggtattgattcatatggaacagatgctttaaggatgacatttttttccattgcaacaaatgcaaaagatataagttttgaaattggaagattaaaagggtttagaaacttttgtaccaaaatgtggaatgctgcaagatttattaatggatatgaaaataaaggaaatgattttgaagttaagtctaaagctgatgaagtgatattaaaagaatttaaacaactaaaaattgatgtcgaagataatgtaaatcattacagattagatttagcaataaataatgtttatgaatttttctggaacaagttttgtgatgtttatattgaagaatgtaaaaaaactgaaaaaactgataacctgcatcctcttcttaaagagatactaatttttattcacccttttgctccattcataactgaagaaattcactcaattatttttaaagcacccttaatcgataggtaa

SEQ ID NO: 307481 - DNA, 2629 bp, Unknown
  Bacterial polypeptide expressing nucleotide sequence isolated from the Sargasso Sea
atgagtagcgagaaatatatacattctgatgtagaaaatagaatttattcttattgggaaaaaaatggtctttttaaacctagagaaaattcaaaaaaattctcaattgtaattcctccaccaaatgtaactggtagtttgcatatgggtcatgctctaaataattctattcaagatttattaattcgttatcacagaatgaataattatgaaacgttatggcaaccaggtacagaccatgctggtatagccactcaagctttagtagagaaaaaattaacttctgaaaaaattgataaaaatgaaattggaagagaaaaatttattgaaaaagtttgggaatggaaagatcaatatggtgacataataataaaccagttaaaaaaactaggttgttcctgtgattggtctagaaatgctttcactatggatgaaaatttgtcaaagtctgtaatcaaggtttttgtggatctatataataaaggacttatttataaagataagaaattagtcaattgggatacagttctaaaaacagctatttcagatctagaagtagatcaaagagaggtaaattctaaaatttatttcatcagatatccaatagatgggacagaagaatttattaaaattgcaacaacaagacctgaaacgatgttaggtgatacagcaattgctgttaatccaaaagatgagagatttaaatcttttgttggtaaaacagttactatcccaattgttggaagaaagattaaaattattgaagatgattatgcagatcctgaacaaggcacaggggcattgaaaataactccagctcatgattttaatgactacgaagttgggcaaagaaataatcttgaaattataaatatttttaccgaagaaggaaaaataaatgaaaacgctccaaaatattacgtaggtcttgataggtctgaagcaagaaaaaaaattttaaaagagcttaaagaaaaagaattttttgtaaaagaggaaaatataaaaaataaagttccttatggagatagatctaattcaataattgaacctttcctaacagagcaatggtttgctgatgcgggtaaattatctgttaaagctaaagaagttgttaattcaaaaaagacaaatttctttcctgagaattggtcaaaaacttattttcaatggatgaataatattgagccatggtgtatttcaagacagctttggtggggacatcaaattcctgcttggtatggtcctgatgaaaaagtttttgttgctgttaatgaagatgaggcaaaagcacaagctaaacaacattacaaaaaagatgttgaattaaatcgtgatccagatgttttagatacttggttttcatctggtctatggccttttgcaacacttggatggcctgatgataataaatatgtagataaattttatccaacatcagtattagttacaggttttgatattatatttttttgggtagcaagaatgattatgtttggtactgaattcttaaacaaagaaccttttaaagatatttacgttcatgcattggtaaaagatgaaaagggacagaaaatgtctaaatcaaaaggtaatgtaattgatcctttagatttaattgaaaaatatagtgctgatgctcttagatttacattgttatcaatggcatctccaggaacagatgttaaactttctgaagatagagttaaagggtatagaaattttttaaacaaattatggaatgcaaataattttttaatcaccaacgaatgtgattttaaagaaatagataaagttccaagtttgaatgtgaatattaataaatggatttactcagaacttgttgagactaaaaataagatagaaaaaaacctagaagattatagatttgatgaagctgctaaaaatgcttatcaatttgcatggcattcgtattgtgattggtatttagaactatctaaaactatactattttcagatgatgcaatagccaaagcagaggttaaaaaggtatcatcttttgtatttaaacaaattttgattttgttacatccttttattccttttgttactgaggaaatttggcttaaaaacaaatttgataacaatggtagtgattatttaatgcttaaaaattggttgtcgggtgaaataaataaggacagtagtactgaacaggtagaaaatattatcaacattatttcagagattagatcatttaaaaatgagctaaatgtaagcccaggctcatttattgatgtatcaataagtaatattaacaaaaatcaaaaagattttattaatacaaatgaaattattctaaaaaaactaggaagaataaatagcatattagataaggatttagataaaccagctgcgacaatggttgtttctggagatttgtttaagatttattttgataaagatgttgatttaaaattaataaaggaaaatttaacaaacaaacaaagtaggttagagcaagagatgaataaaatatctcaaaaattagggaataaaagttttgtagatcgtgctccaaaagagattgttgaacaagaaaaaaataattataataatttaaagaatgatattgagaaaatatcagtaacaataaagggtatataat

SEQ ID NO: 307482 - DNA, 1489 bp, Unknown
  Bacterial polypeptide expressing nucleotide sequence isolated from the Sargasso Sea
ggagaaagaatgattaactgggatcctcaagcgaaaactgctttgagtgatgaagaagtcttttacaaggaagtaaattctaagctttactatttaagatataagatagaaggctcagacgatgaatgggtaaatatcgcaactacaagacctgaaactattttaggtgatacggcaatttgtattaatcctgatgatgaaagatattcttatcttaaaggtaaaaaagtaattgtccctcttataaatagaactataccaattatttttgatgattatgtagatatggattttggaactggttgtttaaaaattactcctgctcatgatcaaaacgattatgaattggggaaaaaacataatcttgaaattattaacattcttgattcatctggaaaatttaataaaaatgccaaattatatataggtgaagatagatttgatgtaaggaaattaatttcatcagagttagaagaatctggttatctcataaaaattgaagatcacattaataaaattggtttctcagaaagaacagatgcaattattgaaccgagattatctcttcagtggttttgttctatggaaaaattaagtattccagcacttgataatgttatgaacgatacaatcaagtttcacccctcaaaatttaaaaatacttaccgtcattgggttgagaatattagagattggtgtatttctagacagttgtggtggggacatcagatacctgcatttttttatggcgatggaaaggatgattttattgttgctccaaatataaaagaagcattaaaaaaacttaatagtaaatctgataaagaatataacttaggagatttagttcaggaagaagatgttatggatacatggttttcttcttggatatggcctattgctgtatttgatggcttttcaaaggataaaaaagaattaaattattactatcctaccaatgatttagttacagctccagagataatgtttttttgggtagcaagaatgattatatctggctatgaatatgtagataaaccaccttttaacaatgtatactttactggaattgttagagataagcttggaagaaagatgtcaaaatctttaggaaatagcccagatccattagaattaatcaaaaaatatggagcagacggagttagggtaggtatgcttttatcttctccagctggaaatgacctcttatttgatagtaatttatgtgaacaaggaagaaatttcactaataaaatatggaattcatttagattaattcaatcgtggaaagtatctgatgaaatagatcaggaaaaaatatctgctattgcattagagtggattgaatcaaaaatatctcaaagcattaaaaaaattaatttatcatatgaaaaatttagaatttcagaagctcttatgattacttataaaactatttgggatgactactgctcttggtttcttgaaatgattaaaccaggcttaccag

SEQ ID NO: 307483 - DNA, 1678 bp, Unknown
  Bacterial polypeptide expressing nucleotide sequence isolated from the Sargasso Sea
ctgtacgagaaggggctaatttacagaaatgaacggattataaactggtgtccaagatgttcaacagcattatcagatttagaagttaattacaaagagacatcaggcaaattgtattatgttaagtattatgaatctaaatctgagggccatgtaactgttgccaccacacgtcctgaaactttatttggagacactgctgtagctatgaatccttcagatgaacgatattcagacggcatccaattgatagtgccgctatgcaatagggaagtaccgctgatatcagatgaagctattgaactagattttgggacaggtgcattaaaagttactccttctcatgatgtattggactttgaaattgggcaaagacattctcttgaaagtttatgtgttatttctaatgatggtttattaaatagtttgtgcggaaaatatgatgggacggatagatttgaagctagagatatggtagttcaagaactagaagagactggtcatattgaaaaaatagaagattatttgcattctgtcggaagctgtcagagatgtgattgtgttgttgagccattgcctagcttgcaatggttcgtaaatgttggggcacatacggacgaagccactattgctggtaaagcatataaagctgttacaagtggtgatatagaaattgtgcctgagagattcactaaaatatatttaaattggatatctaacatacgtgattggtgcataagccggcaactttggtgggggcacagaatccctgtctggtattgtgatgattgtgacggcttgacggtaccaatagaggatcctgataggtgtgagcattgccaatcttctaatatcagccaagatgaagatgtattagatacttggtttagctcaggattatggcctcattctactttgggatggcctaaacagaccaccgaatatgagcaattttaccctacttcagtactagaaactggctacgatatattgtttttctgggtagctcgcatgattatgatgggtatagaaaatacggggagtgttccttttcgaacggtgttgttacatggtttgattagagatgagcacggcgccaaaatgagtaagacccgtgggaatactatggacccattggaactggtaaacaaatatggcacagacgctcttagatttgcgctaactacaggcacagcaccagggaatgacttgagaatatctgatgggaaattggaatcagcgcgtaatttcactacaaaaatctggaatgctgcacgttatgtcatgaatatattagacagacacgattttgattataattctgcaaatttaaattcttcaaacaaacttaaagttgaacacagggaagaccaatggatattaagcagattgcaatcggttataacaaatactaatgaatctctagaaaaatatgaattaggcgaagctcagcaaggattatatgaatttatatggaatgattattgtgattggtatattgagatgtctaaaatcagaatcgcagatggggattatgatcctatgccttgcctcatatatgtattaggtcagatattgaagatgattcacccatttatgccatatataactgaagaaatatggcagaatatgaatcagagagttgatacagaattaggttctattatgatgactgagt

SEQ ID NO: 307484 - DNA, 2136 bp, Unknown
  Bacterial polypeptide expressing nucleotide sequence isolated from the Sargasso Sea
ttttatcattatataacgaaggtttaatatacaaagatcaagctcttgtaaactgggatactaaatttaaaacagctatttcagatttggaggttgttcctacagatgttagtactcaaatttattatattaaatatccctgctccaactcgaaaaccataactgtcgctactgtaagaccagaaactatctttggtgatgttgccattgcagtgaaccctgaagacactagatacctctcattaaaaaatgaaactttcacaattcctttaacatcaagatcaatcccacttatattcgatgaatattctgatccagatatgggaagcggtgcagttaaaattactcctgctcatgattttaatgattttgaaattggtaaaaggcataatttagaattattaaacatcttaaatgatgatggatcattaaatgaaaattgtccaaaagaatttcaaggagtagatcgatttgaagctagaaaaaaagttgttctcttattaaaagaaaaaggcttcatagaaaaaattgaagattataaaactacaataccctatggagatcgctcaaatacaattgtagaaccttacttaacccatcagtggttttgtaatgctgaagaattagcaaagcaggcaatgaaagttgtaaaagatggtgaaacaaaattttttccatcaaattgggagaagacttattttcaatggatggaaaatataaaaccatggtgtatttctaggcaaatatggtggggtcatcaaatacctgtttggtatggtccagatggtaaagaattttgtgcagagacagaagaagaggctaaaaatttagctatagacttctacaaggcagataaaattattttaaaaagggaccaagatgtcttagatacatggttttcttcagctctttggcctttttctacgttgggatggcccgataaagaacaaaccttagatacgttttatccaaactctgtcttggttacaggttttgatattatctttttctgggttgcccgcatgatgatgatgggaaacaaatttatgtcagaaacgccttttaaaactgtttatgttcatgcccttgtccgggatgaaaaagggcaaaaaatgtctaaatcaaaaggcaatgtcatagatccattagaaataattgataaatatggagctgatacacttcgttttaccttaacatcattaaatacccctggaagagacgtaagattaagtgagcaacgtattgcaggttatagaaattttgtcactaaaatcactaatgcatataaatttgcagaatttaaagaaatttatcctcttaatttaaaggacaatattaatccagaacatatatttaatctttggatcatcaatgaatttcaagatttatataaaaaagtgcaagaaaattataaaaaatattattttcatgaagtggctaaccaattataccattttacgtggcatacattttgtgactggtatattgaattatctaaaaacttattagatgacaatcaatatgccaatgaaactaaatttacttttcatttgatatttaattctttactgcaacttttacacccggtcattccatttataactgaaaagttatggggtaaaaataacaaagatattttaatgaatcatcaatggaactatattgatttaaaaattggtagtgaagatgtatctaaaacaaaattatttatcgacttcatagaagagtacagatcaattgaaaaactttttgaaatcaaaaaagaagatgatgtaagaattttttctaataatcaatcaatccaattaattttatttgataataaagaaacttttgaatttttaacaagaaaaaaactttctacttcacaaaatgaaaatagtgttacattaccttttaaggagtttgattttgaaatttttacaaatcaaatagataaatctaaaattaaaataaaacttaatgataataaaaatgctttagaaaaagaaaaaaacattattgataaaaacttatcaaatgaaaattttgtatctagagctcctaagcaattaatcgaccaaaatacagaaagacagggatcaataaatatggaattgtctaaaattgatagtatattaaaaaatattcaataat

SEQ ID NO: 307485 - DNA, 1952 bp, Unknown
  Bacterial polypeptide expressing nucleotide sequence isolated from the Sargasso Sea
gccctgatcgacacgatcgtgcgctaccaacgcctggcggggaagaacgtgccctgcctgccgggcaccgaccacgcctcgattgcggtgcagacgatcctcgagaagcagctgaaggaggagggcaagacccgccacgacctcggccgtgaggcgtttctggagcgggcctggcagtggaaggccgaaagcggtggccgcatcgtgggccagctgcggcggctgggctattccgtggattggaagcgccagcgcttcaccctggatgagggtctgagtgaggcggtgaaggaggccttcgttcgcctgcacgagcaggggctgatctaccgcggtgagtacctggtgaactggtgccccgcctccggttcggcggtgagcgatctggaggtggagatgaaggaggtggacggtcacctctggcatttccgctatccgctcagcagcggcgacggccacctggaggtggccaccacccggcccgaaacgatgctgggcgacacggcggtggcggtgaaccccaccgacgagcgctacgcccacctggtgggccagaccctcaccctgccgttcgtggggagggagattccgatcgtggccgacgaccacgtggagaaggagttcggcaccggttgcgtcaaggtgacgccggcccacgaccccaacgatttcgccatcggccagcgccacggtctgccccagatcacggtgatgcgcaagaacggcacgatgaacaaggaggccggccagttcgaggggctggatcgcttcgaggcccgcaaggctgtggtggctggcctggaggagctggggctgctggtgaaggtggaggactaccgccacagcgttccctattccgaccgcggcaaggtgccggtggagccgctgctctccacccagtggtttgtcaaaaccgagcccctggcggctcgctgtcgtgaggccctcgagaagcaggacccccgcttcatccccgagcgctgggagaaggtgtatcgcgactggctcaccgacatccgcgactggtgcatcagccgccagctctggtggggccatcgcatccccgcctggttcgtgatcagcgagaccggcggcaagtacaccgacaccacgccctacgtggtggcccgcaacgaagccgaagccctggagaaggccaaggcggagtacggcgcggcggcggagatcgagcaggacgaagacgtgctcgacacctggttctccagtggcctctggcccttctccaccctgggttggcccgatgcagatagcgccgacctgcagcgctggtaccccaccagcaccctggtgacgggcttcgacatcatctttttctgggtggcgcggatgacgatgatggccggcgccttcaccggtgagatgcccttccaggacgtgtacatccacggcctggtgcgggacgagcagaaccgcaagatgagcaagagcgccggcaacggcatcgatccgctgctgctgatcgaccgttacggcaccgatgccctgcgcttcgccctggtgcgggaggtggccggtgcggggcaggacatccgcctggactacgaccgcaagaaggacacctccgccacggtggaggcttcgcgcaacttcgccaacaagctgtggaacgccacccgcttcgccctgatgaacctgggcggcgcaacgccggcccagctgggggaccccgaccccgcggccctgcagctggcggaccgctggattctctcccgcctggcccgggtgaaccgcgaaaccgccgagcgctacagcacttatggcctcggtgaagcggccaaggggctttacgagttcgcctggaacgacgtctgcgactggtatttggagctgagcaagcgccggcttaaccccggtgagaacccctcagcggaggccctggctgatcagcgggtggccaagcaggtgctggccaaggtgatcagccagatgca

SEQ ID NO: 307486 - DNA, 1660 bp, Unknown
  Bacterial polypeptide expressing nucleotide sequence isolated from the Sargasso Sea
ttaaaaaatcttaacttatttgttaaagaagaaagcattaaaaataaagttccatatggtgatagatcaaattctataattgaaccttacctaactgaacaatggtttgctgatgcaaaaaaactttccataaaagcaaaaaaaattgttaaatctaaaaaaacaaatttttttcctgaaaattggtcgaagacatattttcaatggatgaataatattgaaccttggtgtatttcaagacaactatggtggggccatcaaattccagcatggtatggtcctgataaaaaaatctttgttgctcttaatgaaaaagaggcaaaacaaaatgctaaaaaattttataaaaaagatgttgaattaaaaagagatccggatgttttagatacttggttttcatctggtttatggccatttgctacattaggctggattaccaaagatccttatcttaaaaaattttatccaacgtctgtgttggttactggctttgatattatatttttttgggttgcgagaatgattatgtttggaatggaatttattaaaaaagaaccttttaaagatatttatgttcacgctttagttagagatgaaaaaggtcaaaaaatgtcgaaatcaaaaggtaatgtcattgatcctttagatttaatagaaaagtatagcgctgatgcactgaggtttactctgttatcgatggcttccccaggaagagatgtgaagttatcagaggacagagtaaaaggtaataggaattttcttaataaattatggaatgtaaataattttttaattcataataaatgtaatatcaaaaattctaaaaaatctcccaaagcaaaaataaatattaataaatggatatattcagaattggttcaaacaaaaattgttgtagaaaagaatattaaagactatcgatttgatgaagcggctcgtaatatataccaatttgtatggcattcgtattgtgattggtatttagaattaagtaaaacaattttaaattcaaataataaaaatgatattaaagaaactaaagaaattgctagttttgtttttaaagaaattttggttttgcttcatccattcataccttttatcactgaagaaatatggcttaaaaataaattggacaatttgaataaagattatttaatgtattcaaattggattacagataaatctaaaaaagaaaaatttaccgatgttgaaaatattatagattttatcacagcaattagatcatttaagaatgaactaagcattagcccaggctcatacgttgatatttcacttggtggaattaacaaaaagaataaagctttttttactaagaacgacacgataattaaaagactaggaagaataacaaattttattgataaagataagaataagccatctgcatcattagtaataaaaggaaatgtttttaaactttattttgaagaaaatgttgatttaaatgtaattaaagaaaaccttctaagcaaacagtcaaaatatcaagcagaaatggataaaatttcctctagattaaagaataaagattttgtaaagcgtgctccaaaacatattgttgaccaagaaaaaagtaattataataatttaggaaatgatataaaaaaattatcagctacagtaaaaagtttataat

SEQ ID NO: 307487 - DNA, 2629 bp, Unknown
  Bacterial polypeptide expressing nucleotide sequence isolated from the Sargasso Sea
atgagttcagacaaatatattcacgaaaatgttgaaaataagatttattcttattgggaagaaaaaaatttatttaaaccaaaaaccaataaaaaacaattttctatagttataccaccaccgaatgtaactggtagtcttcatatgggtcatgcactaaataattctattcaagatcttttaactcgatatcatcgaatgaataattttgaaactttatggcaaccaggaacagatcacgcgggtatcgctacacaagccttagtggaaaagaaacttaaatctgaaggtatagataaaaatgatttaggtagagaaaaattcatcgaaaaagtttgggattggaaaggtcagtatggtgatattatcattaatcaattaaaaaaattaggctgttcttgtgattggtctagaaatgccttcaccatggacgaaaatctatcaaaatctgtattaaaagtttttgttgaaatgtacaaaaatggattgatttacaaatcaaaaaaattagtaaattgggacactgttttaaaaacagctatatcggatttagaagtagatcaaagagaggttaattcaaaactatatcacatcaaatatccaatcgagggatcagataaatttataactattgcaactactagaccggaaaccattttgggagatacagcagttgcagttaatccatcagatgaaagatataaatcattagtaaataaaaatgtaatagttccaatagttgatagaaaaataaaaattatagaagatgattatgctgatcctgaacaagggactggagctgttaaaattactccagcacatgatttcaatgattatgaagtgggggagagaaataatttagaagtcataaatgtttttactcctgatggaaaaattaatgaaaatgcacctgataattatattgggcttgatagatttgaagctagaaaaagaattttaaaagaactaactgacaaaaacttatttgttaaagaagaaaaaattaaaaataaagttccatatggtgacagatctaattcaataattgaaccttatttaactgaacagtggtttgcagatgctaagaaactttcaataaaagctaaagatatagtaaataacaaaacaacaaatttttttcctgttaattggacaaaaacatattttcaatggatggataatatagaaccttggtgtatctctagacagctttggtggggtcatcaaatacctgcatggtatgggcctgatggagaaatatttgtagatgaaacagaagaaggtgcaaataaattagctaaagaacactataaaaaagatgttgaattaattagagatccagatgttcttgatacatggttttcatcaggcctatggccttttgcaacattaggatggccaaaaaaaaatgaatatttagaaaaattttatccaacttcagtattggtaacaggatttgatatcattttcttttgggttgcaagaatgattatgtttggaatggaatttcaaaacaaagaaccttttaaaaatatttatgttcatgcattagttagagatgaaaaaggtcaaaaaatgtcaaagtctaaaggcaatgtaattgatccattagaattaatagaaaaatatagtgctgatgctttaagatttacacttttgtcaatggcatctcctggacgagatgtaaagttatcagaggatagagttaaaggatatagaaattttttaaataaaatatggaacgcaaataattttctaattcaaaacgattgcaaatttgaaaatatagaaacgcctaatgatttaaaactaaatattaataaatggatatttgttgaattcactaacactaatgaaaagattaaaaaatcaatagatagttatcgatttgatgaggctgcgagaattgcatatcaatttgtatggcattcgttctgtgattggtatttagagttatctaaaactgttttttattcagaaaataatgaaaatatcgaagaaacaagaaatgtagctagtttcatatttactcaaattctagttattttacacccattcattccatttttaactgaggaaatatggttgaaaaataaattggataaagatggaaaagattttcttatgttaaaaaactggtctgaggctagttctgataaagataaagactctgatgaagtaaatgaaataatagattttgtctcatctatacggtcttttaaaaatgaaatagaaataagccctggatcatttgtcaaaatactagtgaataaaataaatccagaaattaagaagtttattgaaaataactccaatacattaaaaaaaattggcagaattaatgaatttgtaaatgaagatattaaaaaaccttcagcaaacttggtcattaaaggtgaaatatttaaaatttactttgatgaagatgtagatttgtcaaaaattaaagaaacactattaaataaaaagaataaaattgagaaggaaatggaaaaaattaatacaaggctaaataataaaagttttattgaaagagctccaaatgatattgttgagcaagaaaagtctaactttattaatttagaaaaagatgttaataaattaaattatactttagaaagtctataat

SEQ ID NO: 307488 - DNA, 1261 bp, Unknown
  Bacterial polypeptide expressing nucleotide sequence isolated from the Sargasso Sea
attgaaccatatcttacagagcaatggtttgcagatgcaaaaaaattatcagtaaaagcaaagaagattgtaaagaataaaaaaacaaaattttttccccctaattggtcaaagacttatttccaatggatgaataatattgaaccttggtgtatatcaagacaactttggtggggccatcaaataccagcttggtatggacctgataataaaatctttgtagcatcaaattatagtgaagcaaaaaaactagccaaaaaaaaatataagaaagatgtagaattagtaagagatgaagatgttttagacacatggttctcatcaggattatgggcttttgcaactcttgggtggcctaataaaaatgaatatctaaaaaagttttacccaacatcagttttagtaacgggttttgacattatctttttttgggtagccagaatgatgatgtttggaatggagtttttaaataaacaaccatttaaagaaatttatgttcatgcattggtaagagatgaaaaagggcaaaaaatgtctaagtcaaaaggtaacgtaattgatcctttgatattaatagataaatatagtgcagatgcattaagatttactttgctatcaatggcatcaccaggaagagacgtaaaattatctgaagatagagttaaaggttatagaaattttctaaataagctttggaatgcaaacaactttttggcaatgaataagtgtgatttttcaaagtctaaaaaggagccaaaagtaaaattaaatataaataaatggattatttcagagttaaacacagtaagtaaacttattgaaaagaatattaatgactatagatttgatgaagcagcaagaaacatttaccaatttgtttggcattcatattgtgattggtatgtagagctatctaaaactatcttgaattctaaagaaaagtcatcaattttagaggtaaaacagacattaagttatgtttttaaacaaattttaattcttctacatccattcattccatttattacagaggaattatggttaaaaaataagctagataaaccaaaaaattatctaatgtttgctaattggtcgaataaaaaagcaaataaagataaacaaattaaggaagttgaaaatataattaatttgattagccaacttagggcatttaaaaatgaattaaatgtaagtccaggatcttttgtagatatgtctatttcaactttgtctcaaaaagatcaattatttatcaaaaaaa

SEQ ID NO: 307489 - DNA, 1165 bp, Unknown
  Bacterial polypeptide expressing nucleotide sequence isolated from the Sargasso Sea
aagatggatgaagggacgggtgcggttaagataacaccagctcatgattttaatgactttgaagtggggaagagaaataaccttgaaatgctcaatatattggataaaagcggacatcttgtcgatgatgattttatcccaaaaaaatatcaaaaacttgagaggttcagtgcgcgaaaagaaattctctcagaccttaaggctgagggatcgcttataaagaccgaaaaacatctccataatgttccgcatggggatagatccggcgtaataatagaaccatatttaacagatcaatggtatgttgatgcaaaagaattatcaaaaaaagccattaaagctgtcaaagataagaaaacacaatttgttccaaagaattgggaaaagacttattttgagtggatggataacatacagccatggtgcgtatccagacagctatggtgggggcatcaaatacctgtatggtatggccctgataaccatttctttgtggccatggacgaaagtgaggctaaagaaaaggcatacaaacattacggtaaggatactgatctcgtaagggatgaagatgtcttagatacttggttttcatccgcattatggcctttcagtaccttgggatggccagaaaaaacacctgagtttgagaagtactacaacactgatgtgttggtcaccggtttcgatattattttcttctgggtcgcacgaatgatgatgatgggtctctatttgaccgatgatgtcccttttcatacgatatacatacacgcacttgtcagagacgaagaaggtcaaaagatgtcaaaatcgaaaggtaatgtgatagatccgttaagcctgattgagaaatatggtgcagactctctaagattcactctttcgtcaatggctgcacagggccgagatataaaattagctgagtcacgcgttgaaggttatagaaattttattacaaaaatttggaatgcggcacgtttcatatcaacttacaatattattctagatacaaatttcgatccaaaaactgttaagcaggaccaaaataaatggatacttggagagttagacaatttaaatatgaacgtaagtcaagcgcttgataaatttcgtttcaatgatgcttcggcagaaatatattcattcatctggcacctatttt

SEQ ID NO: 307490 - DNA, 871 bp, Unknown
  Bacterial polypeptide expressing nucleotide sequence isolated from the Sargasso Sea
atggacatattcaatcataaagattatgaaaaattgtggtatgatcgttgggtcgaaaaaggttgttttaaagctgaggtaagtagtaaaaaaaaaccatatactataatgatgcctccacctaatgttacgggttcactacatattgggcatgcattaacttttactcttcaagatattttaattaggtattttcgtatgaaaggtcgtgatgttctatggcaaccaggaacagaccatgctggcattgctactcaaatggttgttgaaagacaattaaatgaaaaaggcattgatagaagagacattggtagagaggagtttttaaataaagtatgggaatggaaagaacattctggaggtcaaattactaatcaacttagggcacttggagcttctccagattgggataaagaaagatttactatggatgacggcttgtcatctgcagttaagaaggtttttgtaaaactctttaacgaaggtttaatttataaagataaaaggttagtaaattgggatacaaaattgttaacagctatttctgatttagaagtagagcaaagagaaatggaaagtcaattttggtatattaaatattcattagaaaatacaaaaaattttattgttgttgcaactacaaggccagagacaatgttaggagatgttgcggttgctgtaaatcccaaagatgaaagatataatcaatttattggaaaaaatttaattttaccaattgcaaatagaaaaatacctataatatcagatgattatactgaaattgaaaaagggtctggcgcagtaaaaattactcccgctcatgacttccatgactttgaggttggcaagaggcgtggtttaaaaatataaa

SEQ ID NO: 307491 - DNA, 793 bp, Unknown
  Bacterial polypeptide expressing nucleotide sequence isolated from the Sargasso Sea
atggaatttaaaaaatataatcatagtaaagaagaaaaaaaaatttcagatttttggattaaaaaaggcttattcaaaccaaaaaaaaacaaatcaaataaaaaattttctgtagttattcctccacctaatgtaactggtagattacatatgggacatgccctaaacaatagtcttcaagatgttttagttagatttaatagaatgaaaggccttgaaactctttggcaaccaggaacagaccatgctggtattgcaactcaagcagttgttgaaaataaccttcttaaagaaggaattaaaaaaaatgatttaggaagagaaaaatttattaaaaaaatatgggattggaaagaggagtctggtggaataattttagatcaacttaagaaattaggttgttcttgtgattggtcaagaaccaggttcaccatggataaggatctttctaaagccgtaattaaagtttttgttgatctttataaaaataagctaatttacaaggataaaaaattagtcaactgggatactaaacttcaaactgctatttctgacttagaagttaaccaaaaagatgttcaatctcaattgtatttcattgattatacaatagaaaactcagatcaaaaaattactatcgccactactagaccagagacaatgatgggagataccgcggttgctgtaaatccaaaggatgaaagatatgttaatttagttggaaaaaatgttcttattccgattgttaataggactgttaaaattatttctgacaattacgctgatccggaac

SEQ ID NO: 307492 - DNA, 682 bp, Unknown
  Bacterial polypeptide expressing nucleotide sequence isolated from the Sargasso Sea
tatagccgtaaaccctaaagacgatagatataaatcactagtaaataaatttgttacaattccattagttgagagaaaaataaaaatcattgaagatgattatgccgatcctgagcaaggtacgggtgcagttaaaattacaccagctcatgactttaatgattatgaagtaggtcaaagaaataatttagaaattttaaatatatttacctctgatggtaaaattaatgaaaatgcacctaaagaatttattggtttagatagatttgaagctagaaaaagattactgaaaaaactaaaagaaaaagattttttagttaaagaagaaaatattaaaaataaaattccatatggcgatagatcaaattctatcattgaaccatttctaactgaacaatggtttgctgatgctaaaaaattatctgttaaagctaaagaagttgtaaataataaaaaaacaaatttctttcctgaaaattggtctaagacttattttcaatggatggataatattgagccgtggtgtatttcaagacaattatggtggggtcatcaaataccagcttggtacggaccagataaaaaaatttttgtagcaataaatgaagatgaagcaaaagttgatgcaaaaaaacattataataaagatgttgaattaatctcgagatccagatgtacttga

SEQ ID NO: 307493 - DNA, 975 bp, Unknown
  Bacterial polypeptide expressing nucleotide sequence isolated from the Sargasso Sea
aatgaactctaagatttactacattagatacccaatagataaatcatcagagtatatcactatagccacaactaggcccgaaactatgcttggggatacagctattgcagttaatccaaaagataaaagatataaaagttttgtcggtaaaatagtcactatacctattgtaggtagaaaaattaaaataattaaagacaattatgcagacccagaacaaggaacaggagcattaaaaattaccccagcgcatgatttcaatgattatgatgtaggacaaagaaataaacttgagatcataaatgtttttacagaagagggtaaaattaatgaaaatgcacctaaagagtatgtaggcttggatagatttgatgctcgtaaaaaaatattaaaagaacttaaagaaaaagattattttgttaaagaggaaaatataaaaaataaagttccttatggagatagatctaactctgttattgaaccttttttaactgagcaatggtttgttgacgcaaaaaaattagcagtcaaagcaaaaaaaattgttaaaacaaaaaaaacaaatttttttccaaataactggtcgaaaacttattttcaatggatgaataatattgagccttggtgtgtttctagacagctgtggtggggtcatcaaataccagcatggtatggacctgacaataaaatatttgttgctttaaatgaaaaagaagcaagcaagcaagctaagaagcattacaaaaaagacgtgaaattagttagagatcctgatgtattagatacttggttttcttctggtttatggccttttgcaactttaggatggccagataaaacggatttcgtaaaaaagttttatccaaccacagttttagtaactggctttgatataatttttttctgggttgcaagaatgattatgtttggaatggaatttcttaacaaagaacctttcaaagatatttatgttca

SEQ ID NO: 307494 - DNA, 1010 bp, Unknown
  Bacterial polypeptide expressing nucleotide sequence isolated from the Sargasso Sea
catgagtaacgataaatatatacattctgatgttgaggatagaatttattcttattgggaagaaaatggactatttaaacctaaagaaaattcaaaaaaattttcaatagtaatacctccacccaatgtgactggtagtcttcatatgggtcatgctttgaataattctattcaagatttattagttcgttatcatcgaatgaataactatgaaactttatggcaaccaggaaccgatcacgcaggaattgctactcaagctcttgttgaaaaaaaacttagtgtagaaaaaattgataaaaatgaaattggtcgagaaaaattcattgaaaaagtttgggaatggaaagagcaatacggtgacatcattattaatcaattaaagaaacttggatgttcttgtgattggtccagaaatgcttttacgatggatgaaaatctatcaaaatccgtaataagggtatttgttgatctatataataaaggtttaatttataaggataaaaaactagtaaattgggacacagttttaaaaacggccatttcagatttagaagttgatcaaagagaggtaaattcaaaaatttattatattaaatatccaattgatagaacggatgaatttataacaattgccaccacaagacctgaaacaatgttgggtgacactgcaatagctgtaaatccaaaagatgatcgttttaaatcttatgttggaaaaactgtcaccattccaattgttggtagaaaaataaaaattatcgaagatgattacgcagatcctgaacaaggtacaggtgctttaaaaataacaccagcacatgactttaatgattatgatttaggtcaaagaaacaatcttgaaattataaatatttttactgaagcaggaaaaataaatgaaaacgccccaaaacattacgtaggtcttgatcgctctgaagcaagaaaacaaattttaaaagagcttaaagataaagaattttttgtaaaagaagagaacattaaaa

SEQ ID NO: 307495 - DNA, 1045 bp, Unknown
  Bacterial polypeptide expressing nucleotide sequence isolated from the Sargasso Sea
aatgttggaaaaatattatcaacccagtctcgttgaagataaaatttataaaacatgggaaaatgatggagattttaaacctttaaagtcttcaagagacgcttactgcatagttatcccccctccaaatgttacaggaacactacatatgggccatgctctaaataatactcttcaggatatcttggttaggttttatagaatgcaaggcaaaaatgttttgtggcagcctggtacagaccatgccggtatcgcgacagaaatggttgttgaaagggaactaaaaaaaagagagataaataaaaatgatttatctcgtgaacagtttatagaacatgtatgggaatggaaaaatcaatctggaaatgaaattattaatcaattaaaaagattaggctgttcatgtgattggtctagagaaaggtttactctggatgaaggtttgtcaaaagcagtaagatttgtatttgtcaaattatataatgataaacttatttataaagataaaagactaagtaactgggatccaaaattaaaaactactatttcggatttagaagtgatccaaaaagaagtaaatggttcactctggtatatagactacaaattagaaaatgaagacaaggtaattacaattgcaacaactcgacccgagacaatgcttggagatacggcaattgctgttcaccctgaagacgaaaggtttagagattttgtaggtaagtatgcatatattcccatactgaataaaaaaattattattattgctgatgaatatgtaaaagtggatcaaggctctggtgctgttaaaataactccagctcatgattttaatgactatgaaataggaaaaagacataatcttgaagtaattaatatttttaatgagagggctgagcttaatgaaaattgcccaatcgaatatcaaaatcttgatcgctttaaagcaagggagaaaattgttaatgaattacaaaccattggagcactaaataaagttgaagagaatattcatactgtgccgtatggagatagatcggggtga

SEQ ID NO: 307496 - DNA, 2758 bp, Unknown
  Bacterial polypeptide expressing nucleotide sequence isolated from the Sargasso Sea
atgaaaaagacatttaacccgagtcaagtgaaacaagccatgtatcaggcatggaaaagcaaaggctatttcaagccaagtggtgataacagcaatggtgcttattgcatcatgatcccaccaccaaacgtgaccggtagcctgcatatgggccatgccttccagcaaaccattatggatgccttaacccgctacaaacgtatgctgggcaaaaacaccttatggcaagtaggaactgaccacgctggtatagccacgcaaatggtggtggagcgtaaactggcagccgaaggcaaaccagatcgccacgccatgggccgcgacgcttttattgaaaaagtgtgggaatggaaagccgaatcaggtggcaccatcaccgaacaaatgcgccgtttaggcaactcagtcgactgggacaaagagcgttttaccatggacgctggcctgtcgaatgcggtgcaggaagtttttgtgcgtttgtatcaggacgacctgatttaccgtggcaaacgcctggtgaactgggatccgaagctgcacactgctatttctgatttagaagtagaaaacaaagaacaaaaaggccacctgtggaacttacgttacccactggccgatggcgtgaccacagcagatggcaaaaactacatagtagtagcaactacccgtcctgaaactatgctgggcgatactggtgttgcggtcaacccggacgatgaacgttatcaatctttgattggtaaagaagtgctgctgcctctggtcaaccgccgtattcctattctggccgacgaacatgccgacaaagacaaaggcacaggctgcgtaaaaatcacgccagctcatgactttaacgactatgaagtaggtaaacgtcatcagttgccgatgatcaacgtgatgacggcggatgccactatccgcactgaaggcgaatgtttcttcccgaacggtgaagccaacccggcgcataacaccctgatcccggctgaattccagggtctggatcgttatgtggcccgtaaagccatagtggccgcttttgatgcagctggccttctggacaaagtagaagatcataacaataccctgccgtacggcgaccgttctggtgtggtgattgagcctttactgacagaccaatggtatgtgcgtgttgcgcctatggcgaaaaccgctattgaagctgtggaaaacggcgacattcagtttgtgcctaaacaatacgaaaacatgtactacagctggatgcgtgacattcaggactggtgtatcagccgtcaactgtggtggggtcaccgtattcctgcctggtacgatgctgaaggcaaagtctatgttggtcgcaatgaagccgaagtccgtgctaagcacagcctggctgactctgtcactttacgtcaggacaacgatgtgctggacacctggttcagttcagcgctgtggaccttctctactttaggctggccagacaatacggaagagttaaaaaccttccacccgaccgacgtgttagtcactggttttgacattattttcttctgggttgcccggatgattatgatgacgatgcatttcatcaaagatgaagatggcaagccgcaagtgccgtttaagacggtgtatgtcacaggtttaatccgtgatgaaaacggcgacaagatgtccaagtccaagggcaacgtgattgacccgctggatatgatcgacggtattagtctggacgacctgttggtgaaacgcaccagtaatatgatgcagccgcagctggccgaaaaaattggcaaccagaccaaaaaacaattccctgaaggtattgaagccagtggtacagatgctttgcgtttcaccttagcggctttggcttcaacaggccgtgatatcagctgggatatgaaacgtttagacggttaccgtaacttctgtaacaagctgtggaacgccagccgttacgtcaccatgatgaccgaagaaaaagactgtggcttggctgttgacggtaaagctgctgaaatggagctgtcattggccgatcactggatcatcagccagtatcagcaaactatcactcaattccgtggttatttagacagctaccgttttgatatggcggccaatacgctgtacgaattcacctggaaccagttctgtgactggtacttagagctgaccaaacctgtattgtttaaaggcaccgaagctcagcaacgcggtacccgtcacaccttactgacagtgctggaatctttactgcgtttaatgcaccccatcatgccatttatcactgaagaaatttggcagttggtggcaccaatgatccgtaccgatatcaaagcgggcgacagcattatgctgcaggcctatccggaatttaatcaggcgctggtgaatgaaaccgccactgccgatctggaatgggtgaagagctttatcgttgctatccgtaacgtacggggtgagatggatatagcaccaagcaagccattgtctgtattagtgcgtaacctgaccccagacgacagccgccgtttacaaagcaatatggccttcctgcagaatatggccaagttagaagccattactgtactggccgatggcgacacagcaccggcttgtgccgctcagttgttgggtaagatggatattctgatccctatggcaggcctgatcgacaaagaagccgaactggcccgtattgccaaacaaatggaaaaagctcagcaggaacatgaccgcgtggccggtaaactggcgaacg

SEQ ID NO: 307497 - DNA, 537 bp, Unknown
  Bacterial polypeptide expressing nucleotide sequence isolated from the Sargasso Sea
aatggataaaaccttcgaaccgcagtccatcgagcagcaatgctacaagtcatgggaagaggcgggtttatttaaagcttcaggtagcggcgacccttattgtattttgcttccgccaccaaacgttaccggtagccttcacatgggccatggtttccagcaaaccattatggacgccttaacccgttatcaccgcatgaagggcgacaatacgctatggcaagtgggtactgaccacgccggtattgcaacccagatggtggtagaacgccaacttaacgcacaaggcaagacgcgccacgatttaggtcgcgaagacttcatcaaaaaagtgtgggaatggaaagagcacagcggcggaacgatcaccggtcaaatgcgccgtctaggtacgtctcctgactggtctcgtgaagtgttcaccatggacgaagacctgtctaaagccgtaactgaagtgttcgttaagctacacgaagaaggccttatttaccgcggtaagcgtttggttaactgggatccagtgcttcacacagc

SEQ ID NO: 307498 - DNA, 1238 bp, Unknown
  Bacterial polypeptide expressing nucleotide sequence isolated from the Sargasso Sea
tatggataaacagtattacccagtagaaattgaagaaaaatggtccaagatatggtctgaaaaagttctttcaaataaagattctgatgcttcattttctcaggtaatacctccaccaaatgttactggtactcttcatatgggtcacagcttccagtatgccatcatggacttctatacaagatatcatcatatgtctggcaaagatgcgcactggcaggttggtgctgatcatgccggcatagccacgcaaatggttgtagaaaataatcttgcaaaaaaagatgtagccagaaaagaacttggaagagaaaaatttcttgaagaagtttggtcttggaaagaatattcagaagaaaaaataacctcacaaattaaaagacttggatgctctgttgattggaataaatataggtttaccctagatgacggatgcaatgatgctgttataaaagcattcgttgaattgcatagaagaaataaaatctataggggttataggttggttaattgggatccatccctaaaaactgctgtttcagatcttgaggttgtaagacaagaaaaagatggcctcctttggcatattaaatatccaattgaaaatacagaagactttttaatagtggctacaactcgacctgaaactatgtttggagatatggcagttgctgttaaccctaatgatgataggtataaagattttgttggtaaaaacgtggttcttccctttgtgggtagaaagataccagttttagccgatgagtatgttgatatggaatttggaaccggttgtcttaaaattactccaggtcatgattttaatgattacgaaataggtaaaaaatattcactacacgaggtagatggtcaagttaagacttcgaatacagtaagtgactttgagcctataaatatatttaatgaagatgcatgttcgaatgaaaatgtgccagaaccattttcaaatcttgatcgttttaaagtcagaaaagctgtattagaaaaacttaaggagctagatctcttggaaaaagaagaaaagcaccatataagtgtacctcgtggtgagaggtctaatatagttattgaacctaaattaagttatcaatggtatgtcaaaactgaagaaatggcagcaagagcaaacgacgctgttaacaaaggagaaataatatttcatccaaacaattggcttaagacatattttaattggatggataatattgaggattggt

SEQ ID NO: 307499 - DNA, 2629 bp, Unknown
  Bacterial polypeptide expressing nucleotide sequence isolated from the Sargasso Sea
atgagtaacgataaatatatacattctgatgttgaggatagaatttattcttattgggaagaaaatggactatttaaacctaaagaaaattcaaaaaaattttcaatagtaatacctccacccaatgtgactggtagtcttcatatggggcatgctttgaataattctattcaagatttattagttcgttatcatcgaatgaataactatgaaactttatggcaaccaggaaccgatcacgcaggaattgctactcaagctcttgttgaaaaaaaacttagtgcagaaaaaattgataaaaatgaaattggtcgagaaaaattcattaaaaaagtttgggaatggaaagatcaatacggtgacatcattattaatcaattaaagaaacttggatgttcttgtgattggtccagaaatgcttttacgatggatgaaaatctatcaaaatcggtaataaaggtatttgttgatctatataataaaggtttaatttataaggataaaaaactagtaaattgggacacagttttaaaaacggccatttcagatttagaagttgatcaaagagaggtaaattctaaaatttatcatattaaatatccaattgatggaacggatgaatttataacaattgccaccacaagacctgaaacaatgttgggtgacactgcaatagctgtaaatccaaaagatgatcgttttaaatcttatgttggaaaaactgtcaccattccaattgttggtagaaaaataaaaattatcgaagatgattacgcagatcctgaacaaggtacaggtgctttaaaaataactccagcacatgactttaatgattatgatgtaggtcaaagaaacaatcttgaaattataaatatttttactgaagcaggaaaaataaatgaaaacgctccaaaacattacgtaggtcttgatcgctctgaagcaagaaaacaaattttaaaagagcttaaagataaagaattttttgtaaaagaagagaacattaaaaataaagttccttacggagatagatccaattcaatcattgaaccttttttaacagaacaatggtttgctgatgcaggtaaattatcagttaaagcaaaaaaagttgtaaattctaaaaaaacaaatttttttcctgagaattggtcaaaaacttattttcaatggatgaacaatatagaaccctggtgtatttcaagacagttatggtggggtcatcaaatacctgcttggtatggacctgataataaaatttttgttgcttacaatgaagatgaagcaaaacaattagctaacaaacattatggtaaagatgtagaattgaacagagatcctgatgttttagatacatggttttcgtctggtctttggccatttgcaacacttggatggcctaatgataaaaagtttgttgataagttttatccaacttcagtattagtaacaggttttgatattattttcttttgggttgcaagaatgattatgtttggaacagaatttttaaacaaagaaccttttaaagatatttatgttcatgctttagttagagatgaaaaaggacaaaaaatgtctaaatcaaaagggaatgttattgatcccttagatctaattgaaaaatatagtgcagatgctttaagatttactttactttctatggcgtcaccaggaactgatgttaaactttctgaagatagagttaaaggttatagaaattttttaaataaactatggaatgctaataattttttaattaccaatgaatgtgattttaaaaatacagatcaaattccagagttaaaagttaatattaataaatggatatattctgagttagcagaaactactaacaaaatcattaagaacttagaagattatcgatttgatgaagccgcaaaaaatgcttatcaatttacttggcattcttattgtgactggtatctagagctttctaaaacaattcttttttcagatgatgaggacgctaaagaagaggttaaaaaagtttcagcatatgtatttaaacaaatactagttttattacatccatttattccctttgttactgaagaaatttggctgaaaaataaatttgataataagggtaatgattatttaatgtttaaaaattggatatctgcaaaatcaactaaagactcacacacagatcaggtagaaaatataattaatatcatatctgagctgagatcctttaaaaatgagctaaatgtaagtcctggttcatttatagatatttcgattaacaatataaacaaagatcaaaagcaatttattagttcaaataaaataattcttaaaaaattaggtcgtataaataatatccttagtgatgatttagataagccggctgctacgatggttgtttcaggggatttatttaagatctattttgataaagatgttgatttaaaattaataaaggaaaatttaactagtaaacaagaacgattagaacaagagatgcataagatatctcaaagactagaaaataaaagttttgtagatagggcaccaaaagagattgttgaacaagaaaaaactaattataataatttaaagaacgatgttgataagatatcaataacaataaagggtatataat

SEQ ID NO: 307500 - DNA, 2878 bp, Unknown
  Bacterial polypeptide expressing nucleotide sequence isolated from the Sargasso Sea
catggaaaaaacatacgatcctcagtccattgagcagactctttaccaaaactgggaagagcaaggttactttaagccccacggcgatgcctcacagggcaactattgcatcatgatcccgccacctaacgtgacgggcagcctgcacatgggtcacgctttccaagataccatcatggatactctgatccgctaccaacgtatgaagggcaaaaacaccctgtggcaagtcggtactgaccatgcgggtattgcgactcagatgctagttgagcgtaagcttgaagccgaagaaggcaaaagccgccatgaccttggccgcgatgcctttatggaaaaagtatgggaatggaaagcgcaatctggcggcaccatcactaagcagctacgtcgtatgggtgcctctgtggattgggaccgtgagcgcttcaccatggacgaaggcttgtctaaagccgttcaagaagtgtttgtccgtctctatgaagacgatttgatttaccgtggtaaacgcttagtgaactgggatcctaagctgcacaccgcgatttcagatctcgaagtggaaaacaaagaaaagcaaggccacatgtggcatctgcgttatccattagccgatggcgaactgactgctgacggtaaagattaccttgaagtcgccaccacgcgtccagagactatgctgggcgatagcgcagttgccgttcatccagacgatgagcgttatcaagcgcttatcggcaagtttattctgctgcctatcgttaatcgtcgcatccctatcgttgccgatgactatgtagacatggagtttggcacaggctgtgtgaagatcacccctgcccacgactttaacgactatgaagtcggtaaacgtcacaagcttcctatgttcaacgtgttgaccttagatgcggccattcgtacatccgccgaagtcgttaataccgatggcacaatcaacactagcttagatggtagcctgccagagcgtttcgcaggtcttgaccgtttcaaagcccgtgatgctatcgtggccgagtttgaaaccttaggcctgctcgaaaaaatcgcgccacacggcctaaaagtgccctacggtgaccgctcaggcgtagttattgagccgatgctaaccgaccaatggtacgttgccgttgcgccaatggcgaaaaccgctatcgaagccgttgaaaatggcgatattaagttcgtgccacagcaatacgaaaacatgtacttctcttggatgcgcgacattcaagattggtgtatctctcgccaattatggtggggtcaccgcatccctgcttggtacgatgccaacggtaaggtctatgtcggccgcaccgaagccgaagtacgtgctaagcacaatatcgatgatgcaatcgccctgcgccaagatgaagacgtactcgatacttggttcagctctgcactgtggacattctcgaccttaggctggcctgacaatgttgaagatttaaaaaccttccacccgaccgatgtgttggtaacaggttttgacatcatcttcttctgggttgcccgtatgatcatgatgaccatgcacttcatcaaagatgaagacggcaagccacaggtgccctttaaaaccgtttatgtgactggccttatccgcgatgaagcgggtaacaaaatgtcaaaatctaagggcaacgtgcttgacccattggatatgatcgacggtatcgatcttgaagccctcgttgaaaaacgtaccggcaacatgatgcagcctcagctagccgccaagatcgaaaagagcacccgtaaagaatttgaaaacggcatcgaagcccatggtaccgatgccctgcgctttaccctagcggcaatggcctcaacgggccgtgatatcaactgggacatgaagcgtttagacggttaccgcagcttctgtaacaaactttggaacgcatcacgctatgtgctgatgaataccgaaggccaagattgcggcccgaactcaccggattaccaaggcggtgagatggaactgtcattggcggatcgctggattatcggtttattcaaccaaaccgtaaaaacctacgacgaccacatggcaaactaccgcttcgacctcgcagccaacaccttgtacgagttcacttggaaccagttctgcgattggtacttagagttaactaagccagtactgcaaaacggcaatgaagcgcaaatgcgcggcacccgccataccttggtcaatgtgttagaagcgatgcaacggctgatgcacccaatgatgccatacatcactgaaaccatctggcaacgtgttaaaccactgactggcgcccaaggcgacaccatcatgctggcaccattcccaagctatgatgcagccaaagtagatgcgaccgcgatggccgacctcgagtgggttaagcaagtgattgttgcagtacgtaatatccgtgcagagctcaatatcgcgccttctaagccattaaacgccctgctgcgtggcgtgagtgcccaagaccaagcccgtgttgaggctaaccaagccttcttcacaacgcttgcgcgcttagagagcatgacgattcttggcgaaggtgaaacggcacctatgtcgaccacaggtctgattggcgaaatggaattattaattccgatggctggtctggtggatgtcgcggccgaaatggctcgcatcgacaagcagcttgagaagctgactcaagagattggccgtatcgaaggtaaattatcgaatgaaggcttcgtggcgaaagcaccgccagccgttatcgataaagagcgcgctaagatggccgatctgagccgcgatatggacaaactaaaagagcaaaaagccgagtttgctaagttagaagcctaa

SEQ ID NO: 307501 - DNA, 2227 bp, Unknown
  Bacterial polypeptide expressing nucleotide sequence isolated from the Sargasso Sea
atggatgctaagtattttccgatagagatagaagagaagtggtcaaaagtttgggctgaacgtgaacttaacaagcctgagtctgaacagattttctctcagatcattccgccgccaaatgtaactggaaccttacatatggggcacagttttcagtatgcaatcatggatttttatactagataccatcatatgaatggtttagattcatattggcaagtaggaactgatcatgctggtattgccacacagatggtcgtagaaaataatctggcaaacgaaggtaaagacaagaatgatcttggtagagaaaaatttctggaagaagtttggaaatggaaagattattcagaagagaaaattacatctcaaattaaacgccttggctctacagttgaatgggataaatatcgttttacttttgatgatgacttctgtgagtctgtaaataaggctttcgttgagctttacagaaatgaaaaaatctatcggggttatcgtttagttaactgggatccttcactaaaaacagctgtttctgatctagaagttatcagacaagagaaagaaggcatactttggcatattgcctaccctatttctgattcagatgaggtgttaactgtagcaacaacaagaccagagactatgtttggtgatatggctgttgcagttaatccaaaggatgatcgtttcaagaaatttataggtcaatacgttgaattaccatttgttgggcgaaagataccaattataggcgatgaatatgttgatatggaatttggtactggctgcttaaaaattacgcctggtcatgactttaatgactatgagattggtaaaaaatatgcactccatgaaatagataatgtagttcactcttcagatgagttgaatgactttgtgcctattaatatttttactgatgaagcacacactaatgatagcgttcccgaaccttttgctaatcttgatcgatttaaagtaagaaaggcagttttagaagagttaaaaaataaaaatttacttttaaaagaagagaagcatcaaataagtgtgccaaggggggaacgctccaatattgtcattgaacctaagcttagtcatcagtggtatgtgaaaactcaagagatggcaaaaaaagctaatgaagctgttaataaaggtgaggtagttttccatcctggtaattggattaaaacctactttaactggatggataatattcaagattggtgtattagtagacaaatatggtggggccatagaattcctgcatggtatgacgaagatgggaacatatacgttggctatgatgaagatgaattaaggaaccattacaaattagataatagaaagttaactcaagatgaagatgtactagatacatggttttcatcctctttatggccttttggatctttaggttggcctaaacaaaatgaattagagaagtactttcctacaagcttattagtgactggcttcgatattattttcttttgggtcgcacgtatgatgatgatgagtctagaatttacaggcaaggtaccttttaaagatgtctatgttacaggtttaattagagatgaaaatggacaaaaaatgtcaaagtccaaaggcaatatcattgacccaattgatctaatctatggcattgatcttgaagatctagtgaccaagagaacagcaaacctaatgcaggaaggtctagctgaaaaaatagaacgtaaaactcgcaaacagtttcctaatggaattgaatcatatggaaccgatgcattacgtatgacattcttctctttagcaactcatactagagatataagttttgaacttggaagactcaaaggttataggaacttttgtaataaaatctggaacgcagcacgatttattaataactatccacatgaatcaacagagtttgttgcaaaaaatgatcatgataagtggatagaaaaagaatttgatcaagtatcacagcaaattaagaaaaacattgatgaatatcgcttagattttgcggtaaatgaagtctatgaattcttttggggtaaattttgtgataaatacatagaagattgcaaaaaatccggagagacttcaaatcttcacccaatgctaaaaaagattttagtgctcatgcacccttttgcaccttttattacagaagaggtaaatgaacttgtctttaaagatggttcattaatggatagaaaataaa

SEQ ID NO: 307502 - DNA, 845 bp, Unknown
  Bacterial polypeptide expressing nucleotide sequence isolated from the Sargasso Sea
catgaaagagatgaatgatcaattatctttagagaattattcaccttttgaagtagagaaaaagtggcaagaaaaatgggaaattctaaaggcgtttagtcctaaccctgaggataatggtgagcctttttgtgttgttattccaccaccaaatgtaactggatctttgcatatgggacatgcatttaatacggctttgatagatgttgtagttcgttttcaaagacttttagggaagaatgttttgtgtttaccaggaactgatcatgcttcaatagctgttcaaactattcttgaaaaacaactaaaaagcgagggcaaaacaagcgaggacattggaagagatgaatttcttaaaagagcatggaactggaaagaaaaaagtgggggcagaatagtttctcaattaaaaaggataggatattcagttgattggactcgagaaagatttactctagatcaaaaattaaatgaggcagttattgaggcttttaatattctttataaaaagaatttaatttatagaggtgaatatttagttaattggtgtcctgaatctcaatctgccgtaagtgatctagaagtagaaatgcaagaagtaaatggtcatttatggcattttaaataccctttaatttctaaaagtggggaacagttggataagtacttggaggttgcaacaacaaggccagaaactcttttgggtgatactgctgtggcagttaatccagatgatgatagatataaagaatttattggtgtcaaagtaaaagtccctttcgttgatagagaaatacctattatcgctgattcacatgttgataaagattttggtactggatgtg

SEQ ID NO: 307503 - DNA, 2881 bp, Unknown
  Bacterial polypeptide expressing nucleotide sequence isolated from the Sargasso Sea
aatgagcgagaccccgagcgacccgacctctacgcttgccaaaagcttcgagccccacactatcgaagcccactggggccccgaatgggaaaagcgcgcctacgcggcgcccaccttcgacgagaacaaaaaagatttctcgatccagttgccgccgccgaacgtcaccggcaccctccatatgggccatgcgttcaaccagacgatcatggacggcctcacccgctatcaccgtatgctcggcgaaaacaccctgtgggtgccgggcacggaccacgcaggcatcgccacgcaaatcgtcgtcgaacgtcaactggacgcccagggcatctcgcgccacgatctcggccgcgaaaaattcaccgaacgcgtctgggaatggaagcagcaatccggctcgaccatcacgaaccaggtccgccgcctcggcgcatcgatcgactggtcgcgcgaatacttcacgatggacgacaaaatgtcggccgccgtgcgcgatgtgttcgtacgcctgtatgaacaaggcctgatctaccgcggcaaacgcctcgtgaactgggatccggtgctgctcaccgccgtctccgacctcgaagtggtcagcgaagaggaaaacggccacctctggcacatccagtatccgctcacggacggctcgggccatctgacggtcgccaccacgcgcccggaaaccatgctcggcgacaccgccgtgatggtccatccggaagacgagcgctacgcacacctgatcggcaaaacggtcacactgccgctgtccggccgcgaagtcccgatcatcgccgacgactatgtcgatcgcgagttcggcaccggcgtggtcaaggtcacgccagcgcacgatttcaacgactatcaggtcggcttgcgccacaagctgccgatgatcgaaatcctcacgctcaacgcgaagatcaacgacaacgcgccggaaaaataccggggtctggaccgtttcgaggcccgcaagcaggtggtggcagacctcgaagcgctcggcgcgctcgaatcggtcaaaccgcacaagctgatggtgccgcgcggcgaccgtacgggcgtcgtgatcgagccgatgctgacggatcaatggttcgtcgccatgagcaagccggcgccggaaggcaccttcaatccgggcaagtcgatcgccgaaaccgcgttggacgtggtgcgcaacggcgaaatcaagttcgtgccggaaaactggagcaccacctattaccagtggctcgaaaacattcaggactggtgtatctcgcgccagctctggtggggccaccagattccggcctggtacggtgagaacggcgaaatcttcgtcgctcaaaccgaagaaggcgcacgcgataaggcggccgctgccggttacacgggcccgctcaaacgcgacgacgacgtgctcgacacgtggttctcgtccgcgctcgtgccgttctcgtcgctcggctggcccgcgcagacgccggaactgaagcacttcatgccctcgtcggtgctggttaccggcttcgacatcatcttcttctgggtcgcgcgcatggtcatgatgaccacgcacttcaccggcaaggtaccgttcgacacggtctacgtgcacggtctggtgcgcgatgccgaaggccagaagatgtcgaagagcaagggcaacacgctcgatccgatcgatatcgtcgacggcatcgacctcgacgcgctggtcgccaagcgcaccaccggcctgatgaatccgaagcaggctgcgtcgatcgaaaagaaaacccgcaaggaattcccggacggcattccggctttcggcacggacgcgctgcgcttcacgatggcgtcgatggccacgctcggccgcaatgtcaacttcgacctggcgcgctgcgagggctatcgcaacttctgcaacaagctgtggaacgccacccgtttcgtgctgatgaactgcgaaggccacgattgcggtttcggcaagccggaacaatgcggcgaatgcggcccggacggccacctgaatttctcggcggccgaccgctggatcgtgtcgcgcctgcaacgcgtggaagcggaaatcgccaagggcttcgccgactatcgtttcgacaatgtggccaacgccctatacaagttcgtatgggacgaatactgtgactggtatctcgaactcgccaaggttcagatccagacgggtcagccgaaccagcagcgcgcaacccgccgcacgctgctgcgcgtgctcgagacggtgttgcgcctcgcgcatccggtgattccgttcattaccgaagcgttgtggcaaaaagtagcaccgttggccggccgttatccgcagggcaaggcagagggcgaagcgtccatcatggtgcagccctaccccattgccgaaccgtcgaagctcgacgaagatgcggagcaatgggcggccgacctgaaagcagtaatcgatgcgtgccggaatctgcgcggcgaaatgaatctgtcgccggcggtcaaggtgccgttgctcgcgactggcaatgcggagcgcctgcgcacctttgcgccgtacgctcaggcattggcccgtttgtcggaggtacagatcattgccgacgaggcaagcctggatgcgcaggcggatggcgcgccaattgctatcgtaggaaatgacaagctggtgctgaaggtggaaatcgacgtcgccgtggaacgcgagcgtctgtcgaaggaaatcgcgcggcttggcgcggaagtcgtcaaatgcaatgcaaaattgcaaaatgaaagctttgttgcaaaggcgccaccggcggtcgttgagcaggagcagaaaaggctggcagaattcgaaaccactatcggcaagctgaaagcccagttggctcgtttgccggcctga

SEQ ID NO: 307504 - DNA, 2221 bp, Unknown
  Bacterial polypeptide expressing nucleotide sequence isolated from the Sargasso Sea
tatggataaacaatacaatcctattgaagttgaggaaaaatgggtaaaaatatggtcaaaaagaaaagtttcaaataaagaatctaaagaatctttttcacaggtaatacccccgccaaatgttactggcacactccatatgggacatagtttccaatactcaattatggacttctatactagatttaatcatatgcagggcaaagactcatattggcaagttgggagtgatcatgcaggaatagcaactcaaatggttgtagagaacaatctttcaaaaaataatataacaagaaaagatctgggtagagaaaaatttataaaagaagtttggtcatggaaagactattctgaaaaaaatatcactgcacaaattaagaggctgggctgtaccgttgattgggataaatatagatttactcttgatgacagatgtaatgacgctgtaataaaagcttttgtagaattatatagaaaagacaaagtttatagaggttatagactcgtaaactgggatccttcacttaaaacagctgtttcagatcttgaagttattaggcaagaaaaagacggaataatttggcacataaagtaccctattgaagatagtcaagattttgtgattgttgctacaacaagacctgagacaatgtttggagacatggctgttgcagtaaatccagaggataaaagatataaagatttaattggtaaaaaaataatattgccttttgtaggtagaaaaataccgattattgctgataaatatgttgatatggattttggtacaggatgcctaaaaattacacccgctcatgattttaatgactatgaaattggaaaaaaatattgtttgcatgaaattaatggagaagtattcacttcaaaaaatgctgataaatttcaaccaattaacatcttcaatgaagatgcatggtccaacaaaaatgtacctaagccttttcaaaaccttgaccgttttaaagtaagaaaacttgttctcgaaaaattaaatgaaaaggaattattgttgaaagaagaaaagcatcccatcagtgttccaagaggtgaaagatctaatattgtaattgagccaagattaagtaatcagtggtatgtaaaaacttctgagatggcaaaaaaagccaatgatgccgttaataatggtgaagtaaaatttcatcctaataattggataaaaacttattttaattggatggataacattgaagattggtgcataagccgtcaaatttggtggggtcatagaatacctgcttggtatgacaatgaaaataatatatatgttggtttcgatgaaacagaagttagagaatactatgatcttgacaatagagaattatcacaagatgaggatgttcttgatacctggttttcttcaagtttatggccattctcatccttgggttggccaaatgattcagaagacttaaaaaaacattttccaacttctctattagtcactggatttgacataatatttttctgggtagcaagaatgatcatgatgagtattgaatttactaataaaatacctttcaaagatgtttatgtaacgggtttaataagagatgaaaatggtcaaaagatgtctaaatcaaagggaaatattatagatccattagatttagtatatggaatatctcaagatgaattagttgataagagaacagccaatctgatgcaagaaggattagctgaaaaaattgaaaagaaaactagaaatcaatttcctaagggcattgagtcttatggaactgatgccttaagaatggcattcttttcaatggctacgcatacaaaagatatcagttttgagtttggtagacttaaaggttttagaaatttttgtaacaaaatatggaatgctgcaaggtttattgatggttatccaattgaaaaagaaacatttgatgctgaaaatgatatagacaaatggatatatgatgaatttcaaaagaccaaggaacaaattaataaaaatataattgaatacaggctagatttcgctgttaatgagatatatgagtttttttggagtaaattttgtgatgtttatattgaagaatgtaagaatacagggaatacagccaacctaaggccgcttctcaatgaaatcttgcatcttatgcacccttttgctccttttataacagaggaaataagtgatttgttgtttaataaaagtatcattagttag

SEQ ID NO: 307505 - DNA, 2749 bp, Unknown
  Bacterial polypeptide expressing nucleotide sequence isolated from the Sargasso Sea
attggataagacatataacccgaaagaaattgaatccagaatatatgaatcctgggaagattcaggatacttctctccatcaaaatcaggcgacccatactgtattgtgattcctccaccaaatgtaacagggacattgcatatgggtcatgcatttcaagacacgatcatggatatcatcattcgttatcaacgaatgaagggaaacaatactttatggcaggtaggaacggatcatgcgggcattgctacgcaaatggttgttgagaggcaattggaaagatcaggaacttctaggcagaaactcggaagagaagcattcgagaaagaagtatggaagtggaaagagaaatctggaaacacaataacccaacaaatgaaaagattgggtgcctctactgattggacaagagagaagttcaccatggatgaaaatctcgttcaaggcgtcactagagtttttattcaactctatgaagaaggattgatctatagaggcaagagacttgtcaattgggatcctatattgcaaaccgcattgtcggatcttgaggttgtgacctcggaggaaaaaggttcattgtggcatatgaaatatccaatcgatggcttagatgactacatagtcgtcgcaacaacaaggccagaaacaatgttgggagacactgctgtagcagttcatccagatgataaacgctacaaaaatctaattggaaaactggtgaatcttcccctcacagatagaaaaattccaatcatagcagacgattatgtggatcaagaatttggaactggatgtttaaaaataacacctggtcatgatttcaatgacttcgatatcggaaaaaaacatgatcttgaaataatcagcattcttgatcaaagcgcaaagatcattcaatcagcaccaaaagaatatcaaggtttggatcgctttgatgcaagacgaaagattgttgaagatattgaatcacttggtctgatgcaagaaattgaagattacacactcacaatccccagaggagacagaagcggagcaattcttgagccactgattactaatcaatggtttctaaagatggaaccattggcagaacctgcaataacggtcgtcaaaaacggtgaattaaaatttgttcctgagaattggtctaaaacctacttcgagtggttagagaatattcaggattggtgtatctcaaggcaactgtggtggggtcatagaattccagcttggtatgataatgaagggaatgtttatgttggagaaagcgagtccgaggttcgagaaaaaaataacataaaaaactcaattgctttaacgcaggatgaagatgtccttgatacgtggttttcatctgccctttggccattctccagtcttggatggccagatgaaacatacgatctaaaaacattttatccaacaaacgtcttggtaacgggctttgatattatcttcttttgggtcgcaagaatggtgatgatgggtcttaagttcatgaaggagattcccttcaaagaaatatatatacacggcctgattaaagacaaaaatggtcaaaaaatgtcgaaatcgaaaggcaatattctcgatccaattgatttaatagacggcatcagtcttgaggaccttcttgagaaacgagttcaaggtctgatgcaacctgaaatggaaaaaagaatcattaatgatacaaaaaaagaatttcctaatggcatccctgattttggaacggatgcacttcgctttaattttgcaattcaggcgtctactggaagagatattcgtctagatcttaggagagtagaaggttatcgaaatttttgtaataaaatttggaatgcatcgcgtttcattaaaatgaataccaacgattttgagttattggatataaatgatgcgaatggacatgccattgaccaatggatccaatcaaaattcgcaggcacaattgacgaaatcgaaaggcaatttaatcaatatcgttttgatctagcagcaaccgcaatgtacgaatttgtttggaatgatttttgtgactggtatatcgaattggcaaaaacactgatcaatgatcccgagatatcagattcacaaaaggattacacaaaaaataatctaataaagatgcttgatgcaatcctaaggatgttgcatccaacgattccttttattacagaggaaatttggcaatcattgaacgaggacaataaaagaagaagtattatgaaagctgactttccttcctcaaatgactggagggtggatgatgaaattgttgcaaatacagaatggcttaagaatattgtttcctcagttcgtcagattcgatctgaaatgaatattccgccaaatgaatccatcaaaatcatcattaatgatgcctcaaatacagatagtagaagactggaatcactgggatcatttatactcaatctagcatcggttgagtcgatcacccaaaaagatacttccgatgatatcccaaagtcagcttttgcattactcaatcaaatgaaaatttatataccattggaagggttggtcgatatagaagaggaaaaagcaagattggaaaagaaactagtaaaacttaatcaagaactcaaatcggttcaagatagactgtcaaacgatacctttgttgaaaaagccccaaccgaagttgtcgaagaattaaagggaaagctcaaatcattgatgtctgatcaaaccagaatcgaagagcaaattaaattgttatga

SEQ ID NO: 307506 - DNA, 1085 bp, Unknown
  Bacterial polypeptide expressing nucleotide sequence isolated from the Sargasso Sea
actggccaagacctacgacccccaggccaccgaggcgcgctggcaacaagcctgggaagagtcaggggcgtttcaccccgacccccaggcgcctggggaacccttttcacttgtcacgccgcccccgaatgtgaccggcagcctgcacatgggccatgccttcaatacggcgctgatcgacacgatcgtccgcttccagcggatgcaaggcaaaaacgtgctgtgcctgcctggtaccgatcacgcctccattgcggtgcaaacgattctggaaaaacagctcaaggctgaaggcagcagcaaagaggagctcggccgcgaaggatttttggaacgttgctgggactggaagggtgaaagcggtgggcgcatcgtcagccaactgcgccggcttggattttcagtggattggcagagggagcgcttcaccctcgatgccggctgcagccaagctgtcatcgaagccttcgtcagcctgcatgagcaggggctgatctaccgaggcgaatacctcgtcaactggtgcccggcttccggttcggcggtgagtgatctggaagtggagatgaaagaggtggatggtcacctctggcatttccgctatcccctcagcgatggcagcggccatttggaagtcgccaccacccgccctgaaacgatgctcggcgacaccggtgtggcggtgaatcccagcgatgcgcgctacagcgctctggtgggtcaaaccctgacccttcctttggtggggcgtgagattccgatcgttgctgatgagcacgtcgaggccgagttcggcaccggttgcgtcaaggtgacgccggcgcatgaccccaacgacttcgccatcggccagcgccatggcttgccgttgatcaccgtgatggccaaggacggcagcatgaacattgaagccggatcttttgctggcttggatcgctttgcagcccgcaaagccgtcgttgcggcgatggatgagcagggtcttctggtcaaggtggagccctaccgccacagcgttccctattccgatcggggcaaggtgccggttgagcctttgctttctacccagtggtttgtcaaagccg

SEQ ID NO: 307507 - DNA, 2629 bp, Unknown
  Bacterial polypeptide expressing nucleotide sequence isolated from the Sargasso Sea
catgaatagcgataaatatatacattctgaagtagaagataatatttatacttattgggaaaaaaatgacttattcaaacctaagaaaaattcaaaaaaattttcaatagttatacctccaccaaatgttacaggaagtttacacatgggtcatgccctgaataattcaattcaagatctactagttcgttattatagaatgaataattatgaaaccttgtggcaacctggaacggatcatgcaggtattgccacccaagctcttgtcgaaaaaaaacttgaatctgaaaaccttaataaaaatgatctaggcagagaaaaatttgttgaaaaagtatgggaatggaaaaatcaatatggtgatataataattaatcaactaaagaaacttggatgctcttgtgattggtctagaaacgcattcacaatggatgaaaatttatccaaatctgtgattaaagtttttgttgaattacataaaaaaaaattaatttataaagcggaaaaactggttaattgggatactgttctaaaaacagctatatccgatctagaagttgaccaaagagaaatgaactctaagatttattatataagatatcctatagataaatcagatcaatttattacaattgcaaccactagacccgaaaccatgcttggagatacagctatagccgttaatccaaaggacaaaagatataaaaattacgttggtaaaactgtcactatcccgatagttggtagaaacatcaaagtcataaaagataattatgctgatcctgaacagggaactggtgcattaaaaattaccccagcacatgattttaatgactatgatgtgggtcaaagaaataagttagagattataaatatttttacagaagatggtaaaataaataaaaatgctcctgattcatatgttggtttagacagatttgaagcacgtaaaaaaatattaaacgaattgaaagaaaaaaatttctttgttaaagaagaaaatattaaaaataaagtaccttacggcgataggtcaaattcagttattgaaccttttttaactgaacaatggtttgtaaatgcaaaaaaattatctgttaaagctaaacaaatagttagatctaaaaaaacaaatttctttccagaaaattggtcaaaaacttattttcaatggatgaacaatattgaaccttggtgtatatctagacaattatggtggggtcatcaaataccagcttggtatgggcctgataaaaaaatatttgtagcaacaaatgaagtagaagcaaaaaaacatgcaaaaaaattttacaaaaagaacgtaagactcaacagagatccagatgttttggatacatggttttcatctggtttatggccatttgcaacattaggttggcctgataaaaaagattttgttaaaaaattttatcccacaacagttctagttacaggttttgatattattttcttttgggtagcacgaatgatgatgtttggaatggaatttttaaataaagaaccatttaaagatatttatgttcacgctttagttagagatgaaaaaggacagaaaatgtctaagtcaaaaggaaatgtaattgatccgttagatataatcaaaaaatatagtgcagatgctttaagatttactcttctttcaatggcatcacccggaacagatgtgaagctttctgaagatagagttaaaggttatagaaactttttaaataaattatggaatgctaataattttttaattaccaatgaatgtgattttaataaaactgataaagctcctaaaaccacgttaaacattaataaatggatttattcagaactaattcaaacaaaagataaaatagaaaaaaatcttaaagattatcgatttgatgaggcagctaaaaatgcctatcagtttgcttggcactcttattgtgattggtatattgagctttcaaaaacaattttgttttctgatgatcaaaaagctaaaaaagaggtaaaagaagtatctgcttatatatttaaacaaatactcgttattcttcatccatttattccatttgttacagaaaaaatttggttaaaaaataaatttgataaatcaaacaaatatttccttatgcatgctaattggccatctggaaaatttaaaaaagatcaatctatgaaagatgttgaaaaaattatcaatgtcatttcagaattaagatcttttaaaaatgaattaaatgtaagccctggttcatttattgatatttcaattaataaaattgcgaaaaaaaataaaacattaatgaccaataatgaaatcattcttaaaaagcttggtcgtatcaataatttctttgataaagaccaaaaaagaccctcagctaccttagttatatctggtgacatatttaagatatattttgatgaaaatgttgatttaaatctaataaaagaaaatttacttaaaagacaaaacaaatatcaagaagaaatgaacaagatatctcagcgattatccaataaaggatttactgatagagctccaaaaaatattgttgaacaagaaaaaactaactatagtaatttaaaagatgatatcaaaaaaatatcattaaccattgaaagtttataa

SEQ ID NO: 307508 - DNA, 2644 bp, Unknown
  Bacterial polypeptide expressing nucleotide sequence isolated from the Sargasso Sea
aatgcttaacaagagttatgatcctaaagaagcggaagctaggctatataattattgggaaactgagggttattttaaatgtggcttaacaaataaccagcctttttcaatagtaattccaccacccaatgtcactggtagtttacatatggggcatgcattaaataatacacttcaagatataattgttagatacaaaagaatgctaggtgaggatgttttatggcaaactggaactgatcatgcaggaattgctactcaaatggttgttgaaagaaagcttgattctgaaaataaaccttcaaggattgaacttgggaggaaaaaatttattgatgaaatctggaaatggaaagaagaatctggaagcataattactaatcaactacgaaggctaggcgcatcatgtgattggagtagagagcgctttactatggatgaaggtcttagtcttgcagtcaataaagtatttgtagatttatataatgaaggcttaatctataaagataaaaggcttgttaactgggatccacagttaagaacagctatatctgacttagaagttgttcaaaaagaagttgatggttgtctatggtacataaattacccaatcaaaggctctaaggaatcaattacaattgcaacaacaagaccagaaacaatgtttggtgatacagcaatagctgttcatccaagtgataatagatatgcagatctgattggaaaagatgttattattcctattatcggtagatctataaaaatcataactgatgaatatgctgatcccgagcaaggtagtggggctgtaaaaattacacctgcacatgattttaatgatttcgaagttggaaaaagaaataatttagaaatgctgtctatcttggatatagatggtaaattaaatgaaaatgtagataaagaatggcaaggtcttgatagatttgaagcgcgatcaaaattattgaaaatgctctctaaagaaggctatttagaaaaagaagagaaatataataattctgttccccatggtgatagatctgatgttgttatcgaaccttatttgacagagcaatggtatgtagatgcaaaaacattagctaaaccagctctagattctgtgaaatcaggtgatatgaaatttattccatctaattggtcaaaaacttattatgaatggttagaaaatattcaaccttggtgtatttctcgtcagttatggtggggacacagaatacctgcatggtacacaaaagatggaaaaataattgttgctcataatgagaaagaggctttttcgattgcaaaaaaagaatttggtaaagatatagaaatttatcaagatgaggatgttcttgatacttggttttcttctgcgctgtggcctttttcaactttaggttggccagaagaaactgtggaaattgaaaaatattatcctacaaatctgcttgtaacagggtttgatataatatttttttgggttgcccgcatgatgatgatggggattcattttatgggaaaaagacctttttctgaagtgtatatccatgctttagtaagagatgaaaagggtcaaaaaatgtcgaaatcaaaaggcaatattgtcgaccccttagatcttatagataagtatggagctgactcacttcgctttactcttactgcaatggcagcacaaggaagagatgtaaagttatctgaatctagagttcagggttacagaaattttggtactaaaatttggaatgcatcaagattttgtgaaatgaatgatattaataatttcaacagttttgataaaaattctcttgagtatccactaaatatctggattttaaatgaatttgttgaaatgcaatctcaattagaaaaaaatttaacagaataccgatttaatgatgctgcaaatattatataccaatttatttggggaacattttgtgattggtatatagagttaattaagccccatctttcagaagaagatgacaaatacgccaatgaaattaaagaaacatgttcatttatattggactcaatactaatctcattacatccatttatgccattcattactgaagaaatatggcaaaatcttaagaagagagataatccattgattattcaaaaatggagagagatatccttagcagatgatcataataatttaagtgatgaaataaatgacttaatagaaataatttcaaatatcagatcaataagagttgaattaaatataaaaccaaaagaaaagctcgcaatagaagttataaataactcagaagcattaaaaataaagaatttggagttttatttatctaaaattgcgaatatttcaaatataactgaagtttcagatttttctgataaatcagctaaatttaatgtaaataattctcgattctctttacttattcctactagtattgatcttacagctgagctcagcagggtaattaaagaagaggagaagcttgaaaaagaaataaattcaatatctaaccgccttaaaaataaggattttattgctaaagcaccgaaaaaagttgttgaagaaaataaaattaaaatagaagatatgatgcagaataaagaaagactatcatcgtcaaaggagcttattaagaagcttattaaataa

SEQ ID NO: 307509 - DNA, 2233 bp, Unknown
  Bacterial polypeptide expressing nucleotide sequence isolated from the Sargasso Sea
atgagtactgataaatatatacattctgatgttgaaaataaaatatattcttattgggaaaaaaactctctttttaaaccaatagaaaattcaaaaaagttttcaatagttatacctccaccaaatgttacaggcagtttacatatgggacatgctttaaataattcaattcaagatttattggttagatatcatcgtatgaataattatgaaactttgtggcaacctggaacagatcatgccggtattgcaacccaagctttggttgaaaagaaacttgcatctgaaaaaattgataaaaatgaaataggtagagaaaaatttattgaaaaagtctgggaatggaaagagcagtatggtgatataattataaatcagctaaagaaattaggttgttcttgtgattggtctagaaatgcttttactatggatgaaaatttatctaaatcagttattaaggtttttgttgatctacataaaaaaaatttaatttataaagctaaaaaattagttaattgggatactgttttaaaaacagcgatttctgatctcgaagtagatcaaagagaagttaattctaaaatttattacattcgatatccaatcaatgggacagatgaatttattacgattgcaacaacaagacctgaaacaatgttaggagatacaggaattgctgttaatccaaaagatgatcgttttaaatcctttgttggtaaaacagcaacgatacctatagttggcagaaaaattaatattatagaagatgattatgcagatcctgaacaaggaacaggtgctttaaaaataactccagcacatgattttaatgactacgatgttgggcaaagaaataatttagaaattattaatatttttacagaatctggaaaaattaatgataatgctccaataggctatgttggtcttgatagatttgaagctagaaaaaaaatcttaaaagaacttaaagaaaaagatttttttgtaaaagaagaaaatattaagaataaagttccttatggagatagatcaaattctattatagaaccatttttaaccgagcaatggtttgctgatgctgaaaaattatcaattaaagcaaaagaagttgttaatttaaaaaaaactaatttctttcctgaaaattggtcaaaaacatattttcaatggatgaataatatagaaccttggtgcatctctagacaattatggtggggtcatcaaattccagcatggtacggtcctgacaaaaaaatattcgtagctattaatgaagatgaagccaaagaacatgcaaaaaaacattataataaagatgttgatttagttcgtgatcctgatgtacttgatacatggttttcatcaggactttgggctttcgctacgttgggatggcctgataataaaaaatatgtagataaattttatcctacttcagtattggtaactggatttgatattatatttttctgggttgctcgaatgattatgtttggtactgaatttttaaacaaagaaccatttaaagatatttatgttcacgcattagttagagatgaaaagggacaaaaaatgtctaaatctaaaggtaatgtaatagatccattagatttaattgaaaaatatagcgctgatgcattaagatttaccttactctcaatggcatctccagggactgacgtaaagctttctgaagatagagttaaaggttatagaaattttttaaataaactatggaatgcaaataattttttaataaccaatgaatgtgattttataaacattgataaagttcctagtttaaatgttaatattaataagtggatttattctgagttaatagaagcaaaaaacaatatagagaaaaatttaaaagattatagatttgatgaagcagctaaaaatgcctatcaatttgcatggcactcttattgtgattggtacttagaattgtctaaaacaatacttttttccgataatgaagaatctaaaattgaggtaaaaaaggtttcaagctatgtttttaagcaaatacttattttattacatccctttattccttttgtaacagaagaaatttggcttaagaataagtttgataaatctggtaaaaatttcttaatgctagcaaattggccaactggtaaaattaataaagattcaaatacggaacaagttgaaaaaataattaatattatatctgaaattagatctttcaaaaacgaactta

SEQ ID NO: 307510 - DNA, 1831 bp, Unknown
  Bacterial polypeptide expressing nucleotide sequence isolated from the Sargasso Sea
tgcattaaaaataaccccagcgcatgattttaatgattatgatgttggtcaaagaaataatcttgaaataataaatatttttactgaagctggtaaaataaatgaaaatgctccagaaccttatgtaggtcttgataggtttgaagctagaaaaagaattttaaaagaacttaaagaaaaggatttttttgtaaaagaagaaaatataaaaaataaagttccatatggagatagatctaattcgataattgaaccttttttaacagaacaatggtttgctgatgctggtaaattatctgttaaagctaaagaagttgttaattcaaaaaagacaaatttctttcctgagaattggtcaaaaacttattttcaatggatggataatattgagccatggtgtatttcaagacaactttggtggggacatcaaatacccgcttggtatggtcctgatgaaaaaatttttgttgctgaaaatgaagatgatgcaaaacaacaagctaagaaacattatggtaaagatgttgaattaaatcgtgatccagatgttttagatacttggttctcatctggcttatggccttttgctacacttggttggccggatgataataaatttgttgataaattttacccgacgtcagttttggttacaggttttgatattatatttttttgggtagctagaatgattatgttcggcacagagtttttaaacaaagaaccttttaaagatatttatgttcatgcattagtaagagatgagaaaggacaaaagatgtctaaatctaaaggaaacgtaattgatcctttagatttaattgaaaaatatagtgcagatgcgcttagatttactttgttatcaatggcttcaccaggcacagatgttaagctttctgaagatagagttaaaggttatagaaattttttaaataaattatggaatgcaaataattttttaatcactaatgaatgtgattttaatgatatagatcaagttccaagtttgaatgtaaatataaacaaatggatatattctgaacttgttgaaactaaaaataagatagaaaaaaaccttgatgattatagatttgacgaagcagctaaaaatgtttatcaatttacatggcattcatattgtgattggtatttagaattatctaaaacaatactattttcagaagatgataaagctaaagaggaggttaaaaaagtatcatcttttgtattcaaacaaattttgattttactacatccttttattccttttgttactgaagaaatttggcttaaaaacaaatttgataatgacggtagtgattatttgatgctaaaaaattggttatctggtgaaataaataaggacagtagcactgaacaggttgaaaatatcataaacatcatttcagagattagatcattcaaaaatgagctaaatgtaagcccaggctcatttattgatttatcaataagtaatattaataaaaatcaaaaagacttcattaatacgaatgaaattattttaaaaaaactaggaagaataaaaagcatattagataaggatttagataaaccggctgcgacaatggttgtttctggtaatttgtttaagatttattttgataaagatgttgatttaaaattaattaaagaaaatttaacaaataaacaaagtagattagagcaagagatgaataaaatatctcaaagattggagaataagagttttgttgaccgtgctccaaaagagattgttgaacaagaaaaaaataattataataatttaaagaatgatattgagaaaatatcagtaacaataaagggtatataa

SEQ ID NO: 307511 - DNA, 2632 bp, Unknown
  Bacterial polypeptide expressing nucleotide sequence isolated from the Sargasso Sea
catgtctacatctaaactagataaagtatataatccagtaaacatcgaagaaaaatggtaccaatattggttagagaataattatttcaaatctaagccagatcctaataaagaaccttatacaattgtaatccctcctccaaatgttaccggcatgcttactatgggtcatgttttgaacaatactatacaggatattttaattagaaaagcaagaatggaaggtagagaggcttgttggattcccgggactgatcatgcatctattgcaacagaagctaaagtagtacaaatgttacaagataaagggataaaaaaagaatctttatcaagagatgaatttttaaagtactcatgggaatggaaagaaaaatatggaggtataataatacaacaacttaaaagactgggttgctcttgtgattgggacagggaaagatttactatggatgatgattatactaattctgtgctagaagcttttgtagttttatataataaaggtctgatttataaaggctttcgtttagtgaattggtgtccagtttcaaagtcagcaattagtgatgaagaagtaattcatcaagaagtaaacggccatttatggcattttagatatccaataaaaaactctgatgaagtattaattgttgcaacaacccgcccagaaacaatgctaggagatacagctgttgcggtgcatccaaaagataaaagatttaaacatttgattggtaagacagttcttttaccattagcaaatcgtgagataccaattattggagataattttgttgatatggaatttggatctggatgtgttaaggtaactcctgcgcatgatcctaatgattttgacattggcaaaaagcatgatcttgagtttataaatattatgaatgaagatgcttcactgaattcaaatgttccagaatcatatagaaatttatctcgtgactctgcgagagagaaaattgttaatgatttaaaagcaaatgatcaattagaaaaaattgaaaagtataatcacaaagttggattttctgaacgcggcaacgttccaattgaatattatatgtcaagtcaatggtttttaaaaatgaatgaattatcaaagcctgcaatagaagctgtaaataatggaagtataaaatttcatcctgagcattgggttaaaacatataatcattggatgaataatattaatgattggtgtataagtcgccaattgtggtggggtcatcgtatacctgtatggtatcataaagaagataaagaaaaagttcatgtctctgttggtgggcctaatgatatagagaattggactcaagatgaggatgttttggatacttgggcttcttcatggctatggccttttgcagttcatgaatggccaaaaaataatcatgatttaaaatattactatcccactgcatctctagttactggtcctgatattatattcttttgggttgcaagaatgattatgtctggttatgaatttttggatgatttaccatttaaggatgtctactttaccagtattttaagagatgaaacgggtaaaaaatttagtaaatcattaggcaactcaccggatccttttaccttatttgatgaatatggaactgacgcagttcgatttggaattatgttaatggcccctcaaggattggatgttttattttcatccaaaggtcttgaggtcggtagaaattttgtaaacaaattatggaatgcttctagatttatattaatgaatattgatgatgatatgtcagatgatttctcagaaaataatttaaagcttccagaattatggattttacaccgtctgcaatttgcaatagatagaataaataaatatttaaataattttaattttaatgaagcagctaaagtcatctatgaatttacatggaatgattattgtgactggtatattgaaatttcaaaaacaaggtttaaaaaagataacgaatcgtatacgaacacggttaaaagtgtttctaaatacgtactgaagaatataattatactacttcatccatattctccatttgtaactgaagagatttggtcaaaattaaaaaaacataatgactctgaccttatagttaaagattggcctaaaatagaaaataaatggattaataaatcattagaagatgaaatggagatattaaaaagtttaatttcatctattagaacaatccgttctcaaatgaatgttccaccaaataaactatgtaaaatgattgttcaatgtaatagtgaacaaaaatcaatcttaaattctcatagtctaataattaaatcattagctaaaatagaaactatagaaatgacagaagatagtaagaaaccatctcaatctgcgactgccattgtagataacatggaaatttttataccattaaaagggattattgattttgatattgagaaaaaacgtttgcaaaaacgtattaaggaattgaaaaatcatttaattggtgctaatagtaaattaaaaaataaagaatttttaaaacgggccccaaagaatattgtcgatcgtgaaaaagaaaaaaaagaggatatggttttagagctagaaaaaatcacaaaaaactatgatatgattaaatga

SEQ ID NO: 307512 - DNA, 2182 bp, Unknown
  Bacterial polypeptide expressing nucleotide sequence isolated from the Sargasso Sea
aactgatgagtttgtgactgttgcaacaacaagacctgaaacgctgcttggagatatggcactagcagtaaatccctctgataagagattttcgcatctcattggtaagaaagcttcattgccattatgcaataggcttattcccattgttgcagatagttatgtagacccagaatttggaaccggagtcgtaaaaatcacgcctggtcatgattttaacgattatgatttgggaaaaagacatggtcttcacatggacgaggatatgcagtgtcatacaggaactgaagctgactttatgcctatttctattcttaataaaacagttgaagttattggagttgctccgaaaaaattccatggtatggatagattcgaagctcgcaaagtaatacttgaggatttaaaaaaagataagtttcttgtgtctgaaaaagaatacgagagtactttgccctatggagataggtcagatcaaattcttgaacccctcctaacagatcaatggtatgtagatgcaaaaacattagcaaaacctgccattgaagctgtcaagagaggagagatacaatttgtgccaactaattgggaaaaaacttattttcaatggatgaataatattcaagattggtgcgtcagcagacaattatggtggggacataggataccaatttggtacgatgaatctaataaaccacatgcaggcttttctgagaaagatgtgagagaaaggcataatcttaaaggcaagctgcgccaagaagaggatgtcttagatacttggttctcttctagtctctggacatttgcaacattggggtggcctgaaaaaaataaaaaattaagcctattccatccaacaacaacgctggtaactggttttgatattatatttttttgggtggcaagaatgatcatgatgaccaagcacttcatgaaagaagttccatttaaagaagtctatataaccggtcttattaaagatgaaaacggacagaaaatgtctaaatcaaaaggcaatatccttgatccaattgatcttatagatggagtttctttagaggaacttctgactaaaagaactgaggggatgatgcagccccaactcaaagaaaaaattatcaaacaaacaaaaaatcagtttcctgaaggcatcgaaagttatggcacggatgcattacgatacaccttttactctcttgcctctcctggtagagatattaattttgatataggcagaattaagggctatagaaacttttgtaataaaatttggaacgctttcagatttattgaaatgcaaattgccagtcatggctatcaatctagtgaaggctcaaaagatattttttctgactggatggcatcaaaaattaatcaaactgctgaaaattgccaaacgcatataaaacaatatcggtttgatttggcctcagcagaaatctatgaattagtatggtcaaatttttgtgactggtatatagaattttgcaaagttgccattcaaaaatctaataatgttgaccaaacaaatagtttgataaaaaatttaatattaaacttctacagtatccttgaattgttgcatcctttcatgccatttatcactgaggagctttcttctaagttagctgatttaggaaagttagataaatcaggatttttagttgaaggtggcttttctcatccgcaagcatgcaatcaaaaaagtgaaatacaattagataagatcataaatattatttctgccctcagagtcataagggcagaaaatcaaaacattaaaaatgaaacgctaaatctcattatttcaaatgatctaaactctgacacacaatcaattattattgaaaatgaattagtgatctcgggtattgcaaaattgggcaagattgaatttactgacaagatcccagctgaatcaattgaaaaaactatggatggatacaaaataatcattccattggagggattaattgatccggaagaagaaaaggcaagactgctaaaagagctcgctgatgtagagaatgatattaaaattgttaacgctaaactagctaataaacaatttgtcgataaagctccagcagaggttgtaaaaaaagaaaaatcaaaaattttagatgctgaaaataaaaaaacaatgttagaaaaaagtattgctaagcttcagccttag

SEQ ID NO: 307513 - DNA, 955 bp, Unknown
  Bacterial polypeptide expressing nucleotide sequence isolated from the Sargasso Sea
atgcttgaagattcatatgagccattaagcattgaacaaaaatggcaatcagagtgggaattaaaaaatcagttcaaaccagttgaatcagataagcagttttcgattgtaataccaccaccgaacgtcactggttcattacatatgggtcatgccttagagcattccatcattgatgtaattgttcgaataaaaagacttcagggatttgaaacattgtgggttcctggaaccgatcatgcagggataattacacaactacttgtcgaaaatgagttattagagaagggtctatcgaaagaagatgttggtcgtgagaatttcatttcaaaagtatgggagtggaaagaaaaatcaggtgaaaatatatcaggacagatgaaaaaacttggtatgagttgtgattggtcaagggagagattcacgatggatgaaggtttatcagcagctgttagacaagtttttgtaaccctctatgactctgggtttatttataaaggttcaagaatggttaattgggatacaaaactaatgtctgcagtctcagaccttgaggtcaatcttgaggaacaaacaggcaaactctggagtgttaaatataaatgtggtgatgaatttatcacaatcgctactactagaccagagactattcttgctgatacagccgttgcagttaaccctgatgatgaaagatataagagctttattggaaaaacagcaattatcccaatcgtaaatagagaggttccgattatcgctgatgagtatgtagataaagaatttggttctggatgtgtaaagataacacctgcacatgattttaatgattatgagatcggcttgaaacatgatctagaagtcatatcttgcatgaagttagatggaacaatgtctgacgatgattttatgccagaaaattataaaaatttagatagattgaagcaagagaccagat

SEQ ID NO: 307514 - DNA, 2248 bp, Unknown
  Bacterial polypeptide expressing nucleotide sequence isolated from the Sargasso Sea
gttaataatacgttacaggatattttaattaggttttatcgaatgagaggacgagatgtattatggcaaccaggaacagatcatgcgggaatagcaacagaaatggtggtggaacgagaattgaggaagcacaaaataaaaaaagctaatctatctcgtgaagaatttatagaacatgtctggaaatggaaggactcatcaggaaataaaattatcaatcaactaaaaagacttggctgctcatgtgattggtccagagaaagatttacactggacgaaggcctttctaaatcagtacgtcatgtgttcgtaaaactctataaagatggcctagtttataaagataagaggcttagtaactgggatccgaaattaaaaacaacaatctccgacttagaggttattcagaaagaggtaacaggtactctttggtatattgattataaaattgaaaatggagatagccgcataaccattgctaccacgagaccagaaacaatgcttggtgatactgcaatagctgttcatccagaagataaaagatacacaggtatggtcggaaagtttgcgatacttccaatagttgaaaaaagaattccaattgttgctgatgaatacgtaaaaatggatcaaggttctggtgcagtaaaaattactcctgctcatgattttaatgactatgaattaggaaaaagacataatctaaaaataataaacatttttactgaaaatgctgaacttaacgaaaactgtcctaaagaatatcaaggccttgatcgttattctgcacgagaaaaaataattagtgaacttaaagaaaaaaaaatattaagcaaagaagaagaaaatttacatacagtaccatacggtgaccggtcaggagaagtaatagagcctctgctaactgatcaatggtttgttgatgcaaaaaaattatctatcgaggcaattaataatgtaaaaaatggcaacacaaaatttatacctaacaattgggacaaagtttattttgattggatggaaaatattcaaccttggtgtgtctcgagacaactgatatggggccatcaaattcccgcttggtacggtcctgatggaaaaatttttgtggaagaaacaactgaagaagcaaatctctctgcaaataaatactatggaaaagacgtagaacttgttcaagaagatgatgtgttagacacctggttctcatcatcgctctggccattttcaacactaggttggcctgaggaaacagctgaattagcaaaatactatccaacctcagctcttgtcactggttttgatattatatttttttgggttgctagaatgatgatgatgggtctttatttcactaaaaaagttccttttacagaggtttatgtgcatgcattagtaagagatgagaagggtcagaaaatgtcaaaatcaaaaggcaacgtaatcgatccacttgttttgatggatgaatttggtgcggatgcattacgcatggcattgtgttcgatggctgcacaaggtagagatattaaattatcaaaacaaagaattgaaggatataaaaatttcattaacaaaatttggaatgcagtaaaactatgtgagttaaacaattgcttctatcaagaaatagattctaaaaagacgaaaaatatttttaacaaatggatactgtctgaatatgaaaattgtcgaaacaaaactcaacttgctttagaacattatagatttaatgaggcagcaaatgaactttataaatttacatggaacattttttgtgattggtatttagaattttcgaaagtgatttacttatctaaaaatgatacagacattaaagagacgagaaatataacttcatatgtattatcaaacgtcataataatgtttcacccaattatgcctttctttacagaacatttatggcatcaggcatcaaatattttaaaaaacgacgtaatgaaaataaataaatcatcatggccaaaaagtataagcgtagatgaaaaggataatgaaaaaattaatacattacttgagcttatttcctcaataaggtccaccagatctgaaatgaatgtcccagcaaatgcggtagtagatataaactactctaaaattagcagtgaattaggaagtattttcgatcaacataaagaaacaattcaaagtttaacaaggtctaagtctataactgaaaaaaatttttcaaaggatgaaggcatggttcaagttatattaacgacgg

SEQ ID NO: 307515 - DNA, 792 bp, Unknown
  Bacterial polypeptide expressing nucleotide sequence isolated from the Sargasso Sea
aatgagttcagaaaaatacattcataaaaacgtagaaaataagatttatgcttattgggaaaaaaataatctttttaagcccaaaaaaaataagaaaaaattttcaattgtaattccaccacctaatgtgactggtagtttgcatatgggtcacgcattaaacaattcaattcaagactttcttacaagatatcaccgaatgaataattatgaaactttatggcaaccaggtacagatcacgctggaattgcaacacaagctttagtcgaaaggaaacttgaaagtgaaaatatttataaacaatctattggcagagaggcttttattaaaaaagtctgggattggaaaaaggaatatggcgatattattattaatcagcttaaaaaacttggatgttcatgtgattggtcaaggaatgccttcacgatggataaaaatctatctgcatctgtcatcaaagttttcatagatctatataataaaggtcttatttataaatctaaaaaattagttaactgggatacagtattaaaaacagctatatctgacctagaagttgatcaaagagaggtaaattcaaaactttattatataaattaccaaattgaaaatagttctgaatttataactattgcaacaacaagaccagaaacgatgctaggcgatacagctgttgctgttaatccaaaagatgaaaggtacacaaatttagtcggtaaaaatgtagttttacccataacaggtagaaaaataaaaattatccaagacgattatgctgatccagatcaagg

SEQ ID NO: 307516 - DNA, 1477 bp, Unknown
  Bacterial polypeptide expressing nucleotide sequence isolated from the Sargasso Sea
ttaactgaacaatggtttgttgatgctaaaactttagccattaaagcaaaagaagtagtcaataatggtaaaactaaattctttcctgaaaattggtcaaaaacatattttcaatggatgaataatattgagccttggtgtatttctcgtcaattgtggtggggacatcaaattccagcttggtacggacctgatggaaaaatatttgtagctgaaaatgaagatgaatgtaaaaagcaggcaaaagaattctattcaaaagatgtggaattaaaaagagatgaagatgttttagacacttggttctcttcaggtctatggccatttgctactttaggttggcctgaaaaaacaccagaagttgaaaaattttatccaacaagtgttcttgttactggttttgacatcatatttttctgggtcgctagaatgattatgatgggaactgagtttttaaagaaagaaccttttaaaaatatatatgttcatgctttagttagagatgaaaagggtcaaaaaatgtctaaatcaaagggcaatgtaattgatcctttagaacttatcgaaaaatatagtgcagacgctttaagatttaccctattatcaatggcatctccaggacgagatgtaaaattatctgaagacagggttaaaggttacagaaatttcttaaataaaatttggaatgctaataattttttatcacaaaataagtgtgatttcagtgatgtaaaaaaacctgaaaatataaacttaacaattaataagtggatactatctgagcttgtaaaagttaaaaacgacacggaaaatagtttaaaaaattataggtttgatgaagcatctaagactatttatcaatttgtatggcattcattttgtgattggtatttagagctatctaaaactgtatttaattctaataatgaggaagatattaaggagttaagacaaacttcatcttatatatttagagaaattttaataatacttcatccatttattccatttgttacagaggagatttggttgaataacaagttagataaaaatggaggcgaatttttaatgcatgctaattggttagaaggtgattatcatgaaaaaaaatcttatgatgaaattaataatattattaattttattacatccataagatcatttaaaaatgaattaaatatcagtccagggtcatttattgaaatttcaacagcaaatacaaacaaagaatataaaaactttttatcagctaatgaaaatatattaaaaaaaaatggaagaattaaaaactttcatgaaaatgatttaaaaaaatcatccgcaagtattgttattaacggagagctattcaaactatattttgaccaagatgttgatctgaatatgattaaaacaaccctagagaagaaaattacaaaaattaatgaagaaatgaaaaaaatagatacaagattgtcaaataaatcctttatagacc

SEQ ID NO: 307517 - DNA, 1906 bp, Unknown
  Bacterial polypeptide expressing nucleotide sequence isolated from the Sargasso Sea
atggataaaagatatgagccacttattattgaagaaaagtggtcagagctttgggccaaaaataatttaggtaaaaataactcttcgcaaactttttcgcaggttataccacctccgaatgtaactggaactcttcatatggggcatagcttccaatattcaataatggatttctatgccagatacaatcacttaaatgatgtaaatactcattggcagatgggtacagatcatgcaggaattgcaacgcaaatggttgttgaaaacaatctatccagagaaaatattgataaaaatgatttgggtagagaggattttgttaaaaaagtttgggagtggaaagaattttcagaaaataaaattactggacaaattaaaaggttaggtaattcagttgattggagtaattacaggtttactttagatgaaggttttaatgaagctgttctaaaagcttttgttgagctttataggaaagagaaaatttatcgaggctataggttagtaaactgggatccatctttaaaaactgcggtttcagatctggaggttgtaagacaagaaaaaagaggtcttatttggtatttaaagtatccaattataggttcagatgattttgtaacagttgcaacaacacgtccggaaactatgtttggagatatggcaattgcagttaatcctgaagataaaagatataaagatatcattggaaaaaaagttgagcttccatttgtaaagagaaaaatcccaataattggcgatgactatgtggataaagagtttgggacaggttgccttaagattactcctgggcatgactttaatgactatgaaattggtaaaaaatactgccttcattgtgtagataatgaagttcatatatctgatgatattgaagattttgaaccacttaatatttttactgatgaagcacatagtaatgataacgtcccttctcctttcaaaaatttagacagattcaaagtaagaaagcttgttcttgaagaaattaaaaagctagatttatttgtaaaagaggaaccgcatgaaattagtgttccccgaggagagcgttcaaatatagttatagagcccaaactaagttatcagtggtatgtaaaaacaaaggacatggcttataaggcaaacaaagctgtaaaaaatggagaaattaaatttcatcctgaaaactggattaaaacatattttaactggatgaataatattgaagattggtgtattagcagacaaatctggtgggggcatagaattcctgcttggtatgacaataatggaaatgtttatgtggggtattctgaaaatgaagtacgaacttattattcactcgataacagatcgctgaggcaagatgatgatgttttagatacttggttttcctctagcctttggccttttgcatcaatgggatggccaaatgaatcaaagaatctaaaaacttttttcccaacaaaccttctagttacaggttttgacattattttcttctgggttgcaagaatgatcatgatgagtattgaatttacaggaaagattccatttaaagatatctatgttactggccttataagagatgaaaatggacaaaaaatgtcaaagtccaaaggcaatattattgatcctattgacttaatatatgggatttctcttgaaaatcttctcgaaaaaagaacatcaaatcttatgcaagaaggattagcagaaaagattactagaaaaaccaaaaaacaatttccaaatggcattgagtcatatgggactgatgctttgaggatgacattttattctattgcaactaatgctaaagacataagttttgaaattgggagattaaaaggatttagaaatttttgcaccacaaatgtggaatgctgcaagatttattaat

SEQ ID NO: 307518 - DNA, 1225 bp, Unknown
  Bacterial polypeptide expressing nucleotide sequence isolated from the Sargasso Sea
gacttcgagccaattaatatttttaatcaagatgcgtggacaaataataatgtacctgaattatttgaaaatttagatagatttaaagttagaaaattagtcataaaagaattaactgagttaaaactccttgaaaaggaagaggaatatgacgtgagcatacccagaggtgagcgttcaaatattgtaattgagcccagattgagtcatcaatggtatttaaagacttctgaaatggcagagaaagctaatatggaagttaaaaaaggaaacattaaatttcatccaaataactggataaagacctattttaattggatggataatattgaggattggtgtataagtagacaaatttggtggggtcacagaattccagcttggtacgatgataatggaaatatttacgttggtgaaaatgaacaggatgtaagaaattattacaaacttgatgcaatagatcttaagcaagatgaggatgttttagatacatggttctcatcaagtctctggccattcggatctcttggttggccagagaaaacagaagattttaaaagtttctttccaacttctcttttagtgacaggttttgacattatatttttctgggtagcaagaatgataatgatgagtattgaatttactggaaaaatacctttcaaagatgtgtatgttactggtcttatcagagatgaaaatggtcaaaaaatgtcaaaatctaaaggaaatattattgatccaattgacttaatatatggtatttcaattgaagatcttgttgaaaaaagaacatcaaatttgatgcaggaaggtatcgctgaaaaaattgaaaggaagacaagaaaacaatttcctaacggaatagaatcatatggcacagatgcactaagaatgacattttattctttggctactcatacaaaagatattagttttgaatttggaagactaaaaggatttagaaatttttgtaccaaaatgtggaatgctgcaagatttattgatggatatccaaatgaaaaagataaatttaaagcagaaaacgatcatgataaatggatatatgacgagtttagtaaagccaaaaaacaaataaataaaaatatttccgattacagactggattttgctgttaatgaaatatatgaattcttttggaataagttttgtgatgtttatatcgaacaatgtaagaaaaaagtggagaaacatcgaatttaag

SEQ ID NO: 307519 - DNA, 682 bp, Unknown
  Bacterial polypeptide expressing nucleotide sequence isolated from the Sargasso Sea
atgaaaaaaaattatgaacctaagggtatagaaaaaagaatctacgaaaattgggaatcttcaggttactttatcgctagtcctgatgaaaaaaagaaaccattttgcataatgattccccctccaaatgtaacaggaactttgcatatgggtcatgggtttcaaaatactcttatggatgccttgataaggcataaaagaatgtctggttttgatgttttatggcaagttggtgttgaccacgcaggcatagcaactcaaatggtagtagaacgccaactagagtcagaaggaaaagataaagaatccataggaagagatgcttttgaaaaaagagtgtgggaatggaaagaaaaatctggaggcacgatcactcaacaattaagaagattaggtgcatcggtagactggtctagagaagcatttacaatgaatgaagatttaagtgaagccgtaaaagaggtcttcgtttctctttatgatgaaggtttaatctatagaggggaaaggctagtaaattgggacgttgtgttacaaactgctttatctgaccttgaggtatctactgaagaagagtcagggtccttatggtactttgattaccctattgagaatggaaataccataacagtagctacaacaagacctgaaactatgttaggcgatgcagctgtagcagtga

SEQ ID NO: 307520 - DNA, 1323 bp, Unknown
  Bacterial polypeptide expressing nucleotide sequence isolated from the Sargasso Sea
tttatagaaaaagtatgggaatggaaaaatgaatatggggacataatcattagtcaattaaaaaaattaggatgttcatgtgattggtcaagaaatgcattcactatggatgaaaatttatcaaaatcagtcattaaagtatttgtagaattatataaaaaaaaattgatttataaggctgaaaaacttgtaaattgggacactgttttaaaaactgcaatatcagatttggaagtagatcaaagagagatgaattctaagatttactatataagatatccaattgataattcgtcagagtttatcaccattgccacaacgaggcctgagacaatgctaggggatactgcgattgcggtaaatccgaaggataaaagatataaaaatcatgttggcaaaactgtcacaataccaatcgtaggtagaaaaataaaaattattaaagataattatgctgatccagagcaaggaactggagcacttaagatcacgccagcacatgattttaatgattatgatgttggtcaaagaaataaattagaaataattaatgtttttacggaagagggaaaaataaatgaaaatgcgccaaaagattacatcggcttagataggtttgatgctcgtaaaaaaatattaaatgaattaaaagaaaaagatttttttgtaaaagaagaaaacatcaaaaataaagttccttatggcgatagatcaaattcagtaattgaaccttttttgacagaacaatggtttgttgatgcaaagaaattagcgatcaaagctaaaaaaattgttaagacgaaaaaaacaaatttctttccaactaactggtctaaaacttattttcagtggatgaataatattgagccatggtgtatttcacgacaattatggtggggacatcaaataccagcttggtatggacctgatcaaaaaatctttgttgcgatcaatgaaaatgatgcaattaaacaagcaaaaaaacattataaaaaagatgtaaaacttacaagagaccctgatgttttagatacatggttttcttcaggattatggccattcgctaccttaggttggcctgacaaaaaagattatgtcaaaaaattttacccaacaacggttttagtgaccggttttgatattatttttttctgggtggctagaatgattatgtttggcatggaatttttaaacaaagaaccatttaaagatatatatgtacacgcgttagtaagagatgaaaaaggacaaaaaatgtctaagtcaaaaggaaacgttattgatccattagatctaattgaaaaatatagtgctgatgcatta

SEQ ID NO: 307521 - DNA, 1456 bp, Unknown
  Bacterial polypeptide expressing nucleotide sequence isolated from the Sargasso Sea
atgacagactctacagataatgatggtaacttttctaccaagccatttgtagaaagtaaggctattatgcaaccttttggtgatagatctaaggttgttattgaaccaatgttgacagatcagtggtttgttgagacttcaaaaattgttaagccggctttggatgtggtcaaaaatggtgagattaaaattataccagcgagtggtgaaaaaacttattatcactggttaaataatattgagccctggtgtatttctcgtcagctatggtggggtcatcaggttccagtgtggtttgataaagatggaaatcaatattgtgctgtgacagagagtgaagctcaagaacaggcaggttcagatgttcagcttacgagagatcctgatgttttagatacatggttttcatcaggattgtggccaattggaactttaggatggcccgaagacagcagcgccttaaatcaatattttccaacatctactttggtaactggtcaggatattttgttcttttgggttgccagaatgataatgatgcaacttgctgttagaaatgaaattccttttgatacggtctatttacatggattggtgagggacgccaaaggtaaaaagatgtccaagtccacaggtaatgttgtggatccaattgacattattgatgagtatggagccgatgctcttcgttttacaaatgcgtcaatggcttcaattggtggtgttttaaaattggatactcaaaggattgccggttatagaaattttggtacaaaactttggaatgcagcgagatttgcgtcacttaatgaggcaaattttggggtatcagttccaactgcaaaagaaacagtaaatcgttggatagtaggtgaaactgtcaaagcgcttaatgaagtaaatattgcttttgatcaatttaggtttaacgatgctgcacaggttctatattcctttgtctggggtactgtatgcgactggtacgtggagctttcaaagccgcttttgaattctgctgattttaagataaaaagtgaaactcgacaaacaatggggtgggttatagaccaatgtctaatattactgcatcctattatgccttttatcaccgaagaattgtgggagaccctctcgcaaagaaacgagatgctagttcattgtgattggccagaatttgatagcacactcattgatcatgcagcggatatagaaatgaattgggttgttaaccttatagagtctattcgctctgcccgagctcaattgagggttcctgctggattaaagataccaatgattttcttgaaaatggattctgaagctaaacaagcttgggaaaataatagtgaaatgatacagaagttagccagaataacagaacttacaagtgctgacgatatacctaaaggtagcattgcgatatcagctaaaggagctagttttgccctaccgcttg

SEQ ID NO: 307522 - DNA, 2878 bp, Unknown
  Bacterial polypeptide expressing nucleotide sequence isolated from the Sargasso Sea
catggaaaaaacatacgatcctcagtccattgagcagactctttaccaaaactgggaagagcaaggttactttaagccccacggcgatgcctcacagggcaactattgcatcatgatcccaccgcccaatgtgacgggcagtctgcacatgggtcacgctttccaagataccatcatggataccctgatccgctaccaacgtatgaagggtaaaaacaccctgtggcaagtcggtactgaccatgcgggtattgcgactcaaatgctggttgagcgtaagcttgaagccgaagaaggcaagagccgccatgatcttggccgcgatgcttttatggaaaaagtctgggaatggaaagcgcaatcgggcggcaccatcactaagcagctacgtcgtatgggcgcctctgtggattgggaccgtgagcgttttaccatggacgaaggcttgtctaaagccgttcaagaagtgtttgtccgtctctatgaagatgatttgatttaccgtggtaaacgcttagtaaactgggatcccaagctgcataccgcgatttctgatctcgaagtggaaaacaaagaaaagcaaggccacatgtggcatctgcgttatccattagccgatggcgaactgactgctgacggtaaagattacctcgaagtcgccaccacgcgtccagaaactatgttaggcgatagcgcggttgcagttcatccagacgatgagcgttatcaagcactgatcggcaaatttattctgctgcctatcgttaatcgtcgcatcccaatcgttgccgatgactatgtggacatggcttttggtacaggttgcgtgaaaatcacccctgcccacgactttaatgactatgaagttggtaagcgccataagctgcccatgttcaacgtgttgaccttagatgcggccattcgcgcatcagccgaagtcgtcaataccgatggcaccatcaacaccaccttagatggcagcctacctgagcgtttcgcaggtttagatcgtttcaaagcccgtgatgcaatcgtggcagagtttgaaaccttaggtctgctcgaaaaaatcgcgccacacggcctaaaagtgccctacggtgaccgctcaggcgtagttattgagccgatgctgaccgaccaatggtacgttgccgttgcgcctatggcgaaaactgctatcgaagccgttgaaaatggcgacattaagtttgtgccgcagcagtacgaaaacatgtacttctcctggatgcgcgacattcaagattggtgtatctctcgccaattatggtggggtcaccgcatccccgcttggtacgatgcgaacggtaaggtttatgtgggccgcaccgaagctgaagtgcgtgctaagcacaatatcgatgatgctatcgccctgcgccaagatgaagacgtattggatacctggttcagctcagccctgtggacattctcaaccttaggctggcctgacaatgttgaagatttaaaaaccttccacccgaccgatgtgctggtaacgggttttgacatcatcttcttctgggttgcccgtatgattatgatgaccatgcacttcatcaaagatgaagacggtaagccacaggtaccctttaaaaccgtttatgtgactggccttatccgcgatgaagcgggtaacaagatgtcaaaatctaagggcaacgtacttgacccattggatatgattgacggtatcgatctagaagccctcgttgaaaaacgcaccggcaacatgatgcaacctcaactagccgccaagatcgaaaagagcacccgcaaagaattcgaaaatggtatcgaagcccacggtactgatgccctgcgctttaccctagcggcaatggcctcaactggccgtgatatcaactgggatatgaagcgtttagacggttaccgcagtttctgtaacaagctttggaacgcgtcacgttacgtattgatgaataccgaaggccaagattgcggcccgaactctccggattaccaaggcggtgagatggaactgtcactggcagatcgctggatcatcggtttattcaaccaaaccgtaaaaacctacgacgaccacatggcaaactaccgcttcgaccttgcggctaacacgctgtatgagttcacttggaaccagttctgcgattggtacttagagttaactaagccagtgctgcaaaacggcaatgaagcgcaaatgcgtggcacccgccatacactggtcaatgtattagaagcgatgcaacgtctgatgcacccaatgatgccatacatcactgaaaccatctggcaacgcgttaaaccactgacaggcgcccaaggcgacaccatcatgctggcaccattcccaagctatgatgctgccaaagtagatgcgaccgcgatggccgatctcgaatgggttaagcaagtcattgttgcggttcgtaatatccgtgcagagctcaatatagcgccttctaagccattaaatgccctactgcgtggcgtgagtgcccaagacaaagcccgtgttgaagctaaccaagccttcttcacaacgcttgcgcgcttagaaagtatgacgattcttggcgaaggtgaaacggcgcctatgtcgaccacaggtctgattggcgaaatggaattattaattccgatggcaggtctggtggatgtagcggccgaaatggctcgtatcgacaagcagcttgaaaagctgactcaagagattgcccgtatcgaaggtaaattatccaatgaaggcttcgtggcaaaagcaccgccagccgtaattgataaagagcgcgctaagatggccgatctcagccgtgatatggacaaactaaaagagcaaaaagccgagtttgctaagctagaagcctaa

SEQ ID NO: 307523 - DNA, 2224 bp, Unknown
  Bacterial polypeptide expressing nucleotide sequence isolated from the Sargasso Sea
aatggataaaagatatgagccacttattattgaagaaaagtggtcagagctttgggcaaaaaataatttaggtaaaaataactcttcacaaactttttcccaggttattccacctccaaatgtgactggtactcttcatatggggcatagcttccaatattcgataatggatttctatgccagatacaatcacttaaatgatgtaaatactcattggcagataggtaccgatcatgcaggaattgcaacgcaaatggtcgttgaaaacaacctatccagagaaaatattgataaaaatgatttgggtagagaagattttgttaaaaaagtttgggagtggaaagaattttcagaaaataaaattactggacaaattaaaaggttaggtaactcagttgattggagtaattacagatttactttagatgaaggttttaatgaagctgttcttaaagcttttgttgagctttataggaaagagaaaatctatcgtggttacaggttagtaaactgggatccatctttaaaaactgcggtttcagatctggaggttgtaagacaagagaaaaaaggtcttatttggcatataaagtatccaattataggttcagatgattttgtaacagttgcaacaacacgtccggaaactatgtttggagatatggcaattgcagttaatcctaaagataaaagatataaagatatcattggaaaaaaggttgagctcccatttataaagagaaaaatcccaataattggtgatgactatgtggataaagagttcggaacgggttgccttaagattactcctgggcatgactttaatgactatgaaattggtaaaaaatactgccttcattgtgtagataatgaagttcatatgtctgatgatattgaagactttgaaccacttaatatttttactgatgaggcgcatagtaatgataatgtcccttctccctttaaaaatttagacagattcaaagtaagaaagcttgttcttgaagaaattaaaaagctagatttatttgtaaaagaggaaccgcatgaaatcagtgttcctcgaggagagcgttcaaatatagttatagagccaaaactaagttatcagtggtatgtaaaaacaaaggacatggctgataaggcaaataaagctgtaaaaaatggagaaattaaatttcatcccgaaaactggattaaaacttattttaactggatgaataatattgaagattggtgtattagcagacaaatctggtggggtcatagaattcctgcttggtatgacgatcgtggaaatgtttatgtggggtattctgaaaatgaagtgcgaactcattattcacttgataatagatcgctaaagcaagatgatgatgttttagatacgtggttttcctctagcctttggccttttgcatcaatggggtggccaaatgaatcaaaaaatctaaaaacttttttcccaacaaacctattagttactggttttgacattattttcttctgggttgcaagaatgataatgatgagtatcgaatttactggaaagattccttttaaagatgtgtatgttactggccttataagagatgaaaatggacaaaaaatgtcaaagtccaaaggcaatattattgatcctattgacttaatatatggtatatctttagaagaccttcttgaaaaaagaacatcaaatcttatgcaagagggtttagcagaaaagattgctagaaaaaccaaaaaacaattcccaaatggtattgagtcatatggaacagatgctttaaggatgacattttattctattgcaactaatgctaaggatataagttttgaaattgggagattaaaaggttttagaaatttttgtaccaaaatgtggaatgctgcaagatttattaatggttatgaaaacaaagggaataattttgaagctgaatctgaatctgataaatggatattaaaagaatttgaacagctaaaagccgatgtcgaggataatgtaaatcactacaggttagatttagctattaatcatgtttatgagtttttctggaataagttttgtgatgtttacattgaagaatgcaaaaaaactgaaaaaactgacaatctgcatccccttcttaaggaaatacttgtttttattcatccttttgctccgtttataactgaagaaattcattcaattatttttaaagcgccattaattgataggtag

SEQ ID NO: 307524 - DNA, 1728 bp, Unknown
  Bacterial polypeptide expressing nucleotide sequence isolated from the Sargasso Sea
ttaaaaaaacttggatgttcatgtgattggtcacgaaatgcatttactatggatgaaaatttatccaaatctgtaattaaagtttttgtcgaattacataaaaagaaattaatctacaaagctgaaaaattggttaattgggacactgtactgaaaactgccatttcagatttagaagtagatcaaagagagatgaactctaagatatactatataagatatccaatcgaaaattcctcagaatttataactattgctaccacaagacctgaaactatgctgggagatacagcgatagcagtaaatccaaaagataaaaggtataaagaatatgttggtaaaactgtaactattccaatagtgggtagaaagattaaaattatcaaagacaattacgcagatcctgaacaagggacaggtgcattaaagattacaccggcacatgattttaacgactatgaagtgggccaaagaaataagttggatataattaatatatttactgaggaaggaaaaataaacaacaatgctcctcaggattacatgggacttgatagatttgatgctcgtaaaaagttattagaagaactcaaagaaaaagatttttttgttaaagaagaaaatattaagaataaagttccttacggtgatagatctaattcagttatagaaccttttttaactgaacaatggtttgttgatgcaaaaaaattagctgtgaaagcaaaaaaaatagttaaaacaaaaaagacaaatttctttccaactaattggtctaaaacttattttcaatggatgaacaatattgaaccgtggtgtgtttcaagacaactttggtggggtcatcaaatacctgcatggtatggacctgataaaaaaatatttgttgcaacaaatgaaatagatgcaaaaaaacaagctaaaaaattttataaaaaagatgttgaaataaccagagatccagatgttttagatacatggttttcatctggtttatggccttttgcaacattaggttggcctgataaaaaagattttgttaagaaattttatcctacttcagttttagttacaggttttgatataatctttttttgggttgctagaatgatgatgtttggaatggaatttttaaataaagaaccttttaaagacatttatgttcatgcacttgtaagagacgaaaaaggacaaaaaatgtctaagtcaaaaggaaatgttattgatccattagatttaatagaaaaatacagtgctgatgccttaagatttactttattgtctatggcatctccaggaacagatgtaaaactctctgaagatagagttaaaggatacaggaattttttaaataaattatggaatgctaataatttcctaattacaaataaatgtgattttaggaaaactgataaagtcccaaaaacctcattaaatataaataaatggatatattctgagttaatagaaattaagaacaaaattcaaaaaaatattgaggattaccgttttgatgaagctgctaaaaatgcttatcagtttgcttggcattcgtattgtgactggtacatcgaactatcaaaaacaattctttattcagatgataaaaaagctcaaaaggaagtaaaagaagtgtcagcttatattttcaaacaaatagtcgtaatgcttcatccttttattccatttgtgactgaagaaatttggttaaaaaacaagtttgataaa

SEQ ID NO: 307525 - DNA, 1635 bp, Unknown
  Bacterial polypeptide expressing nucleotide sequence isolated from the Sargasso Sea
gatgagtgataaatatatacattccaatgtagaagataagatctattcatattgggaaaaaaataaactatttaaacctcaaaaaaactctaaaaaattttcagttgtaattccgccaccaaatgtaacgggaagtttacatatgggtcatgctttaaataattcaattcaagatatgctagttcgatattatcgaatgaataattatgaaaccttatggcaaccaggtacagatcatgctggtattgctactcaagcacttgttgagagaaaacttgaaaacgaaaatctaaataaaaatacactcggaagagaaaaattcattgaaaaggtttgggattggaaaaatcaatacggagatataattatcaatcaattaaaaaaactaggatgttcatgtgattggtctagaaatgcgttcaccatggatgaaaatttatcaaaatctgtaattaaagtatttgttgaattacacaaaaagaaattgatctataaagcagaaaaattagtcaattgggatacagttttaaaaactgcaatttcagatttagaagtagatcaaagagaaatgaactctaagattttctacattagatatccaatagataaatcatcagaatttattactatagccacaaccaggcccgaaactatgcttggggatacagcgattgcagttaatccaaaagataaaagatacaaaagttttgttggtaaaacagtcacgatacctattgtaggtagaaaaattaaaataataaaagacaattatgcagatccagaacaaggaacaggagcattaaaaattaccccagcacatgattttaatgattatgatgtaggacagagaaataaactcgaaataataaatgtttttactgaagagggtaaaataaatgaaaatgcaccaaaagattatgtaggtttggatagatttgatgctcgtaaaaaaatattaaatgaacttaaagaaaaagattattttgttaaagaggaaaatataaaaaataaagttccttatggagatagatctaattctgttatcgaaccttttttaactgagcaatggtttgttgatgcaaaaaaattagctatcaaagcaaaaaaaattgttaaaacaaaaaaaacaaatttttttccaaataactggtctaaaacttattttcaatggatgaataatattgagccttggtgtgtctctagacagttgtggtggggtcatcaaatcccagcatggtatggacctgacaataaaatatttgttgctttaaatgaaaaagaagcaagtaagcaagctaagaagcattacaaaaaagatgtaaaattagttagagatcctgacgtattagatacttggttttcttctggtttatggccttttgcaactttaggatggccagataaaaaagattttgtaaagaaattttatccaacaacagtgttagtaactggctttgatatcatttttttctgggttgcaagaatgattatgtttggaatggaatttcttaataaagaaccttttaaagatatctatgttcatgctttagtaagagatgaaaaaggacaaaaaatgtctaaatctaaaggcaatgtaattgatccattagacttaattgaaaaatatagtgcaga

SEQ ID NO: 307526 - DNA, 1272 bp, Unknown
  Bacterial polypeptide expressing nucleotide sequence isolated from the Sargasso Sea
gatgcagcttgataaattttttgattttttaaaagatgaaaaaaatctttattcgcaatgggagcaatcaaattgttttaaaccacaaaaaggaggtgagccttattctataatgatgccaccacctaatgttactggcagcttacatatgggtcatgctttaaccttcacaattcaagatatattaatcagataccatagaatgaagggtatggaagtattgtggcaagcagggacagatcatgcaggaattgctactcagatggtggttgaaagaaaattaagtgagtcaaacctcgatagacgatctctaggtagagaaaagtttattgaaaaagtatgggaatggaaaaaagagtcgggtggtcagataagtaatcaattaagaagacttggtgcttctgcagattggtcaagagaaagatttactatggatgaaggtctttctaatgcagttaagaaagtttttgttaatttatttaatgatggaattatttataaagataagagattggtgaattgggacccaaaacttttaactgctatttctgatctagaagtagagcaaagagatactgaaggaagtttatggcatattaaatatcctatagatgaaaataatcatatcatagttgcaacaacaagacctgagacaatgttaggtgatactgcagttgccgttcatccagatgatgaaaaatataaaaatttaattggcaaattttgtaacttaccaatttcaaataaaaaaataccaatcattgctgatgaatatgcagatcctgaaaaaggttctggagctgtaaaaattactcctgcacatgactttaatgattttgaggtaggaaagagacatgatttagaatttattaatatttttgatgaaaatgctaaactgaactcaaatgtgcctgaagaatttcaaaatttagatcgatttgaagcaagaaaattaattttaaaaaaattagatgaaatgaatttattaattaaagaagaaaaacagcaaatggtcataccatatggtgatagatcaggtgttgttattgagccatggctgacagaccaatggttttgtgatgcaaaaaaattatcagttgatccaatatcagctgttaaagataatagttctaaatttattcccaaacaatgggaaaatacattttataattggatggaaaatattcaaccgtggtgtatttcaagacagttatggtggggacatcaaattcctgcatggtatggtcctgataaaaaatattttgttagtga

SEQ ID NO: 307527 - DNA, 736 bp, Unknown
  Bacterial polypeptide expressing nucleotide sequence isolated from the Sargasso Sea
aatgttagataaatattatcaacctgatttagttgaagaaaaaatttataagcaatgggaagaagatggtgactttaaggcccctaacgattcaaaaaataaacactacagcatagttatacctccaccaaatgtaactggaaatttacatatggggcatgcattaaataatacattacaggatattttaattaggttttatcgaatgaaaggacgagatgtattatggcagccaggaacagatcacgctggaatagccaccgaaatggtggttgaacgagaattaaaaaagcaaaaaataaaaaaggctgatctttctcgtgaagaattcatagaacatgtctggaaatggaaggactcgtcaggaaataagattataaatcaacttaaaagacttggttgttcatgtgattggtccagagaaagatttacacttgatgaaggcctttctcaatccgtacgacatgtgtttgtgaaactttataaggatggcctagcttataaagataaaaggcttagtaactgggaccccaaattaaaaacaacaatctctgacttagaggttattcagaaagaggtaacaggtaccctttggtatattaattataaaattgagaatgaagatcgatacataactatcgccactacgagacctgaaacaatgtttggtgatactgcaatagctgttcatccagaggataaaaaatataaagatttggttggaaagtttgcgata

SEQ ID NO: 307528 - DNA, 1618 bp, Unknown
  Bacterial polypeptide expressing nucleotide sequence isolated from the Sargasso Sea
aattattacacaaacttcttggttgaaaaagaattagaagagaatgggatttctaagcatgacttaggaagagaaaattttctagcaaaagtttgggaatggaaagaaaaatcaggtgacaatattactaatcaaatgaaaactttaggcatgagttgtgattggtctagagaaagattcacaatggatgaaggactttcacaggcagtaataaacgtatttgtttcactttatgaaaatgacttaatttacaaaggtactcgaatggttaattgggatacaaaattaaagtcagcagtttcggacttggaagttacgtctgcaaatgaacttggaaagttatgggctattaattataaggtcggagattcatttatagaaattgcaacaacaagaccagaaactttactaggcgacacagctgttgctgtaaatccttcagacgatagatataaagatttgataggaaaaactgcaattatcccaatagtaaatagggaagtagaaattattgctgatgactatgttgatgttgaatttggctctgggtgtgtaaagattactccagctcatgacttcaacgattatgaaattggtaaaaggcacaatctagaaatgataagatgtttagattttgatggaaaaattgaaaatcatgattttattcctcaagaactaagagggcttgatcggtttgaagctcgagaaaaaataatagaaatgcttaaaaatcaaaatttacttaaaagagtagaagatcatcaaattcaaattccaaaaggggataggtctaaaacaatacttgaaccaatggtttctgaacaatggtttgtaaaaactgaagaggttgccaaaaaagcaatacaagttgttgaagatgatgaaattagatttataccaaaaaattgggaaaaaacttattttgagtggatgtacaatattcaggactggtgtatatctagacagcaatggtggggccacaggattccagcttggtacgatgatgaaaaaaatcattatgttggtaccagtgaggtcaatgtaagagagaaatatggtcttaaagatgatgttcaattaactcaggatgaggatgtattagacacttggttttcttcagcactttggccatttagcactttagggtggccagatgacactgaagatttaaaaagttattatcctactaccttacttgttactggttttgatattatttttttctgggttgcaagaatgataatgatgggtttatacacaatggaaaatattccatttaaagatattcttatccatggtttagttcgggattcacaaggtagaaaaatgtcaaaaagccttggaaacacaatggaccccttagaattatctgaaaaacatggagcggacgctttgagattctcacttattgaaaaagctaatccaggacaagatgtaccgtttgatgaagagtggacagtatctgcaaaaaaatttggcaacaagatatggaatgctgcaaaattcgtacatttatacactgatgaatctacaccgtatgagattaatactgtatcgttaattgaaaataaatggatcatatcaaggtttaatgaaaccttagaggaatttaatgaac

SEQ ID NO: 307529 - DNA, 1582 bp, Unknown
  Bacterial polypeptide expressing nucleotide sequence isolated from the Sargasso Sea
tatgagttctgataaatacaatcattccgaagtagaaaatcacatatatttatattgggaaaaaaataaactttttaagccaaaaaaaaataaaaaaaaattttctattgtaataccaccaccgaatgtaactggtagcctacacatgggacatgctcttaataactcgatacaagatttattaacccgctatcatagaatgaataattttgaaactttgtggcaaccaggtactgaccatgcaggaatagccacccaagctctagtagaaaaaaaactagaaaaagagggtattaaaaaaaatgatcttggaagagaagaatttattaaaaaagtttgggaatggaaaagtcaatatggtgacattattattaatcaactcaaaaaactaggttgttcatgtgattggtcaagaaatgcatttactatggatgagaatctttcgcaaagtgttattaaagtattcgtagaactgtatagaaaaaaacttatctataaatcaaaaaaattagttaattgggacaccgtattaaaaacagctatttctgatcttgaggtagatcaaagggaagtaaactcaaaattatatcatattaaatatccaataaatggaactaacgaatttataactatagctacaacaagaccagaaacgatgcttggcgatacagctattgctgtaaacccaaaagataagagatataaaaaatataaagggaaagatgtcataattcctttagtagaaagaaatataaaaattatttttgatgattatgctgatccagaacaaggaacaggagcagtaaaaattactcctgcacatgattttaatgactatgaagttggaaaaagaaataaattaaaaataataaatattttcactgaagaaggcaaaattaatgaaaacgcaccaaacaaatattttggattggatagatttgaggcacgaaagaaaattttagaagatctttcaaatttgggtttattagttaaagaagaaaatataaaaaataaagtaccatatggagatagatcaaattctataattgaaccttttttaacagaacaatggtttgttgatgctaaaaaattatcaattaaagctaaaaaaatagttaagtcaaaaaaaacaaatttttttcctagcaattggtcaaaaacatattttcaatggatgaataatattgaaccatggtgtgtgtccagacaactttggtggggacatcaaattccagcgtggtatggacctgataaaaaaatatttgtagcttctaatgaaaatgaagcaaaaaaaaatgcttataaattttataaaaaaaatgttactttaataagagatccagatgtacttgatacgtggttttcatctggtctatgggcttttgcaacattaggctggccatccaataatgaatacttaaaaaaattttatccaacatcagttctagtaacaggctttgatattatatttttttgggttgctagaatgataatgtttggcatggaatttatgaataaagaaccttttaaagatatttatgttcacgctttagtaagagatgaaaagggacaaaaaatgtct

SEQ ID NO: 307530 - DNA, 2854 bp, Unknown
  Bacterial polypeptide expressing nucleotide sequence isolated from the Sargasso Sea
atggaaaagacttttaatcacaacgccatcgaacaggcgctctatcagcactgggaagcccagggttacttcaagccccacggcgacaccagcaaagactccttctgcatcatgatcccgccgccgaacgtcaccggcagcctgcacatgggtcacgccttccagcgaaccctgatggataccctgatccgctacaaccgcatgcggggcaagaacaccctgtggcaggcgggtaccgaccacgccggtatcgccacccagatggtggttgagcgcaagatcgccgcagaagagggcaagacccgccacgattacggccgggaagccttcatcgacaagatttggcaatggaaggaagagtccggcggcaccatcacccgccagatgcgccgtctgggtgactccgtggattgggagcgcgagcgcttcaccatggatgaaggcctctccgccgccgtgcaggaagtgttcgtccgtctctacgaagatggcatgatgtaccgtggcaagcgtctggtgaactgggatccgaaactcaacaccgcgatctccgatctggaagtggaaaaccgcgagatcaagggccacatgtggcacctgcgctacccgctggccaacggcgccaagactgccgaaggtcaggatcacctgatcgtcgccaccacccgcccggaaaccatgctgggtgataccgccgtcgcggtaaacccggaagacccgcgctacaaggcgctgatcggtcagcacattctgctgccgctggtgaaccgtctgatccccatcgtcgccgacgaacacgccgacatggagaagggcaccggctgcgtgaagatcaccccggcccacgacttcaacgacaacgaagtgggcaagcgccacaacctgccgatgatcaacatcttcaccctggacgcccacgtgcgggccgaggccgaagtggtcgacagcaacggcaaccccagcaccgcctatgacgccgccctgccgaccgaattcgccgggatggagcgtttcgccgcccgcaaggccatcgtcgccaagctggatgagctgggcctcttggccgagatcaaggatcacgtgctgcagcagccttacggcgatcgcggtggcgtgcccatcgagccgatgctgaccgaccagtggtacgtgcgcgtggcgccgatggccaagaccgccatcgaggcggtggaagatggccgcatccagttcgtgccgaaacagtacgaaaacatgtacttctcctggatgcgcgacattcaggactggtgcgtctcccgtcagctgtggtggggtcaccgcatcccggcctggtatgacgatgccggcaacgtctacgtgggccgcaacgaagacgaagtgcgtgccaagcacagcatcccgtccgtgaccaccctgcgtcaggacgaagacgtgctcgacacctggttcagctccgccctgtggaccttctccaccctgggctggccgaacaacaccgaggcgctcaagaccttccacccgaccgacgtgctgatgagcggcttcgacatcatcttcttctggattgcccggatgatcatgatgaccatgcacttcatcaaggacgaaaacggtcagccgcaagtcccgttcaagaccgtctacatcactggcctcatccgtgacgaagaaggccagaagatgtccaagtccaagggcaacgtgctggatccgctcgacatgatcgacggcatctcgctggaagatctgctggagaagcgcaccggcaacatgatgcagccgcagatggccgagaagatcggcaagcgtaccgccaagcagttcccggaagggatcgaggcccacggtaccgacgccctgcgcttcaccctggcggcgctggcttccaccggtcgtgacatcaactgggacatgaagcgcctggatggctacaacaacttctgcaacaagctgtggaacgcctcccgctacgtgctgatgaacaccgaagatcaggattgtggcttcaacgatggcgaaatgcagttcagcctggcggatcgctggatccaatcccagctgcaagtggccatccgtgacttccgcaccgccctcgatacctaccgcttcgacatcgcggccggagtgttgtacgaatttatctggaaccagttctgtgactggtatctggagctgaccaagccggtactgaccaagggctccgaggccgagcagcgcgctgcccgccacaccctcgtcagcgtcctcgagaccctgctgcgtctggcacacccgatcatcccgttcatcaccgagaccatctggaaatcggtcgccccgctggctggcgtgcacgccgacaccatcatgattcaggccttcccggagttcgacgctgccaaggtggacgaagccgcgatggcggatcaggagtgggtgaaggagttcatcgtcagcatccgcaacatccgcgccgaaatgaacgtggcgccgagcgtgcccctcaatgtgctgctccagtgcgatgccaaggatgcccagcgcgccgctgacaacgaggccttcctcaagtctttggcccgtctggagtccatccgcgtactggcggatggtgaaaccgccccgctgtcggtcaaaaaattgatcggtgcgaccgagctgatgatcccgatggccggtctcatcgacaaggatgccgagctggctcgtctggccaaagaggttgcccgtctggtgggcgagtgcggccgcatcgaaggcaagctcggcaacgaagccttcgtcgccaaggcgccggaagcggtcatcatcaaggagcgcgagaagctggaagattaccgtctccagctgaccaagctggaagcccagcaggccgagatcgccgcgctgtaag

SEQ ID NO: 307531 - DNA, 1678 bp, Unknown
  Bacterial polypeptide expressing nucleotide sequence isolated from the Sargasso Sea
aaagatataaaaaatatattgggtaaaaaagcaattgttccaatagtagaaagaaaagtaaaaataattgcagataaatatgtttctatagaacagggatcaggagcgcttaaagtgactcccgcacatgattttaatgattttgatattggcaagcgacataaacttgaatttataaatatttttgaaaaaaacggtaaattaaacaattctgcgccaaaggatttaattggattagaacgttttgaagcaagaaaaacgatcgtaaaattactcaaagaattaaatttattagaaaagatagaaaatataaaaaatgcagtaccgtatggagatcgttctaactcagtaatagaacctttgcttaccgagcaatggtttgctgatgcaaaatttttatctaaaaaagctatacaagtagttaaacaaaagaaaactaattttttcccaactaactggtcaaagacttattttcagtggatgaatgatatacaaccatggtgcatatctagacaactatggtgggggcacagaatacccgcttggtattctaaagaaaataaaattttcgtagcagaaaatgaaatagaagcaaataaaattgcaaaaaaatattatagaaaaagtgttgaactaaaaagagatgaagatgtattagatacttggttctcatctgcgctttggccatttgctactttaggttggccaaaaaatacttatgaattaaaaagattttatcctacatcagttttagtaacaggatttgatattatatttttttgggtcgcgagaatgatgatgatgggaaatcatttagttaaaaaagtacctttttctaaaatttatgttcatgctttggttagagatgaaaaaggacaaaaaatgtcaaagtcaaaagggaatgttattgatccattagatttaattgaaaagtacagtgctgatgccttaagatttacattattatcaatggcatctccaggaacagatgtaaaactttctgaggatagagttaaaggatataggaattttttgaacaaattatggaatgctaataatttcctaattacaaataaatgtgattttaagaaaactgataaggttccaaaaacaacacttaatataaataaatggatatattctgagttaatagaaattaagaacaaaattcaaaaaaatattgaagattaccgttttgatgaggctgctaaaaatgcctatcagtttgcttggcactcatattgtgactggtatatcgaactttcaaaaacaatactttattcagatgataaaaaagctcaaaaagaagttaaagaagtatctgcttatattttcaaacaaatactagtaatgcttcatccatttattccgtttgttacagaggaaatatggttaaaaaataagtttgataaatcaaataaaaattttcttatgtataaaaattggccatctggtaaagcaaaaaaagatcaagctcaaaaagatgttgaacagattatcaatataatttcagaattaagatcatttaaaaatgagttaaatgtaagtcctggttcatttgttgatatatcaattaacaaaattgctaaaaagagcaaaactttaatgtctaataatgaagtagtcctaaaaaggcttggtcgtatcaataatttctttgaaaaagatcaagctaagc

SEQ ID NO: 307532 - DNA, 754 bp, Unknown
  Bacterial polypeptide expressing nucleotide sequence isolated from the Sargasso Sea
gatggataaaaaataccaaccccttgaaattgaggagcgtctcagcaagcattgggctgagacacctctttcaaatcggaaaaatttctcaacctttgctcaggtaattcctcctccaaatgtaacagggacccttcatatgggccatagttttcaatatgcaattatggacttctattcaagatataacttcctcaatgacaaaaatgttttctggcaaatggggacagatcatgctggaatagctactcaactagttgttgaaaatagattgttaaaaaaaggtgagacaaaagaaactttaggaagagaaaagtttctagatgaagtttgggattggaaggaaaaatcagaggcaaatattacctctcagatcaaacgtcttggctgctctgtagattggaatcaatacagatttaccttggatgagaagttttcagaatccgttactgaggcttttgtaaaactatatagagataagaaaatatatcgaggttatagattggtaaattgggatccctctcttcaaactgctgtctctgacttagaggttgtcaggcaagagaaaatcggaaaaatatggcacattagttacccgatcgaggattcttcagattttctgatagttgccactacaaggcctgaaacaatgtttggggatatggctgtggcggttaatccctcagatactaggtacaaaaaatatatcggtaaaaaagtttctctgccttttgttggaagaaaattcctataa

SEQ ID NO: 307533 - DNA, 1327 bp, Unknown
  Bacterial polypeptide expressing nucleotide sequence isolated from the Sargasso Sea
aatgttggaaaaatattatcaacccagtcttgttgaagataaaatttataaagcatgggaaaatgctggagattttaaacctcttaagacttcaagtgatgcttattgcatagtgatccctcccccaaatgttacaggaacactccatatgggccatgctctaaataacactcttcaggatatcttggttaggttttatagaatgcagggcaaaagtgttttgtggcagcctggtacagaccatgctggtattgcgacagaaatggttgtcgaaagggaactaaaaaaaagagacataaataaaaaagatttatcccgtgaacaatttatagaacatgtttgggaatggaaaaatcaatctggtaatgaaattattaatcaactaaaaagattaggatgctcgtgcgattggtctagagaaaggtttactctagatgaaggtttgtcaaaagcagtaagatttgtattcgttaaattatataatgataaacttatttataaagataaaagattaagtaactgggacccgaaattaaaaacgactatttcagatttagaagtcatccaaaaagaagtaaaaggttctctctggtatatagactacaaattagaaaatgaagataaggtaataacaattgcaacaactcgacccgagacaatgcttggagatacagcaattgctgttcatcctgatgacgaaaggtttaaagattttgtgggtaagtatgcatatattcctatccttaataaaaaaattattattatttctgatgaatatgtaaaagtggatcaaggctctggtgctgtaaaaataactcctgctcatgattttaatgattatgaaataggaaaaagacataatcttgacgtaataaatatttttaacgaaaaagctgagcttaatgaaaactgtccaatcgaatatcaaaatcttgatcgttttaaagcaagagaaaaaatcattaatgaattagaaactattggagcactgaataaagtcgaagagaatattcatactgtgccgtatggagatagatcaggtgaagttgtagagccgtggcttacagatcaatggtttgtaaacgcaaaaaaattgtccttgaatgcaattgataaagtaaaaacaaaagaaacaatatttgttcctcaaaattggcagaaaacatattttgattggatggaaaatattcaaccttggtgcatttccagacaattaatatggggccatcaaataccagcctggtatgggccagatggagaaatttttgttgccgaaaattcagatggcgctcacaagatagccaaggaacattacaaaaagatgtaa

SEQ ID NO: 307534 - DNA, 1114 bp, Unknown
  Bacterial polypeptide expressing nucleotide sequence isolated from the Sargasso Sea
tattgatgttgaagagaaatgggttgatatttggtcaaagaaagtttttcttaataaggatggaaatgattcattttctttggtaatccctcccccaaatgtaacagggacactccacatggggcatagctttcaatatgcgattatggatttttatactagatataatcatatgtctggcaagagggttcattggcaggttggagcagatcatgcagggatagctactcaactagttgttgaaaataatttatcaaaaaaaggtactaataaaaaagaaattggcagagaagactttctcaatgaggtatggaaatggaaggatttttcagaggataaaatacaaagacaaataaaaagattaggatcatcagttgattggagtaaatatagatttacccttgatgatggtttttcaaaagcagtaaataaagcgtttatcgagttatatcgacaaaataaaatttatagaggatatagattggtcaattgggatccatctttaaaaactgctgtttctgatcttgaagttgtaagacaagaaaaaaaagggctaatttggcacataaaatactccattgacgactcagatgaatttgtaacaatagcaacaacaaggcccgaaaccatgtttggtgatatggcaattgcagtcaatccaaaagattcaagatataaatcattaattggaaaatatgctctactgccatttaaaaatagaaaaattccaattattggcgataattatgtggatatggactttggaacagggtgtttaaaaattactcctggtcatgattttaatgattatgaaattggaaaaaaatatgcattgcatgaaaaaaatgaaatagttcatacttcggatgatcttaatgattttgaaccaatcaatatttttaatgatgaggcttggacaaatgaaaatgtaccagaaccctttaacaatttggacagatttaaagctagaaaactcgtacttgaaaagctttctgagcttaaacttctcgtcaaggaagaagaatgtgatctgagcattccgagaggcgaaagatctaatattgttattgaaccaaaaattaagcaatcaatggtatgtgaaaacttcaggtat

SEQ ID NO: 307535 - DNA, 744 bp, Unknown
  Bacterial polypeptide expressing nucleotide sequence isolated from the Sargasso Sea
aatgagtagcgataaatatatacattctgacgtagaaaatagaatttattcttattgggaaaaaaatggtctttttaatcctaaagaaaattcaaaaaaattctcaattgtaattccaccaccaaatgtaacgggtagtttgcatatgggtcatgcgctcaacaattctatccaagatttattagttcgttatcataggatgaataattttgaaactttatggcaacctggtacagatcatgcaggtatagccactcaagctctagtagaaaaaaaattaacttctgaaaaaattgataaaaatgaaattggtagagaaaaattcattgaaaaagtttgggagtggaaagagcaatatggagacataataattaaccaattaaaaaaacttggttgctcttgtgattggtcaagaaatgccttcactatggatgagaacttatctaaatcagtaattaaggtttttgtagatctttataataaaggtctaatttataaagataagaaattagttaactgggatacagttttaaaaacagctatttcagacctagaagtagatcaaagagaagtaaattctaaaatttattacatcagatatccaatagatgggactgaagaatttatcacaattgcaacaacaagacctgaaactatgcttggtgatacagctatagctgtaaatccaaaagatgaacgatttaaattcttcgttggaaaaacagctactattccaattgttgg

SEQ ID NO: 307536 - DNA, 1015 bp, Unknown
  Bacterial polypeptide expressing nucleotide sequence isolated from the Sargasso Sea
tggatggatatattccaagattggtgtattagtagacaaatatggtggggtcatagaattcctgcatggtatgacgaagatgggaatatatacgttggctatgatgaagatgaattaaggaaccattacaaattagatgatagaaagctaactcaagatgaagatgtactagatacatggttttcatcctctttatggccttttggatctttgggttggcctaaagaaaatgaattagaaaagtactttcctacaagcttattagtgactggcttcgatattattttcttttgggtcgcacgtatgatgatgatgagtctagaatttacaggcaaagtaccttttaaagatgtttatgtcacaggtttaattagagatgaaaatggacaaaaaatgtcaaagtccaaaggcaatatcattgacccaattgatctaatctatggcattgatcttgaagatctagtgaccaagagaacagcaaacctaatgcaggaaggtctagctgaaaaaatagaacgtaaaactcgtaaacagtttcccaatggaatcgaatcatatggaaccgatgcattacgtatgacattcttttctttagctacacatactagagatattagttttgaacttggaagactcaaaggctataggaatttttgtaataaaatctggaatgcagctcggttcattaataattacccacatgaagcaaaagagtttgttgcaaaaaatgatgacgataaatggatagaagaagaattcaacaaagtttcagaacagataaagaaaaatattgaagaatatcgtttagacttcgcggtaaatgaaatctatgaattcttttggggtaaattctgcgacaaatacatagaagattgtaagaaatctggagaaacctcaaacttgcacccaatgttaaaaaagattctgctgttgatgcacccttttgcaccttttattactgaagaggtaaatgaactggttttcaaagatggttcactcatgaagttaaaatgag

SEQ ID NO: 307537 - DNA, 1315 bp, Unknown
  Bacterial polypeptide expressing nucleotide sequence isolated from the Sargasso Sea
atgaaaaaaaattacgaacctaatggtatagagaagaaaatctacgataaatgggagtcttcaggttactttaccgccatacctgatgaaaaaaaggaaccattttgcatcatgattcctcctccaaatgtgacaggaactttgcacatgggtcatggttttcaaaacactcttatggatgccctgattagacacaaaagaatgtcaggtttcgacgttttatggcaagttggtgtagaccatgcgggtatagcaactcaaatggtagtagagcgacaactagagtctgaaggaaaaactaaagaatccataggaagggaagcttttgagaaaagagtatgggaatggaaagaaaaatcaggcggaacaataacacaacaactaaggcgattaggtgcatcagtagattggtctagagaggctttcactatgagtgaagaccttagtttagctgtcaaagaggtctttgtttctttatttgatgaagggttaatttatagaggagaaaggctagttaattgggatattgtcttgcaaacagcgctatctgatctcgaagtaacttctgaagaagaatcgggatttttatggcattttgactaccctgttgaaaatgggggaaccataacagtagcaacgacgagacctgaaactatgctaggtgattcagctgtagccgttaatcctgaagatgaaaggttcaaagaattaataggccagttcgtaacattacctataactaatagaagaatccctataatccaggacacttatgtagattcagagtttggaacgggttgcgtcaagataactccagctcacgactttaatgattttgaaataggaaaaagacatgacttggaaattattaatattctaaacctagatggctcgctgaatgaatctgtccctgaaaagtttagaggcttaacaactacagaagctagagaagaagtattaaatgaattggagtccttaggctgtctaaataaagtagagccgcataagatacaaatccctaaaagtcaaaggagcgattccgtattagaaccaattattactaatcaatggtttgtagatgttaaaaaaatgtctaaagaagcaatgagagtagttcaacaaaacaaaacagagtttattccaaaaaattgggaaaatacttattttaattggatggaagacattcaagactggtgtataagcaggcaactttggtggggtcataggataccggcttggttcgatgaaaaagagaatatatatgtaggtagatctgaagatgaagtaagagaaaatatgatcttaaaaatataga

SEQ ID NO: 307538 - DNA, 1234 bp, Unknown
  Bacterial polypeptide expressing nucleotide sequence isolated from the Sargasso Sea
ttaaaaagagacccagatgtacttgacacatggttttcatcaggtctatggccctttgctacactagggtggcctgataaaaactattatttaaaaaaattttatccaacatcagttttagttacaggttttgatataatttttttctgggtagcaagaatgatgatgctgggtatggaatttttaaataaagaaccctttaaagaaatttatgtacacgcgctagttagagatgaaaaaggtcaaaaaatgtccaaatcaaaaggaaacgttattgatcctttagtgcttatagatagttatagcgcagatgctttaaggtttactttgttgtctatggcatcaccaggtagagatgtaaaactttcagaacaaagagtaaaaggatatagaaattttttaacgaaaatatggaacgttaataattttctcaaggtaaataaatgtacatttgatggggtcattaaacctaaaaacctcaaacttaatattaataaatggatttataacgaacttattgaaacaaaaattttaactgaaaactttattaaaaattatcgtttcgatgaagctgctaaaaccatttataaatttgtttggaatacttattgcgattggtacttagaactctccaaaaccattttactttctaaaaataactcagatattaaagagataaaaacgacatctggtcaggtttttaaggaaatattaatattattacatccatttataccatttattacagaggaactatggctaagaaataaattgaaaacaaaaaatactaaatatctaacgtattccaattggataagtctaaagaaattaaaaactgacaaaagtattcaaagtgttaatgagattatagagttaatatcaagtgtgagatcgtttaaaaatgaactcaatgtaagtccagggtcattcgtagatatctcgatagagaaattggataaaaaaaaacaaatgttatatttaaaaaacgaaataataattaaaaaactagggagaattaattcaatcttcaaaaaagatatgtcaaaacaatcagcaaatttagtatttggtggtcaaatattaaaattatattttgataaaagtatcgatcttgaattgattagacaaaatttattaaaaaaacaaagcaaaatacaacaagatttagatatagtgaataaaaaattaaataattctagtttttgtaaaacgtgcaccaaagcatattgtagaa

SEQ ID NO: 307539 - DNA, 2218 bp, Unknown
  Bacterial polypeptide expressing nucleotide sequence isolated from the Sargasso Sea
atggataaaaggtacagccctattgaagttgaggaaaaatgggttgatatttggtcaaaagaaattcttataaataaggatgctaaggaaactttttcacaagtaatccctcctccgaatgtaacaggtactttgcatatggggcatagttttcaatatgcaattatggatttttataccagatataatcatatgtcaggcaaaaaggctcattggcaagttggttcagatcatgcaggcattgcaactcaacttgttgtagaaaacaatctagccaaagaaagcattgatagaaaagatattggtagagaaaaatttatagatgaagtttggaaatggaaagacttttctgaaaataaaattcaatctcaaattaaaagattaggatgttctgtagattggaataaatatagatttacttttgatgaagaatttactcaagcagtcaataaagcctttatagacctatatcgcaaagataaaatttatagaggatatagattagttaattgggacccttctctaaaaacagcagtatcagatctagaagttgttaggcaagaaaagaaaggccttatatggcatataaattatccaatagagaattcaaatgactatattacagtagcaacaacaagacctgagactttatttggtgatatggcaattgcaatcaatcctaatgactcaagatataaatcaatgattggcaaatatgcacttcttccttttgttaatagaaaattgccaattattggagatgaatatgttgatatggattttggtactggatgcctaaagattacccccggtcatgactttaatgattatgagattgggaaaaaatataacttgcatgagaaggatggaacagttttcacctcaaaaaatattgatgattttaagccaattaatatttttaatgatgatgcatggacaaatgaaaatgttccggaaccatttaatgatcttgataggtttaaagtaagaaaattagcaattaaagaattagataggctaaaacttctagtcaaagaggaggaatatgatatcagtgtcccaagaggagaaagatcaaatattgttatagaaccaagacttagcaatcagtggtatgtaaaaacatcggaaatggctaaaaaggctaataaagaagttaaagatggaaatattaaatttcatccagagaactgggttaaaacttattttaattggatggacaatattgaagactggtgcataagtaggcaaatatggtggggtcatagaatacctgcttggtacgatgaagaaggaaatatatatgtaggtgagagtgaggatgatgtaagaaatcattataaattaaatggtatagaacttactcaagatgaagatgttcttgatacttggttttcttctagtttatggccatttggctcattggggtggccgaaaaatactgaagaccttaaagacttttttccaacatctcttttagttacaggttttgacataattttcttttgggttgcaagaatgatgatgatgagtatcgaatttactggaaagattccctttaaagatgtctatgtcactggcctcataagagatgaaaatggccaaaaaatgtcaaaatcgaaaggaaatattatagatccaatagatttgatatatggaatttctgttaatgatctagtgaaaaaaagaacatctaacttaatgcaggaaggaatagctgaaaaaattgaaaagaaaactaggaaacagtttcctaatggaatagagtcatatggtactgatgcattaagaatgacatttttctcgcttgctacccatactaaagatataagttttgaatttggaagacttaaaggctatagaaatttttgcacaaaaatatggaatgctgctaggtttattgatgggtatcctaatgaaagagattcatttaagtcattaaatgataatgataaatggatttatgaagaattccaaaaaatgaaagaacaaataaacaaaaatattcttgattacagattagattttgcagttaatgaagtttatgaatttttttggaataaattctgtgatatttacatagaagaatgtaaaaaatcaggaaatacatcaaacttaagaccattgctaagagagattttgtatgtatttcacccatttgctccatttataactgaagaaataagcaatttactatttaaagaaagaatcatttaat

SEQ ID NO: 307540 - DNA, 1441 bp, Unknown
  Bacterial polypeptide expressing nucleotide sequence isolated from the Sargasso Sea
atggaatttaaaaaatataatcatagtaaagaagaaaaaaaaatctcgaatttttggattaaaaaaggcttatttaaaccaaaaaagaacaaatcgaataaaaaattttctatagtaattcctccacctaatgtaactggcagattacatatgggacatgctctaaacaatagtctgcaagatgttttagttagatttaatagaatgaaaggcctcgaaactctgtggcagccaggaacagaccatgctggaattgcaacacaagcagttgttgaaaataaccttttaaaagaaggaattaaaaaaaacgatttaggaagggaaaaatttatcaaaaaaatatgggactggaaagaggaatctggtggaataattttagatcaactaaagaaattaggttgttcgtgtgattggtcaagaacgagatttactatggataaggatctttccaaagccgtaataaaagtttttgttgatctttataaaaacaagcttatttacaaggataaaaaattagtcaactgggatactaaacttcaaactgctatttctgaccttgaagtaaaccaaaaagatgtacaatctcaattgtattacattgattataagatagtgaactctgatcaaaaaatcactatcgccaccactagaccagaaacaatgatgggagataccgcggttgctgtaaatccaaaggatgaaagatatgttaatttagtcggaaaaaatattcttattccaattgttaataggactgtcaaaattatttctgacaattacgctgatccggaacaaggttcaggagcagtaaaaattacaccagcacatgatttcaatgactatgaggttggcaagagaaataaattagaaacaataaatatttttgaagagaatggtaaaattaacaaaaatgggattaaagaatttcacggtttagacagatttgaagcaagaaaacttattattaaaaaattaaaggacaaaggttctcttgtaaaaatcgaaaatattaaaaataaagttccatatggagatagatcaaacactataatcgaacctctgttaacagagcaatggtttgttgatgccaaaaaattatccaaaaaaccaattaagatagttaaagatggcaaaactactttttttccaagcaactggtcaaaaacattttttcaatggatgaataatattgagccttggtgtatatctcggcagatttggtggggtcatagaatacctgcttggtatgatgaaaatggaaatatttttgtagctgaaagcgaaaaagatgcagtaaaactagcaaagaaaaaaaataaaaataaacaatttaaattaagacaggaaacagatgttttagatacttggttttcatcagctctatggccttttgcaactcttggatggccaaacaaaactgaagaacttaataaatttatcc

SEQ ID NO: 307541 - DNA, 1734 bp, Unknown
  Bacterial polypeptide expressing nucleotide sequence isolated from the Sargasso Sea
gctaggggatactgcgattgcggtaaatccgaaggataaaagatataaaaatcatgttggcaaaactgtcacaataccaatcgtaggtagaaaaataaaaattattaaagataattatgctgatccggagcagggaactggagcacttaagatcacgccagcacatgattttaatgactatgatgttggtcaaagaaataaattagaaataattaatgtttttacggaagaaggaaaaataaatgataatgctccaaaagattatattggcttagataggtttgatgcccgtaaaaaaatattaaatgaattaaaagaaaaagacttttttgtaaaagaagaaaatatcaaaaataaagttccatatggcgatagatcgaattcagtaatcgaaccttttttaacagaacaatggtttgttgatgcaaagaaattagcaatcaaagctaaaaaaattgttaagacaaaaaaaacaaatttctttccaactaactggtccaaaacttattttcagtggatgaataatattgagccatggtgtatttcacgacaattatggtggggacatcaaataccagcttggtatggacctgatcaaaaaatttttgttgcgatcaatgaaaatgatgcaattaaacaagcaaaaaaacattataaaaaagatgtaaaacttactagagatcctgatgttttagatacatggttttcttcaggattatggccattcgcaactttaggttggcctgaaaaaaaagattacgtaaagaaattttatccaacaacagttttagtaacaggttttgatattatttttttctgggtggctagaatgattatgtttggtatggaatttttaaataaagaaccatttaaagatatttatgtacacgctttagtaagagatgaaaaaggacaaaaaatgtctaagtcaaaagggaatgttattgatccattagatttaatgaaaaaatatagtgctgatgcattacgttttactttactttctatggcgtctccaggaactgacgttaaactttcagaagatagagttaaaggatataggaattttttaaataaattatggaatgccaataattttttaatcactaataaatgtgattttaaaaaaaccaataaagttccaaaaatttcattaaatatcaataaatggatctattcagagttaatagaaactaaaaataaaattcaaaaaaatatagaggattatcgatttgatgaggcggcaaaaaatgcctatcaatttgcatggcactcatattgtgattggtatatagagctatccaaaacaattcttttctcagatgataaaaaggcaaaaacagaggtaaaagaagtttctgcttatgtttttaagcaaatattggttatgcttcatcctttcataccatttgtaaccgaggaaatatggttaaagaacaaatttgatgagtctaataaaaatttccttatgtataaaaattggcctactggaaaaattaaaaaagaccaatctcttaaagaagttgaaaaaattatcaaaattatctctgaattaagatcattcaaaaatgaattaaatgtcagccctggttcatttgttgatgttgcaattaataaaattgcaaaaaagaataaatcattagtaaataataatgatgttattttaaaaaaactgggtcgcatcaacaatttttttgataaagaacagaataaaccctctgctacacttgttat

SEQ ID NO: 307542 - DNA, 1535 bp, Unknown
  Bacterial polypeptide expressing nucleotide sequence isolated from the Sargasso Sea
atgggggattggaaagaaaaaatccggtaataaaataacacaacaacttaggcgtttaggagcttcagttgattggtcaagagaagctttcaccatgagcgatgatttaagcttggccgtaaaagaagtatttataaaactctatgatgaaggtttaatttacagaggagaaagactggtcaattgggatactgttctaggaactgccctctctgatttggaagtttcctctgaagaagagaatgggttcttgtggtacatagattatttgactgaaaacaacaacaaaataacagttgctactacaagacctgagacattacttggagatacagcaattgctgtaaatccggatgacaataaatttaaaaacctgataggtaaaaaggcaatagtaccgatagttaatcgagaaatacctatcatttcagatgactatgttgattcagattttgggacaggttgtgtaaaaattactccggctcacgactttaatgatttcgaaatgggaaaaagacataaacttcccatcatcaatattttaaatttcgatggtacattaaatgagactacaccagatcaatatcatggattgagtgtcaatgaagcaagagatctgatactcaaagaattggaggattttggtcaactcaagaaaactgaaccttatcgggtgcaaataccgagaagtgaaagaagcaattctattcttcagccgcttgttacaaatcaatggtttgtaaatgttaaaactttatctgaagaggctataagagtggtgaaagatgatgaaactcaatttgtacccaagaattgggaaaatacatattttaattggatggatgacatacaagattggtgtattagtcgccaactatggtggggacatagaatccctgcctggtttgactcagaaggcaatatatacgttgctgaatcagaagaaggagttcgaaaaaaatataaattagatgaaagagagcttcaacaagaggatgatgttttagatacttggttttcttcagcattatggactttctcaactctgggctggcccaaagatgaaaatctactctcgcgataccatcccacaagtgtattggtaactggatttgatattatttttttctgggtggctagaatgataatgatgacaacccattttattaatgaagtgccttttaagaaaattttgattcatggcctcattaaagactctgaaggtcaaaaaatgtctaaatcgaaaggaaacacattagatcccttagatatcatagatggtatcgacttagagtcattactagagaaaagaaccgatggtctcatgcagcccaagatgaaagaacgaatcataaagcagacaaaaaaagaattccctgaaggcataaaatcttatggaacagatgcattgagactaacattttgttctcttgcatctggaggaagggatataaactttgatataaaacgtgtcgagggatatagaaatttttgtaataaattatggaatgcagctaggttcatagacttaaata

SEQ ID NO: 307543 - DNA, 1769 bp, Unknown
  Bacterial polypeptide expressing nucleotide sequence isolated from the Sargasso Sea
aatggattctaaataccaacccaaaaaaattgagagattgtggtcttctaaatgggaagaatctaaattattttcaccaagcttaaagaaaaatagcaaagctttctccatcatgcttccgcccccaaatgtgacaggggttctacacatggggcatggctttcaaacatctatcatggattcgatttgtagatacaaacgaatgaatggatacgatgtgttatggcaaccaggaacagatcatgctggcatatcaacagaaatagtcgttgaaagaaatcttgaaaaggaaaataaaagtaaaaataaattagggagagataggtttatcaaggaagtctggaagtggaaaagcaagtcgggaaataccatcacaagtcaattgagaaggttaggtgcatctttagactgggaaaatgaagctttcaccatgaatgaagattatgcgcatattgtaagaaaagtattcattgaactttatgaaaaaggactgatttataagaagaatagattggttaattgggatcccaaaaatgagactggcttatccgacttagaggtaaccacgagggaagaaaatgggaatatttggcatatcaaatatgaagttggagatggctttattattgttgctacaactcggcctgaaacaatgtttggtgatcaggcaatagctgttcatcccaaagacaaaagatataaaaaattaataggtttaaaagcaaaaataccttttaccgataaatatatccccatcattgctgatccgtacgttgataaagattttggtactggttgtttgaagatcactcctggtcatgattttaatgactatgaactaggcataaaacatggactagagcctataaatattttgaatcctgatggcactttgaatgctgagactccggcccctttctcgggcatggatcgttttgatgctaggagagaaattattaaatctttaaaagatatccagatgttagagagaattgaaccgcataaattatctattccaagagcagaaagatccgacacgatactagagccttatctaacagatcaatggtatttaaatacagaccttattggtaaggaagctttgagcttggtcaaaaaaaagtcaatcaattttattcctgataattggaaaaaaacctatttctcttggatgaacgagcttcaagattggtgcatcagtaggcaattgtggtggggtcatcaaatcccaatttggtatgaccaagatggaagtgaatattgcggagaaaacgagaaagatattagaaaaaaatataaattagataaaaaaatatctctggttcaagatcaagatgttctggatacgtggttttcttcctctttgtggacttttgctacccttggttggccccaacaaacaaaaagactagataagtatcaccctacctcattattagtgactggtttcgacatcatctttttttgggttgcccggatgataatgatgacaaagcatttcacaaaggcaataccgtttaaagaaatctacattactgggctcatcagagatagtgaaggccaaaaaatgtctaagtcaaaaggaaatgttcttgatcctttggatattattgatggaataaatttagaagctcttatttcaaaaagaatttctggtttgttaaatccagacgacgagcaaaagataatcaaacagacaaagaaagattatcctcaaggaataaaagctcacggtactgatgctttgagatttacttttttgtctcttg

SEQ ID NO: 307544 - DNA, 1146 bp, Unknown
  Bacterial polypeptide expressing nucleotide sequence isolated from the Sargasso Sea
aatgaagttattagaaaaaaaacataacccttctgatattgagaataagtggtataagtactggcttgaaaaaaaatatttttctagtcaggaatctgaaaaccattatacaattgtaattccaccacccaatgttactggaaagcttcatatgggacatgtactcaacaatactattcaagatattttaataagaaaagctagaatggagggtaaaaatgcatgctggattcctggtacagatcatgcgtcaattgctactgaatcaaaagtaactaagatgcttgaagagcaaggaattaataaaaaagatttaactagagaagagtttttaaagtatgcgtgggaatggaaagaagaatatggtggtaccattattaatcaacttcaaaaactagggtgttcttgtgattgggataaaactagttttactatggatgaagattattctaaagcggttttagaatcttttgttcaattatataacaaagggttgatttataagggaagtaagcttgtaaactggtgtccaaagtcacagaccgctttaagtgatgaagaagttatttttaaagaggtaaatggaactctttggtatattaaatatgctattaatgagtctgatacatttatagaaattgcaacaaccagaccagaaactatgttaggtgatacagcaatagcagtaaatcctgatgataaaagatataaagaattgataggcaagacagcattattaccattagtaggtagaagtattcctattatagctgatgacatggtagatcctgaatttggaacgggctgtgttaaaattacacctgcacacgatttgaatgattatgaagtaggaataaagcataatctcgaaatgataaatattatgaatgcagacagttctattagcgataaagctccagaaaagtatagagggatgtcaagggaggctgctagaaagcaaattgttcttgatttaaaagacataaatcatctaataaaagaagaggattactttcataaggttggatattcagaaagaggaaatgtaccaattgaatattatttgtcagagcaatggtttttaaaaatggaagatttagctaagccagctagcaaagcagttaaagataatgaaattaattttta

SEQ ID NO: 307545 - DNA, 2087 bp, Unknown
  Bacterial polypeptide expressing nucleotide sequence isolated from the Sargasso Sea
atctgacttagaagttgatcaaagagagatgaactcaaaaatttactatattaggtatcctatagacaaatctaaagattttataactatcgcaaccactagacctgagacaatgttaggcgatactgctattgcagtgaacccaaaagacaaaaggtttaaaaagtatgtgggtaaaactgtcactataccaatagtaggtagaaagattaaaattataaaagatgattatgcagatcctgaacagggaactggagcattaaaaattacaccagcccatgactttaatgattatgatgttggtcaaagaaataaactggaaattataaatgtattcactgaagatggtaaaataaataataatgctccagttgaatatgttggattagatagatttgaagcgcgtaaaaaaattttaaatgagttaaaagaaaaagaattttttgttaaagaagaaaatatcaaaaataaagtaccttatggagatagatcaaattcagttatagagccttttctaactgaacagtggtttgtaaatgcaaaaaaattatctgttaaagctaaacaaatagttaaatcaaagaaaacaaatttctttccagaaaattggtctaaaacttactttcaatggatgaacaatattgaaccttggtgtgtatctagacaactttggtggggccaccaaataccagcttggtatggacctgataaaaaaatttttgttgcagtaaatgaggacgatgcaaaaaaacaagctaaaaaattttataaaaaagatgtaaaaattactagggatccagacgttttagatacatggttttcttctggcttatggccttttgcaacattgggttggccggacaataaagattttgttaaaaaattttatccgacaactgtattggtaactggttttgatattattttcttttgggtagctagaatgatgatgtttggaatggaatttttaaacaaagaaccatttaaagatatttatgttcatgcattagttagagatgaaaaaggacaaaagatgtctaagtctaaaggtaatgtaattgatccattagatttaattgaaaagtatagtgcagatgctttaagatttactctactttcaatggcatcacctggaacggatgtaaagctttcagaagatagagttaaagggtatagaaattttttaaataaattatggaatgctaataattttttaattacaaataaatgtgattttaacaaaacagataaagcccctaaaactaagctaaatatcaataagtggatttattcagagcttattcaaacaaaagaaaaaatagaaaaaaatctcaaagactatagatttgatgaggccgctaaaaatgcctatcagtttgcttggcactcttattgtgattggtatatcgagctttcaaaaactattctgttttcagacgatgaaaaagcaaaaaaagaggtaaaagaagtatctgcctacgtatttaaacaaatacttattattcttcatccatttattccatttgttactgagcaaatctggttaaaaaataaatttgataaatcagataagaactttctaatgtatgctaattggccatcaggaaaggctaaaaaagatcaatctttaaaggaagtagagaagatcataagtgttatttctgaacttagatcttttaaaaatgaattaaatgtaagcccaggttcatttattgatatttcaatgactaatattgctaaaaaaaataaaacattaatgaccaacaatgagattattctcaaaaagcttggtcgtatcaataatttctatgataaagaccaaaaaaaaccgtctgcaactttggttatttcaggggacatatttaagatttattttgatgaaaatgtggatttaaatttaatcaaagaaaacttagttaaaagacagaataaatacaaagaagaaatggacaaaatatctcagcggttatctaataaaggatttactgatagagctccaaaaaatattgttgaacaagaaaaaactaattatagtaatctaaaaaatgatatccaaaaaatatcattaaccatagaaagtatataat

SEQ ID NO: 307546 - DNA, 2344 bp, Unknown
  Bacterial polypeptide expressing nucleotide sequence isolated from the Sargasso Sea
cgaaggcattagcaaaaatgatttaggacgtgaaaaatttatagctaaggtatgggattggaaaaatgaatatggtgacataataattaatcagctcaaaaaattgggctgttcctgtgattggtctagaaatgcattcacaatggatgaaaatttatcaaaaagcgttttagaggtttttgttaatctttataaaaagaaaattatctataaatcaaaaaaactagttaattgggatacagtattaaaaacagcaatttctgacttagaagtagatcagcgtgatgtgagttcaaaaatgtactacataaaatatccaattcacgagacaaatgactttattattattgcgacaactagacctgaaacaatgctcggtgacaccgctgtcgcagtcaatccaagagataaaaggtataaaaaatttaaaaataaaaaagtcaatctacctttggttgaaagaaagattaaaattatatttgataaatatgcagacccgaaacagggaacaggagctgttaaaataactccagcacatgattttaatgactatgatgtaggtaaaagaaataaattagaaataattaatatattaaccgaagatggtaaaattaatgaaaacgcacccagtcaatatcaaggtttagatagatttgcagcaagaaaaaaaatcttatctgatttaagtgatttaggattattagttaaagaagaaacaataaaaaataaagttccatatggtgatagatcaaactcaattatagaacccttgttaacagaacagtggtttgctgatgcaaaaaaattatcaataaaagcaaaaaaaattgttaaaggaaaaaaaacaaacttctttccaactaattggtctaaaacttattttcaatggatgaataatattgaaccttggtgtatttcaagacaactatggtggggacatcaaattcctgcttggtatggtcctgataataaaatctttgtagcaatgaatgaagatgatgcaaaaaaggatgcaaaaaaatattataaaaaagatgtaagtttaattagagattcagatgttcttgatacatggttttcgtcaggtctttggccttttgcaacattggggtggccaaacaataatgaatatttaaagaaattttatccaacgtcagttcttgttacaggattcgatattatttttttctgggttgctagaatgattatgtttggcattgaatttatgaaaaaagaaccattcaaagatatttatgttcacgctttagttcgagacgaaaaagggcaaaaaatgtcaaagtctaaaggtaatgtcatcgatcctttagaacttatagaaaaatatagcgctgatgctctaagatttacattgctctctatggcatcacccggaagagatgtgaaattatctgaagaaagagttaaaggttatagaaattttttaaacaaattatggaatgcaaataattttttaattcacaataaatgtagttttaaaaatcttaaaggtaaattaaaaaccaatataaatataaataagtggatttataatgaattattacatacaaagttgacggttgaaaagaatataaaggactatcgttttgatgaagcagctagaaatatatatcagtttgtttggcactcatattgtgattggtatttagagctatcaaaaactattttgtattctggtaataaaagtcaaattgaagaaactaaaaaaacagcagcctttatttttagagagattttaatacttttaagtccctttattcctttcataacagaggaaatttggctcaaaaattctcttgataattctggtaaggatcatctaatgttgagtaattgggttagtggtaagcctaataaagagaagagcaatagcgaggtagcttcactgatacaatttatttcatcaataaggtcatttaaaaatgaattaaatattagccctggatcatttgttgatatctctttatcgaatatagccaaaaaaaataaagaatttttcaataagaacgaattagtaattaaaaggctaggtcgagttaataattttttagataaagatatgaacaaaccatcagcttctttagttatcgctggtaatatctataagctatatttcgatcaaaatgtagatttaaacctaattaaacaaaatttgattaaaaaacaaagtaaatttaaagatgaggttgataaaattaattcaagacttaaaaacaaagactttgttaagagagctccaaaacatattgttgaacaagaaaaaactaactataataatttacaaaacgatattaaaaaaatatcacttacagttaaagggttataa

SEQ ID NO: 307547 - DNA, 559 bp, Unknown
  Bacterial polypeptide expressing nucleotide sequence isolated from the Sargasso Sea
atgcaagacgaaacctatgagccattagctattgagaaaaaatggcaagagagctgggagtcagctaacaaatttgtaccagtaggttcggataaaaagttttcaattgttattccaccaccaaatgtaactggatctttacatatgggacatgcattagagcattcaataattgatgtaattactcgtataaaaaggcttcaaggatatgaaactttatgggtgccaggtacagaccatgcaggaatcattactcagttattagttgaaaatgaactatctgaaaagggtgtacagaaagaagacattggaagagaaaactttatatcaaaagtttgggaatggaaagaaaaatctggtgaaaatatatcaacccaaatgaggaaacttggtatgagctgtgactggtctcgtgagaggtttactatggacgaaggtctttccacagccgtaagagaagtatttataaaactttatgaagatggattaatttataaaggtacacgaatggttaactgggacacggaacttatgtctgcagtttctgatcttgaagtaa

SEQ ID NO: 307548 - DNA, 1165 bp, Unknown
  Bacterial polypeptide expressing nucleotide sequence isolated from the Sargasso Sea
acaagtgttctcgtcactggttttgatatcatatttttctgggttgctagaatgataatgatgggaactcagtttttagataaggaaccttttaaaaatatttatgttcatgctttagttagagatgaaaagggtcaaaaaatgtctaaatcaaagggcaatgttattgatccattagaacttatcgaaaaatatagtgcagacgccttaagatttactctattatcaatggcatcaccaggtcgagacgtaaaattatctgaagacagggttaaaggttatagaaatttcttaaataaaatttggaatgcaaataattttttaacacaaaataaatgtgattttggtgatgtaaaaaaacctgaaaatataaacttaactattaataagtggatactatctgaacttgtaaaagttaaaaacgacacagaaaatagtttaaaaaactataggtttgatgaggcagcaaagaatatttatcagtttgtatggcattcattttgtgattggtatttagagctatctaaaactgttttaaactctgaaaatgaggaagatatcaaggagttaagacaaacatcagcatatgtttttaaggaaattttaataatacttcatccatttattccatttgtaaccgaagagatatggttaaataataagctagataaagaaggcaaagattacttgatgcatgccaattggctagaagatgattatcatgaaaaaaaatcgtatgatgagataaataatatcatcaattttattacatcaataagatcatttaaaaatgaattaaatataagtcctggatcatttattgaaatttcaacagaaaatacaaataaagaatataaaaactttttatcttctaatgaaaatataatgaaaaaaaatggaagaattaaaaattttcatgaaaaagatttaaacaaaccatctgcaagtatagtcataagcggtgagttatttaaattatattttgatgaaaatgttgatttaaatatgatcaaatcaacattagaaaagaaaattacaaaaattagtgaagagatgaaaaaaattgatgttagattatcaaataaatcctttgtggatcgtgcaccacaaaatatagtagagcaggagaaaagcaactttgctaatcttgaaaaagatgttaaaa

SEQ ID NO: 307549 - DNA, 1108 bp, Unknown
  Bacterial polypeptide expressing nucleotide sequence isolated from the Sargasso Sea
gttccagaggaatttataggactagatagatatgatgctagaaaaaaaatactagaagatcttaaaaagaaaaatttgttagttaaagaagaaaagcaaaatatggtagtgccatatggagatcgatcaggtgttgttatagaaccttggcttactgatcaatggttctgtgatgcaaaaaaactttctattgaccctattaaatctgttaaatcaaataatactaaatttattcctaaaatgtgggaaaaaacattttttaattggatggaaaatattcaaccttggtgtatttctaggcaattatggtggggtcatcaaataccagcatggtatggtcccgataaaaaattttttgttgctgaaacattagaagaagctaataaacaagctcttaaacattatggaaaaaaccaaacacttaagcaagatgaagatgttttggatacttggttctcttcagctctatggacattctcaactttagattggccaaataaaacttatgaattagaaagattttatccaggaaatgttttagtcacaggtttcgatataattttcttttgggtagctagaatgatgatgatgggatcttattttatgaaagaaactccatttaaagatgtttatattcatcctttaattagagatgaaaaaggtcaaaaaatgtcgaaatctaaaggtaacattattgacccattggaattactagataaatatggagcagatactttaagatttactcttacttctttaattaatcctggaagagatgttaaattatctgaatctagagtcaaaggttataaatcatttattaacaaaatttggaatgcttcaaactttttacaacttaataaatgttctttagacaaagattttgattataaaaaaataaaagctccagtaaataaatggattattaatgaattgattaaaactaaatcaaatattgaaaaaaatactttaaaatatttatttcatgaagtttctaatgatttatatcattttgtttggcactcatattgtgattggtttatagaattttctaaatccttaatattaaagatgcagatgaatctaatgagacaaaaaatgtattaat

SEQ ID NO: 307550 - DNA, 1648 bp, Unknown
  Bacterial polypeptide expressing nucleotide sequence isolated from the Sargasso Sea
aatggacaaaaggtacaaccctactgaagttgaggaaaagtgggttgaaatttggtcgaatgaggtagtatcaaataaaagttcaaaggaatctttttcacaggtaatacctccgccaaatgttacgggaactctccatatgggccacagtttccaatatgcgattatggacttttacaccagatataatcacatgtcaggtaagaaagctcattggcaagttggtactgatcatgctggaattgcaactcagatggttgtggaaaataatctctccaaaaaaaatattgatagaaaagatcttggcagggaaaaatttcttcaagaggtatggaaatggaaagatttttcagaagataaaatacaatctcaaatcaaaagattaggctcaactgtagattggaacaaatatagatttactcttgatgataaattttctaaggctgttaacaaagcatttgttgatctttatagaaataaaaagatttacagaggatatagattagtaaattgggatccatctcttaaaactgctgtttcagaccttgaagtggtgagacaagaaaaaaaaggaaccatatggtacataaaatatcccatagatagttctgataaatttattacagtagcaacaacaagacctgaaactctttttggcgatatggccattgcagtaaatccaaatgatgaaagatataaagatcttattggcaaatatgctctattaccttttgttgaaagaaaattaccaattattggtgatgattatgttgatatggaatttggtactggttgtttaaaaataacaccggctcatgactttaatgattatgaaataggcaaaaaatattgtttacatgagaaagataacaaagtttacatgtccaaaaatattgacgacttcgagccaattaatatttttaatcaagatgcgtggacaaataataatgtaccgaaattatttgaaaatttagatagatttaaagtaagaaaattagtcataaaagaattaactgagttaaaactccttgaaaaggaagaggaatatgacgtgagcataccgagaggtgagcgttcaaatattgtaattgagcccagattgagtcatcaatggtatgtaaagacttctgaaatggcagagaaagctaatatggaagttaaaaaaggaaacattaaatttcatcccaataactggataaagacctattttaattggatggataatattgaggattggtgtataagtagacaaatttggtggggtcacagaattccagcttggtacgatgataatggaaatatttacgttggtgaaaatgaacaagatgtaagaaattattacaaacttgatgcaatagatcttaagcaagatgaggatgttttagatacatggttctcatcaagtctctggccattcggatctcttggttggccagagaaaacagacgattttaaaagtttctttccaacttctcttctagtgacaggttttgacattatatttttctgggtagcaagaatgataatgatgagtattgaatttactggaaaaatacctttcaaggatgtgtatgttactggtcttatcagagatgaaaatggtcaaaaaatgtcaaaatctaagggaaatattattgatcccaattga

SEQ ID NO: 307551 - DNA, 1349 bp, Unknown
  Bacterial polypeptide expressing nucleotide sequence isolated from the Sargasso Sea
aatggataaaaggtacaaccctattgaagttgaggaaaaatgggttgatatttggtcaaaagaaatctttataaataaggatgctaaggaaactttttcacaaataatcccccctcccaatgtaacaggtactttgcatatgggacatagctttcaatatgcaattatggatttttatactagatataatcatatgtcaggcaaaaaagctcattggcaagttggttcagatcatgcaggtattgcaactcaacttgttgtagaaaataatttagctaaagataacattgatagaaaagatcttggaagagaaaaatttatagatgaagtttggaaatggaaagacttctctgaaaataaaattcaatctcaaattaaaagattaggatgttctgtagattggaataaatatagatttacttttgatgaaggatttactaaagcagtaaataaagccttcatagacctatatcgcaaagataagatctatagaggatatagattagttaattgggacccttccctaaaaacagcagtatcagatctagaagtcgttaggcaagaaaaaaaaggccttatatggcatataaattatcccatagatggttcaagtgattatataacagtagcaacaacaagacccgagactttatttggtgatatggcaattgcagtcaatcctaaagactcaagatataaatcaatgattggcaaatatgcacttcttccttttgttaatagaaagttgccaattattggagatgaatatgttgacatggattttggtactggatgcctaaaaattacccctggtcatgactttaatgattatgagattgggaaaaaatataacttacatgagaaggatgggacagttttaacctcaaaaaatattgatgattttaaaccaattaatatttttaacgatgatgcatggacaaatggaaatgttccagatcaatttagtggtcttgatagatttaaagtaagaaaattagcaattaaagaattagataagctaaaacttctagttaaagaggaggaatatgatattagtgttccaagaggagaaagatcaaatattgttatagaaccaaggctaagcaatcagtggtatgtaaaaacatctgagatggctaaaaaagctaataaagaagttaaagatggaaatattaaattttatccaaagaactgggttaaaacttattttaattggatggataatattgaagactggtgcataagtaggcaaatatggtggggtcatagaatacctgcttggtatgacgaagaaggaaatatatatgtaggtgagagtgaggatgatgtaagaaatcattataaattaa

SEQ ID NO: 307552 - DNA, 1076 bp, Unknown
  Bacterial polypeptide expressing nucleotide sequence isolated from the Sargasso Sea
aatgagttcagataaatatatccattcagaagttgaaaataagatttattcttattgggaaaaaaataatttatttaaacccaaaaaaaacaaaaaatcattttcaatagttatcccgcctcctaatgtaactggaagtcttcatatgggtcatgctttaaataattctattcaggatctattaacaagatttcatagaatgaataattatgaaactttgtggcaacctggaacagatcatgctggaattgccactcaggcattagttgaaaaaaaactagctaacgatggaattaaaaagaatgatttaggtagagacaaatttatagaaaaagtttgggaatggaaaaatcagtatggcgatataataattaatcaattaaaaaaattaggttgttcatgtgattggtcaagaaatgcatttacgatggacgataatttgtcaaaatccgttataaaagtctttgttgatctttataaaaaagatttaatttataaatcaaaaaaattagtcaattgggatgtggttcttaaaactgctatttctgacttagaggttgatcaaagagaagtaaattcaaaattatatcatataagatatccaatagaaaattcagatgaatttataactatagcaacaactagacctgaaactatgctgggtgatacggctatagccgtaaaccctaaagacgatagatataaatcactagtaaataaatttgttacaattccattagttgagagaaaaataaaaatcattgaagatgattatgccgatcctgagcaaggtacgggtgcagttaaaattacaccagctcatgactttaatgattatgaagtaggtcaaagaaataatttagaaattttaaatatatttacctctgatggtaaaattaatgaaaatgcacctaaagaatttattggtttagatagatttgaagctagaaaaagattactgaaaaaactaaaagaaaaagattttttagttaaagaagaaaatattaaaaataaaattccatatggcgatagatcaaattctatcattgaaccatttctaactgaacaatggtttg

SEQ ID NO: 307553 - DNA, 1753 bp, Unknown
  Bacterial polypeptide expressing nucleotide sequence isolated from the Sargasso Sea
atggataacagttttaactcgtctcaaatagaacaagagctctacaaaatgtgggaagaagaaaacttcttcgcccccgcagatagagacaatcaaaaaaacttctgcatcttgatccctccacctaacataacgggaaccctgcacatgggtcatgcctttaatcacacgcttatcgatatcttgattagacatagccggatgacaggtaaacgcaccctatggcaaggagggactgaccacgccgggattgcgactcaaatgctagtcgaaagaaagctcgctgaagagaatctaagcaagatagaactgggaagagaaaaatttctcgagcgagtctgggattggcgccgcaactctggaaacacaataagccaacagatcagacggatggggtctagtattgattggtccagagaaaggttcaccatggatgaggattacgcagacgcggtcctggaggtctttgtaagactttatgacgagggattgatttatcgaggtcaaagactggtcaattgggacccagaattaaaaaccgcaatctccgaccttgaagttgaaaacacagaagaaaatggccttttgtggcacattcgctatccattgacaaaccatgctcgaacaaaagcaggccatccttacctagttgttgcaaccacaagaccagagacaatgctcggagatactgcggtggccgtccaccccgatgatgagcgctacaccaacctaattgggacttctgtagagctcccgctttgctcaagaacaataccgattatctcagacgaatacgtagatccagaatttggaactggttgcgtcaagataactccaggacacgatttcaatgactacgaagtaggcgcacggcatgatctccctttgatcaacatccttacagagaccgcgcaaattaatgaggaggcaccacaagcataccgaagactcgatcgattcgaagccagagaaaaaatcatagaggatctagaaaaaactggtttgttggaatcaattgacgatcactcattgatggtgccgagaggcgaccgctccggatctattattgaacccctattgactgaccagtggtttgttaaaattcagccgctcgcctcaccagcaatcgacgctgttaaaaagggagaagtgcgttttgtaccaaaacaatatgaaaacgtttacttttcctggatggacaacatacaggactggtgtattagtcgtcagcaatggtggggacaccaaatcccagcgtactacgactccgaaggaaatatatacgtagcaaaaaacgaagaagaggcgcgtgaaaaatacaatttagaatcatccttaccactaagccaagatggagatgtgctcgaaacttggttttcgtcggctctatggccgttcgctaccatgggatggcctaaagaaaccgatgatctaaagcatttcctgccctccagcactttgataactggccatgacattatctttttctgggtagcaaggatgatcatgatgacacttcacttcacccaaaaggtgcccttcgaaacggtctatatacacggcatcatacgagacgcggatgggcataaaatgtcgaagacaaaaggaaatggcctagaccctttagacttcatagatggcatcgacctagaaactcttgtcgacaaaagaacaagcaaccttactcaacctcaaatggcgcaacggatcgaaaaatccaccaaacaagaatttcctgagggaatgaagctta

SEQ ID NO: 307554 - DNA, 2596 bp, Unknown
  Bacterial polypeptide expressing nucleotide sequence isolated from the Sargasso Sea
tatgcaagacgaaacctatgagccattagctattgagaaaaaatggcaagagagctgggaatcagctaacaaatttgtaccagtaggttcggataaaaagttttcaattgttattccaccaccaaatgtaaccggatctttacatatgggacatgcattagagcattcaataattgatgtaattactcgtataaaaaggcttcaaggatatgaaactttatgggtgccaggcacagaccatgcaggaatcattactcagttattagttgaaaatgaactatctgaaaagggtgtacagaaagaagacattggaagagaaaactttatatcaaaagtttgggaatggaaagaaaaatctggtgaaaacatatcaacccaaatgaggaaacttggtatgagctgtgactggtctcgtgagaggtttactatggacgaaggtctttccacagccgtaagagaagtatttataaaactttatgaagatggattaatttataaaggtacacgaatggttaactgggatacggaacttatgtctgcagtttctgatcttgaagtaactttaaatccagaaaaaggaaaattgtggagtattaaatataaaacagaagattcgtttttaactatttctactacgcgtccagaaactcttttaggagatacagcagttgctgtaaatcctgatgatgaaagatataaaaatctaattggtaaaacagctattgtgcctttagtaaatcgtgaagttccaataattgcagatgaatatgttgatccagaatttggttcaggatgtgtaaagattacgccgtcacatgatttcaatgattatgaaattggagaaaaacataaattagagtttattcaatgtattgaccttgatggaaaaataagcaacgaagattttattcctgaaaatttaagagggaaagatagatttgaagcaagaaaattaatagtaaatgatttgatgaaattagaacagcttgaaaaagaagaagattatgatattcaattaccaaaaggagataggtcgaaaagcattctagagccaatgattacagaacagtggtttgtaaaaaccgaaacattagcaaagaaagcaatcaaagctgtagagacagaagaaattaaatttgtgccaaaaaactgggaaaaaacttattttgagtggatgtacaatattcaagattggtgtatttcaaggcaaatatggtggggccacagaatcccagcttggtacgatgaagagaataatatttatgtaggaaactcagaacaggaaataagggagaaaaacaatcttcctaaagaaacaaaattaagacaagatgaagatgtattagatacatggttttcatctgctttatggcctttttcaactttaggatggcctgaggaatctgaagatttaagtaattattatccaacatcattattagtagtagggtttgacatcatattcttttgggtagctcgaatgattatgatgggcattaatttccaaaaagatattccatttaaagacatacttgtacatggcctagtaagagactcaaaaggaagaaaaatgtctaaaagccttggaaatactattgatccattagaactgtctgataaacatggagcggatgctctaagattctctttagttgaaaaagcttctccaggccaagatgttccctttgatgaagaatggacaatagcagcaaaaaaatttggcaacaaaatatggaatgcatctaaatttgtccatatatacacagacggaaaagaaaacaatgatttaagcacaatagagtgtgaagaaaataaatggataataaataagtttgatgcagttcttgatgaatttaactctttgttcgaaaagtacaaaatttcagatgcatacaagttgctatataactttctatggtctgacttgtttgattggtattttgagttttcaaaaaatttaattgaaaatgaaaatcataaatcagaaactatggaggtacttaattcagtttttcttaaatcaataaaaattttaaaccctgcgatgcctcacattacagaagaggtatgggaaacgtttgataatgaagtattaattagcaataaatggcccgaaaaatataatataaacgaagacaacgatggaagtgttgaagatttaaaaaatatgatatctaaaattcgaaattttaaagcaacatatcaaataaaaaataacactaagttaaaaatatattctgatgtcgaaatagaagattggtttaaatctcagtttgaatctttagcaaaagttgaaatacaaaaagatacattttccccaaaggagggagaagctgttttacattttcatgcaggaaattatgattttgttctatctgctgaagagtatattgatatagaagtagaaataaaaaaattaaataaaaaaattaatgaaattgaaaaatctatcgagatttcaaacaaaagacttgaaaatgaaaaatttatgaagaatgcaaaaccagaacttattgatgaagaaaaatctaacaaggaagctttagaaatggagcttagtgttataaaagaaactcttaaagaattaggtaattga

SEQ ID NO: 307555 - DNA, 1705 bp, Unknown
  Bacterial polypeptide expressing nucleotide sequence isolated from the Sargasso Sea
atgagttcagaaaaatatatacatacaaaggtagaaaataagatttattcctattgggaaaaaaaacaactttttaaaccaaaaaaaaataagaaaaaatattcaattgtaataccgccacctaatgtaactggaagcttacatatggggcacgctttaaacaatacgattcaagatttattaattagatatcatagaatgaataattatgagaccttgtggcaacccggaactgatcatgcaggtattgcaactcaggccttagtagagaaaaagttagaaagccaaaatattaataaaaaatccatcggaagagacaaatttgtaaaaaaagtttgggagtggaaaaatgaatacggtggaataattattaatcaacttaaaaaacttggatgctcttgtgattggtcaaggaatgcatttactatggataaaaatttatcctcatctgtaatcaaagttttcatagatttgtacaacaaaggattaatttataagtcaaaaaaattagtaaattgggatacggttctaaaaacagctatatcggatttagaggttgatcaaagagaggtcaattcaaagctatattacataaattaccaaatagaaaattcgtcaaattttataacaattgctacaactaggcccgaaaccatgctcggtgatacagcggtggctgtaaatcctaaagatgaaagatatcaaaatttaattggaaaaaatgtaattttaccaattactaacagaaaaattaaaataatagctgatgattacgcagatccagagcaaggttctggagctgttaaaattacacccgcacatgactttaatgattatgacgttggtaaaagaaataaattggaaattataaatattttcactgaagatggtaaaattaataataatgcaccaaccgaatatgttggattagatagatttgaggctcgaaaaaaaatacttaatgaattaggtgacaaattaattaaagaggaaaaaataaaaaataaagttccatatggtgacagatcaaattctgttatcgaaccatacttaactgaacaatggtttgcagatgcaaagaaattatctataaaagcaaagaaaatagttaagaataaaaaaacaagtttctttccaaaaaattggtctaaaacgtactttcaatggatgaacaatatagaaccgtggtgcatatctagacagttatggtggggacaccaaatacctgcttggtacggtccagataaaaaaatatttgttgcaaataatttaaacgaagcaaaaaaacttgctaagaaaaaatataaaaaagatgttacattaataagagatgaagatgtactagatacatggttttcatcaggtttatgggcttttgcaactttaggatggccaaaaaaaaatgaatatttaaaaaagttttacccaacatctgtattagttactggctttgatattatctttttttgggttgcaagaatgatgatgtttggaatggaatttttaaataaagaaccttttaaagatatttatgttcatgctttagttagagatgaaaaaggtcaaaaaatgtcaaaatctaaaggcaatgttattgatcccttggtattaatagaaaagtacagtgctgatgcattaagatttacattattatcaatggcttcacctggtcgagatgttaaactctctgaggatagagttaaag

SEQ ID NO: 307556 - DNA, 2626 bp, Unknown
  Bacterial polypeptide expressing nucleotide sequence isolated from the Sargasso Sea
aatgaagttattagaaaaaaaacacaacccttcagatattgagagtaagtggtataagtactggcttgaaaaaaaatatttttcaagtcaggaatctgaaaaccattatacgattgtaatacctccaccaaatgttaccggaaagcttcatatgggacatgtacttaataatactattcaagatattttaattagaaaagctagaatggaaggaaaaaatgcatgttggattcctggtacagatcatgcgtcaattgctactgaatcaaaggtaaccaaaatgcttgaagagcaaggaattagtaaaaaagatttaacgagagaagagtttttaaaacatgcttgggaatggaaagaagaatatggtggtactatcattaatcaacttcaaaaactagggtgttcgtgtgattgggataaaactagttttactatggatgaagattattctaaagctgttttagagtcttttgttcaactatataataaaggattgatttataaaggcagtaagctagtaaactggtgtccaaagtcacagaccgctctaagtgatgaagaagtcatgtttaaagaagtaaatgggaatctttggtatattaagtatgctattaatgactcagacgcttttatagagattgcaacaacaagaccggaaactatgttaggcgatactgctatagcagtgaatcctaatgataaaagatataaagaattgataggtaagacagcattattaccattagttggtagaagtattcctattatagcagataatatggtagatcctgaatttggaacaggctgtgttaaaattacacctgcacatgatttgaatgattatgaagtaggaataaagcataatctcgagatgattaatattatgaacccagatagttctattagcgataaagctccagaagagtatagagggatgtcaagggaggatgctagaaagcaaattgtttctgatttaaaagacataaatcatctaattaaagaagaggtttatcttcataaggttggatattcagaacgaggaaatgttccaattgaatattatttatctgagcaatggtttttaaaaatggaagatttagctaagccggcaattagtgcagttagaaataaagaaataaatttttatccaaatcattgggttaaaacttacaatcattggatggataatattcaagattggtgtataagcagacaactttattgggggcatcaaatacctgtatggtataaaaaagatgctgatagatctaatcaagataattggtttgtttcaaccacaccacctacagatttggaaaattgggagcaggataatgatgttttagatacatggtttagttcatggttgtggccttttgcagttcatggttggccagatataaaaaccacaaaatattttccaactaatgcactggttactggcccagatataattttcttttgggtagcaagaatgattatgtcaggttatgagtttatgggtgatttgccattcaaagatgtttatttcacgagtattttaagagatgataagggcagaaaattaagtaagtctttagggaactctcctgatccaataacactatttgaaaaatatggtaccgatgcaactagattttctataatgttgatgtcaccacagggttcggatgtatatttttctgagaatggaattgaagttggaagaaattttatgacaaagatttggaatgctagtagatttattatgcttaatcatgaagattcattttcaaatgaaataaatgttgaaaaattagataattttgataaatggattcttgattcacttgacgaaacagttaatgaagtcaataaatactttgacaaatatcagtttaatgaagcaataaaaaagatttatgattttacatggaatgagttttgtaattggtatatagaaattgtaaaacacagatttagagagggagattttgttacaaaaagtaactcgtttaatatttcaaaaaaaataataaagaaaattgtattattattgcacccaattgcaccatttatatctgaagaaatttggaatcacctcaaagatgataatgaacaagatattattatatcatcttggcctaaagctaaaaatagagatataagtcataacaaagatgaaatatcagattttaaagaaatagttacttcaattagaactatccgctctgaattaaatattccaccgtcaaaaaaaattgatgttatagcttatgcaaaaaatgaattaattaagagtagattaaattcattagttgatttaattaaatctttatcaaattctgataatttgaatttgagtttagaaaaagaaaagcctgaaaactctgcagtagctgtttgcaaatcagtggagctatatatccctttaggtgatttagtcgataaagatgaagaactcgctaagcttaataagagattaagtgaactagattcctttattttatcaattgaaaataagctttcaaatgatgattttatcagtaaagctcctgaaaatattgttagtggcgaaaaaaataaactaaacgattttcttgttgaaagaacaaaaattctttctaatattgaggtattaaaatga

SEQ ID NO: 307557 - DNA, 1543 bp, Unknown
  Bacterial polypeptide expressing nucleotide sequence isolated from the Sargasso Sea
ggtactcgaatggttaatttgggatacaaaattaaagtcagcagtttctgatttggaagttacgtcttcaaatgaacttggcaagttgtggactatcaattacaaggtcgaaaattcatttatagaaattgcgacaacaagaccagaaactttactaggcgatacagctgttgctgtaaacccttcagacgatagatataaaaatttgataggaaaaactgcaattatcccaatagtaaatagggaagtaaaaattattgctgacgactatgttgatgttgaatttggctctggctgtgtaaagattactcctgcccatgacttcaacgattacgaaattggcaaaaggcataatctagaaatgattagatgtttagattttgatggaaatattgaagatcatgaatttataccaaaagaattaagaggacttgatcggtttgaagctcgagaaaaaataatagatatgcttaaaaatcaaaatttacttcaagaagtcaaagatcatcaaattcaaattccaataggagatagatctaaaacaatactcgaaccaatgatttctgaacaatggtttttaaaaacggatgagattgccaaaaaagcaatacaagttgttgaggatgatgaaatcagatttataccaaaaaattgggaaaaaacttattttgagtggatgtacaatattcaagactggtgtatatctagacagcagtggtggggccataggattccagcttggtacgatgatgaaaagaatcattatgttggtactagcgaggccaatgtaagacagaaatatggtcttaaagataatgttcagttaattcaagatgaggatgtattagacacttggttttcttcagcactttggccatttagtactttaggatggcctgaagacacagaagatttaaaaaggtactatcctactaccttacttgttactggttttgatattatttttttctgggttgcaagaatgataatgatgggtttatatacaatggaaaatattccatttaaagatattcttatacatggattagttagggattcacaaggtagaaaaatgtcaaaaagccttggaaacacaatggatccccttgaattatctcaaaaacatggagcagacgctttgagattttcacttattgaaaaagctaatccaggacaagatgtgccatttgatgaagagtggacagtgtctgcaaaaaaatttggcaacaagatatggaatgctgcaaaattcgtgcatttatacactgatgaatctacaccatctgagattagcacggtatctttaatcgaaaataaatggatcatatcaaggtttaataacaccttagatgaatttaatgatctttttgaaaaatacaaaatttcagatgccttcaaattactatataattttttgtggtctgagttgtttgattggtattttgaattctcgaagaacttgttcaatgatgaagataaaaaaattgaaacccaaacagttttaaaatcaatatttctagaatcattgaaattattaaatcct

SEQ ID NO: 307558 - DNA, 1069 bp, Unknown
  Bacterial polypeptide expressing nucleotide sequence isolated from the Sargasso Sea
tgtaataccacctccaaacgttactggaagtcttcatatgggtcatgcacttaataactccattcaggatctattaaccagatatcataggatgaacaactatgaaactttgtggcaaccaggaactgaccatgctggaatagcaactcaagctttagtagaaaaaaaacttgagaaagatggattgaaaaaaaacgatttaggtagagaaaaattcatagaaaaagtatgggagtggaaaaaccaatacggcgatataatcattaatcagcttaaaaaactgggttgttcatgtgattggtcaagaaatgcttttacaatggataaaaatctatctgactcggtgatcaaggtattcgtagatctttataataaaaaattaatatataagtctaaaaaattggtaaattgggacactgtattaaaaacagcaatttcagatttagaggtagatttaagagaagtaaattcaaaactttattacataaattatccaattgaaggatctaacgaaaatataactatagcaactacaagacccgagacaatgcttggtgatactgctgttgctgtgaacccaaaggaccaaagatataaaaaattagttggtttaaatattatactcccactggttgaaagaaagattaaaatcatatcagatgaatatgcagatccagagcaaggaacaggcgctgttaaaataacaccagctcacgattttaatgattatgaagtaggggtcagaaataaacttgaaatcttaaatatatttactgatgatggaaaaataaatgaaaatgctccgaaagaatttattggtttagatcggtttgaggcaagaaaaataatattaaaaaaattagttgaaaaaggtttttttgttaaagaggaaaatattaaaaataaagttccttatggtgatagatcaaactctattattgaaccttatttgacagagcaatggtttgcagatgcaaaaaaactttctgtaaaagcaaaaaaaattgtaaaatcgaagaagacaaaattttatcctggtaatggtctaaaacatattttcaatggatga

SEQ ID NO: 307559 - DNA, 844 bp, Unknown
  Bacterial polypeptide expressing nucleotide sequence isolated from the Sargasso Sea
gatgaataatattgaaccatggtgtatttcaagacaactatggtggggtcatcaaataccagcatggtacggaccaggtaaaaaaatttttgttgcaaaaactgaaaaagaagcaaaacaacttgcaaaaaaatattataaaaaagatattaaattaaatagagatccagatgttttagacacatggttttcatcaggcctttgggcatttgcaacattaggatggcctactaaaaatgaatttgtcaaaaaattttatcccacatctgtattagtaacaggctttgatattatatttttctgggttgctcgtatgattatgtttggtatggaatttctaaataaagaaccttttaaagatatttatgttcatgctcttgttagagatgaaaaaggacaaaaaatgtctaagtctaaaggtaatgttattgatcctttagagcttatagagaaatacagtgctgatgctttaaggtttacattgctttcaatggcttccccaggaagagatgttaaattgtctgaggatagagttaaaggttatagaaattttttaaacaaactatggaatgctaataactttttaattcaaaataagtgttcctttaaaaacattcaaaaaaaaccaaaaatttcaattaatatcaataagtggatatatgcagagttattagaaactaaaaaaaatgttgaaaaaaatattaaagattaccgttttgacgaggcagcaagaaattcttaccaatttgtatggcattcttattgcgattggtacttagagcttaccaagaccattctttattccaatgataaaaagtctattaaagaaataagagaggtatct

SEQ ID NO: 307560 - DNA, 1021 bp, Unknown
  Bacterial polypeptide expressing nucleotide sequence isolated from the Sargasso Sea
ttttaattggatggacaatattcaagactggtgtatcagtcgacagatctggtgggggcatagaattcctgcttggcttgatgcagatggcaacacttacgttggatttaatgaggaagaagttagggatttttacaaattagaccaaaggaagcttaatcaagttgaagatgtcttggatacttggttttcatcatcgctctggtcatttggctctctgggatggcctgataacactgaggatcttcaaagatattttccaacttctttgcttgtaacaggttttgatatcatctttttttgggttgcacgaatgatgatgatgagtcttgagtttacaggaaagattccatttaaagatgtctatgttacagggcttattagggatgaaaatggtcaaaagatgtctaagtcaaagggcaatattattgaccccattgatcttatttatgggattgagcttgaggatttagttgcaaaaaggaccgctaatttaatgcaagaaggtttagcagaaaagattgaaaggaaaacacgtaaacaatttcctaatggaattgaatcctatggaacggatgccatgcgtatgactttttattcactggcaacccacaccaaagatataagctttgagcttggaagattaaaaggttaccggaacttttgtaataagatgtggaatgctgccagatttataaacaactaccctcatgaacaaaaagaatttatacctaaaaatgatgctgacaggtggatcgaaaaagaattcgagacagtttcaaaacaaataaataaaaatattgctgaatatcgattggattttgccatcaacgaagtttatgaatttttttggagtaagttttgtgacaagtacatagagaaatgtaaggcttctggcgaaactggtaatctacatccaatgcttaaaagaattctactgcttgtccatcctttctgtccttatatttcagaagaaattaatgaactgatatttaaagacggatctttgatggatctttaa

SEQ ID NO: 307561 - DNA, 1519 bp, Unknown
  Bacterial polypeptide expressing nucleotide sequence isolated from the Sargasso Sea
ttctgatctagaagtagagcaaagagatactgaaggaagtttatggcatattaaataccctatagatgaaaataatcatatcattgttgcaacaacaagacccgagacaatgttaggtgataccgcagttgccgttcatccagatgatgaaaaatataaaaatctaattggcaaattttgtaacttaccaatttcaaaaaagaaaataccaatcattgctgatgaatatgcagatcctgaaaaaggttctggagctgtaaaaatcacacctgcacatgattttaatgattttgaggtaggaaagagacatgatttagaatttattaatatttttgatgaaaatgctaaactaaacttaaatgtgcctgaagaatttcaaaatttagatcgatttgaagcaagaaaactaattttaaaaaaattagatgaaatgaatttattaattaaagaagaaaaacagcaaatggtcattccatatggtgatagatcaggtgttgttattgagccatggctgacagaccaatggttttgtgatgcaaaaaaattatcagttgatccaatatcagctgttagagataatagttctaaatttattcctaaacaatgggaaaatacattttataattggatggaaaatattcaaccgtggtgtatttcaagacagttatggtggggacatcaaattcctgcatggtatggtccagataataaatattttgttagtgaaactctagaaggagcacaaaatctagcaaaagaattttatggagaggatgttaaacttagacaagatgaagacgttctagatacttggttttcttctgctctatggacattctctactttggattggccaaataaaacctatgaattagatagattttatcctggcaacgttttagttactggttttgatatcatatttttttgggttgcacggatgatgatgatgggttcttattttatgaaggaaactccatttaaagatatttatattcatcctttaatacgtgatgaaaaaggacaaaaaatgtctaaatcaaaagggaacataattgatcctttagatttattagataaatatggcgctgatacattaagatttacactaacagcactattaaatcctggacgagatgtaaaattatctgaagctagagttaaaggatataaatcattcacaaataaaatttggaatgctggaaaatttttacaattgaataattcaatttttatagatgatatttcaattgattcaattatttttgatgcaaacaaatggataataaaagaattgaatgatttaaacactcaacttgatcaattaactaaaaagtatttgtttcatgaaatagccaataaaatttatcatttcgtatggcatacttattgtgattggtacattgaaattatcaaacaaaattttgaaaatgaaaaatttgctgatgaaattaaaaaagtttctggatggacatttattcaagttttaaagataatacatcccattatgccatttata

SEQ ID NO: 307562 - DNA, 2059 bp, Unknown
  Bacterial polypeptide expressing nucleotide sequence isolated from the Sargasso Sea
aatgagttttgataaatatgagcataataatgtagaaaataaaatctacgattattgggaaaaaaatgaattatttaaacccaaagaaaactcaaaaaaattctcaattgtaattcctccaccaaatgtaactggaagccttcatatggggcatgctttaaataactctattcaggatgttttaacgagatttcatagaatgaataattatgaaactttatggcagcctggaacagatcacgcaggtattgcaacccaagcattagttgaaaaaaaacttgctaaggacgctattaaaaaaaatgatttaggtagagaaaaatttatagaaaaagtatgggaatggaaaaatgagtatggagatataatcataaaccaacttaaaaaactcggatgttcatgtgattggtctcgtaatgcttttacaatggatgaaaatttatctaagtcggtaattaaagtatttgttgatctttataataaaaaattaatctataaagcaaaaaaacttgttaattgggatgttgttttaaaaacagcaatatctgatttagaagttgatcaacgtgaagtaaattctcaactttattatataaattacccaatagaaaattctgataaatttgtaacaattgcaacaaccagacctgaaactatgttgggagatactgcaatagcagttaatcctaaagacgatcgatttaaagatattgttggaaagctagtgaccattcctttagcaaacagaaaaataaaaataataactgatgactatgctgatcctgagcaaggaacgggtgcagtaaaaattactccagcccatgattttaatgattatgatgttggtacaagaaacaacttagaagtaattaatatatttactccagatggaaaaataaatgacaatgcacctgacccatataaaggtttagatagatttgctgcaagaaaattaatcttagaacatcttgaagaaagtaaatttttacaaaaaatagaaaagttagtaaataaggttccttatggggatagatctaattctattattgaaccttatttaactgaacaatggtttgttgatgcaaaaactttagccattaaagcaaaagaagtggtaaataatggtaagactaaattttttccagaaaattggtcaaaaacttattttcaatggatggataacattgaaccttggtgtatttctcgtcaattatggtggggacatcaaattccagcatggtacgggcctgatggaaaaatatttgtagctgaaaatgaagacgaatgtaaaaaacaggcaaaagaattctattcaaaagatgtggaattaaaaagagatgaagatgttctggatacttggttttcatcaggtctatggccatttgctactttaggttggccagaaaaaacaccagaagttgaaaaattttatccaacaagcgttcttgttactggttttgatatcatatttttttgggttgctagaatgattatgatgggaactgagtttttaaaagaagagccttttaaaaatatatacgttcacgctttagttagagatgaaaagggtcaaaaaatgtctaaatcaaaaggaaatgtaattgatcctttagaacttattgaaaaatatagtgcagatgctttaagatttactcttttgtcaatggcatcgccaggtcgtgatgtaaaactatctgaagacagggttaaaggttatagaaatttcttaaacaaagtttggaatgctaataattttttaagacaaaatgagtgtgattttagtgacattaaaaaacctgaaaatcttaaattaacaattaataagtggatattatctgaactagttaaaacaaaaaaagagactgaaaacagtttaaaaaactatagatttgatgaagccgcaaagaatatttatcaatttgtatggcattctttttgtgactggtatttagagctatctaaaactgtatttaattctaataatgatgaggagattaaagaactaagacaaacatcttcatatgtctttagagaaatcttaataatactgcatcctttc

SEQ ID NO: 307563 - DNA, 1009 bp, Unknown
  Bacterial polypeptide expressing nucleotide sequence isolated from the Sargasso Sea
atgagtaacgataaatatatccattctgaagttgaaaataagatttattcatattgggaaaaaaacgaattatttaaaccaaaagaaaattctaaaaaattttcaatagtaattcctccaccaaatgtgactggaagtcttcatatgggtcatgctttaaataattctattcaagatttattagttcgttatcaccgaatgaataattatgaaactttatggcaaccaggaactgatcacgctggtattgcaacacaagctttagtagagaaaaaactcacctctgaaaaaatagataagaatgagatcggtagagataaatttattgaaaaagtctgggagtggaaagagcaatatggtgacataataattaaccaattaaaaaaactaggatgttcttgtgattggtcaagaaatgcattcacaatggatgcaaatttatccaaatcagttattaaagtttttgtagaactgtacaataaaggtttaatttacaaagataagaaattagtaaattgggacaccgttcttaaaacagcaatttctgatttagaagtagatcaaagagaagtaaattcaaaaatttattatattaaatatcctattgatggatcaagtgaatttataactatagcaactacaagaccagaaacgatgttgggtgataccgctatagctgtaaatccaaaagatgatcgtttcaaatcatttgttggcaaaacagtaaccattccaattgttggtagaaaaattaaaataattgaagatgactatgctgatcctgagcaaggcacgggagcattgaaaataaccccagcccatgactttaatgattatgatgttggccaaagaaataaccttgaaatcataaatatttttaccgaagaaggtaaggtaaatgaaaatgcaccagaacattacaaaggtcttgatagatttgaagctagaaaaagaattttaaaagaattaaaagaaaaagaatttttttgtaaaagaagaaaatattaaa

SEQ ID NO: 307564 - DNA, 2626 bp, Unknown
  Bacterial polypeptide expressing nucleotide sequence isolated from the Sargasso Sea
atgccaattccttctaaatatgaacatattgaaattgaaaagaaatggtattcatattggatggaaaacaatctttttaaatctattccaaatgataaagaaccatttacaattgtaatacctcctccaaatgttactggacttcttcatatgggtcacatgcttaacaatactatccaagatatattggtaaggagggctaggatgttaggtaaaaatgcatgttgggttcctggtactgatcatgcatcgattgcaactgaagcaaaagttgttgagaatctaaaggaaaaaggaataaataagttagatatttctagggatgaatttttaaaatacgcatgggattggacggaaaaatatggtggtggaatacttgaacaattaaaaatgttgggatgttcatgtgattgggacagaactaagtttacattggatgatgagatgtatgaatctgttttaattgcatttaaaattcttcatgataaaggattaatttataggggatacagaatgattaactgggatccagaggctaaaactactgtctctgatgaggaagtaaattatgttgaagaacaatcaaatttatactatctaaaatataaaattgttgactcagatcaagagatgattattgcaacgacaagacctgaaactatatttggtgatactgcagtatgtgttaatcctaaagataaaagatataaatccttgatcggtaaacaagctattgttccaatttgtgacagaaaagtaccaataattgctgatccttatgttgatgttgagtttggaacaggatgtcttaaggtaacccctgcacatgatatgaatgattatagcctaggaaaaaaacatagccttgctactatagatatttttgatacaaatgctaatcttaacaaacatggtcttcattatgaaggcaaaaatagatttgttgtcagaaatgagattgaagatgagcttattaaaaataaattattaataaaaaaagaaaattatgtccataatgttggtagatcagaaagaacaaattctgtgattgagcccaaagtttcaaaacaatggtttttaaagatggatgaaataagtaagccagctattataaatgtattagaaaacgaaagcataaagttcttccctaataaattcaaatcaacatataagtactggcttgaaaatataaaagactggaacatatcaagacagctatcttggggtcatcaaatccctgttttttattatggtaacaatgatgagtatatagttgctaattcaaaagaagaagctcttaaaaaagcaaatgaagacttaaaattaaatttaaaagattcggatctgagtcaggatcaagatgtacttgatacttggttctcttcttggttatggccaatctctgtatttgatggaattagaaatcctgataatgatgaaatcaaatattattatcctacacaagatttagttacaggcccagatataatctttttttgggttgcaagaatgataatatcaggttatgaatttagagatgaaaaaccattttctaatgtatattttactggaattgttagagataaacttagaagaaaaatgtctaaacaacttggtaactcacctgatgctattaaattgattgaacaatatggtgcagattctgtaagagttggtttaatgctaagctcagctgctggtaatgatcttttgtttgatgaatcattgtgtcagcaaggtaaaaattttacaaataaactctggaatgcatcgagacttgttgatggttgggacattgacctacaaattaaacagcctaaagttaatgaactagcaataaactggtatagaaataaattcaacaatactttagagtctatagacagtaactttgaaagttacaggatttcagatgttttaatgtcttcatataaattgatatgggatgacttttgttcatggttattagaaatattaaaacctgaatatggtaagaaaattgaccagaagtcaaagtctgatttaattgaattatttattaaaaatttgaaaattatccatccatttatgccttttctttcagaagaaatatatcataatcttgagggcaaagtctctaaaccaataacaataagttcatggccaaataagggagaatatgatatacagctgattaataattttgaaattacaaaagaaattatttcacaaataagaaattatagaaaggaaaaaaatattccttttaaaacaccaattaaattatactgcattccatctaataaaccaattggtaatattgatgttattaaaaaaattggatttgttgaggatataattgaatctgaaaaagctgactttgctttagttaaatcttttataataaaaaattatgagttttttattccactggacgaaggttttgataaagattctgaaatcaagaaattaaataaagaacttgaatataatattggttttcttaagtctgtagatagtaaattaaaaaacaaaaattttataagtaatgcacctaaagaaattatagataaggaaaaacaaaaaattatagatacagaacaaaagataaaatctataaaaaagtcaatttcagaactttcctaac

SEQ ID NO: 307565 - DNA, 925 bp, Unknown
  Bacterial polypeptide expressing nucleotide sequence isolated from the Sargasso Sea
gatgttctatgggcaaccaggaatggaccatgcaggaatagcaacacaaatggtagtagaaagaaatttattgaaagaaggaatattaagaacagatttaggtagagataaatttgtaaaaaaaatatgggaatggaaagaagaatctgggggaatgataactaaacaacttagatctttaggtgcaactcctgactggaggcgtgaacgctttacattagatgaaggcttatcaaaagcagtaagaaaagtttttgttcaactttataatgaaggcttaatatacaaagacaaccgattggtaaattgggatcccaaacttttaactgcaatttctgatttggaagttgaaaacaaatcagaaaaatctaaaatgtggtatataaaatattctacaaaagataaaaaaaattctgttattgttgctacaactagaccagagacgatccttggtgacactgccgttgcagttcatccgctagataaaaggtatagtgatttagtaggtaaaactcttattttaccattagtaaatagagaaataccagttatagctgacgaatattctgatcctgataaggggtctggagccgtaaaaattactccgggacatgactttaatgattttgaagttggtagaagacataatctagaaattataaatatatttgatgaaaatgcctgcatcgtagataaaaagtttgctgaaaattatataggtttagatagatttgaagcaagaaaaaaagttattgaagatttagaaaaagaaaagcttattgttaaaatagaagaagttgaaaatgttcttccttatggtgatcgctcaggtgtaattattgaaccatggctaatggagcaatggtatgtcaacgcaaaggagcttgctaaaccgactatccaagctgtagaagaaggaaaaatg

SEQ ID NO: 307566 - DNA, 1491 bp, Unknown
  Bacterial polypeptide expressing nucleotide sequence isolated from the Sargasso Sea
tgggatccatctttgaaaactgctgtttcagatcttgaagtcgtaagacaagaaaaaaaaggtcttatttggcatattaaatatcatatagatgatacagatgaatttattacagtagcaacaacaaggcctgaaactatgtttggggacatggcaattgctgttaatccaaaagacactcgatataaatctcttattggtaaatatgctcttctaccttttgtggatagaaaattgccaattattggtgatgagtatgtagatatggaatttggtactggttgcctaaagataactccagggcatgattttaatgattatgaaataggaaaaaaatactctctatatgaggaagataatattgtgcttacctcaaaaaatattgatgatttcaagccaattaatatatttaatgatgaggcatggactaatgaaaatgttccagaattatttagaaacctagataggtttaaagtaagaaaattagtactaagtgaattggcaaaattagaacttcttgtcaaagaagaagaatatgatgtaagtgttcctagaggagaaagatcaaatatagtaattgagccaagattaagtaaccaatggtatgtaaaaacttctgatatggctaaaaaagccaacaaggaggttgaaaatggaaatatcaaatttcatccagaaaactgggttaaaacgtattttaattggatggacaatattgaggactggtgcataagtcgacaaatttggtggggtcatagaattcctgcatggtatgaccaagaaggaaatatttacgttggtgaaaatgaaaaaaatattagggagcactacaaattgaatgatattgaacttcatcaagatgaagatgttctagatacctggttttcatcaagcttatggccatttggttcgttaggatggcctgaaaatactgaagattttgataatttttttcctacatcacttcttgttacaggttttgacataattttcttctgggttgcaagaatgatgatgatgagtcttgagttcacgggaaaaataccttttaaagatgtttatgtcacaggcttaataagagatgaaaatggtcaaaaaatgtcaaaatctaaaggaaacattattgatccaattgatttaatttatggcatttctcttgaggatcttgttaaaaaaagaacaaccaatctcatgcaagaaggaatatctgaaaaaattgaaaagaaaacaaggaaacaatttcctaatggaatagattcctatggaacagacgctttgagaatgacattcttttcattagcaactcataccaaagacatcagctttgaatttggtcgacttaaaggctttaggaatttttgtacaaaaatttggaatgcagcaagatttattgatggatatccaaaagaaagagactcttttattgaagagaatgataatgataaatggatatatgaagaatttcttaagtcaacaaatcaaataaacaaa

SEQ ID NO: 307567 - DNA, 1164 bp, Unknown
  Bacterial polypeptide expressing nucleotide sequence isolated from the Sargasso Sea
catgagcggaaataattataatcattctgaagttgaggataaaatatatagttattgggagaagaacagactttttcaaccaaaaaaaaataagaagaagttttcaattgtaataccccctcctaatgtaactggaaatttacatatggggcatgctctaaataattctattcaggatttgttaacaagatttcatagaatgaataattacgaaactttatggcaaccaggaacagatcatgctggtattgccacacaggctttagtagaaaaaaaattagaaaaagaaggtcatagcaaacatgatttaggtcgcgaaaaattcattaatcaagtttgggaatggaaaaatcaatatggcgatattattattaatcaattgaaaaaattaggctgttcgtgtgattggtcgagaaacgctttcacgatggatgaaaatctatcaaaatccgttattaaagtatttgttgatctttacaaaaaaggcctaatttataaatctaaaaaattagtaaattgggatacagttcttaaaacagcaatatctgaccttgaagttgatcaaagagaggtaaattcaaaattatattatataaaatatccaatcgaaaacagtgaaaatttcattactatagctacaacaagacctgaaacaatgttaggtgatacagctgtagcggtaaaccccaaagataaaagatacaaaaatttggtttcaaaaaatgtaattttaccaattgtagagaaaaaaataaaaattatatcagacgattatgctgaccctgaacaaggtactggagctgttaaaataactcctgctcatgattttaatgattatgaagtaggcataagaaataaactagaaataattaatattttcacagaggatggaaaaattaatattaatgctccaaaagaatatattggattagataggtttgaggctcgaaaaaaaataatatcagaattaaaaaataaaaatttgtttgttaaagacgaagatattaaaaataaagttccatatggagatagatcaaattctataatagaaccttatttaactgaacaatggtttgctgatgcaaaaaaattatcaaacaaagcaaaaaaaatagttagatcaaaaaagactaaattttttccaaccaattggtctaaaacata

SEQ ID NO: 307568 - DNA, 1101 bp, Unknown
  Bacterial polypeptide expressing nucleotide sequence isolated from the Sargasso Sea
aatgacttttgaaaagtactttgattttattaaagatgaaaaatcaatttattccaattgggaaaattcagattgttttaaaccaataaaaaataatgaatcatattcgataatgatgccacctccaaatgtaactggaagtttacatatggggcatgctttaacttttactattcaagatattcttatacgataccatcgaatgaaaaacaaagaagttctttggcaagcaggaacagatcatgcaggtatagctacacaaatggttgttgaaaaaaaattatctgaacaacatattaaaagaactgatttaacaagagatgagtttatagaaaaagtatgggaatggaaaaaagaatcaggcgataagattaataatcaattaagaagactaggcgcatcagcagattggtcaagagaaagattcacaatggatgaaggattgtctgaagcagttaaaaaagtttttgttgatttatataatgatggaataatttataaagataaaagattagttaattgggatccaaaattattaactgccatttctgatttagaagttgagcaaagagaagtagaaggaacattgtggcatattaaatatacaattgataatgaaaatcatattgtagtagctactacaaggccagaaactatgttaggagatgcagctgttgcggttcaccctgatgatagtaggtataaaaatatgattggtaaattttgtattttgccaatcgttgaaaaaaaaattccaattattgctgatgaatatgctgatcctgaaaaaggatcaggtgctgttaaaatcacacctgctcatgattttaatgattttgaagtaggaaaaaaacatgatttagaatttattaatatttttgatgaaaatgcaaaaataaattttaatgcaccaaaagagttccaaaatttagatagatttgaagccagaaaaaaaatcttaatagaattaagaaatcaaaatcatcttataaaagaagaaaaacaattaatggttattccttatggagacagatcaggtgttataatagagccctggcttacagatcaatggttttgcaatgctaaaaagatgtctataga

SEQ ID NO: 307569 - DNA, 1969 bp, Unknown
  Bacterial polypeptide expressing nucleotide sequence isolated from the Sargasso Sea
ggagatactgcaatagcagttaatcctaaagacgatcgatttaaagatattgttggaaagctagtgaccattcctttagcaaacagaaaaataaaagtaataacagatgactatgctgatcctgaacaaggaacaggagcagtaaaaattactccagctcatgatttcaatgactatgatgtaggtataagaaacaagttagaagtaattaatatatttacgcctgatggaaaaataaatgacaatgcacctgacccatataaaggtttagatagatttgctgcaagaaaattaattttagaacatcttgaagaaggtaagtttttagaaaaaatagaaaagttagtaaacaaagttccttatggagatagatctaattctattattgagccttatttaacagaacaatggtttgttgatgctaaaactttagcaattaaagcaaaagaagtagtaaataatggtaaaactaaattctttcctgaaaattggtcaaaaacatattttcaatggatgaataatattgagccttggtgtatttctcgtcaattatggtggggacatcaaattccagcatggtacggacctgatggaaaaatatttgtagctgaaaatgaggatgagtgcaaaaatcaagcaaaagaattctattcaaaagatgtggaattaaaaagagatgaagatgttctagacacttggttttcatcaggtctatggccatttgctactttaggttggccagaaaaaactccagaagttgaaaaattttatccaacaagtgttctcgttactggttttgatatcatatttttctgggttgctagaatgataatgatgggaactcagtttttagataaggaaccttttaaaaatatatatgttcatgctttagttagagatgaaaagggtcaaaaaatgtctaaatcaaagggcaatgtaattgatccattagaattaattgagaaatatagtgcagacgctttgagatttactcttttatcaatggcatcaccaggtcgagatgtaaaattatctgaagacagggttaaaggttatagaaattttttaaataaaatttggaatgcaaataactttttaacacaaaataagtgtgattttagtgatgtaaaaaaacctgaaaatataaaattaacaatcaataagtggatactatctgagcttgtaaaagttaaaaacgacactgaaaatagtttgaaaaactataggtttgatgaagcagctaagattatttatcaatttgtatggcattcattttgtgattggtatttagagttatctaaaactgttttaaactctgaaaatgaggacgatattcaggagttaagacaaacatcagcatatgtttttaaggaaattttaataatacttcatccatttattccatttgtaaccgaagagatatggttaaataataagctagataaagaaggaaaagattatttgatgcatgccaattggttagaagacgattatcatgaaaaaaaatcgtatgatgagataaataatatcattaattttattacatcaataagatcatttaaaaatgaattaaatataagtcctggatcatttattgaaatttcaacagaaaatacaaacaaagaatataaaaactttttatcttctaatgaaaatataatgaaaaaaaatggaagaattaaaaattttcatgaaaaagatttagacaaaccctctgcaagtatagtcataagtggtgagttatttaaattatattttgatgaagatgttgatttaaatatgatcaaatcaacattagaaaagaaaatttcaaaaattagtgaagagatgaaaaaaattgatgttagattatcaaataaatcctttgtggatcgtgcaccacaaaatatagtagagcaggagaaaagcaactttgctaatcttgaaaaagatgttaaaaaaatagaattaactcttaaaggtttataat

SEQ ID NO: 307570 - DNA, 1314 bp, Unknown
  Bacterial polypeptide expressing nucleotide sequence isolated from the Sargasso Sea
caattaatatttttaatcaagatgcgtggacaaataataatgtaccaaaactatttgaaaatttagatagatttaaagtaagaaaattagtcataaaagaattaactgagttaaaactccttgaaaaggaagaggaatatgacgtgagcataccgagaggtgagcgttcaaatattgtaattgagcccagattgagtcatcaatggtatgttaagacttctgaaatggcagagaaagctaatatgcaagttaaaaaaggaaacattaaatttcatcccaataactggataaagacctattttaattggatggacaatattgaggattggtgtataagtagacaaatttggtggggtcacagaattccagcttggtatgatgataatggaaatatttatgttggtgaaaatgaacaagatgtaagaaattattacaaacttgatgcaatagatcttaagcaagatgaggatgttttagatacatggttctcatcaagtctttggccattcggatctcttggttggccagagaaaacagacgattttaaaagtttctttccaacttctctcctagtgacaggttttgacattatatttttctgggtagctagaatgataatgatgagtattgagtttactggaaaaatacctttcaaggatgtgtatgttactggtcttatcagagatgaaaatggtcaaaaaatgtcaaaatctaagggaaatattattgatccaattgacttaatatatggtatttcaattgaagatcttgttgaaaaaagaacatcaaatttgatgcaggaaggtattgctgaaaaaattgaaaggaagacaagaaaacaatttcctaacggaatagaatcatatggcacagatgcactaagaatgacattttattctttggctactcatacaaaagatattagttttgaatttggaagactaaaaggatttagaaatttttgtaccaaaatgtggaatgctgcaagatttattgatggatatccaaatgaaaaagataaatttaaagcagaaaacgatcatgataaatggatatatgacgagtttagtaaagccaaaaaacaaataaataaaaatatttccgattacagactggattttgctgttaatgaaatatatgaattcttttggaataagttttgtgatgtttatatcgaacaatgtaagaaaagtggagaaacatcaaatttaagaccgctcctaaaagaaattcttcagttagtgcatccatttgccccatttattactgaggaaattaatactattttatttgatgaaaggataattacttaga

SEQ ID NO: 307571 - DNA, 1189 bp, Unknown
  Bacterial polypeptide expressing nucleotide sequence isolated from the Sargasso Sea
gtttctcaattaaaaaggataggatattcagttgactggactagagaaagatttactcttgatcaaaaattaaatgaagcagttattgaggcttttaatattctttataaaaagaatttaatttatagaggcgaatatttggttaattggtgccctgaatctcaatctgccgtaagtgatcttgaagttgaaatgcaagaagtaaatggtcatttatggcattttaaataccctttaatttctgaaagtggtgaatacttagataagtacttagaagttgcaacaacaagaccagaaactcttttgggtgatactgctgtggcagttaatcctgatgatgatagatataaagaatttattggactcaaagtaaaagttcctttcgttgatagagaaatacctattatcgctgattcacatgttgataaagattttggtacgggttgtgtgaaggttactccagctcatgatccaaatgattttgcaataggaaaaaggcataatttaaaacagattaatgtaatgaacaaagatggaactttaaatattaatgcaggtatttttcaaaatttagatagatatgacgctagaaagaaaattatcaaagaattggataatttaggcctgctgacaaagatagaggattataaacatactgttcctttttctgatagaggtaaggtgccaattgaacctttattgtcaacacaatggtttttgaaaatggatgatatatcacaaggatgtcttaatgaaattgattctaaaaaaccatcgtttatccctccacgctgggagaaagtttataaggattggttagagaatattaatgattggtgtatcagtcggcaattgtggtgggggcaccaaataccggcctggtatgttttagatgaatctcaagactcaatagaacaaaatactccatatatcgttgcaagaaatgaagaggatgccttaatcgaagctaataaaaaatttggattaaatattaaattggttcgtgataaagatgttttggatacatggttttcaagtggcttgtggcctttttcaacccttggttggccaaatataaataatcctgattttaaaaaatggtatccaaatagtgttcttgttactggtttcgatattattttgttctgggtggcaagaatgacaatgatggggaatacttttacaaaga

SEQ ID NO: 307572 - DNA, 1531 bp, Unknown
  Bacterial polypeptide expressing nucleotide sequence isolated from the Sargasso Sea
gttaaggaagaaaatattaaaaataaagttccttacggtgatagatcgaattctataattgaaccatatttaacagaacaatggtttgccgatgcaaaaaaactttctataaaagcaaagaaaattgttaaaacaaaaaaaactaaattttatccagtaaactggtcaaaaacatattttcaatggatgaacaatattgaaccttggtgtatttcaagacaactatggtggggtcatcaaattcctgtttggtatggaccagataaaaaaatatttgttgcaaaaacagaaaaagaagcaaaacaaaatgcaaaaaagttttataaaaaagatgttaaattataccgtgatccagatgttttagatacatggttttcatctggtttgtgggcctttgctacattaggttggccagcaaagaatgattatatcaaaaaattctatcctacatctgtattagtaactggttttgatattatctttttttgggtcgctcgtatgatcatgtttggtatggaatttcttaataaagaaccgtttaaagatatttatgtacatgccttagtaagagatgaaaaaggacaaaaaatgtctaagtctaaaggtaatgtaattgatcctttagaacttatagaaaagtatagcgctgatgccttaagatttaccttattatcaatggcatctccaggacgcgatgttaaactttccgaagatcgagttaaaggttataggaatttccttaataaactatggaatgcaaataattttctaattcaaaacaaatgttcatttaaaaatgcacataaaaaaccgaaaatttccattaatattaataagtggatatatgcagaactaattgaaaccaaagaaaaaattgaaaaaagtattaaagattatcgttttgatgaggcagcaagatattcttatcaatttgtttggcattcttattgtgactggtatttagaacttacaaaaactattctttattcaaatgatactaaatctattaaggaaattagagaggtatcaagttatatttttagagaaatcttaatattaatgcatccatttataccttttgttactgaggaaatctggcttaaaaacaaattagataattctaaaaaaaactacttaatgctgacaaattgggttttgggcaaatcaaaaaaggataaagattttaaagaggttgaaaaaattattaatataatctctcaaattaggtcatttaagaatgaactcaatgttagccctggttcatttgtagatatatctttaagtaaaataaatgataaaaataaagttttctttaaacataacgatgtagttttaaagaaactaggaagaattaatagctttttagataaagaccaaaataaaccatctgcgacctttgttgcctcaggagatatatttaaagtatattttgaggaaagtgttgatttaaaagttattaaagaaaatttattaaataaacaagaaaagtaccaaaatgaaatagaaaagattaattctcgattaaataata

SEQ ID NO: 307573 - DNA, 1326 bp, Unknown
  Bacterial polypeptide expressing nucleotide sequence isolated from the Sargasso Sea
aatggtggtagagcgaagactgaatgctgacggcaaatcaaagaatgatatcggtagagaagcttttgaaaaagaagtgtggaattggaagaagtactctggcaacaaaattacctcacagctaagacgcctgggctctagtctagattggagcacagaaagattcactttggatgatgattatcatcatgctgttttaagtgcttttataaaattatttgaagaaggcttaatttatcagggcaaacgcctcgtgaattgggatcctgcattagaaacctccctatcagaccttgaagtggtcaataaagatctaacaattaaaatctgggaaataaagtatcaactcgagggaaccgatgaatttgtgactgttgctaccacaaggcctgaaacgcttatgggggatatggctctcgcagtaaaccctgatgataagaggtttgctcatctagtaggtaaaaatgctgagattcccttgtgcaatagagctattcccattgttgcagatgactatgtagattcagaatttggtacaggtgttgtgaagataacccctggtcatgactttaatgattacgagctaggtaaacgacatgggctccatatgaatgatagcttgcaatgttataccggtgatgaaaacgcattttctccaatttcaatcctaaataaagccgttgaagtaatgggtgttgctcctgaaaaatttcatggcatggacagatttgaagctcgtaaagttatcttgcaggacttagaaaaagaaaagcttctgatgtctgagaaggaatatgaaagtactctaccctatggagatagatccgatcaaattcttgagcccctcttaacagatcaatggtatgtagacgccaaaactcttgccaaaccagccatagaagctgttaaatctaaggaaatacaatttgtacctgctaattgggaaaaaacctatttccaatggatggataacattcaagactggtgcataagcaggcaactgtggtggggacatagaattccaatttggttcgatgaatcaaatacaccctatgcaggcttttctgaagcagacgtaagaaaaaagcatggtcttaaaggtgagctacgccaagaagatgatgtattagatacatggttttcatcgagtctgtggacatttgccaccatgggctggcccgaaaaaaataaaaaacttaacctttttcatccaacaacaaccttggtaactggttttgatattatctttttttgggtcgctaggatgatcatgatgacaaaatatttcatgaaagaagttccattcaaagaggtttacattaccgg

SEQ ID NO: 307574 - DNA, 2869 bp, Unknown
  Bacterial polypeptide expressing nucleotide sequence isolated from the Sargasso Sea
catgagcgacaacacgcttgcgaagagcttcgagccccacaccatcgagtcccaatgggggccggagtgggaaaagcgcggctacgcggccccggccttcgacccggcccgtcccgatttctcgatccagttgccgccgccgaacgtgacgggcacgctgcacatgggccacgcgttcaaccagacgatcatggacggcctcacccgctaccaccggatgctcggcgagaacacgctgtgggtgcccggcaccgaccacgcggggatcgcgacccagatcgtcgtcgagcgccagctcgacgcgcagggtgtgtcgcgccacgacctcggccgcgagaagttcgtcgagcgcgtgtgggaatggaaggaaaaatcgggttcgacgatcaccggccaggtgcgccgcctcggcgcatcgcccgactggtcccgcgaatacttcacgatggacgacaagatgtcggccgccgtgcgcgacgtgttcgtcacgctctttgaacagggcctgatctaccgcggcaagcgcctcgtcaactgggatccggtgctgctgaccgccgtgtcggacctcgaagtcgtgagcgaagaggaaaacggccacctgtggcacatccgctatccgctcgtcgacggctcgggttcgctgaccgtggccacgacacgtccggaaacgatgctcggcgacgtcgcgctgatggtccatccggaagacgagcgctacgcgcacctgatcggcaagctcgtcacgctgccgctgacgggccgcgagattccggtgatcgccgacgactacgtcgaccgcgagttcggcacgggcgtcgtgaaggtcacgcccgcgcacgacttcaacgactaccaggtcggccagcgccacaagctcgcgccgatcgagatcctgacgctcgacgcgaagatcaacgacaacggccccgagcagtatcgcggcctcgaccgcttcgacgcgcgcaaggcgatcgtcgccgacctcgacgcggaaggtttcctcgactcggtgaagccgcacaagctgatggtgccgcgcggcgaccgcaccggcgtcgtgatcgagccgatgctgaccgaccagtggttcgtcgcgatgacgaagccggcgccggaaggcacgttcaatccgggcaagtcgatcacggaaacgtcgctcgacgtcgtgcgcagcggccagatcaagttcgtgccggaaaactggacgaccacctactaccagtggctcgagaacatccaggactggtgcatctcgcgccagctgtggtggggccaccagattcccgcgtggtatggcgagaacggcgaggtattcgtcgcccgcaacgaggaagaagcgcgcgcgcaggctgccgcgaagggctacacgggtgcgctgaagcgcgacgaagacgtgctcgacacgtggttctcgtcggcgctcgtgccgttctcgtcgctcggctggccgaacgaaacgcctgaactgaagcacttcctgccgtcgtcggtgctcgtcacgggcttcgacatcatcttcttctgggtcgcccggatggtgatgatgaccacgcacttcacgggcaaggtgccgttccacaccgtctacgtgcacggcctcgtgcgcgacgcggaaggccagaagatgtcgaagagcaagggcaacacgctcgacccgatcgacatcgtcgacggcatcgacctcgacacgctggtcgcgaagcgcacgacgggcctgatgaacccgaagcaggccgcgacgatcgagaagaagacgcgcaaggaattcccggacggcatcgccgcgttcggcaccgacgcgctgcgcttcacgatggcgtcgatggcaacgctcggccgcaacgtgaacttcgacctcgcacgctgcgaaggctatcgcaacttctgcaacaagctgtggaacgccacgcgcttcgtgctgatgaactgcgaaggccacgactgcggcagcgacaagccggaagtctgcggcgcgggcgattgcggcccgggcggctacctcgacttctcggcggccgaccgctggatcgtgtcgctgctgcagcgcacggaggccgacatcgcgaagggcttcgccgattaccgcttcgacaacatcgccagcagcatctacaagttcgtgtgggacgagtactgcgactggtatctcgaactcgcgaaggtgcagatccagaacggcacgccggaacagcagcgcgcgacgcgccgcacgctgctgcgcgtgctcgagacggtgctgcgcctcgcgcacccgatcatcccgttcatcaccgaagcgctctggcagaaagtcgcgccgctggccggccgttatccgcaaggcaaggccgagggcgaagcgtcgctgatgacgcaggcgtacccgatcgcgaacctgcagaagatcgacgaggtgtccgaacagtgggcggccgacctgaaggcgatcgtcgacgcgtgccgcaacctgcgcggcgagatgaacctgtcgccggccaccaaggtgccgctgctcgcagccggcgatgccgagcgcctgcgctcgttcgcgccgtacgttcaggccctcgcgcgcctgtcggaagtgcagatcctcgcggacgaagcgacgctcgacaaggaagcgcacggcgcgccgatcgcgatcgtcgggccgaacaagctggtgctgaaggtcgagatcgacgtcgcggccgaacgcgagcgcctgtcgaaggaaatcacgcgcctgacgaacgaaatcacgaagtgcaatgcaaagctcggcaacgaggctttcgtcgcgaaagcgccgccggccgtggtcgaacaggagcagaagcgcgtcgcggaattccagagcacgctcgagaaactgcgtgcccagctcgatcggttgcctgcgtaa

SEQ ID NO: 307575 - DNA, 1255 bp, Unknown
  Bacterial polypeptide expressing nucleotide sequence isolated from the Sargasso Sea
cccagcttggtatggtcctgatgaaaaatattttattgaatactctgaagatattgcaagaaatgttgcaaagaaattttatggaaaagatgttcctttaaagagagaccaagatgttttagatacatggttttcttcagcactttggccattttctacattaggttggcctgaaaatacagaagaaatgaaaattcattatccaaccagtacattagtaactggatttgatattatatttttttgggtcgctagaatgatgatgatgggtattcactttcttaatactcctccatttaaggatgtctatgtgcatgctctagttcgtgatgaagatggtaaaaaaatgtctaaatcaaaaggcaatgttattgaccctttggaacttatagatcaatttggtgctgatgcattaaggttttgtcttagttctatggcagctcaaggccgtgatgtaaaattatcaatatcacgtgtagaaggatatagaaactttgcaacaaaattatggaattctgtaaggttttgtgagttaaattcatcatttctagatactaattttgatccaaaaaaatgcaaaaatgtaataaataaatggattattcataaagcaaatataacaattaaagatgtttctaaatccatagatgattacaaatttaatgaagcgtcaaatattttatatagttttatttggcatattttttgtgattggtatatagaattaataaagccctcactatatgaaccagaaagtaaagataatttagaatcaagaaattgcagtgcatgggtattgaaaataatattacatcttttgcacccgtttatgccttttgtaacggaagaactttgggaaaaatttagtggtaattcaattaaagatttaaataaaaagcttatagtaagcaaatggccaaatgcatttaattctaaagattatatttatgcaaatgaagaagttaattggttaatagagatagtaacgcaaataagaagcgtaaggtcggaattaaatatttcacaaaatatagaaatagaagcttatttttattcaaaagataataaaataaataatttttttaataactcaaaattatcaattgaaaggttatctaaactttcaaaaataagtaaaatagaaaatgaaaatgaaaatggagtaaaaataataattaaacaaggccttatttttttattaatatctaatagtatagatattgaccaagaaatagagagaataaaaaaagttatt

SEQ ID NO: 307576 - DNA, 1330 bp, Unknown
  Bacterial polypeptide expressing nucleotide sequence isolated from the Sargasso Sea
atgcttaacaagagttatgatcctaaagaagcggaagctaggttatataattattgggaaactgaaggttttttcaaatgtggtttaacaagtagccagtctttttctattgtaattcctcctcccaatgtaactggtagcctacatatggggcatgcattaaataacacacttcaagatataatcgtaagatacaaaagaatgctaggtgaagatgttttgtggcaaactggcactgatcatgcaggaattgctacccagatggttgttgagagaaagcttgaaacagaaaaaaaaccctcaagggttgaattaggaagagaaaaatttattgatgaagtttggaagtggaaagaggaatcaggaaatagcattactcatcaacttcgtagacttggcgcttcgtgtgattggagtagagaacgttttacaatggatgaaggtctgagtttagccgtcaataaagtttttgtagatttatataatgatggtttaatttacaaagataaaagacttgttaattgggatccccaactaaaaactgctatatctgatctcgaggttattcaaaaagaaattgatggtttcctttggtacattaattatccgattaaggattctgaggaatctataactatcgccactacgaggccagagacaatgtttggtgatacagccattgctgttcatcccgatgataaaagatatgctaatttgattggaaaagaagttattattcctattgttggaagatctataagcattatagcagataattacgcagaccctgaacagggaagtggagcagtaaaaataactcctgctcatgattttaatgactttgaggttggtaaaagaaataatttagaaatgctttctatcttagatataaatggaaaattaaatgaaaatgtaaaaacagaatggcaaggacttgatagatttgaggcacgatcaaagttattaaaattactaactgatgaaggttatttagaaaaagaagaaagttattctaactctgttcctcatggtgataggtctgatgttgttatagagccttttttgacagaacaatggtatgtaaatgctgaaaaactagctcaacctgctttagagtctgtaaagaatggggatatgaaatttattccttctaattggtcaaaaacatatttcgagtggctagaaaatattcagccttggtgtatatcgcgccaattatggtggggccatagaatacctgcttggtataccaaagatgataatataattgttgcgaataatgaaaaggatgcttacgagatcgcgaaaaaaaaattggcgaagatataaa

SEQ ID NO: 307577 - DNA, 1264 bp, Unknown
  Bacterial polypeptide expressing nucleotide sequence isolated from the Sargasso Sea
aatgagtagcgataaatatatacattctgatgtagaaaatagaatttattcctattgggaaaaaaacggtctttttaaacctaaagaaaattcaaaaaaattctcaattgtaattccaccaccaaatgtgacaggtagtttacatatgggtcatgcgttgaataattctattcaagatttattagttcgataccacaggatgaataattttgaaactttatggcaaccaggtacagatcatgctggtatagctactcaggctttagtagaaaaaaaattaatttcagaaaaaatagataaaaatgaaattggtagagaaaaatttattgaaaaagtttgggagtggaaagatcaatatggagatataataataaaccaattaaaaaaacttggttgttcatgtgactggtcgagaaatgctttcacaatggatgaaaatttatcaaaatcagtgattaaggtatttgtagatctttataaaaagggtttaatttataaagataaaaaattagttaattgggatacagttttaaaaacagctatttcagacttggaggtagatcaaagagaggttaattctaaaatttattacatcaaatatcccatagatggaacagatgaatttataacaattgcaacaacaagacctgaaacaatgcttggtgacactgcgatagcagtaaatccaaaagatgaacgatttaaatcctttgttggaaaaacagttactattccaattgtaggaagaaaaattaaaattattgaagatgattatgcagatcctgaacagggaacaggagcattaaaaataactccagcacatgacttcaatgattatgatgttggtcaaagaaataaccttgaaataataaatatttttactgaagcgggtaaaataaatgacaatgctccaaaagagtatgttggtcttgataggtttgaagctagaaaaagaattttaaaagaactcaaagataaagaattttttgtaaaagaggaaaatattaaaaacaaagttccttatggagatagatcaaattcaataattgaacccttcttaacagaacaatggtttgctgacgctggtaaattatctgttaaagctaaagaagttgttaattcaaataaaacaaatttttttcctgaaaattggtcaaaaacctatttttcatggatggataatattgagccatggtgtatttcaagacaactttggtggggacatcaaatccccgcttggtacggtccagatgaaaaaaatttt

SEQ ID NO: 307578 - DNA, 1288 bp, Unknown
  Bacterial polypeptide expressing nucleotide sequence isolated from the Sargasso Sea
ggacccttaaatattaatgcaggtatttttcaaaatttagatagatatgaagctagaaagaaaattatcaaagaattggataacttgggccttttgacaaagatagaggattataaacatactgttcctttttctgatagaggtaaggtgccaattgaacctttattgtcaacacaatggtttttgaaaatggatgatatatcaaaaggatgtcttaatgaaattgattctaaaaaaccatcttttattcctccacgctgggagaaagtttataaggactggttaaagaatattaatgattggtgtatcagtcgccaattgtggtgggggcaccaaataccagcatggtatgttttagatgaatctcaagactcaatagaacaaaatactccatatatcgttgcaagaaatgaagaagatgcgttaatcgaagctaataaaaaatttggattaaatattaaattggttcgtgataaagatgttttggatacatggttttcaagtggtttatggcctttctcaacccttggttggccaaatacaaatgatccggattttaaaaaatggtatccaaatagtgttcttgttactggtttcgatattattttcttctgggtggcaagaatgacaatgatggggaatacttttacgaataatattccttttaaggatgtttatattcatggtctagttcgagatgaaaacaataaaaaaatgagtaaaagttcaggtaatggtattgatccaatactattaattgataaatatggttctgatgctctacgatttgctttaattcgagaagttgcaggcgctggacaagatatccggcttgattttgataggaaaaaagatacatcttcaactgttgaagcttcaagaaattttgcgaataaattatggaatgcaactaaatttgtgttaattaataaaacttctaacaataattatttgcttaatgagagtgatgaaacttctttagagttgtgtgataagtggattttatcgaaattgaatcaggtaaatataaaagttgctgctttgttgaaagaatataaattgggagaatctgcgaaacttctatatgaatttacgtggaatgatttttgtgactggtatgtagaatttgctaaacaaaggtttaataataaagagactaataatagacaaatatctgaaaaagttttaataaaagtgctcaatgatattttggtaatgattcatccttttatgccgcacattactgaggaactttggcatgtgctgcaaataaaaccagataatgcat

SEQ ID NO: 307579 - DNA, 1084 bp, Unknown
  Bacterial polypeptide expressing nucleotide sequence isolated from the Sargasso Sea
atgaagctattagataaaaaacataatccttcagatattgagaataagtggtataagcattggcttgaaaaacaatacttttcaagtcaagagtctgataatcattatacaattgtaattccaccacccaatgttactggaaagcttcatatggggcatgttctaaacaatactattcaagatattttaattagaaaagctagaatgcaaggcaaaaatgcatgttggattcctggtacagatcatgcgtcaattgctactgaatcaaaagtaactaagatgcttgaagagaagggaattaataaaaaagatttaaccagagaagaatttttaaagcatgcgtgggaatggaaagaagaatatggcggtactatcattaatcaacttcaaaaactaggatgttcatgtgattgggataaaactagttttactatggatgaagattattctaaagcagttttagagtcttttgttcaattatataataaaggattgatttataaaggtagtaagctagtaaactggtgtccaaaatcacagaccgctttaagcgatgaagaagttatgtttaaagaggtgaatggaaatctttggtacattaagtatgctattaatgaatctgacgcatttatagaaatcgcaacaactagaccggaaacaatgttaggtgatacagcaatagcagtgaatcctagtgataaaagatataaagatttgattggtaagacggcattattgcctttagttggtagaagtattcctattatagcagatgatatggtagatcctgaatttggaacaggctgtgttaaaattacacctgcacatgatttgaatgattatgaggtaggaataaagcataatcttgaaatgattaatattatgaatgctgatagttctattagcgataaagcaccagaaaagtatagaggaatgtccagagaaaaggctagaaagcaaatagtctccgatttaaaagatgcaaatcatttaattaaagaagaggattacttcataaggttggatattcagaaagaggaaatgtaccaattgaatattatttatcagaacaatggtttttaaa

SEQ ID NO: 307580 - DNA, 1447 bp, Unknown
  Bacterial polypeptide expressing nucleotide sequence isolated from the Sargasso Sea
ttggaaaagacatacaacccaaaagagatagaagccagaatatatgaatcttgggaagattcaggatacttctcgccttcaaaatcgggtgagccattttgcattgtgattccgcctccaaatgtaactgggacattgcatatgggccatgcatttcaagacacaatcatggacatcatcattcgataccaaaggatgaatggaaaaaatactttatggcaggtgggtactgatcatgcagggattgctacacaaatggtggtggagagacaattagaaaaatctggaacctctagacaagaactcggaagagaatcattcgaaaaagaagtttggaagtggaaagaagagtccggtagcaccatcacgaaacagatgaaaagattaggggcatccactgattggacaaaagaaaagttcaccatggatgagaatcttgtgagaggtgtaacaaaagtttttatccaactttatgaggaaggattaatatacaggggcaagaggttgatcaactgggatcctgttttgcaaactgctttgtcagatctagaggtatcaaccacagaagaaaaaggttcattgtggcacatgaaatatccaatcagtgactcagaggaccacattgtggttgcaacaacaaggccagagacgatgcttggagatactgcggtcgctgtacatccagatgataaacgctacaaagacctcattggtcgagaggtcattcttccgctcactgatagaaaaattccaattattgctgatgagtatgtggatcaagagtttggaacaggatgtgtaaagattacaccagctcatgatttcaatgattttgaaattggcaaaagacatgatcttgaaataatcagcattttagatcaaagtgccaaaatcagtccgtcggcaccatctgaatatcaaggtcttgaccgttttgaggcaagaaagaagattgtggaagatctagaagcaaatggtcttatgcaagaaatcgaggattatatgctcaccatcccaaggggagatagaagtggagcaattcttgagccgctcattacaaatcaatggtttctaaaaatggaaccactggctcaacccgcaatagaagctgtcaagaatgatgaaataaaattcattccggaaaattggtctaaaacatattacgagtggttagaaaatattcaggactggtgtatctcaaggcaactgtggtggggtcacagaattccagcttggtatgacaatgaaggaaatgtttatgttggggaaagcgaaaatgagattcgaaaacaacacaatatagaagattcaattgcattgattcaggatgatgatgttcttgatacttggttctcttctgcgctttggcctttttcaagtcttgggtggcctgatgagacatatgacctaaaaactttttacccaacaaacgttgctagtcactggc

SEQ ID NO: 307581 - DNA, 1291 bp, Unknown
  Bacterial polypeptide expressing nucleotide sequence isolated from the Sargasso Sea
gcaaaaaaattatctatcaaagcaaaaaaaattgtaaaaaataaaaaaacaaatttttttcctactaattggtcaaagacatattttcagtggatgaacaatattgaaccatggtgtatatcaagacaactttggtggggccatcaaatacccgcttggtatggaccagataaaaaaatatttgttgaattaaatgaagatgatgcaaaaaaatctgcaagaaaattttataaaaaagatgttaaacttattagagatcctgatgtacttgacacatggttttcatctggtctttggccttttgctacactaggttggccaaataaaaatgaatatttaaagaagttttatccaacaacagttttagttacaggttttgatattattttcttctgggtagctagaatgatgatgtttggtatggaatttttaaataaagaaccattcaaagatatttatgttcatgcacttgtacgtgatgaaaaaggtcaaaaaatgtctaagtcaaaagggaatgttattgatcctctggatttaataaaaaaatatagcgctgatgctttaagatttactttattatcaatggcatctcctggaacagacgtgaaactttctgaagatagagttaaaggttataggaattttttaaataaactatggaatgcaaataattttttaattcaaaataaatgcagtttaaaaaattcaaaaaagctacctaaattaaatgttaatattaataaatggatatattttgaattactggaaacatctaagttaataaagaaaaacattgaagactataggtttgatgaggcagctaagaatgcttatcattttgcatggcataagtattgtgattggtacttagaattatctaaaacaatccttttttcagataatttaaaagctaaaaacgaagtaaaagaagtatctgcatttgtatttaggcaaataattattatgttgcatccatttatacctttcgttactgaaaaaatatggttaacaaacaaatttgataataaaaataagaattttttaatgttatctaattggatctcagcaaaatctaagaaagatagtgatcacaagcatgttcagcaaataattgatattatttctgagataaggtcttttaagaatgagctgaatgtaagcccaggttcatttattgatgtttcgattaattctattaagaaaaatagtcaaaattttatgacagataatgaaattataattaaaaaattaggaagaattaacaacttctttaaaaagatcaaaataagcc

SEQ ID NO: 307582 - DNA, 1228 bp, Unknown
  Bacterial polypeptide expressing nucleotide sequence isolated from the Sargasso Sea
tttataaaagccaaaaaaattgtaaaaaacaaaaataccaatttctttccgtcaaattggtcaaaaacatattttcaatggatgaacaatatagaaccctggtgtatttcaagacaactttggtggggacatcaaatcccagcatggtatggaccagatagaaaaatatttgttgcagaaaatcaaaaaaaagctgaacaacaagcaaagaaattttacaaaaataatgtaaatttaaaaagagatccagacgttcttgacacttggttttcctcgggtctttggccttttgctacattaggatggccatcaaaaaattattttttaaaaaaattttatcccacatcagttctagtaactggttttgatataattttcttttgggtagctagaatgatgatgctaggtatgcaattcttaaacaaagaaccatttagagaggtttatgttcacgctcttgtgagagatgagaaaggtcaaaaaatgtcaaaatcaaaaggaaatgtaattgatcctttagctcttatagatagttacagtgctgacgctttaagatttacactgttatctatggcatcaccaggtagagatgtaaaactatcggaacaaagagttaaaggatatagaaattttttaacaaaaatatggaatgttaataattttcttaaagtaaataaatgtagttttgatggaattattaaacctaaaaacctaaaacttaatataaataagtggatttataatgagcttattaaaacgaagaatttaacagaaaattctataaaaaattaccgttttgatgaagctgcaaaaaccgtttacaaattcgtttggaatagttactgcgattggtatttagaactttctaaaactatcctatcttctaaaacaaacaaagatattaaagaagtaaggaatacatctggtcaaattttcaaggaaatattaatattattacatccatttataccttttataacagaagaactgtggctaaaaaataagcttaaaacaaaatcgactaaatatttaatgcatgctaattggattaatgacaaaaaatttaaaaaagataaaaatattgaaaatgttaatgaaattattgatttgatatcaaacataagatcttttaaaaacgaacttaatgttagcccaggctcttttggtgatatttccatagagaaattaacaaaagaaacaaaaatatttttgcaaattgaattgtaat

SEQ ID NO: 307583 - DNA, 1893 bp, Unknown
  Bacterial polypeptide expressing nucleotide sequence isolated from the Sargasso Sea
tatggataagcagtatcaccctgtagaaattgaagaaaaatggtctaaggtatggtcagaaagagttatttcaaataaagactctgatactcctttttcacaggtaataccgccacccaatgttactggtacccttcatatgggtcatagtttccaatatgcaattatggatttctataccagatatcatcatatgtctggaaaagatgctcactggcaagttggagctgatcatgcaggcatagcgacccaaatggttgtagaaaataatcttgcaaaaaaagatgtaaataggctagagcttgggagagagaaatttcttgatgaagtttggtcttggaaaaattattcagaaaaaagaatagcatcacaaattaaaagactaggatgctctgtggattggagcaaatataggtttactttagacgatggatgcaatgaagcagttataaaagcatttgttgaattacatagaaaaaataaaatttatagagggtataggcttgtcaattgggacccgtcactaaagactgctgtttcagatcttgaagttataagacaagaaaaagatggtctactctggcatataaaatatccaattgaaaattcaaaagactttgtgatagtagcgacaacaagacctgaaactatgtttggtgacatggcaattgctgtaaatccaaatgatgatagatataaaaatcttactggtaaaaatgttgttctgcccttcgtaggtagaaaaattcctattttagctgatgaatatgttgacatggaatttggaacgggttgtctgaaaattactccaggccatgattttaatgattatgaaataggtaaaaaatattcacttcatgaagaagatggtgaagtaaagacttctgattcagcaagtgattttgaacctataaatatatttaatgaggatgcatggtctaatgaaaatgtgcctgaaccattttcaaatctcgatcgttttaaggttagaaaagtcgtattagagaaactcaaagaactaaatcttatagaaaaagaagaaaaacatcatataagtgtgcctagaggtgagagatctaatatagttattgagcccagattaagtcatcagtggtatgtcaaaactgatgaaatggcagcaagagctaacaatgctgttaacaaaggagaaataagatttcatccaaacaattgggttaaaacatattttaattggatgaataatattgaggactggtgtatcagcagacaaatatggtggggtcacagaatacccgcatggtatgactcagataataatgtttacgttggttacagtgagaaagaagtcagacaattctataaacttgatgacaggaaactttcacaagatgaagatgttcttgacacttggttttcatcaagcttatggccttttgcatctttaggatggccagaaaaaacaaaagattataaaaaacattttccaacctctcttttggttactggttttgatattatttttttctgggttgcaagaatgatgatgatgagtttagagtttactgatcaaatcccttttaaagatgtttatgttactggtttaattagagacgaaaatggacaaaaaatgtcaaaatctaaaggcaatataattgatccattggatttaatttatggaatttcccaagatgatttagttacaaaaagaacttcaaatcttatgcaagaaggtatagctcaaaagattgaaagaaaaacaagaaaccaatttccacaaggcattgattcatatggcacagatgctttaaggatgacatttttctcactagcaacacacaccaaagacataagttttgaaataggtaggcttaaagggtacagaaacttctgtaataaagttggaatgcagct

SEQ ID NO: 307584 - DNA, 1561 bp, Unknown
  Bacterial polypeptide expressing nucleotide sequence isolated from the Sargasso Sea
caattgcagttaatcctaaagatgaaagatacaaagatatcattgggaaaaaaagttgagctcccatttgtaaagagaaaaatcccaataattggtgatgactatgtggataaagagttcggaacgggttgccttaagattactcctgggcatgactttaatgactatgaaattggtaaaaaatactgccttcattgtgtagataatgaagtttatatatctgatgatattgaagattttgaaccacttaatatttttactgatgaggcgcatagtaatgataatgtcccttctcccttcaaaaatttagacagattcaaagtaagaaagcttgttcttgaagaaattaaaaaactagatttatttgtaaaagaggaaccacatgaaatcagtgttccccgaggagagcgttcaaatatagttatagagcccaaactgagttatcagtggtatgtaaaaacaaaggacatggctaataaggcaaataaagctgtagaaaatggagaaattaaatttcatcccgaaaactggattaaaacttattttaactggatgaataatattgaagattggtgtattagcagacaaatctggtggggtcatagaattcctgcatggtatgacgatcatggaaatgtttatgtggggtattctgaagatgaagtgcgaactcattattcacttgataatagatcgctaagacaagacgatgatgttttagatacgtggttttcctctagcctttggccttttgcatcaatgggatggccaaatgaatcaaaaaatctaaaaacttttttcccaacaaatcttttagttactggttttgacattattttcttctgggttgcaagaatgatcatgatgagtatcgaatttactggaaagattccttttaaagatgtttatgttactggcctcataagagatgaaaatggacaaaaaatgtcgaagtccaaaggcaatattattgatcctattgatttaatatatggtatatctttagaagatcttcttgaaaaaagaacatcaaatctcatgcaagaaggtttagcagaaaagattgctagaaaaaccaaaaaacaattcccaaatggtattgagtcttatggaacagatgctttacggatgacattttattctattgcaactaatgctaaggatataagttttgaaattgggagattaaaagggtttagaaatttttgtaccaaaatgtggaatgctgcaagatttattaatggttatgaaaacaaagggaataattttgaagctgaatctgaatctgataaatggatattaaaagaatttgaacagctaaaagccgatgtcgaggataatgtaaatcattacaggttagatttagctattaatcatgtatatgagtttttctggaataagttttgtgatgtttacattgaagaatgcaaaaaaactgaaaaaactgacaatctgcatccccttcttaaggaaatacttatttttattcatccttttgctccgtttataactgaagaaattcattcaattatttttaaagcgccattaattgataggtagg

SEQ ID NO: 307585 - DNA, 1312 bp, Unknown
  Bacterial polypeptide expressing nucleotide sequence isolated from the Sargasso Sea
tatgagtcaaacaaagtacgacccctcaaaaattgaatcaaaatggtattcagcatgggaaaaaaataaagttttttcaccatctggaaaaggtgagtcctactgtattatgataccaccgccaaatgtaacaggaacacttcacatggggcatgcatttcaagtaactttaatggatattctttgcaggtataaaagaatgtgtggctttaatacattatggcaagctggcactgatcacgcgggtatagccacacaaatggtcgttgaaagaaaacttactgctcaagggttgtcaagaaatgacctaggaagagaaaagtttattgaccaggtatgggagtggaaagatcaatctggaaacattattacaaaacaacttaggcgtatgggtgcttcactcgattgggatagtgaaaggttcacattggatgagggtctctcaagagcagtacgaaaagtatttattgatctttacaataaaaatttaatatataagggtaaaaaacttgtcaattgggatccagttttacaaacagcattatcagatttagaagtaattcaaaatgaagaagacggaaaaatatggacaataaattataaaattgaagatgaaaataattttctaagtatagctacgactagacccgaaactttacttggcgatactggtgttgcagtaaatcctaatgatgaaagatataaaaaatatattggaaaaaacattatagttcctttagttggaagaaaagtgaaaatcattggagatgactatgtagattctgagtttggcactggttgtctaaaaattacacctgcacatgattttaatgattttgagttagctaaaagacataatcttgaggtcattaatatttttgacagttctgcacgtgttttaaataccttcgacaactacagcaatcttgatagatatgaagcaagaaaaaaaatacttaaagacctagatgaactaaaagttttaatagaagaaaaagatcacaaaatggttattcctcgaggagaccgaagccatgcagtaatagaaccgtatatgacagatcaatggtatgtgaaaacaaaagaaattgctgaaaaggccatggaagcagtaaaagaaagtgatattaaatttgtgcctaaaaactgggaaaaaacctattttgaatggatgaataatattgaggattggtgtatcagcagacaattatggtgggggcatagaatacctgcatggtatgatgcagaaaataatatatatgttggcaatagtgaagaagaaattagagataaatttcaaattagagacgaa

SEQ ID NO: 307586 - DNA, 1825 bp, Unknown
  Bacterial polypeptide expressing nucleotide sequence isolated from the Sargasso Sea
tatggggcatgctttgaataattctattcaagatttattagttcgttatcatcgaatgaataactatgaaactttatggcaaccaggaaccgatcacgcaggaattgctactcaagctcttgttgaaaaaaaacttagtgcagaaaaaattgataaaaatgaaattggtcgagaaaaattcattaaaaaagtttgggaatggaaagatcaatacggtgacatcattattaatcaattaaagaaacttggatgttcttgtgattggtccagaaatgcttttacgatggatgaaaatctatcaaaatcggtaataaaggtatttgttgatctatataataaaggtttaatttataaggataaaaaactagtaaattgggacacagttttaaaaacggccatttcagatttagaagttgatcaaagagaggtaaattctaaaatttatcatattaaatatccaattgatggaacggatgaatttataacaattgctaccacaagacctgaaacaatgttgggtgacactgcaatagctgtaaatccaaaagatgatcgttttaaatcttatgttggcaaaactgttacaatcccaatagttggaagaaaaataaaaattatagaagatgattacgcagatcctgaacaaggaacaggtgctttaaaaataactccagcacatgactttaatgattatgatgtaggtcaaaggaataatcttgaaattataaatatttttactgaagcaggcaaaattaatgataatgctcctaaagaatatattggtcttgataggtttgaagcaagaaaaagaattttaaaggaattaaaagataaagagttttttgataaggaagaaaatattaaaaataaagttccttatggagatagatctaattcgatcattgaaccttttttaacagagcaatggtttgctgatgctggaaaattatcagtaaaagcaaaagaggtagttaattcaaaaaaaactaatttctttccagaaaattggtccaaaacttattttcaatggatgaacaatatagaaccctggtgtatttcaagacagttgtggtggggtcatcaaatacctgcttggtatggtcctgataataaaatttttgttgcttacgatgaagatgaagcaaaacaattagctaacaaacattatggtaaagatgttgaactaaacagagatcctgatgttttagatacttggttttcgtctggtctttggccatttgcaacacttggatggcctaatgataaaaagtttgttgataagttttatccaacttcagtattagtaacaggttttgatattattttcttttgggttgcaagaatgattatgtttggaacagaatttttaaacaaagaaccttttaaagatatttatgttcatgctttagttagagatgaaaaaggacaaaaaatgtctaaatcaaaagggaatgttattgatcccttagatctaattgaaaaatatagtgcagatgctttaagatttactttactttctatggcgtcaccaggaactgatgttaaactttctgaagatagagttaaaggttatagaaatttcttaaataaactatggaatgctaataattttttaattaccaatgaatgtgattttaaaaatacagatcaaattccagagttaaaagttaatattaataaatggatatattctgagttagcagaaactactaacaaaatcattaagaacttagaagattatcgatttgatgaagccgcaaaaaatgcttatcaatttacttggcattcttattgtgactggtatctagaactttctaaaacaatt

SEQ ID NO: 307587 - DNA, 1588 bp, Unknown
  Bacterial polypeptide expressing nucleotide sequence isolated from the Sargasso Sea
aatgttggaaaaatattatcaacccagtctcgttgaagataaaatttataaaacatgggaaaatgatggagattttaaacccttaaagtcatcaagtgatgcttattgcattgtgatacctccaccaaatgttacaggaacacttcatatgggccacgctctaaataatactctccaggatatcttagttaggttttatagaatgcagggcaaaagtgttttgtggcagcctggtacagaccatgcgggtatcgcgacagaaatggttgttgaaagggaattaaaaaaaagagatataaataaaaaagatttatcccgtgaacagtttattgaacatgtatgggaatggaaaaatcaatctggaaatgaaattattaatcaattaaaaagattaggctgttcatgtgattggtccagagaaaggtttactctagatgaaggcttatcaaaggcagtaagatttgtatttgtcaaattatataatgataaactaatttataaagataaaagattaagtaattgggacccaaaattaaaaacgactatctcagatttagaagtcattcaaaaagaagtaaaaggttctctctggtatatagactacaaattagaaaatgatgataaggtaattacaattgcaacaactcgacccgagacaatgcttggagatacggcaattgccgttcaccctgaagacgaaaggtatagagaatttgtaggtaagtatgcgtatattcccatcattaataaaaaaattattattattgctgatgagtatgtaaaagtggatcaaggctctggtgctgttaaaataactccagctcatgattttaatgattatgaaataggaaaaagacataatcttgaagtaataaatatttttaatgagaatgctgagcttaatgaaaactgcccaatcgaatatcaaaatcttgatcgctttaaagcaagggagaaaattgttaatgaattagaaactattggagcactaaataaagttgaagagaatattcatactgtgccatatggagatagatcgggtgaagtggtggagccatggcttacagatcaatggtttgtaaatgcaaaaaaattgtctttaaatgcaatcgataaggtaaaaacaaaagaaacaatatttgttcctcaaaactgggagaaaacatattttgattggatggaaaatattcaaccttggtgcatttcaagacaattaatatggggtcaccaaataccggcttggtatgggccagatggagaaatttttgtcgccgaaaattcagatgatgctcacaagatagctagggaaaggtacaaaaaagatgtaaaacttgttcaagatgaagatgttcttgatacatggttttcttcagctttatggcctttttctactctaggatggcctgatgaaacaccagagtttgaaaaattttatcccacatcaactctagtaactggtttcgatattatatttttttgggtcgctcgcatgatgatgatgggtttatattttacaaataaagttccattcagcgaagtgtatgttcatgctttagtgagagatgaaaaaggacagaaaatgtctaag

SEQ ID NO: 307588 - DNA, 2670 bp, Unknown
  Bacterial polypeptide expressing nucleotide sequence isolated from the Sargasso Sea
aggcgtttagtcctaaccctgaggatgatggtgagcctttttgtgttgtcattccgccaccaaatgtaactggatctttgcatatggggcatgcatttaatacggctttgatagatgttgtagtacgttttcaaagactgttaggtaagaatgttttgtgtttaccgggaactgatcatgcttcaatagctgttcaaactattctcgaaaaacaattaaaaagtgaaggtaaaacaagcgaggatattggaagagatgaatttcttaaaagagcatggaactggaaagaacaaagtggtggaagaatagtttctcaattaaaaaggataggatattcagttgactggactcgagaaagatttactcttgatcaaaaattaaatgaagcagttattgaggcttttaatattctttataaaaagaatttaatttatagaggcgaatatttggttaattggtgccctgaatctcaatctgccgtaagtgatcttgaagttgaaatgcaagaagtaaatggtcatttatggcattttaaataccctttaatttctgaaagtggtgaatacttagataagtacttagaagttgcaacaacaagaccagaaactcttttgggtgatactgctgtggcagttaatcctgatgatgataggtataaagaatttattggactcaaagtcaaagttcctttcgttgatagagaaatacctattatcgctgattcacatgttgataaagattttggtacgggttgtgtgaaggttactccagcccatgatccaaatgattttgcaataggaaaaaggcataatttaaaacagattaatgtaatgaacaaagatggaactttaaatattaatgcaggtatttttcaaaatttagatagatatgaggctagaaagaaaattatcaaagaattggataacttaggccttttgacaaagatagaggattataaacatactgttcctttttctgatagaggtaaggtgccaattgaacctttattgtcaacacaatggtttttgaaaatggatgatatatcacaaggatgtcttaatgaaattgattctaaaaaaccatcatttattcctccacgctgggagaaagtttataaggattggttagagaatattaatgattggtgtatcagtcggcaattgtggtgggggcaccaaataccagcttggtatgttttagatgaatctcaagactcaatagaacaaaatactccatatatcgttgcaagaaatgaagaggatgccttaatcgaagctaataaaaaatttggattaaatattaaattggttcgtgataaagatgttttggatacatggttttcaagtggtttatggcctttctcaacccttggttggccaaatacaaatgatccggattttaaaaaatggtatccaaatagtgttcttgttactggtttcgatattattttcttctgggtggcaagaatgacaatgatggggaatacttttacaaataatattccttttaaggatgtttatattcatggtctagttcgagatgaaaacaataaaaaaatgagtaaaagttcaggtaatggtattgatccaatactattaattgatagatatggttctgatgccttaagatttgctttaattcgagaagttgcaggcgctggacaagatatccggcttgattttgataggaaaaaagatacatcttcaaccgttgaagcttcaagaaattttgcgaataaattatggaatgcaactaaatttgtgttaattaataaaacttctaataataattattcgcttaatgagagtgatgaaacttctttagagttatgtgataagtggattttatcgaaattgaatcaggtaaatataaaagtcgctgctttgttgacagaatataaattgggagaatctgcgaaacttctatatgaatttacgtggaatgatttttgtgactggtatgtagaatttgctaaacaaaggtttaataataaagagactaaaaatagacaaatatctgaaaaagttttaataaaagtgctcaatgatattttggtaatgattcatccttttatgccgcacattactgaggaactttggcatgtgctgcaactaaaaccagataatgcattattatctcttcaaaaatggccaattcacgaaaataaatttgttgataataagcttgataattcctttcagcaactctttgaaattattaggctgattagaaatttgagagctgaattaggtcttaagccatcagaaaaaagtcctgtatatttaatttcagacaatgatgaattgattgattttttaaaaactttagttgatgatattcaaaccttaactaaatcttctgaagtatttatttttaaaactaatgctgttgataaaaaagagttcgctaaatctttttccgggataattagtgatttagaggtttacttaccttttcaggattttgtaaatatagatgcattaaaggaaagattaaccaaggatttaaaaaaggtgaatattgaattagaaaatttaaataagagattatctaataacaatttcgttgataaggctccaaaagatattgttgatgaatgcagatttaaattaaatgagggttcggtacaaaaggaaagaatcactaaaaaactcgaacttttgaattgag

SEQ ID NO: 307589 - DNA, 886 bp, Unknown
  Bacterial polypeptide expressing nucleotide sequence isolated from the Sargasso Sea
atgacagagatgaatgatcaattatctttagagaattattcaccttttgaagtagagaaaaagtggcaagaaaaatgggaaagtctaaaggcgtttagtcctaaccctgaggatgatggggagcctttttgtgttgttattccgccaccaaatgtaactggatctttgcatatggggcatgcatttaatacggctttgatagatgttgtagtacgttttcaaagacttttaggtaagaatgttttgtgtttaccgggaactgatcatgcttcaatagctgttcaaactattcttgaaaaacaattaaaaagtgaaggcaaaacaagcgaggatattggaagagatgaatttcttaaaagagcatggaactggaaagaacaaagtggtggaagaatagtttctcaattaaaaaggataggatattcagttgactggactagagaaagatttactcttgatcaaaaattaaatgaagcagttattgaggcttttaatattctctataaaaagaatttaatttatagaggcgaatatttggttaattggtgtcctgaatctcaatctgccgtaagtgatcttgaagttgaaatgcaagaagtaaatggtcatttatggcattttaaataccctttaatttctgaaagtggtgaacagttagataattacttagaagttgcaacaacaagaccagaaactcttttgggtgatactgctgtggcagttaatcctgatgatgatagatataaagaatttattggtgtcaaagtaaaagtccctttttgtgatagagaaatacctatcatcgctgaatcacatggtgataaagattttggtacggggtgtgtgaaggtactccagcacatgatccaaatgagatttgcatagg

SEQ ID NO: 307590 - DNA, 1993 bp, Unknown
  Bacterial polypeptide expressing nucleotide sequence isolated from the Sargasso Sea
tttggaagtaactaatactgataaaaatggacatctttattatataaaatataaattggaagatagcgatgaaaaccttatagtagcaaccacaagacctgaaacacttttcggtgatagcgcaatctgtgttaaccccgaagataatcgctataagcgttttattggaaagaaagcaataatacctatattgaataaatctataccagtaatttctgatgattcaatagatcaggattttggaacagggtgtgtcaaaattacaccagcgcatgatttcaatgattacaaattaggtaagaaacataatctagactttattaatatactaaataaagatggtacatttaataagaatgtctctgatatttttaaagataaaaatattcatcaatcaaggtcgagggttgtagatcaattaaaagaaactggtagtcttgataaaattaaagattataaaactacagtgcctatgggtgaaagatctggcgaaattattgaaccactcctaaccgatcagtggtttatgaaaatggatgatttagcgcaactaggaatagatgctgttaaaaaatccaatattaaatttgtaccaaagaactgggagaaaatatatttcaactggttaaataatattgaagattggtgtataagtagacaaatttggtggggacatagaatacctgcttggtatgacgataatggcaatgtttatgtaggggacaacgaacaagagatacgaaataaaaataatattaatgaggatattaatttaacgcaagatcaagatgttttagatacatggttttcatcttcattatggccatttaccacaatgggttggcctgaaaatacaaaagaactagaaaaatattatccaacaagcgttttagttacaggttttgatataatatttttctgggttgcaagaatggtgatgatgggaattaagtttctagataaagtaccctttaaaacaatctatatacatggcttggtcagagattcagaaggtaagaaaatgtccaaatcattaggtaatgtaatagatccaattgatataatcgatggaattgaactagatgcacttattgataaaagagtttccaatctcgtacaacccaaattaaaggataaaatagcaagaaaaactaaagatgaatttcctaatgggattgatccatatggggcagatgctctaagattctgcttttgtgcattagcctcaacaggccgagatataaactttgatttaaaaagaatagaaggatatagaaatttttgcaataaactatggaatgcatcaaggtatgtatttatttctaccaaagattgcctttatgataataaaataaattttgaaagactgacggtatatgaaaaatttattattgttaaattggatcagcttgtaactgaatataaaaaacattgtacatcatatagatttgatttgatggcaaactcattatatagcttcatatggaatgaatactgtgattggtatcttgagatagcaaaaatagaaattgaacatgataatcattatacgaaaaatgttttaatatatgtattgcagattatattaaaattatgtcacccaataacaccttatattactgaagaaatctggaaagaaatgataaagctaaaatatactaatgacttaatattaatgaatgcaaagtttccgtctcaacaaaagatctttaaagatgataatattaataatgaagttttattattaaagaagattataaatatgattagaaaaatgagaagtgatttaaatgttcatccaaaaataaagattgacatatattgtagatttgaagagggtctttatgatcattttatggagaataatagtaaaataataacgagcttaataaaatcgaatggactttatataaataatggatcatatgatattactgaatgtattgtagttacagtagatgaaatgaaactttatgttcccataaaaagataa

SEQ ID NO: 307591 - DNA, 1207 bp, Unknown
  Bacterial polypeptide expressing nucleotide sequence isolated from the Sargasso Sea
atggataagaagccatatgatccatctgatatagagcaaaagctctataaagcatgggaaaattctggcctctttgcaccaggagataatcctgaggctttttcacttgctataccccctccaaatgtaactggaacattacatatgggccatggatttcagaatgccataatggattgtttaattcgatactatcgaatgtctggcaaaaatactttgtggcaagttggaacagaccatgctggcattgcaactgagatggttgtcgaaaggcgactcaatgctgaaggtaaaacaaaaagtgatatcggtagagaggcttttgaagaagaagtttggaattggaagaaagtctcaggtaataaaattacatctcaacttagacgattaggatcaagtctagattggggttctgaacgattcaccttagatgaagaatatcagcatgccgttttaagtgcatttattcaattgtttgaagaaggcctcatttaccagggtaagaggcttgtgaattgggaccctgtattagaaacttctctttctgaccttgaggtggtgaataaagatctcacaattaaaatttgggaaataaaatatcaacttgaagcaactgataaatttgtgactgttgcaacaacaagacctgaaacgctgcttggagatatggcactagcagtaaatccctctgataagagattttcgcatctcattggtaagaaagcttcattgccattatgtaataggcttatacccattgttgcagatagttatgtagacccagaatttggaaccggggtcgttaaaattactcccggtcatgattttaatgattacgatttaggtaagagacatggtcttcatatggatgaagattttcagtgtcattccggtgctgaagatgattttgttcctatttctatctttaataaaaccgttgcaattattggtgtagctccgaaaaaattccatggcatggatagatttgaagcccgcaaagtaattctcgaggatttaaaaaaagaaaagcttcttatgtctgaaaaagaatatgaaagcactttgccctacggagatagatcagatcaaattcttgaacctctcctaacagatcaatggtatgtagatgcaaaaacacttgcaaaacctgctattgatgctgtcaagtctggagaaatacaatttgtaccggctaatgggaaaaaac

SEQ ID NO: 307592 - DNA, 847 bp, Unknown
  Bacterial polypeptide expressing nucleotide sequence isolated from the Sargasso Sea
atgagtgttgaaaaatataatcattctgaagttgaaaaaagaatatattcatattgggaaagaaatagtcttttcaagcccaaggaaaataataaaaaattttctatagtaatacctccacccaatgtaactggcagtctacatatgggtcatgcattaaataactctattcaggatttattaattcgttaccatagaatgaacaattatgaaacgttatggcagcctggtacagaccacgctggtatagctacacaagcactcgtagaaaaaaaactagctagcgacaatataaataaaagcgaattaggaagagataaatttatcaaaaaagtatgggagtggaaaaatgaatatggagacataattattaatcaattaaaaaaattaggttgttcatgtgattggtcaagaaatgcttttacaatggataaaaatttatctgaatctgtaattaaagtttttgttgaactttataataaaaaattaatttataaatctaaaaaacttgttaattgggatactgtacttaaaacggcaatttctgatttagaagtggatcaaagagaagtgaattctaaactttattatataaattatccaattgaacatacaagtgaatttataactatcgcaactactagaccagagactatgcttggcgatacagccgttgcagtaaatccaaaagacaaaagatacaaaaattttgttggcaaaaatgttattttacctttggtaggaagaaaaattcaaattgtagcagataattacgcagacccagatcaaggaactggagctgttaaaattactccagctcatgactttaatgattatgaagtaggag

SEQ ID NO: 307593 - DNA, 1339 bp, Unknown
  Bacterial polypeptide expressing nucleotide sequence isolated from the Sargasso Sea
atgttggaaaaatattatcaacccagtcttgttgaagataaaatttataaaacatgggaaaatgatggagattttaaacctttagagtcttcaagtgacgcttacagcatagtgatccctcctccaaatgttacaggaacacttcatatgggccatgctctaaataatactctccaggatatcttggttagattttatagaatgcatggaaaaagtgttttgtggcagcctggtacagaccatgctggtatcgcgacagaaatggttgttgaaagagaactaaaaaaaagagacataaataaaaaagatttatctcgtgaacagtttatagaacatgtatgggaatggaaaaatcaatctggtaatgaaattattaatcaattaaaaagattaggttgttcatgtgattggtctagagaaaggtttactctggatgaaggtttgtcaaaagcagtaagatttgtattcgtcaaattatataatgataaacttatttataaagataaaagactaagtaactgggatccaaaattaaaaaccactatttcagatttagaagtgatccaaaaagaagtaaaaggttcgctctggtatatagactacaaattagaaaatgaagataaggtaattacaattgcaacaactcgacccgagacaatgcttggagatacggcaattgctgttcatcctgaagacgaaaggttcaaagattttgtaggtaagtatgcatatattcctatcattaataaaaaaattattattattgctgatgagtatgtaaaagtggatcaaggctctggtgctgttaaaataactccagctcatgattttaatgattatgaaataggaaaaagacataatcttgaagtaataaatatttttaatgagaacgctgagcttaatgaaaactgcccaactgaatatcaaaatcttgatcgctttaaagcaagggagaaaatagtcaataaattagaaattattggagcactaaataaagttgaagagaatattcatactgtgccatatggagatagatcaggtgaagtggtggagccatggctcacagatcaatggtttgtaaatgcaaaaaaattgtctttaaatgcaatcgataaggtaaaaacaaaagaaacaatatttattcctcaaaattgggagaaaacatattttgattggatggaaaatattcaaccttggtgcatttcgagacaattattatggggtcaccaaataccggcttggtatgggccagatggagaaatttttgtcgccgaaaattcagatgatgctcacaagatagccagggaaaggtacaaaaaagatgtaaaacttgttcaag

SEQ ID NO: 307594 - DNA, 1132 bp, Unknown
  Bacterial polypeptide expressing nucleotide sequence isolated from the Sargasso Sea
atggaatttaagaaatacgatcattttaaagaagaaaaaataatcaatgattattggataaaaaataagtgctttgagcctaaaaaatctaaatcaaataaaaagttttctgttgtaataccacctccgaatgttactggaaggttacatatgggccatgctttaaataatagcctccaagatgttttggttcgatttaagagaatgaatggtttcgaaacattatggcaaccaggaacggatcatgctggaatagctacacaggcagttgtagaaaaaaaccttgaaaaagaaaaagttaataaaaaaaaattagggcgagatgattttataaaaagagtttgggagtggaaagaggagtctggtggaataatattagatcaattaaaaaaattaggatgttcttgcgattggtctagaactagattcacaatggataaagacttgtctaaagccgtgatcaaagtcttcgtagatctttacaataataaattaatttataaagataaaaaattagtaaattgggacacaaaactacaaacagctatctctgatttagaagtaatccaaaaagatgttcagtcacaactatattatatagattacaatattgaaagcacctcagacaaaattacaattgcaacaactagacctgaaacaatgatgggtgacacagctattgcagttaatccaaaagatgaaagatataagtccttaattggaatgaatgttttaataccattggtaaatagaactattaagattattgccgacaattatgctaatcccgaacaaggttctggggcagttaaaattactccagcacatgattttaatgattatgaagtaggaaaaagaaataacctaaaaataataaacgttctggaaaaaaatggttcaattaacaaaaatggaataaaagaatttattggattagatcgatttgaagctagaaaattgttagtaaaaaaacttaaggaagaaggttatttagcaaagatagaaaatataaaaaataaagttccttatggcgatagatctaattcaattattgaaccactattgactgaacaatggtttgttgatgctaaaaaattagcaaaaaaacctattcaaattgtaaaagatggta

SEQ ID NO: 307595 - DNA, 1006 bp, Unknown
  Bacterial polypeptide expressing nucleotide sequence isolated from the Sargasso Sea
aatgaatactgataaatatatacattcacaagttgaaaataaaatttatgaatattgggaaaaaaataaattatttcgaccgcaaaaaaattcaaagaaattttcaatagtaatacctccaccaaatgtgactggaagtttgcacatgggtcatgcattaaataactctatccaagatttcttagttagatattatcgaatgaataattatgaaactttatggcaaccaggaactgatcatgcaggtatagcaacacaagcacttgttgagagaaaactagaaaaagagaatttaaataaaaatactcttggaagagaaaaatttattgaaaaagtgtgggaatggaaaaatgagtatggagatataattattaatcaacttaaaaaacttggttgttcatgcgattggtcacgtaatgcatttacaatggatgaaaatttatcaaaatctgtaattaaggtcttcgtagaattacataaaaaaggactaatttataaagcagaaaaattagtaaattgggatactgtattaaaaacagctatttcagatttagaggttgatcaaagagagatgaactctaaaatatactatataagatatccaatcgaaaattcttcccaatttataactatagccactacgagacctgaaactatgcttggcgatacagcgatcgcagtaaatccgaaagataaaagatataaagaatatgttggtaaaagtgtaactataccaattgtaagtagaaaaattaagattattaaagataactatgcagatccggaacaaggaaccggtgcattaaagattacaccagcacatgattttaatgactatgaagtgggtcaaagaaacaagttggaaataattaatatatttactgaggagggaaaaataaataacaatgctccccaagattaccaaggacttgatagatttgatgctcgtaaaaaaatattagaagaacttaaagaaaaagatttttttttaaagaagaaaatataa

SEQ ID NO: 307596 - DNA, 1327 bp, Unknown
  Bacterial polypeptide expressing nucleotide sequence isolated from the Sargasso Sea
tatggcacaaagcaaatataatcataaaatttcagaaagcaaaatttactcatattgggaaaaaaacaagttattcaaacccaaaaaaaacaaaaaatccttttcaatagttatacctcctccaaatataactggaagtctacatatgggacatgccttaaataattcaattcaagatgttttgtccaggtattatagaatgaataattatgaaaccttatggcaaccgggcacagatcatgccggtattgctacccaagcattagttgaaaaaaatcttaaatcaaaaggaattgacaaaaatgaaataggtagagaaaaattcatagaaaaagtttggcaatggaaagaggaatatggtgggaaaataattaaccaacttaaaaaactaggctgttcatgtgactggtcaaggaatgcattcacaatggataaaaatttatcgaattctgtagttaaagtatttatcgatctatataaaaaaaaactaatttttaaagctaaaaaattagttaattgggatacagttttaaagactgctatatccgatcttgaagttgatcaaagagaagataattcaaaattatattatataaagtacaagatagagaactcagatgaaacaattacaattgcaactactagaccagagacaatgcttggtgacacagctattgcggttaatcctaaagatgaaagatatttcaatttaattaataaatttgcgatactgcctatagttgaaagaaaacttaaaatagttcaggatgattatgctgatccacagcaaggcagtggtgcagttaaaattacacctgcacatgattttaatgactttgaagtaggtaaaagacataagcttaaatctataaatatttttactgaagatggaaaaattaataataatgctccaaatgaatatataggtttagacagatttgaagccagaaaaaaaataatcgataaattaaaagaattacaagtctttgaaaaagaagagactataaaaaacaaagtgccttatggagatagatctaattctataattgaaccttttttaactgagcagtggttctgtgatgcaaaaaaattatctatcaaagcgaaaaaaatagtaaaaaataaaaaaacaaatttcttcccatcaaattggtcaaagacatattttcaatggatgaataatattgaaccctggtgcatttcacgacaactttggtggggacatcaaatcccagcatggtatggaccagataaaaaaatatttgttgcagaaaatcaaaaaaaagcagaattgcaggcaaaaaaattttataagaaaaatggttaa

SEQ ID NO: 307597 - DNA, 1743 bp, Unknown
  Bacterial polypeptide expressing nucleotide sequence isolated from the Sargasso Sea
aatggataaaagatatgagccacttattattgaagaaaagtggtcagagctttgggcaaaaaataatttaggaaaaaataactcctcacaaactttttcgcaggttattccacctccaaatgtaactggaactcttcatatggggcatagcttccagtattcgataatggatttctatgccagatataatcacttaaatgatgtaaatactcattggcagatgggtaccgatcatgcaggaattgcaacgcaaatggtcgttgaaaacaatctatccagagaaaatattgataaaaatgatttgggtagagaagattttgttaaaaaagtttgggagtggaaagaattttcagaaaataaaattactggacaaattaaaaggttaggtaactcagttgattggagtaattacagatttactttggatgaagattttaatgaagctgttctaaaagcttttgttgagctttacaggaaagagaaaatctatcgtggttataggttagtaaactgggatccatctttaaaaactgcggtttcagatctggaggttgtaagacaagaaaaaaaaggtcttatttggtatataaagtatccaattataggttcagatgattttgtaacagttgcaacaacacgtccggaaactatgtttggagatatggcaattgcagttaatcctaaagatgaaagatacaaagatatcattggaaaaaaagttgagctcccatttgtaaagagaaaaatcccgataattggtgatgactatgtggataaagagttcggaacgggttgccttaagattactcctgggcatgactttaatgactatgaaattggtaaaaaatactgccttcattgtgtagataatgaagttcatatatctaatgatattgaagattttgaaccacttaatatttttactgatgaggcgcatagtaatgataatgtcccttctcccttcaaaaatttagacagattcaaagtaagaaagcttgttcttgaagaaattaaaaaactagatttatttgtaaaagaggaatcgcatgaaatcagtgttccccgaggagagcgttcaaatatagttatagagcccaaactgagttatcagtggtatgtaaaaacaaaggacatggctgataaggcaaataaagctgtagaaaatggggaaattagatttcatcccgaaaactggattaaaacatattttaactggatgaataatattgaagattggtgtattagcagacaaatctggtgggggcatagaattcctgcttggtatgacgatcatggaaatgtttatgtggggtattctgagaacgaagtccgaacttattattcactcgataatagatcgctgaggcaagatgatgatgttttagatacatggttttcctctagcctttggccttttgcatcaatggggtggccaaatgaatcaaagaatctaaaaacttttttcccaacaaacctattagttactggttttgacattattttcttctgggttgcaagaatgatcatgatgagtatcgaatttacaggaaagattccatttaaagatgtctatgttactggccttataagagatgaaaatggacaaaaaatgtcaaagtccaaaggcaatattattgatcctattgacttaatatatggtatttctcttgaagatcttcttgaaaaaagaacatcaaatcttatgcaagaaggattagcagaaaagattactgaaaaaccaga

SEQ ID NO: 307598 - DNA, 1586 bp, Unknown
  Bacterial polypeptide expressing nucleotide sequence isolated from the Sargasso Sea
tattgagccttatttaacagaacaatggtttgttgatgcaaaaactttagccattaaagcaaaagaggtagtaaataatggaaagactaaattttttcctgaaaattggtcaaaaacatattttcaatggatggataacattgaaccttggtgtatttctcgtcaattatggtggggacatcaaatacctgcttggtacggacctgatggaaaaatatttgtagctgaaaatgaagatgaatgcaaaaaacaggcaaaagaattctattcaaaagaagtggaattaaaaagagatgaagatgttttggatacttggttttcttcaggtctttggccatttgcgactttaggttggcctgaaaaaactccagaagttgaaaaattttatccaacaagtgttcttgttactggttttgatattatatttttctgggttgctagaatgattatgatgggaacggagtttttaaaaaaagaaccttttaaaaaaatatacgttcacgctttagttagagatgaaaagggtcaaaaaatgtctaaatcaaagggtaatgtaattgatcctttagaacttattgaaaagtatagtgctgatgctttaagatttactctattatcaatggcatcacctggtcgtgatgtaaaattgtctgaagacagggttaaaggttatagaaattttttaaataaaatatggaacgctaacaattttttaagacaaaatgaatgtgattttagtgacattaaaaaacctgaaaatcttaaattaacaatcaataagtggatattatctgaacttgtaaaagtcaaaaacgagactgaaaacagtttaaaaaactatagatttgatgaagccgcaaagaatatttatcagtttgtatggcattccttttgtgactggtatttagagttatctaaaactgtatttaattctaaaaatgaggaagatattaaggagttaagacaaacatcagcatatgtttttaaggaaattttgataatactacatcctttcatcccatttgttacagaggagatttggttgaataacaagttagataaaaatggaggtgaatttttaatgcatgccaattggttggaaaatgattatcatgaaaaaaaatcttatgatgaaattaataatatcattaattttattacatctattagatcatttaaaaatgaattaaacattagccctggatcatttattgaaatttcaacagaaaacaccaataaagaatataaaaactttttatcagctaatgaaaatattttaaaaaaaaatggaagaattaaaagctttcatgataatgatttaaaaaaatcatcagcaagcatcgttatcaatggtgagctatttaaattatattttgatgaagatgttgatttaaatatgatcaaatcaacactagagaagaaaattaaaaaaattagtgaagagatgaaaaaaattgatgttaggttatcaaataaatcctttgtggatcgtgcaccacaaaatatagtagagcaggagaaaagcaactttgctaatctagaaaaagatgttaaaaaaatagaattaactctaaaaggtttataat

SEQ ID NO: 307599 - DNA, 1973 bp, Unknown
  Bacterial polypeptide expressing nucleotide sequence isolated from the Sargasso Sea
ggttgctgtaaatccaaaggatgaaagatttgttaatttaattggaaagaatgttcttattccaattgttaataggactgtcaaaattatttccgacaattacgctgatccggaacaaggctcaggagcagtaaaaattacaccagcacatgatttcaatgactatgaggtaggcaagagaaataaattagaaataataaatatttttgaagagaatggtaaaataaacaaaaatgggattaaagagttccatggtttagacagatttgaagcaagaaaacttataattaaaaaattaaaggataaaggttctcttgtaaaaatcgaaaatataaaaaataaagttccatatggagatagatcaaacactataatcgaacctctcttaacagagcaatggtttgttgatgctaaaaaattatctaaaaaaccaattaagatagttaaagagggcaaaactactttttttccaaacaactggtcaaaaacattttttcagtggatgaataatattgagccttggtgtatatctcggcagatttggtggggtcatagaatacctgcttggtatgatgaaaatggaaatatttttgtagctgaaagtgaaaaagatgcagtaaaattagcaaagaaaaaaaataaaaataaacaatttaaattaagacaggaaacagatgttttagatacttggttttcatcagctctatggccttttgctacactcggatggccaaagaaaactgaggaacttaataaattttatccaacttcagttcttgttactgggtttgatataattttcttttgggtagcaaggatgttgatgatgggaaattattttagaaaaaacacaccttttcataaagtatatgttcatgccttggtaagggatgaaaaggggcagaagatgtcaaagtcaaaaggtaatgtgatcgatccattagatttaataaatgaatatggagcagatagtttaaggtttactttaatttcgatggcctctccaggacgagatgtaaaactatcaaaagatagagttactggaaatagaaactttataacaaaaatttggagcgcgaataattttttaaaacttaataattgtaaattagataaaaagataaatttggcctcaattaaacttccaataaaccattggatttacaacgaatttataaaaacacaaaatttaatcacaaaaaacattgaaatatttaggtttgatgaggctgctaggtatgcatatcaatttgtttggcattcttattgcgattggtatttagagtttttaaaacctatttttaattcaaaaaataaaaatgaaattaaagaagctaaagctttttcatcatttatgatggctaatattctaagaattcttcatccttttatccctttttttactgagaacttgtggtctttaaatgcttataaaaaaattttcaataattatttaatcaattccagttggccagattttaagataattaataaatttagcaaaaatcaaaataatataaatgatttaattgaaataatttctaatattagatctactaaagcagagttaaaaattacgccaaaattatattgtgacatatttttggatgataaatcagggaaattaaagaaattggtaaataaaaatataaatttgattaaacaagttggtagagtaaataatgttcttacaacaaagataagagataaaaattcaatagatatcttagttcttaaggaaaaactctcattaaattttaatgaggatgtcaatttaggttctcaaaaagagagaattttacaaaaaattcagacaattaataaacaaatcactggtttaaataacaagctaaaaaataaggcttatgtgacaaatgcacctaaagagatagtacaaaacgataaaaatttggttaaagaattaactattgaagatagaaaattaagaagtattgtgtctagtattaattaaa

SEQ ID NO: 307600 - DNA, 1765 bp, Unknown
  Bacterial polypeptide expressing nucleotide sequence isolated from the Sargasso Sea
atgcggtttcaaaatactcttatggatgccttgataagacataaaagaatgtctggttttgatgttttatggcaagttggtgttgaccatgctggcatagcaactcaaatggtagtagaacgccaactagagtcagaaggaaaagataaagaatccataggaagagatgcttttgaaaaaagagtgtgggaatggaaagaaaaatctggaggcacgatcactcaacaattaagaagattaggtgcatcggtagactggtctagagaagcatttacaatgaatgaagatttaagtgaagctgttaaagaggtcttcgtttctctttatgatgaaggtttaatctatagaggggaaaggctagtaaattgggacgttgtgttacaaactgctttatctgaccttgaggtatctgctgaagaagagtcagggtccttatggtactttgattacccaattgagaatggaaatgccataacagtagcaacaacaaggcctgaaactatgttaggcgatacagctgtagcagtgaacccaaacgatgagagatttaaaggattaataggtaaatttgtaaaattaccaatcactaacagaaaaatcccaataataaaggattcttatgtagatgaagagtttggaacaggatgcgtcaaaataacaccagctcatgactttaatgattttgaaataggaaaaaggcatgatttagaattcattaatattttaaatcttgatggaacattgaatcaatcagttccagaaaattttaggggcttaacaacagctaaagccagagaaaaagtattaaaagaaatggattcactgggtctattgaataaagttgagccacataaaattcaaattccaaagagtcaaagaagtgattccatattagaacctctaatgacaaaacaatggtttgtagatgtcgaaatgatatctaaagaagcaataagagttgttaaagaaaatgaaactgagtttattcctaaaaattgggaaaatacttatttttcatggatggataacattcaagattggtgtataagcagacagctgtggtggggacatagaataccagcttggttcgacgaagaagagaatgtgtatgtaggaaaatcggaagatgaagtaagaaagaaatacgatctaaaagacatagaacttcagcaggatgcagatgtcttagatacatggttttcctctgcattatggaccttctcaactttaggatggcctaaaaagaagaacttattatctagataccatcccactagtgttttggttactggttttgacataattttcttctgggtggcaagaatgattatgatgactactcactttatttccgaagttccttttaaaaagatattaatacacggattaattaaagattctgagggagttaagatgtctaaatcaaagggcaacacacttgaccctctcgacatcatagatggcataaatcttcctgatctttcaaaaaaaagaacggaaggtcttatgcaacctcaaatgaaagacaaaattgaaaaacagactaaaaaggacttccccgatggaattcatgcctacggcaccgatgccttaagacttactttttgctctttggcaactggtggaagagatattaattttgatatgaaaagagttgaaggctaccggaatttctgcaataaactttggaatgcttcaaggtttattgagatgcaaattgaaaactctggagtgtcagagaagccacatgatgacttgatcgaaa

SEQ ID NO: 307601 - DNA, 1299 bp, Unknown
  Bacterial polypeptide expressing nucleotide sequence isolated from the Sargasso Sea
tattgagagtaagtggtataagtattggcttgagaaaaaatatttttcaagtcaggaatctgataatcactatacaattgtaattcctccacctaatgttactggaaagcttcatatggggcatgtacttaacaatactattcaagatattttaattagaaaagccagaatggaaggcaagaatgcatgttggattcctggaacagatcatgcatcaattgctactgaatccaaagtaactaagatgcttgaagaacaaggaattaataaaaaagatttaactagagaagagtttttaaagcatgcttgggaatggaaagaagaatatggtggcactattattaatcaacttcaaaaattaggatgttcatgtgattgggataaaactagttttactatggatgaagattattctaaagctgttttagagtcttttgttcaattatataacaaaggattgatttataagggtagcaagcttgtaaactggtgtccaaaatcacagactgctctaagcgatgaagaggttatgtttaaagaagtaaatggaaagctgtggtacataaaatatgctattaatgactctgacacttttatagagattgcaactactagacccgaaactatgttaggtgatacggcaatagcagtgaaccctaatgataaaagatataaacagcttataggtcagactgcattgttacctttagttggcagaagtatccctatcattgcagatgatatggtagaccctgaatttggaacaggttgtgttaaaattacacctgcacatgatttgaatgattacgaagtaggaattaaacataatcttgaaatgattaatattatgaatgctgatagttctattagcgataaagctccagaaaagtatagaggaatgtccagggaaaaggctagaaagcaaatagtctcagatttaaaagatataaatcatctaataaaagaagaggattatcttcacaaagttggttattcagaacgagggaatgttcccattgaatactatttatcagaacaatggtttttaaaaatggaagacttagctaagccagctagcgaagcagtgaaaaacaatgaaattaatttttatccaaatcattgggtcaaaacttacaatcactggatgggtaacatccaagattggtgtataagtagacaactttattggggtcatcaaattcctgtttggtataaaaaagatactgatagatctaatccggataattggtttgtttctactacaccccccaaagatataaaaaattggagcaagataat

SEQ ID NO: 307602 - DNA, 1330 bp, Unknown
  Bacterial polypeptide expressing nucleotide sequence isolated from the Sargasso Sea
gactttatgcctatcaatatttttactgatgaagctcacactaatgatagtgttcctgaactttttgctaacctcgatagatttaaggtaaggaaggtcgttctagaagaactaaaaaataagaatttactcttaaaagaagagaaacatcaaataagtgttccgagaggagagcgttccaatattgtaatcgaacctaagcttagccatcagtggtatgtaaaaactcaagaaatggccaaaagagctaatgaagctgttaataaaggtgaagtagtttttcatcctggaaattggatcaagacctattttaactggatggataatatccaagattggtgcatcagcagacaaatttggtggggccacagaattcctgcttggtatgacgaagaaggaaatatatatgttggatacgatgaagatgaactaagagagcattataaattggatggcagaaagttaactcaagaagaagatgttctcgatacttggttctcatcatctctatggccttttggatctttaggctggccaaaagaaactgaactaaataaatactttcctacaagcttgctggtaacaggtttcgatattattttcttttgggtcgctcgaatgatgatgatgagtctagaatttactggcaaagtaccttttaaagatgtttatgtaactggattgattagagatgagaatggtcaaaaaatgtcaaagtctaaaggcaatattattgatccaattgatctaatctatggcattggtattgaagatctagtggctaaaagaacagctaaccttatgcaggaaggtttagctgaaaaaatagaacgtaaaactcgcaaacagtttcctaatggaattgaatcatatggaaccgatgcattgcgcatgacattcttctctttagcgacacatactagagatataagttttgaacttgggcgactcaaaggctataggaacttttgtaataaaatctggaacgcagcacgatttattaataactatccacatgaatcaaaagagtttgttgcaaaaaatgatcatgacaagtggatagaaaaagaatttaacgaagtatcacagcaaattaagaaaaacattgatgaatatcgcttagattttgcggtaaatgaagtctatgaattcttttggggtaaattctgcgataaatacatagaagattgtaaaaaatccggagagacttcaaatcttcacccaatgctaaaaaagattttagtacttatgcacccttttgcaccttttattacagaagaggtaaatgaacttgtctttaaagatggttcattaatggatagcaaataaa

SEQ ID NO: 307603 - DNA, 1288 bp, Unknown
  Bacterial polypeptide expressing nucleotide sequence isolated from the Sargasso Sea
gaaggtatcgataaaaatgatttaggaagagaaaaattcatcgaaaaagtttgggaatggaaaggtcagtatggtgatattattattaatcaattaaaaaaattaggctgttcatgtgactggtctagaaatgctttcaccatggatgaaaatctatcaaaatctgtcttaaaagtttttgttgaaatgtataaaaatggattaatttacaaatcaaaaaaattagtaaattgggacactgttttaaaaactgcaatatcggatttagaagtagatcaaagagaggttaattcaaagctataccacatcaaatatccaatcgagggaacagataaatttataactattgcaactacgagaccagaaaccatgttaggagatacagcagttgcagttaatccatcagatgaaagatataaatcattggtaaataaaaatgtaatagttccaatagttgatagaaaaataaaaatcatagaagatgaatatgcagatcctgaacaaggtactggagctgttaaaattactccagcacatgatttcaatgattatgaagtaggggagagaaataatttagaagtcataaatgtttttaccccagatggaaaaattaatgaaaatgctcctgataattatattggacttgatagatttgaagctagaaaaagaattttaaaggaactttctgataaaaacttatttgttaaagaagagaaaattaaaaataaagtaccttatggtgatagatctaattcaataattgaaccttatttaactgaacaatggtttgcagatgcaaagaaactttcaataaaagcaaaagaaatagtaaataataaaacaactaatttttttcctgttaattggacaaaaacatattttcaatggatggataatatagaaccatggtgtatttcaagacagctttggtggggtcatcaaatacctgcatggtatggacctgacggagaaatatttgtagatgaaacagaagaaggtgcaaataaattagctaaagaacattataaaaaagatgttgaattaattagagatccagatgttcttgatacatggttttcatctggtttatggccttttgcaacactaggatggccagaaaaaaatgaatatttagaaaaattttatccaacttcagtattggtaacaggatttgatatcattttcttttgggttgcaaggatgattatgtttggaatggaatttcaaaataaagaaccttttaaaaatatttatgttcatgctttagttagagacgaaaaaggacaaa

SEQ ID NO: 307604 - DNA, 1918 bp, Unknown
  Bacterial polypeptide expressing nucleotide sequence isolated from the Sargasso Sea
tttaggaaaaacagttaccattccaattgttggaagaaaaataaaaattattgaggacgattatgcagatcctgaacaaggaacaggagcattaaaaattactccagctcatgattttaatgactatgatgttggtcaaaggaataatcttgaaataataaatatttttactgaagctggtaaaataaatgaaaatgccccagaacattatgttggccttgataggtctgaagcaagaaaaaaaattttaaaagaacttaaagaaaaagaattttttgaaaaagaggagaatataaaaaataaagttccttatggagatagatctaattcaataattgaacctttcctaacagaacaatggtttgctgatgcaggtaaattatctgttaaagctaaagaagttgttaattcaaaaaagacaaatttctttccagaaaattggtcaaaaacttattttcaatggatgaacaatattgaaccatggtgtatttcaagacagctttggtggggccatcaaatacctgcttggtatggtcctgatgaaaaagtttttgttgcagaaaatgaagatgatgcaaaacgacaagcaaaaaaacattatggtaaagatgttgaattaaatcgtgatccagatgttttagatacttggttctcatctggcttatggccttttgctacacttggttggcctgatgataataaatatgtagataaattttatccaacatcagtattagttaccggttttgatattatatttttctgggttgccagaatgattatgtttggtactgaatttttaaataaagaaccatttaaaaatatttatgttcatgcattggttagagatgagaagggacaaaagatgtctaaatctaaaggaaatgtaattgatcctttagatttaattgataaatatagtgcagatgctttaagatttactttgttatcaatggcatcaccaggcacagatgttaagctttctgaagatcgagttaaaggttatagaaattttttaaataagttatggaatgcaaataattttttaatcactaatgaatgtgattttaaagatatagataaagttcctagtttaaatgtaaatattaacaaatggatttattcagaacttgttgaaactaaaaataaaatagaaaaaaaccttgaagattatagatttgatgaagctgctaaaaatgcttatcaatttgcatggcattcgtattgtgattggtatttagaattatctaaaactatactcttttcagatgatgaaaaagctaaagcagaggttaaaaaggtatcatcttttgtattcaaacaaatattgattttgctgcatccttttattccttttgttactgaagaaatttggcttaaaaataaatttgataatgacggtagtgattatttgatgcttaaaaattggttatcaggtgaaataaataaggataccagtactgaacaggttgaaaatatcatcaatattatttcagagattagatcatttaaaaatgagctaaatgtaagcccaggctcatttattgatgtatcaataagcaatattaataaaaatcaaaaagactttattaatacaaatgaaattattctaaaaaaacttgggagaataaatagcatattggataaggatttagataaaccagctgcgacaatggttgtttctggtgatttgtttaagatttattttgataaagatgttgatttaaaattaataaaagaaaatttaacaaataaacaaagtagattagagcaagagatgaataaaatatctcagagattggagaataagagttttgtagatcgagctccaaaagagattgttgaacaagaaaaaaataattataataatttaaagaatgatattgagaaaatatcaataacaataaagggtatataa

SEQ ID NO: 307605 - DNA, 2104 bp, Unknown
  Bacterial polypeptide expressing nucleotide sequence isolated from the Sargasso Sea
atgcaagacgaaacctatgagccattagctattgagaaaaaatggcaggagaactgggaatcagctaacaaatttgtaccagtagattcagataaaaaattttcaattgttattccaccaccaaatgtaaccggatctttacatatggggcatgcattagagcattcaataattgatgtaattactcgtataaaaaggcttaaaggatatgaaactttatgggtgccaggtacagaccatgcaggaataataactcagttattagttgaaaatgaattatctgaaaagggtgtacagaaagaagacattggaagagaaaactttatatcaaaagtttgggaatggaaagaaaaatctggtgaaaacatatcaacccaaatgagaaaacttggtatgagctgtgactggtctcgtgaaaggtttactatggacgaaggtctttccacggctgtaagagaagtatttataaaactctatgaagatggattaatttataaaggtacaagaatggttaactgggacacagagcttatgtctgcagtttctgatcttgaagtaactttaaatccagaaaaaggaaaattgtggagtattaaatataaaacagaagattcatttttaactatttctactacgcgtccagaaactcttttgggagatacagcagttgctgtaaaccctgatgatgaaagatataaaaatctaattggtaaaacagctattgtgcctttagtaaatcgtgaagttccaataattgcagatgaatatgttgatccagaatttggttcaggatgtgtaaagattacgccgtcacatgatttcaatgattatgagattggagaaaaacataaattagagtttattcaatgtatagaccttgatgggaaaataagcaatgaagactttattcctgaaaatttaagagggaaagatagatttgaagcaagaaaattaatagtaaatgatttgatgaaattagaacagcttgaaaaagaagaagattatgatattcaattaccaaaaggagataggtcgaaaagtattcttgagccaatgattacagaacaatggtttgtaaaaaccgaaacattagcaaaggaagcaataaaagctgtagagacagaggaaattaaatttgtcccaaaaaactgggaaaaaacttattttgagtggatgtacaatattcaagattggtgtatttcaaggcaaatatggtggggccacagaatcccagcttggtacgatgaagagaataatatttatgtaggaaactcagaacaggaaataagggagaaaaacaatctttctaaagaaacaaaattaagacaagatgaagatgtattagatacatggttttcatctgctttatggcctttttcaactctaggatggcctgaggactctgaagatttaagtaattattatccaacatcattattagtagtagggtttgacatcatattcttttgggtagctcgaatgattatgatgggcattaatttccaaaaagacattccatttaaagacatacttgtacatggcctagtaagagactcaaaaggaagaaaaatgtctaagagccttggaaatactattgatccattagaactgtctgataaacatggagcggatgctctacgattctctttagttgaaaaagcttctccaggccaagatgttccttttgatgaagaatggacaatagcagcaaaaaaatttggcaacaaaatatggaatgcatctaaatttgtacatatatatacagacggtaaagaaactaatgatttaagcacaatagagtgcgaagagaataaatggataataaataagtttgataccgttcttgatgaatttaactctttatttgaaaagtataaaatttcagatgcatacaagttgttttataactttctttggtctgacttgtttgattggtattttgaattttcaaaaaatttaattgaaaatgaaaatcataaatcagagactatggaggtactacattcagtattccttaaatcaataaaaattttaaacccagcaatgcctcacattactgaagaagtatgggaaacgtttgatgaggaagtattaataagcaata

SEQ ID NO: 307606 - DNA, 2671 bp, Unknown
  Bacterial polypeptide expressing nucleotide sequence isolated from the Sargasso Sea
atgacactttcaaaaacctacgatccccattcatttgaatcagagatttacaaaagatgggaagaaaaaggtgtgttcagggcagacaacacctccgaggcaactccttttaccatctccatgcctcctccgaatgcaaccgggcaactgcatgtaggacatgccgtgatgttggctttggaagacattcttatacgctggcatcgaatgaagggggatgaggcgctttggcttccgggcaccgatcacgcagcgattgccacagaaaacgtagtcctaaataaaatccgaaatgaggaaggcattcaggatccgagggaaactttggagagggaggaagtgctgcgaagaattgctgcttatgttgaaaattcacggggaaccatcaggaaccaagtgaaggcaatggggtccagttgcgactggtctcgggaacgttacaccatggatccgcagctaaatcgttgtgtcaatgaatcgtttgtccgaatgtacgaggaaggcttgatataccgtgggccgaggatcgtgaattgggatccgaaattgaaaaccaacgtttcagatgatgaagtcgaacgaaaggaaacacggtctcccttttatacttttcagtatggaccttttcagatcgggacagtccgtccggagacgaagttcggggataagtatgtggtcatgcaccctgaggatgaacgataccttgattatcaacatggtcagacctttgagtgcgaatggatcaacggaagaatccaggccacgatcattaaagacgattccgtggatcctgaattcggaacaggagtgatgaccatcactccatggcatgatcatacagattttgaaattgccgaacgacatcaactggataaagaaccgattattgatttcgagggacgacttcttccgattgcccaagagttttcgggaatggccattgaagaagcccgaagtttgattgtcgaaaaacttaaaacaaagggtctgttggttaaagtggatgaaaagtatacccacagcaaatcatttaacagtcgtggaggaggggccattgagcctcaaatccgggaacagtggttcattgatgtcaataaacaggccatcgattggaaaggggaaaaatcgagcttgcgagaaattctcattgatgtggttcgcgctggtgacatcaggttggttcctgatcgatttgaaagtacctactttcactgggttgaaaatcttcgtgactggtgcattagcagacaaatctggtgggggcacaggattccagctttttaccgtgagaaagaattacaaatcgccatgaaaactccggaaggagagggctgggaacaggatcctgacaccttggacacctggttttcctctgcactttggacatggagtaccctgattgatccggatttggctcaggatgaaagcatctcttttgaggaattgctcaggagaagtcctgatttccaaaaatttcatccgactcacgtgatggaaaccgggtatgacattctgtttttttgggttgccagaatgattctgatgacgaccttcatgatccgggaagtccccttcaaaaccgtttacctacatggactggttcgaacacgtgacggtaagaaaatgtctaaatcagatcccctcacctgcatcgatcctctcgaaagcatccgtgattacggaaccgatgctctcaggctggcattgattcaagggacaggaccagggcaagatctcaggctttatccggaaaagctggagagttgccggaggtttgcaaacaaagtctggaatgcaggacgttacatccttatgaatatcccatctggaacgtcgatggatcctccgcaaaaagttcagaatgaagccgcacggtggcttcttcatgaactggatatgcttattggaaaaacacggcaaggcttggaaacttttcgactttcagaggtgattgataatcttagaagctttttctggagtacattttgtgattggtatctcgaaatggataaaagacctgaccggaatgaagaagataatcgagtcttggcctatgctttgagcactcaactcaaacttcttcatccctatgtcccctttgtcacagaagccctttgggaaaatcttgggcaagataagatgttggcaaaagcaccatggcctgaatctcagggatatgattttggagaaagtcacaaaaatattcagttggtctgtgaatcggtttcacagttacgaactctccgtgaaaaagtgcgactgggattgaaccagaaagttgatgccggcatcgattccgagccccatgcagaagtttttgaaatccattcagggttaataaaaaggttggcgcgcatcagcgaattaaaaatcaggaaagtccctgcaactccaagcggagaagccctttcttcttattttcaggactctcttgtgagcatcaacgcgaatgctttggacttcagtcaggagatttcaaacctccagaagcagttgaatcaggaaaaccagtttttgaccaaaagtcggaacaaactccaaaatccaggttttctaaataatgcgccagatcaggtggttttggaacttcgtgaaaaagttgattcgactgaaaaaaccattgatgcactgaagaaacaggtcatcgaattggaacagttggcaaactgag

SEQ ID NO: 307607 - DNA, 1216 bp, Unknown
  Bacterial polypeptide expressing nucleotide sequence isolated from the Sargasso Sea
catgagtagcgataaatacatacattctgatgttgaggataagatttattcatattgggaaaaaaataaactttttaaacctaaaaaaaacttaaaaaaattttcaattgttatcccaccaccaaacgtaactggcagtcttcatatgggacatgctttaaataattcaattcaggatctattggttcgttattacagaatgaacaattatgagacgttatggcaacctggaacagatcatgctggtatagcaacacaagctcttgttgagaaaaagttggaaaatgaaaatttaaacaaaaaagatttaggtagagaaaaatttatagaaaaagtgtgggaatggaaaaatcaatatggagacataataattaaccagcttaaaaaactgggttgttcatgtgattggtccagaaatgcctttacgatggatgaaaatctatcaaaatcagtgatcaaagtttttgtcgagttatataaaaaaaaattaatctataaatcagaaaagttggttaattgggatactgttttaaaaacagctatatctgatttagaagttgatcaaagagaaatgaactctaagatttattatattaggtaccctatagaaaaatctgacgaatttattacaattgctactacgcgacctgaaactatgcttggagatactgctattgcggtaaatccaaaagataaaagatttaaaaagtatgttggcaaaactgtcactatcccaatagttggaagaaaaataaagatcattaaagataattatgcagatcctgaacagggaacaggtgctttaaaaattactcctgcgcatgattttaatgattatgatgttggtcaaagaaacaacttagaaattataaatatttttacagaagatggtaaaattaatagaaatgctccaaaaaattatgttggtttagatagatttgaagctcgtaaaaaaatattagttgaattaaaagaaaaaaacttttttgttaaagaagaaaatattcaaaataaagtcccatatggagatagatctaattcagttattgagccttttttaacagaacaatggtttgttaacgctaaaaaactatctataaaagcaaaaaaaatagttaaatcaaaaaaaaataatttctttccagtaaattggtcaaaaacatattttaaagggatgaacaatattgaaccgtggtgtatctctagacagctctgg

SEQ ID NO: 307608 - DNA, 996 bp, Unknown
  Bacterial polypeptide expressing nucleotide sequence isolated from the Sargasso Sea
taagattattttcttattgggaaaaaaataatttatttaaacctaaaaaaaacaaaaaatcattttcaatagttatcccacctcctaatattaccggaagtcttcatatgggtcatgctttaaataattctattcaggatttgttaacaagatttcatagaatgaataattatgaaaccttatggcaaccaggaacagatcatgctggaattgctactcaggcattagttgaaaaaaaactagctaacgatggaattaaaaagaatgatttaggtagagacaaatttattgaaaaagtctgggaatggaaaaatcagtatggcgatataataatcaatcaattaaaaaaattaggttgttcatgtgattggtcaagaaatgcatttacgatggacgataatttgtcaaaatctgtaataaaagtatttgttgatctttataaaaaagatttaatttataaatcaaaaaaattagtcaattgggatgtggttcttaaaaccgctatttctgatttagaagttgatcaaagagaagtaaattcaaaattatatcatataagatatccaatagaaaaatcagatgattttataactatagccacaactagacctgaaactatgttaggtgatacagctatagccgtaaaccctaaagacgatagatataaatcactagtaaataaatttgttacaattccattggttgagagaaaaataaaaatcattgaagatgattatgctgatcctgaacaaggaacaggagctgttaaaattacaccagctcatgactttaatgactatgaagtaggtcaaagaaataatttagaaatcttaaatatatttacctctgatggtaaaattaatgaaaatgcgcccaaagaatttattggtttagatagatttgaagctagaaaaagattgctgaaaaaacttaaagaaaaagattttttagttaaagaagaaaatattaaaaataaaattcccatatggggataga

SEQ ID NO: 307609 - DNA, 838 bp, Unknown
  Bacterial polypeptide expressing nucleotide sequence isolated from the Sargasso Sea
attgaacccttggtgtatatcaagacaactttggtggggacatcaaataccagcttggtatggacctgataaaaaaatctttgtagcatcaaattataaagaagcagaaaaactggccaaaaaaaaatataagaaaaatgtagaattagtaagagatgaagatgttttagatacatggttctcatcaggattatgggcttttgcaactcttgggtggcctaataaaaatgaatatttaaaaaagttttatcctacatctgttttagtaactggttttgatattatctttttttgggttgctagaatgatgatgtttggaatggagtttttaaataaacaaccatttaaagaaatttatgtacatgcattagtaagggatgaaaaaggacaaaaaatgtctaagtcaaaaggtaacgtaattgatcctttgatattgatagataaatatagtgcagatgcattaaggtttactttgctatcaatggcatcacctggaagagatgtaaaattgtctgaagatagagttaaaggttatagaaatttcctcaacaaactttggaatgcaaacaactttttggcaatgaataagtgtgatttttcaaagtctaaaaaggaaccaaaagcaaaattaaatataaataaatggattatttcagagttaaacacagcgagtaagcttattgaaaagaatataaatgattataggtttgatgaagcagcaagaaacatttaccaatttgtttggcattcatattgcgattggtatgtagagctatctaaaactatcttgaattctaaagaaaagtcatcaatttcagaggtaaaacagacgttgagc

SEQ ID NO: 307610 - DNA, 294 bp, Unknown
  Bacterial polypeptide expressing nucleotide sequence isolated from the Sargasso Sea
gttggaaaagacatacaacccaaaagagatagaagccagaatatatgaatcttgggaagattcaggatacttctcgccttcaaaatcgggggagccattttgcattgtgattccgcctccaaatgtaactgggacattgcatatgggccatgcatttcaagacacaatcatggacatcatcattcgataccaaaggatgaatggaaaaaatactttatggcaggtgggtactgatcatgcagggattgctacacaaatggtggtggaaagacaattagaaaaatctggaacctc

SEQ ID NO: 307611 - DNA, 2749 bp, Unknown
  Bacterial polypeptide expressing nucleotide sequence isolated from the Sargasso Sea
tatgaaaaaaaactacgagccgagttctactgaaacagaaatttacgagaattgggaaaaatcagacttctttaaagctcaacctgatgaatcaaaagaatccttctgcatcatgattcctccacccaatgttactggaacacttcatatgggtcacgggtttcaaaatactctaatggatgcacttattcgccataaaagaatgtcgggattcgatacactctggcaagttggcgtagatcatgccggaatagcaactcaaatggttgtagaaagacaacttgaggcggaaggattgtctagagagaagatcggtagagatgaatttgaaaaaaaagtatggctttggaaggaaaaatcaggaaataaaataacacaacaactaagaagactaggcgcttcggtagactggtcaagagaagccttcaccatgagtgatgatttaagcatggcagtcaaggaggtattcatagaactttataaccaaggattgatttataaaggagaaagattggtcaattgggatacagttcttgagactgctttgtcagatcttgaagtttcttctgaagaagaaaatggatctctttggtatatagattactttacttcagataatgaaaaattaaccgttgcaacaactagaccggaaacattgcttggagatacagccctagcagttaatcctgaggatgaaaggtataagggacagataggaaaaatggcacttttgccaattgtgaatagagaaatacctatcattgctgataattatgttgaatcagaatttggtactggttgtgtgaagattacgcctgcacatgatttcaatgattttgagatgggcaaaaggcacggacttaaaataatcaatatcttgaattttgatggcactctaaatgacaaagttccagataaatatcaaaacttaaatattgaagaggcaagagaacttatactagaagaccttaatacaattggtcaactgaataagactgagccttataaagtccagatcccaaggagtgaaaggagtaattctatccttcaacctttgttgactaatcagtggttcgttaatgttgaaaaactttctgaagaagctatcagagtcgtaaaggaaaatgagacagagtttatacctaagaactgggaaaatacctattttgcttggatgaatgatatacaagattggtgtatcagtaggcagttgtggtggggacatagaataccagcctggtttgataaagatgataatttgtatgttggggaatctgagaaagccgttagagaaaaatataatcttgataatattgaactgaaacaagacgaggatgttctggatacttggttttcttctgctttgtggacgttttcaactcttggctggccaaaaaaagagaacttactttcaagatatcatcctacaagtgttttagtgacagggtttgatatcattttcttttgggtagcaagaatgataatgatgactactcatttcataaacgaagtacccttcaagaaaatattgattcatggtcttataaaagattcagaaggccagaagatgtctaaatctaaaggtaataccttggatcctttggatatcatagatggaattaacctagatgacttaattgataagagaactgaaggcttgatgcaaccaaaaatgaaagatcgaatcataaaacaaaccaaaaaagaatttccgaatggtatcgaagcttatggaactgacgcattgagactaactttttgctcgctagcgtcaggcgggagggatattaattttgatattaaaagagtagaaggttacagaaacttttgtaataagctttggaatgcagccagatttatagatttaaatattgataactatggtatttccaaaaagagaagtgaaacttcaattgatgcctggatcgactataaattcaatcaaactgtagagaaagttgaccaatcaatgaatgaatttagatttgatttggctactaaagcactctatgaatttatatggtacgaattttgtgattggttcatagagcttcagaaaataagtcttagaaaagatgacgtgaataaagcagagattgttaggtctttggttgatattcttgaaaaaaccctaagacttgcacatccaatcatgcctttcataacagaagaaatttggaaacaatttcaggcacatcataattcaacccatgaaagcataatgatatctgaataccccgtaggttctgaaaatacttcggaacaagactaccaatcagtagagtggcttaaagatattgtatctgggataagaaatatacgtggcgagcttcttatcaaaccttcaattaaaatttcttcaatctttaagggaggagatgaattagataaagaaaacttaaatcaaattagtagttacatagaaaagctatgtggtctcaaagatattatttgggccgaagaaagttctcaggatattccctcatcaatgtttacgcgagacaatctaaaagtaatgatacctcttgaaggacttattgatgcaaaggaagaaatgcaaaggctcgataagaaaatatctaaacttattcaagaaaaggaaatgctaggtagtaaactttctaataagagctttgttgaaaatgctccaaaagatctagtggaatctcaaaaagatagattttctgttttatctaaagaactagaaaatcttgactttcaaatggatgaaattaaaaaaatgatttag

SEQ ID NO: 307612 - DNA, 906 bp, Unknown
  Bacterial polypeptide expressing nucleotide sequence isolated from the Sargasso Sea
tatgcacgaattaccaaaacattatgatcatgccgcagcccagactcgctgccagacactctgggatacaaatcgctactggcatgcggatccgaatcaaccgggcgatgtcttctctgtcgtaattccgccgccaaatgtcacaggcgcgcttcacttgggacatgctttaaacaacaccctgcaagatattcttgtgcggacgaagcgaatgcagggatttcttaccctctggatgcctggcaccgatcatgccggtatagcaacacaggctgttgttgaacggcggctgctggaggaggagggagtttcccgacatgatctcggacgcagcaaactcgttgagcgcatctggaactggaaagagcaatacgaaaaacggatcctcagccaactcagggatattggcgcaagttgtgactgggacagaacacgtttcacacttgatgaccagtgtggaagagccgtacgagaaacctttttccgtcttttcgaaaaaggactcgttcgacgtggaaaacgactcgtgaactgggatacatttctccagactgctgtcagtgacgatgaagtttttcatgaggaagtgaaggggtatttctggcacatacgatacacagtgatcgatccacaacctggtgaaccaatagacatcacggttgctacaacccggccagaaacgcttcttggagataccgccgtagcagtccatccgaacccggcggaagcgctccaatcgctcttaggtgagcttcgggaaaaattatcacaggcaccagaaaaagaaaaagctgagattgaacagacgattgactctctccagagccgctgcaaaagtgttctaccgggtctggaaaaactcgcagacatggccgccgatggccgccacgtgagagtgccgttact

SEQ ID NO: 307613 - DNA, 2067 bp, Unknown
  Bacterial polypeptide expressing nucleotide sequence isolated from the Sargasso Sea
tatgaagaaaaactacgagccgagttctactgaaacagaaatttacgagaattgggaaaaatcagacttctttaaagcgcaacctgacgaatcaaaagaatccttttgcatcatgattcctccacccaatgttactggaacacttcatatgggtcatgggtttcaaaatactctaatggatgcacttattcgccataaaagaatgtcgggattcgatacactctggcaagtgggcgtagatcatgccggaatagcaactcaaatggttgtagaaagacaacttgaagcagaaggattatctagagaggagatcggtagagatgaatttgaaaaaaaagtatggctttggaaggaaaaatcaggaaataagataacacaacaactgagaagactaggcgcttcggttgactggtcaagagaagctttcaccatgagcgatgatttaagcacagcagtcaaggaggtgttcatagaactttatgaccaaggattgatttataaaggagaaagattggtcaattgggatacagtacttgagactgccttgtcagatcttgaagtttcatctgaagaagaaaatggatctctttggtatattgattactttacttcagatagtgaaaaattaactgttgcaacaactagaccggaaacattgcttggagatacagctctagcagtaaatcctgaagatgaaaggtataagggacagataggaaaaatggcacttttgccaattgtgaatagagaaatacctatcattgctgatagttatgttgaatcagaatttgggactggttgtgtgaagattacacctgcacatgatttcaatgattttgagatgggcaaaagacatggacttgaagtgatcaatatcttaaattttgatggcactctaaatgacaaagttccagataaatatcaaaacttaaatattgaagacgcaagaaaacttatcctagaagaccttaatacaattggtcaactgaataagactgagccttataaagtccagatcccaaggagtgaaagaagtaattctatccttcaacctttgttgactaatcagtggttcgttaatgttgaaaaactttcccaagaagctatcagagttgtaaaggaaaatgagacagagtttatacctaagaactgggaaaatacctattttgcttggatgaaagatatacaggattggtgtatcagtaggcagttgtggtggggacatagaataccagcctggtttgatatggatgataatttgtatgttggggaatctgagaaagccgtaagagaaaaatataatctcgataatatagaattgaaacaagacgaggatgttctggatacttggttttcttctgctttgtggacattttcaactcttggatggccaaaaaaagagaacttactttcaagatatcatcctacaagtgtcttagtgacggggtttgatatcattttcttttgggtagcaagaatgataatgatgactactcatttcatcaatgaagtacccttcaggaaaatattaattcatggtcttataaaagattcagaaggccaaaagatgtctaaatctaaaggtaatactttggatcctttggatatcatagatggaattaacctagatgacttaatcaagaagagaactgaagggttgatgcaaccaaaaatgaaggatcggatcataaaacaaaccaaaaaagaatttccgaatggtatcgaagcttatggaactgacgcattaagactaactttctgctcgctagcgacgggtgggagggatatcaatttcgatattaaaagagtagaaggttacagaaacttttgtaacaagctttggaatgcggccagatttatagatttaaatattgataactatggtatttccaaaaagagaagtgaaagttcaattgatttctggatcgactataaattcaatgaaacggtaaagaaagtagaccaatcaatgaatgaatttaggtttgatttggccactaaagcaatctatgaatttatatggtatgaattttgtgattggttcatagagcttcagaaaataagtct

SEQ ID NO: 307614 - DNA, 1425 bp, Unknown
  Bacterial polypeptide expressing nucleotide sequence isolated from the Sargasso Sea
taaaaaattaggatgttcatgtgattggtcaagaaatgcttttacaatggatgaaaatctatcaaaagcagttatcaaagtttttgttgatcttcataaaaaaaaattaatttataaagctgaaaaattagtaaattgggacacagttttaaaaaccgcaatatctgatttagaagttgatcaaagggaagttaattctaaaatttattatattagatatccaatagatggaacaactgaatatataaccatagcaaccactagacctgaaactatgcttggagatactgctgttgctgtaaaccctaaagacaagagatataaaaagtatgttaataaaattgttacaattccaattgttggtagaaaagttaaaatcatcgaagatgattatgcagacccagaacagggaagtggagcattgaaaattacacctgcgcatgacttcaatgattacgatgttggtaaaagaaacaaattagaaattattaatatttttacagaagatggaaaaattaatgataatgcaatttcatcatatgttggtttagatagatttgaagctagaaaaaaaatattaaatgaacttaaagaaaaagattattttgttaaggaagaaaatattaaaaataaagttccatatggagatagatcaaactctataattgaaccttttttaacagaacaatggtttgcagatgcaaagaagttatcaattaaagcaaaaaaaatagttaaaaataaaaagacaaacttttttcctgagaactggtcaaaaacttattttcaatggatgaacaatattgagccatggtgcatctctagacaattatggtggggccatcaaataccagcatggtatggaccagataaaaaaatcttcgttgaactaaatgaaagtgatgcaaaaaaatcagcaaaaaaatattataaaaaagatgttaaactagtaagagataatgatgtacttgatacatggttttcatctggtctttggccttttgcaacacttggttggccaaacaaaaatgaatatttaaaaaagttttacccaacaacagttcttgtaacaggatttgatataattttcttttgggtagctagaatgatgatgtttggtatggaatttttaaacaaagaaccttttaaagatatttacgttcatgctttagttcgtgatgaaaaaggacaaaagatgtcgaagtcaaaaggtaatgtaatagatccacttgatctaattcaaaaatatagtgcggacgctttaagatttactttattatccatggcttcacctggtactgatgttaaactttctgaggatagagttaaaggatataggaattttttaaacaaactatggaatgctaataattttttaatacaaaacaaatgtaatttaaaaaatgctaaaaaacttccaaaatt

SEQ ID NO: 307615 - DNA, 1100 bp, Unknown
  Bacterial polypeptide expressing nucleotide sequence isolated from the Sargasso Sea
tgcatggtatggacctgatggagaaatatttgtagatgaaacagaagaaggcgcaaataaattagctaaagaacattataaaaaagatgttgaattaattagagatccagatgttcttgatacatggttttcatctggtttatggccttttgcaactctaggatggccagaaaaaaatgaatatttagaaaaattttatccaacttcagtattggtaaccggatttgatataattttcttttgggttgcaagaatgattatgtttggaatggaatttcaaaacaaagaaccttttaaaaatatttatgttcatgcattagttagagatgaaaaaggtcaaaaaatgtcaaagtctaaaggcaatgtaattgatccattagaattaatagaaaaatatagtgctgatgctttaagatttacacttttgtcaatggcatctcctggacgagatgtaaaattatcagaggatagagttaaaggttatagaaattttttaaataaaatatggaacgctaacaactttctaattcaaaatgattgtaaatttgaaaatatagaaacgcctaatgatttaaaactaaatattaataaatggatttttgttgaattcactaacactaatgcaaagatcaaaaaatcaatagatagttatcgatttgatgaggctgcaagaattgcatatcaatttgtatggcattcgttctgcgattggtacttagaattatctaaaactgttttttattcagaaaataatgaaaatatcgaagaaacaagaaatgtagctagcttcatatttactcaaattctagtcattttacacccattcataccttttctaaccgaggaaatatggttgaaaaataaattggataaagatggaaaagattttctaatgttaaaaaactggtctgaagccatttctaataaagataaagactctgatgaagtaaatgaaataattgaatttgtttcatctataaggtcttttaaaaatgaaatagaaataagccctggatcatttgttaaaatactagtgaataaaataaatcctgaaattaagaaatttattgaaaataactctaatacattaaaaaaaattg

SEQ ID NO: 307616 - DNA, 2515 bp, Unknown
  Bacterial polypeptide expressing nucleotide sequence isolated from the Sargasso Sea
tttgtgtttacctggaactgatcatgcttcaatagctgttcaaactattctcgaaaaacaattaaaaagtgaaggcaaaacaagcgaggatattggaaggcatgaatttcttaaaagagcatggaactggaaagaacaaagtggtggaagaatagtttctcaattaaaaaggataggatattcagttgactggactagagaaagatttactcttgatcaaaaattaaatgaagcagttattgaggcttttaatattctctataaaaagaatttaatttatagaggcgaatatttggttaattggtgccctgaatctcaatctgccgtaagtgatcttgaagttgaaatgcaagaagtaaatggtcatttatggcattttaaataccctttaatttctgaaagtggtgaacagttagataagtacttagaagttgcaacaacaagaccagaaactcttttgggtgatactgctgtggcagttaatcctgatgatgatagatataaagaatttattggtgtcaaagtaaaagtccctttcgttgatagagaaatacctattatcgctgattcacatgttgataaagattttggtacgggttgtgtgaaggttactccagcccatgatccaaatgattttgcaataggaaaaaggcataatttaaaacagattaatgtaatgaacaaagatggaactttaaatattaatgcaggtatttttcaaaatttagatagatatgaggctagaaagaaaattatcaaagaattggataacttaggccttttgacaaagatagaggattataaacatactgttcctttttctgatagaggtaaggtaccaattgaacctttattgtcaacacaatggtttttgaaaatggatgatatatcacaaggatgtcttaatgaaattgattctaaaaaaccatcgtttattcctccacgctgggagaaagtttataaggattggttagagaatattaatgattggtgtatcagtcggcaattgtggtgggggcaccaaataccagcatggtatgttttagatgactctcaagactcaatagaacaaaatactccatatattgttgcaagaaatgaagaagatgccttaatcgaagctaataaaaaatttggattaaatattaaattggttcgtgataaagatgttttggatacatggttttcaagtggtttatggcctttctcaactcttggttggccaaatacaaatgatccggattttaaaaaatggtatccaaatagtgttcttgttactggtttcgatattattttcttctgggtggcaagaatgacaatgatggggaatacttttacaaataatattccttttaaggatgtttatattcatggtctagttcgagatgaaaataataaaaaaatgagtaaaagttcaggtaatggtattgatccaatattattaattgataaatatggttctgatgctctacgatttgctttaattcgagaagttgcaggcgctggacaagatatccggcttgattttgataggaaaaaagatacgtcttcaactgttgaagcttcaagaaattttgcgaataaattatggaatgcaactaaatttgtgttaattaataaaacttctaataataattattcgcttaatgagagtgatgaaacttttttagagttatgtgataagtggattttatcgaaattgaatcaggtaaatacaaaagttgctgctttgttgaaagaatataaattgggagaatctgcgaaacttctatatgaatttacttggaatgatttttgtgactggtatgtagaatttgctaaacaaaggtttaataataaagagactaataatagacaaatatctgaaaaggttttaataaaagtgctcaatgatattttggtgatgattcatccttttatgccgcacattactgaagaactttggcatgtacttcaacttaaatcagataaagaattattatctcttcaaaaatggccaacccaagaaaataaatttgttgataataagcttgataattcctttcaacaactctttgaaattattagattgattagaaatttgagagctgaattaggcctcaagccatcagaaaaagttcctgtttacttaatttcagataatgatgaattgattgattttctaaaaattttagttgatgatattcaaaccttaactaaatcttctgaagtatttatttttaaacctaatgctgttgataaaaaagagtttgctaaatctttttctgggataattagtgatttagaggtttacttaccttttcaggattttgtaaatatagatgcattaaaggaaaggttaaacaaggatttaaaaaaggtgactattgaattagataatttaaataagagattatctaataaaaatttcgtggataaggctccaaaagatattgttgatgaatgtagatttaaattaaacgagggttcggtacaaatggagagaattactaaaaaacttgaacttttgaattga

SEQ ID NO: 307617 - DNA, 838 bp, Unknown
  Bacterial polypeptide expressing nucleotide sequence isolated from the Sargasso Sea
aatgtcttcaaatcaattagataaaacatacagacccaacttagttgaagataaatggtacgagcattggattgagcaggattattttactgctgaccctaattcagataaagaaccatatactattgtcattccacccccaaatgttactgggatgcttacagtagggcatgtcctcaataatacgatacaggatattttgatacgtaaagcacgcatggaaggtaaagaggcctgttggatccctggtacagaccatgcttctattgccactgaatcgaaagttgtcgcgatgcttcacgaaaaaggtatcaacaagaatcaactatctcgggaagaatttttggagcatgcttgggagtggaaagaaaaatatggtgggattattattcgccaacttaaaaagttgggttgttcttgtgactggtcaagagaaagatttacaatggacgaaggctatacaaagtctgtcctgactgcttttgttaagctgtatgataaaggactcatatataaaggtcatcgccttgtcaactggtgccctgtatctagatctgctattagtgatgaagaggtgattcataaagaaaagcaaggcttcctttggcattttcgttaccctatcacagattctgatcagtatgtcattgttgcaacaactcgaccagagacgatgcttggggacacagctgtagcagtacacccagaagatgatcgttaccaagatatggttggcaaaacggtatccttacctttagttggaagagaaattcctatcatcgcagatacgttcgtggaccctgagtttggtactggttgcgtaaaagtgacccctgcc

SEQ ID NO: 307618 - DNA, 1865 bp, Unknown
  Bacterial polypeptide expressing nucleotide sequence isolated from the Sargasso Sea
aatgagttttgataaatatgagcataataatgttgagaataaaatctatgattattgggaaaaaaatgaattatttaaacccaaagaaaattcaaaaaaattctccattgtaattcctccaccgaatgtaacaggaagtcttcatatgggacatgctttaaataactcaattcaagatgttttaacaagatttcatagaatgaataattatgaaactttatggcaaccaggaacagatcacgctggtattgcaactcaggcattagttgaaaaaaaacttgctaagaacggtgttaaaaaaaatgatttaggtagagaaaaatttatagaaaaagtctgggaatggaagaatgaatatggagatataataattaatcaacttaaaaaacttggatgttcttgtgattggtcacgtaatgcattcacaatggatgaaaatttatctaagtcagtcataaaagtatttgttaatctttataataagaaattaatctataaagcaaaaaaacttgtaaattgggatgttgttttaaaaacagcaatatctgatttagaagttgatcagcgtgaagtaaattctcaactttattatataaattatcctatagaaaattctgataaatttataacaattgcaacaactagacctgaaactatgttgggagatactgcaatagctgtaaatcctaaagatgatagatttaaagatttagtaggaaagtttgtaattattcctttagcaaagagaaaaattaaaattataacagatgattatgctgatcctgaacaaggaacaggagcagtaaaaattactccagctcatgattttaatgactatgatgtaggtataagaaacaagttagaagtaataaatatatttacgcctgatggaagaataaatgacaatgcacctgacccatataaaggtttagatagatttgcagccagaaaattaatcttagaacatcttgaagagggtaaatttttagaaaaaatagaaaagttagtaaacaaagttccttatggggatagatctaattctattattgaaccttatttaacagagcaatggtttgttgatgctaaaactttagccattaaagcaaaagaagtagtaaataatggtaaaactaaattctttcctgagaattggtctaaaacttactttcaatggatggataatattgaaccttggtgcatttctcgtcaattatggtggggacatcaaattccagcatggtatgggcctgatggaaaaatatttgtagctgaaaatgaagatgagtgtaaaaaacaggcaaaagaattctactcaaaagatgttgagttaaaaagagatgaagatgttttagatacatggttttcatcaggtctatggccatttgctactttaggttggccagaaaaaacaccagaagttgaaaaattttatccaacaagtgttcttgttactggttttgatatcatatttttctgggttgctagaatgattatgatgggaacccagttcttagataaggaaccttttaaaaacatatatgttcacgctttagttagagatgaaaagggtcaaaaaatgtctaaatccaagggcaatgtaattgatcctttagaattaattgagaaatatagtgcagatgcattgagatttacacttttatcaatggcatcaccaggtcgagatgtaaaattatctgaagacagggttaaaggttacagaaattttttaaataaaatttggaatgcaaataattttttaacacaaaataagtgtgattttggtgatgtgaaaaaacctgaaaatataaacttaaaaattaataagtggatactatctgagcttgtaaaagttaaaaacgacactg

SEQ ID NO: 307619 - DNA, 2629 bp, Unknown
  Bacterial polypeptide expressing nucleotide sequence isolated from the Sargasso Sea
atgcagcttgataaattttttgattttttaaaagatgaaaaaaatctttattcgcaatgggagcaatcaaattgttttaaaccacaaaaaggaggtgaaccttattctataatgatgccaccacctaatgttacaggcagcttacatatgggtcatgctttaaccttcacaattcaagatatattaatcagataccatagaatgaagggtatggaagtattgtggcaagcaggtacagatcatgcaggaatagctactcagatggtggttgaaagaaaattaagtgagtcaaacctagatcgacgatctctaggtagagaaaagtttattgaaaaagtatgggaatggaaaaaagagtcgggtggtcagataagtaatcaattaagaagacttggtgcttctgcagattggtcaagagaaagatttacaatggatgaaggactttctaatgcagttaagaaagtttttgttaatttatttaatgatggaattatttataaagataagagattggtgaattgggatccaaaacttttaacagctatttctgatctagaagtagagcaaagagatactgaaggaagtttatggcatattaaatatcctatagatgaaaataattatatcattgttgcaacaacaagacccgagacaatgttaggggatactgcagttgctgttcatccagatgatgaaaaatataaaaatttaattggtaaattttgtaacttaccaatttcaaataaaaaaatactaatcattgctgatgaatatgcagatcctgaaaaaggttctggagctgtgaaaattactcctgcacatgactttaatgattttgaggtaggaaagagacatggtttagaatttattaatatttttgatgaaaatgctaaactgaactcaaatgtacctgaagaatttcaaaatttagatcgatttaaggcaagaaaactaattttaaaaaaattagacgaaatgaatttattaattaaagaagaaaaacagcaaatggtcataccatatggtgatagatcaggtgttgttattgagccatggctgacagaccaatggttttgtgatgcaaaaaaattatcagttgatccaatatcagctgttaaagataatagttctaaatttattcccaaacaatgggaaaatacattttataattggatggaaaatattcaaccgtggtgtatttcaagacagttatggtgggggcatcaaattcctgcatggtatggtcctgataataaatattttgttagtgaaactttagaagaggcacaaaatcaagcaaaagaattttatggaaaggatgttgagcttagacaagatgaagacgttctagatacttggttttcttctgctctatggacattctctactttagattggccaaataaaacgtatgaattagataaattttatcctggtaacgttttggttactggttttgatatcatatttttttgggttgcgcggatgatgatgatgggttcttattttatgaaggaaactccatttaaagatatttatattcatcctttaatacgtgatgaaaaaggacaaaaaatgtctaaatcaaaagggaacataattgatcctttagagttattagataaatatggcgctgatacattaagatttacactaacagcactattaaatcctggacgagatgtaaaattatctgaagctagagttaaaggatataaatcattcacaaataaaatttggaatgctggaaaatttttacaattgaataattcaatttttatagatgatatttcaatagatacaattatttttgatgcaaacaaatggataataaaagaattgaatgatttgaacactcaacttgatcaattaactaaaaagtatttgtttcatgaaatagccaataaaatttatcatttcgtatggcatacttattgtgattggtacattgaaattattaaacaaaattttgaaaatgaaaaatttgctgatgaaattaaaaaagtttctggatggacatttattcaagttttaaagatcatacatcccattatgccatttataagtgaaaaattatggagatctttagttgatgataaatcatatttaatgaaccaagtttttcaaaattattcaacaaataattcttttaataattctaaaaaaaacttcgaaatatttattgaattcataacatctataagaaatttgagatcagaactaaatataccctataaacaattaattaatatctctatagaagcaaaaaatgaagaacttaataattttctaattgcctataaaaatgaaataagtaattttttaaaaaccaaagatattagttttgataaaattcaacctaataagaattcagctttaattgtattaacatcattatcagttttaatccctttagatggtattattgactcagaagcagaactaaaaaaattaaataagaaaaagcaagttgagcaagaaaaatttaataaagttaatgacaaattaaaaaatgataacttcatgaataaagcttcagaagaaattattaataaatttaaaaatgaggcaaatatttataaatcttctattgaaaaaattgatcaaataataaatactatcaaataga

SEQ ID NO: 307620 - DNA, 1837 bp, Unknown
  Bacterial polypeptide expressing nucleotide sequence isolated from the Sargasso Sea
atggatgctaagtattttccaatagagatagaagagaagtggtcaaaagtttgggctgaacgtgaacttaataagcctgaatctgaacagaatttctctcagatcattccaccacccaatgtaactggaaccttgcatatggggcatagctttcaatatgcaatcatggatttttatactagatatcatcatatgaacggtgcaaattcatattggcaagtaggaactgatcatgctggtattgctacacagatggtcgtagaaaataatcttgcaaacgaaggtaaagacaagaatgatcttggtagagaaaaatttctggaagaagtttggaaatggaaggattactcagaagagaaaattacatctcaaattaaacgtcttggttctacagttgaatgggataagtatcgctttacttttgatgatgatttttgtgaagctgtaaataaagcttttgttgaattatatagaaacaaaaaaatctatcgtggataccgtttagttaactgggatccttcactgaaaacagctgtttctgatctagaagttatcagacaagagaaagaaggcatactttggcatattgcctaccctatttctgattctgatgaaacgttaactgtagcaacaacaagaccagagacaatgtttggtgatatggctgttgcagttaatccaaaggatgaacgtttcaagaaatttataggtcaatacgttgaattgccatttgttgggcgaaagataccagttataggtgatgaatacgttgatatggaatttggtacaggttgtttaaaaattacacctggtcatgactttaatgactatgagattggtaaaaaatatgcacttcatgagatagatggcgtagttcatagttcagatgagttgaataactttgttcctattaatatttttactgatgaagcacacactaatgatagtgttcccgaaccttttgctaaccttgatcgatttaaagtaagaaaggcagttctagaagagctaaaaaacaaaaatttacttttaaaagaagagaagcatcaaataagtgttccaagaggagaacgctccaatattgtcattgaacctaagcttagtcatcagtggtatgtgaaaacgcaagagatggcaaaaaaagctaatgaagctgttaataagggggaggtagttttccatcctggtaattggattaaaacctactttaactggatggataatattcaagattggtgtattagtagacaaatatggtggggtcatagaattcctgcatggtatgacgaagatggaaatatatacgttggctatgatgaagatgaattgaggaaccattacaaattagatgatagaaagctaactcaagatgaagatgtactagatacatggttttcatcctctttatggccttttggatctttgggttggcctaaagaaaatgaattagaaaagtactttcctacaagcttattagtgactggcttcgatattattttcttttgggtcgcacgtatgatgatgatgagtctagaatttacaggcaaagtaccttttaaagatgtttatgtcacaggtttaattagggatgaaaatggacaaaaaatgtcaaagtccaaaggcaatatcattgacccaattgatctaatctatggcattgatcttgaagatctagtgaccaagagaacagcaaacctaatgcaggaaggtctagctgaaaaaatagaacgtaaaactcgtaaacagtttcccaatggaatcgaatcatatggaaccgatgcattacgtatgacattcttctctttagctacacatactagagatattagtttttgaa

SEQ ID NO: 307621 - DNA, 1486 bp, Unknown
  Bacterial polypeptide expressing nucleotide sequence isolated from the Sargasso Sea
taccagatattataggatgaataattacgaaactttgtggcaaccaggtactgatcatgccggaatagccactcaagcattagtagagaaaaagttaaattctgagaatattaaaaagaatgatttaggaagagaaaagtttatcgaaaaagtatgggaatggaaaaatcaatatggtgacataataataaatcagcttaaaaaattgggatgttcgtgtgattggtcaagaaatgcttttacaatggacgaaaatttatcgaaagcagttattaaagtttttgtagatcttcataaaaaaaaattaatttacaaagctgaaaaattagtaaattgggatacagttttaaaaactgcaatatctgatttagaagttgatcaaagagaggttaattctaaaatttattatattagatatccaatagatggaacaagtgaatatataactatagcaactactagacctgaaactatgcttggagatacagctgttgctgtaaaccctaaagacaaaagatataaaaagtatgttaataaaattgttacaattccaattgttggtagaaaagttaaaattatcgaagatgattatgcagatccagaacagggaactggagcactaaaaattacccctgcacatgacttcaatgattatgatgttggtaaaagaaataaattagaaattattaatatttttactgaagatggaaaagtgaattctaatgcaatctcatcatacgttggtttagatagatttgaagctaggaagaaaatattaaatgaacttaaagaaaaagattattttgtaaaagaagaaaatatcaaaaataaagttccatatggtgatagatcaaattctataattgaaccatttttaacagaacaatggtttgcagatgcaaagaaattatcaattaaagcaaaaaaaatagttaaaaataaaaagacaaacttttttcctgagaattggtcaaaaacttattttcaatggatgaacaatattgaaccttggtgtatttctagacaattatggtggggtcaccaaataccagcatggtatggacctgataaaaaaatttttgttgaattaaacgaaagtgacgcaaggaaggcagcaaagaaattttataaaaaagatgtaaaacttttaagagatcctgatgttcttgatacatggttttcatctggtctttggccttttgcaacacttggctggccaaataaaaatgaatatttaaaaaaattttatccaacaacagttcttgtaactggatttgatattattttcttttgggtagctagaatgatgatgtttggtatggaatttttaaataaagaaccatttaaagatatttatgttcatgctttagttcgtgatgaaaaaggacagaaaatgtccaagtcaaaaggtaatgtaatagatccacttgatttaattcaaaaatatagtgcggacgctttaagatttactttattatccatggct

SEQ ID NO: 307622 - DNA, 1282 bp, Unknown
  Bacterial polypeptide expressing nucleotide sequence isolated from the Sargasso Sea
ttagatacttggttttcttcagctctttggacattctcaacattagattggcctaataaaacatatgaacttgatcgattttatcctgggaatgtcctggtaacaggatttgatattatattcttctgggtagctagaatgatgatgatgggctcatattttatgaaagagacaccttttaaggatgtttatatacacccattaattagagatgaaaaaggtcagaaaatgtctaaatcaaagggtaatattatagatccattagttttattagataaatacggagctgacactctccgttttaccctgactgcattattaaaccccggaagagatgttaaattagctgaagagagagtgaaaggttataaatcttttaccaacaaaatttggaatgcagcaaattttttaaacataaataatgtttcttttatagatactattgatattgaaaatattaaattagatactagcaaatggatattaaaagagtttgaagaaattcaaaaaaaatattttgataatattgagaaatatcaatttcatgaaatagcaagttctttgtatcattttacatggcatacatattgtgactggtatattgaattcattaaatctgattttaaagatcctgaaaaatctgaagaaactattaaagtttcaggatgggttttcgttcaaattttaaaactacttcatcctgtaatgccatttattacagaaaagctttggctttcattagtagataaaaaaaattttttaatgaatcaggagttcattaaaattaattttgatcactcttatcaagaaagtaagaaatatattttaaaaattattgaaataatgacagccttaaggaatcttagatcagatcttaacatatcatataaaaataatattgatttaattatagatgctaaaaatgatcatttaaaaaaatttatttctaattatgaagaagaatttaaaagacttataaaaactaacaccatatcttatgaggaaaacaccaatcaaaaaaaatcagcctttatagtattaagtgaaattacaattttagttcctttagaaggcatagtagatacagaaaaagaattatctaagctggatgaaaaaaaacttaattacaataagaaactaaatacagttctggataaactaaacaacaaagcatttattgaaaaagcccctgataatgttatagaaaatttcaaaatgcaagaacaagaaattaaatcttctattgaaaagattaatgaaataatgaatactattaattaaa

SEQ ID NO: 307623 - DNA, 1172 bp, Unknown
  Bacterial polypeptide expressing nucleotide sequence isolated from the Sargasso Sea
tgatacatggttttcttcttctttatggcctttttctactttgggatggcctgatgaaaatgatagggttaaaacattttatcctacgagcgtactgattactggttttgatattattttcttttgggtagcaagaatgataatgatgggtttagaatttttagaagatgtaccatttaaagaggtttatgtccatggcttggttaaagatgctcatggaaataaaatgtcaaaatcgaaaggtaatattattgacccaatagatctaattgatggaattgatattgatagtttattgataaaaagatcttctgacttaatgcaaccagagatggcagagaaaattagaaaaaatacgaagaaagaatatcctaatggtattgaagcatatggtacagacgcactacgctttaccttttcatcgcttgcaacctccaatagagatattaattttgacttaaaaaaacttgaaggtaacagaaatttttgtaataaaatttggaacgcagctaggtatataaaacttctaaaagatgaatataaaatcacctctgtaaaaaatcctgaatatgatgatacagatgtatggatatacaaaagacttaataatttaattacatcattaagaactaattataaaaaatatagattcgattttgcatcaaaagatttatatgactttatatggaatgatttttgtaattggtatattgagctctcaaaaattgatattaaatctaaagatagtaagaaaattgaatctaaaatttttcatctagaagaactctttaaaaatataattctacttttacatccaacaatgccatttattacagaggaattaaaacttttctcatttaatgacgacagatttttaattcagcataattatcctacagaaattgaaatccccgatgagtcaaggtcaaattatattaattggcttacaaatgttatatcggaaattagaaaatatcgatcagaattaggtattaatccttccgcaaaagttaaaataaaaatttcaaatctaagaaaagaggatgaagggttagtcttaaaatatcaagattatttaaagtcaattgctaggttaagtgaatgtgaaattataaaggaaattaatgatgataatgtcccaactatcgttgtagaaaacctgaaaattaaaa

SEQ ID NO: 307624 - DNA, 1291 bp, Unknown
  Bacterial polypeptide expressing nucleotide sequence isolated from the Sargasso Sea
ccagatgtacttgatacatggttttcttcaggtctatggccttttgcaacgttagggtggcctgatcaaaaagaatttgttgaaaaattttatcctacttcagttttagttaccggctttgatatcatatttttttgggttgcaagaatgattatgtttggaacagaatttttacataaagaaccatttaaagatatttatgttcatgcattagttagagatgaaaaaggacaaaaaatgtctaagtcaaaaggtaacgttattgatcctttagatttaatagaaaaatatagtgctgatgctttaagatttactttactttcgatggcatctccaggtcgtgatgtaaaattatctgaggatagagttaagggatataggaattttttaaataaaatatggaatgcaaacaattttttaattcaaaatgaatgcagttttaataatgtagaaaaacctaatgatttaaaagttaatattaataaatggatttattcagaatttttaaccaaaaaagatgaaatacaaaaaaatatcaaaggttatcgttttgatgaagccgcaaaaaatgtatatcaatttgtatggcattcattttgtgattggtatttagaactttcaaagacaatattattttcagataatcaggatgctattaaggaagtaagaaatgtttctagttttatatttagagaaatactaataatccttcacccttttataccttttataacggaagaaatttggcttaaaaataaattagataaaaatagtaatgatttcttgatgtatgctaactggtcaaatgaaaattcaactaaagatagagaaattgatgatgtatataaaatcatagagataataacctcaattagatcgtttaaaaatgaactaggcgtaagtcctggatcattaattgatatatctttaaaaaatacatctaaagagacaattgatttttttaataacaatcaaattgtcgttaaaaaacttggaagaataaataatattttagacaaagatcttgataagggatcggctactttggttatcaatggtgaattatttaaactttattttgaacaagatgttgatttagaaataattaaaaacaacctctcaaaaaaacattctaaaattaaagaagaaatgaacaaaatcaatacaagactaagtaataaaagttttacagataaagcccctaaagatattgtagaacaagaaaaaacaaactttgataacttagaaaaagatgctaaaaaaatagagttaactctagaaagtttataat

SEQ ID NO: 307625 - DNA, 1083 bp, Unknown
  Bacterial polypeptide expressing nucleotide sequence isolated from the Sargasso Sea
aaaaaaatcttgaaaaagaaaatttgaataaggataatttgggaagagaaaaatttattgaaaaggtttgggaatggaaaaatcaatatggagatataataataaaccaattaaaaaaacttggttgttcctgtgattggtctagaaatgcttttacaatggatgaaaatctttctaaatccgtagttaaggtttttatcgaacttcataaaaaaaaattaatttataaagctgaaaaattggttaattgggacacagtgcttaagactgcaatatctgatttagaagtagatcaaagagaaatgaattctaagatttattatatcagatatcctatcgataaatcacatgaatttatcactatagcaacaactaggcctgagactatgcttggtgacacagcaattgctgttaacccaaaagataaaagatataaaaaatacgttggaaaaatagtgacgattccaattgttggaagaaagatcaaaataataaaagataattatgctgatccagaacaaggaacaggagcactaaagattacccctgcacacgattttaatgattatgaagttggtcaaagaaataaattagaaatattaaatatttttactgaagagggtaaaataaataaaaatgctccagttgaatatgttggtttagatagatttgaagctcgtaaaaaaattttagaaaatttaaaagaaaaagatttttatgttaaagaagaaaatataaaaaacaaagttccatatggtgacagatcaaattcgataatagaaccttttctaactgaacaatggtttgtaaatgcaaaaaaattatctgttaaagctaaaaaaattgtaaaatcaaaaaaaacaaatttttttccatcaaattggtcaaaaacttatttccaatggatgaataatattgagccttggtgcatatcaagacaactttggtggggtcatcaaataccagcttggtatggaccagataaaaaaatatttgttgcattgaatgaaatggaagcaaacaaacaagctaaaaaattttataaaaaagataccaaactaaaaagggatcctgatgtttaga

SEQ ID NO: 307626 - DNA, 1864 bp, Unknown
  Bacterial polypeptide expressing nucleotide sequence isolated from the Sargasso Sea
tgccaagatcagtcagtcggctccagcagaatatcaaggtcttgatcgttttgaagcaagaaaaaagattgtggaagatctagaagcaaatggtcttatgcaagaaatcgaggattatacgatcaccatcccaaggggagatagaagtggagcaattcttgagccgctcattactaatcaatggtttctaaaaatggaaccactggctcaacccgcaatacaagctgtcaagaatggtgaaataaaattcattccggaaaattggtctaaaacatattacgagtggttagaaaatattcaggactggtgtatctcaaggcaactgtggtggggtcacagaattccagcttggtatgacaatgaaggaaatgtttatgttggggaaagcgaaaatgagattcgaaaacaacacaatatagaagattcaattgcattgattcaggatgatgatgttcttgatacttggttctcttctgcgctttggcctttttcaagtcttgggtggcctgatgagacatatgacctaaaaactttttacccaacaaacgtgctggtcacaggctttgatatcattttcttttgggtcgcaaggatggtaatgatgggccttaagttcatggatgagatccctttcaaggaaatatatatacatggtctgatcaaagataaaaatggtcaaaaaatgtcgaaatcaaaaggtaatattttagacccaattgatctaattgatggcatcagtcttgatgaacttctcgataaacgagtgcaaggcctcatgcagcctgaaatggaaaaaagaatcatcagcgatacaaaaaaagaattccctaatggaattcctgattttggaacagatgcactgagattcaattttgcaattcaggcatctacagggagagatattcgtctcgatcttaagcgagttgaaggttatagaaacttctgcaacaagatttggaatgcatctcgattcatcaaaatgaacaccaatgattttgaattattggaaataaaggacaccgaaggacatcccattgatcaatggatccaatcaaaatttgcagaaacaattgatgaggtagaaaagcaattcagtcaatatcgttttgatcttgcagcaactgcaatgtatgaatttgtttggaatgacttttgtgactggtatatcgaattatcaaaagcattgatcaatgaacctgggataaaacagtcacaaaaagactatacaaaaaataatttaataaagatgctggatgcaattctaagaatgctgcatccaacgatcccttttatcacagaagaaatatggcaatcgctcagtgaagagaataataagaaaagcattatgaaagctgacttccccagctctaaaaattggaaagcagacactgaaattgctgccaatacggaatggcttaagaattttgtatcctctgttcgtcagattcgatctgaaatgaccatttcaccaaaacaatcgattaaaatcattgttgatgatgcttctaattcagatattaaaagactggaattgtttgaatcttttataagcaatatgggatctgttgagtcaatcattcataaagaagaagcggatgatttaccaaaatctgccatcgcacttcttaaaggaatgaaaatatatattccactcgaaggcctcgtggatattgaggaagaaaaagctcgattgcaaaagaaattatcgaatctgaatcaagatcttaaatcagtaaaaaatagactctcaaatgatgcttttgttgaaaaagctcccaaagaagttgttgatgaacttaaggagaagttcaaagcattgtcattggatcaaactcgaattgaggaacagcttagtttgctatga

SEQ ID NO: 307627 - DNA, 1252 bp, Unknown
  Bacterial polypeptide expressing nucleotide sequence isolated from the Sargasso Sea
aaaattataacagatgattatgcagatcccgaacaaggaacaggagcggtaaaaattactccagctcatgattttaatgactatgatgtaggtataagaaacaagttagaagtaattaatatatttacgcctgatggaaaaataaatgacaatgcaccagatccatataaaggtttagatagatttgcagcaagaaaattaattttggaacatcttgaagaaggaaaatttttagaaaagatagaaaagttagttaataaagttccttatggagatagatctaattctattattgaaccttatttaacagaacaatggtttgttgatgctaaaactttagctattaaagcaaaagaggtagtaaataatggtaaaactaaattctttcctgaaaattggtcaaaaacatattttcaatggatggataatattgaaccttggtgtatttctcgtcaactatggtggggtcatcaaattccagcatggtacggacctgatggaaaaatatttgtagctgaaaacgaggatgagtgtaaaaaaaaggcaaaagaattctattcaaaagatgttgaattaaaaagagatgaggatgtattagacacttggttttcttcaggtctatggccatttgctactttgggttggccagaaaaaactccagaagttgaaaaattttatccaacaagtgttcttgttactggttttgatatcatatttttctgggttgctagaatgattatgatgggaactcagtttttagataaggaaccttttaaaaatatatatgttcatgcttttgttagagatgaaaagggtcaaaaaatgtctaaatcaaagggcaatgtaattgatcctttagaattaattgagaaatatagtgcagatgcattgagatttactcttttatcaatggcatcaccaggtcgagacgtaaaattatctgaagacagggttaaaggttatagaaattttttaaataaagtttggaatgctaataattttttaagacaaaataagtgtgattttggtgatgtaaaaaaacctgaaaatattaaattaacaatcaataagtggatactatctgaacttgtaaaagtcaaaaatgacacggaaaatagtttaaaaaactatagatttgatgagtcagcaaagattatttatcagtttgtatggcattctttttgtgactggtatttagagctatctaaaacagttttaattctaataatgaggaggagattaaagaattaag

SEQ ID NO: 307628 - DNA, 1990 bp, Unknown
  Bacterial polypeptide expressing nucleotide sequence isolated from the Sargasso Sea
acaacaagacctgaaactatgcttggagacactgcagtagcggtaaatcctaaagataaaaggttcaaaaagtataaaaataaggatgtaaatttacctttagtagggagaaaaataaaaattattttcgatgattatgctgatccagaacaaggaactggtgctgttaaaataacacccgcacatgattttaatgattatgatgttggtcaaagaaataaacttaagataataaatatttttaccgatgatggaaaaattaatgaaaattgtcctggaaaatatcagggtctagatagatttgaagcaagaaaaattattttagaggatttaaaaaatcttaatttatttgttaaagaagaaaatataaaaaataaagttccatatggtgatagatctaattctgtaattgaaccttacctcacagaacaatggtttgctgatgcaaaaaaactttcgataaaagcaaaaaaaattgttaaatcaaagaaaacaaatttttttccgggaaattggtcaaagacatattttcaatggatgaacaatattgaaccttggtgtatttcaagacagttatggtggggacaccaaataccagcatggtatggacctgataaaaaaatctttgttgcacttaatgaaaaagaagcaaaacaaaatgctaaaaaattttacaaaaaagaagttgaattagaacgagatcctgatgttttagatacttggttttcatctggtttatggccatttgcaacattaggttggaatacaaaagatccttatcttaaaaaattttacccaacatctgttctagttactggttttgatattattttcttttgggttgcaagaatgattatgtttggaatggaattcattaaaaaagaaccttttaaagatatttatgtacatgctctagttagggacgagaagggtcaaaaaatgtctaaatcaaaaggtaacgtaattgatcctttggacttaatagaaaagtacagtgcagatgcattaagatttactcttttatcaatggcatcaccaggaagagacgtaaagttatctgaggatagagtaaaaggtaatagaaactttcttaacaaattatggaatgtaaataattttttaattcataataaatgtgacatcaaaaatactaaaaaatcacccaaagcaaagattaatattaataaatggatatattctgagcttgtacaaacaaaaattgttgttgaaaacaatattaaagactatcggtttgatgaagcagcccgtaatgtatatcagtttgtatggcactcttattgtgattggtatttagaattaagcaaaaccattctaaattcaaataataaaaaagatattaaggaaactaaagaaatcgctagttatgtgtttaaagaaattttagttttactacacccattcataccttttattactgaggagatatggcttaaaaataagttagataactcaaataaagattatttgatgtattcgaattgggtctctgacaagcctaaaaaagaaaaatttgctgatgttgagaatatgatagattttattactgagatcagatcatttaagaatgaactaagtattagcccaggttcttatgttgatatttcactaagtggtattaacaaaaaagataagtccttttttacaaataatgaaacggtaattaagaagcttggaagaataacaaattttattgataaagataaaaataagccttcggcatctttagtaataaaaggaagtgtttttaaactttattttgaggaaaatgttgatttaaatttaattaaagaaaatcttttaagcaaacagtcaaaatatcaagctgaaatggataaaatttcctcaaggttaaataataaagattttgtaaagcgggcaccaaaacatattgttgaccaagaaaaaagtaattataataacctaggaaatgatataaaaaaaatatcagctacagtaaaaaatttataat

SEQ ID NO: 307629 - DNA, 1264 bp, Unknown
  Bacterial polypeptide expressing nucleotide sequence isolated from the Sargasso Sea
aaaaatactttatggcaggtgggtactgatcatgcagggattgctacacaaatggtggtggaaagacaattagaaaaatctggaacctctagacaagaactcggaagagaatcattcgaaaaagaagtttggaagtggaaggaagagtctggtagcaccatcacgaaacagatgaaaagattaggggcatccactgattggacaaaagaaaagttcaccatggatgagaatcttgtgagaggtgtacaaaaagtttttatccaactttatgaggaaggattaatatacaggggcaagaggttgatcaactgggatcctgtcttgcaaactgctttgtcagatctagaggtagcaaccacagaagaaaaagggtcattgtggcacatgaaatatccaatcagtgactcaaaggatcacattgtggttgcaacaacaaggccagagacgatgcttggagatactgcagtcgctgtacatccagatgataaacgctacaaagaactcattggtcaagaggtcattcttccgctcactgacagaaaaattccaattatcgctgatgagtatgtggatcaagagtttggaacaggatgtgtgaagattacgccagctcatgatttcaatgattttgaaattagcaaaagacatgatcttgaaataatcagtattttagaccaaagtgccaagatcagtcggtcggcaccagctgaatatcaaggtcttgatcgttttgaagcaagaaaaaagattgtggaagatctagaagcaaatggtcttatgcaagcaatcgaagattatacgctcaccatcccaaggggagatagaagtggagcaattcttgagcctctcattacaaatcaatggtttctaaaaatggaaccactggctcaacccgcaatagaagctgtaaagaatggtgaaataaaattcattccggaaaattggtctaaaacatattacgagtggttagaaaatattcaggactggtgtatctcaaggcaactgtggtggggtcacagaattccagcttggtatgacaatgaaggaaatgtttatgttggggacagcgaaaatgagattcgaaaacaacacaatatagaagattcaattgcattgattcaggatgatgatgttcttgatacttggttctcttctgcgctttggcctttttcaagtcttgggtggcctgatgagacatatgacctaaaaactttttacccaacaaacgtgctggtcacaggctttgatatcattttcttttggg

SEQ ID NO: 307630 - DNA, 1974 bp, Unknown
  Bacterial polypeptide expressing nucleotide sequence isolated from the Sargasso Sea
gcgcttaacaattctattcaagatttattagttcgttatcacaggatgaataattttgaaactttatggcaaccaggtacagaccatgctggaattgctacccaagcattagtagagaaaaaattgaactctgacaaaattgataaaaatgaaattggtagagaaaaatttatcgaaaaagtttgggaatggaaagagcaatatggagacataataattaaccaattaaaaaaacttggttgctcttgtgattggtcaagaaatgcctttaccatggatgaaaatttatccaaatcagtaattaaggtttttgtagatctttataataaaggtctaatttataaagataagaaattagttaactgggatacagttttaaaaacagctatttcagacctagaagtagatcaaagagaggtaaattctaaaatttattacatcagatatccaatagatgggactgaagaatttattacaattgcaacaacaagacctgaaactatgcttggtgatacagctatagctgtaaatccaaaagacgaaagatttaaatcctttgttggaaaaacagttaccattccaattgttggaagaaaaataaaaataattgaagatgattatgctgatcccgagcaaggaacgggtgcattaaaaattacaccagcgcatgattttaatgattatgatgttggtcaaagaaacaatcttgaaataattaatattttcacagaagcaggtaaaataaatgaaaacgccccagaacattacaaaggtcttgataggtttgaagctagaaaaagaattttaaaagaacttaaagaaaaagatttttttgtaaaagaagagaacattaaaaacaaagttccttatggagatagatctaattctataattgaaccttttttaacggaacaatggtttgctgatgctggtaaattatctgttaaagcaaaagaagttgttaattcaaagaaaacaaatttctttcctgaaaattggtcgaaaacttatttccaatggatgaataatattgaaccatggtgtatttcaagacaactttggtggggccatcaaatacctgcttggtatggtcctgatgaaaaaatttttgttgctgaaaatgaagatgatgcaaaacaacaagctaaaaaaaattatggtaaagatgttgaattaaatcgtgatccagatgttttagatacttggttttcatctggcttatggccttttgctacacttggttggcctgatgataataaatttgttgataaattttacccaacgtcagttttagttacaggttttgatattatatttttctgggtagctagaatgattatgtttggtacagaatttttaaacaaagaaccatttaaagatatttatgttcatgcattagttagagacgagaagggacagaaaatgtctaaatctaaaggcaacgtaattgatcctttagatttaattgaaaaatatagtgcagatgcacttagatttactttattatcaatggcttcaccaggaacagatgttaaactttctgaggatagagttaaaggttacagaaattttttaaataaattatggaatgcaaataattttttaatcactaatgaatgtgattttaaagatatagataaagttcctagtttaaatgtaaatattaacaaatggatttattcagaacttgttgaaactaaaaataagatagaaaaaaaccttgaggactatagatttgatgaagcagctaaaaatgcttatcaatttgcatggcattcgtattgtgattggtatttagaattatcaaaaacaatacttttttcagatgacgaaaaagctaaagcggaggttaaaaaagtatcatcttttgtattcaaacaaattctgattttgcttcatccttttattccttttgtaacagaggaaatctggctcaaaaataaatttgataatgatggcagtgattatttgatg

SEQ ID NO: 307631 - DNA, 2068 bp, Unknown
  Bacterial polypeptide expressing nucleotide sequence isolated from the Sargasso Sea
attcggaaaaaatgtaattctaccaatagtaaatcgagaaataccgatcatagcagacgattatgtcgaatctgattttggcacaggatgtctaaaaataacacccgcgcatgattttaatgattatgaagttggcttgagacataaattacccattatcaatatattcaatgacagtgcagagttaaatgaaaatgtgccaaagaaattcagaggtttatccagagagagtgcgagagaggttattgtttcagagttcaaaaaacttggccttcttaaaaaaacagaaaaacacaaaagcaagattcccaggggagatcgaagcggggttgtagtggagccttatttaactgatcaatggtttgttgatattaagcccttggctgagccggcaattgaggctgtcaaaaataatgatatccaatttgtacccgataattggaaaaaaacatattttgaatggatggaaaacatccaagattggtgtatcagcagacagttatggtggggccacagaatcccagcatggtatgacgataacgggaatacttatgttggaaaaaatgaaaaagagattaggcaaaaatttaaaataaataaagatattaatctgtcacaggatgaagatgtacttgatacctggttttcttcggctttatggccattcagcacgcagggttggcctgaaaatacagaatctttaaaaacgttttatccaggacaagttcttgtaaccggtttcgatattatatttttctgggtggcaagaatgataatgatggggataaaattcaaggaagaagtcccttttaaaaaagtttacattcacggtctgattcgtgatcaatatggccaaaaaatgtctaaatcaaaagggaatgttcttgatcctattgaccttatcaaaggatcatctattgaaaatttgttaaaaaaacgaacatctggattaatgcaaagtcatttaaaaccagaaatagaaaaaaatacaatagatgagtttcctgatggcattaactcctatggagcggatgctctcagatacacctttgcttctctagcaaccacagggagagacattcgttttgatatggggagaatcgaaggttataaaaatttctgcaataaattatggaatgccgcgcattatgtaattgataatacacataactgtaatttatctaatgaaaagatagcttgctccaacccaatcgatttatggataagaacagaacaaaataaaacaattaacaaagttcataagaatttcgaaaattatagattagatcttgcttctcaaaatttatatgaatttgtatggcatgaattctgtgactggtacattgagctaactaaagcaattcttaatgataattcaattcaagactctgagaagctgggaacaaagaaaaatcttttaattgtccttgagtcaatcttgaggcttctgcatccaatcatacctttcatcacggaagaaatttggcttcatatcaaagataaatttttattcgaagataaaacaatcatgaccagacaatatccaatttatgatgaaaaagatacgtacaaaaaagaatcttctgatattgagtggataaaaaaattcattctaggaataaggcagatcagaggtgaattgaacatctcaccaaaaattgaactggaagtattattaaaaaattatactccaaaagacactaaaatcattaaacagcatgaatatttaataaaaagaacagcgcgtgtaaaagaaattaaactcatggaccaaaatgaaagtgaaccattatcggcagcggctttacatggaaagatgaaaattttagttccactaatcgatcacatagacatatcagatgaaatagccagactagaaaaacaagcgactactcttaaaaatgagatcttaaaatctcaaaaaaaactagataacaaaggtttccgagaaaaagcaccgaaaagtgtagttgaggaagaacagaaacgcattaaagtcaaatctctgttgataaatgagttaagcgcacagattgatcacttgatcaagcttcgtaataagtcgtaa

SEQ ID NO: 307632 - DNA, 1732 bp, Unknown
  Bacterial polypeptide expressing nucleotide sequence isolated from the Sargasso Sea
taaatattcacatatagaaatagaggaccaaatttactcatattgggaaaaaaataatcttttcaagccagtaaaaaataagaagaaatattcagtagtcattccaccaccaaatgtaactggaagtttacatatgggtcatgcattaaacaattcgatacaagatttattaattagatatcatagaatgaataattttgagaccctatggcaaccgggtactgatcatgctggtatagcaactcaagcattagtggaaaaaaagttaaacagtgaaaatattaaaaaggaagacttgggtagagataaatttattgaaaaagtttgggattggaaaggccaatacggtgacattattataaaccaactgaagaaattaggatgttcatgtgactggtctagaaatgcctttacaatggacgaaaatttatcgaaagcagtaattaaagtatttgtagatttatataaaaaaaaattaatctacaaggctgaaaaacttgtaaattgggacacagttttaaaaactgctatttcagacttagaagttgatcaaagggaagtaaattctaaaatttattatattaaatatccaatagatggatctaacgaatttataacaattgcaacaacaagaccagaaacaatgttaggagatactgcaattgcagtgaacccaaaagataaaagatttaaaaagtatgtaaataaatttgcaataattccaatagtaaatagaaaaattaaaattattactgataattatgccgatcctgaacagggaactggtgcgttaaaaattaccccagctcatgattttaatgactatgatgtaggcaagaggaataatttagaaattattaatattttttctgaagatggtaaaataaataataatgctatttcatcttatgttggattagatagatttgaagcaagaaaaaaaatattaaacgaattaaaagaaaaagatttttttgttaaagaagaaaatattaaaaacaaagtaccatatggcgacagatctaattctgttattgaaccatttttaacagaacaatggtttgcagatgctaaaaaactagcagttaaagcaaaaaaaattgttaaatctaaaaaaacaaatttctttccagttaattggtctaaaacttattttcaatggatgaataatattgaaccatggtgtatttcaagacaattatggtggggccatcaaatccctgcatggtacggtcctgataataaaatttttgtagaattaaatgaaaaagatgcccttaaggcagcaaaaaaattttataaaaaagatgttaaacttaagagagatcctgatgtattagacacttggttttcatcaggtctatggccatttgcaacattaggttggcctaaaaaaaatgattatcttaaaaaattttatccaacaacagtattggtaactggttttgatataatatttttttgggttgctagaatggttatgtttggaatggaattattaaataaagaaccatttaaagatatttatgttcatgcattagtaagagacgagaaaggtcaaaagatgtctaagtctaaaggaaatgtaattgatccacttgatctaattaaaaaatatagtgctgatgcattaagatttacattgttatcaatggcttcaccaggaactgatgttaaactttctgaagatagagttaagggatatagaaattttttaaataagctatggaat

SEQ ID NO: 307633 - DNA, 912 bp, Unknown
  Bacterial polypeptide expressing nucleotide sequence isolated from the Sargasso Sea
ctttttggaaattatttcagattataaagtaaaatctcttttttttgctccaacagcttttagagcaataaaaaaagaagatcctgagggaaaattcttctcaaaatataatttaagtaattttgaaagtttgtttcttgcaggtgaacgagctgaccctgatacaatcaagtgggctgaaaatttactcaaagttccggtaattgatcattggtggcaaactgaaaccagttgggcaataagctctaattgcactggtatcgaaatgatgaaaacaaaatatggttcagcttgtaaagctgttccaggatatgatgtaaaaataattaaatctgatcagacattagcaaaacctaatgaaatgggagatatagttgttaaattacctttacctccaggcacattcccgactctctggaatgcagatgaaaggtataaagataactatatgtcaaattataatggttattatcaaacttatgatgcaggacatattgatgaagatggatatatttggattatgtcgagaactgacgacattataaatgttgctggtcatagattatctactggagctattgaggaagttttgtcagatcatcaatctgtagctgaatgtgcagttcttggtatctcagataaattaaaaggacagttaccaattggcctaatagtactaaaagcaggtgtagataaagataatgaaacaatttctaaagaatgtgttaaaatggtaagagataaaattggtcctgtagctgcttttaaagtgacgatagtcattaaaagacttcccaaaacacgatcgggtaaaattttaagaggaacaataagaaaaattgctgataatgttgaatataaagtacctccgacaatagatgatccaacaattttagatgagataaaagaaga

SEQ ID NO: 307634 - DNA, 965 bp, Unknown
  Bacterial polypeptide expressing nucleotide sequence isolated from the Sargasso Sea
attttgggaaaaattaaaatttaaatgtggtaatactttagctgtttgcgatttaagagggaaatacaaagaaaaattttcttattctgagctggctgatttaataacaaaagtctcttcttctttcgaaaataaatatggcttaaaaaagggggatgtagttactgtaatatctgaaaattccccaagatggctagcagtggatcaaggcttaatgcgtttaggagctataaatgcagtgagaggtattaattctccttcagtagaattagactatattattgagcactctaattcagtaggactaatagttcaatctaaggaaatttggctaaagttaaacaataaagaagaattaaaaaaaagactgaaatttataatcaatttagaagatgaacaatttgaaagcttaataagttggagtaaattcataagttcagtagaaaaagaaaattcacaaaataataatcttgaaaaatttaatccaaaaattgatgacgtcgctactattctttacacttctgggacgaccggaaaacctaaaggtgtgcctttgactcatgcaaattttttacatcaaataatcaatttagcctatatcgctgatccagaaccagggacctctgtattaagcgttttgcctatctggcattcttatgagagaagtgctgagtacttctttttttcatgcggttgttctcaacattatacaattccaaaatttcttaaagatgatattacacaagtaaaacctgttgtaatggctactgtaccgagactatgggaagcaatacatgatggtttttttcaggcgttgaaaaaaatgccttccaaaaagcaaaaacttatcaagtttttgataagtaatagttcggttttcaaaagaagtcttagaaagataagaaatatagatataaatcaaataacttttaaatcaaaaatccccttactggggtctgttatta

SEQ ID NO: 307635 - DNA, 915 bp, Unknown
  Bacterial polypeptide expressing nucleotide sequence isolated from the Sargasso Sea
ggatcaaacgaatttgcctatatcctttacacatcaggaacaacgggtatcccaaaaggtatagttagagacattgggggacatatcgtagctcttaaatggacaatgaaaaatatttataacattgatgaagatgatgtttggtggtcagcaagtgacattggatggattgttggacattcttatattgtttatgcccctctttttaaaggatgtactacagttctatttgaagggaagccagtaggcactcctgacgcaggtgttttttggagaattatttctgaatataaaataaaatcattatttacagctccaacagcattcagagctattaaaaaagaagatcccgagggaaagtttttctccaaatatgatttaagttcctttgagtctttgtttcttgctggagaaagagctgatcctgatacaataaaatgggctgaaaatcttttgaaagttccagtaattgatcattggtggcaaacagaaacaagttgggcaattagctcaaattgtacaggtattgaaatgcaaaaaacaaaatatggttccgcatgcaaagctgtgccaggttatgatgtaaaaataattaaacctgatcaaacattagctgaaccaaatgaaatgggtgatatcgttgttaagttaccgctaccgcctggaacatttcctactctttggaatgcggatgaaagatataaagaaaattatatgactaactatgaaggttattatcaaacttatgatgcgggtcacatagatgaagatgggtacatttggataatgtctagaactgatgacattattaatgttgcaggacatagattatctacaggtgcgattgaagaggtattatctgaacatcaatcagttgcagaatgtgcagttttgggaattgcagataaattaaaa

SEQ ID NO: 307636 - DNA, 882 bp, Unknown
  Bacterial polypeptide expressing nucleotide sequence isolated from the Sargasso Sea
atcattgtcaaatgcaaaagatacagattgtattgagatgggctcaaatgaatttgcatatatattgtatacatctggtacgacgggagtgcctaaaggaatagttagggatattggaggacacatagtagcattaaagtggacaatgaaaaatatatataacatcgacataaatgatgtttggtggtcagcaagtgatattggatggattgttggtcattcttatatcgtatacgcaccactgtttaaaggctgtacaacagttttatttgagggtaagccagttggtacacctgatgctggtgtgttttggagagtaatatctgaatataaaataaaatctttatttactgctcctacagcttttagggctattaaaaaagaagaccctgatggtgaatttttttcaaaatacgatctaagttcatttgaatcattatttttagccggcgagagggcagatccagatacaattaagtgggcagaaaatctattaaaagttcctgtaatagatcactggtggcaaacagaaacaagttgggcaataagttcaaattgtactggtatcgagatgcaaaagacaaaatatggttctgcttgtaaggctgtacctggatatgatgtaaaaattattaaaacagatcaatctttagcgaagccaaatgaaatgggagatatagttgttaaactacctttgccaccaggaacttttccaactctttggaatgcagataaaagatatgaagaaaactatatgtcaaattataaaggatattatcaaacctacgatgcggggcatatcgatgaggatggttatatatggattatgtctagaacagatgacataatcaatgttgcaggtcatagattatctactggtaa

SEQ ID NO: 307637 - DNA, 1084 bp, Unknown
  Bacterial polypeptide expressing nucleotide sequence isolated from the Sargasso Sea
gcgcattattctattccgatgacgggtggtgtgattaatactataaatactagactagatgcagaaactattgcttatattttagatcatagtgacgcaaaattattgattgcagatactcaattttcaccaactataaaaaaagcacttaatatatttggtaaacaaataccaataattgatattcatgatgatcaagcaatatttaaagaaggcgagggagagaaaattggtgattgtacttatgaggaatttcttgaaacaggtgatgataattttaattggtcattacctgatgacgaatggcaagcaatttcattaagctatacttctggtactacagggaaaccaaaaggtgtagtttatcatcaccgcggttcttacttgatgtccacaggaagtgtaactgcttggaatatgccaaataaattaactttcctttacactgttcctatgtttcactgtaatggatggggttatccttggacagctgcattgatacatgccaaaattgtctgttgtcgatatatagctgctaagaatatttataacttaattgataaacataaagtgacacatttcggaggagcgcctatagttttaagcttaatagcaaatgcagatgaaaaagataaaaaagaaattaaacacaaagtgtttgttctcacagctggagcacctcctacaagcgctatattagaaaaaatggataatcttggtttcgaagtaatgcatgtttatggtttaaccgaaacgtatggacacattctgcaatgcgcttggaatgaagaatggaatcaactttcaaatgctaaaaaagcagatattaatgctagacaaggcgttcggtacccaaatactgaagaagtatgtgttgctgatccagaaacttataaaccagttccaatggatggagaaacaatgggtgaaattcttattagaggtaatgttgtaatgaaaggatattataaaaataaagaagctacagagacctcaatgaggcagggatggtttcattctggagatttagcagtggtttatcctgatggatatattcaaatcaaagatcgttctaaagacataa

SEQ ID NO: 307638 - DNA, 947 bp, Unknown
  Bacterial polypeptide expressing nucleotide sequence isolated from the Sargasso Sea
gaggttaaatactccaaatgaagttagttgggaagaagttgtctctaatgcaaaaaatacggattgtgttgaaatgaattcaaatgaatttgcctatattctttatacctcaggaacaactggaacacctaaaggtattgtaagagatacaggaggtcacatagtagctcttaaatggactatgaaaaatatttacaatgtaaatacaaacgatatttggtggtcagcaagtgatattggttggattgttggacattcctacatagtctacgctcctttattcaaaggatgcactactgttttgtttgaaggaaagccagttggtacaccagatgctggggccttttggaaaattatttcagactataaagtaaaatctctttttacagcacctactgcttttagggctattaagaaagaagatcctgaaggtaagtttttttcaaaatacgacctaagtaattttgaaagcttatttcttgctggagagagagcagatcctgatacaattaagtgggcagaaaatttactcaaagttcctgtgattgatcattggtggcaaactgaaactagttgggcaattagttcaaattgcactggaattgaaatgatgaagaccaaatatggctcagcgtgtaaagcagttcctggttatgatgtaaaaatcataaaatcagataagactattgctaaaccaaatgaaatgggagatatagttgtaaaacttcctttacctccaggaacttttcccacactttggaatgcagatgaaagatataaacaaacctatatgagtaattatgaaggttattatcaaacttatgatgccggacatatcgatgaagatgattatatttggatcatgtctagaacagatgatattataaacgtagctggtcatagattatctacaggagcgatagaagaggttctatctgagcataaat

SEQ ID NO: 307639 - DNA, 745 bp, Unknown
  Bacterial polypeptide expressing nucleotide sequence isolated from the Sargasso Sea
atgaatttgcatgaataccaagctaaagatctactaagaaagtacaatctacctatacttgaaggcaaaagttacattaaaaatgttgatggtttagaaaaagatttacaaaatataaaaggaccaccttgggttattaaatcacaaatacatgctggaggaagaggagcagggaaatttttaataccatttaatacaaaaggtggagtacaaataacagaatcaattgatgatgcacaaaaaattgcaaaaggaatgatgggcaacatattgattacaaaacaaacaggtaatgaaggaaagttagtaaatagaatttatttagaagctggatgtgaaattgatagggaatattatttaagtattcttcttgataggaatcaatcaaaattaatgatgatggtatctgatgccggtggtgtagacatagaagatgtagctgagaaaacaccagaaagaattcaatatgtttattttgataacttagaagatttcacaattagtgatagtcttcaaaataaattaaatttttctattaatgagtttaaccaatttaaagaaattatttcaaatttatgtaaggcctatgtcgaaatagatgcttctttaattgaaattaatcctcttgttgtgacaaaagatgaaaaactaattcttttagatgctaaaattaatattgatgataatgctctgtatagacaggctgacattgaaaaaattaaagatacttcagaagaaaatgatt

SEQ ID NO: 307640 - DNA, 1033 bp, Unknown
  Bacterial polypeptide expressing nucleotide sequence isolated from the Sargasso Sea
tcatcatatagatcaaattgggaaaaaataaaatttaaatgtggtgatactttagctgtttgtgatttaagaggaaaataccaagaaagattttcttattctgagctggctgatttaataacaaaagtctctttttcatttaaaaattatggcttagtaaagggagatgtagttactgtaatatctgaaaattctccaagatggctagtagtagatcaaggcttaatgcgtttaggagctataaatgcagtgagaggtattaattctccttcagtagaattagagtatattattgagcactctaattcagtaggtctagtagttcaatctaagcagatttggctaaagttaaaaaacaaagaggaattaaaaaaaagactgaaatttataatcaatttggaagatgaacaatttgagaatttaataagttggagtaaatttataagttcagtagaaaaagaaaattcacaaaataataattttgaaaaaaataatccagaaattgatgacgtagctactattctttacacttccgggacaacaggaaaacctaaaggtgtccccttgactcatgcaaattttttacatcaaataatcaatttggcctatatcgctgatccagaaccagggacctctgtattaagcgtattgcctatctggcattcttatgagaggagtgctgaatacttctttttttcatgtggttgttctcaatattatacaattccaaaatttctaaaagatgatattacacaaattaaacctgttgtcatggctacggtaccaagactatgggaggcaatacatgatggtttttttcaggcgttaaaaaaaatgccttccaaaaaggaaaaacttattaagtttttgataagtaatagttcagttttcaaaagaagtctaagaaagataagaaatttagatatcaatcaaataacttttaaatcaaaaatccccttactgggttctcttattggtcgatatcctttacataaattgtctactatttttttatggccgaatatttcttaga

SEQ ID NO: 307641 - DNA, 913 bp, Unknown
  Bacterial polypeptide expressing nucleotide sequence isolated from the Sargasso Sea
cttgagattagtttgggaagaatctctaataaatgcaaaatacaaagactgtgttgaaataggagcaaatgaatttgcatacattctatatacatcaggaactacaggaattccaaaaggtatagtaagagatgttggtggtcacattgttgctctaaagtggacaatgaaaaatatttataacatcgataaaaatgatgtttggtggtctgcaagtgatattggatggatagtaggacactcttatatagtttatgctcctttgtttaaaggatgcacaactgttttgtttgaaggtaaacctgtaggaactccggatgcaggagtattttggagaatgatttcagagcataaaattaaatctttattcacagcccccacagcatttagagctattaaaaaagaagacccagatggaaagtttttctctaaatatgatttaagttcttttgagtctttatttctagctggagaaagagctgaccctgatacaataaaatgggctgaaaatcttttaaaagttccagtgatagatcattggtggcaaactgagactagttgggcaataagttcaaattgtactgggatagaaatgcaaaaaactaagtatggttcagcatgtaaagcagttccgggttatgatgtaaaaataattaaaccagatcattcgattgcaaaaccaaatgagatgggggatatagttattaaattacctttacctccaggaacatttcccaccctttggaatgctgataagagatacgaagaaaattacatgagtaattataagggttactatcaaacttatgatgcaggccatatagatgaagatggatatatatggattatgtcacgaacagatgacataattaatgttgctggtcatagattatcgacaggtgcaattgaagaa

SEQ ID NO: 307642 - DNA, 800 bp, Unknown
  Bacterial polypeptide expressing nucleotide sequence isolated from the Sargasso Sea
aatgttaaacctttcagcaaccttagagtatagcgccaagactaaccctgatgatccagcaatttatttttctaataaagtgttttcttataatgaagtaaatctaatgtctaataagatagctaatggtttaataactgcagggattaaaaaaggtgataaagttgctctatgttgtccaaatattccacaatttattttttcatattttgcaattttgaaagctggctgtgttgttctaccctttaatgttttattaaaaaataatgaaattgagtttatcttaaatgattctcaagcaagaggaattatttgttttgaaggtactcctgaattagctattgctaaagaggcaatgcaagcagttgaaaaatcatcatcttgtaaaaagatgtgggttataaaatcttctgaaagttttaatgtaaataacaaaaatgtttttgatttttcttctttaattgaagaaagtaaggatgattttgacactattcaatgctcttctgaggatacagctataattttatatacatctggaactaccggaaaacctaaaggggctgaactaacgcactctaatgttttattaaactcctttatcggtaaagatttagctaagttgcaaaagacagatagagttataatgtcattacctttatttcacgtttatggtcaagtagttatgatgttaagttctattttgagcggttcaagtttaatagtattgccgcgttttgacccaatagaagtattaaaagctatggaatcatttaaagctacagtgttggaggagtgccaac

SEQ ID NO: 307643 - DNA, 962 bp, Unknown
  Bacterial polypeptide expressing nucleotide sequence isolated from the Sargasso Sea
gattgcgttgaaatgaattcaaacgagtttgcatatattctttatacatcaggtacaactggaacacccaagggaatagtgagagacattggaggtcacatagtggctttaaaatggacaatgaaaaatatctacaacattgatgagggaaatatctggtggtccgcgagtgatataggttggatagtaggtcattcttacatagtctatgctcctttatttaaaggttgcactacagtgttgtttgaaggaaaacctgtgggtactcctgatgcaggagctttctggaaaatcatctctgattataaagtaaaatctttatttacagctccaactgcatttagagcaataaaaaaagaagatcctgagggaaaattcttttctaaatatgatctaagtaattttgaaagtttatttctagcaggagaaagggcggatccggatacaattaaatgggcagaaaatttattaaaggttcctgtcatagaccattggtggcaaacagaaacaagttgggcaataagctcaaattgcacaggaattgaaatgatgaaaacaaaatatggatctgcatgtaaagcagtgccaggttatgatgtaaaaattattaaatcagatcaaactttagctgaaccaaacgaaatgggagacattgttgtaaaattacctttgcctcctggtacatttcctaccctttggaatgcagatcaaagatataaagaaaattatatgtcaaactatgaaggttactatcaaacttatgatgcaggtcatattgatgaagatggttacatttggattatgtctaggactgacgacatcataaatgttgcaggtcatagattatcaactggcgcaatcgaagaagttttatcagagcatcaatcagtagctgagtgtgcggttctcggtatctcagataaattaaagggacaattacctataggattaattgttttaaa

SEQ ID NO: 307644 - DNA, 937 bp, Unknown
  Bacterial polypeptide expressing nucleotide sequence isolated from the Sargasso Sea
ttgaagataaagcctatacatataaagaaactaaattctgaagtgaatttagcatgcagggcattaattaatttaggagcaaaaaaagatgatcgaatttctatatggagcaccaatagaactgagtggttgattacaaattatgctgctatgagacttggattaattgttgttacaattaatcctgcttttagaacaagtgaagtgaaatatgttttagaaaattcagagagtacatttttatttatggctgagaattttagaactttttcatatttagattcaatttcatctattaaagacaatttaataaaacttaagtcagtcgttgtttttggcaataaagttgagccttatttgagttgggactcttttatgaaattaggttttaaaattgacaaaaatattgtctcagttatcgaagaaaaaattgcatttgatcaaccttgccatattcagtacacatcaggaactacaggaaaaccaaaaggtgcgctattaactaattataatttaatcaataatggatattttgttggtctaaatcaaaatttttctataaatgacaaaatatgtttacctgttcctttttttcactgttttggttcagttttaggtgcatttgcagctttgtcacatggaagttgtattgttttaccaagtgaatcatttgatccgaagatatgcatggaagttattcaaaaatataagtgtactgctttatatggcgtaccgatgatgtttatttcaattttaagtttgcccaatttattaaattataatttcaaatcactcagaactggagctataggtgcatctccttgtccaaaagaagttatgaaaaagatcataaatattttaaatatcaaagaaataacaattgtttacggaatgaccgaaacttcgcctatttcctttcaaactaatattggtgatg

SEQ ID NO: 307645 - DNA, 847 bp, Unknown
  Bacterial polypeptide expressing nucleotide sequence isolated from the Sargasso Sea
atagacgacagtaaagccaaaattctaattactgcttcatgtgggtttgaacctggaagaacagttgaatatcgtcctctagtagacggtgctttaaaacttgcaaaacataaagttgaaaaagttattctttatcaaagaaaaggccatgaagtgaaacttaatcaacctttagagataagttgggaagaatctttagttaacgccagtgaaaaagattgtgttgaaatgggatctaatgaatttgcttatattttatatacatctggaaccacaggtgttccaaaaggaattgttcgggacatcggaggacatatagttgctctaaaatggacaatgaaaaatatatacaatgttgacgcagatgatgtttggtggtctgcgagcgatataggatggatcgttggtcactcatacattgtttatgctcccttatttaaaggatgcacaactattttgtttgaaggaaagccagttggaactcctgacgcaggtacgttttggaaaattatatctgattataaagttaaatctctatttactgccccaactgcttttagagcaatcaagaaggaagatcctgaaggtaaatttttctctaaatatgatctgagttcatttgaatcgttatttcttgcaggagaaagagctgatcctgatacaatcaaatgggcagagaatttattaaaagtacctgtaattgatcattggtggcaaactgaaactagctgggcaataagttctaattgtacaggaattgaaatgcaaaaaactaaatatggctcagcatgtaaagctgtacctggatatgacgttaaaattataaagccagaccaaagtttagcta

SEQ ID NO: 307646 - DNA, 919 bp, Unknown
  Bacterial polypeptide expressing nucleotide sequence isolated from the Sargasso Sea
acataaaataaaatcattgtttactgctcctacagcttttagagcatttaaaaaggaagatcctgaaggtaaatttttctctaaatatgatttaagttccttcgagtcattgtttttagctggagaaagagctgaccctgacactttaaaatgggcagagtccttattaaaagttccagttattgaccattggtggcagactgaaactagctgggcaattagttcaaattgtacaggtattgaaatgcttaaaacaaaatatggttctgcttgtaaacccgtgcctggatataacttaaaagttttaaaaagtgacaagtcagaagcaaaagctaacgagatgggagatatagttgttaaacttccacttcctccaggaacttttccaacattatggaatgcagatgaaagatacaaaaaaacttacatgtctaattatgaaggcttctaccaaacttacgacgctggtcatgttgatgaagatggttatgtttggattatgtcgagaacggatgacattattaatgttgccggtcacagactatcaactggtgcaattgaggaagttttgtcagaacataaatcagtcgctgaatgtgccgttataggtatcgctgataaattaaaaggccaaataccaataggattgttagcgttaaaagctggagtaaaacaaagtaacgaagaaattgttaaagagtgtattcaaatggttagaaataaagttgggccagttgcagcttttaaaacagccatggttgtaaaaagattacctaaaacaagatctggaaaaatattaaggggaacgataagaaaaattgccgacaaagaagaatataaaatgcctgcaactattgatgatccagcgattttagatgaaattaaagaagatttaattagtagcagtattctaaaataa

SEQ ID NO: 307647 - DNA, 804 bp, Unknown
  Bacterial polypeptide expressing nucleotide sequence isolated from the Sargasso Sea
aagcttatttttagctggagaaagagctgatccagatacaattaaatgggcagaaaatttgcttaatgttccagtaatagatcattggtggcaaactgaaactagttgggcaattagctcaaattgtactggaattgaaatgatggagactaaatatggctcagcctgtaaagcagttccaggttatgacgtgaaaatcataaaaccagatcaatctttagctaaaccaaatgaaatgggagatatagttgttaaacttcctttgcctcctggaacttttccaacattatggaatgcagacgagagatataaagaaaattatatgtctaattataagggatactatcaaacatatgatgcaggtcatatagatgatgacggttatatttggataatgtctagaactgatgatattataaatgtagcaggtcatagattatccacaggtgcaatagaagaagttttatcagcacatcaatctgttgctgaatgtgcggtacttggaattgcagataaattaaaaggtcaattacctattggattagtagttttaaagtctggcgtggataaagataataatactatatcaaaagaatgcgtacagatggttagagataaaataggcccagttgctgcatttaaagttgtaattgttattaaaagattaccaaaaacaaggtcaggaaaaatattaagaggaacaataagaaaaattgcagatggtgttgaatataaaatcccacctacaattgatgatcctgcaattcttacagaaattaaagaggatttaattaatcacaaaat

SEQ ID NO: 307648 - DNA, 509 bp, Unknown
  Bacterial polypeptide expressing nucleotide sequence isolated from the Sargasso Sea
tatgtctgttttaattgataaaaaaactaagataattgttcagggatttacagggaagatggggacatttcacgctgaggaaatgatcaaatatggttcaaatattgtaggaggtgttactccaggtaaaggtggcacaaagcatcttaatcttcctgtttttaatactgtaaaggatgctgtaaagcatacaggagccacagcatctatattgtttgtacctccagcttttgcagcagattcagccatggagtcggctgatgcaggaataaaaatatgtgttgcaattgttgatggaattccatcacacgacatgattagaataaaaagatatatgaggcggtatactaaaagttctaaaatgactttagttggaccaaattgtgcaggaattataagtccaggaaaatctatgttaggcattatgcctgggcatatttataaagaaggtagagtaggtattataagtagatctggaactctaggatatgaggctgcacaacagttaa

SEQ ID NO: 307649 - DNA, 208 bp, Unknown
  Bacterial polypeptide expressing nucleotide sequence isolated from the Sargasso Sea
aaatcataaaattaaaaaacctatagttggatttattgccggaattactgctccaccaggtcgaagaatggggcacgctggtgctataatttctggaggaaaaggtggggcaaaagataagataaaaaagatggaagattgtggaataactatagcaaactcaccatcgaaaattggaaaaacattattaaataaattgtctaattga

SEQ ID NO: 307650 - DNA, 271 bp, Unknown
  Bacterial polypeptide expressing nucleotide sequence isolated from the Sargasso Sea
cgccaacggcacgaactgcttcgtcgccggcgtgaacccgaagaaggctggcgaagacttcgagggcattcccatctacgcaaccgtcaaggacgccaaggcacgaaccggcgcgaccgtttcggtgatctacgtgcctcccgcaggcgctgccgacgcgatctgggaagctgtggaagccgaactggatctggtggtttgcattaccgagggcatccccgttcgcgacatgatgatggtcattgcaggcaggccgtccgtgccgaccatc

SEQ ID NO: 307651 - DNA, 682 bp, Unknown
  Bacterial polypeptide expressing nucleotide sequence isolated from the Sargasso Sea
atgaaaaatatttacaatatcgatgaaaatgatgtgtggtggtcagccagtgatattggctggatagtgggacactcatatattgtttatgcaccattattcaaaggatgtactacagttctatttgaagggaaaccagttggaactcctgatgcaggagtattttggagaataatttcagagtataaaattaaatctttattcactgctccaacagcatttagagctattaaaaaagaagacccagatggaaagtttttctcaaaatatgatttaagttcttttaaatctttatttctagctggagaaagagccgatcctgacacaataaaatgggctgaaaatcttttgaatgttcccgtcatagatcactggtggcaaaccgagactagttgggcaataagttcaaactgtactggaatagaaatgcaaaaaactaagtatggttcagcgtgtaaagcagttccaggttatgatgtaaaaataattaaaccagatcattcaatcgcgaaacctaatgagatgggtgatatagttgtaaaattaccattaccaccaggtacttttcctacgctttggaatgctgataaaagatatgaagaaaattatatgagtaattataagggttactatcaaacttatgatgcaggacacattgatgaagatggatatatttggatta

SEQ ID NO: 307652 - DNA, 133 bp, Unknown
  Bacterial polypeptide expressing nucleotide sequence isolated from the Sargasso Sea
atgtcagtattaattaataaaaacacaaaagttatttgccagggttttactggttctcaaggtacatttcactcagaacaagctataaaatatggaactcaaatggttgggtggggtgacaccaaagaaaaag

SEQ ID NO: 307653 - DNA, 946 bp, Unknown
  Bacterial polypeptide expressing nucleotide sequence isolated from the Sargasso Sea
gactgcttcgtgtgttttgagccgggaaggacagttgaatacaagcctcttgttgatgaggcaataaaaatagccaatcacaaaattgaaaagatgattttgtttcaaagacctggtcatgaagttaaattaaatgctccaaatgaggtcagctgggaagaagtgatctctaatgcagaggatactgactgtgttgagatgaactccaatgagtttgcttatattttgtatacatcaggtactactggaactccaaaagggatagtcagagatatcggagggcacattgttgctctcaaatggactatgaaaaatatctacaacattgatacagatgacatttggtggtctgcaagtgatattggttggattgtaggacactcgtatattgtctacgctcctttatttaagggatgcacaacagttttatttgaaggtaagccggttggaactccagatgctggggttttttggaaaattatttcagattataaagtgaaatctctttttacagcaccaacagcatttagggcaattaagaaagaagatcctgagggtaaatttttttctaaatatgatttgagtagttttgagagcttattccttgctggagaaagagctgatccagatactataaagtgggctgagaatttacttaaagttccagttattgatcattggtggcaaacagaaactagttgggcaattagctcaaattgtactggtattgaaatgatggaaacaaaatatggctcagcctgcaaagcagtcccgggatatgatgtaaaaatcattaaaccagatcaatctttggccaaaccaaatgaaatgggagacattgttgtaaaactacctttgcctccaggcacttttccaacattatggaatgcagatcaaagatacaaagaaaactatatgtctaattacgagggttactaccaaacat

SEQ ID NO: 307654 - DNA, 278 bp, Unknown
  Bacterial polypeptide expressing nucleotide sequence isolated from the Sargasso Sea
tgcagtcgtattgattggagaaattggtgggaccgccgagcaggaggctgctgagtttataaaaatcatgagcaagccagttgtagcgtttattgcaggtgcgacggcgccaccgggacgaagaatggggcacgctggggcaataattgcgggagctgcaggtacagcagaagctaaacaacgtgcactccgtgaagcaggagcccacgttgttgaaaacccaggagatattgggagcactatgctggatgtcctgaagaatcagggattggcataaa

SEQ ID NO: 307655 - DNA, 742 bp, Unknown
  Bacterial polypeptide expressing nucleotide sequence isolated from the Sargasso Sea
atcacggatcgggaattttctccagtcatcaaaaaagtcctgcaaaaactggaagatcctcctctggtgattgacatcgatgatccgatggcagaaggcggagaactaattggggaaatggattacgaagcatttttgaaaacaggagatgaaaattttgaatggaatctcccggaggatgaatggcaggcggtcagtctgaattatacttccggaaccaccggaaaacctaaaggtgtggtttaccacagccgcggagcacatcttctagccattgacaatatccttgcctggggtatgccgaggcatccggtctatctctggacgctgccgatgttccattgcaatggctggtgttttccatggaccatcacattattggtagggacgcatgtttgcctgagaaaagtcaatgcagccaatatctatgactccattgtaaaacatggagtgacgcacctctgcggtgctccgattgtgatgggaatgatcgcgaatgcagaggatcaggaccaacgcgtcctttcagaccaggtccagatcatgactgccgcggctcctcctccgcccccggtgattgcaagaatggaggaaatgggttttcaggtgacgcatgtttacgggctgacagaaacctatggaccttcggtggtcagtgcctggcaggaagaatggaatgatttgagtcctacggatcaggccctgaaaaagggcaggcagggggtcaattatcctgggtgga

SEQ ID NO: 307656 - DNA, 893 bp, Unknown
  Bacterial polypeptide expressing nucleotide sequence isolated from the Sargasso Sea
tgtagctttaaaatggacaatgaaaaatatctacaacattgaagaaggagatatttggtggtcagctagtgatattggttggattgttggtcattcttacattgtttacgctcctttatttaaaggatgcacaacagttttatttgagggtaaacccgtgggtacaccagatgcaggagctttctggaaaatcatttctgattataaagtaaaatctttatttacagctccaactgcatttagagcaattaaaaaagaagatcctgatggaaaattcttctctaaatatgatcttagtagttttgaaagtttatttcttgctggtgaacgagcagatccagatacaattaaatgggcagaaaatttattaaaggttccagtgatagaccattggtggcaaactgaaacaagttgggcaataagctcaaattgcacaggtattgaaatgatgaaaacaaaatatggttcagcctgtaaagctgtaccaggttatgatgtaaaaattatcaaatcagatcaaactttagctaaaccgaacgagatgggagatattgtagttaaattgcctttacctcctggcacatttccaactctttggaacgcagatctaagatataaagaaaattatatgtcaaactatgagggttactatcaaacttatgatgcaggtcatattgatgaggatggctatatctggatcatgtctaggactgatgacatcataaatgttgctggccatagattatcaactggtgctattgaagaagttttgtccgaacatcaatcagtagctgagtgtgctgttcttggagtcgctgataagttgaaaggacaattaccaattggattaattgttttaaaagctggagttgataaagataatgaaacaaatt

SEQ ID NO: 307657 - DNA, 355 bp, Unknown
  Bacterial polypeptide expressing nucleotide sequence isolated from the Sargasso Sea
atgtctattctaattgataaaaacacaaaagttatttgccaaggttttacaggaaagcatggaacatttcattcagaacaagcaataaaatatggaacacaattagttggtggtgtcactcccaaaaaaggagggcagaaacatttaaatcttccggtatttgatacagtaaaagatgcaataaataaaaccggagcaacagcaacaatgatatacgtacctgcaaaatttgctgcatctgcaattattgaagcaatggatgcagaaatagatcttatagtgtgtatcactgagggtgttccagttctggatatggtaaaagtaaaaaatcttcttaaaaaaagcaaaagtagat

SEQ ID NO: 307658 - DNA, 904 bp, Unknown
  Bacterial polypeptide expressing nucleotide sequence isolated from the Sargasso Sea
gatgaagcagttaaacaagctacacataagataagtaagatgatcttatttcaaagaaaaggtcatgaagtgaaattaaatgctccgatggaaattagttgggacgaagcacatgctaatgctaaagatactgattgtgtagagatgaactcaaatgaatttgcatacatactttatacttcaggtacaacaggtactccaaaagggatagttagggatatcggaggtcatattgttgcattaaaatggacaatgaaaaatatttataatattgatgaagatgacatatggtggtctgcaagtgatattggttggatagttggtcactcgtacattgtttacgctccattattcaaaggatgcacaactgtattgtttgaaggtaaaccagttggaactcctgatgcgggtgctttctggaaaataatttctgattacgaagtaaaatctttatttactgctccaacggcttttagagcaataaagaaggaagatcctgaaggaaaattcttttcaaaatatgatttaagtaagtttgaaagtctatttcttgcaggggagcgtgctgatccagatacaattaagtgggcagagaatttattaaaagttccagtgattgatcactggtggcaaacagaaacaagttgggcgatcagttcaaattgtacaggtattgaaatgatgaaaacaaaatatggctctgcttgtaaagctgtacctggttatgatgtcaaaattattaaatcagatcaaactttggctaaagcaaatgaaatgggagatattgttgttaaactacctttgcctccaggaacttttccaaccctgtggaatgctgatcaaagatacaaagaaaactatatgtctaattatgagggttattaccaaacttacgatgcagggc

SEQ ID NO: 307659 - DNA, 730 bp, Unknown
  Bacterial polypeptide expressing nucleotide sequence isolated from the Sargasso Sea
atgggtaatttagcgtattggccttcagccaaacctttttcaaaaaaggatgaatttgctaaaaatagagattttattgagaaccttaatcatatagatcaaatttgggaaaatctaaaatttaaatgcggtgatactttagccgtttgcgatttaagagggaaatacaaagagaaattctcttattctgagctagctgatttgataacaaaagtctctttttcttttaaaaattatgggttagtaaaaggggatatagttaccgtaatatctgaaaattctccaagatggctaatagcagatcaaggcttaatgcgtataggagctataaatgcagtgagaggtgttaattcaccttccttagaattaggttatattattgagcactctaattcagtaggactaatagttcaatctaaggaaatttggctaaagttaaacaacaaagaagaattaaaaaaaagacttaaatttataatcaatttagaagatgaacaatttgaaagtttaataagttggagtcaatttataagtgcacaagaaaaagaaaattcacaaaataattttattgaaaaatttaatccaaaaattgatgacgttgctactatcctttatacctctgggacaacaggaaaacctaaaggtgtacccttgactcatgcaaattttttacatcaaataattaatttagcccatatcgctgatccagaacctggaacttctgtattaa

SEQ ID NO: 307660 - DNA, 808 bp, Unknown
  Bacterial polypeptide expressing nucleotide sequence isolated from the Sargasso Sea
aacaacgggcgttcctaagggaattgtaagagatattggcggccatatcgttgcacttaaatggacaatgaaaaatatttataacattgatccagatgatgtttggtggtctgcaagtgatattggttggatagtaggacattcatacatagtatatgctccactctttcatgggtgtacaacagtgctatttgaaggaaagcccgtaggaactcctgatgctggagtcttttggagaattatttctgaacataaagtaaaatcacttttcactgccccaaccgcatttcgggcaattaaaaaagaagaccctaatggaactttttttaaaaagtatgatttatcaaaatttgaatctttgttccttgcgggtgaaagagctgatcctgatacaataaaatgggcagaaggtttattaaaagttccagtgattgaccactggtggcaaacagaaacgagttgggcaattagtgcaaactgcgcaggaataggactggaaaaaacaaagtacggatctgcctgtaaaccagttccaggttacgatgtaaaaatattgaaaagtgatggtaaagaagcaaagcctaatgaaatgggtgatgtagtagttaaacttccacttcctccaggaacttttccaacgctttggggcgctgatcaaagatataaagaaacttatatgtcaaactaccctggttattaccaaacatatgacgctggtcacattgatgaggatggttacatttggattatgtcgcgaacagacgatatcataaatgttgctggtcatagattatcaacgggtgccatg

SEQ ID NO: 307661 - DNA, 814 bp, Unknown
  Bacterial polypeptide expressing nucleotide sequence isolated from the Sargasso Sea
tttggcttatacaattgaacattctgagaccaaatttatttttgttgcagacgattgcagagatttggtcgcttcagcggtggctcaacaaaacaatagtgtgaaattaataaaacttgatccagttaggggcccagacttagccgcactccctgtggaattaaacgatttaaaattagaagatatcaagtcaaaacccaatgatattgctttgctcatgtatacttcaggaacaacaggaaaacctaagggtgttatgttgagtcatgcaaatttacttgctgcaggtcgatttatatctactggtcatgaaatagatggaaatgatagtggtctgtgtgtactgccaatttatcatataaatggaatgtgtgttactgtcatgggcacaattgtatcggcgagcaccttagttattcccaacagattttccgtaaattcattttggaagattatcgctaagtttaagtgctcttggttttcggcagtgcctactcaattttcctatattttaaattatgaggaaactccggaggacatatcatcccttcgttttgctcgctctgcctctgctccattatcacctgatattcataaaaaatttgaaaagcggttcggtatcccaatcattgaaactatgggattaaccgagactggttctcagataacgacaaaccctatgccaccaggacagcgtaaaattggatctccaggaaaggcttatggcaaccagattatgattggtgatgatcaatttgaagccttaccagcaggtgaaacgggagaaatattggtcaagggcgataatgttatg

SEQ ID NO: 307662 - DNA, 588 bp, Unknown
  Bacterial polypeptide expressing nucleotide sequence isolated from the Sargasso Sea
ggactaatagttcaatctaaggaaatttggctaagattaaacaacaaagaagaattaaaaaaaagactgaaatttataatcaatttagaagatgaacaatttgaaagtttaataagttggagtacattcataagttcagtagaaaaagaaaattcacaaaataataatcttgaaaaatttaatccagaaattgatgacgtcgctactattctttacacctctgggacgaccggaaaacctaaaggtgtgcctttgactcatgcaaattttttacatcaaataatcaatttagcctatatcgctgatccagaaccaggaacctctgtattaagcgttttgcctatctggcattcttatgagagaagtgctgaatacttctttttttcatgcggttgttctcaatactatacaattccaaaatttcttaaagatgatattacacaaataaaacctgttgtcatggctactgtaccgagactatgggaagcaatacatgatggtttttttcaggctttgaaaaaaatgcctttcaaaaagcaaaaacttattaagtttttgataagtaatagttcggttttcaaaagaaat

SEQ ID NO: 307663 - DNA, 802 bp, Unknown
  Bacterial polypeptide expressing nucleotide sequence isolated from the Sargasso Sea
atacaaaccattagtcgatgaagcacttaatcttgctaatcacaaacctgataaaacaattttatttcaaagaaaaggtcatgaagtcaaattgaatgccccgaaagagataagttgggatgaagctctgtcggatgcaaaagatgctgactgtgttgagatgaattcaaatgagtttgcatatattttgtatacttcaggtactacaggggtgcccaagggtattgttagagacattggcggacacatagtggctttaaaatggactatgaaaaatatttataacatagataccgatgatgtttggtggtcagcgagtgatataggatggattgtagggcactcatatattgtttatgctccactattcaaaggatgtacaacagtactctttgaaggaaagcctgttggcactcctgatgctggtgctttctggaaaataatttctgagtacaaagtaaaatctttattcactgctccaacagcgtttagagcaataaagaaagaagatccagatggaaaattcttttctaaatatgatttaagtaaatttgaagctctctttttagctggagaaagagctgatccagatacaattaaatgggcagaaactcttttaaaagttcccgtaatagatcattggtggcaaacagaaacaagttgggcgataagttccaattgtactgggatagagatgatgaaaacaaaatatggttcagcttgtaaagctgtcccaggatatgatgtaaaaattatcaaacctgatcaatcattagcaaaaccaaatgagatgggagatata

SEQ ID NO: 307664 - DNA, 326 bp, Unknown
  Bacterial polypeptide expressing nucleotide sequence isolated from the Sargasso Sea
aatgtcaattttagtaaataaaaatacaaaagttatttgccaaggcttcactggaaatcatggaacttttcactccgaacaagctattaaatatggaacccaacttgttggcggtgtaacaccaaaaaaaggcggtcaaaaacatttaggtttaccagtttttaatacagtcgaagatgcaaaaaaagttacaaaggccaacgctacaatgatttatgttccgcaaaaatttgcagcatctgcaattatagaagccatagactctgagatagaaataatagtgtgcattactgaaggaatacaaattattgatatgattaaagtaa

SEQ ID NO: 307665 - DNA, 932 bp, Unknown
  Bacterial polypeptide expressing nucleotide sequence isolated from the Sargasso Sea
ttttggagaataatttctgaatataaaatcaaatctttatttacagcaccgacagcttttagagctatcaaaaaagaagatccagatggaaaatttttttctaaatatgatctaagttcttttcaatcactatttctagctggagaaagggctgatccagatacaataaagtgggctgaaaatcttttaaatgttcctgtaattgatcattggtggcaaaccgaaactagttgggcaattagttcaaattgcactggtattgagatgcaagaaactaaatatggttcagcttgtagagctgtcccgggatatgatgtcaaagtaattaaacctgatcactctatagcaaagccaaacgaaatgggagatatagttgttaagttacctttgcctccaggaacatttcctacgctttggaacgcagataaaagatacaaagaaaattatatgactaactatgaaggatattatcaaacttatgatgcgggacatatcgatgaagatggatatatatggataatgtcaagaacagatgacataataaatgttgcaggtcatagattatcaaccggtgcaatagaagaagtattatccgaacatcaatcagttgctgaatgtgcagttcttggaattgcagacaagttaaaaggacaattaccaataggtctagttgttttaaaatctggtgttgaaaaagataataatactatttcaaaagaatgtgttcaaatggttagagataaaattggaccagttgcagcatttaaagttgttatagttattaaaagattgccaaaaacgagatcaggaaaaatattaagaggaactattagaaagatcgctgacaaagaagattataaaatgccagcaacaattgatgatccggcaatactagatgagattactcaaagtttaatagaaaataaaattct

SEQ ID NO: 307666 - DNA, 913 bp, Unknown
  Bacterial polypeptide expressing nucleotide sequence isolated from the Sargasso Sea
agtaccgtttcaatcatagcggcaaatactccggaattattcgaagcacattattctatcccaatgactggcggcgttattaatacgatcaatactagacttgatgcagatacaattgcgtatattctagatcatagtgatgcaaagcttcttataactgatactcaattttcacctacaatgaaaaaggctttaaaaatatatgggaagaatattcctattattgacattcatgatgatcaggcagtttttaaagatggtgagggtgaacaaattggagaaatgacatatgaagaatttttacaaacaggtgatgacaattataattggtctttacctgaagatgaatggcaagcaatctcactaagctatacatcaggcacaactggtaaaccaaaaggtgttgtgtatcaccaccgtggatcatatttaatgtctacaggaagtgttacggcatggaacatgcctaataaattaacatttctttatactgttccaatgttccactgtaacggatggggctatccttggacagccgctttaatacatgcaaagattatttgctgcaggtacattgttgcgaaagatatttataatttaatagataaatacaatgtaactcattttggaggcgctcctatagttttaagtttaattgctaacgcagatgagagagataaaaaggaaataaatcataaagtgtatgtattaactgctggagctccaccaacgagtgcaattcttgaaaagatggataacttaggttttgaagttatgcatgtatatgggctaactgaaacatatggccatattcttcaatgcgcttggaatgaagaatgggaatcacaatcaaaatctgaaaaagctgatattaaagcaagacagggtgttcgttatccaaatactgaagaag

SEQ ID NO: 307667 - DNA, 264 bp, Unknown
  Bacterial polypeptide expressing nucleotide sequence isolated from the Sargasso Sea
agatcatcacccaggatcccaacgtacgatgcattctgatcaatatattcggaggcatcgttcgatgtgacatggttgcctccggaatcgtcgaggccttccgtaaagtcaatttgcagattccagtggtggtaagactcgaagggaccaatgcagaagaagcccagaagatcatcgaatcttcaggtttcggagatcgtttacaaatggcggacggacttggagaggctgctgaaatggctgttgctgctgcggccaaatgaa

SEQ ID NO: 307668 - DNA, 920 bp, Unknown
  Bacterial polypeptide expressing nucleotide sequence isolated from the Sargasso Sea
aacagttgagtatagaccacttgtagatggggctttaaaattagcaaaacaccaaattgaaaaggtgatactttttcagagaaaagatcatgaggtaaaattaaataaaccattagaaataagttggaatgaagcgctatctggagcaaatgataaagattgtgttgagatgggtgccaatgattatgcttatatcctttatacttcagggaccacaggtattccaaaaggaatagttagagatattggtggtcacatagttgctcttaaatggacaatgaaaaatatttataacattgatcaagacgatgtatggtggtcagcaagtgatattggttggattgtaggacattcctatattgtctatgctccattatttaaaggatgtacaacacttctatttgaaggaaaacctgtaggtacaccagatgctggtgtattttggagaattatatcagaatataaaattaaatctttattcactgctccaaccgcattcagagcaataaagaaagaagatccagaaggtaagtttttttctaaatatgatttaagctcatttgagtcattatttttggcgggtgaaagagcagatccagatacgattaaatgggctgaaaatttacttaaggttcctgtaattgatcattggtggcagactgaaacaagttgggcaataagttcaaattgtactggaattgaaatgcaaaaaacaaaatatggatctgcttgtaaagctgtcccaggttatgatgtaaaaataattaaaccggatcaaacaatagctaaaccaaatgagatgggagatattgttgttaaacttccattgccgccaggtacgttcccaactttgtggaatgcagacgaaagatataaagaaaattatatgtcaaattataatggctactatcaaacttatg

SEQ ID NO: 307669 - DNA, 535 bp, Unknown
  Bacterial polypeptide expressing nucleotide sequence isolated from the Sargasso Sea
atgaggattgatcattggttatctgaaacacaaaaaaaatatccacaaaaaactgcaatcatttttaaaggtaaaaactggacatttacaaaattaaatatattaatcagtgaaacatcttcttttcttcaaaatcaatgtaaattaaaaataggcgatagattttgtttttacggactaaataatccagaacaaataatccttttattcgctgcttcaaaaattggtgcaattatttttccaattaattggagactagcaaatcccgagattgagtatcaaattaaaaactcaaaaccaaaactaattttctatgacccacgatttgaaaataacttagaaaacttaaatataaataaacttattaaaaaaatttcaatcaaaaaaactattaaaacaaaaaaaaacctttctgatgagagaaagaataaattacaagttaaaagcctagataataataatttgccgttattgctcgtttatacatctggtacaacaggaaaacctaagggagcattaatcagtcagaagtcaa

SEQ ID NO: 307670 - DNA, 762 bp, Unknown
  Bacterial polypeptide expressing nucleotide sequence isolated from the Sargasso Sea
attgcagtatgaaaaaatagaaaaatttttaaataacaatattaagataatctcaattgataaaataactgctaaaattgaaaacttttctgaaatatttaagaaaacaaatctaattaatgaaagttataatcaaaaaattagaagaaacgacttagcttgtataatctatacttctggtacaacgggcaaaccaaaaggagtaatgttaagtcatggtggaattctttctaactgtgagggggctctagaaatattgtcttcaattgttgagaagaaaaaaccagtttttttgacttggttgcctctttcacattcatacgaacatacagttcaatttgttcaaatttctctaggagcaaaagtttattatgcagaaagtttggataaacttattcccaacatgatattagcaaaaccaactatcatgaccgctgttcctagattttatcaaaatttgtataataagatttctttaaatttttccaaacttagtggatttaaaaagaaattgataatgaacactttaaatttgggtacaaaaaaacttaaaaaggaaaacctaaattttggtgaaaacatattaaattttttttgtgaaattttagtcagaaaaaagattaaaaaacaatttggtggagagctacaagcatttgtttcaggtggtggtgctcttgataaaaaaattggagaatttttgaattctattggattaccaacattacaaggttatgggcttacagaagcctccccagttgtaag

SEQ ID NO: 307671 - DNA, 435 bp, Unknown
  Bacterial polypeptide expressing nucleotide sequence isolated from the Sargasso Sea
gagcgaccgcaagcccccgctcagttaaccgcgccgcgggatatagactgggcgagctgggccgccgcggctgaaccagtcgaatgtgtgccggtcgctgcttcggatccgctctatatcttgtatacctctggcactacaggtaaaccaaaaggtattgtccgcgacaatggtggccatgcagtagcgctgaaatacagcatgtcagcggtttatgatgtcgacgtaggtgacgtgtattgggcggcgtcggatgttggctgggtggttggtcactcgtacttcgtctatggacctttgttggcaggttgtaccaccttcgtctatgagggtaagccggtcaaaacccctgatgccggcgctttttggcgggtggttgctgaacataaagtgaatagttttttcgttgcaccaacggcctttcgagcgataaaa

SEQ ID NO: 307672 - DNA, 487 bp, Unknown
  Bacterial polypeptide expressing nucleotide sequence isolated from the Sargasso Sea
cttccccggttactatgaatctggtgacgctggatattgtgatgaggatggatatctttatatcatggcgcgcacagatgatgtgatcaatgttgctggccaccggctatccacaggtcagttggaggaagtattggcagatcatcctgacatcgctgagtgcgcggtgattggcgttgctgaccaactaaagggccagttgccgctcggactgatttgtttatattcagcaagccagcgaaaagcggaagatatcattgctgaagccattgatttggtgcgcacccgtgttggacgaatagcagcgctcaaccaaattgttgtggttgaaaggttgccaaaaacgcgttcgggtaaggtgttgcgtggcactgttgcaaagattgccgatggcgccgagtggacgatgccagcaaccatcgatgatcctgtgattttagatgaaataacagctgcgttaaaaactatcggatatgccggcggataa

SEQ ID NO: 307673 - DNA, 178 bp, Unknown
  Bacterial polypeptide expressing nucleotide sequence isolated from the Sargasso Sea
ctttatagcgggtattacagcaccaccaggtcgtaggatgggccatgctggtgcaatcatttctgggggcaaaggtggggctaaagataagattaaaaagatggaagattgtggaataacaatggcgaattctccttctaaaattggaaaaacactgttcgataaattgtctgattga
